United States Patent Application Publication US 2014/0199313 A1 - sequence listing, part 2

SEQ ID NO: 450 - protein, 537 aa, Neurospora crassa
MTDNPEEPLIANTQSTERDQDDGSHDVEHAHDSRGGKQHISPPGLFIWLLTFSAGISGLLFGYDTGVISATLVSIGTSLSHRPLTSLDKSVITSCTSLFALLALPFASALADDRGRKRVVLFADTLFIIGALCQAASRTVEVMVIGRSVVGIAIGAASFVTPLYIAELAPATHRGRLVTMNIVFITLGQVVAYVVGWIFGTYGSPETTGWRWMVGLGAVPAVCQVVILLWMPESPRWLVKDGRSQEARAVIAKIAAGDDAQDPSTRREVDAVLKSIEIEVREEATAMRLGGAGAGYANGNAVNAWMEAMRELIRVRRNRRALAIACLLQGLQQLCGFNSLMYFSATIFTMVGFSEPTLTSLVVAVTNFAFTLVALVLIDRVGRRRILLWSLPFMIAGLVLAGYGFSFIELPNSETSSPSTTGGQGGAVIILASIMIYVAGYAIGLGNVPWMQSELFSLSVRSVGSGVATATNWSANFVIGLTFLPLMEALSPSWTFVLYAVICAVGYGLIWTVYPETAGLSLEDAATLLEADDWGVR

SEQ ID NO: 451 - DNA, 1596 bp, Emericella nidulans
  CDS (1)..(1596)
atggctttcaagaagtcctacaatgtttacttcctttgcgggttcatgacccttggtggtggtctgttcggtttcgacatctcgtcgatgagtggtgtcttgggtaccgcggcctacaacaactactttcaggtcggcggcggcaattacaaacagggtggaatcacttgtgctatgccatttggatcgctcgtcggtgccctagcctccagtttccttgccgacaaatactcgcgtgtcactgcaattcagttctcgtctactttgtggattattggatcagtctttcaatgtgccgccaacggtatccccttgctggtcgtcggtcgtgtcattgcaggcctctgcgttggcatcgcctcagctatggttccggtctacatcgccgaagtgagcccaaagcatatccgagggcgaatgatatcgctacagcaatgggcaatcacctggggtatcctgatccagtacttcattcaatacggcgctagcaacgtcgacggcgggcctgacaatgaaacccagagcacagcggccttccgaattccatggggtatccagattgtccccggtgtaatttacttcgttggtttgtttctataccctaaatcgccccgctggctggcgagcaaggaccgctgggacgagtgcatgcatgtcctcgcccgcctccacgggaacggagacatgaaccacccccttgttctggcccagtacaaggaaattcaggacgcgctcgcccttgaacgtgagcaggctagcaccagctatcaggagctcatcaagccacgcatcgcaaagcgtgttttcctgggcatgagtctgcagatgtggtcgcaattgtcgggaatgaacgtcatgatgtactacatcgtctacatcatgcagtccacaggagcgggctcccctcttctaacagcttccattcaatacatccttaacacggcccttactctcccagcgattctctggctcgaccgcttcggccgccgccctgcgatcctcattggcttcaccatgcaagcaatcttcctttacattgagggtggcctgcaagccggctatggtcgctcgactcgaccgtccgacgacctaaacgccatctcctggaccgtggcggaccacccgggtgtgggcaaggctatcatcgccatgtcgtacctctttgtctgctccttcgcaacgaccattggtccaacttcctggacctacccggctgaaatctacccggccaaggtccgtgccaaggctgtctcactggctacggcgtccaactggacctggaactgtctccttgcgctctttgttccgccacttctgtggaatatcaactggaagatgtacatgattttcgcagccttcaacactgtcgccgccttgcacatgttcctgaccgcccctgaaacaaaaggatacacgcttgaggagatggacgaggtctttgagagcggcatcgcgccctggaagaaaaggaagatcagctcccgtcttgagcagatcgagagggagattgccgagggtaacctcaaggttacggaccggactggtcccgtcgatcctgtgcaggagaacgttggtgaaccggagaaggcggtgtaa

SEQ ID NO: 452 - protein, 531 aa, Emericella nidulans
MAFKKSYNVYFLCGFMTLGGGLFGFDISSMSGVLGTAAYNNYFQVGGGNYKQGGITCAMPFGSLVGALASSFLADKYSRVTAIQFSSTLWIIGSVFQCAANGIPLLVVGRVIAGLCVGIASAMVPVYIAEVSPKHIRGRMISLQQWAITWGILIQYFIQYGASNVDGGPDNETQSTAAFRIPWGIQIVPGVIYFVGLFLYPKSPRWLASKDRWDECMHVLARLHGNGDMNHPLVLAQYKEIQDALALEREQASTSYQELIKPRIAKRVFLGMSLQMWSQLSGMNVMMYYIVYIMQSTGAGSPLLTASIQYILNTALTLPAILWLDRFGRRPAILIGFTMQAIFLYIEGGLQAGYGRSTRPSDDLNAISWTVADHPGVGKAIIAMSYLFVCSFATTIGPTSWTYPAEIYPAKVRAKAVSLATASNWTWNCLLALFVPPLLWNINWKMYMIFAAFNTVAALHMFLTAPETKGYTLEEMDEVFESGIAPWKKRKISSRLEQIEREIAEGNLKVTDRTGPVDPVQENVGEPEKAV

SEQ ID NO: 453 - DNA, 1407 bp, Bacteroides thetaiotaomicron
  CDS (1)..(1407)
atgaaaacaacaattaatctgggttatatcatattcctttcagtcgttgctgctttaggaggctttctgttcggttatgacacagctgtcatatccggcacaatagctcaggtgacacatctgtttcagttggacaccttgcaacaaggatggtatgtaggatgcgcattgatcggatcgattgtcggtgttctcttttccggaatattgagcgacagcatcggacgtaaaagaacaatgatactttctgccattctgttttctacatcagcaatcggctgtgctttttgcattgactttaaccagttagttgtttatagaatcataggtggcatcggaattggtgttgtttctattgtatctcctctttacatttccgaagtttccgtcgcacaattcagaggcaggatggtctccctgtatcaactggccgtaactgtcggttttctaggagcttatcttgtcaactaccagttattggcatattcagagagtggaaaccacttacctatcgcctggttagaaaaaatagtagttacagaagtgtggagaggtatgttaggcatggagacattaccagccataatattctttattattatctttttcatacccgaaagccccagatggctgatagtaaaaggacaagaaaggaaagccacttatattctggaaaagatctacaattcatttaaagaggctgatttccagctaaacgagacaaaatccgtccttgtttccgagacccgttcagaatggtctatccttctgaaaccaggtattctgaaagcagtcattatcggtgtatgtattgctattctgggacagttcatgggggttaatgcagttctttactacgggccttccatttttgagaatgccggtctttcaggaggggattctctgttctatcaggttcttgtaggacttgtgaatacactgaccactatcctggcacttctcatcattgacaaagtaggacgcaagaaactgatatattatggggtatccggaatggtcgtttcattgatactcattggcagttatttcctcttcggaaatgcctggaatatttccagcctgtttctgttagccttctttctgtgttatgttttttgttgcgccatttccatttgcgctgtgatattcgtacttctctctgagatgtaccctaccaaaatacgcggattagcaatgtccattgccggattcgctctttggatcggtacctatctgatcggacagctaaccccctggatgctccagaatcttactccagccggaacattcttcctgttcgccatcatgtgtgtaccgtatatgctcattgtctggaaactcgtaccggaaactaccggaaagtctctggaggagattgaaagatactggacccgttcggaacggtaa

SEQ ID NO: 454 - protein, 468 aa, Bacteroides thetaiotaomicron
MKTTINLGYIIFLSVVAALGGFLFGYDTAVISGTIAQVTHLFQLDTLQQGWYVGCALIGSIVGVLFSGILSDSIGRKRTMILSAILFSTSAIGCAFCIDFNQLVVYRIIGGIGIGVVSIVSPLYISEVSVAQFRGRMVSLYQLAVTVGFLGAYLVNYQLLAYSESGNHLPIAWLEKIVVTEVWRGMLGMETLPAIIFFIIIFFIPESPRWLIVKGQERKATYILEKIYNSFKEADFQLNETKSVLVSETRSEWSILLKPGILKAVIIGVCIAILGQFMGVNAVLYYGPSIFENAGLSGGDSLFYQVLVGLVNTLTTILALLIIDKVGRKKLIYYGVSGMVVSLILIGSYFLFGNAWNISSLFLLAFFLCYVFCCAISICAVIFVLLSEMYPTKIRGLAMSIAGFALWIGTYLIGQLTPWMLQNLTPAGTFFLFAIMCVPYMLIVWKLVPETTGKSLEEIERYWTRSER

SEQ ID NO: 455 - DNA, 1407 bp, Bacteroides thetaiotaomicron
  CDS (1)..(1407)
atgaagtctacaattaactttggctatcttattttcctttctgttgtagcagctttgggaggatttttgttcggatatgatactgctgttatatccggaacaatcgctcaggttactcaactttttcaactggatacgttgcaacaggggtggtatgtgggatgtgctttaataggttctatcgtcggtgttctttttgccggtatcctgagtgataagctgggacgaaaaatgacgatgattatttcagcgactctgttttctacatcggctttaggttgtgcgatctccgcagacttcacccaattggtagtctatcgtattattggtggagttggtattggtgttgtgtcgattgtttctcctttgtatatatctgaagtggctgtggcacaatatagagggcgtttggtatctttatatcaattggctgtgacagttggatttttaggagcttatttgattaactatcaattgctggcttatgctgaaagtggtaatcagttaagtatggactggttgaataagatatttgttactgaagtctggcgaggaatgttgggaatggaaacattgccggctgtgttattcttcatcattatcttctttattccggagagtcctcgttggctgatcgtaagaggtaaagaagaaaaagctgtcaatatattagaaaggatatataattcagtttcagaggctgcaagtcaattaaaagaaacgaaatctgtattgacgtctgaaacaaaatctgaatgggctatgttaatgaaacccggaatttttaaagcggtcatcattggtgtatgcattgctattttgggacagttcatgggtgtaaatgctgtactttattatggcccttccattttcgaaaacgcaggactttcaggaggagattctttgttttaccaagttctcgtaggactagtcaacactctgaccaccgttcttgctcttgtgatcattgacagggtcggccgcaagcaactggtctattacggagtttcgggtatggttgtctccctcctgctgatcggcgtttacttcctcttcggtgattcctggggagtatccagcctcttcctgcttgttttcttcctgttctatgtattctgctgtgccgtctccatctgtgccgtggtgttcgtgctcctttcggagatgtaccccaccaaggtacgcgggctggcgatgtccattgcaggattcgccctgtggataggaacgtacctgatcggacagttaaccccctggatgctccagaatctcacccccgccggaacattcttcctgttcgcagtcatgtgcgtgccgtatatgctcatcgtatggaaactcgtgccggagaccacaggaaagtcactggaagagattgaaagatactggacccggtcggaacagtag

SEQ ID NO: 456 - protein, 468 aa, Bacteroides thetaiotaomicron
MKSTINFGYLIFLSVVAALGGFLFGYDTAVISGTIAQVTQLFQLDTLQQGWYVGCALIGSIVGVLFAGILSDKLGRKMTMIISATLFSTSALGCAISADFTQLVVYRIIGGVGIGVVSIVSPLYISEVAVAQYRGRLVSLYQLAVTVGFLGAYLINYQLLAYAESGNQLSMDWLNKIFVTEVWRGMLGMETLPAVLFFIIIFFIPESPRWLIVRGKEEKAVNILERIYNSVSEAASQLKETKSVLTSETKSEWAMLMKPGIFKAVIIGVCIAILGQFMGVNAVLYYGPSIFENAGLSGGDSLFYQVLVGLVNTLTTVLALVIIDRVGRKQLVYYGVSGMVVSLLLIGVYFLFGDSWGVSSLFLLVFFLFYVFCCAVSICAVVFVLLSEMYPTKVRGLAMSIAGFALWIGTYLIGQLTPWMLQNLTPAGTFFLFAVMCVPYMLIVWKLVPETTGKSLEEIERYWTRSEQ

SEQ ID NO: 457 - DNA, 1404 bp, Staphylococcus epidermidis
  CDS (1)..(1404)
atgttgaaacgctttcataaaggcattataattagtctagctatagaaaaaggaatgatacgaatgaaagcaaataagtatttaatctttattttgggagcacttggtggcttattatatggttatgataatggtgtgatttccggtgctttattatttatacataaagacatacctctcaatagtacaactgagggtatcgttgtgtcttcaatgttaattggcgcaatagtcggtgcgggaagcagtgggccacttgctgataaattaggtcgtcgacgtctagtaatgctcatcgctattgtatttattattggggcactgattcttgctgcatcaaccaatttagcattattaattattggacgtttaattattggtttagcagtgggtggttcgatgtctacggtacctgtttatttaagtgaaatggcaccgacagaatatcgtggctcactaggttcacttaatcaactaatgattacaattggtattttagcagcatatttagtcaactatgcatttgcggatattgagggttggcgttggatgctaggattagcagttgttccatcggttattttacttgtgggtatttattttatgcctgagagtccaagatggttacttgaaaatagaaacgaagaagccgctcgtcaagtgatgaagattacttatgacgatagcgaaattgataaagaacttaaagagatgaaagaaattaacgctatctctgaatctacatggacagtcattaaatcaccatggttaggtagaatattaattgtaggttgtatatttgctattttccagcaatttattggtatcaatgcagtcattttctattcatcttcaatctttgctaaggctggactgggtgaagcggcgtctatattaggttcagttggtataggaactattaatgttcttgtaacaatagttgccatttttgtagtagataagattgatcgtaaaaaactacttgttggtggtaatattggtatgattgcctcattattaattatggcaatcttaatttggacaattggaattgcttcatcagcgtggattattattgtttgtttatcattatttattgtattctttgggatttcttggggacctgttctatgggttatgctacctgaattattcccgatgcgcgcacgtggcgctgctacgggcatttcagcgcttgtgctaaatatcggaacgcttatcgtgtcattgttcttcccaatattaagtgatgcattaagtacagaatgggtatttttaatctttgcattcataggtgttttagcgatgattttcgtaattaaattcttaccagaaacacgcggacgtagtttagaagaaatagaatatgaattacgtgaacgtacaggagcaagaactgaataa

SEQ ID NO: 458 - protein, 467 aa, Staphylococcus epidermidis
MLKRFHKGIIISLAIEKGMIRMKANKYLIFILGALGGLLYGYDNGVISGALLFIHKDIPLNSTTEGIVVSSMLIGAIVGAGSSGPLADKLGRRRLVMLIAIVFIIGALILAASTNLALLIIGRLIIGLAVGGSMSTVPVYLSEMAPTEYRGSLGSLNQLMITIGILAAYLVNYAFADIEGWRWMLGLAVVPSVILLVGIYFMPESPRWLLENRNEEAARQVMKITYDDSEIDKELKEMKEINAISESTWTVIKSPWLGRILIVGCIFAIFQQFIGINAVIFYSSSIFAKAGLGEAASILGSVGIGTINVLVTIVAIFVVDKIDRKKLLVGGNIGMIASLLIMAILIWTIGIASSAWIIIVCLSLFIVFFGISWGPVLWVMLPELFPMRARGAATGISALVLNIGTLIVSLFFPILSDALSTEWVFLIFAFIGVLAMIFVIKFLPETRGRSLEEIEYELRERTGARTE

SEQ ID NO: 459 - DNA, 1545 bp, Aspergillus niger
  CDS (1)..(1545)
atgagattaccaaaaattaaaatgcctcgtaagaggccgcaagatgaactcaatggtgatgtgctgcagcaagaggcgcaagctaccggccccaatggccagaaatctgaagaggggattgtggatacacctatccctctgctcacgtggcgttctttcttaatgggcattttcgtgtcaatgggtggtttcctcttcggctacgacactggccaaatttcaggcttcttggagatgccgaactttctccaaagatacggacaacagcaagctgacggaacatactatttctccaatgcccgttcgggtctgattgtcgcgctgctttcaataggtaccttgatcggcgcccttattgcagctcccatcgcagatcgtgttggccggaaatggtccatcagcggctggagtgccatggtgtgtgtcggtatcaccatacaaatatcttcccctttcggaaagtggtaccaggtagccatgggtcgttgggtcgctggtctcggcgttggggctctatcattgcttgttcccatgtaccaagcggaaactggaccgaggcacattcgtggatctcttgttagcacttatcagcttttcatcacccttggaatcttcgtcgccaactgtatcaacttcggaacagaagctcgaaatgatacaggctcctggcgtattcccatgggcatcacctacatctgggccatgatcctgggcttcggaattgcactattccccgaaagtgcccggtacgactatagacatggaagggaggcgaaagcagctcgtaccctatcgagaataagttcgtggaaggaacaggaacgcggagagataacctggtctcatcttttccatgcaccccgcatgaagtatcgcgtcgcagtgggagtcgcccttcaagcactgcaacagttaacgggagcgaattactttttctactacgggacgacgatctttcgaggcgccgggatttcaaattcctacgtaacacaaatgattcttggcggtgtgaatttcggaacgacgttcctagggctgtacctgatcgagaactacggtcgtcgtcgatccctgataactggagcattgtggatgtttgtttgtttcatggttttcgcctccgtgggccatttctctctagaccatgaaaacccagaacggacacacacagctggcgtggtcatggttgttttcgcctgtcttttcattctcggtttcgcatcaacatggggtcccatggtgtggaccattatcgcagagctgtatccctccgaattccgtgcccgcgccatgtctctcgccacagcatccaattggctctggaacttccttctcgcctttttcacccccttcatcaccagtgccattgacttccgcctcggctacgtctttgccggctgcctcttccttgcggcgggcctggtttacgtggcagtcattgaaggtcgtggccgtacattggaagagatcgataccatgtacgttatgaaggtgccgccctggaaagagctccaagtatgtatttccggacatcgatccatatga

SEQ ID NO: 460 - protein, 514 aa, Aspergillus niger
MRLPKIKMPRKRPQDELNGDVLQQEAQATGPNGQKSEEGIVDTPIPLLTWRSFLMGIFVSMGGFLFGYDTGQISGFLEMPNFLQRYGQQQADGTYYFSNARSGLIVALLSIGTLIGALIAAPIADRVGRKWSISGWSAMVCVGITIQISSPFGKWYQVAMGRWVAGLGVGALSLLVPMYQAETGPRHIRGSLVSTYQLFITLGIFVANCINFGTEARNDTGSWRIPMGITYIWAMILGFGIALFPESARYDYRHGREAKAARTLSRISSWKEQERGEITWSHLFHAPRMKYRVAVGVALQALQQLTGANYFFYYGTTIFRGAGISNSYVTQMILGGVNFGTTFLGLYLIENYGRRRSLITGALWMFVCFMVFASVGHFSLDHENPERTHTAGVVMVVFACLFILGFASTWGPMVWTIIAELYPSEFRARAMSLATASNWLWNFLLAFFTPFITSAIDFRLGYVFAGCLFLAAGLVYVAVIEGRGRTLEEIDTMYVMKVPPWKELQVCISGHRSI

SEQ ID NO: 461 - DNA, 1584 bp, Aspergillus niger
  CDS (1)..(1584)
atggcgccgacctacgctggcctgtcgggcaggaaactgtccctggccgtctcgacgattgcgacgatgggtttcttgctgttcggttatgatcagggtgtcatgtccggtattatcagcgataccgctttcgaagacctcttcaccgcgaccaagaacaatccaaccatgcaagccttggttacatccgtttatgagttaggttgtcttgtgggtgccatgttcgctctcttcttcggtgacaagactggacgtaaatggatgatcttctcgggtgccattgtcatgattattggtgtcgtcatccaggttacctcgtatgccggacacatcccgcttctgcagttcttcattggtcgtgtcatcaccggtatcggtaacggcatgaacacctcgactatcccgacctaccaggccgagtgctccaagaccagcaaccgtggtctgctcatctgtattgagggtggtatcatcgccatcggaactgcgattgcctactggattgactatggtgcccacttcggtaacaaggacctggtgtggcgtttccccattgccttccagatcttctttggtctcatcatcatcgtcggcatgtggttccttcccgactctccccgttacctcatctccaaggaccgcgtccaggagggtgagtacgtgcttgctgccttgggtggctgggagatccatgaccacgagacccagctccagaagcagctggtcattgactccattagagcttcgaacgccgctggcaaggatgtcggataccgtgaccttctcactggtggccgctcccagcacttccgtcgtatggttatcggttcctcctcgcagatcttccagcaactcggtggttgcaacgctgtcatctactatctccctgtgctgctccaggactcccttcacgagactgagaacttctctctggtcattggtggtgtcaacatgattgtctacgctatctttgccactttctcctggttcttcattgaaaagatcggtcgtcgcaagcttttcctgggtggatctttccttcagtgcattgccatggttatcacctttgcctgtttgatccctggtgaccaggagactgccaagggtgctgtcttcggtctgttcctctacatggccgctttcggtgccgcttggttgcctctgccctggttgtaccctgctgagctgtcccccatcaagacccgtgccaaggccaacgctgtctcgacctgcagcaactggctcttcaacttcctgattgtcatgatcacccccgtcatggtctcccacatcggctggggtacttacctgttcttcgccgtcctcaacggcctgttcatccccttcatctggttcttctaccccgagaccgccaaccgcagtctggaggagatcgatatcatcttcgccaagggttacaccgagaacatcagctacgtgcgcgctgcccacgagctgcccaagctcaccgacgaggaagtcgagcagaaggccatggagtacggcttcggaggtgccagcgacgaggagaaggtcaccaccgccgaggtctcgggctccaacagcgcccgcgagtcggagtaa

SEQ ID NO: 462 - protein, 527 aa, Aspergillus niger
MAPTYAGLSGRKLSLAVSTIATMGFLLFGYDQGVMSGIISDTAFEDLFTATKNNPTMQALVTSVYELGCLVGAMFALFFGDKTGRKWMIFSGAIVMIIGVVIQVTSYAGHIPLLQFFIGRVITGIGNGMNTSTIPTYQAECSKTSNRGLLICIEGGIIAIGTAIAYWIDYGAHFGNKDLVWRFPIAFQIFFGLIIIVGMWFLPDSPRYLISKDRVQEGEYVLAALGGWEIHDHETQLQKQLVIDSIRASNAAGKDVGYRDLLTGGRSQHFRRMVIGSSSQIFQQLGGCNAVIYYLPVLLQDSLHETENFSLVIGGVNMIVYAIFATFSWFFIEKIGRRKLFLGGSFLQCIAMVITFACLIPGDQETAKGAVFGLFLYMAAFGAAWLPLPWLYPAELSPIKTRAKANAVSTCSNWLFNFLIVMITPVMVSHIGWGTYLFFAVLNGLFIPFIWFFYPETANRSLEEIDIIFAKGYTENISYVRAAHELPKLTDEEVEQKAMEYGFGGASDEEKVTTAEVSGSNSARESE

SEQ ID NO: 463 - DNA, 1752 bp, Aspergillus niger
  CDS (1)..(1752)
atgggtgtctctaatatgatgtcccggttcaagcctcaggcggaccactctgagtcctccactgaggctcctactcctgctcgctccaactccgccgtcgagaaggacaatgtcttgctcgatgacagtcccgtcaagtacttgacctggcgctccttcatcctgggtatcgtcgtgtccatgggtggtttcatcttcggttactctactggtcaaatctctggtttcgagactatggatgacttcctccaacgtttcggtcaggaacaggcggatggatcctatgctttcagcaacgtccgtagtggtctcattgtcggtctgctgtgtatcggtactatgatcggtgccctggttgctgctcctatcgcagaccgcatgggccgcaagctctccatctgtctctggtctgtcatccacatcgtcggtatcatcattcagattgccaccgactccaactgggtccaggtcgctatgggtcgttgggttgccggtctgggtgttggtgccctctccagcattgtccccatgtaccagagtgaatctgctccccgtcaggtccgtggtgccatggtcagtgccttccagctgttcgttgccttcggtatcttcatctcctacatcatcaacttcggtaccgagagaatccagtcgactgcttcctggcgtatcaccatgggcattggcttcgcctggcccttgattctggctgttggctctctcttcctgcccgagtctcctcgtttcgcctaccgtcagggtcgtatcgatgaggcccgtgaggttatgtgcaagctgtacggtgtcagcccgaaccaccgcgtcatcgcccaggagatgaaggacatgaaggacaagctcgacgaggagaaggccgccggtcaggctgcctggcacgagctgttcaccggccctcgcatgctctaccgtaccctgctcggtattgctctgcagtccctccagcagctgaccggtgccaactttatcttctactacggaaacagtatcttcacctccactggtctgagcaacagctacgtcactcagatcattctgggtgctgtcaacttcggtatgaccctgcccggtctgtacgtcgtcgagcacttcggtcgtcgtaacagtctgatggttggtgctgcctggatgttcatttgcttcatgatctgggcttccgttggtcacttcgctctggatcttgccgaccctcaggccactcctgccgctggtaaggccatgatcatcttcacttgcttcttcattgtcggtttcgccaccacctggggtcctatcgtctgggccatctgtggtgagatgtaccccgcccgctaccgtgctctctgcattggtattgccaccgctgccaactggacctggaacttcctcatctccttcttcacccccttcatctctagctccattgacttcgcctacggctacgtctttgctggatgctgtttcgccgccatcttcgttgtcttcttcttcgtcaatgagacccagggtcgcactcttgaggaggttgacaccatgtacgtgctccacgtcaagccctggcagagtgccagctgggttcccccggagggcattgtccaggacatgcccgccccccttcctcttccaagcaggagggtcaggctgagatggctgagcacaccgagcccactgagctccgcgagtaagccactcgcactcgcgcgaactcattttgctagttgctcttgtacattgaacctgcatcttaagctttga

SEQ ID NO: 464 - protein, 583 aa, Aspergillus niger
MGVSNMMSRFKPQADHSESSTEAPTPARSNSAVEKDNVLLDDSPVKYLTWRSFILGIVVSMGGFIFGYSTGQISGFETMDDFLQRFGQEQADGSYAFSNVRSGLIVGLLCIGTMIGALVAAPIADRMGRKLSICLWSVIHIVGIIIQIATDSNWVQVAMGRWVAGLGVGALSSIVPMYQSESAPRQVRGAMVSAFQLFVAFGIFISYIINFGTERIQSTASWRITMGIGFAWPLILAVGSLFLPESPRFAYRQGRIDEAREVMCKLYGVSPNHRVIAQEMKDMKDKLDEEKAAGQAAWHELFTGPRMLYRTLLGIALQSLQQLTGANFIFYYGNSIFTSTGLSNSYVTQIILGAVNFGMTLPGLYVVEHFGRRNSLMVGAAWMFICFMIWASVGHFALDLADPQATPAAGKAMIIFTCFFIVGFATTWGPIVWAICGEMYPARYRALCIGIATAANWTWNFLISFFTPFISSSIDFAYGYVFAGCCFAAIFVVFFFVNETQGRTLEEVDTMYVLHVKPWQSASWVPPEGIVQDMPAPLPLPSRRVRLRWLSTPSPLSSASKPLALARTHFASCSCTLNLHLKL

SEQ ID NO: 465 - DNA, 1593 bp, Aspergillus niger
  CDS (1)..(1593)
atggctgaaggcttcgttgacgcctcgcgcgtcgaggccccagtcaccctcaagacctacttgatgtgtgcctttgcggcttttggtggtatcttcttcggttatgactctggttatatcagcggtgtcatgggaatgagatacttcatcgaggagtttgagggcttggactataacactacccccaccgattccttcgtcctcccgtcctggaaaaaatcgttgatcacgtcgatcctctcggctggaaccttctttggtgccctcattgctggtgacttggcagactggttcggtcgtcgcactaccattgtcagtggttgtgttgtcttcatcgttggtgttatcctgcagaccgcttcgacctccttgggtctgcttgttgccggccgtctggtcgcgggatttggtgtgggcttcgtctccgccatcattatcctgtacatgtctgagattgcacctcgcaaggttcgcggtgctattgtctcagggtaccagttctgcatcaccatcgggctcatgttggcctcgtgcgtcgactacggcactgagaaccgtctcgactctggctcctaccgtatcccaatcggcctccagctcgcctgggccttgatcctgggaggtggtctgctctgcctgcccgagtcccctcgttactttgttaaaaagggcgacctggctaaggctgcggaggttcttgcccgcgttcgtggtcaaccccaagactcggattatatcaaggatgagctggcggagattgtggcaaatcatgagtacgagatgcaggtgattccggaaggtggatatttcgtcagctggatgaactgcttccgtggcagtatattctcgcccaacagcaatctccgtcggactgtcctaggtacttctctgcagatgatgcaacagtggaccggtgtcaactttgtcttctactttggaacgacctttttccagtcgctgggaaccatcgatgaccccttcctcatcagcatgattaccactatcgtcaacgtctgctcgacccccgtctcgttctacacaattgagaagtttggccgccgttcgctccttttgtggggagcacttggtatggtcatctgccagttcattgtcgctatcgtcggcaccgtggacggtagcaataagcacgctgtcagtgcagagatttctttcatctgcatttacatcttcttctttgctagcacgtggggcccgggcgcctgggttgtgattggcgagattttccccctacctattcggtcgcgtggtgtggctctgtcgacggcatcgaactggctgtggaattgcatcatcgctgtcatcaccccttacatggtcgacaaggacaagggtgacttgaaggccaaggtgttcttcatctggggctcgctgtgtgcctgcgcttttgtctacacgtacttcctaattccggagaccaagggtcttactcttgagcaggtggacaagatgatggaagagaccacgcctcgcacctcagccaagtggactccacatggcaccttcacggccgagatgggtcttactgcgaatgccgtggccgaaaaggctactgcggttcaccaggaggtgtga

SEQ ID NO: 466 - protein, 530 aa, Aspergillus niger
MAEGFVDASRVEAPVTLKTYLMCAFAAFGGIFFGYDSGYISGVMGMRYFIEEFEGLDYNTTPTDSFVLPSWKKSLITSILSAGTFFGALIAGDLADWFGRRTTIVSGCVVFIVGVILQTASTSLGLLVAGRLVAGFGVGFVSAIIILYMSEIAPRKVRGAIVSGYQFCITIGLMLASCVDYGTENRLDSGSYRIPIGLQLAWALILGGGLLCLPESPRYFVKKGDLAKAAEVLARVRGQPQDSDYIKDELAEIVANHEYEMQVIPEGGYFVSWMNCFRGSIFSPNSNLRRTVLGTSLQMMQQWTGVNFVFYFGTTFFQSLGTIDDPFLISMITTIVNVCSTPVSFYTIEKFGRRSLLLWGALGMVICQFIVAIVGTVDGSNKHAVSAEISFICIYIFFFASTWGPGAWVVIGEIFPLPIRSRGVALSTASNWLWNCIIAVITPYMVDKDKGDLKAKVFFIWGSLCACAFVYTYFLIPETKGLTLEQVDKMMEETTPRTSAKWTPHGTFTAEMGLTANAVAEKATAVHQEV

SEQ ID NO: 467 - DNA, 1584 bp, Emericella nidulans
  CDS (1)..(1584)
atggcagacgcggtgattgctggtcagcgcgtggaggccccggtcacatggaaggcgtaccttatgtgcgtgttcgcggcctttggtggtatattcttcggctacgactctggctatattaatggagttatgggcatggattatttcatccaagaatttacaggaaaggtcaaaagcgaaactcccgccgcgcagtttgtgatttcatcgtcgaataaatcccttatcacctctatcctgtctgcggggacgttctttggcgctattattgccggtgacctggcagagtggtacggccgtcgcatcacgattatcaatggctgcggagtctttatggctggtgtggcttttcagattgcctctaccaccgtgcccatgcttgtcgtcggccgattgatcgcaggcgttggtgtcggttttgtctctgcgatcatcattctgtacatgtctgagatttctcctcgaaggttccgtggtgctatcgtatcgggctatcagttttgcatcaccattggtttgatgctggcctcctgcgtgaactatgggacggagaaccggaatgattcgggctcataccgtatcccgattgccctccaactcctctgggcgatcattcttgggataggtctgttcgtccttccagagtctccccgttattatgttcggaaaaacaatctggctgaagcagccaaaaccctcgctcgcgtgcgaggccagcccccggagtcagagtatatcacgcaagagctggcagaaatcgtggccaacaatgaatacgagatgcaggttattccccagggcggctattttgctacgtggttgaactgcttccgtggaggtctccggtctcctaacagcaaccttcgtcgtgttatccttgggacctctcttcagatgatgcaacaatggactggagtgaacttcgtcttctattttggtactacgtttttccagaacctcggtaccattgacgaccctttcctcatcagcatgatcaccacgattgtcaatgtcttttctactccgatctccttttacacgatggagaagctcggtcgtcgccctctactgctttggggcgctctgggcatggtcgtctgccaatttattgtggcgatcgctggaaccgtggatggagacaacagtaaaaccgtctcggcgcaaatctcgtttatctgcatttatatctttttctttgcttccacttggggccctggcgcttgggtcgttattggcgagattttcccgctgcccattcgttctcgtggcgttgcgctatcaacagcctccaactggctttggaactgcattattgcagttatcacaccgtacatggttgatatcgacaaggggaacctcaagtcccgagtgttctttatctggggatccctgtgtgcctgcgcatttgtctatgtctacttcctgattcccgagacaaaaggcctcaccctcgaacaagtcgacaagatgatggaggagactactcctcgcacatctgccaaatggaagcctcactctacctttgcgaccgagatgggtatgactgagaaaaatgcgagtacaaccgtggaaagcgctgcctaa

SEQ ID NO: 468 - protein, 527 aa, Emericella nidulans
MADAVIAGQRVEAPVTWKAYLMCVFAAFGGIFFGYDSGYINGVMGMDYFIQEFTGKVKSETPAAQFVISSSNKSLITSILSAGTFFGAIIAGDLAEWYGRRITIINGCGVFMAGVAFQIASTTVPMLVVGRLIAGVGVGFVSAIIILYMSEISPRRFRGAIVSGYQFCITIGLMLASCVNYGTENRNDSGSYRIPIALQLLWAIILGIGLFVLPESPRYYVRKNNLAEAAKTLARVRGQPPESEYITQELAEIVANNEYEMQVIPQGGYFATWLNCFRGGLRSPNSNLRRVILGTSLQMMQQWTGVNFVFYFGTTFFQNLGTIDDPFLISMITTIVNVFSTPISFYTMEKLGRRPLLLWGALGMVVCQFIVAIAGTVDGDNSKTVSAQISFICIYIFFFASTWGPGAWVVIGEIFPLPIRSRGVALSTASNWLWNCIIAVITPYMVDIDKGNLKSRVFFIWGSLCACAFVYVYFLIPETKGLTLEQVDKMMEETTPRTSAKWKPHSTFATEMGMTEKNASTTVESAA

SEQ ID NO: 469 - DNA, 1599 bp, Aspergillus oryzae
  CDS (1)..(1599)
atggttgccggcggtggagttgtttcttcttccggcatggatgcataccgggccctgccaaacaatacgaactcgaactggttcaaggacaagggcctccggcgtctgaatttcggcctcatgcttatgtttgcatccgctgcagcaaatgggtatgatggggctttgatgaatgggctcctgactctccctatgtgtaagtttcctttgtcaagttgtcctcacctctggcgaatgttcacctttattccagcttcgtacttcgcggattacttcggccgcaagatgtctgtcgcacttggatcggccatcatgattgtcgcgagcgtgatccaagcggcaaccgtcggccgctgggccttctttggaacgagaatcgcgatgggtatcgggctgggctttgcgcagacagccgccccgccgctgactactgagatagctcatccgcggcatcgtggcgttgtgacggccattttccaggctacgtggtactggggtgctatcctagctgctgcggtgtgcttgggcactttttatgtggagggaagtacttggtcctggcggattccatgccttctccaatgtttcttccctgctgttcagttggtaggactactcatcgttccagaaagcccgaggtggctcgtgtcaaaggacaggcgagacgaggccttgcaaatcctcgcccgctaccatgggaattgtgacacgtcagatccactggttcagttcgagttttctgagatctgcagtgctatcgagctagaaaactcagtcgcccataagagtggttggtctgcgttcattgcaaccaagggagctcggcatcgccttgcaatttgtctgttggtcggggttatgatccagtgggcaggcaatggtacgtacagggctatccacctactcctgtctatcttgctgattattttgtccctaggtgtcatttcctactatcttgcaccgatccttcgatccgtcggcattaccaatcctacgcagcaatccgccatcaacctgggcctgcaggcgtggaacgcagtctgcgccgcgggaggcgccgtcgctgcagagaaatacggccgacgccctctctggatgctctccactgttcttatgctcctattctttaccctggcgactgtcctttctgccgtctttgacgaatcagccatcaaagctgctggcagtgcggttgtcgcattcctctatctgttctacggcgcgtacgatatcgcctataccccgctctcaattgcgtacccggtcgagatcatgccattctacctgcgcaccaagggcttatcgttaagcttaacggcgcagtttggggcgggcttcttcaaccagttcgtcaaccccatcgctctcggtgcgataaaatggaagttttatttcgtgtaccttggtctgttggttatctttttgggcattatttactttgtgtttccggagacaaagggccacacactggaggagattgctgtcatcttcgatggtcctggggcagagacggaggtacagcgggatctggccgctatcattgcggtggagagggaggtaaaggctcctatgaaggaggagttggaacacgctccatag

SEQ ID NO: 470 - protein, 532 aa, Aspergillus oryzae
MVAGGGVVSSSGMDAYRALPNNTNSNWFKDKGLRRLNFGLMLMFASAAANGYDGALMNGLLTLPMCKFPLSSCPHLWRMFTFIPASYFADYFGRKMSVALGSAIMIVASVIQAATVGRWAFFGTRIAMGIGLGFAQTAAPPLTTEIAHPRHRGVVTAIFQATWYWGAILAAAVCLGTFYVEGSTWSWRIPCLLQCFFPAVQLVGLLIVPESPRWLVSKDRRDEALQILARYHGNCDTSDPLVQFEFSEICSAIELENSVAHKSGWSAFIATKGARHRLAICLLVGVMIQWAGNGTYRAIHLLLSILLIILSLGVISYYLAPILRSVGITNPTQQSAINLGLQAWNAVCAAGGAVAAEKYGRRPLWMLSTVLMLLFFTLATVLSAVFDESAIKAAGSAVVAFLYLFYGAYDIAYTPLSIAYPVEIMPFYLRTKGLSLSLTAQFGAGFFNQFVNPIALGAIKWKFYFVYLGLLVIFLGIIYFVFPETKGHTLEEIAVIFDGPGAETEVQRDLAAIIAVEREVKAPMKEELEHAP

SEQ ID NO: 471 - DNA, 1943 bp, Arabidopsis thaliana
  CDS (139)..(1650)
ctgcaaattcgaagctccgttgagctcgaatcagagaagtagctatttcgtacaaccccagaacgatatatttttttctgggtttccttgaacataccacactcacggtcacgggatccataccaagcttccgtagccatggggtttgatcccgagaaccaatcgatctcttccgttggacaggttgttggtgattcttcttcaggtgggattactgctgaaaaggaacctttgttaaaggaaaaccacagcccagagaactactctgttcttgcagccattcctccgtttctctttccagctcttggagcattgctttttggttatgaaattggtgcaacatcttgtgctatcatgtctcttaagtcgcctactctaagtggaatttcatggtacgacttgtcttcagtggatgttggtataattaccagtggctcactgtatggtgccttaattggctccattgttgcatttagtgttgccgacattataggaaggagaaaggagctgattttggctgcattcttgtatcttgttggagccattgtgactgtagtagcacctgtcttttccatactgataattggacgagttacgtatggcatggggattggactgaccatgcacgcggctccaatgtacattgcagagactgctccaagtcaaatacgtggacggatgatatcactaaaggaattctccactgtccttgggatggttgggggttatggaatcggtagcctttggattacggttatttctggttggcgttacatgtacgcaacaattctcccttttccagttattatgggaactggaatgtgttggctaccagcatctccgaggtggcttttactgcgcgctctccagggacaaggaaatggggagaatcttcaacaggctgcgattagatctctttgtcgccttagagggtctgtcatagctgactcagcagctgaacaagtaaacgaaatattggctgaactttcccttgtgggtgaagacaaagaagctacatttggtgaattatttcgaggcaaatgcttgaaagctctcactatagcaggagggttagtcttgttccaacagataactgggcaaccaagtgtactatattatgcaccatcaatactacagactgccggcttttctgctgcagctgatgcaactcggatctcaattctgctcggcctattgaagttggttatgacaggagtttctgtgatagttatcgacagagttggaaggagacctttacttctttgtggtgttagcggaatggtgatctcattgttcctcctgggatcctactacatgttttataaaaatgtaccagctgttgctgtagctgcattgctactgtatgtaggctgttaccagctgtcctttggccctattggttggctgatgatttcagagatatttcccttaaaattaagaggtagaggaatcagtctagcagtgcttgtgaattttggcgcaaacgcacttgtgacattcgctttctcaccgctaaaggagctgttaggagctggaatactgttctgtgcatttggagtgatatgtgtcgtgtctctcttcttcatatactacattgtgccagagacaaagggtctcactcttgaagaaattgaagccaaatgtctctaaaaggttactcatcttagctccactttctgtgctgcttcattgcttgaggatctaaatcgcaaacgcaccagccgcatgtgtagtcactagtcagccatttatcgcggaattttcactgtttggatatcttttaaagaatggttgtatctagcggcaaaatttggtgcgttggaaaagttttaaaattcgaaagtttgcttaatttgtattttaaaacacgcattcaaaattttgtgattgtatgaaaataatgtgagattcaaaattttatgaaacaatattgtaacgtcgtc

SEQ ID NO: 472 - protein, 503 aa, Arabidopsis thaliana
MGFDPENQSISSVGQVVGDSSSGGITAEKEPLLKENHSPENYSVLAAIPPFLFPALGALLFGYEIGATSCAIMSLKSPTLSGISWYDLSSVDVGIITSGSLYGALIGSIVAFSVADIIGRRKELILAAFLYLVGAIVTVVAPVFSILIIGRVTYGMGIGLTMHAAPMYIAETAPSQIRGRMISLKEFSTVLGMVGGYGIGSLWITVISGWRYMYATILPFPVIMGTGMCWLPASPRWLLLRALQGQGNGENLQQAAIRSLCRLRGSVIADSAAEQVNEILAELSLVGEDKEATFGELFRGKCLKALTIAGGLVLFQQITGQPSVLYYAPSILQTAGFSAAADATRISILLGLLKLVMTGVSVIVIDRVGRRPLLLCGVSGMVISLFLLGSYYMFYKNVPAVAVAALLLYVGCYQLSFGPIGWLMISEIFPLKLRGRGISLAVLVNFGANALVTFAFSPLKELLGAGILFCAFGVICVVSLFFIYYIVPETKGLTLEEIEAKCL

SEQ ID NO: 473 - DNA, 2234 bp, Kluyveromyces lactis
  CDS (402)..(2102)
cccatgtcttttaatttctccagtcagttcctgaggcccagccagtttctgtggttttttccccggatcttttactggtgactacaaaggcaattttttttccttccgcttttcgtttttagcgtggagtaagcaatagatagggctttcttatggtattgatccgctaattcaaactggacctatctcgtcgacaaatttgtatataatacgaagagaattcgcttactttcgtccaaattatccaaccccattgtcaaataagaatatatttgtgtacttctactctcgtatttactagatcaaaaaattagaaagctacagtattaatagcatattggtccgctaagttaaagctattagagcgtagaggttgttgatattaaaaaggttaagaaacaatgtctagtaatctgtctgaaaaagcagttgaccagcaaaaagaattcggcttgcttaagagtacgagttctgttgactcggtacacgaagttgaagccggtgtgaaagtcggtgaagatgacgacaattattttttcagtgaagatcaaatcttaacacagattaaggtgtacgaagatgaaattgcaaatactccagttactaagacgctaagacaacgtatgagaagaatggaattttgtgaagtgaacttctcaaataaaacgtatatggttattatgcttggttttttcgcatcatttgcaggtattttgtcaggtgtggatcaatcgaccatttcaggtgccagttatggtatgaaggcatcgttgaaattgacttccgatgaagattccttgatttcctctttaatgcctttgggtgcggtcggtggttctatcttgttaactccattaagtgaatatttcggtagaaaagttgccttagtgatctcatgtattttttataccattggtggtattttgtgtgccgctgctcaggatgttcatacaatgtatgcaggcagattcttgatcggtgttggtgtcggtattgaaggtggtggtgttggtgtttatattgctgaatctgtcccatctaccgtgcgtggttccttagtttcgttgtatcaattcaatattgcccttggtgagttggttggttatgtcattggtgtcattttcttcgatgtcaaaggtggttggagatatatgttaggttcctctttggtattttctaccatcttatttgttggtttattcttcttacctgaatcccctcgttggttgatccacaagggttatgatgtagaagcttataaggtctggcgtagattgagagacacatcggatctaggcaataaaagagaattcttggaaatgaaacatgcagctgaacaagatagacaattgaaagaacaagaatctcgcttcaagagtatgtttgacttgatcttaatcccaagaaatcgtcgtgcattgttatactccattatgatggtctctttgggtcaattgactggtattaacgcaatcatgtattatatgtccacgttgatgggacagatcggtttctctccaaaacaagccgtcgctatgtctatggttggtggtgctgctttgttaataggtaccattccagcaatcctatatatggataaatttggtagacgtccatggtctatgaccattatcggtttctccgtaggtctagttctcgtcggtgttggttatcagatcgatttgaataccaacttggctgctgctgaaggggtttacttaaccggccagattttgtataacatcttctttggtacttatgccactttgacctgggttgttccttctgagtctttctctttggctacaagatcgatcggtatgacgatttgctctgctttcttatacttatgggccttcactgttacttataacttcaacaaaatgaaggacgctttcacatacactggtttgactttaggtttctatggtggtattgctattgttattggtattccataccaattgttgtttatgccagaaaccaaagataaaactttggaagaaatcgatgatatctttgagatgccaactagacaattggtcaaacaaaatttgaagaacttaaaagattacgtttctggtaaccgtaaatctatttaattctctgtcttatgctaataaaactgaatgaagtaaggagttcactttgaaatcgatcctgaaagtgggagcttatttctatcatatgttttgagctgtatagacacaggataggggttactctctccgatc

SEQ ID NO: 474 - protein, 566 aa, Kluyveromyces lactis
MSSNLSEKAVDQQKEFGLLKSTSSVDSVHEVEAGVKVGEDDDNYFFSEDQILTQIKVYEDEIANTPVTKTLRQRMRRMEFCEVNFSNKTYMVIMLGFFASFAGILSGVDQSTISGASYGMKASLKLTSDEDSLISSLMPLGAVGGSILLTPLSEYFGRKVALVISCIFYTIGGILCAAAQDVHTMYAGRFLIGVGVGIEGGGVGVYIAESVPSTVRGSLVSLYQFNIALGELVGYVIGVIFFDVKGGWRYMLGSSLVFSTILFVGLFFLPESPRWLIHKGYDVEAYKVWRRLRDTSDLGNKREFLEMKHAAEQDRQLKEQESRFKSMFDLILIPRNRRALLYSIMMVSLGQLTGINAIMYYMSTLMGQIGFSPKQAVAMSMVGGAALLIGTIPAILYMDKFGRRPWSMTIIGFSVGLVLVGVGYQIDLNTNLAAAEGVYLTGQILYNIFFGTYATLTWVVPSESFSLATRSIGMTICSAFLYLWAFTVTYNFNKMKDAFTYTGLTLGFYGGIAIVIGIPYQLLFMPETKDKTLEEIDDIFEMPTRQLVKQNLKNLKDYVSGNRKSI

SEQ ID NO: 475 - DNA, 1476 bp, Corynebacterium glutamicum
  CDS (1)..(1476)
atggctagtaccttcattcaggccgacagccctgaaaaaagtaagaagctgcccccactcacagaaggtccgtatagaaagcggctattctacgttgcactagttgcgacgtttggtgggctgctcttcggatatgacaccggagtaatcaacggtgcactcaacccaatgacacgtgagctcggactaaccgcgttcaccgagggtgttgtaacttcttccctgctgtttggtgcagcagctggtgcgatgtttttcggtcgcatttccgacaactggggtcgccggaaaacaatcatctcacttgcagtagctttctttgtcggcaccatgatctgcgtgtttgctccatcttttgcagtaatggttgtcggacgtgtgcttcttggactcgcagttggtggcgcttccactgttgtccctgtctacctggctgaacttgctccttttgaaatccgtggctcactggctggccgtaatgagttgatgattgttgttggtcagctcgcagcttttgtcatcaatgcgattattggaaatgtttttggacaccacgatggtgtgtggcgctacatgctggcaattgccgcaatcccagcaattgccctcttctttggaatgctccgagttccagaatccccacgctggcttgttgagcgaggacgcattgatgaggctcgcgcagttcttgaaaccattcgccctctagaacgtgcccatgcagaagttgctgatgttgaacacctagcaagagaagagcacgccgtttccgagaagtccatgggcttaagggaaattttgtccagcaagtggcttgtgcgcatcctcctggtaggtatcggattgggtgtcgcacagcagctgaccggcatcaactccatcatgtactacggccaggttgttctcattgaggctggtttctccgagaatgcagctctgatcgccaacgtggcgccaggagtgatcgcagttgtcggtgcattcatcgcactgtggatgatggatcgtatcaaccgccgtaccaccctcattaccggttattctctcaccaccattagccacgtattgatcggtatcgcatccgtagcattcccagtcggcgatcctcttcgcccctacgttatcttgactctggttgtggtcttcgtgggatccatgcagaccttcctcaacgtagctacctgggttatgctctctgagctcttcccgctggcaatgcgcggtttcgcaatcggtatctcagtgttcttcctctggatcgcaaacgcgttcctcggattgttcttcccaaccatcatggaagcagtaggactaaccggaaccttcttcatgttcgccggaatcggtgtggttgccttgatcttcatctacacccaggttcctgaaactcgtggacgtaccttggaggagattgatgaggatgttacttccggtgtcattttcaacaaggacatccgaaaaggaaaggtgcactaa

SEQ ID NO: 476 - protein, 491 aa, Corynebacterium glutamicum
MASTFIQADSPEKSKKLPPLTEGPYRKRLFYVALVATFGGLLFGYDTGVINGALNPMTRELGLTAFTEGVVTSSLLFGAAAGAMFFGRISDNWGRRKTIISLAVAFFVGTMICVFAPSFAVMVVGRVLLGLAVGGASTVVPVYLAELAPFEIRGSLAGRNELMIVVGQLAAFVINAIIGNVFGHHDGVWRYMLAIAAIPAIALFFGMLRVPESPRWLVERGRIDEARAVLETIRPLERAHAEVADVEHLAREEHAVSEKSMGLREILSSKWLVRILLVGIGLGVAQQLTGINSIMYYGQVVLIEAGFSENAALIANVAPGVIAVVGAFIALWMMDRINRRTTLITGYSLTTISHVLIGIASVAFPVGDPLRPYVILTLVVVFVGSMQTFLNVATWVMLSELFPLAMRGFAIGISVFFLWIANAFLGLFFPTIMEAVGLTGTFFMFAGIGVVALIFIYTQVPETRGRTLEEIDEDVTSGVIFNKDIRKGKVH

SEQ ID NO: 477 - DNA, 2187 bp, Drosophila melanogaster
  CDS (198)..(1688)
tccttggagaaattcagttcagctcggacgctcgtcgcgccatccacacgtttcgatagttaagcctttcagggaactggagcgatcgaaaaattggcagtagcaaaataaacactaataaaacgaacatataacctcgcatttgcgggttaatcggctaatcgtctaaatagtgctgttttggaagttattgaaacatggtggctaccgaggaacttaaaacgaccgtcagtcaagaggacggagactcacgcaatccaataacctatgatcttctacaagaaaatcagtcgaagacttcaaagacccggcaatatgtggcggctatgataatttgtttgggtgcggttgccgctggaactgcgttatcctggacgtctcctgtttttccgcagatatctgccggaaacgaaagcagtttcaattccacaactggcggtatttccaactcgacttccaacgagaatgacattcgactgactgattcgcaaaaaacattggtgggttccatgttgcccttcggcgccctttttggagccctcccctctggatatattgccgataggatcgggcgacgttatacagctatggtcatggacattcccttcatcttggcctggatcacgcttagtttcgccaattccgtcggctggctttacttgggccgatttttaattggtatcgcaacgggcagcttctgcgtggtggctcctatgtacatttcggaaatcgcggagactagcattcgcggcagtctaggcacattgttccagttgctccttacgattggtatcctgtttatctacgtggtgggagctttggtgtcatggaaaactctgagcctgctctgtctaatcatacccatcctgctgctcgtcggcctgtttatcgtgcccgagacgccagtgtatctacttaaaaacggtaagcgctccgaggccaatcgcgcactaaaatggctgtggggagattactgcaacaccagcaacgccatccaggccatccaaaacgacctggaccagactggagtggatgcctccgtgaaggatttgttcagcaaccgcgcctcgcggaacggtatggtgatctcagtgctgctgatggtcttccagcagttctccggcatcaatgccgtaatcttcttcatgaacgagatcttcgagtctagcagcacgctgaatcccaacgtctgcaccatagtggtgggtgtggtgcaggtgatcatgaccctggcctcctccctgctgatcgagaaggccggccgcaagatcctgctgatcttcagcagcaccatcatgactgtctgcctggccatgctgggtgcttacaacacaatcaatcggcacaccgatctgtcccagtccattggctggttgcccctgctctgcatagtgctgttcatcgtgagcttctccgtgggctatggccccattccttggatgatgatgggcgagctcttcatgccggacgtgaagggcatcgccgtctccctgagcgtaatgatgaactgggtgtgcgtgtccctggtcacatggctcttcggcgtgctcaatgctggcggtgctgatgtgccgttctggttcttcagcgcctggatgggggtggccactgcctacgttgccatcgccttgcaggagacgaagggcaagagtgccagtcaaatccagagctggttgagcggacgttgaggatcacagaaggactccatgccatagtttattctagctgaatgccattgaactcgtagttgaataagcagcccttgaaaagatacttttgaatactttttatatgttatttctattttcaacgatttacaagaaattacctctggcacaattgaacttcagccaagatatgtaacctattcttaattttattacaattttttcggactcaaggccaacctagcttattggtgttccacgatgttcagatacgtagtatagtttaactagttcctaagtactcaaggtcacgcccaaatatctatataagattcaatggacttccacttccacccagttacatatgtacgtgctctccttttgtataaaccacctgctgtataaacacacgtactttaggattgcaaagacaaatacctatatttatacttctgtgtgctaattttaacaaatgtacatatatatttgataataaaagtaagctgtacaggaacctgca

SEQ ID NO: 478 - protein, 496 aa, Drosophila melanogaster
MVATEELKTTVSQEDGDSRNPITYDLLQENQSKTSKTRQYVAAMIICLGAVAAGTALSWTSPVFPQISAGNESSFNSTTGGISNSTSNENDIRLTDSQKTLVGSMLPFGALFGALPSGYIADRIGRRYTAMVMDIPFILAWITLSFANSVGWLYLGRFLIGIATGSFCVVAPMYISEIAETSIRGSLGTLFQLLLTIGILFIYVVGALVSWKTLSLLCLIIPILLLVGLFIVPETPVYLLKNGKRSEANRALKWLWGDYCNTSNAIQAIQNDLDQTGVDASVKDLFSNRASRNGMVISVLLMVFQQFSGINAVIFFMNEIFESSSTLNPNVCTIVVGVVQVIMTLASSLLIEKAGRKILLIFSSTIMTVCLAMLGAYNTINRHTDLSQSIGWLPLLCIVLFIVSFSVGYGPIPWMMMGELFMPDVKGIAVSLSVMMNWVCVSLVTWLFGVLNAGGADVPFWFFSAWMGVATAYVAIALQETKGKSASQIQSWLSGR

SEQ ID NO: 479 - DNA, 1972 bp, Trichoderma harzianum
  CDS (123)..(1754)
tggagctccaccgcggtggcggccgctctagaactagtggatcccccgggctgcaggaattcggcacgaggtcaccacgattcatggtcaaggtcctctacacaaagcatcaagagtgagccatggctatcggcaacatctacgtgattgccggcgtgtccgtcgtcggcggcgcgctcttcggcttcgacatctcgtctgtgtcggcccagctggccgagcagtcgtatctctgctacttcaaccaggatgagaaccctccaaccacggccgatggcaaatgtggtggtccgcggtctctcgtccaaggtggtatcaccgcctccatggctgctggctcctggctgggagctctgatctctggtcccctgtctgatagactgggccgaaagtactccatcatggtcggatgtatcatctgggtcattggttccactctctcctgtgcctcccaaaacattggtatgctcattgtcgcccgtatcatcaacggtatctccgtcggtatcgaatctgctcaggtccccgtctacattgccgaaatctctcctccctccaaacgtggtcgcttcattggtatgcagcaatgggccatcacttggggcattctcatcatgtactacatctcctacggctgctccttcattggcgaagacaaccccgtcagctacaacaccgctgcctggcgtatcccatggggtcttcagatgatccccgccttcttcctcttcttcatgatgatgccccttcccgagtctcctcgttggcttgcccgcaaggaccgctgggaggactgccgagctgtccttactctcgtccacggcaagggtgaccctaaccacccctttgtcgcctacgaactgcaggacatcaaggatatgtgcgagtttgagcgccagcatgccgatgttacttacctcgatctgttcaagcctcgcatgatcaaccgtaccttcattggtctcttcactcagatctggtcgcagttgactggcatgaacgtcatgatgtactacattgccaacatcttctccatggctggttacagtggcaacgccaacctgcttgcctcgtccattcagtacatcatcaacgtcctcatgactattcctgccctactctgggtcgacaaatggggtcgccgtcccacgcttcttatcggttccgtactcatggccctgtggatgtacgccaacgccggtattctcgccacctacggtgaagtcgttcccggcggtatcgaccacgttgctgcccagtcgatgcgtgtcaccggtgcccctgccaagggtctcatcgcctgcacatatcggtttgtggcttcctttgcgcccacctggggtcccgtctcctggacctaccctccggagctgttccctctccgtctccgaggcaagggtgtcgccatggccacctctggaaattgggccttcaacactgctctgggtctctttacccccgtggcctttgccaacatcaagtggaagtcgtacctcatcttcgccgtcttcaacactgttgccttcttccacgtcttcttcgtcttccccgagactgccggaaagactttggaagagactgaggccatgtttgaggaccccaacggcattccctacatgggaactcccgcctggaagaccaaggtcgcaaccagcctcactgtccgtgccgaacagggcgacctcgaggccaagattgcccacgataccgagaagcctccgatccacactcacgaggaagagactacccagtaaatgggaaatttaataacatcttgacgatgataatcttgtgcagggcggtaggctttagttgataccctgggggaagtgtggcctcgtcccacaaggaaccttatgatgcaaatgtttaatagtcgtactataccaataccatcacatgttgcattttgaaaaaaaaaaaaaaaaaaaactcgagggggggcccggtacccaattcgccctatagtgaa

SEQ ID NO: 480 - protein, 543 aa, Trichoderma harzianum
MAIGNIYVIAGVSVVGGALFGFDISSVSAQLAEQSYLCYFNQDENPPTTADGKCGGPRSLVQGGITASMAAGSWLGALISGPLSDRLGRKYSIMVGCIIWVIGSTLSCASQNIGMLIVARIINGISVGIESAQVPVYIAEISPPSKRGRFIGMQQWAITWGILIMYYISYGCSFIGEDNPVSYNTAAWRIPWGLQMIPAFFLFFMMMPLPESPRWLARKDRWEDCRAVLTLVHGKGDPNHPFVAYELQDIKDMCEFERQHADVTYLDLFKPRMINRTFIGLFTQIWSQLTGMNVMMYYIANIFSMAGYSGNANLLASSIQYIINVLMTIPALLWVDKWGRRPTLLIGSVLMALWMYANAGILATYGEVVPGGIDHVAAQSMRVTGAPAKGLIACTYRFVASFAPTWGPVSWTYPPELFPLRLRGKGVAMATSGNWAFNTALGLFTPVAFANIKWKSYLIFAVFNTVAFFHVFFVFPETAGKTLEETEAMFEDPNGIPYMGTPAWKTKVATSLTVRAEQGDLEAKIAHDTEKPPIHTHEEETTQ

SEQ ID NO: 481 - DNA, 1830 bp, Arabidopsis thaliana
  CDS (74)..(1522)
acatctatctctttctctctctttccttgcaaattttcagctctcaaagagttaagagttagagagagagaggatggccattagggaaatcaaagatgtagagaggggtgaaatagtgaataaggtagaagatcttgggaaaccatttttgactcatgaagatgatgaaaaagagagtgagaataatgaatcatatttgatggttctcttcagtacttttgttgctgtctgtggctcctttgagtttggctcttgtgttggatactcagcgcctactcagtcatctataagacaagatctcaatctctcccttgcagagttctccatgtttggatccatcttaactatcggtgcaatgcttggtgctgttatgagtgggaaaatttcagatttctccggccgaaaaggggcaatgaggacatcagcttgcttctgcattacaggttggctcgctgtcttcttcaccaagggggcattgttacttgatgtaggaaggttctttacaggatatggaattggagttttttcttatgtggtccctgtgtacattgctgagatatctcccaagaatctccgaggtggactcacaacactgaaccaactcatgattgtgatcggctcatcggtttctttcttgatcggatctctcatttcttggaaaactcttgccctaaccggacttgctccctgcattgttttgctctttggcttgtgcttcatacccgaatctcctcgatggctggcaaaagcaggccatgagaaagagtttcgcgtagccctgcaaaagctgcgaggaaaagatgcagatatcacaaatgaagcagacggtattcaagtctcgattcaagctctagagattcttccaaaagcaagaatccaagaccttgtgtccaagaaatatggtcgatctgtcatcattggtgtttccctgatggtattccaacagtttgttggaatcaatgggatcggattctacgcaagtgaaacgtttgtaaaagccggatttacctctgggaaactaggaacaatcgctatcgcttgtgttcaggtgccaataactgttcttggaacaatcttgatagataaatctggacgaaggccactaattatgatttcagctggtggtatcttcttgggatgcatactcacaggcacatctttcttactcaagggacagagcttgttgcttgaatgggtcccttccttagccgttggaggtgtacttatctatgtagctgctttctccatcggaatgggacctgttccttgggtgataatgtctgagatatttccgataaacgtaaagggaatcgcaggaagcttagtggtactagtgaattggtctggtgcttgggctgtttcttacactttcaacttcctcatgagctggagctctccaggtacattctatttgtactcggcttttgcagctgcgacgataatatttgtggcgaagatggtgccagagacgaaagggaagacactggaagagatccaagcttgtattcgaagagaaacataagaagaaagatacaatcaatgttatgggaatgttatcaaatgaaaagactcgaactattcccgttggtgagctcaaagtggagtagagtaaaaattatcgccgggagataacgttgaaagtccgatgatgaggcataagggttttgcatgaatgttatgagaataggtttacttttatgtatttgttcacgttttaagttttcatcaaataggtttttgattggtatacagtatgtggaatattaatagaatggagtggcagatttcatattcaatcattctacatgctttcaatcaaaccaagtccgt

SEQ ID NO: 482 - protein, 482 aa, Arabidopsis thaliana
MAIREIKDVERGEIVNKVEDLGKPFLTHEDDEKESENNESYLMVLFSTFVAVCGSFEFGSCVGYSAPTQSSIRQDLNLSLAEFSMFGSILTIGAMLGAVMSGKISDFSGRKGAMRTSACFCITGWLAVFFTKGALLLDVGRFFTGYGIGVFSYVVPVYIAEISPKNLRGGLTTLNQLMIVIGSSVSFLIGSLISWKTLALTGLAPCIVLLFGLCFIPESPRWLAKAGHEKEFRVALQKLRGKDADITNEADGIQVSIQALEILPKARIQDLVSKKYGRSVIIGVSLMVFQQFVGINGIGFYASETFVKAGFTSGKLGTIAIACVQVPITVLGTILIDKSGRRPLIMISAGGIFLGCILTGTSFLLKGQSLLLEWVPSLAVGGVLIYVAAFSIGMGPVPWVIMSEIFPINVKGIAGSLVVLVNWSGAWAVSYTFNFLMSWSSPGTFYLYSAFAAATIIFVAKMVPETKGKTLEEIQACIRRET

SEQ ID NO: 483 - DNA, 1599 bp, Neurospora crassa
  CDS (1)..(1599)
atgggtctcttctcgaaaaagtcggctgcgccgcagacccaatcacaagatgagatcgatctcgctgctgagcagaaggtcactttccgtgccgtcttcctcggtgttgtcgcctccgtaggtggcttcatgtttggctacgtcagtggtcaaatttctggtttcttcgacatggaagacttcggtcgtcggttcggtaactaccaagacgcggatggctgggtcttctcagcataccgccagggtgctattgtcgccctactccctgctggtgcccttcttggttcgctcgttgccggtagaattgcggatacccttggtcgccgtatcgccatctctgcgtccgcccttttctcctgcatcggaacaattatcgagatcgcctccaccacgcactgggcccagtttgcggtcggtcgtcttatcaccggtattggtatcggtgctctctccgtcgtcgtcccgatgtaccagtctgagtccgcgcccgccatcctccgtggtatcctcgtctcgtgctaccagctcttcatcactcttggtatctggaccgctgagatgatcaactacggtactcacgacctcagcaactccgcctcttggcgtattcccaacggtatctccttcctctgggctttggttctcggtggcggaatattgttccttcctgagtctccccgttatgcctaccgtgttggtcgcgaggacgaggctcgcaacaccattgcccgccttgccggtctcgagcccagcgcccgctctgtcaacatgcaaatcgatgagatccgtatgaagcttgaggaggagaaggctggtgccgacaccaagtggtacgagatcttcggacctgctctgttgcgccgcacccttatcggtatcattcttcagtctggccagcagcttactggtgccaacttcttcttctactacggaaccacgattttcaaggctactggtcttagcgactcttacgttacccagatcattcttggttccgtcaacgctggatgcactgttgctggtctctgggttgtcaagaatgttggccgccgtaaggccctcatcggtggtgccctctggatgaccatgtgcttcttggtctactctttcgtcggaagatttgtgctcgaccccgtcaacccggctagcactcctcaggccggcaacgtcctcattgtcttctcctgcttcttcatcgtcgcctttgccaccacttggggtcctctcgtctgggccgtcgttgctgagctctaccctgctcgctaccgtgctcctgccatggccttggccaccgcttccaactggctgtggaacttcctcatgtccctcttcacgcgccccatcaccgactccattggctacttctatggcttggtgttcgccggatgctgccttgccctcgccgctttcgtttggctctttgtgatcgagtccaaggaccgcacccttgaggagatcgagaccatgtacaaccagaaggtcagccctaggcactccacccactggcacgctgaggtcccttcgggaccgcgggatgcggaggagaagcccgaggttcacagtggttctgcgacaacctcaagccatggagaggtttag

SEQ ID NO: 484 - protein, 532 aa, Neurospora crassa
MGLFSKKSAAPQTQSQDEIDLAAEQKVTFRAVFLGVVASVGGFMFGYVSGQISGFFDMEDFGRRFGNYQDADGWVFSAYRQGAIVALLPAGALLGSLVAGRIADTLGRRIAISASALFSCIGTIIEIASTTHWAQFAVGRLITGIGIGALSVVVPMYQSESAPAILRGILVSCYQLFITLGIWTAEMINYGTHDLSNSASWRIPNGISFLWALVLGGGILFLPESPRYAYRVGREDEARNTIARLAGLEPSARSVNMQIDEIRMKLEEEKAGADTKWYEIFGPALLRRTLIGIILQSGQQLTGANFFFYYGTTIFKATGLSDSYVTQIILGSVNAGCTVAGLWVVKNVGRRKALIGGALWMTMCFLVYSFVGRFVLDPVNPASTPQAGNVLIVFSCFFIVAFATTWGPLVWAVVAELYPARYRAPAMALATASNWLWNFLMSLFTRPITDSIGYFYGLVFAGCCLALAAFVWLFVIESKDRTLEEIETMYNQKVSPRHSTHWHAEVPSGPRDAEEKPEVHSGSATTSSHGEV

SEQ ID NO: 485 - DNA, 1860 bp, Oryza sativa
  CDS (3)..(1736)
acatgtcggccaccacgtccaattcccggcggctatgcaacggccggggacaggtcatacctgggcccaccttaccagaggctgtcaagatgggcccacacgccattcggattgtagtcggagggctcggagaaggcgagctctcgaccgccactactgtacacggcccagagcgagcctcctcctcctctgcaccaccggagatggcttccgccgcgctgccggaggccgtcgcgccgaagaagaagggcaacgtccggttcgccttcgcctgcgccatcctcgcctccatgacctccatcctcctcggctacgatatcggggtgatgagcggggcgtcgctgtacatcaagaaggacttcaacatcagtgacgggaaggtggaggttctcatgggcatactgaacctctactcgctcatcggctccttcgcggcggggcggacgtcggactggatcggccggcggtacaccatcgtgttcgccgccgtcatattcttcgcgggggcgttcctcatggggttcgccgtcaactacgccatgctcatgttcggccgcttcgtggccggcatcggcgtgggctacgcgctcatgatcgcgccggtgtacaccgccgaggtgtcgccggcgtcggcgcgtggcttcctgacgtcgttcccggaggtgttcatcaacttcggcatcctgctcgggtacgtctcgaactatgctttctcccgcttgccgctgaacctcgggtggcgcatcatgctcggcatcggcgcggcgccgtccgtgctgctcgcgctcatggtgctcggcatgccggagtcgccgcggtggctggtcatgaagggacgcctcgcggacgccaaggtggtgctggagaagacctccgacacggcggaggaggccgcggagcgcctggccgacatcaaggccgccgccggcatccccgaggagctcgacggcgacgtggtgaccgtccccaagagagggagcggaaacgagaagcgggtgtggaaggagctcatcctgtccccgaccccggccatgcggcgcatcctgctgtcgggcatcggcatccacttcttccagcaggcgtcgggcatcgactccgtcgtgctctacagcccgcgcgtgttcaagagcgccggcatcaccgacgacaaacacctcctcggcaccacctgcgccgtcggtgtcaccaagacgctcttcatcctcgtggcgaccttcttcctcgaccgcgtcgggcggcggccgctgctgctgagcagcacgggcgggatgatcctctccctcatcggcctcggcgccgggctcaccgtcgtcggccagcaccccgacgccaagataccttgggccatcggcctaagcatcgcctccaccctcgcctacgtcgccttcttctccatcggccttggccccatcacgtgggtgtacagctcggagatcttcccgctccaggtgcgcgcgctgggctgctcgctcggcgtcgccgccaaccgcgtcaccagcggcgtcatctccatgaccttcctgtcgctgtccaaggccatcaccatcggcggcagcttcttcctctactccggcatcgccgcgctcgcctgggtgttcttctacacctacctcccggagacccgcggccggacgctggaggagatgagcaagctgttcggcgacacggccgccgcctcggaatcagacgagccagccaaggagaagaagaaggtggaaatggccgccactaactgatcaaactaaccgcaaaatcaccaaatcctaagggttttcttgcaaaaacgtgtgctgtactggctagctagcaagtagtagcagcaacgtgggaagattcgctgatccggcgttgctggagagc

SEQ ID NO: 486 - protein, 577 aa, Oryza sativa
MSATTSNSRRLCNGRGQVIPGPTLPEAVKMGPHAIRIVVGGLGEGELSTATTVHGPERASSSSAPPEMASAALPEAVAPKKKGNVRFAFACAILASMTSILLGYDIGVMSGASLYIKKDFNISDGKVEVLMGILNLYSLIGSFAAGRTSDWIGRRYTIVFAAVIFFAGAFLMGFAVNYAMLMFGRFVAGIGVGYALMIAPVYTAEVSPASARGFLTSFPEVFINFGILLGYVSNYAFSRLPLNLGWRIMLGIGAAPSVLLALMVLGMPESPRWLVMKGRLADAKVVLEKTSDTAEEAAERLADIKAAAGIPEELDGDVVTVPKRGSGNEKRVWKELILSPTPAMRRILLSGIGIHFFQQASGIDSVVLYSPRVFKSAGITDDKHLLGTTCAVGVTKTLFILVATFFLDRVGRRPLLLSSTGGMILSLIGLGAGLTVVGQHPDAKIPWAIGLSIASTLAYVAFFSIGLGPITWVYSSEIFPLQVRALGCSLGVAANRVTSGVISMTFLSLSKAITIGGSFFLYSGIAALAWVFFYTYLPETRGRTLEEMSKLFGDTAAASESDEPAKEKKKVEMAATN

SEQ ID NO: 487 - DNA, 1569 bp, Uromyces fabae
  CDS (1)..(1569)
atgcctgcggttatggccggcccggtctctttcgccccgccggagggtaaatctagtaaggtcgcgattgtcattgctgtatttgccgcctttggtggcttcttatatggatatgacactggttacattgccggagttaaagccatgcccttttggctacgctctgctggacagcgcggacctgatggtaaatacatgatcactacaagccaagactcaatggttactagtattctttcagttgggactttcgtgggagctcttttagcctatcctatcggtgacaggttcggacgaagaattggcataatgattgcctgtgcaattttttctgttggtgttgctctgcaaactgcctcaaccaagataccaatgttcgtcgtcggcagagtttttgctggcttaggagttggggtagcttcttgtcttgtgccaatgtatcaatcagaatgtgcaccaaaatggatacgtggagggattgtcgcgtgctaccaatgggctattaccattggtttattagttgcctcaattacggtcaacgcaacgaaagatttcgacagtgccaactcataccgcattcccattggtattcagtttatttgggctgcaatccttactatcggtttgcttgtgttacccgaatcgccgagatacttactactcaagggcagggaagacgaggcttggaaatctttaagtcgcctctacagcgctccatacgatgacccagatgtacaagcagaattctcagaaatcatggctagtttggaaaaagagagatcgttcggaaaaaccacgttactagactgcttcaaaacagacaaaagaaaaaatctccaaaggactttgacaggtttgggcgttcagggatggcaacaagcgtcgggaattaattttttcttttattacggtacaacgttcttcaaaaatgcgggaatcgaaaacgcgtttctagtgacggtcgcaactaatgtagtcaatgtggttatgactataccaggaatttgggccgtagacaaagtaggtcgcagaacgatgatgatttgtggggcagcgatgatgttcacatgtgaacttatcctggcttgcgttggtactttcactgcaactagcaacctagcctcgcagaaagttctcgtggccttctcttgtatcttcatcggtctttttgcggccacttggggcccgattccctgggttgtgacaagcgagatttatccgctcgcgacccgtggtaagcaaatggcaatgtcaaccgcctcaaattgggcagtgaattttttcattggtttcattacgccatacttggtcgattcgggtgccggtcaagccggcttgggtgttaaagtcttctggctttgggctgctttgtgctttggagccatggtgttctcattcttacttatccctgagacgaaaggactttcgctggagcaagttgacctcctttacactaattctaccgtccttaagagcaatacctacaggagccagttgatcgcaaacaacttgcacgagggtatgacacctgcagaaaaggcataccaagagaaattggaacatatttga

SEQ ID NO: 488 - protein, 522 aa, Uromyces fabae
MPAVMAGPVSFAPPEGKSSKVAIVIAVFAAFGGFLYGYDTGYIAGVKAMPFWLRSAGQRGPDGKYMITTSQDSMVTSILSVGTFVGALLAYPIGDRFGRRIGIMIACAIFSVGVALQTASTKIPMFVVGRVFAGLGVGVASCLVPMYQSECAPKWIRGGIVACYQWAITIGLLVASITVNATKDFDSANSYRIPIGIQFIWAAILTIGLLVLPESPRYLLLKGREDEAWKSLSRLYSAPYDDPDVQAEFSEIMASLEKERSFGKTTLLDCFKTDKRKNLQRTLTGLGVQGWQQASGINFFFYYGTTFFKNAGIENAFLVTVATNVVNVVMTIPGIWAVDKVGRRTMMICGAAMMFTCELILACVGTFTATSNLASQKVLVAFSCIFIGLFAATWGPIPWVVTSEIYPLATRGKQMAMSTASNWAVNFFIGFITPYLVDSGAGQAGLGVKVFWLWAALCFGAMVFSFLLIPETKGLSLEQVDLLYTNSTVLKSNTYRSQLIANNLHEGMTPAEKAYQEKLEHI

SEQ ID NO: 489 - DNA, 1620 bp, Aspergillus oryzae
  CDS (1)..(1620)
atgactccagagaaggccgctatgtctgaacatattgaaaacgataacccagcgaggcatgatgatatcgacctccccaacagtagcgaggcacataccgccattgcgaaagaacgtgagatgactctatggcaagcgctaagactttatccgaaggcggtggcgtggtctcttctgttctcctgtgccattatcatggaaggctacgatgttgttcttatcggttccttcctcgcatttcctgccttcaacgaaaaatacggaggtctcatgtccgacgggacatatgggctcgaagctaggtggcaagcaggtgttaacaacgcgatggcctgcggccagattatcggactttttctcaatggactggtctcagagcgcttgggataccgaaagaccctgatggcatgccttgccgcgaccgttggtttcgttttcattctgttctttgcgcccaatattcaaactctcgttgtcggcgagctctttatgggcatccctcttggtgtataccaaaccctcgttgtgacatacgcatccgaagtgtgccctgtcgcattgcgcgcatatctcaccacctatgttaacctttgctgggtgctaggtcaattgctcgcctctggcgtgctgaagggtctggccgagcgcaccgatcaatgggcataccgtatcccctttgctctgcagtggatctggccaattcccattttcatcggggtgtttctggcccccgagagcccctggtggctcgttcgacaagaccgccgcgaagatgccgtcaaggcattgaaacgactgaccagcgctaacgcagacttcaacgccgaagaaaccgtcgcaatgatcgtatacaccgacgcactcgagcgacgtgctgaaaccggtacctcctaccttgactgcttcaagaaaagcgacttacgccgaaccgaaatctcctgctgcgcatgggcggcgcagagtctatgtggcgcaggcctcatgggctattcgactgtcttttaccagcgcgcaggtctcgccgtgtcgcagtccttcaccatgtcgctcgtgcaatatgccctaggcgtggtggggacattcgtctcctggacactaatgtcgtacttcggccgtcgcaccctctacgtcggcggtctatttatcctagccatcgtattattcgtcatcgggttcgtctccatcgctccatccacacccgccatctcctgggccaccggctccatgcttctcgtctatacctttatctacgactcctccatcggccccgtctgcttcgccctcgtctccgaaatcccatcctccagactccgtaccaagaccgtcgtgctggcccgaaacgtctacaatatcctcaacctcgtcaccggaatcattatcccgtatatgctgaacgtcgacgcatggaactggcgcggtaaatcaggtttcttctggggtgcactctgcgtttgctgcttgacgtggtcgttcttccggctgccagaacctaagggacggtcgtatgctgagttggatctgttgtttgagagaggggtgaagacgagggagtttgcgactgctaagactgggttggaggatttgcagggcgaggggaaggatgatatggtgaaggtttga

SEQ ID NO: 490 - protein, 539 aa, Aspergillus oryzae
MTPEKAAMSEHIENDNPARHDDIDLPNSSEAHTAIAKEREMTLWQALRLYPKAVAWSLLFSCAIIMEGYDVVLIGSFLAFPAFNEKYGGLMSDGTYGLEARWQAGVNNAMACGQIIGLFLNGLVSERLGYRKTLMACLAATVGFVFILFFAPNIQTLVVGELFMGIPLGVYQTLVVTYASEVCPVALRAYLTTYVNLCWVLGQLLASGVLKGLAERTDQWAYRIPFALQWIWPIPIFIGVFLAPESPWWLVRQDRREDAVKALKRLTSANADFNAEETVAMIVYTDALERRAETGTSYLDCFKKSDLRRTEISCCAWAAQSLCGAGLMGYSTVFYQRAGLAVSQSFTMSLVQYALGVVGTFVSWTLMSYFGRRTLYVGGLFILAIVLFVIGFVSIAPSTPAISWATGSMLLVYTFIYDSSIGPVCFALVSEIPSSRLRTKTVVLARNVYNILNLVTGIIIPYMLNVDAWNWRGKSGFFWGALCVCCLTWSFFRLPEPKGRSYAELDLLFERGVKTREFATAKTGLEDLQGEGKDDMVKV

SEQ ID NO: 491 - DNA, 1725 bp, Oryza sativa
  CDS (1)..(1725)
atggtgaaaggagctcacaaaatgggagaaatgtctgacctttggagagaggctcagtgtttggagactgtcatttgcactgttttatccaatttggagatagtgctaatcgaaatcgacaatggtgtgcaacctagtgcctaccattacatagtctcaaagaaagttacacaaggagaagaaggagaagacgacgcagctgccatgggagaagagaagcagaatgacgagaggaagaacaagtacgccgtcgggtgctccatcatcggctccatcatctcggtcctcatgggctatgacactggtgtgatgagtggggcgatgctgttcatcaaggaggacctgaagacgaacgacacgcaggtgcaggtcctcgccgggatcctcaacgtgtgcgcgctcgtcggctccctcaccgccggccgcgtctccgactgcgtcggccgccgcctcaccatctccctcgccgcctgcatcttcctcgtgggctccgtcctcatgggcctcgcgcccaacttcgccacgctcctcgccggccgctgcgtcgccggcgtcggcgtcggctacgcgctcatgattgcgccggtgtacgccgccgagatcgcctccgccgacatccgcggctcgctcacctcgctcccggagatctgcatcagcttcgggatactcatcggctacgtggccaactacctgctcgccaagctgccgctggtgtacgggtggcgcgccatgctcggcctcggcgcgctcccgagcgccgcgctcgcgctcggcgtgctcgccatgcccgagtccccgcggtggctcgtcgtccagggccgcgccgaggaggcgctctccgtgctccgccgcgtgtgcgacaggcccagcgaggccgacgcgcggctcgcggagatcaaggccgcggcggggctcgccgacgacgacggcgccgccgccaacgcgggcagcggcggcaagggcgtgtggagggagctgttcctgcacccgacgccgccggtgcggcgcatcgtcatcgccgccctggggatccacttcttccagcacctcaccggcatcgaggccgtggtgctctacagcccgcgcatcttcaaggcggccggcatcgccagccgcaactcggtgctcgctgcgaccatcggcgtgggcgtcaccaagacggcgttcatcctcaccgccatcctcctcgtcgaccgcataggccggcggccgctctacctgtcaagcctcgccggcatcatcgcctcgctcgcctgcctcggcatgggcctcaccgtcatcgagcggtcgccgccgcaccactcgccggcgtgggccgtcgtgctcgccatcgccaccgtgttcaccttcgtcgcctccttctccatcggcgtcgggccgatcacctgggcctacagctcggaggtgtacccgctccgcctccgcgcgcagggcgccagcgtcggcgtcgccatcaaccgcgtgatgaacgccggcgtgtccatgacgttcgtgtcgctctacaaggccatcaccatcggcggcgccttcttcctcttcgccgggctcgccgtcgccgccgccacgttcttctacctcctgtgcccggagacgcagggcaagccgctggaggagatcgaggaggtgttcagccaggggtggcgcgcgcggcgccgggcgtcggcggcggccgtcgagatgccggcctccggcggcggcggcggcggcggcgccccgatggcgtag

SEQ ID NO: 492 - protein, 574 aa, Oryza sativa
MVKGAHKMGEMSDLWREAQCLETVICTVLSNLEIVLIEIDNGVQPSAYHYIVSKKVTQGEEGEDDAAAMGEEKQNDERKNKYAVGCSIIGSIISVLMGYDTGVMSGAMLFIKEDLKTNDTQVQVLAGILNVCALVGSLTAGRVSDCVGRRLTISLAACIFLVGSVLMGLAPNFATLLAGRCVAGVGVGYALMIAPVYAAEIASADIRGSLTSLPEICISFGILIGYVANYLLAKLPLVYGWRAMLGLGALPSAALALGVLAMPESPRWLVVQGRAEEALSVLRRVCDRPSEADARLAEIKAAAGLADDDGAAANAGSGGKGVWRELFLHPTPPVRRIVIAALGIHFFQHLTGIEAVVLYSPRIFKAAGIASRNSVLAATIGVGVTKTAFILTAILLVDRIGRRPLYLSSLAGIIASLACLGMGLTVIERSPPHHSPAWAVVLAIATVFTFVASFSIGVGPITWAYSSEVYPLRLRAQGASVGVAINRVMNAGVSMTFVSLYKAITIGGAFFLFAGLAVAAATFFYLLCPETQGKPLEEIEEVFSQGWRARRRASAAAVEMPASGGGGGGGAPMA

SEQ ID NO: 493 - DNA, 1440 bp, Zymomonas mobilis
  CDS (1)..(1440)
atgaataacaattcagaaatagaaaatgatacccaaactaacgttcgaaataccgtatcagattttattggttcacaattatatttgctcggtaccgttctggtaacggctattgctggctttctttatgggtatgacacgggtattatttcaggcgcattgatgaatattgcgcatgacttcaaactggatgcccatcaacaagaaattattactagtattctcttatttggtgccgtgatcggctctctggtctgtggtcgactgtctgcttttgttggccgccgtcatatgattatgattgtgaccgctattttcggtttcagtgtgattgccgcagacgcccccacggctttctggttaggtgcagcccgcttggttctcggcttcgccgttggcggatcatcacaaattgtgcctgtctatatcgccgaattggcaccagctgaccaacgtggtcgcatggtaaccttctataatatttcgattggtcttggtattctggcggcgggtattgtcggcgctttccttcaggaagaatggacatggcggacaatgttcagcgtcgcggctattccggcggctgttttattctgctcaatgatgatgcttcccgaaagtcctcgctggttggtgcggcaggaacgcgttgaagaagcgcgtgatatgctggataccgtccgcgaaacagatcacgaagtcaccaaagaacttcgctctatcaagaaaaatcagcaaccggacgaaggaagcggctcaagatggctggaaagcttggcacagccttgggtgcgccctgccctgatcgcaggtctaggcgtcgctgcttttacccagctttccggcattgaaatgatgatctattataccccgaccttcttgcgggattccggcttcactgaaaaaatggcctattattcggctttgggtgtcgcccttatttatgtcatcatgacaaccatcgggaaattgttggtcgatcatgtcggtcgtcgtaaattagctttatgcatgatgccgctggccgctctcagcctttttgcattgggtattgcctttaacctgccggggggtgcttcggaacatcgctggcttattcttgcctgtctgtttgcctttatggttttcaatgcgggtggtattcaggttatcggctggcttattggttcggaagtctatccgctctgtattcgcgctcgtgccaccagccttcacgctgcgactttgtggggttccaacctcattttaacgtcaactgcgttaacgatgaccagcttattgggcatcggtggttccatgtggttctatggcggtctgaatgctttgggttttgttttcgtctatttcatggtgccggaaaccaaaggccgcagtttggaagaaatcgaatccagcctgaaagatggcagcttcttaccgagtaaaaaagcctccgcctaa

SEQ ID NO: 494 - protein, 479 aa, Zymomonas mobilis
MNNNSEIENDTQTNVRNTVSDFIGSQLYLLGTVLVTAIAGFLYGYDTGIISGALMNIAHDFKLDAHQQEIITSILLFGAVIGSLVCGRLSAFVGRRHMIMIVTAIFGFSVIAADAPTAFWLGAARLVLGFAVGGSSQIVPVYIAELAPADQRGRMVTFYNISIGLGILAAGIVGAFLQEEWTWRTMFSVAAIPAAVLFCSMMMLPESPRWLVRQERVEEARDMLDTVRETDHEVTKELRSIKKNQQPDEGSGSRWLESLAQPWVRPALIAGLGVAAFTQLSGIEMMIYYTPTFLRDSGFTEKMAYYSALGVALIYVIMTTIGKLLVDHVGRRKLALCMMPLAALSLFALGIAFNLPGGASEHRWLILACLFAFMVFNAGGIQVIGWLIGSEVYPLCIRARATSLHAATLWGSNLILTSTALTMTSLLGIGGSMWFYGGLNALGFVFVYFMVPETKGRSLEEIESSLKDGSFLPSKKASA

SEQ ID NO: 495 - DNA, 1766 bp, Apium graveolens var
  CDS (17)..(1558)
ggcacgaggagcttctatgattaccggcgaagtttccgtcgattcatatgatactaacaagcctaaacctaaaaggaataagtatgcttttgcttgtgctcttttagcttccatgaattccatcttactcggctatgacaccggagtgttgagtggagcatcaatatacataaaggaagatctccatttctccgacgttcaaatcgaaataatcatcggaatcatcaacatctactctcttcttggttcggccatagccggaaggacctcggactggataggcagacgttacaccatggtactagctggtatcatattttttctaggagccattttcatggggcttgctacaaactttgcctttctcatgtttggtcgctttgttgctggaattggtgtcggttatgccatgatgatcgctcccgtctacactgccgaggttgctccgtcgtcttcccgtggtttcctcacttcttttcctgaggttttcattaattctggtgtgttgctcgggtatgtatccaactttgcatttgccaagtgcccactttggttaggctggagaattatgctgggaattggagcatttccttcagttgccttggccataattgtgttatatatgccagagtccccacgttggctcgttatgcagggtcgacttggtgaagcgaggactgtacttgagaaaacttctacttccaaagaagaagctcaccaaagactgtctgatattaaggaagctgctgggattgataaagattgtaatgacgatgttgttcaagttccaaaacgtaccaaagacgaagcagtgtggaaagaattgattcttcaccctacaaaacctgttcgccacgctgcaattacgggtattggtattcatttcttccaacaggcttgtggtattgatgctgttgttttatacagccctcgaatttttgaaaaagctggtatcaaaagtaatagtaaaaagctccttgcgacaattgctgttggagtctgcaaaacagtctttattctgatatcaacgtttcagctggacaaaattggacgacgccccctgatgctaacaagtatggggggtatggttattgctctatttgtactggcaggctcattgacggttattaacaaatcacatcatactggtcattgggctggtggtttggcaatatttacagtgtatgcttttgtgtcgatattttcaagtggcatgggtccaattgcttgggtctatagctccgaggtgttccctttgaggctaagagctcaaggttgtagtatcggagtggcagttaaccgtggcatgagtggcataattggaatgacatttatatcgatgtacaaagccatgactattggtggtgcattccttttatttgctgtggttgcatctatcggatgggtctttatgtacacaatgttccccgagacacaaggtagaaatctcgaagaaattgagttattgtttggcagctactttggctggaggaagacattgaaggatttgaaggcaaaagaagctgctgaagcaaagagtcgcgagagtgaagtttagcagtcagatgaatttagggttcaaagatgttatattagctctgtgtagagggtagttttagagaagcccttagtatgtgttggagtatgtgtgattattaaccatcacccgataatttagaataagggtgtcaaagaacaattacccatttcttatgtggtaatctattgaaaagaatttgcccaatggtaaaaaaaaaaaaaaaaaa

SEQ ID NO: 496 - protein, 513 aa, Apium graveolens var
MITGEVSVDSYDTNKPKPKRNKYAFACALLASMNSILLGYDTGVLSGASIYIKEDLHFSDVQIEIIIGIINIYSLLGSAIAGRTSDWIGRRYTMVLAGIIFFLGAIFMGLATNFAFLMFGRFVAGIGVGYAMMIAPVYTAEVAPSSSRGFLTSFPEVFINSGVLLGYVSNFAFAKCPLWLGWRIMLGIGAFPSVALAIIVLYMPESPRWLVMQGRLGEARTVLEKTSTSKEEAHQRLSDIKEAAGIDKDCNDDVVQVPKRTKDEAVWKELILHPTKPVRHAAITGIGIHFFQQACGIDAVVLYSPRIFEKAGIKSNSKKLLATIAVGVCKTVFILISTFQLDKIGRRPLMLTSMGGMVIALFVLAGSLTVINKSHHTGHWAGGLAIFTVYAFVSIFSSGMGPIAWVYSSEVFPLRLRAQGCSIGVAVNRGMSGIIGMTFISMYKAMTIGGAFLLFAVVASIGWVFMYTMFPETQGRNLEEIELLFGSYFGWRKTLKDLKAKEAAEAKSRESEV

SEQ ID NO: 497 - DNA, 2041 bp, Mesembryanthemum crystallinum
  CDS (118)..(1785)
aaataacccatcttactctgagcgatcaagcgattagtgaaagataaaacaaggaaattcgatcatctctgattgcgttaacccacttggaattttgtctataatttaggtttaaagatgcaagcatcaagttgtctggtgaaagggaacttgggttttgaagttcagaaccggagaagaggggttcttgctgtggctgggcttggaggatttaagaattcaagtccaattcttagcagtaacttgagatttgtgaatggtgttattaataagaagagtagttcttgtaaattgactacttctgggtcggttttaatgggtgctggattagcaagaatgggtcttgatcatgtcttccagtccactgccaagtacagatcagtcaaggctcaagctgcttctggagattatgaagatcctgctccagtcaaatttcaaggcaaatcttctgcatcagttctgccgtatgttggtgttgcttgcttaggagcaattttgtttggatatcaccttggtgtagtaaacggagctctcgagtatttgtctcctgatctgggtattgctggcaatacggtcttacaaggatgggttgtgagtatactgcttgctggtgcaactgtgggctcatttactggtggatctttggctgataagttcggaagaacaagaactttccagttagatgcaattcctctggctataggagcctatctttgtgctacagcacagagtgtacagacaatgatgattggtcggttactttgtggcattggaataggcatatcatctgctttagttccactgtacatctctgagatctcacctactgaaattcgaggtgcacttggttctgtcaaccagctttttatttgcattgggattcttgcagcattggtggctggattgcctttggcaggaaaccctttatggtggagaacaatgtttggtattgcagctattccctctgttctattggctcttgggatggctatgtgtccagaaagtccgaggtggctttttcagcaaggaaaagttgcagaagctgagaaagcttcggcagccctatatgggaaagaaagagttcctgaagttatgaatgatttgaaagcatctgttcagggttcttctgaaccagaagctggctggtttgatctattcagtagccgctacaggaaagtggtaagcgttggtgctgcacttttcctgttccagcagatggcaggaatcaatgctgtggtatattactccacttctgtattccgcagtgctggaattgaatctgatgttgcagctagtgctttggttggggctgcaaatgtcttcggcactgctatcgcctcttctcttatggataggcaaggaagaaaaagcctactgattacaagtttctcaggaatggctgcttcaatgttgttgctgtcgctttcattcacatggcctgttctagcaccatattctggcacactcgctgtcctggggactgttctctacgtgctctccttctcgcttggtgctggtcccgtgcctgctctattacttcctgaaatttttgcctccagaatccgagcaaaagcagttgctttgtctctgggaatgcattgggcatctaatttcgtgattggtctctacttcttgagtgtggtgaccaagtttggaataagcagagtttatctgggtttcgcgtcagtttgtatgctagccgtcttgtacatagctggcaacgttgtagaaacaaaaggccgatcactcgaggaaatagagcgtgctttaagcccagctgtttgatgagtgaagatggtgtcaacagtccctagattttggagacatactagaactttagctcaaaacccttgtaaacagctgtagtgttgatatctctgtttatttatgcagtctttctccttggttatctggcttggcatcatcatctccggcctttccctgggttgattcttctctaacttaaccaaacattcaatgtaatgtttcttttgccaattcatcatccagatactcctaccgtaaaaaaaaaaaaaaaaaa

SEQ ID NO: 498 - protein, 555 aa, Mesembryanthemum crystallinum
MQASSCLVKGNLGFEVQNRRRGVLAVAGLGGFKNSSPILSSNLRFVNGVINKKSSSCKLTTSGSVLMGAGLARMGLDHVFQSTAKYRSVKAQAASGDYEDPAPVKFQGKSSASVLPYVGVACLGAILFGYHLGVVNGALEYLSPDLGIAGNTVLQGWVVSILLAGATVGSFTGGSLADKFGRTRTFQLDAIPLAIGAYLCATAQSVQTMMIGRLLCGIGIGISSALVPLYISEISPTEIRGALGSVNQLFICIGILAALVAGLPLAGNPLWWRTMFGIAAIPSVLLALGMAMCPESPRWLFQQGKVAEAEKASAALYGKERVPEVMNDLKASVQGSSEPEAGWFDLFSSRYRKVVSVGAALFLFQQMAGINAVVYYSTSVFRSAGIESDVAASALVGAANVFGTAIASSLMDRQGRKSLLITSFSGMAASMLLLSLSFTWPVLAPYSGTLAVLGTVLYVLSFSLGAGPVPALLLPEIFASRIRAKAVALSLGMHWASNFVIGLYFLSVVTKFGISRVYLGFASVCMLAVLYIAGNVVETKGRSLEEIERALSPAV

SEQ ID NO: 499 - DNA, 1530 bp, Pichia angusta
  CDS (1)..(1530)
atggtcaaacttcaatcgtattaccctctcttccgccctgggaagccaacccaacatatattgacggtcacctgcatgttcgcatttatcctgtatgggtttgaacagggagcattagcaaatgtgcagaacgaggtcgtttttcaaagccaatttggccatccccaaggaaattatctcggaattatagttgcgatctacaacctaggaagtttttttggtagcatggcaaacatctggatcggtgataagttaggcagaaagcgggccatctggctgggattcaccttggtgaccattggagtcattctgcaatgcagctcgtacagtgtggttcaactcttcatcggaagattcatttctggcctcggaacaggatttgagacaagtacaacaccgatgtatcagtctgaagtatgccacgagaaccatagaggtggcctggtggccgcagaacctcaaggtgtcgcatttggtatcactgtgtcgtactggattggctacggttgcagcaaaagaacagatcaggtttcatggagacttccagtaggtattcagatgcttttcgcggtactcgggattgtgatgttattcttctgccctgaatctccaaggtggttaatgaaagttggaagaacacaagatgcaaggtactcactagcaacgattaatggtgtgccagaggatcatccgcggatttctgccatcattgacgacattctctatcttcaaaaaatcgaaggttcaggcgataaaatcacctggggtgatattcttatgggcagagatgccatgcacggccggtttagaatcatgcttactgtatttggtcagttctggaaccagttcggaggcatcaacttggtggtttactatgtgccaatggtgttagagaataacgttggactaagttcaaacctcgcgacaattctgggtggttgcattatgctgacctttttcgcaaccggatttatccctacgctgtttttggataagatgggaagacgttttgccatggcatccggttccgctggacaatgtatttcaatgcttctcgtcactatccttttgcgtgttggtaccaaagaatcgtcagtcgccgcaactgcattcttcttcacgtttattgggttctttggctatgctatgaactgcgttccatgggtttatgctgctgaggtgctgccattgcaacttcgtgccaaaggtaatgcaatcagtgtcgcaacgaattggatttgcaattttgtgattgcgatgatcactccgatcatgactcaaaatctggcttggaagacatacattgtcttcaccttgacgaacgctgttgcaactattcacttttttgtcttctatcctgaaacctccaagagaacccttgaagacattgagaacatattcctcgattctcataccatcttctacggtctccaagagattaagaggactccaacagaacgccttacggaaaagctcatcgatatcgagcacgttgaaagtgtagaagagggctcacccgagagcgactag

SEQ ID NO: 500 - protein, 509 aa, Pichia angusta
MVKLQSYYPLFRPGKPTQHILTVTCMFAFILYGFEQGALANVQNEVVFQSQFGHPQGNYLGIIVAIYNLGSFFGSMANIWIGDKLGRKRAIWLGFTLVTIGVILQCSSYSVVQLFIGRFISGLGTGFETSTTPMYQSEVCHENHRGGLVAAEPQGVAFGITVSYWIGYGCSKRTDQVSWRLPVGIQMLFAVLGIVMLFFCPESPRWLMKVGRTQDARYSLATINGVPEDHPRISAIIDDILYLQKIEGSGDKITWGDILMGRDAMHGRFRIMLTVFGQFWNQFGGINLVVYYVPMVLENNVGLSSNLATILGGCIMLTFFATGFIPTLFLDKMGRRFAMASGSAGQCISMLLVTILLRVGTKESSVAATAFFFTFIGFFGYAMNCVPWVYAAEVLPLQLRAKGNAISVATNWICNFVIAMITPIMTQNLAWKTYIVFTLTNAVATIHFFVFYPETSKRTLEDIENIFLDSHTIFYGLQEIKRTPTERLTEKLIDIEHVESVEEGSPESD

SEQ ID NO: 501 - DNA, 1864 bp, Spinacia oleracea
  CDS (61)..(1716)
ggcacgaggcgatcgctgcttaatcaatttcaactttcggtttagaaaaagagggggaaaatgcaggcgtcaacttttatggtcaaaggcaatttgggttttgaagttcagaaccgtagagtggctgggcttgctgggttgaaagggttaagctcaatccgttccaataatctaagttttgtgaatgttaatgacaataattataagtctaatccctgtaaattgagttgtgggtccctttcgatgggtgctggatttgcaagattgggtcttgatcatgtcatgaagtcctcacccaagtacagatcagtcaaggctcaagctgcttctggaggagatcttgaagatgccactcctgtcaaatatcaaggcaaatcttctgcatcagtgttgccgtatgttggtgttgcttgtttgggagctattttgtttggatatcaccttggtgtggtaaatggagctcttgactacctatctgcggatttagctattgctggcaatactgttttacaaggatgggttgtgagcatattacttgctggagcgactgtaggttcatttactggcggatctttggctgataagtttggaaggacaaagaccttccagttagatgcaattcctcttgcaataggagcttatctctgtgccacagcacaaaatgtacagataatgatgattggtcgtttactttgtggcattggaattggcatatcatctgccttagttccgttatacatttctgagatttcgccaactgaaattcgaggtgcacttggttctgtcaaccagctttttatatgcattggtattcttgcggctttggttgctggattgcctttagcaggaaaccctttgtggtggaggacaatgtttggtattgcaacagttccctctgttctcttggctcttgggatgggcttctgtccagaaagccctaggtggctttttcagcaaggaaaaattgttgaagcagaaaaggccgtagcagccctctatggaaaagaaagggttccggaggtgattaatgatttgagagcatctgttcaaggttcttctgaaccagaagctggctggtttgatctgttcagtagccgctacaggaaagtggtaagtgttggtgctgcacttttcttgttccagcaaatggcaggaatcaatgctgttgtatattactccacatctgtattccgaagtgctggaattgcatcagatgttgccgctagtgcccttgttggagcatcaaatgttattggcactgctgtcgcctcttctttaatggacaagcaaggaagaaagagcctactgatgacaagtttctcaggaatggctgcctcaatgttgttgctgtcactatcgttcacatggaaggctctagcaccttactcgggcacacttgccgttgtgggaactgttttatatgtcctttccttttcacttggcgctggtcctgttcctgctcttctacttccagagatcttcgcatccagaatccgagcaaaagcagtggctttgtcactgggaatgcattgggcgtcaaacttcgtaattggcctttatttcttaagtgtggtgaccaagtttggaatcagcaaagtgtatttggggttcgcgtcagtgtgtgtgcttgccgtgttgtacatagctggtaacgttgttgaaacaaaaggacgatcacttgaggaaatagagcttgctctaagtccagctgtttagtttggaggatacagtttttctgtttttttgatctatagagaattatgttaataattcccggatttaggagtttgatgctagttttcatgctcgttggcacattcatgtccagacagttgtactatcaatgtcagaaattcctcgtgcc

SEQ ID NO: 502 - protein, 551 aa, Spinacia oleracea
MQASTFMVKGNLGFEVQNRRVAGLAGLKGLSSIRSNNLSFVNVNDNNYKSNPCKLSCGSLSMGAGFARLGLDHVMKSSPKYRSVKAQAASGGDLEDATPVKYQGKSSASVLPYVGVACLGAILFGYHLGVVNGALDYLSADLAIAGNTVLQGWVVSILLAGATVGSFTGGSLADKFGRTKTFQLDAIPLAIGAYLCATAQNVQIMMIGRLLCGIGIGISSALVPLYISEISPTEIRGALGSVNQLFICIGILAALVAGLPLAGNPLWWRTMFGIATVPSVLLALGMGFCPESPRWLFQQGKIVEAEKAVAALYGKERVPEVINDLRASVQGSSEPEAGWFDLFSSRYRKVVSVGAALFLFQQMAGINAVVYYSTSVFRSAGIASDVAASALVGASNVIGTAVASSLMDKQGRKSLLMTSFSGMAASMLLLSLSFTWKALAPYSGTLAVVGTVLYVLSFSLGAGPVPALLLPEIFASRIRAKAVALSLGMHWASNFVIGLYFLSVVTKFGISKVYLGFASVCVLAVLYIAGNVVETKGRSLEEIELALSPAV

SEQ ID NO: 503 - DNA, 1822 bp, Arabidopsis thaliana
  CDS (65)..(1684)
gttgttagtctactcattaatcctcacaactctctatctctctctcgccccattctctatcataatgacaggtgccacaccggaaaaccgaacggccccgtcgccaccaccggtgaaacatgtgccggagtcagttctgccggctaaaccaccaaagaggaacaattatgcattcgcgtgtgctatcttagcttccatgacttctatcctccttggttatgatataggagtgatgagtggagcaatgatttatataaagagagatttgaagattaatgatttacaaatcgggattctcgctggaagcctcaacatctattcacttataggatcttgcgccgccggaagaacctctgactggattggtcggcgttacactatcgtgttggctggagccatattcttcgccggagctatccttatgggattgtcccctaactacgctttcctcatgttcggaaggttcatcgccggtatcggcgtcggatatgctctcatgatcgcaccagtttataccgccgaagtctctccggcatcttcccgcggcttcctcaattccttccccgaggtgtttatcaacgccggaattatgctcgggtacgtatcaaatctggctttctcgaacttgccgttgaaggtaggatggagactgatgctcggaatcggagccgtaccttccgtgatactcgctatcggcgttctcgctatgccggaatctccacggtggctcgttatgcaaggccgtctcggtgatgccaagcgcgttctggacaaaacctctgattcccccaccgaagcaactctccgtctcgaagacatcaaacacgccgctggtattcccgccgattgccacgacgacgtcgttcaggtgtcgaggaggaacagtcatggagaaggagtttggagagagcttttaatccgaccaacaccagccgtgcgtcgtgttatgatcgccgcaatcggaatccatttcttccagcaagcttccggtatcgacgcggtggttctcttctcaccgcgaattttcaaaaccgccggactcaaaaccgatcaccaacagcttctagcgactgtagcagtaggagtagtgaagacatcattcatactagtcgccactttcttactcgacagaatcgggagaagaccattgcttctaaccagcgtaggaggaatggtactatctctagcagcgttagggacttctctaacgattatagaccagtcagagaagaaagtgatgtgggctgtggttgtagctatagctacggtgatgacttatgtagctacgttttcgataggagctggaccgataacttgggtttatagctcggagatattcccgttgaggttgagatcacagggctcgagtatgggtgtggtggtgaacagagtgactagtggtgtgatctcgatatcgtttcttccaatgtcgaaagcgatgactactggtggagcgttttacttgtttggagggattgcgactgtggcttgggttttcttttacactttcttgccggagacgcaagggaggatgcttgaggatatggatgagcttttcagtggtttcaggtggagagattccaagagtaagcctaagggtaaccccgagaagacggtaccgaatcccgaggttgagattggatcaaacaagcagtggaaggaaggagacacacaaagttcgtaggaaatttgatcagatatgtaatttgtatggtatgtgggtttaatgataaaacgaacaaattagcgtaacaaatttagtatgtgtgactgttttcgtaatgagagttgcaataatttaactaatataattactgagatg

SEQ ID NO: 504 - protein, 539 aa, Arabidopsis thaliana
MTGATPENRTAPSPPPVKHVPESVLPAKPPKRNNYAFACAILASMTSILLGYDIGVMSGAMIYIKRDLKINDLQIGILAGSLNIYSLIGSCAAGRTSDWIGRRYTIVLAGAIFFAGAILMGLSPNYAFLMFGRFIAGIGVGYALMIAPVYTAEVSPASSRGFLNSFPEVFINAGIMLGYVSNLAFSNLPLKVGWRLMLGIGAVPSVILAIGVLAMPESPRWLVMQGRLGDAKRVLDKTSDSPTEATLRLEDIKHAAGIPADCHDDVVQVSRRNSHGEGVWRELLIRPTPAVRRVMIAAIGIHFFQQASGIDAVVLFSPRIFKTAGLKTDHQQLLATVAVGVVKTSFILVATFLLDRIGRRPLLLTSVGGMVLSLAALGTSLTIIDQSEKKVMWAVVVAIATVMTYVATFSIGAGPITWVYSSEIFPLRLRSQGSSMGVVVNRVTSGVISISFLPMSKAMTTGGAFYLFGGIATVAWVFFYTFLPETQGRMLEDMDELFSGFRWRDSKSKPKGNPEKTVPNPEVEIGSNKQWKEGDTQSS

SEQ ID NO: 505 - DNA, 1653 bp, Pichia stipitis
  CDS (1)..(1653)
atgtcctcacaagatttaccctcgggtgctcaaaccccaatcgatggttcttccatcctcgaagataaagttgagcaaagttcgtcctcaaatagccaaagtgatttagcttccattccagcaacaggtatcaaagcctatctcttggtttgtttcttctgcatgttggttgcctttggtggcttcgtattcggtttcgataccggtacaatttccggtttccttaatatgtctgatttcctttccagatttggtcaagatggttctgaaggaaaatatttgtctgatatcagagtcggtttgattgtttccatttttaacattggttgtgcaattggtggtattttcctttctaagataggagatgtttacggtagaagaattggtatcatttcagctatggttgtatacgtcgtcggtattatcatccagatctcgtcccaagacaagtggtaccaacttacaattggacgtggagttacaggattagctgttggtactgtttcagtgttgtctccaatgttcattagtgaaagtgctccaaagcatttgagaggtactttggtatactgttaccaattatgtatcaccttaggtattttcattggttactgtgtcacttatggaaccaaagatttaaatgattcaagacaatggagagttcctttgggcttatgcttcctttgggctattttcttagttgtcggtatgttggctatgccagaatccccaagattcttaattgaaaagaagagaatcgaagaagccaagaagtcccttgcaagatccaacaagttatctccggaagatccaggtgtctacactgaacttcaattgattcaggctggtattgacagagaagctgctgcaggttctgcttcgtggatggaattgatcactggtaagccagctattttcagaagagttatcatgggaattatcttgcagtctttgcaacaattaactggtgtcaactatttcttctattacggaactacaatcttccaagctgttggtttgcaagattccttccagacttccatcatcttaggtacagtcaactttctttctacatttgttggtatttgggccattgaaagatttggaagaagacaatgtttgttagtcggttctgctggtatgttcgtttgtttcatcatttactccgttattggtacaactcatttgttcattgatggagtagtagataacgacaacacccgtcaactgtctggtaatgctatgatctttatcacttgtttgttcatcttcttctttgcctgtacatgggctggaggtgtttttaccatcatttccgaatcatatccattgagaatcagatccaaggcaatgtctattgctactgctgctaactggatgtggggcttcttgatttccttctgcactccattcattgttaatgccatcaacttcaagttcggctttgtgtttactggttgtttactcttttcgttcttctatgtctacttctttgtcagcgaaaccaaaggtttgtcgttggaagaagttgatgagttgtacgctgaaggtattgcaccatggaagtctggtgcatgggttcctccttctgcccaacaacaaatgcaaaactccacttatggtgccgaagcaaaagagcaagagcaagtttag

SEQ ID NO: 506 - protein, 550 aa, Pichia stipitis
MSSQDLPSGAQTPIDGSSILEDKVEQSSSSNSQSDLASIPATGIKAYLLVCFFCMLVAFGGFVFGFDTGTISGFLNMSDFLSRFGQDGSEGKYLSDIRVGLIVSIFNIGCAIGGIFLSKIGDVYGRRIGIISAMVVYVVGIIIQISSQDKWYQLTIGRGVTGLAVGTVSVLSPMFISESAPKHLRGTLVYCYQLCITLGIFIGYCVTYGTKDLNDSRQWRVPLGLCFLWAIFLVVGMLAMPESPRFLIEKKRIEEAKKSLARSNKLSPEDPGVYTELQLIQAGIDREAAAGSASWMELITGKPAIFRRVIMGIILQSLQQLTGVNYFFYYGTTIFQAVGLQDSFQTSIILGTVNFLSTFVGIWAIERFGRRQCLLVGSAGMFVCFIIYSVIGTTHLFIDGVVDNDNTRQLSGNAMIFITCLFIFFFACTWAGGVFTIISESYPLRIRSKAMSIATAANWMWGFLISFCTPFIVNAINFKFGFVFTGCLLFSFFYVYFFVSETKGLSLEEVDELYAEGIAPWKSGAWVPPSAQQQMQNSTYGAEAKEQEQV

SEQ ID NO: 507 - DNA, 2408 bp, Drosophila melanogaster
  CDS (316)..(1839)
agtcgcgctcccgactccaacgctgccgcaccgtaccgctttgattccaactcaatcccgcgtgcactgctggcggtgcgccgtttacaaacaattgtggtttagaattccgaactgctggggggatcgcaaactaagaatccacactcggtgtccgttgcacaacactgtttcggaacccgattacctgccttaccaccaattgctaacaattgttctaaccgtgttaacacgcacacatcgtaactgtgtgctccgagtgccttgggaagtgtttcctcaaaaagtggtgattaccaggcaaagtccactgttatggccaccaaaagccagccggcggaggctcaacaattgtacccgcagcccaacagagtggaactgctctcggcgcagacggatcccagccagaaaccgcgatggggcaacctcctgctgctggtggccctggcaaccacatttggcggcgccgtttccaccggctactgcataggcgttatcaacgccccctcgaagctgatgaaagtttggtgtaatcagaccctgcacgacacctacgggagtaacctcagcgcaggcggtctagatctcttgtggtcgtgcgtcgtttctgtgttcctggtcggaggcgccatcggttcgctgggcggagctggagcagccaataaatttggcaggaaagcatgctttcttatctgcggcgccctgttcaccgtgggagcggtgctattcttcttctgccgagcagccagctccgtggagatgctggtgatcggaaggtttgttgtgggccttgcctccggcctcgtgaccgccaccctgcccatgtacttgtccgaggtggctccaatggctctgcgcggcactctgggagtcttcattgccgtgggcgtgacggggggcgtggtagtggggcaggtctgcagtttggccaatgtcttcggtactgaggatctctggcactacgccctgactgcctacatgttccttatcctggtctgctacctgccatcatacctctttcccgagagtcccaagttcctgtatattgttaaaggaaatcgcgcagctgccaagcgggagcttcaacggctgcggggcaaggatgcggaggagcttatcgcccaagaaatggccgagatggaggcagagtctaatgccaaggtgcagacgagcagcttttgcgatgtgcttcgcgatcctcgtctcacattgcccctgatcattgtctgctgcttccatggtggtcagcagttgtcgggcattaatgcgatattttattactcggtcagcatcttcgaaaaggccggactgtccacagtggatgctcaatgggccaatttgggcgctggttgcctgaatctagctgtctctttgttgggaccttggctaatggccaagtgcaatagacgaaccttgatgatgttctcctgtgctctttgctccgtttttctgttcaccatagcctttgtgttgttttatattgaccaagttagctggtttgccattgcctgcatcgtctgcatcatgggttacatattcttctaccaattcgggctgggccccattccctactttattggcgcagaactgttcgaggtggctccccgctccgtggccatgtcgatgggcagcttggcctcgtggacgtgcaatttcataattggcatatcgttccccctgctgcagaacgcatggggcgccttcgtcttcctgcccttctccattacctgcgtgctgctcttcttgcttacgaaattctatctgccggaaacgcggggacgcgatccctcagaggtggctcccctcgtatcgaagggcttccgctccaaagtcaaataggacatagcccagtgggctcaacttccaattagccataagtagccggtggtttgtggtaatacggtttaacttcatgtgtgcagtgggtcgcttaatgattcgtccatgtcgtgtgccttttgtatgtgtcgacaataagccgaaatccacgttgttcagggataaattactcttactaaatgtaatttcccgcctagcctgtaagttcttttgtacaaaccaataaatgcgaaaattgatctaactttaagagtcaccctgtaagaaagctttgagcgctgcgtcctcttatcactgcacaagttcaattaaaacgccttgggacggaccgccaagtaatactctgttaattagatttattgttgaacaagagcgacgcggaatcactggatactcttccacggcgggtgcgttagttaattaagtgccaacgcttgaattgtttagcaataagtgcttagcatttggaaggcaaatatatcctgatctccctatatatatatgcctgtgggtaggttaataaaatgttgtattttccactacgaaagatctctgatcaattcgtaaga

SEQ ID NO: 508 - protein, 507 aa, Drosophila melanogaster
MATKSQPAEAQQLYPQPNRVELLSAQTDPSQKPRWGNLLLLVALATTFGGAVSTGYCIGVINAPSKLMKVWCNQTLHDTYGSNLSAGGLDLLWSCVVSVFLVGGAIGSLGGAGAANKFGRKACFLICGALFTVGAVLFFFCRAASSVEMLVIGRFVVGLASGLVTATLPMYLSEVAPMALRGTLGVFIAVGVTGGVVVGQVCSLANVFGTEDLWHYALTAYMFLILVCYLPSYLFPESPKFLYIVKGNRAAAKRELQRLRGKDAEELIAQEMAEMEAESNAKVQTSSFCDVLRDPRLTLPLIIVCCFHGGQQLSGINAIFYYSVSIFEKAGLSTVDAQWANLGAGCLNLAVSLLGPWLMAKCNRRTLMMFSCALCSVFLFTIAFVLFYIDQVSWFAIACIVCIMGYIFFYQFGLGPIPYFIGAELFEVAPRSVAMSMGSLASWTCNFIIGISFPLLQNAWGAFVFLPFSITCVLLFLLTKFYLPETRGRDPSEVAPLVSKGFRSKVK

SEQ ID NO: 509 - DNA, 1506 bp, Oryza sativa
  CDS (1)..(1506)
atgagcttccgcggcgaggagagcggcggcgaggatggggggcggacggcgtcggcgtcggacctgcggaagccgttcctccacacggggagctggtacaagatgtcgtcggcgggcggcggcggcgggatggggtcgcgcctcggctcctccgcctactccctccgcgactcctccgtctccgccgtcctctgcaccctcatcgtcgccctcggccccatccagttcggcttcacctgcggcttctcctcgcccacccaggacgccatcatctccgacctcggcctcaccctctccgagttctcgctgttcgggtcgctgtcgaacgtcggggcaatggtgggcgccatcgccagcggccagatcgccgagtacatcggccgcaaggggtctctcatgatcgcggcaattcctaacattattgggtggctcgcaatatcttttgcaaaggactcatcctttttgtttatgggccgattgctggaaggatttggggtcggcgtgatatcctatgtggtgccagtttatatagcagaaattgctccacaaacaatgagaggagctcttggttcagtcaatcagctttctgttactattggcatattgcttgcctacttgttaggcatgtttgttccctggagaattctctccgttctcggtattttaccatgttcaattctgatacctggattgttctttatccctgaatcaccaaggtggctggcaaaaatgggaaagatggaggattttgaatcctcgctgcaagtattgcgaggatttgaaacagacatcgctgtagaagtaaatgaaataaagagatcagttcaatcatcacggaggaggacgacaatacgatttgcagatatcaagcagaagagatatagtgtacctctaatggttggaattggtctccttgtactgcagcagttaagtggtgtgaatggcattctattttatgctgctagtatcttcaaagccgccggtcttacgaatagtaatctagcaacatttggtctgggggttgttcaggtggttgctactggagtgacaacttggttgactgacaaagctggtcgacgactcctcctcattatctctactacagggatgaccattactcttgttgttgtttctgtgtcattttttgtgaaggacaacataactaatggttctcatttatactctgtaatgagtatgctttcgctggtcgggcttgtggcatttgtgatttcattttctcttggtttgggagccataccatggatcataatgtctgagattcttcctgtaaatatcaagagccttgctggaagcgttgcaacccttgcaaactggttgacggcttggctcattacgatgacagcaagcttgatgttaagctggagcaatggaggaacatttgctatctatgctgctgtgtgtgccgggaccctcgttttcgtatgcctgtgggtgccggagactaaaggaagaacacttgaggaaattgcattttctttccggtga

SEQ ID NO: 510 - protein, 501 aa, Oryza sativa
MSFRGEESGGEDGGRTASASDLRKPFLHTGSWYKMSSAGGGGGMGSRLGSSAYSLRDSSVSAVLCTLIVALGPIQFGFTCGFSSPTQDAIISDLGLTLSEFSLFGSLSNVGAMVGAIASGQIAEYIGRKGSLMIAAIPNIIGWLAISFAKDSSFLFMGRLLEGFGVGVISYVVPVYIAEIAPQTMRGALGSVNQLSVTIGILLAYLLGMFVPWRILSVLGILPCSILIPGLFFIPESPRWLAKMGKMEDFESSLQVLRGFETDIAVEVNEIKRSVQSSRRRTTIRFADIKQKRYSVPLMVGIGLLVLQQLSGVNGILFYAASIFKAAGLTNSNLATFGLGVVQVVATGVTTWLTDKAGRRLLLIISTTGMTITLVVVSVSFFVKDNITNGSHLYSVMSMLSLVGLVAFVISFSLGLGAIPWIIMSEILPVNIKSLAGSVATLANWLTAWLITMTASLMLSWSNGGTFAIYAAVCAGTLVFVCLWVPETKGRTLEEIAFSFR

SEQ ID NO: 511 - DNA, 1767 bp, Kluyveromyces lactis
  CDS (1)..(1767)
atgcttcataagattgataacagaaagttctttattcacttcaaacaaaacagtaaagctgaattaattcaatacaactattacaacaagggacagaatcacttcacaatggattcttcatcgtccgtgcttcagaaagacacaaaacaggtcgatattgaacatagggaagaagcaagctccaacgatcagtttgtagatcaaaatgccttattagatagcttccttggtgacgtcgatgtgctgcgagcgctgatgcgactggaaaaaagtatgtctctcttagaaaggttgcgccaagtacatccgaaagctgtaggttggtccttaatgggttcaaccggcttaatcatggaagggtacgacactgctttcattaacaatctgtttgctcttccaatttttcgaaccactttcggtgaatacaatcaagcgaatgacatttgggagattccttccaaatggcaaattggtttggggatgtgtgttgcctgtggtgagattattggtttgcagataactggtatattcgcagatcgttacggttacaggcttgtgttgattgctggcttggttcttttgattgctttcaattttattctctactttgcaaacagtttgactatgattgctataggccaaattttaagtggtatcccatggggctcattccaaacactctgcgtttcatatgctagtgaggtctgtccattggttttgagatactatttgacaacatacatcaatttatgttggcttatcgggcaagtgattgccgctggagttttgaaggcatgtcaggaacatcttgccaatgatgagctaggttggagacttccatttgcgttacagtggatatggccggttcctttgattgtaggtatttaccttgctccagaatctccttggtggttggttagaaagggcaggatcgatcaagccaaacgatccgtcacaagaattctaaccctgcccacttctgaaaaggacaagctaactgacataatgatcacaaaaatgagaatgactgtcgagaaagaaaaccgtcttgcttccgaatcaagttcttatatggactgtttcaagggcattgatgcgagaagaaccaggataacgtgtctcacatgggtcatgcaaaatttaacgggatccgctttgatgggatactccacctatttctatgaaaaagccgggttggacacttctgcagccttcactttttccatcattcaatacgtgattggtattgttggtaccttaacatcatggttcctatcttccagagctggtcgcttcacgattctcttttggggtgtctttttccagacgatagttatgttcattactggtggcctcggattcagcagctctgaaggtgccagttggggtgctggttccatgttgctgatctacaacttcttttacaactccaccttaggtcctgttgtttactgtgtggtgtcagaaattcctagtgacagattgagaactaaaactgtagttctagcacgtaactcctacaacttgatagctattgtaaattctattttgacaccgtatatgttaaactccgaccaatggaactggggtgcaaagacaggtttgttctggggtggattagctgccatctcattagtttgggcttacttcgatctcccagaaactaagggcagaacatttgcagagcttgatgagttattccatcaaagagttccagcaaggaagtttaacagtacacatgtggagccttctctcgtgagacaataa

SEQ ID NO: 512 - protein, 588 aa, Kluyveromyces lactis
MLHKIDNRKFFIHFKQNSKAELIQYNYYNKGQNHFTMDSSSSVLQKDTKQVDIEHREEASSNDQFVDQNALLDSFLGDVDVLRALMRLEKSMSLLERLRQVHPKAVGWSLMGSTGLIMEGYDTAFINNLFALPIFRTTFGEYNQANDIWEIPSKWQIGLGMCVACGEIIGLQITGIFADRYGYRLVLIAGLVLLIAFNFILYFANSLTMIAIGQILSGIPWGSFQTLCVSYASEVCPLVLRYYLTTYINLCWLIGQVIAAGVLKACQEHLANDELGWRLPFALQWIWPVPLIVGIYLAPESPWWLVRKGRIDQAKRSVTRILTLPTSEKDKLTDIMITKMRMTVEKENRLASESSSYMDCFKGIDARRTRITCLTWVMQNLTGSALMGYSTYFYEKAGLDTSAAFTFSIIQYVIGIVGTLTSWFLSSRAGRFTILFWGVFFQTIVMFITGGLGFSSSEGASWGAGSMLLIYNFFYNSTLGPVVYCVVSEIPSDRLRTKTVVLARNSYNLIAIVNSILTPYMLNSDQWNWGAKTGLFWGGLAAISLVWAYFDLPETKGRTFAELDELFHQRVPARKFNSTHVEPSLVRQ

SEQ ID NO: 513 - DNA, 1557 bp, Schizosaccharomyces pombe
  CDS (1)..(1557)
atgcgcgattttcaatcacggttcgctgatcggtataatcagattacaaactcatactcttattcttcatcacgacaaggattaattaccggtatggttaatgtgggttctttcttcggttgtcttctatcttcaccagtagctgataaaattggtaagcgtctctccattattgtgtggaccacagtttatcttattggtattattattcaagtaacaacagttccctcttgggtacagatcttggtagccaaaatatggacaggtctttcgataggagcgttgtctgttatcacaccaggttatcaatcagaagttgcacctgctataatgagaggtgctatcgttacaacttatcagttatttattacgcttggtattttcatcgccgcttgcatcaatatggggacgcacaaatattctcatggaaccactgctcagtggcgtatatccattggaattaacttactctggggtatcattactttagtaggtattatatttctaccggaatcgccccgctatctaattgccattggtaaagatgatgaggctttgaagataatgtgttacaacaatgaccttccgcttgaacacgaaatcattcaaacagagtatcataccattaaatctgattgtgacgcagagttagctggtggtccggcaagatggccagaaattttcaatgcaaatattcgctatcgtacattccttggaatggctgttatgatgttccaacaacttactggtgctaattattatttctactacggtactcaggtattccgcggtaccggtatggattcaccctatttggctgccttaattccggatgctgtcaattgtggttgtacttttggagccatttttgtgcttgaattctttggacgacgttctcctttgattgttggtggtatatggcaatatatttgcttcttcatttatgcagcagttggtgatcgtgcactatatcacaaaaatggaacttcaaaccaccgtgcgggtgctgtaatgattgtgttctcatgccttttcattttttcattttctcaaacttgggcccctgccgcatacgttattgtgggtgagtcatatcctgttcgttatcgttccaaatgtgcagctgtcgctacttcagctaactggttttggaattttttgatttctttctttactcctttcatcacaaattctattggttttaagtatggttatatttttgcttcatgtaatttaacaggtgctgcaattatttttctgtttgtccatgagaccaagggtcgtacattggaagagattaatactatgtacgcatctaacttgaaaccatggatgcctcatccagagggttacagagagttcggtcgtgagcaaaacaacgcaactttgaagtctcacatcggactcaatggagaaacaaccgaacttattgaaaataccgataatcaaggagacagtgggtcattccaaacatcaaccccggatgattctagacctgaacaaaatcaagcttcagcaacatatatacgtcctgataaacgggagcctcgtctttaa

SEQ ID NO: 514 - protein, 518 aa, Schizosaccharomyces pombe
MRDFQSRFADRYNQITNSYSYSSSRQGLITGMVNVGSFFGCLLSSPVADKIGKRLSIIVWTTVYLIGIIIQVTTVPSWVQILVAKIWTGLSIGALSVITPGYQSEVAPAIMRGAIVTTYQLFITLGIFIAACINMGTHKYSHGTTAQWRISIGINLLWGIITLVGIIFLPESPRYLIAIGKDDEALKIMCYNNDLPLEHEIIQTEYHTIKSDCDAELAGGPARWPEIFNANIRYRTFLGMAVMMFQQLTGANYYFYYGTQVFRGTGMDSPYLAALIPDAVNCGCTFGAIFVLEFFGRRSPLIVGGIWQYICFFIYAAVGDRALYHKNGTSNHRAGAVMIVFSCLFIFSFSQTWAPAAYVIVGESYPVRYRSKCAAVATSANWFWNFLISFFTPFITNSIGFKYGYIFASCNLTGAAIIFLFVHETKGRTLEEINTMYASNLKPWMPHPEGYREFGREQNNATLKSHIGLNGETTELIENTDNQGDSGSFQTSTPDDSRPEQNQASATYIRPDKREPRL

SEQ ID NO: 515 - DNA, 2468 bp, Mus musculus
  CDS (34)..(1605)
cctggattaagaggacaattccacacacacacaatgtcagaagacaagatcaccggaaccttggctttcactgtcttcactgctgtactgagttccttccagttcggctatgacatcggtgtgatcaatgcacctcaagaggtaataatatcccattatcgacatgttttgggtgttccactggatgaccggaaagctgccattaactatgacgtcaatggcacagacaccccacttacagtcacaccagcatacacaacaccagctccctgggatgaagaggagactgaaggatctgctcacatagtcactatgctctggtctctgtctgtgtccagctttgcagtgggcggaatggtcgcctcattctttggtgggtggctcggggacaaacttggaaggatcaaagcaatgttggctgcaaacagcctctcattgactggagccctcttgatgggatgttccaaatttggaccggcacacgccctcatcattgctggacgaagtgtatcaggactgtattgtgggctaatttcaggactggttccaatgtacattggagagatcgctccaaccacactcaggggtgccctgggtactcttcaccaactggcccttgtcacaggcattcttattagtcagattgctggcctcagctttattctgggcaatcaggatcattggcacatcctacttggcctatctgctgtgccagctcttctgcagtgtctgctactgctcttctgtccagaaagccccagatacctttatataaagttggaagaggaagtcagggcaaagaaaagcttgaagagactaagaggaactgaggatgtcaccaaagatattaatgagatgaagaaagaaaaggaagaggcatcgactgagcagaaggtctccgtgatccagctcttcacggatgccaattaccgacagcccatcctcgtggcgctgatgctgcacatggcccagcagttctcaggaatcaatgggatattttactattcaaccagcatttttcagacagctggcatcagccagcctgtgtatgcaaccattggtgttggggccatcaacatgatcttcacggctgtctctgtgctgcttgtggagaaggcagggcggcggaccctgttcctaaccgggatgattggcatgtttttctgcaccatcttcatgtcggtgggacttgtgctgctggataaattcgcctggatgagttacgtgagcatgacggccatcttcctctttgtcagtttctttgagattgggccaggtccaatcccttggttcatggttgctgaatttttcagccaaggaccccgtcctacggctctggcactggctgccttcagcaactgggtctgcaattttgtcatcgccctctgcttccagtacattgcggacttcctcgggccttacgtgttcttcctcttcgctggggtggtcctggtcttcaccctgtttacattctttaaagttccagaaaccaaaggaaagtcttttgaggaaatcgctgcagaattccggaagaagagtggttcggccccaccacgcaaagctgctgtacaaatggaattcctggcgtcttcagagagtgtgtgaggatgacctgcctaaaaccgaggaaccgaccaggaggaaccacgcgctccctcttaaaccgattccttcctcggtgtgcgactacacccaggagtatcgtttattcatttggaagaatttttacagactccgattagaaatatcaacatatattattaccaaagaaagtatttttttaacttaaagaatctatttttgatggtaacactcttcagtaaaccagaggctattttgctactctacagggaagtgtgtaataaccttcctagccctgttctactgaaattgaagagctttcaacatatcgctgctttttaaagcacgtgactaagaaatctgcagctacaactgctatctagatatttaattacaccggaatgttcttagccccagatcagaagctaaaggacatacggctggtggcagcaaggctcacattcaaactgactttctgttacctttcctcggcttctctcacttggattagacttcgggttttgcgtacagccattttctgcatttttatatagaattcctgagtatgttaaactgtatttgtaatgagaaactcttttttatagctaccaaaagcttcctacagtgagagaaaacattttagtttctttgatgtattttgcaaggttaaatgcttgagttgttcttagctgtagagctcagattatcagttagttatattagcatccaaagcatgttagtttctcaccacttcagtctttgtgttgtacttatacttgtttttttaattgcccatggcacacacttaaaccattaggagtcaggcattttgcatattgcctaaaaatctaataaactgggtcaatcacagggaaaaaaaaaaaaaa

SEQ ID NO: 516 - protein, 523 aa, Mus musculus
MSEDKITGTLAFTVFTAVLSSFQFGYDIGVINAPQEVIISHYRHVLGVPLDDRKAAINYDVNGTDTPLTVTPAYTTPAPWDEEETEGSAHIVTMLWSLSVSSFAVGGMVASFFGGWLGDKLGRIKAMLAANSLSLTGALLMGCSKFGPAHALIIAGRSVSGLYCGLISGLVPMYIGEIAPTTLRGALGTLHQLALVTGILISQIAGLSFILGNQDHWHILLGLSAVPALLQCLLLLFCPESPRYLYIKLEEEVRAKKSLKRLRGTEDVTKDINEMKKEKEEASTEQKVSVIQLFTDANYRQPILVALMLHMAQQFSGINGIFYYSTSIFQTAGISQPVYATIGVGAINMIFTAVSVLLVEKAGRRTLFLTGMIGMFFCTIFMSVGLVLLDKFAWMSYVSMTAIFLFVSFFEIGPGPIPWFMVAEFFSQGPRPTALALAAFSNWVCNFVIALCFQYIADFLGPYVFFLFAGVVLVFTLFTFFKVPETKGKSFEEIAAEFRKKSGSAPPRKAAVQMEFLASSESV

SEQ ID NO: 517 - DNA, 2355 bp, Canis familiaris
  CDS (201)..(1688)
ctaaatagaaagctatttatttcctatagaaaaacacaagaaaggaagggaggaggagatgtgctgcggagctggggaccagtagaaaaacttgctgccaagaaggacattttggaggttttgttcactggaaggcggtgtctctgggatcccaactcccagatctttattgaagattggaatagaattaaattagggccatggggacacagaaggtcacggtgtctctgatctttgccctctccattgctacaataggctctttccagtttggctataataccggagtcatcaatgctcctgaaacgataataaaggactttctcaattacaccttggaagagaaatcggaaaaccttcccactgaagtgttactcacttccctctggtccttgtctgtggccatcttctctgttggtggtatgattggctccttctctgttggactctttgtcaaccgctttggcaggcgcaattcaatgcttatggtcaacctcttggctgtcgctggtggctgccttatggggttctgcaaaatagcgcagtcggttgaaatgctgatcctgggccgattgattattggcctcttctgcggcctctgcacaggttttgtgcccatgtacattggagagatctctcccactgccctacggggcgcgttcggcactcttaaccagctgggcatcgtcatcgggatcctggtagctcagatcttcggtctgaaagtcatcatgggaactgaagagctttggcccctgctcttgggcttcaccatcattccagctgtcctgcaaagcgccgcccttccattttgccccgagagccctagatttttgctcattaacagaaaggaagaggagaatgctaaggagatcctccaacgattgtggggcacccaggatgtgagtcaggacatccaggagatgaaagatgagagtgctaggatggcacaagaaaagcaagtcactgtgctggagctcttcagatcgcgcagctaccggcaacccattatcatttccatcatgctccaactctcccagcagctctctggaatcaatgctgtgttctattactcaacaggaatcttcaaagatgcaggtgttgaggagccaatctatgccaccattggtgcaggggtggtcaatactatcttcactgttgtctctctgtttctggtggaaagggcagggaggagaactctacatatgattggccttggagggatggctgtttgttccatccttatgaccatctcgttgttattaaaggataactataattggatgagctttgtttgtattggggctatcttggtcttcgtagccttctttgaaattggcccaggccccatcccctggtttattgtggccgaactcttcagccagggaccccgcccagctgcaatggcagtggctggttgttccaactggacctccaattttctggttgggctgctctttccttctgctgcattctacttaggagcctatgtatttatcattttcactggcttcctcatcgtcttcttggtcttcaccttcttcaaagtccctgagacccgtggcaggacttttgaggaaatcacccgagccttcgaagggcaggggcaggatgccaacagagcggagaagggccccattgtggagatgaacagcatgcagccggtgaaggagaccgccactgtctaagccatgcctccttcccgcctccctcccaacatggaaaaaccacctctcccggatgagggagaaatcgaatcaggttgtaaccaggactgtttactgaatagctagctacttgattcctttctcttccccacacactccatgagcactcagaagaacccaatgctggagttagttgtatcttcaatgagtttgaacgttcattctggacattctcttctgtttagaagagaccaagtgaacctaccttcatttcaggaggaactggccacttgccatatgacaacattgtcagctcttcctacctggggttctggtaggtcctcaccgggccaataggggaataagagtgaggtgcagcaccccccccacacacacacacacacacacacacaccagacctcccaggaagcatatctacataagtgtggagggctgagagggattaaatagaagcacccctcctcgcttccatacagctctgcagagcaaattaacttgagtttattatcttatcttctggttttattgcataaatatttatttttttaagtgtaaagtaattttaccaaataatgcaaacataaggaaattgaggttagagttagagggaggtgcttaaagagaggtttatagggtagaagatttgatacgggagaggtcaaggtgc

SEQ ID NO: 518 - protein, 495 aa, Canis familiaris
MGTQKVTVSLIFALSIATIGSFQFGYNTGVINAPETIIKDFLNYTLEEKSENLPTEVLLTSLWSLSVAIFSVGGMIGSFSVGLFVNRFGRRNSMLMVNLLAVAGGCLMGFCKIAQSVEMLILGRLIIGLFCGLCTGFVPMYIGEISPTALRGAFGTLNQLGIVIGILVAQIFGLKVIMGTEELWPLLLGFTIIPAVLQSAALPFCPESPRFLLINRKEEENAKEILQRLWGTQDVSQDIQEMKDESARMAQEKQVTVLELFRSRSYRQPIIISIMLQLSQQLSGINAVFYYSTGIFKDAGVEEPIYATIGAGVVNTIFTVVSLFLVERAGRRTLHMIGLGGMAVCSILMTISLLLKDNYNWMSFVCIGAILVFVAFFEIGPGPIPWFIVAELFSQGPRPAAMAVAGCSNWTSNFLVGLLFPSAAFYLGAYVFIIFTGFLIVFLVFTFFKVPETRGRTFEEITRAFEGQGQDANRAEKGPIVEMNSMQPVKETATV

SEQ ID NO: 519 - DNA, 1485 bp, Ovis aries
  CDS (1)..(1485)
atggggaccacgaaggtcaccacacctctgatcttcgccatctcgattgctaccataggctctttccagtttggctacaacactggagtcatcaatgctcctgaggcgatcataaaagactttctcaattacactttggaagaacggtcagaaacacccccgtccagcgtgctcctcacatccctgtggtccttgtctgtggccatcttctccgtgggtggtatgattggttccttctccgtcggactctttgtcaaccgatttggcaggcgcaactcaatgcttattgtcaacctgttggccatagctggcggctgccttatgggattctgcaaaatagcagagtcagttgaaatgctgattttgggccgactgattatcggcctcttctgcggactctgcacaggattcgtgcctatgtacattggagagatctcccctactgccctgcggggtgcctttggtactctcaaccagctgggcatcgttatcggaattctggtggcccagatctttggtctaaaagtcatcttggggactgaagatctgtggcctctactgctgggcttcaccatcttaccagccatcatccagtgcgctgcccttccattttgccctgaaagtcctagattcttgctcattaacagaaaggaggaggagaaggcaaaggagatccttcagagactctggggcaccgaggacgtggctcaggacatccaggagatgaaggacgagagtatgcggatgtcgcaggagaagcaagtcacagtgctggagctcttccgtgcccccaactaccggcagcccatcatcatctccatcatgctccagctctcccagcagctctctgggatcaacgcggtgttctactactcgacaggaatcttcaaagatgcgggtgtccaggagccggtctacgccactatcggtgcaggtgtggtcaacaccatcttcactgtggtgtctgtgttcttggtggaaagggctgggaggaggactctacacctgattggccttggagggatggctttttgttccatcctcatgacaatttctttgttactaaaggataattacagctggatgagctttatctgtattggggccatcctggtctttgtggccttctttgaaattggcccaggccccattccctggtttattgtggctgaactctttggccagggaccccgcccagcagccatggcagtggccggttgttccaactggacctccaactttttggttggactgctcttcccctcagccacgttctacttaggtgcctacgttttcatcgtcttcactgtcttcctcgttatcttctgggtcttcaccttcttcaaagttcctgagacccgtggcaggacttttgaggaaattacacgagcctttgaagggcaggtgcagacaggaacccgcggtgaaaaaggccccatcatggaaatgaacagcatccagcccacgaaggacaccaatgcctaa

SEQ ID NO: 520 - protein, 494 aa, Ovis aries
MGTTKVTTPLIFAISIATIGSFQFGYNTGVINAPEAIIKDFLNYTLEERSETPPSSVLLTSLWSLSVAIFSVGGMIGSFSVGLFVNRFGRRNSMLIVNLLAIAGGCLMGFCKIAESVEMLILGRLIIGLFCGLCTGFVPMYIGEISPTALRGAFGTLNQLGIVIGILVAQIFGLKVILGTEDLWPLLLGFTILPAIIQCAALPFCPESPRFLLINRKEEEKAKEILQRLWGTEDVAQDIQEMKDESMRMSQEKQVTVLELFRAPNYRQPIIISIMLQLSQQLSGINAVFYYSTGIFKDAGVQEPVYATIGAGVVNTIFTVVSVFLVERAGRRTLHLIGLGGMAFCSILMTISLLLKDNYSWMSFICIGAILVFVAFFEIGPGPIPWFIVAELFGQGPRPAAMAVAGCSNWTSNFLVGLLFPSATFYLGAYVFIVFTVFLVIFWVFTFFKVPETRGRTFEEITRAFEGQVQTGTRGEKGPIMEMNSIQPTKDTNA

SEQ ID NO: 521 - DNA, 1638 bp, Candida albicans
  CDS (1)..(1638)
atgtcgtccaagatcgaaagaatcttttctggacctgctttaaaaatcaatacttatttggacaagcttccaaaaatttacaatgttttcttcatcgctagtatatccaccattgctggtatgatgtttggttttgatatttcttcaatgtctgcctttattggtgctgaacattatatgaggtatttcaattccccaggatcggatatccaagggttcattacttcatccatggctttgggttctttctttggttctattgcctcctcatttgtttctgaaccctttggtagaagattatcattattgacttgtgctttcttctggatggtcggtgctgctattcaatcatcagttcaaaatcgtgctcaattgattattggtagaatcatttctggtattggtgttggtttcggttctgctgttgctccagtttatggtgctgaattggctccaagaaaaattagaggtcttatcggtggtatgttccaattctttgtcaccttgggtatcatgatcatgttttacttatccttcggattgggccacattaatggtgttgcttcattcagaattgcttggggacttcaaattgtccctggtctttgtttgttcttgggttgtttctttattccagaatctcctcgttggttggctaaacaaggtcaatgggaagctgctgaagaaattgttgccaagatccaagctcatggtgatcgtgaaaatcctgatgttttgattgaaatttctgaaatcaaagatcaattattattggaggagtccagtaaacaaattggatatgctactttattcaccaaaaaatacattcaaagaaccttcactgctattttcgctcaaatttggcaacaattgactggtatgaacgttatgatgtactatatcgtttatattttccaaatggctggttattctggtaacagtaacttggttgcttcatccattcaatatgttatcaacacttgtgtcaccgtgcctgcattatattttattgataaagtaggtagaagaccattattgattggtggtgccactatgatgatggctttccaattcggtcttgctggtattttgggtcaatactcaattccttggccagatagtggtaacgactcagtcaacattagaattccagaagacaataagtctgcctccaaaggtgccattgcttgttgctacttgttcgttgcttcctttgcctttacttggggggtcggtatttgggtctactgtgctgaaatatggggtgataacagagttgctcaacgtggtaatgccatctccacttctgccaattggattttgaatttcgctattgccatgtataccccaactggtttcaagaatattagctggaaaacatatatcatttatggtgtcttctgtttcgctatggctacccatgtctactttggattcccagaaaccaagggtaaaagattggaagaaattggtcaaatgtgggaagaacgtgttcctgcttggagatcaagatcttggcaaccaaccgttcctattgcttccgatgccgaattggcaagaaagatggaagttgaacacgaagaagataaattgatgaatgaagactctaactccgaatccagagaaaatcaagcctaa

SEQ ID NO: 522 - protein, 545 aa, Candida albicans
MSSKIERIFSGPALKINTYLDKLPKIYNVFFIASISTIAGMMFGFDISSMSAFIGAEHYMRYFNSPGSDIQGFITSSMALGSFFGSIASSFVSEPFGRRLSLLTCAFFWMVGAAIQSSVQNRAQLIIGRIISGIGVGFGSAVAPVYGAELAPRKIRGLIGGMFQFFVTLGIMIMFYLSFGLGHINGVASFRIAWGLQIVPGLCLFLGCFFIPESPRWLAKQGQWEAAEEIVAKIQAHGDRENPDVLIEISEIKDQLLLEESSKQIGYATLFTKKYIQRTFTAIFAQIWQQLTGMNVMMYYIVYIFQMAGYSGNSNLVASSIQYVINTCVTVPALYFIDKVGRRPLLIGGATMMMAFQFGLAGILGQYSIPWPDSGNDSVNIRIPEDNKSASKGAIACCYLFVASFAFTWGVGIWVYCAEIWGDNRVAQRGNAISTSANWILNFAIAMYTPTGFKNISWKTYIIYGVFCFAMATHVYFGFPETKGKRLEEIGQMWEERVPAWRSRSWQPTVPIASDAELARKMEVEHEEDKLMNEDSNSESRENQA

SEQ ID NO: 523 - DNA, 2425 bp, Kluyveromyces lactis
  CDS (539)..(2194)
gaattccgagcagtgagtgagaacggtaatgttgaggattgtagtgtttttcttttattgatagaagatgctcatcgcatcgtcgtgttccgtgaaagctctccatgttagaaagtccaccgttgccagttggcaggctgtatcctccccgctcttccttggtgccggattttctttagctccttacacaatgacgctttgggacaatgtttcgttattccatcgacgatgttgccccagactaattaatcaacgggctaagaaattagcgtaactgatgtagaatgatcagagggtttttttttctttcttagttctatttacactattttccagcttgaatggtttaagatttaatccgttgtttctgatataaaagccaggtaataaaccttctaacttgcctcttcttggtgtcgattcgaaaacacttttcggttgtttgtttctgtttttttccctttcgattcaataacccaattaaaaaacgtattataacaaactataacaaacatcaactttagctaataacaacaaaatgtcattgaaaaattggcttttgctacgtgatatccaatacgagggaacgttttataaaaagttcccccatgtctacaacatttacgtcatcggtttcatagcatgtatctccggtcttatgttcggttttgatatcgcatcgatgtcttctatgattggtaccgatgtttacaaggactatttcagtaatcctgactctttgacttacggtggtattactgcttctatggcaggtggttcattcttgggttctttgatctctccaaacttttctgatgcttttggtagaaaagtctctttgcatatatgtgctgctctatggattattggtgccattctacaatgtgctgctcaagaccaagccatgttgatcgtgggtcgtgttatttctggtatgggtattggtttcggttcctctgctgcccctgtgtactgttctgaaatctccccaccaaagattagaggtaccatttctggtcttttccaattctctgttaccgttggtatcatggtcctattctacatcggttacggttgtcacttcattgatggcgctgctgcctttagaatcacttgggggttgcaaatggttccaggtttgatcttaatggtcggtgtattctttatcccggaatccccacgttggttggctaaccatgatcgttgggaagaaacttctctcatcgttgctaacatcgttgctaacggtgacgttaacaacgaacaagttcgtttccaattggaagaaattaaggaacaagtcatcatcgattctgctgccaagaacttcggttacaaagatttattcagaaagaagactttaccaaaaacaatcgttggtgtttctgctcaaatgtggcaacaactatgtggtatgaatgttatgatgtactacattgtctacattttcaacatggctggttacactggtaacactaacttggttgcctcgtccattcaatatgtgctaaatgttgttatgactatcccagcattgttcttgattgataaatttggtagaagacctgtgttgatcattggtggtatcttcatgttcacttggttgttctctgtcgctggtatcttggctacttactccgttccagccccaggcggtgtcaacggtgatgatactgttactattcaaattccaagtgaaaacacttccgctgctaacggtgtcattgcatcctcatacttgttcgtctgtttcttcgctccaacttggggtattggtatctggatttactgttctgaaattttcaacaacatggaaagagctaagggttctgccctttctgcagcaactaactgggccttcaactttgccttggctatgttcgttccatctgccttcaaaaacatttcctggaagacctacatcatctttggtgtcttctctgttgctttgactattcaaactttcttcatgttcccagaaactaaggggaaaactttagaagaaatcgaccaaatgtgggttgataatattccagcatggaggactgctaattacattccacaactacctatcgttaaagatgaagaaggtaacaagttgggcttgttgggtaacccacaacatttggaagatgttcattctaatgaaaagggtctacttgaccgttccgactcagcaagcaactccaattaaacagtgaccagctatgacaaataaataaatttttcgaactaattactagcgcatctttctctaatgacttaagaaatgaaatgaattatttcaaacaaatataacaatatcaatccataacatggttttatgctcttactatcttctgtcttttttttctttgtgtggcagacgacaaactcagtggctctacatgactataaatatagcacgaggctcacgtcaaagctt

SEQ ID NO: 524 - protein, 551 aa, Kluyveromyces lactis
MSLKNWLLLRDIQYEGTFYKKFPHVYNIYVIGFIACISGLMFGFDIASMSSMIGTDVYKDYFSNPDSLTYGGITASMAGGSFLGSLISPNFSDAFGRKVSLHICAALWIIGAILQCAAQDQAMLIVGRVISGMGIGFGSSAAPVYCSEISPPKIRGTISGLFQFSVTVGIMVLFYIGYGCHFIDGAAAFRITWGLQMVPGLILMVGVFFIPESPRWLANHDRWEETSLIVANIVANGDVNNEQVRFQLEEIKEQVIIDSAAKNFGYKDLFRKKTLPKTIVGVSAQMWQQLCGMNVMMYYIVYIFNMAGYTGNTNLVASSIQYVLNVVMTIPALFLIDKFGRRPVLIIGGIFMFTWLFSVAGILATYSVPAPGGVNGDDTVTIQIPSENTSAANGVIASSYLFVCFFAPTWGIGIWIYCSEIFNNMERAKGSALSAATNWAFNFALAMFVPSAFKNISWKTYIIFGVFSVALTIQTFFMFPETKGKTLEEIDQMWVDNIPAWRTANYIPQLPIVKDEEGNKLGLLGNPQHLEDVHSNEKGLLDRSDSASNSN

SEQ ID NO: 525 - DNA, 2099 bp, Saccharomyces cerevisiae
  CDS (180)..(1910)
agcttcaacactggggaatgaataatatgtcatctagaaaaaatttatataatactcagtgtttatcatatctcggatcatcactcatctctcatgagtaatagaaaccataaagaaaagatatatcaagcctcttatcaaggttggttttgaacactttacaataaaatctgccaaaaatgtctgaagaagctgcctatcaagaggatacagcagtccaaaatactccagctgatgctttgtcgccagttgaatccgattctaattccgctttgtctactccatccaacaaagctgaaagagatgacatgaaagatttcgacgagaatcacgaagaatctaataactacgttgaaattccaaagaagcccgcctccgcctacgttacagtttccatctgttgtttaatggttgctttcggtggttttgttttcggttgggatactggtaccatttctggttttgttgctcaaactgattttatcagaagatttggtatgaagcaccacgatggtacttattatttgtctaaggttagaactggtttaattgtctccattttcaacattggttgtgccattggtggtattattttagcaaaattaggtgatatgtatggtcgtaaaatgggtttgattgtcgttgttgtcatctacattatcggtatcattatccaaattgcctcaatcaacaagtggtaccaatatttcattggtagaattatctctggtttaggtgtcggtggtattgccgttttatctcctatgttgatttctgaagtctctccaaagcatattagaggtactttggtttcatgttaccaacttatgattactttgggtattttcttgggttactgtacaaactacggtaccaagacctacaccaattctgtccaatggagagttccattaggtctaggtttcgcttgggctttgtttatgattggtggtatgacattcgttccagaatctccacgttatttagttgaagtcggtaaaattgaagaagctaagcgttctattgctctttcaaataaggtcagcgcagacgatccagctgttatggctgaagtcgaagttgttcaagctacagttgaagctgaaaaattagctggtaatgcctcctggggtgaaatatttagcactaagactaaggttttccaacgtttgatcatgggtgctatgattcaatcattgcaacaattgacaggtgataactatttcttctattacggtactaccgttttcactgctgtcggtttggaagattcttttgaaacttctattgtcttgggtattgtcaactttgcttccacctttgttggtattttcttagtcgaaagatatggtcgtcgtagatgtttattatggggtgctgcttccatgacagcttgtatggttgttttcgcttctgttggtgttacaagattgtggccaaatggtaagaagaacgggtcttctaagggtgctggtaactgtatgattgtcttcacatgtttctacttattctgttttgccactacctgggctccaattccatttgttgttaactctgaaactttcccattgagagttaagtccaagtgtatggctattgctcaagcttgtaactggatctggggtttcttgattggtttctttactccatttatttcaggtgctattgatttctactacggttatgttttcatgggctgtttggtcttttcttacttctacgtcttcttcttcgttccagaaactaaaggtttgactttagaagaagttaacaccttatgggaagaaggtgttttgccatggaaatcaccttcttgggttccaccaaacaagagaggtactgactacaacgctgatgatctaatgcatgatgatcaaccattttacaagaagatgttcggaaaaaagtaggtcagttaattaaataatatagacttccttcaaggaataaaaataatatttgatccttccaatttttaacgctttatgaaatatatatttatgatttaatagtttatagataatactttatcaaactacaattttgaattatgttttttgtttcatagttgtggaagaggttaggaataggccgaattc

SEQ ID NO: 526 - protein, 576 aa, Saccharomyces cerevisiae
MSEEAAYQEDTAVQNTPADALSPVESDSNSALSTPSNKAERDDMKDFDENHEESNNYVEIPKKPASAYVTVSICCLMVAFGGFVFGWDTGTISGFVAQTDFIRRFGMKHHDGTYYLSKVRTGLIVSIFNIGCAIGGIILAKLGDMYGRKMGLIVVVVIYIIGIIIQIASINKWYQYFIGRIISGLGVGGIAVLSPMLISEVSPKHIRGTLVSCYQLMITLGIFLGYCTNYGTKTYTNSVQWRVPLGLGFAWALFMIGGMTFVPESPRYLVEVGKIEEAKRSIALSNKVSADDPAVMAEVEVVQATVEAEKLAGNASWGEIFSTKTKVFQRLIMGAMIQSLQQLTGDNYFFYYGTTVFTAVGLEDSFETSIVLGIVNFASTFVGIFLVERYGRRRCLLWGAASMTACMVVFASVGVTRLWPNGKKNGSSKGAGNCMIVFTCFYLFCFATTWAPIPFVVNSETFPLRVKSKCMAIAQACNWIWGFLIGFFTPFISGAIDFYYGYVFMGCLVFSYFYVFFFVPETKGLTLEEVNTLWEEGVLPWKSPSWVPPNKRGTDYNADDLMHDDQPFYKKMFGKK

SEQ ID NO: 527 - DNA, 1785 bp, Neurospora crassa
  CDS (1)..(1785)
atggcgatcttcgccatgggctggcagaagcccgacaatgtcgctggctcatctgccccagcgattatggtcggcctgtttgtcgccacaggcggcttactccttggctatgacactggaaccatcaacggcattcttgccatgaaatcgttcaaagaccacttttcaaccggctacatcgacggcaacggacagcctggcatatacccaaaggagagtgcgttaatcgttgccatgctcagcgccggaaccgccatcggagccttactcgctgcgcctctcggagatcactatggacgtcgccggtcccttattggcgccatcggaattttcgtaataggcgccatcctgcaggtttgtgcatataacatcgatctgttggtggcaggaaggacggttgccggtgttggtatcggcattgtctcagtgcttgtccccttatatcagtctgagatggcacccaagtggattcgaggaacactggtgtgcacctaccaactctccatcaccatggggcttcttgccgctgccgtggtcaacatcctcacatacaaattgaagacagctgctgcctaccgggtaccaataggacttcagctaacctgggcctgcgtcttggccctgggcttgaccgtgttacccgaaactcctcgttacctcatcaaacgtggagacaagaacgccgctgcgctttctctcagtcggctgcgtcgactggacattactcaccctgccttggtcgaggagcttgccgaaatcgaagcaaaccatcaatacgagatggcactgggtcccgactcttacaaggacattctctttggcgaacctcaccttggccgtcgcacgtttacaggttgctgtctgcagatgctacaacagcttaccggcgtgaactttatcatgtactatggaaccaccttttttaataacgctggcgttggaaaccccttgaagatctctctcatcatgcaagtcatcaacacagcatcgaccatacccggattgttcgtagtcgaatcatggggccggcgtcggctcttgatggtgggcgccataggcatggccatctgtcagctgctgatcgctgccttcgcgacggccagcggctccaacaacctatcagcacataacaaggtcctcattacctttgttgcgatatacatcttcttctttgctgcatcatggggcccagttgtatgggtcgtcacctccgagatttatccgctcaaggttagagccaaatccatgtcgataactacggcttcaaattggttcctcaattttggcatcgcctacggcaccccgtatatgcaaacgaacagtgcagcgagcgacgaaagctcgatagatctcggctctaaagtgtttttcgtatggggcgcgttttgcatagtagcggtcggctttgtatggtgtatggtttacgagactagcaagatcagtctcgaacaaattgatgagatgtacgagagagttgaccatgcgtggcacagcaggcgcttcgaacctagttggagtttccaggagatgcgagaccttggcttctccgatggcggcataccgccaacgcagcagctgcagcagcagccgcagcagccgcagcagcaacaacaacaacaccaccaacaacaacaacaccaactacaagttgacctacagcaatcgcagtcacgcactagcaactccagcacgtctcaaaccgacacgggcgggagcaataacaccggggcgtcacaagacgataaacttgtggcatccttgggcaacatcgatctcagctattga

SEQ ID NO: 528 - protein, 594 aa, Neurospora crassa
MAIFAMGWQKPDNVAGSSAPAIMVGLFVATGGLLLGYDTGTINGILAMKSFKDHFSTGYIDGNGQPGIYPKESALIVAMLSAGTAIGALLAAPLGDHYGRRRSLIGAIGIFVIGAILQVCAYNIDLLVAGRTVAGVGIGIVSVLVPLYQSEMAPKWIRGTLVCTYQLSITMGLLAAAVVNILTYKLKTAAAYRVPIGLQLTWACVLALGLTVLPETPRYLIKRGDKNAAALSLSRLRRLDITHPALVEELAEIEANHQYEMALGPDSYKDILFGEPHLGRRTFTGCCLQMLQQLTGVNFIMYYGTTFFNNAGVGNPLKISLIMQVINTASTIPGLFVVESWGRRRLLMVGAIGMAICQLLIAAFATASGSNNLSAHNKVLITFVAIYIFFFAASWGPVVWVVTSEIYPLKVRAKSMSITTASNWFLNFGIAYGTPYMQTNSAASDESSIDLGSKVFFVWGAFCIVAVGFVWCMVYETSKISLEQIDEMYERVDHAWHSRRFEPSWSFQEMRDLGFSDGGIPPTQQLQQQPQQPQQQQQQHHQQQQHQLQVDLQQSQSRTSNSSTSQTDTGGSNNTGASQDDKLVASLGNIDLSY

SEQ ID NO: 529 - DNA, 27 bp, artificial sequence
  Artificial sequence
  Primer
atgaaaaatatcatttcattggtaagc

SEQ ID NO: 530 - DNA, 27 bp, artificial sequence
  Artificial sequence
  Primer
ttaacatttatcagctgcatttaattc

SEQ ID NO: 531 - DNA, 1390 bp, Saccharomyces cerevisiae
  CDS (303)..(1118)
cgttacttaaagagagagcacacacgttataaactacccaccgccaaattgctatccaatgttaaggatagacaaatgcaaaaatatataaaggaaaccaaaatctgcttatataaagcgtaaatcttacatttttcactgcttactcactcttattgttttttttctgttcaaccacgcgatgagttttttttttccattattatttataggacaaaaatgaaaaaatattagctcagataagcacattttgttcatagctaagtggatagggaaacacctacacttaattgcaagcaacaatgccttcgctaacccccagatgtatcattgtcagacacggtcaaactgaatggtccaagtcaggccagtatactggtttgacagatctaccgttaacgccctacggtgagggccaaatgttgaggaccggtgagagtgttttccgcaataatcagtttttgaatccagacaacatcacttatatcttcacctctccacgtttgcgtgccaggcaaactgtggatttggttttgaaaccattaagcgacgagcaaagagctaagatccgtgtggtggtagacgacgacttgcgagagtgggagtacggtgactacgagggaatgctgactcgagaaatcattgaattgagaaagtcacgcggtttggacaaggagaggccatggaatatctggagagatgggtgtgagaacggtgagactactcagcaaattgggttgagactttcccgcgctattgccagaatccagaacttgcaccgcaagcaccagagtgagggcagagcatcagacatcatggtctttgcgcacggacatgcattgcgttattttgctgctatttggtttggactgggtgtgcaaaagaagtgtgagacgattgaagaaattcaaaatgtcaaatcttatgatgacgacacagttccatatgtgaaattggaatcttacagacatttggtagacaatccatgtttcttactggacgccggtgggattggtgttttgtcatacgctcaccacaacattgacgaacctgcattggaattagcaggtccatttgtctcaccaccagaggaggaatcccagcatggcgatgtgtaagcaatcattcgaaatgcaaaaaaagatatgcagttatagaaagtgataaaaacattttttttcttgactttttatgttatataatatgctatatatgataatatctagtggtatcttaaaaaagaaaaaataatgaaataaaagggatagtacaaaggactgtgtttttttgtattgtggaaaaacgaactaattgaaaaataaaccataaaatgaacggagtaaaaaaagtactagcaaaagcttatttgcaatattcaaggaaaaaaggc

SEQ ID NO: 532 - protein, 271 aa, Saccharomyces cerevisiae
MPSLTPRCIIVRHGQTEWSKSGQYTGLTDLPLTPYGEGQMLRTGESVFRNNQFLNPDNITYIFTSPRLRARQTVDLVLKPLSDEQRAKIRVVVDDDLREWEYGDYEGMLTREIIELRKSRGLDKERPWNIWRDGCENGETTQQIGLRLSRAIARIQNLHRKHQSEGRASDIMVFAHGHALRYFAAIWFGLGVQKKCETIEEIQNVKSYDDDTVPYVKLESYRHLVDNPCFLLDAGGIGVLSYAHHNIDEPALELAGPFVSPPEEESQHGDV

SEQ ID NO: 533 - DNA, 714 bp, Deinococcus radiodurans
  CDS (1)..(714)
atgatcaagcgccttgctcccaccggtttttcggcccccgaccgcgcgaccgccaccgagttctgggtcgtgcgccacggcgagagcacctggaacgccggggggcgctaccagggccagacggacgtgccgctgtccgccgtcggcctgttgcaggcagcctgcctcgccgagcgcctgaccgggcaggtcttcgacgcggtgtactccagcgacctgacccgcgcccgccagaccgccggggcggtggccgagcgccttgccggggcgccgccggtgcaactgagccccgaactgcgcgaaatcgacgtgggcgagctgaccgggctggtcgtcactgagatccgcgagcgctatcccgactacctcgcggcgctgcaggccgacccctggacgacccagcgcccgggcggcgagagcatggccgaccttttcgggcgctgcggcgaggcctttcacgcgctgcgggccgcgcatcccggggggcgggtgctggtctttacccacggcggcgtggtacgggtggcagtgggactcgcgctcggtggcgttcccggccacgcctggtcgcgcctgagtgtcaccaacacgtcgattacccgcgtgctgctcggcgaacacagcggcaccctgctcggcttcaacgacgaggcgcacctcgaagccctgctcgaagcgaccgaggcggacgacgtgctggggcaagcgccgtag

SEQ ID NO: 534 - protein, 237 aa, Deinococcus radiodurans
MIKRLAPTGFSAPDRATATEFWVVRHGESTWNAGGRYQGQTDVPLSAVGLLQAACLAERLTGQVFDAVYSSDLTRARQTAGAVAERLAGAPPVQLSPELREIDVGELTGLVVTEIRERYPDYLAALQADPWTTQRPGGESMADLFGRCGEAFHALRAAHPGGRVLVFTHGGVVRVAVGLALGGVPGHAWSRLSVTNTSITRVLLGEHSGTLLGFNDEAHLEALLEATEADDVLGQAP

SEQ ID NO: 535 - DNA, 1350 bp, Nostoc sp. PCC 7120
  CDS (1)..(1350)
atgactcgtgtcattattgtgcgtcacggccaaagtacttataacatcgaacggcgcatccaaggacgtgctgacgtatcaacattaacggagcgaggtcgtagtgacgctagtaaggtaggcaaggccctcactaacatttcctttaaggcaatttacactagcccactccagcgagcaaaacaaacagcagagattattcatagtgagctggcaaatgaggcagttcagtctgctgatgtgcagatttctgaattgttaagagaaatagacttgcctttgtgggaaaaactgctgacatccgaggtcaaggaaaagtttcccgaagattaccgcatttggcacgaaaaaccccaggaactacaaatgttagtgaacgacaatggggtgacaagagaacattttccagttctatctttatacgaacaggcgcggcagttttggcaaaacattttgcccaatcatcgcggtgaaagcattctcatcgttggacacaacggcattaatcgcgccctcatcagcacagccttgggtgttcaccccagtcgttaccatgccatacagcaatctaactgtggaatcagtgtattaaattttgctggaggactgggtgaaccagtgcaactagagtcgatgaatcaaacccaacacacaggcgagactctaccttccttgcgtcctggtcatcagggagtgagattgttattggtgcgtcacggtgaaactgaatggaatcgccaaactaggtttcagggacaaattgacgttcccctcaacgataacggtagacaacaagcacaaaaagccggggtgtttctgcaaaatgtagcaattgactttgctgtaagtagttctatgctgcgtcccaaagaaacagccgagattatcttgcgccaccatccaagtatcaatttggagttgcaagacggtttaagagaaatcagtcacggactttgggaaggaaaactagaagccgaaatagaagaggaatttcctggtgaattagagcgttggcggactataccaggccaggtacaaatgccggaaggtgagaatttacagcaagtgtgggaacgtagcacggaagcctggcaaaatattgtgcaaacagccttagataatcaacgccaaacagggttaatcgtggctcacgatgccacaaataaaaccttactgtgtcatattctcggtttacccacagacaatttctggaattttcgccaaggtaatggtgctgttagtgtcattgattacccctctggattaaatggtgtaccagtactgcaagccatgaatattactactcatttgggtggtgtattagataaaaccgcagctggagcattatag

SEQ ID NO: 536 - protein, 449 aa, Nostoc sp. PCC 7120
MTRVIIVRHGQSTYNIERRIQGRADVSTLTERGRSDASKVGKALTNISFKAIYTSPLQRAKQTAEIIHSELANEAVQSADVQISELLREIDLPLWEKLLTSEVKEKFPEDYRIWHEKPQELQMLVNDNGVTREHFPVLSLYEQARQFWQNILPNHRGESILIVGHNGINRALISTALGVHPSRYHAIQQSNCGISVLNFAGGLGEPVQLESMNQTQHTGETLPSLRPGHQGVRLLLVRHGETEWNRQTRFQGQIDVPLNDNGRQQAQKAGVFLQNVAIDFAVSSSMLRPKETAEIILRHHPSINLELQDGLREISHGLWEGKLEAEIEEEFPGELERWRTIPGQVQMPEGENLQQVWERSTEAWQNIVQTALDNQRQTGLIVAHDATNKTLLCHILGLPTDNFWNFRQGNGAVSVIDYPSGLNGVPVLQAMNITTHLGGVLDKTAAGAL

SEQ ID NO: 537 - DNA, 636 bp, Listeria monocytogenes
  CDS (1)..(636)
atggcagaaggtttacgtacaatttattttgtaagacatggtaagacagagtggaatatgactggacaaatgcagggatggggcgattcgccgctagttgcagaaggtattgacggggcaaaagcagtcggcgaagtattaaaagacatgcagattgatgccgtttatacgagtactagtaaacgcacgcaagataccgcggcttatattctcggtgaccgcgaaatcgaaattcaacctctggaagaactaaaagaaatgggttttggaacatgggaaggcattagagtaacggaaattgacgaaaaacacccagaagaacgcgcaaagattctccatagtccagaaacctacaaagcagaagtaaatggtggcgaaacctattatgagcttgcagaacgactactagaaggcgtcgaaaaaattattgcagacaatccaaatggtaatattctcgtcgtttctcacggcatgtcgctcacgttattattatacttgctgcaaggcggaactattgaagatcaccgcaaagaagcaccaagaattttgaacacaagtattagcatcgtagaataccaaaacggcgaattttctcttaaaaaaatcaatgaaatcggtcatttagacttaaaataa

SEQ ID NO: 538 - protein, 211 aa, Listeria monocytogenes
MAEGLRTIYFVRHGKTEWNMTGQMQGWGDSPLVAEGIDGAKAVGEVLKDMQIDAVYTSTSKRTQDTAAYILGDREIEIQPLEELKEMGFGTWEGIRVTEIDEKHPEERAKILHSPETYKAEVNGGETYYELAERLLEGVEKIIADNPNGNILVVSHGMSLTLLLYLLQGGTIEDHRKEAPRILNTSISIVEYQNGEFSLKKINEIGHLDLK

SEQ ID NO: 539 - DNA, 636 bp, Listeria innocua
  CDS (1)..(636)
atggcagagggtttacgaacgatttattttgtaagacatggtaaaacagagtggaatatgactggacaaatgcaaggctggggcgattctccgctagttgcagaaggtattgacggggcaaaagcagttggcgaagtgttgaaagatacaccaattgatgccgtttatacaagtacaagtaaacgcacgcaagataccgcggcttacattcttggcgaccgcgaaatcgaaattcaacctctggaagaactaaaagaaatgagctttggaacgtgggaaggcattagagtaactgaaattgacgaacaacaccctgaagaacgcgcgaaaattctccatagcccagaaacctacaaagcagaagtgaacggtggcgagacttattatgagcttgcagaacgactgttagaaggcgttgaaaaaatcattgcagaaaatccaagtggcaacattctcgtcgtttctcacggcatgtcacttacgttattattatacttgctacaaggcgggaccattgaagatcaccgcaaagaagcaccaagaattttgaacacaagtattagcatcgtagaataccaaaacggcgaattttctcttaaaaaattaaatgaagttggtcatttagacttaaaataa

SEQ ID NO: 540 - protein, 211 aa, Listeria innocua
MAEGLRTIYFVRHGKTEWNMTGQMQGWGDSPLVAEGIDGAKAVGEVLKDTPIDAVYTSTSKRTQDTAAYILGDREIEIQPLEELKEMSFGTWEGIRVTEIDEQHPEERAKILHSPETYKAEVNGGETYYELAERLLEGVEKIIAENPSGNILVVSHGMSLTLLLYLLQGGTIEDHRKEAPRILNTSISIVEYQNGEFSLKKLNEVGHLDLK

SEQ ID NO: 541 - DNA, 654 bp, Brucella melitensis
  CDS (1)..(654)
atgactgattcttcccaccaacggagtactgcgatgtctcgtaccctcgtcctggtccgccatggccaaagcgaatggaacctcaagaacctctttaccggctggcgtgatccgggcctcaccgagcagggccatgcggaagccaaggccgcaggccaacgcctcaaggcagccggcctgaagttcgacattgcctacacctccgccctttcccgcgcgcaagttacctgccagcacattctcgacgagcttggccagccgggccttgaaaccatccgcgaccaggccctgaacgagcgcgactatggcgatctctccggtctcaacaaggatgacgcccgcgcaaagtggggtgaggaacaggttcacatctggcgccgttcctatgacgtcccgcctccgggcggcgaaagcctgaaggacaccggcgcgcgcgtctggccctattaccttcacaccatccagccacatgtgctgcgcgaggagaccgttctggtcgccgcccatggcaattcgctgcgcgcactcatcatggcgctcgagggcctgacaccagaacagattctcaagcaggaactcaacaccggcgttccgatcatctaccggctcaatgccgattcgacggtcgcctcgaaggaaatcctcagcgcctga

SEQ ID NO: 542 - protein, 217 aa, Brucella melitensis
MTDSSHQRSTAMSRTLVLVRHGQSEWNLKNLFTGWRDPGLTEQGHAEAKAAGQRLKAAGLKFDIAYTSALSRAQVTCQHILDELGQPGLETIRDQALNERDYGDLSGLNKDDARAKWGEEQVHIWRRSYDVPPPGGESLKDTGARVWPYYLHTIQPHVLREETVLVAAHGNSLRALIMALEGLTPEQILKQELNTGVPIIYRLNADSTVASKEILSA

SEQ ID NO: 543 - DNA, 813 bp, Nostoc sp. PCC 7120
  CDS (1)..(813)
atggttactacgccactttatatcaaatacaaggcattgtcgaaccagaaggagatatctatgcagttgaggcttgaagaatctgtaggaactcgcgtgattttgttacgccacggagagagtacgtttaatgctttgggattatatcaaggtagtagtgatgagtcagtattaacagaagttgggcgtagggatgcgcgaattacaggggaatttctccagggaatatgttttgatgctgtttatgttagttcactcaagcgggcgcaggaaaccgctaaggaaattttagaggtaattaattttccccaaaatgcagtttttatcgatgaaaaattaagagaaaatgatatgcctgcttgggaaggattagcatttcaatatgtgcgggaaatattccctgaagcatatcaactttggaaacagcgcccgcatgaattttggatgcagatagataataaaacacggttttatccggcgctgaatttatatcaacgggtacaacaattttggcgagaagtactaccaaacaacgtaggtaaaactgtgttggtagttgcacatggggggacaaatcgggctttgattgggactgctttggggataagtcctgagttttatcattctcttcaacagtcaaattgtgggattagtattcttaattttcctgatggttatttggcttcggggcagttagaggtgatgaatttgaattatcatttggattttttgagaaatgagaagaaaggcaaaatttttaaacgcaaagtatcgcggaggtttacgcggagtgacgcggaggttttactatga

SEQ ID NO: 544 - protein, 270 aa, Nostoc sp. PCC 7120
MVTTPLYIKYKALSNQKEISMQLRLEESVGTRVILLRHGESTFNALGLYQGSSDESVLTEVGRRDARITGEFLQGICFDAVYVSSLKRAQETAKEILEVINFPQNAVFIDEKLRENDMPAWEGLAFQYVREIFPEAYQLWKQRPHEFWMQIDNKTRFYPALNLYQRVQQFWREVLPNNVGKTVLVVAHGGTNRALIGTALGISPEFYHSLQQSNCGISILNFPDGYLASGQLEVMNLNYHLDFLRNEKKGKIFKRKVSRRFTRSDAEVLL

SEQ ID NO: 545 - DNA, 615 bp, Deinococcus radiodurans
  CDS (1)..(615)
atggcggggccggaccttaccctgctgctcgtgcggcacggcgcaaccgcgtggaacgagggagggcagtggcagggctggaccgacaacccgctgggcgacgcgggccgggcgcaggccagagcgctgcgcgaggaactggcggggcagactttcgacgccgtttattcgagcgacctcacgcgggcgcggcagaccgccgaactcgcgctgccgggccgggcgctgcggctggacgcccgactgcgcgagctgaatctgggcgactacgagggccacacgctggcgcagatgcaggcgcacggcggctacgcgggctggcaggccgacccctgggcgcaggcggtgccgggcggagagagcctgcaagacgtggcggcgcggatgcgtgggtggctaacggacgtgcaggccgagtttcccggcgggcgcgtcatcgctttctcgcactccatcgcccttcgcacgctggcccgtgacctgctggggctgccgctggagccgcaggtgaattacccgattccctatgccgagcgcatcaagaacgggcgctgcatggtgctggagtgccggggcgggacgtggcggcgggccggggcaaacgccgcaagctga

SEQ ID NO: 546 - protein, 204 aa, Deinococcus radiodurans
MAGPDLTLLLVRHGATAWNEGGQWQGWTDNPLGDAGRAQARALREELAGQTFDAVYSSDLTRARQTAELALPGRALRLDARLRELNLGDYEGHTLAQMQAHGGYAGWQADPWAQAVPGGESLQDVAARMRGWLTDVQAEFPGGRVIAFSHSIALRTLARDLLGLPLEPQVNYPIPYAERIKNGRCMVLECRGGTWRRAGANAAS

SEQ ID NO: 547 - DNA, 714 bp, Caulobacter crescentus
  CDS (1)..(714)
atgccgacgctcgtcctgctgcgccatggccaaagccagtggaacctggaaaaccgcttcaccggttgggttgatgtggacctcaccgctgagggcgaagctcaggcccggaagggcggcgagctgatcgctgcggccggcatcgagatcgaccgcttgttcacctcggttcagacccgcgccatccgcacaggcaatctggcgctggacgccgccaagcagagcttcgtccccgtgaccaaggactggcgcctgaacgagcgccactatggcgggctgaccggcctgaacaaggctgagaccgccgaaaagcacggcgtcgagcaggtgaccatctggcgccgttcgtacgatatcccgccgccggagctggcgccgggcggcgagtacgacttcagcaaggatcgccgctacaagggcgcaagcctgcccagcacggaaagcctggcgacgacgctggttcgcgttctgccctactgggaaagcgacatcgctccgcatctcaaggcgggtgagactgtgctgatcgccgcccacggcaactcgctgcgcgccatcgtcaagcatctgttcaacgtgccggacgaccagatcgtcggtgtggagattccgaccggcaatccgctggtgatcgacctggatgctgcgttgaagccgaccggcgcgcgctacctggacgacagtcgggctgaggcgcttcccaaagttggttaa

SEQ ID NO: 548 - protein, 237 aa, Caulobacter crescentus
MPTLVLLRHGQSQWNLENRFTGWVDVDLTAEGEAQARKGGELIAAAGIEIDRLFTSVQTRAIRTGNLALDAAKQSFVPVTKDWRLNERHYGGLTGLNKAETAEKHGVEQVTIWRRSYDIPPPELAPGGEYDFSKDRRYKGASLPSTESLATTLVRVLPYWESDIAPHLKAGETVLIAAHGNSLRAIVKHLFNVPDDQIVGVEIPTGNPLVIDLDAALKPTGARYLDDSRAEALPKVG

SEQ ID NO: 549 - DNA, 756 bp, Treponema pallidum subsp. pallidum (syphilis spirochete)
  CDS (1)..(756)
atgaagcttgtgttgatccgtcatggagaaagtgaatggaacaggctgaacctgttcactggttggacagatgttccgcttaccccacgtggggagtcggaagcccaggaaggaggccgcgtactgcaagaagcggggtttgattttgacctatgctacacttctttcttgaaacgtgccattcgtacgctcaattttgtactccaggcactggaccgtgagtggttgccggttcacaaaagctggaaattgaacgagcggcattatggggatctacaaggtttaaataagacagagacggcgcagaagtatggtgagcagcaggttagggtgtggcgtcgctcctttgatgtggctcctcctccgcttactgtaggggacgcacgttgtccgcatactcaagcctcctaccggggggtatgcgcgtctggtcggacgccagtacttccgtttacggaaagtttgaaagataccgttgcgcgtgtggtgccgtattttgaagaggaaatcaaaccgcagatgatttccggacagcgtgtgcttattgtggcgcatggtaactcgttgcgcgcactgatgaagcacatagagtctttggatgagactcagataatggaagtaaatttgcctaccggtgtaccgcttgtctatgagttcgaggcggattttaccctgtgtgggaagcgttttttaggtaatgaggcggatgttgcagcgagggcgcaggctgtggctgatcagggtaagagtaactaa

SEQ ID NO: 550 - protein, 251 aa, Treponema pallidum subsp. pallidum (syphilis spirochete)
MKLVLIRHGESEWNRLNLFTGWTDVPLTPRGESEAQEGGRVLQEAGFDFDLCYTSFLKRAIRTLNFVLQALDREWLPVHKSWKLNERHYGDLQGLNKTETAQKYGEQQVRVWRRSFDVAPPPLTVGDARCPHTQASYRGVCASGRTPVLPFTESLKDTVARVVPYFEEEIKPQMISGQRVLIVAHGNSLRALMKHIESLDETQIMEVNLPTGVPLVYEFEADFTLCGKRFLGNEADVAARAQAVADQGKSN

SEQ ID NO: 551 - DNA, 645 bp, Xylella fastidiosa
  CDS (1)..(645)
atgcgtattttgcttgctcgtcatggagagacactttggaatgctgaaggtcgctatcaaggccaaattgatattcctctttcttctgttggtgaggctcaggcgcgtgcccttggtgagcgcctacgggatgtagtcattgctcgtgccgtggcatctcccttggtacgggcccaatacactgcgcaactggccttgggtgaaagccgcgcagcacagttattgattgaggcggatctgaaagaaatttcccacggtgactgggagggtcttttagatactgagattcatgcaatggatcccacacggctgcacgcttggcgtaaagcacctgagacagtcatcatgcctaacggtgaatcactgcaccaagttctagaacgcagctggcgtggtttaacaaccgccgctgttggattagggattgacgatatcttattagtcgttgcgcatgatgcagtcaaccgagtgatcctgtgtcgagtgctgggattgccattggctcatttatggcgcttccatcaagcaccgactacgctgaacctcttggaaggaaagaatattgaccaactacaagtagtacgcttaaacgattgcagtcatcacaccccgttctttggtgaagctaaacatcgcgctttataa

SEQ ID NO: 552 - protein, 214 aa, Xylella fastidiosa
MRILLARHGETLWNAEGRYQGQIDIPLSSVGEAQARALGERLRDVVIARAVASPLVRAQYTAQLALGESRAAQLLIEADLKEISHGDWEGLLDTEIHAMDPTRLHAWRKAPETVIMPNGESLHQVLERSWRGLTTAAVGLGIDDILLVVAHDAVNRVILCRVLGLPLAHLWRFHQAPTTLNLLEGKNIDQLQVVRLNDCSHHTPFFGEAKHRAL

SEQ ID NO: 553 - DNA, 2034 bp, Arabidopsis thaliana (mouse-ear cress)
  CDS (1)..(2034)
atgattccactctcgtttgcagcattaggagacatagttgataagaagcttgatgaggattatgtaaaggaagaagttgaaatgatgatacaagtatctctgctatccacacaagcagcaccgggagaacgaccaacgatgtcggaagttgaaatttttagaaactcctgcttgtgctacataaactggttttgcaacatcatctccataatatattctaacagtttgcttttgaggattgattcaggatcatcatctatatctgttgtcttcttagtttttactctgtctcggatggagcaacgacggatgttaacggcggctagaccacgtttgtcctcgacgatccgtacgattacgtctcacgtggcgttctcagcaagccgtctcttgaaaccttatgttgcatatcggcttggattggaggacgcgaatcagaggaaaacagagaacgaatccaccggtggagataaagaaatcgccaattcgctcctccactgtcttaaatttcactatcttcttcttcattttccttccttctcacttcaaatccataatcgctctacttctctctctctctctagattcgaaaaaatggcgaaactggtgatgttgttggttctctgtatcttaccggcgatagccatggcggcaaggaggggaaatattggaaagaatacaatggtggttcaaggtagcacctactgtgacatttgcaaattcggcttcgagactcctgaatcctcctacttcatccccggtgcaacggtgaagctatcatgcaaagacaggaagacaatggaagaggtttacacagacaaagctgtatcagacaaagaaggaaagtataagttcattgtccacgacgatcacagagaccagatgtgcgatgttttgcttgtgaaaagctcggataaaacctgctctaaaatctccgttggacgtgagaagtctcgtgtgatcttgaaccattacagtggcattgcctcgcagatcagacatgctaacaacatgggatttgagaaagaagtgagaatggctacttctacgactatgtctcatcaagcgattgggtctgttgtctctcaaagaccattcaaagcttctcagtttctaaaggagcctttgaataatgtaccaatgaaattcagacaaaaaagattcaagattgaagcaactgcttctcagatatctgtcgttgacaacactttcttgtctccgtctccttccaagaacaaaccacatgaatctaagaagaaatcaaatgaagcagctttgatattgattaggcatggagaatcgttatggaatgagaagaatttgttcacgggttgtgttgatgtgccattgactcagaaaggtgttggagaagctattgaagctgggaagaagattagtaacattcctgtagatttgattttcacttcttctttaatccgtgctcagatgactgcaatgcttgccatgactcagcatcgtcgcaagaaggttccaatcatcttgcacaacgagagtgtaaaggcgaaaacttggagtcatgttttcagcgaagaaactagaaaacaatctatcccggttatagcggcttggcaactgaatgagagaatgtatggagagttgcagggtttgaacaagaaagaaacagcggaaagatacgggacacaacaagttcacgaatggcgcaggagttacgaaattcctcctccgaaaggcgagagcttggagatgtgtgctgagagagcagtggcttattttgaagacaatatcaaaccagagcttgcatctggaaacaatgtaatgattgctgctcacgggaactcattgagatctatcattatgtatcttgacgatttaacttctcaggaggttacaactctagacctgtccacaggtgtaccattgctctacatcttcaaagaaggcaagttcatgaaacgaggaagccccgtcggttctactgaagctggtgtctatgcttatacaaagagattggcacaatacagagagaagcttgatgcggcggcgaccatttaa

SEQ ID NO: 554 - protein, 677 aa, Arabidopsis thaliana (mouse-ear cress)
MIPLSFAALGDIVDKKLDEDYVKEEVEMMIQVSLLSTQAAPGERPTMSEVEIFRNSCLCYINWFCNIISIIYSNSLLLRIDSGSSSISVVFLVFTLSRMEQRRMLTAARPRLSSTIRTITSHVAFSASRLLKPYVAYRLGLEDANQRKTENESTGGDKEIANSLLHCLKFHYLLLHFPSFSLQIHNRSTSLSLSRFEKMAKLVMLLVLCILPAIAMAARRGNIGKNTMVVQGSTYCDICKFGFETPESSYFIPGATVKLSCKDRKTMEEVYTDKAVSDKEGKYKFIVHDDHRDQMCDVLLVKSSDKTCSKISVGREKSRVILNHYSGIASQIRHANNMGFEKEVRMATSTTMSHQAIGSVVSQRPFKASQFLKEPLNNVPMKFRQKRFKIEATASQISVVDNTFLSPSPSKNKPHESKKKSNEAALILIRHGESLWNEKNLFTGCVDVPLTQKGVGEAIEAGKKISNIPVDLIFTSSLIRAQMTAMLAMTQHRRKKVPIILHNESVKAKTWSHVFSEETRKQSIPVIAAWQLNERMYGELQGLNKKETAERYGTQQVHEWRRSYEIPPPKGESLEMCAERAVAYFEDNIKPELASGNNVMIAAHGNSLRSIIMYLDDLTSQEVTTLDLSTGVPLLYIFKEGKFMKRGSPVGSTEAGVYAYTKRLAQYREKLDAAATI

SEQ ID NO: 555 - DNA, 582 bp, Bacillus subtilis
  CDS (1)..(582)
atgacagccgtttgtttagtaagacatggagaaaccgattggaacctgcagcaaaaatgccaaggcaaaaccgatatcccgctaaacgcaacaggtgaacgccaagcaagagaaaccggagaatatgtaaaggacttttcttgggatattattgtgacgagcccgctgaaaagagcgaaaagaaccgcggaaattattaatgaatatctgcatcttccgatagtcgagatggatgattttaaggaacgcgattacggcgacgcggagggcatgccgctggaggaacggacaaagcgctatccagataacatctatccgaatatggaaaccttagaagaactcactgacaggctgatgggcggtttggcaaaagtgaatcaggcgtatccaaacaagaaggtgctgatcgtggcgcacggtgcggcaattcacgccctgctgacagaaatatccggcggtgacccggagcttcaaagcacccgtctcgtcaacgcctgcctcagcaacattgaatttgcagaagaaaaatggcggataaaagactataatatcaacagccacttatccggctttatcaaataa

SEQ ID NO: 556 - protein, 193 aa, Bacillus subtilis
MTAVCLVRHGETDWNLQQKCQGKTDIPLNATGERQARETGEYVKDFSWDIIVTSPLKRAKRTAEIINEYLHLPIVEMDDFKERDYGDAEGMPLEERTKRYPDNIYPNMETLEELTDRLMGGLAKVNQAYPNKKVLIVAHGAAIHALLTEISGGDPELQSTRLVNACLSNIEFAEEKWRIKDYNINSHLSGFIK

SEQ ID NO: 557 - DNA, 606 bp, Thermotoga maritima
  CDS (1)..(606)
atgaaactctatctcataagacacggcgaaaccatctggaacgaaaagggtctgtggcagggagtcacagatgttcctctcaacgaaagaggaagagaacaggcaagaaagctggcaaacagcctgaaaagagtcgatgccatttactcgagtcccctcaaaagaagcctcgagacagcagaagagatcgccaggcgctttgaaaaagaaatcatcgtcgaagaagatctgagagaatgtgaaatatcactctggaacggtctcacagtggaagaggctatcagggagtatcctgtggagttcaagaagtggtcatcggatccaaattttggaatggaaggtttagaatccatgagaaatgtacagaatcgcgtagtgaaggcgatcatgaagatcgtctcacaggagaagttgaacggttcagagaacgtggtcatcgtatcacactctctgtctttgagagctttcatctgctggatcctcgggcttcctctttaccttcacagaaatttcaagctggacaacgcgtccctcagtgtggtggaaatagagagcaaaccgaggcttgttttgttgaacgatacgtgtcaccttaaggaatcttga

SEQ ID NO: 558 - protein, 201 aa, Thermotoga maritima
MKLYLIRHGETIWNEKGLWQGVTDVPLNERGREQARKLANSLKRVDAIYSSPLKRSLETAEEIARRFEKEIIVEEDLRECEISLWNGLTVEEAIREYPVEFKKWSSDPNFGMEGLESMRNVQNRVVKAIMKIVSQEKLNGSENVVIVSHSLSLRAFICWILGLPLYLHRNFKLDNASLSVVEIESKPRLVLLNDTCHLKES

SEQ ID NO: 559 - DNA, 660 bp, Clostridium acetobutylicum
  CDS (1)..(660)
atgaaaacaacggttttgctggttagacatggagagactgaatggaatgttcagggaaggtttcagggatgccatgatataaaccttacagataacggaattgaacaagctaagagagttgcaaagcgattagaaggaagttttgattgtgtttatgcaagtccattgaagagagcctttaatactgctaaattaattgcttcgactaaagggattagtccaataatagaagacgacttaagagaaataaattttggactttgggaaggtttaaccattaaggaaatgaaaagtaagtttccgaaggaatttgacatttggagaaatgatactgaggatggacctttgtgtggaggagatttaagtataaaaagagcttcaataagagttgaacatgctgtattaaaaattgtaaatgacaataaaggtaaaaacattgtagtagttgctcatggagggataataaaagcagcgcttatagctctttttaactggaatatggcaatgtatcatagaattttattaggcaatacatctatatgcaaaatagaatttaatgaaaataatatacctaaaatagtaacaattaatgatgtcagccatcttccggaagaatatgcagaaaaggacccgatgcatgataagaaagaaatagtatag

SEQ ID NO: 560 - protein, 219 aa, Clostridium acetobutylicum
MKTTVLLVRHGETEWNVQGRFQGCHDINLTDNGIEQAKRVAKRLEGSFDCVYASPLKRAFNTAKLIASTKGISPIIEDDLREINFGLWEGLTIKEMKSKFPKEFDIWRNDTEDGPLCGGDLSIKRASIRVEHAVLKIVNDNKGKNIVVVAHGGIIKAALIALFNWNMAMYHRILLGNTSICKIEFNENNIPKIVTINDVSHLPEEYAEKDPMHDKKEIV

SEQ ID NO: 561 - DNA, 744 bp, Saccharomyces cerevisiae
  CDS (1)..(744)
atgccaaagttagttttagttagacacggtcaatccgaatggaacgaaaagaacttattcaccggttgggttgatgttaaattgtctgccaagggtcaacaagaagccgctagagccggtgaattgttgaaggaaaagaaggtctacccagacgtcttgtacacttccaagttgtccagagctatccaaactgctaacattgctttggaaaaggctgacagattatggattccagtcaacagatcctggagattgaacgaaagacattacggtgacttacaaggtaaggacaaggctgaaactttgaagaagttcggtgaagaaaaattcaacacctacagaagatccttcgatgttccacctccaccaatcgacgcttcttctccattctctcaaaagggtgatgaaagatacaagtacgttgacccaaatgtcttgccagaaactgaatctttggctttggtcattgacagattgttgccatactggcaagatgtcattgccaaggacttgttgagtggtaagaccgtcatgatcgccgctcacggtaactccttgagaggtttggttaagcacttggaaggtatctctgatgctgacattgctaagttgaacatcccaactggtattccattggtcttcgaattggacgaaaacttgaagccatctaagccatcttactacttggacccagaagctgccgctgctggtgccgctgctgttgccaaccaaggtaagaaataa

SEQ ID NO: 562 - protein, 247 aa, Saccharomyces cerevisiae
MPKLVLVRHGQSEWNEKNLFTGWVDVKLSAKGQQEAARAGELLKEKKVYPDVLYTSKLSRAIQTANIALEKADRLWIPVNRSWRLNERHYGDLQGKDKAETLKKFGEEKFNTYRRSFDVPPPPIDASSPFSQKGDERYKYVDPNVLPETESLALVIDRLLPYWQDVIAKDLLSGKTVMIAAHGNSLRGLVKHLEGISDADIAKLNIPTGIPLVFELDENLKPSKPSYYLDPEAAAAGAAAVANQGKK

SEQ ID NO: 563 - DNA, 1050 bp, Synechocystis sp
  CDS (1)..(1050)
atgaccaaagacgatgtggcccaccaatatcccgaacaatatcgtctctggcacgaagcaccggatcaattggccatgaccgtagatggagcggaatattaccccgttgcggctctctatgcccaggcccaaagattttggcaggatgtgttaaccgatgcggcgggacaaaccctgctgattgtggcccacaatggcatcaatcgttgcctgttaatgagcgccattggtatgcccgcttcccattaccaacgcctgcaacagtccaactgcaatattaatgtgttgaattttagtggtggctggggcgatccggtgcaactggaatccttgaatcaaaccgcccatatgggggtacctctgccacctccccgcaaggataataatcgtctgcggttactgcttatccgccatggggaaacccaatggaatcgggaaggacggttccaaggtattcgggatattcccctcaatgacaatggccgccatcaagcccaaaaagcggcggaattcctcaaagatgtgcccattaacctaggcattagcagtcccatggctcggcccaaggaaacggcggagattattctgcaatatcacccaagcatagagttggatttacagccggaattggcggaaatttgccatggcctgtgggaaggcaagctagaaacggaaattgaagcggaatatcccggattattgcaacagtggaaagatgcccccgccacagtgcagatgccggaaggggaaaatttacaacaggtctgggaccgggcgatcgcctgttggcaggaccgggtcaaattctatagccagggggatggttccacagtgggcattgtggtggcccatgatgccatcaacaaggtgattttggcttatttgttgggtcttactcccgctcacttttggcaagttaaacagggtaatggcggggtgagcgtcattgactatccccagggtctagataagcccccagttattcaagccattaatttgatgggccatttgggcacagtgttggataaaaccgccgccggagccctatag

SEQ ID NO: 564 - protein, 349 aa, Synechocystis sp
MTKDDVAHQYPEQYRLWHEAPDQLAMTVDGAEYYPVAALYAQAQRFWQDVLTDAAGQTLLIVAHNGINRCLLMSAIGMPASHYQRLQQSNCNINVLNFSGGWGDPVQLESLNQTAHMGVPLPPPRKDNNRLRLLLIRHGETQWNREGRFQGIRDIPLNDNGRHQAQKAAEFLKDVPINLGISSPMARPKETAEIILQYHPSIELDLQPELAEICHGLWEGKLETEIEAEYPGLLQQWKDAPATVQMPEGENLQQVWDRAIACWQDRVKFYSQGDGSTVGIVVAHDAINKVILAYLLGLTPAHFWQVKQGNGGVSVIDYPQGLDKPPVIQAINLMGHLGTVLDKTAAGAL

SEQ ID NO: 565 - DNA, 875 bp, Arabidopsis thaliana (mouse-ear cress)
  CDS (30)..(722)
aaagcaattgtcagatttcagcatctcccatggaggaatcaagattcgattctgaagatgttgattatgctgagattgttgttgttcgtcatggtgaaacatcttggaatgccgagagaaaaatccagggtcatttggatgttgagttaaatgatgcaggaagacaacaagcacaaagagttgcagagcggttatcgaaggagcagaagatatctcatgtatactcttctgacttgaagagagcctttgagactgctcagatcattgctgctaaatgcggcaagcttgaggtgcttaccgatcgtgatttgcgggaaagacatttaggagatatgcaagggcttgtgtatcaagaagcttcgaaaattcgcccggaagcttacaaggctttttcatctaaccgcacagacgttgatattccaggtggaggagaaagtcttgacaaactttacgatagatgtacaactgcattacagagaatcggcgacaaacataaaggtgaaaggatagtagtagtgactcatggaggtgtgatccgatctctctacgaaagagctcgtccaagtgcaagaaaagttgaaaagatactcaatacatcggtcaatgtgttccgtttattcgacggagacaaatggaccatccaagtttggggtgatgtgagtcatctggaggaaaccggcttcttacaatcaggttttggtggtgatagaacctctggttagagagattctatactcttagtcttcttccccttggaagagcatttatgtaatttaagtttcactccataacttttcaatttttaacatttgaccccattactttgataaagtgatttgggaggattgataaagtaaattgctataaatttctac

SEQ ID NO: 566 - protein, 230 aa, Arabidopsis thaliana (mouse-ear cress)
MEESRFDSEDVDYAEIVVVRHGETSWNAERKIQGHLDVELNDAGRQQAQRVAERLSKEQKISHVYSSDLKRAFETAQIIAAKCGKLEVLTDRDLRERHLGDMQGLVYQEASKIRPEAYKAFSSNRTDVDIPGGGESLDKLYDRCTTALQRIGDKHKGERIVVVTHGGVIRSLYERARPSARKVEKILNTSVNVFRLFDGDKWTIQVWGDVSHLEETGFLQSGFGGDRTSG

SEQ ID NO: 567 - DNA, 741 bp, Debaryomyces hansenii
  CDS (1)..(741)
atgagcccatctaaagcaccaactccaagagttatatttattcgccacggccaaaccgaatggtcaaaatctggccaatatacgtccattactgatttaccattaacagatttcggagtcaaacagatgcggaatactggtaaacacttaattgggcctagtccattccaattgatcaaaccggaaaacttgaagaatgtctttacatctccaagattgcgtgccaagcaaacggttgagttgttgctcgaagggttgaacgatatggcaaaggccaagttgcttaccaccgaggaagataacttaagagagtgggaatacggtgattacgaaggattattgacgtcccagattattgaattaagaaacaagagaggtttggataaggatttacctaaaggtgaagaatggaacatttggagggacgggtgtgaaaacggtgaaacgcacgagcaagtttccgcaagattggacaaggttatcacgaacatcagagctatccacgaaaaggcgattcaagataatgttccttgcgatgtcatagttgttggacatggtcatatcttgagatgttttgctgctagatgggtgggtaaagacattaatgtcaatccgcaagtcgtgttggatgctggtggagttggagttttgagctatcaacaccataatattcacgagcctgctttatgcttagctggagcatttgttgtcccagttgaagaggaagggtctgatatataa

SEQ ID NO: 568 - protein, 246 aa, Debaryomyces hansenii
MSPSKAPTPRVIFIRHGQTEWSKSGQYTSITDLPLTDFGVKQMRNTGKHLIGPSPFQLIKPENLKNVFTSPRLRAKQTVELLLEGLNDMAKAKLLTTEEDNLREWEYGDYEGLLTSQIIELRNKRGLDKDLPKGEEWNIWRDGCENGETHEQVSARLDKVITNIRAIHEKAIQDNVPCDVIVVGHGHILRCFAARWVGKDINVNPQVVLDAGGVGVLSYQHHNIHEPALCLAGAFVVPVEEEGSDI

SEQ ID NO: 569 - DNA, 741 bp, Yarrowia lipolytica
  CDS (1)..(741)
atggcccctcgagttatctttgtacgacacggcgagaccgaatggtcaaagtccggccaacacacgtcggtgactgatctgccattgactgagaacggagtcaagcgagtgcgagcgacgggacgggcgctggtgggccgaaaccggctggtgaacccggcgtacgtggagcacatttttgtttcgccccgatctcgtgcccagcagacgctcaagctcttttttgaggacgagcccgaggctctcgccaagatcccccagaccgtgaccgaagacattcgagagtgggactacggcaagtacgagggccgaaagtcagccgaaatccgggccgaccgaaccgcgcgaggcatcgacaaggacggccacaagtggaacatttggtccgacggctgcgaggacggagagtcgccccaacaggtgcagaagcgagtggacgagctcatcaaggagatccgggtgatccacaagaaggcgctcgacgagggcaaggagcattgcgacgtcatggtgttcgcacacggccacatcctgcgagtctttgctctgcgatgggtcaacggagacatcaccatcaacccggctctgattctcgaggcaggaggagtcggtgtgctgtcttacgagcataacaacattgaggagccagccatttacctgggaggagccttctttgtgcccgacgaggatgtggagaagaacagcggagtcattgcgctggctgggggagagcagaactag

SEQ ID NO: 570 - protein, 246 aa, Yarrowia lipolytica
MAPRVIFVRHGETEWSKSGQHTSVTDLPLTENGVKRVRATGRALVGRNRLVNPAYVEHIFVSPRSRAQQTLKLFFEDEPEALAKIPQTVTEDIREWDYGKYEGRKSAEIRADRTARGIDKDGHKWNIWSDGCEDGESPQQVQKRVDELIKEIRVIHKKALDEGKEHCDVMVFAHGHILRVFALRWVNGDITINPALILEAGGVGVLSYEHNNIEEPAIYLGGAFFVPDEDVEKNSGVIALAGGEQN

SEQ ID NO: 571 - DNA, 816 bp, Kluyveromyces lactis
  CDS (1)..(816)
atgtctaaagttactccccgttgtattatcgtccgtcatggacaaactgaatggtcaaaatccggtcaatataccggattaactgatattccgttgactccatatggtgttgaacagatgagaagaactggtaaatgcgtctttggtaacaagttcattgacccaaaccatatcacatacattttcacttctcctcgtcaacgtgctagaaagactgttgatttaattttggaatcccttactgaagaacaacgttcaaagatcagaatcgtagtcgataacgatctaagagaatgggaatatggtgattacgagggtctgttgacccatgaaattgtcaaattgagaaaatcccgtggtttggatcaagaaaggccttggaacatctggcgtgatggttgtgaaaacggtgaaagcaccaagcaaatcggttgtagactttcccgtgtcatttccagaattcaaaacctacatcgccaacaacagaaagacggagtaccaagtgatatcttggtgtttgcacatggccatgcattacgttatttcgcatccttgtggatcaaacatggattagaagaaaaatatgaaccatcattcgatccaccaaaacctacttataacgatgagactgttcctaatgtaacaatggaaaagtacagatacttggttgataatccaaacttcttgttggatgctggtggtatgggagttctttcttatgcacaccataatattgacgaacctgctctagcgttggccggaacatttattgccccaccagaggaagaatctcaacatgaaccggtagttgaataa

SEQ ID NO: 572 - protein, 271 aa, Kluyveromyces lactis
MSKVTPRCIIVRHGQTEWSKSGQYTGLTDIPLTPYGVEQMRRTGKCVFGNKFIDPNHITYIFTSPRQRARKTVDLILESLTEEQRSKIRIVVDNDLREWEYGDYEGLLTHEIVKLRKSRGLDQERPWNIWRDGCENGESTKQIGCRLSRVISRIQNLHRQQQKDGVPSDILVFAHGHALRYFASLWIKHGLEEKYEPSFDPPKPTYNDETVPNVTMEKYRYLVDNPNFLLDAGGMGVLSYAHHNIDEPALALAGTFIAPPEEESQHEPVVE

SEQ ID NO: 573 - DNA, 687 bp, Kluyveromyces lactis
  CDS (1)..(687)
atgaccgctgatataccgtactatgagtcaaataacgataaaaacgtgctacgtctgtttgtcattagacatggtcaaactgaagaaaatttgaagaagatattgcaaggtcatatggacaccgagctgaacgaaacaggacaggatcaagcatccaaactgggggaatatttggctaatgatagacatttgaaatttgataaaatatacagtagtgatttgaaacgttgccaacaaaccatcaacacagctcttgaacatttcaacaccccaactaaattggttactactgataaacttagagaaagatgcatgggggttatagaaggaatgtacctcaaggacgctgaagaatatgctgattcgatgggaaaaccaacttttagagacttcggtgaaccagcggaggagttccagcaaaggttatctaatgtattagaaaacattgtaagtgaaaataaatcgagcaaaaatattggtatagtcagtcatggtggcagcattagacaactattaaagctactcgattataaggagctcaatgtccataaaatcattgttttcaatacctccgtcacgattattgactacatcaagaatgaaaaagcatatgtggtaagacgagtcggtaatacccagcatttgggatccggagagtttatcgtcagcgacttacagctaagataa

SEQ ID NO: 574 - protein, 228 aa, Kluyveromyces lactis
MTADIPYYESNNDKNVLRLFVIRHGQTEENLKKILQGHMDTELNETGQDQASKLGEYLANDRHLKFDKIYSSDLKRCQQTINTALEHFNTPTKLVTTDKLRERCMGVIEGMYLKDAEEYADSMGKPTFRDFGEPAEEFQQRLSNVLENIVSENKSSKNIGIVSHGGSIRQLLKLLDYKELNVHKIIVFNTSVTIIDYIKNEKAYVVRRVGNTQHLGSGEFIVSDLQLR

SEQ ID NO: 575 - DNA, 651 bp, Erwinia carotovora subsp
  CDS (1)..(651)
atgttacaggtatatcttgttcgccacggcgaaacagaatggaatgtggctcgacgtattcaaggccaatctgatagtgcgctgacgccaagaggtgagcaacaggcacaacaggttgctgaacgaatcgggacgttagggattacgcatatttttaccagcgatctcggcagaacgcgccagacgacagaaatcatcgctaaatattgtggtgattgccagataatcctggagcccggcttacgcgaattgaacatgggcgtattggaagctcgcgatctggattcgttgaccgccgaggaagaagggtggcgtaaacggctggtggatggcacacctaatgggcgaatcccggaaggggaatcgatggtggatgtcgcatcacgtatgcacggtgtcttagaacattgtctggcattgcctgctgggagccgcccgttgctggttagtcacggcatggcgctggggtgtttactcagtacggttttggggctaccagcatcggctgagcggcgtctgcgactacgcaactgttccttatcgcgcatcgatcatcagcaaagcccgtggctggcatcgggttgggtggtggaaacggccggagatatttctcatttggatatcccggcactggatgagttacagcgctga

SEQ ID NO: 576 - protein, 216 aa, Erwinia carotovora subsp
MLQVYLVRHGETEWNVARRIQGQSDSALTPRGEQQAQQVAERIGTLGITHIFTSDLGRTRQTTEIIAKYCGDCQIILEPGLRELNMGVLEARDLDSLTAEEEGWRKRLVDGTPNGRIPEGESMVDVASRMHGVLEHCLALPAGSRPLLVSHGMALGCLLSTVLGLPASAERRLRLRNCSLSRIDHQQSPWLASGWVVETAGDISHLDIPALDELQR

SEQ ID NO: 577 - DNA, 840 bp, Candida glabrata
  CDS (1)..(840)
atgggtcacagtccaactcctagatgtattattgtcagacatggccagaccgagtggtctaagtccggtcagtacaccggtttgactgacttgccattgactgactatggtgttggccaaatgctgaggaccggtgagtctatcttctccaacaaccgtttcatcaaccctgaccacatcacatatatcttcacttctccaagaaccagggccaagcagaccattgagttggttttgaagccattgagcgaggagcaaaggtctaagatcaaggttattgttgacaatgacttgagagaatgggagtacggtgactatgaagggctattgaccaaggagattgtcgagctgcgtaagtcccgtggtttggacaaagctcgcccatggaatatctggagagatggctgtgagaacggtgaaactactgaagaagtcggtttgagattgtctagagtcatcgcacgtatccaaaacctgcacaagaagcaccaggaacaaggcataccatctgatatcatggtgtttgctcatggacatgctttgcgttactttgcggccatctggctacgtctaggtgaagagaaagagtgtatcactgctttctctaagcagaaggttaagtcctatgaggaggatgagtctgtggtcccatacgttgagattaccaagttcagacacttggtggacaacccattcttcttacttgacgctggtggtatcggtgtattgtcttatgcccaccacagcattgatgaacccgccttggacctagctggtgcgttcatttccccaccagaggaagagtcccaacacgctccagttccaaacaagaattactga

SEQ ID NO: 578 - protein, 279 aa, Candida glabrata
MGHSPTPRCIIVRHGQTEWSKSGQYTGLTDLPLTDYGVGQMLRTGESIFSNNRFINPDHITYIFTSPRTRAKQTIELVLKPLSEEQRSKIKVIVDNDLREWEYGDYEGLLTKEIVELRKSRGLDKARPWNIWRDGCENGETTEEVGLRLSRVIARIQNLHKKHQEQGIPSDIMVFAHGHALRYFAAIWLRLGEEKECITAFSKQKVKSYEEDESVVPYVEITKFRHLVDNPFFLLDAGGIGVLSYAHHSIDEPALDLAGAFISPPEEESQHAPVPNKNY

SEQ ID NO: 579 - DNA, 744 bp, Candida glabrata
  CDS (1)..(744)
atgccaaagttagttctagttagacacggtcaatccgaatggaatgaaaagaacttgtttaccggttgggtcgacgttagattgtccgccaagggtgaacaagaagccgctagagccggtgaattgttgaaggagaagaacgtccacccagacatcttgtacacttccaagctatccagagctatccaaaccgctaacattgctttgtccaaggctgacagattgtggatcccagtcaagagatcctggagattgaacgaaagacactacggtgctttgcaaggtaaggacaaggctgaaaccttggaaacttacggtgaagagaagttcaacacctggagaagatccttcgatgtcccacctccagtcatcgaagctgactccccatactctcaaaagaacgatgaaagatacagagacgtcgacccaaatgtcttgccacaaactgaatctttggctttggtcattgacagattgttgccatactgggaagatgttatcgccaaggacttgttggctggtaagaccgttatgatcgccgctcacggtaactccttgagaggtttggtcaagcacttggaaggtatctccgatgctgacattgccaagttgaacatcccaactggtattccattggtcttcgaattggacgaaaacttgaagccatccaagccatcttactacttggacccagaagctgctgctgctggtgccgctgccgtcgctgctcaaggtaagaaataa

SEQ ID NO: 580 - protein, 247 aa, Candida glabrata
MPKLVLVRHGQSEWNEKNLFTGWVDVRLSAKGEQEAARAGELLKEKNVHPDILYTSKLSRAIQTANIALSKADRLWIPVKRSWRLNERHYGALQGKDKAETLETYGEEKFNTWRRSFDVPPPVIEADSPYSQKNDERYRDVDPNVLPQTESLALVIDRLLPYWEDVIAKDLLAGKTVMIAAHGNSLRGLVKHLEGISDADIAKLNIPTGIPLVFELDENLKPSKPSYYLDPEAAAAGAAAVAAQGKK

SEQ ID NO: 581 - DNA, 621 bp, Bartonella quintana
  CDS (1)..(621)
atgggacgcacacttgtattaatccgtcatggacaaagtgaatggaatatcaaaaatctttttaccggttggaaagaccccggtttgacagaaaaaggccatgcagaagcaataacagcaggaaaaaatctcaaagcagctggtttaaaatttgatattgcttatacatctgccttacagcgtgcacaaaaaacggctcagcacattttagaacaaatgggacaatcagatttgccattgataaaaaactcggcattgaatgaacgtgattatggtgatctctctgggctaaataaagatgaagtacgtcaacaatggggagaacaacaagtgcaaatatggcgtcgctcctatgctgttgcgccccctaatggagaaagcctacgcgatactggtgcacgtgtttggccctactatctttaccatattcaacctcatattttgcgttctcaaactgttttgattgcagcacatggtaattctcttcgtgctcttattatggcacttgaaggtctaaatagtgaagaaattatatctcaagaattaacaactggcattcctcttatttatacatttaattccgactcaacaatttcatcaaagaccattatcacaccctaa

SEQ ID NO: 582 - protein, 206 aa, Bartonella quintana
MGRTLVLIRHGQSEWNIKNLFTGWKDPGLTEKGHAEAITAGKNLKAAGLKFDIAYTSALQRAQKTAQHILEQMGQSDLPLIKNSALNERDYGDLSGLNKDEVRQQWGEQQVQIWRRSYAVAPPNGESLRDTGARVWPYYLYHIQPHILRSQTVLIAAHGNSLRALIMALEGLNSEEIISQELTTGIPLIYTFNSDSTISSKTIITP

SEQ ID NO: 583 - DNA, 648 bp, Parachlamydia sp
  CDS (1)..(648)
atggtagataaaaatttattttgcgatatttatttaatccggcatggagagacagattggaacatgttaggaaaattacaagggcatattgatatttctcttaacagctcaggtaagattcaagctcggaaccttcaaaagcaactgaatcacattaattttgcagcagctttttcctctgatcttagccgagcgcgtcaaacggcagaaattgttctcgaatcaaaagacattaagatagaggaaacagctgttttaagagagcgacagctaggcgaatgggaaggtcaatcaatagatgacctaaaaaattggttgcaaaagaacagtcaaattgattctttcactcaagaagattttttagcctacaagtgggattcaatatctgaaaactatgcagaagtattcaaccgtttgtctaggcttgttttaaagatctctccattgtacttaggctctacaattttgctgtcttcccacggaggattattacgctcagttctttatcagttggattttaaaagtgaactcagatggcatgtagataattgtggatttattaaaatacgtgccaataatagaggtggaatgactattgcggaatgtcatgggattaagacctcaagagcctcctcttcaacattttga

SEQ ID NO: 584 - protein, 215 aa, Parachlamydia sp
MVDKNLFCDIYLIRHGETDWNMLGKLQGHIDISLNSSGKIQARNLQKQLNHINFAAAFSSDLSRARQTAEIVLESKDIKIEETAVLRERQLGEWEGQSIDDLKNWLQKNSQIDSFTQEDFLAYKWDSISENYAEVFNRLSRLVLKISPLYLGSTILLSSHGGLLRSVLYQLDFKSELRWHVDNCGFIKIRANNRGGMTIAECHGIKTSRASSSTF

SEQ ID NO: 585 - DNA, 636 bp, Listeria monocytogenes
  CDS (1)..(636)
atggcagaaggtttacgtacaatttattttgtaagacatggtaagacggaatggaatatgactggacaaatgcagggatggggcgattcgccgctagttgcagaaggtattgacggggcaaaagcagttggcgaagtgttgaaagatacaccaattgatgcggtttatacaagtacaagtaaacgcacgcaagataccgcggcttacattcttggcgaccgcgaaatcgaaattcaacctctggaagaactaaaagaaatgggatttggaacgtgggaaggcattagagtaactgaaattgacgaacaacaccctgaagaacgcgcaaaaattctccatagcccagaaacctacaaagcagaagtgaacggcggcgagacttattatgaacttgcagaacgactgttagaaggcgtcgaaaaaatcattgcagaaaatctaagcggcaacattctcgtcgtttctcacggcatgtcgctcacgttattattatacttgctgcaaggcggaacggttgaagatcaccgcaaagaagcgccaagaatcttgaacacaagtattagcatcgtagaataccaaaacggcgaattttctcttaaaaaaatcaatgaaatcggtcatttagacttaaaataa

SEQ ID NO: 586 - protein, 211 aa, Listeria monocytogenes
MAEGLRTIYFVRHGKTEWNMTGQMQGWGDSPLVAEGIDGAKAVGEVLKDTPIDAVYTSTSKRTQDTAAYILGDREIEIQPLEELKEMGFGTWEGIRVTEIDEQHPEERAKILHSPETYKAEVNGGETYYELAERLLEGVEKIIAENLSGNILVVSHGMSLTLLLYLLQGGTVEDHRKEAPRILNTSISIVEYQNGEFSLKKINEIGHLDLK

SEQ ID NO: 587 - DNA, 633 bp, Thermus thermophilus
  CDS (1)..(633)
atgaaggagatctggtacgtccgccacggggagacggagtggaacgcccagcggcgcttccaggggcacctggacgtccccctctcccccgtgggtatcgggcaggccttccgcctcgccgagcgcctcagccgcagccgcataagctttgaccgcctctacgcctcggatctgcggcgggcccgccagaccgccgagcccctcgcccaggtcctcggcctccccatcgccaccacgccccttctccgggagatccacgtgggcgagctcgccggcctgacccgggccgaggccgaggcccggtttcccagcttcttggcggaagcggccaaggacccctggaacgcccgcaggcccggtggagagagcatggccgacctggcccgaaggcttcaggcctttctggaagaggtgccgcccggccgccacctcgtggtcacccacggcggcgtcatccgcgccgccctcaagctcgccctagacctcgccggggacacctggcgccgcttccacatccaaaacacctccatcacccggatcctctacccggaaaacgccgtgctcaccgtggcggacgccgcccacctggaagtgtgggccgactggctcagcgacgaggatctaaaaggataa

SEQ ID NO: 588 - protein, 210 aa, Thermus thermophilus
MKEIWYVRHGETEWNAQRRFQGHLDVPLSPVGIGQAFRLAERLSRSRISFDRLYASDLRRARQTAEPLAQVLGLPIATTPLLREIHVGELAGLTRAEAEARFPSFLAEAAKDPWNARRPGGESMADLARRLQAFLEEVPPGRHLVVTHGGVIRAALKLALDLAGDTWRRFHIQNTSITRILYPENAVLTVADAAHLEVWADWLSDEDLKG

SEQ ID NO: 589 - DNA, 654 bp, Mycobacterium paratuberculosis
  CDS (1)..(654)
atggcatgttcgcccgccagacgcttgggcccagcggccccagcatgtcgtccggcagaatcactgcacatgggcttgcacaaccaccgtctggtgctgctgcgccacggcgagaccgagtggtcgaaaacgggtcggcacaccggccgcaccgaggtggagctgaccgaggccggccggacgcaggccgagcgcgccggccgggcgctgagcgagctgaaactcgttgagccactggtgatcagcagcccgcggcaacgctcgctggccaccgcggagctggccgggctgaacgtcgacgaggtgtccgagcagctcgcggaatgggattacggctcctacgagggcctgaccactgagcagatccgccagtcggtgcccgactggctggtgtggacgcacggctgtcctggcggcgagagcgtcgcgcaggtcagcggtcgcgccgacgcggccgtcaccgcggcgctgcggcagatggagtcgcgcgacgtggtcttcgtcagccacggccacttctgcagggcggtgatgacacgctgggtggaattgccgctcgccgaaggcagccgcttcgccatgatcaccgcgtcgatcgcggtctgcggattcgagcacggggtgcggcaactgcgggcgctcgggttgacgtga

SEQ ID NO: 590 - protein, 217 aa, Mycobacterium paratuberculosis
MACSPARRLGPAAPACRPAESLHMGLHNHRLVLLRHGETEWSKTGRHTGRTEVELTEAGRTQAERAGRALSELKLVEPLVISSPRQRSLATAELAGLNVDEVSEQLAEWDYGSYEGLTTEQIRQSVPDWLVWTHGCPGGESVAQVSGRADAAVTAALRQMESRDVVFVSHGHFCRAVMTRWVELPLAEGSRFAMITASIAVCGFEHGVRQLRALGLT

SEQ ID NO: 591 - DNA, 1134 bp, Mycobacterium paratuberculosis
  CDS (1)..(1134)
atgaaggtcgtcatcgaagccgacgggggatcgcgcggcaaccccggcccggccgggtacggcgccgtggtgtggacaccggaccgcggcaccgtgctggccgagaacaagcaggccatcgggcgggccaccaacaacgtcgccgaatatcgcggcctgctagccggtttgggcgacgcgctgaagctgggcgccaccgaggccgaggtctacctggattccaaactgttggtggagcagatgtcggggcggtggaaggtcaaacaccccgacctgatcgagctgcacgcccaggcccgaagcctggccgcgcgattcgacaggatcagctacacgtggatcccccgcgagcgcaactcgcacgccgaccggctggccaacgaggcgatggacgcggccgccgcggccaccggcacggcggaaaagcccgggccggccgaacaatccgatccgaccgccgccgacgccgggaaaaccgccgcggcgccgtcacccgcggcgcccgggtggaccggcgcgcgcggcaccccgacccggctgctgttgctgcgacacgggcagaccgaattgtcggtgcagcggcgctattccgggcgcggcaaccccgcactcaccgagacgggacggcggcaggccgacgcggcggcacgctatctggccgcgcgcggcgggatttcggcggtgttcgcctccccgctgcaacgggcctacgacaccgcggcggtcgtcgccaaggcgctgggcctggacgtgaccgtcgacgacgacctgatcgaaaccgatttcggggcctgggaggggttgacgttcggcgaggccgccgagcgcgaccccggactgcaccggcgctggctgcgtgacaccagcaccgccccgcccggcggggagagcttcgactcggcggccgagcgggtgtcgcgggttcgccagaagatcatcgccgcacagcagggcagcaccgtgctggtggtgtcgcacgtgacgccgatcaagatgctgctgcgggaggcgctggacgccgggccgggcatcctgtaccggttgcatctcgacctcgcctcgctgagcatcgccgagttctattccgacggagccgcttcggtgcggctggtcaaccagaccggatacctgtag

SEQ ID NO: 592 - protein, 377 aa, Mycobacterium paratuberculosis
MKVVIEADGGSRGNPGPAGYGAVVWTPDRGTVLAENKQAIGRATNNVAEYRGLLAGLGDALKLGATEAEVYLDSKLLVEQMSGRWKVKHPDLIELHAQARSLAARFDRISYTWIPRERNSHADRLANEAMDAAAAATGTAEKPGPAEQSDPTAADAGKTAAAPSPAAPGWTGARGTPTRLLLLRHGQTELSVQRRYSGRGNPALTETGRRQADAAARYLAARGGISAVFASPLQRAYDTAAVVAKALGLDVTVDDDLIETDFGAWEGLTFGEAAERDPGLHRRWLRDTSTAPPGGESFDSAAERVSRVRQKIIAAQQGSTVLVVSHVTPIKMLLREALDAGPGILYRLHLDLASLSIAEFYSDGAASVRLVNQTGYL

SEQ ID NO: 593 - DNA, 627 bp, Lactobacillus johnsonii
  CDS (1)..(627)
atggatctgttattagtaagacatggggttagtgaacataatacttcagatgtgatctccggcggtactagtaaccctaacttaagccaagcgggtgttaaacaagtagaagaagtaagtaagttaattgacaatagtaaacttgatcgagtatatgcaagcccattaattagagctaaaagaacagcacaaattttaactgattttcaaaaagagattattactgatgatcgacttagagaaatgaattttggctcttgggacggccaacatgccgaagagctgaagataaaatatcctgatgccttcgatgatttaggaactattaatagtaaatatgcagaatacgctgaaaatggtgaaacttttagtcaagtagcagatcgagttgaagaatttttatctgagattcaacccgatgctaatgacaagacaattatgattgtttgtcacggatttgtgattaggagtttaatagctcggtggtttaaactaaaaattgaagatgtaatgacagtaagaaatgttagttttactgagcttcattttgaaaaaaatgatattgagcgaccaagattaatgacctttaatcggacggaacccttgtattacggaattaagaggtga

SEQ ID NO: 594 - protein, 208 aa, Lactobacillus johnsonii
MDLLLVRHGVSEHNTSDVISGGTSNPNLSQAGVKQVEEVSKLIDNSKLDRVYASPLIRAKRTAQILTDFQKEIITDDRLREMNFGSWDGQHAEELKIKYPDAFDDLGTINSKYAEYAENGETFSQVADRVEEFLSEIQPDANDKTIMIVCHGFVIRSLIARWFKLKIEDVMTVRNVSFTELHFEKNDIERPRLMTFNRTEPLYYGIKR

SEQ ID NO: 595 - DNA, 807 bp, Ashbya gossypii
  CDS (1)..(807)
atggcgaagacgcataccccccgttgcattgtgatccgtcacggacagactgaatggtcaaaatcaggtcaatacacaggcttgacagaccttccgctgaccgaatatggtgtcggccagatgcggcgcactggtgctgcgatatttagcgcaaaatacattgatcctgcgcacataacatacgtatttacttctccacgccaacgcgcgcggaagactgtggacctggttttggaaagcctcagtgaagatgaacgtgcacgcatccaggtggtggtcgacgaggacctacgggagtgggagtacggtgactacgaaggtctgctgacaagccagattatcgaattgcgtcgtagccgtggcttggactgcaagcgcccatggaatatatggcgcgacggctgcgagaacggcgagagcacccagcaggtgggcctgaggctatcacgagtgattgcccggatccaggcattacaccggcagcaccaagctgagggacggccgagcgatattctggtgtttgcgcatggccatgctctccgttatttttctgcgctctggatgaagatgggcgtcgaagcgccgacgccagactgcgccatgccctcgagtaaccggaatgacgattccgtgcccttggtgcggctggagcaattccggtacctgcaggacaaccccaacttcttgctagacgcaggtggcatcggtgtgttgtcgtacgcacaccacaatattgacgagccagctctagctctcgctggcgctttcgtttgccccccacaggaggaatcacagcacgacgggtaa

SEQ ID NO: 596 - protein, 268 aa, Ashbya gossypii
MAKTHTPRCIVIRHGQTEWSKSGQYTGLTDLPLTEYGVGQMRRTGAAIFSAKYIDPAHITYVFTSPRQRARKTVDLVLESLSEDERARIQVVVDEDLREWEYGDYEGLLTSQIIELRRSRGLDCKRPWNIWRDGCENGESTQQVGLRLSRVIARIQALHRQHQAEGRPSDILVFAHGHALRYFSALWMKMGVEAPTPDCAMPSSNRNDDSVPLVRLEQFRYLQDNPNFLLDAGGIGVLSYAHHNIDEPALALAGAFVCPPQEESQHDG

SEQ ID NO: 597 - DNA, 687 bp, Mycobacterium tuberculosis
  CDS (1)..(687)
atgtcatcctggcatgctgctcgcacagtggttcgggcgacaggcctaggatgtcgtcgggcacaatctgtcggtatgggcgtgcgcaaccaccgattgctactgctccgccacggcgagaccgcttggtcgacgctgggccggcacaccggcggtaccgaggtcgagctgaccgataccgggcgaacgcaggcagagctggctggtcagctgctgggtgaactcgaacttgacgacccgattgtcatctgtagcccgcgtcgacggacgttggatactgccaagttggccggcctgacggtgaatgaggtaactgggctgctcgccgaatgggattacggttcctatgagggccttacgacgccgcagatccgggaatccgaacccgattggctggtgtggacgcacggctgcccagctggagaaagcgtcgcacaggtaaacgatcgcgctgacagcgccgtcgcgctggccctggagcacatgtcctcacgcgacgtgttgtttgtcagccatggccacttctcccgcgcggtgatcacgcgctgggtccagctaccgctcgccgaaggcagccgtttcgcgatgcccaccgcctcgatcgggatctgcgggttcgagcacggcgtgcgtcagctcgccgtgctcgggttgaccggtcatccgcagccgatcgcagccgggtga

SEQ ID NO: 598 - protein, 228 aa, Mycobacterium tuberculosis
MSSWHAARTVVRATGLGCRRAQSVGMGVRNHRLLLLRHGETAWSTLGRHTGGTEVELTDTGRTQAELAGQLLGELELDDPIVICSPRRRTLDTAKLAGLTVNEVTGLLAEWDYGSYEGLTTPQIRESEPDWLVWTHGCPAGESVAQVNDRADSAVALALEHMSSRDVLFVSHGHFSRAVITRWVQLPLAEGSRFAMPTASIGICGFEHGVRQLAVLGLTGHPQPIAAG

SEQ ID NO: 599 - DNA, 618 bp, Photorhabdus luminescens
  CDS (1)..(618)
atgcgactatttttggttcggcacggtcagacggaagcgaatctgagtggtgttttctgtggtatgacggatgtggagctgactgaaacggggataaatcaggctcggcaagttgcccgttatctatcggcagtaacattttcgcaagcgataagcagcgcgttacggcgggcgcgtcatactgcggagattattctggccggtcattcgttatcagctaatattgatacacaactcaatgagatgcatttcggcgcatgggaaatgcgccatcaccgtgatttgcaacatgaagacgcagaagcttgggctgcttggttagccgattggcaacaggcatccccgactggcggtgaaactttctcagcatttgcggccaggatagagaacgtggttcagcaactgttgacaccagaaagtcaggataatctgttgctggttgctcatcagggagtattgggcttgttactggcgcgtctgttggctataccgcctgctgctatgtggcactttcattttgaacaaggaacatacagtgtcgtggaaatccaacatggatttactaccttgcgaacatttaataaccggactgactggcagcttgagacacggaaataa

SEQ ID NO: 600 - protein, 205 aa, Photorhabdus luminescens
MRLFLVRHGQTEANLSGVFCGMTDVELTETGINQARQVARYLSAVTFSQAISSALRRARHTAEIILAGHSLSANIDTQLNEMHFGAWEMRHHRDLQHEDAEAWAAWLADWQQASPTGGETFSAFAARIENVVQQLLTPESQDNLLLVAHQGVLGLLLARLLAIPPAAMWHFHFEQGTYSVVEIQHGFTTLRTFNNRTDWQLETRK

SEQ ID NO: 601 - DNA, 588 bp, Anopheles gambiae str
  CDS (1)..(588)
atgtcccgtaccctctatctgctgcgccacggccagacccgttacaacgccgaactgcggctgcaggggcgctgcaactccgaactgaccgccaagggcgaagcccaggccctcgccatgggggcccgtctggtcaagctgctggcggagcccgctgactggaccctttacgccagccccctcggccgggcgcgccagaccgcggagcgggtatgccagcaacttggcatggaccaagagcgtatcgtctgggacgagcggctggtggagctggggatgggggagtgggagagtcgccgggtgcccgagctgctggcggcccaccccgagctcgatctggagcagccagactggtatctgcaagcccccgagggggagagttttcagagcattcaaggccgggcgctgagctggctgcaggatgagcgtatcgccgagcgtgccatcgtggtctctcacggtctgttcggcgccatgctgcgcggcgcctatgcggatctggactacaccaccacctggctgcaggagttgccgcaggatgccttcttcaaactgagcggcggccgtatcgagcggatcccctgctga

SEQ ID NO: 602 - protein, 195 aa, Anopheles gambiae str
MSRTLYLLRHGQTRYNAELRLQGRCNSELTAKGEAQALAMGARLVKLLAEPADWTLYASPLGRARQTAERVCQQLGMDQERIVWDERLVELGMGEWESRRVPELLAAHPELDLEQPDWYLQAPEGESFQSIQGRALSWLQDERIAERAIVVSHGLFGAMLRGAYADLDYTTTWLQELPQDAFFKLSGGRIERIPC

SEQ ID NO: 603 - DNA, 3762 bp, Neurospora crassa
  CDS (1)..(3762)
atgtcagctaccgctcccaagatcatcacgatagggtatgcccacgaagccctggacagaaacatcaatcttcgcaaagacatcgggtcggtaaacttggcggtgggcgggaacctagaagccgtgtttgtacagctcaatggtaaacaggctacagcggaatgtgacgtgtgcaagaagagtctaggaccatttgtcggttgtgttcaacacccgagtgttggcgatggttcatgtgcaaattgcctgtataggcgtcagggactcaaatgtacacatcgtgtttcgatggacatcgacagtgacgacctcccgctcattcaaagtcgcaagacgcaggaccccaatgtacacccgccaccttgcaccaagaagaatgtcaaaaagcaaagaaggaccatcgaaactgagacggctagtcatactgaggcagagccgccaattcatggccccggcacagcgcttggttcggctgcagaccactggctaaaaagtctagccttcagcaagtacgcttccccagctcccactcaaggagaaaaagcgaacaacgactatgcgcctaacccgggacacttcgaaaacgggaactatacgtctagctctggactcctcgagaacaacaactacactctgagccaagcacctgcggtcatgggaggcaacgactacgcccccagcccgatgccgttcaaaggaaccatgaatgacattctcgaccacgatgccagcaagccgatgcttgcgtacctgcccaaaaatgtttcccccgaggtgttgcgctccatagctcaataccaccaggaccttgcggacgacctccgcatggaagccaagaggcttgagaaggagatgcgacaagagcgcgagcgtgagcgtgagcaccgtgtgagagagcatttggtttcagtgcgcggcactcctcctcttcctctaaaagtccccaaacctttccagcttagcaattctgccactaagcatacccatctccaacaccccacaagctttatgccatacaaatggcatatgttaatggcttcagacgatgaaaatttcgtggacgctactatttggaatagtggcttgaatgtcccgcgcatagaaattttggcagacgaaatcgctggatttgtgtcagcccgccggcccgctaagaggaagcgtgacaaaatggatatccaagacaatctccaggatccctcacagacctccacgaaagaaaaccacgatgataacgccaagttttcaagggactggaagccaccacaggggatcatcacagacaaggacctcgaagagatttatgcaagccttggttcaagcaatacgaagattaaggaactgagaaaacgcaaggcagtgcgcgagatcgctttacggaaaagcgttgacacaatagaccttaccgaaaagcaccagctccgagcagcttatcttcagcttacgggtcaacaagctcagaatccctgtaaggaatgcaaagctggcaaagggcgcttcgaggtttgcgtctacggtgatggcaacagatgtggcaactgctgtcaccgcggcagcggcaacgctcgctgctcttttcagataaccgggaaagaaaatactgaagctaccaatgaatccccacatcacgcagacgtagatgcgccggtaccgaataccaaatcagtgccggacttgctctctgaacctggaatcgggacagggcttgaacatcatccagagccggagccggaaccccagaagggcggacgagaactaagaccacggccgccacagccaccacggccgccacggcgcaatagaaaactgccacaaagagatcaggatactagagtgacagaaactgccacagttggccgaaatcaagaacctgacacacccctcggccctccacccgcaacaacagagacaacaacgacagcagcagcagcagcagcagcagcagcagcagcagcagcagcagcaacaccaaggcaagaactaccatcagatgttcacgaagcacaactccctgctgccgtaggatcagtgggtaacgtacaaacttcccgcgaacgatgcgaatgcaggccgagagacacccgccccgaaagacaggaggaaaccgatgacaccacgggcctacagggtaccaaaacccaagacaggtcggcgatggcattgtggcaaggtgaagagcgacaggacactggcaaggacaaagatacaagagcgtttggcagggctgccgttagtgaagatgatgcgggcccttcttccattctcgcatgtctcggagattctcctatggagacgctgcggcgcctaggactgcattatcaggttcaggcggatgagttgaggctggagtgcatgaggattgatcgggaggagagaacgaggagacaaaaggagcgcgagagggagtgggagcgggaaagaggaggaagagaagatggcggctggactgacaagatgggtgatcatgtgtcttactcagaatacagaactaatacacaacccaacattggactgtattgtaaaattcaagatctctcaaagtatccgtgcagccccatgcttgaccgagacatagccgagaacagttttacgtgctccgtacgcgacggtgtgcgtagcgaagacccgtgtattgttacattttacccatccatgcacgctgcgtattgtaacgaatatcctacactgggaaaacttacgtaccgagcgctgaaaagttctggtgcgcactggcgtagtgctgctcgggatgattcccattcgtcgaattacctggctattgagaaatcgtcagatcggcaaagataccgagggtgcaatgtcattgtgaaaactccctttaccccggctgttccggcagtttcattgttgagcaacgtttcactacctctatcaattgtttacttcacccttccgccactcctcacgttattcccatcaaggccaagcaacccaggtcaaattcaagttccaccttcgacaactcagcgctcggaagtagcaaggatgtcaacaccccgggtattcattatcagacatggcgagaccgcatggtctattgatggccgtcacactggctcgaccgacattccgttgacagcgaatggcgagaagcgcgtcaaggcgacgggaaaagcgctcataggtgatgaccgcctgattgttcccaagaagctggcccatatatacgtatctccccgaaaaagagcccagcgtacctttgagcttctaaacctcggtatcaaaggtccgctgccatggcaacgtcatggcgagtgcgaatccaagccagttccatgcgatgccgaggttgaagtcaccgaggacatccgcgagtgggattatggtgaatacgaaggtatcactagtccgcaaattagggagaagaggaagcaacaaggtcttgatcccaactgggatatttggagggatggatgccctggaggagagaaaaatctcgtctgcaggagtcccgcagatgtcaacgagcgctgcgatcgtctcatcaaagatattcgggagaggtttcacgctcccgcgctcaataagccaaagggagatcctgatgcggaacgcgccgatgtgttgattgttgcccatggacacatccttcgtgcgtttgcacagcgatggactgggctgtctctgcacgagggaccttcgtttttgctggaagctggcggtgttggtaccttaagtgctttccatgttgatcttgaggatctagatgatgcgaagttggataagctggagaagatgtaa

SEQ ID NO: 604 - protein, 1253 aa, Neurospora crassa
MSATAPKIITIGYAHEALDRNINLRKDIGSVNLAVGGNLEAVFVQLNGKQATAECDVCKKSLGPFVGCVQHPSVGDGSCANCLYRRQGLKCTHRVSMDIDSDDLPLIQSRKTQDPNVHPPPCTKKNVKKQRRTIETETASHTEAEPPIHGPGTALGSAADHWLKSLAFSKYASPAPTQGEKANNDYAPNPGHFENGNYTSSSGLLENNNYTLSQAPAVMGGNDYAPSPMPFKGTMNDILDHDASKPMLAYLPKNVSPEVLRSIAQYHQDLADDLRMEAKRLEKEMRQEREREREHRVREHLVSVRGTPPLPLKVPKPFQLSNSATKHTHLQHPTSFMPYKWHMLMASDDENFVDATIWNSGLNVPRIEILADEIAGFVSARRPAKRKRDKMDIQDNLQDPSQTSTKENHDDNAKFSRDWKPPQGIITDKDLEEIYASLGSSNTKIKELRKRKAVREIALRKSVDTIDLTEKHQLRAAYLQLTGQQAQNPCKECKAGKGRFEVCVYGDGNRCGNCCHRGSGNARCSFQITGKENTEATNESPHHADVDAPVPNTKSVPDLLSEPGIGTGLEHHPEPEPEPQKGGRELRPRPPQPPRPPRRNRKLPQRDQDTRVTETATVGRNQEPDTPLGPPPATTETTTTAAAAAAAAAAAAAAATPRQELPSDVHEAQLPAAVGSVGNVQTSRERCECRPRDTRPERQEETDDTTGLQGTKTQDRSAMALWQGEERQDTGKDKDTRAFGRAAVSEDDAGPSSILACLGDSPMETLRRLGLHYQVQADELRLECMRIDREERTRRQKEREREWERERGGREDGGWTDKMGDHVSYSEYRTNTQPNIGLYCKIQDLSKYPCSPMLDRDIAENSFTCSVRDGVRSEDPCIVTFYPSMHAAYCNEYPTLGKLTYRALKSSGAHWRSAARDDSHSSNYLAIEKSSDRQRYRGCNVIVKTPFTPAVPAVSLLSNVSLPLSIVYFTLPPLLTLFPSRPSNPGQIQVPPSTTQRSEVARMSTPRVFIIRHGETAWSIDGRHTGSTDIPLTANGEKRVKATGKALIGDDRLIVPKKLAHIYVSPRKRAQRTFELLNLGIKGPLPWQRHGECESKPVPCDAEVEVTEDIREWDYGEYEGITSPQIREKRKQQGLDPNWDIWRDGCPGGEKNLVCRSPADVNERCDRLIKDIRERFHAPALNKPKGDPDAERADVLIVAHGHILRAFAQRWTGLSLHEGPSFLLEAGGVGTLSAFHVDLEDLDDAKLDKLEKM

SEQ ID NO: 605 - DNA, 567 bp, Synechococcus sp
  CDS (1)..(567)
atgcgccatggggcaacggaatgggctctcaatgggcggcacaccggcagcacagacctgccgctgcagcccgagggtgaagcggaagcctgcgccctcagcccggtcctcagccagcagacatttgcagtggtgttcagctctcccctccaacgggcacaacgcacctgcgagctggccgggctcggcgatcagatgcagatctacgacgacatcatcgagtggaactacggcgactacgaagggatcacaactgccaagatccgtgaaaccgtcccggactggacggtctggagccacggttgccccaagggtgagaacgctcagcaagttgaagttcgctgcgcaaacgcgatcagcacagcgctggccgtcccaggggacggggatgttgccctgtttgcccatggccacatcctccgggcactggctggaacatggctgggactgggtgccactggcggacaactgctaaggctgggcacagcctccgtcagcatcctgggctgggaacgggaaacccgggccattcagcgttggaataccccatccacagggaacttctag

SEQ ID NO: 606 - protein, 188 aa, Synechococcus sp
MRHGATEWALNGRHTGSTDLPLQPEGEAEACALSPVLSQQTFAVVFSSPLQRAQRTCELAGLGDQMQIYDDIIEWNYGDYEGITTAKIRETVPDWTVWSHGCPKGENAQQVEVRCANAISTALAVPGDGDVALFAHGHILRALAGTWLGLGATGGQLLRLGTASVSILGWERETRAIQRWNTPSTGNF

SEQ ID NO: 607 - DNA, 612 bp, Rhodopirellula baltica
  CDS (1)..(612)
atggagcgccaggtcatgagcgatcagttccctcaaatttatcttgctcgtcatggcgaaacgccgtggacgatcacggggcagcacaccggatcgacagacatgccgctgacacccaaaggcgaacgcaacgccactcaactacaaggtcgactcgaaggcatccgtttcaacgaagtctggaccagtcctttgcagcgagccaaacgaacctgtgaactggcaggttacggcgagcgggcacgcgtcgtcaccgagctggccgaatgggactgcggtgcatacgaagggctcacgagaaatgaaattcaccaaaagcatccagactggaatctttttcgcgatggttgccccaacggcgaatcattgacggacgtggcgacgcgtgtcgatcgagtgatccagcgaatccgtcagcgaaacgacacttgcttgctgttcgctcacaagcactttttgcaagtcttcgccgcctgctgggtggggcttcctccggagactggtcaacgtctgtttctcggtacggcggcgttgagcatcgttggctatcaccacgaccaaagtgattcagtcatccggttgtggaacgaccgaagctatctgactgactaa

SEQ ID NO: 608 - protein, 203 aa, Rhodopirellula baltica
MERQVMSDQFPQIYLARHGETPWTITGQHTGSTDMPLTPKGERNATQLQGRLEGIRFNEVWTSPLQRAKRTCELAGYGERARVVTELAEWDCGAYEGLTRNEIHQKHPDWNLFRDGCPNGESLTDVATRVDRVIQRIRQRNDTCLLFAHKHFLQVFAACWVGLPPETGQRLFLGTAALSIVGYHHDQSDSVIRLWNDRSYLTD

SEQ ID NO: 609 - DNA, 1329 bp, Prochlorococcus marinus subsp
  CDS (1)..(1329)
atgagcattagattaattttagttaggcatgggcttagcagttttaatgaaaaaggcttagttcaaggtaggacagatgattcatatttaaccgataaaggctacgaacaggcacttaaatctggagaggcattatcagggattaattttgacaagatatattcttccccacttgtaagagcagcagagactgcaaagacaattcagaaaaacttaaaaggagaaaataatattatttacgataaaaatttattagaggttgatcttggttcatggtctggtttaactattaatgaaataagaaaaaagtatccagaagactatcttctttggaaaaatgatcctgaaaatttgactttagagagtattcataattcaacgtatcaaccaattaaagaattatatgagcaggcaaatgaatttattaaaagtatttttaaaatctatttagaaaaacaagaagcaaatattttaataattggtcataatgcaatcctaagatgtttaattttattattaattggaaaacctaaaaaaggttttagaaaaataaagttagataatgcctctttttccatccttaatattgtgaagcaaagacattcatataaaacacaaattgaatgtttaaaccaaacttctcatctagataaaagaattcctgatcagattggagactcaagaatatttttaattaggcatggtgaaaccaactggaataaagagggtcgatttcaaggacaaataaatattcctttaaataataatgggaaagatcaggcgggaaaggcctctaaatatttagaagaaattaacttcaacaaagctttttcaagttcaatggatagaccatatgaaacagcacaaataattcttcaaaacaagtcagatttagaaataaaaaagattgaaaatttagtagaaataagccatggattatgggaaggcaaattagaaaatgaaattaagcaacaatggccagaattacttaaaaattggcatgaaaaacctgaagaagtgctaatgcccgagggtgagagtattaaagaagtatctgaaagatcagttaaggcttgggaagaaatatgtttagctcaaaagaataaagatttgaccttgttagtcgcacatgatgcagtaaataaaacccttatttgtaatttattaggaattgatttttctaatatctggatgataaagcaaggtaatggaggtataactgttattgatctttttaaggatcctcaaaaagataatgtaattagtgctttgaatattactacacatcttggtgggatactggactcaacagcatccggggctctttaa

SEQ ID NO: 610 - protein, 442 aa, Prochlorococcus marinus subsp
MSIRLILVRHGLSSFNEKGLVQGRTDDSYLTDKGYEQALKSGEALSGINFDKIYSSPLVRAAETAKTIQKNLKGENNIIYDKNLLEVDLGSWSGLTINEIRKKYPEDYLLWKNDPENLTLESIHNSTYQPIKELYEQANEFIKSIFKIYLEKQEANILIIGHNAILRCLILLLIGKPKKGFRKIKLDNASFSILNIVKQRHSYKTQIECLNQTSHLDKRIPDQIGDSRIFLIRHGETNWNKEGRFQGQINIPLNNNGKDQAGKASKYLEEINFNKAFSSSMDRPYETAQIILQNKSDLEIKKIENLVEISHGLWEGKLENEIKQQWPELLKNWHEKPEEVLMPEGESIKEVSERSVKAWEEICLAQKNKDLTLLVAHDAVNKTLICNLLGIDFSNIWMIKQGNGGITVIDLFKDPQKDNVISALNITTHLGGILDSTASGAL

SEQ ID NO: 611 - DNA, 1332 bp, Prochlorococcus marinus
  CDS (1)..(1332)
atgcccctgcgtcttctcctcgtccgtcatgggctgagcagcttcaaccgcgagcgacggattcagggtcgcagtgatctttccacgctcacctcgcaaggccaagaacaggcccgtcaaactggacaagccctaaaagaaatccaaatcaatgctgtttacagctcccctctgaagcgtgccgcatccacaacaacaaacctactagcaagcaaaggcagtgatctcagaccttgcttcgatgatgggttactggaaatcgacctggctccatggagtggtctctgcagcgatgaggtaaagagcatgttcccagatgcctatcgcacctggaagcaacaaccacaggaattggttctcaagcgagaagacggcaatccctataaacccattggcgagctgatggaacaggctcgtgaattcctacggaaactcattcaacgtcacccaatggagggtgacgaaacagttctggttgtttcgcacaattgcatcctgcgctgcttaatccttgttctccttggtgagccagaccaaggcttgcgacgactgcgcctcgataacgcctcactctcggtgttcaacctgatacccctctcagagcaatcccatcaagcacaagtcgaatgcctcaacagcaccgttcacttgcatcagcaactacccagcaaagggaaggggccgagactgatccttgtgcgccatggtgaaaccgactggaaccaacaaggccggttccaaggccaaatcgacatcccgctgaataaaaatggcttcgcgcaagccgccgcagccggtgcattcctaagcgatgtgttgatcgatcaggcctacagcagttcgatgacccgaccaagacaaacggcggaagccatcctcaagcaccatccagatgtccaactcgaagtcacccaggggctggtggaaattggccatggcctttgggaagggaagctggaatcagacattgaagccggctggcctgaactgctagatgcctggaaaaaagctccgcagacggtgcagatgcccgaaggcgaaaccatccaggatgtatggaagcgttcagtggcctgctggaacaagatcgccaacagcctggctccagaagcaacagcgctcgtggtggctcatgacgctgtcaacaaaacgattctctgccatctactcggaatgaccccggctgatatctgggcagtcaaacaagggaatggaggtgtcacggtggtcgacatcgctacagatcccggccaacctgcagtggtgacctctctcaacctcacctctcaccttggtggtgtgctcgatcgcacagctgctggggcgctctaa

SEQ ID NO: 612 - protein, 443 aa, Prochlorococcus marinus
MPLRLLLVRHGLSSFNRERRIQGRSDLSTLTSQGQEQARQTGQALKEIQINAVYSSPLKRAASTTTNLLASKGSDLRPCFDDGLLEIDLAPWSGLCSDEVKSMFPDAYRTWKQQPQELVLKREDGNPYKPIGELMEQAREFLRKLIQRHPMEGDETVLVVSHNCILRCLILVLLGEPDQGLRRLRLDNASLSVFNLIPLSEQSHQAQVECLNSTVHLHQQLPSKGKGPRLILVRHGETDWNQQGRFQGQIDIPLNKNGFAQAAAAGAFLSDVLIDQAYSSSMTRPRQTAEAILKHHPDVQLEVTQGLVEIGHGLWEGKLESDIEAGWPELLDAWKKAPQTVQMPEGETIQDVWKRSVACWNKIANSLAPEATALVVAHDAVNKTILCHLLGMTPADIWAVKQGNGGVTVVDIATDPGQPAVVTSLNLTSHLGGVLDRTAAGAL

SEQ ID NO: 613 - DNA, 591 bp, Prochlorococcus marinus
  CDS (1)..(591)
atgacatctcgtcaactttggatcatccgccatggggctaccgaatgggcactccaaggccgtcataccggcagcaccgacctccccttgctaccccagggggaagaagaggcgaaggctcttgctcctgtgctcaaaggcgtgacatttgccgctgtgttgtcatctcccctgcaacgagccatacgcacctgtgcgctggctgagcttgaaatacctgctgaaatcatgccggagctgatcgaatggaactacggaaactatgaaggcatcaccacagcagagatccgtcaaaccgttcctgcgtggaccatttgggaccaaggttgtcctggtggcgagcacgctactgccgtgcaagagcgttgtgaacgaattattgaacatgccctcggcatctcaaacaacggtgacatcgttctcttcgcccatggacatatcttgcgagccctgactggcacctggctaggtctcggtgccgcagcaggccgactgttcagactagataccggcagcatttgcattcttggtttcgaaagagagcagcgcgtgatcacacgctggaatgccctctgcactggcacgttctaa

SEQ ID NO: 614 - protein, 196 aa, Prochlorococcus marinus
MTSRQLWIIRHGATEWALQGRHTGSTDLPLLPQGEEEAKALAPVLKGVTFAAVLSSPLQRAIRTCALAELEIPAEIMPELIEWNYGNYEGITTAEIRQTVPAWTIWDQGCPGGEHATAVQERCERIIEHALGISNNGDIVLFAHGHILRALTGTWLGLGAAAGRLFRLDTGSICILGFEREQRVITRWNALCTGTF

SEQ ID NO: 615 - DNA, 618 bp, Streptomyces avermitilis
  CDS (1)..(618)
atggcaccgcgcatcctgctggcccggcatggacagacggaatggtccctgctcgggaagcacaccggcaggacggacattccgctcctcgaagagggccggcgcggcgccaagctgctgggcgaacggctgcaccgggcgcccttcgacgggctcttcgacgccgagatccgtacgagtccgctggcacgcgcgcgtgagacatgcgaactggccggtttcggtgaccgcgccacctcctgggacccgctcatggagtgggactacggggcgtacgagggcatgacgccggccgagatccagaaggtgcggccgggctggttcatctggcgcgacggcgtccccgagggcgagaccctcgcgcaggtctccgcgcgcgcggacgaggtcgtcgcctgggcgcgtgccgaggaccgcgacgtcctggtgttcgcccacgggcacatcctgcgctcgatcggcgcgcggtggctcggcctgccgatcgatttcgccgcgcgtatcaggctcagtccgacgtccctctcggtgctgggatgggcctacggggagcccgcgatcgagagctggaacgatctggggcatctggtgcaccagggcgagcagcggatcgcctga

SEQ ID NO: 616 - protein, 205 aa, Streptomyces avermitilis
MAPRILLARHGQTEWSLLGKHTGRTDIPLLEEGRRGAKLLGERLHRAPFDGLFDAEIRTSPLARARETCELAGFGDRATSWDPLMEWDYGAYEGMTPAEIQKVRPGWFIWRDGVPEGETLAQVSARADEVVAWARAEDRDVLVFAHGHILRSIGARWLGLPIDFAARIRLSPTSLSVLGWAYGEPAIESWNDLGHLVHQGEQRIA

SEQ ID NO: 617 - DNA, 600 bp, Streptomyces avermitilis
  CDS (1)..(600)
atgggtgaccttctcctcgtacggcacggtgagaccgagtggtcggtgtccgggcggcacacggggtcgaccgacattccgctcaccgagaacggacgggagcaggcgcgcaggctggctccgctgatcgcctcgcaccacgtcggggccgcgttcgtcagcccgatgcggcgggcgcgggagacggcgcggctggcggggctcgacggggcgcgcgtcgacgcggacctgagcgagtgggactacggcgggtacgagggggtcacgaccgtcgagatccaccggacccggcccgactggttcctgttcacggacggggtcgagcccggcccgccggagcaccccggggagagtccggaggaggtcggggcgcgcgcggagcgcatgctggccaaggtcgacgcggcgctcgccgacacggagggcagtgtcgtcgtggtctcccacggtcacttcctccgcgtgctggccgcgcggcggctggggctgcccgcctcgggcggcgccctgttccagctcgcgaccggaacggtgagccggctgagcacggagcaccgccgccatgtggtggccagctggaatgtcagaccctcctcgtag

SEQ ID NO: 618 - protein, 199 aa, Streptomyces avermitilis
MGDLLLVRHGETEWSVSGRHTGSTDIPLTENGREQARRLAPLIASHHVGAAFVSPMRRARETARLAGLDGARVDADLSEWDYGGYEGVTTVEIHRTRPDWFLFTDGVEPGPPEHPGESPEEVGARAERMLAKVDAALADTEGSVVVVSHGHFLRVLAARRLGLPASGGALFQLATGTVSRLSTEHRRHVVASWNVRPSS

SEQ ID NO: 619 - DNA, 612 bp, Streptomyces avermitilis
  CDS (1)..(612)
atgggcgacctcatactggtccgccacggcgagaccgagtggagcctgtcgggccggcacaccagccggaccgacctgcccctcacccaccacggtgaggagcaggccaagtccctggcgcccttcttcgccgggcgctcgttcgcccgcgtcctcaccagccccctcgaccgcgcggtgcgcacggcggagctggccgggctgaccggggccgtgaccgaccccgacctgcacgagtgggactacggcgggtacgagggcatcacgaccgtcgagatccaccgcacccggcccgactgggacctgtggaccgacggcgtgccgtcggcctcggacgggtcccgcggtgagtcgccgcaggaggtgggagagcgcgccgaccgtgtgctgtcccgggtggacgcggcgctccggggtgacggagaagacgtggtcctggtggcccacgcccacttcctgcgggtcgtgaccgcgcgccgcctgggcctgcctcccgagcaagggcggctcttccggctcgccaccggcacggtcagccggctgtccaccgaacacggacgtccggtgatcgcgacgtggaacgagtcgggaacttcccacgggcaccactag

SEQ ID NO: 620 - protein, 203 aa, Streptomyces avermitilis
MGDLILVRHGETEWSLSGRHTSRTDLPLTHHGEEQAKSLAPFFAGRSFARVLTSPLDRAVRTAELAGLTGAVTDPDLHEWDYGGYEGITTVEIHRTRPDWDLWTDGVPSASDGSRGESPQEVGERADRVLSRVDAALRGDGEDVVLVAHAHFLRVVTARRLGLPPEQGRLFRLATGTVSRLSTEHGRPVIATWNESGTSHGHH

SEQ ID NO: 621 - DNA, 645 bp, Enterococcus faecalis
  CDS (1)..(645)
atgaaattatattttacacgacatggaaaaactgaatggaatcaacagaaacgatttcaaggaatgacaggagattcgccgttattaccaactagttatgacgaaattaaacaattaggccaatatttacaagatattccgtttgaaaaaatttattctagtccgctattacgtgccaaaaatactgcgcggggaattcaacaagaattgactcatccagttgaaattgtttatacagataccttaaaagaattaggtttaggtcgtctagaaggacaatatattgaagaaatgcgtaatttttatggagaagaattagatcatttacggcatcgtttagatttgtatgatccaacaatttttgatggtgaaccaatcgagcaagcgattcaacggatttcagaaacagttgctgaagcggcgaaacagcacgaaggtccagttctatttgtcggacacggagcagcgctgacggcggcaatccaagcgatggctggtaaaccattatcagaattacggacaatgggcgggctgttaaacaatagcctctcaatccttgaaaccaaagaggcatcaaggaacatgccgtacgacttaacgttatggaatgatacgtcttttttagctaaagaaaaagcacaataa

SEQ ID NO: 622 - protein, 214 aa, Enterococcus faecalis
MKLYFTRHGKTEWNQQKRFQGMTGDSPLLPTSYDEIKQLGQYLQDIPFEKIYSSPLLRAKNTARGIQQELTHPVEIVYTDTLKELGLGRLEGQYIEEMRNFYGEELDHLRHRLDLYDPTIFDGEPIEQAIQRISETVAEAAKQHEGPVLFVGHGAALTAAIQAMAGKPLSELRTMGGLLNNSLSILETKEASRNMPYDLTLWNDTSFLAKEKAQ

SEQ ID NO: 623 - DNA, 666 bp, Lactobacillus plantarum
  CDS (1)..(666)
atgacaaaactattatttgttcgccatgggaaaacagagtggaatcttgaggggcgctatcaaggctctcagggagattcaccattattaccgactagttatcaagaaattcatgaattggcagcggcgctccaggatattcggtttagtcatatctatgtcagtccgttaaaacgggcgcgtgatacagcgatgacactacgtaatgatttgacacaatcagagttacccataacggtactgagtcgtttacgggagttcaatctcggtaagatggaaggaatggccttcacggatgttgaagctacgtatccggccgaattcgacgcgtttcgaaatcatccggatcagtatgacccgacagcgattcagggggagagctttcaacaactgctgaagcggatgactcccgctattaagcaaattgttcaagcaaatccacgtcgcgatgacaatgttttgatcgttagtcatggtgcggccttgaatgccttggtcaactcattactgggagcgacactggcgacgttacggcaacggggtggcttgtcgaatacgtcaacaacaattttagagacgcgtgaccgtggtcaacattttaagctattagattggaatgacacctcatacctatcacggcggcccgatgcaactgatacgatttaa

SEQ ID NO: 624 - protein, 221 aa, Lactobacillus plantarum
MTKLLFVRHGKTEWNLEGRYQGSQGDSPLLPTSYQEIHELAAALQDIRFSHIYVSPLKRARDTAMTLRNDLTQSELPITVLSRLREFNLGKMEGMAFTDVEATYPAEFDAFRNHPDQYDPTAIQGESFQQLLKRMTPAIKQIVQANPRRDDNVLIVSHGAALNALVNSLLGATLATLRQRGGLSNTSTTILETRDRGQHFKLLDWNDTSYLSRRPDATDTI

SEQ ID NO: 625 - DNA, 642 bp, Clostridium tetani
  CDS (1)..(642)
atggaaatgggtataacattatatataactaggcatggacaaactgagtggaacacagaaagaagaatgcaaggatggaatgattcacctttaacaaaattagggatggagcaggcaaagagattaggaaagcgattagataataataatatagatataatttattctagtccattaggaagggctattaaaacagcaaaaatagttagaggagaaagggatatacctattgtatgtgataatagattaaaagagattaaattaggaaaatgggaaggtatgaatcatgaccttatagacaattattataaagaagagatagacaacttttggaataatcctaaactatacaaatctataggaggagagacatttttacagcttagaaacagagttaaagattttttggaggagattctaaaaaagcataaagatgaaactattcttatagtaactcatgctataacattaaaaggtatcatgaactatatagaagatttaactatagataatttttggggagaaccacatataaatcctacaagtctgacaaaggtagagatagaagattcaaatagaagaatattattgaatgcagatatatcccatttagatgaagtgaaagaaataaagatagtatag

SEQ ID NO: 626 - protein, 213 aa, Clostridium tetani
MEMGITLYITRHGQTEWNTERRMQGWNDSPLTKLGMEQAKRLGKRLDNNNIDIIYSSPLGRAIKTAKIVRGERDIPIVCDNRLKEIKLGKWEGMNHDLIDNYYKEEIDNFWNNPKLYKSIGGETFLQLRNRVKDFLEEILKKHKDETILIVTHAITLKGIMNYIEDLTIDNFWGEPHINPTSLTKVEIEDSNRRILLNADISHLDEVKEIKIV

SEQ ID NO: 627 - DNA, 600 bp, Bradyrhizobium japonicum
  CDS (1)..(600)
atgcccgtgcccacgatctactatcttcgccatggcgagaccgagtggaatgcgctcgggcggctccagggcaccagggacgttccgctgaacgcgcgcggccgcagccaggccgtgcaggccggcggcattctcgccgatctgttcaagcgcgacggccgcgacaaggcggcgctgccctatgtgtcgagtccgctcggccgcgcgcgcatgaccatggaacttgcgcgcggcatgctcgaattgcccgtggccgactattcgctcgacgatcgcctgcgcgagatcggctacggcgtctgggaagggctgacgctggccgagagcgaggcgaccgatcccgaaatctatgccaggcgccttgccgacaaatggacggtgggccccgtaggcggggagacctacgccgatgtacaggtccgcgtgcgggcctggtacgatcagctccggaccgacaccgtcgcggtcgcccatggcgggacctgccgggccctgatggtttcgcttggcctggagacgccggccagcgccgccgagctctatatcgagcagggcgccgtctacgtgttccgggacgggcggctggagaagtttagttaa

SEQ ID NO: 628 - protein, 199 aa, Bradyrhizobium japonicum
MPVPTIYYLRHGETEWNALGRLQGTRDVPLNARGRSQAVQAGGILADLFKRDGRDKAALPYVSSPLGRARMTMELARGMLELPVADYSLDDRLREIGYGVWEGLTLAESEATDPEIYARRLADKWTVGPVGGETYADVQVRVRAWYDQLRTDTVAVAHGGTCRALMVSLGLETPASAAELYIEQGAVYVFRDGRLEKFS

SEQ ID NO: 629 - DNA, 1407 bp, Synechococcus elongatus
  CDS (1)..(1407)
atggcacagtgggatggccaagtttgttgtctgtcaatcgctaaggagaaacctctgagtacccgagtcattattgtccgccacggtgaaagcacgtttaatgtccaagagcgggtgcaaggtcacagtgatgcctcgttgctcacggagcggggtcgttggatggcagcccaggtgggtctagcgctgcggggtattcctattcgcaaaatttacaccagtcccctgaaacgggcacaggaaaccgcagaggttatccatgctcagctccaaaaccccgaactcaagccaccccatgcccttgatctcctcaaagagattgccctgccagcttgggaagatctcccctttgccgaagtgaaggcacagttcccagaggactatcgccgctggcaggaagccccagaaaccttgatgatgaaaatcaccacagaaagtggccaaacgaaggagtttttcccgctactggatctctacgatcgcgcgggcatggtcttggaaacgctgctagcggctcacgccaatgaaacgattgtcattgtgggtcacagtggcatgaaccgtgccctgatctgcacgggcctcggcttgggggtcaagggttacctgcggctccagcaggccaatggtggcattagtgtcttaaatttcagcaatggcctgcggcaacctgctcaactggaagcgctcaatctcactagccatcttaatgatccttttccacagccccgcttcaaggaacaaacgctgcgggtctttcttgtccgccacggtgaaacggactggaaccgcgaaggacgcttccaagggcaaattgatgtgcccctcaatgaaaatggccgtgcccaagcagcggcggtggctgagtttctcaaggatgtccccttccaccatgccgtgagcagtcccctgctgcgtcccaaggatacggccttggcgattttgcagtatcacccccatgtgcagctggagttagagccagcccttgcagagattagccatggggactgggagggcaagtttgaacctgaggtggaggcggcctaccccggtgaactggaacgttggcggacaacaccagccctagtgcaaatgcccaatggcgaaaacctcgagcaggtgcgcgatcgcgtggtcaaagcctgggaactctggctgaagcgctggaaaactaatgctcccactccccacaatgtcttggttgtggcccacgatgccaccaataaggtgttgctctgccacattgttggtcttggcattgaaaacttctggctctttaagcagggcaatggcagtgtcacggtgattgactatcccctcaaggggggtctgccgcgcttgcaggcagtgaatatcaccacccatttgggaggggtactggatcggacggcggcgggagcgctatag

SEQ ID NO: 630 - protein, 468 aa, Synechococcus elongatus
MAQWDGQVCCLSIAKEKPLSTRVIIVRHGESTFNVQERVQGHSDASLLTERGRWMAAQVGLALRGIPIRKIYTSPLKRAQETAEVIHAQLQNPELKPPHALDLLKEIALPAWEDLPFAEVKAQFPEDYRRWQEAPETLMMKITTESGQTKEFFPLLDLYDRAGMVLETLLAAHANETIVIVGHSGMNRALICTGLGLGVKGYLRLQQANGGISVLNFSNGLRQPAQLEALNLTSHLNDPFPQPRFKEQTLRVFLVRHGETDWNREGRFQGQIDVPLNENGRAQAAAVAEFLKDVPFHHAVSSPLLRPKDTALAILQYHPHVQLELEPALAEISHGDWEGKFEPEVEAAYPGELERWRTTPALVQMPNGENLEQVRDRVVKAWELWLKRWKTNAPTPHNVLVVAHDATNKVLLCHIVGLGIENFWLFKQGNGSVTVIDYPLKGGLPRLQAVNITTHLGGVLDRTAAGAL

SEQ ID NO: 631 - DNA, 582 bp, Oceanobacillus iheyensis
  CDS (1)..(582)
atgacagaaatatacttagttaggcacggggaaacaaattggaataaggaaggaagagtacaaggcaggacggatattcctttaaatgaaacaggtagaatgcaagcaaaactttgttttaacggagtaaaggaatttgagccaacgattctgattgcaagccctttacaacgagccaaagtaactgctgaaattctaaatgaacaatggggtttacctattattgagatggaagaatttaaggaacgatcctatggtgatgcggaaggaatgacgctggaagatagagaacgattcttccctgataaagacattccgaatatggaaatattggaagatgtaaagcgacgaggaattgaaggaatacaaaaagtgtgccaacggttttctgatgaaaaaatcgtaattgtagctcacggggcgctaatcaatgcgattttatcggtgatctctaagggagaaattggatcaggtaaaacacatttaaataatacttgtattaataagctgacgtttgctgataaggtatttgaaattaaagattataataacacggatcatttaatagcggtgaatgattaa

SEQ ID NO: 632 - protein, 193 aa, Oceanobacillus iheyensis
MTEIYLVRHGETNWNKEGRVQGRTDIPLNETGRMQAKLCFNGVKEFEPTILIASPLQRAKVTAEILNEQWGLPIIEMEEFKERSYGDAEGMTLEDRERFFPDKDIPNMEILEDVKRRGIEGIQKVCQRFSDEKIVIVAHGALINAILSVISKGEIGSGKTHLNNTCINKLTFADKVFEIKDYNNTDHLIAVND

SEQ ID NO: 633 - DNA, 648 bp, Bifidobacterium longum
  CDS (1)..(648)
atgttgctgcgccacggccagaccgtgtggagcgaatccgggcagcataccgggcgcacgaacatcccgttgaccgcggtcggcgagcagcaggcagcggatgccggaaggcgcctgcgcgaagctttccccgaaggattcagccagggctgtgtgttttccagtccgctgaagcgggcgtgccaaaccgctgaactggccggttttgcggaccacggtgtgttggacggcatcgctgaatgggattacggccgagccgaggggcgtacgcgccagcaggtgagtgaggccagcggttttgaatgggatgtgtggcgtgacgggccgcgctcgctgacgcccacgctggagggcgattgggtcgagaccttaccttcgggcgagcaggtgccggtccatgccgggcctggcgagacgctggaagaagcagcggtacgcgccaagagcgccatcgatgagattacgccgctgctgaaagacggccataatgtgctgttggtggctcatgcgcacatcctgcgcatcctcacctcgcaatggctgggcgtggacccgcatttcgcgcggttgctgcgtttggatacggcgcactactcggtgcttagcgtctataagggagataacgtcatcgaacggtggaacgcctag

SEQ ID NO: 634 - protein, 215 aa, Bifidobacterium longum
MLLRHGQTVWSESGQHTGRTNIPLTAVGEQQAADAGRRLREAFPEGFSQGCVFSSPLKRACQTAELAGFADHGVLDGIAEWDYGRAEGRTRQQVSEASGFEWDVWRDGPRSLTPTLEGDWVETLPSGEQVPVHAGPGETLEEAAVRAKSAIDEITPLLKDGHNVLLVAHAHILRILTSQWLGVDPHFARLLRLDTAHYSVLSVYKGDNVIERWNA

SEQ ID NO: 635 - DNA, 1005 bp, Arabidopsis thaliana
  CDS (1)..(1005)
atggctactgctacgtctcaccaatcagtcgtttcatttgcttctctccggtcttctccttcttctacaatctctcaatgtggattcaagatcgattcttcactgagctttacatcgaaaaagacaaacttttgcaagattaaagcaatggcatcatcagtttcttttaacaacactctcttgtctccttccaagacaatccctgacaattctcaaaagaaatcaaatgaagcagctttgatattgattaggcatggagaatctttatggaacgagaagaatctttttactggttgtgttgatgtgccattgactgagaaaggtgttgaagaggctattgaagcagggaagaggattagtaacattcctgttgatgttatctttacatcttctttgattcgtgctcagatgactgcaatgcttgctatgattcaacaccgtcgtaagaaggtaccgatcatcttgcacgatgaaagcgaacaggcgaaaacttggagtcaagtttttagtgatgagactaaaaaccaatccattcctgtcatacctgcttggcagctcaatgaaagaatgtatggagaattacaaggtcttaacaagcaagaaacagccgagagatatgggaaagagcaagttcacgaatggcgtaggagttatgatattcctcctcccaaaggagagagtttggagatgtgtgctgagagagcagtagcttattttcaggacaatatcgaaccgaagcttgcagctggaaagaacgtaatgatagctgctcacgggaactcgctgcggtctatcattatgtatcttgacaaattgacttgccaggaggtgataagtctagagctatcgacaggtatacctcttctctacatattcaaagaaggcaaattcatgaagcggggaagcccggttggtccaacagaagctggtgtttatgcttataccaagagattggctcaatacagacagaagctagaggacgatagtgaagtactctgtgcctga

SEQ ID NO: 636 - protein, 334 aa, Arabidopsis thaliana
MATATSHQSVVSFASLRSSPSSTISQCGFKIDSSLSFTSKKTNFCKIKAMASSVSFNNTLLSPSKTIPDNSQKKSNEAALILIRHGESLWNEKNLFTGCVDVPLTEKGVEEAIEAGKRISNIPVDVIFTSSLIRAQMTAMLAMIQHRRKKVPIILHDESEQAKTWSQVFSDETKNQSIPVIPAWQLNERMYGELQGLNKQETAERYGKEQVHEWRRSYDIPPPKGESLEMCAERAVAYFQDNIEPKLAAGKNVMIAAHGNSLRSIIMYLDKLTCQEVISLELSTGIPLLYIFKEGKFMKRGSPVGPTEAGVYAYTKRLAQYRQKLEDDSEVLCA

SEQ ID NO: 637 - DNA, 645 bp, Xanthomonas campestris
  CDS (1)..(645)
atgcgcatcctgcttgcccgtcacggcgagacgccgtggaacgccgaaggccgttaccagggccagatcgatatcccgctgtcaccggtcggcgaagggcagggcgccgcgttgggcgcgcgtctgcaggccttgcagatcacccgcgcagtggcatcgccactctcgcgtgcccaggccaccgcaacgttggcgcttggcagtgcacgcgcaggcctgctgcagaccgatgcggacctgcaggaaatcgcccatggcgaatgggaagggttgcttgcaagcgaaatcaatgacaaggatccggcacgcctgcgcgcatggcgcgaagaacccgacaccgtactgatgcccggcggcgagtcgctgcgtcaggtgctcgatcgcagctggcgcggtctggcgcgcgccgccgacggcctgggtgcagacgacaccttgcttgtggtcgcgcacgatgcggtcaaccgcgtgatcctgtgcaagatcctcggcctgccgctgtccaagttgtggacattccgccaggcccccaccacgctcaacctgctcgaaggcgacgacgtcgatcacctggaagtggtccgcctcaacgattgcgcgcaccacacgccgttctttggtgaagccaagcatcgggcgttataa

SEQ ID NO: 638 - protein, 214 aa, Xanthomonas campestris
MRILLARHGETPWNAEGRYQGQIDIPLSPVGEGQGAALGARLQALQITRAVASPLSRAQATATLALGSARAGLLQTDADLQEIAHGEWEGLLASEINDKDPARLRAWREEPDTVLMPGGESLRQVLDRSWRGLARAADGLGADDTLLVVAHDAVNRVILCKILGLPLSKLWTFRQAPTTLNLLEGDDVDHLEVVRLNDCAHHTPFFGEAKHRAL

SEQ ID NO: 639 - DNA, 645 bp, Xanthomonas axonopodis
  CDS (1)..(645)
atgcgcatcctgcttgctcgtcacggcgagacgccgtggaacgccgaaggccgttaccagggccagatcgatattccgctctcgccggtcggcgaaggccaggcgcgcgcattgggcgaacggctgcactcgctgcagatcgaccgcgcggtggcatcgccgttgtcgcgcgcgcaggctactgccaaggccgcgttgggcgcttcgcgtcaagcgctgctgcagaccgatgccgacctgcaggaaattgcgcacggcgaatgggagggcctgctggccagcgagatcaacgacaaggatcccgcacgtctgcgcgcctggcgcgaagagcccgataccgtgttgatgccgggtggcgaatcgctgcgtcaggtgctcgatcgcagctggcgcggcctgatgcgcgccgccgatgggctgggcgcccacgacaccttgctggtggttgcgcacgatgcggtcaatcgcgtgatcctgtgcaagatcctgggcctgccgttgtccaggctatggagcttccgccaggccccgaccacgctgaacctgctcgaaggcgatgacgtcgagcatctcgaagtggtgcgcctcaacgactgtgcgcaccacacaccgttctttggtgaggcaaagcatcgggcgctttaa

SEQ ID NO: 640 - protein, 214 aa, Xanthomonas axonopodis
MRILLARHGETPWNAEGRYQGQIDIPLSPVGEGQARALGERLHSLQIDRAVASPLSRAQATAKAALGASRQALLQTDADLQEIAHGEWEGLLASEINDKDPARLRAWREEPDTVLMPGGESLRQVLDRSWRGLMRAADGLGAHDTLLVVAHDAVNRVILCKILGLPLSRLWSFRQAPTTLNLLEGDDVEHLEVVRLNDCAHHTPFFGEAKHRAL

SEQ ID NO: 641 - DNA, 621 bp, Thermoanaerobacter tengcongensis
  CDS (1)..(621)
atggttacaagactttatatagcaaggcacggccagtcaaagtggaatttagagagcagaatgcagggtatgaaagatattgaactgacccaattagggttggaacaggctgaattgcttgcaaaaagactgaaaggtgaaaacatagattgtatatattctagtgacttaaaaagagcttataccaccgcagaaataatttcaaaagaaataaatgcccccatagtaaaaatagaggaatttagggaaatgtcctttggagtttgggaagggcttactgcgaaggagatagaagaaaactatcaagaactttatgacctctggaaaacagaccctagacatgtccttatagaaaatgcggaaacattaaaagaggtccaaaagagaatgctcacaaagacaaaagagattgtagaagagaattggggaaaaaatattctaattgtatctcatggcacttctattaaagctctaattttaggattgctggaaatcgatttgagcttttaccctagctttagaatggataatgcttctcttagcataatagatataaaagaaaacaaaaaagcagttctagttttgtataacgatacctgccatttaggagagaggaagtag

SEQ ID NO: 642 - protein, 206 aa, Thermoanaerobacter tengcongensis
MVTRLYIARHGQSKWNLESRMQGMKDIELTQLGLEQAELLAKRLKGENIDCIYSSDLKRAYTTAEIISKEINAPIVKIEEFREMSFGVWEGLTAKEIEENYQELYDLWKTDPRHVLIENAETLKEVQKRMLTKTKEIVEENWGKNILIVSHGTSIKALILGLLEIDLSFYPSFRMDNASLSIIDIKENKKAVLVLYNDTCHLGERK

SEQ ID NO: 643 - DNA, 582 bp, Rhizobium loti
  CDS (1)..(582)
atgagcagcgtgctaccgcaaatccatctggtccggcatggcgagacggcgtggagcctttcggggcagcataccggccgcaccgacatgccgctgacgccggcgggcgaggccgcggcgcggggcgtggcggagcggctcaagggcctgtcgttctcggcggtgtggtcgagcccctcgcagcgcgcctacaacactagcgtgctggccggctttggcgcgacaagcgtcagaaacgacgatctgcaggaatgggactacggcgcctatgaggggcgcaccaccaaggacatcctggccgagcggccaggctggaacgtgtttcgcgacggctgcccgcaaggcgagatggctgccgatgtcggtgcccgcgccgacaggatcatcagacagcttcgcgaagccggcggctcgatcctgatcttttccagcgcgcatttcctgcgcgtgctcgccgcccgctggctcggcctgccgccggaaggcggcgcgctgttcgtgctcgatacggccagcatcagcgtgctcggctacgagcatgatctcagcgagccggtcgtgcgcaaatggaaccagaagtag

SEQ ID NO: 644 - protein, 193 aa, Rhizobium loti
MSSVLPQIHLVRHGETAWSLSGQHTGRTDMPLTPAGEAAARGVAERLKGLSFSAVWSSPSQRAYNTSVLAGFGATSVRNDDLQEWDYGAYEGRTTKDILAERPGWNVFRDGCPQGEMAADVGARADRIIRQLREAGGSILIFSSAHFLRVLAARWLGLPPEGGALFVLDTASISVLGYEHDLSEPVVRKWNQK

SEQ ID NO: 645 - DNA, 651 bp, Pasteurella multocida
  CDS (1)..(651)
atgaaaacattaacattctatttgatacgtcatggtaaaacggagtggaacgaaaaaaggttattacaaggaaatggggactcccctttgacacaagaaggcattgaaggtgctaagcgcacagcaaaagcgttatctaacattgatttcactgccgcctatagtagcgtattgccccgtgcaatttccactgcaaacatgattttagcgcacaaaaccaccccattaatttgtcatgccggcttaaatgaattgtgttttggctcatgggaagggcaagccattgaggaattaagttgcttaccggaataccgtcaaatgcgcgatcaacctgcgcagtatttggggttaaccaatggcggggaaacttatcagcaattagcaacacgcgcgatcggcgtcattgaacagattattcaacgttatgacactggaaatattctcattgtctctcatggtcatactttacgtatgcttttggcgttgtttcatggtgccacttggcaaacccatcgagaaaaaagtaccagcttagcgaacacgtccattagcgttgtacactatttacaaactgagaatgaaacaggacgctttgtgcttgaaaaggtcaatgatatacagcatttaaccgattcattcgatgaggaataa

SEQ ID NO: 646 - protein, 216 aa, Pasteurella multocida
MKTLTFYLIRHGKTEWNEKRLLQGNGDSPLTQEGIEGAKRTAKALSNIDFTAAYSSVLPRAISTANMILAHKTTPLICHAGLNELCFGSWEGQAIEELSCLPEYRQMRDQPAQYLGLTNGGETYQQLATRAIGVIEQIIQRYDTGNILIVSHGHTLRMLLALFHGATWQTHREKSTSLANTSISVVHYLQTENETGRFVLEKVNDIQHLTDSFDEE

SEQ ID NO: 647 - DNA, 597 bp, Streptomyces coelicolor
  CDS (1)..(597)
atggcaccgcgcattctgctggcccggcacggacagacggagtggtcgctgtccggcagacacaccggcaggaccgacgtgccgctcctggaggagggccggcgcggcgcgaagctgctcggcgagcggctgcaccgggcgccgtgggacgggctggacggcgtggaggtgcggaccagtccgctggtgcgcgcgagcgagacctgcgagctggcgggtttcggggagcgcgcacgcgcgtgggacacgctgatggagtgggactacggggcgtacgagggcatgacgccggagcagatccaggccgtgcggcccggctggctgatctggcgggacggggccccggagggggagggcgtggcggacgtcacggcgcgcgcggacgaggtggtggcgtgggcgcgagaggcggagcgggacgtgctcgtcttcgcccacgggcacgttctgcgggcgatcggggcgcggtggctggggctgccggtgtccttcggcgcgcggatacggctcagtccgacgtcgctgtcggtgctggggtgggcgtacggggagccggcggtggagagctggaacgatctggggcacttggtcggctga

SEQ ID NO: 648 - protein, 198 aa, Streptomyces coelicolor
MAPRILLARHGQTEWSLSGRHTGRTDVPLLEEGRRGAKLLGERLHRAPWDGLDGVEVRTSPLVRASETCELAGFGERARAWDTLMEWDYGAYEGMTPEQIQAVRPGWLIWRDGAPEGEGVADVTARADEVVAWAREAERDVLVFAHGHVLRAIGARWLGLPVSFGARIRLSPTSLSVLGWAYGEPAVESWNDLGHLVG

SEQ ID NO: 649 - DNA, 600 bp, Streptomyces coelicolor
  CDS (1)..(600)
atgggtgatctgtttctggtccggcacggtgagaccgagtggtcgcgttcgggccggcacaccgggctgacggacgtcccgctgaccgagaaggggcgggaacaggcgcggagtctggtgccgttgatccggtcccaccggatcggggcggcgttcgtcagccccttccagcgggcgcgggagacggccgagctgatcgggctgcacgatgtgcgcatcgaaccggacctgcacgagtgggactacggcggctacgaggggatcaccaccgtcgagatccaccggagccggccggactggttcctgttcacggacggggtgacgcccggaccgccggaccaccccggggagacgcccgagcaggtgggtgagcgggccgaccgggtgctggccacggtggatgccgcgttcgccaacaccgaggggtgcgtggtgctggtggcgcacgggcacttcctgcgcgtgctgaccgcccggcacctgggccttccgccctcgcacggggcgctgttccagctgggcacgggcacgctgtgccggctgggcacggagcacggacggccggtgatcgccgcctggaatgtcagacccccgtcgtag

SEQ ID NO: 650 - protein, 199 aa, Streptomyces coelicolor
MGDLFLVRHGETEWSRSGRHTGLTDVPLTEKGREQARSLVPLIRSHRIGAAFVSPFQRARETAELIGLHDVRIEPDLHEWDYGGYEGITTVEIHRSRPDWFLFTDGVTPGPPDHPGETPEQVGERADRVLATVDAAFANTEGCVVLVAHGHFLRVLTARHLGLPPSHGALFQLGTGTLCRLGTEHGRPVIAAWNVRPPS

SEQ ID NO: 651 - DNA, 660 bp, Gloeobacter violaceus
  CDS (1)..(660)
atggcactactggtcatggtccgccacggtcaatcgatctggaacctcgaaaaccgcttcaccggctggactgacgttcccctgaccgaaaaaggccgcgcggaagcccgcgcctgcggcgagttgatttattgcgtccccttcgccgtcgcctttacttccaaactgacgcgcgcccaagacaccttgcgcctcattctcgaagccgccgaccaaccggacgtgccggtgatcgaggatcaggccctcaatgagcgccactacggcgagctgcaggggctcaacaaagccgaaactgccgcgaagtacggtgaggaaacggtccggcagtggcggcgcagcctggaggggcgtccccccggcggcgagagcctcaaggacaccgccctgcgatcattgcgctatttctacgaaaaaattgttcccgagttggaggcgggtaagaacgtgctcgtcagtgcccacggcaacacgatccgggccattttgatggaactcgatcacctgagccccgagcaggtcgaaaaggtcgaaatcgaatactgcgtgccggtcgccttcgagcatcaggcggacggcaccttctcgcaggtgctcatgccccgatgcgacatcatccggccgccgcagccgccggcccgcagcatcgcccggctctag

SEQ ID NO: 652 - protein, 219 aa, Gloeobacter violaceus
MALLVMVRHGQSIWNLENRFTGWTDVPLTEKGRAEARACGELIYCVPFAVAFTSKLTRAQDTLRLILEAADQPDVPVIEDQALNERHYGELQGLNKAETAAKYGEETVRQWRRSLEGRPPGGESLKDTALRSLRYFYEKIVPELEAGKNVLVSAHGNTIRAILMELDHLSPEQVEKVEIEYCVPVAFEHQADGTFSQVLMPRCDIIRPPQPPARSIARL

SEQ ID NO: 653 - DNA, 621 bp, Bartonella henselae
  CDS (1)..(621)
atggaacgcacacttgtactcattcgtcatggacaaagtgaatggaatctcaaaaatctctttaccggttggaaggaccctggtttaacagaaaaaggccgtaccgaagcaatagcagcaggtaagaaacttaaagaaactggtttaaaatttgatatcgcttatacatctgctctacagcgtgcacaaaaaacagcccagaacatcttagaacaaatggaacaatcagatttagaactgataaaaacccccgcactgaatgaacgaaattatggtgatctctctggtttgaataaagatgaagtgcgtcaaaaatggggagaacagcaagtgcaaatatggcgccgctcctatactattgctccccctaatggagaaagccttcgcgatactggtgctcgtgtttggccttattatcttcaccatatccaacctcatattttgcgctctcaaactgttttgatcgcagcacacggtaactctcttcgtgctcttattatggcacttgaaggcttaaatagtgaggaaattatctctcaagaattagcaactggcattcctatagtttatacatttaattcggactcaacaatttcgtcaaagacaatcatcaccccttaa

SEQ ID NO: 654 - protein, 206 aa, Bartonella henselae
MERTLVLIRHGQSEWNLKNLFTGWKDPGLTEKGRTEAIAAGKKLKETGLKFDIAYTSALQRAQKTAQNILEQMEQSDLELIKTPALNERNYGDLSGLNKDEVRQKWGEQQVQIWRRSYTIAPPNGESLRDTGARVWPYYLHHIQPHILRSQTVLIAAHGNSLRALIMALEGLNSEEIISQELATGIPIVYTFNSDSTISSKTIITP

SEQ ID NO: 655 - DNA, 681 bp, Parachlamydia sp
  CDS (1)..(681)
atggttaaattaattttgatgcgtcacggccaatctcagtggaatttagcaaatttgtttactggttgggtagacattcccctgtcttttaaaggaattgaagaggctatagaggcaggaaaacaaatcaaaaattaccctattgatttaatttttacttcttccttaattcgtgctcaaatgacagcaatgttggcaatgtctgttcatacatctggtaaagtccctgtgattcttcacacaggtgaggggcgactagaagaatgggcaagtatttatagttccgaatctcaatctcagacaatacctgtcattcgtgcttgggaattgaatgagcggatgtatggagaattacaaggaataaataaagaagaaatggctaaaaaatatggagctgagcaggtgcatatttggcgacgaagttttgatgttccccctccaaatggagaaagtttacaaatgacagcagctcggaccataccttattttgaaaacaccattgtccctcatttgaaagagaagaaaaatatttttattgctgcacacggaaattccctgcgttcgattatcatgaaattagatgggctgacaacagatcaagtcgttaagttggaactggcaacaggggtgcctgtgatctatgatttcaatcacgatgaatatattaaacaacaaaagtag

SEQ ID NO: 656 - protein, 226 aa, Parachlamydia sp
MVKLILMRHGQSQWNLANLFTGWVDIPLSFKGIEEAIEAGKQIKNYPIDLIFTSSLIRAQMTAMLAMSVHTSGKVPVILHTGEGRLEEWASIYSSESQSQTIPVIRAWELNERMYGELQGINKEEMAKKYGAEQVHIWRRSFDVPPPNGESLQMTAARTIPYFENTIVPHLKEKKNIFIAAHGNSLRSIIMKLDGLTTDQVVKLELATGVPVIYDFNHDEYIKQQK

SEQ ID NO: 657 - DNA, 636 bp, Rhizobium meliloti
  CDS (1)..(636)
atgagcggcaccctcgtccttgtccggcacggccagagcgactggaacctgaagaacctcttcaccggctggcgcgatcccgacctcaccgaactcggcatcgaggaggcaaaggccggcggcaaggcgcttgccgattacggcatcaaattcgacatcgccttcacctccgtcctcatccgggcccagcgtacctgccagctcgtcctcgacgccgtcggccagtcgtcgctcgaaacgatccgcgatcaggccctgaacgagcgcgactacggcgacctctccggtctcaacaaggacgatgcgcgggcgaaatggggcgaagagcaggtccatatctggcgccgctcctacgacgtgccgccgcccggcggcgagagcctgcgcgacaccggcgcgcgcgtctggccctattacctgaccgacatcctgccgcgcgtgctttcgggcgagaaggtgctcgtcgccgcccatggcaactcgctgcgctccctcgtcatggtgctggacaagctgaccaaggagcagatcctcaagctcaacctcgcgaccggagtgccgatggtctacaagctgaacgcggattcgaccgtcgcttcgaaggaagtgctaggggatatgtccggggcgcattga

SEQ ID NO: 658 - protein, 211 aa, Rhizobium meliloti
MSGTLVLVRHGQSDWNLKNLFTGWRDPDLTELGIEEAKAGGKALADYGIKFDIAFTSVLIRAQRTCQLVLDAVGQSSLETIRDQALNERDYGDLSGLNKDDARAKWGEEQVHIWRRSYDVPPPGGESLRDTGARVWPYYLTDILPRVLSGEKVLVAAHGNSLRSLVMVLDKLTKEQILKLNLATGVPMVYKLNADSTVASKEVLGDMSGAH

SEQ ID NO: 659 - DNA, 648 bp, Escherichia coli O6
  CDS (1)..(648)
atgttacaggtatacctagtccgccacggtgaaacgcagtggaacgccgagcgacgtattcagggccagtctgacagcccgctgaccgccaaaggtgagcaacaggcgatgcaggtggcaacccgtgccaaagagcttggcattacgcatatcatcagtagcgatttaggacggacccggcgcacggcggaaatcatcgcccaggcctgcggctgtgacatcatctttgattctcgcctgcgtgaattaaatatgggtgtactggaaacaagaaatatcgattcactcaccgaagaagaagagaactggcgtcggcaactggtcaatggcaccgttgacgggcgtattcctgaaggcgagtcaatgcaggagctcagcgatcgcgttaatgcggcactggaatcttgccgggacttaccgcagggaagccgaccgctactggtgagccatggtattgcactgggatgcctggtgagtacgattctcggattaccagcatgggcagagcgccgcttacgtctgcgtaactgttctatttcgcgcgtggattatcaggaaagcttgtggctggcgtctggctgggtggttgaaaccgcaggggacatctcgcatctggacgcccctgcattagatgagctgcagcgttaa

SEQ ID NO: 660 - protein, 215 aa, Escherichia coli O6
MLQVYLVRHGETQWNAERRIQGQSDSPLTAKGEQQAMQVATRAKELGITHIISSDLGRTRRTAEIIAQACGCDIIFDSRLRELNMGVLETRNIDSLTEEEENWRRQLVNGTVDGRIPEGESMQELSDRVNAALESCRDLPQGSRPLLVSHGIALGCLVSTILGLPAWAERRLRLRNCSISRVDYQESLWLASGWVVETAGDISHLDAPALDELQR

SEQ ID NO: 661 - DNA, 648 bp, Photorhabdus luminescens
  CDS (1)..(648)
atgttacaggtatatcttgttcgtcatggggagtctgaatggaacgcagcacgtcgtattcagggacaatctgacagccctttgactgaaacaggcgaacatcaagccagattagtggcacaaagagtaaaatctgaaagtattacccatattattaccagtgaccttggacggacacgccgaacggcggaaatcattgctaaggtttgtggttgtgaaattattctggagccacgtttgcgtgaattgcacatgggggttcttgaacgcagaaatattgattcattaacatcggaagaagagaaatggcgtaagaaagtccttgatggcacacctgggggacgtatccccaaaggcgaatctatggatgaactggctgtgcgtatgagggctgcgctggagaactgtcgtaatctgcctgttggtagccgaccgctgttagtcagtcatggcatcgctttgggatgtttggttggcacaatactgggattgcccgcacatgctgaacgtcgtcttcgcttgcgaaattgctctctgtccagagtggattatcagcacagtccgtggctagcgtcgggctggattgtagaaacggcaggcgatatcacacatctggatacgcccgcactggatgaattacaacgttaa

SEQ ID NO: 662 - protein, 215 aa, Photorhabdus luminescens
MLQVYLVRHGESEWNAARRIQGQSDSPLTETGEHQARLVAQRVKSESITHIITSDLGRTRRTAEIIAKVCGCEIILEPRLRELHMGVLERRNIDSLTSEEEKWRKKVLDGTPGGRIPKGESMDELAVRMRAALENCRNLPVGSRPLLVSHGIALGCLVGTILGLPAHAERRLRLRNCSLSRVDYQHSPWLASGWIVETAGDITHLDTPALDELQR

SEQ ID NO: 663 - DNA, 648 bp, Salmonella typhimurium
  CDS (1)..(648)
atgttacaggtataccttgttcgccacggtgaaacgcagtggaacgccgagcgacgtattcagggccaatcggacagtcccctgacagcaaaaggcgagcagcaggccatgcaggtaggagaacgcgcccgtagcctcggcatcacccatatcatcagcagcgatttaggccgcacaaaacgcacggcggagattatcgcccaggcgtgcgggtgtgatatcacctttgactcccgcctgcgcgagctggatatgggcgtgctggaaaagcgccagatcgattcgctgacggaagaagaagagggctggcgtcgtcagctggtcaacggcacgcaggatggccgcattcccggcggggaatcgatgcaggagttgagcgatcgcgttcatgccgcgctggcgtcctgtctggagctaccgcagggcagccgacctttattggtcagtcacggtatcgcgttgggctgtctggtcagtactatactgggactacccgcctgggcggaacgccggttacgtttgcgcaactgctctatttcccgcatcgattaccaggaaagtcagtggctggcgtctggctgggtggtagaaaccgcaggggacgtttcgcatctggacgcccctgcattggatgagctacagcgttaa

SEQ ID NO: 664 - protein, 215 aa, Salmonella typhimurium
MLQVYLVRHGETQWNAERRIQGQSDSPLTAKGEQQAMQVGERARSLGITHIISSDLGRTKRTAEIIAQACGCDITFDSRLRELDMGVLEKRQIDSLTEEEEGWRRQLVNGTQDGRIPGGESMQELSDRVHAALASCLELPQGSRPLLVSHGIALGCLVSTILGLPAWAERRLRLRNCSISRIDYQESQWLASGWVVETAGDVSHLDAPALDELQR

SEQ ID NO: 665 - DNA, 22 bp, artificial sequence
  Artificial sequence
  Primer
atgccttcgctaacccccagat

SEQ ID NO: 666 - DNA, 23 bp, artificial sequence
  Artificial sequence
  Primer
ttacacatcgccatgctgggatt

SEQ ID NO: 667 - DNA, 3844 bp, Saccharomyces cerevisiae
  CDS (1218)..(3269)
agatctactcaaatatgaaaaaaagaagagaacgtcaacaattttaatcgttcgtatcatcaagaagttccggtcctatagtgtagtggttatcactttcggttttgatccggacaaccccggttcgaatccgggtaggaccttcttttttgcgaatgacgtatgctgctttttgtgcctacagttttttttttatttggctagcccattgctttgatcgatatttcctgtgagaagtttaaatccactaaggtttttcattgttgctgcagatgtgtttttccattcatcctgaaatatgcactgctattccgcattccattcccctagtcttttttagttctttccgttcgaccttcatcgaaaaatgacaaaacgcgttaggaacaacaaccaattgcaaacaagcagtgaaacaaaaccatcaaggcccgaaaatacaagtgtgtactaatacagtaagtaggtcaaatacgcaatgaccaaagatgccgtgaatctagatgcttacaccgtgagcttcatgcctttctataccgagtatcaaggaccaaccgaagagtttaaggattacaaattcgaagatactatttactttcgtggcaaggaactgaagagggaaaagtctgcgacgccttccagtagcgataacacaactagtaataccttcagtaatggcgccatcctctcgggaaacacaataactggcaagatagtttcagtgaataattacgaaagagagggcactgatcgcaacgaattggcgcgattgcaagaattgatctccctcatcgatgtcataaatcagtaaatataaacattaaatacattacacgtagccacccgctgtatagcataaaactaacttaaaattattcatatgcgtttcccggggccgaagcgttattgccgatattcggtagccgattccgctggctttttttttttgaacgaggcaaaaaagtttcgtgactgaacttcttcgtcactggttttgttgataatttttatcgttttttacttcgagattgaaaacagtgttctgaattttagcaacgatatcgcaccgcacgtttagcctgatcaaaccttatatatacctctaccttaaaatatatatatatatagtattcgaattccgaattgtgtgtctccgcggttagtgattgttatacacaaacagaatacaggaaagtaaatcaatacaataataaaatatgacaatcaaggaacataaagtagtttatgaagctcacaacgtaaaggctcttaaggctcctcaacatttttacaacagccaacccggcaagggttacgttactgatatgcaacattatcaagaaatgtatcaacaatctatcaatgagccagaaaaattctttgataagatggctaaggaatacttgcattgggatgctccatacaccaaagttcaatctggttcattgaacaatggtgatgttgcatggtttttgaacggtaaattgaatgcatcatacaattgtgttgacagacatgcctttgctaatcccgacaagccagctttgatctatgaagctgatgacgaatccgacaacaaaatcatcacatttggtgaattactcagaaaagtttcccaaatcgctggtgtcttaaaaagctggggcgttaagaaaggtgacacagtggctatctatttgccaatgattccagaagcggtcattgctatgttggctgtggctcgtattggtgctattcactctgttgtctttgctgggttctccgctggttcgttgaaagatcgtgtcgttgacgctaattctaaagtggtcatcacttgtgatgaaggtaaaagaggtggtaagaccatcaacactaaaaaaattgttgacgaaggtttgaacggagtcgatttggtttcccgtatcttggttttccaaagaactggtactgaaggtattccaatgaaggccggtagagattactggtggcatgaggaggccgctaagcagagaacttacctacctcctgtttcatgtgacgctgaagatcctctatttttattatacacttccggttccactggttctccaaagggtgtcgttcacactacaggtggttatttattaggtgccgctttaacaactagatacgtttttgatattcacccagaagatgttctcttcactgccggtgacgtcggctggatcacgggtcacacctatgctctatatggtccattaaccttgggtaccgcctcaataattttcgaatccactcctgcctacccagattatggtagatattggagaattatccaacgtcacaaggctacccatttctatgtggctccaactgctttaagattaatcaaacgtgtaggtgaagccgaaattgccaaatatgacacttcctcattacgtgtcttgggttccgtcggtgaaccaatctctccagacttatgggaatggtatcatgaaaaagtgggtaacaaaaactgtgtcatttgtgacactatgtggcaaacagagtctggttctcatttaattgctcctttggcaggtgctgtcccaacaaaacctggttctgctaccgtgccattctttggtattaacgcttgtatcattgaccctgttacaggtgtggaattagaaggtaatgatgtcgaaggtgtccttgccgttaaatcaccatggccatcaatggctagatctgtttggaaccaccacgaccgttacatggatacttacttgaaaccttatcctggtcactatttcacaggtgatggtgctggtagagatcatgatggttactactggatcaggggtagagttgacgacgttgtaaatgtttccggtcatagattatccacatcagaaattgaagcatctatctcaaatcacgaaaacgtctcggaagctgctgttgtcggtattccagatgaattgaccggtcaaaccgtcgttgcatatgtttccctaaaagatggttatctacaaaacaacgctactgaaggtgatgcagaacacatcacaccagataatttacgtagagaattgatcttacaagttaggggtgagattggtcctttcgcctcaccaaaaaccattattctagttagagatctaccaagaacaaggtcaggaaagattatgagaagagttctaagaaaggttgcttctaacgaagccgaacagctaggtgacctaactactttggccaacccagaagttgtacctgccatcatttctgctgtagagaaccaatttttctctcaaaaaaagaaataacttaaatgagaaaaatttcgtaatgagataaaatttcgctccttttctgttttctattttctattttcccaacttttgctctattcagttataaattactatttatccatcagttaaaaaacaagatcttttactggtcagctaggaaagcgaaaatacaaagactttatgcacttagtgatatatatgtatagatatatccatttttacgcacttatcatatatcttagttatctaaatacaatctagttattcgtacacaatcgcccctgttatccctatagtgggaataaagtaatgcactgtgacggggttcttcgcccgggatagggtaaaaggatattgccgtttcaagaaacttcggggataatcgaataagataccgagaaagctattgttcgttgtgcacgtaggatgtatattgaacaagcatgaccagaatctgatgcattacgagaaggttacgggatgatatcagacctccgaagtccatgttgcaaaaatgtgccgacttttccgcggcgctatttggcacaaatttcaggagaaacatcactgtcggtgttatagaattc

SEQ ID NO: 668 - protein, 683 aa, Saccharomyces cerevisiae
MTIKEHKVVYEAHNVKALKAPQHFYNSQPGKGYVTDMQHYQEMYQQSINEPEKFFDKMAKEYLHWDAPYTKVQSGSLNNGDVAWFLNGKLNASYNCVDRHAFANPDKPALIYEADDESDNKIITFGELLRKVSQIAGVLKSWGVKKGDTVAIYLPMIPEAVIAMLAVARIGAIHSVVFAGFSAGSLKDRVVDANSKVVITCDEGKRGGKTINTKKIVDEGLNGVDLVSRILVFQRTGTEGIPMKAGRDYWWHEEAAKQRTYLPPVSCDAEDPLFLLYTSGSTGSPKGVVHTTGGYLLGAALTTRYVFDIHPEDVLFTAGDVGWITGHTYALYGPLTLGTASIIFESTPAYPDYGRYWRIIQRHKATHFYVAPTALRLIKRVGEAEIAKYDTSSLRVLGSVGEPISPDLWEWYHEKVGNKNCVICDTMWQTESGSHLIAPLAGAVPTKPGSATVPFFGINACIIDPVTGVELEGNDVEGVLAVKSPWPSMARSVWNHHDRYMDTYLKPYPGHYFTGDGAGRDHDGYYWIRGRVDDVVNVSGHRLSTSEIEASISNHENVSEAAVVGIPDELTGQTVVAYVSLKDGYLQNNATEGDAEHITPDNLRRELILQVRGEIGPFASPKTIILVRDLPRTRSGKIMRRVLRKVASNEAEQLGDLTTLANPEVVPAIISAVENQFFSQKKK

SEQ ID NO: 669 - DNA, 1713 bp, Glycine max
  CDS (1)..(1713)
atgacaacggtagctgcttctcttgatgccaaagaggtgtctacctccaaaactgaccaaaaccaagtgtgtgactgtgatccccaaactagccatgtcttcaaatcaaaattaccagatatcccaatctccaaccacctccctctccacgcttactgctttcagaaactatcccaattctccgaccgcccatgcctcatcgtcggacccgccgccaaaacctacacctactccgagacacacctcatttcacgcaagattgccgccggattgtccaacctcggaatccgcaagggcgacgtggtcatgatccttctccagaactccgccgagttcgtcttctccttcctcgctgcctccatgatcggcgccgtcgccaccacagccaatccgttctacaccgccgcggagatcttcaagcagtttaccgtctccaagacgaagctgatcataacgcaggcaatgtacgtggacaagcttcgcaaccacgacgacggcgcgaagctcggcgaggacttcaaggttgtgaccgtcgacgacccgccggaaaattgcctccacttctcggtgctctcggaggcgaacgagagcgacgcgccggaggttgatatccaacccgacgacgcggtggcgatgccgttctcttccggcacgacgggtttacctaaaggagtggttctcacgcacaagagtttaacaaccagtgtggcgcaacaagttgacggagagaaccctaacctctacctcaccaccgaggacgtgctcctatgcgtgcttccgttgtttcacatattctccctcaacagtgtgcttttgtgcgcgcttagggccgggagtgcggttttgttgatgcagaagttcgagattgggacgctgttggagctcatacagcggcaccgcgtgtcggtggcgatggtggtgccgccgctggtgctggcgttggcgaagaatccgatggtggcggattttgacctgagttcaatacggttagtgctgtcgggagctgctcccttggggaaggagctcgtggaagctctccggaacagggtgcctcaagccgttttgggacaggggtacgggatgacagaagcaggaccagtgctgtccatgtgcttgggctttgcaaagcaacctttcccaacaaaatcaggctcttgtggtaccgtagtcagaaatgcagaactcagggttgttgaccctgaaactggtcgttctcttggctacaatcaacccggtgaaatttgcatcagagggcaacagatcatgaaaggatatctgaacgatgagaaagcgacagcattgaccatagattcagagggttggcttcacaccggtgatgttggctatgtagatgaagatgatgaaattttcattgttgacagggtgaaagaactcatcaaatataaaggcttccaggtgccccctgcagaacttgaagggcttcttgtaagccatccctccattgcagacgcagctgtagtcccacaaaaggatgttgctgctggtgaagttcctgttgccttcgttgtgagatcaaacggctttgatctaactgaagaggctgtaaaagagtttatagctaaacaggtagtgttttacaaaagactgcacaaagtttattttgtacatgctattcccaagtctccatcaggaaagatattaaggaaagacctcagagcaaagctagaaaccgccgccactcagacgccttaa

SEQ ID NO: 670 - protein, 570 aa, Glycine max
MTTVAASLDAKEVSTSKTDQNQVCDCDPQTSHVFKSKLPDIPISNHLPLHAYCFQKLSQFSDRPCLIVGPAAKTYTYSETHLISRKIAAGLSNLGIRKGDVVMILLQNSAEFVFSFLAASMIGAVATTANPFYTAAEIFKQFTVSKTKLIITQAMYVDKLRNHDDGAKLGEDFKVVTVDDPPENCLHFSVLSEANESDAPEVDIQPDDAVAMPFSSGTTGLPKGVVLTHKSLTTSVAQQVDGENPNLYLTTEDVLLCVLPLFHIFSLNSVLLCALRAGSAVLLMQKFEIGTLLELIQRHRVSVAMVVPPLVLALAKNPMVADFDLSSIRLVLSGAAPLGKELVEALRNRVPQAVLGQGYGMTEAGPVLSMCLGFAKQPFPTKSGSCGTVVRNAELRVVDPETGRSLGYNQPGEICIRGQQIMKGYLNDEKATALTIDSEGWLHTGDVGYVDEDDEIFIVDRVKELIKYKGFQVPPAELEGLLVSHPSIADAAVVPQKDVAAGEVPVAFVVRSNGFDLTEEAVKEFIAKQVVFYKRLHKVYFVHAIPKSPSGKILRKDLRAKLETAATQTP

SEQ ID NO: 671 - DNA, 1644 bp, Glycine max
  CDS (1)..(1644)
atggctgatgatggaagcaggagggaattgatattcaggtcgaagcttccggatatctacatccccaaacatatgcccctccactcttactgcttcgagaatttgagagagtgtggttcacgcccctgcctgatcaatgcccccacgggagacgtctacagctaccacgaggtggacagcaccgccagaaaggtggcgagggggctgaagaaagagggcgtggaacagggccaggtcatcatgatcctcctccccaattgccccgaattcgtcttctcgtttcttggcgcatcccaccgcggtgccatggccactgccgccaaccctttcttcacccccgccgagattgcaaagcaagcccatgcctccaatgccaagctcctcatcacccaggcctcttactacgacaaagtcaaggacctccgcgacatcaagctcgtattcgtcgactcttgtcccccccatacagaggagaagcagcatctccatttctcacatctgtgtgaggataacggtgacgctgatgttgatgttgatgttgatatcaagcccgatgacgtggttgcattgccttattcttcgggaacaactggtcttcccaagggagtgatgctgagccacaaggggctggtgaccagcattgctcagcaggttgacggtgataatcccaacctctattaccactgccacgacaccatcctctgcgtgcttcccctctttcacatttactctctcaactccgttcttctctgtggcttgcgtgccaaggctaccattctcctcatgcccaagttcgatattaactccttgcttgctctcattcacaagcacaaagtcactattgcccctgtcgtccctcccattgttctcgccatttccaaatcacccgatctccacaagtacgacctgtcttccatcagagtcttgaagtccgggggagcccctctgggtaaggaactcgaagacactctcagagctaaattccccaacgccaaacttggccagggatacggaatgactgaggcagggcctgtgctaacaatgtctttagcttttgctaaagaaccgatagacgtgaaaccaggtgcatgtggaaccgttgtaagaaatgcagagatgaagattgtcgatcctgaaaccggtcattctttacccagaaaccaatccggtgaaatttgcataagaggcgaccagattatgaaaggttatctaaatgatggagaggctacagagagaaccatagacaaagatggttggttgcacacaggtgacatcggttacatcgacgatgacgatgagttattcatcgttgacaggctcaaggaattgatcaaatacaaaggatttcaagtggctccagctgaacttgaagcccttcttctcactcatcctaagatctctgatgctgctgttgttccaatgaaggatgaagccgcgggagaggtacctgttgcatttgtggtcatatcaaatggttataccgacacaaccgaggatgaaattaagcagtttatctccaaacaggtggtgttttacaaaagaataaaccgagtattcttcattgatgcaattcccaagtcaccgtcaggcaaaatcttgcgcaaggatctaagagcaaagatagcggcaagtgttccaaaatga

SEQ ID NO: 672 - protein, 547 aa, Glycine max
MADDGSRRELIFRSKLPDIYIPKHMPLHSYCFENLRECGSRPCLINAPTGDVYSYHEVDSTARKVARGLKKEGVEQGQVIMILLPNCPEFVFSFLGASHRGAMATAANPFFTPAEIAKQAHASNAKLLITQASYYDKVKDLRDIKLVFVDSCPPHTEEKQHLHFSHLCEDNGDADVDVDVDIKPDDVVALPYSSGTTGLPKGVMLSHKGLVTSIAQQVDGDNPNLYYHCHDTILCVLPLFHIYSLNSVLLCGLRAKATILLMPKFDINSLLALIHKHKVTIAPVVPPIVLAISKSPDLHKYDLSSIRVLKSGGAPLGKELEDTLRAKFPNAKLGQGYGMTEAGPVLTMSLAFAKEPIDVKPGACGTVVRNAEMKIVDPETGHSLPRNQSGEICIRGDQIMKGYLNDGEATERTIDKDGWLHTGDIGYIDDDDELFIVDRLKELIKYKGFQVAPAELEALLLTHPKISDAAVVPMKDEAAGEVPVAFVVISNGYTDTTEDEIKQFISKQVVFYKRINRVFFIDAIPKSPSGKILRKDLRAKIAASVPK

SEQ ID NO: 673 - DNA, 1641 bp, Glycine max
  CDS (1)..(1641)
atggcaccttctccacaagaaatcatcttccgatccccactccccgatattccgatccccacacatctcccattgtactcttactgcttccaaaacttgtcacagttccatgaccgtccatgcctcatcgacggcgacaccggcgagaccctcacctacgccgacgtcgacctcgctgctcgccgcatcgcctccggcctccacaaaatcggcatccgccagggtgacgtcatcatgctcgtcctacgcaactgcccgcagttcgccctcgccttcctcggcgccacccaccgtggcgccgtcgtcaccacagccaaccccttctacacgccggcggagcttgcgaagcaagcgacggccacgaaaaccaggctcgtcataacgcaatccgcgtacgtagagaaaatcaagagtttcgcggacagcagcagcgatgtcatggtgatgtgcattgatgatgatttttcttatgaaaacgacggcgttttgcatttctcaacgctcagtaacgccgacgaaacggaagcccctgccgttaagattaaccctgacgagctcgttgcgcttccgttttcttctggcacgtctgggctccccaagggcgttatgttatcgcataaaaacttggtcaccacgatagcgcagttagttgacggcgaaaacccgcaccaatacactcacagcgaggatgtgctactctgtgtgttgcctatgtttcatatctatgcgctcaattccattttgctctgcgggattcgttccggtgcggccgtgcttattttgcagaagtttgagatcactactctgttggagctcatcgagaagtacaaggtgacggttgcgtcgtttgtgccgcccatcgttttggcgttggttaagagcggagagactcatcgctacgacctgtcgtctattcgcgctgtggtcaccggcgcggcacccttaggaggggaacttcaagaagccgttaaggctaggctaccacacgctacttttggacagggatatgggatgacagaagcaggaccacttgccattagcatggcatttgcaaaagtaccctctaagattaaaccaggtgcatgcggaaccgttgtgagaaacgccgagatgaaaatcgtggatacagaaacgggtgattcacttccaagaaacaaacacggtgaaatttgcataataggcacaaaggtcatgaaaggatatctaaatgacccagaggctacagagagaactgtagacaaagaaggatggttacacacaggagatattggtttcattgatgatgatgatgaactcttcattgttgatcggttaaaggaattgatcaaatacaaaggattccaagtggctcctgctgagcttgaagcattgttgattgcccacccaaacatttctgatgctgccgttgtaggcatgaaagatgaagctgcaggggaaattccagttgcatttgttgtaaggtcaaatggttctgagatagccgaggatgaaatcaagaaatacatttcacaacaggtggttttttacaagagaatatgtagagttttcttcacggactctattcctaaagcaccctcaggcaaaattctgcgaaaggtattaactgcaagacttaacgaaggtttggtggtggccaattag

SEQ ID NO: 674 - protein, 546 aa, Glycine max
MAPSPQEIIFRSPLPDIPIPTHLPLYSYCFQNLSQFHDRPCLIDGDTGETLTYADVDLAARRIASGLHKIGIRQGDVIMLVLRNCPQFALAFLGATHRGAVVTTANPFYTPAELAKQATATKTRLVITQSAYVEKIKSFADSSSDVMVMCIDDDFSYENDGVLHFSTLSNADETEAPAVKINPDELVALPFSSGTSGLPKGVMLSHKNLVTTIAQLVDGENPHQYTHSEDVLLCVLPMFHIYALNSILLCGIRSGAAVLILQKFEITTLLELIEKYKVTVASFVPPIVLALVKSGETHRYDLSSIRAVVTGAAPLGGELQEAVKARLPHATFGQGYGMTEAGPLAISMAFAKVPSKIKPGACGTVVRNAEMKIVDTETGDSLPRNKHGEICIIGTKVMKGYLNDPEATERTVDKEGWLHTGDIGFIDDDDELFIVDRLKELIKYKGFQVAPAELEALLIAHPNISDAAVVGMKDEAAGEIPVAFVVRSNGSEIAEDEIKKYISQQVVFYKRICRVFFTDSIPKAPSGKILRKVLTARLNEGLVVAN

SEQ ID NO: 675 - DNA, 1668 bp, Zea mays
  misc_feature (603)..(603): n is a, c, g, or t
  CDS (1)..(1668)
atgggttccgtagacgcggcgatcgcggtgccggtgccggcggcggaggagaaggcggtggaggagaaggcgatggtgttccggtccaagcttcccgacatcgagatcgacagcagcatggcgctgcacacctactgcttcgggaagatgggcgaggtggcggagcgggcgtgcctgatcgacgggctgacgggcgcgtcgtacacgtacgcggaggtggagtccctgtcccggcgcgccgcgtcggggctgcgcgccatgggggtgggcaagggcgacgtggtgatgagcctgctccgcaactgccccgagttcgccttcaccttcctgggcgccgcccgcctgggcgccgccaccaccacggccaacccgttctacaccccgcacgaggtgcaccgccaggcggaggcggccggcgcccggctcatcgtgaccgaggcctgcgccgtggagaaggtgcgggagttcgcggcggagcggggcatccccgtggtcaccgtcgacgggcgcttcgacggctgcgtggagttcgccgagctgatcgcggccgaggagctggaggctgacgccgacatccaccccgacgacgtcgtcgcgctgccntactcctccggcaccaccgggctgcccaagggcgtcatgctcacccaccgcagcctcatcaccagcgtcgcgcagcaggttgatggcgagaacccgaacctgtacttccgcaaggacgacgtggtgctgtgcctgctgccgctgttccacatctactcgctgaactcggtgctgctggccggcctgcgcgcgggctccaccatcgtgatcatgcgcaagttcgacctgggcgcgctggttgacctggtgcgcaggtacgtgatcaccatcgcgcccttcgtgccgcccatcgtggtggagatcgccaagagcccccgcgtgaccgccggcgacctcgcgtccatccgcatggtcatgtccggcgccgcgcccatgggcaaggagctccaggacgccttcatggccaagatccccaatgccgtgctcgggcaggggtacgggatgacggaggcaggccccgtgctggcgatgtgcctggccttcgccaaggagccgtacccggtcaagtccgggtcgtgcggcaccgtggtgcggaacgcggagctgaagatcgtcgaccccgacaccggcgccgccctcggccggaaccagcccggcgagatctgcatccgcggggagcagatcatgaaaggttacctgaacgaccccgagtcgacgaagaacaccatcgaccaggacggctggctgcacaccggcgacatcggctacgtggacgacgacgacgagatcttcatcgtcgacaggctcaaggagatcatcaagtacaagggcttccaggtgccgccggcggagctggaggcgctcctcatcacgcacccggagatcaaggacgccgccgtcgtctcaatgaacgacgaccttgctggtgaaatcccggtcgccttcatcgtgcggaccgaaggttctcaagtcaccgaggatgagatcaagcaattcgtcgccaaggaggtggttttctacaagaagatccacaaggtcttcttcaccgaatccatccccaagaacccgtcgggcaagatcctgaggaaggacttgagagccaggctcgccgccggtgttcactga

SEQ ID NO: 676 - protein, 555 aa, Zea mays
MGSVDAAIAVPVPAAEEKAVEEKAMVFRSKLPDIEIDSSMALHTYCFGKMGEVAERACLIDGLTGASYTYAEVESLSRRAASGLRAMGVGKGDVVMSLLRNCPEFAFTFLGAARLGAATTTANPFYTPHEVHRQAEAAGARLIVTEACAVEKVREFAAERGIPVVTVDGRFDGCVEFAELIAAEELEADADIHPDDVVALPYSSGTTGLPKGVMLTHRSLITSVAQQVDGENPNLYFRKDDVVLCLLPLFHIYSLNSVLLAGLRAGSTIVIMRKFDLGALVDLVRRYVITIAPFVPPIVVEIAKSPRVTAGDLASIRMVMSGAAPMGKELQDAFMAKIPNAVLGQGYGMTEAGPVLAMCLAFAKEPYPVKSGSCGTVVRNAELKIVDPDTGAALGRNQPGEICIRGEQIMKGYLNDPESTKNTIDQDGWLHTGDIGYVDDDDEIFIVDRLKEIIKYKGFQVPPAELEALLITHPEIKDAAVVSMNDDLAGEIPVAFIVRTEGSQVTEDEIKQFVAKEVVFYKKIHKVFFTESIPKNPSGKILRKDLRARLAAGVH

SEQ ID NO: 677 - DNA, 1659 bp, Brassica napus
  CDS (1)..(1659)
atggaacttttgctcccacacccttcaaactcatctcctctgactgttctcggttttttggaccgagccgccgccgtttacggcgactctccttccctcctccacgataccaccacccatacttggtctgaaacccactctcgatgtctccgagtcgcttcgactctatcttcctcctccctcggaatcaaccgtggccaagttgtctccgttattggtcccaacgttccttctgtctacgagcttcagttcgcggttccaatgtctggagcagtcctcaataacatcaaccctcgtttagacgctcatgcactctctgttgttctacgtcacagtgaatccaagctcgttttcgtcgaccatcactcgagttctttagtcctcgaagctctctcgttcttgcccaagaatgagaagcctcgtctcgtcctcctccaagatgacagcaacatatccggcttaaccaatatgtcggcctcttcgtctgctgacgtggattttctcgacacttacgaaggtgttatggagagaggagacccgaggttcaagtgggtccgtcctaacaacgagtggaacccaatggtgcttaactacacttccggaacgacgtcgtctcctaaaggtgtggtacttagtcacagagcagttttcatgagtaccgttaactctttgctctactggtctatgcctaaccgaccagtctacctatggaccctaccgatgttccacgccaacggttggggctacacatgggccacagctgctgtgggggccacaaacatttgtgtccgaagagtagacgctccgaccattttcgagttgatcgacaagcatcaagtgactcacatgtgcgccgcgccgatggttctcaacatgttgactaactatccatctaggaaacagcttaaacggccggtccagattatgacagctggagctccacctccggccacggtcatttcaagcgccgagagtctaggttttgatgtggctcacggttacgggctgacagaaactggtggtctagttgtcacatgtgcgtggaagccggagtgggacgggctaggacaagacgagagagcgagactgaagtcaaggcaaggaatcagaaccgcggtattcgcggaagctgacgtgttggacacgctaacgggaaagagcgtgaagcacgacggagtaactgtgggagagattgtcttcagaggtggttgtgtcatgttgggttactacaatgacccggaagggaccgccgcgagtatgagagaagacggatggttctacactggagacattggtgtgatgcacccggacggttacttggaagtcaaggataggtcaaaagatgtgatcatatgtggaggagagaacataagcagcacggaagttgagacggttttgtacacgaacccggcggttaaggaagcagctgtggtggctaaaccggataagatgtggggagagactccttgtgcgtttgtgagcttgaagtgtagtgatcgtgggtcagttactgagagagaggtaagggagttttgtaagaagaagctaccaaagtatatggttccaaggaatgtggttttcatggaggagcttccaaagacttctactggaaagattcagaagttcctgctcagacaaatggccaagtctttgccttga

SEQ ID NO: 678 - protein, 552 aa, Brassica napus
MELLLPHPSNSSPLTVLGFLDRAAAVYGDSPSLLHDTTTHTWSETHSRCLRVASTLSSSSLGINRGQVVSVIGPNVPSVYELQFAVPMSGAVLNNINPRLDAHALSVVLRHSESKLVFVDHHSSSLVLEALSFLPKNEKPRLVLLQDDSNISGLTNMSASSSADVDFLDTYEGVMERGDPRFKWVRPNNEWNPMVLNYTSGTTSSPKGVVLSHRAVFMSTVNSLLYWSMPNRPVYLWTLPMFHANGWGYTWATAAVGATNICVRRVDAPTIFELIDKHQVTHMCAAPMVLNMLTNYPSRKQLKRPVQIMTAGAPPPATVISSAESLGFDVAHGYGLTETGGLVVTCAWKPEWDGLGQDERARLKSRQGIRTAVFAEADVLDTLTGKSVKHDGVTVGEIVFRGGCVMLGYYNDPEGTAASMREDGWFYTGDIGVMHPDGYLEVKDRSKDVIICGGENISSTEVETVLYTNPAVKEAAVVAKPDKMWGETPCAFVSLKCSDRGSVTEREVREFCKKKLPKYMVPRNVVFMEELPKTSTGKIQKFLLRQMAKSLP

SEQ ID NO: 679 - DNA, 1689 bp, Glycine max
  CDS (1)..(1689)
atgataactctagctccttctcttgatactccaaaaactgatcaaaaccaagtttctgatccccaaactagccatgtcttcaaatcaaaattaccagatatcccaatctccaaccacctccctctccactcctactgcttccagaacctctcccaatttgcccaccgcccttgcctcatcgtcggacccgcctccaaaaccttcacctacgccgacacccacctcatttccagcaagatcgccgccggattgtccaacctcggaatcctcaagggcgacgtcgtcatgatcctcctccagaactccgccgatttcgtcttctccttcctcgccatctccatgattggcgccgtcgccaccaccgccaacccgttctacaccgccccggagatcttcaagcagttcaccgtctccaaggcgaagttgatcataacacaggcaatgtacgtggacaagctccgcaaccacgacggcgcgaagctcggcgaggacttcaaggtcgtaaccgtcgacgatccgccggagaattgcctccacttctctgtcctctcggaggcgaacgagagcgacgtgccagaggtggagatccacccggacgacgcggtggcgatgccgttctcctccggcacgacgggtttacctaaaggagtgattctcacgcacaagagtttaaccacgagtgtggcgcagcaagttgacggagagaaccctaacctctacctcaccaccgaggacgtgctcctctgcgtgcttccgctctttcacatattctcgctcaacagtgtgctattgtgcgccctcagggcggggagtgcagttttgttgatgcagaagttcgagatcgggacactgctggagctgatacagcggcaccgagtgtcggtggcgatggtggtgcccccgctggtgttggcgttggcaaagaatccgatggtggcggattttgacctgagttcaatacggttagtgctgtccggagctgctcccttggggaaggagctcgaggaggctctccggaacaggatgcctcaagctgttttgggacagggttacgggatgacagaagcagggccagtgctgtccatgtgcttgggctttgcaaagcaacctttccaaacaaaatcaggctcttgtggtaccgtagtcagaaatgcagaactcaaggttgttgaccctgaaactggtcgttctcttggctacaatcaacccggtgaaatttgcatccgagggcaacagatcatgaaaggatatctgaacgatgaggcagcgacagcatcgaccatagattcagagggttggcttcacaccggtgatgttggctacgtagatgatgatgacgaaattttcattgttgacagggtgaaggaactcatcaaatataaaggcttccaggtgccccctgcagaacttgaagggcttcttgtaagccatccctccattgcagatgcagctgttgtcccacaaaaggatgttgctgctggtgaagttcctgttgccttcgttgtgagatcaaacggctttgatctaactgaagaggctgtaaaagagtttatagctaaacaggtagtgttttacaaaagactgcacaaagtttattttgttcatgctattcccaagtctccatcaggaaagatattaaggaaagacctcagagcaaagctagaaaccgccgccactcagacgccttaa

SEQ ID NO: 680 - protein, 562 aa, Glycine max
MITLAPSLDTPKTDQNQVSDPQTSHVFKSKLPDIPISNHLPLHSYCFQNLSQFAHRPCLIVGPASKTFTYADTHLISSKIAAGLSNLGILKGDVVMILLQNSADFVFSFLAISMIGAVATTANPFYTAPEIFKQFTVSKAKLIITQAMYVDKLRNHDGAKLGEDFKVVTVDDPPENCLHFSVLSEANESDVPEVEIHPDDAVAMPFSSGTTGLPKGVILTHKSLTTSVAQQVDGENPNLYLTTEDVLLCVLPLFHIFSLNSVLLCALRAGSAVLLMQKFEIGTLLELIQRHRVSVAMVVPPLVLALAKNPMVADFDLSSIRLVLSGAAPLGKELEEALRNRMPQAVLGQGYGMTEAGPVLSMCLGFAKQPFQTKSGSCGTVVRNAELKVVDPETGRSLGYNQPGEICIRGQQIMKGYLNDEAATASTIDSEGWLHTGDVGYVDDDDEIFIVDRVKELIKYKGFQVPPAELEGLLVSHPSIADAAVVPQKDVAAGEVPVAFVVRSNGFDLTEEAVKEFIAKQVVFYKRLHKVYFVHAIPKSPSGKILRKDLRAKLETAATQTP

SEQ ID NO: 681 - DNA, 3359 bp, Methanothrix soehngenii
  CDS (310)..(2328)
gtcgacctgcaggtcaacggatctgtgagcctgaataagttggaattaacagtattcttccagcggccgggcacggctgcttttaggctcttcgagattcgaccatctcttcaagccatagggtctataatctttattatttataattattaacaagcaaaaaccttatttatctgaaagacaaatcggaaatgtgcaaaactgctgttctctatgacgaattagagtggacagcgggcatgttcttcgcgtcaagttttccctgggataggagaaaagtgcgcgaaatattaggctttgatttaggagatgttgaaattggctggcaaagaagacaagaagttgaagacgacagtatttcaggacgagaccagaatctttaatccgccaaaagagttggtagaaaagtcaatcgtgatgcagtggatgaagaagaaagggttcaagactgagaaggagatgcgtgcttggtgctcctctgatgagcattacctcgagttctgggacgagatggcaaagacgtacgttgactggcacaagccctatactaaggtgatggacgactcggagatgccctacttccactggttcactggaggtgagatcaacatcacatacaacgccgtggacaggcacgccaagggcgcaaagaaggacaaagttgcatacatatggataccagagcctacagaccagccagtccagaagatcacctacggcgacctctataaggaggtcaataagttcgcaaacggcctcaagagcctcggcttgaagaagggggatcgggtcagcatctacatgcccatgataccccagcttcccatcgccatgctcgcctgcgccaagctcggcgtcagccacatcgtggttttctccggattcagctccaaaggcctgatggacagggctgctcactgcggttccagagccatcatcaccgtggatggattctacaggcgcggaaagccggtgcctctgaagccgaacgccgacgaggcagctggcggcgctccgtcagttgagaagattatcgtctacaagcgtgcgggcgttgacgtttccatgaaagagggcagggacgtctggtggcatgatctggtcaagggccagtccgaagagtgtgagccggtatgggttgacccggagcacaggctgtatatcctctacacctccggcacaaccggcaagcccaagggtatcgagcacgcaacgggcggaaacgccgtcggaccggctcagacgcttcactgggtcttcgacttgaaggacgacgatgtctggtggtgtaccgccgatattggatgggtcaccggtcactcctacatcgtctacgctccgctcattctgggcatgaccagcctcatgtacgagggcgctgcagactatccagacttcggtaggtggtggaagaacatccaggaccacaaggtcaccgtcctttacactgcccccacggcggtaaggatgttcatgaagcagggcgcagaatggcctgataagtacgacctctcaagcctgaggctactgggatctgtgggcgagccgatcaatccggaggcctggatgtggtatcgtgagcacattggacgaggcgagctccagatcatggacacctggtggcagaccgagaccggaaccttcctcaactctccgctgcccatcacgccactgaagcccggatcgtgcacattcccgctccccggatatgacatatccatcctggatgaggaagggaatgaggttcctctgggatccggaggcaacatagtggcattgaagccctatccttcgatgctcagggcgttctggggcgacaaagagaggttcatgaaggagtactggcagttctactgggatgttcccggccgccgcggcgtctatctcgctggagacaaggcgcagagggacaaggacggctacttcttcatccagggcagaatcgatgatgttctcagcgtcgcaggccacaggatagccaacgccgaggtcgagtctgccctggtggctcaccccaagatagccgaggcggcagtagttggaaagcccgacgaggttaagggcgagtcgatcgtcgccttcgtcattctgagggtcggaaatgaaccgtcccctgagctggcaaaggatgcgatcgctttcgtcaggaagacccttgggccggtggctgcgcccacggaggtccacttcgtcaacgacctcccgaagacgaggagcggcaagataatgcgccgtgtcgtcaaggcgagggcccttggaaacccggttggggacatatcgaccctgatgaatccagaagcagtggatgggatccccaagatcgtctgatggggatcctatttttttatcagattagcggagctaaagtcttctttttccatcaagtcttgatgatgctttaacgttctcatccatacaatatggcaatttctaaaagcctagtgttttgttaatcacgttaaataatgataattatcaatcataacgttaagtcacctcgatagatttataaatgaaaaaacaggttaattatcgatcgctacaatattcccaatggctcctgctggctgggattttggccctattgcgataataaaaggaatgccagatggctgcgttgggctggctgcctggcatcaggatagatcaggcggagagttgggaagacgtggggattataaaggaggctgtaaatttggctgaggaaaaagcaactgcaaagacatcagttttactggaagagacaaggatattcgaggcacccaaggatctggcagagaactccaacgtaatgaagtggatgaaagagaaaggcttcaagacagagcgcgagatgcgcctctggtgctctgccaactacatccagttctggggagagatggccaagacctacgcagattggtttgagccctggtcctcaaccctagaatggaagccaccatatgccaaatggttcgtgggcggcaagtgcaatgtgacccacaactgcgtggataggcatgcccagggggccaagaagataaggtggccatatattcgtgcctgaacctacagatcagcccactcaaaagatcacttatgcacagctggaaaaggaggtcaataagttcgccaacggcctgaagagcctgggcgtggtaaagggagacagagtcatgttatacatgcccatgatccctcaactgcccatcgccatgctggccatagccaagattggcgccattcactgcattgtattctctggattttcctctggcggcctaaacagcagaatcatggacgccgaggccaaagtggttattactgtggatggtttctaccggcgcggcaagccgctgcccctcaagccaaatgtcgac

SEQ ID NO: 682 - protein, 672 aa, Methanothrix soehngenii [sequence omitted]

SEQ ID NO: 683 - DNA, 3802 bp, Alcaligenes eutrophus
  CDS (722)..(2704)
cccgggcgatattcagcacggcgatgccggtcatcgccagcagcaccgatgccaccgtgcgccgcgacagccgttcgcgcagcagcagccacgacaggatcgccaccgtggccgggatggtgctggtgatcacgccggccgccatggcgctggtcagccgcacgcccattgagcatcagcagcgtaaacaggaaggtgccgaagaacgcctgcaggaacaggttcagccattccccgcgcgagacccggcgcatgcgcgcgggccggtaccagggcgccaggcagacgatggcaatgacaaaacgcagcagcgcgaacagcagcaccggcacatgcgcgatgatcgatttgccgaggcccacgttgctgccgaccagtgccatcgaggcaaccaggaagagggcgtagaccggggagaatgctgaagggttggcgggcacgggtacggccttggtcttccggcgggcgccgcggcgggtgctgagccggcaggagcggcaagggtaagcgccgcgatcaggtatggaactcgcggcattatagctgtgcatgcctaatggagaaggctgcactttcgcggcacgtgcgtggatttttcccgctgcattgcaacaagttgcaggcacgccccggcccaccgtcaggtcttaccgtcaggtttaagtaagccgtcgggcgtaacgtggcagccaaagccagtccaaaatcaggagacaaacctatgtccgccatcgaatcggtgatgcaagagcatcgcgtgttcaacccgcccgaaggcttcgccagccaggccgcgatccccagcatggaggcctaccaggcgctgtgcgacgaagccgagcgtgactatgaaggtttctgggcgcgccacgcgcgcgagctgctgcactggaccaagcccttcaccaaggtgctggaccaaagcaacgcaccgttctacaagtggttcgaagacggcgagctcaacgcctcttacaactgcctggaccgcaatctgcagaacggcaatgcggacaaggtcgcgatcgtgttcgaggccgacgacggcagcgtgacgcgcgtcacctaccgcgagctgcatggcaaggtgtgccgcttcgccaacggcctgaaggcgctcggcatcaggaagggcgaccgcgtggtgatctacatgccgatgtcggtcgaaggcgtggtcgcgatgcaggcctgcgcacgcctgggcgccacgcactcggtggtgttcggcggcttctcggccaagtcgctgcaggagcggctggtggacgtgggcgcggtggcgctgatcaccgccgacgagcagatgcgcggcggcaaggcgctgccgctcaaggccatcgccgatgacgcgctggcgctgggcggctgcgaggccgtcaggaacgtgatcgtctaccgccgcaccggcggcaaggttgcctggaccgaaggccgcgaccgctggatggaagatgtcagcgccggccagccggatacctgcgaagccgagccggtgagcgccgagcacccgctgttcgtgctctacacctccggctccaccggcaagcccaagggcgtgcagcacagcaccggcggctacctgctgtgggcgctgatgacaatgaagtggaccttcgacatcaagcccgacgacctgttctggtgtaccgcggacatcggctgggtcaccggccacacctatattgcctacggcccgctggccgcgggcgccacccaggtggtgttcgaaggcgtgccgacctaccccaacgccggccgcttctgggacatgatcgcgcgccacaaggtcagcatcttctacaccgcgccgaccgcgatccgctcgctgatcaaggccgccgaggccgacgagaagatccacccgaaacagtacgacctgtccagcctgcgcctgctcggcaccgtgggcgagccgatcaaccccgaagcctggatgtggtactacaagaacatcggcaacgagcgctgcccgatcgtcgacaccttctggcagaccgagaccggcggccacatgatcacgccgctgccgggcgcgacgccgctggtgccgggttcgtgcacgctgccgctgccgggcatcatggccgccatcgtcgacgagaccggccatgacgtgcccaacggcaacggcggcatcctggtggtcaagcgtccgtggccggccatgatccgcaccatctggggcgatccggagcgcttcaggaagagctacttccccgaagagctcggcggcaagctctacctggccggcgacggctcgatccgcgacaaggacaccggctacttcaccatcatgggccgcatcgacgacgtgctgaacgtgtcgggccaccgcatggggacgatggagatcgagtccgcgctggtgtccaacccgctggtggctgaagccgccgtggtgggccgccccgacgacatgaccggcgaggccatctgcgccttcgtcgtgctcaagcgttcgcgtccgactggcgaagaggccgtcaagatcgcgacggagctgcgcaactgggtcggcaaggagatcggcccgatcgccaagcccaaggacatccgctttggcgacaacctgcccaagacgcgctcgggcaagatcatgcggcgcctgctgcggtcgctggccaagggggaggagatcacgcaggacacctcgacgctggagaatccggccatcctggagcagctcaagcaggcgcagtgatcgtctggcttcggcccgatcgagcccttgaacccgccgccgcgttcccgcgcgccggcgggtttgttacgatagccccccaccgaccacggaccgtccccaatgcctgaagcccagtcgcgctttcgccgacggttgctgctgtactacggcctgttcacgctagggttgttcggcttcgtcggcatgatggggctgcttgaaaagtccaatgccgatgcgctgtggctcggctacgtcttcctcttcatcaccatcgcgatctatgcctgcatcggcctgatctgccgcacctctgacctgaacgagtactacgttgcctcgcggcgcgtgccggcgctgttcaacggcatggcgattgccgccgactggatgagcgcggcgtccttcatcggcctggccggcatcctgtttgcctcgggctacgaagggctggcctatgtgatgggctggaccggcggctactgcctggtggccttcctgctggcgccgtacctacgcaagtacggcggctacaccattcccgatttcctcgcggcgcgctacggcaacggcaagcccggcggcaacctgccagtgcgcgcgatcgcggtgctggcggcctcgctctgctccttcgtctacctggttgcgcagatccagggcgtggggctggtggtgacgcgctttatcggcgtggagtttgccgtcggcatcttcttcgggctggccggcatcctggtgtgctcgttcctgggcggcatgcgcgcggtcacatggacgcaggtggcgcagtacatcatgatgatcgtcgccttcctggtcacggtatcgatgatcgcgtggaagcatcaccacgaagcgttgccgcagctcagctacggcacgctgctgtcgcaactcgacgcgcgcgagcagcagctggagcgcgagccggccgagcaggccgtgcgcgagtactaccggcagcaggccatcctgctgcaggagcgcatcgcccggctgcccgattcctttgcccaggagcgtgacgcgctcgacgcgcggctgcaggacctgcgcacgcgcaatgccccgctgcgcgacatcaagtcgctggagcgcgaacggctggaattc

SEQ ID NO: 684 - protein, 660 aa, Alcaligenes eutrophus [sequence omitted]

SEQ ID NO: 685 - DNA, 1845 bp, Phanerochaete chrysosporium
  CDS (1)..(1845)
atgcaccagcagacggtgggccatgagtccgacaagtggtgggccaagatggcgcgcgataccctgcacagggatcgccccttccacaccgttcgcgcaggcggcttcgagacaggcgacatcgtttggttcccagaaggcggcctgaacgcatcgttcaactgcgttgacagatgggcgttcaagcaccctgataagacggccatcatctacgaggccgacgagccgaacgagggctgcgagatcacgtatgcgcagctgccgcgaggtctgcagagagtcgcgaacgtgctcaagtcgctcggcgtcaagaagggcgacaccgtgtcggcgtacctgcccatgacatggcaggccgtcgccgcgttcctcgcatgcgcgcgcatcggcgtgcactctgtcgtcttcgcgggcttctctgccgagtccctgcgcgaccgtatgaacgactgcaagtcccgcgtgctcatcaccctcgacgaggcgcgcggcggcaagacgatcgcgaccaaggtcatcgccgacgccgcgatcaagcagtgccccggcgtcgagcacgtccttgtcctccgccgcaccggcaacgaggtgccctggaccgagggtcgcgacaagtggtggcacgaggagaccgccaaggtccccaactactgcccgccggaggtcatgtctgcagaggacccgctgttcatcctgtatacgtctggctcgactggcaagcccaagggtgtcgtccataccaccggtggatactcctttggcgctgcgctcaccgtcaagtacgtcttcgacgtgcaccccgacgacaagtttgcctgcatggctgacattggttggatcaccggccacacttacatcgtgtatggcccgctgtgcaacggtgtgtcgacgcctgtatacccgacgccctcgcgctactggcagaccgtcgagaagcacaagctcacgcagttttactctgcacccaccgcgatccggctgctccgccgcctcacggggacccacgtccaggaccacgacctcagctcgctccgcgtcctcggctctgtcggtgaaccgattaacccggaggcgtggcactggtacaacgaccacgtcggcaagccccagtgcgccatcgtcgacacgttctggcagaccgagaccggctcgatcgtcgtcactcccttccccggtgcgattgagaccaagcccggctccgcgaccgtcccgttctttggcattgagcctgccatccttgaccccgtctcaggcgaggagctcaagggtgataacgtcgagggtgtcctcgtcctcaagaccccatggccatcaatggcccgcacggtctaccaggaccacaaccggtacctggagacatacatgaagccctaccctggctacttctacactggtgacggccacgggcgcgacgagcacggctacatctggatcaagggccgtgttgatgacgttatcaacgtctccggcgacctgtcgacggcggagatcgagtcgtcgctcatccttcacaaggcggtcgcggagacggcggtcgtgggcacggcggacgagctcacgggccaggcggtgtcgttcgtgacgctcaagcccgagttcaagtgcaccccgcgggaggccgggctcgtgaaggagctcgtgctgcaggtgcgcaaggtcatcgggccgttcgcgccgaagaagatcttcatcgtgcccgacctgcccaagacgcgctcgggcaagatcatgcgtcgcatcatgcgcaagatcgtcgccggcgagggcgacagccttggcgacctcagcacgctcgccgagcccggcgtcgtcgacgtcatcaagactaaggtcgcgtcgtcctga

SEQ ID NO: 686 - protein, 614 aa, Phanerochaete chrysosporium
MHQQTVGHESDKWWAKMARDTLHRDRPFHTVRAGGFETGDIVWFPEGGLNASFNCVDRWAFKHPDKTAIIYEADEPNEGCEITYAQLPRGLQRVANVLKSLGVKKGDTVSAYLPMTWQAVAAFLACARIGVHSVVFAGFSAESLRDRMNDCKSRVLITLDEARGGKTIATKVIADAAIKQCPGVEHVLVLRRTGNEVPWTEGRDKWWHEETAKVPNYCPPEVMSAEDPLFILYTSGSTGKPKGVVHTTGGYSFGAALTVKYVFDVHPDDKFACMADIGWITGHTYIVYGPLCNGVSTPVYPTPSRYWQTVEKHKLTQFYSAPTAIRLLRRLTGTHVQDHDLSSLRVLGSVGEPINPEAWHWYNDHVGKPQCAIVDTFWQTETGSIVVTPFPGAIETKPGSATVPFFGIEPAILDPVSGEELKGDNVEGVLVLKTPWPSMARTVYQDHNRYLETYMKPYPGYFYTGDGHGRDEHGYIWIKGRVDDVINVSGDLSTAEIESSLILHKAVAETAVVGTADELTGQAVSFVTLKPEFKCTPREAGLVKELVLQVRKVIGPFAPKKIFIVPDLPKTRSGKIMRRIMRKIVAGEGDSLGDLSTLAEPGVVDVIKTKVASS

SEQ ID NO: 687 - DNA, 1938 bp, Pseudomonas aeruginosa
  CDS (1)..(1938)
atgttcgagatcagcgtccacccggtgccggacgccgtccgccagcgtgcctacctgaacgacgacgactaccagcgcctgtaccgccaatccgtcgagaaccccgacgagttctggggcgagcaggccaaggccttcctcgattggttcaagccctggcacagcgtccaccacggcgacctgaggaaaggccaggccacttggttcaagggcggccagttgaacgtcgcctacaactgcatcgatcgccacctggaacgccgcggcgaacagatcgcgatcgtctgggaaggcgacaaccccagcgaatccgcgcacatcacctaccgcaagctgcaccacaacgtctgccgcctggctaacgtgctgaagagccgcggcgtggaaaagggcgaccgggtctgcatctacatgccgatgattcccgaggccgcctacgccatgctcgcctgcgcccgtatcggggcggtgcactcggtggtgttcggcggcttctcgccggactcgctgcgcgaccgcatcctcgatgccgactgccgcaccgtgatcaccgccgacgagggcgtgcgcggcggcaagtacatcccgctgaagcagaatgtggaaaaggcactgaaggactgcccggacgtctctaccgtggtggtggtcgagcgcacccagggcgacataccctgggtcgaaggccgcgacatctggtaccacgaggcgctccacgcggcctcagccgactgcccggcggaagcgatggacgccgaggacccgctgttcatcctctatacctccggcagcaccggcaagccgaagggcgtgttgcacaccaccgggggctacctgctcggcgcggcgatgacccacaagtacgtgttcgactaccacgatggcgacgtctactggtgcaccgccgacgtcggctgggtcaccggacacagctatatcgtctacggcccgctggccaacggcgccaccaccctcatgttcgagggcgtgcccaactacccggacgcctcgcgcttctggcaggtgatcgacaagcaccaggtgaatatcttctacaccgcgccgaccgcgatccgcgcgctgatgcgcgaaggcgacgccccggtccgccagacctcgcgcagcagcctgcgcctgctcggctcggtgggcgagccgatcaacccggaggcttgggagtggtactaccaggtggtcggcgagaagcgctgccccatcctcgatacctggtggcagaccgagaccggcagcatcctgatcaccccgttgcccggcgccactgcgctaaagccaggctcggctacccgcccgttcttcggcgtgcaacccgtgctgctcgacgagaaaggcaaggaaatcgacggcgcgggcagcggcgtactggcgatcaaggccagttggccgagtcagatccgcagcgtctacggcgaccaccagcggatgatcgacacctacttcaagccctaccccgggtattacttcagcggcgacggcgcgcgccgcgacgaggacggctactactggatcaccggccgggtcgacgacgtgatcaatgtctccggacaccggatcggcaccgccgaggtcgagagcgcgctggtcctgcacgatgcggtggccgaggcggcagtggtcggctgcccgcatgacgtgaagggccaggccatctacgcgttcgtcaccctgatggccggcagtcagcccagcgaggcgctacaacaggaattgctggccctggtcggcaaggagatcggcagcttcgccaagccggatcacctgcaatgggcgcccagcctgccgaagacccgctccggcaagatcatgcggcgtatcctgcgcaagatcgcctgcaacgagctggacagtctcggcgatacctcgaccctggccgatccgggagtggtgcaggggttgatcgacaaccgcctcaaccgctga

SEQ ID NO: 688 - protein, 645 aa, Pseudomonas aeruginosa [sequence omitted]

SEQ ID NO: 689 - DNA, 1668 bp, Pseudomonas aeruginosa
  CDS (1)..(1668)
atgcgcgactacgccaccactgccgccgggttcgacttgcagcggaccgccgccgccacgctttccggtacgctccaggcgctcaacgcctgcgtcgaatgctgcgaccggcatgccctgccgggtcggatcgcgttgttctgggagggcaaggatggcagtcgcgccagctataccttcagcgagctgaaagcgctctccggacgtttcgccaatttcctccaggcccagggcgtacgcccgggcgactgcgtcgccggcctgttgccgcgcacgcccgagctgctggtcaccatcctcggcgcctggcgcctgggcgcggtgtaccagccgctgttcaccgccttcggcccgaaggccatcgaacaccgcgtggcgaccgccggcagcaaggtgctggtcaccgatgcggccaaccgcgacaagctcgacgaactcgccgatccgcctctggccgtcaccgtcggcggaccgaaggggcagggcatccgtcgcggcgatttcagcttctgggccgagctggagcgctatccggccgaattcgaaccggttccgcgcagcggcgaggatccgttcctgatgatgttcacctccggcaccaccggcctggccaaaccggtgccggtgccgctcaaggcgatcctcgccttcgtcggctacctgcgcgaggcggtggacctgcgccccgaggacgccttctggaacctcgccgatccgggctgggcctacggcctctactacgctgtcgccggtcccctcgccatgggccatccgaccaccttctacgaagggccgttcagcgtggaaagcacctgccggatcatccgtgactacggcatcaccaacctcgccggatcgcccaccgcctatcgcctgctgatggccgccggcgcggccgcggaaactgcgctgaaggggcgcctgcgcgcggtcagcagcgccggcgagccgttgacgccggaggtgatccgctggttcgccgacaggctcggcaccaccatccacgatcattacgggcagaccgagctgggcatggtgctgtgcaaccaccatgccctggcgcatccggtgcgggtcggcgccgccgggttcgcctgtcccgggcaccgggtagtagtgctggacgacgatctcaacgaactgccgcccggccagccaggcatcctcgccctcgaccggcggcgttcgccgctgatgtggtttcccggctaccagggcctggaaaccgcagccttcgtcggcgactactacctgagcggcgataccgtcgaactcaacgaagacggcagcatcagcttcgtcggccgcgccgacgacgtcattaccacctctggctaccgggtcggcccgttcgatgtggagagcgcgctgatcgaacacccggcagtgatggaggcggcggtgatcggcaagcccgacccggagcgcaccgaactggtcaaggccttcgtcgtgctctgcgccggccaccggccgacgccggaactggcggacgcattgcagcgatacgtgcgccagcgcctgtcggcgcacgcctacccgcgggagatcgagttcctcgaggaactgccgaagactcccagcggcaagatccagcgctttctcctgcgcaaccaggagatcgcccggcaacgcgaggcggccccacgggcggccgccgcgaactga

SEQ ID NO: 690 - protein, 555 aa, Pseudomonas aeruginosa
MRDYATTAAGFDLQRTAAATLSGTLQALNACVECCDRHALPGRIALFWEGKDGSRASYTFSELKALSGRFANFLQAQGVRPGDCVAGLLPRTPELLVTILGAWRLGAVYQPLFTAFGPKAIEHRVATAGSKVLVTDAANRDKLDELADPPLAVTVGGPKGQGIRRGDFSFWAELERYPAEFEPVPRSGEDPFLMMFTSGTTGLAKPVPVPLKAILAFVGYLREAVDLRPEDAFWNLADPGWAYGLYYAVAGPLAMGHPTTFYEGPFSVESTCRIIRDYGITNLAGSPTAYRLLMAAGAAAETALKGRLRAVSSAGEPLTPEVIRWFADRLGTTIHDHYGQTELGMVLCNHHALAHPVRVGAAGFACPGHRVVVLDDDLNELPPGQPGILALDRRRSPLMWFPGYQGLETAAFVGDYYLSGDTVELNEDGSISFVGRADDVITTSGYRVGPFDVESALIEHPAVMEAAVIGKPDPERTELVKAFVVLCAGHRPTPELADALQRYVRQRLSAHAYPREIEFLEELPKTPSGKIQRFLLRNQEIARQREAAPRAAAAN

SEQ ID NO: 691 - DNA, 1947 bp, Bacillus halodurans
  CDS (1)..(1947)
atgacagcgcctgtctggtttccatcggatgcttacaaagagcaaacgagattgtatcaatggatgaaaatgctcggctattcgtcctatgacgatttttatcaacgttcgatcgacgacattgcttggttttggcgggaagtggagcgggagctagacattccatggatgaagccttatgatcatgtccttgcaatggagaaagggcctgcctggcctgaatggtttatcggtggcaaattaaatgtgacggaagcagccgtggaaaaatgggcgaatgatccaaagaccgcaaataaaacggcgatcgtctgggaaggggaagaaggaaagacttccttgctatcgtttgcagcccttgatgaggcggtgaaacgtgcagcccatggcttaaaacagcatggagtcaaaaaaggagatgtgttcgccttatacatgccgatgattcctgagacggtgattgccatgctggctgttgccaagctcggagcaatcttcacgccgattttttctggttatggtgcagaggcgatcgctacgagactacgcgcttctggagcgaaatggctcataacagtagatggctgttaccggcgaggcaagctgattgatatgaggcaagaggcggagaaagcacttgctgacgcgccgaatgtccaatcaattgtcgttgtggagcgggtcggcacgttaacatcttatggtgccaacgatatacgctggactgagcttatgacctatgctccgctccaagaaacggcagcgatgaattcggcagatcccttaatgcttatttatacttccgggacaactggacggccaaaaggagcggttcatacgcatagtggcttcccaattaaagcggcgttcgatgcaggaattggcatggatttacgaaaagaggacacgcttttttggctgacagatatgggatggatgatgggcccgtttcttgtgtttgctggtttgatcaatggggcaaccatcgtcctttacgacggtgctcctgactatccgaatcatgaccgactttggcagcttgtcgaacaaaagcaagtaagtcatttaggtatttctccgacattaattcgcgccatgatgaagtacgggacggaacgaatggctgagcatgatttgtcttgcttaaaggtgattggctctacgggggagccgtggaaccctgagccatggcattggctgtttgaacacgtcggaaataaacaggtacctatctttaattactccggagggacggaaatatcaggtgggattttagggaatgtactcgttcgaccgattggtccgataacgtttaactcagcgattccagggatggcagctgctgtttataatgaaagtggtgaaaaagtaaccgcggaagtgggggagcttgtcctaacaaagccttgggtcgggatgactaacggcttttggcaggagcctgaacggtttctcgaaacgtactggtcacgttggagcaatacgtgggttcatggagattgggtcactcttgacgcggatggattttggacgataaccggtcgatcagatgatattttaaatgtagctggcaaacgacttggaccggcagaagttgagtctgtcctagtcggtcatcaggccgtcattgaggctggaaccattggggtaccagatgatgtgaagggtgaagtgccaatctgttttgttgtcattgccccaagtttttctgagagcgactcattaagacacgaattgatccagcttgtcgggacaaagcttggaaaagcattgaagccaaaggcagtgtattttgtttccgatttaccgaagacacgaaatgcaaaggtgatgcgccgtgcgatacgggcggcctttttgcaaaaggaggcaggagatttatcctcacttgaaaaccctcatgtattaaaagaaatcgaaaggttaggaacaaagcaatcctcatag

SEQ ID NO: 692 - protein, 648 aa, Bacillus halodurans
MTAPVWFPSDAYKEQTRLYQWMKMLGYSSYDDFYQRSIDDIAWFWREVERELDIPWMKPYDHVLAMEKGPAWPEWFIGGKLNVTEAAVEKWANDPKTANKTAIVWEGEEGKTSLLSFAALDEAVKRAAHGLKQHGVKKGDVFALYMPMIPETVIAMLAVAKLGAIFTPIFSGYGAEAIATRLRASGAKWLITVDGCYRRGKLIDMRQEAEKALADAPNVQSIVVVERVGTLTSYGANDIRWTELMTYAPLQETAAMNSADPLMLIYTSGTTGRPKGAVHTHSGFPIKAAFDAGIGMDLRKEDTLFWLTDMGWMMGPFLVFAGLINGATIVLYDGAPDYPNHDRLWQLVEQKQVSHLGISPTLIRAMMKYGTERMAEHDLSCLKVIGSTGEPWNPEPWHWLFEHVGNKQVPIFNYSGGTEISGGILGNVLVRPIGPITFNSAIPGMAAAVYNESGEKVTAEVGELVLTKPWVGMTNGFWQEPERFLETYWSRWSNTWVHGDWVTLDADGFWTITGRSDDILNVAGKRLGPAEVESVLVGHQAVIEAGTIGVPDDVKGEVPICFVVIAPSFSESDSLRHELIQLVGTKLGKALKPKAVYFVSDLPKTRNAKVMRRAIRAAFLQKEAGDLSSLENPHVLKEIERLGTKQSS

SEQ ID NO: 693 - DNA, 1707 bp, Staphylococcus aureus
  CDS (1)..(1707)
atgaaagtcgaagtttataaaggagcgcaaggtaaacataaccttaaagattatgaagaaacatataatacttttgattggaaagacgtagaacaagcattttcttggagtgaaactggaaaaatgaacatggcatatgaatgtatagatcgccatgtagatcaaggattaggggataaaatagcgttaaattacaaagatgagtacagaaaagaatcgtatacttataaagatatgcaacggttatctaataaagcagcgaatgttttgtctgaacatgcagaagttgacaaaggtgacagagtatttatatttatgtcgcgtacacctgaactatattttgcgttgttaggtgttttaaaaattggtgcaattgttgggccgttatttgaagcatttatggaaaaggcagttgcggatagattagagaacagtgaagctaaagtgttaattactaataaggcattgttacctcgagtacctgtagataaattaccgaacttgaaaaaaattgttgtcgtagatgaggatgtagaagacaattacatagacttcattagtttgatggaaactgctagcgatgaatttgacattgaatggttaaagtcggatgatggtttgattttacattatacatcaggttctactgggcaacctaaaggtgtattgcatgttcaacaagcaatgttagtgcactatatttctggaaaatatgtattagatttacaagaagatgatgtttattggtgtacagcagatccaggttgggttacaggaacatcttatggtatttttgcaccatggttaaatggcgctacaaattgtatagctggtggtcgcttttcaccagaacagtggtatagtatgattgaagattttaaagtgacgatttggtatacggcaccaacagctttaagaatgttaatgagtgctggtgacgatattgttgagaaatatgacttgtcatcgttacgttcgattctatcagtaggtgagcctttaaatcctgaagttataaaatgggcgaaaaaagtatacggtttaacggtgttagatacttggtggatgacagaaacaggtggacatatgattgttaactatccaacgatggacgtcaagcttggctcaatgggcaaaccattacctggtattcaagctgcaattatcgatgatgcaggtaatgaattaccaccaaatcgaatgggcaaccttgctataaaaaaaggctggccatcaatgatgtatcgtatctggaagaatccagaaaaatataaatcatattttattggagactggtatgtatctggtgattcggcatataaagatgaagatggttacttctggttccaaggacgtgttgatgatgtaattatgacagctggtgaacgagttggaccatttgaggttgagtctaaattggttgaacacgaagcagttgccgaagcaggaattattggtaaacctgatccggttcgcggtgaaataattaaggcgtttgttgcactgagaaaaggatatgaaccaacagacgaattaaaagaagaaattcgtttatttgttaaagaaggtttgtcggcacatgcagcaccacgtgaaatcgaatttaaagataaattacctaaaacacggtcaggtaaaattatgagacgtgtattaaaagcttgggaattaaatttagatgctggggatttaagtacaatggaataa

SEQ ID NO: 694 - protein, 568 aa, Staphylococcus aureus
MKVEVYKGAQGKHNLKDYEETYNTFDWKDVEQAFSWSETGKMNMAYECIDRHVDQGLGDKIALNYKDEYRKESYTYKDMQRLSNKAANVLSEHAEVDKGDRVFIFMSRTPELYFALLGVLKIGAIVGPLFEAFMEKAVADRLENSEAKVLITNKALLPRVPVDKLPNLKKIVVVDEDVEDNYIDFISLMETASDEFDIEWLKSDDGLILHYTSGSTGQPKGVLHVQQAMLVHYISGKYVLDLQEDDVYWCTADPGWVTGTSYGIFAPWLNGATNCIAGGRFSPEQWYSMIEDFKVTIWYTAPTALRMLMSAGDDIVEKYDLSSLRSILSVGEPLNPEVIKWAKKVYGLTVLDTWWMTETGGHMIVNYPTMDVKLGSMGKPLPGIQAAIIDDAGNELPPNRMGNLAIKKGWPSMMYRIWKNPEKYKSYFIGDWYVSGDSAYKDEDGYFWFQGRVDDVIMTAGERVGPFEVESKLVEHEAVAEAGIIGKPDPVRGEIIKAFVALRKGYEPTDELKEEIRLFVKEGLSAHAAPREIEFKDKLPKTRSGKIMRRVLKAWELNLDAGDLSTME

SEQ ID NO: 695 - DNA, 1887 bp, Salmonella enterica subsp. enterica serovar Typhi
  CDS (1)..(1887)
atgtcttttagcgaattttatcagcgttccattaacgaaccggaggcgttctgggccgagcaggcccggcgtatcgactggcgacagccgtttacgcagacgctggatcatagccgtccaccgtttgcccgctggttttgcggcggcaccactaacttatgtcataacgccgtcgaccgctggcgggataaacagccggaggcgctggcgctgattgccgtctcatcagagaccgatgaagagcgcacatttaccttcagccagttgcatgatgaagtcaacgctgtggccgctatgctgctgtcgctgggcgtgcagcgtggcgatcgcgtattggtctatatgccgatgattgccgaagcgcagataaccctgctggcctgtgcgcgcattggcgcgatccattcggtggtctttggcggttttgcctcgcacagcgtggcggcgcgcattgacgatgccagaccggcgctgattgtgtcggcggatgccggagcgcgtggcggtaaaattctgccgtataaaaagctgcttgatgacgctattgcgcaggcgcagcatcagccgaaacacgttctgctggtggacagagggctggcgaaaatgtcgtgggtggatgggcgcgatctggatttttccacgttgcgccagcagtatctcggcgcgagcgtgccggtggcgtggctggaatccaatgaaacctcgtgcattctttacacctccggcactaccggcaaaccgaaaggcgtccagcgcgacgtcggcggttatgcggtggcgctggcaacctcgatggacaccatttttggcggcaaggcgggcggcgtattcttttgcgcatcggatatcggctgggtcgtcggccactcctatatcgtttacgcgccgctgctggcaggcatggcgactattgtttacgaaggactgccgacgtacccggactgcggggtctggtggaaaattgtcgagaaataccaggttaaccggatgttttccgccccgaccgcgattcgcgtgctgaaaaaattcccgacggcgcaaatccgcaatcacgatctctcctcgctggaggcgctttatctggccggtgagccgctggacgagccgacggccagttgggtgacggagacgctgggcgtaccggtcatcgacaattattggcagacggagtccggctggccgatcatggcgctggcccgcgcgctggacgacaggccgtcgcgtctgggaagtcccggggtgccgatgtacggttataacgtccagctactcaatgaagtcaccggcgaaccctgcggcataaatgaaaaaggcatgctggtgatcgaagggccgctgccgccgggttgtattcagactatttggggcgacgatgcgcgttttgtgaagacttactggtcgctgtttaaccgtcaggtttatgccactttcgactggggaatccgcgacgccgaggggtattactttattctgggccgtaccgatgatgtgattaatattgcgggtcatcggctggggacgcgagaaatagaagaaagtatctccggttacccgaacgtagcggaagtggcggtggtggggataaaagacgctctgaaagggcaggtggcggtggcgtttgtcattccgaagcagagcgatacgctggcggatcgcgaggcggcgcgcgacgaggaaaaagcgattatggcgctggtggataaccagatcggtcactttggtcgtccggcgcatgtctggtttgtttcgcagctccccaaaacgcgttccggaaagatgcttcgccgcacgatccaggcgatctgcgaaggccgtgatccgggcgatctgacaaccattgacgatcccgcgtcgttgcagcaaattcgccaggcgatcgaggaatag

SEQ ID NO: 696 - protein, 628 aa, Salmonella enterica subsp. enterica serovar Typhi
MSFSEFYQRSINEPEAFWAEQARRIDWRQPFTQTLDHSRPPFARWFCGGTTNLCHNAVDRWRDKQPEALALIAVSSETDEERTFTFSQLHDEVNAVAAMLLSLGVQRGDRVLVYMPMIAEAQITLLACARIGAIHSVVFGGFASHSVAARIDDARPALIVSADAGARGGKILPYKKLLDDAIAQAQHQPKHVLLVDRGLAKMSWVDGRDLDFSTLRQQYLGASVPVAWLESNETSCILYTSGTTGKPKGVQRDVGGYAVALATSMDTIFGGKAGGVFFCASDIGWVVGHSYIVYAPLLAGMATIVYEGLPTYPDCGVWWKIVEKYQVNRMFSAPTAIRVLKKFPTAQIRNHDLSSLEALYLAGEPLDEPTASWVTETLGVPVIDNYWQTESGWPIMALARALDDRPSRLGSPGVPMYGYNVQLLNEVTGEPCGINEKGMLVIEGPLPPGCIQTIWGDDARFVKTYWSLFNRQVYATFDWGIRDAEGYYFILGRTDDVINIAGHRLGTREIEESISGYPNVAEVAVVGIKDALKGQVAVAFVIPKQSDTLADREAARDEEKAIMALVDNQIGHFGRPAHVWFVSQLPKTRSGKMLRRTIQAICEGRDPGDLTTIDDPASLQQIRQAIEE

SEQ ID NO: 697 - DNA, 1575 bp, Nostoc sp. PCC 7120
  CDS (1)..(1575)
atgtctcagccaactatagagtcaattctgcaagaaaaacgtttatttcctcccagtaccgagttttcccaaaatgcccagattaaaagtctagaagattaccaacgtctttatgacaaagccaaagctgatccgcaaaaattttgggcagaattagccgaaacagaattgcactggttccaaaaatgggacacagtactagattggcaagcaccttttgctaagtggttcgtgggtgggaagattaacatttcctacaactgtttagatagacatctcacaacctggcggaaaaataaagccgcgttgatttgggaaggggaaccaggagattcccgtactttaacttatgcccaattgcatcgggaagtttgccagttcgccaacgtcttgaaacaactgggagtgcagaaaggcgatcgcgtcggtatttatatgccgatgataccggaagccgcgatcgctatgttagcctgtgccagaattggcgcgcctcatagtgtggtatttggtgggtttagtgcggaagcattgcgcgatcgcttaattgatgcccaagccaaggtagtagttacagctgatggtggttggcgtaaagatgcgatcgttcccttgaaagaacaggtagacaaagccttggctgatgacgctgttcccagtgtggagaatgtcctggttgtcaagcgtaccggacaagatatttatatgcagttgggaggacgagatcattggtggcacgatttacaaaaaggtgcatcggcagattgtcccgccgaaccaatggacagcgaggatttactctttgtcctctacacttctggtagcacaggcaaacccaaaggtgttgtccacaccactggcggttataacctatatactcacatgaccaccaaatggattttcgacctacaagacacagatgtatattggtgtactgccgatgtaggctggattaccggacacagttacattgtttacggccccctctccaacggtgcaaccactctgatgtatgaaggtgcgcctcgtgcctctaatcctgggtgtttctgggatgtaattgaaaaatacggcgtgaatattttctacaccgcacccaccgcaattcgcgccttcattaaaatgggcgaacaccatcccaacgcccgtaatctttcttctttaagattattaggaaccgtcggcgaacccatcaacccagaagcttggatgtggtatcacaaagtaattggtggtgaacgctgccccatagttgatacttggtggcaaacggaaactggcggtatcatgattacgcctctaccaggggcaatttccactaaacccggttccgctacccttcccttccccggcatcctggccgacatcgttgatttagaaggtaacactgtaccggaaaacgaaggtggttacttagcagtgcgttatccctggcctgggatgatgcggactgtctacggcgatccggaacgcttccgccgcacctactgggaacacatccccccaaagatgggaattatacttactttgccggcgatggtgcaagaaaagatgaagacggctatttctgggtaa

SEQ ID NO: 698 - protein, 524 aa, Nostoc sp. PCC 7120
MSQPTIESILQEKRLFPPSTEFSQNAQIKSLEDYQRLYDKAKADPQKFWAELAETELHWFQKWDTVLDWQAPFAKWFVGGKINISYNCLDRHLTTWRKNKAALIWEGEPGDSRTLTYAQLHREVCQFANVLKQLGVQKGDRVGIYMPMIPEAAIAMLACARIGAPHSVVFGGFSAEALRDRLIDAQAKVVVTADGGWRKDAIVPLKEQVDKALADDAVPSVENVLVVKRTGQDIYMQLGGRDHWWHDLQKGASADCPAEPMDSEDLLFVLYTSGSTGKPKGVVHTTGGYNLYTHMTTKWIFDLQDTDVYWCTADVGWITGHSYIVYGPLSNGATTLMYEGAPRASNPGCFWDVIEKYGVNIFYTAPTAIRAFIKMGEHHPNARNLSSLRLLGTVGEPINPEAWMWYHKVIGGERCPIVDTWWQTETGGIMITPLPGAISTKPGSATLPFPGILADIVDLEGNTVPENEGGYLAVRYPWPGMMRTVYGDPERFRRTYWEHIPPKMGIILTLPAMVQEKMKTAISG

SEQ ID NO: 699 - DNA, 1992 bp, Brucella melitensis
  CDS (1)..(1992)
atgcgctttcaccctgagactaatcacgacgcggcactcctcatcgcagggcggcgcggtgcgtgtttctggaggaacagcatgacttcgaactatgccgaaacctatgccgcatggcagaacgatcctgaaggcttctgggcggatgctgcggcggcaatagactggttcaagccgtgggagcaggttttcgcaggcggcgaaggcacctatggccgctggtacaccggggctgagtgcaatacctgctacaacgcgcttgaccgccatgtcgccaatgggcgcggcgaccagctcgcgctcatctatgaaagccctattacgggcaagacgcgcaagatcacctatcacgaacttctggaagaagtggaggcgcttgccgccgtcatgctcgataatggcgtgcagaagggcgaccgcatcctcatctatatgccgaccgtgccggaagcggtggttgccatgcttgcctcggcccgtatcggagcgattcattccgtcgtattcggcggctttgctgccaatgaacttgccacccgcatcgatgacgccaagcccgtgatgattatcgccgcgtcatgcggcattgagccatcgcgcgtggtgccctatcaggccatgctggacaaggctatttcgcttgcccatcacaaggtcgatcattgcatcatattccagcgtgaacagcaccggcatttgccggtggaaggacgcgacatcgattatcgcgaagcggtcgatgccgctcgtgaacgccatgtgccttgcgtgccggtggccgcgaccgacccgctctacgtgctttacacctccggcacgaccggcgagccgaagggcgtcgtgcgcgacaatggcgggcatatggtggcgctcgtctggtcgatgaaacacgtcttcgacgtcaagccggggcaggtctggtgggcggcctccgatgtgggctgggttgtcggccattcctatatcgtctatgcgccgctgctcattggcgcaaccagcatcctctttgaaggcaagcctgtcggcacgccggatgcgggcgaatattggcgcatcatcgaagagcatggcgtggaagtaatgttcaccgcaccaaccgcgctgcgtgccatcaagaaggaagatgcagacgggcatttcgtgcgccgccatgatctttccggattccgtgcgctttatcttgcaggcgaacgcgccgacccggacacgatccattgggcggaaaacctgctcggctgcccggtcatcgaccattggtggcagaccgaaagcggctggccgatggtcgccaatccgctcggcctcggccttctggaaaccaaatacggctcgcctgccgtctgcctgccgggctatgacattcgcgtgctggatgatgagggccacgaggtcgaacccggcacgctgggcaatattctcatcaaggtgcctctgccgcccggttgcctgccaacattgtggaacgccgatgagcgtttccgcaaggcctatctcaacgagtttccgggctattacaaaaccgccgatgcgggctatatggatgaggacggctatctctacattatgagccgtaccgacgacatcatcaatgtcgcgggccatcgcctctcaacaggcgcgatggaggaggttctctccagccatcccgatgtggccgaatgcgccgtgcttggcatttccgatcccctgaaggggcaggttccctgcggctttctggtgctgaaatccaatatcgaccgcgatccgcaggaggtcgagaaggaatgtatcagcatgattcgcgacgccatcggcccggtcgccgccttccggctggcgcttgccgtcaagcgtctgccgaagacccgctccggcaaaatcctgcgctccaccatccagaagatggcggacggacaggaatggaagatgccagcaaccatcgatgatccggccattctggacgaaatcggcacggtcctgcgtgagcggcatatcggcctcgccttcgcctga

SEQ ID NO: 700 - protein, 663 aa, Brucella melitensis
MRFHPETNHDAALLIAGRRGACFWRNSMTSNYAETYAAWQNDPEGFWADAAAAIDWFKPWEQVFAGGEGTYGRWYTGAECNTCYNALDRHVANGRGDQLALIYESPITGKTRKITYHELLEEVEALAAVMLDNGVQKGDRILIYMPTVPEAVVAMLASARIGAIHSVVFGGFAANELATRIDDAKPVMIIAASCGIEPSRVVPYQAMLDKAISLAHHKVDHCIIFQREQHRHLPVEGRDIDYREAVDAARERHVPCVPVAATDPLYVLYTSGTTGEPKGVVRDNGGHMVALVWSMKHVFDVKPGQVWWAASDVGWVVGHSYIVYAPLLIGATSILFEGKPVGTPDAGEYWRIIEEHGVEVMFTAPTALRAIKKEDADGHFVRRHDLSGFRALYLAGERADPDTIHWAENLLGCPVIDHWWQTESGWPMVANPLGLGLLETKYGSPAVCLPGYDIRVLDDEGHEVEPGTLGNILIKVPLPPGCLPTLWNADERFRKAYLNEFPGYYKTADAGYMDEDGYLYIMSRTDDIINVAGHRLSTGAMEEVLSSHPDVAECAVLGISDPLKGQVPCGFLVLKSNIDRDPQEVEKECISMIRDAIGPVAAFRLALAVKRLPKTRSGKILRSTIQKMADGQEWKMPATIDDPAILDEIGTVLRERHIGLAFA

SEQ ID NO: 701 - DNA, 1707 bp, Brucella melitensis
  CDS (1)..(1707)
atgcccacgaggaggtgggctgcaagggaggaccaccgaatgactgaaagccctgcttcagcacggctcgaccgctacgatgatgccgttgcgcagttcgatattgcaaaagccattgcgcttcttgcaggaaatcctgatacgggtatcaatgcctgcattgaatgctgcgaccgatatacgggcgaaaatcgcgtggcgctgcacgccatttccatcgacaatacgttgactgaactcacctttgaagacctgcgcgatatgtccgcgcgggtcggcaatatgctggccgatgccgggatcagcgcaggcgatgtggttgccggtcttctcccccgcacgcctgaactcgtcgccaccattctcggcgcctggcgcatcggcgcaatctatcagccgcttttcaccgccttcggcccaaaagccatcgaacagcgtttcggcaccagtggcgccaaactcgtcgtcaccaacctggccaatcgttccaaattggccgaagtggaaaactgcccccgcgtcgcaaccattcttgcccccggtgaaagcctgccggaaggcgatatcgactttcgcgcagccgtggcggcagcatcgaccgaatgcgagcccgtcatgcgcaagggcagcgaccttttcatgatgatgtccacctccggcacggcgggcctgcccaaaggcgtcccggtgccgctgcgcgccctgatggctttcggcgcctatatgcgcgatgcgtgggctgcgcagcgacgatatttctggaatatcgccgatccgggctgggcttatgggctttactatgccgtgacgggtcccctgcttctgggtgtgccgacgatcctgaacgaaggcggtttcaccgccgaaaacacctatgacatcatcgaacgcctcggcgtgacgagccttgcgggctctccgactgccttccgcctgcttatggccgccgggccggaatctgctgcccgcgtcaagggccgcttgcgcgtggcatccagcgcgggcgagccgctgaacccggaagtcattcgctggttcgatgcctgtcttggcgcgccgatccacgatcattacggccagacggaactgggcatggtggtgaacaaccatcatggattggaacatccggtgcggcagggttccgcgggctatgccatgccgggctacagggttgcggttctggatgaagcgggcaaagaagtcggccccaatgaaccgggcgttctggccattgatatcgacaattcgccgcttctctggttcaccggctattataaaaaggatacgccctccatctccggcggatattatcgcaccggcgatacggtggaattcgagccgcatgggtctatcagcttcatcggccgcgccgatgacgtcatcacctcctccggctatcgcatcgggcctttcgatgtggaaagcgcgcttctggaacatcctgcggtcaacgaggctgcggtggtcggcgttcccgatccgcaacgcaccgaaatcgtgaaggcctttgtcatcctggcccccggcttcgagggtacgccggaactggcggaagaactggcgcttcacgtcaagaaacagctttccgcccatgcctatccgcggcagatcgactttgtggcggagcttcccaagacgccgagcggaaaaatacagcgcttcctcctgcgcaaggcggaagtcgaaaagcaacagcaacagaattag

SEQ ID NO: 702 - protein, 568 aa, Brucella melitensis
MPTRRWAAREDHRMTESPASARLDRYDDAVAQFDIAKAIALLAGNPDTGINACIECCDRYTGENRVALHAISIDNTLTELTFEDLRDMSARVGNMLADAGISAGDVVAGLLPRTPELVATILGAWRIGAIYQPLFTAFGPKAIEQRFGTSGAKLVVTNLANRSKLAEVENCPRVATILAPGESLPEGDIDFRAAVAAASTECEPVMRKGSDLFMMMSTSGTAGLPKGVPVPLRALMAFGAYMRDAWAAQRRYFWNIADPGWAYGLYYAVTGPLLLGVPTILNEGGFTAENTYDIIERLGVTSLAGSPTAFRLLMAAGPESAARVKGRLRVASSAGEPLNPEVIRWFDACLGAPIHDHYGQTELGMVVNNHHGLEHPVRQGSAGYAMPGYRVAVLDEAGKEVGPNEPGVLAIDIDNSPLLWFTGYYKKDTPSISGGYYRTGDTVEFEPHGSISFIGRADDVITSSGYRIGPFDVESALLEHPAVNEAAVVGVPDPQRTEIVKAFVILAPGFEGTPELAEELALHVKKQLSAHAYPRQIDFVAELPKTPSGKIQRFLLRKAEVEKQQQQN

SEQ ID NO: 703 - DNA, 1959 bp, Yersinia pestis
  CDS (1)..(1959)
atgagccaaatacataaacatcctattccagctgcaattgcagagcatgctctaattaccccagaaaaataccaacattattaccaacaatccgtgcagaaccctgatgaattctggggcgaacaaggcaaaatcattgattggattaaaccctataaaacggtaaaaaatacctcctttgaccccggtcatgtgagtatccgctggtttgaggacggtacattgaacctcgcggcgaattgccttgatcgccatttggcagagcgtggtgatcaaacagccatcatttgggaaggtgatgaccctaatcaatcaaaaaccgtcacttataagcaactgcaccatgatgtgtgccagtttgctaatgtcctaaaaagtttaggcgtcaaaaaaggcgatgtggttgccatctatatgccaatggtgcctgaagctgccgtggcgatgttggcttgcgcgcgcatcggcgctgttcattccgttatctttggtggattttctccagatgccgttgccgggcgtatcatcgattctcactctaaactggtgattactgccgatgaaggtatccgtgcaggccgtgctattccactgaaaaaaaatgtcgatgaagcactgaaaaaccccgctatcaccagtattaaaaatgttgtggtcttccaacgtactggtaacgccagctattgggaagatgggcgcgatgtatggtggcatgacctgataaaagaggcatccgctgactgcccgccagaagagatgaatgcagaagacccgctgttcatcctttatacctctggctctaccggtaaacctaaaggggttgtacatacgacgggcggttatctggtttatgctgcactgacattcaaatatgtctttgattatcaccctggcgatatctactggtgtactgcagacgttggctgggtaaccggacacagctatctgttatatggaccactggcttgtggggccatcactctaatgtttgaaggcgtgcctaactaccctggcgtcaatcgcttaagccaagttgttgataaacataaagtcaatattctatacaccgcgcctacagcgattcgggccttaatggccgaaggtgacaaagccatcgaaggaaccaaacgcgactcactgcgtattatgggatcggtcggcgagccgattaatccagaagcctgggaatggtattacaacaagatcggtaacagtaaatgcccgattgtcgatacttggtggcagactgaaaccggtggtttcatgataacccctctgccgggtgccaccgagttgaaagccggttccgcaacgcgtccattctttggggtacaacctgcgttggtagataacctgggcaatcctcaggaaggggtggcagaaggtaatctggtcataaccgactcatggccggggcaagccagaacattatttggcgatcatgaacgtttcgaacaaacctacttctcaacctttaaaggcatgtatttcagtggcgacggcgcacgtcgtgacgaagacggttactactggataaccggtcgagttgatgacgtactaaacgtttcaggccatcgcttaggaacggctgaaattgaatctgcattggttgcacacccgaaaattgccgaagcggctgttgtcggtgttccacataatattaaaggacaggctatttatgcctatatcacgctaaatcacggtgaagaaccaacgccagagttatataccgaagtacgcaactgggtacgtaaagagattggcccactcgcaacacccgatattttgcattggacggactcattacccaaaacccgttcaggcaagatcatgcgccgtattttacgcaaaattgcgacaggagataccagcaacttgggcgatacctcaacacttgccgatccaagcgtggtagaaaaattactagaagaaaaacaatcaatgcagacaccgtcgtaa

SEQ ID NO: 704 - protein, 652 aa, Yersinia pestis
MSQIHKHPIPAAIAEHALITPEKYQHYYQQSVQNPDEFWGEQGKIIDWIKPYKTVKNTSFDPGHVSIRWFEDGTLNLAANCLDRHLAERGDQTAIIWEGDDPNQSKTVTYKQLHHDVCQFANVLKSLGVKKGDVVAIYMPMVPEAAVAMLACARIGAVHSVIFGGFSPDAVAGRIIDSHSKLVITADEGIRAGRAIPLKKNVDEALKNPAITSIKNVVVFQRTGNASYWEDGRDVWWHDLIKEASADCPPEEMNAEDPLFILYTSGSTGKPKGVVHTTGGYLVYAALTFKYVFDYHPGDIYWCTADVGWVTGHSYLLYGPLACGAITLMFEGVPNYPGVNRLSQVVDKHKVNILYTAPTAIRALMAEGDKAIEGTKRDSLRIMGSVGEPINPEAWEWYYNKIGNSKCPIVDTWWQTETGGFMITPLPGATELKAGSATRPFFGVQPALVDNLGNPQEGVAEGNLVITDSWPGQARTLFGDHERFEQTYFSTFKGMYFSGDGARRDEDGYYWITGRVDDVLNVSGHRLGTAEIESALVAHPKIAEAAVVGVPHNIKGQAIYAYITLNHGEEPTPELYTEVRNWVRKEIGPLATPDILHWTDSLPKTRSGKIMRRILRKIATGDTSNLGDTSTLADPSVVEKLLEEKQSMQTPS

SEQ ID NO: 705 - DNA, 1716 bp, Bacillus halodurans
  CDS (1)..(1716)
atgaacttgcaagcgcttccagcaaaagaggggaaccataatctaaaagattacaatgaagctgtctctacctttgattggtcttctgttgaaaaacagttttcatggtatgagacagggaaagtgaatctcgcctatgaagccattgaccgtcatgcagaatcaaacagacaagataaagtggctctttattatagtgacgcaacaagggatgagcagtatacatttgctgatatgaagaagtatacagataaagctggcaacgttcttcgcgatgctggagtcagcaaaggggatcgggtctttattttcatgccacgctcacctgaactttattttgcattgcttggcgcagtgaaggttggtgcgatcgttggacctctttttgaagcctttatggaaggggcagtcagagatcgcttagaagatagtgaagcaaaagttctcatcacaactccagatctgttacaacgtgtaccagtcgaccaattgccacatttggaaacggtatttatcgtcggtgatcatgttgaagaagaagggccttatcgtgattttctctctaggttaactcaagcatcggacgacttagagattgaatgggtggaccgtgaagacggcttgattttacactatacttcaggatctactgggaagccaaaaggagtattgcacgtccacaatgcgatgattcaacactaccaaacaggaaaatgggtgttagatttaaaagaggatgatgtctattggtgtactgctgatcctggctgggtaacagggacgtcgtacgggatttttgccccgtggttatgtggagcgacaaatgtaattcgcggtggtcgctttagcccagcagattggtatgagacattgcaaaaatataaggcaaccgtatggtacagtgcaccaaccgctttccgaatgttaatgagcgccggggatgagctcgtgaaaaagtacgatctatcgtctttgcgccacatcttaagcgtgggtgaaccattaaatccagaagttgtccgctgggggatgaaagtgtttgatttgcgtattcatgatacgtggtggatgacagaaacaggagcgcaattaatttgtaactatccatcaatggacattcgcccaggctcaatgggaaaaccgttgccaggaattaaagcggccatcatcgatgatcaagggaatgagctaccaccgaatcggatggggaatttagcgatccgcaaaggctggccttcgatgatgcgtgccatatggaaaaatgaagaaaagtataacagctattttgaaattgatggctggtacgtttctggtgattcggcttatatggatgaagatggatatttctggttccaaggccgaattgatgatgtcattatgacctcaggggaacgagtcggtccatttgaggtagaaagcaagctagtagagcatcctgctgtagctgaagcgggagttatcggaaagcctgatccagttcgtggcgaaattatcaaggcatttgtctcccttcgcgatggatatgaactcaccgacgagttaaaagaagatatccgtacatttgtgaaggaaggtcttgctgcccatgccgctccaagagagatcgagtttaaggataagctaccaaaaacacgcagcggtaaaattatgcgtcgtgtgttaaaagcatgggagctagacttacctacgggagacctttcgacaatggaagattaa

SEQ ID NO: 706 - protein, 571 aa, Bacillus halodurans
MNLQALPAKEGNHNLKDYNEAVSTFDWSSVEKQFSWYETGKVNLAYEAIDRHAESNRQDKVALYYSDATRDEQYTFADMKKYTDKAGNVLRDAGVSKGDRVFIFMPRSPELYFALLGAVKVGAIVGPLFEAFMEGAVRDRLEDSEAKVLITTPDLLQRVPVDQLPHLETVFIVGDHVEEEGPYRDFLSRLTQASDDLEIEWVDREDGLILHYTSGSTGKPKGVLHVHNAMIQHYQTGKWVLDLKEDDVYWCTADPGWVTGTSYGIFAPWLCGATNVIRGGRFSPADWYETLQKYKATVWYSAPTAFRMLMSAGDELVKKYDLSSLRHILSVGEPLNPEVVRWGMKVFDLRIHDTWWMTETGAQLICNYPSMDIRPGSMGKPLPGIKAAIIDDQGNELPPNRMGNLAIRKGWPSMMRAIWKNEEKYNSYFEIDGWYVSGDSAYMDEDGYFWFQGRIDDVIMTSGERVGPFEVESKLVEHPAVAEAGVIGKPDPVRGEIIKAFVSLRDGYELTDELKEDIRTFVKEGLAAHAAPREIEFKDKLPKTRSGKIMRRVLKAWELDLPTGDLSTMED

SEQ ID NO: 707 - DNA, 2004 bp, Halobacterium sp. NRC-1
  CDS (1)..(2004)
atgagcaacgacaccgacaccccggagctggaggcgcgactcaccgaccaggacgagttcacgccgcccgagtcgttcgtcgagcaggcgaacgtctccgacccgggtatctacgacgagttcgatgcgacctggcccgaatgctggactgacgcggccgacctgctggactgggagacgccgtacgatcaggtcctcgacgattcgaacccgccgttctacgagtggttcccgggcggcggcctgaacgcgagcgcgaactgtctggaccgccacctcgacgagcgcggcgacgaggccgccatcgagtgggtgggcgagccggccgacgaagccaaccgcacgtacacgtacgcccagctccaccgggaggtcaacgagttcgccgccgggctgcgcgagatgggtgtcggcgaggacgacatcgtcacgctgtacatgccgatggtgcccgagttgccgatcgcgatgctggcctgcgcgcgcctcggcgcgccacactcggtggtgttcgcgggcttctccgcggacgcgctcagcacgcgaatgaacgccgccgactcggagtatctcgtcacctgcgacggctactaccggcgcggcgaccccctcgatcactacgcgaaaacgctcgacggcctggatggggtgtcacacgcggtcagtgacgtggtcgtcgtcgaccgcctcggcgcgaacggcgacggcttcgaccacgaccgcccggccgcacaccacgactacgacgccgtcgtcgccgcccacgacggtgcaagcgtctcgccggtcgagcgcgacgccaccgacatgctgttcctgatgtacacgtcgggcaccaccggccagcccaaaggcgtcactcactccacgggcggctacctctcgtgggccgcctggacctcgcaggcggtcctggacatcaagccgtctgacacctacttctgctcggcggacatcggctggatcaccggccactcctacatcgtctacgggcccctggcgcttggcaccacgacgatgctctacgagggcgctccggaccaccccgacaaggaccgcctgtgggagctcgtcgagtcctacgaggcaacccaactgtacaccgcgccgacggcgatccggtcgttcatgaaatggggggtggagtaccccgacgcccacgacctctccagcctgcggctgctcggaaccgtcggggagccgatcaacccacgggcctggacgtggtattacacccacatcggcgacgagtcgtgcccgatcgtggacacgtggtggcagaccgagaccggcggcatgatggtcacggggctgcccggcgtctccacgatgaaaccggggtcggcgggccgcccactgccgggcgtcgacgcgcgcgtcatcgacaccgacggcgacgacgtggcgggcgggcgggcgggccacctgaccatccagaagccgtggccggggatgctccaaaccctctacgagaacgacgagcggttcatcgacgagtactggcgggtatactccgacaccgacagcggcgactccgcggactgggtgtacttcccggaggacggtgcgaaagtcgacgacgacggctacatcacggtcctggggcgcgtcgacgacgtggtgaacgtctccgggcaccgcctgggcacgatggagatcgaatcggccatcgtcgacgtgccgggggttgcggaggcggcggtcgtcggcggcgaccacgacctgaaaggcgaagccgtgtacgcgtacgtgctcaccacggacgaccacgacgccagcgacgccctccgtgagcgcatcgtggccagcgtggaggacgccatcggccccatcgcgcgcccggaggcggtcgtgttcgcgccggaactcccgaagacgcggtcggggaagatcatgcgccggctcctggaggacatcgcaaacgacgccgacctcggggacacctcgacgctccggaaccccgacgtggtggagacgattcaggaccagctggccggcgactga

SEQ ID NO: 708 - protein, 667 aa, Halobacterium sp. NRC-1
MSNDTDTPELEARLTDQDEFTPPESFVEQANVSDPGIYDEFDATWPECWTDAADLLDWETPYDQVLDDSNPPFYEWFPGGGLNASANCLDRHLDERGDEAAIEWVGEPADEANRTYTYAQLHREVNEFAAGLREMGVGEDDIVTLYMPMVPELPIAMLACARLGAPHSVVFAGFSADALSTRMNAADSEYLVTCDGYYRRGDPLDHYAKTLDGLDGVSHAVSDVVVVDRLGANGDGFDHDRPAAHHDYDAVVAAHDGASVSPVERDATDMLFLMYTSGTTGQPKGVTHSTGGYLSWAAWTSQAVLDIKPSDTYFCSADIGWITGHSYIVYGPLALGTTTMLYEGAPDHPDKDRLWELVESYEATQLYTAPTAIRSFMKWGVEYPDAHDLSSLRLLGTVGEPINPRAWTWYYTHIGDESCPIVDTWWQTETGGMMVTGLPGVSTMKPGSAGRPLPGVDARVIDTDGDDVAGGRAGHLTIQKPWPGMLQTLYENDERFIDEYWRVYSDTDSGDSADWVYFPEDGAKVDDDGYITVLGRVDDVVNVSGHRLGTMEIESAIVDVPGVAEAAVVGGDHDLKGEAVYAYVLTTDDHDASDALRERIVASVEDAIGPIARPEAVVFAPELPKTRSGKIMRRLLEDIANDADLGDTSTLRNPDVVETIQDQLAGD

SEQ ID NO: 709 - DNA, 1944 bp, Caulobacter crescentus
  CDS (1)..(1944)
atggtgagcgacggacaggttttcccggttcctgcggatctggcgcgagacgcccatatcgatgcggccgcctatgacgcggcgctggctcgcgtcgaagccgaccccgaaggctattggcgcgacatcgccgcccggctcgactggatcacgccgcccaccaagatcaaggacgtctcctacgccaaggaagacttccgcatccgctggtacgaggacggcgttctcaacgtctcggccaactgcatcgatcgccacctgccggccaagaaagacgacgtggccctggtgttcgagggcgacgagcccgggacctccagcacgctgacctacggccagctgcacgaggaggtttgccgcatggccaacgtcctcaaggcgcagggcgtcaagaagggcgaccgggtcaccatctatctgccgatggtgccgctggcggccgtggccatgctggcctgcgcgcgcatcggagcggttcactcggtggtgttcggcggcttctcgcccgacagcatcgccggccgcatccaggactgcgcctcgcacttcgtgatcaccgccgacgagggccgccgcggcggccgccgcgtgccgctgaaggccaatatcgacgaagcgctgaagcactgcccatgggtcggcaaggtgctgatgatccgctggaccggcgccgatgtgccgctgaaggcgggccgcgacatcgtctggcaggacgtccgcgacaccgtctcggccgactgcccgcccgagcctatgaacgccgaggacccgctgttcatcctctacacctcgggctcgacggggaagcccaagggcgtgctgcacaccaccggcggctatctggcctgggcgtcgtggaccttctgggcggtgttcgactacaagccgggcgaggtgttctggtgcaccgccgacgtcggctgggtcaccggtcacagctatgtcgtctacggcccgctggccaatggcgggaccagcctgatcttcgagggtgtgcccaactatcccacccccagccgcttctgggaggtgatcgacaagcaccaggtgtcgatcttctacaccgcccccaccgctctgcgcgccctgatgcgcgaaggcgacgcgcatgtgaccaagaacgacctttcgtccctgcgcctgctgggcagcgtcggcgagccgatcaatccggaggcctggctctggtaccaccgcgtggtcggcaaggagaaactgccgatcgtcgacacctggtggcagaccgagaccggcggcatgctgatcaccccgctgcccggcgccaccgccctgaagccgggctcggcctccaagccgctgccgggcgtcaagccgcagctcgtggacgccgagggcaagtttctggacggcgccaccgagggaaatctggtcatcaccgacagctggccgggccagatgcggaccgtctatggcgaccaccagcggttcttcgagacctatttctcgacctatcccggcaagtacttcaccggcgacggctgccgccgcgacgccgatggctactactggatcaccggccgggtggacgatgtgatcaacgtctcgggccaccgcctgggcaccgccgagatcgagagcgccctcgtcgcgcacgagaccgtcgccgaggcggccgtggtcggctatccgcacgacatcaagggccagggcgtctatgcctatgtcactctgaaggcggggatcgaggctacggacgcgctgcgcaaggacctcgtcctgtgggtgcgccacgagatcggccctttcgccgcgccggacgtcatccagtgggccccgggcctgcccaagacccgctcgggcaagatcatgcgccgcatcctgcgcaagatcgccgagaacgagctcggcagcctgggcgacacctcgaccctggctgatccatcggtggtcgatgatctggtgaagaaccgcgcggggacctga

SEQ ID NO: 710 - protein, 647 aa, Caulobacter crescentus [sequence omitted]

SEQ ID NO: 711 - DNA, 1716 bp, Sulfolobus solfataricus
  CDS (1)..(1716)
atggactactacacactttacgacctttccttagaaaaaccagaaacctactgggaaacgtttgctaataggttatcattctttaagaaatgggaaaaagtcatagaaaaaaataaacaattacccatagctaaatggttcattaacggtactacaaatattgcatataacgcccttaatcacggtggtaaggcccttatattttaccaagagaataaacataaaggagatgaaattacattcgatgagttaaataatatgagttcaatgattgctggattattactagataaaggggtaagaagaggagatagaattgcgatttatatgcctaactcaatatgtacgatagctacgatactagctgcggctagactaggagcaatttatacgctcatttttgcaggattaggaataaatgctatagtaagtaggatttcaaatctggaacctaaattagtaatctccatagataagacattcagaaggggaaaggaaataaaactatatactaacttagccaatatagtatttccgagggactcctcgcaatttgactatacaagagaatataaagaatttgagaaaatagaaagtaatgaaccattgaaaataatgtatacttctggaacaacgggtaaacctaaaggtgtaatcttaccacatggagcttggatggtaggagattatacagtatttgacttaatgttttcattaaagagtgacgatatagttctaacaactgcagatgtgggatggataacgttctcaagaataatgtatggaactctaatgcatggctccacgttggcatttatggaaggagcgccagactatccatcggatagattgccaaaaattattgacgagttacagcctaaagtattatttacatcccctacactccttagaactttacaaaagttagatgtgaaacttccaagagtggagtttatagccacagcaggagagataatggatgaaactgcatggaaatacgcattaaggttttctgatagagttgcagatgtatatgggcaaactgagttaggttatgtaataggctatccttatgcgttagatggtgtagaaccaaaaataggatatgctggattgccatttccagctgcagttatagacacagtagacgaaaatgggaaaagtttaagaggacatattggtcatctagtcgcaagagaaccatttcctacccaatttattggaatttggaaagatgaagacaaatttttaagctattttgaaaaattcaacagccacgatactggggatctagccataattgatgagaaaggttatgttaaaatagttggtagagatgacgatatgataaagatagctggacatagaataactagtggagaagtagaaagtgtaataaattccttgcaaggaataattgaatcagctgctgtaggaataccggatgagataaagggtgaaaaattagtagtattttatgtgggaaacgtagacgaaagaatagtagcaacaaaggttagggaaatgttggggcctatatatgtcattgacaaaatatataaggttgaaagactaccgaagtctcgaagtggtaaaatagttagaagagttttgagagatttattattgggaaaagaaatagatgaaactatattggaagacccagaaatattaaaggagatcaaaaatgagattaagagatccgagagaatttag

SEQ ID NO: 712 - protein, 571 aa, Sulfolobus solfataricus
MDYYTLYDLSLEKPETYWETFANRLSFFKKWEKVIEKNKQLPIAKWFINGTTNIAYNALNHGGKALIFYQENKHKGDEITFDELNNMSSMIAGLLLDKGVRRGDRIAIYMPNSICTIATILAAARLGAIYTLIFAGLGINAIVSRISNLEPKLVISIDKTFRRGKEIKLYTNLANIVFPRDSSQFDYTREYKEFEKIESNEPLKIMYTSGTTGKPKGVILPHGAWMVGDYTVFDLMFSLKSDDIVLTTADVGWITFSRIMYGTLMHGSTLAFMEGAPDYPSDRLPKIIDELQPKVLFTSPTLLRTLQKLDVKLPRVEFIATAGEIMDETAWKYALRFSDRVADVYGQTELGYVIGYPYALDGVEPKIGYAGLPFPAAVIDTVDENGKSLRGHIGHLVAREPFPTQFIGIWKDEDKFLSYFEKFNSHDTGDLAIIDEKGYVKIVGRDDDMIKIAGHRITSGEVESVINSLQGIIESAAVGIPDEIKGEKLVVFYVGNVDERIVATKVREMLGPIYVIDKIYKVERLPKSRSGKIVRRVLRDLLLGKEIDETILEDPEILKEIKNEIKRSERI

SEQ ID NO: 713 - DNA, 2001 bp, Sulfolobus solfataricus
  CDS (1)..(2001)
atgtcagtaacgtgggctctaccttttgatcaaaagataaacccaaaactgaatttaaataggctagtaagtataactacgtataaagagattcacagccaaacggtaaaagattacaaacaattttgggcatctgtagcctcggaaattgactggttcaaaccatgggagaaaacactagacgatagtaatcctccattctataagtggttcgtaggtggagagcttaacgcctcttatctaactgtagataggcacgttaagagctggaggaagaataaggttgccataatatgggaaggagaaccagtggacgagaagggaaacccaaaggaggttaggaagttaacatattacgatctatatagggaagttaatagagtagcctatctcttgaaggagaaatacgggttaaagaaaggtgatgcaatagcgatttaccttccaatgataccggaattaccaatattcatgttagctgctgctaggatcggagtagtctttacggtggtgttctcaggatttagcgctgacgcattggcaagtaggattaatgacgccgaagccaagttactaattaccgcagatggtggatggagaaggggtaaagttgttgacttaaagggaattgtagataaggctttggagaagaccccaacaataaaggatgtaatagtagttagaaggataggtaataaggtcaacatggttgaaggtagggataagtactttgatgaagtaatcaaggacattccacaaaatgtttacgttgaaccagaaaggatgaaatctgaagacccgttatatatactctacacctctggaaccactggaaaacctaagggtatagtccacgatattggagggtatatgacattattacacgctacaatgaagtgggtattcgatataagggatgacgacatttactggtgtaccgcagatataggatgggttactggacactcttacattgtgtttggaccattaatggaaggagcaactgaaataatgtatgaaggagccttggattatccacaaccggataggtgggtatcgataattgaaaggtatgggatcacaatcctttatacctcacccactgcaattagaagcttcatgaaatatggtgataattgggttaaggctcacattacctccactgttaggctaatgcattctgtaggtgaaccaataaatccggaagcttgggagtggctatggaaattagtcggtagagaggaggtaccatttggaagcacttggtggatgactgagactggaggtattctaatatctcatttaccaggattgtatcttgtgccaatgaaacctgggacaaatggcccaccaatattgggaattgagccagatgtagttaatgaagatgggaaacaagttaaccttgaggaaagaggatatcttgttataaagaatccgtggcctggaatgccattaacaatttacaaggatcctgaaagatacgtgaaggtgtattggagtagattccctggaatgttctatgttggtgattacgctgttaaggacaaggatggatacttctggatattagggagggctgatgaagttatcaaggtagctgggcataggctaggtacatatgagttagaatcagctttaattgagcatcctgcagttgcggaagcagcggtaattggagtcccagacccagttaagggagaggtgccttatgcgtttgtaattttgaggcaaggttatacacctaatacgcagctttcacaagagatactgaagacggtaagagataaggtgggacctatagctactatagataagatattcttcgtgggtaagttgcctaaaacgagaagtggaaagataatgagaagagttgtaagggctgttgcaactagggcagaagtgggagatataactacattagaggatgaggcttctgtagaggagattaaaaaagctttagaggagtttaaggcagagtttgaaaagatcaacaaataa

SEQ ID NO: 714 - protein, 666 aa, Sulfolobus solfataricus
MSVTWALPFDQKINPKLNLNRLVSITTYKEIHSQTVKDYKQFWASVASEIDWFKPWEKTLDDSNPPFYKWFVGGELNASYLTVDRHVKSWRKNKVAIIWEGEPVDEKGNPKEVRKLTYYDLYREVNRVAYLLKEKYGLKKGDAIAIYLPMIPELPIFMLAAARIGVVFTVVFSGFSADALASRINDAEAKLLITADGGWRRGKVVDLKGIVDKALEKTPTIKDVIVVRRIGNKVNMVEGRDKYFDEVIKDIPQNVYVEPERMKSEDPLYILYTSGTTGKPKGIVHDIGGYMTLLHATMKWVFDIRDDDIYWCTADIGWVTGHSYIVFGPLMEGATEIMYEGALDYPQPDRWVSIIERYGITILYTSPTAIRSFMKYGDNWVKAHITSTVRLMHSVGEPINPEAWEWLWKLVGREEVPFGSTWWMTETGGILISHLPGLYLVPMKPGTNGPPILGIEPDVVNEDGKQVNLEERGYLVIKNPWPGMPLTIYKDPERYVKVYWSRFPGMFYVGDYAVKDKDGYFWILGRADEVIKVAGHRLGTYELESALIEHPAVAEAAVIGVPDPVKGEVPYAFVILRQGYTPNTQLSQEILKTVRDKVGPIATIDKIFFVGKLPKTRSGKIMRRVVRAVATRAEVGDITTLEDEASVEEIKKALEEFKAEFEKINK

SEQ ID NO: 715 - DNA, 1959 bp, Escherichia coli
  CDS (1)..(1959)
atgagccaaattcacaaacacaccattcctgccaacatcgcagaccgttgcctgataaaccctcagcagtacgaggcgatgtatcaacaatctattaacgtacctgataccttctggggcgaacagggaaaaattcttgactggatcaaaccttaccagaaggtgaaaaacacctcctttgcccccggtaatgtgtccattaaatggtacgaggacggcacgctgaatctggcggcaaactgccttgaccgccatctgcaagaaaacggcgatcgtaccgccatcatctgggaaggcgacgacgccagccagagcaaacatatcagctataaagagctgcaccgcgacgtctgccgcttcgccaataccctgctcgagctgggcattaaaaaaggtgatgtggtggcgatttatatgccgatggtgccggaagccgcggttgcgatgctggcctgcgcccgcattggcgcggtgcattcggtgattttcggcggcttctcgccggaagccgttgccgggcgcattattgattccaactcacgactggtgatcacttccgacgaaggtgtgcgtgccgggcgcagtattccgctgaagaaaaacgttgatgacgcgctgaaaaacccgaacgtcaccagcgtagagcatgtggtggtactgaagcgtactggcgggaaaattgactggcaggaagggcgcgacctgtggtggcacgacctggttgagcaagcgagcgatcagcaccaggcggaagagatgaacgccgaagatccgctgtttattctctacacctccggttctaccggtaagccaaaaggtgtgctgcatactaccggcggttatctggtgtacgcggcgctgacctttaaatatgtctttgattatcatccgggtgatatctactggtgcaccgccgatgtgggctgggtgaccggacacagttacttgctgtacggcccgctggcctgcggtgcgaccacgctgatgtttgaaggcgtacccaactggccgacgcctgcccgtatggcgcaggtggtggacaagcatcaggtcaatattctctataccgcacccacggcgatccgcgcgctgatggcggaaggcgataaagcgatcgaaggcaccgaccgttcgtcgctgcgcattctcggttccgtgggcgagccaattaacccggaagcgtgggagtggtactggaaaaaaatcggcaacgagaaatgtccggtggtcgatacctggtggcagaccgaaaccggcggtttcatgatcaccccgctgcctggcgctaccgagctgaaagccggttcggcaacacgtccgttcttcggcgtgcaaccggcgctggtcgataacgaaggtaacccgctggagggggccaccgaaggtagcctggtaatcaccgactcctggccgggtcaggcgcgtacgctgtttggcgatcacgaacgttttgaacagacctacttctccaccttcaaaaatatgtatttcagcggcgacggcgcgcgtcgcgatgaagatggctattactggataaccgggcgtgtggacgacgtgctgaacgtctccggtcaccgtctggggacggcagagattgagtcggcgctggtggcgcatccgaagattgccgaagccgccgtagtaggtattccgcacaatattaaaggtcaggcgatctacgcctacgtcacgcttaatcacggggaggaaccgtcaccagaactgtacgcagaagtccgcaactgggtgcgtaaagagattggcccgctggcgacgccagacgtgctgcactggaccgactccctgcctaaaacccgctccggcaaaattatgcgccgtattctgcgcaaaattgcggcgggcgataccagcaacctgggcgatacctcgacgcttgccgatcctggcgtagtcgagaagctgcttgaagagaagcaggctatcgcgatgccatcgtaa

SEQ ID NO: 716 - protein, 652 aa, Escherichia coli
MSQIHKHTIPANIADRCLINPQQYEAMYQQSINVPDTFWGEQGKILDWIKPYQKVKNTSFAPGNVSIKWYEDGTLNLAANCLDRHLQENGDRTAIIWEGDDASQSKHISYKELHRDVCRFANTLLELGIKKGDVVAIYMPMVPEAAVAMLACARIGAVHSVIFGGFSPEAVAGRIIDSNSRLVITSDEGVRAGRSIPLKKNVDDALKNPNVTSVEHVVVLKRTGGKIDWQEGRDLWWHDLVEQASDQHQAEEMNAEDPLFILYTSGSTGKPKGVLHTTGGYLVYAALTFKYVFDYHPGDIYWCTADVGWVTGHSYLLYGPLACGATTLMFEGVPNWPTPARMAQVVDKHQVNILYTAPTAIRALMAEGDKAIEGTDRSSLRILGSVGEPINPEAWEWYWKKIGNEKCPVVDTWWQTETGGFMITPLPGATELKAGSATRPFFGVQPALVDNEGNPLEGATEGSLVITDSWPGQARTLFGDHERFEQTYFSTFKNMYFSGDGARRDEDGYYWITGRVDDVLNVSGHRLGTAEIESALVAHPKIAEAAVVGIPHNIKGQAIYAYVTLNHGEEPSPELYAEVRNWVRKEIGPLATPDVLHWTDSLPKTRSGKIMRRILRKIAAGDTSNLGDTSTLADPGVVEKLLEEKQAIAMPS

SEQ ID NO: 717 - DNA, 1533 bp, Aquifex aeolicus
  CDS (1)..(1533)
atggcagaagaaaagtccgaagtacttttaaaaatccaagaaaagtattaccctcccaaagaaatagtggagagggcttggattaaagactacgaaaaggtttacgaggaaagcatcaaggatcgcgaaggcttctgggcaaaggtagccgaagaactccactggttcaagaagtgggacaaggttctcgagtggaacttcccatacgccaagtggttcgtaggggcaaagaccaacataacctacaactgcctcgacaggcacgtccagaacggaaagagaaacaaggttgcttacatctacgttgacgagaacgataacgaaaagaagataacctacggagaactcttagaactcgtaaacaggatagcaaacgggctcaaatccttgggagttaagaaaggagacagagtttccatatacatgccaacaaccatagaagcgatagctacgatgctcgcttgtgcgaggataggggctattcacagcgtagtatttgccggattctccgaaggagctctcagaacgaggattgaagacgcaaaggcaaaggtcgtggtcaccgcaagctacactcaaaggagaggaaagaaaatagaccttctcacaaccgttgagagggctatagacggactggacttcgttgagaaagtagtggtgtgggacagggacggagacgccctggaggaaaagggcggactctttgtagacttcaacgaaatggttaagaacgcttctcccgagtgcgaacccgaagttatggacgctgaagacccactctttatcctctacacttcaggaaccacaggaaagccgaagggagttctccacaccacgggtggttacatggttcagacctactacacttcaaagatagtctttgaccttcacgaagacgacatatactggtgtaccgcggacataggttggatcacgggacactcttacatagtctacggaatactcgcaaacggagttacgtccgtgataaccgagggagcacccgattatcccgatccgggaaggtggtggaggtacgtagaaaagtatagagtaaacgtcttctacaccgcacccacagcaataaggatgttcatgaggtacggtgaagagtggcctatgaagtacgatctctcttccctgagaattctcggttcagtaggagaacccataaaccccgaagcttggctctggtattacaaatatatcggaagggagaaatgcgtaatcgttgacacatggtggcaaacggaaacgggagctcacatgataacgacgataccctcttaccctgcaaagcccggaaaggcaggaaagcccttcttcacgatagaacccgaaatcgttgacaaggatggaaacaaggttccccccaataccgttggattcttggtaattaaatctccttggccctcaatgctcaggacgtgctggggtgagcccgagaggtacgaaaagtactggaacaccataaagggtgtgtggagacctagcctcttacgacgaagaagggtacataatgatcctcggtag

SEQ ID NO: 718 - protein, 510 aa, Aquifex aeolicus
MAEEKSEVLLKIQEKYYPPKEIVERAWIKDYEKVYEESIKDREGFWAKVAEELHWFKKWDKVLEWNFPYAKWFVGAKTNITYNCLDRHVQNGKRNKVAYIYVDENDNEKKITYGELLELVNRIANGLKSLGVKKGDRVSIYMPTTIEAIATMLACARIGAIHSVVFAGFSEGALRTRIEDAKAKVVVTASYTQRRGKKIDLLTTVERAIDGLDFVEKVVVWDRDGDALEEKGGLFVDFNEMVKNASPECEPEVMDAEDPLFILYTSGTTGKPKGVLHTTGGYMVQTYYTSKIVFDLHEDDIYWCTADIGWITGHSYIVYGILANGVTSVITEGAPDYPDPGRWWRYVEKYRVNVFYTAPTAIRMFMRYGEEWPMKYDLSSLRILGSVGEPINPEAWLWYYKYIGREKCVIVDTWWQTETGAHMITTIPSYPAKPGKAGKPFFTIEPEIVDKDGNKVPPNTVGFLVIKSPWPSMLRTCWGEPERYEKYWNTIKGVWRPSLLRRRRVHNDPR

SEQ ID NO: 719 - DNA, 1950 bp, Deinococcus radiodurans
  CDS (1)..(1950)
atgacccatcccaacgaccacattgacgcgatgctgcacgaaacgcgcgtcatccaccccagcgccgaatttcaggccgggacgcgggtcagccgcgcagagtacgagcgccgctaccgccagagcctcgaccagcccgacgacttctggtcagaggtggcccatgacctccactggatgaaggactgggaccgggtgctcgactggcaggagccgcacgcgcagtggttcgtgggggggcagacgaacatcgcctacaacgcgctcgaccgcaacgtgcagcgcggcctcggcgacaagcgggccatcatctgggaaggcgaggacggcgaggtgcggacctacacctacgccgaactgctgcgcgaggtttgcaaggcggcgaacgccctggaagaactcggcgtggtggccggcgaccgagtgaccctctacatgcccctgattcccgaggccgccatcgccatgctcgcctgcgcccgcatcggcgcggtgcattccatcgtgttcggcggcttctcggtctcggcgctggccgaccgcatcaacaacgcgcagagcaagctgctcatcaccgccgacgccggctatcgccggggcaagccggtcacgctcaaaatcaacgccgacgaggcggccaagctcgccccctgcctggaacacgtcctggtggtcaagcgcgccggcattccgctggagtggtggaccgaaggccgcgacctgtggtggcacgacgtagtggaccgccagagcgatcagcacgaggccaccgcgctcgacagcgagcacccactgttcatcctctacacctccggcagcaccggcgcccccaaaggcgtgcagcacacgaccggcggctacatggtgggcacttacctcaccacccagacggtcttcgacctgcgtgacgacgacatttactggtgcaccgccgacatcggctggattaccggccacagctacagcgtgtacggcccgctgctcaacggcgcgacggtggtgatgtatgagggcgctcccaaccagcccgactggggccgcttctgggacatcgtgcaaaagcaccgggtcaccatcctgtacaccgcgccgaccgccattcgctcctttatgcagcacggcgacgagattccgggccgctacgacctcgccagtttgcgcctgctggggtcggtgggcgaacccatcaaccccgaggcgtggatgtggtactaccgcgtcatcggcggcgagcgctgcccggtcgtggacacctggtggcagaccgaaaccggctccatcatgctgaccacactgccgggcgcctttcccagcaagccgggcagcgcggggctgccgatgttcggcgtggagcccgcgctgatgacccgtgacggcgaagagatcggcgacgacgacggcggcctgctcgtcatcaagcggccctggccctccatgctccgcacggtctacggcgacgacgaacgctaccgcaagagctactggggcgagattccgcacgtgtacttcgctggcgacggcgcccgccgcgaccacgacgggtactacacgattgtcgggcgggtcgatgacgtgctcaacgtctccggacaccgactgggcaccatggaaatcgaatcggcgctggtggcgcaccctgacgtgtccgaagccgcagttgtcggcagacccgacccagtgaagggggagagtgtggtggcctacgtgctgctgcaagacgggcacaccgccgaccccgccgccctacgcgcccacgtcagcagcgaaatcggcgccctggcccggcccgacgccatctacattgccgacgccctccccaagacccgcagcggcaaaatcatgcgccgcttcctgaggcaacttgccgccggacagccggtgcagggcgacaccagcaccctggaagaccccaccgttctggaacgactgcaagcctcccctgccctttga

SEQ ID NO: 720 - protein, 649 aa, Deinococcus radiodurans [sequence omitted]

SEQ ID NO: 721 - DNA, 1929 bp, Deinococcus radiodurans
  CDS (1)..(1929)
atggaccccgcactcttgacgactcccctcgtttcacccaccgacgccctgaaaaagaccgcccccgtcacgcccgagcgggcgcagcagctccgcgacatgcccgcgggcgactactggctgagcgtcgccagcgaactcacctgggacgtgccgccgaccaccgccctcgaaggcaccttcggggacttccagtatttccccggcgcgaagggcaacgtcagcgtcaactgcctcgaccgtcaccccaaaaaccgcgtcgcgctgtactacgagcgcgaagatggcctcaaggaaacgtggagctacggcgacctgaccgacgccaccgcccggttcgcggcggcattgcaagacctcggcgtggacaagggcgaccgggtggcgatttatctgtccaacgtgcccgaagcgtttatcgccattcatgcctgctaccgcatcggggcgatctactcggtcatcttcgcgggcttttcggcgtcggcggtgcgcgaccggctcaccgacgcgcagcccaaagtcgtggtttgcaccgacggcacgctgcggcgcgggcgcaacattccgctcaaggcgacgctcgacgaggcgcttgaagggttggagaagcccaccgtcatcgtcgcccgtcgcctggaccccttcctgccgctgggcgagaacgaactcgatttcgccgagctgctggagaaaacgacccgccgcgccgcgcccgtttcgctcgacgccaacgaccccggcttcatcatctacacctcgggcaccacgagcaaacccaaggggctggttcacagcggcatcggctttctgacggggacgtatgccaacgtgaagtgggcgctcaacctgcaacccgacgacgtgtactggtgcaccgccgacgtgggctggctgaccttcccgatttttgcgctggtgggcgggctggcgcacggggcgacgcacgtgatttacgagggcagcatcgacacgccgacgcccgagcggccctaccagatcatcgagaggtaccgcgccgacaaggtgtttaccgcgcccaccgccctgcggatgctgcggcgctcgggcgacgaagcgctggcacggtacgacctgagcccgctgcaactcgtcgcgctggtgggcgagccgcttgaccccgaaacctggcactggacgcacgacgtgctcggcggcggcaggctcttcgtcaacaacacctacggtcagaccgaaaccggcaccgcgtgggcgagcagcatggtgggcctcaccgaaggccgccccggctcgtgcgggcacccgctgcccggctaccgcgccgccgtggtgcacgaggacggcacgccctgcggccccaacgaactcggctcgctgacgctgaccgagcctttcccctgcctggcccgcaccgtgtggggcgaccatgaccgctacgtggagacctacctgtccgaatttcccggcaagtacgccgccgccgacgccgccctgctcgacagcgacgggcaactgtgggtcacgggccgcctggacgacgtgatgaacgtggccgggcaccgcctcggcacgatggagatggaagccgcgctgctcacccaccccgccgtcagcgaagccgccgtggtggcgatgcccgacgacatcaagggcgcggtgccggtggccttcgtggtgccgcgcgcgggcattcgcctcgacaccgacctcacctggctagaaaacgaacttgccgacgcggtggtgtccggtgtgggcgccatcgcccgtccgggccgcgtcgtcgtgacccccaccgtcccgcgcacccgcagcggcaaaatcatgcgccggctcctgcgcgacctgctgctgaccggcgaagtgaagggcgacctgacgagcctggaaaaccccgacgccctcgaaacggtgcgcgagcggctgggcggggcggcagcgggctga

SEQ ID NO: 722 - protein, 642 aa, Deinococcus radiodurans
MDPALLTTPLVSPTDALKKTAPVTPERAQQLRDMPAGDYWLSVASELTWDVPPTTALEGTFGDFQYFPGAKGNVSVNCLDRHPKNRVALYYEREDGLKETWSYGDLTDATARFAAALQDLGVDKGDRVAIYLSNVPEAFIAIHACYRIGAIYSVIFAGFSASAVRDRLTDAQPKVVVCTDGTLRRGRNIPLKATLDEALEGLEKPTVIVARRLDPFLPLGENELDFAELLEKTTRRAAPVSLDANDPGFIIYTSGTTSKPKGLVHSGIGFLTGTYANVKWALNLQPDDVYWCTADVGWLTFPIFALVGGLAHGATHVIYEGSIDTPTPERPYQIIERYRADKVFTAPTALRMLRRSGDEALARYDLSPLQLVALVGEPLDPETWHWTHDVLGGGRLFVNNTYGQTETGTAWASSMVGLTEGRPGSCGHPLPGYRAAVVHEDGTPCGPNELGSLTLTEPFPCLARTVWGDHDRYVETYLSEFPGKYAAADAALLDSDGQLWVTGRLDDVMNVAGHRLGTMEMEAALLTHPAVSEAAVVAMPDDIKGAVPVAFVVPRAGIRLDTDLTWLENELADAVVSGVGAIARPGRVVVTPTVPRTRSGKIMRRLLRDLLLTGEVKGDLTSLENPDALETVRERLGGAAAG

SEQ ID NO: 723 - DNA, 1899 bp, Vibrio cholerae
  CDS (1)..(1899)
atgagagcaaggagtaatgcgatgtctgcctatcaagagcaatatcaatgggcgaaagagcagcccgaagccttctggcgtaaacaagcgcagcagatcgactggtttcaaccgccgcaaaccattttggccaatgacgaacatggtatcgaacgttggtttcccgatggtgtgctcaatacgtgttggttagcactcgattatcactgcgagcaaggccgtggcgatcacactgcgctgatttacgactcgcccgtgacgggcaaaaagcagcgctacagttactcggcactgcgtgacagtgtcgcgaaaattgcaggcatgctggctgcgcaaggggtgagcaaaggtgatcgtgtcatcatttacatgccgatgatcccagaagcggcgatggcgatgctggcttgtgcgcgtttgggcgcgattcactcggtggtgtttggcggctttgcaccgaatgagctggcggtacggattgaagatgcggagccgaaagtgatcatgaccgcctcgtgcggcgtggaaatcaataaggtgattccctacaagcccatggtcgataaagccattatggatagccgctggaaacctgaaaaagtcttggtttatcagcgtagcgaatgccgcgctgagctcactcatgcccgtgatttggaatggaacacggtcgtgcaatcggccacgccacacggttgtgtgcctgtgctcgctaccgatccgctgtatatcctttacacctcaggcaccacaggcaaaccgaaaggggtggtgcgcgataatggcggccacgcggttgcgctcaagtattcaatgcagatcatctacaacatgccgcaagatggagtgttttgggcggcttcggatgtgggctgggtagtcgggcactcctatattgtgtatgcgccgctcattcatggttgcaccaccattttgtatgaaggtaaaccggtacgcacacccgaccccggcgcgttttggcgagtgtgtcaggagtaccaagtcaccgcgcttttttctgcaccgaccgcgtttcgtgccatcaaaaaagaagatccgaatggcgattatttaaaaaagtacgatttgtcggcgttaaccaccatttttatggccggagagcggcttgacccgccgaccttggaatgggtacaaagcaaaacaggcaagccagtgattgatcactggtggcaaaccgaaacgggttgggcgattgctggaaacccaacgggtcttgaatctatgcccatcaaagcgggctcggcaaccaaacccatccccggttatcaggtggagattcttaatgagcttggcgaaaatatgcctgccaatcagcaaggttttgtcgcactaaaaaggcctctaccaccaagctgcctgccaaccgtatggcgtaaccatgaccgttttgagtcgggctatttggcgcaattccccggttattatgtatccggtgatggcggttatcttgatgacgacgggtatctcttcatcatgggacgcatcgatgatgtgatcaacgttgcggggcatcgactatcgacaggcgagatggaagagattgtcggcgcgcatccggctgtcgcggaatgtgcggtgattggcgtccacgacgagctgaaagggcagttgccacttgggttagtggtgctcaaagatggagtgaagattgatgcgcaaacgctggagcaagagctggtcgccagtgtgcgcaatcaaattggtgcggtggcttgctttaagcatgccatagtggtcgaacgcttaccgaaaacgcgatccggcaaaattttgcggcgtatcatccgccaaatcgccgatggtgagagttacaccattccatctacgattgacgatcccatgagcctcaatgagctggaaaacctgtttcagcactga

SEQ ID NO: 724 - protein, 632 aa, Vibrio cholerae
MRARSNAMSAYQEQYQWAKEQPEAFWRKQAQQIDWFQPPQTILANDEHGIERWFPDGVLNTCWLALDYHCEQGRGDHTALIYDSPVTGKKQRYSYSALRDSVAKIAGMLAAQGVSKGDRVIIYMPMIPEAAMAMLACARLGAIHSVVFGGFAPNELAVRIEDAEPKVIMTASCGVEINKVIPYKPMVDKAIMDSRWKPEKVLVYQRSECRAELTHARDLEWNTVVQSATPHGCVPVLATDPLYILYTSGTTGKPKGVVRDNGGHAVALKYSMQIIYNMPQDGVFWAASDVGWVVGHSYIVYAPLIHGCTTILYEGKPVRTPDPGAFWRVCQEYQVTALFSAPTAFRAIKKEDPNGDYLKKYDLSALTTIFMAGERLDPPTLEWVQSKTGKPVIDHWWQTETGWAIAGNPTGLESMPIKAGSATKPIPGYQVEILNELGENMPANQQGFVALKRPLPPSCLPTVWRNHDRFESGYLAQFPGYYVSGDGGYLDDDGYLFIMGRIDDVINVAGHRLSTGEMEEIVGAHPAVAECAVIGVHDELKGQLPLGLVVLKDGVKIDAQTLEQELVASVRNQIGAVACFKHAIVVERLPKTRSGKILRRIIRQIADGESYTIPSTIDDPMSLNELENLFQH

SEQ ID NO: 725 - DNA, 1956 bp, Pseudomonas aeruginosa
  CDS (1)..(1956)
atgtctgcggcatccctgtaccccgtgcacccggaagcggtggcacggaccttcaccgacgaagccacctacaagacgatgtaccagcagtccgtcgtcaaccccgacggcttctggcgcgagcaggcccagcggatcgactggatcaagccgttcgagaaggtcaagcagacctccttcgacgaccatcacgtggacatcaagtggttcgccgacggcaccctcaacgtgtcgcacaactgcctcgaccgtcacctcgccgaacgcggcgaccaggtggcgatcatctgggaaggcgacgatcccgccgaccaccaggaaatcacctaccgccagctccacgagcaggtctgcaagttcgccaacgccctgcgcgggcaggacgtgcaccgcggcgacgtagtgaccatctacatgccgatgatccccgaggccgtggtcgccatgctcgcctgcacccgcatcggcgcgatccactcggtggtcttcggcggcttctcccccgaggccctggcaggacgcatcatcgattgcaagtcgaaggtggtgatcaccgccgacgaaggcgtgcgcggcggcaagcgcactccgctgaaggccaatgtcgacgacgccctgaccaacccggaaacctccagcgtgcagaagatcatcgtctgcaagcgtaccggtgcggagatcaagtggaaccagcaccgcgacgtctggtacgacgacctgatgaaggttgccggcagcacttgcgcacccaaggaaatgggcgccgaggacccgctgttcatcctctacacctccggctccaccggcaagccgaagggcgtgctgcataccaccggcggctacctggtgtacgcctcgctgacccacgagcgggtcttcgactaccgtccgggcgaagtctactggtgcaccgccgacatcggctgggtcaccggccacacctacatcgtctatggcccgttggccaacggcgccaccaccattctgttcgagggcgtgccgaactaccccgacgtgacccgcgtggcgaaaatcatcgacaagcacaaggtcaacatcctctacaccgcgccgaccgcgatccgcgcgatgatggccgaaggcaaggcggcggtggccggtgccgacggttccagcctgcgtctgctcggttcggtgggcgagccgatcaacccggaagcctggcagtggtactacgagaccgtcggccagtcgcgctgcccgatcgtcgacacctggtggcagaccgagaccggcgcctgcctgatgaccccgctgccgggcgcccacgcgatgaagccgggctctgcagccaagccgttcttcggcgtggtaccggcgctggtggacaacctcggcaacctgatcgagggcgccgccgagggcaacctggtgatcctcgactcctggccgggccaggcgcggaccctgttcggcgaccatgaccgcttcgtcgacacctacttcaagaccttcaagggcatgtacttcaccggcgacggcgcgcgccgcgacgaggacggctactactggatcaccgggcgggtcgacgacgtgctcaacgtctccggccaccgcatgggcaccgccgaggtggaaagcgcgatggtcgcccacccgaaggtcgccgaggcggcggtggtcggcatgcagcacgacatcaaggggcagggcatctatgtctacgtcaccctcaactccggggtcgagccgagcgaggcgctgcgccaggagctgaagcaatgggttcgccgcgagatcggtccgatcgccacgccggatgtgatccagtgggcgccgggactgccgaagacccgttcgggcaagatcatgcggcgcatcctgcgcaagatcgccgcggccgagtacgacaccctcggcgacatctccacccttgccgacccgggcgtggtccagcacctgatcgagacccatcgctcgatgcaggccgcctga

SEQ ID NO: 726 - protein, 651 aa, Pseudomonas aeruginosa [sequence omitted]

SEQ ID NO: 727 - DNA, 1497 bp, Sulfolobus solfataricus
  CDS (1)..(1497)
atggctagttatgaagaagttaggagaagtttttcgtggagtgaggtaattagatatttagacgagaacccattagacgttttgacttctcatgacggtatagcagttaagagattcactaagaacgctatggaggagataagcttctcagatcttaaaagaaaggcattaagacttgccttatatctcaaggagtttcataacattaaaaagggtgatgtaatagcaatattagcttcaaagaagattcaacaaatcatagtatttttagcaactctctccctaggagcaatttatcaaccattatttactgcatttgggccagaggcaattaagatgaggactagagatgtaaaaccaaaaattatcttttgtcaagatgaccaaaaggataagataaatgatgcaatactcttctccaagtttgatgaattattaagttacggtgaattgaaagagattgaaaagataaattgggatgatgcaataattttactttacacttctggtactacgggaacacctaaaggggccctaatcgctaagaggctatttcttaacatttatgtctacatgaaatatggtataggtgttagggaaaatgacgtgttttggaaccccgcagatcctggatgggcttatgggctatattatggtataataggaccgctaatgtttgggaaaactataatctttcttgacgaaccatttaacccagaaaggacaatggagttcatggaggaaaataaggttactaattttgctttcgcacctacggcatatagaatgatagctggaacggttaagaagaagtatgatttagtattggaaagagcgagttctgcaggtgaaccacttaacccagaagttataagatggtttatggataagtacaatgttactatcaaggatcattatggacaaactgaagttggaatggtagtttataatggctggggatatgacgcaaaagtaaaaatagggagtatgggactacctgcacctggttatgaggtcgatataatagaggatattatagctgtcaagagagattctccaggtttccacttcttgggatatctaaacaatccagagaagaccaaggaatcatttcgaggcgattggtacttgactggtgataatgcgtataaagatgaggaaggatatttatggtttgttggaaggaaggacgatgtggttaaggtatctggttacaggataggtccatttgaagttgagagcgtacttctagaatttcccgcagtactagaatctgctgttgttgccgatgaagatccaatacgaggacatgtattacatgcttatattgtactcaaaagtggatatactccaagtgaggaactaaagaaggagattattgattttgtaaatactaaatattctaggcacgtacatctagaaagggttgactttgttgataaattgccaaagactgagagtggtaaaatacaaagatatctacttagaaagaaataa

SEQ ID NO: 728 - protein, 498 aa, Sulfolobus solfataricus
MASYEEVRRSFSWSEVIRYLDENPLDVLTSHDGIAVKRFTKNAMEEISFSDLKRKALRLALYLKEFHNIKKGDVIAILASKKIQQIIVFLATLSLGAIYQPLFTAFGPEAIKMRTRDVKPKIIFCQDDQKDKINDAILFSKFDELLSYGELKEIEKINWDDAIILLYTSGTTGTPKGALIAKRLFLNIYVYMKYGIGVRENDVFWNPADPGWAYGLYYGIIGPLMFGKTIIFLDEPFNPERTMEFMEENKVTNFAFAPTAYRMIAGTVKKKYDLVLERASSAGEPLNPEVIRWFMDKYNVTIKDHYGQTEVGMVVYNGWGYDAKVKIGSMGLPAPGYEVDIIEDIIAVKRDSPGFHFLGYLNNPEKTKESFRGDWYLTGDNAYKDEEGYLWFVGRKDDVVKVSGYRIGPFEVESVLLEFPAVLESAVVADEDPIRGHVLHAYIVLKSGYTPSEELKKEIIDFVNTKYSRHVHLERVDFVDKLPKTESGKIQRYLLRKK

SEQ ID NO: 729 - DNA, 1869 bp, Sulfolobus solfataricus
  CDS (1)..(1869)
atgagttggaaaatatattctctagatcagattaaagcactggcaaaattctccatggaaaatccagaagccttctggcgggataaggctaattacgtaagttggtttaggcaaccagagaaaatacttgagggagaaccaccatacgagaaatggttcgtcggaggaacacttaatatatcctataatgccatagataggcatttaccagataagaaagataaggtggcattttattggaccaatgagagattagatagttttaggtcaatatcctttcaagatctttatcaagaagtaaacaaggcagcctatgtcttaagtgaattgggcgtgaaaaaaggcgatacggtatccatgctaatgcctaatataccagaagctgtatacttctccttagcaacacacagactgggggcaattctaataatacattatgtaggtttgagcgaggaaacagtggcatataggtttaatgattgcggttcaaaagtattgattgttgcttcaaagacgtttaggaatggaaatgagataagaattaaggattttgtggataaagttttggaatctcatactacacccatacagaaagtcttgacagtgccgaggggatattcagattttaatgttaatgggaaaagggatgttgtgtatgatggtgtgaaacctaaagggaaagtttacgttaaaccagtggaagttgaggctaacgagccagcgacagtttattacacgtctggaactacgggaagacctaagggattataccatagtaatggagggtatgtgatagcactcaattgggcttttaaggcaatatttaacccaacagagaatgacgtttggtggactgtttcagaattaggttggccagtatggccaatggcaaatttatacacgataccagtaatgggaatacctggtgtgctttttgagggatatgttggttataaaagggatctattctcgagagtaattgagagatataatgtaagcctagtttggagttctaccacaactctttacactctcaagagtttaggagaggagtcagttaagagcggagatacatcaagcttaagaatgattcttaatacaggagaacctttaaacgttggagcgtggatgtggttaaatcagaatcttcctcaagttaagatagcagatgcgtactggatgacagagcatttatcgccagttggtgcaactccttacggaatcggcgaaattccctttaaggcaggttccgctggtatacaattcccaggaggaacatatttcttaattgttgacgatgagggaaaaccattacctcctaagcaaaagggatatatagtgttaaaaccgcttaacccagccttagctaaaatgtggaatgatcccaattacgagaagataaaggagaagtattggtctaggttcccaggatacttctacactggagattacggttatgttgatgaggatggatatctgttcgtgctgggaagagctgatgatgtaataagagctgaaggggagaggataggaacacttgaagttgaaagtgtaatagtaactcatcccaacgtggccgaagctgccgtaataggtcaaggcggtaacataatagcgtttgtagtcccaagacaaggggttgaggttggtgacgcactcagaaatgacattaagaactattgtaggaacgctggttacatagttgataaagtagtgtttgtgaagagactgcctaaaaccaaaagcgggaagataatgagaaggctactaaaggctatcctagctaacgagaatccaggtgatgtatcaacattggacgatataaggataatggaggaacttaaggaggcgttgaagagcctaagctaa

SEQ ID NO: 730 - protein, 622 aa, Sulfolobus solfataricus
MSWKIYSLDQIKALAKFSMENPEAFWRDKANYVSWFRQPEKILEGEPPYEKWFVGGTLNISYNAIDRHLPDKKDKVAFYWTNERLDSFRSISFQDLYQEVNKAAYVLSELGVKKGDTVSMLMPNIPEAVYFSLATHRLGAILIIHYVGLSEETVAYRFNDCGSKVLIVASKTFRNGNEIRIKDFVDKVLESHTTPIQKVLTVPRGYSDFNVNGKRDVVYDGVKPKGKVYVKPVEVEANEPATVYYTSGTTGRPKGLYHSNGGYVIALNWAFKAIFNPTENDVWWTVSELGWPVWPMANLYTIPVMGIPGVLFEGYVGYKRDLFSRVIERYNVSLVWSSTTTLYTLKSLGEESVKSGDTSSLRMILNTGEPLNVGAWMWLNQNLPQVKIADAYWMTEHLSPVGATPYGIGEIPFKAGSAGIQFPGGTYFLIVDDEGKPLPPKQKGYIVLKPLNPALAKMWNDPNYEKIKEKYWSRFPGYFYTGDYGYVDEDGYLFVLGRADDVIRAEGERIGTLEVESVIVTHPNVAEAAVIGQGGNIIAFVVPRQGVEVGDALRNDIKNYCRNAGYIVDKVVFVKRLPKTKSGKIMRRLLKAILANENPGDVSTLDDIRIMEELKEALKSLS

SEQ ID NO: 731 - DNA, 1989 bp, Helicobacter pylori
  CDS (1)..(1989)
atgcaattagacgaagatttagaattcgctaaaaaaatctttaaccctaacagagcgtttgccaagcaagccaggattaaaaacatgtgcgaatataaagatttagtgcatgaagccaatgaagattatgaacatttttggggcgatttagccaagcagaaactcacatggtttaaaccttttgataaggttttaaacagcgataacgccccttttttcaaatggtttgaaaacggcaaaatcaatgtttcttacaattgcatagacaggcatttaaaagacaaaaaaaataaagtggcgatcatttttgaaggggaaatgggggattataatgtcatcacttacagaaaactccactctgaagtcaataaaacagccaaccttttaaaaaacgaattcaatgtcaaaaaaggcgatagggtcattatctatatgcccatgattgtagaaagcgtttatatgatgctcgcatgcactaggattggagcgatccatagcatcgtttttgctgggtttagccctgaagccttaagggataggatcaacgacgctcaagctaaattagttatcacagcggatgggacttttagaaaaggcaaaccttacatgctcaagccagcccttgacaaggctctagaaaataacgcctgccctagcgtggaaaaagcgctcattgtgatacgaaacgccaaagagattgactatgtgagagggcgcgattttgtctataatgaaatggtcaattaccaatccgacaaatgcgaacctgaaatgatggactctgaagatcctttattcttgctctatacaagcggatcaaccggaaagcctaaaggcgttcaacacagcagtgcggggtatttgttatgggcgcaaatgacgatggagtgggtttttgatattagagataacgataatttttggtgcaccgccgatattggctggatcacagggcacacttatgtggtttatggacctttagcttgtggggcgacgactttgatactagaaggcacgatgtcttatccggattatgggagatggtggaggatgatagaagaataccgtgtggataaattctacacttcccctaccgctataagaatgttgcatgccaaaggtgaaaacgaaccctcaaagtataatttagagtcgctcaaagttttaggaacggtgggagagcccattaaccctacagcatggaaatggttttatgaaaaaatcggcaactcaaaatgcagcatcgtggatacttggtggcagacagaaacaggcgggcacatcatcagccctttaccgggagctacgcctataagggccagttgcgcgactttacctttgcctggaatccatgcggaagttttaaacgaagacggcactaaaacaaagcctggagagcaagggtttttatgcatcactaagccatggccttctatgataagaaacatttggggcgatgaaaaacgatacattgatagctatttttctcagatcaagttgaatggggaatatgtctacctctctggagatggcgctatcgtggatgaaaacggatacattactattattgggcgcacagatgatattgtgaatgtgagtgggcataggattggcacggctgaagtggagagcgctatttccaagcatgaaatggtggctgaatgcgcggtggtgggtatccctgatgcgattaaaggagagggcttgtttgcgtttgtggtgctgtgcgatggggctaaatgcaatcttggcgagagtttagaattgctaaaagaaatgaaccatatcttatccattgagattggaaagatcgcgaaattagacaatgtcatgtatgtgccaggtttgcctaaaaccaggagcgggaaaatcatgagaaggcttttgaaatccatcgccaaaaaagagcctatcactcaagatttaagcacgctagaagatgtgaatgtggttaaagaaataatgagcatcgctcaaatggaggagtaa

SEQ ID NO: 732 - protein, 662 aa, Helicobacter pylori [sequence omitted]

SEQ ID NO: 733 - DNA, 1989 bp, Archaeoglobus fulgidus
  CDS (1)..(1989)
atggagccgaaaattttgtgggagccggattcggagtttatcaaaaactccaatctggccgagtttgttgagtggctttcttcaaacaagggtctcgattttgtggtttcagagaatgcgagggagaacgttgagaactacaagaacctctggaagtggtctgtggagaaccttgaggacttctgggagagcgtgtgggagttctttgagattaagagctacagcgattacaagactgttctcgatgaaaggaagatgccgggagcaaagtggtttgagggggcaacgctgaactatgcggagcatgcctttttgaaggctggtgagggagaagcggttgtttacgttagagaggacggtttgaggagggctttaacatggagcgagctggagaggcagactgcagcctttgctgcttggcttaaagatatgggtgtaaagaagggagacagggttgttgcctactgcagtcaggttcctgaagcggttattgcattgctggcaacggcgagcattggtgcaatctgggcggccgttggtggtgaggttgcgccaagggctgttattgacaggttcaagcagcttgagccaaaggttctgatcgcatctgatggccacttctacaacgggaaggagttcaacaagctggaggacattaagaccgttgtcagcggcatcccgagccttgagagggttgtcttgattcccaacctctacgagtcccacgacctgaagcttagcatcccactccactattgggaagagacggttgatagaaaggagaagctcaccttcgagcctctgccctttgaccatccactatgggttctttacacctcaggaacaacaggaattccgaagcccattgttcacgggcatggggggataacggtcgagatcttcaagggctccttccacatggacttcaaggagggcgaccgcttcctgtggtactccccgccctcatggatgatgtggaacactgttgttagcggtctcctcgctggagctaccattgtcttctacgatggcagcccgctttacaacttcctccagccgctgtggcagatatgcgagaaggagaagctgaacatcttcggaacgagtgctcccttcctccacggctgcatgaaattcggcctgcagcccggctcgcagtacgatttgagcagcttgagaatggttggctccaccgccgccccgctatcgcctgagggctttgagtgggtttacaggaatgttaaggaggacgtatggctgaactctgcaagcggcgggacggatgtgatgacgggctttgttggaggctgcccaattctccccgtctggagtggagagcttcagtgcaggtggctggggacgaaagttgaggcttacaacattgaaggcaagcctgtaatcaatgaagtgggagagcttgtcatcgagctcccgatgccctcaatgcccctctacttctggaatgacaaggacttcagctggtataaagagagctacttcagcatgttccccaacgtctggtggcacggggactggctgatgattacagacagaggaacggcaataatcttcggccgctctgattcaacaatcaagagaaagggagttagaatgggaactctggacttctacaaggttgtcgagagtatgaacgaaattatcagcagcctcgttgttgaggtcaagggcaagattttcctcttcgtggttccagcacatggaattgaggtcaacgaggagcttaaggagaagataaacagagccttgaaagagaatctcggagcctacttcgttgcggactacattattccagtgcccgacattccaatgactttgaactacaagaagctggaggtgccgataaagaagattctgctcggctgggaagtggagaaggcagtgaaccttgacagcataatgaatcctgatgccgttttcaaggtcgttgaggctgcaaagccctacgtggagcagctggagggagaatga

SEQ ID NO: 734 - protein, 662 aa, Archaeoglobus fulgidus
MEPKILWEPDSEFIKNSNLAEFVEWLSSNKGLDFVVSENARENVENYKNLWKWSVENLEDFWESVWEFFEIKSYSDYKTVLDERKMPGAKWFEGATLNYAEHAFLKAGEGEAVVYVREDGLRRALTWSELERQTAAFAAWLKDMGVKKGDRVVAYCSQVPEAVIALLATASIGAIWAAVGGEVAPRAVIDRFKQLEPKVLIASDGHFYNGKEFNKLEDIKTVVSGIPSLERVVLIPNLYESHDLKLSIPLHYWEETVDRKEKLTFEPLPFDHPLWVLYTSGTTGIPKPIVHGHGGITVEIFKGSFHMDFKEGDRFLWYSPPSWMMWNTVVSGLLAGATIVFYDGSPLYNFLQPLWQICEKEKLNIFGTSAPFLHGCMKFGLQPGSQYDLSSLRMVGSTAAPLSPEGFEWVYRNVKEDVWLNSASGGTDVMTGFVGGCPILPVWSGELQCRWLGTKVEAYNIEGKPVINEVGELVIELPMPSMPLYFWNDKDFSWYKESYFSMFPNVWWHGDWLMITDRGTAIIFGRSDSTIKRKGVRMGTLDFYKVVESMNEIISSLVVEVKGKIFLFVVPAHGIEVNEELKEKINRALKENLGAYFVADYIIPVPDIPMTLNYKKLEVPIKKILLGWEVEKAVNLDSIMNPDAVFKVVEAAKPYVEQLEGE

SEQ ID NO: 735 - DNA, 1932 bp, Archaeoglobus fulgidus
  CDS (1)..(1932)
atggaagagtttagaaagttgtggcaggaagcgtatgaaaatcctgaaaagttctggaatgagagggctgaggaggccatggacgacataaactggtttgaaccttggaagaatgtttttaaatgggaatacccaaagttcagctggtttgaaggggggaagaccaacatctgctacaactgccttgactacaaggtgaagaggtacggttcaaagcctgcctacatctacgaaaaccccgaaatggacttgagctatgcaattacctacagacagctttacagcatggttaaaaagtatgccgcatctctgagaggagctggactgagcaagggggacagaattcttctttatcttccaaactcaatcgaagctgcggcaatgctgctcgcagcagcaagaattggcgttatttctgtgacagtctttgctggtttctcccccaaggccgttgccgacagaattgagctgaccacaccgaagctaatcttcacgcaggatttctccacaaggagagggaagctggtgaggctgaaggacaacatcgatgaggctctgagctacgtgcctgaaaacgtaagggaaaacgtcggaatggtggtcgtgaagagagcgatgccggaagaggaggtcgatttaaaggaggggcgggatttcaccctgaaggagtttcttgacctgaaaggaggagaaagcagtgattatgttgagatggatgcgatggacccaatcttcgtcatgcccacatcaggcacaacggccaagcccaagcctgtggttcacgttcagggaggttatcagatatggaactactatgctgctaagtgggtttacggcctgaagcctgacgatgtgatattcaacacctcggacataggctggattgtcgggcagagctacatggttttcggcccgcttctcgcaggctctacgtgcattctcttcgacggcactcctgattatcccgagccgggcacgtggtgggaggttgtggagagaaacggagcaacgctgatatggacatccccgactggtgcgaggatactgagaaagcttggagtggagaaggcaaaggagtacgacgtgagctcggtcgagagggtggtttgtgcgggggaggttctgaatccagaggtgtggtactggctctacagagatgtttttgaggaggaaattccaataattgaccacatgtggcagaccgaaaccaccggagcgctattcggctatccctacggtctctacggggatgaaattaaggagtacatcaagcccggctccgccggacttcccttacctggaataattcccgtcgttcttgacgagctgagtggagaggagctaccaccgagggaaaagggagtcatgtacctcaaaagacctttccccggcctaacaccaacgctctgggacagctttgacagatacgtgaggtcatattgggaggttggagcgggcagaggaatgtactgcaccggagatgctgcctacattgacgaggatggctacgtgtggttcacgggaagggctgatgaggtcataaagattgcaggtcacagaattgggacaatagaggttgagaatgccctgataagtcatccggcagtagctgaggcaggtgtaagcggcatacctgatgaaatcaggggagaggttgtggcagcattcgtcgttctcaagcccggctactctccgagcgaggagctgaagagggagataatagaccacgtgaggaaaactctcggcccgattgttgttttcaaggacatacagttcgtgaacatgcttccaaagacgaggagcggtaaaatcatgaggagggtcatgaagaggcttttcctcgggcaggagcttggtgacctgtcaacgatcgaggaggaggcatcggttgaggaaatcaaggaggcggttgagaagctcaagaaactttaa

SEQ ID NO: 736 - protein, 643 aa, Archaeoglobus fulgidus
MEEFRKLWQEAYENPEKFWNERAEEAMDDINWFEPWKNVFKWEYPKFSWFEGGKTNICYNCLDYKVKRYGSKPAYIYENPEMDLSYAITYRQLYSMVKKYAASLRGAGLSKGDRILLYLPNSIEAAAMLLAAARIGVISVTVFAGFSPKAVADRIELTTPKLIFTQDFSTRRGKLVRLKDNIDEALSYVPENVRENVGMVVVKRAMPEEEVDLKEGRDFTLKEFLDLKGGESSDYVEMDAMDPIFVMPTSGTTAKPKPVVHVQGGYQIWNYYAAKWVYGLKPDDVIFNTSDIGWIVGQSYMVFGPLLAGSTCILFDGTPDYPEPGTWWEVVERNGATLIWTSPTGARILRKLGVEKAKEYDVSSVERVVCAGEVLNPEVWYWLYRDVFEEEIPIIDHMWQTETTGALFGYPYGLYGDEIKEYIKPGSAGLPLPGIIPVVLDELSGEELPPREKGVMYLKRPFPGLTPTLWDSFDRYVRSYWEVGAGRGMYCTGDAAYIDEDGYVWFTGRADEVIKIAGHRIGTIEVENALISHPAVAEAGVSGIPDEIRGEVVAAFVVLKPGYSPSEELKREIIDHVRKTLGPIVVFKDIQFVNMLPKTRSGKIMRRVMKRLFLGQELGDLSTIEEEASVEEIKEAVEKLKKL

SEQ ID NO: 737 - DNA, 1542 bp, Aeropyrum pernix
  CDS (1)..(1542)
atgctagccgtgacaagaatcggggccatacacagcgtggtattctcggggttcagcagctgggccctcgccgacaggattgtcgacgccaaggcggatgtcctgataacggcggatggcttctataggagggggaggatagttgatctcaagaagaacgccgacgaggccgtgaagcttgccgccgacaatggtgtaaaggttaggaaggttatagtggtgaggagggctgggaacgaggttaggtggagcagcgagctgaacgtctggtaccacgacctcctgaaggaggtgcctgagaaggtctatgtaaagccggagccgaggaagtctgacgacgtgctcttcatactatacaccagcgggacgacgggaaagcctaagggtataatgcacagcgtaggcggttacatgacctacgtctacaacgtgttccgctggaactgggatccgaggcccgaggacgttttctggaccgccgcggatataggctggataacgggccacacctacatagtctacggcccgttgatgcacggcgagacccagatcatgtacgagggggctccagactatccgaaccctggtaggatctgggagatggtggagcgctacggagtaacggtcttctacactagccccacccttctcaggctgctcaggaagtatggggacgagtgggttgagggcagagacttctcccggctaaggctactgggtactgtgggggagccgattaaccccgaggtgtggaagtggtattacgagaagataggctggaagagggctcccatagtggatacgtggtggcagaccgagacgggggcggcaatgataagtcccgcgcccgggatagcgctggtccccctgaagccgggcagcgctacgctcccgctacctgggattgtggctgatgtcctgacaagtgacgggaggcaggcagggccgggtgagaagggctacctggttgtgagggagccgtggcccggcatgatgctgggtatatggggagatcctgataggtatgtgaggacctactggtccaggttcagcaagccggaggagggggtttggatctactatcccgcggactatgctgtgagggatcgcgacggctacttctggattctaggtagggctgacgaggtcctcaacgtggcgggacacaggattggaactatagagcttgaggacgccctcctcacacaccccgcggtgagcgaggcagccgtggtgggggcgcccgatcccgttaagggtgaggttcccgtggccttcgtcgtccttagggctggctacgagccgagcgataagctggagcgggagcttagggagacagtgagaaggctgataggccctatagcggagccgtcaaagatatacttcgtggagaagctcccgaagactaggagtggtaagataatgaggaggattatgataagcctgctacgaggccagcctgttggagacgtcaccacgcttgaggacccaagcgctgtagaggctgtaaggagagcccttgagagggagaaggctgggtag

SEQ ID NO: 738 - protein, 513 aa, Aeropyrum pernix
MLAVTRIGAIHSVVFSGFSSWALADRIVDAKADVLITADGFYRRGRIVDLKKNADEAVKLAADNGVKVRKVIVVRRAGNEVRWSSELNVWYHDLLKEVPEKVYVKPEPRKSDDVLFILYTSGTTGKPKGIMHSVGGYMTYVYNVFRWNWDPRPEDVFWTAADIGWITGHTYIVYGPLMHGETQIMYEGAPDYPNPGRIWEMVERYGVTVFYTSPTLLRLLRKYGDEWVEGRDFSRLRLLGTVGEPINPEVWKWYYEKIGWKRAPIVDTWWQTETGAAMISPAPGIALVPLKPGSATLPLPGIVADVLTSDGRQAGPGEKGYLVVREPWPGMMLGIWGDPDRYVRTYWSRFSKPEEGVWIYYPADYAVRDRDGYFWILGRADEVLNVAGHRIGTIELEDALLTHPAVSEAAVVGAPDPVKGEVPVAFVVLRAGYEPSDKLERELRETVRRLIGPIAEPSKIYFVEKLPKTRSGKIMRRIMISLLRGQPVGDVTTLEDPSAVEAVRRALEREKAG

SEQ ID NO: 739 - DNA, 1944 bp, Xylella fastidiosa
  CDS (1)..(1944)
atgtctgacctgtacaccattgatccgatgttggccaaagatgcgcacgtagaccgtgctcactacaaaacgctttaccacgaatccctcgaacaaccggaagcattctggagcaacatcgcacagcgcctggagtggttcaaaaccccaacaaaaatcaaagatgtcagctaccaactagaagacgttcacatccgctggttcgaagacggtgaactcaatgccagcgtcaactgcctagaccgccacctcaccttacgcggcgacaaaacagcactcctgtttgaacctgacgcccctgacgccccatcctcacgcatcacctaccgtgaactgtacgaacgtgtctgccaactcggtaacgcactgcgccacctcaacatcgaaaagggcgaccgcgtcaccatctatttaccaatgattccagatgcagtcgtcgccatcctcgcttgcgcacgcattggagcaatccactccgtcgtcttcggcggctttgcaccgaactccattgccgatcgaataaacgactgcggtagcaaactcatcatcaccgcagacgaaggcctgcgcggcggcagaaaaattccattgaaagccaatgttgatgccgcattaaagatccacggaacccaatccgtcgaaaccgtactcgtcgtgcgtcacaccggcggtacgatcaacatgcataccccgcgcgaccgctggttccatcacgtcgtcgacatccaagcgaccgaatgcgccccagaacgcatgaacgctgaagacccacttttcatcctctatacctccggctccacaggcaaacccaaaggagtgctgcacaccaccggcggctacctggtgtacaccagctacactcatgaaaccgtgtttgacctgcgcgaaaacgacatctactggtgcactgccgacatcggctggattactggtcacagctacatcgtttacggccccctggccaatggcgccaccgtgttgctgttcgaaggcgtcccccactacccaaccgtgtcgcgcttctgggaagtgatcgacaaacatcacgtcaccctgttctacaccgcgccgaccgcaatccgtgccttgatgcgcgaaggcgacacccctgtaaaaaaaacctcccgcaaaagcttgcggttgcttggcagcgtcggcgaacccatcaaccccgaagcctggcactggtactacaccatcgttggcaacggacgctgtcccattgtcgacacctggtggcaaaccgagacaggaggaatcctcatcaccccactgatcggtgcaaccgaccttaaaccaggctcagtcaccctccccttcttcggcatacgccccgccctagtcgataccaacggacaaatactggatggccccgcagcaggcaacctagtcctcctcgattcctggccgggtcaaatgcgtaccgtctacggtgaccaccaacgttttatagacacttactttcgcacctaccccaatacttacttcaccggcgacggctgccgccgcgatgccgacggctactactggatcactggacgtgtggatgacgtcatcaacatctccggccaccgcatcggcaccgccgaaatcgaaagcacactcgtcgctcaccccaaagtggctgaagccgcggtcgtcggcttccctcacccgatcaaaggccagggcatctacgcatacgtgacattaattaccggcgagacacccagcgaagcactgcaccaagaactgctcacctgggtacgtaaagaaatcggagcaatcgccacacccgatcacgtgcaatgggcacccaacctccccaaaacccgctccggaaagatcatgcgccgcatcctacgcaaaattgcagaaaacgcaccagaccaactcggtgacacctccacactggctgatccgtctatcgtcgacttattgctcaacgaacgactgacacactga

SEQ ID NO: 740 - protein, 647 aa, Xylella fastidiosa [sequence omitted]

SEQ ID NO: 741 - DNA, 1827 bp, Sulfolobus solfataricus
  CDS (1)..(1827)
atggtatttaatccagataaggaatggatagagaacagtaacgtatataagttcatgattaaaaggaaccttaatagattagaagacttcgtaaggtatacatatgagaatcctgaattttgggaccagtttgtaaagcttattggagtggaatttaaagaaccttatgccaaggttttggatctgagcagaggaaaacaatggccacaatggttcataggagggaagttaaacattggagatcaattacgtgatagttctgatgtgttcattaagtggatggatgaagacctcaacaccagaactgtaacttattctcaaatactaaatgagagcaagtctattgcaagttggttaaagaagataggtttgaagaagggagatagggtcgctatttacatgccaatgatcccggaaatagtatcagtaatgctgggagcaataagggtagggacgataatcgtacccttattttccggatttggtccagagcccataagggttagagtggaggatagtgaggcgaaagtaatcttcacagttgataagagcattagaagaggaaaagaagtcgacatgttaaaaaatctagaaggactaaacgataatataactaaagtagtattgaatagaggaggcactaagggtgatttttatgagtataaggatgtcataaaaactgctggagattatgtagaagataccagtactgaagacccaatgatgataatttacacttctggaactactggaaaacccaaaggatgcgttcatactcacgatgggtttccaataaaagcttcagctgacatttacttccaattcgatttgaaaaatggagagacgttaatgtgggttactgacatggggtggatgatgggaccctggatggtatttggatcactcttactaaacgctaaaatgggaatgattgaaggatatacaagtggggaagtcctacagaaattcgttgaagatatgaaagttgatgttttaggggtctcagctagtctagttagggcactgagaagtcaaggcgaagttaagctaaacgttaggttaactggaaacactggagaaccaattgattcggaaagctggtattggttattcaacgccagtggaaagaaccccataataaactactctggaggtactgaaatctctggaggtattttggggaattacgttataaagaagataaagccatcttcatttaatggaccttctccgggaattaacgcctcagtatttaatgaggaaggaaaagacgccccaccaaatgttgaaggagagttagtcgtattaagtgtttggccaggtatgactagaggattttggagaaacccggaaaggtatatagagacctactggtcagtgtggaaagatgtatgggttcatggagatttggcttatagagacgaagaagggtatttttacatcgtaggtaggagtgatgatacgataaaggttgctgggaagagagtaggtccggctgaaatcgaaagcgtattaaattcattcccaaacgtagtggaatcagcatgtataggaatacctgatccgatgaagggggagaaaatagtctgttttgtagtctctaaggttagtgggattgaaaatcaattaatagaatacacagaggataaactgggtaaggcatttgcaccatctgaaataaagattgttaaggagctacctaagactagaaatgctaaaataatgaggagattgataagagccatatatttaaataaacccttaggagatatatcctcactggaaaatccgtcagctttggaggaaattaagaaggccatcagttag

SEQ ID NO: 742 - protein, 608 aa, Sulfolobus solfataricus
MVFNPDKEWIENSNVYKFMIKRNLNRLEDFVRYTYENPEFWDQFVKLIGVEFKEPYAKVLDLSRGKQWPQWFIGGKLNIGDQLRDSSDVFIKWMDEDLNTRTVTYSQILNESKSIASWLKKIGLKKGDRVAIYMPMIPEIVSVMLGAIRVGTIIVPLFSGFGPEPIRVRVEDSEAKVIFTVDKSIRRGKEVDMLKNLEGLNDNITKVVLNRGGTKGDFYEYKDVIKTAGDYVEDTSTEDPMMIIYTSGTTGKPKGCVHTHDGFPIKASADIYFQFDLKNGETLMWVTDMGWMMGPWMVFGSLLLNAKMGMIEGYTSGEVLQKFVEDMKVDVLGVSASLVRALRSQGEVKLNVRLTGNTGEPIDSESWYWLFNASGKNPIINYSGGTEISGGILGNYVIKKIKPSSFNGPSPGINASVFNEEGKDAPPNVEGELVVLSVWPGMTRGFWRNPERYIETYWSVWKDVWVHGDLAYRDEEGYFYIVGRSDDTIKVAGKRVGPAEIESVLNSFPNVVESACIGIPDPMKGEKIVCFVVSKVSGIENQLIEYTEDKLGKAFAPSEIKIVKELPKTRNAKIMRRLIRAIYLNKPLGDISSLENPSALEEIKKAIS

SEQ ID NO: 743 - DNA, 1959 bp, Sulfolobus solfataricus
  CDS (1)..(1959)
atggtacaagaaattacagaaaatattaaagaaatagaggaaaaagttgattataatacaaggatttatagagaaatttatagggaaagcatagagaacccaggtaaattctggggtaaattaggtgaggatttaattgactggtttgaaccttggaaggagatctataagcaagaaactcttacaaagtggttcttaggaggaaaactaaacgcaagttataatgcaattgatagacatttgaacagtagtagaaagtttaaagccgcgataatttgggaatctgaaaaaggggagagaaaaatacttacctatcaagacttattttacgaagttaatagatgggctaatgcgttaaagcaattaggtgtaaaaaaaggtgacagggttacaatttacatgcctttaaccccagaaggagttacagcaatgttagcgtgtgccagaataggtgcaattcacagtgtggtatttgctggttttggttcccaagcgttagccgatagaattgccgatgcacaatcgaagattgtcattactgcagacggatattatagaaagggtagactcatagagcttaagaagaccgttgatgatgctttatcgaaattacaagataattccgtaaagaatattataatatttaggaggattgggatagaaattccatttaaagaaggaagagatgtgttttttgatgaaataggaaagtataaatatatcgaaccagaaccagtagaggccactcatccgttattcatcctttatacttctgggactaccggtaaacctaagggtatagtacactcaactggtggatatcttgtaggcacagctacaatgttgttatggagttatggattaagccaagaaaatgatgtattattcaatacttcagacattggctggattgtaggacactcatacataacatattcaccgctcgtgatgggtagaagtgtagtaatatatgagagtgcacctgattatccaactcccgataaatgggctgaactaattgagaagtataaggctacgacttttggaacttctgcaacattcttaaggtatctgatgaaatatggtgaagattacattaaagctcatgacttatcctcgcttagaataatagtaacaaatggagaaccgctaaattacgctccgtggaaatatgggttagaaattataggtaagggtagggtgtttatgtcacatcagtggtggcaaactgagactggagctccgaatttaggttacatgccgggatatccaatcttcttaaccatgaaatctggcccagcgtccggtttcccattaccgggtaataaaataaaagttgtcgacgaaaatggaaatccgaccaggcctagagagagaggttacctaataattgaaccaccatttccaccaatgatgatgataggtatgtggaacgacgatggaaatgagagggttattaagacttactttagtaaattccccaacttatattatactggagactttgccatgatagatgaagatggatacgtgtgggtatctggaagagcagatgagacattgaagatagctgggcatagaataggagcaggtgaagttgagtctgcaataacctcgcaccctgcagtagcagaggcagctgtaataggcattccagatccagtgaaaggagagatcgctcacgcattcgttgtgttaaaacaagggtatcatcaaaacaatgagttatctaaggaaatacaagaacatgtgaggaaaattatggggcccatagtattattagaggtacatttcgttaatgcgttacctaaaactaggtctggtaaagtaatgagaagagtaataaaagctgttatgacgggatctaatataggagatatttcgacgttagaagatgaggcatcaatggaagaaattaaaaaagctatagaggtattgagaagacagttaaacccatga

SEQ ID NO: 744 - protein, 652 aa, Sulfolobus solfataricus
MVQEITENIKEIEEKVDYNTRIYREIYRESIENPGKFWGKLGEDLIDWFEPWKEIYKQETLTKWFLGGKLNASYNAIDRHLNSSRKFKAAIIWESEKGERKILTYQDLFYEVNRWANALKQLGVKKGDRVTIYMPLTPEGVTAMLACARIGAIHSVVFAGFGSQALADRIADAQSKIVITADGYYRKGRLIELKKTVDDALSKLQDNSVKNIIIFRRIGIEIPFKEGRDVFFDEIGKYKYIEPEPVEATHPLFILYTSGTTGKPKGIVHSTGGYLVGTATMLLWSYGLSQENDVLFNTSDIGWIVGHSYITYSPLVMGRSVVIYESAPDYPTPDKWAELIEKYKATTFGTSATFLRYLMKYGEDYIKAHDLSSLRIIVTNGEPLNYAPWKYGLEIIGKGRVFMSHQWWQTETGAPNLGYMPGYPIFLTMKSGPASGFPLPGNKIKVVDENGNPTRPRERGYLIIEPPFPPMMMIGMWNDDGNERVIKTYFSKFPNLYYTGDFAMIDEDGYVWVSGRADETLKIAGHRIGAGEVESAITSHPAVAEAAVIGIPDPVKGEIAHAFVVLKQGYHQNNELSKEIQEHVRKIMGPIVLLEVHFVNALPKTRSGKVMRRVIKAVMTGSNIGDISTLEDEASMEEIKKAIEVLRRQLNP

SEQ ID NO: 745 - DNA, 2046 bp, Archaeoglobus fulgidus
  CDS (1)..(2046)
atggcagacccgatggaagctatgaaaaaagagtttgagaaccgcatcattccaccaagctggaaggacagggtttgggaaatagaagattacaggaagttccacgaggacaccatcaaggacaaggaatcgatagagaagtggtgggagaagtgggcaaacgagattttctggttcaggaagtgggacagggctcttgacgatagcaacccgcccttctacaggtggtttgttggcggagagacgaatctcgcttacctctgtaccgactggcagattgagcagggaaggaagaacaaggtggcgattatctgggaaggagagccggttaaggaaaatggagagccggttgaagtgagaaagctaacttactacgacctttacagggaatcgaacaggattgccgcgatgctgaaggacaagcttggagttaagaaggacgagatcctgaccttctacctgccaatgattcctgaactgccgcttttcatgcttggagtgcagagaataggggcgaagcacagcatagtgttcagcggattcagtgctcaggctctggcggttagaataatggatgctggtgcgaggtatgttgtcactgcagatggcgtttacaggagagggaaggtgctgaacctcaaagcgattgtagatgacgccgttaagatttgcgagcaggagggtcacaaggttgagaaggttatcgtggtcaagagagcaggaaatgaaatcccgtggaacgatagcagagatgtttggtttgaggacctgatggcagacattggaaagaacgtgaaggttgagtgcgagaaaatgggttctgaggacttcagcttcatcctatatacctcgggaaccacaggaaggccgaaaggagcgcagcactccgtcggaggctatgcggttcacctctacactacaatgaagctcattttcgatatcaaggatgacgacatattctggtgcactgccgacatcggctggattacgggacacagctacattgtttacggtccactgatgtgcggtgcgacgaccatgatgtatgaaggcgccccagacttccctgacgtgagcagatgggcagcgatgattgagcgctacggagtgacgatattctacaccgccccgacggcaataagaatgctcatgcgcttccctgaggagaactacaccaagtacgacatgtcaacgctgagaataatccacagcgttggagagccgattaaccccgaagcttggagatggtactacagggttttcggtagagaagatgttgtctgctcaagcacatggtggatgacggaaactgggggtatgctgacggaccacttcccaggattggggaagataattccacttaagccgggcacaaatggctatccaattcctggagttaggatggaggttcttgatgatgagggcaattctgtgaaaccgggagaaagaggctacctcgttatctccacaccatggcccggaatgctcatgacgctgttcaaagacccaaacaggttcattgacgtttacttcggcaagtacaagagcaagggttggtattactacacaggcgactttgccatgttcgatgaggacggctacgtctgggttcttggaagggctgatgatatactgaaggttgctgggcacagaattggaactgctgaaattgaatcggcaatggtctctcatccggatgttgctgaagcagcctgcgttggcaaatccgacccggtaaagggagagattccgataatctacgtggtgctgagagaaggtgttgaaccctcaccggatatggtgaacgagctcaagaagcacctcagagccactctcggccctgttgttgccagcgatgctgtgataaccttcgttaacactctacccaaaacaagaagcggtaaaatcatgaggaggctgcttagggctgttgcagagggcaaagagctcggtgacgtcacaacccttgagagcgaggttgcggttgaggaggcgaagaaggcctacgagatggttaaggcggcccttgaggggtccaaatcctaa

SEQ ID NO: 746 - protein, 681 aa, Archaeoglobus fulgidus
MADPMEAMKKEFENRIIPPSWKDRVWEIEDYRKFHEDTIKDKESIEKWWEKWANEIFWFRKWDRALDDSNPPFYRWFVGGETNLAYLCTDWQIEQGRKNKVAIIWEGEPVKENGEPVEVRKLTYYDLYRESNRIAAMLKDKLGVKKDEILTFYLPMIPELPLFMLGVQRIGAKHSIVFSGFSAQALAVRIMDAGARYVVTADGVYRRGKVLNLKAIVDDAVKICEQEGHKVEKVIVVKRAGNEIPWNDSRDVWFEDLMADIGKNVKVECEKMGSEDFSFILYTSGTTGRPKGAQHSVGGYAVHLYTTMKLIFDIKDDDIFWCTADIGWITGHSYIVYGPLMCGATTMMYEGAPDFPDVSRWAAMIERYGVTIFYTAPTAIRMLMRFPEENYTKYDMSTLRIIHSVGEPINPEAWRWYYRVFGREDVVCSSTWWMTETGGMLTDHFPGLGKIIPLKPGTNGYPIPGVRMEVLDDEGNSVKPGERGYLVISTPWPGMLMTLFKDPNRFIDVYFGKYKSKGWYYYTGDFAMFDEDGYVWVLGRADDILKVAGHRIGTAEIESAMVSHPDVAEAACVGKSDPVKGEIPIIYVVLREGVEPSPDMVNELKKHLRATLGPVVASDAVITFVNTLPKTRSGKIMRRLLRAVAEGKELGDVTTLESEVAVEEAKKAYEMVKAALEGSKS

SEQ ID NO: 747 - DNA, 1761 bp, Archaeoglobus fulgidus
  CDS (1)..(1761)
atgaagatggaggagatatatagggaatttatcgaattgacgaagttgccagacaatgagacgaaggaaaaggccatggaagagtttttcagaaagctgaacacgatgcagctgcctgagtacttcaactgggcggaagaaatctttgagggagttcacgtgaaggatagggggaatcagaaggccctgatatggtcgaacattgagacgggagaaaagaaggaatacacctacgagcagtttgctgctgaaggaaacaggattgttaacttcctgaggggacacggcgtggagaagggggacagcttctacatgatgattcccctcctgcccccaatatggttcgcaacctttgcaactgtcaagggagggttcataggagttcccaccgctacaacgatgacggtcagagaccttgaatacaggttcaaagtttacccgccggttgcaattatggccgacgaagcttcagccaaaacaattgatgaggctttaagcaacgttggtgcggagccaaaagtcaaaattgttatcggagacaggagcggatgggagagctacgattcccttagcaaggagtcgtcggaagctgaggctgcaaagacgaagtgggacgacataatcttcagcttcttcacctcgggaacgacgggattgccgaagagagttgcccacaccgctacatcctacccagtgggccacctcatgacagcatgcataatcaatgtgcaaccgggagatattcaccacaacctgagcgctccgggatgggcgaagtacgcgtggagctccttctttgcccctcttaacgtcggagccactgcgaccggtttctactacacgaggctgaacggtgacctttaccttcaggctgtgtccgagttcaaggtcaacaccttttgcgccccgccaacagcatggaggctgttcatgttcgcagacataggaaagtacgactactcggcattgagggatgtcgttagcgctggagaaccactcaaccccgaactctacgagcagtggaagaagtacaccgacacggaaatcagggacttctacggccagacggagagcaccgcaatgataggcaacccgccgtggttcaagggaggcaaaatcattcccggctctttcggcaggcccaccttcatgtacgacgttactctcgttgatgatgagggcaatgaaataacgaagcccaatgaggttggccacatcgtcgtcaggcttgatcgctggaggccgattgggctgttcaaggagtacatgggcgaccctgagaaaacggccaaagttttcgttggaaagtactactacacgggagataaggcgttcttcgacgagaaggggtactggtggtttgttggcagggctgatgatgtcataaaaacttctgattaccgtgtcggaccatttgaggttgagagcgcccttattgagcaccctgcagttgctgaggctgctgttgttggaagcccgcatcccataaggtatcagctcgtcaaggccttcgtcatacttgctccgggctacgagccatcaagggagcttgctcttgagctgttcatgcactgcaagaatattcttgcgaggtacaagatacccaggataatcgagtttgttcccgagctgcccaagaccatcagcggtaaaataaggagagttgagctgaggcagattgaggaggagaagaggaagaagggagagaagggggagcacgagtacttctacgacgacttccctgaactcaagtcttcctaa

SEQ ID NO: 748 - protein, 586 aa, Archaeoglobus fulgidus
MKMEEIYREFIELTKLPDNETKEKAMEEFFRKLNTMQLPEYFNWAEEIFEGVHVKDRGNQKALIWSNIETGEKKEYTYEQFAAEGNRIVNFLRGHGVEKGDSFYMMIPLLPPIWFATFATVKGGFIGVPTATTMTVRDLEYRFKVYPPVAIMADEASAKTIDEALSNVGAEPKVKIVIGDRSGWESYDSLSKESSEAEAAKTKWDDIIFSFFTSGTTGLPKRVAHTATSYPVGHLMTACIINVQPGDIHHNLSAPGWAKYAWSSFFAPLNVGATATGFYYTRLNGDLYLQAVSEFKVNTFCAPPTAWRLFMFADIGKYDYSALRDVVSAGEPLNPELYEQWKKYTDTEIRDFYGQTESTAMIGNPPWFKGGKIIPGSFGRPTFMYDVTLVDDEGNEITKPNEVGHIVVRLDRWRPIGLFKEYMGDPEKTAKVFVGKYYYTGDKAFFDEKGYWWFVGRADDVIKTSDYRVGPFEVESALIEHPAVAEAAVVGSPHPIRYQLVKAFVILAPGYEPSRELALELFMHCKNILARYKIPRIIEFVPELPKTISGKIRRVELRQIEEEKRKKGEKGEHEYFYDDFPELKSS

SEQ ID NO: 749 - DNA, 1983 bp, Aeropyrum pernix
  CDS (1)..(1983)
atgcaggagggtttggaaaagaagatatggtatccgccccgcgatatagtggaccagagtaatgtaaagcttttcatggataagcacggtttcaagagctatgaggagcttgtcaggaggagcagtgaggacctcaaatggttctggggtaacctgcctgaatggctcggggtagagtggttcagagagcctaaagccgtggtggacctgagcagaggtgtggagtgggcccagtggtaccggggaggcctcctcaacgcggcgtacaacgtcgtagaccgtatagtcaagatggggtacgggcatagggaggccttcacttgggtaggcgaggatggggaggttaggaggtacacgtacctacagctgaaggacgaggttgacaggatggccaagctcctctcccaggactatgggctgggagtcggcgatgtggttgcgatctacgcccccatgatgcctgagagcatagcggccatgcttgcggccatgaaggttggggctgtggcttcaccgatattctccggcttcgccccgccagccgttgctgagaggctcaagctgggggaggcgagggtgctcgttaccgtagacgggtatctgaggagggggaggaggatagccctaaaggagcaggccgaccaggccgtgaagcttgcgggcggggcggtcgagcacgtcattgtggtcaggaggctcgggatagacgtcccatgggttgagggcagggatgagtggtatgacagggccatagcgggtaaggctggctctgcggagcccgaggagctagacccggagcatccagccctcctcctcttcacaagcggcacaaccgggaggcccaagggcgctgtgataagccatgcaggcgccatactccagcccgggaaggagcactacttcaacctcgacatacacccagcctggaggggcggggaggacaggctatggtggataactgatataggctggatgatggggccatggcaggtcctcggctcccagctcctgggcgccagccaccttatggcggagggggccatagactatccttataagtcgagggtttggaggctaatacaggagcacagggtaacccacttcggctttgcggcaacagtggccaggatgctcagggcagtggcgagcgacacggtggaggattacgacctatcaagcattagggccttcggaaacacgggggagcctatagaccatgccacctggatgtgggtcatggagaagttgggaggctggaggaggcccctgataaatctcagcggcgggacagaggtgttcggctgcatactcctcccgagccccgttgtccccctcaagccgacgaccctctgggggcccgctctgggtgttgatgctgacgttttcgacgatgagggtaggcctgtgaggggcgagccgggatacttggttgttaagaagcccttccccagcatgaccagggggctgtggaaagaccctgagaggtatataaagacgtactggtcccgcttcccgggtgtatggtaccacggcgactacgccctagtcgacgaggacgggttctggtacatactggggagggcggacgacgtgataaaagtggcggggaagaggattggcagcgccgagcttgagagcgtgctcacacagctacccgaagtggcggaggcggcatgcataggggtgccccacccgataaagggcgaggtcatagcctgcttcctggtgcccaagggcggttatgacgcggaggagctggcctcgaaggccaggaaggccgtggtggataggttcggcaagcccttcgccccggagcacgtggttatagtgagcgagctcccaaagacgaggagcggcaagataactaggagggtgctcagggatctagcccgcggtgtggagccgaaggagctgagtgttctggagaatcctgaggccgtcgaaaagcttagggacattataaagaggataggagggggctag

SEQ ID NO: 750 - protein, 660 aa, Aeropyrum pernix
MQEGLEKKIWYPPRDIVDQSNVKLFMDKHGFKSYEELVRRSSEDLKWFWGNLPEWLGVEWFREPKAVVDLSRGVEWAQWYRGGLLNAAYNVVDRIVKMGYGHREAFTWVGEDGEVRRYTYLQLKDEVDRMAKLLSQDYGLGVGDVVAIYAPMMPESIAAMLAAMKVGAVASPIFSGFAPPAVAERLKLGEARVLVTVDGYLRRGRRIALKEQADQAVKLAGGAVEHVIVVRRLGIDVPWVEGRDEWYDRAIAGKAGSAEPEELDPEHPALLLFTSGTTGRPKGAVISHAGAILQPGKEHYFNLDIHPAWRGGEDRLWWITDIGWMMGPWQVLGSQLLGASHLMAEGAIDYPYKSRVWRLIQEHRVTHFGFAATVARMLRAVASDTVEDYDLSSIRAFGNTGEPIDHATWMWVMEKLGGWRRPLINLSGGTEVFGCILLPSPVVPLKPTTLWGPALGVDADVFDDEGRPVRGEPGYLVVKKPFPSMTRGLWKDPERYIKTYWSRFPGVWYHGDYALVDEDGFWYILGRADDVIKVAGKRIGSAELESVLTQLPEVAEAACIGVPHPIKGEVIACFLVPKGGYDAEELASKARKAVVDRFGKPFAPEHVVIVSELPKTRSGKITRRVLRDLARGVEPKELSVLENPEAVEKLRDIIKRIGGG

SEQ ID NO: 751 - DNA, 1677 bp, Methanobacterium thermoautotrophicum
  CDS (1)..(1677)
atgtcaaaggatacctcagttctcctggaagagaaaagggtcttcaaaccccactacaccgttgtggaggaggcccacataaaaaactgggaggccgagctcgaaaagggaaaggaccatgagaactactgggccgaaaaggctgaaagattcgaatggttcagaaaatgggacagggtccttgatgagagcaacagaccattctacaggtggttcgtcaacggtaagatcaacatgacctacaacgccgttgacaggtggcttgacacagacaagagaaaccaggtcgccattctatacgtgaacgagaggggggatgaaaggaagttaacctactatgaactgtaccgtgaggttaacaggaccgctaatgccctcaaaagtcttggaatcaaaaagggcgatgcagttgccctctaccttccaatgtgccccgaacttgtaatctcaatgcttgcctgtgcaaagataggtgctgtccacagtgtcatatactccggtctcagtgtgggggccctggtggaacgcctgaacgatgcaagggcaaagatcataataacagccgacggtacctacagaaggggcggggttataaagctcaaacccatagtggacgaggccatactccagtgccccaccatagaaaccacagtggttgtaaagcacacagacatcgacattgagatgtcggatataagtggacgtgaaatgctcttcgataagctcatagagggtgaaggggaccggtgcgatgcagaggagatggatgcagaggaccccctcttcatactctacacttcggggagcaccggaaaaccaaagggtgttctacacacaacaggaggatacatggtgggggttgcatcaaccctcgagatgacctttgacatccacaacggagacctctggtggtgcacagcagacatcgggtggataacaggtcacagctatgttgtctatggcccgctgctacttggaaccacaacactcctctatgagggggcacctgattaccctgaccccggtgtgtggtggagtatcgttgagaaatacggtgtcaccaagttctacacggcaccaaccgcaataaggcacctcatgaggttcggtgacaagcacccaaaacgctacaaccttgaatccctcaagatacttggtacggtcggtgaacccataaaccctgaggcatggatgtggtactacaggaacattggaagggagaagtgcccgataattgacacctggtggcagaccgagacagggatgcacctcatagcacccctacctgtgacaccccttaaaccgggttcagtgacaaagcccctcccgggcatagaggccgacgtggttgacgagaatggcgaccccgtgcccctgggtaagggtggttttcttgtgatcagaaagccatggccagccatgttcaggaccctcttcaacgacgagcagaggtacatcgatgtttactggaagcagatccccggcggagtgtacaccgcaggtgacatggccaggaaggacgaggacggatacttctggatccagggaagatccgatgacgtcctgaacatagcagggcacaggataggtactgcagaggttgaatcagtctttgtcgcacaccctgcagttgcagaagccgcggttataggcaaggcctaccccatcaaggggtag

SEQ ID NO: 752 - protein, 558 aa, Methanobacterium thermoautotrophicum
MSKDTSVLLEEKRVFKPHYTVVEEAHIKNWEAELEKGKDHENYWAEKAERFEWFRKWDRVLDESNRPFYRWFVNGKINMTYNAVDRWLDTDKRNQVAILYVNERGDERKLTYYELYREVNRTANALKSLGIKKGDAVALYLPMCPELVISMLACAKIGAVHSVIYSGLSVGALVERLNDARAKIIITADGTYRRGGVIKLKPIVDEAILQCPTIETTVVVKHTDIDIEMSDISGREMLFDKLIEGEGDRCDAEEMDAEDPLFILYTSGSTGKPKGVLHTTGGYMVGVASTLEMTFDIHNGDLWWCTADIGWITGHSYVVYGPLLLGTTTLLYEGAPDYPDPGVWWSIVEKYGVTKFYTAPTAIRHLMRFGDKHPKRYNLESLKILGTVGEPINPEAWMWYYRNIGREKCPIIDTWWQTETGMHLIAPLPVTPLKPGSVTKPLPGIEADVVDENGDPVPLGKGGFLVIRKPWPAMFRTLFNDEQRYIDVYWKQIPGGVYTAGDMARKDEDGYFWIQGRSDDVLNIAGHRIGTAEVESVFVAHPAVAEAAVIGKAYPIKG

SEQ ID NO: 753 - DNA, 1929 bp, Archaeoglobus fulgidus
  CDS (1)..(1929)
atgagaaaaatgggctttatctggcatccgccaaaagaattggttgaggagtccaacgtcaaggccttcatggatgctgagggcttttccgactacaagcagatggttgagaagtccactgacgacatagagtggtggtggagcaaggctgttgagtggctcaatgtggagtggttcaagccctacgagaaggtctacgacatgtcgaagggcatagagtggactgactggttcgtgaacggcagagtaaacgccgcttacaacgccttggacaggcacagaaagaagaggaacaagttagcgttcatctggcagggagaggatggagaagtgaggagatacacctacctcgagctttacagggaagtgaacaggctcgccaacgccctcaaggcctttggagttgggaagggggacgttgtggccctctacctcccaatgtttcctgaaactgtcgttactctctttgctgccatgaagattggcgccattgcgatgccgatattctcgggctatagctctgcagccattcagacgaggcttgctgattcagatgcgaaggttgttgttacagcagatgcaagctacagaagagggagggctgtgccactcaagcccgaactcgacaaggcccttgaggggacgaaggttgagaaggttgttgtggtgaacagggcggacaccgaagttgagatgaaggaggatagggacgtttactgggatgaggttaaggagagcagcaggtgtgagacggttgagatggaccccaacgatgctgctttgctgctctacacctcaggcacaaccggaaagccgaaaggggttgttttatcccatgcgggagtgattttgcagagcagcaaggagattttcttcaacatggatttgaagcctgaagacgtttttctttggatcaccgacattggctggatgatggggccttggcagattattggctgccagcatctcggcgggactcacgttctctttgagggagcccccgactatcccaacaccgacaggatatgggcgatgattgaggagtttgaaattacgcagcttggtggttcagcgacggtttacagattgctgaagagatacggagatgaggcggtaaagcagcacgacctgagcagtttaaaggctacgggcaacaccggagagccgatagaccacgacacgtggatgtggctgctgaaggtcgttggcgaggagaggtgcccgatcataaacctctcaggaggaaccgagatcttcggctgctttttgcttccctctcccgcaatgcccctcaagccgacaaccttgggctatcccggattggggatggacgtggatgtgtttgatgacgctggaaactctgtgaggcagcagattggatatctggtttgcaagaagccagccccatcaatgacaagaggcttctggaaagaccctgagaggtacatcaagacctactggagcaggtggaagggagtctggtaccacggagactgggcttatgttgacgaggatggtttctggttcctcttcggcagggccgatgacgtcataaaggttgcaggaaagagaatgggacctgcagagattgagaccatcgtgaactccattcctgctgtccaggagtccgcatgcattggagttccgcatgagcttaagggagaggttgtttgggtttttgtgactctaaagcccggctatgagccgagtgaggagctggagaaggaaatcgttgacaaaattgtgaaggagttcggaaagcccttcaagccggacagggttgtgtttgtccccgatctgccgagaacgaggagcgggaagattatgaggaggctgataaaggctgttgttgccaagcaggagcttggcgacacctcagctctggaaaatccggactcgctggagaagataaaggaggttttggggtga

SEQ ID NO: 754 - protein, 642 aa, Archaeoglobus fulgidus
MRKMGFIWHPPKELVEESNVKAFMDAEGFSDYKQMVEKSTDDIEWWWSKAVEWLNVEWFKPYEKVYDMSKGIEWTDWFVNGRVNAAYNALDRHRKKRNKLAFIWQGEDGEVRRYTYLELYREVNRLANALKAFGVGKGDVVALYLPMFPETVVTLFAAMKIGAIAMPIFSGYSSAAIQTRLADSDAKVVVTADASYRRGRAVPLKPELDKALEGTKVEKVVVVNRADTEVEMKEDRDVYWDEVKESSRCETVEMDPNDAALLLYTSGTTGKPKGVVLSHAGVILQSSKEIFFNMDLKPEDVFLWITDIGWMMGPWQIIGCQHLGGTHVLFEGAPDYPNTDRIWAMIEEFEITQLGGSATVYRLLKRYGDEAVKQHDLSSLKATGNTGEPIDHDTWMWLLKVVGEERCPIINLSGGTEIFGCFLLPSPAMPLKPTTLGYPGLGMDVDVFDDAGNSVRQQIGYLVCKKPAPSMTRGFWKDPERYIKTYWSRWKGVWYHGDWAYVDEDGFWFLFGRADDVIKVAGKRMGPAEIETIVNSIPAVQESACIGVPHELKGEVVWVFVTLKPGYEPSEELEKEIVDKIVKEFGKPFKPDRVVFVPDLPRTRSGKIMRRLIKAVVAKQELGDTSALENPDSLEKIKEVLG

SEQ ID NO: 755 - DNA, 1974 bp, Campylobacter jejuni
  CDS (1)..(1974)
atgcttaatcaaaataatcaagagctttttaagccaagtaaagaattttctcgtaatgctcgtataaaaaatttatgtgaatactatgatttatgcgatgaagccaaggaagattttgaaggtttttggaaaagacaagcatttgagaagattgagtggttttcgcctttttcaagagtgctaaatgaggataaagctccattttataaatggtttgaaggtggaactttaaatgtaagttatcaatgtcttgatcgtcatatgaaaacaagacgcaataaagctgctttgatttttgaaggtgaaatgggggattatgaagtttatacttatagaagattattgcatgaaacttgcaaggcggccaatttgcttaaaaaattcggagtaaaaaaaggcgatagggttgtaatttatatgcctatgattccagaaacagctatagtaatgttagcttgtgcaaggattggggctattcatagtgtagtatttggagggttttctcctgaagccttaagagatagaattatagatgcaggagctaaacttgtagtaacggctgatggtgcttttcgtcgtggcaaaccttatatgttaaaacctgcagtagataaggctttaagtgaagggtgtgaaagtgtagaaaaagtacttatagttatacgcaataatgagcctatagaatatattaaaggaagggactatgtttataacgaacttgtgaaaaatgagtcttataagtgtgaacccgaaattatggatagtgaggatttgttgtttttgctttacacttcaggatcaacgggcaagccaaaaggagttatgcatgcaagtgcaggatatatactttgggcacaaatgactatggaatgggtttttgatattaaagattatgataattattggtgtagtgctgatgtgggttggattacaggacatacttatgtagtttatgggcctttagcatgtggggcaacgactataatgcatgaaggaactcctacttatccaaattctgggcgttggtggagaatgatagaagagtatcaaataagcaaattctacacttcgccaactgccataagaatgcttcatgctgatgcacctaatgagccaagaaaatatgatttaagtacgcttgaagtgcttggaacggttggagagcctatcaatcctagtgcttggaagtggttttatgatgaaatagggggaactaaaagtcctatagtcgatacttggtggcaaacagaaacaggtgggcatatgatcacgcctttaccaggcgccactcctttaaaaccaggttgtgccaccttgcctttgccagggatttttgcggaagttattgatgaagaaggcaataaaaaagatgaaggtgaagatgggttgctttgtataactaaaccttggccttcgatgattcgtggaatttggggcaatgatgaacgctatatagaaagttatttttctcaagctaaaaaagatggaaaagctgtatattttagtggcgatggtgctttttatgataaaaatggttatattaccatcacaggaagaacagatgatgtggttaatgttgcaggacatcgtataggaacggctgaaattgaaagcgctattgctaaacatccaagtgtagcagaatcagctgtagtgagtattttggatacgattaagggcgagtcattgtttgcttttgtggttttaagtcctgcatccagttgtgatcttggcggagctatagaaactttaaaagaacttaatgacattttaagagtagaaataggacctatagctaaaatagaaaaaattctttatactccaggtttgccaaaaactagaagtggtaaaataatgagaagaattttaagaactatagcaagaggcgaagaaatcaaacaggatatttcaacacttgaagattctaaagtagtagaaaccattgttaaattagctaaggcagagtttgaataa

SEQ ID NO: 756 - protein, 657 aa, Campylobacter jejuni [sequence omitted]

SEQ ID NO: 757 - DNA, 1956 bp, Pseudomonas aeruginosa
  CDS (1)..(1956)
atgcccgcaccgctctggagcccttccgccgaacgcatcgccgccagtcgcatggaggccttccgacgcttcgtcaaccagcggcacgccctcggcctggtcgactacccggcgctgcatgcctggagcgtgcagcggcgcgaggcattctggcaggccatcgtcgacttcttcgaggtgcgcttccagcaaccgccgcgtgcggtcctcgaggaaggcgcgcagatgccctcggcgcgctggttccccggcgccacgctgaatttcgccgaacacctgctgcgccgccgcgatgatgccccggcgctgatcgcggtgagcgaagacggtcgccgcgaggtgctcagccacgccgaactggcccgtcacgtggcgggcctgcagaagcgcctcgccgccctgggcataggccccggcgaccgggtcgccgcgctgatgccgaacacctggcagaccgtggtcggcatgctcgccaccgccagcctcggcgcgacctggtcgagctgctcgccggacttcggtacccagggcgtgatcgaccgcttcggccagatcgaaccgcgcgtgctgatcgcctgtgccggctaccgctacgccggcaagtcgctggacctgaccgccaagctcaacgaggtgctcgccggcctgcccggcctggagcaactgctggtggtgccctacgaccgtccgcaggcgcagccgcaggactaccgctgccaggcgcaggtcgcgctgtgggacgggttctaccaggccgagggcgagccggtcttcaccccggtgcccttcgagcagccgctgtacatcctctattcgtcgggcaccaccggagtccccaagtgcatcgtccatgccaccggcggcgtgctcctgcaacatctcaaggagcacggcctgcacaccgacctgggcgacggcgaccggctgttctactacaccacctgcggctggatgatgtggaactggctggcctccggtctggcggtgggcgccagcctggtgctctacgacggctcgccgttccaccccggccccgagcgcctgctggacctcatcgacgccgaggacatcgccgtgttcggcgccagcgccaagtacctggcggcgctcgagaaggccggcatgcgcccgcgccacagccaccgcctggacagcctgaggacactgctctccaccggttcgccgctggcccacgaaagcttcgactacgtctaccgcgagctgaagagcgacctctgcctgtcgtcgatctccggcggcaccgacatcgtttcctgcttcgccatcggcaacccggtgctgccggtgtggcgcggcgaactgcaatgcaaggcgctgggcatggccgtggaaatctgggacgacgacggccgccgcctcgccagcggcaagggcgagctggtctgcacccggcatttcccgtcgatcccgctgggcttctggaacgacccggatggcaccaggttccacgacgcctacttcgccagctttcccggcgtctgggcccatggcgactacgccgaggaaaccgtccacggcgggctggtcatccacggccgctccgacgcggtgctcaatcccggcggcgtgcgcatcggcaccgcggaaatctaccgccaggtggaaaaggtcgaggaagtcctcgagtccatcgccatcggccaggactggcagggcgatgtgcgtgtgctgctgttcgtccgcctgcgcgacggcgtgcgactcgacgagccgctgcgcgaacgcatccgccagaccatccgcgccaacgccacgccgcgccacgtaccggcgaagatcatccaggtcgccgatatcccgcgcaccctgagcggcaagatcgtcgagcttgcggtgcgcaacgtgatccacggccgcccggtgaagaacaccgacgccctggccaacccgcaggcgctggagctttatcgcgacctcgccgaactgcgcgactga

SEQ ID NO: 758 - protein, 651 aa, Pseudomonas aeruginosa
MPAPLWSPSAERIAASRMEAFRRFVNQRHALGLVDYPALHAWSVQRREAFWQAIVDFFEVRFQQPPRAVLEEGAQMPSARWFPGATLNFAEHLLRRRDDAPALIAVSEDGRREVLSHAELARHVAGLQKRLAALGIGPGDRVAALMPNTWQTVVGMLATASLGATWSSCSPDFGTQGVIDRFGQIEPRVLIACAGYRYAGKSLDLTAKLNEVLAGLPGLEQLLVVPYDRPQAQPQDYRCQAQVALWDGFYQAEGEPVFTPVPFEQPLYILYSSGTTGVPKCIVHATGGVLLQHLKEHGLHTDLGDGDRLFYYTTCGWMMWNWLASGLAVGASLVLYDGSPFHPGPERLLDLIDAEDIAVFGASAKYLAALEKAGMRPRHSHRLDSLRTLLSTGSPLAHESFDYVYRELKSDLCLSSISGGTDIVSCFAIGNPVLPVWRGELQCKALGMAVEIWDDDGRRLASGKGELVCTRHFPSIPLGFWNDPDGTRFHDAYFASFPGVWAHGDYAEETVHGGLVIHGRSDAVLNPGGVRIGTAEIYRQVEKVEEVLESIAIGQDWQGDVRVLLFVRLRDGVRLDEPLRERIRQTIRANATPRHVPAKIIQVADIPRTLSGKIVELAVRNVIHGRPVKNTDALANPQALELYRDLAELRD

SEQ ID NO: 759 - DNA, 1887 bp, Pseudomonas aeruginosa
  CDS (1)..(1887)
atgacgtacctgcagcagcacgcccgctcgatcgccgagccggccgcgttctgggccgaacaggcccgttccctggcctggtaccaggcgcccgcgaacatcctcgaaagcctgcccgacggcacccatcgctggttcgccgatggccgtctgaacagcgcctacctggccctcgaccggcagatcgaggaggggcgcggcgaacagaccgcgctgatctacgactcgccggtgaccggcacccaggaccgctacagctacctgcggctgcgcgacgaagtggcgcgcctggccggtgccctgcgggccctcggggtcggcaagggcgaccgggtgatcatctacatgccgatggtgccgcaggcggccatggcgatgctcgcctgcgcgcgcctgggcgcggtgcattcggtggtgttcggtggcttcgctccctacgagctggccctgcgcatcgacgacgccacgccgaagctggtgctcaccgcttcctgcgggctggagttcgatcgggtgatcgaatacaagccgctggtggacaaggccctcgaactggcgatccaccagcctgcccacgtcatggtctggcaacgcccgcaggcgcccgcgcgcctgcacccgggccgcgacctggactggcaggactgcctcgccgccgccgagccggccgatccgctgccggtggccagcggcgatccgctgtacatcatgtacacctcgggcaccaccggtaagcccaagggtatcgtccgcgacaacggtggccacgcggtcgcggtgcgctacgcggtccgcactatctacggcatgcaggccggcgacgtctggtgggggatctccgacgtcggctgggtggtcggccactcgctgatcgtctacggcccgctgatgtgcggctgtaccacggtgttctacgaaggcaagccggtgcgcacgccggacgccggcgcctactggcgggtgatcgaagagcacagggtgaacagcctgttctgcgcgccgacggcgatccgcgcgatccgcaaggaagacccgcatggcgaacgggtgaagcgctacgacctgggttcgctgcgccacctgttcctggccggcgagaagctcgacagcagcacccagcactggctggaggagcacaccgggcggccggtccacgaccattggtggcagaccgagaccggctggccggtgaccgcgccctgcatcgggatcgccggccacgacctgcgggccggctcgaccaaccgcgcggtgcccggctaccacgtgcaggtgctggacgacgaaggccggccgctgggagcgaaccgccagggcgcgatcgtcatcgccctgccgttgccgccgggctgcgcgcagaccctctggggcgaccacccgcgctacctgcaggcctacctgggcaactatcccggctactaccacaccggcgacggcggttatctcgacgaggacggcttcgtctacatcatggggcgcaccgacgacgtgataaacgtttccgggcatcgcctctccaccggcgagatggaggaacgcgtggcgcagcaccaggcggttgccgagtgcgcggtgatcggcgtgcgggacgaactcaagggccacgtgccgctgggcctggtggtgctcaaggacgatgccgggatcgccgccgagcaactgcagcgcgagctggtggcgctggtccgcgaacagatcggcgcgctggcctgcttccagcgggtggtggtggtcaagcggctgccgaagacccgctccgggaagatcctccgcgcggtgctgcgcaagatcgccgatggcgaggactacgcggcgccatcgaccatcgacgacccgacgatccttggcgagatcgaggctgcgctgagggtgcgcaaggcgggatag

SEQ ID NO: 760 - protein, 628 aa, Pseudomonas aeruginosa [sequence omitted]

SEQ ID NO: 761 - DNA, 1971 bp, Halobacterium sp. NRC-1
  CDS (1)..(1971)
atggattcactcgacggagtcggcacggtcgtccacgaaccggaccctgcgctcgcgtcgtcgacgaacgtcgcccagttcatgaccgcccacgacatcgacgacgtggacgcgctccgcgagcgcagcaccactgatctcgactggttctggggggaactcccggagtatctcggcctggagttcttcgaagactacgacgccgtccgcgacgacgccgacgacccccagtccacggcgtggtatccgggcgccgaactgaacgtcgcgcacaacaccgtcgaccgccacgccagcgtcgacgccggcacccgcaaccacgtcgcctgcatctgggagggcgaggacggcacggtccgccaacagacctaccacgacctccaccagcaggccaaccgggtggccaacgcccttgctgagcgcggcatcggcgagggcgacacggtgggcctctacatgccgatggtcccggaagtccagagcatcctctacggcatcttcaagatcggcgcgatcgccgtccccatcttctccgggttcggcgtcgaggccaccgccacgcgcatcgccgacgccgagtgttcggtggtgttcacgggcgacggcttcctgcggcggggcgaccgcgtcacgctcatggacaccctcaacgacgccatcgagcgggccggccacgtcgaccacaccatcgtctacgaccgcctcggcatccccgcggactcgctgtcctggacgccccgcgacgagtggtgggacgacgccgtggccacccagtccccgacgttcgagacgcactcgatggccgccagcgatccgtgcatgctgttgtactcctcggggacgacgggaacaccgaaaggcatcgtccacacccacgccggcgcgctcgtccaacccgccaaggagatccacttcgggttcgaccagcggcccggcgaccggttctgctgggtgagcgacatcggctggatgatggggccgtggtcgctcatcgggaaccacgcgttcgccggcaccatcgtgatgtacgagggcgcccccgaccaccccgcccccgaccgcttctggcagctcatcgaggaccacggcatcacccagttcggcgtctccccgacggcgatccgtgcactgcgcgaccacggcgacgagcacgtcgccggccacgatctctcctcgctgcgcatcctggggtcgacgggcgagccctgggaccccgagtcctggcggtggttttacgaccacgtcggcggcggtgacaccccgatcatcaacatctccggcggcacggaagtgttcggctgcttcctcatgccgctgccgacggagtcgctgaaaccctgcacgctcggcggccccgggctcggcatggacatcgacatcgtcgacgacgacggcacctccgttcgggacgccaacgagcgcggctacctcgtcgcgcggtcgtccagcccgtcgatgacgcggcgcctctggagcggcgaggaccgctacctggaggcgtactggtcgcgcttcgaggacgtctggaaccacggcgactgggcgcagatggacgccgacggcgactggttcctccacgggcgcgccgacgacgccatcaacgtcgccggccgcaaagtcggcccggcggaggtcgagggcgcgctcatcgaccacgacgccgtcacacaggcggccgtcgtcggagtgcccgacgacaccaccggtgaggccgccatcgcgtacgtcatcctcgccgacgccgccaccccgagcgcggagctgcgcgcggaactgcgcgaccacgtcggcgacgcccacggcaaaccgttccggccccgggaggtggtgttcgtcgacgacctgccgaaaacccagtccgggaagctcgtgcgccgcgccgtcgccagcgcgtacaccggggcggacgtcacggaccgctccagcatcgagaaccctgcggtgctggacgcgctccgggacgcgacctag

SEQ ID NO: 762 - protein, 656 aa, Halobacterium sp. NRC-1
MDSLDGVGTVVHEPDPALASSTNVAQFMTAHDIDDVDALRERSTTDLDWFWGELPEYLGLEFFEDYDAVRDDADDPQSTAWYPGAELNVAHNTVDRHASVDAGTRNHVACIWEGEDGTVRQQTYHDLHQQANRVANALAERGIGEGDTVGLYMPMVPEVQSILYGIFKIGAIAVPIFSGFGVEATATRIADAECSVVFTGDGFLRRGDRVTLMDTLNDAIERAGHVDHTIVYDRLGIPADSLSWTPRDEWWDDAVATQSPTFETHSMAASDPCMLLYSSGTTGTPKGIVHTHAGALVQPAKEIHFGFDQRPGDRFCWVSDIGWMMGPWSLIGNHAFAGTIVMYEGAPDHPAPDRFWQLIEDHGITQFGVSPTAIRALRDHGDEHVAGHDLSSLRILGSTGEPWDPESWRWFYDHVGGGDTPIINISGGTEVFGCFLMPLPTESLKPCTLGGPGLGMDIDIVDDDGTSVRDANERGYLVARSSSPSMTRRLWSGEDRYLEAYWSRFEDVWNHGDWAQMDADGDWFLHGRADDAINVAGRKVGPAEVEGALIDHDAVTQAAVVGVPDDTTGEAAIAYVILADAATPSAELRAELRDHVGDAHGKPFRPREVVFVDDLPKTQSGKLVRRAVASAYTGADVTDRSSIENPAVLDALRDAT

SEQ ID NO: 763 - DNA, 1719 bp, Bacillus subtilis
  CDS (1)..(1719)
atgaacttgaaagcgttaccagcaatagagggggatcataacttaaaaaactatgaagaaacgtaccggcattttgattgggccgaggcagagaaacatttctcttggcatgagacagggaaactgaatgcggcgtatgaagcgattgaccgccatgccgaatcgtttcgaaaaaacaaagtagcgctttattataaagacgcaaaaagggatgaaaaatacacatttaaagaaatgaaggaagaatcaaacagagccgggaatgtgctgagacggtatggaaatgtggaaaaaggggaccgcgtttttatttttatgccgagatcacccgagctttattttattatgcttggcgcaatcaaaattggcgccatcgccgggccgctgttcgaagcatttatggagggagcggtgaaagaccggcttgaaaacagtgaggcaaaggttgttgtcacaacgcctgagctgctggagagaataccggtagacaaactgcctcacttgcagcatgtcttcgtagtcgggggagaggctgagagcggcacgaatatcatcaattatgatgaagcagcgaaacaggaaagcacaagattggatatcgaatggatggataaaaaagacggctttctgcttcactatacatcaggttccactggtacgccaaagggcgtgttgcatgtccatgaagcgatgattcagcaatatcaaacaggaaagtgggtccttgatttaaaggaagaagacatttattggtgcacggctgatccaggctgggtgacaggtacggtatacggcatttttgcaccgtggctgaacggagcgacaaatgtcatcgtcggcggacgtttcagcccggaaagctggtatggaacgattgaacagcttggcgtcaatgtctggtacagcgcgccgacagcttttcggatgctgatgggagcgggagatgaaatggctgcgaaatatgatctaacttcactccggcatgtgctcagtgtcggtgagccgctaaatccggaagtcatcagatggggacataaagtttttaacaaacgaatccatgatacctggtggatgaccgaaacgggcagtcagctcatctgcaactatccttgcatggatattaaaccgggttcaatgggtaagccgattccaggagtggaggcagcgatcgttgacaatcaaggcaacgagctaccgccgtaccgaatgggcaatctcgccatcaaaaagggctggccttccatgatgcataccatttggaataaccctgaaaagtatgaatcgtatttcatgccgggcggctggtatgtgtctggggattctgcttacatggatgaagagggatacttttggttccaaggcagagttgatgacgtcatcatgacctccggtgagcgcgtcggcccatttgaagtggaaagcaagcttgtcgaacatccggctattgcagaagcaggcgttatcggaaagcctgacccggtgcgtggagaaatcattaaagcctttattgcactcagggaaggatttgagccgtctgataaactgaaagaagagatccgcctatttgtaaagcagggtcttgcagcccatgcggctccgcgtgagatcgaatttaaagataagcttccgaaaaccagaagcggaaagatcatgaggcgcgtgctgaaggcatgggagcttaatctgccggctggagatctgtcaacaatggaggattaa

SEQ ID NO: 764 - protein, 572 aa, Bacillus subtilis
MNLKALPAIEGDHNLKNYEETYRHFDWAEAEKHFSWHETGKLNAAYEAIDRHAESFRKNKVALYYKDAKRDEKYTFKEMKEESNRAGNVLRRYGNVEKGDRVFIFMPRSPELYFIMLGAIKIGAIAGPLFEAFMEGAVKDRLENSEAKVVVTTPELLERIPVDKLPHLQHVFVVGGEAESGTNIINYDEAAKQESTRLDIEWMDKKDGFLLHYTSGSTGTPKGVLHVHEAMIQQYQTGKWVLDLKEEDIYWCTADPGWVTGTVYGIFAPWLNGATNVIVGGRFSPESWYGTIEQLGVNVWYSAPTAFRMLMGAGDEMAAKYDLTSLRHVLSVGEPLNPEVIRWGHKVFNKRIHDTWWMTETGSQLICNYPCMDIKPGSMGKPIPGVEAAIVDNQGNELPPYRMGNLAIKKGWPSMMHTIWNNPEKYESYFMPGGWYVSGDSAYMDEEGYFWFQGRVDDVIMTSGERVGPFEVESKLVEHPAIAEAGVIGKPDPVRGEIIKAFIALREGFEPSDKLKEEIRLFVKQGLAAHAAPREIEFKDKLPKTRSGKIMRRVLKAWELNLPAGDLSTMED

SEQ ID NO: 765 - DNA, 2019 bp, Phycomyces blakesleeanus
  CDS (1)..(2019)
atgctcgataaaaccaccattgacggacaggaggatattgtcacccacccagtccccaagcgcctcctcaactcagcagaatgccctacacctcatgtcaactctcttgaacagtacaagtcaatgtggaaagagagtgtcgaacaacccgagaagttctttggaaatcttggtcgtgagcttttgtcctggagcaagcctttcgagactgtccagtatggttcctttgaggctggagatgtagcctggttcttggagggtgaacttaacgcatcgtacaactgtgttgatcgtcacgctttcaagaaccccgataagattgccatcatccatgaaggcgatgaacccgatcaggtccgccgtatcacttatggtgagcttcttagagaggtctgtcgcatggccaacgtcctcaagggcctcggtgtacgcaagggtgatcccgttgctatctacatgcccatgattcccgagaccattgtcgccatcttggcatgtgcccgtattggtgctatccactctgttgtctttgctggtttttctgccgagatcctccgtgatcgtgttgtcgactgtgctacccgtgtcgtactgacttccgatgaaggcagacgtggtggaaagaacattgccaccaagtgcatcgttgacgaggctctccgtgactacgagaatcactctgtcgaacatgtcctcgtcttccgtcgcaccggatccccagttccctgggttcaaggacgcgatgtctggtggcatgaggagatggccaaggcacgtactttctgctctcctgagcccatgagtgctgaagatcctctctttttgctctacacttctggatccactggtacccccaagggtattttgcacaccactggtggctatcttttgggtgttgctgccacagtcaagtacatctttgattaccaggagaatgatatctacgcttgcatggctgatattggatgggttactggacattcttacattgtttatggtcctctcactcttggtgctaccacagttctattcgaatctaccccaacataccccaacccctctcgcttctggcaactgatcgagaagcataagattacccagttctacaccgcacctacagctattcgtgctctgcagcgtcttggagaccagtggctggataacattgatatgtcaagcctgcgtgtacttggctctgtaggtgaacctattaaccgtgaagcctgggattggtacaacgagaaggttggtaagggtagatgtgctgttgtagatacctactggcaaaccgagactggttccatcattgtcagtcctcttcccggagctactcccacaaagcctggatctgccactcttcccttctttggtattgaccccgtattgcttgatcctactaccggcaaggagttgactgccaccggccaaaccggtgttcttgccatccgcaagcctaggccctcaatggctcgctctgtctacaacaaccacagccgttttgttgagacttatctcaagccctaccccggttactatttcacaggtgatggtgctctccgtgatgatgatggttatatctggattcgtggacgtgttgatgatgttatcaatgtttctggtcaccgtctctccacctctgagatcgaatctgctctcgttaaccatgaggctgttgccgagtctgctgttgttggtgcccatgatgatttgaccggccaatgtatccatgctttcgtttctctgaagccccatattcagatcgctgatggactcgaaaaggttctgactttgcaagttcgcaagactattggtccctttgctgcccctcgtcgcatctacattgtcagtgaccaccccaagactcgttctggaaagatcatgcgccgtattcttagaaagatcgttaacggagagcacgaccaactcggtgatatctctaccctggctgatccttcgattgttgctgtattgatcaacaaggttcaacggttaaacacagaagcaaatatatatatataa

SEQ ID NO: 766 - protein, 672 aa, Phycomyces blakesleeanus [sequence omitted]

SEQ ID NO: 767 - DNA, 2674 bp, Drosophila melanogaster
  CDS (419)..(2164)
cgtccaagcttttcacctccttaataaataagtggtattgcactgctctgttccaagtcagacccacaagggaaaggcaaacaaagtaaaacaattacacaatgctaagtcatattacaatatgtacgcggtaggaacacaagcggcacacaaaaggggattggatttaaatgcatttttaaatattttgttggaaatcttaccgtagctctaaaatatctctttgaaattaggtgacaatttgagttcagaaaatcgaattaagtcgggtgggcaattaggaagcctcgcataaaagtaagtgatccaattatggtcggggtaattagcccaattgtggggcacccggtatgcggccacccatttgagaacgccatcggcgcgtgctcaatgtaatactatagaaggaatactaagtatgtgtttcctcacggtcgtgtttcttttttgccattgtttcagggagggcaaccaccccgacgattattcccggggtctcacctatcgcaagttgctggaggaggtgtgccgcttcgccaacgtgctgaaggatcatggcattcgaaagggcgatcgtgtatccatttacatgcccatgattctggagctgcctatcgcgatgctggcctgcgctcgcattggagccgtgcactcgatcgttttcgccggattctcaccggactcactggcggagcggatgttcgattgcaaggccaagctgctgattacggcggatggagcctggcgtggagagaaacccctgtacctgaaggctctgtgcgacacggccttggagaaagtcgaggagatggggcactccgtggagaagtcgatcgtggtgtcgcatttgaagcgagtgactccgtgccagccggatcatgtcgaggaggaaatcccatggaccgatgaccgcgattactggtggcacgaggagatggaggacaaggagccggcctgctatccggagtggatggacgccgaggatccattgttcatgctctacaccagtggctccactggcaagcccaagggagtgctccacacgactgccggatatctgctgtatgcggccacgaccttcaagatcgtatttgactataagccaggggatatctactggtgcaccgccgatgttggctggatcacgggacacacctacgtggtgtacggaccattggccaatggagccacttcagtgattttcgaaggcacaccattcttccctggaaacgatcggtactggagtgtcattgacaaatataaggtaactcagttctacacagctccaacggcgattcgtgccctcatgaagttcggcgagggtcccgttctaaagcacaacctgagcggactcaaagttttgggcagcgtgggtgagcccatcaacccggaggcctggctctggtattacaaatacattggaaaggagcagtgctccattgtggacaccttttggcaaacggaaaccggtggtcatgtcattacacctctgcctggagcgactcccatgaagccgggatctgcttcattccccttctttggagtgaagcccactttgctggatgagtgcggcattgaaattaagggggagggagagggctacttggtcttctcgcaaccttggccgggaatgatgcgcactttgtacaacaaccatgaacgcttcgaggacacttatttctccaagttcccaggctactactgcactggcgatggagcccgacgcgatgctgacggctatttgtggatcactggtcgtgtggacgacatgttaaacgtgtccgggcacctgatgtccacagccgaggtagagtcggttctcacagagcatcctcgcgtggctgagtccgccgtggtttcccgtccgcatcccgtcaagggcgagtgtctctactgcttcataacgccgaacgagaacgaggtattcgaccagaagctaatttcggacctgaagaagatggtgcgagaacgtatcggaccttttgccatgccggatgtcattcaaaacgctcccggactgcccaaaactcgttccggcaagattatgcgtcgtgtgctgcgcaagatcgcggttaacgatcgcaacgtgggcgacacatctaccttggccgatgagcaaattgtggagcaactgttcgccaaccggccagtggaggccaagtagatggtagctgttggaccaactggcagcagccaggatcccttaacccaaggctttctccggttgcactgaccactccactttgccatcgcatttccaccacttacgtatcgcgattacgtatcctgtaaatctccctctacttatatgaattacccactgcttaatgtttgttccgttccgggctacggcgtggttagcacctttcaaattctacttagcgcgtaagcctaagcgtgtgcgtaagtaagtgactggatggtttccgatcccagttatatatcgtctatatgattttgtgtacttgcctgttcatcgtagttgacatgctcaccacgcacacattttccagttcttttgtttcttcgttgtagtcgtagtttaagttctcgctaattcgttgtgatacaaatttaattatatcttacttatgtatgtatttttagctagaattgatatgagacaaaatatatacacgattccaattgtcgccacaatttacaaaaaaaaaaa

SEQ ID NO: 768 - protein, 581 aa, Drosophila melanogaster
MCFLTVVFLFCHCFREGNHPDDYSRGLTYRKLLEEVCRFANVLKDHGIRKGDRVSIYMPMILELPIAMLACARIGAVHSIVFAGFSPDSLAERMFDCKAKLLITADGAWRGEKPLYLKALCDTALEKVEEMGHSVEKSIVVSHLKRVTPCQPDHVEEEIPWTDDRDYWWHEEMEDKEPACYPEWMDAEDPLFMLYTSGSTGKPKGVLHTTAGYLLYAATTFKIVFDYKPGDIYWCTADVGWITGHTYVVYGPLANGATSVIFEGTPFFPGNDRYWSVIDKYKVTQFYTAPTAIRALMKFGEGPVLKHNLSGLKVLGSVGEPINPEAWLWYYKYIGKEQCSIVDTFWQTETGGHVITPLPGATPMKPGSASFPFFGVKPTLLDECGIEIKGEGEGYLVFSQPWPGMMRTLYNNHERFEDTYFSKFPGYYCTGDGARRDADGYLWITGRVDDMLNVSGHLMSTAEVESVLTEHPRVAESAVVSRPHPVKGECLYCFITPNENEVFDQKLISDLKKMVRERIGPFAMPDVIQNAPGLPKTRSGKIMRRVLRKIAVNDRNVGDTSTLADEQIVEQLFANRPVEAK

SEQ ID NO: 769 - DNA, 1962 bp, Synechocystis sp
  CDS (1)..(1962)
atgtcagataccattgaatccatcctgcaggaagagcgactgtttgatccccctacagaatttagtgagcgggcttacgtgcgtagtgggcgggagtatgagcaactgtacagccgggcggccagcaatccggagaagttttggggtgagctggcggagcaggaattacattggtttaaaaaatgggaccaggttttggattggcaacctccctttgcgaaatggtttgtggggggtcagttaaatatttcccataactgtttggatcggcacttaaccacctggcggcgcaataaggcggccattatttgggagggggaaccgggagattcccggataattacctatgcccaactccatcgggaagtgtgtcagtttgccaatgccctgaaaagtttaggcgtgcaaaaaggtgatcgggtagcaatttatctgcccatgattcccgaagcggcgatcaccatgttggcctgttcccgtatcggtgcgccccatagtgttgtgtttggtgggtttagtgcggaagccctgcgggatcgattagtggatgctgaagccaaattggtcataactgccgacggtggttttcgtaaagataaggcgatcgccctgaagcaggaagtggataaggccctggaacacggtgcccccagcgtggaaaacgtcatcgtcgtgcaaagaactaaagccgatgtgaccatgacggcgggacgggaccactggtggcacgaactccaacctcaacagtcggcccattgcccagcggaacccatagacagtgaagatatgctgtttattctctacacctctggcagtactggcaaaccaaaaggcgtggtccacaccaccgggggttacaacctttacacccacatgaccaccaaatggatctttgacctcaaagatacggacgtttattggtgtaccgctgatgtgggttggattacgggccacagctacattgtttacggccccctgtccaacggtgcaacaacggtaatgtatgaaggggtgccccgcccctccaaccccggttgtttttgggacgtaattgaaaggtatggggtgaatattttctacaccgcccccaccgccatccgagcctttattcgcatgggggaagccgtacccaacgccagggatttatcctctctccgtttactgggcactgtgggggaacccattaaccccgaagcttggatgtggtaccaccgggtcattggcggcggtaaatgccccattgtcgatacctggtggcaaacggaaaccggcggcattatgctcactcccctacctggagctatccctaccaaacccggttcttgtaccaaaccttttcccggcattgtggcggaaattgttgatttagatggcaatcccgtcgagtcagaccaagggggctttttagtgattaaacaaccttggcccagcatgattcgggatgtgtacggcgacaccgatcgcttccgccatacctattgggaacatattcaacccaaggagggacaatatctctactttgctggggacggggcccgccgggataaagacggttatttttgggtcatgggccgggtggatgatgtgattaatgtctctggtcaccgtttaggcactatggaaattgaatcggctttggtttcccatcccctcgtagcggaagcggcggtggtgggtcgccccgatgaattgactggggaagccattttcgcctttgtttctctggagggtaacgctgaacccagtgaagagttgaaaaaagatttggtcaagcacgtcactgaagaaattggggcgatcgccaggccagcggaaatccgtttcaccgatgtgttacccaaaacccgttccggcaaaattatgcgtcgtctgttgcggagtttagcctccgggcaggaaatttccggggacacttccaccctggaggaccggacagtgctggacaaattacgggagggctaa

SEQ ID NO: 770 - protein, 653 aa, Synechocystis sp [sequence omitted]

SEQ ID NO: 771 - DNA, 2013 bp, Emericella nidulans, Aspergillus nidulans
  CDS (1)..(2013)
atgagtgacggaccaattgcccctcccaagcccgccgtggttgctgaggcccacgaggtcgacactttccacgttcccaaggcgttcttcgacaagcacccttccggccctcacttgaaaaatctcgatgaatacaagaagctctatgaggagtcgattcgcagcccagacgttttctgggcccgcaaagcccgtgagctgctcacttttgacaaagatttccaaacgacccgtatcggctcattggagaacggtgacgttgcttggttccctgagggtcggctaaatgcttctttcaactgtgtcgatcgtcacgccatcaagaaccccaacaaggtcgctatcatctacgaagccgacgaacccaacgagggccggacaatcacatatggcgagctgctccgcgaagtttctcgggttgcctgggttttgaaacagcgcggcgttaagaagggcgacactgtggctatctaccttcccatgattcctgaggccatcatcgccttccttgcgtgctcgcgtattggtgccgttcactccgttgttttcgccggtttctcgtcagactccctccgtgaccgtgtccttgacgccggttccaaggttgtcatcacaaccgatgagggtaagcgtggcggtaaggtcatcgggaccaagcgcattgtcgatgagggtctcaagcagtgccccgacgtgtcgaccgtgcttgtttacaagcgcaccggcgccgaggtgccctggaccgagggccgtgacatttggtggcacgaggaggttgagaagtaccctgcgtacattgctcctgactctgtcaactccgaggatcctcttttccttctatacacttctggttccaccggtaagcccaagggtgttatgcacactactgccggttacctcctaggcgcggctatgaccggaaaatacgtttttgatatccatgatgatgaccgctacttctgcggtggtgatgtcggctggattaccggccacacctacgtggtgtacgctcctctcctcctgggagtctcaacggttgtctttgagagtaccccggcttaccccgacttctctcgctactgggacgtgattgagaagcacaaggtgacccaattctatgtggcacccactgccctgcgattgttgaagagggctggtgaccaccacatccaccacaagatggaacatctacgtgtcctgggatccgtcggcgagcccattgctgctgaggtctggaagtggtacttcgagaaggttggaaaggaagaggctcacatttgcgacacctactggcaaaccgaaactggctccaacgtcattacccccttggccggtgtcactcccacgaagcctggcagtgcttccctgcccttcttcggtattgagcctgccatcattgatccagtctctggagaggagatctccggcaacgatgtggagggtgtgcttgccttcaagcagccctggcccagcatggcccgcactgtgtggggtgcccacaagcgctacatggacacatatctgcaagtctacaagggttactacttcaccggagatggagccggtcgtgaccacgagggatactactggatccgtggtcgtgttgacgatgtcgtcaacgtttctggtcaccgtctgtcaaccgcggaaattgaggctgccctcattgagcaccctatggttgctgaagcagccgtggttggtattgccgatgagttgaccggtcaggccgtcaatgcctttgtttcgctcaaagagggtaacgagaccaacgaccaagtccgcaaagacctcattctgcaagtccgcaagtcgattggacccttcgctgctcccaaagccgtctttgttgtcgacgacctgcccaagacccgtagcggtaagatcatgcgccgcatcctgcggaagattcttagtggtgaggaggatagcctgggcagcatttcaacgctgtccgatccatccgtggttgagagaattatcgccacagtgcacgcttcccgaggcaaataa

SEQ ID NO: 772 - protein, 670 aa, Emericella nidulans, Aspergillus nidulans [sequence omitted]

SEQ ID NO: 773 - DNA, 1881 bp, Neurospora crassa
  CDS (1)..(1881)
atgcgccagactttgaggagtaccagaagctatacaagcagtccatcaccgagcccaacgatgttctgggctgagcgcgcccgcgagcttctgtcgtggagcaaggatttccagacggtccacagcggctccctcgccaacggtgacaacgcctggttcgtagagggcgagctcaacgcctcgtacaactgcgtcgacaaacgccacaaggaccccaacagagtcgccatcatctacgaggccgacgagccggtcagaaggaatgtcacctatggcgagctcctcagggaggtctccaagctcgccatgtcctcaccaacttgggtgattcgcaagggagacaccgtcgccatctaccttcccatgattcccgaggccatcgttgccatgcttgcttgcaccagaattggcgccatccactccgtcgtttttgccggcttctcctccgactccctccgcgaccgtgtcgtcgatgcccagtccaaggttgtcatcaccaccgatgagggcaagcgcggtggcaagctgattggcaccaagaagatcgtcgacgaggctctccagcagtgccccgatgttcgcaacgtgctcgtctacaagcgcaccgggccgatcatcagcatgacccccggccgtgatctctggtggcacgaggaggttgagaagtaccctgcttactacacccctgtggccatggcctcggaggatcctctcttccttctctacacttctggctccactggcaagcccaagggagttgcccactctaccggtggttacctgctgcgtgccatgaccggcaagtacgttttcgacatccatgacggcgacaggtatttctgcggtggtgacgtcggctggattaccggtccacactatgtcctctcagccccgctcttgctcggtgtctctaccgtcgttttcgagggtaccccgcctaccaattctccgtactgggacatcattgaggagcacaaggtcactcagttctcagttgctccaactgccctgcgcctgctgaagcgcgccggtgaccatcacgttcgcaacgagatgaagcacctccgtgttctcggctctgtcggtgagccatcggccgccgaggtctggaagtggtactatgatgttgtcggcaaggccgccgcccagatttgcgacacctactggcagaccgagactggctccaacgtcatcactcccctcgccggcgttacccccaccaagcccggttccgcttctttccccttcttcggtatcgagcccgcgcttgtcgaccccgttaccggcgaggagatccgcggcaacgacgttgagggtgtcttggccttcaagcagccctggcccagcatggctcgcaccgtctggggtgcccataagcgctacatggagacctacctccatgtgtacaagggctactacttcacgggcgacggtgctgcccgcgatcacgagggcttctactggatccgcggccgtgtcgaccgtgtcaacgttagtggccaccgtctcagcactgccgagattgaggctgctctgattgagcatcactcaattgccgaggctgctgttgttggtgttgccgacgagctcactggccaggccgtcaacgccttcgttgccgtcaaggagggtacccagatcaacgatgctctccgcaaggagtctccgtccctccaggtccgccgcagcatcgggcccttcgctgctcccaaggccatctacatcgttcctgatcttcccaagactctctctggcaagatcatgcgccgcattctgaggaagattgttgccggcgaggaagatcagcttggtgatatcactactctcagcgatcccagcgtcgttgccaagatcatcgatgtcgtccacgcgcaccagtaa

SEQ ID NO: 774 - protein, 626 aa, Neurospora crassa [sequence omitted]

SEQ ID NO: 775 - DNA, 1971 bp, Rhodobacter capsulatus
  CDS (1)..(1971)
atgggagttcaaggacaaccctcggtcgcaccggcgcttcgggaggttccggcggggtttgagactgcgcatgcgaatggcgcgaaatatctcgagatgtatcgggaatcgctcgagaatccggatgcgttctgggggcgcgagggcaagcggctcgactggatcacgccctataccaaggtgaagaataccgatttcaccttcggcaaggtctcgatcaaatggttcgaggatggggtgctgaacgcgtccgtgaactgcatcgaccggcatctgcgcgaccgcgcgctgcaaaccgcgatcatcttcgagcccgatgacccgaaggaaccggcccgccacatcacctacaaggagctctccgaaaaggtgaaccggatggcgaatgtgctgctgtcccagggcatcatgcgcggcgaccgggtggtgatctatctgccgatgatcccggaggcggcctatgcgatgctggcctgcgcccggatcggcgcgatccattccattgttttcgcgggcttttcgcccgatgcgctggcgaaccggatcaatgattgcggcgccaaactggtgatcaccgccgacaccgcgccgcgcggcgggcggcgcacgccgctgaaagcgaacaccgatgcggcgctcttgcactgctcggacaaggtgcgctgcctggtggtcaagcacaccggcgatcagatcagctgggtgcatggccgcgatgtcgaccttttgtacctgatggagcacgtcagcccggaatgcccgccccgcccgatgaatgcggaagatccgctcttcatcctctacacctcgggctcgaccggcaaacccaaaggcgtcgtgcatacgaccggcggctacctcgtctatgccgcgatgacgcaccaatacacgtttgattacaaggacggcgacgtgttctggtgcaccgccgatgtgggctgggtgacggggcacagctacatcatctacgggcccttggcgaatggcgcgacgaccttgatgttcgagggcgtgccgaccttccccgatgcggggcggttctgggcggtgtgcgaaaagcacaaggtcaatcagttctacaccgcgccgacggcgatccgcgcgctgatgggtcagggcccggaatgggttgagaaatatgacctttcctcgcttcgggtgctggggtctgtgggcgagccgatcaaccccgaggcctgggtctggtacgacaaatatgtcggaaaagggaaatgtccgatcgtcgacaccttctggcagaccgagaccggcgggcacatgatcacgcccttgcccggcgcgacaccgacgaaaccgggctcggcgacgaacccgttctttggcgtcaagccggtggtgctggacccgcagaccgcggtgcggatcggcgaggtcgaatgcgagggggtgctctgcatttccgacagctggcccgggcagatgcggacggtctggggcgatcacgaccgcttccaggagacctatttcggccagtatcgcggctattacttcaccggcgacggctgtcggcgcgacaaggacggctattactggatcaccggccgggtcgatgacgtgatcaacgtctcggggcaccggatgggcacggccgaggtggaatcggcgctcgtcgcgcatccgcaggtggccgaggcggcggtggtgggctatccgcatgacatcaagggccagggcatctacgcctatgtgaccctgatgaacgggatcgagcccagcgaggatctgcgcaaggatctggtcaagtgggtgcgcaccgagatcggtccgatcgcctcgcccgatctgatccaatgggcgccgggcctgccgaagacgcgctcgggcaagatcatgcgccggatcctgcgcaagatcgccgagaacgactatggcgcgcttggcgacatctcgacgctggccgatccgggcgtggtgcaggagctgatcgacaaccggatgaaccgggcctga

SEQ ID NO: 776 - protein, 656 aa, Rhodobacter capsulatus [sequence omitted]

SEQ ID NO: 777 - DNA, 2043 bp, Caenorhabditis elegans
  CDS (1)..(2043)
atgtcggacgttcgcgtcaagttcaacctagccaacgatggagaaggtctcgacgaggatattttcctccctccagccccactccttgccggtgctcactgtgctggccttcaatcttaccacgatttgtaccgttcctcgatcaacgatgctgacgagttctggcgtaccgtctcatctgaactccatttcgaacaaggaacctctaagggtctcgaatggaatttcgactcgaaagctggaaatgtcttcgtcaagtttatggatggagccaagactaacatctcgtacaactgtttggaaagaaacattaaacgtggatatggaaacaaaatcgcctacattttcgaaggaaacgagccaaccgacacctccacctggacatacaacgagctacacgcccaagtagtccaattctccgctgttctgagatctcatggcgtcaaacgaggcgatgtggttgctttatatcttccaatgattcccgaattagcagttgcaatgcttgcgtgtgcccgtatcggagcaatgcattctgttgttttcgctggtttctctgccgaatcacttgccgctcgtgttgtcgacgctcgctgcagagttttggttacggcggacggagtttttcgaggagctaaaccaattgggctcaagtcaattgcggatgcagctgccgttctcgcatcgcaggaagatgtcaaagtggaagctatcattatggtggaacacttaaaacgagtcacgaagcctgatggagtggaacttcccaaggtcgattacaccgatatcaccgtcatctacgattcggagatgctcaagtgtgcaggcgtggattccccggtagaatggatggattctgaagatccgctatttattctctacacatctggctcaaccggaaaaccgaaaggtattcaacacactacagctggatacatgacgtacgcctacgcaaccacaaaatacacttttgatgcacaagaagacgatgtttactggtgtactgccgattgtggatggatcaccggacactcgtaccttctttatggacctttgatgaatgggctcaagggaatttggtatgaaggtgtgccgacttatccgactccttctagaatgtgggatgtcactgataagtatggtgtgaccaagctgtatacctcaccaacagccgcaagagctcttatggctctcggaaatcagtggcttgaaagctcttctcgcaaaactctcaaggttatcggaacagttggagagcccatcaatcctgctgcatggatgtggttgtacaagcaagttggactttccaatgtatccattgtggatacttactggcaaactgaaactggaggacacatgatcacatgccttccaggagcaactccaatgaagccaggagcagctgcaatgccattcttcggagcatctccagttcttttggatgctgaaggtcgtgttattgaaggtccgggagaaggatcactatgctttgatcgtgcctggcctggaatgatgcgtggaatctatggagatgagcaacgctttgtcaagacctatttggctccattcaatggatactatttcactggagatggtgccagacgtgatgaagatggatacttgtggataactggacgtgttgatgatttgatgaatgtcagtggtcatcttctgtctactgctgaaattgaatcagctcttgtggctcatgagaaagttgctgaagctgccgttgttgctgctccacatgacatcaagggatccttcccatacgcattcgtcactttgaatgttggagagagaatcaatgaaaagcttgtggctgagctcaagaaactagttcgcgagaaaattggtgcattggctgttccagatgttatccaagaagctccaggacttccaaaaactcgttccggcaaggttaccagaagaatcttgagaaagattgctgaaggatccgaaagtggaatcggtgatactactactctagtcgacgaatctgtcatcaaacaactaatctctggacgttctgcacgtgcataa

SEQ ID NO: 778 - protein, 680 aa, Caenorhabditis elegans
MSDVRVKFNLANDGEGLDEDIFLPPAPLLAGAHCAGLQSYHDLYRSSINDADEFWRTVSSELHFEQGTSKGLEWNFDSKAGNVFVKFMDGAKTNISYNCLERNIKRGYGNKIAYIFEGNEPTDTSTWTYNELHAQVVQFSAVLRSHGVKRGDVVALYLPMIPELAVAMLACARIGAMHSVVFAGFSAESLAARVVDARCRVLVTADGVFRGAKPIGLKSIADAAAVLASQEDVKVEAIIMVEHLKRVTKPDGVELPKVDYTDITVIYDSEMLKCAGVDSPVEWMDSEDPLFILYTSGSTGKPKGIQHTTAGYMTYAYATTKYTFDAQEDDVYWCTADCGWITGHSYLLYGPLMNGLKGIWYEGVPTYPTPSRMWDVTDKYGVTKLYTSPTAARALMALGNQWLESSSRKTLKVIGTVGEPINPAAWMWLYKQVGLSNVSIVDTYWQTETGGHMITCLPGATPMKPGAAAMPFFGASPVLLDAEGRVIEGPGEGSLCFDRAWPGMMRGIYGDEQRFVKTYLAPFNGYYFTGDGARRDEDGYLWITGRVDDLMNVSGHLLSTAEIESALVAHEKVAEAAVVAAPHDIKGSFPYAFVTLNVGERINEKLVAELKKLVREKIGALAVPDVIQEAPGLPKTRSGKVTRRILRKIAEGSESGIGDTTTLVDESVIKQLISGRSARA

SEQ ID NO: 779 - DNA, 1956 bp, Streptomyces coelicolor
  CDS (1)..(1956)
atgagcaacgaatccttggccaacctgctcaaggaagaacgcaggttcgcaccccccgccgacctggccgcgaacgccaacgtcacggcggaggcgtacgaacaggccaaggctgacaggctcggcttctgggccgagcaggcccgccggctgacctgggcgaaggagccgaccgagacgctcgactggtcgaacccgccgttcgccaagtggttcaaggacggcacgctgaacgtcgcctacaactgcgtggaccgccacgtggaggccggcaacggcgaccgcgtcgccatccacttcgagggcgagtccggcgacagccgcgccctcacctacgcccagctcaaggacgaggtctccaaggccgccaacgccctgctggagctgggcgtgcagaagggcgaccgggtcgccatctacatgccgatgatccccgagaccgcgatcgcgatgctggcctgcgcccgcatcggcgccgcgcactcggtggtcttcggcggcttctcctcggacgcgctggccacccgcatccaggacgccgacgcccgcgtcgtcatcaccgccgacggcggctaccggcgcggcaagccgtccgcgctcaagccggccgtcgacgaggccgtcgagcgcgcggggatcgtcgagcacgtgctcgtcgtccgccgcaccggccaggacgtcgcctgggacgactcccgggacaagtggtggcacgagaccgtcgacgggcagtccgccgagcacacgcccgaggcgttcgacgccgagcacccgctgttcatcctgtacacgtccggcacgacggggaagcccaagggcatcctgcacacctccggcggctacctcacacagacggcgtacacccactgggcggtcttcgacctcaagccggagaccgacgtcttctggtgcaccgccgacgtcggctgggtcaccggacactcgtacatcgtctacggcccgctcgccaacggcgccacccaggtcatgtacgagggcaccccggacaccccgcaccagggccgcttctgggagatcgtgcagaagtacggcgtgacgatcctctacacggcgcccaccgcgatccggacgttcatgaagtggggcgacgacatccccgcgaagttcgacctgtcctccctgcgcgtcctcggctcggtcggcgagccgatcaaccccgaggcgtggatctggtaccgcaagaacatcggcgcggacgccaccccggtggtcgacacctggtggcagaccgagaccggcgcgatgatgatcaccccgctgccgggcgtcacccacgccaagccgggctccgcccagcgcccgctgcccggcatctccgccaccgtcgtcgacgacgaggccaacgaggtgccgaacggtggaggcggctacctggtgctcaccgagccgtggccgtcgatgctgcgcaccatctggggcgacgaccagcggttcatcgacacctactggtcgcgcttcgagggcaagtacttcgcgggcgacggcgccaagaaggacgacgacggcgacatctggctgctcggccgcgtcgacgacgtgatgctcgtctccggccacaacatctccaccaccgaggtggagtcggccctcgtctcccacccctcggtcgccgaggcggccgtggtcggcgcgacggacgagacgaccgggcaggccatcgtggccttcgtgatcctgcgcggcaccaccgcggagagcgaggacctggtcgccgagctgcgcaaccacgtcggtgccacgctcggcccgatcgccaagcccaagcggatcctgccggtctcggagctgccgaagacccgctccggcaagatcatgcggcgcctgctgcgagacgtcgcggagaaccggcaggtcggcgacgtcacgacgctggcggactcgacggtcatggacctcatccagacgaagctcccggccgcccccagcgaggactga

SEQ ID NO: 780 - protein, 651 aa, Streptomyces coelicolor
MSNESLANLLKEERRFAPPADLAANANVTAEAYEQAKADRLGFWAEQARRLTWAKEPTETLDWSNPPFAKWFKDGTLNVAYNCVDRHVEAGNGDRVAIHFEGESGDSRALTYAQLKDEVSKAANALLELGVQKGDRVAIYMPMIPETAIAMLACARIGAAHSVVFGGFSSDALATRIQDADARVVITADGGYRRGKPSALKPAVDEAVERAGIVEHVLVVRRTGQDVAWDDSRDKWWHETVDGQSAEHTPEAFDAEHPLFILYTSGTTGKPKGILHTSGGYLTQTAYTHWAVFDLKPETDVFWCTADVGWVTGHSYIVYGPLANGATQVMYEGTPDTPHQGRFWEIVQKYGVTILYTAPTAIRTFMKWGDDIPAKFDLSSLRVLGSVGEPINPEAWIWYRKNIGADATPVVDTWWQTETGAMMITPLPGVTHAKPGSAQRPLPGISATVVDDEANEVPNGGGGYLVLTEPWPSMLRTIWGDDQRFIDTYWSRFEGKYFAGDGAKKDDDGDIWLLGRVDDVMLVSGHNISTTEVESALVSHPSVAEAAVVGATDETTGQAIVAFVILRGTTAESEDLVAELRNHVGATLGPIAKPKRILPVSELPKTRSGKIMRRLLRDVAENRQVGDVTTLADSTVMDLIQTKLPAAPSED

SEQ ID NO: 781 - DNA, 1989 bp, Schizosaccharomyces pombe
  CDS (1)..(1989)
atgacgaaaaatcctgtcgatcacacactcattatagaacctccggttcgtcttcatggcgatcccaccgtccctaaacctaacattgctagtttggatgagtataaacgtatgtatgaagagtcaattaatgacccatccactttttggggtaacatggctcgcgacatgatgacttgggacaaacaattcagcactgtcgtccaaggttccatcgacaaggcagatagtgcttggttcgctgatggtgccatttccccttgttataatttagtcgatcgtcatgccattgctcgcccagacgccgttgccttgatttatgaagctgatgagcccaatcagggtcgctatatcacctatcgcgagcttttggcttccgtttctcaatgtgccggtgctctccagtccatgggcgttggtatgggagatcgtgttgccatctatatgcctatgattcctgaaacaatcattgccatgttggccattgttcgtttgggtgccattcattctgttatttttgctggtttttctgcagagtctgttgcagaccgtgtcaatgattctgagtgtaaagttatcattaccgctgatgaaagtcatcgtggtggtaaacgaatccctttaaagggtgtcgttaacaaagcccttaccgaatgtcctaccatcaagaaggtactcgtcttccaacgctctgctgagcctaccgccagtatggttgaaggtcgtgatgtctggtggcacgatattattccaaagttcccccggtattgccctcctgcagtcgttaatccagagcatcccttgttccttctctacacttctggaagtacaggaaaacccaagggtgtcgtacattgcactggtggttaccttcttggcgctgctgctacttgcaaatacgttttcgatttgcatcccacggatcgtatgggttgtgctggtgatgtcggttggattactggtcatacctatattgtatacggccccttaatgcttggtgctgctactcttgtttttgaaagcacaccagcttaccctgattactctcgttactggagtgtcgttgagcgtcacagactgactcaatggtatattgcaccaactgccattcgtcttcttcaacgtgccggtaatgaatttgtcaagcacgatcgctcttctcttcgtgtcttgggtagtgttggtgaacccatcgctccagagtcatttatgtggtactacgaagtagttggtgagaaaagatgtgctgttgccgatacttattggcagactgaaacaggttctcacattgttacttctttgggacctgtgacacccatgaagcctggttctgctacgttaccctttttcggtatcgatgcagtcatcattgatcccttgactggcaagatcattgaaggcaacgatgttgaaggtgttcttgctatccgcagtccctggcccagcgctgctagaactgtttggcgcggtcacgatcgttacatcgacacctacttgaagccatatcctgggttctacttcaccggtgatggtgctacccgcgataaagatggttacatttggattcgtggacgtgttgatgatgttgtcaacatttccggccatcgtctgagtacagctgaaatcgaggctgctttgttgtctcatgacgctgtcgcagaatccgctgttgttggtgttcatgatgagctaaccggtcaagccgtcaatgcctttattttattgaaacctggctatgaagctacagtcgaacttgaaaaggagttgatcatggcggttcgatcgacaattggcccctttgcatctccacgcaagttaattttcagtgatcttccaaaaactagaagtggtaaaattatgcgccgcattctccgtaagattttggctggtgaagtcgaccagattggagacttgagtaccttggctgaccctaaggttgttgagcacatcatccatgctgttcattatgcccatcagaagaagccctag

SEQ ID NO: 782 - protein, 662 aa, Schizosaccharomyces pombe [sequence omitted]

SEQ ID NO: 783 - DNA, 2013 bp, Pyrobaculum aerophilum
  CDS (1)..(2013)
atgtccttagaattaaaagaaaaggaaagcgaactgccctttgatgaacaaattataaacgataagtggaggagtaaatatacgcctatagacgcctactttaaattccacaggcagacagtcgagaacttagagagtttctgggaaagcgtagccaaggagttggagtggtttaagccgtgggacaaggtgttagacgcctctaatccgccgttttacaagtggtttgtaggagggaggcttaatctgtcatacctggcagtagacagacatgtaaagacgtggaggaagaacaaactcgccattgagtgggagggagagcccgtagatgaaaacggctaccccacagacaggaggaaactgacgtattacgacctataccgcgaggtaaaccgcgttgcatatatgttaaaacagaacttcggcgttaagaagggcgataaaataacgctgtatctacccatggtgcccgagctcccaataaccatgttagccgcgtggagaattggcgcaattaccagcgttgttttctccgggttctcggccgacgcgctggcagagcgtataaacgactcccagtcgcgtattgtcataaccgcagacggcttctggcgcagggggagggtggtcagacttaaagaagtggtagacgccgcgttggagaaggccacaggagttgagagtgtaatcgtcttgcctagactcggcttaaaagacgtcccaatgaccgaggggcgcgactactggtggaataagttaatgcaggggattccgcctaatgcctacatcgagcccgagcctgtggagagcgagcacccctcctttattctatacacctcgggcactacggggaagcccaagggcattgtgcacgacacaggcggctgggccgtgcacgtatatgctacaatgaagtgggtttttgacataagagacgacgacatattctggtgcactgcggatataggctgggtcaccggccactcctacgttgtgctagggcctttgttaatgggagccactgaggtgatctacgagggcgcccccgactacccgcagccagataggtggtggtctataattgagcgctacggcgtcactatattctacacgtcgcctaccgccatacgcatgttcatgcgctacggcgaggagtggccaagaaagcacgacctctccactttgcgcataatccactcagtgggcgagccgataaaccccgaggcctggaggtgggcatacagagtcctcggcaatgagaaagtcgcctttggctccacttggtggatgacggagactggaggcattgtgataagccatgccccaggcctctacttagtgcccatgaagcccggcactaacggcccgccgctgcctgggtttgaagttgacgtggtggacgaaaacggcaacccggccccgccaggcgtaaagggctatcttgtcattaaaaagccgtggcccggcatgctccacggcatttggggcgatcccgagcgttatataaagacctactggtccagattccccggcatgttctacgccggcgactacgctattaaggataaggacgggtacatatgggtgttgggacgcgccgacgaggtgatcaaggtggctgggcacaggctgggcacatacgagctggagtcagccctaatttcacacccagctgtcgccgagtcggcggtggtaggcgtgcccgacgccatcaaaggagaggttcccatagccttcgtggtgctgaaacaaggcgtggcgccaagcgacgagttgcgcaaagagttgagggagcatgtaaggagaactataggccccatagcagagccagcccagatatttttcgttacaaagttgcccaagacacgctccggcaagataatgcgccgcctgctgaaggccgtggccacgggggcgccgctgggagatgtaacgacgctagaggacgagacctccgtggaggaagctaagagggcatacgaggagataaaggctgagatggcgagaacatga

SEQ ID NO: 784 - protein, 670 aa, Pyrobaculum aerophilum [sequence omitted]

SEQ ID NO: 785 - DNA, 2010 bp, Penicillium chrysogenum
  CDS (1)..(2010)
atgtcggacggcccaattcagcctcccaagcccgcagtggtgcatgaggcacacgaggtcgacactttccacgtccccaaggcgttccacgataagcacccctccggcactcacatcaaggacattgaggagtacaagaagctttacgaagaatcaatcaagagccccgacaccttctgggcacgcatggcccgcgagctcctcacatttgacaaggactttgaaaccacacatcacggctcgtttgagaacggcgacaatgcctggttcgtcgagggtcggttgaacgcatcgttcaactgtgtcgatcgccatgccctcaagaacccagataaggtcgccattatttatgaggccgacgagcccaacgagggccgtaagatcacctacggagagctgatgcgcgaggtgtcccgggttgcctggactctgaaggagcgtggcgtcaagaagggcgacacggtcggtatctacctgcccatgattcccgaggccgtaatcgctttcctggcttgctcgcgtattggtgccgtgcactccgttgtcttcgctggtttctcttccgactccctccgggaccgtgtcctggacgcctcctccaaggtcatcattacctccgacgagggcaagcgcggtggcaagatcattggcactaagaagattgtggacgaggccatgaagcagtgccccgatgtcgacaccgtgctggtgtacaagcgcaccggtgccgaggtgccctggaccgctggccgtgacatttggtggcacgaggaggtcgagaagtaccccaactacctcgcccctgagtcggtcagctccgaggatcctctcttcctgttgtacacctccggttccaccggtaagcccaagggtgttatgcacaccactgccggttacctgctcggtgcggccatgactggaaagtacgtgtttgatatccacgacgatgatcgctacttctgcggtggtgatgtcggttggattacaggtcacacctatgtcgtgtacgcccctctattgcttggctgcgccaccgtcgtgttcgagagtacccccgcctaccctaacttctcgcgctactgggatgtcattgacaagcacgacgtcacacaattctacgttgcacccaccgctctgcgtctgctgaagcgcgctggagatgagcacattcaccacaagatgcacagtctgcgtattcttggctccgtcggagagcccattgccgcggaagtctggaagtggtacttcgagtgtgttggcaaggaggaagctcacatctgcgacacatactggcaaaccgagaccggctcacatgtcatcacccctctcggcggtatcacccccaccaagcccggcagtgcctccctacccttcttcggtatcgagcctgccattatcgaccccgtctccggagaggagattgtcggcaatgatgtcgagggtgttttggccttcaagcagccgtggcccagcatggcccgcaccgtgtggggtgcccacaagcgttacatggacacttacttgaacgtgtacaagggttactacttcaccggagatggtgctggccgtgaccacgacggctattactggatccgcggtcgtgttgacgatgtcgtcaacgtttctggacaccgtctgtccaccgctgagatcgaggccgctcttctcgagcacgcttccgttgccgaggctgctgtcgttggtattgccgacgagctgaccggtcaggctgtcaatgcctttgtctctctcaaggagggcaagcccacagaacagatcagcaaggaccttgcaatgcaagttcgcaagtccattggtcccttcgccgcccccaaggctgtcttcgtcgtggatgacctccccaagacccgcagtggcaagatcatgcgccgaatcctccggaagattctcagtggcgaggaggacagcctcggtgatacatcaacgctctccgaccccagtgtcgtggacaagatcatagaaaccgtccacagtgctcgccagaagtaa

SEQ ID NO: 786 - protein, 669 aa, Penicillium chrysogenum
MSDGPIQPPKPAVVHEAHEVDTFHVPKAFHDKHPSGTHIKDIEEYKKLYEESIKSPDTFWARMARELLTFDKDFETTHHGSFENGDNAWFVEGRLNASFNCVDRHALKNPDKVAIIYEADEPNEGRKITYGELMREVSRVAWTLKERGVKKGDTVGIYLPMIPEAVIAFLACSRIGAVHSVVFAGFSSDSLRDRVLDASSKVIITSDEGKRGGKIIGTKKIVDEAMKQCPDVDTVLVYKRTGAEVPWTAGRDIWWHEEVEKYPNYLAPESVSSEDPLFLLYTSGSTGKPKGVMHTTAGYLLGAAMTGKYVFDIHDDDRYFCGGDVGWITGHTYVVYAPLLLGCATVVFESTPAYPNFSRYWDVIDKHDVTQFYVAPTALRLLKRAGDEHIHHKMHSLRILGSVGEPIAAEVWKWYFECVGKEEAHICDTYWQTETGSHVITPLGGITPTKPGSASLPFFGIEPAIIDPVSGEEIVGNDVEGVLAFKQPWPSMARTVWGAHKRYMDTYLNVYKGYYFTGDGAGRDHDGYYWIRGRVDDVVNVSGHRLSTAEIEAALLEHASVAEAAVVGIADELTGQAVNAFVSLKEGKPTEQISKDLAMQVRKSIGPFAAPKAVFVVDDLPKTRSGKIMRRILRKILSGEEDSLGDTSTLSDPSVVDKIIETVHSARQK

SEQ ID NO: 787 - DNA, 2323 bp, Homo sapiens
  CDS (92)..(2152)
gcccccgccccctactcccttccctcaggccccaggaagttgcaagagtaccatttgtcgcacactcggggaccgcgggtggccggaggagatgaaaccgtcttggctgcagtgtcgtaaagtcaccagcgccggggggctcggagggcccttgcctgggtcctctccggcccggggagccggtgcggccctcagggctttagtggtcccgggcccgcggggcggtctcgggggccggggatgcagggcactgtcctccggcagtggcagcgagtacaagacccacttcgcagcctcggtgaccgaccccgagaggttctggggcaaagctgccgagcagatcagctggtacaagccctggaccaaaacgctggagaacaaacactcgccctctaccaggtggtttgtggaaggaatgcttaacatttgttacaatgccgttgatcgtcatattgaaaatggtaaaggggataagattgctatcatctatgacagtcctgttacaaacactaaagcaacctttacctataaagaagttctggagcaggtctccaagctggctggtgtcttggtcaagcatggcatcaagaaaggtgacactgtggttatctacatgcctatgatcccacaggcgatgtataccatgttggcatgtgcaaggataggtgccatccacagtctcatatttggaggatttgcttccaaagaactaagtagtcgcattgatcatgtaaagcccaaggtggttgttacagcatcatttggcattgaacctggaaggagggtagagtacgtaccacttgtagaagaagcgctaaaaataggacaacacaaaccagacaaaattctcatttataatcgtccaaatatggaggcggttcctttggctcccggtcgtgaccttgattgggatgaagagatggcaaaagcccagtcacatgactgtgttcctgttctttcagaacacccactgtatattctttacacatctggcacaacggggttacctaagggtgtgattaggcccactgggggatacgctgtcatgctacactggtcaatgtcttccatatacggacttcaacccggagaggtgtggtgggcagcttctgacttaggctgggttgttggacattcctatatctgctatggacctcttcttcatgggaacacaacagttttatatgaggggaagcctgtgggaacaccagatgctggcgcttatttccgtgtgcttgcagagcatggagtagctgccttgtttacagcaccaactgcaattagagcaatccgtcaacaggaccctggggcagctttggggaagcagtactctctgacaaggttcaaaacattatttgtggctggagaacgatgtgatgtagagaccctggaatggtccaaaaatgtcttcagagtacctgtcttagaccattggtggcaaactgagactggatctccaattactgcgtcatgtgttggattaggcaattctaaaacacctccaccagggcaagcaggaaaaagcgtcccaggatacaatgttatgattttggatgacaacatgcaaaaactgaaggctcggtgtttaggaaatattgtggtaaagttaccattgccacctggggctttttcaggactctggaagaatcaggaagcattcaagcatttatactttgaaaaatttcctggatattatgataccatggatgctggttacatggatgaagaaggctatttgtatgttatgtctcgagtggatgatgtaataaatgttgcaggtcacagaatttctgcaggcgccattgaagagtcaatcctttcccatggtaccgtggcagactgtgctgttgttggcaaggaagatcccttaaaaggtcatgtccccttagcactctgtgtattgagaaaagatataaatgcaacagaggagcaagttttggaagaaattgtgaaacacgttagacagaacattggccctgtggctgcttttcgaaatgcagtgtttgtcaaacagctacccaaaaccagatctggcaagatcccccgatcagctttatctgccattgtcaatggcaagccatacaagataacttctacaattgaagaccccagcatttttggccacgtagaagaaatgctgaagcaagcataatgagtttgtcttattcctattttgagttgatttaatttcttaattgaaattaaattatttgagttgtttctcagaaataaatatttcagtagaaattacttgcaaaatgaaatgtgaattgtaaaacttggcctaaacaaatctaatgaaaacaaaaaaaaaaaaaaaaaa

SEQ ID NO: 788 - protein, 686 aa, Homo sapiens
MKPSWLQCRKVTSAGGLGGPLPGSSPARGAGAALRALVVPGPRGGLGGRGCRALSSGSGSEYKTHFAASVTDPERFWGKAAEQISWYKPWTKTLENKHSPSTRWFVEGMLNICYNAVDRHIENGKGDKIAIIYDSPVTNTKATFTYKEVLEQVSKLAGVLVKHGIKKGDTVVIYMPMIPQAMYTMLACARIGAIHSLIFGGFASKELSSRIDHVKPKVVVTASFGIEPGRRVEYVPLVEEALKIGQHKPDKILIYNRPNMEAVPLAPGRDLDWDEEMAKAQSHDCVPVLSEHPLYILYTSGTTGLPKGVIRPTGGYAVMLHWSMSSIYGLQPGEVWWAASDLGWVVGHSYICYGPLLHGNTTVLYEGKPVGTPDAGAYFRVLAEHGVAALFTAPTAIRAIRQQDPGAALGKQYSLTRFKTLFVAGERCDVETLEWSKNVFRVPVLDHWWQTETGSPITASCVGLGNSKTPPPGQAGKSVPGYNVMILDDNMQKLKARCLGNIVVKLPLPPGAFSGLWKNQEAFKHLYFEKFPGYYDTMDAGYMDEEGYLYVMSRVDDVINVAGHRISAGAIEESILSHGTVADCAVVGKEDPLKGHVPLALCVLRKDINATEEQVLEEIVKHVRQNIGPVAAFRNAVFVKQLPKTRSGKIPRSALSAIVNGKPYKITSTIEDPSIFGHVEEMLKQA

SEQ ID NO: 789 - DNA, 1950 bp, Pseudomonas putida
  CDS (1)..(1950)
atgagctattcgagtggattgatccgtccggacggagcaaagaaggaggatcgctatcttaatctctatcgtcattccgtggacgatcctgagagtttctgggccgaacaagcgcagcgcatccattggcacgttcagccgcagagaatccttgaggcgtcgaacccacccttccgacaatggtttgttggtggtcagaccaacctctgcttcaacgccctcgatcgccacttgccagagcgtgccgaacagttggcgttggtagctgtttcctcggaaacaggagttacccaggagatcacctatgcgcagctgtatcgggaagttaataccttcgccgcagtactcaagcgactcaacgtagaaaagggtgaccgagtcgtcatctacatgccgaacatggctgaggcagttttcgccatgcttgcttgtgcgaggatcggggcgatccactccgtagtctttggcggcttcgctgcgcgtaacttatcggcgcgcatcgacgactcgcagcctaagttgctgattactgccgatgcagggatgcgcggtggccgggtcattccgtacaaaccactggtggaccaagcctgtgcggagtcggagtcaccgccacccaaggtgctgatagtgtctcgtggtttgcagccagagctgacctgggtaccggggcgtgacgaagactacgcgactttgcgcgccgctgttggtgatgcgcaggtgtcagtggagtggctggagtcgaacgatcccagctacctgctttacacatcgggcactaccggaaaacccaagggggtacaacgcgatgtcggtggctatgcggttgccctggcgctgtcaatggagacggtttttgacgttgctcctgggcaggtgatgttctcgacctcggatgtcggttgggcggtcgggcattcttacaatgtctatgggccgctaatcgtcggtgcgacttcgttgttgtatgagggcttgcctacccatccggatgccggcatctggtggtcgctatgtgaaaggtatgccgtgcgtaccatgttttcctcaccgacggccgtccgtgtgttgaagaggttcaataccgacgccattgctcggcacgacttgaatgccttgcgctacctcttcctggccggggaacccctggacgagccgacagctaactggatcagtcgggcactcggcaagccagtcatcgacaactactggcagaccgagactggctggccggcgattacccttcatcctggcttggaaatgaaacctgtgaagttaggctcggccggcctgccgaatttgggctacaggatcaaggtgattgatgagctcagcggggcgcctgtcgcggcgcatcaaaaaggcatgcttgtcgttgagccgccgttaccaccgggcttcatgacgacgatctggcgtgatgatgatcgcttctgtagtagctactttgggcacttcaaggagcaggtctacagctcgcttgattgggcggtccaggatgaggacggttacacctacattcttgggcgtaccgatgatgtcatcaacgttgctgggcatcgtctggggactcgcgaaatcgaggagtccgctgcggaagcttcccgcgttgccgaggcggcagttatcggtgtccccgacgagatcaaggggcaggtaccagttgcctttgtcacgctccgtaagactgcttccgatgaactccagcgccgagaggctgcggcagagatacgccaggcggtagagagccgtctgggggcggtggcgcgacctgctcgggtgtatatcgtcaatctcctgccgaaaacgcgttcaggcaaattacttcgtcggtcattgcaagccctggcgctgcaggcggatccaggggacttgtccacccttgacgaccctagtgcactcgatgagattcgccatgccctgagacgtggaccggacgcggggaactga

SEQ ID NO: 790 - protein, 649 aa, Pseudomonas putida
MSYSSGLIRPDGAKKEDRYLNLYRHSVDDPESFWAEQAQRIHWHVQPQRILEASNPPFRQWFVGGQTNLCFNALDRHLPERAEQLALVAVSSETGVTQEITYAQLYREVNTFAAVLKRLNVEKGDRVVIYMPNMAEAVFAMLACARIGAIHSVVFGGFAARNLSARIDDSQPKLLITADAGMRGGRVIPYKPLVDQACAESESPPPKVLIVSRGLQPELTWVPGRDEDYATLRAAVGDAQVSVEWLESNDPSYLLYTSGTTGKPKGVQRDVGGYAVALALSMETVFDVAPGQVMFSTSDVGWAVGHSYNVYGPLIVGATSLLYEGLPTHPDAGIWWSLCERYAVRTMFSSPTAVRVLKRFNTDAIARHDLNALRYLFLAGEPLDEPTANWISRALGKPVIDNYWQTETGWPAITLHPGLEMKPVKLGSAGLPNLGYRIKVIDELSGAPVAAHQKGMLVVEPPLPPGFMTTIWRDDDRFCSSYFGHFKEQVYSSLDWAVQDEDGYTYILGRTDDVINVAGHRLGTREIEESAAEASRVAEAAVIGVPDEIKGQVPVAFVTLRKTASDELQRREAAAEIRQAVESRLGAVARPARVYIVNLLPKTRSGKLLRRSLQALALQADPGDLSTLDDPSALDEIRHALRRGPDAGN

SEQ ID NO: 791 - DNA, 2444 bp, Lysobacter
  CDS (337)..(2232)
cccgggcgaccgcatccgcgtgcgcgtggacgtgcgtcggactgacgcggcgaccgccgggccgaacgcagcgcccggccgaggcatcttcgcaaggcgcaaggaatcggcgcgggcgcgcaggaacggggcgccgcccgcccggtgggacgccggggccgcaaggctccggcgtctttcgttggtgcgggctcgtgttcgcgcgagctttcttgtgcgagccgtcatcgtgcgggcccgtccacggcgcgcgccgcgcctagaccaaggtcgtaacgccccgcgtgcgccgcatggtctagcctgcgcgcggatgtcccttcgaggccgcgccccatgcgttacgaggagttccaccgccgttcgatcgaacagcccgaggcgttctgggccgagcaggcccgggcgatccactggcgcacgccgccgcagcgcatcctcgactactccaacccgccgttccggcaatggttcgccggcggcgaaaccaatctttgctacaacgcgctcgaccgccacctcgacgagcgcggcgaccagctcgcgctggtgacgatctccagcgaaaccgggcagacccgcgagctgagctatcgccaggtgcaccgcgaggtcaacgtcttcgccagcgcgattcgcgcgctcggcgtgggccgcggcgaccgcgtggtgatctacatgccgaacatggccgaggcggtgttcgcgatgttggcctgcgcgcgcatcggcgcggtgcattcggtggtgttcggcggattcgccgcgcacaacctggccctgcgcatcgacgacgccacgcccaagctgctgatctgtgccgatgccggcatgcgcggcggcaaggtcattccctacaagccgttggtggacgcggcctgcgcagaggcgcaatcgccgccgccgcacgtgctggtggtcagccgcggactcgacccggacctgcgcctgatccccggtcgcgatgtcgactacgcggccttgcgcacgcagcacgaagacgcgcaggtcgaggtggaatggctcgaatccaacgagcccagctatctgctctacacctccggcaccaccggcaagcccaagggcgtgcagcgcgacgtcggcggctacgcggtcggcctggcgctgtcgatgtgggcgatctacgacatccgcgccggacaggtgatgttctccacttccgacgtgggctgggcggtcggccattcctacaacgtctacggcccgctgatcgccggcgcgacctcggtgttgtacgaaggcctgccgaccaatcccgacccgggcgtgtggtggagcatctgcgagcgctacggcgtgcgcaccatgttctcctcgccgaccggcatccgcgtgctcaagaaacaggacgcggcctggttgaagaagcacgacctgtccgcgctgcattggctgttcctggccggcgagccgctcgacgagccgaccgcgcactggatcaccgacggcatcggcaagaccgtcatcgacaactactggcagaccgaaaccggctggccggtgctggcgctgatgccggggctggacctcaagccggtcaagttcggctcgccgggcctgccgatgccgggctaccacctgcgggtgatcgacgaggccaccggccgcgatgtcggcccgaacgagaagggcgtgctgacgatcgtgccgccgctgccgccgggctgcctgagcacggtgtggaacgacgatgcgcgcttcctcaccagctatttcggccacttcaaggagctgttgtacagctcgctggattgggcgatccgcgacgaggacggctacaccttcattctcggccgcaccgacgatgtcatcaacgtcgccggccaccgcctgggcacgcgcgagatcgaggaatcggtggccagccacgccagcgtcgccgaggcggcggtgatcggcgtgcacgacgagctcaagggccaggtgccggtggtgttcgccacgctcaaggccggcgatgcgcacgacccgcacgcggtcgcgacgggcatgcaggactgcgtggtgcgccagctcggcgcggtggcgcggccggcgcgggtgtacgtggtcgccgcgctgcccaagacccgctcgggcaagctgctgcggcgctcgatccaggccctggccgaaagccgcgaccccggcgatctgtccacgctcgacgatcccggcgcgctggaggaagtgcggcgcgcgctcgaacgcggcgccgatgcgggcggctgaccggcgccggcgcagcgtgaacgcgagcgaaacgttcgcccgcgcaacaccggtgttgacgccatttttctgcgacagcgttagcatcgcggcaacgggcgggctgcggcccgccctcgatccagcgaggcacgcgcgcaatgcagtacaccagtccttccggcaccgacgccgaactcggcccggcgcaccacggcgatgcgcaccgcggc

SEQ ID NO: 792 - protein, 631 aa, Lysobacter
MRYEEFHRRSIEQPEAFWAEQARAIHWRTPPQRILDYSNPPFRQWFAGGETNLCYNALDRHLDERGDQLALVTISSETGQTRELSYRQVHREVNVFASAIRALGVGRGDRVVIYMPNMAEAVFAMLACARIGAVHSVVFGGFAAHNLALRIDDATPKLLICADAGMRGGKVIPYKPLVDAACAEAQSPPPHVLVVSRGLDPDLRLIPGRDVDYAALRTQHEDAQVEVEWLESNEPSYLLYTSGTTGKPKGVQRDVGGYAVGLALSMWAIYDIRAGQVMFSTSDVGWAVGHSYNVYGPLIAGATSVLYEGLPTNPDPGVWWSICERYGVRTMFSSPTGIRVLKKQDAAWLKKHDLSALHWLFLAGEPLDEPTAHWITDGIGKTVIDNYWQTETGWPVLALMPGLDLKPVKFGSPGLPMPGYHLRVIDEATGRDVGPNEKGVLTIVPPLPPGCLSTVWNDDARFLTSYFGHFKELLYSSLDWAIRDEDGYTFILGRTDDVINVAGHRLGTREIEESVASHASVAEAAVIGVHDELKGQVPVVFATLKAGDAHDPHAVATGMQDCVVRQLGAVARPARVYVVAALPKTRSGKLLRRSIQALAESRDPGDLSTLDDPGALEEVRRALERGADAGG

SEQ ID NO: 793 - DNA, 2016 bp, Debaryomyces hansenii
  CDS (1)..(2016)
atgacaccacactctacacacgtaacgttggaccatgagggtattatccaacccccagcggaatttaaggaaagatcgaagtccaaacccaacttggcagactttgagacctatagcaagatgtacaaggaatcgattgagaaccccagcaaattttttggcgaacaagcgttggaacacttgagttgggaccgtccttttgacgaagccagataccccgtgagtagcgagcaggactttgcagacggggacattgcgtcgtggtttgtgaacgggcaattgaacgcttcgtataacgcagttgacagatgggccatcaagaatcctaacaagccggcgataatctacgaggcagacgaggaaaacgaaggtcgtattatcacgtacggccagttgttgaaggacgtgtgtaagttggcacaatgcttgacgaaattgggcatcagaaagggagattctgtggcagtatacttgccaatgatccctgaggcgttagtgactttgttagcgattgtgagaattggggccgtccattcggttgtattcgccgggttttcatctagctcgttgaaggaccgtatcttggacgccagctcgaagattgttatcaccactgatgagtcgaagagaggtggtaagaccattgagaccaagaagattgtggatgatgcgttgaagaactgtcctgacgtgacaaacgtcttgcttttcaagagaaccggcaacgcccatattccgttcaccgaaggcagggacttgtggtggcacgaggaaatggccaagtacggaccatacttcccaccggtaccagtcaactcggaagacccattatttttattgtacacctcgggttcgacaggtaagccgaagggtatccagcactcgaccgcggggtacttgttgggggctgccatgacgtccaagtacacgttcgacgtgcacgaagacgacgtgttatttaccgcaggagatgtgggttggattactggacacacatatgtggtatacggtccgttattatgtggggccaccaccgtggtgtttgaaggtaccccagcccaccctaactactcgagatactgggaaattgtcgacaagtatcaggtcacccagttctacgttgctcctactgctttgagattattaaagagagccggcaccaagtatatagaaaactataagttggattccttgagagttttaggttctgttggtgaaccaattgcagccgaaatctggcactggtataacgacaacattggtagacgcaagtgtcacattgttgatacctactggcaaacagaatcggggtcacacatgttagcgccattagccggtattactccaactaaaccaggctctgcctcgttaccatgttttggtattgatgcgaaaatcttggacccagttagtggtaaggaattgaaggaaaatgatgtcgagggggtcctttgtgtcaaatcgtgctggccatcaattagtagaggtatttacaacgactatgccagatttattgaaacttacttgaagccatacccaaatcattatttctcaggtgatggggctgcaagagacgttgacggattctactggattttaggtagagtcgacgatgttgttaatgtctccggtcacaggttgtctacggcggaaattgaagctgccttgatcttacatgaatctgttgctgaatgtgcagttgttgggtacgcagacgagttgacgggtcaagcagttgccgcttatgtttcattgaaatctaacgtatctgaagacctagaagtgatcaagaaagaattgatcctaactgttcgtaaggaaatcggtccttttgcaactccaaagacaattttgttggtagatgatttacctaagactagatcaggtaagatcatgagaagaattttgagaaaagttttggctggtgaagaagaccaattgggtgatatttcaacattatcgaatcctggtgttgttgctcaaatcattgatgtagtcaaggctactcgtaagtaa

SEQ ID NO: 794 - protein, 671 aa, Debaryomyces hansenii
MTPHSTHVTLDHEGIIQPPAEFKERSKSKPNLADFETYSKMYKESIENPSKFFGEQALEHLSWDRPFDEARYPVSSEQDFADGDIASWFVNGQLNASYNAVDRWAIKNPNKPAIIYEADEENEGRIITYGQLLKDVCKLAQCLTKLGIRKGDSVAVYLPMIPEALVTLLAIVRIGAVHSVVFAGFSSSSLKDRILDASSKIVITTDESKRGGKTIETKKIVDDALKNCPDVTNVLLFKRTGNAHIPFTEGRDLWWHEEMAKYGPYFPPVPVNSEDPLFLLYTSGSTGKPKGIQHSTAGYLLGAAMTSKYTFDVHEDDVLFTAGDVGWITGHTYVVYGPLLCGATTVVFEGTPAHPNYSRYWEIVDKYQVTQFYVAPTALRLLKRAGTKYIENYKLDSLRVLGSVGEPIAAEIWHWYNDNIGRRKCHIVDTYWQTESGSHMLAPLAGITPTKPGSASLPCFGIDAKILDPVSGKELKENDVEGVLCVKSCWPSISRGIYNDYARFIETYLKPYPNHYFSGDGAARDVDGFYWILGRVDDVVNVSGHRLSTAEIEAALILHESVAECAVVGYADELTGQAVAAYVSLKSNVSEDLEVIKKELILTVRKEIGPFATPKTILLVDDLPKTRSGKIMRRILRKVLAGEEDQLGDISTLSNPGVVAQIIDVVKATRK

SEQ ID NO: 795 - DNA, 2040 bp, Debaryomyces hansenii
  CDS (1)..(2040)
atgaccagttctccaacacatcaagttgtgcacgaagccaacaacatcaagaaacaagaaactccaaaagaatttttcgaaagacagccacgccaagggcacattacttcgttagaacaataccaagaattatacgagaagtcaattaacgacccagaaaccttttttggtgagtttggtaaggaattgttgcactgggacagagacttcgaaagagtcaagtctggatctttgttgcatggcgatgcagcatggtttattggaggtcaattgaacgcatgttacaactgtgttgatagacatgcattcgctactccaaacaagccagctattatctacgaagctgatgaagaaaaggactctaagatcttgactttcgccgaattgttgagagaagtctgccaagttgcaggtgtcttacaaagctggggtattaagaaaggcgacactgttgccatttatatgccaatgaactcgcaagcgatcattgctatgttggctgttgctagattgggtgctatccactctgttattttcgctggtttttcttctggttccattaaggacagagttaacgatgcatcttgtaaggctttgatcacctgtgacgaaggtcgtcgtggtggaaagaccattaacatcaagaaattgtgtgacgaggctttattgaactgtccatccattgaaaaggttcttgtttacgaaagaaccggtaataaggaagttaccttaaaggaaggccgtgattactggtggtctgaagaaacccaaaagtttgcaggctacttacctccagttccagttaactccgaagatccattattcttgttatacacctcaggttctactggtactccaaagggtgttgttcactctactgctggttacttattaggagctgccttaactactaaatacgtatttgatatccacccagaagatgtcttattcactgctggtgatgttggttggattactggacacacctacgcgttatatggtccattatctcttggtgtgccaactgtcgtttttgaaggtaccccagctttcccagattacggtagattatggcaaattgttgaaaaacataaggccactcacttctatgttgctccaaccgccttaagattattaagaaagtctggtgaacaagaaattgagaaatacgatttatcttctttaagaactttgggatctgttggtgaacctatttctccagatatctgggaatggtacaacgaaaaagttggtaagggccaatgccatgtcactgatacttattggcaaacggaatctggatcgcacttcattgctccaattgcaggtgtcgttccaaacaaacctggttctgctgctgtaccattctttggtatccaaacctgtcttattgatccagtcagtggtatcgaaattcaagggaacgacgtcgaaggtgttttagccgtcaaagatacctggccatccatggccagatcggtctacaagaaccataccaaatatatggacacctacttgaacccatacccaggatattacttcacgggtgatggtgccgcaagggatcatgatggatactactggatccgtggtagagttgatgacgttgttaatgtttctggtcacaggttatcgactgctgagatcgaagctgctttaattgaacataatgcaatttctgaagctgccgttgtcggtatgaatgacgacttaacgggtcaaactgttgttgcttttgttgcattgaaggaacaccttatcgctaaccttaaagccgacgaatccccagaagaagccttgaaattgaagaaagaaatgatcttacaagtcagaactcaaattggtccatttgctgctccaaagtctgttattattgtagaggatttaccaaagactagatctggtaagatcatgagaagaatcttaagaaagatcgcagccggtgaagctgatcaattaggtgatattaccactttatctaacccgcaatctgttgctggtattattggctcttttgatagccaatttggtaagaagtag

SEQ ID NO: 796 - protein, 679 aa, Debaryomyces hansenii
MTSSPTHQVVHEANNIKKQETPKEFFERQPRQGHITSLEQYQELYEKSINDPETFFGEFGKELLHWDRDFERVKSGSLLHGDAAWFIGGQLNACYNCVDRHAFATPNKPAIIYEADEEKDSKILTFAELLREVCQVAGVLQSWGIKKGDTVAIYMPMNSQAIIAMLAVARLGAIHSVIFAGFSSGSIKDRVNDASCKALITCDEGRRGGKTINIKKLCDEALLNCPSIEKVLVYERTGNKEVTLKEGRDYWWSEETQKFAGYLPPVPVNSEDPLFLLYTSGSTGTPKGVVHSTAGYLLGAALTTKYVFDIHPEDVLFTAGDVGWITGHTYALYGPLSLGVPTVVFEGTPAFPDYGRLWQIVEKHKATHFYVAPTALRLLRKSGEQEIEKYDLSSLRTLGSVGEPISPDIWEWYNEKVGKGQCHVTDTYWQTESGSHFIAPIAGVVPNKPGSAAVPFFGIQTCLIDPVSGIEIQGNDVEGVLAVKDTWPSMARSVYKNHTKYMDTYLNPYPGYYFTGDGAARDHDGYYWIRGRVDDVVNVSGHRLSTAEIEAALIEHNAISEAAVVGMNDDLTGQTVVAFVALKEHLIANLKADESPEEALKLKKEMILQVRTQIGPFAAPKSVIIVEDLPKTRSGKIMRRILRKIAAGEADQLGDITTLSNPQSVAGIIGSFDSQFGKK

SEQ ID NO: 797 - DNA, 1974 bp, Yarrowia lipolytica
  CDS (1)..(1974)
atgtctgaagaccacccagccatccacccaccctccgagttcaaggacaaccacccccacttcggaggcccccacctcgactgtctgcaggactaccaccagctgcacaaggagtccattgaggaccccaaggccttctggaagaagatggccaacgagctcatctcctggtcaaccccctttgaaactgtgcgatctggcggcttcgagcacggcgacgtggcctggttccccgagggccagctcaacgcctcctacaactgtgtggatcgacacgcctttgccaaccccgacaagcccgccatcatttttgaggccgatgagccgggccagggccgaatcgtcacctacggcgaactgctgcgacaggtgtctcaggtcgcagccaccctgcgatccttcggcgtccagaagggcgatactgtggccgtctacctgcccatgatccccgaggccattgtcactctgctggccatcacccgaattggcgctgtccactcggtcatcttcgccggcttctcctccggttctctgcgagaccgaatcaacgacgccaagtccaaggttgtcgtcaccaccgacgcctccatgcgaggaggcaagaccatcgacaccaagaagattgtcgatgaagccttgcgagactgcccctctgttacccacaccctggtcttccgacgagcaggtgtcgagaacctggcctggactgagggccgggacttctggtggcacgaggaggtcgtcaagcaccgaccctaccttgcccccgtccccgttgcctccgaggaccccatcttcctgctttacacctctggatccaccggcacccccaagggtctggcccacgctaccggtggctacctgcttggtgctgccctgaccgccaagtacgtgtttgacatccacggagacgacaagctgttcaccgctggagacgttggctggatcaccggccacacctacgtgctctacggtcctctgatgctcggagccaccactgttgtgttcgagggaacccctgcctacccctccttctcgcgatactgggacattgtcgacgaccacaagatcacccacttctacgtggctcccaccgccctgcgtctcctgaagcgggccggcacccatcacattaagcacgacctgtcgtctctgcgaaccctcggctctgtgggtgagcccattgcccccgacgtgtggcagtggtacaacgacaacattggccgaggcaaggcccacatctgtgacacctactggcagaccgagactggctcgcatatcattgcccccatggccggcgtgacccccaccaagcccggttctgcttccctgcctgtctttggaattgatcccgttatcattgatcccgtgtctggcgaggagctcaagggtaacaacgttgagggtgttcttgccctgcgatctccctggccctccatggcccgaaccgtgtggaacacccacgagcgatacatggagacctacctgcggccctaccccggctactacttcaccggtgatggtgctgcccgagacaatgacggcttttactggatccgaggccgagtcgacgacgttgtcaacgtttctggccaccgtctttccaccgccgagattgaggctgctctcattgagcacgctcaggtgtctgagtctgccgttgttggtgtccatgacgatctgactggccaggccgtcaacgcctttgtggctctcaagaaccccgtcgaggatgtggacgctctgcgaaaggagcttgttgtgcaggtgcgaaagaccattggaccctttgctgctcccaagaatgtcatcatcgtggacgatctgcccaagactcggtctggcaagatcatgcgacgaattctgcgaaaggtgcttgctggcgaggaggaccagctcggagacatttccactcttgctaaccccgacgttgtccagaccatcattgaggttgttcactcgttgaaaaagtaa

SEQ ID NO: 798 - protein, 657 aa, Yarrowia lipolytica
MSEDHPAIHPPSEFKDNHPHFGGPHLDCLQDYHQLHKESIEDPKAFWKKMANELISWSTPFETVRSGGFEHGDVAWFPEGQLNASYNCVDRHAFANPDKPAIIFEADEPGQGRIVTYGELLRQVSQVAATLRSFGVQKGDTVAVYLPMIPEAIVTLLAITRIGAVHSVIFAGFSSGSLRDRINDAKSKVVVTTDASMRGGKTIDTKKIVDEALRDCPSVTHTLVFRRAGVENLAWTEGRDFWWHEEVVKHRPYLAPVPVASEDPIFLLYTSGSTGTPKGLAHATGGYLLGAALTAKYVFDIHGDDKLFTAGDVGWITGHTYVLYGPLMLGATTVVFEGTPAYPSFSRYWDIVDDHKITHFYVAPTALRLLKRAGTHHIKHDLSSLRTLGSVGEPIAPDVWQWYNDNIGRGKAHICDTYWQTETGSHIIAPMAGVTPTKPGSASLPVFGIDPVIIDPVSGEELKGNNVEGVLALRSPWPSMARTVWNTHERYMETYLRPYPGYYFTGDGAARDNDGFYWIRGRVDDVVNVSGHRLSTAEIEAALIEHAQVSESAVVGVHDDLTGQAVNAFVALKNPVEDVDALRKELVVQVRKTIGPFAAPKNVIIVDDLPKTRSGKIMRRILRKVLAGEEDQLGDISTLANPDVVQTIIEVVHSLKK

SEQ ID NO: 799 - DNA, 2124 bp, Kluyveromyces lactis
  CDS (1)..(2124)
atgtctcctgctgttgataccgcttccaccgccaaagatccaatctcagtcatgaaatctaacgcttcagctgccgctgcagaccaaattaagacccatgaatacgaacatttaacttctgtgcctatagtgcagcctctaccaattactgataggttgagcagcgaagcagctcaaaaatataaacctaatttgccaggtgggttcgaagagtacaagtctttgcacaaggaatcacttgaaaatccagccaagttttaccatgaacgtgctcagctgttgaattggttcaaaccatacgatcaagttttcatcccagataccgaaggtaaaccaacttttgagaacaacgcttggtttaccaacggtcaattgaacgcttgttacaatttggtagacagacatgccttcactcaaccaaacaaggttgccattctttatgaagctgatgaaccaggtcaaggttatagtctcacttatgcggaattgttagaacaagtctgtaaagttgctcaaatcttgcaatactcgatgaacgtcaagaaaggtgacacggtcgcagtttatatgccaatgatcccacaggctttgattaccttgttggcaattactcgtatcggtgccattcattccgttgtttttgctgggttctcttcgaattcattgcgtgatcgtattaacgatgcttactcaaagacagtcatcaccaccgatgaatctaagagaggtggtaagaccatcgaaaccaagcgtatcgtcgatgaagccttgaaggatacccctcaagtaacaaacgttttggtcttcaaacgtactcataacgaaaatatcaagtacattccaggtagggatttggactgggatgaggaagtcaagaagtacaaatcttacaccccatgcgaacctgttgactctgaacatcctttgttcttattgtatacttcgggttccaccggtgctccaaagggtgttcaacattctacagcaggttacttgctccaagcattattaagtatgaaatacacctttgacatccaaaacgatgacatcttcttcaccgcaggtgacattggttggatcactggtcacacatactgtgtttacggtccattgttacaaggttgtactactttggtgttcgaaggtacacctgcctatccaaacttttctcgttattgggaaattgttgacaagtaccaagtgactcaattctatgtagccccaactgcactacgtctattgaagagagctggtgattcctttactgaaggattctctctcaagtcattgcgctccttgggttccgttggtgaacctatcgctgctgaagtttgggaatggtactctgaaaagattggtaagaatgagctaccaatcgtagacacatactggcaaactgaatctggctcccacttggtcactccattggctggtggtgctactccaatgaaaccaggtgcagcggcattcccattctttggtattgatttggcagtgttggatccaaccacaggtatcgagcaaactggtgaacatgcagaaggtgttcttgccattaaaagaccttggccatctttcgcaagaaccatttggaagaataacgataggttcttagacacgtacttgaaaccatacccgggctattacttcactggtgatggtgttgcccgtgataaagatggattcttctggatcttgggtcgtgttgatgatgttgttaacgtctcaggtcacaggttgtctactgctgaaattgaagctgctatcattgaagatgatatggttgccgaatgtgcagttgttgggtttaacgacgaattgactggtcaagccgttgctgcctttgtagtattgaagaacaagtctagtttaactgctgcaagcgagtccgagttacaagacatcaaaaagcatttgatcatcaccgttagaaaggatattggtccattcgctgctcctaagttgatcgtcctagttgatgatctaccaaagactagatctggcaagattatgagacgtattttgagaaagatcctagccggtgaatctgatcaattgggcgacgtctccacattatccaaccctggtatcgttaagcacttgatcgattccgtgaaattataa

SEQ ID NO: 800 - protein, 707 aa, Kluyveromyces lactis
MSPAVDTASTAKDPISVMKSNASAAAADQIKTHEYEHLTSVPIVQPLPITDRLSSEAAQKYKPNLPGGFEEYKSLHKESLENPAKFYHERAQLLNWFKPYDQVFIPDTEGKPTFENNAWFTNGQLNACYNLVDRHAFTQPNKVAILYEADEPGQGYSLTYAELLEQVCKVAQILQYSMNVKKGDTVAVYMPMIPQALITLLAITRIGAIHSVVFAGFSSNSLRDRINDAYSKTVITTDESKRGGKTIETKRIVDEALKDTPQVTNVLVFKRTHNENIKYIPGRDLDWDEEVKKYKSYTPCEPVDSEHPLFLLYTSGSTGAPKGVQHSTAGYLLQALLSMKYTFDIQNDDIFFTAGDIGWITGHTYCVYGPLLQGCTTLVFEGTPAYPNFSRYWEIVDKYQVTQFYVAPTALRLLKRAGDSFTEGFSLKSLRSLGSVGEPIAAEVWEWYSEKIGKNELPIVDTYWQTESGSHLVTPLAGGATPMKPGAAAFPFFGIDLAVLDPTTGIEQTGEHAEGVLAIKRPWPSFARTIWKNNDRFLDTYLKPYPGYYFTGDGVARDKDGFFWILGRVDDVVNVSGHRLSTAEIEAAIIEDDMVAECAVVGFNDELTGQAVAAFVVLKNKSSLTAASESELQDIKKHLIITVRKDIGPFAAPKLIVLVDDLPKTRSGKIMRRILRKILAGESDQLGDVSTLSNPGIVKHLIDSVKL

SEQ ID NO: 801 - DNA, 1962 bp, Pseudomonas putida
  CDS (1)..(1962)
atgagtgcggctccactgtatcccgttcgtcccgaggttgcggccactaccctgaccgacgaggccacctacaaggccatgtaccagaaatcggtgatcaacccggacggcttctggcgcgagcaggcccagcgtatcgactggatcaaaccgttcaccaaggtcaagcaaacctcctttgacgaccaccacgtcgatatcaaatggttcgccgacggcactctgaacgtttcctccaactgcctggaccgccacctcgaagagcgcggtgatcagttggccatcatctgggaaggcgacgacccttccgaacaccgcaacatcacttaccgtgaactgcacgagcaggtctgcaagttcgccaacgccctgcgtggccaggacgtgcaccgtggtgacgtggtcaccatctacatgccgatgatccccgaggccgtggtggccatgctggcctgtgcccgtattggtgcgatccactcggtggtgttcggtggcttctcccctgaagcgctggccggccgcatcatcgattgcgagtccaaggtggtgatcaccgccgacgaaggcgtgcgtggcggccgtcgtaccccgctcaaggccaacgtcgacctggcgctgaccaaccctgaaaccaaaagcgtgcagaagatcatcgtgtgcaagcgcaccggtggtgatattgcctggcaccagcaccgcgacatctggtacgaagacctgatgaaagtggcctccagccactgcgcgccaaaggaaatgggtgctgaagaagcgctgttcatcctttatacctctggctccacgggcaagccgaagggtgtgctgcacaccaccggcggttacctggtgtatgccgcgctgacccatgagcgcgtgttcgactatcgcccgggcgaggtctactggtgcaccgccgacgtcggttgggtcactggccacagctacatcgtctacggcccgctggccaacggcgccactaccttgcttttcgaaggcgtgccgaactacccggacattacccgcgtctcgaagatcgtcgacaagcacaaggtcaacatcctctacaccgcgccaaccgccatccgcgcgatgatggccgaagggcaggccgctgttgaaggggccgatggttccagcctgcgtctgcttggctcggtgggcgagccgatcaaccctgaagcctggaactggtactacaagactgtaggcaaggagcgttgcccgatcgtcgacacctggtggcagaccgaaaccggcggcatcctgatcagcccgctgccgggcgctaccggcctcaagccgggctcggcaacccgcccgttctttggtgtggtgcccgccctggtggacaacctgggtaacctgatcgaaggtgcggccgaaggcaacctggtgatcctcgactcctggccaggccagtcgcgttcgctgtacggcgaccacgaccgctttgtcgacacctacttcaagaccttccgtggcatgtacttcaccggcgacggtgcgcgccgcgacgaagatggctactactggatcaccggtcgtgtggatgacgtgctcaacgtctccggtcaccgcatgggtactgccgaaatcgaaagcgccatggtcgcgcattcgaaagttgccgaggctgcagtggttggcgtgccgcacgacatcaagggccagggcatctatgtgtatgtcaccctcaattccggtatcgaggccagtgagcagttgcgcctggagctgaaaaactgggtgcgcaaggaaatcggcccgattgcctcgccggacgtgatccagtgggcgccgggcctgccgaagacccgttcgggcaagatcatgcgccgcatcctgcgcaagattgccaccggtgagtacgatgcgctgggcgatatctcgacactggctgacccgggtgtggtgcagcacctgatcgatacccacaaggccatgaacctggcttcggcctga

SEQ ID NO: 802 - protein, 653 aa, Pseudomonas putida
MSAAPLYPVRPEVAATTLTDEATYKAMYQKSVINPDGFWREQAQRIDWIKPFTKVKQTSFDDHHVDIKWFADGTLNVSSNCLDRHLEERGDQLAIIWEGDDPSEHRNITYRELHEQVCKFANALRGQDVHRGDVVTIYMPMIPEAVVAMLACARIGAIHSVVFGGFSPEALAGRIIDCESKVVITADEGVRGGRRTPLKANVDLALTNPETKSVQKIIVCKRTGGDIAWHQHRDIWYEDLMKVASSHCAPKEMGAEEALFILYTSGSTGKPKGVLHTTGGYLVYAALTHERVFDYRPGEVYWCTADVGWVTGHSYIVYGPLANGATTLLFEGVPNYPDITRVSKIVDKHKVNILYTAPTAIRAMMAEGQAAVEGADGSSLRLLGSVGEPINPEAWNWYYKTVGKERCPIVDTWWQTETGGILISPLPGATGLKPGSATRPFFGVVPALVDNLGNLIEGAAEGNLVILDSWPGQSRSLYGDHDRFVDTYFKTFRGMYFTGDGARRDEDGYYWITGRVDDVLNVSGHRMGTAEIESAMVAHSKVAEAAVVGVPHDIKGQGIYVYVTLNSGIEASEQLRLELKNWVRKEIGPIASPDVIQWAPGLPKTRSGKIMRRILRKIATGEYDALGDISTLADPGVVQHLIDTHKAMNLASA

SEQ ID NO: 803 - DNA, 1644 bp, Acinetobacter sp
  CDS (1)..(1644)
atgcaaacattagagcaagcatatcaagcatttgatttgaatcaattaatagagcagcaattgataggccatccccaatcgatcaatgcttatgaagaatgttgtggccgttatgtgggacaaaataaaatcgcattgatttgggaagggcttgagggtgagacaaagcaattcaccttcgatgagttggcaacttattctggtcaattggcaaattattttaagtctcaaggtgtgcaacccggacaatgcattgcgggtctattacctcgtactcccgaattgttgattacaattttagccacttggcgaatgggagctatttatcaaccgttatttactgcatttgaatcaaaagcaattgaacatcgtttgagtgtagctcagacacaactggttgtgaccaacaaagaacaagcggcaaaattaaatgctgtgaacaatttaaaagtcttaacagtagaaaaagattcatttgatattttagatcaacctgatttttggaatgcacttaagcattttgatgcccaatatcaatctgaaatgattacctttaatgatcattttttgatgatgtttacgtctggaacgactggtttggctaaacctgtgcctgtgccactcaaagcaattttatcttttaaaggctatatgacgcacgctgttggattaaatcagtcagattctttctggaatctcgcagatcctggctgggcctatggtttgtactacgggataacagggcctttaagcctgggccatagcatcattttagatgaacaaggatttagtgttgatcgtgcaattgaattaattaaaaaatacaaagtctctaatttgattggatcgcctactgcctttaggatgttctttggatttaaagaaaaatttgatgctgaaattaaagattatttacgtgtggtgagtagtgccggagaacctttaacaccagaggtcgtccattggtttaagaatgatttagacatcaatatttatgatcagtatggtcaaactgaactgggtatggtcatcgcaaatcaccatgcacttgagcatcatgtaaagattggctctgctggatatgcaattcctggttatcgttttgtcgtattagatgaacatcatcaagaactatcatctgattctattggtgtattagcaatagatagtgctgcctctccattattctggtttacagggtacggcgaaaacaatcgaagcgcatttgttggtcagtattatattacgggtgatactgtgaaaatgaatgcgtttggcagtatcgactttgtcgggcgtatagatgatgtaattacaacatcgggttatcgtgtagggccttttgatgttgaaagtactttacttgagtgccaagaggttcttgaatctgcggtgattggtaagcctgatgcaatcagaactgaaattgtaaaagcttttgttgttttaaaatcacaatacaagtctcaggctgatcaatcactgagcgaaaaacttaaacaatatgtccgcggacgcctttcaaagcatgcttatcctaaagaaatagaatttgtagatcaattacctaaaacagccagtggcaaaatccagcgtggagttttaaaacaacaggaaatctcccgtatgcagttatcgggttaa

SEQ ID NO: 804 - protein, 547 aa, Acinetobacter sp
MQTLEQAYQAFDLNQLIEQQLIGHPQSINAYEECCGRYVGQNKIALIWEGLEGETKQFTFDELATYSGQLANYFKSQGVQPGQCIAGLLPRTPELLITILATWRMGAIYQPLFTAFESKAIEHRLSVAQTQLVVTNKEQAAKLNAVNNLKVLTVEKDSFDILDQPDFWNALKHFDAQYQSEMITFNDHFLMMFTSGTTGLAKPVPVPLKAILSFKGYMTHAVGLNQSDSFWNLADPGWAYGLYYGITGPLSLGHSIILDEQGFSVDRAIELIKKYKVSNLIGSPTAFRMFFGFKEKFDAEIKDYLRVVSSAGEPLTPEVVHWFKNDLDINIYDQYGQTELGMVIANHHALEHHVKIGSAGYAIPGYRFVVLDEHHQELSSDSIGVLAIDSAASPLFWFTGYGENNRSAFVGQYYITGDTVKMNAFGSIDFVGRIDDVITTSGYRVGPFDVESTLLECQEVLESAVIGKPDAIRTEIVKAFVVLKSQYKSQADQSLSEKLKQYVRGRLSKHAYPKEIEFVDQLPKTASGKIQRGVLKQQEISRMQLSG

SEQ ID NO: 805 - DNA, 1644 bp, Acinetobacter sp
  CDS (1)..(1644)
atgttggattatcaaacggtcgcaacctcatttgactttcatagagcagcaaatgaaatgttatctggttcactggatcaagttaatgcatgttacgaatgttgtgatcgacatgcagaatcaaaccccgaaaaaatagcattatattggcaaggcaaagatggtcgtcaatatcaatatacgtttgcacaattacaaaagtggtccagtcaatttgccaattttttaaaatcacaaggggttcaaacaggcgatcgtatttcaggtttattacccagaacacctgaattattggtggtgattttaggtgcttggcgaattggtgcagtttatcagccactttttacggcatttggcccgaaagcgattgagcatcgcgtgcagcttgcaaaaagtaaattggttgtgactgatttgggtaatcggagcaagcttgatgaagtagcgcattgtccacccatcatgacggttattggcgaaaaagatcatgcagtaaatgatcaagacttaaatttttggaagcaagtgagtcaagcgtctgaccactgtgatttggttttacaagacattcaaaaaccatttttactgatgtttacgtcgggaaccacaggccctgcaaagcctttggaagtgcctttaaaggcattaatcgcgtttggtcattatatgaaagatgccattggtttacgcaccgatgatgtcttttggaatcttgcagatcctggctgggcatatggtttatattatgccataaccgggccactgcttttggggcatgcaaccttattttatgagggtggttttagtatcgatagtttgtgccaaattattgaggattataaaattaccaatttggcaggtgcaccgactgcataccgcatgatgatggcagcagatccagcgaaaatcgcctgcctaaagggtaaattacgtgtgataagtagtgcaggtgaaccactcaatccagaagtatttcgttggtttaaacacactttagatgcccctatttttgatcattatggtcagactgaagtgggtatggtggtatgtaatcatcacggtttaagccatgatgtgcgtgcaggaacagcaggttttgcaagtccaggctatcgtgtggccgtagtggatgagcagggcaatgaacttccagcggatacggctggaatattggccgtcgatattcaaaagtcgccgatgatgtggtttggtggttatcaagaaagtcgaaaatctccttttttaaagcattattacttaacaggtgatacagccgaattacatgcggatggcagtatgagttttgtagggcgtagtgatgatgtcatcaccacatcaggctatcgtattggtcctttcgatgttgaaagtgcattaattgaacatcaagctgtaattgaagcagcagttattggtgtgcctgacccagaaagaacggaaattgtaaaagcatttgtgattttgacagcacagacgagcccatcagagcaattggccgaggaactacgccaatttgttaaaaagcgtttatcggcacatgcttatccaagacaagttgagtttgtgacagagttgcctaaaactccaagtggtaagattcaacggtttttgttgcgtaatcaagagattgccaagcaatcctaa

SEQ ID NO: 806 - protein, 547 aa, Acinetobacter sp
MLDYQTVATSFDFHRAANEMLSGSLDQVNACYECCDRHAESNPEKIALYWQGKDGRQYQYTFAQLQKWSSQFANFLKSQGVQTGDRISGLLPRTPELLVVILGAWRIGAVYQPLFTAFGPKAIEHRVQLAKSKLVVTDLGNRSKLDEVAHCPPIMTVIGEKDHAVNDQDLNFWKQVSQASDHCDLVLQDIQKPFLLMFTSGTTGPAKPLEVPLKALIAFGHYMKDAIGLRTDDVFWNLADPGWAYGLYYAITGPLLLGHATLFYEGGFSIDSLCQIIEDYKITNLAGAPTAYRMMMAADPAKIACLKGKLRVISSAGEPLNPEVFRWFKHTLDAPIFDHYGQTEVGMVVCNHHGLSHDVRAGTAGFASPGYRVAVVDEQGNELPADTAGILAVDIQKSPMMWFGGYQESRKSPFLKHYYLTGDTAELHADGSMSFVGRSDDVITTSGYRIGPFDVESALIEHQAVIEAAVIGVPDPERTEIVKAFVILTAQTSPSEQLAEELRQFVKKRLSAHAYPRQVEFVTELPKTPSGKIQRFLLRNQEIAKQS

SEQ ID NO: 807 - DNA, 2115 bp, Candida glabrata
  CDS (1)..(2115)
atgtcaccatctgctattgctgagaagaaacaggtggacaacatccaggagatcaaggacaagaaccaggagcctgcgcaccacgagtacgagcacttgaccaatgtcggtgtggtcaagcagaagcctatcgaccacaggttgaaggacaacatcaagacccactactcgcctcacctggacggcttgcaggagtacaagagacagtaccaggagtccatcgagaacccagagaagttcttcagcgagaaggcacgctctttcatgaactggttcagggacttcgacagggtcttcgtgccagacgtggacaacccaacaaaaccttccttcgagaacaacgcctggttcctgaacggccaattgaacacttgctacaactgtgtcgacagacacgctttgaagactccaaacaagaccgccatcatctacgaggcagacgagcccggtgaaggctactcgatgtcttacaaggaactgctggagaaagtctgccaagtggcacagatcttgaagtactccatgaacgtcaagaaaggtgacactgttgcagtctacatgccaatgatcccagaagcactcatcactttgctagccatctcgagaatcggtgccatccactccgtcgtcttcgcaggtttctcttcaaactccctaagagaccgtatcaatgacgccggctcccgcgtagtgatcaccgctgatgagtccaacagaggcggcaagatcatcgaaacaaagagaatcgtagatgacgccttgagagaaaccccacaagtcgaacacgtcctggtctacaggcgtaccaacaaccctcaagtcaacttccaagctccaagagacttggactgggaaactgagagaaagaagtacaagacttacttcccttgcgaacccgtcgactcagaacacccattattcttgctttacacctcgggatctacaggtactccaaagggtgttcaacactctaccgcaggctacctactgggcgccctgttgacgatgagatacactttcgacgtccatcaggaagacgtgttcttcaccgctggtgacatcggttggatcacaggccacacatactgtgtatacggtcctttgctgtacggttgtactactttggtcttcgaaggtacccctgcttatccaaacttctctcgttactgggaaatcattgacaaacaccaagtcacccagttctacgttgcaccaactgctctgcgtctactaaagagagctggtgactcattcatcgacggcttctccctgaagtctctacgttgtttgggctcagttggtgaacctatcgctgctgaagtctgggaatggtactctgacaagatcggtaagaacgagattcctatcgtcgacacttactggcaaaccgagtctggttctcacttggtcactcctttggcaggtggtgtcacaccaatgaaaccaggttctgcatcattgccattctttggtatcgaaaccgtcatcctggacccaactactggtgaagagattaacgactctcatgcagaaggtgtcctggcaattaagagaccatggccatcctttgccagaaccatttggaagaaccatgacagattcttggacacctacttgaacccatacaagggctactatttcacaggtgatggtgccgctagagacaaggatggctacatctggattttgggtcgtgttgacgatgtcgttaacgtctccggtcacagactatccacagctgaaattgaagctgccattatcgaggacagaatggtcgccgagtgtgctgtcgttggtttcaacgacgatctgaccggtcaagctgttgctgctttcgtggtcttgaaggacaaatcgacctgggcttctgcctccgaggaagaacttcaagatattaagaagcacttgattttgactgtgagaaaagacattggtccctttgctgcaccaaaattgattgtcttggttgatgacttaccaaagaccagatccggtaagatcatgaggcgtatcttgagaaagattttggcaggtgagtctgatcaattaggtgacgtctctaccttatccaatcctggcgttgttaagcatttgattgactctgttaaattgtga

SEQ ID NO: 808 - protein, 704 aa, Candida glabrata
MSPSAIAEKKQVDNIQEIKDKNQEPAHHEYEHLTNVGVVKQKPIDHRLKDNIKTHYSPHLDGLQEYKRQYQESIENPEKFFSEKARSFMNWFRDFDRVFVPDVDNPTKPSFENNAWFLNGQLNTCYNCVDRHALKTPNKTAIIYEADEPGEGYSMSYKELLEKVCQVAQILKYSMNVKKGDTVAVYMPMIPEALITLLAISRIGAIHSVVFAGFSSNSLRDRINDAGSRVVITADESNRGGKIIETKRIVDDALRETPQVEHVLVYRRTNNPQVNFQAPRDLDWETERKKYKTYFPCEPVDSEHPLFLLYTSGSTGTPKGVQHSTAGYLLGALLTMRYTFDVHQEDVFFTAGDIGWITGHTYCVYGPLLYGCTTLVFEGTPAYPNFSRYWEIIDKHQVTQFYVAPTALRLLKRAGDSFIDGFSLKSLRCLGSVGEPIAAEVWEWYSDKIGKNEIPIVDTYWQTESGSHLVTPLAGGVTPMKPGSASLPFFGIETVILDPTTGEEINDSHAEGVLAIKRPWPSFARTIWKNHDRFLDTYLNPYKGYYFTGDGAARDKDGYIWILGRVDDVVNVSGHRLSTAEIEAAIIEDRMVAECAVVGFNDDLTGQAVAAFVVLKDKSTWASASEEELQDIKKHLILTVRKDIGPFAAPKLIVLVDDLPKTRSGKIMRRILRKILAGESDQLGDVSTLSNPGVVKHLIDSVKL

SEQ ID NO: 809 - DNA, 2052 bp, Candida glabrata
  CDS (1)..(2052)
atgacattaaaagaacataagactgtgcatgaagcacagaacgctgttgctcgccaagctccagagcatttctacaagagccagccaagcagaggtggtttcataaaggacatctccgaatatgaaagactttacaagcagtcgattgaggacccagagactttcttcagtgaaaaggctcgtgaactattgcactgggacgccccattctctaaagtatcgtacggttctctagagcaaggtgatgtcgcttggttcctaaacggtaaactaaacgcctcttacaactgtgtggacagacacgcctttgccaacccagacaagcctgccattatctatgaagcagacgacgagaaggacaactataccatcacttttggtgaattgctgagaagagtatctaaggttgctggtatcttgaagagctggggtgtcaagaaaggtgacactgttgccatttacttgccaatgatcccagaagctattattgctatgttggccgttgtgcgtcttggtgccatccactctgtcgtcttcgccggtttctcagctggttctttgaaagaccgtgtagtcgatgctggttccaaggttgtcatcacttgtgatgaaggccgtagaggtggtaagactgtccacttgaagaaaatcgttgatgaaggtttgaacggtgtcgatcaagtctctcgtattttggttttcaagagaacaggtactgaaggtattccaatgaaggctggtagagatttctggttgcacgaggaagctgacaagagaagatcatatctaccacctgttccatgtgatgccgaagatccactattcctactatatacatctggttctaccggctctccaaagggtatcgtgcacactactggtggttatttgctaggtgccgctatgactactaagtacgtcttcgatgttcatccagaggatgttttcttcactgctggtgatgtcggctggattacaggtcacacctacgctctatacggtccattgttgctaggtgtaccaactatctgcttcgaatctacaccagcttacccagattacggtagatactggagaattgtcgaacgtcacaaggccacccacttctacgttgcaccaactgctatgagattgattaagcgtgttggtgaagctgaaattagcaagtacgacttgtcctccctacgtgtcctaggttctgtcggtgaaccaatttctcctgaactatgggaatggtacaacgaaaagattggtaacaacaattgtgttgtttgtgacactttctggcaaactgaatccggttctcatttgattgccccaatggcgggtgccatcccaaccaaaccaggttctaccactcttccattcttcggtattgatgcttgtatcattgatccagtttctggtgttgaaattgaaggaaacgatgtcgaaggtgttttagctgttaaatcaccatggccatccatggctagatctgtctggaacgatcacgttcgttatgtcgacacttacatgaagccatacccaggttactactttacaggtgatggtgctggtagagaccacgatggttactactggatcagaggtagagttgacgatgttgttaacgtctctggtcataggttatctactgcagaaattgaagcctgtttggttaaccatgagaatatctctgagaccgctgtggttggtatcaatgacgaattgaccggtcaagctgttattgcattcgtatcattgaaggaaggctacctacaaaatgatgccccagaaggtgatgctgaacatattactcctagtaacttacgtagagagttgattctacaagtcagaggtgaaattggtccattcgcttctccaaagtgtattatcttggtcagagacctaccaaaaaccagatctggtaagatcatgagaagagttttaagaaagatcgcttccaatgaagcagaccaactaggtgatttgtctactttggctaatgctgatgttgttcctgccattatctctgcctgcgaaaaccaattcttcgcagaaaagaaataa

SEQ ID NO: 810 - protein, 683 aa, Candida glabrata
MTLKEHKTVHEAQNAVARQAPEHFYKSQPSRGGFIKDISEYERLYKQSIEDPETFFSEKARELLHWDAPFSKVSYGSLEQGDVAWFLNGKLNASYNCVDRHAFANPDKPAIIYEADDEKDNYTITFGELLRRVSKVAGILKSWGVKKGDTVAIYLPMIPEAIIAMLAVVRLGAIHSVVFAGFSAGSLKDRVVDAGSKVVITCDEGRRGGKTVHLKKIVDEGLNGVDQVSRILVFKRTGTEGIPMKAGRDFWLHEEADKRRSYLPPVPCDAEDPLFLLYTSGSTGSPKGIVHTTGGYLLGAAMTTKYVFDVHPEDVFFTAGDVGWITGHTYALYGPLLLGVPTICFESTPAYPDYGRYWRIVERHKATHFYVAPTAMRLIKRVGEAEISKYDLSSLRVLGSVGEPISPELWEWYNEKIGNNNCVVCDTFWQTESGSHLIAPMAGAIPTKPGSTTLPFFGIDACIIDPVSGVEIEGNDVEGVLAVKSPWPSMARSVWNDHVRYVDTYMKPYPGYYFTGDGAGRDHDGYYWIRGRVDDVVNVSGHRLSTAEIEACLVNHENISETAVVGINDELTGQAVIAFVSLKEGYLQNDAPEGDAEHITPSNLRRELILQVRGEIGPFASPKCIILVRDLPKTRSGKIMRRVLRKIASNEADQLGDLSTLANADVVPAIISACENQFFAEKK

SEQ ID NO: 811 - DNA, 1959 bp, Bartonella quintana
  CDS (1)..(1959)
atgtctgaaaaaatctatccagtaccaaccgatatcaaaaaaaatgctttgatcaatgaagagacctatcaaaaatggtatcgggaaagcattaatgatccagaagccttctgggcaaaacatggccaacgcattgagtggtttaagccctatacaaaagtaaaaaacacttcatttaacggtgatgtatcgattcaatggtacgaagatggtataacaaatgttgcctataattgcattgatcgtcatctaaaaaactctggcaaccatatcgcactgatttgggaggggaataacccttatcatgataaaaaaataacctataatgaactttatgaacatgtttgtcgctttgctaatatattaaagaatcatggcgtaaaaaaaggtgacagagttaccatttacctcccgatgatacccgaagccgcttatgccatgctcgcctgcgctcgcattggtgctattcattcggttatttttgccggcttttcttctgaagcgatagcagaccgcattgttgattgcaaatcaacctttatcatcaccgctgatcaaggcctgcgtggaggaaaattgatcaagttaaaaaacaatattgatcatgctattgatattgcagcacgccgtggtgttcatgttaatcaagtcttggtcatacggcgtacaagtggaacaattgattgggtaaagggacgtgatttttggtatcatgaagaaatatctcatgccaaaacggattgtccagcagaaatgatgaatgctgaagatccactttttattctttatacctccggttcaacaggcaaaccaaaaggtgttctgcatacaacagctggctatctcgtttatgtatcgatgacacatcaatatgtttttgattatcatcctggtgaaatttactggtgtactgccgatattggctggatcagtggtcattcttacttgatttatggtcctctatgcaacggtgccaccactttaatgtttgaaggtataccaacctttcccgaccaaggtagattctgggaaattgtcgataagcataaagtaaatacgctttacactgcaccaactgctattcgcgcattaatgggtgctggaaattcttttgttgaacattctaaaagaacatccttacgcctcttaggcaccgtaggcgaaccgattaatccagaagcatggaaatggttttatcatacggttggagacaatcgctgtcccattctcgacacatggtggcaaacagaaacaggagggcatatgatcacgcccctaccaggcgcaacacaactcaaagcaggatcagccacccatccattctttggtgttcaactccaaatcattgatggcgaaggaaatgttctggaaggtgaagcagaagggaatctctgtattattgactcatggcctggtcaaatgcgcactctctataatgaccatgagcgttttatcgaaacctatttttccacatataaaggaaaatattttacaggcgacggttgtaaacgagacaatgacggttattactggattacaggacggattgatgacattctcaatgtctctggacacagattaggaacagctgaaattgaatcagcgcttgtttctcaccccgctatttcagaagcagctgttgtcggttaccctcatcccattaaaggacaaggaatttacagttttgtcaccttaatggaaggcataaccccaagtgaagaattgtataaagatcttattcagcatgtcaaaaaagaaataggatcgattgccctcttggataaaattcagtttacacctcagctccccaaaacgcgatcgggaaaaattatgagacgcattttgagaaaaatcgccgaaaatgatttcgataacctaggagatatttcaacccttgccgaaccacaagtcgttgacgatcttattgccaacagacaaaatacagaagccacggcttaa

SEQ ID NO: 812 - protein, 652 aa, Bartonella quintana
MSEKIYPVPTDIKKNALINEETYQKWYRESINDPEAFWAKHGQRIEWFKPYTKVKNTSFNGDVSIQWYEDGITNVAYNCIDRHLKNSGNHIALIWEGNNPYHDKKITYNELYEHVCRFANILKNHGVKKGDRVTIYLPMIPEAAYAMLACARIGAIHSVIFAGFSSEAIADRIVDCKSTFIITADQGLRGGKLIKLKNNIDHAIDIAARRGVHVNQVLVIRRTSGTIDWVKGRDFWYHEEISHAKTDCPAEMMNAEDPLFILYTSGSTGKPKGVLHTTAGYLVYVSMTHQYVFDYHPGEIYWCTADIGWISGHSYLIYGPLCNGATTLMFEGIPTFPDQGRFWEIVDKHKVNTLYTAPTAIRALMGAGNSFVEHSKRTSLRLLGTVGEPINPEAWKWFYHTVGDNRCPILDTWWQTETGGHMITPLPGATQLKAGSATHPFFGVQLQIIDGEGNVLEGEAEGNLCIIDSWPGQMRTLYNDHERFIETYFSTYKGKYFTGDGCKRDNDGYYWITGRIDDILNVSGHRLGTAEIESALVSHPAISEAAVVGYPHPIKGQGIYSFVTLMEGITPSEELYKDLIQHVKKEIGSIALLDKIQFTPQLPKTRSGKIMRRILRKIAENDFDNLGDISTLAEPQVVDDLIANRQNTEATA

SEQ ID NO: 813 - DNA, 1959 bp, Bartonella henselae
  CDS (1)..(1959)
atgtctgaaaaaatctacccaataccggataatatcaaaaaaaatgctttgatcgatgaagaaacctatcaacaatggtatcaggaaagcatcaatgatccagaaagtttctgggcaaaacatggtcaatgtattgaatggtttaaaccttatacaaaagtaaaaaatacttcctttaatggcgatgtatcgattcaatggtatgaagatggcataacaaatgttgcctataactgcattgatcgccacctaaaaacccatggtgataaaatcgcactgatttgggaaggagataacccttatcacgataaaaagataacctataatgaactttatgaacatgtctgtcgttttgccaatattttaaaaaatcacggtgtcaaaaaaggcgataaggttaccatttacctaaccatgatccctgaagcagcctatgcaatgctagcctgtgcccgtattggcgctattcattcggttatttttgcaggtttttctcctgaagcaatagcaggacgcattgtagactgcgaatcgacttttatcattaccgcaaatcaaggcttgcgtggaggaaaacagattaatttaaaagacagtgttgaccatgctattgagattgccgctcgccagaatgtgcatgtggatcaagtcatggtcatacggcgaacctgtggaccaatccattgggtagagggacgtgatttttggtatcatgaagaagtatctcataccaaaacggactgtccagcagaaaagatgaatgctgaagatccactttttattctttatacctcaggctcaacaggtaaacccaaaggtgttttgcatacaacagcgggctatcttgtttatgcatcaatgacccataaatatgtttttgattatcatgctggtgaaatttactggtgtactgctgatattggttggatcaccggccattcttatttggtttatggtcctctttgcaacgctgctactactttaatgtttgaaggcacaccaacctttcccgacaacggcagattctgggaaattgtcgataaacatcaagtcaatatattctacaccgcaccaacagctattcgcgccttaatgggtgcgggcaattcatttgttgaacgctcgaaaagaacatccttgcgtcttttagggtccgtgggcgaacccattaatccagaggcatgggaatggttttaccacacagttggaaacaatcattgccccattctcgatacatggtggcaaacagaaacaggaggacatatgatcacccccctccccggtgcgacaccccttaaagcaggatcagccacacgtcctttttttggagtacaactccaaatcatagatgcagaaggaaatgtcctagaaggtgaaacagaaggcaatctttgtattattgattcatggccaggacaaatgcgcacactctataatgatcacgagcgctttattcaaacttatttttccacctataaagggaaatattttacaggcgatggctgtaggcgcgatagcgatggctattattggattacaggacgagtggatgacattctcaatgtttctggacacagactaggaacagcagaaattgaatcagcgcttgtttcgcatcccgctgtttcagaagccgccgttgttggctaccctcatactattaaaggacaaggaatttacagttttatcaccttaatggaagggacagccccaagtgaagagttgcatcaagagcttatccgacatgtcagaaaggaaataggctccattgccatattggataaagttcaatttgctcctcagctccccaaaacgcgatcaggaaaaattatgagacggattttgcgaaaaattgccgaaaataattttgataatctaggagatatttccactctttctgaaccacaagtcattgatgatcttattgctaatcgtcaaaacagagaaattacagcgtaa

SEQ ID NO: 814 - protein, 652 aa, Bartonella henselae
MSEKIYPIPDNIKKNALIDEETYQQWYQESINDPESFWAKHGQCIEWFKPYTKVKNTSFNGDVSIQWYEDGITNVAYNCIDRHLKTHGDKIALIWEGDNPYHDKKITYNELYEHVCRFANILKNHGVKKGDKVTIYLTMIPEAAYAMLACARIGAIHSVIFAGFSPEAIAGRIVDCESTFIITANQGLRGGKQINLKDSVDHAIEIAARQNVHVDQVMVIRRTCGPIHWVEGRDFWYHEEVSHTKTDCPAEKMNAEDPLFILYTSGSTGKPKGVLHTTAGYLVYASMTHKYVFDYHAGEIYWCTADIGWITGHSYLVYGPLCNAATTLMFEGTPTFPDNGRFWEIVDKHQVNIFYTAPTAIRALMGAGNSFVERSKRTSLRLLGSVGEPINPEAWEWFYHTVGNNHCPILDTWWQTETGGHMITPLPGATPLKAGSATRPFFGVQLQIIDAEGNVLEGETEGNLCIIDSWPGQMRTLYNDHERFIQTYFSTYKGKYFTGDGCRRDSDGYYWITGRVDDILNVSGHRLGTAEIESALVSHPAVSEAAVVGYPHTIKGQGIYSFITLMEGTAPSEELHQELIRHVRKEIGSIAILDKVQFAPQLPKTRSGKIMRRILRKIAENNFDNLGDISTLSEPQVIDDLIANRQNREITA

SEQ ID NO: 815 - DNA, 2763 bp, Oryza sativa
  CDS (355)..(2472)
ggatttggcatcctctgaggaatgaattgtaaaaacaaaaaagggaaaaaaaggagggagaagaaaacaaagtcaacctctcgtcggttacattacaatttacaggagcaagcagcttaattagcaaaggctgcgtagcgtaatccgatcaccgatgtatccatccagcaatccatccaagatcgatcaacccctcgtcgtgatctcgtcgtcgtactattatttatagtccaccgctagccatcgcactctgcagcagcagcagcagccgcgcccccacacctcgcctcctcctcggcttggatctcgccgcatcatctgccgccgacgacgacgaagaggaagacgaccgccatggggacggcgagcggggaccagccggcaggggcgtcgtcggacaagctgcggcacgtggagtccatgtcggagctgccctccggcgccggcaggatctccgggatcaacgccgtcgtcctcggcgagtcactcgccgccgaggagcacgacctcgtctacccctccgccgagttctccgccgacgccctcgtcccctcccccaagaagtaccaaaagatgtatgagaggtcaatcaacgacccggccgggttctggtcggagatcgccgacgccttctactggaaggagaagtggaaccccagtgaggtctgctccgagaacctcgacgtcaccaaggggcctgtccagatcagttggttcaaaggtggcaaaacaaacatatgttacaatgctgttgatcgcaacgtcgaggctgggaacggagacaagatcgcgatgtattgggagggcaatgagcctggtcaggatgggaagctcacctattcagagctcttggacagggtttgccagcttgccaattacttgaagagtgttggtgtcggcaagggtgatgctgtgatcatctacttaccaatgttgctggagcttcccattgccatgcttgcttgtgcccgcattggtgctgttcactcggttgtatttgctggcttttctgcggattccctggcccaaaggatcgttgattgcaagcctaagcttgtgatcacttgcaatgcagtcaaaagaggggtgaagcccatccttctgaaagatatagtggatgctggtctggctgaaagtgagaaacaaggagtcgctgtaggtctatgtttgacatatgaaaatcagtcagcaatgaagagagaagacacaaaatggcaagcaggaagggatgtttggtggcaggatgttgtgaccagtttcccaaccaagtgcgatgtagaatgggtggatgcagaggacccattgttccttctgtacacaagtggcagtacaggaaagccaaagggtgtgttgcatactactgggggctacatggtttacagtgcaacaacatttaagtatgcatttgattacaagccgtcggacatatactggtgcactgcagactgtggctggattactggacacagctatgtgacgtatggtccactcctgaatggagcaacagttctcgtttttgaagggactccaaattaccctgattctggtcggtgctgggacattgtggacaagtacaaggtgacaatattttacactgcaccaacactcgttcgatcactcatgcgtgatggcaccgagtatgttacacgtcactctcgaaaatctcttcgagtcttgggaagtgttggtgagccaattaatcctagcgcatggagatggttctacaatattgtcggggactctcgatgccctatctccgacacctggtggcagactgaaactggtggcttcatgatcactcctttacctggcgcctggcctcaaaaaccaggttctgcaacctttcctttctttggtgttcagcctgtcattgttgatgagaaagggaaggagattgaaggagaatgcagtggatatctttgcataaagaaatcatggcctggggctttccggactctctatggagatcatgatagatatgagaccacttacttcaagccatttgctggctactattttactggggatggttgcagcagggacaaagacggttaccactggctgactggaagagtagatgatgtcatcaatgtcagtggacaccggattggtacagcagaggttgagtctgcgttggtttcacacccaaagtgtgcagaggctgctgttgttgctgttgagcatgaagtgaaaggtcaaggaatatatgcttttgtaactttggtggatggtgttccttatagtgaagaactacggaaaagcctcatattgacagtccgcaaccagattggggcatttgcagctcctgacaagatccactgggcaccaggacttcctaaaacgagaagcggtaagataatgcgcaggattctgcgcaaaattgcctcaaaacagctggatgaacttggtgacacaagcacccttgctgatcctggcgtcgttgaccagctgattgcgctcaaagattgctagattgtaaaaattagatgacagatgcacttccactgatgcttgtgcgttccatttctcttcctatatgatggagatgcactttctcttcctacattttagtgtccatagtctttcgtttattcggtggaagttgctcctggtctagggaactgaaacacgatatggaatgatctgagagtgcggtgttggacttctgtatacttgtgttacacattgagatgacttgctccatgaatgtatttgatggacgcaataaatccatttcaataaaatattttgtatgattttccc

SEQ ID NO: 816 - protein, 705 aa, Oryza sativa
MGTASGDQPAGASSDKLRHVESMSELPSGAGRISGINAVVLGESLAAEEHDLVYPSAEFSADALVPSPKKYQKMYERSINDPAGFWSEIADAFYWKEKWNPSEVCSENLDVTKGPVQISWFKGGKTNICYNAVDRNVEAGNGDKIAMYWEGNEPGQDGKLTYSELLDRVCQLANYLKSVGVGKGDAVIIYLPMLLELPIAMLACARIGAVHSVVFAGFSADSLAQRIVDCKPKLVITCNAVKRGVKPILLKDIVDAGLAESEKQGVAVGLCLTYENQSAMKREDTKWQAGRDVWWQDVVTSFPTKCDVEWVDAEDPLFLLYTSGSTGKPKGVLHTTGGYMVYSATTFKYAFDYKPSDIYWCTADCGWITGHSYVTYGPLLNGATVLVFEGTPNYPDSGRCWDIVDKYKVTIFYTAPTLVRSLMRDGTEYVTRHSRKSLRVLGSVGEPINPSAWRWFYNIVGDSRCPISDTWWQTETGGFMITPLPGAWPQKPGSATFPFFGVQPVIVDEKGKEIEGECSGYLCIKKSWPGAFRTLYGDHDRYETTYFKPFAGYYFTGDGCSRDKDGYHWLTGRVDDVINVSGHRIGTAEVESALVSHPKCAEAAVVAVEHEVKGQGIYAFVTLVDGVPYSEELRKSLILTVRNQIGAFAAPDKIHWAPGLPKTRSGKIMRRILRKIASKQLDELGDTSTLADPGVVDQLIALKDC

SEQ ID NO: 817 - DNA, 1941 bp, Bacillus thuringiensis serovar konkukian str
  CDS (1)..(1941)
atgaaacaagcagtttggtttccaacagaagagtataaagaaaaaacacgcttatatggttggatgaaatcattggggtatgaagattatgaaacgttttataataaatctattgaagaaacagcttggttttggggagaagctgagaaagcggttggctatcaatggatgaaaccttatacagaagtgttagacttgcaaaatggtacaccgtttgcacagtggtataatggcggaacatgtaacgttgtagaatcagtgttatcacgctggcttgcagatgatgaaacaagaacgcaaccagcacttcagtatgaaggagaaaatggaacttcaaaatcatttacatatgaagaacttgatagctgggtaagtcgcgttgcaaatggtttgaaacatgcgggtattgaaaaaggcgaccgagtaacaatttatatgccaatgattccagaaacagttgttgcgatgctagctgtaatgaaaatcggagcaattatttcaccaatattctcaggatttgcgtctgatgcagtcatgacacgcgtgcaagcagcaggatcaaagatgatcattactgcagatggtttttcacgccgaggtaagattgtttcattaaaagatgaagtagataaagcttgtgagcattgtccaactgttgaaaaagtcgttatcgtgcgccacgcaggaaatgattttacaccgcataattatgatttctcatggagtacgttagaaaaagaaaagccatttgtacatgctgaagaaatgcatagtgacgatccgttaatgctcatttatacatcaggtacaacaggaaaaccgaaagggaccgtgcacactcatgctggtttccctttgaaagcagcatttgatgcagggtttgggatgaatataaaacaaggcgaccgcgtattatgggtaactgatatgggctggatgatgggaccatttttactatttggctctctcattaatggagcaacgatggttatgtatgaaggtgttccggacttcccagaagcagatcgtttatgggagacagttgataaatatgaaattacacatctcggtatatcaccaacattaattcgtgcgttaatggcaaaaggtgatgagtatgtaaataaacattcgcttaagagtttagaagtatttgcctcaacaggcgagccttggaatccagacccttggatgtggctatttgaaatggttggaaaaagtaatgtgccaatttgtaactattcaggcggaactgaaatttcaggtgggattttcgggaacgtccttattaaaccaattgcaccgattagctttaatgcttctttaccagggatggcggcggttgtgctcgatgatcaaggtaatccaattcgcgatgaagttggagaattatgtttagagaaaccttgggttggtatgacgaaaagtttctgggaagacgatgagcgttatgtgaacacatattggtcacgttttgaaaataaatgggttcatggtgactgggtggtttatgatggtgagcaatatattattacaggacgctcagatgatacgctaaacattgctggaaaacgcattggacctgctgaatatgaatctattcttgtgaagcataatgatgtcatagaagctgccgcgattggtgtaccagatgatgtaaaaggtgaagtttgtcattgttttgtagtattaagagataatgtaacatttacaggagaattaaagaaagaattaatgagtttagtaaactctcatattggaaaagcattatgtccaaaagatattcacgttgtagaagatttaccgaaaacgcgtaattctaaagtaatgcgacgtgtcattaaagctgcttatctagggaaagaattaggtgatttatcatcacttgtaaaccctgaagtagtgccatttattcagggattgcagtctagtaaattataa

SEQ ID NO: 818 - protein, 646 aa, Bacillus thuringiensis serovar konkukian str
MKQAVWFPTEEYKEKTRLYGWMKSLGYEDYETFYNKSIEETAWFWGEAEKAVGYQWMKPYTEVLDLQNGTPFAQWYNGGTCNVVESVLSRWLADDETRTQPALQYEGENGTSKSFTYEELDSWVSRVANGLKHAGIEKGDRVTIYMPMIPETVVAMLAVMKIGAIISPIFSGFASDAVMTRVQAAGSKMIITADGFSRRGKIVSLKDEVDKACEHCPTVEKVVIVRHAGNDFTPHNYDFSWSTLEKEKPFVHAEEMHSDDPLMLIYTSGTTGKPKGTVHTHAGFPLKAAFDAGFGMNIKQGDRVLWVTDMGWMMGPFLLFGSLINGATMVMYEGVPDFPEADRLWETVDKYEITHLGISPTLIRALMAKGDEYVNKHSLKSLEVFASTGEPWNPDPWMWLFEMVGKSNVPICNYSGGTEISGGIFGNVLIKPIAPISFNASLPGMAAVVLDDQGNPIRDEVGELCLEKPWVGMTKSFWEDDERYVNTYWSRFENKWVHGDWVVYDGEQYIITGRSDDTLNIAGKRIGPAEYESILVKHNDVIEAAAIGVPDDVKGEVCHCFVVLRDNVTFTGELKKELMSLVNSHIGKALCPKDIHVVEDLPKTRNSKVMRRVIKAAYLGKELGDLSSLVNPEVVPFIQGLQSSKL

SEQ ID NO: 819 - DNA, 1953 bp, Picrophilus torridus
  CDS (1)..(1953)
atgtatagtttaatgttaaatactataatgagtgagacattaccaacagatgagagatacaatacctcttttagcaggtatcttgatgagtacaggagatccattgagaacacagaggagttctggaatgaaaaatcaaaaataatagaatggttcagggactacgacagggttctggatgattcgaagaagccattttttagatggtttgtcaatggaaaaacaaacgtttcatacaactgccttgacaggcatataaagaccgataaaagaaacaaggttgcatacatatgggtctcagaatcaggaaatgaaaagatagtaacatactacggtttatacagaagggtcaatgcccttgcaaggggacttttaaacatgggccttagaaaaggggatcacgttacaatatacatgccaatgatacttgaggctccggttgcaatgcttgcatgtgccagaataggtgttgtgttcaacgttgttttctctggctttggcgctgaggcacttgcagagagaataaaggattcaagatcaaagatggttataacagctgatggtgcatggcgccgtggaaagatcgttgagttaaaaagcatagttgacagggcacttgagttaaccgagaacgttgagagcgtaatagttgtgaaaaatacaaacaatgagataaacatggaatcagagcgcgatttctattacaatgatattatagaggacggctacgttgaaccagagaaaatggattcaaacgatcctttgtttatattatacacatcgggaacgactggaaagccaaagggcatagtccatggcaacggcggttaccctgtatggatatcaaacacaatgaaatgggcctttgatccaaaggacgaggatagatactggtgcgccgcggatattggctggataaccgggcacagctatattgtctttgcgccgctgctccttggagtaacatcaataatgtacgagggcgcaatagattatccaaagccggatcgtgtctgggatataatagaaaggtacggtgttaacatattatacacgtccccaacggccataagattgttaatgaagtacggagataagtatccaaattcacatgatctgagctcattaaaaacgcttggaactgttggtgagccaataaacccggctgcatggcactggttctatgaggtaataggaaaatcaaggtgtccaataatagatacctactggcagaccgagaccggtggattcacaatagcacctgcgcttggacttggacttcctgatttaaaaccgggctctgcaacatttccgctgcctggaatagatcctgtgatactcgatgacaatggaagggaggtaaagagaaacgagaagggatacattgttttaagaaggccatggcccggtttaatgctaacagtgaacaacgacgataaaaggtacatagaaacctatttttcaaagtttaaggatatgtacttaatgggcgactacgcggtaaaggacgatgatggctacatatggctgcttggccgtgctgacgaggtattaaaggtctcagggcatagaataggaacaatagaaatagaggatgcacttgtatcgatgaaggagatagccgaggcagctgtgttcggaaaacctgatacaataaagggcgatacaataatagcatttgtaacattaaaggagggctatgaaaagagtcctgacctgatagattattttaaaaggaagatcagggaagagcttggaccaatcatggttcctgaggagatacatatagtcgattcactgccaaagacaagatcaggaaagatcatgaggcgtgttataaaggccgtttatctggaccagcttccaggggatatcacaacgcttgaaaacgaggcatctgtagacgagataaaaagggccgttgaggaattaaaaaggtacacaggtgattaa

SEQ ID NO: 820 - protein, 650 aa, Picrophilus torridus
MYSLMLNTIMSETLPTDERYNTSFSRYLDEYRRSIENTEEFWNEKSKIIEWFRDYDRVLDDSKKPFFRWFVNGKTNVSYNCLDRHIKTDKRNKVAYIWVSESGNEKIVTYYGLYRRVNALARGLLNMGLRKGDHVTIYMPMILEAPVAMLACARIGVVFNVVFSGFGAEALAERIKDSRSKMVITADGAWRRGKIVELKSIVDRALELTENVESVIVVKNTNNEINMESERDFYYNDIIEDGYVEPEKMDSNDPLFILYTSGTTGKPKGIVHGNGGYPVWISNTMKWAFDPKDEDRYWCAADIGWITGHSYIVFAPLLLGVTSIMYEGAIDYPKPDRVWDIIERYGVNILYTSPTAIRLLMKYGDKYPNSHDLSSLKTLGTVGEPINPAAWHWFYEVIGKSRCPIIDTYWQTETGGFTIAPALGLGLPDLKPGSATFPLPGIDPVILDDNGREVKRNEKGYIVLRRPWPGLMLTVNNDDKRYIETYFSKFKDMYLMGDYAVKDDDGYIWLLGRADEVLKVSGHRIGTIEIEDALVSMKEIAEAAVFGKPDTIKGDTIIAFVTLKEGYEKSPDLIDYFKRKIREELGPIMVPEEIHIVDSLPKTRSGKIMRRVIKAVYLDQLPGDITTLENEASVDEIKRAVEELKRYTGD

SEQ ID NO: 821 - DNA, 2994 bp, Plasmodium falciparum
  CDS (1)..(2994)
atgaataatttgaagagttatggaagtctatcaaaagtcgactctgttcaaatcaacggtatggatatagatacaaatatttttcttaatatgaattcttaccctaccaaggaaatatatgatgatgagaataataagaatgatggaaatcataacataaaaaatttccaagcatataaagcaatgtatgaagagagtataaataatccagaagctttttggggaaatttagcaaagaataatttaatatggtataaattatttactaaagtatttttaggtaattttaaaaaaggaaatataaattggtttgttaatgggaaaattaatgcttgtgaaaattgtgttgatagatgggttgaaaaagatcctaataaaattgcacttatatgggaacaagattgtccagatcaatataaaaagattacatatcagaaattattagaaaagacttgtaaagtagctaatttattaaaacttattggtgttaaaaaacaagacactgttactatttatttacctatgatacctgaattgatttattctatgctagcttgtgttcgtattggagctattcataatgtagttttcgctggttattcggcagctagcttgagcgatagaataatagattctagatctactgttttaattacttctgattttggattgagaggtgggaaattaaccaaattaaaacaaattgctgatgtagctatggatatgtgtggaatgatacaaacatgcatagtattcaaaaataaaactaaaatgaaagataaaaatatacaaattaaaacacctatggaaaatcctatttataattttacaagttttgattctaatagtgcacaaaattttacaattaataattctaatgattttattcaaataaaatcaactcattcccatcaaagtgatcatcaaaatgatttctctcttcagcaggaagataataattatacaaaaaactctaatatgtcttatactacgagtatgtattatcatgataataatttaaaccatataaacactaataaaaataacgatcattataacaataatttaaataataaaaattatttaaataataatattaatgatcaaagccctatgtatgttcataccatgaaccataatgacaataatgatgataataataataataataataataacaatgtagatgatgataataatagtaatatacaaaatgatgaacaatcttattttaatcaacaaaataatacatataacaaaaatgatcattctgatgacaataataagaataaaggaaaaacaaccttacataaaaaaattacaaaaaataatcctataaatcataaaatttcttactcagaaaaaagttactcaaaagaattaataaacactgacatggtaaataacgataatcaatttggtgatttaaaaacaaaaaaaaaatttataaatattaataatattataacttgtaatcagaatggatattctacaaataaacaatattttcctgaacctgataaaaatagcacaagcaattttgatgaaactttatgtgttttaaaaaaaggaagagatatagatggtactgctttattaaaaaatatgagatcttactgtcctatagaatatgtagatagtgaagatttcttatttttattatatacatctggatcaactggtaaacctaaaggtgttgcacatacaacagctggatatttattatatgcatatacaacatgtaaatatatatttgatgtaaaagaaaatgatatatttggttgtgtagcagatataggttgggttaccggacatacatatgtattgtatggtcctttattaaatggtataactacagttattttttcttctataccaacatatccagattgtggtagatactggagtctaatacaaacacataaagtgacacaattttatacggctccgacagccttaagagcattaatgaaatatggagatgaatggatacaaaaatatgatctatcttcatgtcgtattttgggaagtgtgggtgaaccaatcaatccagaaacatggagatggtattataatgtagtaggtaaaaaaaaatgtacaatagtagatacatattggcaaacagaaacaggtggtatcgttatagcacctataccacatttattcagtatgaaaccaggatgtgctagtttaccattcttaggtgttcaattagaaatattagattcaaaaactttacaacctttaagtggtaataatgtatgtggtttattatgtataaagagcccatggccaggaatgttacgtacagtatatggaaatcatcaaagattaataaaaacatattttaccatgtgtcctaattattattttaccggagatggagcgttcagagatgaagatggatactattggatatctggacgaatcgatgatacattaaatgtagcagggcacagattaggagcagcagaaattgaacatgcactagttcaacatttttatattgctgaagcagctgttgtttcatttcatcataatgttaagggagaaggaattttatgttttgtcgttaaaaaaaaaggagacataaaaaattatagtaaaggtattacagatattgttaatagtaataataacaataatagaaatgaattacataataatagtccatttttgatatgctctaataatattactgatattgaagaatttaaaaaaaattttaccgatgaaaaattaatagaacaactaaaattatatgtaagacaagttattggacccatagcaacacctgacctaatttgtgtggttccagatttgccaaaaaccagaagtggaaaaattgttagaagaatattaagatgtatagcaaatggtataacagatttcggagatatttccactgtctctaattatgaagttattgaaactattaataatacacttattgaatgtaaaaaaaagttaaagcatattgaaattaagaaataa

SEQ ID NO: 822 - protein, 997 aa, Plasmodium falciparum
MNNLKSYGSLSKVDSVQINGMDIDTNIFLNMNSYPTKEIYDDENNKNDGNHNIKNFQAYKAMYEESINNPEAFWGNLAKNNLIWYKLFTKVFLGNFKKGNINWFVNGKINACENCVDRWVEKDPNKIALIWEQDCPDQYKKITYQKLLEKTCKVANLLKLIGVKKQDTVTIYLPMIPELIYSMLACVRIGAIHNVVFAGYSAASLSDRIIDSRSTVLITSDFGLRGGKLTKLKQIADVAMDMCGMIQTCIVFKNKTKMKDKNIQIKTPMENPIYNFTSFDSNSAQNFTINNSNDFIQIKSTHSHQSDHQNDFSLQQEDNNYTKNSNMSYTTSMYYHDNNLNHINTNKNNDHYNNNLNNKNYLNNNINDQSPMYVHTMNHNDNNDDNNNNNNNNNVDDDNNSNIQNDEQSYFNQQNNTYNKNDHSDDNNKNKGKTTLHKKITKNNPINHKISYSEKSYSKELINTDMVNNDNQFGDLKTKKKFININNIITCNQNGYSTNKQYFPEPDKNSTSNFDETLCVLKKGRDIDGTALLKNMRSYCPIEYVDSEDFLFLLYTSGSTGKPKGVAHTTAGYLLYAYTTCKYIFDVKENDIFGCVADIGWVTGHTYVLYGPLLNGITTVIFSSIPTYPDCGRYWSLIQTHKVTQFYTAPTALRALMKYGDEWIQKYDLSSCRILGSVGEPINPETWRWYYNVVGKKKCTIVDTYWQTETGGIVIAPIPHLFSMKPGCASLPFLGVQLEILDSKTLQPLSGNNVCGLLCIKSPWPGMLRTVYGNHQRLIKTYFTMCPNYYFTGDGAFRDEDGYYWISGRIDDTLNVAGHRLGAAEIEHALVQHFYIAEAAVVSFHHNVKGEGILCFVVKKKGDIKNYSKGITDIVNSNNNNNRNELHNNSPFLICSNNITDIEEFKKNFTDEKLIEQLKLYVRQVIGPIATPDLICVVPDLPKTRSGKIVRRILRCIANGITDFGDISTVSNYEVIETINNTLIECKKKLKHIEIKK

SEQ ID NO: 823 - DNA, 2007 bp, Photobacterium profundum
  CDS (1)..(2007)
atgacagtaaacaccgacgatccacacatgctgtggcgcccttcacgggagcgtattcaatccagtttgctctatcaatttatgattcaattaagtgagcaacaaaatacgctgtttcatgattaccaccagctacatcattggtctattacccatagcgacatcttttgggatcaagtttgggatttttctgatgtgataggtcataaaggcgagcccacttgcttaacacccccacaatcaacactgcctgctaaagagacgcagtggtttcctaatgcaacgctgaactttgcagagaatctactcaaaaactggaatcgacatgcagccgcagatgccatcgtatttcattgtgaagggcaaaaagagctgcaacaacgtataagctggcaacagctctatcgtcaaacatcacaactaacccagtttctcgccgctaaaggggttaaaaaaggtgatgtagtcgcaggatacatacccaacatacctcaggccattattgccatgttagctacatcgacattgggcgcaatttggacatcgacgtcacccgactttggtgcagatagtgttgtagagcgatttggtcaaaccaagcccaaagtattattaacggcagacggctatttttataacggaaaatcacacagcagcttagacaatatcacgcaaatgctcgctcaacttcccagcgtcgaacaattgatcgttattccctatactcaggtagatatacgtgaattgacagcttctatccctaaaactatcacgctaactctttggcaaagtgcattagaaccatacgaaccaacagatattcaatttgcaccagtgccttttaaccatccgctgtatatcttgtattcgtctggtacaacaggcaaacccaaatgcattgttcacagcacgggcggtttgctactgaatcaccttaaagaacacaagttacactgtaacacaaggaatggtgatcggattttctatttcacgacatgcggctggatgatgtggaattggttagtcagcgggttagcctctggggctacaatcgtactgtatgacggttcaccattttacccaaatgcgagtgtattatgggatatggcagagcaagaacagctttcattgtttggcacatctgccaaatatttagaagcactcgaaaaacaaaattacagcccaaaccagttccattctttaccacacctacaaacattatgttcaacaggttcagtgcttgcaccagaacaatttgactatgtgtacagccacatcaaatctgatctacagcttgcttctatttctggtggtacagatatttgtggttgctttgctatcggtaatcccttgagtccggtttataaaggagaatgccaaagccaagcattaggtatggatgtacgtgtgttcaatgaacaaggtcaaacagaattaacccaacaaggtgagcttgtttgttgtaatagtttcccaaatcaacctattggtttttggaatgatcctgatggaaagcgctatcacaatgcgtattggaatacctatccgaatacatggcatcacggcgattttgtagcgttaagcagtacgggtggcatggttttctttgggcgttctgatgccgtattaaacccaggcggtgtacgtatcggtacagcagaggtttaccgccaagtaaacccattacacgaaattaccgattcagtggtaataggacaaaactggaagaacgatgtgcgggtggtgttatttgttcagcttgccgatggttacctgttagacgacgcactcaaagccacgatacgccagcgcattaaacaccattgctctccccgtcatatacctgccgttattctgccagttactgatatacctagaaccaaatctggtaagttggtggaacttgccgtgcgtaacatcgtgcataatttgccagtaacaaatataggagccttggcaaacccagcagcattagaagagtataaaggccgtaaagaattaaaataa

SEQ ID NO: 824 - protein, 668 aa, Photobacterium profundum
MTVNTDDPHMLWRPSRERIQSSLLYQFMIQLSEQQNTLFHDYHQLHHWSITHSDIFWDQVWDFSDVIGHKGEPTCLTPPQSTLPAKETQWFPNATLNFAENLLKNWNRHAAADAIVFHCEGQKELQQRISWQQLYRQTSQLTQFLAAKGVKKGDVVAGYIPNIPQAIIAMLATSTLGAIWTSTSPDFGADSVVERFGQTKPKVLLTADGYFYNGKSHSSLDNITQMLAQLPSVEQLIVIPYTQVDIRELTASIPKTITLTLWQSALEPYEPTDIQFAPVPFNHPLYILYSSGTTGKPKCIVHSTGGLLLNHLKEHKLHCNTRNGDRIFYFTTCGWMMWNWLVSGLASGATIVLYDGSPFYPNASVLWDMAEQEQLSLFGTSAKYLEALEKQNYSPNQFHSLPHLQTLCSTGSVLAPEQFDYVYSHIKSDLQLASISGGTDICGCFAIGNPLSPVYKGECQSQALGMDVRVFNEQGQTELTQQGELVCCNSFPNQPIGFWNDPDGKRYHNAYWNTYPNTWHHGDFVALSSTGGMVFFGRSDAVLNPGGVRIGTAEVYRQVNPLHEITDSVVIGQNWKNDVRVVLFVQLADGYLLDDALKATIRQRIKHHCSPRHIPAVILPVTDIPRTKSGKLVELAVRNIVHNLPVTNIGALANPAALEEYKGRKELK

SEQ ID NO: 825 - DNA, 1899 bp, Photobacterium profundum
  CDS (1)..(1899)
atgaataggcgaaaggagaccactatgtcagcctatcaggatgcatttgattttgccgccaacgagccagaactcttttggaaacaacaagcacagtctatttcttggtttcgatttcccgaaacaatattaagcaatgatgagaacggtatagagcgctggtttgccgacggtgagctcaatactgcgtacttagcattagattatcatgtcgataatggccgaggtgatcaaactgcccttatttatgactcccccgttacgggaaaaaaggcgcgctatagttaccgtgtattacgggatcaagtcgcgaaaacggctggtatgctggcaagcttaggggtcgaaaaaggtgatcgagttgtaatctatatgccgatgatccctgaagcggccatggcaatgttagcgtgtgcccgattaggggcgattcactccgtggtatttggcgggtttgcacccagtgagcttgccgttcgtatagaagatgctgaaccgaaagtcgtattaacagcatcatgcggtgttgaagtcagtaaagttattccttataaaccgctggtggatcaagcggtaatggatagtcgctggaaacccgatagtgtcgtggtattccaacgaaaagaatgccttgcagatttaaatcaagcccgagatatcgattgggtaacgttattcaaccgttctgcacctcatgattgtgtgccagtaaaagcgacagatcctctgtacattttatatacatcaggcacaaccggaaaacccaaaggtgtggtgcgtgataacggcggacatgctgttgcaatgaaatacagcatggaatcaatttacaatgtaaaaccgggtgaagtgtattgggcggcatctgatatagggtgggttgttggacactcttacattgtttatgcgccgcttattcatggttgtaccacgatcatgtatgaagggaagccagtaaaaacaccggatcctgctgcattttggcgtgtgtgcgaagagtatggtgtgagtattttattttctgccccaacggcatttcgtgcgattaagaaagaagatccaaccggtgcattgctagctgcattcccgatgaaaaaactgcgcactatttttatggctggcgagcggttagatccgccaacccttgaatgggtagaaaccaaaacccaacgccctgttgtcgatcattggtggcaaactgaaacggggtgggcaattgctggcaatcctttgggtctagaaaaattcgacttaaaaccgggctcagcgaccaaagcgataccgggttatcaagttgaagtgctcaatgagttgggtgaacagcaagccatgaatgaacaaggctatatcgcgataaaacgccccctaccgccaagttgtttaccgaccgtatggcgtaaccatgatcgctttgaatcagggtatttaagccagtttccgggttattatgtatcgggtgatggtggttatattgatgaagatggctatctgtttgtgatggggcgtattgatgatgtgattaatgtggctgggcaccgcttatcgactggagaaatggaagaagtagtaggtgcccatgaagctgttgccgagtgtgctgttattggtatacacgatgatctaaaagggcagctaccattaggcttggtggtattaaaagacggttatgtctctgaaaatggcgctattgaggcagaattattgcagcaagttcgcgcaaaaataggcgcggtggcgtgctttaaacgtgcgttaattgtcgatcgtttaccgaaaacccgttcgggtaaaatactgcgtcgtgttattcgccaaatcgcagatggagaacaatatgtcgtaccatcgactatcgatgatccatcaagcttgaatgaaatagaaaaggcactttattaa

SEQ ID NO: 826 - protein, 632 aa, Photobacterium profundum
MNRRKETTMSAYQDAFDFAANEPELFWKQQAQSISWFRFPETILSNDENGIERWFADGELNTAYLALDYHVDNGRGDQTALIYDSPVTGKKARYSYRVLRDQVAKTAGMLASLGVEKGDRVVIYMPMIPEAAMAMLACARLGAIHSVVFGGFAPSELAVRIEDAEPKVVLTASCGVEVSKVIPYKPLVDQAVMDSRWKPDSVVVFQRKECLADLNQARDIDWVTLFNRSAPHDCVPVKATDPLYILYTSGTTGKPKGVVRDNGGHAVAMKYSMESIYNVKPGEVYWAASDIGWVVGHSYIVYAPLIHGCTTIMYEGKPVKTPDPAAFWRVCEEYGVSILFSAPTAFRAIKKEDPTGALLAAFPMKKLRTIFMAGERLDPPTLEWVETKTQRPVVDHWWQTETGWAIAGNPLGLEKFDLKPGSATKAIPGYQVEVLNELGEQQAMNEQGYIAIKRPLPPSCLPTVWRNHDRFESGYLSQFPGYYVSGDGGYIDEDGYLFVMGRIDDVINVAGHRLSTGEMEEVVGAHEAVAECAVIGIHDDLKGQLPLGLVVLKDGYVSENGAIEAELLQQVRAKIGAVACFKRALIVDRLPKTRSGKILRRVIRQIADGEQYVVPSTIDDPSSLNEIEKALY

SEQ ID NO: 827 - DNA, 1950 bp, Photobacterium profundum
  CDS (1)..(1950)
atgagtgaagttcatgtttatccagtcaatcaagagattgcagctacagcccacgtaaatgatgaacaatatcgtgagatgtaccagcaatcggtgatcaaccctgaaggtttctggcgtgaacacggtcagattgtagactggatcaaaccattcactaaagtgaagcacacttcttttgatactggccatgtcagcgttaagtggtttgaagatggcacgctgaacgtttcggcaaactgtattgaccgccacctcgcgacccgcggcgatcagcccgcgatcatttgggaaggcgacgatcctaccgatgatgccacatttacgtataacgaattacacgaacaagtctgtaagttctctaacgcactgaaaagccaaggcgtacgcaaaggcgatgtagtgtgtctttacatgccaatggtggcagaagcggcaattgctatgctggcttgcacacgaatcggggcggtacataccattgtatttggtggtttctctccagaagcgcttgctggccgtattgttgattccaacgcaaagctcgtgattactgccgatgaaggcgttcgggctggccgtgctgtaccactgaaaaagaatgtggatgatgccttagccaataaaaatgtcacgagtatcgaaaaagtcatcgtacttaagcgtactggcggtaatgttgaatggcacagcgagcgggatgtgtggtggcatgaagcaacagcagtcgcatcttctcactgtgagcctgaagaaatgaatgcagaagatcctcttttcattctatatacctcaggatcaacaggtaaacctaaaggtgttcttcacacaacaggtggttacttagtgtatgccaccatgacctttaaatatgttttcgattaccaagaaggcgatgtgtactggtgtaccgccgatgtcggttggattaccggtcacagttacttggtatatggcccgctggccaacggtgcaacaaccgtgctatttgaaggtgtgccaaactacccatcaaccagccgtatgagtgaagtggttgataagcataatgtcagtattctttatactgcaccaacagccatccgtgcattaatggcaaaaggcacagaagcgattaaaggtacgtcacgatcctcactgcgtattatgggatcagtcggcgagcccattaaccctgaagcatgggaatggtatcaccataccattggcgacagccgttgccctattgttgatacatggtggcaaacagaaacaggcggtatcttaattacgccattacctggcgcgacagcgctaaaacctggttctgccactcgtccatttttcggtgttcagccagccatcgttgataatatggggaatatcttagaaggtgtcgctgaaggtaacttggttatggttgattcatggcctgggcagatgcgtactttatggggtgaccatgaacgcttcgaacaaacttacttctcaaccttccaaggtatgtatttcaccggtgatggcgcacgtcgtgatgaagacggttactactggatcactggtcgtgtcgatgacgtcttgaatatctcaggccaccgtatgggtacagctgaaattgaatccgcattagtggctttcgataagatagcagaagctgcgattgttggggtgccacacgatattaaaggccaagcaatttatgcttatatcacgctgaatgatggtgaaatacccagcgctgagctgcataaagaagtgaaagattgggtacgtaaagaaattggtcctattgcgacccctgacttcctccattggaccgatgccttaccgaaaacacgttcgggtaaaattatgcgccgaattctccgtaagattgccacgggtgatactggaagtttgggtgatacatcaacgctcgctgaccctagcgtggttgataaactgatcgcagaaaaacaaactattttataa

SEQ ID NO: 828 - protein, 649 aa, Photobacterium profundum
MSEVHVYPVNQEIAATAHVNDEQYREMYQQSVINPEGFWREHGQIVDWIKPFTKVKHTSFDTGHVSVKWFEDGTLNVSANCIDRHLATRGDQPAIIWEGDDPTDDATFTYNELHEQVCKFSNALKSQGVRKGDVVCLYMPMVAEAAIAMLACTRIGAVHTIVFGGFSPEALAGRIVDSNAKLVITADEGVRAGRAVPLKKNVDDALANKNVTSIEKVIVLKRTGGNVEWHSERDVWWHEATAVASSHCEPEEMNAEDPLFILYTSGSTGKPKGVLHTTGGYLVYATMTFKYVFDYQEGDVYWCTADVGWITGHSYLVYGPLANGATTVLFEGVPNYPSTSRMSEVVDKHNVSILYTAPTAIRALMAKGTEAIKGTSRSSLRIMGSVGEPINPEAWEWYHHTIGDSRCPIVDTWWQTETGGILITPLPGATALKPGSATRPFFGVQPAIVDNMGNILEGVAEGNLVMVDSWPGQMRTLWGDHERFEQTYFSTFQGMYFTGDGARRDEDGYYWITGRVDDVLNISGHRMGTAEIESALVAFDKIAEAAIVGVPHDIKGQAIYAYITLNDGEIPSAELHKEVKDWVRKEIGPIATPDFLHWTDALPKTRSGKIMRRILRKIATGDTGSLGDTSTLADPSVVDKLIAEKQTIL

SEQ ID NO: 829 - DNA, 1674 bp, Methanococcus maripaludis
  CDS (1)..(1674)
atggtatcattacttaataaatttgttaaaaagacggaatttgagtcatatgaagattttgtggaaaatttcaagatagatgttccagaaaatttcaattttgcttacgatatcgttgacgaatatgcaaaaattgcaccggaaaagattgcaattatatggtgtgacgataacaacgacgaaaaaatctttacattcaaagatatgaaaaaatacagtgataaagcagctaatttctttttaaaacacggaattaaaaagggagacactgtaatgctcacattaaagagcaggtacgaattctggttctgcatgcttggacttcataaaattggggctgtcgcaattcctgcaacacacatgcttacaacaaaagatatcgtgtacaggattgaaaaagcaggcttaaaaatgatagtctgtatcggagaaaacggagttcccgactacgttgatgaagcagtatctgaaattaattcagatgttttaaaagcatgtgtttcaaatttaaacaatgatagttggattgatttttcaaaagaattggaagaatcatcagaagactttacaaggcctgttggagaaatggatactaaaaatgacgatgtattagttgcatatttttcatcaggaacaacaggatatccaaaattaattcagcacgaccacgaatatcctttaggacatattacgactgcaaaatactggcaaaatgttgaagacgatggacttcactacactgttgcagacagtggatgggcaaagtgtatccggggaaaactctacggacagtggattgcaggaactgcagtatttgtctacgactacgacagatttgatgcaggaaatatgcttgaaaaaattgcaaaatataaaattacaacgttctgcgcaccacctacaatttacaggttcatgatcaaacaggatatttcaaaagcagacttttcaagtttacactacgcagtaactgctggagaaccgctaaaccctgaagtttacaacaaatttttggagtttactgggcttagattaatggaaggatttggtcagaccgagaccgttgtatctgttgcaaactttacatggatggatccaaaacccggatcaatgggaaaaccagtgccaatttttgatttaatgataaaagggccagatggaaaagaatgcgatgtgggtgaagaaggagaacttgcattcaaaacagaagatggaaaacctcttggtcttttctcaggatactttaaagaccctgaaagaactaaaaaagcctggtacgatggatattaccatactggggatactgcatggaaagatgaagatggatacctctggtttgttggaagaaacgacgatttaatcaaaagttccggttacagaatcggtcctttcgaagtagaaagtgcacttatttcacaccctgcagtacttgaatgtgcaataactggagtaccggacccagtaaggggccagattgttaaagctacaattgttttaacgtctgaatatgaagcaagtgaggaacttaaaaaagaacttcaagaccacgttaaacacaacactgccccatacaaataccctcgagctattgaatttgtaaaagaactcccaaaaacaatcagcgggaaaatcaggcgtgtagaaatccgggaaactgatgaaaaaaataaataa

SEQ ID NO: 830 - protein, 557 aa, Methanococcus maripaludis
MVSLLNKFVKKTEFESYEDFVENFKIDVPENFNFAYDIVDEYAKIAPEKIAIIWCDDNNDEKIFTFKDMKKYSDKAANFFLKHGIKKGDTVMLTLKSRYEFWFCMLGLHKIGAVAIPATHMLTTKDIVYRIEKAGLKMIVCIGENGVPDYVDEAVSEINSDVLKACVSNLNNDSWIDFSKELEESSEDFTRPVGEMDTKNDDVLVAYFSSGTTGYPKLIQHDHEYPLGHITTAKYWQNVEDDGLHYTVADSGWAKCIRGKLYGQWIAGTAVFVYDYDRFDAGNMLEKIAKYKITTFCAPPTIYRFMIKQDISKADFSSLHYAVTAGEPLNPEVYNKFLEFTGLRLMEGFGQTETVVSVANFTWMDPKPGSMGKPVPIFDLMIKGPDGKECDVGEEGELAFKTEDGKPLGLFSGYFKDPERTKKAWYDGYYHTGDTAWKDEDGYLWFVGRNDDLIKSSGYRIGPFEVESALISHPAVLECAITGVPDPVRGQIVKATIVLTSEYEASEELKKELQDHVKHNTAPYKYPRAIEFVKELPKTISGKIRRVEIRETDEKNK

SEQ ID NO: 831 - DNA, 1911 bp, Methanococcus maripaludis
  CDS (1)..(1911)
atgaaaactggagacaaatacataatgcttgaaaaatattcagaattacagcaaaaagctttggatgaccctgaaaaattctggggagagcaggccaaatgtttagaatgggataaaacttgggataaagcactggactggaatcctccttatgcaaaatggtttaaaggcggcagtttgaatgcaagctacaactgtgttgataggcacataaaaggaaacaggagaaataaagctgcgataatttgcgaaaaagaggatgggagctgcggaattttaacttattacgagttatatcgggaagtaaataaatttgcaaacgttcttgagaatctgggcgttgaaaaaggcgatgttgtcacaatctacatgccgatgatgacagaggcaattattgcaatgctcgcatgttcaagaattggggcaattcacaacgttgtattttctggattttcttcagatgcacttgctgatcggataaacgattcgaaatcaaaaatattggtgactaccaatctcttatacaggcgtggaaaagagattgatcttaaaaaaatattggataaagcattattgaattgtaactcaataaaacacgtagtttatgcaaaaagaggcattgaagaatttaacttagtttctggaaaagagtacttctgggatgaattaatgggcggtgctaaaagctacgtagaaccggttcccgtggagtctgaacacccgctatttattctctacactagcggtacaactggaagtccaaaaggtgtagttcattcaacaggcggatatttaacttatgccacaaaaaccatggattggacatggggattaaatgaaatggatgtattttggtgtactgcagacattggatggattactgggcacacttacgtagtatatggtccgctttcacttggtgcaacgatagtactctacgagggtgcaatagactaccctgaacccgacagattgtggggtattgtagaaaatcatggggttacaattctttatactgcaccaaccgcgataagaatgcttatgatgtacggtgaaaaatgggtaaatactcacgatttatctacattgaggcttttgggaagtgtaggggaacccataaatccaagagcttggaaatggtattacaaagtaattggaaaagaaaaatgtccaatttgcgactgctactggcaaactgaaactggtgggcatattatatatcctccaattggaatccagtcagttccattaaaaccgggttcagcaacattccctggaatcggaattgatgttgatgttgtagacaacgaaggaaaccctgttgatgcaaatgtaaaaggaaatctaattataaaacgaccctggccaggaatgcttgcaggactctggaacaacgatgaaagataccgtgcggcatattgggataggttcaaaaacaaattttcaacatctgactatgcaataaaagatcaggatggatacatttgggtactaggacgatctgacgaagtattgaatgtttcaggacacaggattggaaccgcagaactcgaacacgaacttgtatcaaataaaatggttgcagagtctgcagtagtcggaaaaccagacgatgtgaaaggagaagttcctgttgcatttgttatattaaacgaaaaataccgtgaacttccatcaaatgaagtaaaggctgaacttatcaaacatattcgagatactgtaggcccaattggaactcctgcaatgatattctttgtaaacaaacttccaaaaacaagaagtggaaaaataatgagaagaatattgaaaaaactcataatgggcgaagagataggcgatgttaccacattggaagacaatacaagtttagaagaagttaaaaaagagcttgaagatttcaagtatgattaa

SEQ ID NO: 832 - protein, 636 aa, Methanococcus maripaludis
MKTGDKYIMLEKYSELQQKALDDPEKFWGEQAKCLEWDKTWDKALDWNPPYAKWFKGGSLNASYNCVDRHIKGNRRNKAAIICEKEDGSCGILTYYELYREVNKFANVLENLGVEKGDVVTIYMPMMTEAIIAMLACSRIGAIHNVVFSGFSSDALADRINDSKSKILVTTNLLYRRGKEIDLKKILDKALLNCNSIKHVVYAKRGIEEFNLVSGKEYFWDELMGGAKSYVEPVPVESEHPLFILYTSGTTGSPKGVVHSTGGYLTYATKTMDWTWGLNEMDVFWCTADIGWITGHTYVVYGPLSLGATIVLYEGAIDYPEPDRLWGIVENHGVTILYTAPTAIRMLMMYGEKWVNTHDLSTLRLLGSVGEPINPRAWKWYYKVIGKEKCPICDCYWQTETGGHIIYPPIGIQSVPLKPGSATFPGIGIDVDVVDNEGNPVDANVKGNLIIKRPWPGMLAGLWNNDERYRAAYWDRFKNKFSTSDYAIKDQDGYIWVLGRSDEVLNVSGHRIGTAELEHELVSNKMVAESAVVGKPDDVKGEVPVAFVILNEKYRELPSNEVKAELIKHIRDTVGPIGTPAMIFFVNKLPKTRSGKIMRRILKKLIMGEEIGDVTTLEDNTSLEEVKKELEDFKYD

SEQ ID NO: 833 - DNA, 1938 bp, Bdellovibrio bacteriovorus
  CDS (1)..(1938)
atgcacaaagaactttatcccgtgaattccgaggtggcgaaaaaagcctggattgatgaagccaaatacaaagccatgtatgagcgctccattcaagacaacgaagccttttgggccgagcaagccgagcgcctggactggatcaaaaagtgggataaggtcaaagaagtcagtttcaagaaacccgttagcatcaaatggtacttgggtggaaaaatgaatgtgtcctacaattgcgtggaccgtcatttaaaaacccgcggcgacaaaacagccctgctgtgggaagccgacaatccatccacaccttcacgcaaaatcacttacaaagaactgcatctggaagtgtgccgcttcgccaatgtcctgaaaaaaatgggcgtgaaaaaaggcgatgtggtgacgatctatatgccgatgattccggatacagccgtggcgatgctggcctgtgcgcgcatcggggcggttcattcggtggtgtttgccggtttttctccggattccatctcagatcgtattttggacgggcagtgccggtttgtgatcaccggtgatgccggcttccgcggcagcaaagtggtggcgttaaaagaaaatatcgataaagcacttgtgaaaactccggacgtgcaaaaagttctggtggtgaaatatgcgggcacgacggtggacatgaagccgggccgtgatctttggtatcacgaagaagtcaaaaccgtcagcgaccagtgtgaaccagaacccatggacgcggaagatcctttgtttattctttacacttccggttccacaggaaaacccaaaggggtgatgcacaccacggggggatatctggtgtatgccagcatgacccaccagtatgtctttgattatcacgaagatgatatctactggtgttctgctgacgtgggttgggtgaccggccatagctatatcgtgtatggcccgctggcgaatggggcgacaagtttgttctttgaaggggtgccgaactatccaactccaagccgtttctgggaagtggtcgacaaacacaaagtcacaatattctatacctcaccaacggcgattcgttctttgatgcgcgaaggggacgcggcggtgaaaaccacctcgcgaaaaaccctgcgcctgctggggtccgtcggggagccgatcaatccggaagcctgggcatggtatcacgatgtggtcggtgaaggacgctgcccggttgtcgatacatggtggcagacagaaaccggtggcattctgatcacgccactgccgggggcgattgcgcaaaagccggggtctgcaactttaccgttctttggggtgcaaccgaaacttttgaccaacgaaggacaagagatccatggaccgggcgaaggggtgctggtgattgcggattcctggccgggccagatgcgcacggtgtatcgcaatcacgaacgttttgaagacacgtatttctcgaactatcccgggtactatttcacaggcgacggctgtcgtcgcgatcaggacgggtattactggatcacgggacgggtggatgacgtgatcaacgtttccggtcaccgcctggggacggctgaaattgaatcagcgcttgtggcccatcacaaagtggctgaagccgccgtggttggatatccacatgatatcaaagggcaggggatttatgcctttgtcaccttgaagtccggtgaaacggccagtgaagagctgcgtaaagagctgattcagaccgtgcgtaaagagatcgggccgattgcgactccggatctgattcagtgggctccacgtctgccgaagacccgttctggcaagattatgcgccgaatcctgcgtaaaatcgccgagaaccacccggatcaactgggggatacgacaaccttgtcagagcctgcggtggtccaagaactggtggacaatcgcatgaaccggtga

SEQ ID NO: 834 - protein, 645 aa, Bdellovibrio bacteriovorus
MHKELYPVNSEVAKKAWIDEAKYKAMYERSIQDNEAFWAEQAERLDWIKKWDKVKEVSFKKPVSIKWYLGGKMNVSYNCVDRHLKTRGDKTALLWEADNPSTPSRKITYKELHLEVCRFANVLKKMGVKKGDVVTIYMPMIPDTAVAMLACARIGAVHSVVFAGFSPDSISDRILDGQCRFVITGDAGFRGSKVVALKENIDKALVKTPDVQKVLVVKYAGTTVDMKPGRDLWYHEEVKTVSDQCEPEPMDAEDPLFILYTSGSTGKPKGVMHTTGGYLVYASMTHQYVFDYHEDDIYWCSADVGWVTGHSYIVYGPLANGATSLFFEGVPNYPTPSRFWEVVDKHKVTIFYTSPTAIRSLMREGDAAVKTTSRKTLRLLGSVGEPINPEAWAWYHDVVGEGRCPVVDTWWQTETGGILITPLPGAIAQKPGSATLPFFGVQPKLLTNEGQEIHGPGEGVLVIADSWPGQMRTVYRNHERFEDTYFSNYPGYYFTGDGCRRDQDGYYWITGRVDDVINVSGHRLGTAEIESALVAHHKVAEAAVVGYPHDIKGQGIYAFVTLKSGETASEELRKELIQTVRKEIGPIATPDLIQWAPRLPKTRSGKIMRRILRKIAENHPDQLGDTTTLSEPAVVQELVDNRMNR

SEQ ID NO: 835 - DNA, 1911 bp, Rhodopseudomonas palustris
  CDS (1)..(1911)
atgactatccatgacaacagccgttaccgcgaggttcatgcccgctcgctggccgacccggagggattctggggagaggtcgcgaaagagatcgactggatcacgccgcccaccaaggtgttcgatccctcgctcggcctgtatggccgctggtttcccggcgccaaggtcaacacttgctacaacgccctcgatcgccacgtcgcgaacggccgcgctgatcagctcgcgctgatccacgactcgccgctgaccggcacggtgagcaaatacacttacgccgagatgctgcgcgaagtgcagacgctcgccgccatcatgcaggacttcggcgttcagaagggtgaccgcgtcattctctatatgccgatggtaccggaatcgatggtggcgatgctggcctgcgcccgcatcggcgcggtgcattcggtggtgttcggtggcttcgccgccaaggagctcgccacccgcatcgaagacgccaagccgaagctgatcctgtcggcgagctgcggcatcgagccgggacgcatcgtcaagtacaagccgctgctcgatgaagcgattgaactcgcctcggtgaagccggaagcttgtatcatcctcaagcggccgcagcaggattgcgagctgaaggcgggccgcgatcacgactgggcgagcttgcgcgagcaggcgctggcggccggcaagaaggccgactgcgtcgcggtcgatgcgaccgacccactctacatcctctacacatccggcacgaccggtaagccgaagggcgtggtccgcgacaatggcggccatctcgtcgcgctgaagtggacgatggaaaacctctacggcatcaaacccggcgaggtgtggtggtgcgcctccgatatcggctgggtggtcggccacagctacatcatctacggtccgctgatccacggcgcgacttcgatcatgtatgaaggcaagccggtcggcacccctgatgctggcgcgttctggcgggtgatttccgagcacggcgcggtggcgttgttcacggcgccgaccgcgttccgcgccatccgcaaggaagacggcgacgggagcttcatccgcaaatacgacctgtcgaaattccgcacgctgttcctggcgggcgaacgtgccgatccgccgacggtggaatgggccgagcagcaattgcaggtgccggtgatcgatcactggtggcagaccgaaaccggctggtgcatcgccggcaatccggtcggccttggcctgctgccggtcaagcacggctcgccgacggtgccgatgcccggctacaagctcgaggtcgtcgacgagggcgccaagccggtgccggccggaacgatgggctcgatcgtgatcaagctgccgctgccgcccggcaatctgccgacgctgtggcagcaggacgagcgctgccgcgagagctacttcgccgacttccccggctactacaagacttccgacgccggctatgtcgatgaagacggctatgtcttcgtgatgggccgcaccgacgacatcatcaacgtcgccggccaccggctgtcgaccggcggcatggaagagatccttgcgtcgcatccggacgttgccgaatgcgcggtgctcggcatcaacgatccgatcaagggcgaggtaccgtgcggcctgatcgtgctgaagagcggcgtcacccgcgatccggccgaaatcgagaaggagatcgtcaagctggtgcgcgacaagctcggcccggttgcggcgttcaagctcgcgatcaccgtgccgcggttgccgaagacccgctccggcaagatcttgcgcggcaccatcaagaagatcgccgacggcgatacctggacgatgccggccacgatcgaagatccgaccgcgctcgacgacatctcctcggcgctgaagagccatagctga

SEQ ID NO: 836 - protein, 636 aa, Rhodopseudomonas palustris
MTIHDNSRYREVHARSLADPEGFWGEVAKEIDWITPPTKVFDPSLGLYGRWFPGAKVNTCYNALDRHVANGRADQLALIHDSPLTGTVSKYTYAEMLREVQTLAAIMQDFGVQKGDRVILYMPMVPESMVAMLACARIGAVHSVVFGGFAAKELATRIEDAKPKLILSASCGIEPGRIVKYKPLLDEAIELASVKPEACIILKRPQQDCELKAGRDHDWASLREQALAAGKKADCVAVDATDPLYILYTSGTTGKPKGVVRDNGGHLVALKWTMENLYGIKPGEVWWCASDIGWVVGHSYIIYGPLIHGATSIMYEGKPVGTPDAGAFWRVISEHGAVALFTAPTAFRAIRKEDGDGSFIRKYDLSKFRTLFLAGERADPPTVEWAEQQLQVPVIDHWWQTETGWCIAGNPVGLGLLPVKHGSPTVPMPGYKLEVVDEGAKPVPAGTMGSIVIKLPLPPGNLPTLWQQDERCRESYFADFPGYYKTSDAGYVDEDGYVFVMGRTDDIINVAGHRLSTGGMEEILASHPDVAECAVLGINDPIKGEVPCGLIVLKSGVTRDPAEIEKEIVKLVRDKLGPVAAFKLAITVPRLPKTRSGKILRGTIKKIADGDTWTMPATIEDPTALDDISSALKSHS

SEQ ID NO: 837 - DNA, 1692 bp, Rhodopseudomonas palustris
  CDS (1)..(1692)
atgagcaacacccatcctgcggtcgcagccattgaagattatgccgacgtcctggcgcggtttcgccgcgaggacctcgaagccctgttcgacggcaacttcgcgaccggcatcaacgtctgcatcgaatgctgcgaccgtcacgtcgccggcggcggcaccgcactggattgggagagccaggacggccgcaccgcttccttcagctttgccgagatgaaggactatgcggcccgagtcgccaatctgctggtcgcgcagggcgtgaagcccggcgacgtcgtcgccggcatgctgccgcggacgcccgaactgctggcgctgatcctcggcacctggcgcgccggcgcggtgtatcagccgctgttcaccgcgttcggtccgaaggcgatcgaacaccgcgtcaagatgagcgccgccaagctggtggtcaccgatctggccaaccgcgccaagctcgccgacgtcgccgattgcccgaccgtcgcgatcgtgctccggcccggcgagaccgcgccgctcggcgatctcgatttccatgccgagatcgcggcgcaatcgaccgaattcgcgccggtgctgcgcaagggcaccgacctgttcctgatgatgtcgacctccggcaccaccggtctgccaaagggcgtgccggtgccgatcaacgcgttgccggcgttctattcgtatatccgcgatgcggtcgatctgcgcgcgggcgatatcttctggaacatcgccgatccgggctgggcctatggcttgtactacgcggtcactggcccgctgctgcacggccacgccaccaccttctacgacggtccgttcaccgccgagagcacctacggcctgatcaagcgtcgcggcatcaccaacctcgccggtgcgccgaccgcgtatcggctgctgatcgcagcgggtccggaagcggcggcgccggtgaagggccagctccgcgtcgtctctagcgccggcgagccgctcaatcccgaagtgatccgctggtttgccgagcatctcgccgcgccgatccacgatcattacggccagaccgaactcggcatggtggtcaacaatcaccaccgcctgcgacacaccgtgcatccgggttccgccggtctcgcgatgccgggcttccgcgtcgcggtgctcgacgagcacagcaacgaactgccgccgaacgtcccgggcgtgctcagcgtcgatttgaagcgttcgccgctgatgtggttctccggctactggcagcaggagacgccggcgatcgaaggcggttactaccgcaccggtgacaccgtcgaactggagccggatggctcgatcagcttcgtcggccgggccgacgacgtcatcacctcgtcgggctatcgtatcggtccgttcgacgtcgagagcgcgctgatcgagcacgccgcggtgatcgaggcggcggtgatcggcaagcccgatcccgagcgcaccgagatcgtcaaagcctatgtggtgctcgccaaggacgtgacgccgagcgaggcgctggccgaggagctgcggcaatacgtcaagaagcggctctccgcgcacgcctatccgcgcgagatcgaattcctggagcaactcccgaagacgccgagcggcaagctgcagcgcttcatcctgcgcaagcgcgacaccgaaccggcgggcacgacccagggctcttcttctgcagcttga

SEQ ID NO: 838 - protein, 563 aa, Rhodopseudomonas palustris
MSNTHPAVAAIEDYADVLARFRREDLEALFDGNFATGINVCIECCDRHVAGGGTALDWESQDGRTASFSFAEMKDYAARVANLLVAQGVKPGDVVAGMLPRTPELLALILGTWRAGAVYQPLFTAFGPKAIEHRVKMSAAKLVVTDLANRAKLADVADCPTVAIVLRPGETAPLGDLDFHAEIAAQSTEFAPVLRKGTDLFLMMSTSGTTGLPKGVPVPINALPAFYSYIRDAVDLRAGDIFWNIADPGWAYGLYYAVTGPLLHGHATTFYDGPFTAESTYGLIKRRGITNLAGAPTAYRLLIAAGPEAAAPVKGQLRVVSSAGEPLNPEVIRWFAEHLAAPIHDHYGQTELGMVVNNHHRLRHTVHPGSAGLAMPGFRVAVLDEHSNELPPNVPGVLSVDLKRSPLMWFSGYWQQETPAIEGGYYRTGDTVELEPDGSISFVGRADDVITSSGYRIGPFDVESALIEHAAVIEAAVIGKPDPERTEIVKAYVVLAKDVTPSEALAEELRQYVKKRLSAHAYPREIEFLEQLPKTPSGKLQRFILRKRDTEPAGTTQGSSSAA

SEQ ID NO: 839 - DNA, 1953 bp, Rhodopseudomonas palustris
  CDS (1)..(1953)
atgtccgagaagatctacgacgtgcccgcagagtgggcgagccgcgccttcgtcgacgacgccaaatatcgccagatgtacgagcgctcggtcacggatccgaccggattctgggcggagcacgccaagcgcgtcgactggatcaaggcgccgaccaagatcgacaactggtcgttcgcgcccggcaacgtttcgatcaagtggttcgaggacggcgtcctcaacgccgcctacaactgcatcgaccgccacctcgacaagcgcggcgaccaggtcgcgatcatctgggaaggcgacgatccttcgcagtcgcgcagcatcacctatcgcgagctgcacgacgaggtctgcaagttcgccaacatcctgcgcaaccgcaatgtcggcaagggtgaccgcgtcaccatctatctgccgatgattccggaagccgcgttcgcgatgctggcctgcgcccggatcggcgcgatccactcggtggtgttcgccggcttctcgcccgacagcctcgcgggccgcatcaacgactgcaactcgaagatcgtcatcaccgccgacgaaggcctgcgcggcggccgcaaggtgccgctgaaggccaatgtcgacgcggcgctgaagaagtgcgagggcgtcgactgggtgatggtggtcaaacgcaccggcgccgcggtcgaaatggatgacgtccgcgacttctggtaccacgaagccgccgaggtggtgacgaccgagtgcccggtcgagcacatgcatgccgaagacccgctgttcatcctctacacctcgggctcgaccggccagccgaagggcgtgctgcataccaccggcggctatctggtgttcgcgtcgatgacgcaccaatacgtcttcgattatcacgacggcgacatctactggtgcaccgccgacgtcggctgggtcaccggccacagctacatcctgtacgggccgctcgccaacggcgccacgacgctgatgttcgaaggcgtgccgaactatccgaccaattcccggttctgggaagtgatcgacaagcacaaggtcaacatcttctacaccgcaccgaccgcgatccgcgcgctgatgcaggccggcgacgagccggtgaagaagacctcgcgcaagtcgctccgcctgctcggctcggtcggcgagccgatcaatccggaagcctgggagtggtaccaccgcgtcgtcggcgaggaccgctgcccgatcgtcgacacctggtggcagacggagaccggcggcatcctgatcaccccgctgcccggcgccaccaagctgaagcccggctctgcgacccggccgttcttcggcgtggtacccgagatcctcgatccggaaggcaacgttctggaaggcgaatgcaccggcaacctctgcctcgcccgctcctggccgggacaaatgcggaccgtgtacggcgaccatgcccggttcgagcagacctacttctcggcctacaagggcaagtacttcaccggtgacggctgccggcgcgacaccgacggcttctactggatcaccggccgggtcgacgacgtcatcaacgtctcgggtcaccgcatgggcaccgccgaggtcgaatcctcgctggtggcgcatccgaaggtgtccgaggcggcggtggtcggctatccgcacgacatcaagggccagggtatctacgcctatgtgaccctgatggccggcgaagagccgaccgaggagctgcgcaaggaactggtcgcctgggtccgcaaggacatcggcccgatcgcctcgcccgacctgatccagttcgcgcccggcctgcccaagacccgctccggcaagatcatgcgccgaatcctacgcaagatcgcggaggacgaaccgtcctcgctcggcgacacctcgacgctggccgatcccgcggtggtcgacgatctggtcgagcatcgccagaacaagcaccacaaggcgagctga

SEQ ID NO: 840 - protein, 650 aa, Rhodopseudomonas palustris
MSEKIYDVPAEWASRAFVDDAKYRQMYERSVTDPTGFWAEHAKRVDWIKAPTKIDNWSFAPGNVSIKWFEDGVLNAAYNCIDRHLDKRGDQVAIIWEGDDPSQSRSITYRELHDEVCKFANILRNRNVGKGDRVTIYLPMIPEAAFAMLACARIGAIHSVVFAGFSPDSLAGRINDCNSKIVITADEGLRGGRKVPLKANVDAALKKCEGVDWVMVVKRTGAAVEMDDVRDFWYHEAAEVVTTECPVEHMHAEDPLFILYTSGSTGQPKGVLHTTGGYLVFASMTHQYVFDYHDGDIYWCTADVGWVTGHSYILYGPLANGATTLMFEGVPNYPTNSRFWEVIDKHKVNIFYTAPTAIRALMQAGDEPVKKTSRKSLRLLGSVGEPINPEAWEWYHRVVGEDRCPIVDTWWQTETGGILITPLPGATKLKPGSATRPFFGVVPEILDPEGNVLEGECTGNLCLARSWPGQMRTVYGDHARFEQTYFSAYKGKYFTGDGCRRDTDGFYWITGRVDDVINVSGHRMGTAEVESSLVAHPKVSEAAVVGYPHDIKGQGIYAYVTLMAGEEPTEELRKELVAWVRKDIGPIASPDLIQFAPGLPKTRSGKIMRRILRKIAEDEPSSLGDTSTLADPAVVDDLVEHRQNKHHKAS

SEQ ID NO: 841 - DNA, 1959 bp, uncultured bacterium 314
  CDS (1)..(1959)
atgaataatcaactttggaagattaaaaaagaagaattaaataaaactaatttttttttatattctaattttattaaacaaaattttaaaattgatacaggtaatgattttaataaaatttggaaatggtctgtcgataatacggaaattttttggaaatcaatttgggatttcacaaaagtcaaaggtgttttaggaaagaatttgcttcaaaaatcgaatattttttataataataaattttttcctgacactaaacttagttatgcagaaaacttacttaaaaaaaataacacaacacccgctattatatttaaaagtgaaaacggctatagaactgcactttcttggaaagatctaaatttaaatgttgcaaaaatttcagattggatgcgagctaatggactacaaaaaggagatagagtggcagcctatctcccaaatataccagaaacagtaacagcttatctcggaacatctgctgtaggagcaatatggtcttcatgctcacctgactttggaacagttggagttatagacagattttctcaaataaatccaaaaatattatttattggtgacaagtatttttataacggaaaaacaatcaatattgccgaaagattaaaagaaataatgagtaaaatacctacaattgttaaagttgtaattgtgtcctatccaggcacagaaattgaaaaaaaagataatcttaaagtagatatatatcgttggcatgaaatcatggctttaaaaaaggaaaataatattcaatatgaaatgtcgtattttaatgatcctctcgcaattctttactcaagtggcacaacgggaaaaccaaagtgtatttgtcatggaactggagggattttgcttcagcataataaggaattacaaatacattgtgatgtgaaagaaaatgatcgtgtgttttattttaccacatgcggatggatgatgtggaattggttagttggttcgctttcatcaggagcaacaattttattatttgatggttttcctttatacaaaaaagacgatttattatttgaatttgccagtgaagaacaaattactctttttggtattagtgctaaatatattgatactcttagcaataataaggtagttccaaaaaataatcacgatatgtcaaaattgaaaactgtttgttcaacaggttctccattatcgattgatggatttagatatatttataaaaatattaaagaagatgttcatttagcgtctattgcaggaggaactgatattgtttcctgttttgttttgggcaacccattgcagccggtttatgcaggagaaattcaaaacagaggattgggtatggatgtggatgtatttgacgaaaaagggttttcaataaaaaatacaaaaggagagttagtttgtaaaaaaccttttccttctatgccagttaaattttggaatgataatgaagataaaaagtacagatcttcatattttgaaaagtataaaaacgtttggcatcatggtgattttgctaaagtaactgacaatggaggatttattatatacggcagatctgatactacacttaaccctggtggcgtaagattgggtactgctgaaatatatagtgtggttgaaaaatttgaggaaattcaagaatcaatcgtaataggacaatcatggaacaacgatattagaataatattatttattattcttaatcaaggttataaattaaatgacaaaataaaagacaaaattaaaaaagcaataagatctaatacttctcccaggcatgtaccttcaaaaataatatccattttggacatcccgaaaacaaaaaatggaaaacttgtagagttagctgttaaacaaactgttgaaggtgaaccaataaaaaatttggaagctttagctaatccagatagtttaaaacaatttaaaaatattaaagaattaaatgaataa

SEQ ID NO: 842 - protein, 652 aa, uncultured bacterium 314
MNNQLWKIKKEELNKTNFFLYSNFIKQNFKIDTGNDFNKIWKWSVDNTEIFWKSIWDFTKVKGVLGKNLLQKSNIFYNNKFFPDTKLSYAENLLKKNNTTPAIIFKSENGYRTALSWKDLNLNVAKISDWMRANGLQKGDRVAAYLPNIPETVTAYLGTSAVGAIWSSCSPDFGTVGVIDRFSQINPKILFIGDKYFYNGKTINIAERLKEIMSKIPTIVKVVIVSYPGTEIEKKDNLKVDIYRWHEIMALKKENNIQYEMSYFNDPLAILYSSGTTGKPKCICHGTGGILLQHNKELQIHCDVKENDRVFYFTTCGWMMWNWLVGSLSSGATILLFDGFPLYKKDDLLFEFASEEQITLFGISAKYIDTLSNNKVVPKNNHDMSKLKTVCSTGSPLSIDGFRYIYKNIKEDVHLASIAGGTDIVSCFVLGNPLQPVYAGEIQNRGLGMDVDVFDEKGFSIKNTKGELVCKKPFPSMPVKFWNDNEDKKYRSSYFEKYKNVWHHGDFAKVTDNGGFIIYGRSDTTLNPGGVRLGTAEIYSVVEKFEEIQESIVIGQSWNNDIRIILFIILNQGYKLNDKIKDKIKKAIRSNTSPRHVPSKIISILDIPKTKNGKLVELAVKQTVEGEPIKNLEALANPDSLKQFKNIKELNE

SEQ ID NO: 843 - DNA, 1938 bp, uncultured bacterium 311
  CDS (1)..(1938)
atggcaaaagaaatcttgtatcaagttcccgatctcataaagaaaaatgctttattgaacgaagaagaatacgaactgctttatagagaatctttagaccattcagaagacttttggtctaagcaagctaaagaatacttagattggatattaccttgggaaaaagtttctgaaagcgaccttaccaagggcgaggtctcttggtttagtggaggaaaaattaatgcttcagaaaattgcatcgacaggcatctagaagaaaggtctagccaaattgctattatttgggagggagatgatccctctgtctccaaatctataacctatcaggaattatacgaatcggtttgtagatttgccaacgctcttaaagagagaggaataaagaaaggagacagagtttgtatttacatgcccatgattcctgaagcagcttatgccatgctagcttgtgccaggataggagctattcattcagtggtattcggaggtttttctcctgagtcgctgaaagacaggattttagattcagattgccagactgtgataacagcagatgaaggactaaggggagccaaaaaaatcccgctcaaacaaaatgtcgatgaagctttagttaactgtcctagcgttgatacagtattcgttgtaaagagaactggagctgaaataaattgggttgatgaaagagatgtctcttatgaagagattgttagttcaatgagttcagattgtccgccagaggtaatggattctgaagaccctctttttattttatacacatcaggttctacaggaaaaccaaaaggggtcttgcacacaactgcaggttatcttcttcaaactacaatgagccataaattaatctttgattaccatgagggagaggttttctggtgtactgcagatgtcggttgggttacaggtcactcatatattgtttacggacctttatcgaatggagctacaaccctaatgtttgaagggatacctacctaccccagcccatcaagattttgggaggtggttgataagcatcaagtgaatatattttatactgctcctacggccctaagggctctgatggctcaaggcaatgagcctttggagtctacttctagagagtctttaagagttctaggtacagttggtgagcccatcaatcctgaagcttgggaatggtattaccgagtagtgggcgataagagatgtccgatagtggatacttggtggcagactgaaaccggatcggccatgatcagccctttggctggttcaacccctcaaaaacctggaagcgctactaaacccttttttggaattgaaccagctctgttagacgaaaatggacaagaaattgagggagaaggttcaggcaatctagtcattaaaagaagttggccttctcaaattagaactgtgtatggtgatcataaaaggtgtgtggaaacttattactccctttaccctggttactacaccacgggggatggagcaagaagagataaagatggctattattggatcactggaagagtcgatgatgttctgaatgtatcaggacatagattaggaaccgccgaggtagagagtgctctggtattacacgaaactgtcgctgaagcagcagttgtgggttatgagcatgacatcaaaggtcaaggaatatactgttatgtaaccctgatgaacggcatagaacccagcgatgaacttaaaagtgatttagttgggctggtagctaaagaaattggagctattgccaaacctgatattattcaatgggcccctggtcttccaaaaactagatccggtaaaattatgcgaagaattttacgaaaaattgcaggaaatgagattaaggatcttggagatactactactttagccgagcctagtgtggtagaacagattatagaaaatagagaaaatcgataa

SEQ ID NO: 844 - protein, 645 aa, uncultured bacterium 311
MAKEILYQVPDLIKKNALLNEEEYELLYRESLDHSEDFWSKQAKEYLDWILPWEKVSESDLTKGEVSWFSGGKINASENCIDRHLEERSSQIAIIWEGDDPSVSKSITYQELYESVCRFANALKERGIKKGDRVCIYMPMIPEAAYAMLACARIGAIHSVVFGGFSPESLKDRILDSDCQTVITADEGLRGAKKIPLKQNVDEALVNCPSVDTVFVVKRTGAEINWVDERDVSYEEIVSSMSSDCPPEVMDSEDPLFILYTSGSTGKPKGVLHTTAGYLLQTTMSHKLIFDYHEGEVFWCTADVGWVTGHSYIVYGPLSNGATTLMFEGIPTYPSPSRFWEVVDKHQVNIFYTAPTALRALMAQGNEPLESTSRESLRVLGTVGEPINPEAWEWYYRVVGDKRCPIVDTWWQTETGSAMISPLAGSTPQKPGSATKPFFGIEPALLDENGQEIEGEGSGNLVIKRSWPSQIRTVYGDHKRCVETYYSLYPGYYTTGDGARRDKDGYYWITGRVDDVLNVSGHRLGTAEVESALVLHETVAEAAVVGYEHDIKGQGIYCYVTLMNGIEPSDELKSDLVGLVAKEIGAIAKPDIIQWAPGLPKTRSGKIMRRILRKIAGNEIKDLGDTTTLAEPSVVEQIIENRENR

SEQ ID NO: 845 - DNA, 1743 bp, Rattus norvegicus
  CDS (1)..(1743)
atggcaatgttacttcgtgctaggtgttttcaccgcctagcaatccctgatcccaggagaatcttgtataaagattacagaacagcgattcctcagaacttttccaactatgagtccatgaaacatgacttcaaaatagagattccagagtatttcaattttgcaaaagatgttttggaccaatggaccaatacggaaaagactggaaaaagactttccaatccagccttctggtgggtagatggaaatggaaaggaggtgagatggagttttgaagaacttgggtctttatccaggaaatttgccaacatactcacagaagcctgttccctgcaaagaggagatagagtaatggtgattctgcccaagatcccagagtggtggcttgcaaatgtagcctgtctgcgaacagggacagttttaattccaggaaccactcagctgacccagaaagacatcctctacaggctacaatcttcaaaatcaaagtgcattattactgatgatactttggccccagcagtagatattgtagcagctaaatgtgaaaatctccactccaaattaattgtgtctcagcactccagagaaggctgggggaacctcaaggagatgatgaaatatgccagtgacagccacacctgtgtggacacaaaacacaatgagttgatggccatctacttcaccagtgggacgactgggcctccgaagatgattggacacacccacagcagttttggtttaggactgtctgtcaacggaaggttctggctggatttgatagcctctgacgtgatgtggaatacgtcagatacaggctgggcaaagtctgcatggagtagtgttttttctccgtggacccaaggagcatgtgtttttgcacactatttgccccgttttgattcaacttccatcttgcaaaccctctccaagtttcccatcactgtcttctgttctgcaccaactgcctaccggatgcttatacagaatgacataaccagctataagttcaacagtttgaagcactgtgtgagtgccggggaacccatcaaccctgaagtgatggaacaatggaaaaagaagacaggactagacatctacgaaggatatggacagacagaaacggtgctgatctgtggaaatttcaaggggatgaaaattaagcctggctcaatggggaagccctctcctgcttttaatgtggagattttagatgaaaatggcactattcttcctcctggacaagaaggggatattgctgttcaagttcttcctgatcgaccatttggcctttttactcattatgtagataatccttcgaaaacagcttcaactctacgagggaatttctacatcactggggacagaggctatatggatgaggatggctatttctggtttgttgcaagatcagacgatgtcatattatcctctggttaccgaattggaccatttgaggtagagagtgctctcatagagcatccttccattgcagagtcagctgttgtcagcagccctgaccccatcagaggagaggtagtaaaggcctttattgtcctgaatcctgattacaaactccatgatcaagaacaactgaaaaaagagattcaggagcatgtgaaaaagactacagcaccttacaaataccccaggaagatagaatttattgaggagctgccaaagactgtcagtgggaaggtcaaaagaaatgaactgaggagaaaggaatggacaacaacttaa

SEQ ID NO: 846 - protein, 580 aa, Rattus norvegicus
MAMLLRARCFHRLAIPDPRRILYKDYRTAIPQNFSNYESMKHDFKIEIPEYFNFAKDVLDQWTNTEKTGKRLSNPAFWWVDGNGKEVRWSFEELGSLSRKFANILTEACSLQRGDRVMVILPKIPEWWLANVACLRTGTVLIPGTTQLTQKDILYRLQSSKSKCIITDDTLAPAVDIVAAKCENLHSKLIVSQHSREGWGNLKEMMKYASDSHTCVDTKHNELMAIYFTSGTTGPPKMIGHTHSSFGLGLSVNGRFWLDLIASDVMWNTSDTGWAKSAWSSVFSPWTQGACVFAHYLPRFDSTSILQTLSKFPITVFCSAPTAYRMLIQNDITSYKFNSLKHCVSAGEPINPEVMEQWKKKTGLDIYEGYGQTETVLICGNFKGMKIKPGSMGKPSPAFNVEILDENGTILPPGQEGDIAVQVLPDRPFGLFTHYVDNPSKTASTLRGNFYITGDRGYMDEDGYFWFVARSDDVILSSGYRIGPFEVESALIEHPSIAESAVVSSPDPIRGEVVKAFIVLNPDYKLHDQEQLKKEIQEHVKKTTAPYKYPRKIEFIEELPKTVSGKVKRNELRRKEWTTT

SEQ ID NO: 847 - DNA, 1740 bp, Klebsiella pneumoniae
  CDS (1)..(1740)
atgacgctctgtggcaggcggagatcatcgcgcgccgcgccgggcatatcgccgcgcaggaggccgtcgatgcgaacagtgcagagtgagcacgatccctttctgcgcgacttctggcgggaagagtccgcgcggctttactgggaaacggattttaccgaggtggtggaaagccttgacggcagcccgcgctgccgctggtttacgggcgggcgcaccaatctcagcttcaacgccctggaccgccatttagcagagaaaggggagaagtgcgccattattcatcgcgactatctcgggcaaacgcaccggcttagctatcgcgagctttggcagcaggtgaataccctctgcagcatgatgcaaagctggggcgtgaagccgggggaccgggtactcatcgccctgccgatgacgccgctggtggccgtcgctatgctggcgtgcgcgcgcattggcgcggtgcatgtcgtgctctattcctccatcacccatgaggccctgatgcagcgcatcgccgtcagccagccggtgctgctgttgcatagccgcgagcagcgaggccgcaaggaactgcccgttatcgccgagcggatggccggactgcgggtagtagatacgtacagccgggcatttgaagagctgttggcacgacatcgtggcaacgtcgtgccctgtacctggcttgcggcctccgcgccttcgcatctgctgtttacgtcggggactacaggaacgccgaaagggatcgtccgcgacacgggcggttacgccgtggcgctgctggccagccttgtgcatctctttcggctgcgggacgacgagattttctttacaaccgccgacgccggctgggtgaccgggcacagctacgggatctatgggccgctgctggcggggctgacgacggtgctctgcgaggttaactcgccgggagaatactggtggcagatggtggaaaccctcggcatcacccggatgctgaccattgccggggcgattcgcatggcccggcggcagggtaagccgcgcgccgatctgacctcgctgcgcacgctctatctcgccggcgagccgctggataacgccaccgatgagtgggtggccgcacagctgggggtgccctgcgagaaccattactggcagaccgaatccggctggccgctgctggccggctccggtagagcgctctcgccggtattcacgcgcgcggctgaggtggttcatcccgccagcgggaaaacctgcgcgccgggcgagacgggcatgcttgtgattaacaatacgcttggccccggcgggatgtcgacgttgtggcagaatgatatccagcacgaccagtactactggtcgtatcggcagcgacagtggcgctatgccacccacgattgcgcgataagggttggtgagcggattattatccaggggcggatggatgacgtgatgaatatcggcggtaagcgcatcgccaccgcagagatagaaaatgccctgatggggcttgagggggttgtcgaggtggttgccgccgggacggcacactacctgctgggggaaatggtggcgctgtttgtggtcaccgatatcgccgaccctgcgcagcaggccgcgctcaaaaaaaacatttgcgcccggctggtggcgagatgcggtcgcttcgccgtaccgcggcgcatccacatcacctcggccctgcctaaaaccttctccgggaaggtgatgcgccgcatactggcttag

SEQ ID NO: 848 - protein, 579 aa, Klebsiella pneumoniae
MTLCGRRRSSRAAPGISPRRRPSMRTVQSEHDPFLRDFWREESARLYWETDFTEVVESLDGSPRCRWFTGGRTNLSFNALDRHLAEKGEKCAIIHRDYLGQTHRLSYRELWQQVNTLCSMMQSWGVKPGDRVLIALPMTPLVAVAMLACARIGAVHVVLYSSITHEALMQRIAVSQPVLLLHSREQRGRKELPVIAERMAGLRVVDTYSRAFEELLARHRGNVVPCTWLAASAPSHLLFTSGTTGTPKGIVRDTGGYAVALLASLVHLFRLRDDEIFFTTADAGWVTGHSYGIYGPLLAGLTTVLCEVNSPGEYWWQMVETLGITRMLTIAGAIRMARRQGKPRADLTSLRTLYLAGEPLDNATDEWVAAQLGVPCENHYWQTESGWPLLAGSGRALSPVFTRAAEVVHPASGKTCAPGETGMLVINNTLGPGGMSTLWQNDIQHDQYYWSYRQRQWRYATHDCAIRVGERIIIQGRMDDVMNIGGKRIATAEIENALMGLEGVVEVVAAGTAHYLLGEMVALFVVTDIADPAQQAALKKNICARLVARCGRFAVPRRIHITSALPKTFSGKVMRRILA

SEQ ID NO: 849 - DNA, 1821 bp, Homo sapiens
  CDS (1)..(1821)
atgttaaaaacttttctttttctggaaaagtactttccatgcattaagtattccagtgcctgttttcctggcactgggctggatgtatatgacataaaatttgcagtattgctccacccccaaactgctctgcattttggccctcctccatctctgatggctttctcttccctgtgctgcagggaactactggagaccacgtgccgcctggccaacacgctgaagaggcatggagtccaccgtggggaccgtgttgccatctacatgcccgtgtccccattggctgtggcagcaatgctggcctgtgccaggatcggagctgtccacacagtcatctttgctggcttcagtgcggagtccttggctgggaggatcaatgatgccaagtgcaaggtggttatcaccttcaaccaaggactccggggtgggcgcgtggtggagctgaagaaaatagtggatgaggctgtgaagcactgccccaccgtgcagcatgtcctggtggctcacaggacagacaacaaggtccacatgggggatctggacgtcccgctggagcaggaaatggccaaggaggaccctgtttgcgccccagagagcatgggcagtgaggacatgctcttcatgctgtacacctcagggagcaccggaatgcccaagggcatcgtccatacccaggcaggctacctgctctatgccgccctgactcacaagcttgtgtttgaccaccagccaggtgacatctttggctgtgtggccgacatcggttggattacaggacacagctacgtggtgtatgggcctctctgcaatggtgccaccagcgtcctttttgagagcaccccagtttatcccaatgctggtcggtactgggagacagtagagaggttgaagatcaatcagttctatggtgccccaacggctgtccggctgttgctgaaatacggtgatgcctgggtgaagaagtatgatcgctcctccctgcggaccctggggtcagtgggagagcccatcaactgtgaggcctgggagtggcttcacagggtggtgggggacagcaggtgcacgctggtggacacctggtggcagacagaaacaggtggcatctgcatcgcaccacggccctcggaagaaggggcggaaatcctccctgccatggcgatgaggcccttctttggcatcgtccccgtcctcatggatgagaagggcagcgtcgtggagggcagcaatgtctccggggccctgtgcatctcccaggcctggccgggcatggccaggaccatctatggcgaccaccagcgatttgtggacgcctacttcaaggcctacccaggctattacttcactggagacggggcttaccgaactgagggcggctattaccagatcacagggcggatggatgatgtcatcaacatcagtggccaccggctggggaccgcagagattgaggacgccatcgccgaccaccctgcagtaccagaaagtgctgtcattggctacccccacgacatcaaaggagaagctgcctttgccttcattgtggtgaaagatagtgcgggtgactcagatgtggtggtgcaggagctcaagtccatggtggccaccaagatcgccaaatatgctgtgcctgatgagatcctggtggtgaaacgtcttccaaaaaccaggtctgggaaggtcatgcggcggctcctgaggaagatcatcactagtgaggcccaggagctgggagacactaccaccttggaggaccccagcatcatcgcagagatcctgagtgtctaccagaagtgcaaggacaagcaggctgctgctaagtga

SEQ ID NO: 850 - protein, 606 aa, Homo sapiens
MLKTFLFLEKYFPCIKYSSACFPGTGLDVYDIKFAVLLHPQTALHFGPPPSLMAFSSLCCRELLETTCRLANTLKRHGVHRGDRVAIYMPVSPLAVAAMLACARIGAVHTVIFAGFSAESLAGRINDAKCKVVITFNQGLRGGRVVELKKIVDEAVKHCPTVQHVLVAHRTDNKVHMGDLDVPLEQEMAKEDPVCAPESMGSEDMLFMLYTSGSTGMPKGIVHTQAGYLLYAALTHKLVFDHQPGDIFGCVADIGWITGHSYVVYGPLCNGATSVLFESTPVYPNAGRYWETVERLKINQFYGAPTAVRLLLKYGDAWVKKYDRSSLRTLGSVGEPINCEAWEWLHRVVGDSRCTLVDTWWQTETGGICIAPRPSEEGAEILPAMAMRPFFGIVPVLMDEKGSVVEGSNVSGALCISQAWPGMARTIYGDHQRFVDAYFKAYPGYYFTGDGAYRTEGGYYQITGRMDDVINISGHRLGTAEIEDAIADHPAVPESAVIGYPHDIKGEAAFAFIVVKDSAGDSDVVVQELKSMVATKIAKYAVPDEILVVKRLPKTRSGKVMRRLLRKIITSEAQELGDTTTLEDPSIIAEILSVYQKCKDKQAAAK

SEQ ID NO: 851 - DNA, 1716 bp, Thermoproteus tenax
  CDS (1)..(1716)
atgttgccaggaactgctgtgaacggtattaaatatcccaaagcgtatagcgatagactagaaatagatataagaaatttttcttttaattcatatgaagatatatatagaaaatttatttggaatataccaaaatattttaatataggatatgctataacggacagagcaatcgcgttgggacgcggagaaaacgttgcgatatattacgaggacgacgaggggcggagagaagttgtaagattcagcgaactgaagactaggtccgacgcgtttgcgagatcgcttctggacaacggagtaaggaagggggacgtcgttggcgtatatctctaccctgggccggaggttgtaatcgctctaagcgccatttataagataggagcaattgcattgtcgatatctccgttgatagggaccgagggagtagaatacagattgaaacacagcgaggcaaaggcgtttgtgacagacggcacgaagaaagaggcgatctcgatagcgaatagattgaacacaataagagcgatatatgtagtgggttcagagccctctggcggcaaggagttgtctttcgaggatcagaccaaggccggatcagcggaaatagccgagacagagagcgatgagccggcccagttgttttatacatcgggcagcacgggcccgcccaagggagtgctacacgcccatcggtttcttctgggccatataccgacctaccaactgtactttgagatggcccctcgcgatggcgacgtatattggacaaacgcagactgggggtggatcggcgccttgggcgacgtagtactgccctcgctctacttcggcatgcctgtagtggcatacaggaggacaagcggcttcagtgcccggagagcgctggaggtgatgtcacagtacggagtcactgcggcctttataactcctactgctctccgtataattagaagggagtatccggagccgttgaaagatttcgatataaagttgagggccttgagcacggcgggagagtcgccaggacgggagcttgtgctctgggcctcggaggcttttaaagcttcagtgaacgagttctacggctgcactgagactaatctagttgtcactaacaactccatttgggccaagccaggttcgctgggaaagcctgcgcctgggcacatcgtcgaggttgtcgacgacaaggggaacccgcttcctccaaatgccgagggatggatagctgtcaaattgccagatccggtggcatttctagggtacttcaaaaaccccgaggccacggccgcgaaaataaagaacggctggttcctcataggagatatggggcttaaagatgccgagggctacctctggtttaagggcagaggggatgacgtcataaaagtctcaggctacaggatcgggcccgaggagatagaggaggtaatcacaaaacatccggcagtcctagaggctgccgtgattgggaagccggatcctgtccgcggcactatagttaaggccttcgtagtcctcaaaccaggtattgagccaagcgatattttggccagagagatccaagagtttgtaaaaacacggctcgccgcatatgcatatcctagagaagtggagtttgtagatcaattgcccagaacggagaccggaaaactcaagaggtatgagctgaggcgcagagagcttgagaggggcaatgtacagagcggttga

SEQ ID NO: 852 - protein, 571 aa, Thermoproteus tenax
MLPGTAVNGIKYPKAYSDRLEIDIRNFSFNSYEDIYRKFIWNIPKYFNIGYAITDRAIALGRGENVAIYYEDDEGRREVVRFSELKTRSDAFARSLLDNGVRKGDVVGVYLYPGPEVVIALSAIYKIGAIALSISPLIGTEGVEYRLKHSEAKAFVTDGTKKEAISIANRLNTIRAIYVVGSEPSGGKELSFEDQTKAGSAEIAETESDEPAQLFYTSGSTGPPKGVLHAHRFLLGHIPTYQLYFEMAPRDGDVYWTNADWGWIGALGDVVLPSLYFGMPVVAYRRTSGFSARRALEVMSQYGVTAAFITPTALRIIRREYPEPLKDFDIKLRALSTAGESPGRELVLWASEAFKASVNEFYGCTETNLVVTNNSIWAKPGSLGKPAPGHIVEVVDDKGNPLPPNAEGWIAVKLPDPVAFLGYFKNPEATAAKIKNGWFLIGDMGLKDAEGYLWFKGRGDDVIKVSGYRIGPEEIEEVITKHPAVLEAAVIGKPDPVRGTIVKAFVVLKPGIEPSDILAREIQEFVKTRLAAYAYPREVEFVDQLPRTETGKLKRYELRRRELERGNVQSG

SEQ ID NO: 853 - DNA, 2118 bp, Agrobacterium vitis
  CDS (1)..(2118)
atgtctaatttgcccgccatgtggcgacctgataagaattggcagtatgacacctatatcattgatgcagagccactgcaccgcatcatgccaggtccatgtttgagagaggtgaggactctcccgcagcctgtcatggctgcgtcacatcaggaggatttcctgtctgccaagacccatcccgctttaaaggccgccaaggcccaggctttgatcgataacgacaaatacctgaaatggtacgaggaaagcatcgaggagccggagaatttctggtccaagcacggcaagcggatcgattggttcaagccctataccaaggccaagaacaccagtttcaagggcaaggtaccgatcaaatggttcgaggacgggctgaccaatgtctcctataattgcattgaccgacatctgaaaacccatggcgagcgcaccgcgatcatctgggaaggggacaatccctatatcgacaagcggatcacctataaccagctttatgacaatgtctgccggcttgccaatgtgctgaaggcgcatggtgtcaagaagggcgaccgcgttacaatctatatgcccatggtgccggaagcgacctatgccatgctggcgtgttcgcgtattggtgctgtgcattcggtggtgtttggcggtttttcgcctgaagccctggctggccggatcgtcgattgcgaatcgaccttcgtgatcacctgtgacgaaggggtgcgcggcggcaagccggtggctctcaaggaaaacaccgatgtcgccatcgacattgcagcgaaacaatatgtcatcgtcaacaaggtgttggtggtgcgccgtaccggcggcaaggtcggctgggctccggggcgcgatctctggtaccatcaggaaatcgccaaggtgaagccggattgcccgccggagaaaatgaaggcggaagatccgctgttcattctctacacctccggctccaccggcaagccaaagggcgtgctgcacacgaccggtggctatctcgtctatgcggcgatgacccacgaatatgtgttcgactacaaggacggcgaaatattctggtgctcggcagacgtgggttgggtgaccggccattcctatatcgtctacgggccgctggccaattgcgcgacgacggtgatgttcgaaggtgtgcccaatttccccgaccagggacggttctgggaaattatcgacaagcacaaggtcaatattttctataccgcacccaccgccatccgttcgctgatgggggccggagacgatttcgtcaagcgctcctcgcgctccagcctgcgattgctgggctcggtcggtgagccgatcaatccggaagcctgggaatggtattataacgtggtcggtgatcagcgctgcccgattgtcgatacctggtggcagaccgagaccggtggcattctcattagccccctgcccggcgccacggatctcaagcccggttccgcgacccggccgttcttcggcgtcaagccggagctggtggacaatgaaggcaaggtgctggagggggctgccgatggcaatctctgcctgatcgacagctggccgggccaggcacggacgatttacggcgaccacaatcgcttcgtccagacctatttttccacctataagggcaagtatttcaccggcgacggctgccgtcgcgacgaggacggttattattggatcaccggtcgcgtcgatgacgtgctgaatgtgtccggccaccgtctgggaactgccgaggtggaatcggcactggtctcgcatcatttggtctcggaagccgccgtggtcggttatccgcacggcataaaaggccagggcatttattgctatgtgacgctgatggcgggccatgagggcgatgaggaattgcgccagacgttatcaagcatgtccgttccgaaatcggcccgattgcctctcccgacaaggttcagttcgctcccggcctgccgaaaacccggtccggcaagatcatgcgtcgtaatcctgcgcaagatcgccgaggacgatttcggcgcgctgggcgatacatcgacgctcgccgatcctggcgttgtcgacgatctgattgccaaccggcagaacagggctccggcctga

SEQ ID NO: 854 - protein, 705 aa, Agrobacterium vitis
MSNLPAMWRPDKNWQYDTYIIDAEPLHRIMPGPCLREVRTLPQPVMAASHQEDFLSAKTHPALKAAKAQALIDNDKYLKWYEESIEEPENFWSKHGKRIDWFKPYTKAKNTSFKGKVPIKWFEDGLTNVSYNCIDRHLKTHGERTAIIWEGDNPYIDKRITYNQLYDNVCRLANVLKAHGVKKGDRVTIYMPMVPEATYAMLACSRIGAVHSVVFGGFSPEALAGRIVDCESTFVITCDEGVRGGKPVALKENTDVAIDIAAKQYVIVNKVLVVRRTGGKVGWAPGRDLWYHQEIAKVKPDCPPEKMKAEDPLFILYTSGSTGKPKGVLHTTGGYLVYAAMTHEYVFDYKDGEIFWCSADVGWVTGHSYIVYGPLANCATTVMFEGVPNFPDQGRFWEIIDKHKVNIFYTAPTAIRSLMGAGDDFVKRSSRSSLRLLGSVGEPINPEAWEWYYNVVGDQRCPIVDTWWQTETGGILISPLPGATDLKPGSATRPFFGVKPELVDNEGKVLEGAADGNLCLIDSWPGQARTIYGDHNRFVQTYFSTYKGKYFTGDGCRRDEDGYYWITGRVDDVLNVSGHRLGTAEVESALVSHHLVSEAAVVGYPHGIKGQGIYCYVTLMAGHEGDEELRQTLSSMSVPKSARLPLPTRFSSLPACRKPGPARSCVVILRKIAEDDFGALGDTSTLADPGVVDDLIANRQNRAPA

SEQ ID NO: 855 - DNA, 1578 bp, Listeria monocytogenes
  CDS (1)..(1578)
atgaattcagaaaatttaatcgctccagaactttataatattaccgacgagattgctaaattcagttctgaaaaaactgctttaatttggaaaaatgagcataacgaaacaaaaacttggagttaccgccacctgcttgaacaagcgaataaatttgccaatgttgtcaaagacgcaggcataaaaaaaggtgaccacgttatcgtcatgacacctagattactcgaaacgtacgcaatttacatgggcttatggaaagctggtgccattatcatcccggcatccgagctacttaaagcgcacgatttagaataccgcatccaccatgcaaacgtaaaagcaatcgtttcttacaatggaatgactgctgaatttgataaaattgaaagcatcccttctgtttcgaaaaaaattattgttggggagaaattatccggctgggatcactacgaaacattaatggaagccgcttcaaccgaatttgaacgcgtggaaacttcgcgcgatgatgcttgtctgcttgcattcacgagtggaacaacaggtaatcctaaaggcgttgtacatattcacggctggggttacgcgcatattcgtatcgctgctgatcattggctcgatattcacgaagacgatatcgtttgggctacagccggacctggttggcaaaaatgggtttggtctcctttcctttctgtactcggaaaaggtgccactggcttcatttacaacggtcgtttcattcctgaaaaacaacttcatttactggaagaagaaaaaatcaacgtgctgtgctgtacgccaacagaatatcgcttaatggctaaagtaaataatttgcgcgaacatgatttaagttcccttcgtagcgccgtatcagcaggagaacctctaaaccgcgaagtaattcaagttttccaagataattttgatattaaagttcgcgacggctacggtcaaacggagagtacactgttgattgggacactggttgatacgccgattcgccctggttcgatgggcaaaccaattatgcctgaatacatggcgattattgatgctgaaggaaatccagttggtgtcggtgaaattggtgatatcgcgatgcgtagagatttcccagcacttttcaaagagtactataaagaaccagaacgtttgcaaaaagcgattcgcggtgattatttcgtttctggtgaccgcgctatccgcgatgaagataattattactggttccaaggccggaatgacgatattattattagctctggttacacgattggaccgttcgaagtagaggacgcgctcacacatcatccagccgtaaaagaagtcgctgttgtcgcaagtcctgacgaaatccgcggtacggtcgtaaaagctttcatcgtcttaaaagatggatacgagggcacggaagatcttgtgcacgaattacaaacatttacgaaagaacaaacggctccgtataaatatccgcgccggattgagtttgttgaagcgttaccgaaaactgattctggtaaaattcgccgcgttgagttgcgtgatgctgagtttgctagtgtgcacggatga

SEQ ID NO: 856 - protein, 525 aa, Listeria monocytogenes
MNSENLIAPELYNITDEIAKFSSEKTALIWKNEHNETKTWSYRHLLEQANKFANVVKDAGIKKGDHVIVMTPRLLETYAIYMGLWKAGAIIIPASELLKAHDLEYRIHHANVKAIVSYNGMTAEFDKIESIPSVSKKIIVGEKLSGWDHYETLMEAASTEFERVETSRDDACLLAFTSGTTGNPKGVVHIHGWGYAHIRIAADHWLDIHEDDIVWATAGPGWQKWVWSPFLSVLGKGATGFIYNGRFIPEKQLHLLEEEKINVLCCTPTEYRLMAKVNNLREHDLSSLRSAVSAGEPLNREVIQVFQDNFDIKVRDGYGQTESTLLIGTLVDTPIRPGSMGKPIMPEYMAIIDAEGNPVGVGEIGDIAMRRDFPALFKEYYKEPERLQKAIRGDYFVSGDRAIRDEDNYYWFQGRNDDIIISSGYTIGPFEVEDALTHHPAVKEVAVVASPDEIRGTVVKAFIVLKDGYEGTEDLVHELQTFTKEQTAPYKYPRRIEFVEALPKTDSGKIRRVELRDAEFASVHG

SEQ ID NO: 857 - DNA, 1986 bp, Desulfovibrio vulgaris
  CDS (1)..(1986)
atgagccaggaacgtatcgagagcatgatggatgagaagcgccacttcgcccctcccgctgacagccggggcagggcacatgtgtccggcgaagccgcgcgagaggcgcttgtgcggcgtgccgccgaagaccccgaaggcttctggggcgaacgtgcggcacagctcatcgactggttcaagccgtgggataccgtgctggatgccgacatgaacgaaccgcgcatcgagtggttcaagggcggaaggctcaacgtggcccacaactgcctcgacaggcatgtggcaggaaaccggcgcaacaaggccgccatcatctggcagggcgaacccgaagaggacgtgcgggtgctcacctaccagatgctgtatgacgaggtgcgccgtttcgccgccgttctgcgcaagatgggcgtgcacaagggcgaccgcgtctcgctgtacatgcccatgattcctgaactggctgtcgccatgctcgcctgcgcgcgcatcggggctgtccattccatcgtctttgccggattctcggctgtgagccttcagaatcgcatccacgactgcgaggccaaggtcgtggtcaccgccgacgcggtgctgcgtgccggacggcgcatccccctcaaggtgaacgtcgacgaggccgtgcgccagtgtcccagcgtggagaaggtcgtcgtcgtcaaccgcgggagcctcgaagtgaccatggaggaggggcgtgacctgtggtggcatgaggtcatggccgaccgcaccctcgacgtcgaccgcccctgcgaggagatggatgcggaggacatgctgttcatcctctacaccagtggcagcaccggcaagcccaagggcgtggtgcacaccacgggcggctatcttacctatgccgcgcacaccacgcagtgggtcttcgacgtgcaggacgacgacgtgtactggtgcaccgccgacatcggctggattaccgggcacagctacatcgtctacggcccgctggccctcggggcgacctcgctgatgttcgagggtgtgccctcgtggccctcgcccgaccgtttctggcgcatcgtcgagaagttccgcgtcaacatcttctacaccgcccccaccgtcgtccgcgcactcatgcgtgaaggcacggactggacggaacggcacgacctttcgtcgttgcgtgtcctcgggtcggtgggcgaacccatcaaccccgaagcgtggatgtggtaccatacccacatcggcaagggacgcctgcccatcgtcgacacatggtggcagacagagacgggtggcatcatgatttcgggcctgccctacgccaccaccctcaagcccggttcggcaacgcagccgctgcccggcgtcgatgccgccatcgtccggcccgacggcagccccgcagggcccaacgaaggcgggcatcttgtcatccgcaagccgtggccgggcatgttgcgcggcatcttcggctcgcccgaacggtaccgctcgacatacttcgaacgctttcccggcatgtacgagtccggcgatggcgcacgcaccgatacggacggctatttctggatcatgggccgcctcgacgacgtcatcaacgtctcgggacaccgcatgggcacggccgaggtcgagtctgcgctggtcgcccatcccagcgtcgcggaagccgccgtcgtgggcatgccacacgccgtgaagggtgaggccatctacgcctacgtgactctcggcgccgatgcggaagagaccgaggagctccgcgccgagctgcgcgcatgggtgcgcaaggagataggccccatcgccacgcccgatgtgctccagttcgcagaggggctccccaagacgcgtagcggcaagatcatgcggcgcatcctgcgcaagatcgccgccggggccaccagcgagttcggggacacttctactctcgccgaccccggggtcgtctccgacctcattgaaggtcgcctgcaacttaccggaaggtag

SEQ ID NO: 858 - protein, 661 aa, Desulfovibrio vulgaris
MSQERIESMMDEKRHFAPPADSRGRAHVSGEAAREALVRRAAEDPEGFWGERAAQLIDWFKPWDTVLDADMNEPRIEWFKGGRLNVAHNCLDRHVAGNRRNKAAIIWQGEPEEDVRVLTYQMLYDEVRRFAAVLRKMGVHKGDRVSLYMPMIPELAVAMLACARIGAVHSIVFAGFSAVSLQNRIHDCEAKVVVTADAVLRAGRRIPLKVNVDEAVRQCPSVEKVVVVNRGSLEVTMEEGRDLWWHEVMADRTLDVDRPCEEMDAEDMLFILYTSGSTGKPKGVVHTTGGYLTYAAHTTQWVFDVQDDDVYWCTADIGWITGHSYIVYGPLALGATSLMFEGVPSWPSPDRFWRIVEKFRVNIFYTAPTVVRALMREGTDWTERHDLSSLRVLGSVGEPINPEAWMWYHTHIGKGRLPIVDTWWQTETGGIMISGLPYATTLKPGSATQPLPGVDAAIVRPDGSPAGPNEGGHLVIRKPWPGMLRGIFGSPERYRSTYFERFPGMYESGDGARTDTDGYFWIMGRLDDVINVSGHRMGTAEVESALVAHPSVAEAAVVGMPHAVKGEAIYAYVTLGADAEETEELRAELRAWVRKEIGPIATPDVLQFAEGLPKTRSGKIMRRILRKIAAGATSEFGDTSTLADPGVVSDLIEGRLQLTGR

SEQ ID NO: 859 - DNA, 1656 bp, Desulfovibrio vulgaris
  CDS (1)..(1656)
atggataagctcacctttgccagctacgacgagttcttgcgtgtcttctcgctggatgcgccagagaccttcaatttcgccttcgacgttctcgatgccatggccaacgagactcccgacaggctcgccattgcccacgtcgatgacgccggggtgcggcgcgactacaccttcgcatggcttgccgacgcttctgcgcggcttgccaacgcgctcaaggccagaggtgtgcgcaagggccatcgggtcatgctggtcttgcaccggcgtatcgaattctgggtctccatgctggcattgcatcgtctcggcgcggtagccattcccgccccagcgcaactgacccccaaggatatcgtgttccgcgtcgaacgcgcgcaggttcgtgccgtcatcgtcgacgacggcatcaccgaccgtatcgaggccgcgcgtcccgactgtccgaccctttcagtgctcgtgcagtgcggcgggacaccgttgcccgatggctggtgcgactacgaggccctctgtgcggatgcctcgccctctttcccgcgcccgacagcacccgacgaacttgcctgcggcgaagacccgctgctcatattcttctcgtccggcaccacgggcatgccgaagatggtggaacatgtgcacacctaccccctcgggcacctcgtgacgggcatgtactggcacgacctgcgccccggcgacctgcacctcaccgtggccgacacgggttggggcaaggccgtgtggggcaagttctacgggcagtggatggcgggggcagccgtcttcgtctacgacttccgcggcaagttcgaccccgaagcgttgctcgatgtcgtcgcgaagaacggcgtcaccaccttctgcgccccgcccaccgtgtaccgctttctcgtgcgggccgacctttcgcgttacgacctctcgaagctgcgccactgcacaacggcaggtgaactgctcaacgagagcgtgttccacgggtggaaggccgcaacgggcctttccatctacgagggatacggccagaccgagaccacgttgcagattgccacgctctcgtgcatggaggccaagcccggttccatcgggcgccccatgccggggtggggcatcacgcttctcgaccacgagggcaaggaatgtccgacgggcgaagagggcgaaatctgcatccgcatcagcgacggactgcctgtggggcttttccggggctatgtggaggacgccgagaagaccgcatcggtcatgttcgacgggtactaccacaccggcgacaaggcgtggatggacgaggacggctacctctggttcctcgggcgtgtggacgacctcatcaagagttcgggctatcgcatcgggcccttcgaggtcgagagcgccctcgtggcccatcctgccgtcgtcgaggccgccgtcaccggcgtgcccgacccgttgcgcgggcaggctgtgaaggccaccatcgtgcttgccgcaggctacgaggcgggcgaggtgctcacgaaggagttgcaggaccacgtcaagaaggtcaccgctccctacaagtacccccgcatcgtcgagtacgtggcagagttgcccaagaccatcagcggcaagatcaaacgcgccgaaatacgccagcgcgatagcgaaaagagcgcatag

SEQ ID NO: 860 - protein, 551 aa, Desulfovibrio vulgaris
MDKLTFASYDEFLRVFSLDAPETFNFAFDVLDAMANETPDRLAIAHVDDAGVRRDYTFAWLADASARLANALKARGVRKGHRVMLVLHRRIEFWVSMLALHRLGAVAIPAPAQLTPKDIVFRVERAQVRAVIVDDGITDRIEAARPDCPTLSVLVQCGGTPLPDGWCDYEALCADASPSFPRPTAPDELACGEDPLLIFFSSGTTGMPKMVEHVHTYPLGHLVTGMYWHDLRPGDLHLTVADTGWGKAVWGKFYGQWMAGAAVFVYDFRGKFDPEALLDVVAKNGVTTFCAPPTVYRFLVRADLSRYDLSKLRHCTTAGELLNESVFHGWKAATGLSIYEGYGQTETTLQIATLSCMEAKPGSIGRPMPGWGITLLDHEGKECPTGEEGEICIRISDGLPVGLFRGYVEDAEKTASVMFDGYYHTGDKAWMDEDGYLWFLGRVDDLIKSSGYRIGPFEVESALVAHPAVVEAAVTGVPDPLRGQAVKATIVLAAGYEAGEVLTKELQDHVKKVTAPYKYPRIVEYVAELPKTISGKIKRAEIRQRDSEKSA

SEQ ID NO: 861 - DNA, 1947 bp, Desulfovibrio vulgaris
  CDS (1)..(1947)
atggcatcgcccgccgccactctcgatgcgctgctgcgtgaagagcgcgtgttccgccctctgccacgcgtcgtcgccgatgccgtggtcaaccctcaggacgtggcccgcgcacgcgaacaggccggaacggcccctctcgccttctgggaagaggccgccgaagagctggaatggttccgccgctgggacggtgtgctcgatgacagcaacgccccgttcatgcgctggtttcccggtgcgctgtgcaacatcgtccacaacgccctcgaccggcatatcgagacatccaaccgccaccgccttgccctcatatgggaaggcgaaccgggtgacagccgtcgtttcacctatttcgacctctaccgtgaggtgaaccgcctcgccaatgccatgcgttccctcggcgtgacgaagggcgacagggtggtcatctacatgccccccctgcccgagacggtcttcgccatgctcgcctgcgccaagataggcgcggtacacagcacggtgttcggtggcttctcggcccgttcgctgtgcgaccgcgtcgaagacgcaaggcccaccctgctgctgacggttgacggattctaccgcaacggccgcgtcgtaccgctcaaacccgtcgccgacgacgccgtggacgccctgtcaccggaggcacgggccggtctgcatcatgtcgtggtcgtgcatcgcgcccacctcgagacccccatgcgcgacgggcgcgacatctggtatcacgacctcgtgcgcggacagtccaccgaggcgcttaccgaagtcctctccgccaacgacccgctgttcgtcctctacacttccggcactacaggcaagcccaaggggctggtgcacagtcacggcggctacatggtgggcgtacaccgcaccatgcgctgggtcttcgacgtgcggcccaccgacatcttctggtgcactgccgaaccgggctggataacgggccatagctacggcgtgtacgggccgctcatggcgggcaccaccaccgtcctctacgaggggcaccccctgtaccccgaagcgggcaggctgtggtccatggtcgaacgatggggtgtcaccatcctgtacaccgtccccacggtcatccgcatgctcatgcgattcggtccgctgtaccccgcgcgccacgacatcaccacgctacggcttctggctaccgtaggcgaacccatcagcccggagacatgggtgtggttctaccgcaccatagggcgagggcgctgcccggtgctcgacacatggtggcagacggagacgggcatgatcatggtcagcccgctgccggtgtcggccctgaaacccggttcggtggcccgccccctgcccggtgtggatgtggatatcgtggacggggaaggtgcccccgtcccccccggcaggggtggactgctggtggtgaagaacccgtggcccgccatggcatgcggtgtcttcggtgacgatgaggccttccgcaggctttactgggagcgctttcccggatggtactgcacgggtgacgtggcccgccgggatgacgacgggtacatctggatacagggacgtgccgacgacgtcattctcatcgccggacaccgtatcgggacggcagagatggaagcggccctcgcgtcgcatcccgccgtggcggaatgcgccgtcatcggcgtgcccgacaggctgaagggcgaagtgggcaaggcgttcgtcgttctgcgcgataccgaagaggctgcggcagaagagcaggccctagccacgtcactggtggggcatgtccggcgtgaactcggcccggtggccgtcatacgcgatgtcgtattccgtgagggactgccacgcaaccgcagcggcaagatcatgcgccgtattcttcgttcggaagagatgggcgtggagacgggtgacctctcgacgctggaagacgcctatatctga

SEQ ID NO: 862 - protein, 648 aa, Desulfovibrio vulgaris
MASPAATLDALLREERVFRPLPRVVADAVVNPQDVARAREQAGTAPLAFWEEAAEELEWFRRWDGVLDDSNAPFMRWFPGALCNIVHNALDRHIETSNRHRLALIWEGEPGDSRRFTYFDLYREVNRLANAMRSLGVTKGDRVVIYMPPLPETVFAMLACAKIGAVHSTVFGGFSARSLCDRVEDARPTLLLTVDGFYRNGRVVPLKPVADDAVDALSPEARAGLHHVVVVHRAHLETPMRDGRDIWYHDLVRGQSTEALTEVLSANDPLFVLYTSGTTGKPKGLVHSHGGYMVGVHRTMRWVFDVRPTDIFWCTAEPGWITGHSYGVYGPLMAGTTTVLYEGHPLYPEAGRLWSMVERWGVTILYTVPTVIRMLMRFGPLYPARHDITTLRLLATVGEPISPETWVWFYRTIGRGRCPVLDTWWQTETGMIMVSPLPVSALKPGSVARPLPGVDVDIVDGEGAPVPPGRGGLLVVKNPWPAMACGVFGDDEAFRRLYWERFPGWYCTGDVARRDDDGYIWIQGRADDVILIAGHRIGTAEMEAALASHPAVAECAVIGVPDRLKGEVGKAFVVLRDTEEAAAEEQALATSLVGHVRRELGPVAVIRDVVFREGLPRNRSGKIMRRILRSEEMGVETGDLSTLEDAYI

SEQ ID NO: 863 - DNA, 1890 bp, Thermus thermophilus
  CDS (1)..(1890)
atggaaccagtctggtaccctgacgcgcgcgcccaagaaacctggcttggccgcttcatggccgagctcggcttccaggactacgaggccttccaccgctacagcgtagaggaggccgaggccttctaccacgccttcttcacccggctcggcgtgccctggcgggccccgtacacacgggtggtggaaggccacttccccttcccccgcttcttcgtggggggaaggctcaacctggtggaggcctgcctgcgccacgaccccacccggcccgccctcgtccacgagacggaggacggccacgtccggagcctcacctacggggaggcccgccgggaggtggaaaggctcgcagggggcctgcgggccctcggggtggggcggggagaccgggtggggctatggcttcccatgggcctcgaggcggccttggccctcctcgccgtggcccacctcggggggatcgccgtccccatcttctcgggctacggggcggaggccgccgccctccgcctcaaggacgccgaggccaagctcctcatcgtccaagacggcttccttcgccggggacgccgggtggagctcctccccgaggcccggaaggccagggccatggcggggacggaaaaggtggccgtggtccgccgcctcggcctccccctggaggaggaggcggacctcgccgccctcgccggccccctctcgccgccggaggagatggagagcatggaccccttcatgctcatctacacctccgggaccacgggccgccccaagggcacggtccactaccacgcgggctttcccctgaaggccgccctggacctcgccctcctctttgacctgagggaggaagaccgcctcttctggttcaccgacctcggctggatgatggggccctgggccatcctgggaggcctcatcctcggggccaccgtcttcctctacgacggggcgccggaccatccgggcccggaccgcctctggcgcatggtggcggcccaccgcctcacccacttaggcctctcccccaccctggtgcgggccctcatcccctttggggaagcccccgtggaggcccacgacctctcctccctccgggtcctcggctccacgggagagccctggaacctcgagccctacctctggttcttccgggtggtgggcaaggagcggcttcccatcgtgaactactcggggggcaccgaggtctcggggggcatcctggggaacgtcctggtgaggcccatcaagcccatggggttcaacaccgccgtgcccggcatgaaggccgccgtcttggacgaggaggggaggcccgtggtgggcaaggtgggggagctcgccgtcctcgccccctggcccgggatgaccaagggcttctggcgggacgaggcccggtacctagagacctacttccagaaggtgcccggggtctgggtccacggggacttcgccctcctggacgaggaggggcacttcttcctcctcggccgctccgacgacaccctgaaggtggcgggaaagcgggtgggccccgccgaggtggagacggcggccatggcccatcccgccctgcgggagtgcgccgccatcggtgtgccccacccggtgaagggggaggccatcgtcctcttcgccgtgctgaagccgggcttcgccccctcggaggccctggccgaggaggtggcggagcgggtggccgaggccttggggaagccccttaggccggagcgggtcctcttcgtccccgacctgcccaagacgcgcaacgccaaggtgatgcgccgggtggtgcgggccgcctacctgggccaggaccccggggacctctccgccttggagaacccggaggcggtggaggccatcaagcggacccgggagggttaa

SEQ ID NO: 864 - protein, 629 aa, Thermus thermophilus
MEPVWYPDARAQETWLGRFMAELGFQDYEAFHRYSVEEAEAFYHAFFTRLGVPWRAPYTRVVEGHFPFPRFFVGGRLNLVEACLRHDPTRPALVHETEDGHVRSLTYGEARREVERLAGGLRALGVGRGDRVGLWLPMGLEAALALLAVAHLGGIAVPIFSGYGAEAAALRLKDAEAKLLIVQDGFLRRGRRVELLPEARKARAMAGTEKVAVVRRLGLPLEEEADLAALAGPLSPPEEMESMDPFMLIYTSGTTGRPKGTVHYHAGFPLKAALDLALLFDLREEDRLFWFTDLGWMMGPWAILGGLILGATVFLYDGAPDHPGPDRLWRMVAAHRLTHLGLSPTLVRALIPFGEAPVEAHDLSSLRVLGSTGEPWNLEPYLWFFRVVGKERLPIVNYSGGTEVSGGILGNVLVRPIKPMGFNTAVPGMKAAVLDEEGRPVVGKVGELAVLAPWPGMTKGFWRDEARYLETYFQKVPGVWVHGDFALLDEEGHFFLLGRSDDTLKVAGKRVGPAEVETAAMAHPALRECAAIGVPHPVKGEAIVLFAVLKPGFAPSEALAEEVAERVAEALGKPLRPERVLFVPDLPKTRNAKVMRRVVRAAYLGQDPGDLSALENPEAVEAIKRTREG

SEQ ID NO: 865 - DNA, 1884 bp, Thermus thermophilus
  CDS (1)..(1884)
atggcgctggaaaagctccttaaggttcaggaaaggctttgggcaccggaggacttgcggaagaaggcgaacctccaggactacgcggcggagtaccggaagagcctcgaggaccccgagggcttctggggggcttgggcgcggcgcttccactgggaaaagccctttgagaaggtccttgagtggaccctcccagagcaccgctggttcctgggcggcaccaccaacgccgtttacaacgccctggagcggaacgtggaaaggggcctaaggaacaaggtggccctcctctacctcgccgaggacggccgggaggaaaagctcacctacggggagcttctggaccgggtgcgccgcctggccacggggcttaggcgcctcggggtgggaaagggggaccgggtggtgatctacatgcccctcaccctggaaggggtcctcgccatgctcgccaccgcctacatcggcgccatccacagcgtggtctacgccgggcttggggtctcggccctgagggagcgcatcctggacgcccaggccaagctcctcatcgccggggacgtaagcttccggcgggggaagggggtggacctcaggagcatcgccgaggaggccatccgggaccttcccctaaaagtggtctggttccagcgggcgtacaaggcggagctttccgaagggcactacgacttccacgagctcctctggggtaacccccccgaggcccgggcggagatggtggacgccgagcaccccctcttcatcctctacacctcgggctccacgggaaagcccaagggcgtggtccacgtccacggggggtacatggtgggcaccacctaccacctgcgcaccttctttgacgtgaaggacgaggacgtcttctgggccacgagcgacatcggctggatcgtgggccactcctacatcgtctacgccccccttcttgaggggatcacctccgtcctccgggaaggggcccccgaccaccccgaccccggggccctctggcaggcggtggagcggtaccgggtgaacgtgatgttcaccgcccccacggcggtgcgcatgttcatgaagtacggccccgagtggcccaggaagtacgacctcagctccttgcgccttctggccgtggccggggagcccttgaaccccgaggccctgaagtgggcctacgagcacctggtggacgggggcaggcggggcttcgtggcggacaactggtggcagacggagctcggcggccccaccctgggaacccccctcaccctccccgccaagcccggcttcgccggggtggccctccccggggtggaggcggaggtggtggacgaggagggcaggcccgtccccccggggcagggcggcctcctcgtcctcaagcggcccttcccccacatgatgcgcaccgtctgggggaaccacgagcgctacctccggtactggcaggaggtcccggggggcgtctacgccagcggggacgtggcgagcaaggacgaggaggggtacttcagcgtcttgggccgggcggacgacgtgctgaacgtcgcggggcaccgcatcggtaccgccgacgtggaaagcgccctggtctcccaccccgccgtggccgaggccgcggtcatcggcgtccccgaccccctgaagggggaggccatcaaggccttcgtggtccttaggcttgggcaaaccccctccgaggagctgaaggaggccctcgtccagcacgtgcgccgggagctcgggcccatcgccacgccgagcgaggtggtcttcctggacaagctccccaagacccgctcggggaagatcctgaggcggctcctcaaggcccaggccctgggcaaggaccccggggacctctccaccctcgaggagtag

SEQ ID NO: 866 - protein, 627 aa, Thermus thermophilus
MALEKLLKVQERLWAPEDLRKKANLQDYAAEYRKSLEDPEGFWGAWARRFHWEKPFEKVLEWTLPEHRWFLGGTTNAVYNALERNVERGLRNKVALLYLAEDGREEKLTYGELLDRVRRLATGLRRLGVGKGDRVVIYMPLTLEGVLAMLATAYIGAIHSVVYAGLGVSALRERILDAQAKLLIAGDVSFRRGKGVDLRSIAEEAIRDLPLKVVWFQRAYKAELSEGHYDFHELLWGNPPEARAEMVDAEHPLFILYTSGSTGKPKGVVHVHGGYMVGTTYHLRTFFDVKDEDVFWATSDIGWIVGHSYIVYAPLLEGITSVLREGAPDHPDPGALWQAVERYRVNVMFTAPTAVRMFMKYGPEWPRKYDLSSLRLLAVAGEPLNPEALKWAYEHLVDGGRRGFVADNWWQTELGGPTLGTPLTLPAKPGFAGVALPGVEAEVVDEEGRPVPPGQGGLLVLKRPFPHMMRTVWGNHERYLRYWQEVPGGVYASGDVASKDEEGYFSVLGRADDVLNVAGHRIGTADVESALVSHPAVAEAAVIGVPDPLKGEAIKAFVVLRLGQTPSEELKEALVQHVRRELGPIATPSEVVFLDKLPKTRSGKILRRLLKAQALGKDPGDLSTLEE

SEQ ID NO: 867 - DNA, 2538 bp, Thermus thermophilus
  CDS (1)..(2538)
atggcgcgcaagcgagggctttccaccgtgcagcaggccctgcgccttctggcctacctggccgaccacccggaaggggtgggggcgaaggaggtggcccgcctcctggggaagagcctctcctccgcctacgccctcctccacagcctgatggaggagggcttcgtggtgaaggaggaggggggcttccggctcgcgcggcaaaagcccgtccccttggagcccacgcccttggaggaggccttggaggagctctacctgcgcacccgggagcggtgctacctcgtcctcctcaccccccagggggtgcggctcaagacccgggggcggcagggccagctccaccccctgggggagaccctgcccccggagtggcacgccctggccctgggaaaggtgctcctcgccttcggggacttccccctgccccccctcacccccaagaccccctacaccctcaccgaccccctggccctcgaggaggagctgaagcgcgtccgggcctcggggcttgcggtggagatggaggagtacgccctcggggtctccggggtggccgtccccctcctgagcccggaggggcgcctcctcggggccctgggggtcaaggtgccctcgcgccgcttccccttcgcctttggccgcctggcccgggccctggccgaggtggcccgggtctccgcccaggtcctgcccgaggaagaggcccccgctcccccgcccgccctccccgagccgggaagggtggagcggatagacccccccgaggccctccgccgcgccgccaacctgcccgacccccgggccgcccaccgggcgagcctcgaggaccccgaggccttctgggaaggcttcgcccggggtttcgcctgggaaaggccctggaaggcggtcttccgccgggaggaccggacctggttcgcgggcggcctcaccaacgtggccctaaacgccctggaccggcacctcccggaaaaggcccagcaggtcgccctcctcaccctggacggagaagggcggctcggcaagtggacctacaaggaggtccgggagctctcaagcaggctcgccgggctcttccggaccctcggggtggggcggggggacagggtggccctctacctgcccacgggcctcgaggccgccctcgccgccttggcctgcgcccggatcggggcggtgcacgccgccctgcccctgggcctgggcccggaggccctgaggcggcgcctcgaggacctgaggccccggctcctcgtggcggcggacgcctacttctaccggggccagcccgtgcgggtgcgggaggtggtggaggccgcaatccagggcctggacctcaaggtcctctggcacgtccggggaagccccgagtttctggagcggctttacgaggcccggcccgccgagcccgagcccgtgcccgcggcccaccccctcttcctccttcccacctcgggctccacggggaagcccaagggcgtggtccacggccacggggggtacatggtgggggtcgcctgggccctccgacacgtctttgacctgaagccgggagaggtgttccacaccaccgccgacctcttctggatcgtgggccactccttcggcctctacgcccccttgctcctcggcggcacctccctcctcgtggaggaccggcccgaccacccgagccccggggccttctacgagcgcctggcccacctcggggtggacgtcctcctcacctcccccgcggtgctccggaccctgaggcgccacggggaggcccggcccacgggcctccgcctggcggcgagcgtgggcgaggtgctgagccccgagatctggcgctggacccgggagcacctggcctggcccgtggacaactggtggcagacggagctcggggcccccgccctggccacgccccccgccctcccggccaagcccggccacgtgggcctccccctccccggggtggaggcccgggtggtggacgaggaggggcggcccctccctcccgggagcaaggggcacctggtcctcggcgccacggggcccgcccacatggtggacctccagggggggcgctccccctggcggggaggcctctactggacgggggacctcgcggagatggacgaggaagggtacttccgcatcctgggccgcaccgaggaggtcatcaaggtgggcgaggcccggatcggccccgcggaggtggaggccgtcctcctcacccacccccaggtggcggaggcggccgcggtgggggtgccgggggagacgggggaggagatcgccgtcttcgtggtgccgcaggcccgggagttccccgaggagctcaagcccctcctggcggaaaagctcaaggcccacatcctgcggcacctgggccccgtcccgccgcccagggtcttcttccgggaacgccttccccggacccgctcagggaagatcctgaggcggctcctcaaggcggagcttctcggcctagacccgggggacacctcgggactggaggaggactatggcgctggaaaagctccttaa

SEQ ID NO: 868 - protein, 845 aa, Thermus thermophilus
MARKRGLSTVQQALRLLAYLADHPEGVGAKEVARLLGKSLSSAYALLHSLMEEGFVVKEEGGFRLARQKPVPLEPTPLEEALEELYLRTRERCYLVLLTPQGVRLKTRGRQGQLHPLGETLPPEWHALALGKVLLAFGDFPLPPLTPKTPYTLTDPLALEEELKRVRASGLAVEMEEYALGVSGVAVPLLSPEGRLLGALGVKVPSRRFPFAFGRLARALAEVARVSAQVLPEEEAPAPPPALPEPGRVERIDPPEALRRAANLPDPRAAHRASLEDPEAFWEGFARGFAWERPWKAVFRREDRTWFAGGLTNVALNALDRHLPEKAQQVALLTLDGEGRLGKWTYKEVRELSSRLAGLFRTLGVGRGDRVALYLPTGLEAALAALACARIGAVHAALPLGLGPEALRRRLEDLRPRLLVAADAYFYRGQPVRVREVVEAAIQGLDLKVLWHVRGSPEFLERLYEARPAEPEPVPAAHPLFLLPTSGSTGKPKGVVHGHGGYMVGVAWALRHVFDLKPGEVFHTTADLFWIVGHSFGLYAPLLLGGTSLLVEDRPDHPSPGAFYERLAHLGVDVLLTSPAVLRTLRRHGEARPTGLRLAASVGEVLSPEIWRWTREHLAWPVDNWWQTELGAPALATPPALPAKPGHVGLPLPGVEARVVDEEGRPLPPGSKGHLVLGATGPAHMVDLQGGRSPWRGGLYWTGDLAEMDEEGYFRILGRTEEVIKVGEARIGPAEVEAVLLTHPQVAEAAAVGVPGETGEEIAVFVVPQAREFPEELKPLLAEKLKAHILRHLGPVPPPRVFFRERLPRTRSGKILRRLLKAELLGLDPGDTSGLEEDYGAGKAP

SEQ ID NO: 869 - DNA, 1947 bp, Thermus thermophilus
  CDS (1)..(1947)
atggacaggctggagtcggtgctcaaggaggagcgggtcttttaccccagcgaggagttccgcaagcaggcccacatcaagagcgaggaggagtaccagcgcctctacgaggagagcgtccgtgaccccgaggggttctggggacgggtggcctcggagctccactggtttgaaccctggcggaaggtcctggaaggggacctgccccaccccaagtggttcgtgggggggaagaccaacctctcctacaacgccctggaccggcacgtgaagacctggcggcgcaacaaggcggccatcgtttgggagggggagccgggggaggagagggtcctcacctaccacgacctctggcgcgaggtgcagaggttcgccaacgtcctcaagcgcctgggggtgaagaagggcgacagggtcaccatctacctccccatgatccccgaggcggccatcgccatgctcgcctgcacccggatcggggccgtccactccgtggtcttcggcggcttctccgccggggcgctggcggaccggatcaaggacgccgaggccaaggtcctcatcaccgccgacgggggcttccgccggggcgggatcgtccccctcaagcagaacgccgacgaggccctaaaggacgccacgagcgtggagcacgtggtggtggtgcgccgcaccggggaggaggtgccctggaccccgggccgggaccactggtggcacgagctcatggaggccgcccccgaccggtgcgatcccgaatccatggaggcggaggagcccctcttcatcctctacacctccggctccaccgggaagcccaagggggtgttgcacaccacgggcggctacatgacctacgtctactacaccaccaagctggtctttgacctcaaggacgaggacgtctactggtgcaccgccgacgtgggctggatcacggggcactcctacgtggtctacgggcccctcctcaacggggccaccacggtgatgtacgagggggcccccaactggcccgagcccgaccgcttctggcggatcgtggacaagtacggggtgaccgtcttctacaccgcccccaccgccatccgcagcttcatgaagtggggcgagggctggccgggcaagcaccgcctggactccttaaggctcctcggcaccgtgggcgagcccatcaaccccgaggcctggctctggtactaccacgtgatcggcaagggccgctgccccatcgtggacacctggtggcagacggagacgggcggcatcatgatcaccaccctccccggggcccacgccatgaagccggggcacgcggggaagcccttcttcggcgtggtgcccgagattttggacggcgagcaccgccccgtggagaaccccgacgaggggggccacctctgcatcacccgtccctggcccagcatgctccgcaccgtctggggcgacccggagcgcttcctgcagcagtacttcagccagcaccccggggtctacttcagcggcgacggggccaagcgggacaaggacgggtactacatgatcctgggccgggtggacgacgttctgaacgtggccgggcaccgcctgggcaccatggagatcgagtccgccctggtggcccaccccgccgtggccgaggcggcggtggtgggcaggcccgatcccgtgaagggggaggccatcgtggccttcgtgaccctgaaggaggggcacaccccctcggacgccctcaaggaggagctcagggcccacgtggccaaggtcatcggccccatcgcccgcccggacgagatccgcttcaccgacgccctgcccaagacccgctcgggcaagatcatgcgccgcctcctccggcagatcgccgccggggagaaggagatcaagggggacacctccaccctcgaggaccgctccgtggtggagcggctgaaggagggcgcctaa

SEQ ID NO: 870 - protein, 648 aa, Thermus thermophilus
MDRLESVLKEERVFYPSEEFRKQAHIKSEEEYQRLYEESVRDPEGFWGRVASELHWFEPWRKVLEGDLPHPKWFVGGKTNLSYNALDRHVKTWRRNKAAIVWEGEPGEERVLTYHDLWREVQRFANVLKRLGVKKGDRVTIYLPMIPEAAIAMLACTRIGAVHSVVFGGFSAGALADRIKDAEAKVLITADGGFRRGGIVPLKQNADEALKDATSVEHVVVVRRTGEEVPWTPGRDHWWHELMEAAPDRCDPESMEAEEPLFILYTSGSTGKPKGVLHTTGGYMTYVYYTTKLVFDLKDEDVYWCTADVGWITGHSYVVYGPLLNGATTVMYEGAPNWPEPDRFWRIVDKYGVTVFYTAPTAIRSFMKWGEGWPGKHRLDSLRLLGTVGEPINPEAWLWYYHVIGKGRCPIVDTWWQTETGGIMITTLPGAHAMKPGHAGKPFFGVVPEILDGEHRPVENPDEGGHLCITRPWPSMLRTVWGDPERFLQQYFSQHPGVYFSGDGAKRDKDGYYMILGRVDDVLNVAGHRLGTMEIESALVAHPAVAEAAVVGRPDPVKGEAIVAFVTLKEGHTPSDALKEELRAHVAKVIGPIARPDEIRFTDALPKTRSGKIMRRLLRQIAAGEKEIKGDTSTLEDRSVVERLKEGA

SEQ ID NO: 871 - DNA, 1719 bp, Bacillus cereus
  CDS (1)..(1719)
atgaaagtagaaacgcttcctgtcattaaaggagaaaataatttgccgaattatgatgaggcatacgcaaattttaactgggaagaggttaataaaaactttacttggaatgaaacaggccgagtaaatatggcgtatgaggcaattgataagcatgcgaaatccgatcgaaagaataaagtagccctttattatcaagatggatcgcgaaaagagaagtatacatttaaggaaatgaaggatttttctaataaagcaggaaacgtcctgaaaaattatggcgatgtagaaaaaggcgatcgcgtttttatttttatgccgcgttccccagagttatatttcgcccttcttggtgcagtgaaattaggggcaattgttggtccgttatttgaagcatttatggaaggcgcagttcgcgatcgtttagaagatagcgaagcaaaagtgttaattacaacgcctgaattgttagagcgcgtaccattaaatgatttaccagctttaaaaacagtcttccttgttggagatcatgtagaagaaggcggtaaaacagtagcattcaatcctttattcgaacaagcttcaaaagaattacatattgaatggttaggccgtgaagacggtctgattctacattacacgtctggttctactggtaagccaaaaggtgtgctccatgcgcaaaacgcaatggttcagcactatcaaacggcgaaatgggtattagatttaaaagaagacgatgtatattggtgtacagctgacccaggctgggtaactggtacagcttacggtattttcgcaccgtggttagtcggagcatcaaatgttattttaggcggacgttttagtccagaagcttggtatgaagcgctgcaagattacggcgtaacagtttggtatagcgcaccaacggcgttccgtatgttaatgggtgctggacaagatgcaattaaaaaatacgatttatcacaagtgcgccacgtgttaagcgttggtgaaccgttaaatccagaagtaattcgctgggggatgaacgcatttggacttcgtattcatgatacgtggtggatgacagaaacaggtggacaagttatttgtaactacccttgtatggaaatccgtccaggttcaatgggtaaaccaattccaggtgtaaaagcagcgattgttgataatgaaggaaatgaagtgcctccctacacaatgggtaacttagcaattagcaaaggttggccagcgatgatgcgcggaatttggaataacaaacaaaagtatgaatcttacttcatgccaggcgattggtacgtatcaggtgattctgcctatatggacgaggatggatacttctggttccaaggacgtattgacgatgtaattatgacgtcaggtgagcgcgttggtccgtttgaagtagaaagcaaattaatcgagcatgctgctgttgcagaagctggtgtaatcggtattcctgatccggtgcgcggcgaaattattaaagcatttatcgcgcttcgtgcagggtacgaaccatctgaagagttaaaagaagaaattcgtcaatttgtaaagaaaggtctagcagctcatgcagcgccaagacaaattgaatttagagataaattaccgaaaacgagaagcggtaaaattatgcgccgcgtattaaaagcgtgggagttaaacttgccaacaggtgacttatcaacgatggaagattaa

SEQ ID NO: 872 - protein, 572 aa, Bacillus cereus
MKVETLPVIKGENNLPNYDEAYANFNWEEVNKNFTWNETGRVNMAYEAIDKHAKSDRKNKVALYYQDGSRKEKYTFKEMKDFSNKAGNVLKNYGDVEKGDRVFIFMPRSPELYFALLGAVKLGAIVGPLFEAFMEGAVRDRLEDSEAKVLITTPELLERVPLNDLPALKTVFLVGDHVEEGGKTVAFNPLFEQASKELHIEWLGREDGLILHYTSGSTGKPKGVLHAQNAMVQHYQTAKWVLDLKEDDVYWCTADPGWVTGTAYGIFAPWLVGASNVILGGRFSPEAWYEALQDYGVTVWYSAPTAFRMLMGAGQDAIKKYDLSQVRHVLSVGEPLNPEVIRWGMNAFGLRIHDTWWMTETGGQVICNYPCMEIRPGSMGKPIPGVKAAIVDNEGNEVPPYTMGNLAISKGWPAMMRGIWNNKQKYESYFMPGDWYVSGDSAYMDEDGYFWFQGRIDDVIMTSGERVGPFEVESKLIEHAAVAEAGVIGIPDPVRGEIIKAFIALRAGYEPSEELKEEIRQFVKKGLAAHAAPRQIEFRDKLPKTRSGKIMRRVLKAWELNLPTGDLSTMED

SEQ ID NO: 873 - DNA, 1653 bp, Treponema denticola
  CDS (1)..(1653)
atgttttataaagaatatataaactatattgaaagcgatgattgggaaaccgtacataattctttttcagttaaagctcccgagaattttaattttgcttatgacataatagatagaatggctaaggaataccccgaaaaagaggctctcgtatggtgcgatgaaaccgaagaaaggattttttcgttcggagaattggcaaagcagataaataaaacagccaacttttttaaggccatgggaataggaagaggcgacacggttttgctttttttgcgaagaagatacgagttttggtttgttcttcctgccctgcacaaaataggggcaatagccgttcctgcaacggtccagctcgcagctcacgacatcgaataccgtattcaatccgccaatataaaaatgataatggccgtacaagaaaagaatttgcaagaagaaattcaaaaagctgctgagtccgcttataataagccccttcttgtctgggtgcatgacgaaatggagggttggatttcctttgatgaactcgtaaaaaatatgagtgaagattttacacctccccaagggaattcctacccttgcggaaaggacatagctcttttgtactttacctcaggtacttcgggcaatcccaaaatggtggagcataattttttatatcctcttggacacattgcgactgcaaaattttggcaaaatgtcaaggaaggcggaagacacttaagcgttgcagaaacaggctgggcaaaggctatgtggggaaagatttacggtcaatggctctgcggctgtgccgtctttgtgtacgacatgaaaatgtttatccctaaaaacctgctcgaaaaattatcaaaatacagggtaacttccttttgtgcacctcctaccgtttacaggtacttaatccgcgaaaaaatagaagattacgatttatcctcattggaagaatgtacaacggcaggtgaagcccttagcatggacatattcaatacatttaaagaaaagactggaatagaactgcgggaaggctacgggcaaacagagcttaccctcacaacaggaaccttccccggcatgaaaattaaacccggctcgatgggaaagcccgcccccggctatgagatagatattatccgccccgacggatcttcttgcaaggcaggagaatcgggagaaatcatcttgcgtttggataaaaaggttcctttcggaatgttcgggggttattataaaaatgaagaaaaaacggccgaggtttttaaggacggagtttaccacacgggagacgccgcctatagggatgaagacggttatttttggtttgaaagccgaaccgatgaccttataaaaagctccggtttccgtataagcccctttgaggtggagtcggttcttctccagcatccggcagtctttgaatgtgcggtaacaggcgtacccgaccctaagagaggtcaggcggtaaaggcctttgttgttttgaacaaaacctatcagccgagccaagccttggaaaaagagcttatgttctttgcaaagaaaaatgcggccctttacaaggccccgcgttctctcgaatttgtagaaactttgccgaaaacccataacggcaagataagccgggctgcaatcagaagccgaaaggtctga

SEQ ID NO: 874 - protein, 550 aa, Treponema denticola
MFYKEYINYIESDDWETVHNSFSVKAPENFNFAYDIIDRMAKEYPEKEALVWCDETEERIFSFGELAKQINKTANFFKAMGIGRGDTVLLFLRRRYEFWFVLPALHKIGAIAVPATVQLAAHDIEYRIQSANIKMIMAVQEKNLQEEIQKAAESAYNKPLLVWVHDEMEGWISFDELVKNMSEDFTPPQGNSYPCGKDIALLYFTSGTSGNPKMVEHNFLYPLGHIATAKFWQNVKEGGRHLSVAETGWAKAMWGKIYGQWLCGCAVFVYDMKMFIPKNLLEKLSKYRVTSFCAPPTVYRYLIREKIEDYDLSSLEECTTAGEALSMDIFNTFKEKTGIELREGYGQTELTLTTGTFPGMKIKPGSMGKPAPGYEIDIIRPDGSSCKAGESGEIILRLDKKVPFGMFGGYYKNEEKTAEVFKDGVYHTGDAAYRDEDGYFWFESRTDDLIKSSGFRISPFEVESVLLQHPAVFECAVTGVPDPKRGQAVKAFVVLNKTYQPSQALEKELMFFAKKNAALYKAPRSLEFVETLPKTHNGKISRAAIRSRKV

SEQ ID NO: 875 - DNA, 1953 bp, Mycobacterium paratuberculosis
  CDS (1)..(1953)
atgaccgccagcaacaccgcaagccccgcgtcgtatccgccgccgccgcagttcgtcgagcaggccaatgcggatgagcagttgtaccgcgaggccgagcgggaccggctgacgttctgggccgagcaggccaaccggttgtcctgggccacaccgttcaccgaggtgctggactggtcccgggcgccgttcgccgagtggttcgccgacggcacgctcaacgtcgcctacaactgcgtggaccgccacgtgcaggccggccacggcgaccgggtcgccatccactgggagggcgaatctcccggcgatcagcgcagtctgacctattccgagctgtacacgcaggtgtgcaaggccgccaacgcgctgaccgatctcggtctggtcgccggcgaccgcgtcgccatctatctgccgctgatccccgaggcggtgatcgcgatgctggcctgcgcgcggctgggcgtcatgcacagcgtggtgttcgccggcttcaccgccaaggcgctgcaggcccgcatcgccgacgcggcagccaagctgctgatcaccagcgacgggcagttccgccgcggcaagcccgcgccgctcaaggacgccgccgacgaggcggtcgccgaccccgacagcccggtcgagcacgttgtggtggtgcggcgcaccggaattgacgtgtcctggaccggcggccgcgacctgtggtggcacgacgtcgtcgacgccgccgcgcccgaacacacccccgagccgttccccgccgagcagccgctgtttctgctgtacacctcgggcaccaccggcaagcccaagggcatcgtgcacaccagcggcagctatttgacccaggccgcctacacgcactattacgtcttcgacatcaaggccgacaccgacgtgttctggtgcaccgccgacatcggctgggtcaccggacacacctacggcgtctacggcccgctggccaacggggtcaccgaggtgctctacgagggaaccccggacacaccgacccagcaccggcatttcgagatcatcgaaaagtacggcgtgacaatctattacaccgcgcccacgctgatccgcacgttcatgaagtggggccgggaaatccccgacgcgcacgacctgtccagcctgcggctgctgggttcggtcggcgaaccgatcaatcccgaggcgtggcgctggtatcgcagcgtgatcggcgccgaccggctgccgatcgtcgacacctggtggcagaccgagaccggcgccacgatgatctccccgctgcccggagtcgctgcggccaaaccgggttcggcgatgcggccgctgccgggcatctcagccaggatcgtcgacgaccacggcgaccagctggtgccgggcatccaccacggcgagcacgtcaccggctacctggtgctggaccaaccgtggccgtcgatgctgcgcggcatctggggcgaccccgaccgctacgtcgagacctactggtcgcggttcgccgagcagggctggtatttcgccggggacagcgcctattacgaccgcgacggcgccatctgggtggtcggccgcatcgacgacgtgatgaacgtgtcggggcatcggctgtccaccgccgaggtggagtcggcgctggtcggacaccacggcgtcgccgaggcggcggtggtcggcgccaccgacgccacgaccggccaggccatctgcgcgttcgtcgtgctgtgcgccgattaccaggtgcacgacgggatcgtcgacgagctgcgcgccgaggtggcccgggagatctcgccgatcgccaagccgcgggaggtgcacgtggtgcccgagctgccgaagacccgcagcggcaagatcatgcgccggctgctgcgcgacatcgccgagaaccgcgaattgggcgacacctcaacgctgctcgaccccggggtgttcgacgcgatccgggcggcgaagtag

SEQ ID NO: 876 - protein, 650 aa, Mycobacterium paratuberculosis
MTASNTASPASYPPPPQFVEQANADEQLYREAERDRLTFWAEQANRLSWATPFTEVLDWSRAPFAEWFADGTLNVAYNCVDRHVQAGHGDRVAIHWEGESPGDQRSLTYSELYTQVCKAANALTDLGLVAGDRVAIYLPLIPEAVIAMLACARLGVMHSVVFAGFTAKALQARIADAAAKLLITSDGQFRRGKPAPLKDAADEAVADPDSPVEHVVVVRRTGIDVSWTGGRDLWWHDVVDAAAPEHTPEPFPAEQPLFLLYTSGTTGKPKGIVHTSGSYLTQAAYTHYYVFDIKADTDVFWCTADIGWVTGHTYGVYGPLANGVTEVLYEGTPDTPTQHRHFEIIEKYGVTIYYTAPTLIRTFMKWGREIPDAHDLSSLRLLGSVGEPINPEAWRWYRSVIGADRLPIVDTWWQTETGATMISPLPGVAAAKPGSAMRPLPGISARIVDDHGDQLVPGIHHGEHVTGYLVLDQPWPSMLRGIWGDPDRYVETYWSRFAEQGWYFAGDSAYYDRDGAIWVVGRIDDVMNVSGHRLSTAEVESALVGHHGVAEAAVVGATDATTGQAICAFVVLCADYQVHDGIVDELRAEVAREISPIAKPREVHVVPELPKTRSGKIMRRLLRDIAENRELGDTSTLLDPGVFDAIRAAK

SEQ ID NO: 877 - DNA, 2064 bp, Ashbya gossypii
  CDS (1)..(2064)
atgtcttgcaaggaacacaaggtggtgcatgaggcgcacaatgtggaagcacgcaagacgcccgaccacttctatcggtcgcaacccggcccgtcgtatgtgcaggatatagagcaatatcggacgatgtaccaacagtcaattgaagatccggatgccttttttggtgagaaggcgcgggagttcttacactgggagaaggacttcacgcacgttcgggcggggagtttgcggaccggggacacggcgtggtttctcaacggtgagttgaacgcagcttacaactgtgtggatcggcacgcgctggagaatccagacaaggtggcgataatctacgaggctgatgacgaggctgacaaccgtgttgttacattcggtgagcttctacggcaagtgtcgcaggtggcaggcgtgctacagtcgtggggcgtgaagaagggagatactgttgctgtctatatgccgatgatcccggaggcggttgtggcaatgctcgccgtcgcccgtttaggcgccgtgcattccgtgatttttgccggattttcatctgggtcgctacgtgatcgtatcgtggacgctgaatccaaagtggtaataacgtgcgatgagggccgccgtggtgggaagacagtgcacacaaagaagattgtagatgagggcctagctggcgttggcgttgtcagccacattttagtgttccagagaaccggttccgagggaattccaatgaaggccggcagggacttctggtggcacgaggaggtacgcaagcaacgaggctatcttccaccggtttctgtgaatgcagaagacccgatcttccttctctacacctctgggtctaccggatctcctaaaggagtggtccacaccactggcgggtatttgctaggcgccgctctaactaccaggtatgtatttgacatccatcctgaggacgtacttttcactgcaggcgatgtcggctggattactggacacacctatgcgctctacggtccattatgcctaggaactgctactataatattcgagtctactccggcgtatccagactatggcagatattggcggattattcagcgccacaaggcgacacacttctacgttgcaccaacggccatgcggttaatcaagactgttggggagcaagaaatttcaaagtacgatttatcctctttgagagttctagggtccgtcggggaaccgatcgctccagatttgtgggaatggtacaatgaaaaggtgggcaataacaactgtgttgtctgcgatacgatgtggcaaactgagtctggttcacatttgattgctcctttggctggtgcaattccaacaaagccgggatctgcaactgtcccattctttggtattaatgcgtgtatcattgatcctgttacgggtgatgaattggagggcaatgacgtggaaggcgtgcttgcgatcaagtcaccttggccctcgatggcgcgttcagtctggaataatcatgaccgctacattgaaacgtacctaaaaccctaccctggctactacttcacaggtgatggagctggaagagatcatgacggatattactggatcagaggcagagttgacgatgtcgtaaacgtttcgggtcaccgtctctctactgctgaaatagaggccgcgttatcggaacacgagggtgtatcgcaggccgctgtcgttggtattgcggatgagctaactggacaagccgttgttgctttcgtgtctttaaaggaaggatatggaagaggatcttctacggatacggacccggagtcgatcgcacccgatgttgttcctttagacactctgcgccgcgagctagtgctgcaagttagagcagaaatcggtccatttgctgcgccaaaatcggttattgtcgtggacgatcttcccaagaccagatctggcaagatcatgagaagaacactaagaaaaatatcggcaaatgaggccgaccagcttggtgacttgtctacgcttgcgaacccagagacagttcccgccattattgctgctgtaggtgcccaatttctcaagggaaagaaataa

SEQ ID NO: 878 - protein, 687 aa, Ashbya gossypii
MSCKEHKVVHEAHNVEARKTPDHFYRSQPGPSYVQDIEQYRTMYQQSIEDPDAFFGEKAREFLHWEKDFTHVRAGSLRTGDTAWFLNGELNAAYNCVDRHALENPDKVAIIYEADDEADNRVVTFGELLRQVSQVAGVLQSWGVKKGDTVAVYMPMIPEAVVAMLAVARLGAVHSVIFAGFSSGSLRDRIVDAESKVVITCDEGRRGGKTVHTKKIVDEGLAGVGVVSHILVFQRTGSEGIPMKAGRDFWWHEEVRKQRGYLPPVSVNAEDPIFLLYTSGSTGSPKGVVHTTGGYLLGAALTTRYVFDIHPEDVLFTAGDVGWITGHTYALYGPLCLGTATIIFESTPAYPDYGRYWRIIQRHKATHFYVAPTAMRLIKTVGEQEISKYDLSSLRVLGSVGEPIAPDLWEWYNEKVGNNNCVVCDTMWQTESGSHLIAPLAGAIPTKPGSATVPFFGINACIIDPVTGDELEGNDVEGVLAIKSPWPSMARSVWNNHDRYIETYLKPYPGYYFTGDGAGRDHDGYYWIRGRVDDVVNVSGHRLSTAEIEAALSEHEGVSQAAVVGIADELTGQAVVAFVSLKEGYGRGSSTDTDPESIAPDVVPLDTLRRELVLQVRAEIGPFAAPKSVIVVDDLPKTRSGKIMRRTLRKISANEADQLGDLSTLANPETVPAIIAAVGAQFLKGKK

SEQ ID NO: 879 - DNA, 2085 bp, Ashbya gossypii
  CDS (1)..(2085)
atggtgacctcagcaggtgtgggacatgcagaatataacaacggggccgacgtacagcacgcagactacgcgcatctgacgagcgttgggcaggtggaacagaaaccgcttggcgggcggttaggggcgctggcggagtactacaagcccaacgtggcgagcatggaggagtaccgggcgatgcacgcgcagtcgataacggacccggcggcgttctacggtgagcgggcgcgcacgtacgtggactggttccggccgttcgacgcggtgttcttgccggggccggacgggcggccgagcttcgataacaacgcatggttcgtgaacggacagttgaacgcgtgctacaacctggtggaccgacacgcagcgcgaacgccggacaaggtggcaatcatctacgaggcggacgagccaggcgaggggtacagcctcacgtaccgcgagctcttggcacaggtgtgcaaggtggcacaggtgcttcagtactcgatgggcgtgcggaagggagacacagtggcggtgtatatgcccatgataccccaggcgttggtgacgcttcttgcgatctcgcggattggggccatacactcggtggtgtttgcggggttctcgtccaactcgctccgcgacagaatcaacgacgcgcgtagcgaggtcgtggtaaccacggacgagtcgaagcgcgggggcaagatcatcgagacgaagcgcattgtggacgacgccatcaaggagaccccgcagctacgcaaggtgttggtgtacaagcgcacatgcaacccctccgtgtcttacgtcgccgaccgggacctggattgggacactgaggtcaagaagtacaagtcatactgtccatgcgagcccgtagactccgaacacccgttatttttgttgtacacctcggggtcgacgggcgctccgaagggtgtccagcattccactgcagggtatttactacaagcatatctaagtatgctttactcgttcgatgtgcacagcgatgacatcttctttactgcgggtgacattggatggataacggggcacacgtacgtcgtgtacggaccattgttttccggatgtacgactgtggtgttcgagggtacgccagcgtatccctcttattcgcgctactgggacattattgacaaatacagtgtgacacaattctatgttgcacccaccgctctccgcttattaaagcgcgcaggtgactcttacgtggatggatactcgttgcggacgctacggtcacttggcactgtaggcgagccgattgccgcagaggtgtgggagtggtactacactgtaattggcaaacgggaaatccccgttattgatacctactggcagactgaatctggagcccacttggtaactccgttagcaggcggctccacacctatgaagccggggtctgccagcttcccattcttcgggatagatttggccattttagatccacaaacaggtgaggaacttcttgggccgaatgtagagggtgttttagctgtgaagcagccttggccctccttcactcgcacaatctggaacaaccacgataggtaccttgacacctatctcaatccatacaagggctactactttgcaggcgatggagcggcccgcgactcacaaggcttcatatggatacttggccgcgtggacgatgttgtgaacgtgtctggacatcgcctctctactgcggaggtggaggctgctattatccaagagagcatggtagcagagtgcgccgttgttgggtttgcagatgagttgactggccaagcgattgccgcctttgtggtcttgaagcagaagagcagctggaacacagcgagcgagagggagctccaggagatcaaaaagcacctaattctgtctgtccgtcgcgatattgggccgtttgctgcccctaagcttatcgtgctcgtggatgacttgccaaagactcgctcaggcaaaattatgcgccgtatattgcgcaaaatccttgctggggaggcagatcagttaggggatgtctcgaccttgtccaacccaggtattgtgaaacatttgattgagtctgtgaaattttaa

SEQ ID NO: 880 - protein, 694 aa, Ashbya gossypii
MVTSAGVGHAEYNNGADVQHADYAHLTSVGQVEQKPLGGRLGALAEYYKPNVASMEEYRAMHAQSITDPAAFYGERARTYVDWFRPFDAVFLPGPDGRPSFDNNAWFVNGQLNACYNLVDRHAARTPDKVAIIYEADEPGEGYSLTYRELLAQVCKVAQVLQYSMGVRKGDTVAVYMPMIPQALVTLLAISRIGAIHSVVFAGFSSNSLRDRINDARSEVVVTTDESKRGGKIIETKRIVDDAIKETPQLRKVLVYKRTCNPSVSYVADRDLDWDTEVKKYKSYCPCEPVDSEHPLFLLYTSGSTGAPKGVQHSTAGYLLQAYLSMLYSFDVHSDDIFFTAGDIGWITGHTYVVYGPLFSGCTTVVFEGTPAYPSYSRYWDIIDKYSVTQFYVAPTALRLLKRAGDSYVDGYSLRTLRSLGTVGEPIAAEVWEWYYTVIGKREIPVIDTYWQTESGAHLVTPLAGGSTPMKPGSASFPFFGIDLAILDPQTGEELLGPNVEGVLAVKQPWPSFTRTIWNNHDRYLDTYLNPYKGYYFAGDGAARDSQGFIWILGRVDDVVNVSGHRLSTAEVEAAIIQESMVAECAVVGFADELTGQAIAAFVVLKQKSSWNTASERELQEIKKHLILSVRRDIGPFAAPKLIVLVDDLPKTRSGKIMRRILRKILAGEADQLGDVSTLSNPGIVKHLIESVKF

SEQ ID NO: 881 - DNA, 1977 bp, Dictyostelium discoideum
  CDS (1)..(1977)
atgtttaaattaagtgacccttttgattatgaaaatgattgcaaatactctcaaataaatccaatttcattttgggatgaagttgcaaaaaaatatgcccactgggataaaatgtatgataaagtttatagtagtgatggaatgtatccagattggtttaaaggtggagaattaaatacatgttataatgttttagataaacatgttaaaaatccttcaaaaagagatcaagatgcattaatttatgaatgtccatttataaagaaaacaattaaattaacatatttccaattatatgaaaaagtatgtgaattttcaagagtacttttaaatttaaatatatcaaaaaatgataatgttttaatttatatggcaaatacattagaaccaataattgcattgttatcatgtgctcgtattggtgcaacatttatagtattatacgatggttatccagttaaaagtttgattgatagaattgacacatttacaccaaaattaattattacatcaaattgtggtattttaaatgatgaaattattacatttacatcagatttaaaagatgcaatccaattatcaacttttaaaccaaatcatgttattactcattttagaaataatgaagatattgaattcaatgatagtattattataggaaccataccaatcataccaaatacattagattgggacaaagaaattcaaaaaataaaagataataatcaaaaaccattctatgaatatgtaccagtagaatcaagtcatccactaagtatttatttcccaagtggtacatctggtaattataaagcaattgtaagaagtaatggtggtagtatagttggactggcttatagttggtttagttgtatttctaaaaaagatgaaacagtttacctttcacactcaagtattggatgggctacttttcatttgggattatttggatcattaggacttggaaatacaatggtgatgtttgaaggcgacattatgaaaccaattcattatgaacattatttatgggcaactattgaaaaacataaaatcaatacatttttaacatcaccaaaaacaataagataccttataaagaatgatccagatgctagtaaaattaagtcaaaatatgatttatcaagtttagtttcaatttggacatctggcgaagttattgaacaatcaattcctgaatatattgaaagtaaattaaaatgtcgttcatcaaatttatacggtcaaactgaaagtggttgtgcacttttatttaattataaaagaataattactaaacagaataatacactaattaatccaacaccatttttaaaaccatcaatattttcagaggatggtattgaattaccagagaatcaagttggtgaagttgcattcaaattaccattaccaccaagttttgcaacaacattttataaaaatgaattactttataaaaagatgttcaataaatttccaggttattataatagtggtgatttaggttttaaaaatgaaaatgattattatggtatagtttcaagagcagatgatcaaattaacagtcgtggcttttatgttctattaaatgaaattgaaacatcaattttaaaacatccattagttttggaatgttgttcaattggtattcatcatcaagatttagccaatgttccaattggattattagttttaaatcaacaacaaccagataattcatcattatcatcatcatcatcatcatcattaattgatttaaaaaatcaaattaatgaaattattaaaaatgatatggattattattcagaattatcgaaaattataattgttccacaattaccaaaaacaaaaactggtaaaattcctagacaaatcatttcaaaatttttaaatgaaccaaactatcaattactggatagtacatttgatcgtaaagttttttactctataaaagagttatatgaaaaaaatctttag

SEQ ID NO: 882 - protein, 658 aa, Dictyostelium discoideum
MFKLSDPFDYENDCKYSQINPISFWDEVAKKYAHWDKMYDKVYSSDGMYPDWFKGGELNTCYNVLDKHVKNPSKRDQDALIYECPFIKKTIKLTYFQLYEKVCEFSRVLLNLNISKNDNVLIYMANTLEPIIALLSCARIGATFIVLYDGYPVKSLIDRIDTFTPKLIITSNCGILNDEIITFTSDLKDAIQLSTFKPNHVITHFRNNEDIEFNDSIIIGTIPIIPNTLDWDKEIQKIKDNNQKPFYEYVPVESSHPLSIYFPSGTSGNYKAIVRSNGGSIVGLAYSWFSCISKKDETVYLSHSSIGWATFHLGLFGSLGLGNTMVMFEGDIMKPIHYEHYLWATIEKHKINTFLTSPKTIRYLIKNDPDASKIKSKYDLSSLVSIWTSGEVIEQSIPEYIESKLKCRSSNLYGQTESGCALLFNYKRIITKQNNTLINPTPFLKPSIFSEDGIELPENQVGEVAFKLPLPPSFATTFYKNELLYKKMFNKFPGYYNSGDLGFKNENDYYGIVSRADDQINSRGFYVLLNEIETSILKHPLVLECCSIGIHHQDLANVPIGLLVLNQQQPDNSSLSSSSSSSLIDLKNQINEIIKNDMDYYSELSKIIIVPQLPKTKTGKIPRQIISKFLNEPNYQLLDSTFDRKVFYSIKELYEKNL

SEQ ID NO: 883 - DNA, 2046 bp, Dictyostelium discoideum
  CDS (1)..(2046)
atgtttaaattaagtgaccctttcgattatgaaaatgattataattactctcaaataaatccaatttcattttgggacgaagttgcaaaaaaatatgttcactgggataaaatgtatgataagatttatagtagtgatggaatgtatccagattggtttaaaggtggagaattaaatacatgttataatgttttagataaaaatgttaaaaatcctgtaaaaagagatcaaaatgcattaatttatgaatgtccatttataaagaaaacaattaaattaacatattttcaattatacgaaaaagtatgtgaattttcaagagtacttttaaatttaaatatatcaaaaaatgatactgttttaatatttatggcaaatacattagaaccaataattgcattgttatcatgtgctcgtattggtgcaacattttcaactttattcgatggttatccagttagaagtttaattgatagaattgataaattgacaccaaaactaattataacatcaaattatggaattttaaatgatgaaattatcacatttacaccaaatttaaaagatgcaatccaattatcaacttttaaaccaaatcatgttattactcattttagaaataatgaagatattgaatccaatgatagtagtatagaaaccataccaatcataccaaatacattagattgggacaaagaaattcaaaaaataaaagacaacaatcaaaaaccattctatgaatatgtaccagtagaatcaaatcacccattaagtatttatttttcaagtggtacaactggtaattgtaaagcaattgtaagaagtaatggtggtaatttagttggactggtttatagttggtttagttgtatttctaaaaaagatgaaacagtttacttttcacattcaagtattggatggatttcatttcatttgggattatttggatcattagtacttggaaatacaatggtgatgtttgaaggcgacattatgaaaccaattcattatgaacattatttatgggaaactgttgaaaaacataaaatcaatacatttttaacatcaccaaaaacaataagattccttataaagaatgatccagatgctaataaaattaagtcaaaatatgatttatcaagtttagtttcaatttggacatctggcgaagttattgaacaatcaattcctgaatatattgaaagtaaaataaaatgtcgttcatcaaatttatacggtcaaactgaaagtggttgtgcccttttatttgactataaaagaataaatagtaaacagtttaaaacactatttaaaccaacaccatttttaaaaccattaatattttcagaggatggtattgaattaccagagaaccaagttggtgaagttgcattcaaattaccattaccaccaagttttgcaacaacattttataaaaatgaattactttataaaaagatgttcaataaatttccaggttattataatagtggtgatttaggttttaaaaatgaaaatgattattatggtatagtttcaagagcagatgatcaaattaaaattggtggttttgatgttctattaaacgatattgaaacatcaattttaaaacatccattagttttagaatgttgttcaattggtatttatcatcaagatttagccaatgttccaattggattattagttttaaatcaacaacaaccagataattcaccatcatcatcatcatcatcatcatcatcatcatcatcatcatcatcatcatcatcatcatcatcatcatcatcatcatcatcatcatcagcattatcattatctttaattgatataaaaaatcaaattaatgaaattattgaaaatgatattggtttttattcagaattaacaaaaatcatatttgttccacaattaccaaaaacaaaaactggtaaaattcctagacaaatcatttcaaaatttttaaatgaaccaaactatcaattaaaagatagtacatgtgatcgtgaagttttttactccattaaagagttatatgaaaaatga

SEQ ID NO: 884 - protein, 681 aa, Dictyostelium discoideum
MFKLSDPFDYENDYNYSQINPISFWDEVAKKYVHWDKMYDKIYSSDGMYPDWFKGGELNTCYNVLDKNVKNPVKRDQNALIYECPFIKKTIKLTYFQLYEKVCEFSRVLLNLNISKNDTVLIFMANTLEPIIALLSCARIGATFSTLFDGYPVRSLIDRIDKLTPKLIITSNYGILNDEIITFTPNLKDAIQLSTFKPNHVITHFRNNEDIESNDSSIETIPIIPNTLDWDKEIQKIKDNNQKPFYEYVPVESNHPLSIYFSSGTTGNCKAIVRSNGGNLVGLVYSWFSCISKKDETVYFSHSSIGWISFHLGLFGSLVLGNTMVMFEGDIMKPIHYEHYLWETVEKHKINTFLTSPKTIRFLIKNDPDANKIKSKYDLSSLVSIWTSGEVIEQSIPEYIESKIKCRSSNLYGQTESGCALLFDYKRINSKQFKTLFKPTPFLKPLIFSEDGIELPENQVGEVAFKLPLPPSFATTFYKNELLYKKMFNKFPGYYNSGDLGFKNENDYYGIVSRADDQIKIGGFDVLLNDIETSILKHPLVLECCSIGIYHQDLANVPIGLLVLNQQQPDNSPSSSSSSSSSSSSSSSSSSSSSSSSSSSSSALSLSLIDIKNQINEIIENDIGFYSELTKIIFVPQLPKTKTGKIPRQIISKFLNEPNYQLKDSTCDREVFYSIKELYEK

SEQ ID NO: 885 - DNA, 2316 bp, Oryza sativa
  CDS (1)..(2316)
atggcccagctgcatatatacgccagctgcggctgcgcacgcgcccgcgctgcgatcccgcttcccgcgcaggctcaggcatccgctgcggctctaccttgggtgatgtccgtgacttcgccgccgctgctccggcgaggagggtgggcgatgggcgcgagcgatcacgccgcggtggcggcggcggcgagcggtaacggcaagccgcgggcgaggaggccctccgccgccgcggcggccgtgctgggcgagccggtggcggcgtccgacgaccacggcctcgtccaccccagcacggacttcgcctcccaggccctcgtctcctccacgcagcaggtgatcgccgatacacgcctctctgcttttcttactgctttgccgatttcctctcggttgctgtcaattcgctctccccctcgaactggcggcgcatcgcgcgttcaaaggccgtaccttcaatttgaggcgcgcagcgatccatccatcgctggccgcagaggcgcagataaggcaagagtggcagacagcgacggcgcagtcgtataccaagaaatgtaccgacgttcgatcgacgatccggccgggttctggtcggagatcgcggagacgttctactggaagcacaagtggaaccctgacgaggtctgcaccgagaatctggatgtcaccaaggggccgatcaagatcgaatggttcaaagggggcaagaccaatatatgctacaatgcggtggaccgcaacgtggaggctggcgacggcgagaagatagcgatgtactgggaagggaacgagcccggccaggacgcgaagctcacctactccgagctcctgaacaaggtttgccagctggcaaattacctgaagagcgtcggcgtcgggaagggtgatgccgtggtgatctacctgccgatgctgatggagctgcccattgcgatgctcgcgtgtgctcggattggcgctgttcattcggttgtgtttgctggcttctctgctgacgcactagcacaaagaatcattgactgcaagcctaaggttgtgattacgtgcaacgcggtgaaaaggggaaagaaactcatagctctcaaagatatagtagatgtgtcgctggctgacagtgcgaagaatggagtcgatgtaggcatttctttgacatacgaaaatcagtcggcaatgaagagagaagacacaaaatggacgtcaggcagagacgtttggtggcaggatgttgtgcccaattttccaacaaaatgtgatgtggaatgggtagatgcagaggatccattgtttcttctatatacaagtggtagcacaggaaagccaaaggctccaaactatcctgatcctagtcgttgttgggacgttgttgacaaatacggggtgacgatattttatactgcaccaacacttattcgtgcactcatgcgtgatggtaccgagtatgttactcggtattctcgtaaatctcttcgagttctaggaagcgtaggcgagccaatcaatcccactgcttggagatggttctatgatattattggtgatgcaagatgcccaatatcagacacttggtggcagactgaaactggtggttttatgatcactcctttacctggcgcttggcctctgaaacccggatctgcgacatttcctttcttcggtgtacagccagtaatagtagatgagaaagggaaggaaatggaaggagaatgcagcggatacctttgcataaagaagtcatggcctggggctttccggacactttatggagacaaggacagatatgaaaccacatacttcaagccatttgctggctattacttctccggtgatggttgcagcagaattaccggatgtttacacactggcaaatgtaatttgaatgccagggacaaagatggataccattttctgactggacgggttgacgatgttatcaatgtcagcggccaccggattgggacagcagaggttgagtctgctctggtttcacatccaaaatgcgccgaggccgctgttgttggaattgaccatgaggttaaaggccagggaatttacgctttcgtgacattggtggacggtgttccttacagcgatgagctacggaaaagcctcgttatgactgttcgcagccagattggggcgttcgcggcgccggacaagatccactgggcgccggggctcccgaagacgcggagcggcaagatcatgcggaggatcctgcggaagatcgcgtccaggcagctggacgagctcggcgacaccagcacgctcgccgaaccaggcgtcgtcgaccagctcatcgcgctcgccgatagctag

SEQ ID NO: 886 - protein, 771 aa, Oryza sativa
MAQLHIYASCGCARARAAIPLPAQAQASAAALPWVMSVTSPPLLRRGGWAMGASDHAAVAAAASGNGKPRARRPSAAAAAVLGEPVAASDDHGLVHPSTDFASQALVSSTQQVIADTRLSAFLTALPISSRLLSIRSPPRTGGASRVQRPYLQFEARSDPSIAGRRGADKARVADSDGAVVYQEMYRRSIDDPAGFWSEIAETFYWKHKWNPDEVCTENLDVTKGPIKIEWFKGGKTNICYNAVDRNVEAGDGEKIAMYWEGNEPGQDAKLTYSELLNKVCQLANYLKSVGVGKGDAVVIYLPMLMELPIAMLACARIGAVHSVVFAGFSADALAQRIIDCKPKVVITCNAVKRGKKLIALKDIVDVSLADSAKNGVDVGISLTYENQSAMKREDTKWTSGRDVWWQDVVPNFPTKCDVEWVDAEDPLFLLYTSGSTGKPKAPNYPDPSRCWDVVDKYGVTIFYTAPTLIRALMRDGTEYVTRYSRKSLRVLGSVGEPINPTAWRWFYDIIGDARCPISDTWWQTETGGFMITPLPGAWPLKPGSATFPFFGVQPVIVDEKGKEMEGECSGYLCIKKSWPGAFRTLYGDKDRYETTYFKPFAGYYFSGDGCSRITGCLHTGKCNLNARDKDGYHFLTGRVDDVINVSGHRIGTAEVESALVSHPKCAEAAVVGIDHEVKGQGIYAFVTLVDGVPYSDELRKSLVMTVRSQIGAFAAPDKIHWAPGLPKTRSGKIMRRILRKIASRQLDELGDTSTLAEPGVVDQLIALADS

SEQ ID NO: 887 - DNA, 1965 bp, Wolinella succinogenes
  CDS (1)..(1965)
atgacccaaacccattctacggagttgttcaaacccaatcgtgcgtttgccaagaccgcccgtatcaagaatctctgtgaatatgaagacctgcgcttagatgcggaagaggactttgaaggtttctgggggaaattggccaaagagaaaattgactggatggagcccttttccaaggtactagacgagagcgaggctcccttttacaaatggtttgtcggaggcaaactcaatgtctgcgctcagtgcctcgatcgccatcttgacactcgcaaaaacaaagccgccatcatctttgaaggagagcttggtgattctcgtatcatcacctatcgagagctcttttacgaggtcaagcgcaccgccaacctcctcaaaaacaagttcaatgtcaaaaaaggcgaccgtgttgtcatctatatgcccatgattcccgaagcggccttcatgatgcttgcttgtgcgagaatcggagcgatccactccgtcgtctttggaggattctcggctgaggcgttgcgcgatcgaattattgacgccgaggcaaaactcgtcatcaccgctgatggagcctacagaagaggcaagccctatatgctaaagcccgtagtcgatgatgcactcgccgaaggcgcctgcccaagcatcgagaaggtgctcatcgtgattcgcaacaaagaagagatcaactatgtccctggacgcgactacatctacaacgagatgatcgggctagaatcagcccactgcccccctgagcctatggacgccgaagaccctctcttcttgctctacacctcaggctccacaggcaagcccaagggcgtccagcacaaccaagcaggctacatcctttgggcacagaccaccatggagtgggtctttgatgtgaaggagaatgacacctattggtgcaccgcggatgtgggctggatcacgggtcatacctatatcgtctatggccctctagccatgggcgctaccaccgtcatgtatgagggcgtgcccatctaccctgacacaggtcgatggtggaagatgatcgaacactaccgagtcaatcagttctacactgctcccacggcgattcgactccttcacaaagagggcaaagaggagcccaaaaaatacaatctctccaacctcaaagtgcttggcacggtgggcgaacccatcaaccctgatgcatggaattggtactacaacgagattggcggggggcaatgccccattgtagatacatggtggcagaccgagacagggggtcatatgatctcccctcttcccggcgcgacccctataaaacccggatgtgcgactttgcctttgccaggaatctttgcagaggtgattgacgaagaggggaatccaaagcctgcgggtgagcagggctacctctgcatcaccaagccttggccctctatgattcgcaatatttggggcgaccccaagcgctacgaatcgagctactttagcacttgtaagaaaaacggcaaacccgtctattttgctggagatggggcgattcgtgatgagagaggctacatcaccatcacagggcgaatggatgatgtcatcaatgtctctggccaccgcctcggaaccgccgagatcgaatcggctatcgccaagcaccccggagtcgccgagacagccgtggttagccgcttggatgagatcaaaggcgaatcggtttatgccttcatcgtgctcaaacccggctatgaggataatgtcgctgaagagctacaactcctcaaagagattaatgccgtcatcacaagagagatcgggcccttggctaaagccgacacgatgctctttgtccccggacttccaaaaactagaagcggaaagatcatgcggcgtatcctccgctctatcgccagaggcgaagagatcacgcaggacacctccaccctcgaagaccccgctatcgtccaaaaaatccaacaactcgcctaa

SEQ ID NO: 888 - protein, 654 aa, Wolinella succinogenes
MTQTHSTELFKPNRAFAKTARIKNLCEYEDLRLDAEEDFEGFWGKLAKEKIDWMEPFSKVLDESEAPFYKWFVGGKLNVCAQCLDRHLDTRKNKAAIIFEGELGDSRIITYRELFYEVKRTANLLKNKFNVKKGDRVVIYMPMIPEAAFMMLACARIGAIHSVVFGGFSAEALRDRIIDAEAKLVITADGAYRRGKPYMLKPVVDDALAEGACPSIEKVLIVIRNKEEINYVPGRDYIYNEMIGLESAHCPPEPMDAEDPLFLLYTSGSTGKPKGVQHNQAGYILWAQTTMEWVFDVKENDTYWCTADVGWITGHTYIVYGPLAMGATTVMYEGVPIYPDTGRWWKMIEHYRVNQFYTAPTAIRLLHKEGKEEPKKYNLSNLKVLGTVGEPINPDAWNWYYNEIGGGQCPIVDTWWQTETGGHMISPLPGATPIKPGCATLPLPGIFAEVIDEEGNPKPAGEQGYLCITKPWPSMIRNIWGDPKRYESSYFSTCKKNGKPVYFAGDGAIRDERGYITITGRMDDVINVSGHRLGTAEIESAIAKHPGVAETAVVSRLDEIKGESVYAFIVLKPGYEDNVAEELQLLKEINAVITREIGPLAKADTMLFVPGLPKTRSGKIMRRILRSIARGEEITQDTSTLEDPAIVQKIQQLA

SEQ ID NO: 889 - DNA, 1956 bp, Photorhabdus luminescens
  CDS (1)..(1956)
atgaccaaaataatgaagcaccctattcctatcgccattgcagaacatgccctgatgaatgagcaacaatatcagcaagactaccaattatcgttgcaagatcccgacaggttctggggtgaaaaaggaaaaattgttgactggattaagccttacaccaaggtaaagaatacctcttttgatcctggacatatcaatatccgctggtttgaagatggaacactaaacttaagcgcaaattgtctcgatcgtcatctaaaagaacgtggtgagcaaaccgctattatctgggaaggtgatgatccaacagaatccaaagcaataacctatcgtgaactacaccatgatgtatgtcagtttgccaatgtattgaaaaatatgggtattaaaaaaggcgatgttgttgctatttacatgccgatggtgccagaagcagcggttgccatgttagcatgtgcccgcattggtgctattcactctgttattttcgcaggtttttctcctgatgctgtatccgggcgtatcatcgattcaaacaccaaattggtcattaccgccgatgaaggattaagagccggacgtacaatccccctgaaaaagaatgttgatgacgcattaaataatgcagccgttgtcaatgtatccaatgtaatcgtttttaaacgtactggaaatattggtcactggcaatctggccgtgacctttggtggcatgaattggtcgcagacgcgagtgctgactgtccagttgaagagataaatgcagaagacccgctgtttattctctatacctcaggctctaccggtaaacccaaaggggtactgcacaccactggaggttaccttgtatatgcatctctaacatttaaatacgtattcgattatcagccgggggaagtctattggtgcacagccgatgtgggatgggttaccggacatagctacctgctctacggccccctttcctgtggtgctattaccctaatgtttgaaggcgtaccaaactatcctgcggttaaccgcctaagtcagattattgataaacatcaggtaaatatcctatatacagcacccacagcgattcgtgccctaatggcggaaggtgataaagctattgaaggaacaaaacgtacttccctgcgtattatgggatcagttggcgaaccgattaatccggaagcttgggaatggtattaccagaaaattggtaacagcaaatgcccgattgtcgatacctggtggcaaacagaaactggtggcttcatgatcacaccactaccaggcgcaaccgaactaaaagcaggttccgcaacgctacctttcttcggtgttcagcccgcattggttgataatcttggtgaacaactagaaggtgtttgtgaaggaaacctagttattaccgattcctggccaggacaagcacgctcactatttggcgatcatgaccgtttcgaacaaacctatttctctacctttaagggaatgtattttagtggtgatggcgcacgccgtgatgaagatggctactattggataactggtcgtgttgatgatgtgctgaatatttccggccaccgtctaggtactgctgaaattgaatcagctttggtctcccatcctaaaattgcagaagctgctgtcgtaggtaccccacataatattaaagggcaggcaatttatgcctatgtcaccttaaatcacggtgaagaaccctctccagaactctatacagaagtccgtaattgggtacgtaaagaaatcggcccgattgctacaccagatatcctacactggacagactccttaccaaaaacccgttcaggaaaaattatgcgtcgtatcctgcgcaaaatagcctccggcgataccaacaatctaggggacatttcaacactagcagatccaggagtagtagaaaaattgttagaagaaaaacaaacaatgagtatttcgtga

SEQ ID NO: 890 - protein, 651 aa, Photorhabdus luminescens
MTKIMKHPIPIAIAEHALMNEQQYQQDYQLSLQDPDRFWGEKGKIVDWIKPYTKVKNTSFDPGHINIRWFEDGTLNLSANCLDRHLKERGEQTAIIWEGDDPTESKAITYRELHHDVCQFANVLKNMGIKKGDVVAIYMPMVPEAAVAMLACARIGAIHSVIFAGFSPDAVSGRIIDSNTKLVITADEGLRAGRTIPLKKNVDDALNNAAVVNVSNVIVFKRTGNIGHWQSGRDLWWHELVADASADCPVEEINAEDPLFILYTSGSTGKPKGVLHTTGGYLVYASLTFKYVFDYQPGEVYWCTADVGWVTGHSYLLYGPLSCGAITLMFEGVPNYPAVNRLSQIIDKHQVNILYTAPTAIRALMAEGDKAIEGTKRTSLRIMGSVGEPINPEAWEWYYQKIGNSKCPIVDTWWQTETGGFMITPLPGATELKAGSATLPFFGVQPALVDNLGEQLEGVCEGNLVITDSWPGQARSLFGDHDRFEQTYFSTFKGMYFSGDGARRDEDGYYWITGRVDDVLNISGHRLGTAEIESALVSHPKIAEAAVVGTPHNIKGQAIYAYVTLNHGEEPSPELYTEVRNWVRKEIGPIATPDILHWTDSLPKTRSGKIMRRILRKIASGDTNNLGDISTLADPGVVEKLLEEKQTMSIS

SEQ ID NO: 891 - DNA, 2043 bp, Vibrio vulnificus
  CDS (1)..(2043)
atgacttttgagcaaaatagaataaaacttatttgtgttaatgaatggttaacaatgagaataacaatgccaacatcaagccctatctggaacccttctccagagagaattgcaaccagcaacctcaaaaagttcatagaacacatcaacatgcaaggcgaagccatcgaaaactatgcgcagttgcatcagtggtcgattgtcgaaaataaaaagttttggatggaaatctggaccttctgcgatgtgattggttaccaaggtgactgtatcgtcggtgaagggaagccaaaatggggaaattacttttcgcaaagagacaacctttggttccctcaagcggaactcaactacgctgaaaacttactttcttccgcttaccaaaagccgccagagcccgccatcatcttccggaatgaacggaatgaagaatcctgtttctcttggcaagagctgtgtgatcacgtttcaatattgcagcaatggttaattcgcaatggtgtcggtaaaggtgatgtggtggctggctatcttccatatttaccagaaaccgtcattgccatgctggcaacaaccagccttggtgcggtttggacctccacctctcccgactttggtacagacagcgttatcgaacgattaggacaagtgaaccccaaaattctgttttgctgcgatggttactcattcaatggcaaaacgttcgatatgtcagaaaagaaccgcaaaatcgctgaacagctgccagacttgctcaatatttgtgaaattgagtatttggaatctcccgagacggactacaacactaactactccacttgggctgctatattagaaaactacgatgccaaaggtatcatctacgaacgtgtgccttttaattcgcccttgtttattctctactcttccgggaccactggtaaaccaaagtgcatcattcacacggtgggcggtaccattctcaatcacctgaaagaacatcaattacattgcgatattcagcctgatgatcgtgttttttattacaccacctgtggatggatgatgtggaactggcatgtgtccacactcgccagtggggcaacgctggtgatctacgatggtagccccgtttacccagaccaatcggttttgtgggatatggtggacgattgccaagtaacactgtttggcacctcagccaaatacttagaagcgattcaacatgcgcattacgagccagcactgttccatgatctcagtacgttaaaaacgatttgttcgactggttccgtgctctatccggagcaatttgattttgtctattcgtctatcaaatccgacgttcaccttgcatctatctctggtggcaccgacatttgtggctgttttgtactgggcaaccccatctcgccagtctaccgtggggaagtacagtacgcaggcttaggtgtctctatcgccgtttacgacgcttccggacaaccagtcgttggacaacgaggtgaactggtgtgtaccaactctctgcctaacttcccgctgggcttttggcacgatgatggcgagcgttatcaccaatcatactggagcaagtatcccaatgtgtggcatcacggtgatgatgtgatcatgacaagtcatggtggatttgtcttctacgggcgaagtgacactacacttaaccccggtggcgttcgaatcggcactgcggagctctatcaacaagtgaacgcactgaacagcattgacgattccattgcggtggggaaagtgcaaaaccgtagcgaagagatctggctgtttgtaaaacctgcgacgggtttcgacttgaacgatagcattgcagaacaaatccgttcaacgctgagaaaccactgctcaccacgccacgttcccagtcaaattttcgctatttcggatattcccaaaacgcgctcagggaagttggtcgaattggcggtaaaacaagtggtgaatgggcaagaagtgaaaaacctcggggcgatcgctaacccagaagttctagaggaaatcaaacgcgttacacaagcttatcgctaa

SEQ ID NO: 892 - protein, 680 aa, Vibrio vulnificus
MTFEQNRIKLICVNEWLTMRITMPTSSPIWNPSPERIATSNLKKFIEHINMQGEAIENYAQLHQWSIVENKKFWMEIWTFCDVIGYQGDCIVGEGKPKWGNYFSQRDNLWFPQAELNYAENLLSSAYQKPPEPAIIFRNERNEESCFSWQELCDHVSILQQWLIRNGVGKGDVVAGYLPYLPETVIAMLATTSLGAVWTSTSPDFGTDSVIERLGQVNPKILFCCDGYSFNGKTFDMSEKNRKIAEQLPDLLNICEIEYLESPETDYNTNYSTWAAILENYDAKGIIYERVPFNSPLFILYSSGTTGKPKCIIHTVGGTILNHLKEHQLHCDIQPDDRVFYYTTCGWMMWNWHVSTLASGATLVIYDGSPVYPDQSVLWDMVDDCQVTLFGTSAKYLEAIQHAHYEPALFHDLSTLKTICSTGSVLYPEQFDFVYSSIKSDVHLASISGGTDICGCFVLGNPISPVYRGEVQYAGLGVSIAVYDASGQPVVGQRGELVCTNSLPNFPLGFWHDDGERYHQSYWSKYPNVWHHGDDVIMTSHGGFVFYGRSDTTLNPGGVRIGTAELYQQVNALNSIDDSIAVGKVQNRSEEIWLFVKPATGFDLNDSIAEQIRSTLRNHCSPRHVPSQIFAISDIPKTRSGKLVELAVKQVVNGQEVKNLGAIANPEVLEEIKRVTQAYR

SEQ ID NO: 893 - DNA, 2013 bp, Vibrio vulnificus
  CDS (1)..(2013)
atgactgttttaaacgtcatggaactccatcacgaagacaaaggcacaaggagagagacaatgagtgaagcccacatttatccggtaaaagagaacatcaaagcccatacccatgcggataatgatacctacctagccatgtaccagcagtcagtcactgacccagaaggtttctggagtgaacacggcaaaattgttgactggattaagcccttcaccaaagtcaaacaaacgtcttttgatactggccacgttgatattcgctggtttgaagatggcacgctcaacgtctcagcaaactgtattgaccgccatctagcagagcgcggcgatgatgtcgccatcatttgggaaggcgacaacccagcggacgacaaaactctgacttacaacgagctctacaccgaagtgtgtcgtttctcgaatgcactcaaagagcaaggcgtacgcaaaggcgacgtggtgtgtctctacatgccaatggtccctgaagcggcggttgcgatgttggcctgtacccgtattggtgcggtgcacaccatcgtctttggtggtttttcaccagaagcactggctggccgcatcatcgactccgatgccaaagtcgtcatcacggccgacgaaggcgttcgtggtggtcgcgcggtgccactgaaaaagaacgtggacgaagcactaaccaacccagaagtgaaaaccatcagcaaagtggtggtgttcaagcgcactggcggcaacattgattggcacgaacatcgtgatgtttggtggcacgaagcgacagcaaaagtctctgacgtttgcccaccagaagagatgaaagctgaagatccgctgttcatcctctacacgtcaggctcaaccggcaaaccgaaaggcgtgctgcacaccacgggcggctatttggtctacgcgaccatgacctttaagtacgtgtttgactaccagccaggcgaaactttctggtgtacggccgacgtgggttggatcactggccacacgtatctggtttacggtccactggcaaacggcgcgaaaaccattctctttgaaggcgtgccaaactatccaaacaccagccgcatgagtgaagtggtcgataagcaccaagtcaacattctttacaccgcaccaacggccattcgtgcgctgatggcaaaaggcaacgaagcgattgaaggtacggatcgtagcagcctacgcatcatgggctctgtgggtgaacctattaacccagaggcgtgggagtggtactacaagaccatcggcaacgagaaatcaccgattgtcgatacttggtggcaaaccgaaaccggcggcattttgatcacaccactgccaggcgccaccgcgctgaaaccgggttctgcaacgcgcccattctttggtgttcagcctgcactggtggacaacatgggtaatgtgatcgaagaccaagccgcagaaggtaacctcgttatcctcgattcttggccaggtcaaatgcgcacggtttatggtgaccatgaacgtttcgaacaaacctacttctcaacctttaaaggcatgtactttaccggagatggtgcgcgccgcgatgaagatggttactactggatcacaggccgtgtggatgacgtattaaacgtttctggccaccgtatgggtacagcggaaattgaatccgccctagtggcacacccgaaaattgctgaagcggcgattgttggcattccacacgacatcaaaggccaagcaatttacgcctatgtcaccctcaatgcgggcgagtatccaaccgccgagctgcataaagaagtgaaagattgggtacgtaaagagattggccccatcgcaacaccagatgtcctgcattggacagatgcactaccgaaaactcgttcaggtaaaatcatgcgccgcattttgcgcaagatcgccacgggagacaccagcaacttgggtgacacctcaacactggccgacccaagcgtagttgataagctgatcgcagaaaaagccgaactggtttaa

SEQ ID NO: 894 - protein, 670 aa, Vibrio vulnificus
MTVLNVMELHHEDKGTRRETMSEAHIYPVKENIKAHTHADNDTYLAMYQQSVTDPEGFWSEHGKIVDWIKPFTKVKQTSFDTGHVDIRWFEDGTLNVSANCIDRHLAERGDDVAIIWEGDNPADDKTLTYNELYTEVCRFSNALKEQGVRKGDVVCLYMPMVPEAAVAMLACTRIGAVHTIVFGGFSPEALAGRIIDSDAKVVITADEGVRGGRAVPLKKNVDEALTNPEVKTISKVVVFKRTGGNIDWHEHRDVWWHEATAKVSDVCPPEEMKAEDPLFILYTSGSTGKPKGVLHTTGGYLVYATMTFKYVFDYQPGETFWCTADVGWITGHTYLVYGPLANGAKTILFEGVPNYPNTSRMSEVVDKHQVNILYTAPTAIRALMAKGNEAIEGTDRSSLRIMGSVGEPINPEAWEWYYKTIGNEKSPIVDTWWQTETGGILITPLPGATALKPGSATRPFFGVQPALVDNMGNVIEDQAAEGNLVILDSWPGQMRTVYGDHERFEQTYFSTFKGMYFTGDGARRDEDGYYWITGRVDDVLNVSGHRMGTAEIESALVAHPKIAEAAIVGIPHDIKGQAIYAYVTLNAGEYPTAELHKEVKDWVRKEIGPIATPDVLHWTDALPKTRSGKIMRRILRKIATGDTSNLGDTSTLADPSVVDKLIAEKAELV

SEQ ID NO: 895 - DNA, 1887 bp, Photorhabdus luminescens
  CDS (1)..(1887)
atgtcattcaacgctttttatcagcagtccattgatgatcccaacgctttctgggctgagcaggcgcaacgtattttctggcaacatccttttgagcaagtgctggattatagcaatcctccttttgctcgttggttttgcgggggaaaaaccaacctatgctacaacgcgttggatcgctggctggaaagccagcctgatgctaaggcgctcatcactatctcaacagaaaccaatagtgagaaagtatttactttcaaagaattacatcaggaagtgaatcgagcggctgccatgatgctctctctgggcgttaaaaaaggcgacagagttttggtttatatgccgatgattgccgaagcattgtttgttttgctcgcttgtgcccgtattggtgccgttcactctgttgtctttggtggttttgcttctcagagccttgccacacggttggataatgctgaaccggtgttggtggtatctgctgatgggggagcgcgtggtggaaaaattattccttacaagccattgttagatgaagccatcgaactggcgaaccacaaaccccgccatgtattgatggttaatcgtggattggcagaaatggtttgggtaccggggagagatatcgatttcgcgacattgcggcagaagtactttgatgctgacattcccgtaacctggcttgaatcaaatgaaacctcctgtgtgctctatacttccggtacgacgggcacgccaaagggcgtgcagcgtgatgttggcggttatgctgtcgcattggcaacatctatggatatcatttttggtggtaaagcgggtgaggtattttttagcacctcagatattggctggatcgtcgggcattcttatattgcctatgctcctttaattgcaggaatggcgacgattatgtatgaggggctaccgatacggccagatgcgggtatttggtggaaaatagtggagaaatatcaagtaacgcggatgttttcagcgcctacagctattcgtgtactgaaaaaatatccaattgaatgtattggtaaatacgatatttcatcacttaagacattgtatttggcgggagaaccgcttgatgaacataccgcccgctggattgctgaggctatcaacgtccctgtcattgataattattggcagactgagaccggttggccaattatggctatcgcccgtacgctggatgaccggccgagtcgatttggcagtaccggcttcccgatgtatggctttcatgtcaagctcatcaatgaactgactggagaggcgtgtggtgataacgaaaaaggtatgctcgtgattgaaggacctttgccaccgggttgtattcaaactatctatggtgatgatacccgttttatcaatacctattggcgacactttgagcatgctgtttattccacattcgattggggtatccgtgatagtgacggctattattttattttggggcgttcggatgatgtgattaatgtggccgggcatcgtctgggaacgcgggagatagaagagtgtattgccagccatgaagatgttgccgaagtggctgtgattggtattaaggatgccatcaaggggcaagtcgcggttgcttttgctgtcctcaaggatgggaaggagatccagaatgccgagcattttgctgctttggaaaaggttttgatggggttggtcaataaacagattggtagtgtgggccgcccggcacggatttattttgtctctcagcttcccaagacgcgttcaggaaaaatgctacgtcgaaccatgcaggcaatatgtgaagggcgtgaacctggcgatctttccttgattgaaaatcctgcctcattagacgtcattcgagaagctgttttttgctaa

SEQ ID NO: 896 - protein, 628 aa, Photorhabdus luminescens
MSFNAFYQQSIDDPNAFWAEQAQRIFWQHPFEQVLDYSNPPFARWFCGGKTNLCYNALDRWLESQPDAKALITISTETNSEKVFTFKELHQEVNRAAAMMLSLGVKKGDRVLVYMPMIAEALFVLLACARIGAVHSVVFGGFASQSLATRLDNAEPVLVVSADGGARGGKIIPYKPLLDEAIELANHKPRHVLMVNRGLAEMVWVPGRDIDFATLRQKYFDADIPVTWLESNETSCVLYTSGTTGTPKGVQRDVGGYAVALATSMDIIFGGKAGEVFFSTSDIGWIVGHSYIAYAPLIAGMATIMYEGLPIRPDAGIWWKIVEKYQVTRMFSAPTAIRVLKKYPIECIGKYDISSLKTLYLAGEPLDEHTARWIAEAINVPVIDNYWQTETGWPIMAIARTLDDRPSRFGSTGFPMYGFHVKLINELTGEACGDNEKGMLVIEGPLPPGCIQTIYGDDTRFINTYWRHFEHAVYSTFDWGIRDSDGYYFILGRSDDVINVAGHRLGTREIEECIASHEDVAEVAVIGIKDAIKGQVAVAFAVLKDGKEIQNAEHFAALEKVLMGLVNKQIGSVGRPARIYFVSQLPKTRSGKMLRRTMQAICEGREPGDLSLIENPASLDVIREAVFC

SEQ ID NO: 897 - DNA, 1944 bp, Gloeobacter violaceus
  CDS (1)..(1944)
atgtcttccttcgaaatcgagtcgctcctgcacgaaaaccgccgcttcgccccgcccgcgggctttggcgagggcgcctggattaagagtctcgagcactaccgcgagctgtgcgcgcgggctgaggccgatccggagggtttctgggcggatcttgcccgcagtgagctgcactggttcaccccctggcaacaggtactcgattggcaggagcccacggcccgctggtttgtgggcggcaagctcaatcttgcttataactgcctcgaccggcatctccagacgcgcggcgacaaggttgccgtgctctgggagggcgaaccgggcgaggtgcgtgcgcttacctaccgcgaactgcacgccgaggtctgccgcttcgccaatgccctgaaggcgctgggggtcggcaagggcgacgtggtggcgatttatatgccgctggtgccggaggcggccgtcgcgatgctcggctgcgcgcgcatcggggcaccccacacggtagtcttcggaggcttctcgggcgacgcgctgcgcgaccggctcatcgatgcccaggccagggtggtggtcaccgccgacggcggctggcgcaaaggggcgattgttcccctcaaaccgcgggtggacgaggcggtggcccaggctcccggcgtggctcatgtgatctgcctgaagcgggtaggccaggaggtggccatggagccggggcgcgatcactggtggcacgaactggtggcctcccggagcgccgagtgtccggctgaagcgatggactccgaagatttgctgtttattctttacaccagcggcaccaccggcaagcccaagggcgtcgtgcacacgactggtggttacaacctctatacccacatcaccagcaagtggatcttcgatctgcacgacgaggacgtctactggtgcaccgccgacgtaggctggatcacgggccattcgtacgtggtgtacgggcccctgtcgaacggggcgacgacctttatgttcgagggtgcccccaaccaacccgaccccggccgcttctggcagctcatcgaaaagcaccgcatcggcattttctataccgccccgaccgccattcgcaccttcatcaagtggggcgacgattggcctgcccgctacgatctttcttcgctgcggcttctaggcacggtgggcgaaccgatcaaccccgaagcgtggatgtggtaccaccgggtgatcggccaggagcgctgcccgatcgtcgatacctggtggcagaccgagacgggcgggatcatgatcaccccgcttccgggggcgaccatcaccaaacccggctcggcgacgatgccttttccgggcatcgtcgccgatgtggtcgaccgcgagggcaacagctgcccccccaaccagggcggctatctggtgattcgcaggccctggccctcgatgctgcgcacggtctaccgcgacccggagcgctaccgtcagaactactggagccaggttccccacgcctactttgcaggcgacggtgcccgccgcgacgaagagggctacttctgggtgatgggccgcgtcgacgatgtgatcaacgtctccggccaccgcctgggcacgatggagatcgaatcggccctggtctcccacccggcagtggccgaggccgccgtggtcggccgacccgatgagatcaaaggcgaagcgatcgtcgcttttgtgacggtcgaatcggaggtcgagacgacgcctcagttgctcgaggagttgcgtgcccacgtcgtcaaagaaatcggcgcccttgcccgcccggaggaaatccgctatgcggaggcgctacccaagacccgctcgggcaagatcatgcggcggctgttgcgctcgctcgcctcgggaagcgacctgactggcgacacctcgaccctcgaagatcgctcggtgctcgagaagctgcgcgagggctaa

SEQ ID NO: 898 - protein, 647 aa, Gloeobacter violaceus
MSSFEIESLLHENRRFAPPAGFGEGAWIKSLEHYRELCARAEADPEGFWADLARSELHWFTPWQQVLDWQEPTARWFVGGKLNLAYNCLDRHLQTRGDKVAVLWEGEPGEVRALTYRELHAEVCRFANALKALGVGKGDVVAIYMPLVPEAAVAMLGCARIGAPHTVVFGGFSGDALRDRLIDAQARVVVTADGGWRKGAIVPLKPRVDEAVAQAPGVAHVICLKRVGQEVAMEPGRDHWWHELVASRSAECPAEAMDSEDLLFILYTSGTTGKPKGVVHTTGGYNLYTHITSKWIFDLHDEDVYWCTADVGWITGHSYVVYGPLSNGATTFMFEGAPNQPDPGRFWQLIEKHRIGIFYTAPTAIRTFIKWGDDWPARYDLSSLRLLGTVGEPINPEAWMWYHRVIGQERCPIVDTWWQTETGGIMITPLPGATITKPGSATMPFPGIVADVVDREGNSCPPNQGGYLVIRRPWPSMLRTVYRDPERYRQNYWSQVPHAYFAGDGARRDEEGYFWVMGRVDDVINVSGHRLGTMEIESALVSHPAVAEAAVVGRPDEIKGEAIVAFVTVESEVETTPQLLEELRAHVVKEIGALARPEEIRYAEALPKTRSGKIMRRLLRSLASGSDLTGDTSTLEDRSVLEKLREG

SEQ ID NO: 899 - DNA, 1965 bp, Chromobacterium violaceum
  CDS (1)..(1965)
atgtcgacgctagattccatcctcaaggaaacccgcagcttcgccccgtcggaagaattccgccgcaaggcgtccatcagcgggatcgaagcctaccacgcgctgtgcgagcaggccgacgaccactacctgtccttctggggggatctggcgcgcgaactgatcacctggaaaaaaccgttctcccgcgtgctggacgacagccaggcgccgttcttcaagtggttcgacgacggcgtgctgaacgcctcctacaactgcctggaccgccacctggccgccaacgccaacaagatcgccatcatcttcgaagccgacgacggcgaggtcacccgcgtcacctactccgagctgcaccgccgcgtctgccagttcgccaacggcctgaagagcctgggcgtgaagaaaggagaccgcgtcgtggtctacatgccgatgggcatcgaggcggtggtgacgatgcaggcctgcgcccgtatcggcgccatccactcggtggtgttcggcggcttctccgccggcgcggtgcgcgaccgcatccaggatgccggcgccaccgtggtggtcaccgccaacgagagcgtgcgcggcggcaagaacgtgccgctgaaggccaccgtcgacgaggcgctggcgctggaaggcgccgaatcggtcaggcacgtggtggtgtaccagcgcaccaacggcggcgccgactggaccgacggccgcgacgtgtggtggcacaagctgatcgaaggccagagcgaggcctgcgagccggaatggatgggcgccgaagacccgctgttcatcctctacacctccggctccaccggcaagcccaagggcatccagcacagcaccgccggctacctgctgggcgcgctgaacagcttccgctgggtgttcgactacaaacccaacgacgtcttctggtgcaccgccgacgtcggctggatcaccggccacagctacgtctgctacggcccgctggccaacggcgccacccaggtgatcttcgagggcgtgcccacctatcccgacgccggccgcttctggaagatgatcgagcagcacaaggtgtccatcttctataccgcgccgaccgcgatccgctcgctgatcaagctgggttcggacctgcccaagcaatacgacctgtccagcttgcgcgtgctgggcacggtcggcgagcccatcaaccccgaagcctggatctggtactacgaaaccgtcggcggcggccgctgccccatcgtcgacacctggtggcagaccgagaccggctcgacgatgatcgcgccgctgccgggcgcgatcgccaccaagcctggctcgtgcacgctgccgctgccgggcgtgatcgccgacatcgtcgacgagtccggcgcccaggtggagccgggccgcggcggcttcctggtgatcaagaagcccttccccagcctggtgcgcaccatctggaacgatccggaacgcttcaagaaaacctatttccccgacgagttcgacggcaagtactacctggccggcgactccgcccaccgcgacgagaacggctatttctggatcatgggccgcatcgacgacgtgctgaacgtgtccggccaccgcctgggcaccatggagatcgaatcggcgctggtggccaacccgctggtggccgaggccgccgtggtcggcaagccgcacgaggtgaagggcgaggcggtagtcgccttcgtggtgctgaagggcgcgcgtccgcagggcgacgcggccaagaccgtggcggccgaactgaagaactgggtcgcgcacgagatcggcaagatcgcgcagccggacgacatccgcttcggcgagaacctgcccaagacccgctccggcaagatcatgcgccgcctgctgcgttccatcgccaagggcgaggagatcacccaggacgtctccacgctggaaaacccgcaaatcctgcaacaactgcagcagccgctgtaa

SEQ ID NO: 900 - protein, 654 aa, Chromobacterium violaceum
MSTLDSILKETRSFAPSEEFRRKASISGIEAYHALCEQADDHYLSFWGDLARELITWKKPFSRVLDDSQAPFFKWFDDGVLNASYNCLDRHLAANANKIAIIFEADDGEVTRVTYSELHRRVCQFANGLKSLGVKKGDRVVVYMPMGIEAVVTMQACARIGAIHSVVFGGFSAGAVRDRIQDAGATVVVTANESVRGGKNVPLKATVDEALALEGAESVRHVVVYQRTNGGADWTDGRDVWWHKLIEGQSEACEPEWMGAEDPLFILYTSGSTGKPKGIQHSTAGYLLGALNSFRWVFDYKPNDVFWCTADVGWITGHSYVCYGPLANGATQVIFEGVPTYPDAGRFWKMIEQHKVSIFYTAPTAIRSLIKLGSDLPKQYDLSSLRVLGTVGEPINPEAWIWYYETVGGGRCPIVDTWWQTETGSTMIAPLPGAIATKPGSCTLPLPGVIADIVDESGAQVEPGRGGFLVIKKPFPSLVRTIWNDPERFKKTYFPDEFDGKYYLAGDSAHRDENGYFWIMGRIDDVLNVSGHRLGTMEIESALVANPLVAEAAVVGKPHEVKGEAVVAFVVLKGARPQGDAAKTVAAELKNWVAHEIGKIAQPDDIRFGENLPKTRSGKIMRRLLRSIAKGEEITQDVSTLENPQILQQLQQPL

SEQ ID NO: 901 - DNA, 1962 bp, Chromobacterium violaceum
  CDS (1)..(1962)
atgcaagcacgcgttaccccgatctggagcccgtccgccgaacggctggccggctgccatctcaccgccttcgcccgcctggccgaaaccgtctggggcaaggaattgcccgattaccaccgcctgtggcgcgccagcgtggaagacccgggccgcttctggtcgctggtctgggactactgcggcgtgatcggcgacaagggcgccgtcgcgctggagaacggcgacgacatgctggccgcccgcttcttccccgaggcccggctcaacttcgccgaaaacttgctgcgccgcgacgacgacgcgctggcggtggtgttccgcggcgaggacaagatcgaacaaaagctgagctggcatgagctgaaccagctggtctcccggctgcagcaggcgatgcgcgccgccggcatccagccgggcgaccgcgtcgccggcttcatgcccaatatgccggccacgctggcggcgatgctggccgccagcagcctgggcgcggtgtggaccagcggctctcccgacttcggcaccgacggcgcgctggaccgcttcggccagaccgagcccaggatcctgttctgcccggacggctactggtacaacggcaaggcggtggacatccgcgccaagatgatccacctggcggaaaagctgcccagcgtggagcgcttcgtggtggtgccttacctgggcgacggcgccgacttcgccgccgccgtgccgcgcgcgcagacgctggacgccttcctggccggtttcgacgcccgtccggtcgaatacctccgcctgccgttcaaccatccgctgtacatcctctattccagcggcaccaccggcaagcccaagtgcatcgtccacggcgccggcggcacgctgctgcagcacctgaaggagcaccagctgcacgccgacgttcatgccggcgaccacctgttctacttcaccacctgcggctggatgatgtggaactggctggtcagcggcctggcctccggcgccgcgctgatgctgtacgacggctcgccgttcgccgacgagggacgcgtgctgtgggactacgccgccgagcacggcttcacccatttcggcacctcggccaagtacatcgacagcctgaagaagacgcccatcgtccccgcgcgcgactggcagctgcccaagctgcgcagcctgttctccaccggctcgccgctggtggcggaaagctacgactgggtgtacgagaacatcaagtccgacctcaacctcgcctccatttccggcggcaccgacatcgtgtcctgcttcgcgctgggcgccgccacgctgccggtctaccgcggcgagctgcaatgccgcggcctgggcatggcggtggacatctacgacgagctgggccgcccgctgtaccgcgagaaaggcgagctggtttgcctgaagccgttcccgtcgatgccgataggcttctggaacgacccggacggcgagaaataccgccaggcctacttcggccgcttccccaacatctggtgccacggcgactacgccgaagtcacccagcacgacggcgtgatcatctacggccgctccgacgcggtgctcaaccccggcggcgtgcgcatcggcaccgccgagatctaccgccaggtggaagttttcccggaagtgctggaaagcctggccgtcggccagacctggcaggacgacgagcgcgtggtgctgttcgtcaagctgcgcgaaggcgttcagcttgacgaggatctgagcagccggatcaaggcccagatcaagaatggggccagccctcgccacgtgccggcccgcatcgtcgccgtggccgacatcccgcgcaccgtcagcggcaagattgtcgagctggcggtgaagaacatcatccatggccgtccggtcagcaacgtcagcgcgctggccaatccggaagcgctgaaactgttcgaaaacctgagcgagctgggagaatga

SEQ ID NO: 902 - protein, 653 aa, Chromobacterium violaceum
MQARVTPIWSPSAERLAGCHLTAFARLAETVWGKELPDYHRLWRASVEDPGRFWSLVWDYCGVIGDKGAVALENGDDMLAARFFPEARLNFAENLLRRDDDALAVVFRGEDKIEQKLSWHELNQLVSRLQQAMRAAGIQPGDRVAGFMPNMPATLAAMLAASSLGAVWTSGSPDFGTDGALDRFGQTEPRILFCPDGYWYNGKAVDIRAKMIHLAEKLPSVERFVVVPYLGDGADFAAAVPRAQTLDAFLAGFDARPVEYLRLPFNHPLYILYSSGTTGKPKCIVHGAGGTLLQHLKEHQLHADVHAGDHLFYFTTCGWMMWNWLVSGLASGAALMLYDGSPFADEGRVLWDYAAEHGFTHFGTSAKYIDSLKKTPIVPARDWQLPKLRSLFSTGSPLVAESYDWVYENIKSDLNLASISGGTDIVSCFALGAATLPVYRGELQCRGLGMAVDIYDELGRPLYREKGELVCLKPFPSMPIGFWNDPDGEKYRQAYFGRFPNIWCHGDYAEVTQHDGVIIYGRSDAVLNPGGVRIGTAEIYRQVEVFPEVLESLAVGQTWQDDERVVLFVKLREGVQLDEDLSSRIKAQIKNGASPRHVPARIVAVADIPRTVSGKIVELAVKNIIHGRPVSNVSALANPEALKLFENLSELGE

SEQ ID NO: 903 - DNA, 1713 bp, Anopheles gambiae str
  CDS (1)..(1713)
atgcagcgcacccgctggttcccggacagccggctcaacttcgccgaaaacctgttacgccgccaggatgacacgccggccatcatctcccgcatcgaagggagccccagccagatcttgagctggcgtgagctggctgatcaggtggccaggctggcccagtggctgcgtggccagggaatcggccggggcgatgtggtggcagcctacctgcccaatatcccgcaaaccgtggtggctatgctggcgaccaccagcctgggggcgatctggacctccaccagccccgatttcggcgaagctagcgtggtggagcgcttcggccagacccggccgcgtgtgttgtttgcggtggatggctatcgctacaacggcaaggctatcgacattcaggacaaagtggcggtggtcgtcagccagatcgacagcatagagcagacggtcatgatccccttgctgggccaccccctgcagcttggccacgactggcgccagatcctggccggtcagccggatgccagcctgcagttcgagcccatggccttcaatgacccgctctacatcctctattcgtccggcaccaccggcaagcccaagtgcatcgtgcacggcatcggcggcactctgctgcaacatctgaaagaacaccagctgcactgcgacatcaagccgggggagcggatcttctacttcaccacctgcggctggatgatgtggaactggctggtgagcgccctcgcctccggcgcaactctggtgctctacgacggctcccccttctacccggacggcaacgtgttgtgggatctcgcccgcgacgaagaggtcgccctgttcggcacctcggccaaatacctggatgcgctgcacaagcagggctatgccccgatcaagactcaccagctgccgcagttgcggctgatctgcagcaccggctccgtgctctcgccggaggggttcgactacgtctatcagcagatcaagcgggatgtgcagctcagctccatctcaggtggcaccgacatctgctcctgcttcgtcatcggcaaccccatcagccctgtctaccgcggcgagagccagggacgcggcctcggcctcgcggtacaggtattcaacgaagcgggtcagccggtgcagggggaaaagggcgagctagtctgtaccaagcccttcccggcccagcccatcggcttctggggggacgacagcggcgacaagtaccacgccgcctatttcgaacggttcgacaacatctggtgccatggcgactggatcgagctgaccccgaccggcggcatcctgttctacggtcgctccgacgccaccctcaacccgggcggcgtgcgcatcggcaccagcgagatctatcgctacgtggaacagctggacgaggtggaagagagcatcgtcatcggccagcagtggcaacaggacgagcgggtggtgctgttcgtcaagctcaagccaggcctcatgctggacgaggcgctgcgcgagcgtatccgccagcaggtgcgcctgcactgcaccgcccgtcacgtgccggcccgcatcctgcaggtggacgccattccgcgcaccaagtccggcaagatagtggagctggcagtgcgggaagtggtgcacaaccggcccgtcaacaacacccacgccctcgccgatcccgaggtgctgagccagtatcgcaaccggcccgagctggccagctga

SEQ ID NO: 904 - protein, 570 aa, Anopheles gambiae str
MQRTRWFPDSRLNFAENLLRRQDDTPAIISRIEGSPSQILSWRELADQVARLAQWLRGQGIGRGDVVAAYLPNIPQTVVAMLATTSLGAIWTSTSPDFGEASVVERFGQTRPRVLFAVDGYRYNGKAIDIQDKVAVVVSQIDSIEQTVMIPLLGHPLQLGHDWRQILAGQPDASLQFEPMAFNDPLYILYSSGTTGKPKCIVHGIGGTLLQHLKEHQLHCDIKPGERIFYFTTCGWMMWNWLVSALASGATLVLYDGSPFYPDGNVLWDLARDEEVALFGTSAKYLDALHKQGYAPIKTHQLPQLRLICSTGSVLSPEGFDYVYQQIKRDVQLSSISGGTDICSCFVIGNPISPVYRGESQGRGLGLAVQVFNEAGQPVQGEKGELVCTKPFPAQPIGFWGDDSGDKYHAAYFERFDNIWCHGDWIELTPTGGILFYGRSDATLNPGGVRIGTSEIYRYVEQLDEVEESIVIGQQWQQDERVVLFVKLKPGLMLDEALRERIRQQVRLHCTARHVPARILQVDAIPRTKSGKIVELAVREVVHNRPVNNTHALADPEVLSQYRNRPELAS

SEQ ID NO: 905 - DNA, 2856 bp, Plasmodium yoelii yoelii
  CDS (1)..(2856)
atgaataacgcggaacacaatggagttgcttcaaagatggattcatcaaaaattgataatattgatatagatgaaaatattttccttaatagcaaatcatttccagtaaatgaagcatatgaggtcgatcaaaataaatttggtggtaacaaccaaattaaagatataaaagaatataaaaaaatgtatgaagagagtataaaaaaccctgagttattttggggtgatatggcaaaaaataatttaaggtggtctaaattatttactaagacatatattggcaattttaataaaggaaatgttagctggtttgttaatgggaaaataaatgcctgtgataattgtgttgatagatgggttgaaaagcatcctaataagactgccattatatgggaaaaggatacaccaaatgattataaaaaaataagttatcaaaaattattagaaaaagtttgtaaaattgctaatttattaaaaatgtatggagttaaaaaacaagattgtgtaaccatttatttgccaatgataccggaattgatatattctatgctagcatgcgctagaataggtgctatacataatgttgtttttgctggatattctactaggagtttatcagaaaggatagtcagttcaggatcaactattttaattactagcgattttggtttaagaggcggtaaattaaccaaattaaaaaatattgccgatggggcaatggagatgtctggaatgatcaaaacgtgtatagtttttaaaaataaaacaaaaagaaatgataacaataataatagtatattaaatagtaaatcaaataatatgtataatacatctaatatatgctctcaaggaagtagtcatttcttgcaatattacgcagttggaaatgcaacacataaaaacaataatgatccaagcccaaatgtatatgatagtatattacataatgatatttccaatcatattaaagaagatacatttgataaaaaaactgagaatttaaataattgtgttacaaataatataacaggcatatgtagtaatagcaatcataatgatattaatttatcttctaataatgatacgaatgatgtcaatttatccaaaaataataaaatcgataaaaagggtactaaagaaaaagatatacaaacacttaataaattaatatcaaaaaataccaatataaataaaaaaaatcaaaacaaggaaaatggtacatataaagagttatataacaataatgatcagtatataatagatggaaaggaaaataaattgactgaaaatgggacacaaatgaatggacatatttcatatgataataatatgattaactgtaatcaagtaaacgcttttgaacatattaatgattataatatacacaatggacacgccaattatgaacaaaattgtaaaagcaaatatgattttgatgaaaatatatgtacactaaaagaaggtcgagatattaatggatcaatgttaatgaaaaatatgagaccatattgcccaatagaatatgtagatagtgaagattttttatctatattatatacatctggttctactgggaaacctaaaggtgtgactcatactactgcaggatatttattatatgcatttgcaacatccaaatatatttttgatataaaagatgatgatatttttggttgtgttgctgatattggttgggtaacaggtcatacttatgtagtatatggaccattattaaatggaataacaaccactttattttcatctatacctacctatcctgattgtagtagatattggaacttaatacaaactcataaaataacgcaattttatacagcccctaccgcacttagaactttaatgaaacatggtgattattatattaaaaattatgatttatcatcttgtagaatattaggaagtgtaggcgaacctataaacccagaaacatggagatggtattataatgttgttggaaaaaaaaaatgtgtaattgtcgatacatattggcaaacagaaacagggggcattgtcattgcacctataccacatttatttaaaatgaaaccgggatctgcttctttaccattttttggtatacaattagagatattaaattcaaaaacattagagccattaaagggtccaaatgtatgtggtatattatgtataaaaagttcatggccaggtatgttaagaacagtttatggaaatcacaatagattaattaaaacctattttgaagcatgccccagttattattttactggagatggtgcatatagagatgaagatgggtattattggatatcaggaaggatagatgatacactaaatgtatcaggtcatagattaggcgctgcagaaattgaacatgctttagttcaacattcatgtatttctgaatcagcagttgtatctttttctcataaagttaaaggggaaggtattctatgttttgtcgttaaaaaactcacaagttttcaaaaatatccagaatgtaatggtgataataataataatgatgaattaaataatcgatctctattaagttcaaatgacaacattgtacaaaatcatactcatgaaaattataccgatgaaaagttaatagaagaattgaagctatacgttagaaaagttattggaccaattgctacaccagatataatatgtattgtccccgatttgccaaaaacaagaagtggaaaaattataagaagaatattaagagctatagcaatcggattgaatgattatggagatatttcaactgtttcaaattatgatgttattgaaattattaaaaataaatttatggaatctaaggaaaaacgttatggcgtagcatcataa

SEQ ID NO: 906 - protein, 951 aa, Plasmodium yoelii yoelii
MNNAEHNGVASKMDSSKIDNIDIDENIFLNSKSFPVNEAYEVDQNKFGGNNQIKDIKEYKKMYEESIKNPELFWGDMAKNNLRWSKLFTKTYIGNFNKGNVSWFVNGKINACDNCVDRWVEKHPNKTAIIWEKDTPNDYKKISYQKLLEKVCKIANLLKMYGVKKQDCVTIYLPMIPELIYSMLACARIGAIHNVVFAGYSTRSLSERIVSSGSTILITSDFGLRGGKLTKLKNIADGAMEMSGMIKTCIVFKNKTKRNDNNNNSILNSKSNNMYNTSNICSQGSSHFLQYYAVGNATHKNNNDPSPNVYDSILHNDISNHIKEDTFDKKTENLNNCVTNNITGICSNSNHNDINLSSNNDTNDVNLSKNNKIDKKGTKEKDIQTLNKLISKNTNINKKNQNKENGTYKELYNNNDQYIIDGKENKLTENGTQMNGHISYDNNMINCNQVNAFEHINDYNIHNGHANYEQNCKSKYDFDENICTLKEGRDINGSMLMKNMRPYCPIEYVDSEDFLSILYTSGSTGKPKGVTHTTAGYLLYAFATSKYIFDIKDDDIFGCVADIGWVTGHTYVVYGPLLNGITTTLFSSIPTYPDCSRYWNLIQTHKITQFYTAPTALRTLMKHGDYYIKNYDLSSCRILGSVGEPINPETWRWYYNVVGKKKCVIVDTYWQTETGGIVIAPIPHLFKMKPGSASLPFFGIQLEILNSKTLEPLKGPNVCGILCIKSSWPGMLRTVYGNHNRLIKTYFEACPSYYFTGDGAYRDEDGYYWISGRIDDTLNVSGHRLGAAEIEHALVQHSCISESAVVSFSHKVKGEGILCFVVKKLTSFQKYPECNGDNNNNDELNNRSLLSSNDNIVQNHTHENYTDEKLIEELKLYVRKVIGPIATPDIICIVPDLPKTRSGKIIRRILRAIAIGLNDYGDISTVSNYDVIEIIKNKFMESKEKRYGVAS

SEQ ID NO: 907 - DNA, 2130 bp, Neurospora crassa
  CDS (1)..(2130)
atggattcaaacaccaaaacgatgtcatttgtctcaaaattggccacgagtactcagaacaatctgtccattcacatcattgcttcggctagctccaaactccgacccagagatgggtgttcgctggcactccatagattaggtcacatcactatagacacaatgacccatcctcaagacgaggcccagcatctctctctcaccgatcccgaaggattctggggtcatcaagctgaacagcttcactggcacagaaagccttctgcggttctgaaacgcacgactaaagatctgaaattgggtacctctcacagtcattgggaatggttcccagacggcgagatatccacctgctataactgccttgaccgtcatgtcctagcggggcatggagatcagcccgccattctctacgacagttcggtcacgaacaccaagcagcggttgacttacaagcagcttcttgccgaggtcgaaacttttgccggggtccttcgagaggaaggcgttaagaagggagatgttgttttagtttacagtcagttcacccagttacggctttcacgagtgtccactgagccagctactgacagcctacctatttacatagtgcccatggtgcccgccactttgatcggcattctcgccattaatcgcttgggtgccatccacgctgttgtctttggtggctttgcttccacagccctggctcagcgcattgaagcctcacgtccagtcgctatcttgacagcttcttgtggtatcgaaggtaacaaagggcctgtcagttaccgcgcctatatcgaagaagctatcagcatctcatccttcaaaccccccaagactatcatctggcagcgtgagcagctagtgtggcgtccgatcaagaaaaccgagggcgagcgggattggcagaagctggtcaagagcgcgcggttcagaaatatcaaggttgagtgtgttcctgtaaggtcggctgatcccatttacatcatctacaccagcggaaccacaggtcgaccgaaaggtgtcgttcgcgatagcggcggtcatgctgttgggctgcacatgtcgatttcgtatctgttcggtatacatggaccaggtgacgtggcgccgccacggtcctctacgaaggaagaccctgacaatgtctttatcaccgagattggcagacgaggtgggctcaagagcctcaaagccctttttcttgctggagagcggtccgagccagctatcattaacatgtaccaggacttgctcaggcggtatggcgcggcaggctcccaggttgttgataactggtggtcgtcagaatctgggtcgccgatttcgggtgttgcgttggttccgcacgcaggcaagaacaggaagacgaatatgaaagatcatccgccattacctatcaagcccgggagtgctggaaaggccatgcctgggtttgatgtcagagttgtggatgacgaaggcaacgaggtgcccaggggcaacatgggaaacatcgttctgggccttccattggcacctactgcgtttcggacactttggggggatgaggaacgattctataagagttacatgattcgcttcaatggcaagtgggttgacactggcgatgccggctatgtcgaccaaacagggtacattcacattatggcacgcactgatgacattatcaacgttgccgcccatcgcacgctcgagcaagcagtcacaagccaccccctcgtcaccgaagcatgtgtggttagcgtccccgacgccctcaaaggccagcttcctttcgccttcgtcagcacctcggacggcggcgccgacgtcaagtcagacgagcagctgttccaggatatccagaagctcgtccgcgcccaggttggcgccatcgcctcgctgggcgggatgatccggggcaagggcatgattccgaagacgcgctcgggcaagaccttgaggagagtcctacgcgaactgctagaaaatgcggtccatgacgagttcgaaaagcccatcaatatcccctcgacggtggaggatccgagtgtagtggatgtggcgagggagaagattagggaatattggcatgcgaagagcgggttgcatgcggctatcgaggctagggcgaagctttga

SEQ ID NO: 908 - protein, 709 aa, Neurospora crassa
MDSNTKTMSFVSKLATSTQNNLSIHIIASASSKLRPRDGCSLALHRLGHITIDTMTHPQDEAQHLSLTDPEGFWGHQAEQLHWHRKPSAVLKRTTKDLKLGTSHSHWEWFPDGEISTCYNCLDRHVLAGHGDQPAILYDSSVTNTKQRLTYKQLLAEVETFAGVLREEGVKKGDVVLVYSQFTQLRLSRVSTEPATDSLPIYIVPMVPATLIGILAINRLGAIHAVVFGGFASTALAQRIEASRPVAILTASCGIEGNKGPVSYRAYIEEAISISSFKPPKTIIWQREQLVWRPIKKTEGERDWQKLVKSARFRNIKVECVPVRSADPIYIIYTSGTTGRPKGVVRDSGGHAVGLHMSISYLFGIHGPGDVAPPRSSTKEDPDNVFITEIGRRGGLKSLKALFLAGERSEPAIINMYQDLLRRYGAAGSQVVDNWWSSESGSPISGVALVPHAGKNRKTNMKDHPPLPIKPGSAGKAMPGFDVRVVDDEGNEVPRGNMGNIVLGLPLAPTAFRTLWGDEERFYKSYMIRFNGKWVDTGDAGYVDQTGYIHIMARTDDIINVAAHRTLEQAVTSHPLVTEACVVSVPDALKGQLPFAFVSTSDGGADVKSDEQLFQDIQKLVRAQVGAIASLGGMIRGKGMIPKTRSGKTLRRVLRELLENAVHDEFEKPINIPSTVEDPSVVDVAREKIREYWHAKSGLHAAIEARAKL

SEQ ID NO: 909 - DNA, 2070 bp, Synechococcus sp
  CDS (1)..(2070)
atggtttcaccctctgtccgacggattgatacgggtcgtggaacggtcgatcgactcctccgtacccttgcaacaacagtctttggcccgcctgctgtgaccgagtccaatacgtcgatcgaaagtgtcctgcaggagcagcgggtatttcagccgccggcggagatggcggctgcagcacgcatcggcagtctggagagttaccgcgccatggcggcggcggcgaccaaggatcccgatgggttctggggggaggcagcccgtcgtgagctgcattggttcgagccgttccacacggttctcgattggtcggaacctcctttcgcccgctggtttgaagggggcaccaccaacctgtcgtacaactgtctcgaccgacatctcgagggggccaaggccgagaagaccgcgctgatctgggaaggggagcccggagacgtgcgccgtttcagctaccgcgagctccatgccgaggtgtgcaaagccgccaacgctctgaaggccatgggcattggcaaaggcgatctggtcgccctctacatgccgatgattccagaggccgccattgcgatgctcgcctgcgctcgcatcggtgccccccattccgttgtgttcggtggtttctctgccgaggccttgcgcgatcgcctcaaggacggtgaggcgaaggccgtgatcacagcggatgggggattcagaaaggacaagcccgtttccctcaaacctgctgttgatgcagctctagcggagggcgcctgtccttcggtgaccggcgtgctcgtggtgcagcgcaccaagcagcccgtggagatggttgccggccgcgatcagtggtggcacgacctcgtggatgcccagggcagcgattgccctgcggagccgatggccagtgaagatcgactgttcgtgctctacacctcaggttccaccggcaaacccaagggtgtagtgcacaccactgccggttacaacctctgggcccatctcaccttccagtggattttcgacatccgcgataacgacgtctactggtgcacagcggatgttggctggatcactggccacagctacatcgtgtacggcccgctgtccaacggtgcgaccaccgtgatgtacgagggggcgccgcgcccctccaaacccggtgcgttctgggagttgatccagaagcacggcatcacgatcttttacaccgcgccgactgcgattcgagccttcatgaagagtggccgccaggtgccggatcaattcgacatgagcagccttcgcctgctgggcaccgttggtgaaccgatcaatccggaggcctggatgtggtaccgcgacgtgattggcggcaaccgctgtccgattgtcgacacttggtggcagaccgaaaccggtggcgtgatgatcagtccgctgcctggagccactcccaccaaaccgggatccgccacgctgccgctgccgggcattcaggccgacatcgttgatggagaaggcaacagctgcgggcccgatgaaggtggatacctggctgtccgagccccctggcctggaatgatgcgcacggtccatggcaacccccagcgctttcgtgagagctattgggagcacatccgtcctgccgatggctcgtacctctatttcgctggggatggcgcccgccgtgatgccgatggatatttctgggtgatgggccgggtggatgacgtgatcaacgtctccggtcaccgcctcggcacgatggaaattgagtcggctctggtgagccatcccgcggtggcggaagctgctgtggtgggtcgtcccgatgacctcaaaggtgaaggcatcgttgcgttcgtcacccttgagtcggggcgtgagtcgtcggatgatctgatcaagcaactcagggcccatgtgggcacggagataggaccgatcgctcggccggatgagattcgttgcagtgatgcactgcccaagacccgcagcggcaagatcatgcgccggatcctgagggccctggccgccggtcaggaggtcagcggcgacaccagcaccctggaggatcgttcggtcctcgatcggctgcgggcttga

SEQ ID NO: 910 - protein, 689 aa, Synechococcus sp
MVSPSVRRIDTGRGTVDRLLRTLATTVFGPPAVTESNTSIESVLQEQRVFQPPAEMAAAARIGSLESYRAMAAAATKDPDGFWGEAARRELHWFEPFHTVLDWSEPPFARWFEGGTTNLSYNCLDRHLEGAKAEKTALIWEGEPGDVRRFSYRELHAEVCKAANALKAMGIGKGDLVALYMPMIPEAAIAMLACARIGAPHSVVFGGFSAEALRDRLKDGEAKAVITADGGFRKDKPVSLKPAVDAALAEGACPSVTGVLVVQRTKQPVEMVAGRDQWWHDLVDAQGSDCPAEPMASEDRLFVLYTSGSTGKPKGVVHTTAGYNLWAHLTFQWIFDIRDNDVYWCTADVGWITGHSYIVYGPLSNGATTVMYEGAPRPSKPGAFWELIQKHGITIFYTAPTAIRAFMKSGRQVPDQFDMSSLRLLGTVGEPINPEAWMWYRDVIGGNRCPIVDTWWQTETGGVMISPLPGATPTKPGSATLPLPGIQADIVDGEGNSCGPDEGGYLAVRAPWPGMMRTVHGNPQRFRESYWEHIRPADGSYLYFAGDGARRDADGYFWVMGRVDDVINVSGHRLGTMEIESALVSHPAVAEAAVVGRPDDLKGEGIVAFVTLESGRESSDDLIKQLRAHVGTEIGPIARPDEIRCSDALPKTRSGKIMRRILRALAAGQEVSGDTSTLEDRSVLDRLRA

SEQ ID NO: 911 - DNA, 1983 bp, Prochlorococcus marinus subsp
  CDS (1)..(1983)
atgacattagataagaaacattcaatcaacaatattcttgaagaaaatagactcttccccccttcaaaagaattctcagataaatcaaatataaaaagttttgaggaattacaaagtttaaaaaaacaatctttagagaacccaacaaaattctgggaatcttttgcaaattcggaaattgattggttcgaaccatttcagactgttttagaccgagaaaatgcgcccttttttaaatggtttaaggaaggtaagttgaatatcacttataactgcttagatagacatatcaaaaacggaattgggaataaaacagcgcttgtatgggaaggcgagccaggagataacaagaaatatacgtatcaagaacttctcaaagaagtatgcaaagcttcaaatgctttgaaatctttgggaataaaaaagggtgatttggtctgtatttatatgccaatgattcctgaggcgatggttgccatgctcgcttgcgcgagaattggagctcctcattccgtagtttttggaggcttctcctctgagtcgttaaaagataggttaattgatggaaatgccagatttgttataacggcagatggtggttttagaaaagataaggtaattgagcttaagaaagctgttgatgcggcaattgaaagtggggcaaataagattgttgaaaaagttattgttgttcaaagaactaaaaaagatatctcgatggtaaacaatagggatttttggtggcacgaattattaaaagatcaaaaagattggtgtgaacctgaaattatgaatagcgaagatagattgtttgtcttatatacttcaggatccactggtaaaccaaagggtgttgttcatacaactgctggttataatctctggtctcaccttacattcaagtggatttttgatataaaagatgatgatgtctattggtgtacagcagatgttgggtggattactggacatagttatatagtatatggacctttatccaatggagcaacaactcttatgtttgaaggtgttccaagggcatctaacttaggggctttttgggaaattattcaaaaatacaaagttactattttctatacagcgccaacagcgataagatcatttatgaaatctggacgtgaaatccctgaccaatacgatttaagatctttgagacttttggggacagttggcgagccaattaatcctgaagcatggatgtggtatcgagaggtaataggtgataataagtgtccaatagtagatacatggtggcaaactgaaactggtggtgtgatgataagcccgttaccaggagccgttgctacaaagccaggttccgcaacattctctttgcctggaatcgaggttgaagttgtagataaaaatggagaaaaggtggtggaaaatgagggtggatatttggttgttaaaaaaccttggcctggaatgatgcgtacaattcatgaaaactctcaaagatatttagaaagttattgggaatatatttcttttaaaggtgaaaaaaatgtttatttcgctggtgatggggctcggattgataatgatggatatatttggattatgggaagagttgatgatgttataagtgtttccgggcatcgtttgggaactatggagatagagtccgcattagtaagtcataaatcagttgcggaagctgctgttgtcggaagaaaagatgatttaaaaggtgaggctattgttgcatttgtatctttagaaaaagatataaatagttttccagaaatagttgaggagttaaagaaacatgtagttaatgaaattggaattattgctaaaccagaaaaaataataatttcagattctcttccaaaaacgcgtagtggaaaaataatgagaagaattttgagatccttggcagaaggcgaaaaaataagtggagatattagtactcttgaagatagttctgttttagaaaaattaaaggaaatatcttaa

SEQ ID NO: 912 - protein, 660 aa, Prochlorococcus marinus subsp
MTLDKKHSINNILEENRLFPPSKEFSDKSNIKSFEELQSLKKQSLENPTKFWESFANSEIDWFEPFQTVLDRENAPFFKWFKEGKLNITYNCLDRHIKNGIGNKTALVWEGEPGDNKKYTYQELLKEVCKASNALKSLGIKKGDLVCIYMPMIPEAMVAMLACARIGAPHSVVFGGFSSESLKDRLIDGNARFVITADGGFRKDKVIELKKAVDAAIESGANKIVEKVIVVQRTKKDISMVNNRDFWWHELLKDQKDWCEPEIMNSEDRLFVLYTSGSTGKPKGVVHTTAGYNLWSHLTFKWIFDIKDDDVYWCTADVGWITGHSYIVYGPLSNGATTLMFEGVPRASNLGAFWEIIQKYKVTIFYTAPTAIRSFMKSGREIPDQYDLRSLRLLGTVGEPINPEAWMWYREVIGDNKCPIVDTWWQTETGGVMISPLPGAVATKPGSATFSLPGIEVEVVDKNGEKVVENEGGYLVVKKPWPGMMRTIHENSQRYLESYWEYISFKGEKNVYFAGDGARIDNDGYIWIMGRVDDVISVSGHRLGTMEIESALVSHKSVAEAAVVGRKDDLKGEAIVAFVSLEKDINSFPEIVEELKKHVVNEIGIIAKPEKIIISDSLPKTRSGKIMRRILRSLAEGEKISGDISTLEDSSVLEKLKEIS

SEQ ID NO: 913 - DNA, 1977 bp, Prochlorococcus marinus
  CDS (1)..(1977)
atgtcccctgatccatccggcaccattaagtcagtcctgcaggagcagcgcgtctttcatccctccgcagagttggcctcacagtcgatggttggaagcctggaagcctatcgtcggatggcagagcaagccaaaactgatcctgacagtttctggggtgaagccgctcgcactgagctggaatggttcgaaccctttgatagcgttctcgattggtcgaatcctccctttgcgcgttggtttgaaggaggcacgacaaatctttccttcaactgtcttgatcgccatctcaatgggccgaaggcaaacaaaacagccctgatctgggagggagagccaggtgatgtgcggcgcttcacctatcgagaacttcatgctgaagtgtgcagggctgccaatgcgctgaaagctcttggcattggcaaaggtgacctggttgccctttatatgccaatggtcccagaagcggccattgccatgttggcttgcgcccgtatcggagccccacattctgttgtctttggtggcttttccgctgaagcccttagagatcgtttggtggatggtgaagccaaagccgtgatcactgctgatggtggttttcgtaaggacaaggccgttgccttgaagccggcagtggatgctgcattagccgagggtgcctgccccagcgtgacgtcggtgctggtggtgcaacgcacgaaagaaagcgtggtgatggaagctggtcgagatcagtggtggcacgagcttgtgtcagctcaatcgcaagagtgcgcggcggaacccatggcgagtgaagatcgcctgtttgtgctctacacctctggctccactggaaagccaaagggcgttgtgcacagcacggcaggctataacctctgggctcacctcactttcaagtggatcttcgacattcgcgacgaagacgtctactggtgcacagccgatgtgggctggatcacaggccatagctacattgtttatgggcctctttccaatggggcgacaactgtgatgtatgagggggcaccacgcccatccaagcctggagccttttgggagctaattcagaaacacgggatcacgattttttacactgcacctacggcaattcgggcattcatgaaaagtggtcgggctgtacccgatcaatacgacatgagcagtctgcgcttgctaggtaccgtcggagaacccatcaatcctgaggcctggatgtggtatcgcgaggtcatcggtggtgatcgttgcccaattgtcgacacttggtggcaaacggagacaggtggggtgatgatcagcccattacctggtgcgacgccaacaaagccagggtctgcgacccttcccctaccaggcattgaggctgaggtggttgatgcacaaggcgagccagtagccgttgacgaaggtggatatctgatcgtgcgacgtccttggccaggaatgatgcgcaccgtgcacggaaatcctcaacgctttagagagagctattgggaatacttacgccctaaggatggcagtttcatctatttcgcaggcgatggagctcgtcgagatggtgatggttatttctgggtgatgggcagggtggatgatgtgattaacgtttcaggccatcgtcttggcacgatggaaatcgaatcggcattggtgagtcacccggcagtgtctgaagcggcagtggttggaagacctgatgaccttaaaggtgaagcgatcgtggccttcgtcaccttggaaggaagcagggaagtgagtgatgctttgattcaggagcttcgtgttcatgtgggcaaggagatcggccccattgctcgacctgatgagatccgttgcagtgatgccttacccaagacccgcagcggcaaaattatgcggcgtatcttgcgggctttggccgctggagaggaggtcaagggtgataccagcaccctggaagatcgctccgtactggatcggcttagagcctga

SEQ ID NO: 914 - protein, 658 aa, Prochlorococcus marinus
MSPDPSGTIKSVLQEQRVFHPSAELASQSMVGSLEAYRRMAEQAKTDPDSFWGEAARTELEWFEPFDSVLDWSNPPFARWFEGGTTNLSFNCLDRHLNGPKANKTALIWEGEPGDVRRFTYRELHAEVCRAANALKALGIGKGDLVALYMPMVPEAAIAMLACARIGAPHSVVFGGFSAEALRDRLVDGEAKAVITADGGFRKDKAVALKPAVDAALAEGACPSVTSVLVVQRTKESVVMEAGRDQWWHELVSAQSQECAAEPMASEDRLFVLYTSGSTGKPKGVVHSTAGYNLWAHLTFKWIFDIRDEDVYWCTADVGWITGHSYIVYGPLSNGATTVMYEGAPRPSKPGAFWELIQKHGITIFYTAPTAIRAFMKSGRAVPDQYDMSSLRLLGTVGEPINPEAWMWYREVIGGDRCPIVDTWWQTETGGVMISPLPGATPTKPGSATLPLPGIEAEVVDAQGEPVAVDEGGYLIVRRPWPGMMRTVHGNPQRFRESYWEYLRPKDGSFIYFAGDGARRDGDGYFWVMGRVDDVINVSGHRLGTMEIESALVSHPAVSEAAVVGRPDDLKGEAIVAFVTLEGSREVSDALIQELRVHVGKEIGPIARPDEIRCSDALPKTRSGKIMRRILRALAAGEEVKGDTSTLEDRSVLDRLRA

SEQ ID NO: 915 - DNA, 1977 bp, Prochlorococcus marinus
  CDS (1)..(1977)
atgagctctgattcttcagcaaaaattgagacagtacttcaggaagaaagggtttttaatccttctgatgaaacaattaatcgagcaagtattaaaggttttgctcaatatcagaagatggttaattctgccaagtcggatcctcaaaagttttggggtgaggcagctttagagggattgcattggtttaagccttttaatactgttttggattggactgatcctccttttgcaagatggtttgatggaggtaagacaaatgtttcatataattgtttagatcgtcatgtaaagcaagggaaaggcgaaaaaattgcaattatttgggaaggtgagcctggagaagttaggaaaatcacctataagcaacttttagaacaagtatgtcgcacagctaatgcattaaaagaaattggtattaaaaaaggtgatttggttgcactgtatatgccaatggtccctgaggctgctgtggctatgcttgcttgcgccagaataggggctcctcattctgtagtttttggaggtttctcttcagaagctttacgagaccgaataaatgatggccaagcaaaagcaattattactgcagatggtggttttcgtaaagataaaataatctccttaaaaaatgctgttgattctgctttgtcggggaatagttgtccaagcgttgaatctgttttagtagtaaaaagaacttctgaaagtatttcctttagtcctggtagagattattggtggcatgagttagtacctgctcaatcaatagattgccctgctgaagaaatggatagcgaggatagactttttgttctttatacgtcaggttccacaggaaagccaaaaggtgttgttcatactacggcaggttataacttgtgggcccatatgacttttcagtggatttttgatgttcgtgaagaggaaatttattggtgcacagctgatgttggatggattaccgggcatagctacatcgtttatggtccattgtctaatggttcaacaactgtcatgtatgaaggcgtaccacgcccttccaacccaggagcattttgggatcttatagaacgtcataagatcaatattttttatactgcgccaacagccattagagcttttatgaaatctggtagggatatcccagataaatataatttgaaaagtttgagattactaggaacagttggcgaacctattaatccagaagcttggatttggtatagagatgttataggaggcaattcctgtccaattgttgatacttggtggcagacagagactggcggtgtgatgataagtcctttgcctggcgcaattcctactaagcctggctcagcaactctccctttgcccggtatagaggctgaaatagttaatgctgaaggcaaatctgtagatgttaatcaaggtgggtatttagttatcaaacatccttggcctggaatgatgagaacggttcatggaaaccctcaaagatttcgtgaaagttattgggagtatttgcctccaattaatggaagccttgtttattttgccggtgatggtgctagacgagataaggatggctatttttggatcatgggaagggttgatgatgtaattaatgtatctggacaccgtttaggaactatggaaatagagtctgctcttgtaagccataattcagttgctgaagcagcagttgtaggaaaaccagatgatattaaaggagaagcaattgttgcgttcgtgactttggagtcaggagcaaatcacaacgaaaagcttttaactgatttaaaagtacatgtaagtacggaaataggagctattgctaggccggatgaaattcgttttaccaattctttaccaaaaacaaggagtggaaaaattatgcggcgattacttagagcattagcagcaggtgaggaagttaagggagacacaagtacattagaagataggaatgttttagatgaacttaggaagtga

SEQ ID NO: 916 - protein, 658 aa, Prochlorococcus marinus
MSSDSSAKIETVLQEERVFNPSDETINRASIKGFAQYQKMVNSAKSDPQKFWGEAALEGLHWFKPFNTVLDWTDPPFARWFDGGKTNVSYNCLDRHVKQGKGEKIAIIWEGEPGEVRKITYKQLLEQVCRTANALKEIGIKKGDLVALYMPMVPEAAVAMLACARIGAPHSVVFGGFSSEALRDRINDGQAKAIITADGGFRKDKIISLKNAVDSALSGNSCPSVESVLVVKRTSESISFSPGRDYWWHELVPAQSIDCPAEEMDSEDRLFVLYTSGSTGKPKGVVHTTAGYNLWAHMTFQWIFDVREEEIYWCTADVGWITGHSYIVYGPLSNGSTTVMYEGVPRPSNPGAFWDLIERHKINIFYTAPTAIRAFMKSGRDIPDKYNLKSLRLLGTVGEPINPEAWIWYRDVIGGNSCPIVDTWWQTETGGVMISPLPGAIPTKPGSATLPLPGIEAEIVNAEGKSVDVNQGGYLVIKHPWPGMMRTVHGNPQRFRESYWEYLPPINGSLVYFAGDGARRDKDGYFWIMGRVDDVINVSGHRLGTMEIESALVSHNSVAEAAVVGKPDDIKGEAIVAFVTLESGANHNEKLLTDLKVHVSTEIGAIARPDEIRFTNSLPKTRSGKIMRRLLRALAAGEEVKGDTSTLEDRNVLDELRK

SEQ ID NO: 917 - DNA, 1902 bp, Helicobacter hepaticus
  CDS (1)..(1902)
atgcccacatatcaagaaatttatcaacaatccattgagaatccagaaattttttgggcagaagctgctaaaaaagtgcattggtatcacgaatgggataaggtgcttgatgttgtcaatgaccattatcgttggtttgttggaggttgtatgaatacttgctacaatgctcttgacttgcacatagaaaatggcagaggagagcaagtagcactctattatgattcgcctgtaactgatacaaaaaaatcttatacttataaagaattgcgcaaacgcgtagccaaaactgctggaatacttgtgaataaaggtgtagttaagggcgatagagtgcttatttatatgcctatgattccagaggctgttattgctatgcttgcgtgtgcaaggattggtgctattcatagtgttgtatttggcggatttgcttcacacgagcttgcttcgcgtattgaagatgctaaaccacgagtgattataagcgcttcgtgtggcatagaaattagccgagtagtcaaatataaacctattcttgatgaggctattaaatcttcaaatcataaacccaccacttgtcttatttggcaacgcccacaagagagagcaaatatgctcccttggcgtgatgtagattgggagagtgaagaagagaaaactgaaggcgtagaatgtgttccgcttgatgcaactgaccctttatatgtgctttatacttcaggcacaacaggtaagccaaaaggtgttattcgtggcaatggaggacattctgtggctatgaaatggtcaatggataatatttataatgccaaaccaggcgatgtattttgggctgcaagtgatgtaggctgggtagttggacatagctatattgtatatgcaccgctaatgaatggttgcacaacaatcctttatgaaggaaaacctgtcaaaacccctaatcctggtgcattttggcgtgttgtccaagaatataaggttaatattctattctctgcacctactgcatttagggctattaaaaaagaagatcccaaaggcgaatggcttaaaaaatatgatctctcttcgcttaaagcagtgtttgttgctggagaacgttgcgatacagatacgctcaaatggattgaaaaaattaccaaaaaacctgtgattgaccattggtggcagacagaaaccggctgggcaatagcagctaatcctttaggtttagaaccacttcctatcaaagcaggttctcctactaagcctatgcccggattcaatcttaaggtgcttgatgaagagggtaaggaatgtaagaggggaaaattagggaatcttgttatcaagcttccattacctcctgcgtgtctttgcggtatttggggtgatgatgcacgatataaacgttcttacctcaatcactatccgggctattatcttacaggtgatagcgggtatattgacaaagacggctatgtgtttgtaatgggacgaatggacggagtaatcaatgttgcagggcatcgtctctccacgggtggtatggaagaagccatttcaaaacatccagatattgctgaatgtgcagttataggtgttaataatgaactcaaaggggagattccattagcctttgttgtgcttaaagacggacttgaacgtgatacacaaagtttatgcgagggtgttgttcaactcgtgcgagaggaaattggtgcagtagcgtcattgcatattgtagctgttgtggcaagacttcctaaaacacgaagtggtaaaatcttgcgtggcacaatgcgtgatattgctgatggcaatgaatggaagatgccctcaactattgaagattcaagcgttatgccagagatagaaaaaacacttgccacgcttggctatccaatcaaaacaaaggagtaa

SEQ ID NO: 918 - protein, 633 aa, Helicobacter hepaticus
MPTYQEIYQQSIENPEIFWAEAAKKVHWYHEWDKVLDVVNDHYRWFVGGCMNTCYNALDLHIENGRGEQVALYYDSPVTDTKKSYTYKELRKRVAKTAGILVNKGVVKGDRVLIYMPMIPEAVIAMLACARIGAIHSVVFGGFASHELASRIEDAKPRVIISASCGIEISRVVKYKPILDEAIKSSNHKPTTCLIWQRPQERANMLPWRDVDWESEEEKTEGVECVPLDATDPLYVLYTSGTTGKPKGVIRGNGGHSVAMKWSMDNIYNAKPGDVFWAASDVGWVVGHSYIVYAPLMNGCTTILYEGKPVKTPNPGAFWRVVQEYKVNILFSAPTAFRAIKKEDPKGEWLKKYDLSSLKAVFVAGERCDTDTLKWIEKITKKPVIDHWWQTETGWAIAANPLGLEPLPIKAGSPTKPMPGFNLKVLDEEGKECKRGKLGNLVIKLPLPPACLCGIWGDDARYKRSYLNHYPGYYLTGDSGYIDKDGYVFVMGRMDGVINVAGHRLSTGGMEEAISKHPDIAECAVIGVNNELKGEIPLAFVVLKDGLERDTQSLCEGVVQLVREEIGAVASLHIVAVVARLPKTRSGKILRGTMRDIADGNEWKMPSTIEDSSVMPEIEKTLATLGYPIKTKE

SEQ ID NO: 919 - DNA, 1890 bp, Bordetella parapertussis
  CDS (1)..(1890)
atgaaaaaaacccgggatttccattaccgttcgatacatgatcgcgatgggttctggcgcgaggaggcagggcggattcattgggagacgccgttcgagcaggtgatcgattattcccggccgccgtttgcgcggtggttcgtggggggcaggaccaacctctgttacaacgccgtcgaccgctggctgccgcagcaggccgaccagccggcgctgatctgggtatcgaccgaagtcgaccaggagcgcgtctacacccgccagcagttgcacgacgaggtcaacgccgtggcggctatgctgcgcgagcagggggtggagcggggcgaccgggtgctgctgtacatgcccatggtgcccgaggcggtgttcgccatgctggcgtgcgcgcgcatcggcgccatccattcggtggtgttcggcggcttcgcctcggtcaacctggcccagcgcatcgacgacgccgcgcccaaggtcgtcgtcagcaccgacggcggctcgcgcgcgggcaaggtggtggcgtacaagcccctgctggaccgcgcgctggcgctgtgccagaagccgcccggcgcggtgatcatcctcgaccgggggctcacgccatgcgagcggcaggccggccgcgacctggactacgctgagctgcgcgcccgccacgagggctcgcgcgtgccggtgcaatggctggagtcgtccgagccgagctacatcctctacacctcgggcaccaccggccgtcccaagggcgtgcagcgcgacaccggcggctatgcggtggcgctggcctcgtcgatggagtacctgttcgacggcaagcctggcgatacctatttctgcaccagcgacatcggctgggtggtgggccactcgtacatcgtctatggtccgctgatcggcggccagacgaccatcctgtacgaaggcacgccggtgcggccggacggcgccatcctgtggcagctggtcgagcgcttcggggtcaacaccctgttttccgcgccgaccgcggtgcgggtgctcaagcgccaggacgccgcgctgctgcgccggcacgacctgtccacgctgcgcgccgtatacctggccggcgagcccctggacgagccgaccgcgcagtggatttcccaggggctgggcaagcccatcatcgacaattactggcagaccgagtccggctggccgatcctgtcggcgcagcctggcgtcgagcgcgtgccgacccgcttcggcagcccctcgtttccggtctacgggttcgacgcgcgcatcgccagcgaaagcaccggcgaggacctggggcccgacgagaaaggcgtggtggccattgtgccgcccctgccgcccggtgccatgtccaccatctggggcgacgacgaacgcttcgtgcagacgtacttcacctcgatttccggccgccaggtgtattccacgttcgactgggggctggtcgacccggacggctactggttcatcctggggcgcaccgacgatgtcatcaacgtcgcgggccaccggctgggcacgcgcgagatcgaagagtcgatcaacagccatgcgggcgtggccgagtgcgccgtggtcggcgtggccgatacgttgaaggggcaggtggcgatggccttcgcggtgctcaaggatccggccggcgcggaaacgcgtgacggggcgctggcgctggaaggcgatatcatgcgcgtggtggaagaccagctgggcgcggtggcgcggccggcgcgcatccgtttcgtgggtgccttgcccaagacgcgttccggcaaggtgctgcgccgcgcgatcgtggccgtctgcgagggccgcgacccgggtgatctgaccaccatcgaagatccttccgccctagaacagatcaaggaatccctgcaatga

SEQ ID NO: 920 - protein, 629 aa, Bordetella parapertussis
MKKTRDFHYRSIHDRDGFWREEAGRIHWETPFEQVIDYSRPPFARWFVGGRTNLCYNAVDRWLPQQADQPALIWVSTEVDQERVYTRQQLHDEVNAVAAMLREQGVERGDRVLLYMPMVPEAVFAMLACARIGAIHSVVFGGFASVNLAQRIDDAAPKVVVSTDGGSRAGKVVAYKPLLDRALALCQKPPGAVIILDRGLTPCERQAGRDLDYAELRARHEGSRVPVQWLESSEPSYILYTSGTTGRPKGVQRDTGGYAVALASSMEYLFDGKPGDTYFCTSDIGWVVGHSYIVYGPLIGGQTTILYEGTPVRPDGAILWQLVERFGVNTLFSAPTAVRVLKRQDAALLRRHDLSTLRAVYLAGEPLDEPTAQWISQGLGKPIIDNYWQTESGWPILSAQPGVERVPTRFGSPSFPVYGFDARIASESTGEDLGPDEKGVVAIVPPLPPGAMSTIWGDDERFVQTYFTSISGRQVYSTFDWGLVDPDGYWFILGRTDDVINVAGHRLGTREIEESINSHAGVAECAVVGVADTLKGQVAMAFAVLKDPAGAETRDGALALEGDIMRVVEDQLGAVARPARIRFVGALPKTRSGKVLRRAIVAVCEGRDPGDLTTIEDPSALEQIKESLQ

SEQ ID NO: 921 - DNA, 2046 bp, Bordetella parapertussis
  CDS (1)..(2046)
atggcgatacggttgcgtgtcggcaagaaaaacggcagcaccagaatcattcatcggagacacaccatgtcgaatgccattcaatccgtcctggtcgagaatcgcgtattcccgccgccggcgagcgccgtgcaaggcgccgcgatttcgggcatggacgcctattgggccctgtgcgaggaagcggacaaggatttcaacgggttctggtcgcgcctggcgcgcgagaacctgcaatggagcaagcccttcacccaggtcctggacgagtccgaggcgcctttctatcggtggttcggcgatggcgaactcaacgtatcggccaactgcctggacgtgcacctgcataacggcaacgccgacaagaccgccatcatcttcgaatccgacgacggcaaggtcgacaagatcagctaccgcgaactgctggcgcgcgtgtgccgcttcgccaatggcctgaaggccatggggtacaagaagggcgaccgcgccatcatctacatgcccatgtcgatcgaggcggtggtggccatgcaggcctgcgcccgcctgggcgtgacccactcggtggtgttcggcggcttctcggccaagagcctgcaggagcgtatcgtcgacgtcggcgccacggtggtgatcaccgccgacgagcaggtgcgcggcggcaagaccatcccgctcaagcccgccgtcgaggaagcgttcgccatgggcggttgcgaggccgtttccaaggtggtggtgtatcgccgcaccggcggcaagatcgcctggcaggaagggcgcgatgtctggatgcacgacgtggaagccggccaggccgatacctgcgagccgcaggcggtcaatgccgagcatccgttgttcatcctgtacacgtcgggctccaccggcaagcccaagggcgtgcagcatgcctccgcgggctatctgctgtgggcgctgctgaccatgaagtggaccttcgacgcccgcgccgatgatgtgtactggtgcacggccgacgtgggctgggtgaccggccatacctatatcacctacggcccgctggccgccggcgtgacgcaggtggtgttcgagggcgtgcccacgttccccaatgccggacgcttctgggacatgattgcgcgccacaaggtgtcggtgttctataccgcgccgaccgcgatccgctcgctcatcaaggccgccgaggccaaccaggaggtgcacccgcgccaatacgacctggacagcctgcgcatcatcggttcggtgggcgagcccatcaaccccgaggcctggatctggtaccacaagaacgtcggccgcgagcgctgcccggtcgtcgacacctggtggcagaccgagaccggcgggcacatgctcacgccgctgccgggcgccacgtcgctcaagccgggatcgtgcacgctgccgctgccgggcattgtcgcggccatcgtcgacgagaccggcggcgatgtcgcgcagggcaatggcggcttcctggtcatcaagcgtccctggccggccatgatccgcaacatctggggcgacccggagcggttcaagaagagctacttcccgcccgagctgcgcggctactacctggccggcgacggcgcccagcgcgacgccgatggctatttctggatcatggggcgcatcgacgacgtgctcaacgtgtccggccaccgcctcggcaccatggaggtggagtcggcgctggtggcgcacgaaatggtggccgaggccgccgtggtgggccgtcccgacgacaccaccggcgaagccgtggtggccttcgtggtgctcaagcgcagccgtcccgagggcgacgaagcccaggccatcgccaggcaactgcgcgactgggtgggcaaggaaatcggccccatcgccaagcccaaggacatccgtttcggcgacaacctgcccaagacccgttcgggcaagatcatgcgccgcctgctgcgcgtggtcgccaagggcgaggaaatcacccaggacgtgtccaccctggagaaccccgccatcctcgagcaactggccaagccgttgtga

SEQ ID NO: 922 - protein, 681 aa, Bordetella parapertussis
MAIRLRVGKKNGSTRIIHRRHTMSNAIQSVLVENRVFPPPASAVQGAAISGMDAYWALCEEADKDFNGFWSRLARENLQWSKPFTQVLDESEAPFYRWFGDGELNVSANCLDVHLHNGNADKTAIIFESDDGKVDKISYRELLARVCRFANGLKAMGYKKGDRAIIYMPMSIEAVVAMQACARLGVTHSVVFGGFSAKSLQERIVDVGATVVITADEQVRGGKTIPLKPAVEEAFAMGGCEAVSKVVVYRRTGGKIAWQEGRDVWMHDVEAGQADTCEPQAVNAEHPLFILYTSGSTGKPKGVQHASAGYLLWALLTMKWTFDARADDVYWCTADVGWVTGHTYITYGPLAAGVTQVVFEGVPTFPNAGRFWDMIARHKVSVFYTAPTAIRSLIKAAEANQEVHPRQYDLDSLRIIGSVGEPINPEAWIWYHKNVGRERCPVVDTWWQTETGGHMLTPLPGATSLKPGSCTLPLPGIVAAIVDETGGDVAQGNGGFLVIKRPWPAMIRNIWGDPERFKKSYFPPELRGYYLAGDGAQRDADGYFWIMGRIDDVLNVSGHRLGTMEVESALVAHEMVAEAAVVGRPDDTTGEAVVAFVVLKRSRPEGDEAQAIARQLRDWVGKEIGPIAKPKDIRFGDNLPKTRSGKIMRRLLRVVAKGEEITQDVSTLENPAILEQLAKPL

SEQ ID NO: 923 - DNA, 1950 bp, Bordetella bronchiseptica
  CDS (1)..(1950)
atgatgcataccaacgattcctcccatgtctggcagccgggccagcgcgaactgcaggattccggcatcgcgcacctgatacgcaccctgggcgccgctacgtacgacgacctcatgcgggtgtcggtggaggagcccgagcgctactggaacaccgtgatgcgcgagtgcgcgatcgcgtgggacgagccgcccacgggctatgtggacctggcgcgcgggccgcagtttcccagctggtttcccggcggcaggctgaactgggtcaataccatctacgcctgggccaggaacccggccaccgcggggcagaccgccgtgatcggcgagcgcgaggacggcagcgtcggttcgctgacctaccaggaactcgagacccgcgtgcgtgaattcgcggccggcctggcgcggcacggcgccaggccgggcgaccgcatcggcctgctgatggaaaacggcgtcgatgccacggtgtccctgcttgccatcgtgcacctgggcgccctggtcgtgccgctgttcagcggtttcggcgtcgatgcgatcgtggcccgcctgtcggccgccgaggcgcgcatggtgatcgcgtccaccggcttccagcgccgtaccaagcgcgtggacgtgcagggcgcgctgcgcgacgcatggcgccagctgccgttgctcgagaacgtggtctggaagcgcgccgacggcgaaagcgcccaggaccagcgggacctggactggcagcagatcgccacggccgcgcagggccagggccaggatcccgtgtcggtgacgcccgatacgcccttcatggtgatctacacctcgggcaccaccggcaagcccaagggcgtcgtgcacacgcacggcagcttcccgatcaagatcgcgcacgattcgctggtccatttcgacgtccatcccggcgacgtgtattgctggccggccgacatgggctggatcgccggaacgctggtgctcggctgcgcattgctgcgcggcgccacgctggtgtgctatgacggcgcgccggactatcccgactggtcgcgcatgtcccgggtggtggagcgccacaaggtgacgcacttcggctcggcgcccacgctgatccgcggcatggccagcaacgagacgctggcgctggcgggcgatcgcgccacggtgcgcgtgctgatcacggcgggcgagggtatcgcgcccgagcatttcatctggttccagcagcgcttcggcgacggctcggcgccgctggtcaattacaccggaggcaccgaggtgtcgggcgcgctgctctcgagcgtgccgatccgcccgatcccgcccagcggcttcaataccatttcgccgggcgtggccgtcgacgtcgtcgatcccgacggccacagcgtgaccggcgaggtcggcgagctggcggtgcgcgcgcctttcgtgggcatgacccagtcgttctggcacgacgacgcgcgctatctcgaaacctactggcaggccatccccggcatctgggtgcatggcgacctggccctgcgcacccccgaaggctatttcttcatgatggggcgctcggacgacacgctgaaagtcgcgggcaagcgcctgggtccggccgaggtggaggaggtcgtcctggaactgcatgacgtggccgaggcggccgccatcggggtggccgacgccgccaagggccagaagctggtggtcttcgtcgtgcccaggcccggcgtcagcgtcccggacgacgcgctgcaggccgccgtgatcggccacgtggacaagcgcctgggccgtccgttccggcccggccgggtgcacgtggtgagccagttgcccaagacgcgcagttccaagatcatgcggcgcgtcatccgcagcgtgtactgcggacagccgccgggcgatctttcttcgttggacaacccggccgcgctcgacgaagtgcgtgcggccgcggcctga

SEQ ID NO: 924 - protein, 649 aa, Bordetella bronchiseptica
MMHTNDSSHVWQPGQRELQDSGIAHLIRTLGAATYDDLMRVSVEEPERYWNTVMRECAIAWDEPPTGYVDLARGPQFPSWFPGGRLNWVNTIYAWARNPATAGQTAVIGEREDGSVGSLTYQELETRVREFAAGLARHGARPGDRIGLLMENGVDATVSLLAIVHLGALVVPLFSGFGVDAIVARLSAAEARMVIASTGFQRRTKRVDVQGALRDAWRQLPLLENVVWKRADGESAQDQRDLDWQQIATAAQGQGQDPVSVTPDTPFMVIYTSGTTGKPKGVVHTHGSFPIKIAHDSLVHFDVHPGDVYCWPADMGWIAGTLVLGCALLRGATLVCYDGAPDYPDWSRMSRVVERHKVTHFGSAPTLIRGMASNETLALAGDRATVRVLITAGEGIAPEHFIWFQQRFGDGSAPLVNYTGGTEVSGALLSSVPIRPIPPSGFNTISPGVAVDVVDPDGHSVTGEVGELAVRAPFVGMTQSFWHDDARYLETYWQAIPGIWVHGDLALRTPEGYFFMMGRSDDTLKVAGKRLGPAEVEEVVLELHDVAEAAAIGVADAAKGQKLVVFVVPRPGVSVPDDALQAAVIGHVDKRLGRPFRPGRVHVVSQLPKTRSSKIMRRVIRSVYCGQPPGDLSSLDNPAALDEVRAAAA

SEQ ID NO: 925 - DNA, 3626 bp, Homo sapiens
  CDS (6)..(2069)
cctggatggcggcgcgcaccctgggccgcggcgtcgggaggctgctgggcagcctgcgagggctctcggggcagcccgcgcggccgccgtgcggggtgagcgcgccgcgcagggcggcctcgggaccctcgggcagcgctcccgcagttgcagcagcagcagcacagccaggctcgtatcccgcgctgagtgcacaggcagcccgggagccggccgccttctgggggcctctggcgcgggacactctcgtgtgggacaccccctaccacaccgtctgggactgcgacttcagcactggcaagatcggctggttcctgggaggccagttaaatgtctctgtcaactgcttggaccagcatgttcggaagtcccccgagagcgttgctttgatctgggagcgcgatgagcctggaacggaagtgaggatcacctacagggaactactggagaccacgtgccgcctggccaacacgctgaagaggcatggagtccaccgtggggaccgtgttgccatctacatgcccgtgtccccattggctgtggcagcaatgctggcctgtgccaggatcggagctgtccacacagtcatctttgctggcttcagtgcggagtccttggctgggaggatcaatgatgccaagtgcaaggtggttatcaccttcaaccaaggactccggggtgggcgcgtggtggagctgaagaaaatagtggatgaggctgtgaagcactgccccaccgtgcagcatgtcctggtggctcacaggacagacaacaaggtccacatgggggatctggacgtcccgctggagcaggaaatggccaaggaggaccctgtttgcgccccagagagcatgggcagtgaggacatgctcttcatgctgtacacctcagggagcaccggaatgcccaagggcatcgtccatacccaggcaggctacctgctctatgccgccctgactcacaagcttgtgtttgaccaccagccaggtgacatctttggctgtgtggccgacatcggttggattacaggacacagctacgtggtgtatgggcctctctgcaatggtgccaccagcgtcctttttgagagcaccccagtttatcccaatgctggtcggtactgggagacagtagagaggttgaagatcaatcagttctatggcgccccaacggctgtccggctgttgctgaaatacggtgatgcctgggtgaagaagtatgatcgctcctccctgcggaccctggggtcagtgggagagcccatcaactgtgaggcctgggagtggcttcacagggtggtgggggacagcaggtgcacgctggtggacacctggtggcagacaggtggcatctgcatcgcaccacggccctcggaagaaggggcggaaatcctccctgccatggcgatgaggcccttctttggcatcgtccccgtcctcatggatgagaagggcagcgtcatggagggcagcaacgtctccggggccctgtgcatctcccaggcctggccgggcatggccaggaccatctatggcgaccaccagcgatttgtggacgcctacttcaaggcctacccaggctattacttcactggagacggggcttaccgaactgagggcggctattaccagatcacagggcggatggatgatgtcatcaacatcagtggccaccggctggggaccgcagagattgaggacgccatcgccgaccaccctgcagtaccagaaagtgctgtcattggctacccccacgacatcaaaggagaagctgcctttgccttcattgtggtgaaagatagtgcgggtgactcagatgtggtggtgcaggagctcaagtccatggtggccaccaagatcgccaaatatgctgtgcctgatgagatcctggtggtgaaacgtcttccaaaaaccaggtctgggaaggtcatgcggcggctcctgaggaagatcatcactagtgaggcccaggagctgggagacactaccaccttggaggaccccagcatcatcgcagagatcctgagtgtctaccagaagtgcaaggacaagcaggctgctgctaagtgagctggcaccttgtggggctcttgggatgggcgggcacccaagccctggcttgtccttcccagaaggtacccctgaggttggcgtcttcctacgtcccagaagcagcccccaccccacacatgacccacaccgccctcacgtgaagctgggctgagagccctttctcccatccattggaggtcccaggagtgtcacccatggagaggctatgcgacatggctagggctggttctgccatctgagtttggtttcctggaatgaaaaggcattgccatctccattcctctgccctcttgagccagcacaggaaggtgaggccctgggatagcgcgcctgctcagataacacagagctagttagctagtagcaaccgtgttttctccagatctgtctagatacaaaggtcagaaatcttatttttatacttttatattgtggaagaacagcatgcaacactcacatgtagtgtgtggatttacttgaacatgttctttttaacatgtagttatgaaaatctccttttttgcctctactggtgaggaaacatgaggatcagaggccacatttttaattattgttagtgtatttggaagtctgaattggagatgttcgtacctctgtctaaacagttcccttgagaacttccaagcctccggcatcttttcctggtgagtgtttctcctgtgcttggttgtgtataatggagctaactcctaagcggtggggtgaatgtggccgccttagttctgaagctactcaagttatgttctgtttcttcaagctgtgatccagaaagatttttgtgcccccagatgcctcttgataggagaggcaacatactccaaatagttgggttcttcagggaagctattagaaactcaggtgacttgttagagcactaacttggtcagagccaaatcctggcaaacgctgcctgaccttcactctgtggttggggcagtgagaaccactgaggtccaatgatgagacttggaggtctggatccagtctctctttgttttaatgtgacttaggtgctgtcgacattagcaagataatggaaatcacgacgccagtgggtgcttacctccctgctaggcatgcaggggctggcggttggcaggggaaggaggcacagtgagccgggtcccttaggggagggagagtttgtcctctttgccccacagtctacccttcagggccttgtggcagtgccagtgttcggggggtgtctgggccactgagtacccactcggtcgtggttgtgctggcctcttgggtgagtgaacctgtgaagcccaggaggtggtgttggctgcagggtacacaaatactgagtggtggtcttttgttacaggcttagcaacaaagctgtgccctgggcatggggggctgtagtgtagctacagttgtgcgtttgtgaaatggcttagctttccatgttgctgagaggaacctggacatggtcccgggcatctgaatgatctgtaggggagggagttcaaataaagctttattttgttcattttcaaaaaaaagaaaaaaaaaaaaaaaaca

SEQ ID NO: 926 - protein, 687 aa, Homo sapiens [sequence omitted]

SEQ ID NO: 927 - DNA, 1941 bp, Bacillus cereus
  CDS (1)..(1941)
atgaaacaagcagtttggtttccaacagaagagtacaaggaaaaaacacgtttatatggttggatgaaatcattgggatatgaagattatgaaactttttataataaatctatcgaggaaacagcttggttttggggagaggcagaaaaggcagtaggctatcaatggatgaaaccttatacagacgtgttagatttagaaaatggtacaccgtttgcacagtggtataatggcggaacatgtaacgttgtagaatcagctttatcccgctggcttgcggatgaagagacgagaatacagccagcacttcagtacgaaggggaaaatggaacttcaaaatcatttacatatgaagagcttgacaactgggtaagtcgtgttgcaaatggtttgaaacacgcgggtattgagaaaggtgaccgtgtaacaatttatatgccgatgattccagaaacagttgttgcgatgctagctgtaatgaaaatcggagcaattatttcaccaatattctcaggctttgcgtctgatgcagtcatgacacgtgtgcaagcggcaggttcaaaaatgattattaccgcagatggattttcacgccgcggtaaaattgtttctttaaaagatgaagtagataaagcttgtgaacattgcccaactgttgaaaaagttgttatcgttcgtcatgcaggaaatgattttacaccacataactatgacttttcgtggagtacgctagaaaaagaaaaaccattcatacatgccgaggaaatgcaaagtgatgatccattaatgctcatttatacatcaggaacgactggtaagccgaaaggaacagtacacacgcatgcaggatttcctttgaaagcagcttttgatgcaggatttggaatgaatattaaacaaggtgatcgtgtattatgggtaactgatatgggctggatgatggggccgtttctattattcggttcactcattaatggagcaacgatggttatgtacgaaggtgttccagacttcccagaagcagaccggttatgggagacagttgataaatatgagattactcatctaggtatttcgccaacgttaatccgagcattgatggcaaaaggtgatgagtatgtcaataaacattctttaaagagtttggaagtattcgcatcaacaggagaaccttggaatcctgatccatggatgtggctgtttgaaacggttggaaaaggaaatgtcccaatctgtaactactcaggtggaactgaaatctctggtgggattttcggtaatgttcttattaagccaatagcaccgattagttttaacgcatctttaccaggaatggcagctgtcgtactggatgatcaaggtaaaccaattcgagatgaagtcggagaattatgcttagagaaaccttgggtaggtatgacgaaaagcttctgggaagatgatgaacgttacgtaaacacatattggtcgcgttttgaaaataaatgggtccacggtgactgggtcatttacgatggtgaacaatatatcatcacagggcgttcagacgatacgttaaatattgcaggtaaacgtattggacctgctgaatatgaatctattcttgtgaaacataacgatgtaatcgaagctgctgcaattggtgtacctgacgaagtaaaaggtgaagtttgtcattgttttgtagtgttaagagatcatgtaacattcacaggagaattaaagaaagaattaatgagtttagtaaactctcatattggaaaagcgttgtgtcctaaagacatccacgttgtagaagatttaccgaaaacacgtaattctaaagtaatgcgccgtgttattaaagcagcttacttaggaaaagaattaggtgatttatcatcgcttgtaaatcctgaagtagttccgtttattcaggggttacagtctagtaaattataa

SEQ ID NO: 928 - protein, 646 aa, Bacillus cereus
MKQAVWFPTEEYKEKTRLYGWMKSLGYEDYETFYNKSIEETAWFWGEAEKAVGYQWMKPYTDVLDLENGTPFAQWYNGGTCNVVESALSRWLADEETRIQPALQYEGENGTSKSFTYEELDNWVSRVANGLKHAGIEKGDRVTIYMPMIPETVVAMLAVMKIGAIISPIFSGFASDAVMTRVQAAGSKMIITADGFSRRGKIVSLKDEVDKACEHCPTVEKVVIVRHAGNDFTPHNYDFSWSTLEKEKPFIHAEEMQSDDPLMLIYTSGTTGKPKGTVHTHAGFPLKAAFDAGFGMNIKQGDRVLWVTDMGWMMGPFLLFGSLINGATMVMYEGVPDFPEADRLWETVDKYEITHLGISPTLIRALMAKGDEYVNKHSLKSLEVFASTGEPWNPDPWMWLFETVGKGNVPICNYSGGTEISGGIFGNVLIKPIAPISFNASLPGMAAVVLDDQGKPIRDEVGELCLEKPWVGMTKSFWEDDERYVNTYWSRFENKWVHGDWVIYDGEQYIITGRSDDTLNIAGKRIGPAEYESILVKHNDVIEAAAIGVPDEVKGEVCHCFVVLRDHVTFTGELKKELMSLVNSHIGKALCPKDIHVVEDLPKTRNSKVMRRVIKAAYLGKELGDLSSLVNPEVVPFIQGLQSSKL

SEQ ID NO: 929 - DNA, 1968 bp, Streptomyces avermitilis
  CDS (1)..(1968)
atgaccccagcgaacccctcgccgctctggcgacccgacgaggaacgcatcgcccaggcacagatcaccaggttccagtcctgggcggccgaacaccacggagcacccgccgacggcggctacgcggcattgcaccgctggtccgtcgacgagctggacaccttctggaaagccgtcaccgaatggttcgacgtacggttttccaccccctacgcgcgcgtgctcggcgaccgctccatgcccggtgccgcatggttccccggagcgaccctgaactacgccgaacacgccctgcgcgccgccgacacgcgcgcggacgaaccggctctcctgcacgtcgacgagacccacgagccccgcccggtcacctggtccgaactgcgccgccaggtcggctccctggccgccgaactgcgctccctcggcgtacgccccggagaccgcgtcagcggctatctccccaacattccgcaggccgtggtcgccctcctcgccacggccgcggtgggcggcgtctggacgtcctgcgcccccgacttcggcgcccgcagcgtcctcgaccgcttccagcaggtcgagccggtcgtgctgttcacggtcgacggctaccggtacggaggcaaggagcacgaccgccgtgaaacggtcgccgagctgcgccgcgaactgcccaccctgcgtgccgtcgtccatatccccgtgctcggcaccgaggcccccgagggcgccctggagtggtccgccctgacctcctccgacgtggcgcccgagttcgagcaggtcccgttcgaccaccccctgtgggtcctgtactcctccggcacgaccggcctgccaaaggccatcgtccagtcccagggcggcatcctcgtcgagcacctcaagcagctcggcctgcactgcgacctcggccccgaggaccggttcttctggtacacgtccacgggctggatgatgtggaacttcctcgtctccggcctcctcaccggcaccacgatcgtcctgtacgacggcagcccgggctttccggacaccgccgcccagtggcgcatcgccgaacgcaccggcgcgaccctctacggcacctccgccgcgtacgtcatggcctgccgcaaggcgggcgtgcacccctcgcgcgacttcgacctcgcgcgcgtgcggtgcgtggcgacaaccggctcgccgctgccgccggacggcttcagctggctgcacgacgaggtccgcgccgacctctggatcgcctcggtcagcgggggcaccgacgtgtgctcctgcttcgcgggagccgttcccaccctgccggtgtacatcggcgaactccaggccccgggcctcggcaccgacctccagtcctgggacccgagcggcaagcccctggtcgacgaggtcggcgagctggtggtcaccaatccgatgccctccatgccgatccgcttctggaacgacccggacggcagccgctaccacggcagttacttcgacacgtatccgggagtgtggcgccacggcgactggatcaccgtcacctcccgcggctccgtggtcatccacggccgctccgactccacgctcaaccgccagggcgtccgcatgggctcggccgacatctacgaagcggtcgaacgccttccggagatcaaggaatccctcgtcatcggcgtcgaacagcccgacggcggctactggatgcctctcttcgtccacctcgccccgggagccaccctcgacgacgccctcctgggccgcatcaagcagaccatccgcgaacagctttcgccccggcacgtccccgacgagatcatcgaggtcccggccatcccgcacacgctcaccggcaaacgcatcgaggtcccggtcaaacgcctgctccagggcaccccgctggagaaggcggtcaatccgggctccatcgacaacctcgacctgctgggcttctacgaggacctggcccgcaagcgcgcctga

SEQ ID NO: 930 - protein, 655 aa, Streptomyces avermitilis
MTPANPSPLWRPDEERIAQAQITRFQSWAAEHHGAPADGGYAALHRWSVDELDTFWKAVTEWFDVRFSTPYARVLGDRSMPGAAWFPGATLNYAEHALRAADTRADEPALLHVDETHEPRPVTWSELRRQVGSLAAELRSLGVRPGDRVSGYLPNIPQAVVALLATAAVGGVWTSCAPDFGARSVLDRFQQVEPVVLFTVDGYRYGGKEHDRRETVAELRRELPTLRAVVHIPVLGTEAPEGALEWSALTSSDVAPEFEQVPFDHPLWVLYSSGTTGLPKAIVQSQGGILVEHLKQLGLHCDLGPEDRFFWYTSTGWMMWNFLVSGLLTGTTIVLYDGSPGFPDTAAQWRIAERTGATLYGTSAAYVMACRKAGVHPSRDFDLARVRCVATTGSPLPPDGFSWLHDEVRADLWIASVSGGTDVCSCFAGAVPTLPVYIGELQAPGLGTDLQSWDPSGKPLVDEVGELVVTNPMPSMPIRFWNDPDGSRYHGSYFDTYPGVWRHGDWITVTSRGSVVIHGRSDSTLNRQGVRMGSADIYEAVERLPEIKESLVIGVEQPDGGYWMPLFVHLAPGATLDDALLGRIKQTIREQLSPRHVPDEIIEVPAIPHTLTGKRIEVPVKRLLQGTPLEKAVNPGSIDNLDLLGFYEDLARKRA

SEQ ID NO: 931 - DNA, 2019 bp, Streptomyces avermitilis
  CDS (1)..(2019)
atgaccaccccgcaccccgcgccgtatccggaacccttcttcactcccgacccgaagtcggccgcccacagccgtatcgcggacttcgcccgatgggcggcccggcaccagggcgccgaagggatccaggaccccacggactaccgagccctgtaccagtggtccgtcaccgacctcgaagggttctgggccgcggtgtgggagtacttcgacatcgacgcgacgactgagtacgagggggtgctggccgaggagaccatgcccggcgcccgctggttccccggcgccaccctcaactacgtccatcacgcgctacgcaacctgcagccggacgctcccgcgatcaccgccctggacgagaccggagccggctatgagatcacgggccgggagctgcgcgcccgggtcgcctccgtcgctgccagcctgcgcgacctgggcgtcgcacagggcgaccgggtggtgggctatctgcccaacaccccccacgccgtcatcgccttcctcgccaccgcaagcctgggcgcggtgtggtcggtgtgcggccaggactacgtacccaaggccgccgccgaccgcttcgcccagctcgaacccacggtgctcatcaccgctgacggctacctcttcaacggcaccacacacgaccgccgcgccgcctcgctcgaactcgccgtcgccctgccgacgctgaaggccacggtgctcgtggatcacgtgggccttgcctggcccgagggcggggacttggggctgacagttccctgggaggacgcggccacccgcgccgagtacctcaccatcgccccggtgccgttcgaccaccctctctgggtcgtcttctcctccggcaccaccggactgcccaagggcatcgtccacggccacggcggggtcctgctcgaacacctcaagatgctcggcctgcacaccgatctgggcatcggggaccgcctgctgtggtacaccaccacccactggatgatgtggaacctggtcgtctccaccctgctgaccggtgccaccacctgcacctacgacggcagcccggcaccgcaggcgcgtccggacgtcctgtgggagctggcggcccgtcacaaggtcaccgtcttcggcaccagtcctcagtacctgctggccatgtccaagctgggcatcgcaccctccgtgtacgacctgtcggccatccgcgtcgtcggctgcaccggctccgctctgcccgcctccgcctacccctgggtccgcgaccacgtgggcgcaggcgtccagctggcctccaccagcggcggcacggacatcgtctccggcttcgccggcagtgccgccacgacccccgtctgggcgggggagctgtccgcccccggcctgggcgtggcgctggccgcctacgacgaggaaggcctccccgtcacggaccgggtcggtgaactggtcgtcacccgccccatgccgtccatgccgctgtacttctggaacgaccccgacggcagccgctaccgcgacgcctacttcggcgcctaccccggtgtgtggcggcacggtgactggatcacgctcacctcgcacggctcggtgatcgtccacggccgctccgacgccaccctcaaccgcaacggcgtgcgcctgggcagcgccgacatccacgacgtcgtcgaacgcctccccgagatcaccgaggccctcgtcatcggcgcggaggaacccgacggcggctactggatgccgctcttcgtggtcctcgccgacggggtcggcctggacgactccctgcgcgcgaagatccgcgacgcgatccgcgccggcgcctcaccccgccacgtccccgacgagatcctcgccgtaccggccctcccgcacacgaagaccggcaagaaactcgaggttcccgtcaagcgcctgctccagggcgctcccgccgagcaggtcctgaacccctcggcggtcgacaaccccgacctgatcgcctacttcgcccgcctgggcgcggagcggaacaagcggtcagcacaccacacatga

SEQ ID NO: 932 - protein, 672 aa, Streptomyces avermitilis
MTTPHPAPYPEPFFTPDPKSAAHSRIADFARWAARHQGAEGIQDPTDYRALYQWSVTDLEGFWAAVWEYFDIDATTEYEGVLAEETMPGARWFPGATLNYVHHALRNLQPDAPAITALDETGAGYEITGRELRARVASVAASLRDLGVAQGDRVVGYLPNTPHAVIAFLATASLGAVWSVCGQDYVPKAAADRFAQLEPTVLITADGYLFNGTTHDRRAASLELAVALPTLKATVLVDHVGLAWPEGGDLGLTVPWEDAATRAEYLTIAPVPFDHPLWVVFSSGTTGLPKGIVHGHGGVLLEHLKMLGLHTDLGIGDRLLWYTTTHWMMWNLVVSTLLTGATTCTYDGSPAPQARPDVLWELAARHKVTVFGTSPQYLLAMSKLGIAPSVYDLSAIRVVGCTGSALPASAYPWVRDHVGAGVQLASTSGGTDIVSGFAGSAATTPVWAGELSAPGLGVALAAYDEEGLPVTDRVGELVVTRPMPSMPLYFWNDPDGSRYRDAYFGAYPGVWRHGDWITLTSHGSVIVHGRSDATLNRNGVRLGSADIHDVVERLPEITEALVIGAEEPDGGYWMPLFVVLADGVGLDDSLRAKIRDAIRAGASPRHVPDEILAVPALPHTKTGKKLEVPVKRLLQGAPAEQVLNPSAVDNPDLIAYFARLGAERNKRSAHHT

SEQ ID NO: 933 - DNA, 1953 bp, Coxiella burnetii
  CDS (1)..(1953)
atggaagcgtcaaaaccactctgggaaccctcttcggaaactcgtttacaaagtcagatgagtcattttatctcggatattaacaaacgtttttcgttaaaaatcgagggttatcctgcactttaccaatggtccatcgatcagcctgcgctcttttggaaggccgtttgggatttttgtgggatcagcgcttcgcaagcacctaccaacgttttggtaagaggcaagcggatggaagaatcccaatggttcttaggtgccaaacttaactttgcagaaaatttattacggcatcgcaaccaaaacgttgcattaatttttacttccgaaacggggttttctcggagtattacttatgctgagctttacacggaagttgctgcgcttgctggttttttacgtcaatgccatgttgttcctggcgatcgcgtcgttggtgtcctctctaaccagatcgaaaccgtaattgccatgctggcgactgctagtgttggcgctatttggtcagcgtgttcgccggattttggattagaaggtctcgtagatcgttttggacaaattaaacctaaggtattattcgccgtcgacagccatacttataaaggcaaaacttatcatcaccttgataaaatccgccaactccagcagcaactgacttcactaacgcacacaatcatcgttcctaatcatcaaaaaaatatcgctattaatgagttaaaaaatgcttctctttatcccgactgccttcgtgcaacttctcttcctttttattttgaagcacttccctttgatcaccccgtctacattctttattcttcaggaaccaccggaaaaccaaaatgtatggtgcatagcgccggcggcactctgcttcagcatctaaaagaattaatattacacactgatttgcggccgtcgcagcgtattttcttttataccacctgtagctggatgatgtggaactggttaatgagtagtttggccgtcggcgccacggtcgtgctttacgatggcgcgcctttttatcctactcccacagctttattcgatttaatcgacaaggttggtatttctatttttggcgtgggtgcaaaaattttagagtcggctgaaaaattcgatttagttcctaaaaagacacataatctcttatccttaaaaacaattttaacgacaggctctccccttcttcctaaaagttttgattatgtttacaacaacgtaaaatccgacattcaattatcatccatctcgggcggcagcgatattatttcttgtttcgctttaggaaattctttattgcccgtctatcgcggcgaattgcagtgtatcggccttggcatggatgtaaaaatttttaacgacgacggggattccgtaattgaagaaaaaggcgaattagtctgtaaaagccctttcccttcaatgccaatttatttttggaatgatcctgagggcaaaaaatatcaccaagcttattttgataaataccctaatacctgggcgcacggcgattacgctaaaacaacaaaacgcggtacactgattatctacggacgctcggataccacgcttaatcctggcggaattcgcattggcaccgccgaaatttaccaacaagtcgaaaaaattaaggaaattctagattgtctggttaccagtcagcagtggaaaggagatgaacgaattatcttattcgttgttctccaaaaagaaactactttaactgatcccttgcggaaaaaaattcaaaccaccattcgccaaaatctatcacctcatcatgtaccgaataaaattatcgctgtgcccgacttaccccgaacaaaaagcggtaaaatagttgaattagcagtaaaaaaaattattaacggcgagtcggttaataacttaaccgctctcgaaaaccccaaaatactagaatatttccagaatctcaaagaattggggtga

SEQ ID NO: 934 - protein, 650 aa, Coxiella burnetii
MEASKPLWEPSSETRLQSQMSHFISDINKRFSLKIEGYPALYQWSIDQPALFWKAVWDFCGISASQAPTNVLVRGKRMEESQWFLGAKLNFAENLLRHRNQNVALIFTSETGFSRSITYAELYTEVAALAGFLRQCHVVPGDRVVGVLSNQIETVIAMLATASVGAIWSACSPDFGLEGLVDRFGQIKPKVLFAVDSHTYKGKTYHHLDKIRQLQQQLTSLTHTIIVPNHQKNIAINELKNASLYPDCLRATSLPFYFEALPFDHPVYILYSSGTTGKPKCMVHSAGGTLLQHLKELILHTDLRPSQRIFFYTTCSWMMWNWLMSSLAVGATVVLYDGAPFYPTPTALFDLIDKVGISIFGVGAKILESAEKFDLVPKKTHNLLSLKTILTTGSPLLPKSFDYVYNNVKSDIQLSSISGGSDIISCFALGNSLLPVYRGELQCIGLGMDVKIFNDDGDSVIEEKGELVCKSPFPSMPIYFWNDPEGKKYHQAYFDKYPNTWAHGDYAKTTKRGTLIIYGRSDTTLNPGGIRIGTAEIYQQVEKIKEILDCLVTSQQWKGDERIILFVVLQKETTLTDPLRKKIQTTIRQNLSPHHVPNKIIAVPDLPRTKSGKIVELAVKKIINGESVNNLTALENPKILEYFQNLKELG

SEQ ID NO: 935 - DNA, 1968 bp, Dictyostelium discoideum
  CDS (1)..(1968)
atgtttagtaatggattatcaaaattaataaaatccaaaatagcatctacatcaataattaccactaaaaataattattcaatttcaaaactatcattttcatcaacatcaattttattaaataaaaaatataaattaagtgaaccatttaattatgaacaagattgtgaatatgcattaaaagagccaatacaattttgggatgaagtagcttcaaaatatgtacattggaataaaagatatgaaaaagtttatagtggtgatgagtataatccagaatggtttaaaggtggtgtattgaatgcatgttataatgcattagatgttcatgcaaaggatccaattacaaagaatagaattgcaatcattcatgaaacaccatcaaagaataatacaaataaattgacctatggtgaactttgggatgaggtttgtatatttgcaaggggattacataatttaggtgttgaaaagggtgatagagtagtcatttatatgccaatgattaatcaggcgttgattgcaatgttggcatgcgcaagattgggtgcgacacatagtgtggtatttggtggttttgcatcaccccaattggctcaacgtattgagcatttcaagccaaaggtagtgatatctgcaaatttcggtgttgaaggccacaagatcaattgctacacaccactactttcaaaggcattagaactatcatcacataaaccaaatcataccattgtttacaatcgtttggatgtaaagttagacgcaggtgaagttttaccaccaagagttgagggatcgttggattggagtgaactaattaaaaatattgcaccgtatagggactatgcattggtagattcgacacacccattatacattctttacaccagtggtaccactggcatgccaaaaggtgtcgttagggacaccggtggctactcagtggctttgaattactccattagaaattgttatggtatgaagagtggtgatacatttttcgcaggttccgacgtaggttgggtagttggtcatactttatcagtctacggtccattgatggtaggtttaacatcgatcatattcgaaggtaaaccaacagttccagacgcctcaacctattggaaattgattgaaaagcatcgtgtaaatgcactattctctgcaccaacagcaattcgtgcaattcatagagatgatgctgatggtaagttggcatcaaaatgtgatctctcctcattgagatccatttggttgggtggtgaacgtttggatagttcaacattcaatttcttaagaaacatcaccaacaacaaaccaatcttggacaactattggaataccgagagtggttcaccattaatcaccaacccatcatgtcaagtaccaatcaaagcaaacgccactggtaagccaatgccaggttaccaattccatgtactctctccaacctctgaaagattgggtgccgataaaatcggtgaggtttgtataaagttaccagttgcaccaggttttacaaataccctatacctaaatccagaaggttacaagaatgcttatctcaacgagtatccaggttaccttagaaccgccgattcaggctactacgatgaaaatggttattatcatatcatttctagagttgatgatattatcaatgttagtggtcaccgtttatcaactggttcaatcgaagaaatcttagttaaacatccaaaaatagtagaatgcgcagtaattggtgtccacgatgaattaaaaggtgaaataccatttggtttggtagttttaaaacctcaatataaagattgtgctgaagaagttgaaaatgaattaattaaagaagttagagaaaatattggtcctgtcgcaacctttaaaaaagttttatctgtaaatcgtttaccaaaaactggtagtggtaaaattttaagaaatattttaagaaaaatgtataatatttaa

SEQ ID NO: 936 - protein, 655 aa, Dictyostelium discoideum
MFSNGLSKLIKSKIASTSIITTKNNYSISKLSFSSTSILLNKKYKLSEPFNYEQDCEYALKEPIQFWDEVASKYVHWNKRYEKVYSGDEYNPEWFKGGVLNACYNALDVHAKDPITKNRIAIIHETPSKNNTNKLTYGELWDEVCIFARGLHNLGVEKGDRVVIYMPMINQALIAMLACARLGATHSVVFGGFASPQLAQRIEHFKPKVVISANFGVEGHKINCYTPLLSKALELSSHKPNHTIVYNRLDVKLDAGEVLPPRVEGSLDWSELIKNIAPYRDYALVDSTHPLYILYTSGTTGMPKGVVRDTGGYSVALNYSIRNCYGMKSGDTFFAGSDVGWVVGHTLSVYGPLMVGLTSIIFEGKPTVPDASTYWKLIEKHRVNALFSAPTAIRAIHRDDADGKLASKCDLSSLRSIWLGGERLDSSTFNFLRNITNNKPILDNYWNTESGSPLITNPSCQVPIKANATGKPMPGYQFHVLSPTSERLGADKIGEVCIKLPVAPGFTNTLYLNPEGYKNAYLNEYPGYLRTADSGYYDENGYYHIISRVDDIINVSGHRLSTGSIEEILVKHPKIVECAVIGVHDELKGEIPFGLVVLKPQYKDCAEEVENELIKEVRENIGPVATFKKVLSVNRLPKTGSGKILRNILRKMYNI

SEQ ID NO: 937 - DNA, 1956 bp, Dictyostelium discoideum
  CDS (1)..(1956)
atgtatacattaagccaaccattcaattatgaaaatgattataaattctcaataaacaccgacccaatttcattttgggatcaagtagccactaaatatgtttattgggataaaatgtatgataaagtttatagtggtaatgaaatttatccagattggtttaaaggtggtgaattaaatacatgttataatttattagatagacaagttcagaatccattaaaaaaagatcaagttgcattaatttatgaatgtccatatttaaagaaaactgtaaaattaacttattatcaattatatgaaaaagtatgtgaattttcaagagtacttttgaatttaaatgtttcaaaaaatgataatgttttaatttatatggcaaatacagttgaagcaccaattgcaatgttatcatgtgctcgtattggtgcaactcattgtgctttattcgatggttattcagttaaaagtttaatagatagaattgaaacaattacaccaaaattaataattacaacaaatttgggagttggacttgatgaaattgttgatattactacaaatttaaaagaagcaattgaattatcaacttttaagcctgacaatgtaataacactttatagaaatgatattgtttataataataataatttccaaacaataataccaaattcattaaattgggaagaagaaattaaaaaaattaaaattaataatcaatcaccattttatgattatgtaccagtagaatcaagtcatccaatctatttaatttatacaagtggtacaactggtaattctaaaccagttgtaagaagtaatggtagtaatttggttggacttttatatcattggaattgtttaagttcaaaggttaataatgatgaaaatgtagttttattttctgcaactagtgttggatgggtgtcattccatatgttcttttatgcatcattatcaaaaggaaatacatttgtaatgtttgaaggtggtttcttaaaacaaaataatgttgaagatgacatttgggcaaccattgaaaaacataatgtaaacatttatttagcattaccaattgtaatgagatatcttaagaaaatggatcccaatgctgaaagattacattcaaaatatgatatatcacgtttaaagcaagtttggattggtgctgaagttattgaaaaatcaattcaagattatattgaaaataaattaaatgctgaatcaattggtttatatggtcaaactgaaagtggaatgatgtatatttatgaatattcaagtataaataaaacatatgatacagtaggtataccatcaccatttattaaaccatcaatattatctgaagatggtaaagagttgggtgttaatgaaattggtgaattctctctcaaattaccattaccacctggatttgcgactacattttataaaaatgatgaacaatataaaaaattattttcaaaatttccaggttattataattctggtgatttaggttataaagatgaaaatggatattatggtattgtttcaagagctgatgatcaaattaaaattagtggtaataaagttcaactaaatacaattgaatcatcaattttgaaacatccaaatgttattgaatgttgttcaattggtattaatgattatgattgttataaagcaccaattggtatattggttttaaaaaaacaagattcaattttagatttcaatcaattaaaaaatgaaattaataatattattaatgatgatattgaaagttatgctgaactaaaacaaattatcattgtaaatcaattaccaaaaactaaaagtggtaaaattcaaagacatatactttctaattatttaaataacaataattttaaattaccagataatattgaaaatcttcaattattttataacataaaagattcttttattaaaaactcaaataaaaatatttaa

SEQ ID NO: 938 - protein, 651 aa, Dictyostelium discoideum
MYTLSQPFNYENDYKFSINTDPISFWDQVATKYVYWDKMYDKVYSGNEIYPDWFKGGELNTCYNLLDRQVQNPLKKDQVALIYECPYLKKTVKLTYYQLYEKVCEFSRVLLNLNVSKNDNVLIYMANTVEAPIAMLSCARIGATHCALFDGYSVKSLIDRIETITPKLIITTNLGVGLDEIVDITTNLKEAIELSTFKPDNVITLYRNDIVYNNNNFQTIIPNSLNWEEEIKKIKINNQSPFYDYVPVESSHPIYLIYTSGTTGNSKPVVRSNGSNLVGLLYHWNCLSSKVNNDENVVLFSATSVGWVSFHMFFYASLSKGNTFVMFEGGFLKQNNVEDDIWATIEKHNVNIYLALPIVMRYLKKMDPNAERLHSKYDISRLKQVWIGAEVIEKSIQDYIENKLNAESIGLYGQTESGMMYIYEYSSINKTYDTVGIPSPFIKPSILSEDGKELGVNEIGEFSLKLPLPPGFATTFYKNDEQYKKLFSKFPGYYNSGDLGYKDENGYYGIVSRADDQIKISGNKVQLNTIESSILKHPNVIECCSIGINDYDCYKAPIGILVLKKQDSILDFNQLKNEINNIINDDIESYAELKQIIIVNQLPKTKSGKIQRHILSNYLNNNNFKLPDNIENLQLFYNIKDSFIKNSNKNI

SEQ ID NO: 939 - DNA, 1968 bp, Dictyostelium discoideum
  CDS (1)..(1968)
atgtatagactaagcgaaccatttgattatttaaatgataaaacttatgcaaataatgagccagaagctttttgggatgaagttgcaaagaaattaattaaatgggataaaatgtatgataaagtttatagtggtgatgaaatgtatccagattggtttaaaggtggtgaattaaatacatgttataatgttttagatagacaagttcaaaatccattaaaaagagatcaagatgctttaatttatgaatgtccatatttaaagaaaactgttaaattaacatattatcaattatatgaaaaagtatgtgaattttcaagagtacttttaaatttaaatatttcaaaaaatgataatgttttaatttatatggcaaatacattggagcctttaattgcaatgttatcatgtgctcgtattggtgcaactcattgcacaatattcgatggttattcggttaaaagtttaatagatagaattgaaacaattacaccaaaattaataattacaacaaactatggtatattaaatgatgaaatcattacatttacaccaaatttaaaagatgcaattgaacaatcaacttttaaaccaagtaatgtaattactttatttagaaatgatattacaagcgaatcagatttaaagaaagtaaaagatataccaacgataccaaatacattaagttggtatgatgaaattaaaaaattcaaggaaaataatcaatcaccattttatgaatatgttccagtagaatcaagtcatccattatacataatatatacaagtggtacaactggaaattctaaagcagttgtaagaagtaatggttcacatatggtttgtttgaattactttaaccgatatatttcagaaaataatcaaagtacaacattattgacaacttcaagtgttggatgggtatcatttcatggtttcctatatggtatgttgtcatttggatctacatttgtaatgtatgaaggtggtattataaaaaataaacatattgaagttgacctttggaataccattgaaaaacataaagtaacacatgcattatcattggcaagcgctattagataccttattaaaactgatcctgaaggaacaatccttcgttcaaagtatgatttatcaaatttaaaagaaatatggattggtggtgaaccaattgaagaatcaatttcagaatacattgaacaaaagttaaaaataaaatcaacaaggggatatggtcaaactgaaattggtataacttatttatattgttttggtcatattaatatcccatactacgcaactggtttaccatcaattttcattagaccatcaatattttcagacgatggtaaagaattaggtgttaacgaaattggtgaaatcgcattcaaattaccaatgccaccaagttttgcaactacattttataaaaatgatgaaaagtttaaacaattattttcaaaatttccaggttactacaatcctggtgatttaggttttaaagatgaaaatggattttatacaattgtttcaagatcagatgatcaaattaaaatcagtggtaataaagttcaattaaatacaattgaaacatcaatactaaaacatccatcagttttagaatgttgttcaattggtattaacgatccaacttgttatagtgtaccaatagccttattagttttaaaacaacaacaacaacagcaacaagatcagtcaactcgacaaatagatttaaataaattacactctgaaattaataatatcattacacaagatattgcatcattagcagtcttaagaaaaattgtaattgttaatcaattaccaaaaacaaaaactggtaaaattccaagaccaattatatcaaagtttttaaatgattcaaattttctattacccgataacatcagtaatgttgaaatattttatgaaatcaaagaattatatacgaaaattaattag

SEQ ID NO: 940 - protein, 655 aa, Dictyostelium discoideum
MYRLSEPFDYLNDKTYANNEPEAFWDEVAKKLIKWDKMYDKVYSGDEMYPDWFKGGELNTCYNVLDRQVQNPLKRDQDALIYECPYLKKTVKLTYYQLYEKVCEFSRVLLNLNISKNDNVLIYMANTLEPLIAMLSCARIGATHCTIFDGYSVKSLIDRIETITPKLIITTNYGILNDEIITFTPNLKDAIEQSTFKPSNVITLFRNDITSESDLKKVKDIPTIPNTLSWYDEIKKFKENNQSPFYEYVPVESSHPLYIIYTSGTTGNSKAVVRSNGSHMVCLNYFNRYISENNQSTTLLTTSSVGWVSFHGFLYGMLSFGSTFVMYEGGIIKNKHIEVDLWNTIEKHKVTHALSLASAIRYLIKTDPEGTILRSKYDLSNLKEIWIGGEPIEESISEYIEQKLKIKSTRGYGQTEIGITYLYCFGHINIPYYATGLPSIFIRPSIFSDDGKELGVNEIGEIAFKLPMPPSFATTFYKNDEKFKQLFSKFPGYYNPGDLGFKDENGFYTIVSRSDDQIKISGNKVQLNTIETSILKHPSVLECCSIGINDPTCYSVPIALLVLKQQQQQQQDQSTRQIDLNKLHSEINNIITQDIASLAVLRKIVIVNQLPKTKTGKIPRPIISKFLNDSNFLLPDNISNVEIFYEIKELYTKIN

SEQ ID NO: 941 - DNA, 1944 bp, Dictyostelium discoideum
  CDS (1)..(1944)
atgtataagtttaattatgaaaatgatattgattttgcaaataaccaaccaatagaattttgggatgaagttgcaaaggatttagttcattgggataaaatgtatgaaaaagtttatagtgatgatgaaatatatccagattggtttaaaggtggtgaattaaatacatgttataatgttttagatattcatattaaaaatccagaaacaagagatcaagatgcattaatttatgaatgtccatatttaaagaaaactgtaaaattaacttattatcaattatatgaaaaagtatgtgaattttcaagagtacttttaaatttaaatatatcaaaaaatgataatgttttaatttatatgtcaaatacattagaaccattaattgcaatgttatcatgtgctcgtattggtgcaactcattgtgtgttattcgatggttattcagttaaaagtttaatagatagaattgaaacaattacaccaaaattaataattacaacaaattatggtatttttaatgatgaaattattaatttcataccaaatttaaaagaatcaattgaattatcaacttttaaaccaagtaatgtaattactttatttagaaatgatattacaagcgaatcagatttaaagaaagtaaatgatataccaacgataccaaatacattaagttggtatgatgaaattaaaaaattcaaagaaaataatcaattaccattttatgaatatgtaccagtagaatcaagtcatccattatatatactatatacaagtggtacaactggtaattctaaaggggctgttagaagtaatggtccacatttagttggtattaaatatcaaacattgatacaaaagggtaaaacaaaagtagtattttatcatacaagtgttgggtggatatcaattcataatgcttttaatggtttattatcacttggatatacattggttatgtttgaaggtgggcttactaaaacaaaacatatggaagatgatatttgggaagttattgaaagaaataaagtaacttgtgcatccataatggctaaagcaattagatacttaattaaagttgatcctgaatgtaaaaatttacattcaaagtatgatttatcaaatttaaaagaaataatagttggtggagaaccaattgaagaatcaattccaaattatattcaagagaaattaaaagtaaagtcaattcgtgtatacggtcaaactgaaactggagcatgttatttttattgttatgattataaaaatttaaaaattcctattaacacaagtggctttccattttcatctttaaaagcaatgattttttcagatgatggcaaagaattaggtgttaatgaaattggagagcttgtatttaaattaccattaccaccaagttttgcaactacattttataaaaatgatgaaaagtttaaacaattatttacaaaattcccaggttactataaccctggtgatttaggatttaaagatgaaaataattgttatggtgttgtttcaagatcagatgatcaaattaaaatcagtggtaataaagttcaattaaataaaattgaaacatcaattttaaaacatccattagttttagaatgttgttcaataggtatttataatccagattgttataatgtaccaatagcttttttagttttaaaacaacaagaagatcaatcaattcaacaaattgatttaaataaattacaatctgaaattaatataatcatttcaaaagatatagaaaattttgcaattttaagaaaaactttaatagttacacaaataccgaaaaccaaagctggtaaaattcaaagacaaatcatttctaaatatttaaatgatataaattatgaattaccagataatgtttgtgatgttgaaatcttttataaaatcaaggatttatataataatgttaaatag

SEQ ID NO: 942 - protein, 647 aa, Dictyostelium discoideum
MYKFNYENDIDFANNQPIEFWDEVAKDLVHWDKMYEKVYSDDEIYPDWFKGGELNTCYNVLDIHIKNPETRDQDALIYECPYLKKTVKLTYYQLYEKVCEFSRVLLNLNISKNDNVLIYMSNTLEPLIAMLSCARIGATHCVLFDGYSVKSLIDRIETITPKLIITTNYGIFNDEIINFIPNLKESIELSTFKPSNVITLFRNDITSESDLKKVNDIPTIPNTLSWYDEIKKFKENNQLPFYEYVPVESSHPLYILYTSGTTGNSKGAVRSNGPHLVGIKYQTLIQKGKTKVVFYHTSVGWISIHNAFNGLLSLGYTLVMFEGGLTKTKHMEDDIWEVIERNKVTCASIMAKAIRYLIKVDPECKNLHSKYDLSNLKEIIVGGEPIEESIPNYIQEKLKVKSIRVYGQTETGACYFYCYDYKNLKIPINTSGFPFSSLKAMIFSDDGKELGVNEIGELVFKLPLPPSFATTFYKNDEKFKQLFTKFPGYYNPGDLGFKDENNCYGVVSRSDDQIKISGNKVQLNKIETSILKHPLVLECCSIGIYNPDCYNVPIAFLVLKQQEDQSIQQIDLNKLQSEINIIISKDIENFAILRKTLIVTQIPKTKAGKIQRQIISKYLNDINYELPDNVCDVEIFYKIKDLYNNVK

SEQ ID NO: 943 - DNA, 1941 bp, Dictyostelium discoideum
  CDS (1)..(1941)
atgaaattaagtgatccttttgattatgaaaatgatctaaaatatgcagaatcccaacctgtttcattttgggatgacattgccaaaaaatatatacattgggataaaatgtatgataaagtttatagtggtgatgaaatgtatccagattggtttaaaggtggtgaattaaatacatgttataatgttttagatattcaagttcaaaatccattaaaaagagatcaagacgcattaatttatgaatgtccatttttaaagaaaactgttaaattaacttattatcaattatatgaaaaagtatgtgaattttcaagagtacttttaaatttaaatatttcaaaaaatgataatattttaatatttatggcaaatacagttgaagcaccaattgcaatgttatcatgtgctcgtattggtgcaactcattgtgtactattcgatggctattcaacaaaaagtttaatagatagaattgaagctgtaagaccaaaagttattattacctcaaattatggtattttaaatgaggaaattattacatttacaccaaatttaattgaagcaattgaaatatcaacttttaaaccagatcatgtaattacacataatagagatttaattagttccgatgcacaattatcaataattgaaactatacctactgtaccatcttctttggattgggacttggaaatcaacaaaattaaagaaaacaatcaaacaccattctatgaatatgttacagtagaatcaagtcatccactttacattatttatacaagtggtacaactggtaattcaaaaggagttgttagaagtaatggtccacatttagtttgttttggttatctttggccatcaattgttcaaaaaaatactactttcttttctcatactagtataggatgggtatcgtttcattcatttttgtatgcttcattattacatggatgttcatttgtgatgtttgaaggtggaattgtaaaaccaaaacatatggaagatgatatttggtcaattgttgaaaagcataaagttagtgcatttctaacattagcaaaaacaataagatatttaaataaagttgatccagatgcaaaacaaatacattcaaaatatgatatttcaagtttaaaatcaatttggaatggtggtgaagttattgaagattcaattccagaatatattgaaaacaaactaaaatcaagaccatctattggatatggtcaaactgaaactggttatttgtatttattcgattacataaaatcaaaaaaaaatccatacaacacagttggtccaccatcaccatttgtctacccatcaattttatcagaagatggtattgaattaccagtgaatcaaattggtgaaatcgtattcaaattaccattaccacctggattcgcttcaacattttataaaaatgatgaacaatttaaaaaagttttaacaaaattcccaggttattatagtagtggtgatttaggttataaagatgaaaatggatattatgctatcgtttcaagagcagatgatcaaattaaaattggtggtaataaagttcaattaaacacaattgaaacatcaattttaaaacatccaaatgttattgaatgttgttcaattggtatttacaatccagattgttataataaaccaattggtttattaactttaaaacaacaagattcaaatgtcgacttaattcaattaaaaaatgaaattaatagtatcatcacacaagatattgataaatttgctcaattaacacatataataattgttgaacaattaccaaaaactaaaagtggtaaaatccaaagattaatcatttctaaatttttaaatgataataattttaaattacctgatcatgtatttgaaagtcaacaaatatatacagatattaaaaatttatatttaaataatttataa

SEQ ID NO: 944 - protein, 646 aa, Dictyostelium discoideum
MKLSDPFDYENDLKYAESQPVSFWDDIAKKYIHWDKMYDKVYSGDEMYPDWFKGGELNTCYNVLDIQVQNPLKRDQDALIYECPFLKKTVKLTYYQLYEKVCEFSRVLLNLNISKNDNILIFMANTVEAPIAMLSCARIGATHCVLFDGYSTKSLIDRIEAVRPKVIITSNYGILNEEIITFTPNLIEAIEISTFKPDHVITHNRDLISSDAQLSIIETIPTVPSSLDWDLEINKIKENNQTPFYEYVTVESSHPLYIIYTSGTTGNSKGVVRSNGPHLVCFGYLWPSIVQKNTTFFSHTSIGWVSFHSFLYASLLHGCSFVMFEGGIVKPKHMEDDIWSIVEKHKVSAFLTLAKTIRYLNKVDPDAKQIHSKYDISSLKSIWNGGEVIEDSIPEYIENKLKSRPSIGYGQTETGYLYLFDYIKSKKNPYNTVGPPSPFVYPSILSEDGIELPVNQIGEIVFKLPLPPGFASTFYKNDEQFKKVLTKFPGYYSSGDLGYKDENGYYAIVSRADDQIKIGGNKVQLNTIETSILKHPNVIECCSIGIYNPDCYNKPIGLLTLKQQDSNVDLIQLKNEINSIITQDIDKFAQLTHIIIVEQLPKTKSGKIQRLIISKFLNDNNFKLPDHVFESQQIYTDIKNLYLNNL

SEQ ID NO: 945 - DNA, 2085 bp, Neurospora crassa
  CDS (1)..(2085)
atgacccatcctcaagacgaggcccagcatctctctctcaccgatcccgaaggattctggggtcatcaagctgaacagcttcactggcacagaaagccttctgcggttctgaaacgcacgactaaagatctgaaattgggtacctctcacagtcattgggaatggttcccagacggcgagatatccacctgctataactgccttgaccgtcatgtcctagcggggcatggagatcagcccgccattctctacgacagttcggtcacgaacaccaagcagcggttgacttacaagcagcttcttgccgaggtcgaaacttttgccggggtccttcgagaggaaggcgttaagaagggagatgttgttttagtttacatgcccatggtgcccgccactttgatcggcattctcgccattaatcgcttgggtgccatccacgctgttgtctttggtggctttgcttccacagccctggctcagcgcattgaagcctcacgtccagtcgctatcttgacagcttcttgtggtatcgaaggtaacaaagggcctgtcagttaccgcgcctatatcgaagaagctatcagcatctcatccttcaaaccccccaagactatcatctggcagcgtgagcagctagtgtggcgtccgatcaagaaaaccgagggcgagcgggattggcagaagctggtcaagagcgcgcggttcagaaatatcaaggttgagtgtgttcctgtaaggtcggctgatcccatttacatcatctacaccagcggaaccacaggtcgaccgaaaggtgtcgttcgcgatagcggcggtcatgctgttgggctgcacatgtcgatttcgtatctgttcggtatacatggaccaggtgacgtgatgggctgtttcagcgacataggctgggtagtttcacacagctacacactttatggtcccctactgacaggcgccgccacggtcctctacgaaggtaagcctgttggaacacccgacgcctcggctttctggagactagccgaggaatataagatcaacaccttgtttaccgcaccaacggcactcagagccatccgaaaggaagaccctgacaatgtctttatcaccgagattggcagacgaggtgggctcaagagcctcaaagccctttttcttgctggagagcggtccgagccagctatcattaacatgtaccaggacttgctcaggcggtatggcgcggcaggctcccaggttgttgataactggtggtcgtcagaatctgggtcgccgatttcgggtgttgcgttggttccgcacgcaggcaagaacaggaagacgaatatgaaagatcatccgccattacctatcaagcccgggagtgctggaaaggccatgcctgggtttgatgtcagagttgtggatgacgaaggcaacgaggtgcccaggggcaacatgggaaacatcgttctgggccttccattggcacctactgcgtttcggacactttggggggatgaggaacgattctataagagttacatgattcgcttcaatggcaagtgggttgacactggcgatgccggctatgtcgaccaaacagggtacattcacattatggcacgcactgatgacattatcaacgttgccgcccatcgtcttagcacaggcacgctcgagcaagcagtcacaagccaccccctcgtcaccgaagcatgtgtggttagcgtccccgacgccctcaaaggccagcttcctttcgccttcgtcagcacctcggacggcggcgccgacgtcaagtcagacgagcagctgttccaggatatccagaagctcgtccgcgcccaggttggcgccatcgcctcgctgggcgggatgatccggggcaagggcatgattccgaagacgcgctcgggcaagaccttgaggagagtcctacgcgaactgctagaaaatgcggtccatgacgagttcgaaaagcccatcaatatcccctcgacggtggaggatccgagtgtagtggatgtggcgagggagaagattagggaatattggcatgcgaagagcgggttgcatgcggctatcgaggctagggcgaagctttga

SEQ ID NO: 946 - protein, 694 aa, Neurospora crassa
MTHPQDEAQHLSLTDPEGFWGHQAEQLHWHRKPSAVLKRTTKDLKLGTSHSHWEWFPDGEISTCYNCLDRHVLAGHGDQPAILYDSSVTNTKQRLTYKQLLAEVETFAGVLREEGVKKGDVVLVYMPMVPATLIGILAINRLGAIHAVVFGGFASTALAQRIEASRPVAILTASCGIEGNKGPVSYRAYIEEAISISSFKPPKTIIWQREQLVWRPIKKTEGERDWQKLVKSARFRNIKVECVPVRSADPIYIIYTSGTTGRPKGVVRDSGGHAVGLHMSISYLFGIHGPGDVMGCFSDIGWVVSHSYTLYGPLLTGAATVLYEGKPVGTPDASAFWRLAEEYKINTLFTAPTALRAIRKEDPDNVFITEIGRRGGLKSLKALFLAGERSEPAIINMYQDLLRRYGAAGSQVVDNWWSSESGSPISGVALVPHAGKNRKTNMKDHPPLPIKPGSAGKAMPGFDVRVVDDEGNEVPRGNMGNIVLGLPLAPTAFRTLWGDEERFYKSYMIRFNGKWVDTGDAGYVDQTGYIHIMARTDDIINVAAHRLSTGTLEQAVTSHPLVTEACVVSVPDALKGQLPFAFVSTSDGGADVKSDEQLFQDIQKLVRAQVGAIASLGGMIRGKGMIPKTRSGKTLRRVLRELLENAVHDEFEKPINIPSTVEDPSVVDVAREKIREYWHAKSGLHAAIEARAKL

SEQ ID NO: 947 - DNA, 2034 bp, Vibrio parahaemolyticus
  CDS (1)..(2034)
atgccaagccaaactcctatttggtcgccatctgctgagcgagtcagagacagtaacctgcttcgatttatcgagagcactaatgcacgaagcagcacaagtaatgagattagcgattatgcgtcattacaccgctggtctattgaacacaatgacgcattttggcagcacacttggcaattttgtaaagtcgttggcaagttaggttcacaaatcaaaagtttaagcgagccaaaatggagcgattcaaactcaccaaatatcaacagagatacggtttggttctgcgatacaacccttaactacgctcagaatttacttgtacacgcagagcaatcgccagagcgacaattgattgttttcagcaatgaaagtggcgagcaaaaacagctctctggtcaacaattgattgagcaagtgtccatcgtccaacaatggttgattgcaaatggtgtcggcaaaggagatgtcgtggcggcctacttgccctaccttcctgagaccgtaatcgcgatgcttgcgaccaccagcctcggtgctatttggacgtcgacctctccagactttggcgtcgacagcgtgttggagcggttcggccaagtgacacccaaagtattgttttgttgtaatggctaccaatttggcggcaagatcttcgatatgacgcaaaaaaaccgagcgattagtagcaagctcggaaacaccattagcgtttgccaaattgactatttaacgccaagcagcgaattaacaccaagagacgaacgatccgactccgacttcattacatggagcgagttgtctgaacacattgctccacaatctgttcactaccaaccagcgctgtttaatgacccgttattcattttatattcgtcaggaaccacagggcagcctaagtgcattgtccattccgtagggggaaccttactcaatcatttgaaagaacatcagctgcactgcgatgtaaaacctctcgacaaggttttctactacaccacttgtggttggatgatgtggaactggcatgtttccgcactcgcgagcggtgccacgttggtgatttacgacggtagccccgtgtaccccgaccattctgtgctttggcgcttggcggaagaacagtcggtgtcactgtttggcacctctgcaaagtatctcgaagcgcttgagcaagccaattattcgcctcggtcagagcataatttggattcgctgaagaccttatgctctacaggttccgtgctctatccagagcagttcagttacgtttatcaacatatcaaacaggatttacacttagcttccatcgcaggcggaaccgacatttgtggctgctttgttctcggtaacccgatctctcccgtctacaaaggggaatgccaaggtgcggggctcggtaacaatgtaaaagtacttgatgacgcagggagcgaagtagtttcacaacgcggagaactgacatgtaacaactcgctgccaaactttcctatcggcttttggcatgacaatggcgaacgttatcacgatgcttactggagcaaatttgcggatacttggcaccacagtgatgacgtcatgcaaaccgcaaacggcggctttatcttctacggccgaagtgacgcaacgctcaatcccggcggagtacgtattggcacagcagaaatctatcaacaagtgaacgcgctatcgggtatcgaagattcgattgccgtcggtaagttgagccagcaatctgaagagatctggttattcgtcaaattaagccaaagtgttgaattaacgccacaactgactgacttgatccgccaaacgttgaaaacgaagtgctcaccgcgacatatcccgcgcaagatcttcgcactcagtgatattccacgaacgcgttccggcaaaacggttgaactggcagtaaagcaggccgtaaatggtcagacagttaaaaatatcggtgcaattgcgaatcctgaagttttggaagagatagcggcaattgccgttgaaacacagcccgcactgaccaatgcgctataa

SEQ ID NO: 948 - protein, 677 aa, Vibrio parahaemolyticus
MPSQTPIWSPSAERVRDSNLLRFIESTNARSSTSNEISDYASLHRWSIEHNDAFWQHTWQFCKVVGKLGSQIKSLSEPKWSDSNSPNINRDTVWFCDTTLNYAQNLLVHAEQSPERQLIVFSNESGEQKQLSGQQLIEQVSIVQQWLIANGVGKGDVVAAYLPYLPETVIAMLATTSLGAIWTSTSPDFGVDSVLERFGQVTPKVLFCCNGYQFGGKIFDMTQKNRAISSKLGNTISVCQIDYLTPSSELTPRDERSDSDFITWSELSEHIAPQSVHYQPALFNDPLFILYSSGTTGQPKCIVHSVGGTLLNHLKEHQLHCDVKPLDKVFYYTTCGWMMWNWHVSALASGATLVIYDGSPVYPDHSVLWRLAEEQSVSLFGTSAKYLEALEQANYSPRSEHNLDSLKTLCSTGSVLYPEQFSYVYQHIKQDLHLASIAGGTDICGCFVLGNPISPVYKGECQGAGLGNNVKVLDDAGSEVVSQRGELTCNNSLPNFPIGFWHDNGERYHDAYWSKFADTWHHSDDVMQTANGGFIFYGRSDATLNPGGVRIGTAEIYQQVNALSGIEDSIAVGKLSQQSEEIWLFVKLSQSVELTPQLTDLIRQTLKTKCSPRHIPRKIFALSDIPRTRSGKTVELAVKQAVNGQTVKNIGAIANPEVLEEIAAIAVETQPALTNAL

SEQ ID NO: 949 - DNA, 1971 bp, Vibrio parahaemolyticus
  CDS (1)..(1971)
atgcgcgagagcaacaaagtatggcaaccgagcgaaagtcgtatcgcagaagccaatattactcagtttatcgaacacattaatcgacaaggttttgacctaaaaaactacgcagacctgcaccaatggtctttggatcataacgagcagttttggcaagaggtctggctgttttgcgatgtaataggtaatgcaggtgagacggtaaaaagccaagccgagagcaaatggcaacaaccagtactcaatcgtgatttatgttggtttcctgacgctcatattaactacgcagaaaacttattgagttttgcttatcaaaaaccacatgagctcgccatctggtttgaaaatgagcgcgacgaacgacagacctatacgtggcaacagctgtgtgatgaagtctcgagtgttcaacagtggcttagggattgtggcatcaaacaaggcgatgttgttgctggttacttacctcaccttcctcaaaccgtcatcgcgatgttggcaaccaccagcttaggtgcgacatggacgtcaacctcgccagattttggcgtagaaagtgtgctggaacgttttggacaggtaaaaccaaaaattttgttcacttgtgatggctacacattcaatggcaaaactttcgacatggcggaaaaaaaccaacatatatccgatcatctcgatggcctcaaacaagtatgccaaatcagctatctcaagcctcacatctttgaatgtgatgtttgtacccaagattggcaaaacgtgcttaatcaatactcacctgagcccctcacctacactcgcgttaacttcaatgacccactctttgtgttgtattcatccggtacgacaggtaaacccaaatgcatcgtgcactcggtcggtggcaccattctgaatcacgtaaaagagcatcaactgcactgcgatattcaaccgaacgatcgagttttttactacacgacctgtggttggatgatgtggaattggcacgtttccgcccttgcaagcggagcgtgcttagtcatttttgacggtagccctgtttatccttctcacaaggtgctgtggaaccttgctcaaaatgctgacgtgaccttgtttggtacgtcggctaaatatctggaagcgcttgaaaaagcgcaattctcaccgaaaagagccgatgctttccccgcactcaagacgatttgctcaactggctctgtactttatcctgagcaattcaattacgtttacgagcacttaaaggaagacatacatttagcgtccattgctgggggcacagatatttgcggatgctttgtattaggcaatccgatatcaccagtctatcgaggcgagtgtcaatccgcaggcttaggcgttgatgtgcaagtatttaatccacaaggtcacagtgtcgtgggtgaacgaggtgagctggtttgcaccaattcactgcctaattttccttctgggttctggcgtgattcaggcgagcgttaccatcgcgcctactgggataagttcgataatgtttggcatcatggcgacgatgtagaaaaaagtgaggttggcggttttgttttttatggccgcagtgacaccactcttaatccaggcggagtcagaattggtaccgcagaaatttaccaacaggtgaatgctattgatggcattgttgactccatcgcagttgggaaagaagtggatcgaaatgaacagatctggctttttgttcaattagaaagccaagatgagttggatgatgagttaatcggtagcattaaagcgcagctgaaatcggcctgttcaccacgccatgtgccgagtgccattttcgccatcagcgatattccgaaaacgcgatcaggcaaactggtagaacttgccgtcaagcaggttgtcaatggtcgacaagttgaaaacttaggcgcaattgccaatccagagatacttcaagagattcaaaccgcgatatcagcttag

SEQ ID NO: 950 - protein, 656 aa, Vibrio parahaemolyticus
MRESNKVWQPSESRIAEANITQFIEHINRQGFDLKNYADLHQWSLDHNEQFWQEVWLFCDVIGNAGETVKSQAESKWQQPVLNRDLCWFPDAHINYAENLLSFAYQKPHELAIWFENERDERQTYTWQQLCDEVSSVQQWLRDCGIKQGDVVAGYLPHLPQTVIAMLATTSLGATWTSTSPDFGVESVLERFGQVKPKILFTCDGYTFNGKTFDMAEKNQHISDHLDGLKQVCQISYLKPHIFECDVCTQDWQNVLNQYSPEPLTYTRVNFNDPLFVLYSSGTTGKPKCIVHSVGGTILNHVKEHQLHCDIQPNDRVFYYTTCGWMMWNWHVSALASGACLVIFDGSPVYPSHKVLWNLAQNADVTLFGTSAKYLEALEKAQFSPKRADAFPALKTICSTGSVLYPEQFNYVYEHLKEDIHLASIAGGTDICGCFVLGNPISPVYRGECQSAGLGVDVQVFNPQGHSVVGERGELVCTNSLPNFPSGFWRDSGERYHRAYWDKFDNVWHHGDDVEKSEVGGFVFYGRSDTTLNPGGVRIGTAEIYQQVNAIDGIVDSIAVGKEVDRNEQIWLFVQLESQDELDDELIGSIKAQLKSACSPRHVPSAIFAISDIPKTRSGKLVELAVKQVVNGRQVENLGAIANPEILQEIQTAISA

SEQ ID NO: 951 - DNA, 1905 bp, Vibrio parahaemolyticus
  CDS (1)..(1905)
atgtcaggacatactggaggaagcaatatgtcttcatacgaaaaagaatatttatgggcgaaaaacgaaccggagagtttttggcgcgctcaagcggagaatatcgactggtttgaatctcctaaaaccatcttgaaatctgatgagaacggcatcgaacgttggttcccagatggggtgatgaatacgtcttggttggcactggattaccattgcgaacaaggacgtggtgataatactgcgctaatttatgactcaccagtaacgggaaataaaaagacttacacttaccgagagctacgcgatcaagttgcgaaaattgccggtatgctttctgcgcaaggcgttgaaaaaggcgaccgagttgttgtttacatgccgatgatcccagaagcggcaatggcaatgcttgcttgtgcacgtttgggtgcgattcactcagttgtgtttggtggttttgcgcctaatgagctggcggtacgtattgaagatgcagagccaaaagtcattatgacggcatcgtgtggcatcgaaatcagtaaaatcattccgtataaaccattagtagacaaagccatcatggacagccgttggaaacctgagaaagtgtttgttttccagcgtccagaatgtgaagccgagttaaatcaggaaagagatttggactggcaacaggaatacaaaaaagcgctgcctcatgcttgtgttcctgtattagcaacagacccactgtatatcctttatacctcaggcacgacgggcaaaccgaaaggggtggtacgtgataacggtggccatgcggtagcactgaagtactcaatgagcgcaatctacaacatcccgcaaggtggtgtgttctgggcggcatccgacgtgggctgggtagttggtcactcgtatattgtttacgcgccattaattcacggctgcaccacaatactgtttgaaggtaagccagtcagaactccgaatccgggggcattctggcgtgtgtgtgatgaatataaagtggatgctttgttctcggcgccaacggctttccgtgcgattaagaaagaagacccggaaggcgagttcttaaagcagtatgatctgtcaaacctgaaaaccatctttatggctggtgagcgtttagatcctcctacgctggaatgggtacaaagtaaaactgacaaaccggttatcgatcactggtggcaaacagagacaggttgggcgattgcggggaacccaacgggcattgaaatgatgccagtaaaagcgggttcttcaactaagcctattccgggttatcaagtagaaatcctcgatgaactgggtgaaccagtaaaacctaatcaacaaggtttcgttgcgctaaaacgtccgttaccgccaagctgcttaccaaccgtgtggcgaaaccatgatcgttttgaaacgggctacctaagccaattcccaggctactatgtgtcgggtgacggtggttatctcgacgaagacggttacctattcatcatggggcgtattgacgatgtgattaacgtggctggccaccgtctgtctactggtgaaatggaagaaattgttggtggtcacccagccattgcagaatgtgcagtagttggcattcacgatgatctgaaagggcagctaccacttggtttcgttgtgctgaaagatggcgtcaaggttgatgagttagcgctagaaggcgaacttgtgggtaaggtgagaaatgagattggcgcggttgcatgcttcaaacacgcactggttgtagatcgcttaccgaaaacacgttcgggtaaaattctgcgtcgaaccatccgccaaattgctgatggtgaacaatacaccgtgccatcgacgattgatgatccaacgagcctgaatgaaatagagcgagtattacgacgctaa

SEQ ID NO: 952 - protein, 634 aa, Vibrio parahaemolyticus
MSGHTGGSNMSSYEKEYLWAKNEPESFWRAQAENIDWFESPKTILKSDENGIERWFPDGVMNTSWLALDYHCEQGRGDNTALIYDSPVTGNKKTYTYRELRDQVAKIAGMLSAQGVEKGDRVVVYMPMIPEAAMAMLACARLGAIHSVVFGGFAPNELAVRIEDAEPKVIMTASCGIEISKIIPYKPLVDKAIMDSRWKPEKVFVFQRPECEAELNQERDLDWQQEYKKALPHACVPVLATDPLYILYTSGTTGKPKGVVRDNGGHAVALKYSMSAIYNIPQGGVFWAASDVGWVVGHSYIVYAPLIHGCTTILFEGKPVRTPNPGAFWRVCDEYKVDALFSAPTAFRAIKKEDPEGEFLKQYDLSNLKTIFMAGERLDPPTLEWVQSKTDKPVIDHWWQTETGWAIAGNPTGIEMMPVKAGSSTKPIPGYQVEILDELGEPVKPNQQGFVALKRPLPPSCLPTVWRNHDRFETGYLSQFPGYYVSGDGGYLDEDGYLFIMGRIDDVINVAGHRLSTGEMEEIVGGHPAIAECAVVGIHDDLKGQLPLGFVVLKDGVKVDELALEGELVGKVRNEIGAVACFKHALVVDRLPKTRSGKILRRTIRQIADGEQYTVPSTIDDPTSLNEIERVLRR

SEQ ID NO: 953 - DNA, 1953 bp, Pseudomonas putida
  CDS (1)..(1953)
atgaacgatgtgctctggcgaccgtccacaacgcagatcgaggccagccggatggatgccttccgccgccgggtcaacctgcgctacaacctgcaactcaacgactaccaggccctgcacggctggagcatcgaacagcggcccgccttctggcaaaccctggccgagtatttccaggttcattggcataccccacccagccaggtgctcagcgaagggccgcaaatgcccgatgcacagtggttcgccaatgccaccctgaactttgccgaacacctgctgcgccgccgcgacgaccgcccggccgtggtcgccgtacgcgaagacggccagcgcgaagtgttcacccatgccgaactggccgcacaggtggccggcctgcaaacggcattcaaggcggtaggtatcgtcccgggcgaccgggtagccgccatcatgcccaatacctggcaaacactggtggccatgctcgcctgcaccagccttggcgcggtctggtctacctcctcgcccgagttcggcgtgcacggcatcatcgaccgcttcggccagatcgaacccaagctgctgatcgtctgcgccggttaccagtatgcaggcaaggccatcgaccaggtgaccaaggtcaaccaggtgtgtgcgcagttgcctggcctggagcacctgatcgtggtgccccatacccgcaaaggcacgcgtgccgatgaattccaggcagccaacgtcagcctgtggaatgacttcttccagcccggcggcgagccccgtttcaccccgctgccgttcgaccacccgctgtacatcctctattccagtggcaccaccggcgtgcccaagtgcattgtccatcgcgccggaggcgtgctgttgcaacacctcaaggaacacggcctgcacaacgacctgaaggccgatgacgtgctgttctactacaccacctgcggctggatgatgtggaactggctggccagcggcctggcggtgggtgccacgctggtgctgtacgacggctcgccgttccacccgggccccgagcgccttctggacctgatagaggccgagggcatccacgccttcggcaccagcgccaagtacctggcggcactggagcaggcaggcctggaacctgccaacagccactgcctgaccagcctgcggctgctgctgtccaccggttcgccgctgtcaccgcacagctatgactatgtatacgacaagatcaaggccgacctgtggctcgtgtccatgtcgggcggcacggacattgtctcctgcttcgtgctgggcaacccgaccctgcctgtgcgtcgcggcgaaatccagtgcaagggcctgggtatggcggtggaggtgtggaacgagcagggtcagcccgtggtggacgaaaaaggcgagctggtgtgcacgcgcaacttcccctcgatgccactcggtttctggaacgacccggacggtcgccgttaccacgatgcctacttcagccagtttccgggggtgtgggcccagggcgactacgccgagcagcgtgccagcgggggcatggtgatccacggtcgctccgacgccgtgctcaacccgggcggtgtgcgcattggcacggcggagatctaccgccaggtggaaaaggtcgaacaggttgtggaaagcgtggccatcggccaggactggaacggggatgtgcgggtggtgctgttcgtgcgcctgcaagacggcctgcagctggatgaagccttgcgccagcacatccgccaggtgatacgccagtacaccacgccccgccatgtgccggcggtgatcgcccaggtcagcgacataccgcgcaccatcagtggcaagctggtggaactggcgattcgcgatgtggtgcatgggcggccggtgaagaacaccgatgccctggccaacccggaggcgctggagcagtttcgcgatcgcgcagagctgaagagctga

SEQ ID NO: 954 - protein, 650 aa, Pseudomonas putida
MNDVLWRPSTTQIEASRMDAFRRRVNLRYNLQLNDYQALHGWSIEQRPAFWQTLAEYFQVHWHTPPSQVLSEGPQMPDAQWFANATLNFAEHLLRRRDDRPAVVAVREDGQREVFTHAELAAQVAGLQTAFKAVGIVPGDRVAAIMPNTWQTLVAMLACTSLGAVWSTSSPEFGVHGIIDRFGQIEPKLLIVCAGYQYAGKAIDQVTKVNQVCAQLPGLEHLIVVPHTRKGTRADEFQAANVSLWNDFFQPGGEPRFTPLPFDHPLYILYSSGTTGVPKCIVHRAGGVLLQHLKEHGLHNDLKADDVLFYYTTCGWMMWNWLASGLAVGATLVLYDGSPFHPGPERLLDLIEAEGIHAFGTSAKYLAALEQAGLEPANSHCLTSLRLLLSTGSPLSPHSYDYVYDKIKADLWLVSMSGGTDIVSCFVLGNPTLPVRRGEIQCKGLGMAVEVWNEQGQPVVDEKGELVCTRNFPSMPLGFWNDPDGRRYHDAYFSQFPGVWAQGDYAEQRASGGMVIHGRSDAVLNPGGVRIGTAEIYRQVEKVEQVVESVAIGQDWNGDVRVVLFVRLQDGLQLDEALRQHIRQVIRQYTTPRHVPAVIAQVSDIPRTISGKLVELAIRDVVHGRPVKNTDALANPEALEQFRDRAELKS

SEQ ID NO: 955 - DNA, 1890 bp, Pseudomonas putida
  CDS (1)..(1890)
atgagctaccagcacagctacgcccattccatttccgaccctgccgctttctgggcggaacaggccgcacacctggcctggcaccgcaagcctgccctgaccctgcaagataacgccgacggtacccaccgctggttcgcggatggccgcctgaacagctgttacctggccctcgaccaccagatcgagcagggccgcggcgagcagttggcgctgatctacgattcgccagtgaccggcgtgcagcagacctacacctacaaccaattgcgcgacgaggtggcacgcctggccggtttgctgcgccagctgggggtgaacaagggcgatggcgtgatcatctacatgcccatggtgccgcaagcggccatggcgatgctggcctgcgcgcggatcggcgcggtgcattcggtcgtgttcggtggctttgccgccaacgagttggccctgcgcatcgatgacgcccggcccaccttgttgctgacggcatcgtgcgggctggagttcgaccgggtcattgcatacaaaccgctggttgaccgtgccctgcaactggcccggcaccagccgcgcaatgtgctggtgctgcagcggccacaggcacacgctgaactgctgcctggccgcgacctggactggcaggcggccttggccgacgccgagccggtggcccccgtcgagctggatgccggcgacccgctgtacatcatgtatacctcaggcaccaccggtaagcccaagggtatcgtccgggaaaacggcggcaatgccgtggcgctgtgttacgccatgcgccatatctatggcatgcaggccggtgatgtgtggtggggcatttccgacgtcggttgggtggtcggccactcactgatcgtctacgggccgttgatgagcggctgtaccacggtgttctacgaaggcaagccaatccgcaccccggatgcttcggcctattggcgggtggtggagcagtaccgggtcaacgcgctgttctgtgcacctacggccatgcgcgccatccgcaaggaggacccggagggcgacctgattcgcaaacatgacctcagctcgctgcggcaactgttcctggcgggggaaaagctggattccagcacccatgaatggctggaacgggtgagtggcaagccggtgcacgaccactggtggcagaccgagaccggctggccggtcaccgcgccttgcgtcgggctggagggcagtgcggcgaagccaggatcgagcaaccgggcggtgccgggttacaacgttcgcgtactggatgacgaaggccacttgctcggggccaaccatcagggttcgatcgtgattgccctgccattgccacccggttgcagtcagacgctgtggggggatcacgagcgctacctgcaggcctacctgcgcacgtatccggggtactaccacacgggcgatggcggctatctggacgatgatggtttcgtctacatcatggggcgcaccgatgatgtgatcaacgtttccggtcatcgtttgtccaccggtgaaatggaagacctggtcgcccgccacccggcggtagcggagtgtgctgtgatcggtgtgcatgacgagatcaagggccaggtaccgttggcgctggtggtactcaaggatggcgagggcattgccgaggcgcagttgctggtggagctggtgggcagcgtgcgcgaggaaattggcccgctggcctgtttcaaccgggtacggctggtgaagcgcctgcccaagacccgttccggcaagattctgcgggcggtgctgcgcaagattgccgatgggcaggattatgtgccgccgtcgaccctggatgacccggcagtgctgggggagatcgaagcggtgctggcagatttgcccagggcgggttga

SEQ ID NO: 956 - protein, 629 aa, Pseudomonas putida
MSYQHSYAHSISDPAAFWAEQAAHLAWHRKPALTLQDNADGTHRWFADGRLNSCYLALDHQIEQGRGEQLALIYDSPVTGVQQTYTYNQLRDEVARLAGLLRQLGVNKGDGVIIYMPMVPQAAMAMLACARIGAVHSVVFGGFAANELALRIDDARPTLLLTASCGLEFDRVIAYKPLVDRALQLARHQPRNVLVLQRPQAHAELLPGRDLDWQAALADAEPVAPVELDAGDPLYIMYTSGTTGKPKGIVRENGGNAVALCYAMRHIYGMQAGDVWWGISDVGWVVGHSLIVYGPLMSGCTTVFYEGKPIRTPDASAYWRVVEQYRVNALFCAPTAMRAIRKEDPEGDLIRKHDLSSLRQLFLAGEKLDSSTHEWLERVSGKPVHDHWWQTETGWPVTAPCVGLEGSAAKPGSSNRAVPGYNVRVLDDEGHLLGANHQGSIVIALPLPPGCSQTLWGDHERYLQAYLRTYPGYYHTGDGGYLDDDGFVYIMGRTDDVINVSGHRLSTGEMEDLVARHPAVAECAVIGVHDEIKGQVPLALVVLKDGEGIAEAQLLVELVGSVREEIGPLACFNRVRLVKRLPKTRSGKILRAVLRKIADGQDYVPPSTLDDPAVLGEIEAVLADLPRAG

SEQ ID NO: 957 - DNA, 1686 bp, Pseudomonas putida
  CDS (1)..(1686)
atgcttcaactccaaaaacaagaaaccaggagtccgatgatgcgcgattacgccgaggccgctcgtacgttcgaccatgaccaggccgttgtgacggcattgcacggcaaccttgaagcccttaatgcctgtgtcgaatgctgtgaccggcatgccggtgacggcaagctggcactgattcatgaggaccgcgatggtaacagcgcgtgctatagcttcgatcagcttcaggtgcaggctgctcggttcgccaatgtgttaaaggcgcagggggtaggcgccggagaccgggttgccggcttgatgccgcgtacccctgaactgctggtgaccatcctcgctacctggcgcctcggggcggtttaccagcccttgttcaccgcgttcggccccaaggccatcgagcaccggcttgagcaatcccatgcccgagtggtggtcaccgatagccacaaccgcgccaagctggacgatgtgcacgcctgcccgaccatcatcactgtcaaggcccgcagtggtgagctggacttccagcaatgcctggaacgcgcagcggacgtatgtgagccggtgatgcgctcaggcaacgatccattcctgctgatgttcacttccggaaccactggcccggcaaaacccctggaagtgccactgcgtgcgatcgtcgcgtttcagggctacatgcgtgatgccatcgagctgctgcccgaggacaacttctggaacctggccgacccgggttgggcttacggcttgtattacgccgttaccggtccgttgtcgctggggcacgccaccacgttctacgatggcccgttcagtgtcgagagctgcgcccgggtgatcgacaagctgggtatcaccaacctggccggctcgcccaccgcgtatcgcttgctgattgcggcgggcaaagatttctcggcaccgatcaagggccgcctgcgggtggtcagcagtgccggcgaaccgctgaaccccgaagtgatccgctggttcgccgacgagctgggcgtgaccattcacgatcactacggccagaccgaactgggcatggtgctgtgcaaccaccatggcctgcagcatccggtgcacctgggttctgccggctatgccatccccggccaccgcatcgtggtggtggacgagcaaggtaacgaactgccagccggccagccaggcatcctcgccgttgaccgtgagcagtcgccgctgtgctggttcggcggttaccacggcctgccgaccaaagccttcgtcggcaagtactacctcagcggcgacactgtcgagctgaacccggatggcagcatcagcttcgttggccgtagcgacgacgtgatcaccacctccggttaccgtgtggggccattcgatgtggaaagcgcgttgatcgagcacccggcggtgatcgaggcagcggtgatcggcaagcccgacccggagcgtaccgagctgatcaaggcgttcgtggtattggccagcggctacgccggcagcgtcgagctggaagaaaccttgcgccagcatgtgcgccagcgcctctacgcgcatgcctaccccagggaaatcgaattcgtcagcgagctgcccaagaccccgagcggcaagctgcaacgcttcatcctgcgcaaccaggaagtcgccaaacaacaagcgcaacaggccacccctgccagcgtctga

SEQ ID NO: 958 - protein, 561 aa, Pseudomonas putida
MLQLQKQETRSPMMRDYAEAARTFDHDQAVVTALHGNLEALNACVECCDRHAGDGKLALIHEDRDGNSACYSFDQLQVQAARFANVLKAQGVGAGDRVAGLMPRTPELLVTILATWRLGAVYQPLFTAFGPKAIEHRLEQSHARVVVTDSHNRAKLDDVHACPTIITVKARSGELDFQQCLERAADVCEPVMRSGNDPFLLMFTSGTTGPAKPLEVPLRAIVAFQGYMRDAIELLPEDNFWNLADPGWAYGLYYAVTGPLSLGHATTFYDGPFSVESCARVIDKLGITNLAGSPTAYRLLIAAGKDFSAPIKGRLRVVSSAGEPLNPEVIRWFADELGVTIHDHYGQTELGMVLCNHHGLQHPVHLGSAGYAIPGHRIVVVDEQGNELPAGQPGILAVDREQSPLCWFGGYHGLPTKAFVGKYYLSGDTVELNPDGSISFVGRSDDVITTSGYRVGPFDVESALIEHPAVIEAAVIGKPDPERTELIKAFVVLASGYAGSVELEETLRQHVRQRLYAHAYPREIEFVSELPKTPSGKLQRFILRNQEVAKQQAQQATPASV

SEQ ID NO: 959 - DNA, 1689 bp, Bradyrhizobium japonicum
  CDS (1)..(1689)
atggccgggactttgatcgcgaagacgcgcttcgcgctttcgcccggccatgacgccaagaccgtggaaacgcgagccatgctcaccgaagccaagacctacgacgagctctatcgcaacttccgctgggatatcccggcgcgcttcaacatggcggaggcgtgctgcgaccgccatgccgacggtaccggccgtctcgcgctgatctatgtcgacgagaacggcgccaccacgcgcacctccttcgacgaggtcgcggagatgtcgcgccgcttcgccaacgtgctgaaggcggatggccttgcgcgcggcgaccgcgtcgcggtgttcctgtcgcagtcgctggagctgcctatcgcgcatatggcggcgttccgctccgggctgatctcgatccctctgttcgcgctgttcggcgaggacgcgctggaatttcgcctgtcgaattcgcaagcaagagccatcatcactgatgaggcgggctgggagaagctcacgagggtccgcgatcggctgccctatttgcaggacatctatgtcacgagcggcgccgtccacgccggcgcaaaaccgttctggccggcgatcgaaaccgcgtccgaggattttgcgaccgtcgacacctcggccgacgatcctgcgctgatcatctacacctcgggcacaacgggcaatccgaagggagcgctgcatgcgcatcgcgtcgtgctcggccatctgccgaacgtcgagatgtgccacaacttcctgccgcgccccggcgatctgatgtggacgccggcggactgggcctggatcggcggcctcgtcaacggcctgctcgcgttctggtatcacggcattcccctggtcggtcaccgcgcccgaaaattcgagccgcaggcggcgatgcagatgatggccgatctttccgtccgcaacgtcttcctgccgccgacggcgctgaagctgatgcggcaggccggcgtgaagcatcccggcgtcaagctgcgcagcattttcaccggcggcgaatcgctcggcggcgaactcttgggctgggtgcgcgagaccttcggcatcgacgcgcacgaagtattcggccagaccgagtgcaatctcgtgatcggcagcaactccaacctgtttccgatccggcccggcgcgatgggcaaggcgacgccgggcttcgacgtccgcatcgtcaacgacaagggcgaggagcagccgcgcgggcagcgcggcatcatcggcgtgcgccagccgtgccccgtcaccatgctcgaatactggcgcaatccggaggcgacgcgtaagaaatatgccggcgacttcctgctcaccggcgatctcggcgtgcaggacgaggacggctatttctggtatgtcagccgcgaggacgacgtcatcaccaccgccggctatcgcgtcggcccatccgagatcgagcacacgctgatgaagcatccgtcggtggcgatggccgcggtggtcggtattcccgatccgatccgcacggagtcgatcaaggcctggatcgtgctgcgtccgggctttaccggcagcgacgcgctcgcgcgcgagatccaggagttcgtgaaggtgcagctcgccgcgcacgaatatccgcgcttcgtggagttcgccgagacgctgccgatgacggcgaccggcaaggtgctgcggcgcgaactgcgggcgaagggttag

SEQ ID NO: 960 - protein, 562 aa, Bradyrhizobium japonicum
MAGTLIAKTRFALSPGHDAKTVETRAMLTEAKTYDELYRNFRWDIPARFNMAEACCDRHADGTGRLALIYVDENGATTRTSFDEVAEMSRRFANVLKADGLARGDRVAVFLSQSLELPIAHMAAFRSGLISIPLFALFGEDALEFRLSNSQARAIITDEAGWEKLTRVRDRLPYLQDIYVTSGAVHAGAKPFWPAIETASEDFATVDTSADDPALIIYTSGTTGNPKGALHAHRVVLGHLPNVEMCHNFLPRPGDLMWTPADWAWIGGLVNGLLAFWYHGIPLVGHRARKFEPQAAMQMMADLSVRNVFLPPTALKLMRQAGVKHPGVKLRSIFTGGESLGGELLGWVRETFGIDAHEVFGQTECNLVIGSNSNLFPIRPGAMGKATPGFDVRIVNDKGEEQPRGQRGIIGVRQPCPVTMLEYWRNPEATRKKYAGDFLLTGDLGVQDEDGYFWYVSREDDVITTAGYRVGPSEIEHTLMKHPSVAMAAVVGIPDPIRTESIKAWIVLRPGFTGSDALAREIQEFVKVQLAAHEYPRFVEFAETLPMTATGKVLRRELRAKG

SEQ ID NO: 961 - DNA, 2049 bp, Bradyrhizobium japonicum
  CDS (1)..(2049)
atgaccgcacctttcgttccccagatcgccctctatcgcaactggctcgccgagcagcgcggcctcaccttcggcagctacgaagacatgcggcaatggtcggtgcgcgatctcgacggcttctggcgcagcatctgggactattatgatctgcaatcgccgacgccgttcgcggccgtgatcaccgagcgcaagatgcccggcgcggtctggtttccaggcgcgcaggtgaactatgcgcgtcaggtattccggcatgtcgaagcggccgacgccgccggcctgcccgcgatcgtcagcggcggcgaggacggcaggctgagggaaacgagctggccggagctgcggcgcaaggcggccgcgctcgcgctgcatctgaaggataacggtatcaagcccggcgaccgcgtcgcggcctacctgcccaacattcccgagaccatcatcgcgttcctcgcgaccgccagcatcggcgcggtctggagcgtctgcgcacccgacatggccgcgcccgccgtgatcgaccgcttcaagcagatcgaacccaaagtgctgatcgcctgcgacgccgtcacctatgccggccggcggcacgaccggcgcgacgtcgtcgccgaactgcggcgatcgctgcccacggtcgcgcatgtcatcctgcacagcgaggccggtgcgcctgccgcgccggatgccctgctctccgatattgtcgccaggacaagcgccgcgattgacacgttcgagccggcctggctgccgttcgatcatccgctctggatcgtctattccagcggcaccaccggcctgcccaagccgatcgtgcacggccatggcggcatcgtcatcgtggtgctcgcgctgctcggcctgcacaacgacatcggctgctcctatcaccaaaattctttcggcgagcgctatcactggtactcttcgaccggctggatcatgtggaattcgcaagtcggcggcctgctcggcggcgccacctgctgcatcttcgacggcagccccggcggcgccaaggacaagccggactggaccacgctgtggcgcttcgtggcgcaatcgaaagcgaccttcttcggcgcgggcgcggcgttcttcgccaactgcgccaaggccgaaatcgatcttgccgccgcgggcgatctgtcgcggctgcgctgcctcggctcgaccggatcgccgctcagcgccgacacgcaagcctggttcaacgaccgcttcgccgcactgtcgaagaccaatggcagcaaggcgcaggccgacatctggtgggcgaacatttccggcggcaccgatttcgccggtgccttcatcggcggcaaccgcgaattgccacaaacgcccggcgcgatgcagtgtcgcctgctcggcgccgccgtcgaagccttcagcgaacagggccgcgccgtcacggacgaggtcggcgagctcgtctgcaccgagccgatgccgtcgatgccgctctacttctggaacgacaaggacggcgtgcgttaccgctccagctatttcgagacctatccggacaatttcgacggcagcggccgcggccccgtgtggcggcacggcgactggctcaaggtcaacccggacggctcctgcatcatctacggccgcagcgatgccaccatcaaccggcacggcctgcgcatgggcacgagcgaactctattccgcgatcgaagccttgccggaggtgctggactccctcgtcgtcgacctcgaatatctcggccgcgacagctacatgccgctgttcgtggtgcttcgcgaaggcgtcgcgctcgacgccgcgatgcaggagaagatcaacaaggcgatcgaggccggtctctcccggcgcttcctgccgaacgaaatcttcgccgtcgccgagatcccgcgcacgctgtcgggcaagaagcaggagctgccgatcaagaagctgctgctcggccagcccgtcgagaaggtcatcaacaaggaggcgatggccaatcccggctgcctcgactggtatctcgccttcgcgcgcgactacctggcgcgaagcgctgcgtag

SEQ ID NO: 962 - protein, 682 aa, Bradyrhizobium japonicum
MTAPFVPQIALYRNWLAEQRGLTFGSYEDMRQWSVRDLDGFWRSIWDYYDLQSPTPFAAVITERKMPGAVWFPGAQVNYARQVFRHVEAADAAGLPAIVSGGEDGRLRETSWPELRRKAAALALHLKDNGIKPGDRVAAYLPNIPETIIAFLATASIGAVWSVCAPDMAAPAVIDRFKQIEPKVLIACDAVTYAGRRHDRRDVVAELRRSLPTVAHVILHSEAGAPAAPDALLSDIVARTSAAIDTFEPAWLPFDHPLWIVYSSGTTGLPKPIVHGHGGIVIVVLALLGLHNDIGCSYHQNSFGERYHWYSSTGWIMWNSQVGGLLGGATCCIFDGSPGGAKDKPDWTTLWRFVAQSKATFFGAGAAFFANCAKAEIDLAAAGDLSRLRCLGSTGSPLSADTQAWFNDRFAALSKTNGSKAQADIWWANISGGTDFAGAFIGGNRELPQTPGAMQCRLLGAAVEAFSEQGRAVTDEVGELVCTEPMPSMPLYFWNDKDGVRYRSSYFETYPDNFDGSGRGPVWRHGDWLKVNPDGSCIIYGRSDATINRHGLRMGTSELYSAIEALPEVLDSLVVDLEYLGRDSYMPLFVVLREGVALDAAMQEKINKAIEAGLSRRFLPNEIFAVAEIPRTLSGKKQELPIKKLLLGQPVEKVINKEAMANPGCLDWYLAFARDYLARSAA

SEQ ID NO: 963 - DNA, 1911 bp, Bradyrhizobium japonicum
  CDS (1)..(1911)
atgaacatccagggcaagagcagctatcacgaggtccatgcacgctcgctggctgatccccagggcttctgggccgaggcggccagggaaatcgactggatcgagccgcccaagacgatcttcgacgcgtcgcaaggaacctacggccgctggttcaccggcggcgtggtcaacacctgctataacgcgctcgaccgccatgtcgaacgcggccgcgccgaccaggtcgcgctgatccatgattcgccgctgacgaactcgatcaccaagctcacctatgccgagctgctgaacgaggtgcaggcgctcggcgccgtcatgcaggatttcggcgtcgccaagggcgatcgcgtcatcctttacatgccgatggtgccggaggcggtggtcgcgatgctcgcctgcgcgcgcatcggcgcggtgcattcggtcgtgttcggcggctttgccgcgaaggagcttgccacccgcatcgacgatgcacagccgaagctgatcctgtcggcgagctgcggcatcgagcccggccgcatcgtgcagtacaagccgctgctcgacgaggcgatcaggcttgccggcagcaagccgaaggcctgcatcgtgctgcaacgtccgcagctcacctgtgacctggcgccgggccgcgattacgattgggcgagcctgcgccgcaaggcgatgaacgacggcaagaaggcgccttgcgtgccggtcgccgccaccgatccgctctacatcctctacacctcgggcaccacgggcattcccaagggcgtggtgcgcgacaatggcggccatctggtcgcggtgaaatggtcgatgttcaacctctatggcgtcaagccgggcgaggtctggtggtgcggctccgacatcggctgggtggttggccacagctacatcgtctacggcccgctgctgcacggcgcgacctcgatcatgtatgagggcaagccggtcggcacgcccgatgccggcgcattctggcgcgtcatctccgagcacaaggcggtggcgctgttcaccgcgccgaccgcgttccgcgcgattcggaaagaggatccggaaggaaagttcatccggcaatacgacctgtcgacattccgcacgctgttcctcgccggcgagcgcgccgatccgcccacggtggaatgggcggagcagcagctgaaggtgcctgtgatcgaccattggtggcagaccgagaccggttggtgcatcgccggtaatccggtcggcctcggcatgctgccggtgaagcacggctcgccgacggtgccgatgccgggctaccaggtcgacgtggtcgatgaagcggccaagcctgtcggtcccaacaccatgggctcgatcgtcatcaagctgccgatgccgccgggctgcctgccgacgctgtggaagcaggacgagcgcttcaaggaggcttacctcagcgaattccccggctattacaagacctcggacgccggctacaaggatgaggacggctatgtctgggtgatgggccgtaccgacgacatcatcaacgtcgccggacatcgcctgtccaccggcggcatggaggagatcctggcctcgcatcccgatgtcgccgaatgcgccgtgctcggcgtcaaggacgcgatcaagggcgaggtgccctgcggcttcctggtgctcaaggccggcgtgcagcgcgcacccgccgagatcgagaaggaaatcattgcgctggtgcgcgacaagctcgggcccgtcgccgccttcaagctcgccatcaccgtcggccgcctgcccaagacgcgctccggcaagattttgcgcggcaccatcaagaagattgccgacggcgaatcctggaccatgcccgcgacgatcgaggaccccaaggtgctggacgagatcggggcggcactgaaggggcgggtgtga

SEQ ID NO: 964 - protein, 636 aa, Bradyrhizobium japonicum
MNIQGKSSYHEVHARSLADPQGFWAEAAREIDWIEPPKTIFDASQGTYGRWFTGGVVNTCYNALDRHVERGRADQVALIHDSPLTNSITKLTYAELLNEVQALGAVMQDFGVAKGDRVILYMPMVPEAVVAMLACARIGAVHSVVFGGFAAKELATRIDDAQPKLILSASCGIEPGRIVQYKPLLDEAIRLAGSKPKACIVLQRPQLTCDLAPGRDYDWASLRRKAMNDGKKAPCVPVAATDPLYILYTSGTTGIPKGVVRDNGGHLVAVKWSMFNLYGVKPGEVWWCGSDIGWVVGHSYIVYGPLLHGATSIMYEGKPVGTPDAGAFWRVISEHKAVALFTAPTAFRAIRKEDPEGKFIRQYDLSTFRTLFLAGERADPPTVEWAEQQLKVPVIDHWWQTETGWCIAGNPVGLGMLPVKHGSPTVPMPGYQVDVVDEAAKPVGPNTMGSIVIKLPMPPGCLPTLWKQDERFKEAYLSEFPGYYKTSDAGYKDEDGYVWVMGRTDDIINVAGHRLSTGGMEEILASHPDVAECAVLGVKDAIKGEVPCGFLVLKAGVQRAPAEIEKEIIALVRDKLGPVAAFKLAITVGRLPKTRSGKILRGTIKKIADGESWTMPATIEDPKVLDEIGAALKGRV

SEQ ID NO: 965 - DNA, 1656 bp, Bacteroides thetaiotaomicron
  CDS (1)..(1656)
atggtagaaagatttttagcacagactagctttgcctcacaagaggatttcatcaagaacctgaaaataaacgtaccggagaatttcaacttcggctacgacgtagtagatgcctgggctgccgaacaacccgacaagaacgctctgctctggaccaatgaccaaggcgaaagccgtcagttctccttcgccgacatgaaacgctatacggacatgacggcctcttacttccagagcctcggcatcggtcgcggagacatggtgatgctgattctgaagcgccgctatgagttctggtacagcaccatcgccctgcataagctgggagcaacggtgatccccgccactcacctgctgacaaagaaagatatcatctatcgctgcaacgctgccgacatcaaaatgattgtggctgccggcgaaggaatcatactgcaacacatcaaagatgctcttcccgagtgtccgagcgtggaaaagctggtcagtgtaggtccggaagttccggaaggattcgaagatttccatcagggaatcgataacgctgcccctttcatccgcccgagacatgccaatacgaatgacgacatctcactgatgtacttcacttccggcactaccggcgaacctaaaatggtagcacatgactttacgtatccgttaggccatatcgttacgggtagtttctggcacaatctggatgagaacagcctccacctcaccatcgccgataccggctggggaaaagccgtatggggaaaactctacggacaatggatcgccggagccaacattttcgtctatgaccacgaaaagttcacgcccgcagctattctggaaaagatacaggagtatcaggtgacttccctttgcgcacctccaaccatcttccgctttctgattcatgaagacctgactaaatatgacttgtcttcactgcggtattgcaccattgccggagaagcactgaaccctgccgtattcgaaaccttcaagaaactgacaggcatcaagctgatggaaggtttcggacagacggaaacgacactgacagttgccaccatgccttggatggaaccgaaaccgggaagcatgggactgcccaatccgcagtatgacgtagacctgatcgacagtgaaggtcgctccgtggaagccggagagcaaggacaaattgtgatccgtaccagcaaaggcaaacctctcggacttttcaaagagtactatcgggatgcggaacgtacacacgaggcttggcacgacggcatttactacacaggtgatgtagcgtggaaagacgaagacggatacctttggtttgtaggacgtgcagacgacgtaatcaagagttccggttaccgtatcggcccgttcgaagtggaaagcgctttgatgacgcaccctgccgtcatagaatgtgccatcaccggagtacccgatgagattcgcggacaggtagttaaagctactatcgtattgtccaaagactataaagcacgtgccggagaagaactgatcaaggaattgcagaaccacgtcaagaaggtgactgctccttataaatatccgcgtgtgattgagttcgttgacgaactgcccaagactatcagcggcaagattcgtcgcgtggaaattcgcgagaacgatgagaaataa

SEQ ID NO: 966 - protein, 551 aa, Bacteroides thetaiotaomicron
MVERFLAQTSFASQEDFIKNLKINVPENFNFGYDVVDAWAAEQPDKNALLWTNDQGESRQFSFADMKRYTDMTASYFQSLGIGRGDMVMLILKRRYEFWYSTIALHKLGATVIPATHLLTKKDIIYRCNAADIKMIVAAGEGIILQHIKDALPECPSVEKLVSVGPEVPEGFEDFHQGIDNAAPFIRPRHANTNDDISLMYFTSGTTGEPKMVAHDFTYPLGHIVTGSFWHNLDENSLHLTIADTGWGKAVWGKLYGQWIAGANIFVYDHEKFTPAAILEKIQEYQVTSLCAPPTIFRFLIHEDLTKYDLSSLRYCTIAGEALNPAVFETFKKLTGIKLMEGFGQTETTLTVATMPWMEPKPGSMGLPNPQYDVDLIDSEGRSVEAGEQGQIVIRTSKGKPLGLFKEYYRDAERTHEAWHDGIYYTGDVAWKDEDGYLWFVGRADDVIKSSGYRIGPFEVESALMTHPAVIECAITGVPDEIRGQVVKATIVLSKDYKARAGEELIKELQNHVKKVTAPYKYPRVIEFVDELPKTISGKIRRVEIRENDEK

SEQ ID NO: 967 - DNA, 2495 bp, Mus musculus
  CDS (87)..(1580)
gctcctgcaggctccccctcggggctagtgccacagctgttgggactgcaaactgctccgactgcagctagggacagagagaaagtatgaagccatcctggttgcaatgtcgcaaagtaacaggcgccgggacgcttggggcacctctgccaggatccccttcagtaagaggagccgctgtgacccgaagggctttggtggccgggtttgggggcaggggctgcagggctctgaccaccggcagtggtggtgagtacaagacccacttcgcagcctctgtggctgaccccgaaagattctggggtaaagctgctgagcagatcagttggtacaagccctggaccaaaactctagagagcagatacccgccttccacaagttggtttgtggaagggatgctgaacatttgttacaatgctattgatcggcacattgaaaatggccaaggggataagattgctatcatctatgacagtcccgttacagacaccaaagcaactatctcctataaggaagtcttggagcaggtctctaagctggctggtgtcttggtcaagcagggtgtcaagaaaggcgatacagtggtcatctatatgcccatgatcccacaagcaatatataccatgctggcgtgtgcaaggataggagcaatccacagtctcatatttggaggatttgcatccaaagaattaagtacgcgcattgatcatgcgaagcctaaggtggttgttacggcatcatttggcattgaaccaggaaggaaggtggagtacatcccacttctagaagaagctctgaggataggacagcacaggccagacagagttctcatttacagccgtccaaacatggagaaagttcctttgatgtcaggtcgtgatcttgattgggaagaagaaatggcaaaagcccagtctcatgactgcgtgcctgttctctcagagcatccattgtacattctctacacatctggaacaactgggctgcctaagggtgtggttagacccactgggggctatgctgtcatgttgaactggacaatgtcttccatatatggactcaaacctggagaggtatggtgggcagcttctgacttaggctgggttgttggacattcctatatttgctatgggcctcttctccatggaaacacaacagttttatatgagggaaagcctgtgggaacaccggatgctggcgcttatttccgtgtgcttgcagagcatggagtggctgccttgtttacagcaccaactgcaattagagccatccgtcaacaggaccctggggcagccttggggaagcagtactctctgacaaggttcaagacactgtttgtagctggggaaagatgtgatgtggagaccctagaatggtccaaaaaagtcttccgagttcccgttctagaccattggtggcaaacagagactggatcccccatcacagcatcatgtattggattaggtaactccaaaacacctccaccaggacaagcaggaaaatgtgttccaggaaacaatggacgatacctgcttcatcattctgcagagtctctgactcctcctgctatgggaaaatgagcccatatctgatgaatccctcaactgaacagtggttgtcctcactctttgatcagaaaacttgctttgtgttaagatacttttagtggttgccaattgtgggagatgctaaacacattttcccctagtatatgtgttccattcttatactcagtagtaagaaagagttaagctttgatgcctcctggaacattaatacagaaaattttcatttcaaaaaccactggctaccagaggagggattaaactactctagttgaagcatcagggactttgtgactgatacacttttagtttgtttaatggatatacataactttgaaagtataatataatacacagcacgatagtaaaagaaagctactttgagaaaggaaaggaaacctttctttgtgaaagaatccatgtggtattatatttaattttatacccattctctagatacccctacaatgagaagacattgcttttgttttataaagaggaaaccagaagggtataaaacaacatggcctggggcatgtagtaattaggatgttgtctttcatttgatgaaacaaagatgaatttggactggttttctcttataatgaactcataatcagcaaaacacggatatttataacttaaataactgtcataatgttttcccatagtgccctctagaaacacaagggaaagtgattaatttaatatcggttcagtgccttcccaaagttgtttaagaataatctaaatgaaaagaacaatatacaagacttcagaatctagataattgctgttcatttttacatgtgatgtgatgaattctggacaccagatactttatcaaacattttccatattctatcaggcatcatgaaaaatattggaatgatatatttggaaaaaataaaatgacccagtttacatatc

SEQ ID NO: 968 - protein, 497 aa, Mus musculus
MKPSWLQCRKVTGAGTLGAPLPGSPSVRGAAVTRRALVAGFGGRGCRALTTGSGGEYKTHFAASVADPERFWGKAAEQISWYKPWTKTLESRYPPSTSWFVEGMLNICYNAIDRHIENGQGDKIAIIYDSPVTDTKATISYKEVLEQVSKLAGVLVKQGVKKGDTVVIYMPMIPQAIYTMLACARIGAIHSLIFGGFASKELSTRIDHAKPKVVVTASFGIEPGRKVEYIPLLEEALRIGQHRPDRVLIYSRPNMEKVPLMSGRDLDWEEEMAKAQSHDCVPVLSEHPLYILYTSGTTGLPKGVVRPTGGYAVMLNWTMSSIYGLKPGEVWWAASDLGWVVGHSYICYGPLLHGNTTVLYEGKPVGTPDAGAYFRVLAEHGVAALFTAPTAIRAIRQQDPGAALGKQYSLTRFKTLFVAGERCDVETLEWSKKVFRVPVLDHWWQTETGSPITASCIGLGNSKTPPPGQAGKCVPGNNGRYLLHHSAESLTPPAMGK

SEQ ID NO: 969 - DNA, 1881 bp, Vibrio vulnificus
  CDS (1)..(1881)
atgtctgcttatcagaaagaatatcaatgggcgaagcagcaaccggaaagcttttggcaagcccaagcaaagaacatcgattggtttgagttccctaaaaccattcttgccaatgatcccaatggcattgagcgttggtaccccgatggactgctcaatacttcatggttggcactcgattaccactgtgaacaaggtcgaggtgataaagcggcgctgatctatgattcacctgtgaccgaaactaagaaggtctacagctatttcgaaatgcgagatcgcgtggctcgtatcgctggcatgttggctgaccaaggcgtgacgaaaggtgatcgcgtggtgatttacatgccgatgatcccagaagcggcgatggcgatgcttgcctgtgcacgattgggggcgattcactcagtggtgtttggtggctttgccccaaatgagctggcggtgcgcattgaagatgccgagcccaaagtggtgctgacagcgtcttgtggtatcgaaatcaacaaagtcatcgcctataagcctatggtggataaagcgatcatggacagccgctggaaaccggaaaaagtggtggtactgcaacgtcctcagtgtgatgcccagctcaacagcgaacgcgatcttgattggcatcaagcggttgaaaacgcgctaccacatgcttgtgttccggtattggcaacggaccctctgtatatcctctacacctcaggcacgacgggcaagccgaaaggggtggtgcgtgacaacggtggccatgccgtggccatgaagtattcaatgagcgccatttacaatatgccgcaggatggcgtgttttgggccgcctctgacgtgggttgggttgtcgggcactcttatatcgtctatgcccctttaattcatggttgcaccacgatcttgtttgaagggaagccagtgcgcacgccggatccaggcgcattttggcgcgtatgtgaagagtatggagtgaatgttcttttctctgcgccaaccgcgttccgagcgattaaaaaagaagatccgcaaggcgagcatctaaagaactatgacctttccaagcttgatacgatttttatggcgggagaaaggcttgacccgccaaccttggaatgggttcaaagccaaacggccaagcccgtgattgaccactggtggcaaacggaaaccggctgggcgattgcaggcaacatggtgggtattgagctaatgcccgtcaaagcggggtcggccaccatgcctattccgggttatcaagtggacattctcgatgaaatggggttaagagctgggccgatgcagcaaggttttgtcgcattgaaaaggcctttgccgccaagctgcttgccaaccgtgtggcgcaatcatgatcgatttgaatcgggttatctgagccagttcccgggttactatgtttcgggcgatggcggttatctggatgaagagggttatctctttatcatgggtcgcattgatgatgtgattaacgtggctgggcatcgtctctctaccggcgaaatggaagagattgttggcgcgcaccctgccgttgcggaatgtgccgtggttggcgtgcacgatgagctcaaagggcagttgccactagggtttgtggtgctcaaagatggggtgaaaatcgacccaaccgagctggagcaagaactcgtcggcaaagtgcgtaatgaaattggcgccgttgcctgctttaaacaagccttggtggtggagcgtttacctaagacgcgctcaggcaagatcttgcgccgtaccatccgtcaaattgccgatggtgaacaatacgctgtgccatccaccattgacgatccgaccagtcttaatgagttgatcagattatttccagaaaaataa

SEQ ID NO: 970 - protein, 626 aa, Vibrio vulnificus
MSAYQKEYQWAKQQPESFWQAQAKNIDWFEFPKTILANDPNGIERWYPDGLLNTSWLALDYHCEQGRGDKAALIYDSPVTETKKVYSYFEMRDRVARIAGMLADQGVTKGDRVVIYMPMIPEAAMAMLACARLGAIHSVVFGGFAPNELAVRIEDAEPKVVLTASCGIEINKVIAYKPMVDKAIMDSRWKPEKVVVLQRPQCDAQLNSERDLDWHQAVENALPHACVPVLATDPLYILYTSGTTGKPKGVVRDNGGHAVAMKYSMSAIYNMPQDGVFWAASDVGWVVGHSYIVYAPLIHGCTTILFEGKPVRTPDPGAFWRVCEEYGVNVLFSAPTAFRAIKKEDPQGEHLKNYDLSKLDTIFMAGERLDPPTLEWVQSQTAKPVIDHWWQTETGWAIAGNMVGIELMPVKAGSATMPIPGYQVDILDEMGLRAGPMQQGFVALKRPLPPSCLPTVWRNHDRFESGYLSQFPGYYVSGDGGYLDEEGYLFIMGRIDDVINVAGHRLSTGEMEEIVGAHPAVAECAVVGVHDELKGQLPLGFVVLKDGVKIDPTELEQELVGKVRNEIGAVACFKQALVVERLPKTRSGKILRRTIRQIADGEQYAVPSTIDDPTSLNELIRLFPEK

SEQ ID NO: 971 - DNA, 1986 bp, Oceanobacillus iheyensis
  CDS (1)..(1986)
atgaaagtagaagaaggtacattattatgggaaccaagcgaccaacaaattaaacaatcaaatatgtatgcatatcaacaatggctagcaaacaataaacaacttcatttgaacgattatgcttctttgtggaaatggtcagtagacgatattagttctttttgggaaacgatatgggaatactttaatgtaatttctcaccacccttatcaacatgtaatatcaagtacatcaatgcctggttctagatggtttaaagaagcgaaagtcaattatgcagaacatgtatttaagcataaagataattccaaccctgccatcatacatgcttcagaaacaagaggaaagcaagaaatttcctggcaacaactttatcaagatacgactgctcttcaacttacacttaagaatatcggtgtaacaaaaggagaccgagtagttagttatgctcctaatatttatgaaactgtggtcgcttttctagctacttctagtctcggagcaatttggtccagtgcatctcctgactttggtaaacaaagtgttatcgagcgattccagcaaattgaacctaaagttatgattaccatagatggctatcaatatggtggtaaaagctttgatcgaatggcgattattgaagagattcaatcaacaataccttctttagaagctacgattgcgatcccttacttgcatgccgatacagatttttctaatttaaaacaaccaataacatggaaagatgcagtgcacactagtaaacccttagaactaacctttacacctgtcggctttaatgatccactttgggtactctattcatctggtacaacaggaaagccgaaagcaatcgttcatagtcagggtggtatgttactcgagcatctaaaagccactcacttacatctcgatttagatcagaattctcgatttttctggtttactacaaccggatggatgatgtggaattttcttgttggcgggctccttaatggtagctgtattattttatacgatggaagtccatcctacccagatgaacgtttcttatggaagtttgctgaggatacaaaaatgactgtatttggaaccagtgccagtttcataacttcttcgatgaagaaagatatccacccagaagaagaatttgatctttctgctttaaaaaacataagttcgactggatctccgttacctcctgaagggtttcaatggtgttatactcatgtaaaaaaagatatttgggtatcttctgttagtggcggaaccgatgtttgtacggcctttttacttggctctccaactctaccagtatatgcgggtgaattgcagtgtagtggtctaggagcaaaagtggaaagttttgattcaaatggaaattcattagttaatgaaattggcgagttagtactaacaaaaccatttccatgtatgccgatcttcttctggaatgacgatgatggtatgcgaatgtatcatagctattttgacacttatcgcggggtctggtgtcacggtgattatataaaaatcacggaaaaaggcacttctattatctatggtcgttcggacgcaacaatcaatcgcggaggtattcgtattggtacaagtgagatctatcgagcagttgatcaaatcgaagaagtagaagatagtttaatgatagatttacctcaaaccaacggagactcgattactcctttgtttgtagtaatgaaaaatagtaagcctttcacagatgaagtgaaaaactctattaaaaataacttaaaaacgcactgttcaccaagacatgtgcctactcatatgtttgaagtgaaggaattgcctaaaacattaaatggcaaaaagattgaagttcctataaagaaaatattaatgggcgaaagttttgagcaagtaatgaataaaggatcgcttatcaacgaaagtgctattgaatattttattaacttagccagagaatggaattccagcgtctga

SEQ ID NO: 972 - protein, 661 aa, Oceanobacillus iheyensis
MKVEEGTLLWEPSDQQIKQSNMYAYQQWLANNKQLHLNDYASLWKWSVDDISSFWETIWEYFNVISHHPYQHVISSTSMPGSRWFKEAKVNYAEHVFKHKDNSNPAIIHASETRGKQEISWQQLYQDTTALQLTLKNIGVTKGDRVVSYAPNIYETVVAFLATSSLGAIWSSASPDFGKQSVIERFQQIEPKVMITIDGYQYGGKSFDRMAIIEEIQSTIPSLEATIAIPYLHADTDFSNLKQPITWKDAVHTSKPLELTFTPVGFNDPLWVLYSSGTTGKPKAIVHSQGGMLLEHLKATHLHLDLDQNSRFFWFTTTGWMMWNFLVGGLLNGSCIILYDGSPSYPDERFLWKFAEDTKMTVFGTSASFITSSMKKDIHPEEEFDLSALKNISSTGSPLPPEGFQWCYTHVKKDIWVSSVSGGTDVCTAFLLGSPTLPVYAGELQCSGLGAKVESFDSNGNSLVNEIGELVLTKPFPCMPIFFWNDDDGMRMYHSYFDTYRGVWCHGDYIKITEKGTSIIYGRSDATINRGGIRIGTSEIYRAVDQIEEVEDSLMIDLPQTNGDSITPLFVVMKNSKPFTDEVKNSIKNNLKTHCSPRHVPTHMFEVKELPKTLNGKKIEVPIKKILMGESFEQVMNKGSLINESAIEYFINLAREWNSSV

SEQ ID NO: 973 - DNA, 1716 bp, Oceanobacillus iheyensis
  CDS (1)..(1716)
atggatatgcaagtagtacctgcacgtgaaggtaatcataatttaaaggattatgaagcattaagaaaggacttttcatgggaggaagtcaagaaaaatttctcttggtatgaatcagggaaggtgaatatggcatatgaagcagtagataaacatgcagctgatccaactaaaaaagatcaagcagcattattatactcagctcctgaccgtgaagagaaagtaacatttgaacaacttcgattaaagagtaatcaatttgctaatgtattgaaaaaatacgagattgaaaaaggagaccgtgtctttttatttatgccgagaagccctgaattctatgaggcattctttggtattttaaaaatcggcgctattgctggtccattatttgaagcatttatggaacaggcagtaggagatcgtttggacgacagtgaggctcgagtattaattacaacgccagaactactatatcgtgtgccacaagataaactcccgcatttagaaaaaattgtacttgtgggcgatcattcagaacaagatgataaatttattgattatgaagaagaaatgaaaggtgcatccgaagattttgacattgtttgggttgatttagaggatggaatgctattgcattacacatctggttcaacaggaaaaccaaaaggtattcttcatgtgcataatgccatgattcagcattatgctacagctgaatgggtgctagatctaaaagaagatgatgtttactggtgtacagcagatcctggttgggtaactggtacaagttatgggattttcgctccatggctccatggtgtgacgaatgttattcgtggaggccgatttacgccagatgattggtatcaaacattacaagactataaagtaacggtctggtatacagcgccaactgctttgcgtatgcttgtaagtcatggagaagacactgtgaaaaaatatgatctttcttctgtacgacacatccttagtgtcggagaaccattgaatccggaagtaattacatggggactaaaagcttttgatcttcgcattcacgatacatggtggatgactgaaacgggagcacaattgattgtaaacattccatcgcttgagattcgaccaggatccatggggaaaccaattcctggggtagaagcttcaatcgttgataatgagggaaatgagattccgccaaatcaaatggggaaccttgctattaaggaaggttggccatcgatgatgcgggaagtctggaagaataaaagtaaatttgaaagctattttgtaaatggctggtatgtatctggagatagtgcataccgcgatgaagatggatatttctggttccaaggtcgtctggatgatgttatcaatacatctggtgaaagagtgggtccatttgaagtagagagtaaattaattgagcatccagctgtttcagaagcgggtgttattggaaaaccgcatccggaacgcggagaaattataaaagcatttattaccttaaatgcaggctatgaagatagtgaagaattattagaggatattcgtcaatttgtaaaaacagggttaagtgcacatgcagctccacgagaaattgaagtgaaagatagtatcccaaaaacaagaagtggaaaaattatgcgtagacttctaaaatcttgggaacttggcttgccgacaggagatacatctactttagaagattaa

SEQ ID NO: 974 - protein, 571 aa, Oceanobacillus iheyensis
MDMQVVPAREGNHNLKDYEALRKDFSWEEVKKNFSWYESGKVNMAYEAVDKHAADPTKKDQAALLYSAPDREEKVTFEQLRLKSNQFANVLKKYEIEKGDRVFLFMPRSPEFYEAFFGILKIGAIAGPLFEAFMEQAVGDRLDDSEARVLITTPELLYRVPQDKLPHLEKIVLVGDHSEQDDKFIDYEEEMKGASEDFDIVWVDLEDGMLLHYTSGSTGKPKGILHVHNAMIQHYATAEWVLDLKEDDVYWCTADPGWVTGTSYGIFAPWLHGVTNVIRGGRFTPDDWYQTLQDYKVTVWYTAPTALRMLVSHGEDTVKKYDLSSVRHILSVGEPLNPEVITWGLKAFDLRIHDTWWMTETGAQLIVNIPSLEIRPGSMGKPIPGVEASIVDNEGNEIPPNQMGNLAIKEGWPSMMREVWKNKSKFESYFVNGWYVSGDSAYRDEDGYFWFQGRLDDVINTSGERVGPFEVESKLIEHPAVSEAGVIGKPHPERGEIIKAFITLNAGYEDSEELLEDIRQFVKTGLSAHAAPREIEVKDSIPKTRSGKIMRRLLKSWELGLPTGDTSTLED

SEQ ID NO: 975 - DNA, 1887 bp, Escherichia coli O6
  CDS (1)..(1887)
atgtcttttagcgaattttatcagcgttcgattaacgaaccggagaagttctgggccgagcaggcccggcgtattgactggcagacgccctttacgcaaacgctcgaccacagcaacccgccgtttgcccgttggttttgtgaaggccgaaccaacttgtgtcacaacgctatcgaccgctggctggagaaacagccagaggcgctggcattgattgccgtctcttcggaaacagaggaagagcgtacctttaccttccgccagttacatgacgaagtgaatgcggtggcgtcaatgctgcgctcactgggcgtgcagcgtggcgatcgggtgctggtgtatatgccgatgattgccgaagcgcatattaccctgctggcctgcgcgcgcattggtgctattcactcggtggtgtttgggggatttgcttcgcacagcgtggcaacgcgaattgatgacgctaaaccggtgctgattgtctcggctgatgccggggcgcgcggcggtaaaatcattccgtataaaaaattgctcgacgatgcgataagtcaggcacagcatcagccgcgtcacgttttactggtggatcgcgggctggcgaaaatggcgcgcgttagcgggcgggatgtcgatttcgcgtcgttgcgccatcaacacatcggcgcgcgggtgccggtggcatggctggaatccaacgaaacctcctgcattctctacacctccggcacgaccggcaaacctaaaggtgtgcagcgtgatgtcggcggatatgcggtggcgctggcgacctcgatggacaccatttttggcggcaaagcgggcggcgtgttcttttgtgcttcggatatcggctgggtggtagggcattcgtatatcgtttacgcgccgctgctggcggggatggcgactatcgtttacgaaggattgccgacctggccggactgcggcgtgtggtggaaaattgtcgagaaatatcaggttagccgcatgttctcagcgccgaccgccattcgcgtgctgaaaaaattccctaccgctgaaattcgcaaacacgatctttcgtcgctggaagtgctctatctggctggagaaccgctggacgagccgaccgccagttgggtgagcaatacgctggatgtgccggtcatcgacaactactggcagaccgaatccggctggccgattatggcgattgctcgcggtctggatgacagaccgacgcgtctgggaagccccggcgtgccgatgtatggctataacgtgcagttgctcaatgaagtcaccggcgaaccgtgtggcgtcaatgagaaagggatgctggtagtggaggggccattgccgccaggctgtattcaaaccatctggggcgacgacgaccgctttgtgaagacgtactggtcgctgttttcccgtccggtgtacgccacttttgactggggcatccgcgatgctgacggttatcactttattctcgggcgcactgacgatgtgattaacgttgccggacatcggctgggtacgcgtgagattgaagagagtatctccagtcatccgggcgttgccgaagtggcggtggttggggtgaaagatgcgctgaaagggcaggtggcggtggcgtttgtcattccgaaagagagcgacagtctggaagaccgtgaggtggcgcactcgcaagagaaggcgattatggcgctggtggacagccagattggcaactttggccgcccggcgcacgtctggtttgtctcgcaattgccaaaaacgcgatccggaaaaatgctgcgccgcacgatccaggcgatttgcgaaggacgcgatcctggggatctgacgaccattgatgatccggcgtcgttggatcagatccgccaggcgatggaagagtag

SEQ ID NO: 976 - protein, 628 aa, Escherichia coli O6
MSFSEFYQRSINEPEKFWAEQARRIDWQTPFTQTLDHSNPPFARWFCEGRTNLCHNAIDRWLEKQPEALALIAVSSETEEERTFTFRQLHDEVNAVASMLRSLGVQRGDRVLVYMPMIAEAHITLLACARIGAIHSVVFGGFASHSVATRIDDAKPVLIVSADAGARGGKIIPYKKLLDDAISQAQHQPRHVLLVDRGLAKMARVSGRDVDFASLRHQHIGARVPVAWLESNETSCILYTSGTTGKPKGVQRDVGGYAVALATSMDTIFGGKAGGVFFCASDIGWVVGHSYIVYAPLLAGMATIVYEGLPTWPDCGVWWKIVEKYQVSRMFSAPTAIRVLKKFPTAEIRKHDLSSLEVLYLAGEPLDEPTASWVSNTLDVPVIDNYWQTESGWPIMAIARGLDDRPTRLGSPGVPMYGYNVQLLNEVTGEPCGVNEKGMLVVEGPLPPGCIQTIWGDDDRFVKTYWSLFSRPVYATFDWGIRDADGYHFILGRTDDVINVAGHRLGTREIEESISSHPGVAEVAVVGVKDALKGQVAVAFVIPKESDSLEDREVAHSQEKAIMALVDSQIGNFGRPAHVWFVSQLPKTRSGKMLRRTIQAICEGRDPGDLTTIDDPASLDQIRQAMEE

SEQ ID NO: 977 - DNA, 1671 bp, Brucella suis
  CDS (1)..(1671)
atgactgaaagccctgcttcagcacggctcgaccgctacgatgatgccgttgcgcagttcgatattgcaaaagccattgcgcttcttgcaggaaatcctgatacgggtatcaatgcctgcattgaatgctgcgaccgatatacgggcgaaaatcgcgtggcgctgcgcgccatttccatcgacaatacgttgactgaactcacctttgaagacctgcgcgatatgtccgcgcgggtcggcaatatgctggccgatgccgggatcagcgcaggcgatgtggttgccggtcttctcccccgcacgcctgaactcgtcgccaccattctcggcgcctggcgcatcggcgcaatctatcagccgcttttcaccgccttcggcccaaaagccatcgaacagcgtttcggcaccagtggcgccaaactcgtcgtcaccaacctggccaatcgttccaaattggccgaagtggaaaactgcccccgcgtcgcaaccattcttgcccccggtgaaagcctgccggaaggcgatatcgactttcgcgcagccgtggcggcagcatcgaccgaatgcgagcccgtcatgcgcaagggcagcgaccttttcatgatgatgtccacctccggcacggcgggcctgcccaaaggcgtcccggtgccgctgcgcgccctgatggctttcggcgcctatatgcgcgatgccgtgggcctgcgcagcgacgatattttctggaatatcgccgatccgggctgggcatatgggctttactatgccgtgacgggtcccctgcttctgggtgtgccgacgatcctgaacgaaggcggtttcaccgccgaaaacacctatgacatcatcgaacgcctcggcgtgacgagccttgcgggctctccgactgccttccgcctgcttatggccgccgggccggaatctgctgcccgcgtcaagggccgcttgcgcgtggtatccagcgcgggcgagccgctgaacccggaagtcattcgctggttcgatgcctgtcttggcgcgccgatccacgatcattacggccagacggaactgggcatggtggtgaacaaccatcatggattggaacatccggtgcggcagggttcggcgggctatgccatgccgggctacagggttgcggttctggatgaagcgggcaaagaagtcggccccaatgaaccgggcgttctggccattgatatcgacaattcgccgcttctctggttcaccggctattataaaaaggatacgccctccatctccggcggatattatcgcaccggcgatacggtggaattcgagccggatgggtctatcagcttcatcggccgcgccgatgacgtcatcacctcctccggctatcgcatcgggcctttcgatgtggaaagcgcgcttctgaaacatcctgcggtcaacgaggctgcggtggtcggcgttcccgatccgcaacgcaccgaaatcgtgaaggcctttgtcatcctggcccccggcttcgagggtacgccggaactggcggaagaactggcgcttcacgtcaagaaacagctttccgcccatgcctatccgcggcagatcgactttgtggcggagcttcccaagacgctgagcggaaaaatacagcgcttcctcctgcgcaaggcggaagtcgaaaagcaacagcaacagaattag

SEQ ID NO: 978 - protein, 556 aa, Brucella suis
MTESPASARLDRYDDAVAQFDIAKAIALLAGNPDTGINACIECCDRYTGENRVALRAISIDNTLTELTFEDLRDMSARVGNMLADAGISAGDVVAGLLPRTPELVATILGAWRIGAIYQPLFTAFGPKAIEQRFGTSGAKLVVTNLANRSKLAEVENCPRVATILAPGESLPEGDIDFRAAVAAASTECEPVMRKGSDLFMMMSTSGTAGLPKGVPVPLRALMAFGAYMRDAVGLRSDDIFWNIADPGWAYGLYYAVTGPLLLGVPTILNEGGFTAENTYDIIERLGVTSLAGSPTAFRLLMAAGPESAARVKGRLRVVSSAGEPLNPEVIRWFDACLGAPIHDHYGQTELGMVVNNHHGLEHPVRQGSAGYAMPGYRVAVLDEAGKEVGPNEPGVLAIDIDNSPLLWFTGYYKKDTPSISGGYYRTGDTVEFEPDGSISFIGRADDVITSSGYRIGPFDVESALLKHPAVNEAAVVGVPDPQRTEIVKAFVILAPGFEGTPELAEELALHVKKQLSAHAYPRQIDFVAELPKTLSGKIQRFLLRKAEVEKQQQQN

SEQ ID NO: 979 - DNA, 1989 bp, Brucella suis
  CDS (1)..(1989)
atgagcaccgaggcgatctccagacagtcttcgcatgacaatccgctgtggcaaccggatggcgcgcgcattgcggccagcaatctcgaacaattccgcattcgcgccgaacggcataccggcctcagcctgccggattatgccgcgctgcatcgctggtctgtagaggatcgcgccgggttctggcaacttgtatgggatttctgctcggttatcggagagcgtggcaatacggcccttaccgacaggggccatatgcgcgcggcaaaattcttccccgaggcgcggctcaactttgccgaaaacctgttgcgccacaagggcgatggggaggccattgtctttcgcggggagaataaggtcgagcgccgcctgacctggaacgatcttcatgcgctggtctcgaagctacagcaattcatgctttccgagggcgtgcagccgggcgaccgtgtggcgggcatgatgcccaacatgccggaggcggtggcgctgatgctggcggcctcgtccatcggtgcggtctggtcgtcatgctcgccggattttggcgtgcagggcgtgcttgaccgtttcggccagatcgagccgaaactgttcttcgcctgcgatggctactggtataatggcaagcgcatcgcggttgccgacaaggtggctgaagtgacggcaaaactgccgggactgaagcgcgcggtcatcgtcacctatcttggcgaagcggaagccgtcgccgacaaggcggaaaagggcattgcactttatgcggcgctggagccattcaaggccaagcccgtggaattcacgcagcttcccttcgatcatccgctttatatcctgttttcgtcgggcacgaccggcattccgaaatgcatcgtgcatcgggctggcggcgtgctgctgcaacacctgaaggaacatcgccttcatgccgacctgcgcgatggcgaccgcttcttctatttcaccacctgcggctggatgatgtggaactggctggcttctggcatcgcctccggcgccacgcttatgctctatgacggctcgcccttctatccggacggcaatgtgctgttcgattatgccgctgctgagggcatgacctatttcggcacgtcggcaaaattcatcgatgccgtgctgaaagcgggattgaagcccggagaaacgcacgacctttcggctctgcgcaccatttcctccaccggctcgccgctgtcgccggaaggctttgccttcgtctatgatgcgatcaagaaggatgtgcatctcgcctccatttcgggcggaacggacattgtgtcctgcttcgtgctgggcgttccgaccgagcctgtctggcagggcgagatacagggtgccgggctcggcatggctgtcgatgtctggaacgatgacggcaagccggtgcggggcgaaaagggtgaactggtctgcacgaaggcatttccttccatgccgctgcaattctggaacgacgcgcaaggcgaaaaatatcaggccgcctatttcgagcgtttcgacaatatctggtgccatggcgattttgccgaatggaccgaacatggcggcatcgtcatccatggccgctcggacgcgacgctgaaccccggcggcgtgcgcatcggcacggcggagatctacaatcaggtcgagcagatgccggaaattgccgaggcgctctgcatcggacaggattgggacagggatgtgcgggtggtgcttttcgtacggcttgccgaaggggtggtgctggatgacgacctcaaggcgcgcatcaggaccaaaatccgcaccggcgccacaccgcgccatgtaccggcgaaaatcattgccgtccgcgatattccgcgcaccaaatcgggaaagatcgtggaacttgccgtccgcgatatcgtgcatggtcgcgaggtgaagaaccgtgaagcattggccaacccggaagcgctggaattttatcgcgacatagccgagttgcagcaggattga

SEQ ID NO: 980 - protein, 662 aa, Brucella suis
MSTEAISRQSSHDNPLWQPDGARIAASNLEQFRIRAERHTGLSLPDYAALHRWSVEDRAGFWQLVWDFCSVIGERGNTALTDRGHMRAAKFFPEARLNFAENLLRHKGDGEAIVFRGENKVERRLTWNDLHALVSKLQQFMLSEGVQPGDRVAGMMPNMPEAVALMLAASSIGAVWSSCSPDFGVQGVLDRFGQIEPKLFFACDGYWYNGKRIAVADKVAEVTAKLPGLKRAVIVTYLGEAEAVADKAEKGIALYAALEPFKAKPVEFTQLPFDHPLYILFSSGTTGIPKCIVHRAGGVLLQHLKEHRLHADLRDGDRFFYFTTCGWMMWNWLASGIASGATLMLYDGSPFYPDGNVLFDYAAAEGMTYFGTSAKFIDAVLKAGLKPGETHDLSALRTISSTGSPLSPEGFAFVYDAIKKDVHLASISGGTDIVSCFVLGVPTEPVWQGEIQGAGLGMAVDVWNDDGKPVRGEKGELVCTKAFPSMPLQFWNDAQGEKYQAAYFERFDNIWCHGDFAEWTEHGGIVIHGRSDATLNPGGVRIGTAEIYNQVEQMPEIAEALCIGQDWDRDVRVVLFVRLAEGVVLDDDLKARIRTKIRTGATPRHVPAKIIAVRDIPRTKSGKIVELAVRDIVHGREVKNREALANPEALEFYRDIAELQQD

SEQ ID NO: 981 - DNA, 2924 bp, Homo sapiens
  CDS (34)..(2178)
aaaaggcggccgcggttctaggaacttgacgtgatggggcttcctgaggagcgggtccggagcggcagcgggagccggggccaggaggaagctggagccggaggccgggcgcggagttggtctccgccgcccgaggtcagccgctccgcgcacgtcccctcgctgcagcgctaccgcgagctgcaccggcgctccgtggaggagccgcgggaattctggggagacattgccaaggaattttactggaagactccatgccctggcccactccttcggtacaactttgatgtgactaaagggaaaatcttcattgagtggatgaaaggagcaactaccaacatctgctacaatgtactggatcgaaatgtccatgagaaaaagcttggagataaagttgctttttactgggagggcaatgagccaggggagaccactcagatcacataccatcagcttctggtccaagtgtgtcagttcagcaatgttctccgaaaacagggcattcagaagggggaccgagtggccatctacatgcctatgatcccagagcttgtggtggccatgctggcatgtgcccgcattggggctttgcactccattgtgtttgcaggcttctcttcagagtctctatgtgaacggatcttggattccagctgcagtcttctcatcactacagatgccttctacaggggggaaaagcttgtgaacctgaaggagctggctgacgaggccctgcagaagtgtcaggagaagggtttcccagtaagatgctgcattgtggtcaagcacctggggcgggcagagctcggcatgggtgactccaccagccagtcccccccaattaagaggtcatgcccagatgtgcagggtaaactgaaagagaaatccaagcgtgttcagccccagatctcatggaaccaagggattgacttgtggtggcatgagctcatgcaagaggcaggggatgagtgtgagcccgagtggtgtgatgccgaggacccactcttcatcctgtacaccagtggctccacaggcaaacccaagggtgtggttcacacagttgggggctacatgctctatgtagccacaaccttcaagtatgtgtttgacttccatgcagaggatgtgttctggtgcacggcagacattggttggatcactggtcattcctacgtcacctatgggccactggccaatggtgccaccagtgttttgtttgaggggattcccacatatccggacgtgaaccgcctgtggagcattgtggacaaatacaaggtgaccaagttctacacagcacccacagccatccgtctgctcatgaagtttggagatgagcctgtcaccaagcatagccgggcatccttgcaggtgttaggcacagtgggtgaacccatcaaccctgaggcctggctatggtaccaccgggtggtaggtgcccagcgctgccccatcgtggacaccttctggcaaacagagacaggtggccacatgttgactccccttcctggtgccacacccatgaaacccggttctgctactttcccattctttggtgtagctcctgcaatcctgaatgagtccggggaagagttggaaggtgaagctgaaggttatctggtgttcaagcagccctggccagggatcatgcgcacagtctatgggaaccacgaacgctttgagacaacctactttaagaagtttcctggatactatgttacaggagatggctgccagcgggaccaggatggctattactggatcactggcaggattgatgacatgctcaatgtatctggacacctgctgagtacagcagaggtggagtcagcacttgtggaacatgaggctgttgcagaggcagctgtggtgggccaccctcatcctgtgaagggtgaatgcctctactgctttgtcaccttgtgtgatggccacaccttcagccccaagctcaccgaggagctcaagaagcagattagagaaaagattggccccattgccacaccagactacatccagaatgcacctggcttgcctaaaacccgctcagggaaaatcatgaggcgagtgcttcggaagattgctcagaatgaccatgacctcggggacctgtctactgtggctgacccatctgtcatcagtcacctcttcagccaccgctgcctgaccatccagtgaacatgatcctgacctttacctaggattcctcctgctccaaactttgcccatcctctttgccccctcaggagtgctgagggccagtgttgacccacactaccctcccttgaccagctgtctgggaccggaaaccagctttgtctccaggtagagacaacatcctgtgactgccaggcagaaaggacagggcccaggtcagcctcagtctgctgtgcctccagactgcagagctctcagaacccagaacagagacgaaaaggctacctctcctacccaagttaagtgttcaaaggggatgtgagggcctccactgaagcagggaggcagctgtgtaatcctatttcagctctcttaggaagccccagtacttatattgggcatgcacttgcccttaaaaacaatgatttgtgagtccaggaacaatttactatttttaaaatattttgctgcttctgttctgggtctgaattcccttttgtgccagatgccagtactgtctgcccattggctccaggggctgtatgggcagattcagtctccagagggtattcagatcatctgcttctttgaaggagtaaatgtgttttgttcctagggccagaggagcttgtcttccttgtcctctgttcccaccctcccctgaacagaacccagcccataagagacattctcagatgaaactctgttttcttgccccagtcaggctcaagccctgtggttgtaggaataaagcctgtgatctcaag

SEQ ID NO: 982 - protein, 714 aa, Homo sapiens [sequence omitted]

SEQ ID NO: 983 - DNA, 1899 bp, Encephalitozoon cuniculi
  CDS (1)..(1899)
atggacagaagcgagtatgagggattgtacaagagatctattgaggataaagagggtttttggggagagcaagcaaaggtgcttttgaagtgggacaggatgtttgacagggtttacaacaatgactttgagaactcaaggtggttcgaaggaggtatgttgaatgcatgctataattgcgttgatagacatgcggcctgcagcccggacaaagtcgcggttatttatgagggaaacgatggggagtcggtctactacacattcaaagacgtccttgatgaagttataaggatctgtaccatacttaaggacgaaggtcttgagaagggagatacggttgctatgtatatggcaatgtccccgtatgcagtgttttctgcacttgcatgtgctaggcttggtcttgtgcataatgcaatcttcggaggatttagtgcaagcagcgtggctctacggcttaacgactcgaatgccaagcttttaatagtccaggacgtcgttgcaaggcaagactccaccatgaacttccttgagaacacaagggtagcgctcaagggaaaatcaattcctgttctagtcttcgacacatttctggacgagagaaagatcttagattcactggatgggattggaggaaggattctgatatggtcaaaggttttgaagagggagaatgaattcattccctgtgtctcggtcaatgcagaggacagacttttctatctgtacacaagtggaagtacaggaaagccaaaaggaattatccacacggccggtgggtatctggtgtatgcgatgcttacttccaaaatatgctttgatcttcaagaaaacgatgtttttgcctgtacggcagacataggatggatcacagggcatacatatgtcatttacgggccgctgttgaatggaatcacgaccgttgtatttggaggaacgcccttctatccttcgtattacaggctcttcaagatggtcgaaaagtatagaataactcagttgtacactgcgcctacagttataaggatgctgaggaagcatttttccacaacaccccttgatcacaactatgacctgtcttccctgagaattctcggatctgttggagagccgataaataagaatgcccatctgtggtttagtgagaacttcaacggctgtcctgttattgatacatattggcaaactgaatctggtgggattctgattgcgcctattccgcacgccgtagacataaagcctgagtgtgcctgtcttccatttttaggccaagaggttgttattgcggatccgagctctagaagcgactgtgttgtcgaagcgaaggcctatgagttagggcgtgttcttctcaagggttcctggcctgggataaccagagggattctaggaaacccggagagattcagaaagggatattttttctacaagggattctacttcacgggcgacgaaggatataaagattctgatggacatgtgtggatcagaggaagagctgacgacgtgataaatgtctctggacacaggattagcacggcagaggtcgaaggcgcggcatgtacggatccgcatatagctgaggcagcagctgttgcagaaagcgacgatattactgggcaggccctttgcatttttgtggtcttgaaagacaggaaaacatctcatgaaggagtaagagcgtctctgagaacaactctgagaagcaagatcggaaagtttgttaatgcaaaaagaatctacttctgtgaaggtattcccaagactgcaactggaaagatcatgagaagagtcctgaaaagtatcctggccggagatccgcctggagatgtatcgacttgtaccaatgcagacattattgagggcctgagagaaattgctggatcggaagtaaattaa

SEQ ID NO: 984 - protein, 632 aa, Encephalitozoon cuniculi
MDRSEYEGLYKRSIEDKEGFWGEQAKVLLKWDRMFDRVYNNDFENSRWFEGGMLNACYNCVDRHAACSPDKVAVIYEGNDGESVYYTFKDVLDEVIRICTILKDEGLEKGDTVAMYMAMSPYAVFSALACARLGLVHNAIFGGFSASSVALRLNDSNAKLLIVQDVVARQDSTMNFLENTRVALKGKSIPVLVFDTFLDERKILDSLDGIGGRILIWSKVLKRENEFIPCVSVNAEDRLFYLYTSGSTGKPKGIIHTAGGYLVYAMLTSKICFDLQENDVFACTADIGWITGHTYVIYGPLLNGITTVVFGGTPFYPSYYRLFKMVEKYRITQLYTAPTVIRMLRKHFSTTPLDHNYDLSSLRILGSVGEPINKNAHLWFSENFNGCPVIDTYWQTESGGILIAPIPHAVDIKPECACLPFLGQEVVIADPSSRSDCVVEAKAYELGRVLLKGSWPGITRGILGNPERFRKGYFFYKGFYFTGDEGYKDSDGHVWIRGRADDVINVSGHRISTAEVEGAACTDPHIAEAAAVAESDDITGQALCIFVVLKDRKTSHEGVRASLRTTLRSKIGKFVNAKRIYFCEGIPKTATGKIMRRVLKSILAGDPPGDVSTCTNADIIEGLREIAGSEVN

SEQ ID NO: 985 - DNA, 2004 bp, Neurospora crassa
  CDS (1)..(2004)
atgtctggtagcaccgttcctgccggggcagtagtgcccgaggctcacactattgagaccttccagccccctagggagatgcttcagaaccacccaagcaaacctcatcttgccaactttgaggagtaccagaagctgtacaagcagtccatcaccgagcccaacgtgttctgggctgagcgcgcccgcgagcttctgtcgtggagcaaggatttccagacggtccacagcggctccctcgccaacggtgacaacgcctggttcgtagagggcgagctcaacgcctcgtacaactgcgtcgacagacacgcccacaaggaccccaacagagtcgccatcatctacgaggccgacgagcccggtcagggaaggaatgtcacctatggcgagctcctcagggaggtctccaagctcgcccatgtcctcaccaacttgggtgttcgcaagggagacaccgtcgccatctaccttcccatgattcccgaggccatcgttgccatgcttgcttgcaccagaattggcgccatccactccgtcgtttttgccggcttctcctccgactccctccgcgaccgtgtcgtcgatgcccagtccaaggttgtcatcaccaccgatgagggcaagcgcggtggcaagctgattggcaccaagaagatcgtcgacgaggctctccagcagtgccccgatgttcgcaacgtgctcgtctacaagcgcaccggcgccgacatcagcatgacccccggccgtgatctctggtggcacgaggaggttgagaagtaccctgcttactacacccctgtggccatggcctcggaggatcctctcttccttctctacacctctggctccactggcaagcccaagggagttgcccactctaccggtggttacctgctcggtgctgccatgaccggcaagtacgttttcgacatccatgacggcgacaggtatttctgcggtggtgacgtcggctggattaccggtcacacctatgtcctctacgccccgctcttgctcggtgtctctaccgtcgttttcgagggtacccccgcctaccccaacttctcccgctactgggacatcattgaggagcacaaggtcactcagttctacgttgctcccactgccctgcgcctgctgaagcgcgccggtgaccatcacgttcgcaacgagatgaagcacctccgtgttctcggctctgtcggtgagcccatcgccgccgaggtctggaagtggtactatgatgttgtcggcaagggccgcgcccagatttgcgacacctactggcagaccgagactggctccaacgtcatcactccccttgccggcgttacccccaccaagcccggttccgcttctttccccttcttcggtatcgagcccgcgcttgtcgaccccgttaccggcgaggagatccacggcaacgacgttgagggtgtcttggccttcaagcagccctggcccagcatggctcgcaccgtctggggtgcccataagcgctacatggagacctacctccatgtgtacaagggctactacttcacgggcgacggtgctgcccgcgatcacgagggcttctactggatccgcggccgtgtcgacgacgtcgtcaacgttagtggccaccgtctcagcactgccgagattgaggctgctctgattgagcatcactccattgccgaggctgctgttgttggtgttgccgacgagctcactggccaggccgtcaacgccttcgttgccgtcaaggagggtacccagatcaacgatgctctccgcaaggagttcgtcctccaggtccgccgcagcatcgggcccttcgctgctcccaaggccatctacatcgttcctgatcttcccaagactcgctctggcaagatcatgcgccgcattctgaggaagattgttgccggcgaggaagatcagcttggtgatatcactactctcagcgatcccagcgtcgttgccaagatcatcgatgtcgtccacgcgcagcgccagtaa

SEQ ID NO: 986 - protein, 667 aa, Neurospora crassa
MSGSTVPAGAVVPEAHTIETFQPPREMLQNHPSKPHLANFEEYQKLYKQSITEPNVFWAERARELLSWSKDFQTVHSGSLANGDNAWFVEGELNASYNCVDRHAHKDPNRVAIIYEADEPGQGRNVTYGELLREVSKLAHVLTNLGVRKGDTVAIYLPMIPEAIVAMLACTRIGAIHSVVFAGFSSDSLRDRVVDAQSKVVITTDEGKRGGKLIGTKKIVDEALQQCPDVRNVLVYKRTGADISMTPGRDLWWHEEVEKYPAYYTPVAMASEDPLFLLYTSGSTGKPKGVAHSTGGYLLGAAMTGKYVFDIHDGDRYFCGGDVGWITGHTYVLYAPLLLGVSTVVFEGTPAYPNFSRYWDIIEEHKVTQFYVAPTALRLLKRAGDHHVRNEMKHLRVLGSVGEPIAAEVWKWYYDVVGKGRAQICDTYWQTETGSNVITPLAGVTPTKPGSASFPFFGIEPALVDPVTGEEIHGNDVEGVLAFKQPWPSMARTVWGAHKRYMETYLHVYKGYYFTGDGAARDHEGFYWIRGRVDDVVNVSGHRLSTAEIEAALIEHHSIAEAAVVGVADELTGQAVNAFVAVKEGTQINDALRKEFVLQVRRSIGPFAAPKAIYIVPDLPKTRSGKIMRRILRKIVAGEEDQLGDITTLSDPSVVAKIIDVVHAQRQ

SEQ ID NO: 987 - DNA, 1899 bp, Ralstonia solanacearum
  CDS (1)..(1899)
atgcccatgtccgacgcctatcgcgcgctgtaccagcgttccatcgacgatcccgccgccttctggggcgagcaggcgcagcgcatcgactggcagacgccctacgccgccgtgctcgacgatgcgcggctgccgttcgcgcgctggttcgtcggcgggcgcaccaacctgtgccacaacgccgtcgaccgccatctcgccacgcgcggcgagcaggccgcgctggtgtatgtctccaccgagaccggcatcgagacgacctacacgtaccgagcgctgcatcgcgaggtcaaccgcatggcggcgtgcctgcaagcgctgggcgtcaggcgcggcgatcgcgtgctgatctacctcccgatgatcccggaagcggcgttcgccatgctggcctgcgcgcgcatcggcgcgatccattcggtggtgttcggcggcttcgcctccaacagcctcgccacccgcatcgacgacgccactccgcgcgtcatcgtcagcgccgacgccggctcgcgcggcggcaaggtggtcgaatacaagccgctgctcgatgccgccatcgacctcgccgtgcacaagccggcgcacgtcctgctggtcgaccgcaaacttgccccgatgcagcaccggccgcacgacattgactacgccgcgctggcccggcagcacacccacgccgacgtgccgtgcgaatggatggagtcgagcgagccgtcctacatcctctacacctcgggcaccaccggcaagcccaagggcgtgcagcgcgacaccggcggctacgcggtggcgctggccgcgtcgatgccgctgatcttcggcgcgcaggcgggcgacaccatgttcaccgcgtcggacgtcggctgggtggtcggccacagctacatcgtctacgcgccgctgctggcggggcttgccaccgtgatgtacgagggcacgccggtccgccccgacggcgccatctggtggcgcatcgtcgagcaataccgcgtcaacgtgatgttcaccgcgcccacggccatccgcgtgctgaagaagcaggatccggcgctgctgcggcggcatgacctgtccagcctgcggcgcctgttcctggccggcgagccgctcgacgagcccaccgctcgctggatcggcgacgcgctcggcaagcccatcatcgacaactactggcagaccgagaccggctggccgatgctggcgatcccgcagggcgtggcgccctcgacgcccaagctgggctcgcccggcttcccggtctacggataccggctcgacatcctcgacgaggcgacgggccagccctgcgcgccgggcgaaaagggcctgctggccgtcgccgcgccgctgccgccgggctgcatgagcaccgtgtggggcgacgatgcacgcttcctcaagacgtactggtccgccttccccgggcgcccgctctattccagcttcgactggggcgtgcgcgatgaagcgggctacatcaccatcctcggccgcaccgatgacgtgatcaacgtggccggccatcgcctgggcacgcgcgagatcgaagagagcctgtcgtcgcatccggcgatcgccgaggtggcggtggtgggggtggccgacccgctgaaggggcaggtggcgatggggtttgccatcgtgcgcgatgcggcccgcgttgccgagccggctggccgcatggcgctggagggcgaactgatgcgcacggtggaggggcagttgggcgccgtggcgcggccgtcgcgcgtgttcttcgtcaacgcgctgccgaagacgcgctcgggcaagctgctgcgccgggccatgcaggcggtggccgaggggcgcgatcccggcgacctgactaccatcgaggacccgaccgcgcttgcccaggtgcgcgaggcgatgcaggcgtga

SEQ ID NO: 988 - protein, 632 aa, Ralstonia solanacearum
MPMSDAYRALYQRSIDDPAAFWGEQAQRIDWQTPYAAVLDDARLPFARWFVGGRTNLCHNAVDRHLATRGEQAALVYVSTETGIETTYTYRALHREVNRMAACLQALGVRRGDRVLIYLPMIPEAAFAMLACARIGAIHSVVFGGFASNSLATRIDDATPRVIVSADAGSRGGKVVEYKPLLDAAIDLAVHKPAHVLLVDRKLAPMQHRPHDIDYAALARQHTHADVPCEWMESSEPSYILYTSGTTGKPKGVQRDTGGYAVALAASMPLIFGAQAGDTMFTASDVGWVVGHSYIVYAPLLAGLATVMYEGTPVRPDGAIWWRIVEQYRVNVMFTAPTAIRVLKKQDPALLRRHDLSSLRRLFLAGEPLDEPTARWIGDALGKPIIDNYWQTETGWPMLAIPQGVAPSTPKLGSPGFPVYGYRLDILDEATGQPCAPGEKGLLAVAAPLPPGCMSTVWGDDARFLKTYWSAFPGRPLYSSFDWGVRDEAGYITILGRTDDVINVAGHRLGTREIEESLSSHPAIAEVAVVGVADPLKGQVAMGFAIVRDAARVAEPAGRMALEGELMRTVEGQLGAVARPSRVFFVNALPKTRSGKLLRRAMQAVAEGRDPGDLTTIEDPTALAQVREAMQA

SEQ ID NO: 989 - DNA, 1956 bp, Pyrobaculum aerophilum
  CDS (1)..(1956)
atggaaaaactatataataaatatgaagtttacaatagatggctacaagattctgacggctattggcaggagtttatagaaaaaaccgcggggtatatatactgggctaagaaacctgagaaaatctttgagtggaatccgccaaatccgtttaaatggtttgttggaggctataccaacgccgggtatagcgccgttgattacaaattggggaggtttggcgacaaaactgcctatatttatataaacccagaggcaagtgttgagaggcgtattacctacggggagttgtaccaactggtttgtagaataagcgcagccctaagggcattcggcgtcaaaaagggcgatacaattctggtgtatatgcccaatagtattgaggcggttgcagttctcttagccgccgccagaataggcgcagtttccagtacagttttcgccgggttttcgccaaaggctgtggccgatagaatagaactcgtcgagcccaagataatattcactcaagactactcactgcggagggggaggcgaattgcgctgaaagagaatatagacgaggctttgaagctgtcgacttggaggccgcaggcagtggtggtgaaaagggcgttgggggaggagaaagagcctccaatggaaaggggccgcgacatgtggcttgaggagtttttagaaatgggcaaacacggcaactgcaccccggagtttgtggagtcaaatgagccccttttcgtactgccaacctctggcactacagcaaagcccaaaccagtagtacacgtccacggcggctatcaagtctggatagtccacggggctctcctcgtctatggattatctagcgacgacgtgattttcaacactagcgacattggctggatagtcggccagagttatatagtctttgcgcctacgataatggggacgacttcaatattatttgacggcgctattgattatcccaagcccgatcttttctgggaaattattgagaaatacaaaccgacattaatatggacatcccccacggcggctaggatgttaatgagactcggcgttagtcatgccagaagacacgatttgtctagcgtcaaaagagtagtcacagcgggggaggtgttaaacccagaggtgtggaggtggctgtatgaagaggcctttcaaaagaacgtgcccgtgatagaccactggtggcagacagagctaggcggacctgccataggctattactacgcccttgttaaagacatgcccgtgggccttgagtttatggaaataaagccgggctctgcgggagtgccgttgccaggcgtagaagtggaggtggtagacgagaggggcaacgccgtttcggccgggcagaaggggactttagtgttgaagaggcccttccccggcatgacgccgactttatggaaagatcacaagcggtacatggctgagtattgggagcgctacgaggggaagcttgtgtactacaccggcgacgccgcttatatagacgacgaaggctacgtgtggtttggcggcagagctgacgaagtgataaaaatagcgggccatagaataggcactatagaagtggagtcggcgttgttaactcaccccgcggtggcggaggccgcggtagtgggagtccccgatccgataagaggagaggccattgcggcttttgttgtgttaaaacccagttggagacccacggaggagttgagaaaagagttgatagaacatgtgagaaagacctttggccccatagctgtattcgccggcttggagtttgtcaacatgttgcccaagactagatctgggaaaatcatgaggagagtgctcaagcgcctgtggactggagagcctattggcgatatctctactatagaagacgaggcctctgtggaggagatcagagaggcaatatcgcgtttaaaagtggtcaaggtctctgagtaa

SEQ ID NO: 990 - protein, 651 aa, Pyrobaculum aerophilum
MEKLYNKYEVYNRWLQDSDGYWQEFIEKTAGYIYWAKKPEKIFEWNPPNPFKWFVGGYTNAGYSAVDYKLGRFGDKTAYIYINPEASVERRITYGELYQLVCRISAALRAFGVKKGDTILVYMPNSIEAVAVLLAAARIGAVSSTVFAGFSPKAVADRIELVEPKIIFTQDYSLRRGRRIALKENIDEALKLSTWRPQAVVVKRALGEEKEPPMERGRDMWLEEFLEMGKHGNCTPEFVESNEPLFVLPTSGTTAKPKPVVHVHGGYQVWIVHGALLVYGLSSDDVIFNTSDIGWIVGQSYIVFAPTIMGTTSILFDGAIDYPKPDLFWEIIEKYKPTLIWTSPTAARMLMRLGVSHARRHDLSSVKRVVTAGEVLNPEVWRWLYEEAFQKNVPVIDHWWQTELGGPAIGYYYALVKDMPVGLEFMEIKPGSAGVPLPGVEVEVVDERGNAVSAGQKGTLVLKRPFPGMTPTLWKDHKRYMAEYWERYEGKLVYYTGDAAYIDDEGYVWFGGRADEVIKIAGHRIGTIEVESALLTHPAVAEAAVVGVPDPIRGEAIAAFVVLKPSWRPTEELRKELIEHVRKTFGPIAVFAGLEFVNMLPKTRSGKIMRRVLKRLWTGEPIGDISTIEDEASVEEIREAISRLKVVKVSE

SEQ ID NO: 991 - DNA, 1881 bp, Pyrobaculum aerophilum
  CDS (1)..(1881)
atggaattatggcggccagaaaaacaccaccttgaggagtctaatgtggcaaagtacataacctcccacggcatcaaggggcttgacgacttcctctcgctcacttttgacaagcctgaggaattctggcgctccttcgagaaagaggtgttgaagcttggttggtacgaggagtacataaaggtgctggatctatccaagggagtccaatggcctaggtggttcgtcggcggcaagatcaacatagcggatcagctggaggattcctcccgtccccttgtcaaatgggagggggaagacgggtcgaccgccgtctggagctattctgaggtgctctacaaagccaaggcggtcgccagctggctgaagagaaacgggctcgagaagggggatcgcgtggctatcttcatgccgatggtgcccgagataatcccggtcatgctgggggccatcagagctggcggcgtcatagtcccgcttttcagcggcttcggcaaggaggccataagggttaggctcgaggacagcgaggctaagttcgtcttcgcctccgatatctcctacaggagaggcaaggagatcgatatgctctcggagctgagagccggcttgacgccctcagtgaagcgcgtggtggtgcaggaacgctccggacgtagcagcggctatacgccgctctccgaggtcttcaagaccggcggcgaccacgtagagagggcagacgcagaggatcccatcatgattatatatacctcgggcaccacggggaagcctaaaggcaccgtccatacgcacgacggcttccccgtgaaggccgccgccgacgtctacttccacttcgacgtgagcgagggcgagaccttgagctgggtgacagacatggggtggatgatggggccttggatggtcttcgccgcgtatctgctcagaggctccatggccttcttcgagggagctccagactaccccaaggacagactctggcgttttgtggagcgcttcaaggtgaacgccttgggcctggcggcgacgttaacgagatatctccgctccataggcgcagcggcggagcccggccagctggattcgctcaaagccttcggcaacacgggggagcccatagacgtcgagagctggctgtggctataccgcatgggaagggggcgcataccgattataaactactccggcgggaccgagatatcaggggggatattgggttgctacgtggtgaggcccataaagcccagctctttcaacgggcctagcataggcactaaagccgcggtgtttactgaggatgggaggccggccccgcctggcgttgagggagagctcgtggtactctcggtgtggcccggcatgacgagaggcttctggagggatccccaacgctatttagagacttactggaacaagtggcctggagtgtgggcccacggcgacgctgccgtagtggatgaagagggcttcttttacatactggggagggcagacgacaccataaaggtggccggaaagcggctgggacccgccgagattgagactgtcctcaacgcccatcctgccgtggccgagtccgcctgtataggcgtcccccatgagattaagggcgaggtgcccgtatgtttcgtggtgttgaagccgggctatgagcccagtgaggccttaaggcgcgagttgatcaagctgacggaggaggccttaggcaaagccttcggcgcggtggaggatataaggttcgtcaagatgttgccgaagacccgcaacgccaagatcatgaggagggtgataagggcggtgtacttaggccgcaaccccggcgacctatcggcgctcgaaaatccggaggccatagaggagataaaaagagctctgtga

SEQ ID NO: 992 - protein, 626 aa, Pyrobaculum aerophilum
MELWRPEKHHLEESNVAKYITSHGIKGLDDFLSLTFDKPEEFWRSFEKEVLKLGWYEEYIKVLDLSKGVQWPRWFVGGKINIADQLEDSSRPLVKWEGEDGSTAVWSYSEVLYKAKAVASWLKRNGLEKGDRVAIFMPMVPEIIPVMLGAIRAGGVIVPLFSGFGKEAIRVRLEDSEAKFVFASDISYRRGKEIDMLSELRAGLTPSVKRVVVQERSGRSSGYTPLSEVFKTGGDHVERADAEDPIMIIYTSGTTGKPKGTVHTHDGFPVKAAADVYFHFDVSEGETLSWVTDMGWMMGPWMVFAAYLLRGSMAFFEGAPDYPKDRLWRFVERFKVNALGLAATLTRYLRSIGAAAEPGQLDSLKAFGNTGEPIDVESWLWLYRMGRGRIPIINYSGGTEISGGILGCYVVRPIKPSSFNGPSIGTKAAVFTEDGRPAPPGVEGELVVLSVWPGMTRGFWRDPQRYLETYWNKWPGVWAHGDAAVVDEEGFFYILGRADDTIKVAGKRLGPAEIETVLNAHPAVAESACIGVPHEIKGEVPVCFVVLKPGYEPSEALRRELIKLTEEALGKAFGAVEDIRFVKMLPKTRNAKIMRRVIRAVYLGRNPGDLSALENPEAIEEIKRAL

SEQ ID NO: 993 - DNA, 1848 bp, Pyrobaculum aerophilum
  CDS (1)..(1848)
atggattatattgagttctggaggaagtctatcagttatcctgagattttctgggaatctgtagctaaagagctcttctggaagaaaaaatgggaaaagccattagacggctcaaatccgcctttttaccggtggtttgtaggaggcgttacaaatattacgtataatatcctagaacgtcattcaaaagataaaccagctattatatggttcaactccgaattaaagccgcacataattacatatggtgaattatctcaagaggttaataagtgggcgtgtctattgaaaaaagctggcgtacaacaaggcgatagagtaactatatacatgcccatgattccacaggcggcatatgccatgttagctgttgcaaaaataggcgcagtacataacgtcgttttttcaggcttcagcgttagagcattgcatgaaagaatattggactcaggctctaagattatcctaacagtagacgcaatgaggaggaggggaaaggttataaagctagctgaaatcgcattaaaggcggcggatagcgcgagagtagttgtatttaattacctgggcgaaaaaatagacggcgatttcgtacaggcagaaaacctcttagaaaaatgcgaaattgaatacacctgggtcaaatctgacgatccgctttttattctttacacatctggaacaaccggaaagcccaagggaatttatcacgggcacgggagctatatggtgtgggcttatgcgcacactaagtggttttttgggtttgaaaaaggagatattctattctccactgctgatataggttggataaatggacatacttatgggctctatgggccgttattaaacggctccaccgttgtgtggtatgaagatgcgcccgattacccgcacccgggcgtgtggtgggaaattgttgacagaagtaaggcgacgtttatatggctttcccccacggccgtgaggctattaatgagatatggcgaggagtggcccgctaagtattctcttgagagtttaaaaatggtggtgagcgcaggcgaaattttaggaaaagaggcttggaagtggctaaaaagccatgtgtgtaaaaaccggcaggggtgccacgtggtggagacgtggggacagaccgaaaactctggctttattgcagcacctggaggttatggagtcggggggattagatacaaagaagggagtgtaggtcttccatatccaggaattgatgtaagaatatatgacgataatggtcaagagcttccgcctggcgcaaaaggccatgttgttatattaccgcctacaccgccggcgttcgcattgggcatatggggaaatccagcgaggtggattgaggcgtattggtcaaaatttccgggagtgtactatactggcgacgttggcataaaagatgaagagggatacatctatatactcgggcgggcggatgatgtcatcaaaatagctggccatcgattaagccctgctgaggttgaaaatatagttgcaacattccccggcgttgttgaagcggctacggtaggagttcccgatgaaattaagggaactaccttggctatttttgtagtgcctaaagagggggtgagaataaactctcaagaagtagtagaatttcttaagagggagttcggcccagttgccgtagtatctaaagtttatgtagtaaataaactacctaagactaggacaggcaagattatgcgaagagttttgagggctttaattagcggcggtgaaataggtgatatctcgactttagaggacgaggcgtcaatagatgaagtgaaaagggcattagaagaagttaaaattatatcctcttga

SEQ ID NO: 994 - protein, 615 aa, Pyrobaculum aerophilum
MDYIEFWRKSISYPEIFWESVAKELFWKKKWEKPLDGSNPPFYRWFVGGVTNITYNILERHSKDKPAIIWFNSELKPHIITYGELSQEVNKWACLLKKAGVQQGDRVTIYMPMIPQAAYAMLAVAKIGAVHNVVFSGFSVRALHERILDSGSKIILTVDAMRRRGKVIKLAEIALKAADSARVVVFNYLGEKIDGDFVQAENLLEKCEIEYTWVKSDDPLFILYTSGTTGKPKGIYHGHGSYMVWAYAHTKWFFGFEKGDILFSTADIGWINGHTYGLYGPLLNGSTVVWYEDAPDYPHPGVWWEIVDRSKATFIWLSPTAVRLLMRYGEEWPAKYSLESLKMVVSAGEILGKEAWKWLKSHVCKNRQGCHVVETWGQTENSGFIAAPGGYGVGGIRYKEGSVGLPYPGIDVRIYDDNGQELPPGAKGHVVILPPTPPAFALGIWGNPARWIEAYWSKFPGVYYTGDVGIKDEEGYIYILGRADDVIKIAGHRLSPAEVENIVATFPGVVEAATVGVPDEIKGTTLAIFVVPKEGVRINSQEVVEFLKREFGPVAVVSKVYVVNKLPKTRTGKIMRRVLRALISGGEIGDISTLEDEASIDEVKRALEEVKIISS

SEQ ID NO: 995 - DNA, 1908 bp, Rhizobium meliloti
  CDS (1)..(1908)
atggcgagccgctattccgaagtgtatgccgcgtggaaaaccgatccgcacggcttctgggcagatgccgcatcggcgatcgactggttcaagcggccggagcgcattttcgagcctgccggcggcacctatggtcactggtttccggacggcgtcaccaacacctgccacaactgcctggaccggcatgtcgaggccggccgtggcgagcagctggcctttatatacgacagtcccgtcaccggacggatcgagaggatctcctatgcggacctgctcgccgatgtgaaggctatggctgcgatctaccgcaagctgggcgtcgacaagggcgatcgcatcatcatctacatgccgatgatcccgcaggcggcgatcgccatgctcgcggcagcgcggatcggcgcggtgcattccgtcgtcttcggcggctttgccgccaacgaactcgccatgcgcatcgatgattgccaggcgaagatcgtcgtctcggcgagctgcgggctggagcccgggcgaaccgtcgcctacaagcctctgctcgatcaggcgatcgaaacggccagccacaagccggcccgttgcctcatctatcagcgcgacatgctcgccgccgaaatggttagcggccgcgacatcgatttcgccgaagcgcttgcggcggccagagacgccggtgaggaagcctcttgcacgccggtcgcctccaccgatccgctctatgtcctctatacgtccggcacgaccggccagccgaaaggcgtcgtgcgggacaatggcggccacatggtcgcgctcagatggtcgatggagcacttcttcggagtcaatgccggcgacgtgttctgggcggcttccgacatcggctgggtggtcggtcattcctacatcgtctatgggccgctcctcaacggctgcacctcggtcctcttcgaaggaaagccggtcgggacgcccgaccccggaacctattggcgcgtcatttccgaacgcggcgtggccgtcatgttcaccgcgccgacggcgctgcgagcgatccgcaaggaggacccggaagcggcccatgcgggccgttacgacctgtcgcggttccgggcgctttatctcgcgggcgagcgggccgacccggacacgatccgctgggcggaacgggcgctgaaggtcccggtcatcgatcactggtggcagaccgaaacaggatggcccgttgccggcaatccattgggtctcggcctcctgccggtaaaatacggttccccggcggttcccctccccggctatgacgtgcaggtcgtcgacgacgcgggccacccggtggaaaccggcacgctcggcaatgtcgtgatcaagctgccgttgccgcccggctgcctgccgactctgtggaatgccgatcaccgcttccatgcggcctatctcgaggaatatcccggcttctacaagacggcggatgccggctatgtcgacgaggacggctatatcttcatcatggcccggaccgacgacatcatcaacgtcgcgggacaccggctgtcgacgggggccatggaagaggtttgcgccagccatccggacgtcgccgaatgcgccgtgatcggcatcgccgatcccctcaaggggcaggtgccggcgggcttcctggtcatcaacgccaatgtttcccgtgaaacggaagaaatcgagaaggaggttgtcggtctcgtgcgcgagcgcatcgggccggtcgccgccttcaggacggcggtctgcgtcaagcggctgccaaagacgcgatccggcaagattctgcgctcgacgatccagaagatcatcgaccgacagccatggacgatgccggcaacgatcgacgatccggcgatcctggacgagattaccgaactgctgcggtcaaaggggatcggcgtttag

SEQ ID NO: 996 - protein, 635 aa, Rhizobium meliloti
MASRYSEVYAAWKTDPHGFWADAASAIDWFKRPERIFEPAGGTYGHWFPDGVTNTCHNCLDRHVEAGRGEQLAFIYDSPVTGRIERISYADLLADVKAMAAIYRKLGVDKGDRIIIYMPMIPQAAIAMLAAARIGAVHSVVFGGFAANELAMRIDDCQAKIVVSASCGLEPGRTVAYKPLLDQAIETASHKPARCLIYQRDMLAAEMVSGRDIDFAEALAAARDAGEEASCTPVASTDPLYVLYTSGTTGQPKGVVRDNGGHMVALRWSMEHFFGVNAGDVFWAASDIGWVVGHSYIVYGPLLNGCTSVLFEGKPVGTPDPGTYWRVISERGVAVMFTAPTALRAIRKEDPEAAHAGRYDLSRFRALYLAGERADPDTIRWAERALKVPVIDHWWQTETGWPVAGNPLGLGLLPVKYGSPAVPLPGYDVQVVDDAGHPVETGTLGNVVIKLPLPPGCLPTLWNADHRFHAAYLEEYPGFYKTADAGYVDEDGYIFIMARTDDIINVAGHRLSTGAMEEVCASHPDVAECAVIGIADPLKGQVPAGFLVINANVSRETEEIEKEVVGLVRERIGPVAAFRTAVCVKRLPKTRSGKILRSTIQKIIDRQPWTMPATIDDPAILDEITELLRSKGIGV

SEQ ID NO: 997 - DNA, 1647 bp, Rhizobium meliloti
  CDS (1)..(1647)
atgctcccgaagatcgaagactacgacgaactctatcgcgaattccgctggcggatccctgagaggttcaatatcggcgtggccgtgagcgacgcctgggccgcgcgtgatccggagcgcatctgtcttcagcatttcagcccggacggcgcgcatcttgcgctgacctatggcgacttcgccgcgcgttcgtccgcctttgccggcgggcttgccgcgcatgacgtgagccccggcgaacgcgtcgccatcctgctgccgcagggtttcgaggcggcgatcgcccatgcggcgatctataaactcggcgccatcgcgctgccgctggcactgctcttcggcgtcgaggcgcttgcctatcggctgaaggatgcgggcgcggcagcagtcgtcaccaatcgcttcggctatgagcggcttgcggcgatccgcggcgagctgccggaacttcgtatggtcgtcctggccgaggaggacgagaagcccggcacggttcgtttccgcgatatcgcggcagggcagggccgcttcgaccccgcggagacgaagccggacgatccggcgctgatgatctacacctcgggaacgaccggaccgccgaagggggccttgcacgggcaccgcgtgctgctcggccatctgccgggatttcagttccatcatcatttcctgccacagccgggcgaccgcatgtggacgcccgccgactgggcctgggcaggcggtctcctgaacgctctgctgccgtcgcttttcttcggtgtgcccgtggtttcctcgcctgcgcagaaattcgatgcccatacggcgttccggatcatcgaagagatggaggtgcgcaacgccttcatcccgccgacggcgctcaggctcctcaaatccgtcgagcggccgcgcgatcgctgcgcgctcaagctccgcaccgtcggttcggcgggagaggcgctcgggcgggagaccttcgaatgggccagggcggcgctcggcgtcgaggtgagcgaattctacggccagacggaatgcaatatcgtcatctcctctgcgaccggtctcggcgtggcgaaggccggctcgatgggcaaggcggcaccgggtcatcaggtcgcgatcatcgacggcgaggggcgggtgctgccgcccggcacggtcgggcaggtggcgatcaggcgtcccgatccggtgatgttcctcggctattggcgcaacgaagaggcgaccgaggccaagtttatcggcgactggatgaccaccggcgaccagggcgtcatggacgaagagggctatttcacctttttcggccgtgacgacgacgtcatcacgtcgtcaggctatcgcatcggtccgagcgagatcgaggattgtctcgccgggcacccggacgtccagctcgccgcggccgtcggcaaaccggacccgctccggaccgagatcgtcaaggcctatgtcgtgctgaaacccggcgtcgctgccggcgacgagaccgcggcagggatccgcgactgggtgaagaacaggctgtcgatgcatgaatatccgcgcgagatcgctttcgtcgacagcctgcctttgaccacctcgggcaaggtgatccgccggcttctgcgggagaaggcggcggcagaggcgcgcgccgcgtccggcggctga

SEQ ID NO: 998 - protein, 548 aa, Rhizobium meliloti
MLPKIEDYDELYREFRWRIPERFNIGVAVSDAWAARDPERICLQHFSPDGAHLALTYGDFAARSSAFAGGLAAHDVSPGERVAILLPQGFEAAIAHAAIYKLGAIALPLALLFGVEALAYRLKDAGAAAVVTNRFGYERLAAIRGELPELRMVVLAEEDEKPGTVRFRDIAAGQGRFDPAETKPDDPALMIYTSGTTGPPKGALHGHRVLLGHLPGFQFHHHFLPQPGDRMWTPADWAWAGGLLNALLPSLFFGVPVVSSPAQKFDAHTAFRIIEEMEVRNAFIPPTALRLLKSVERPRDRCALKLRTVGSAGEALGRETFEWARAALGVEVSEFYGQTECNIVISSATGLGVAKAGSMGKAAPGHQVAIIDGEGRVLPPGTVGQVAIRRPDPVMFLGYWRNEEATEAKFIGDWMTTGDQGVMDEEGYFTFFGRDDDVITSSGYRIGPSEIEDCLAGHPDVQLAAAVGKPDPLRTEIVKAYVVLKPGVAAGDETAAGIRDWVKNRLSMHEYPREIAFVDSLPLTTSGKVIRRLLREKAAAEARAASGG

SEQ ID NO: 999 - DNA, 2028 bp, Zygosaccharomyces bailii
  CDS (1)..(2028)
atgacagtcaaagaacacaaggtagtgcacgaggcacaaaacgtagaagcgctgcatgcgccagagcatttttacaagtcacaaccaggccccagctacatcaaggacatgaagcagtacaaggagatgtacaaacaatctgtggaagacccagaaaacttctttggtgaaaaggctagggagctgctggattgggacagaccttttacgagaagcaagtacggttcgttggaaaatggcgatgtcacgtggtttttaaatggtgaattgaacgcagcctacaactgtgttgacaggcacgcttttgcaaacccagacaagcccgcattgatctacgaggctgacgaggaggctgacaacaggatgataaccttcagcgagctgctgagacaggtttcgcgggtcgctggggttctacaaagctggggagtgaaaaagggcgacactgtggcagtgtacttgcccatgattcctgaagcggtggtggccatgttggccattgcaagacttggtgccatccactctgtggtgttcgctggcttctctgctggctctttgaaagaccgtgtggtagatgctggttgtaaagtggtaatcacgtgcgacgaaggtaagagaggcggtaagacagttcacactaaaaagatcgtggacgaaggtttgaacggtatcagccttgtctctcacattcttgtcttccagagaaccgggagcgaaggtatccccatgaccgccggtagggattactggtggcatgaggagaccgccaagcagagaagttacttgcctcctgtgccttgcaattccgaagatccattgttcttgctatacacttctgggtctacgggctcccctaaaggtgttgtccattctaccgccggttaccttttgggtgccgctatgaccaccagatatgtcttcgacatccatccagaagacgttctctttaccgccggtgacgttggctggatcactggccacacctatgctctatatggcccattggttctcggtacggccagtatcatctttgaatctacccctgcctacccagattatggtaggtattggagaattatccagcgtcacaaggcaacacatttctatgtggctcctacagctttgagactcatcaaacgtgttggtgaagctgaaatccccaaatacgacatctcgtcgcttcgtgtgcttgggtctgttggtgagcccatctccccagagctttgggagtggtactatgaaaaagttggtaacaaaaactgtgtcatttgcgatacgatgtggcagacagaatctggctctcatttgatcgcccctcaagctggtgcagttccaacgaaaccaggttccgccactgtacctttctttggtgtggacgcttgcatcatcgatcctgttactggtattgagttgcaaggcaacgatgtggaaggtgtcctagcggtcaaatcttcctggccatcaatggctcgttctgtctggcaaaatcatcaccgttacgtcgacacatatttgaagccatacccaggttattactttacaggtgatggtgccgggagggaccacgatggctactactggattagaggcagagtggacgacgtggtaaatgtctcaggtcacagactttctacagctgagatcgaagcctctttgaccaatcatgataatgtctctgagtctgctgtagtcggcattgctgatgaattgacaggtcagtcagttattgcctttgtctctttgaaggacggttcttccagggaatcttctgccgtcgtagctatgcgtcgcgaattggttctccaggttagaggtgaaattggtcccttcgcagcccctaagtgtgtcattttggtcaaggacttgcccaaaaccagatcaggcaaaattatgagaagagttctaaggaaagtggcctctaacgaagcggaccagttgggtgatctatctaccatggcgaactccgaggttgttccatctatcattgccgctgtagatgaacaattctttgctgagaaaaagaaataa

SEQ ID NO: 1000 - protein, 675 aa, Zygosaccharomyces bailii
MTVKEHKVVHEAQNVEALHAPEHFYKSQPGPSYIKDMKQYKEMYKQSVEDPENFFGEKARELLDWDRPFTRSKYGSLENGDVTWFLNGELNAAYNCVDRHAFANPDKPALIYEADEEADNRMITFSELLRQVSRVAGVLQSWGVKKGDTVAVYLPMIPEAVVAMLAIARLGAIHSVVFAGFSAGSLKDRVVDAGCKVVITCDEGKRGGKTVHTKKIVDEGLNGISLVSHILVFQRTGSEGIPMTAGRDYWWHEETAKQRSYLPPVPCNSEDPLFLLYTSGSTGSPKGVVHSTAGYLLGAAMTTRYVFDIHPEDVLFTAGDVGWITGHTYALYGPLVLGTASIIFESTPAYPDYGRYWRIIQRHKATHFYVAPTALRLIKRVGEAEIPKYDISSLRVLGSVGEPISPELWEWYYEKVGNKNCVICDTMWQTESGSHLIAPQAGAVPTKPGSATVPFFGVDACIIDPVTGIELQGNDVEGVLAVKSSWPSMARSVWQNHHRYVDTYLKPYPGYYFTGDGAGRDHDGYYWIRGRVDDVVNVSGHRLSTAEIEASLTNHDNVSESAVVGIADELTGQSVIAFVSLKDGSSRESSAVVAMRRELVLQVRGEIGPFAAPKCVILVKDLPKTRSGKIMRRVLRKVASNEADQLGDLSTMANSEVVPSIIAAVDEQFFAEKKK

SEQ ID NO: 1001 - DNA, 1635 bp, Sulfolobus tokodaii
  CDS (1)..(1635)
atgtttgaaattgacctaagggaaaatagatttcataattatgatgaattaataaagacatttaagtggagtatcccttcttattttaatataggagaagcaatattagacagaaaaattagagaaggattaggagataatgtagctgtttactatgaagatgaagagggtaatcactctgtttatacgttctcacaattgaaaaaacttagtgattctttgataacacttttgaaagaaaatggagtgaaaaagggtgatgtgataggtgtttatttacaacctagagttgaaacaatcgtaagtattctgacaatatataggcttggaggtgtcactttatctatttccccgttaatgggagtagatgctgttgagtacagaataaagcaaagtggagcaaaagtcataataatggaaggttcaagaaaggaagtaagagagaggttaaaaaatgtaactaagatagtagttgatggtgaagctaatagagaaaatgagatagaattcgacgaggttaagaaagcttctggaatatacgacgctgtgaatactggaagtgaagatcctgcccaacttttttatacttcaggtagtactggtgcaccaaaaggggttcttcatgctcatagatttttattaggacatattccaacttatcaactttatttcgaaatggcaccaaaagaggaagacgtattttatacgccagcagactggggatggataggagctataggtgatgtactattacctagtttatatttcggaaagcctatagtagcatacagaagaacgggcaagttctctcctaaagatactcttgcagtaatgcaaaaatataaggttacatgcgcatttattcctcctactgctttgagaatgattagaagagaagttagtagccctacaaaggactacgatttaaagctaagggcaattagtagtgcaggagaagctgtaggagaggagttaatagaatgggcaatgaaagaattgtctcctaatgtcaatgaattttatggttgtactgaagctaatttagtaacagtaaacaattccttatggagaaaaataggttctgtgggcaaacctgcaccgggacatgaggtagcggttattgatgaacaaggaaataaactgataaatcagataggggaaatagcagtaaagtctggagatccagtactttttctaggatattataaaaacccggaagctactgcaaagaaatttagaggggattggtttttaattggagatttaggaataatggacgaatatggctacatttggtttaaaggtagggcagatgatgtaataaaagtatctggatataggttaggaccagaagagatagaaagcattatattacaacatcctgcggttcaagaggtagcggtaataggtaaggcagataaattgagaggaaatataatcaaggcattcatagtattaaaggaagggtatagtccctcagaggagttagtaactgaaatccagcagttggtaaagagtagactagcttcttatgcatatcctagggaaatagagttcgtaaaagaattacctaggacggaaacgggtaagttaaagagatttgaactaagaaaaagagaggaagaaaaaagttaa

SEQ ID NO: 1002 - protein, 544 aa, Sulfolobus tokodaii
MFEIDLRENRFHNYDELIKTFKWSIPSYFNIGEAILDRKIREGLGDNVAVYYEDEEGNHSVYTFSQLKKLSDSLITLLKENGVKKGDVIGVYLQPRVETIVSILTIYRLGGVTLSISPLMGVDAVEYRIKQSGAKVIIMEGSRKEVRERLKNVTKIVVDGEANRENEIEFDEVKKASGIYDAVNTGSEDPAQLFYTSGSTGAPKGVLHAHRFLLGHIPTYQLYFEMAPKEEDVFYTPADWGWIGAIGDVLLPSLYFGKPIVAYRRTGKFSPKDTLAVMQKYKVTCAFIPPTALRMIRREVSSPTKDYDLKLRAISSAGEAVGEELIEWAMKELSPNVNEFYGCTEANLVTVNNSLWRKIGSVGKPAPGHEVAVIDEQGNKLINQIGEIAVKSGDPVLFLGYYKNPEATAKKFRGDWFLIGDLGIMDEYGYIWFKGRADDVIKVSGYRLGPEEIESIILQHPAVQEVAVIGKADKLRGNIIKAFIVLKEGYSPSEELVTEIQQLVKSRLASYAYPREIEFVKELPRTETGKLKRFELRKREEEKS

SEQ ID NO: 1003 - DNA, 1731 bp, Sulfolobus tokodaii
  CDS (1)..(1731)
atgggttatgccaaaactagtagtagaatagatatggattatttcactctttatcaatattcaatagaaaacccagaaaaatattggagttcttttgctaataaattagaatggttttctaagtggaatagtgttataataagggacaaatacatcgcaaaatggtttgttaatggtaaaactaatatagcctataattccgtcaatacacatcaaggcaaggcactaatttggtatggagaagacggaaaaagaatagaaataacatatgatgaactaaataggctaagtaactctattgcaaacttacttaaaaagaggggaattaaaaaaggtatgaggattgctatttattcacccaattctatactaacattggcctcaattttaggaacagctaaaattggtgctatttatacccttatctttgctggactaggtattgaggctataaaatctaggcttaatgattttaatccagaccttgtcatatcatcaagaaagacctttaggagaggaaaagaaatacccctattaatagaaggggatattaattttgaaagaaatgatgaagatgaaatccgcaaacttttagatagcgatgaagtaaaagtggaagaaatagaagctaatgaaccattaaaagtgatgtacacttctggtactacgggtaagcctaaaggagtaattttgcctcatggtgcgtggatggtaggagattatacagtatttgatttactttttggactaaaacctggtgataaggtcctaactactacagatgtcggctggataactttctctagaataatgtatggtactttacttcatggttctacttttatatttatggaaggagctccagattatcctaaagatagattagttaaaataattgaagaagagcaacccaaagtactattcacttctcccactttaataagattgttgatgaaatatgatataaaacttccaagagtagaatatattgctactgcaggagagatatttgatgaaaaaagctggaattatgcattagaaattgcagataaagttactgatgtatatggacaaagcgaattgggctatgtagtaggaataccttattcactagagagcataaaaccgaagataggatatgcaggtgtaccttttcctggtatagtcttagatacattggatgatgaggggaaggcagtgagaaacaaacctggctatctagttgcaaaaactccttttccaactcaatttataggaatattaaataatgaaaagaaatttacagaatattttgagaaatttggtttccatgataccggagatttagcaatatttgatggaacttatataaagatagtaggaagagcagacgatatgattaaagttgcagggcatagaattacaagtggagaagttgaaagtataatagctagtattgatggagtgaaagatgtagcagtagtaggtattccagacgaaattagaggtgaaaagctggcaatctttgtagttggaaaagtagataaagaggaaattaaaagaaaagttcttgatgcattaggaccaatttatattattcatgatgtttatgtcgtagaaaagttacctaaatctagaagtggcaagactgtaagaagaattttaagagatatacttttaaataaggaaattgatgcttcaatacttgaagacccagaagtcgtaaaggagattaaggatgaaatttcatga

SEQ ID NO: 1004 - protein, 576 aa, Sulfolobus tokodaii
MGYAKTSSRIDMDYFTLYQYSIENPEKYWSSFANKLEWFSKWNSVIIRDKYIAKWFVNGKTNIAYNSVNTHQGKALIWYGEDGKRIEITYDELNRLSNSIANLLKKRGIKKGMRIAIYSPNSILTLASILGTAKIGAIYTLIFAGLGIEAIKSRLNDFNPDLVISSRKTFRRGKEIPLLIEGDINFERNDEDEIRKLLDSDEVKVEEIEANEPLKVMYTSGTTGKPKGVILPHGAWMVGDYTVFDLLFGLKPGDKVLTTTDVGWITFSRIMYGTLLHGSTFIFMEGAPDYPKDRLVKIIEEEQPKVLFTSPTLIRLLMKYDIKLPRVEYIATAGEIFDEKSWNYALEIADKVTDVYGQSELGYVVGIPYSLESIKPKIGYAGVPFPGIVLDTLDDEGKAVRNKPGYLVAKTPFPTQFIGILNNEKKFTEYFEKFGFHDTGDLAIFDGTYIKIVGRADDMIKVAGHRITSGEVESIIASIDGVKDVAVVGIPDEIRGEKLAIFVVGKVDKEEIKRKVLDALGPIYIIHDVYVVEKLPKSRSGKTVRRILRDILLNKEIDASILEDPEVVKEIKDEIS

SEQ ID NO: 1005 - DNA, 1986 bp, Sulfolobus tokodaii
  CDS (1)..(1986)
atgtcagtaaactggtctcttccatttgaagagaaaataataccaagtaagtatcagagcaaagtaatttcaccatcaatatataaagagttacacaagatagctactgaaaattacaaggagttttgggcatcaattgcctctcaattagagtggtttaagccttgggaaaaggtacttgatgattctaatccaccattttacaagtggtttgttagtggtgaaataaatgcttcatatttagctgtggatagacatgctaagagttggagaaaaaataaagtagcaataatttgggaaggagaaccggcagaaggtgataagccaaaggaggtaagatatattacatatggtgaattatatagagaagtaaatagagtggcttatattcttaaggaagtttatgggttaaagaagggtgatgctatatcattatatttaccaatgatacccgaattacctatatttatgttagccgctgctagattggggataatatttagtgtagtgttttctggatttagtgcccaagcattagcagatagaattaatgatgctagagctaaattattagtaacggctgatggaggttggagaagaggtaaaatagttccactaaaagatatagcagataaggcattagaaaatacatctactgtagagaaagtcttggttgtaaaaagaacgaataataatataactatgaaagaaggtagagatgaatttttcgataatgtatataagcaagttcctttgaatgcatatgtagagccagagagaacaaagagcgaagatcctctattcattctctatacctctggaaccactggcaagccaaagggaatagttcatgatactggcggatatttaactattcttcacgctacaatgaactgggtattcgatattaaagatagtgatataatgtggactactgctgatattggttggattactggtcattcatatatagtatttggtcctctattagaaggagtaacaacagtaatgtatgaaggagctctagattatccaaacccagataggtgggcatctataattgagagatatggtgttacgatactttatacttcacctacagcaataaggtctttcatgaaattaggagaggatgtatataaaggtagagatttctcttctgtgagattaatgcattctgtaggagagccaataaacccagaggcatttagatggttcttcagattggtaggaaaagaaagcataccatttggtagtacttggtggatgactgagactggtggtattatgattagtcacttacccggtctttatctaattccattgaaaccaggaactaatggaatgccgttaccgggaattgatgcagatgttgttaatgaaaatggtaatcctacaaaacctgaagaaagaggatatctagtgattagaaaaccatggcctggaatgccattaactatttggggagatccagatagatatgttaaagtatactggtctaaattcccgggtatattttatcccggcgatttcgctgttaaagattctgatggatacttctggatattaggtagggctgacgaggtaattaaagtagctgggcatagattaggaacatatgagttagagtctgctttaatacatcacccagccgttgctgaagcagcagttgtaggagtcccagatccattaaaaggtgaagtaccggtagcatttgtagtattaaaggtgggacaaaaagcaaatgaggagttgaaaaagagcttaaatgaatgggtaagagagcaagtaggacctatagcgtcattaagtagtatttactttgtatctaaacttccaaaaactaggagtggtaagattatgagaagagtagtaaaggctgttattactaatcagccagtaggcgatgtcacaacacttgaagatgaagcttcggtagaagaagttaaaaaggcatacgaagaattaaagaaggagatatcctaa

SEQ ID NO: 1006 - protein, 661 aa, Sulfolobus tokodaii
MSVNWSLPFEEKIIPSKYQSKVISPSIYKELHKIATENYKEFWASIASQLEWFKPWEKVLDDSNPPFYKWFVSGEINASYLAVDRHAKSWRKNKVAIIWEGEPAEGDKPKEVRYITYGELYREVNRVAYILKEVYGLKKGDAISLYLPMIPELPIFMLAAARLGIIFSVVFSGFSAQALADRINDARAKLLVTADGGWRRGKIVPLKDIADKALENTSTVEKVLVVKRTNNNITMKEGRDEFFDNVYKQVPLNAYVEPERTKSEDPLFILYTSGTTGKPKGIVHDTGGYLTILHATMNWVFDIKDSDIMWTTADIGWITGHSYIVFGPLLEGVTTVMYEGALDYPNPDRWASIIERYGVTILYTSPTAIRSFMKLGEDVYKGRDFSSVRLMHSVGEPINPEAFRWFFRLVGKESIPFGSTWWMTETGGIMISHLPGLYLIPLKPGTNGMPLPGIDADVVNENGNPTKPEERGYLVIRKPWPGMPLTIWGDPDRYVKVYWSKFPGIFYPGDFAVKDSDGYFWILGRADEVIKVAGHRLGTYELESALIHHPAVAEAAVVGVPDPLKGEVPVAFVVLKVGQKANEELKKSLNEWVREQVGPIASLSSIYFVSKLPKTRSGKIMRRVVKAVITNQPVGDVTTLEDEASVEEVKKAYEELKKEIS

SEQ ID NO: 1007 - DNA, 1866 bp, Sulfolobus tokodaii
  CDS (1)..(1866)
atggaagcggaattttatagtttacaaaaaattagaaaattaagtgaggaagcagtaaaagacccagaaagtttttggaaggataaaatgcatttgatctcatggtttaaagagccagaaaaaataagggaaggagaaccaccatttgagaaatggtttgttaatggttatactaatatttcttataacgcaattgatagacatttagataaatctgaaaaagtagctttctattggataaatgagaaattagatactaggagtataacttatagagatttatattgtgaggtaaatagggcttcttacgttttaaaagaactaggagtaaagaaaggtgacgtagtatctcttataatgcctagtattccagaggcagtctatatgtctttagctgtacataggctaggggcgacactagtaatacactatctaggtttaagtgaggagacattaacttataggctaaatgattgtaattctagggttttaatagttgctagcaagggtttcagaaacggaaatgaaataaggataaaagatttcgtggataagcttcttgattccagaaaaactccgatagagaaagttttagtagtgaaaagaggttatgacgattttaacgttacaaagagggacgttatatatgaagaagtaagacctaggggtagagtttatgttgaaccaatctgggtagaatctaatgagccttcaacaatttattatacttctggaaccactggtagacctaaaggcttatatcactctacagcaggatatgtaatagcattaaattatgcctttaaatcccttatgggtcctaaagagaatgatatatggtggacaatatctgaattaggctggccagtatggcctatggcaaatctttacacaataccattcatgggtcttactggagtactttttgagggatatataggatataaaccagatatgttctccagaataattgaaaggtttggagttaatttagtatggagttcaacaacaactttatatacattaaagagccttggagaagaatcggttaaatctggagatacttcaacactgagactcattttgaacactggagaaccattaaaccctggtgcatggaaatggttaagagaaaatatgcctcacgttactattgcagatgcgtattggatgactgaacatttattcccagttgctggaacaccttttggaataggagagattccttacaaagcggggtctgctggaattagatttcctggtagtgattttagagtagtggacgatgacgggaaagaattacaagttggaaagaagggatatattgtgttaaagcctattagcccagctttagcaaaaatgcacaatgatactaacggggaaaggattataaagacctactggtcgaggttccctggatatttttacactggtgattacggctatatggacgaggatggatacctttacgttttaggaagagctgatgatgtaataaagtctggtgaaagaataggtactttagaggtagaaagtgtagttgtaacacatccagcagtcgctgaggctgctgtagtaggctacccaaaggaagtaggagaaggaattttagttttagctgtgattaagaaaggttatccaatgagtgaggatttagctaatgatataaaatcatatctaagaaatagtggatatatagtagataaagtatatttagtaagaagactaccaaagactaagagtggcaagataatgaggagattaataagagcactggtaaggaatgaggagattggtgatatctctactttagatgacccaagcatattagaggagttaaagagtatattaagtgagaaagattga

SEQ ID NO: 1008 - protein, 621 aa, Sulfolobus tokodaii
MEAEFYSLQKIRKLSEEAVKDPESFWKDKMHLISWFKEPEKIREGEPPFEKWFVNGYTNISYNAIDRHLDKSEKVAFYWINEKLDTRSITYRDLYCEVNRASYVLKELGVKKGDVVSLIMPSIPEAVYMSLAVHRLGATLVIHYLGLSEETLTYRLNDCNSRVLIVASKGFRNGNEIRIKDFVDKLLDSRKTPIEKVLVVKRGYDDFNVTKRDVIYEEVRPRGRVYVEPIWVESNEPSTIYYTSGTTGRPKGLYHSTAGYVIALNYAFKSLMGPKENDIWWTISELGWPVWPMANLYTIPFMGLTGVLFEGYIGYKPDMFSRIIERFGVNLVWSSTTTLYTLKSLGEESVKSGDTSTLRLILNTGEPLNPGAWKWLRENMPHVTIADAYWMTEHLFPVAGTPFGIGEIPYKAGSAGIRFPGSDFRVVDDDGKELQVGKKGYIVLKPISPALAKMHNDTNGERIIKTYWSRFPGYFYTGDYGYMDEDGYLYVLGRADDVIKSGERIGTLEVESVVVTHPAVAEAAVVGYPKEVGEGILVLAVIKKGYPMSEDLANDIKSYLRNSGYIVDKVYLVRRLPKTKSGKIMRRLIRALVRNEEIGDISTLDDPSILEELKSILSEKD

SEQ ID NO: 1009 - DNA, 1494 bp, Sulfolobus tokodaii
  CDS (1)..(1494)
atggtaagttattatgaggttgtaagaagttttagctggaaggagatcgaaaaaacaatagatatttcatcactagtagaccatgagggggtagctgtaattagatttagtaaagaaggaaaagaacaaattactttccaagaacttaaagataaagcgttaaggcttgcttcttatctgaagcatatagctggtgttaagaagggagatgtaatatcagttttagcttctaagaaaattgagcaagttatagtcctcttagccagtctctatataggagctttgtatcagcccttatttacagcctttggacctaaggctatagaaattaggactagagataaaaaacctaaagtgttattttatcaagatgatcaaaaagagaaggtaagtgaaggagtaccactttcaaagcttgatgagttaacatcttacgggagattagaagagatagaaaggctaagctggaacgatccaattattttactttatacttctgggagtactggtttacctaaaggagcattaatatctaagaggcttttacttaacacatacgtatatatgaaatacggaattgggttaagagagaatgatattttctggaatggtgctgatcctggctgggcatatggtctctattatggaattataggcccattgcttttcggcaagactgtaatattcctagatgagcctttcgatgcagaaagaacaatggagtttcttgaagaaaacaaaataacaaatttcgcatgggcacctactacatataggattatatcgaggtctgtgaaaaggaagtacgatttaaggcttgaaagagctagctctgcaggagaaccccttaatccagaggtaataaagtggtttaaagataattataatgtgattgtgaaagaccattatggtcagactgaagtagggatggtagtgtataatggttggggttatgattatgagttaaagataggtagtatggggttaccagcaccaggttatgaggtggatattatagaagagaatatagctgtaaagaagacttctccaggatttcattttctaggatatttgaataatcctgagaaaacgcaagaagctttcagaggagattggtatttaactggtgatgtagcatctaaagatcaagacggatacttctggtttattggtagaaaggatgatgtaactaaggtgtctggatataggattggaccttttgaagtagagagtgtgctattagagcatccagctatccttgaatctgcagtagttgctgatgaagatcctattagggggcacgttctccacgcatatatagttcttaaacccggatatactccaagtgaagagctaaaaaaggagataatagagtttgttaagagtcgttactctaagactgtgcatttagagagggtggatttcatcgataaattaccgaaaaccgaaagtggaaaaatacaaaggtatttacttaagaaaaagataagttaa

SEQ ID NO: 1010 - protein, 497 aa, Sulfolobus tokodaii
MVSYYEVVRSFSWKEIEKTIDISSLVDHEGVAVIRFSKEGKEQITFQELKDKALRLASYLKHIAGVKKGDVISVLASKKIEQVIVLLASLYIGALYQPLFTAFGPKAIEIRTRDKKPKVLFYQDDQKEKVSEGVPLSKLDELTSYGRLEEIERLSWNDPIILLYTSGSTGLPKGALISKRLLLNTYVYMKYGIGLRENDIFWNGADPGWAYGLYYGIIGPLLFGKTVIFLDEPFDAERTMEFLEENKITNFAWAPTTYRIISRSVKRKYDLRLERASSAGEPLNPEVIKWFKDNYNVIVKDHYGQTEVGMVVYNGWGYDYELKIGSMGLPAPGYEVDIIEENIAVKKTSPGFHFLGYLNNPEKTQEAFRGDWYLTGDVASKDQDGYFWFIGRKDDVTKVSGYRIGPFEVESVLLEHPAILESAVVADEDPIRGHVLHAYIVLKPGYTPSEELKKEIIEFVKSRYSKTVHLERVDFIDKLPKTESGKIQRYLLKKKIS

SEQ ID NO: 1011 - DNA, 1980 bp, Sulfolobus tokodaii
  CDS (1)..(1980)
atgactgaaaaactctcagaacaattacaacaattgggtgaacaaaacttagaggagaaagcagactataatatgagatactataagtatttatacaaaaagagtattgaagagcctgataaattctggggcgaattagcagaagaattaattacttggtacgagccatggaaacaagcttttgtccaagaagaaggtttacttacaaagtggtttgttggtggaaaacttaatgcttcctataacgctgtagatagacatttaaattctcatagaaaatataaggctgcaatattttgggagagtgaaaaaggagaaaagaaggtagttacatatcaagacctattttatgaggttaataaatgggctaacgcattaagggaactcggagtaaagaagggcgatagagtaacaatttacatgcctttaacaccagaaggagtaatagctaagctagctgttgcaagattaggtgcaatacactcagttgtatttgcaggatttggtgcacaagcattagctgatagaattgcagatgctggagcaaaagttgtaattactgcagatgcatactataggagaggaaaactcgtggaattaaagaaaactgtagatgaggcattaaacattctcggtgataaaagcccggtacaaaaagttttagtttataagagaactggtactgaaatacccttcaaagagggtagagatgtttactttgatgaagtaggaaagtataagtacattgaaccagtaccagttgaagctacagaaccattattcattctatacacttccggaactacaggcaagcctaagggaatagttcacagtactggaggttatttagtaggaacagcagttatgttattatggagttatggtttaagccaagaaaatgatgtgttatttaatacttcagatatcggatggattgttgggcactcttacattacttattcaccgttagtaatgggtagaagtatcgtaatctatgagagtgccccagattatccttacccagataaatgggctgaaatgatagagaaatatagggcaacaacatttggtacttcagctacggcaataagaacattaatgaaatacggagaagattatgtaaagcaacatgatctatcatcattaaggataattgtaactaatggcgaaccattaaattatgctccatggaagtggggattagaagtagttggaggaggaaaagtatttatgtctcatcagtggtggcaaactgaaactggaggtcctaatattggttacatccccggtgtagtttacttaccaatgaagtctggaccagctgtaggtttcgctttgcccggtaataaggttactgtagttaatgaggaaggcaaagaaactaagcctagagagaggggttatttagttatgctacctccattcccaccaatgatgatgataggtatgtggaatgacccagataacgagaggttaaagaaaacatacttcagtaaattcccagggatttactatccaggagattatgcaatgattgatgaagatggttacatatgggtaatgggtagagctgatgaaacaattaaagttgctgctcatagaattggtgctggagaggttgaatcaatagtaacatctcatccagcagtagctgaagctgcagctgtaggaattccagatcctgttaaaggggaagctgttcatctatttgtagtactaaaagttggctataaaccctcacctcagctagctagagagatacaagagcatgtaaggaaatatatgggagcaatagtaactccagaggtacattttgtagataaattacctaagactagatctggtaaaattatgagaagagtaattaaagcagttatgatggggcaaagtgctggtgatataaccactcttgaagacgaggcatcaatggatgagattaagaaagcagtagaagagtttaagaaatcattaagccaatga

SEQ ID NO: 1012 - protein, 659 aa, Sulfolobus tokodaii
MTEKLSEQLQQLGEQNLEEKADYNMRYYKYLYKKSIEEPDKFWGELAEELITWYEPWKQAFVQEEGLLTKWFVGGKLNASYNAVDRHLNSHRKYKAAIFWESEKGEKKVVTYQDLFYEVNKWANALRELGVKKGDRVTIYMPLTPEGVIAKLAVARLGAIHSVVFAGFGAQALADRIADAGAKVVITADAYYRRGKLVELKKTVDEALNILGDKSPVQKVLVYKRTGTEIPFKEGRDVYFDEVGKYKYIEPVPVEATEPLFILYTSGTTGKPKGIVHSTGGYLVGTAVMLLWSYGLSQENDVLFNTSDIGWIVGHSYITYSPLVMGRSIVIYESAPDYPYPDKWAEMIEKYRATTFGTSATAIRTLMKYGEDYVKQHDLSSLRIIVTNGEPLNYAPWKWGLEVVGGGKVFMSHQWWQTETGGPNIGYIPGVVYLPMKSGPAVGFALPGNKVTVVNEEGKETKPRERGYLVMLPPFPPMMMIGMWNDPDNERLKKTYFSKFPGIYYPGDYAMIDEDGYIWVMGRADETIKVAAHRIGAGEVESIVTSHPAVAEAAAVGIPDPVKGEAVHLFVVLKVGYKPSPQLAREIQEHVRKYMGAIVTPEVHFVDKLPKTRSGKIMRRVIKAVMMGQSAGDITTLEDEASMDEIKKAVEEFKKSLSQ

SEQ ID NO: 1013 - DNA, 1989 bp, Sulfolobus tokodaii
  CDS (1)..(1989)
atgtcagtaaattgggcactaccatttaatactaaaattgtacctaagtcaaataaggtagttgacataaatacttacaaggaaatacatagcacgagtctgagagactataagggattttgggcttctgttgcatcagaattagactggtttaagccttgggaaaaggtacttgatgattctaatcctccattttataagtggtttgttggtggtgaaataaatgcttcatatttagctgtggataggcatgctaagagttggagaaaaaataaggtagcaataatttgggaaggagaaccagtagatgaaaatggaaaccctaaggaagtgagaaaattaacatattacgatttatacacagaggttaatagggtagcttacatacttagaaataaatacggtttaaagaaaggagatgcagtagctatttatctaccaatgataccagaattgccgatatttatgttagcattggctagaattggagttgtgtttactgtagtattttccggctttagtgctgatgcactagctacgagaatagatgatgcacaagctaaagtgttaattacagctgatgggggctggagaagaggtaagatagtaccgttaaaggatattgctgataaagctttagagaaagtttctacggtgaaagacgttatagttgttagaagaacaggacaaaaggtaaacatggtcgagggaagagataaatatctagatgatgtgttaagggaagttcctcaaggtgtttatgttgaaccagaaaggataaagagtgaagaccccttatatatactctacacttctggaacaactggtaagccaaaaggaatcgttcacgatactggaggataccttacattacttcatgcgacgatgaaatgggtgtttgatgttagagatgatgatatttactggtgcactgcagacataggatgggttaccgggcattcttatattgtgtttggaccattaatggaaggagttaccgaaataatgtatgaaggagctttagactatcctaaaccggatagatgggtttcaataattgaaagatacggcgttacgatattctatacatcaccaaccgcaataagatcattcatgaaatacggtgatgaatgggttaaggcacataagacagacaccatcagaattatacattctgtaggagaaccaataaatccagaagcttttgagtggttatggaagttaattggaagaggagaagtaccatttggtagtacttggtggatgactgagactggtggtatcatgattagtcacttacccggtctttatttaattcctttgaaacctgggactaacggaatgcctttacccggaatagaggcggatgttgttgatgataatggtaatcctacaaagcctgaagaaagaggatatctagtaataaagaatccatggcctggaatgccattaacaatacatagggatccggagaggtatattaaaatatattggtctaaattcccgggaatgttctatgctggagattatgcagttaaagactctgatggatacttctgggtattaggtagggctgatgaggtaattaaagtagctggacatagattaggaacatatgagttagagtctgcgattattgaacatccagccgttgctgaagcggcagttgtaggagttccagatccggtgaaaggtgaagtaccagtggcatttgttattcttaagcaaggtgtttcgccaagtaaaaatcttatggatgatatactgaagactgttagagataaggttggtcctattgctacattatccagtatttactttgtatctaaacttccaaaaactaggagtggtaagattatgagaagagtagttaaggctgttattactaatcaaccggtaggtgatattacaacgcttgaaaatgaggcttcagtagaagaagttaagaaggcttatgaggagtttaaggctgagataggtaaaagttaa

SEQ ID NO: 1014 - protein, 662 aa, Sulfolobus tokodaii
MSVNWALPFNTKIVPKSNKVVDINTYKEIHSTSLRDYKGFWASVASELDWFKPWEKVLDDSNPPFYKWFVGGEINASYLAVDRHAKSWRKNKVAIIWEGEPVDENGNPKEVRKLTYYDLYTEVNRVAYILRNKYGLKKGDAVAIYLPMIPELPIFMLALARIGVVFTVVFSGFSADALATRIDDAQAKVLITADGGWRRGKIVPLKDIADKALEKVSTVKDVIVVRRTGQKVNMVEGRDKYLDDVLREVPQGVYVEPERIKSEDPLYILYTSGTTGKPKGIVHDTGGYLTLLHATMKWVFDVRDDDIYWCTADIGWVTGHSYIVFGPLMEGVTEIMYEGALDYPKPDRWVSIIERYGVTIFYTSPTAIRSFMKYGDEWVKAHKTDTIRIIHSVGEPINPEAFEWLWKLIGRGEVPFGSTWWMTETGGIMISHLPGLYLIPLKPGTNGMPLPGIEADVVDDNGNPTKPEERGYLVIKNPWPGMPLTIHRDPERYIKIYWSKFPGMFYAGDYAVKDSDGYFWVLGRADEVIKVAGHRLGTYELESAIIEHPAVAEAAVVGVPDPVKGEVPVAFVILKQGVSPSKNLMDDILKTVRDKVGPIATLSSIYFVSKLPKTRSGKIMRRVVKAVITNQPVGDITTLENEASVEEVKKAYEEFKAEIGKS

SEQ ID NO: 1015 - DNA, 1689 bp, Sulfolobus tokodaii
  CDS (1)..(1689)
atggtagaaataataaaggataagaaaatagtagtaaagccaaatttaactgactacgatgaagtaagaagaaattttagttgggacagagtacgcaaggagctaaattattatggtgaagtaaatgcaggagaattagcaatacataataaaaatgataaacttgccttattatgggtgagtgaagaaggcagtataagaaagttaacatttaatgatttagagaaaaaaggtactatatttagagatgtattagaaaataatggggtaaaaagaggggatagagtagttataatgtctaaaaggacaccatcattatacttctcatttattgcaatagctatgataggtggtgtcatagttcctatcttttcaacattcggtgaagaggcaataaggtatagagtggaaaatagtggggctaaagtagctatagtgcatgaggagctaacagataaatttaagaatataagtgggattaaggttttaagaactactgatgatggaatagaaggagaaagtaataggttaggtaatatttcatatgaaaagagatcaattaacgatcctttcttaatactttatacttctggaaccactggaaagcctaaagggatttggcacgcccaggatattttaacgttctattacatttctgggaaatatcatttcgatatgcatccacaagatatattttggcatactggagatccagcgtgggtggcgggatttgcgggtgtatggacaccatgggttaatagtattcctcttgtttcatatgagggaagatttaaggctgaaacttggtattctattattgaagaatttaaagtttctgtaatttctactgcaccaacagccttaagattgttaaagaaagaaggtctggagcttagtaagaaatatgatctttcatcagttagatttatacatgcaggcggagaatatgtagatccagatactgttaaaataggtctccaaatatttggtgttccggttcatgatggatacggtcagaccgagactgcgacatatgtcatagctaacttcatctcaatgcccataaaagttggatccatgggtaaaccattaccgggagtcgaggctgtgattgttgatgaaaacggaaatcctcttccacctaacacaaggggtatattagctttcaaacctgattttccagctatggctagaggaatatggggagatgaggagagatggaagagtaactttaagaacggttattatttaactggtgatttagcgtatatggatgaagatggatatttctggtatttgggtagggcagatgatgtaattaaagtttctggctacagagttagtccaatagaaatagagagcgtaatatcaacccatccagctgtagccgaagttggtgttataggcatagaagaccctgttagagggcataagataaaggcatatatagtacttaaaaaagaatatgaacctacagaggagctaaaacaacaaatccaaaattatgttaaagagaaattagcttcacacatggttcccagagaaatagagtttgtaaaagaattaccgcacacattaagtggtaaaataatgaggagagttttgaaatccatagaaagtggtagtaatattggcgatataagtacattagaaaatccagaaattataaagaaattagaaaaacaataa

SEQ ID NO: 1016 - protein, 562 aa, Sulfolobus tokodaii
MVEIIKDKKIVVKPNLTDYDEVRRNFSWDRVRKELNYYGEVNAGELAIHNKNDKLALLWVSEEGSIRKLTFNDLEKKGTIFRDVLENNGVKRGDRVVIMSKRTPSLYFSFIAIAMIGGVIVPIFSTFGEEAIRYRVENSGAKVAIVHEELTDKFKNISGIKVLRTTDDGIEGESNRLGNISYEKRSINDPFLILYTSGTTGKPKGIWHAQDILTFYYISGKYHFDMHPQDIFWHTGDPAWVAGFAGVWTPWVNSIPLVSYEGRFKAETWYSIIEEFKVSVISTAPTALRLLKKEGLELSKKYDLSSVRFIHAGGEYVDPDTVKIGLQIFGVPVHDGYGQTETATYVIANFISMPIKVGSMGKPLPGVEAVIVDENGNPLPPNTRGILAFKPDFPAMARGIWGDEERWKSNFKNGYYLTGDLAYMDEDGYFWYLGRADDVIKVSGYRVSPIEIESVISTHPAVAEVGVIGIEDPVRGHKIKAYIVLKKEYEPTEELKQQIQNYVKEKLASHMVPREIEFVKELPHTLSGKIMRRVLKSIESGSNIGDISTLENPEIIKKLEKQ

SEQ ID NO: 1017 - DNA, 1860 bp, Thermoplasma volcanium
  CDS (1)..(1860)
atgtttgtttataagcctgatgaagcggagatagcatcaacgaatttggggatgtttgcttcttctgttggaatcactgtaaaggaactctacgataaagcagattcagacccagaatggttttggcctcaggtgattaaagatactggaattgaattcttttctccatacaaaaaagtttttgacaattcaggcgggccgcaacatacgaaatggtttactgaaggactcataaacatagagtataacgcagtctcaaggtataaggattcgtcaaagcctgcagtaatttaccagaatgaatatctcgaaagggaaacgctttcctattccggactcaatatatatgtatcttctgttgcctctactcttcttgatatggggatacggaaaggcgatagggttggcatctacatgccttttaacttaaagagtgcaatcgctttctattccatacttcgaattggagcagtagccgttcctatgttctcaggatacggctatgaagctgtaaaaacacgcgttgaagatgctggagtgaagcttctctttacatccaaaggatactccagaaaaggaaaatttgtcgacatgatgtctgtagccgagaaggttggcttgcccataatagctgaaggcggtagcaaaaaaggctatagtttcgaagatgctatgcatgggcagaagcggatagagacggagaaaacgggatcggaagacacagccataatgctttatacatctgggacaacaggaaagcctaagggaactgtacacgtccacggtggagccttgattaacatagccaaagaggtgaagtactatatggacttgaaggacggtgacgtgcttcactggataaccgatcttgggtggatgatgggcccgtgggccttaataggtacgaatgtactgcacgggacgatttatctgtatgacggtgctgtagattatccggatgcctctagactcttcaccatacttgaagataacaacgttacactgcttggtctatcgccaactctcgttcgcatgctgaggtataaaaatattgagagaagattcaatacagtaaggctctttggatctaccggcgaaccttgggacgacgagtcgtggagctacttgttcaatgttcttggtggaggcaaaacgcctatttcgaatatctctggaggcactgacattatcggctgcttccttgcatcgaacccggcaataccgattaaaccgaaatgcctctaccgcgggctcggaatgaacgcatccatatttgacgaaaacggaaaagaggtctatggaaaggtcggttatcttgtagcaaagaagccatcaccttctatgacgcggggtttgtggatggcagaggaccgctacctcgaaagctattggtctagatttcagggtgtttggtttcacggcgactttggagaaatggatgaagatggctatttttatctctatggaagggcggacgatgtgataaaggtagctggcaaaagggtcgggcccaacgaattggaagatattgtaatggcagtgaacggcgttatagaggcagctgtaatttccataccagataaaataaagggtgaagctctcgctgtgttttacgttggcgaaccggatctatcaggtaggataaaagacgctatagaatctaagatgggaaagccattctcgccgtcctatgtgctgcgattgagaaaactgccaaagacgaggaatggcaagaccatgaggcgtgttataagatcctcattccttggccaagaccccggagacttgagcaacactgaagacctagattccattaaagaaatagaagaactcggaaggaccatattcaacaacgattga

SEQ ID NO: 1018 - protein, 619 aa, Thermoplasma volcanium
MFVYKPDEAEIASTNLGMFASSVGITVKELYDKADSDPEWFWPQVIKDTGIEFFSPYKKVFDNSGGPQHTKWFTEGLINIEYNAVSRYKDSSKPAVIYQNEYLERETLSYSGLNIYVSSVASTLLDMGIRKGDRVGIYMPFNLKSAIAFYSILRIGAVAVPMFSGYGYEAVKTRVEDAGVKLLFTSKGYSRKGKFVDMMSVAEKVGLPIIAEGGSKKGYSFEDAMHGQKRIETEKTGSEDTAIMLYTSGTTGKPKGTVHVHGGALINIAKEVKYYMDLKDGDVLHWITDLGWMMGPWALIGTNVLHGTIYLYDGAVDYPDASRLFTILEDNNVTLLGLSPTLVRMLRYKNIERRFNTVRLFGSTGEPWDDESWSYLFNVLGGGKTPISNISGGTDIIGCFLASNPAIPIKPKCLYRGLGMNASIFDENGKEVYGKVGYLVAKKPSPSMTRGLWMAEDRYLESYWSRFQGVWFHGDFGEMDEDGYFYLYGRADDVIKVAGKRVGPNELEDIVMAVNGVIEAAVISIPDKIKGEALAVFYVGEPDLSGRIKDAIESKMGKPFSPSYVLRLRKLPKTRNGKTMRRVIRSSFLGQDPGDLSNTEDLDSIKEIEELGRTIFNND

SEQ ID NO: 1019 - DNA, 1926 bp, Thermoplasma volcanium
  CDS (1)..(1926)
atgacatatgatctaccgaattttgttttaaatagtaaggagatccttagaatagacgagaagaaaagggatgaatttaagcgtttgcttgaattctcgaagaacgatccaaatggcttttgggagagtattgcttctgatctagtttggagaaagaaatgggataccgtaatggaaggcagacttcctgaattttcctttttcaagggaggctatttaaacgttgctgaaaacctcatagatagacatatagaagctggggaagctaatagagctgctttgatatttgagagcgaaacagggcgaagcgctgtatatacatacgcaatgctgcaatctattgtaaacaaactttcaaatgctctaagaagcctaggcgtaaagaaaggtgacagagtctctatatttctgccaaacatacctgaaacattattcagtgtgctcgcgtgctacagggttggtgctgttttcaatacaatattttctggtttctctacgcaggcattggagaacaggttaaagcattttaaccctatgataataataactgcagacggaacatacagaagaggcaaactagtggagttaaagaaaaaagtggatgagattcgagattctaattttgaaaagatcatcgtagtaaaaaatgtagggctcaatctgaattttacagaaagagatttagacttttacagcctaatagcgaagtttaacgataaagacaaagggggagatgtcgaggcaaacgagcctggcatagtcttttatacatcaggtacaacaggtaagccaaaaggagtggtgctttcgggtgccggatttctggtgaacaactacgtgtatgcaaagcaccacctcgatttgagtaaatctgatgtactttggtgcacagctgacataggatggcttactatgcatatatggggtataattggggctcttgctaatggctctacgactctattttatgaaggggcaatcgattacccttctcaagatcgtttctacgaaatagtgcaaaaatacaaagtaacaaaaattttcacagctccaactttgataaggatgctgatgaagtacggctttccagagggcaagtatgatgtttcatccgttcgtgtaataggactagtgggcgagccgttgaatccagaagcgtggcactggatgaataaacacttcagatctgcatacattaataatacgtgggggcaaaccgaaactgctggaactccgcttgcaggatctgcctttgctactggcatgaagccaggatctagcggcatcgagttcctgggagcatccttggatgttgttgacgatgagggtaatccagtgcttgaacgtccaggaaatttagtaataaagaaaccgttccctatgatgatccgcgatctatggaacgaacacgaacgtttcttaaaagaatactatggaaagttagaaggattgtatttcacctatgatgttgctgtaaaggataaagatggccacttttgggttctcgggaggaatgatgatgtaatcaacgtttccggccatagactgagcacgatggagatggagagccttgtagctagcgtaaacggaatagctgaatgtgcagttgtaggaatccctgatgaaatcagaggtctcactcccgttgtattcgtttcattgaagaatgatatatcagcgacaggcattgaagaaactatatcaaagatgattgaggagggcattgggaagtttgcagcaccgtccgatgtaatcgttgttgaagagatgccgaagaccccaagtggaaaaatactcagaaggttccttagggagatctatgtttatggagacattgtcggagaccgtaccggccttgaaaatccggcgtctatagaaaaattgaaatcagtattgcgaaatagaatagaaagtaggaataagtga

SEQ ID NO: 1020 - protein, 641 aa, Thermoplasma volcanium
MTYDLPNFVLNSKEILRIDEKKRDEFKRLLEFSKNDPNGFWESIASDLVWRKKWDTVMEGRLPEFSFFKGGYLNVAENLIDRHIEAGEANRAALIFESETGRSAVYTYAMLQSIVNKLSNALRSLGVKKGDRVSIFLPNIPETLFSVLACYRVGAVFNTIFSGFSTQALENRLKHFNPMIIITADGTYRRGKLVELKKKVDEIRDSNFEKIIVVKNVGLNLNFTERDLDFYSLIAKFNDKDKGGDVEANEPGIVFYTSGTTGKPKGVVLSGAGFLVNNYVYAKHHLDLSKSDVLWCTADIGWLTMHIWGIIGALANGSTTLFYEGAIDYPSQDRFYEIVQKYKVTKIFTAPTLIRMLMKYGFPEGKYDVSSVRVIGLVGEPLNPEAWHWMNKHFRSAYINNTWGQTETAGTPLAGSAFATGMKPGSSGIEFLGASLDVVDDEGNPVLERPGNLVIKKPFPMMIRDLWNEHERFLKEYYGKLEGLYFTYDVAVKDKDGHFWVLGRNDDVINVSGHRLSTMEMESLVASVNGIAECAVVGIPDEIRGLTPVVFVSLKNDISATGIEETISKMIEEGIGKFAAPSDVIVVEEMPKTPSGKILRRFLREIYVYGDIVGDRTGLENPASIEKLKSVLRNRIESRNK

SEQ ID NO: 1021 - DNA, 1953 bp, Thermoplasma volcanium
  CDS (1)..(1953)
atggacatagaaggagaaaagtccgttcttccgacagaagaggtgtatcaccctgatatgaatttgtacaagagggcttacgatgattcgttcaaaaatatggaggctttttggtcgtttaatgctgaaatactaacttggtacaaaaaatgggatagggtgctagatgatacaaaaaagccattctataggtggtttgtaggcggtaaattaaacatgtcttacaactgcgttgacagacacatagagcaacacagaaggaataaggcggcatatatatgggttggtgagaaaggagatgaaaagatagtcacttacgatggattgtttcgcaggataaacaacttagctaaagctttaataaacttaggcataaaaaagggtgacaggattgtcctgtacatgccaatgataatcgaggcaccagttgctatgcttgccgcggctaggattggtgccgttttttctttcgtattcgccggttttggagctggtgctctggcagagaggataaatgattcaaaagctgtgctactcataaccgcagatggaagtttcagaaatggaaaggtggttgaactaaagaaaatagccgatgaagctctggaaatgacatctacgattagaaatgtcatagttgtaaagcacgcaggcaacaatgttgatatgaacgaagacagagacatatggtatcacgaggtagtaggggattcttacacatacgtagagccggtccaaatggatgccaacgatccgttgtttatactctacacgtcaggcacaacagggaagccaaaaggagctgtgcatagcacgggagggtatggtgtttgggttgcgaatactttgaagtgggcctttaatccagatgaagacgatagatggtggtgtgctgcggacatcggttggattacaggccacagttatatcgtatttgcacccttgatattaggtcttaccagcataatgtatgaaggatcaataacttatccggaacccgatagagtatgggaaattatagaaaaatacagaataaacatactctacacatcccctacagctataaggatgctcatgaagtttggcgataaatacccgaagaggcatgacttatcaacgctaaaggttctcggtaccgttggcgaacctataaacccttcagcatggagatggtattacgaaacgatagggaactctaagtgccccataatagatacgtactggcaaacagagactggaggctttatgattgctccacaaagggcgctagggcttcctcctttaaaacctggatcagcaacattcccgcttccaggcgtagatccagcgatactcaacgataggggtgaagaagttaaggataatgagaaagggtacatagtgtttagaaggccttggccaggaatgctgatgacagtaaacaatgacgatgagagatacgtgaagacgtatttttccaagttctatggctattacttttgcggagattacgccataaaggattccgacggttattactggctcctaggaagggctgatgaagtcctaaacgtagcaggacatcgcctcggtacaatagaagttgaagacgcattagtttcaacagggcttgccgttgaagcagcagcttttggtaaacctgatcctataaagggggaagttatagtggccttcattgtacccaaacaaattcaggctgaccgaagggaattaatttctgaaattagaaagcgaattagatctgatttagggccaatttacgtaccagacgagatacatattgtaaaactgcttccaaaaactagaagcggcaagataatgaggagagttgtaaaggctgttgcactggatcagataccaggagatctaaccactcttgaggactcaagctctgtcgatgagattagatcagcaatagaggcctttaggaaggaggcaaagggaggggagtga

SEQ ID NO: 1022 - protein, 650 aa, Thermoplasma volcanium
MDIEGEKSVLPTEEVYHPDMNLYKRAYDDSFKNMEAFWSFNAEILTWYKKWDRVLDDTKKPFYRWFVGGKLNMSYNCVDRHIEQHRRNKAAYIWVGEKGDEKIVTYDGLFRRINNLAKALINLGIKKGDRIVLYMPMIIEAPVAMLAAARIGAVFSFVFAGFGAGALAERINDSKAVLLITADGSFRNGKVVELKKIADEALEMTSTIRNVIVVKHAGNNVDMNEDRDIWYHEVVGDSYTYVEPVQMDANDPLFILYTSGTTGKPKGAVHSTGGYGVWVANTLKWAFNPDEDDRWWCAADIGWITGHSYIVFAPLILGLTSIMYEGSITYPEPDRVWEIIEKYRINILYTSPTAIRMLMKFGDKYPKRHDLSTLKVLGTVGEPINPSAWRWYYETIGNSKCPIIDTYWQTETGGFMIAPQRALGLPPLKPGSATFPLPGVDPAILNDRGEEVKDNEKGYIVFRRPWPGMLMTVNNDDERYVKTYFSKFYGYYFCGDYAIKDSDGYYWLLGRADEVLNVAGHRLGTIEVEDALVSTGLAVEAAAFGKPDPIKGEVIVAFIVPKQIQADRRELISEIRKRIRSDLGPIYVPDEIHIVKLLPKTRSGKIMRRVVKAVALDQIPGDLTTLEDSSSVDEIRSAIEAFRKEAKGGE

SEQ ID NO: 1023 - DNA, 1959 bp, Rhizobium loti
  CDS (1)..(1959)
atggctgccgaagtaccgctctggaccccgacgcaagaccggatcgacgcttcgccattgacggctttcctgaaggccgcggaggcgaaagccggcgccacattcgcctcttatgccgatcttcaccgctggtcggtcgaggatcgcgaggggttctggagcctggtctgggatttctgcggcatcgccggcgaaaagggcgagcgcctgctcgccgatggcgacaagatgccgggtgcctccttctttcccgacgcgacgttgaatttcgccgagaacctgttgaagaagaccggcgcgggcgaggcgatcgtcttccgcggcgaggacaaggtcgagcggcggctgtcctggaaccaactgcatggcctggtttcgcgcctgcagcagcttttcctgtcgctcaaggtcaagaagggcgaccgcattgccgcgatgatgcccaacatgcccgagacagtcgctgccatgctggccgccgcctccatcggcgcggtgtggtcatcctgctcgcccgacttcggcgagcagggcgtgctcgaccggttcggccagatcgagcccgtcatcttcatcgggcctgacggctattggtacaatggcaaggcgatcgaggtcgctgacaaggtcgccgcggtcgcggccaagctcggcagtgtccgcaaggtgctgcttgtcgattatctcggtacttcggccgatgtggcggcaaccatcgacaaggcggtggcgatggaagaggcgctgtcgcccttcgccgccaagccagtcagcttcgagcctctgccgttttcgcatccgctctacatcctgttttcatcaggaaccaccggcatccccaaatgcatcgtccattcggccggcgggacgctgatccagcatgtcaaggaacaccggctgcatgccggcctcgtcgacggcgaccgcttcttctacttcaccacgtgcggctggatgatgtggaactggctggtgtcgggcctggcttccggggcgacgctgctgctctacgacggctcgcccttctaccccgacggcaatgtgctgttcgacttcgtcgatgccgagaagatgaccttcttcggcacctcggccaagttcatcgattccgtgcgcaaggccggcctcaagccgatccgcagccatgacctgtcgaccgtgcgggcgatctcctccaccggttcgcccctgtcgcccgaggatttccgcttcgtctacgaaggcatcaagaaggatgtgcatctcgcctcggtttccggcggcaccgacatcgtctcctgcttcgtgctcggcgtgcccaaccagccggtgtggaccggcgagatccagggaccaggcctcggcctggccgtcgatgtctgggacgatgacggcaagccgatccggcaggaaaagggcgaactggtctgcaccaaggcgtttccgtcgatgccgatcggcttctggaacgatcccgaaggcaagaaataccaggcggcctatttcgagcgtttcgacaatgtctggtgccatggcgatttcgctgagtggacggcgcatggcggcatgatcatccatggccgctcggacgccaccctcaatccgggcggggtgcgcatcggcacggcggagatctacaaccaggtcgaacagatgccggaaatcctggaggcgctgtgcatcggccaggatttcgacaatgacgtgcgtgtcgtgctgttcgtgcggctggccgcgggcgtcgaactggacgaggatctggaaaaacgcatccgcgccaagatccgcagcggtgccagcccccgccatgtcccggccaggatcgtcgcggtcacggatattccgcgcaccaagtcgggcaagatcaccgaactcgccgtgcgcgacgtcgtgcatggccgcgccatcaagaacaaggaagcgctcgccaacccggaagcgctggagctgttcaggaacctgccgcagcttgccgaatga

SEQ ID NO: 1024 - protein, 652 aa, Rhizobium loti
MAAEVPLWTPTQDRIDASPLTAFLKAAEAKAGATFASYADLHRWSVEDREGFWSLVWDFCGIAGEKGERLLADGDKMPGASFFPDATLNFAENLLKKTGAGEAIVFRGEDKVERRLSWNQLHGLVSRLQQLFLSLKVKKGDRIAAMMPNMPETVAAMLAAASIGAVWSSCSPDFGEQGVLDRFGQIEPVIFIGPDGYWYNGKAIEVADKVAAVAAKLGSVRKVLLVDYLGTSADVAATIDKAVAMEEALSPFAAKPVSFEPLPFSHPLYILFSSGTTGIPKCIVHSAGGTLIQHVKEHRLHAGLVDGDRFFYFTTCGWMMWNWLVSGLASGATLLLYDGSPFYPDGNVLFDFVDAEKMTFFGTSAKFIDSVRKAGLKPIRSHDLSTVRAISSTGSPLSPEDFRFVYEGIKKDVHLASVSGGTDIVSCFVLGVPNQPVWTGEIQGPGLGLAVDVWDDDGKPIRQEKGELVCTKAFPSMPIGFWNDPEGKKYQAAYFERFDNVWCHGDFAEWTAHGGMIIHGRSDATLNPGGVRIGTAEIYNQVEQMPEILEALCIGQDFDNDVRVVLFVRLAAGVELDEDLEKRIRAKIRSGASPRHVPARIVAVTDIPRTKSGKITELAVRDVVHGRAIKNKEALANPEALELFRNLPQLAE

SEQ ID NO: 1025 - DNA, 1689 bp, Rhizobium loti
  CDS (1)..(1689)
atgcttttcgagaaggatagctttgaggaggtccgccgatcgtttcagtggtctattcctgagcggttcaatatcggcgtcgacatctgcgacaagtgggctgaggcagacccaactcgtctcgcgatagttgacgtcgatccggctggttttacgcgcgaatacacattttccgacctgcgcacgatgtcgaacagattagcgaatgcactttttgggcatggcgttggccgacaggtgggtgaaacgggcgaccgagtgggtgtgttgcttcctcaacgtgtcgagactgcggtagcccatatcgccgtgaccaaactcggatgtgtgtcgataccacttttcaccctgttcggtccggaggcgctcgagcaccgacttcgcgactcaggcgcgagggtagtcattaccgaccgtgccggcgccgaacgtgtcgcaagcatccggtctcgcgtgccttcgatagaactcgtcgtctgcgtggacggccggggggagggcgacgaagtctcattccaagagatgtgttctgagcagtcggacacgtttatccccgtcgatactcactccgatgacccggcgatcctcatctatacgtctggaacaaccggcaatcccaagggtgcgctacatgctcatcgcgtcctgctgggacatctgccaggtgtggagataagtcatgactttctgccgaagcccgacgaccgcttctggacacctgccgattgggcgtggattggaggactgctcgacgtactgatgcctgcgcttcatcatggtattccggtcgtcgcctgccgcttttcgaagttcacgaccgaggcggcgatcaccctgatccgctcgcagaggatcagaaacgtattcctcccacctaccgccctgaagatgctgaaactcaagcctgctgaggaatgctcggggctcgacctccgttccgtcgccagcgggggagagacgttgggcgccgagctgatccagtggggcaaggacgcgttaggcgtgacgatcaacgaattctacggccagacagaatgcaacatgatcgtctcgtcttgtgcggccctggagccgcccgcactaggatctatgggacggccggtccctggacatgatgtcgacgtcattgatccggtatcgagactgagacagcctgcaggcgtggagggggctattgcggcactcgctcccgaccccgtcatgttcctagggtactggaacaacccggatgccactcgggagaagttcattcatggacccgagggccgatggctggttaccggagaccgaggtgtcagggacaatgatggacgtttgcgctttgtcggacgagacgacgatgtcatcggctccgcggggtatcggatcggtcccgctgagatcgaagattgcctgctcggtcacccgtcagtgcgtctggccggtgcggtcggcaagccggatgaaatcaggggttccgtcgtggcggcgtacgtcgtcctgcgcgaaggattcagtccttcgcaaaaccttgcagaggacatcgcggcacacgtgaaatcgcgcctcgccgcgcatgaatatccgcgggtcgtcaggttcatagacgagatgccgatgaccaccaccggcaagatcatccggggagcgctcaggaagattgcgcaggaagaagccgctctcgaagcacgatccaggcagaaagattaa

SEQ ID NO: 1026 - protein, 562 aa, Rhizobium loti
MLFEKDSFEEVRRSFQWSIPERFNIGVDICDKWAEADPTRLAIVDVDPAGFTREYTFSDLRTMSNRLANALFGHGVGRQVGETGDRVGVLLPQRVETAVAHIAVTKLGCVSIPLFTLFGPEALEHRLRDSGARVVITDRAGAERVASIRSRVPSIELVVCVDGRGEGDEVSFQEMCSEQSDTFIPVDTHSDDPAILIYTSGTTGNPKGALHAHRVLLGHLPGVEISHDFLPKPDDRFWTPADWAWIGGLLDVLMPALHHGIPVVACRFSKFTTEAAITLIRSQRIRNVFLPPTALKMLKLKPAEECSGLDLRSVASGGETLGAELIQWGKDALGVTINEFYGQTECNMIVSSCAALEPPALGSMGRPVPGHDVDVIDPVSRLRQPAGVEGAIAALAPDPVMFLGYWNNPDATREKFIHGPEGRWLVTGDRGVRDNDGRLRFVGRDDDVIGSAGYRIGPAEIEDCLLGHPSVRLAGAVGKPDEIRGSVVAAYVVLREGFSPSQNLAEDIAAHVKSRLAAHEYPRVVRFIDEMPMTTTGKIIRGALRKIAQEEAALEARSRQKD

SEQ ID NO: 1027 - DNA, 1929 bp, Rhizobium loti
  CDS (1)..(1929)
atggttcctgggaggttgccgatggcttcacgctatcacgaggtctatgacggctggaaacgcgacccggaaaaattctgggcggacgccgccggcgccatcgactggtattcgccctgggacaaggtgttcgacgctgacgccggcgtctatggccgctggtttaccggcgcgacatgcaacacctgttacaacgccatcgaccggcatgtcgcccgcgggcgcgccgaccagatcgcactgatccatgacagcgccatcaccggaacggtgaaaaaattcacctatgccgaactcaagcgcgaggtggtggcgctgacctcggtgctgaagaaccggggcatcggcaagggcgaccgcgtcatcatctacatgccgatggtggcggaggcggccatcgccatgcttgcctgcgcccgcatcggcgccgtgcattcggtcgtcttcggcggctttgcctcgcatgaactggccacccgtatcgacgacgccaagccgaagctgatcatctcggcctcctgcggcctggagccgggccggatcgttgcctacaagccgctgctcgacaaggcgatcgagatgtccggccacaagccggacgcctgcctgatcctgcagcgcgaccagctgcgctgcgagctgaaggagcatttcgacatcgactatgccgacgccgtcgcgcgcgaacgggcggccggcgccaatgtcgactgcgtgccggtgctggccaccgacccgctctacatcatctacacgtcaggcacgaccggccagccgaagggcatcgtgcgtgacaatggcggccacatggtcgcgctgaaatggacgatggaaaacgagttcggcgtcaagccgggcgaagtgttctgggcagcgtccgatgtcggctgggtcgtcggccattcctacatcgtctacggaccgctgctgcatggcagcaccagcgtcctgttcgaaggcaagccgatcggcacgcccgacgccggcacctactggcgggtcatctcggaccatggcgtggtcgcgctgttcaccgcgccgacggcgttccgggcgatcaagggccaggaccccaagggcgagttcgttcccagatacgatctgtcgaaattccgcacgctgttcctcgccggcgagcgcgccgatcccgagaccatcaaatgggcggagcagaagcttaacgtgccggtgatcgaccactggtggcagaccgagaccggttcgccgatgaccatcaatcccgcgggacttggcctgctgccggtgaaatacggttcgcccggcgtaccgatgccgggctacgacatccgcgtgctggacgatgccggccacgaagtgccgcgcggcacactcggcaatgtcgtggtcaagctgccactgccggccggctgcctgccgacgctgtggaacgccgacgcccgcttccgccaagcctatctcgacgagtttcccggcttctacaagacggcggacgccggcatgatcgacgaggacggctatctctacgtgatggcccgcaccgacgacatcatcaatgtcgccggccaccggctgtcgaccggcgccatggaagaggtgctggccgctcatcccgatgtcgccgaatgcgccgtcgtcggcatcgccgatgctatgaaggggcaaattccgctcggcttcgtggtgctgaacgccggtgtcgcgcgcggcggcgacgtcatcgagaaggaggtcgtggcactggtgcgcgagcgcatcgggccggtcgccgctttcaaaacggtggtgacgatcaaacgcctgcccaagacgcggtcgggaaagattctgcgcggcaccatgcagaagatcgccgacaaggaggcgtggacgatgccggcgacgatagacgacccggccatcctcgacgagatcaccgcagcgatgaaggcgcgcgggatcgggatttga

SEQ ID NO: 1028 - protein, 642 aa, Rhizobium loti
MVPGRLPMASRYHEVYDGWKRDPEKFWADAAGAIDWYSPWDKVFDADAGVYGRWFTGATCNTCYNAIDRHVARGRADQIALIHDSAITGTVKKFTYAELKREVVALTSVLKNRGIGKGDRVIIYMPMVAEAAIAMLACARIGAVHSVVFGGFASHELATRIDDAKPKLIISASCGLEPGRIVAYKPLLDKAIEMSGHKPDACLILQRDQLRCELKEHFDIDYADAVARERAAGANVDCVPVLATDPLYIIYTSGTTGQPKGIVRDNGGHMVALKWTMENEFGVKPGEVFWAASDVGWVVGHSYIVYGPLLHGSTSVLFEGKPIGTPDAGTYWRVISDHGVVALFTAPTAFRAIKGQDPKGEFVPRYDLSKFRTLFLAGERADPETIKWAEQKLNVPVIDHWWQTETGSPMTINPAGLGLLPVKYGSPGVPMPGYDIRVLDDAGHEVPRGTLGNVVVKLPLPAGCLPTLWNADARFRQAYLDEFPGFYKTADAGMIDEDGYLYVMARTDDIINVAGHRLSTGAMEEVLAAHPDVAECAVVGIADAMKGQIPLGFVVLNAGVARGGDVIEKEVVALVRERIGPVAAFKTVVTIKRLPKTRSGKILRGTMQKIADKEAWTMPATIDDPAILDEITAAMKARGIGI

SEQ ID NO: 1029 - DNA, 1680 bp, Rhizobium loti
  CDS (1)..(1680)
atggggagatgggcgccaccagggaggactgacatgaccggcttgccacgctacgaggacgccgttgcgcgcttccgcatcgaggatgagatcgccaggctcgatggcgatcccctcaccggcatcaacggctatgtcgaatgctgcggccgccacaccgggcagaaccggctggcgctgcgcgcgatctcggccgggggcgaactccggctgttcagcttcgacgacctcgctgatatgtcgggccgcgtcggcaacctgctcaaggatgcaggcgtcgggcccggcgatgtcgtcgccggcatgctgccgcgcattcccgaactcatagcgctcatcctcggcacctggcgcatcggcgccatctaccagccgctgttcaccgctttcggcccgaaggcgatcgagcatcggctcggctatagcggcgcgaaattggtggtgaccaatccggccaatcgcggcaagctcgacgagatgaagacctgcccgccgatcgccaccattcttggccccggcgatcccctgcccgctggcgacatcgacttccgcgccgcgcttgccgccgcctcccctgactgcgaacccgtgatgcgcaaaggcgaggacctgttcatgatgatgtcgacctcgggcacgacgggcctgcccaagggcgtgccggtgccgctcaacgcgctgctctccttcggcgcctatatacgcgatgcgatcgggctgcgccccgacgacgtcttctggaatatcgccgatcccggctgggcctatggcctctactacgccatcactggcccgctgctgctcggcatcgccaccaccttcaacgagggcgccttcaacgctgggaacacctatgacgtcatcgagcggctcggcgtcaccagccttgccggctcgcccaccgccttccgcctgctgctcgccgaagggcctgaggccgctgcccgcatcaagggccggctgcgcgtggtgagcagcgccggcgagccgctcaacccggaagtgatccgctggttcgacgctcatctcgccgcgcccattcacgaccattacggccagaccgagaacggcatgatggtcaacaaccaccatggcctcgcgcatgccgtccgcgcgggctcggccggctttgccatgccgggttatcgcatggtggtgctggacgatgaaggcaacgagctcggcctcaatcagcccggcatcctcgccgtcgatgtcgccaattcgccgctgcgctggttcgacggctaccaccaggccgagacgccggcgatcgcaggcggctactaccgcaccggcgacacggtggaatacgagcccgacggctcggtctcctttatcggccgcgccgacgatgtcatcacctcgtcgggctaccgcatcggccccttcgacgtcgaaagcgcgctgatcgaacatcccgcggtcaacgaggcggcggtggtcggcgtgcccgacccgcagcgcaccgagatcgtcaaggccttcgtcatcctggcgccggcctaccagggcagcacggaactcgccgaagaactggcgcagcatgtccgcaagcggctctcggcccacgcctacccgcgcgagatcgatttcgtcgccgaattgccgaagacgccgagcggcaagatccagcggttcctgctgcggcaggcggaggtggagaagcggaaggggtag

SEQ ID NO: 1030 - protein, 559 aa, Rhizobium loti
MGRWAPPGRTDMTGLPRYEDAVARFRIEDEIARLDGDPLTGINGYVECCGRHTGQNRLALRAISAGGELRLFSFDDLADMSGRVGNLLKDAGVGPGDVVAGMLPRIPELIALILGTWRIGAIYQPLFTAFGPKAIEHRLGYSGAKLVVTNPANRGKLDEMKTCPPIATILGPGDPLPAGDIDFRAALAAASPDCEPVMRKGEDLFMMMSTSGTTGLPKGVPVPLNALLSFGAYIRDAIGLRPDDVFWNIADPGWAYGLYYAITGPLLLGIATTFNEGAFNAGNTYDVIERLGVTSLAGSPTAFRLLLAEGPEAAARIKGRLRVVSSAGEPLNPEVIRWFDAHLAAPIHDHYGQTENGMMVNNHHGLAHAVRAGSAGFAMPGYRMVVLDDEGNELGLNQPGILAVDVANSPLRWFDGYHQAETPAIAGGYYRTGDTVEYEPDGSVSFIGRADDVITSSGYRIGPFDVESALIEHPAVNEAAVVGVPDPQRTEIVKAFVILAPAYQGSTELAEELAQHVRKRLSAHAYPREIDFVAELPKTPSGKIQRFLLRQAEVEKRKG

SEQ ID NO: 1031 - DNA, 1686 bp, Pseudomonas putida
  CDS (1)..(1686)
atggttcaactccaaaaacaagaaaccaggagtccgacgatgcgtgattacgccgaggccgctcgagcgttcgaccctgcccaggccgctagcgcggcgctgcatggccacctcgaagccctcaatgcctgtgtcgaatgctgtgaccgccatgccggtgacggcaagctggcgctgatccacgaagaccgcgacgacaacagcgcacgctacagttttgatcagctcaaggcacaggcggcccgctttgccaatgtgctcaaggcgcagggcgtgggtgcaggggaccgggtggcgggcttgatgccgcgtactcccgagttgctggtcaccattctcgccacctggcgtctcggtgccgtgtaccagccgctgttcaccgcgttcggccccaaggccatcgaacaccgccttgaacagtcccacgcccgcgttatcgtcaccgacagccacaaccgtgccaagctggatgaggtgcaggcctgcccatcgatcatcacggtcagggcccgcagtggcgagctggattttcagcaatgcctggatgctgcctcgccggtatgtgaaccggtcatgcgctcgggcaacgacccgtttctgctgatgttcacctccggcaccaccggcccggcgaaacccctggaagtgccattgcatgccattgtcgcgttccagggttacatgcgggatgccatcgacctgcgccccgaggacaacttttggaacctggccgacccgggctgggcctacggcctgtattacgccgtcaccggcccattgtcgctgggccatgccaccaccttctacgatggcccgttcagcgttgaaagctgtgcccaggtaatcgacaagctgggtatcacaaacctggctggctcgcccacggcgtatcgtttgttgattgccgcgggcaaggcattttcggcaccggtcaaaggccggctgcgtgtggtcagcagcgccggagaacccctcaacccggaggtgatccgctggttcgccgaggaactggacgtgaccattcacgaccactacggccagaccgagttgggcatggtgctgtgcaatcatcatggtttgttgcatccggtgcacctgggctcggccggcttcgccatccccggccatcgcatcgtggtgctggatgcccaaggtaacgaactgccagctggccagccgggcatcctcgcggttgaccgcgagcagtcgccattgtgctggttcgccggctaccacggccaggcaaccaaggccttcgtcggcaagtaccacctcagcggcgacacggtggagctgaaccaggatggcagcatcagtttcgttggccgcagcgacgacgttatcactacctccggttaccgagtcggcccgttcgatgtggaaagtgcattgatcgagcacccggcggtgatcgaggcagcggtgattggcaagccggaccccgagcgtactgagctgatcaaggccttcgtggttttggccaacggccatgtgggcagcgtcgagctggaagaaaccttgcgccagcacgtgcgccagcgcctctacgcgcatgcctaccccagggaaatcgaattcgtcagcgagctgcccaagaccccgagcggcaagctgcaacgcttcatcctgcgcaaccaggaagtcgccaaacaacaagcgcaacaggccacccctgccagcgtctga

SEQ ID NO: 1032 - protein, 561 aa, Pseudomonas putida
MVQLQKQETRSPTMRDYAEAARAFDPAQAASAALHGHLEALNACVECCDRHAGDGKLALIHEDRDDNSARYSFDQLKAQAARFANVLKAQGVGAGDRVAGLMPRTPELLVTILATWRLGAVYQPLFTAFGPKAIEHRLEQSHARVIVTDSHNRAKLDEVQACPSIITVRARSGELDFQQCLDAASPVCEPVMRSGNDPFLLMFTSGTTGPAKPLEVPLHAIVAFQGYMRDAIDLRPEDNFWNLADPGWAYGLYYAVTGPLSLGHATTFYDGPFSVESCAQVIDKLGITNLAGSPTAYRLLIAAGKAFSAPVKGRLRVVSSAGEPLNPEVIRWFAEELDVTIHDHYGQTELGMVLCNHHGLLHPVHLGSAGFAIPGHRIVVLDAQGNELPAGQPGILAVDREQSPLCWFAGYHGQATKAFVGKYHLSGDTVELNQDGSISFVGRSDDVITTSGYRVGPFDVESALIEHPAVIEAAVIGKPDPERTELIKAFVVLANGHVGSVELEETLRQHVRQRLYAHAYPREIEFVSELPKTPSGKLQRFILRNQEVAKQQAQQATPASV

SEQ ID NO: 1033 - DNA, 2582 bp, Bos taurus
  CDS (1)..(2028)
atggcggcgcgctgcttgggccgcggcgtcgggcggctactgggcggcctccgcggggttggggtgcgggcgctggcggccccccggctctggagcagcgcctccgcctccgtagcgccacccagctcctaccaagagcgaatcgcgcttgcagctcgcgagcccgccgccttctgggggccactggcgcgggacgctctcgtgtgggacaccccttaccacacggtgagcgactgcgacttccgcagcggcaggatcagctggttcctgggaggccagttaaacgtgtctgtcaactgcttggatcagcacgttcagaagtccccagagagcatcgctttgatctgggagcgagatgagcctggaactgaagtgaagatcacctacagggagctactggagaccacgtgccgcctggccaacacactcaagaggtatggagtccgccgaggggaccgagtggccatctacatgcctgtctccccactggctgtggctgccatgctggcctgtgccaggatcggagccatccacaatgtcatctttgctggcttcagtgtggggtccttggctgggaggatcaacgatgcccaatgcaaggtggttattaccttcaaccaaggactccggggagggcgcgtggtgcagctgaagaagatcgtggacgaagccataaaggtctgcccatccgtccagcatgtcctggtggctcacaggacagacaacaaggtccacatggggcatctggatgtttcccttgagcaggagatggccaaggaggagccggtatgtgccccggagagcatgggcagtgaggatatactcttcctcctgtacacctcggggagcaccgggaagcccaaggggctcgtccacacccaggcgggttacctgctctatgctgccctgacgcaccggcttgtgtttgactaccggccaggtgacatcttcggctgcgtggctgatatcggctggatcacgggacacagctatgtggtgtacgggcccctctgcaatggagcgaccagtgtcctttttgagagcactccggtttaccctgatgcgggtcggtactgggagacggtgcagaggctgaagatcaatcagttctatggcgccccgacagcctaccggctgctgctgaagttcgaggactcctgggtgaagaagtatgaccgctcttctctgcggaccctgggctcagtgggagagccgatcaaccacgaggcctgggaatggctgcacagggtggtgggggacagccggtgcacgctggtagacacctggtggcagacagaaacggggggcatctgcatctctccacggccctcagaggagggggcagagatcctgccctgcatggcgatgaggcccctgtttggcattgttcccgttctcatggatgagaagggaaatgtcctggagggcggagacgtgtctggggctctgtgcctgtcccaggcctggccgggcatggcccggaccatctacggagaccaccagcgattcctggacgcctacttcgagacctaccctggctactacttcacaggagacggggcttacagaacagaggagggctactacgagatcactgggcgcatggacgacgttatcaacatcagtggccaccggctggggaccgcggagattgaggacgccatggctgaccaccccgcggtgcccgagaccgctgtcattggctacccgcatgacatcaagggagaagctgccttcgccttcgttgtgttgaaagatgatgtgggtgatgtggacgtggtggtgaaggagctccggtcagtggtggccgacaagatcgccaagtacgcagtgcccgatcaggtcctggtagtgaagcgtcttccaaaaactcggtctggaaaagtcatgcggaggctcctgaggaagattgtcatgggccgagctcaggacctgggggacaccaccaccctggaggaccctggcgtcatcacggagatcctgagtgcctaccaggagtacaaagacaagcggggaggtgccaagtgatggctctgctgagaccaggcccctaatgcgtgctcctagagcacagctcccgagtcggcttgttcctagacaccccagcagaacccaggctgccctcctcgcgaagcctgaagtccccgcctcccctcctggggacccacgacaggtcctcgcccagggcgagcttcctcccgcttgtcccgaatctggtttcctggtgaaaagtccatccccctgtccccttgacagcacaggaaggtggagcccctgtgtctgctcaggtggactgggagcaaacagcagtcatgtttcctccagatgtttctagaaacaaaaggtgaagattttatttttatacttttatattttagaagaaacatggtgcccacacacgtgcagtgtatgctgtacttgtacacactcttcttaacagttatgaaaagctccttttttgcctccgctcgtggggaagtgtggcgggctggagggtgcaatttgggttactgtttggcttgttggaaatttaagttggaaatgtttgtgcctctgtcttaacacagctatcttgaaacctc

SEQ ID NO: 1034 - protein, 675 aa, Bos taurus
MAARCLGRGVGRLLGGLRGVGVRALAAPRLWSSASASVAPPSSYQERIALAAREPAAFWGPLARDALVWDTPYHTVSDCDFRSGRISWFLGGQLNVSVNCLDQHVQKSPESIALIWERDEPGTEVKITYRELLETTCRLANTLKRYGVRRGDRVAIYMPVSPLAVAAMLACARIGAIHNVIFAGFSVGSLAGRINDAQCKVVITFNQGLRGGRVVQLKKIVDEAIKVCPSVQHVLVAHRTDNKVHMGHLDVSLEQEMAKEEPVCAPESMGSEDILFLLYTSGSTGKPKGLVHTQAGYLLYAALTHRLVFDYRPGDIFGCVADIGWITGHSYVVYGPLCNGATSVLFESTPVYPDAGRYWETVQRLKINQFYGAPTAYRLLLKFEDSWVKKYDRSSLRTLGSVGEPINHEAWEWLHRVVGDSRCTLVDTWWQTETGGICISPRPSEEGAEILPCMAMRPLFGIVPVLMDEKGNVLEGGDVSGALCLSQAWPGMARTIYGDHQRFLDAYFETYPGYYFTGDGAYRTEEGYYEITGRMDDVINISGHRLGTAEIEDAMADHPAVPETAVIGYPHDIKGEAAFAFVVLKDDVGDVDVVVKELRSVVADKIAKYAVPDQVLVVKRLPKTRSGKVMRRLLRKIVMGRAQDLGDTTTLEDPGVITEILSAYQEYKDKRGGAK

SEQ ID NO: 1035 - DNA, 1800 bp, Thermoplasma acidophilum
  CDS (1)..(1800)
atggcatctgaattggacgggttcaagaaatgggataaagatcttgaaggtgatcttggaaaattcgaatttttcgtcaatggatacagcaatgtcagttttaactgtattgacaggcatgcaatgaaaacacctcagaagactgctataatatggctgagtgaggacggtttacggcaatcgataacctacagagatctcatgctgcagaccgcgaaatttgcgaaaggattggcagatgaaggcgtaaaaatgggagatgtcgtgacgatctttctccccaatagaatagaggcattcatagctgcccatgcctgcttcagaattggggcgatatataacataatattttctgggttttctgctaaagcccttctggataggatgaaggaaactaacccaaaggtggtaataaccacagacagcagtctacgccggggaagaaaaatcaacctgaaggagaccctagactcaataatcagtgaagtgccgtccgtgaagaaagtcatcataatcaagagagacggcaagcacgatctgaatctgggtgaaagggaagtatactacgatgactttatgtcaggaataacgggatatgccgaaccggtgcctatcgaggctaatgcacctggttttgtcatatacacttctgggacaacggccaagcccaagggcgtggtccattccggcataggttttcttgttggatcctatcacaatgtaaaatatgcgcttgatcttgggcctgaagatatcttctggtgtaccgccgacgtgggatggctgacgttcccgatcttcgaactcgtgggcggcctggcacacggtgcaacggtcattgcatacgagggggcgctggattaccctgacataaggcatttctacagcattatacaggatttcaaggttacgaaattgttcacggcgccaacctttttgagaatgcttgccaggaatggatcggacgtggcttctggatatgacctgagcagcctgaggctgatatcgctggttggggaaccgctagacgtgaagacatggaaatgggtgtacaacgacctcgggcacgggaggatagagataaacaacacctacggccagacggaaacagggagcgcatggacttcctctcttgtgggcgttaccggtgcaaggcccggttcatgcgggcttccactcccaggtcactcatttgatatacttgacgaaggtggtcaaccagttgaaaatggaaggatagggacgctcgtattgagaaagccattcccttcacttgcaagaggaatatggaaagacccacagagatatttcaaggaatatctttctgttttcccggggaattattgtacctatgattctgccgtccgtgacaggtatggccatatatgggtactcggaagaactgacgatgtgataaatgtttccgggcacaggatctccacaatggagatggaagatgcaataatgtctataccggaggtttctgaggctgccgttgttggtgtcgatcatgctataaaaggcatgtcaactgcggtatttgtcaccctcggcaacggaattgatttgccagcagatctaggaaaaaggatacaggacgaaattgctagaaggataggtaattatgccaagcctgaaagtgtatacgtgatcccagagatgccaaagacgcgtagcggaaagataatgcgaagactgttgcgagagatcgtaatcagcaataaagtgagcggtgatctgacaggcctcgaggatcccggtgtgatttcgcgcatactgcaggagatgaagcaggcttaa

SEQ ID NO: 1036 - protein, 599 aa, Thermoplasma acidophilum
MASELDGFKKWDKDLEGDLGKFEFFVNGYSNVSFNCIDRHAMKTPQKTAIIWLSEDGLRQSITYRDLMLQTAKFAKGLADEGVKMGDVVTIFLPNRIEAFIAAHACFRIGAIYNIIFSGFSAKALLDRMKETNPKVVITTDSSLRRGRKINLKETLDSIISEVPSVKKVIIIKRDGKHDLNLGEREVYYDDFMSGITGYAEPVPIEANAPGFVIYTSGTTAKPKGVVHSGIGFLVGSYHNVKYALDLGPEDIFWCTADVGWLTFPIFELVGGLAHGATVIAYEGALDYPDIRHFYSIIQDFKVTKLFTAPTFLRMLARNGSDVASGYDLSSLRLISLVGEPLDVKTWKWVYNDLGHGRIEINNTYGQTETGSAWTSSLVGVTGARPGSCGLPLPGHSFDILDEGGQPVENGRIGTLVLRKPFPSLARGIWKDPQRYFKEYLSVFPGNYCTYDSAVRDRYGHIWVLGRTDDVINVSGHRISTMEMEDAIMSIPEVSEAAVVGVDHAIKGMSTAVFVTLGNGIDLPADLGKRIQDEIARRIGNYAKPESVYVIPEMPKTRSGKIMRRLLREIVISNKVSGDLTGLEDPGVISRILQEMKQA

SEQ ID NO: 1037 - DNA, 1944 bp, Thermoplasma acidophilum
  CDS (1)..(1944)
atggaaagcgaaaagggaacattacccatgaacgaggtctacaaccccggcatgaacgtgtacagcgagatatacaggaaatccctggaagatcctgagaatttctgggcaaaacaggccgagatactgacatggtattccaaatggaacaagatcctcgacgattcaaagaagccgttttacagatggtttgtgggcggaaagctcaacgtgtcgtacaacgcagttgacaggcacctggagcagcacaggaggaataaggccgcatacatatgggttggcgaaaatggtgaagaaaagatagtgacgtacgatggactttacaggaggataaacaacctggccaaagccctcctgaacctcggaataaagaagggagacaggatagtactgtacctgcccatgataatcgaagcgcccgttgccatgctggccgcggccaggataggtgcagtattctctttcgtcttcgcaggcttcggtgcaggtgcactggcagagaggataaacgattcaaaggccgtactgctgataactgcagatggaggtttcagaaacggcaaggtggtggagctaaagaagatagcggatgaggcccttgagatgacctccacggtcagaaacgtgatcgtcataaagcatgccaggaatgacgtgaacatggttgaggatcgggatatctggtatcatgagatcgttggtgattcgcatacgtacgttgagccggaacatatggacgcgaacgatccgctcttcatcctttacacctctggaaccactggaaaacccaaaggagctgtgcacagcaccgggggctattccgtatgggttgccagcacgctgaagtgggctttcaatcctgatgaggatgacagatggtggtgcgctgcagacataggctggataaccgggcacagctacatagtattcgctcccttgatccttggcctgacgagcatcatgtacgagggatcgataacctatcccgaacctgacaggctatgggagatcatagaaaaataccgcgtgaacatcctttacacctcccccacggctataaggacgctgatgaagttcggagagaagtacccgcagaggcatgatctgagcaccctgaaagttctcggaacggttggagaacccataaatccggctgcctggaaatggtactacgagatcatcggcaactccaggtgcccgataatcgatacgtactggcagacggagaccggaggtttcatgatcgcaccgcagaggggactcggcctgccaccattgaagcctggttctgcgacttttccgcttcctggcgtagatcctgcaatacttgatgacgcgggaaaggaggtgcgtaccggcgagaagggttacatagtcttcaggagaccgtggccaggtatgctgatgaccgtcaacaacgacgacgagagatacgtaaaaacatacttctccaagttccccggctactattactgcggcgactatgcggtgaaggacgaagatggctactactggctcctgggcagatccgacgaggtcatgaacgtatcagggcacaggcttggtacgatcgagatcgaggatgccatagtagccacaggccttgccgttgaagctgccgtcttcggaaagcccgatccggtaaagggcgaggcaatatcggcattcgttgtacccaaggacgcaaacgccgacaggcacgaactcatctcggagatacgcaagaggataagggctgatcttggcccgatatacgttccggacgagatcaggatcgtgaaactgttgccgaagacgaggagcggcaagataatgaggagggtcgtgaaagctgtggcgctgaaccagatacctggcgatctaacgactctggaggattccacctctgtggacgagatcaagagcgcaattgaagccttcaagggagaggccggaggtgagtga

SEQ ID NO: 1038 - protein, 647 aa, Thermoplasma acidophilum
MESEKGTLPMNEVYNPGMNVYSEIYRKSLEDPENFWAKQAEILTWYSKWNKILDDSKKPFYRWFVGGKLNVSYNAVDRHLEQHRRNKAAYIWVGENGEEKIVTYDGLYRRINNLAKALLNLGIKKGDRIVLYLPMIIEAPVAMLAAARIGAVFSFVFAGFGAGALAERINDSKAVLLITADGGFRNGKVVELKKIADEALEMTSTVRNVIVIKHARNDVNMVEDRDIWYHEIVGDSHTYVEPEHMDANDPLFILYTSGTTGKPKGAVHSTGGYSVWVASTLKWAFNPDEDDRWWCAADIGWITGHSYIVFAPLILGLTSIMYEGSITYPEPDRLWEIIEKYRVNILYTSPTAIRTLMKFGEKYPQRHDLSTLKVLGTVGEPINPAAWKWYYEIIGNSRCPIIDTYWQTETGGFMIAPQRGLGLPPLKPGSATFPLPGVDPAILDDAGKEVRTGEKGYIVFRRPWPGMLMTVNNDDERYVKTYFSKFPGYYYCGDYAVKDEDGYYWLLGRSDEVMNVSGHRLGTIEIEDAIVATGLAVEAAVFGKPDPVKGEAISAFVVPKDANADRHELISEIRKRIRADLGPIYVPDEIRIVKLLPKTRSGKIMRRVVKAVALNQIPGDLTTLEDSTSVDEIKSAIEAFKGEAGGE

SEQ ID NO: 1039 - DNA, 1860 bp, Thermoplasma acidophilum
  CDS (1)..(1860)
atgttctattataagccgtccgatgaagccatcgcggaaaccaatcttgggcgattcgcctcatcccttgggatgaccgtaaaggatctctacgccagggccgacagggatcctgagtggttctggccaagggttatagatgatctcggcctggaattcttcaaaaaattcgaccatgtaatggatctatccgaaggcgtaccgtgggcgaaatggttcaccggcggcagaatcaacatcgagtataatgcggtggaacgctactccgattccgaaaatactgccatagtgtatgaatctgaggatggctataaatcaaaaatgtcatactcggaactcaacagaaaggtctcggccttatcttcggccatccatgacatgggcataggcaggggggacagggtcgccatatacatgccattcaatgctaacagcgcaatagcgttctatgccgtcctccgcatcggtgccatagctgtgccgatgttctctggctacggagttgatgctgtcaggaacaggatcgaagattcaggatcgagcctcatgataacgtctgcatcgtacaggaggaagggaaaggccatcgatatgtccgcggtcgcaaggagcatcaatatgaaaacgataatggatgccgatcgcacagatttctacagatttgaagatgctgtcagcggcggcaaaaatgtgccagtggagcgtacatcgagcgaagaccctgccataatgctctacacatcaggaactactggaaagccaaagggcacggtacatgtgcatggcggcgcgctagtcaacatagccaaggaagtcaagtattacatggatctgaaagagaacgatgtgctgcactggataactgaccttggctggatgatgggcccatgggcgcttattggcacgaatgcgcttcacggcacgatattcctctacgacggcgcaatagactatcccgatcctgacaggatattcgatattgtgcacgataacggcgtaacgctccttggcctctctcccacggtggtcaggatgataaagttcaggggcacgagcaggacgttcgataccgtgagggtattcggatcaactggggagccatgggacgaggagtcatgggtatacctgttcagcatactcggccgcggccgtgcatcgatttcaaacatatccggcggcacagacataatagggtgcttccttgcctcaaatccggccataccgcagaaacccagatgcctctacaggggacttggcatgaacgcatcgatattcaacgaggagggaagggaggtatacaacacggtggggtaccttgtggcaaagtttccaagcccatcaatgacacgcgggctttggaataacagggagaagtacctcgaaacttactggtcgaaattcaaagatatatggttccatggagacttcggtgagatggatgaagaaggctacttctacctttacggtagatccgatgacgtgataaagatcgccgggaaacgcgttggccccaatgaagttgaggatatggtgatgcgtgtcagcggcgtgacggaatgcgcggtggtatcgatacctgacagcgtcaaaggggaggttctcgccgtcttctacgtcggcgaaccgggcctgagcgggagaattgcaaagcagatagaggttggcatgggaaagccattcacgcccgcccatgtggtgcgcatatccagaataccgaagacaaggaacggcaagatcatgaggagggtgataagatccgccttctgcggccttcccgttggcgatgtgagcaacaccgacgacggcgacgtgataagggaaatagatgaccttgggaaggttgcccttcgccaggcttag

SEQ ID NO: 1040 - protein, 619 aa, Thermoplasma acidophilum
MFYYKPSDEAIAETNLGRFASSLGMTVKDLYARADRDPEWFWPRVIDDLGLEFFKKFDHVMDLSEGVPWAKWFTGGRINIEYNAVERYSDSENTAIVYESEDGYKSKMSYSELNRKVSALSSAIHDMGIGRGDRVAIYMPFNANSAIAFYAVLRIGAIAVPMFSGYGVDAVRNRIEDSGSSLMITSASYRRKGKAIDMSAVARSINMKTIMDADRTDFYRFEDAVSGGKNVPVERTSSEDPAIMLYTSGTTGKPKGTVHVHGGALVNIAKEVKYYMDLKENDVLHWITDLGWMMGPWALIGTNALHGTIFLYDGAIDYPDPDRIFDIVHDNGVTLLGLSPTVVRMIKFRGTSRTFDTVRVFGSTGEPWDEESWVYLFSILGRGRASISNISGGTDIIGCFLASNPAIPQKPRCLYRGLGMNASIFNEEGREVYNTVGYLVAKFPSPSMTRGLWNNREKYLETYWSKFKDIWFHGDFGEMDEEGYFYLYGRSDDVIKIAGKRVGPNEVEDMVMRVSGVTECAVVSIPDSVKGEVLAVFYVGEPGLSGRIAKQIEVGMGKPFTPAHVVRISRIPKTRNGKIMRRVIRSAFCGLPVGDVSNTDDGDVIREIDDLGKVALRQA

SEQ ID NO: 1041 - DNA, 1977 bp, Streptomyces coelicolor
  CDS (1)..(1977)
atgtcgaccgagaacccacagccgctctggcagccagatgcgcaacgcatcgcccaggcacgcatcaccaggttccaggcctgggcggccgagcaccacggagcccccgccgagggcggatacgccgccctgcaccgctggtccgtcgacgagctggacaccttctggaaagccgtcacggagtggttcgacgtccgcttctccaccccctgcgcgcgcgtgctcggcgaccggaccatgcccggcgcccagtggtttcccggcgccacgctgaactacgccgaacacgccctgcgcgcggccggcacccgcccggacgaaccagccctcctgtacgtcgacgagacccacgaaccggcccccgtcacctgggcagagctgcgccgccaggtcgcctccctcgccgccgaactgcgcgccctcggcgtacgccccggcgaccgcgtcagcgggtacctccccaacatcccgcaggccgtggtcgcgctgctcgccacggccgccgtgggcggcgtctggacctcctgcgcgcccgacttcggcgcccgcagcgtcctcgaccgcttccagcaggtcgaacccgtcgtcctgttcaccgtcgacggctaccgctacgggggcaaggaacacgaccgccgcgacaccgtcgccgaactccgccgggaactgcccaccctccgcgcggtgatccacatcccgctcctcggcaccgaggccccggacggcgcgctggactgggagaccctcaccgccgcggacgccgagccggtgtacgagcaggtgcccttcgaccaccccctgtgggtgctctactcctccggcaccaccggcctgcccaaggccatcgtccagtcccagggcggcatcctcgtcgagcacctcaagcagctcggcctgcactgcgacctcggccccggggaccgcttcttctggtacacctcgaccggctggatgatgtggaacttcctcgtctccggcctgctcaccggcaccacgatcgtcctctacgacggcagccccggcttccccgccaccgacgcccagtggcgcatcgcggaacgcaccggcgccacccttttcggcacctccgccgcctacgtcatggcctgccgcaaggccggcgtccacccggcccgcgacctggacctctccgcgatccagtgcgtcgccaccaccggctccccgctcccgcccgacggcttccgctggctgcacgacgagttcgccgccggcggtgccgacctgtggatcgcctccgtcagcggcggcaccgacgtgtgctcctgcttcgcgggcgccgtccccaccctccccgtccacatcggcgaactccaggcccccggcctcggcaccgacctccagtcctgggacccgagcggcaaccccctgaccgacgaggtcggcgagctggtcgtcaccaacccgatgccctcgatgccgatccgcttctggaacgaccccgacggcagccgctaccacgacagctacttcgacacctaccccggcgtctggcggcacggcgactggatcaccctcacctcccgcggctccgtcgtcatccacggccgctccgactccaccctcaaccgccaaggcgtccgcatgggctccgccgacatctacgaggccgtcgagcggctccccgagatcagggaatccctcgtcatcggcatcgaacagcccgacggcggctactggatgcccctcttcgtgcacctggcacccggagccaccctcgacgacgcgctcctggaccgcatcaagcggaccatccgcgccaacctctccccgcgccacgtccccgacgaggtcatcgaggtccccggcatcccgcacaccctcaccggcaaacgcatcgaggtcccggtcaagcgcctcctccagggcaccccgctggacaaggcggtcaaccccggctccatcgacaacctcgacctgctccacttctacgaggaactcgcccgcaagcgctcctga

SEQ ID NO: 1042 - protein, 658 aa, Streptomyces coelicolor
MSTENPQPLWQPDAQRIAQARITRFQAWAAEHHGAPAEGGYAALHRWSVDELDTFWKAVTEWFDVRFSTPCARVLGDRTMPGAQWFPGATLNYAEHALRAAGTRPDEPALLYVDETHEPAPVTWAELRRQVASLAAELRALGVRPGDRVSGYLPNIPQAVVALLATAAVGGVWTSCAPDFGARSVLDRFQQVEPVVLFTVDGYRYGGKEHDRRDTVAELRRELPTLRAVIHIPLLGTEAPDGALDWETLTAADAEPVYEQVPFDHPLWVLYSSGTTGLPKAIVQSQGGILVEHLKQLGLHCDLGPGDRFFWYTSTGWMMWNFLVSGLLTGTTIVLYDGSPGFPATDAQWRIAERTGATLFGTSAAYVMACRKAGVHPARDLDLSAIQCVATTGSPLPPDGFRWLHDEFAAGGADLWIASVSGGTDVCSCFAGAVPTLPVHIGELQAPGLGTDLQSWDPSGNPLTDEVGELVVTNPMPSMPIRFWNDPDGSRYHDSYFDTYPGVWRHGDWITLTSRGSVVIHGRSDSTLNRQGVRMGSADIYEAVERLPEIRESLVIGIEQPDGGYWMPLFVHLAPGATLDDALLDRIKRTIRANLSPRHVPDEVIEVPGIPHTLTGKRIEVPVKRLLQGTPLDKAVNPGSIDNLDLLHFYEELARKRS

SEQ ID NO: 1043 - DNA, 2113 bp, Arabidopsis thaliana
  CDS (1)..(2082)
atgtcgtctaattccctgaggcatgtcgagtccatgtcccagctaccctcaggtgccggaaagatctctcaattaaacgccgtcgtgttaggagaatcccttgcatcggaggagaatgatctcgtctttcccagcaaggaattctccggccaggctcttgtttcctcccctcaacagtacatggaaatgcataagaggtcgatggatgaccctgctgctttttggtctgatattgcgtctgagttttactggaagcagaaatggggtgaccaagtgttttccgagaatctcgatgtcaggaagggtcctattagcatcgagtggtttaaagggggaatcaccaatatttgctacaactgtttggacaaaaacgttgaagctggtttgggtgataaaacagccatacactgggaaggaaatgaacttggggtagatgcttccttaacttattctgagttgctccaacgagtttgccagcttgctaattacttgaaagataatggagtgaagaagggtgatgctgttgtaatttatttacctatgttgatggaacttcccatcgctatgcttgcatgtgcaaggatcggagctgttcattcggtcgtttttgctggattttctgcggactctcttgcccaaagaatcgttgattgcaagccaaatgtaatactgacttgcaatgctgttaaaagaggccctaagaccataaaccttaaagctattgttgatgctgcacttgaccaatcttctaaagatggagtctctgtaggcatatgcttgacctatgacaactcattagcgacaacaagggaaaacactaaatggcagaatggaagagatgtgtggtggcaggatgttatttctcaatatccaacatcgtgtgaggtggaatgggttgatgcagaagatcccctgtttttgctctacaccagtggaagtactgggaagccaaagggtgtcctacacacaactggagggtatatgatctacactgctacaacgttcaaatatgcatttgactacaaatcaacagatgtatactggtgtacagcagattgtggttggataactggccatagctatgttacttatggaccaatgcttaatggagccactgttgttgtctttgagggggctccaaactaccctgaccctggacgctgttgggatattgttgacaaatacaaggtttcaatattttatactgccccaacattggtgaggtctctcatgcgcgatgacgataagtttgtaacacgtcactcgcgcaaatcgctgcgggtccttggaagtgttggtgagcccatcaatcctagtgcctggagatggttcttcaatgtagtcggtgattcaaggtgtcccatttcagatacgtggtggcaaactgaaactggtggcttcatgataaccccattgccaggtgcttggccccagaaacctggttcagccactttccctttctttggtgttcagcctgtcatagttgatgaaaagggcaatgaaatcgaaggcgagtgtagtggttatctttgtgtcaaaggttcatggcccggggcgtttcgaactctgtttggggatcatgaaagatacgaaaccacatactttaaaccttttgccggatattatttcagtggtgatggttgcagcagagacaaggatggttactactggcttacagggagggttgatgatgttatcaacgtcagtggccatcgaatcggaactgctgaagtagaatctgctctggttttacaccctcaatgtgcagaagcagctgttgtaggcatagaacatgaggtaaaaggtcagggaatttatgcgtttgtcactcttctggaaggtgttccttacagcgaggagcttcgtaaaagcctagtactaatggtccgaaatcagattggggcttttgcagcaccggacagaatacattgggcaccagggttgccaaagacgagaagcggaaagataatgaggagaatcttgagaaagattgcttcgaggcaattagaagaactcggagatactagcacactcgcggatcctagtgtagttgatcagcttattgcacttgccgatgtgtgatgactaaccatagcatatgagccaatggaga

SEQ ID NO: 1044 - protein, 693 aa, Arabidopsis thaliana
MSSNSLRHVESMSQLPSGAGKISQLNAVVLGESLASEENDLVFPSKEFSGQALVSSPQQYMEMHKRSMDDPAAFWSDIASEFYWKQKWGDQVFSENLDVRKGPISIEWFKGGITNICYNCLDKNVEAGLGDKTAIHWEGNELGVDASLTYSELLQRVCQLANYLKDNGVKKGDAVVIYLPMLMELPIAMLACARIGAVHSVVFAGFSADSLAQRIVDCKPNVILTCNAVKRGPKTINLKAIVDAALDQSSKDGVSVGICLTYDNSLATTRENTKWQNGRDVWWQDVISQYPTSCEVEWVDAEDPLFLLYTSGSTGKPKGVLHTTGGYMIYTATTFKYAFDYKSTDVYWCTADCGWITGHSYVTYGPMLNGATVVVFEGAPNYPDPGRCWDIVDKYKVSIFYTAPTLVRSLMRDDDKFVTRHSRKSLRVLGSVGEPINPSAWRWFFNVVGDSRCPISDTWWQTETGGFMITPLPGAWPQKPGSATFPFFGVQPVIVDEKGNEIEGECSGYLCVKGSWPGAFRTLFGDHERYETTYFKPFAGYYFSGDGCSRDKDGYYWLTGRVDDVINVSGHRIGTAEVESALVLHPQCAEAAVVGIEHEVKGQGIYAFVTLLEGVPYSEELRKSLVLMVRNQIGAFAAPDRIHWAPGLPKTRSGKIMRRILRKIASRQLEELGDTSTLADPSVVDQLIALADV

SEQ ID NO: 1045 - DNA, 2088 bp, Leishmania major
  CDS (1)..(2088)
atgagcagccaggtcgtctccagtccggtgactctgaagagtccgctgtcagtctcccagcatgtaggcgagtttaacagtgtgcgggacacgaacgttgtggagccgacggaggcaaaccggacaaagtcgcacgtcggcccccaccttggctcccgcatgcgcatctacgagtactccatcgagcacaatgacgtcttctgggccgaaattgcacggcgcgacttctactggaagacgacctggccggatgaccagcacgtcaagtcgtacaacttcgacaaatccaagggccccatctttgtgaaatggttcgagggcgccgtgacaaacatctgctacaacgcgttggaccgccacctgccggcgcacaaggatcgcgtgtgcttttactttgaaggcaacgacccgagtgtgacggaaaaggtcacgtacggcagcatgtacacgagggtggtggagctggcgaacgtgctgaagcaccagtacggtattacaaagggcgaccgcgttggcctgtatctacccatgatcccgttcgctgcagtggccatgctcgcctgcgcccgcatcggtgcggtggccagtgtcatctttggcggattttcggctcaggcgatcgtgactcgtgtcacggactgcagcccgaagctcatcatcactgctgacgcgtcctctcgcggtgataagccgattctgctcaagacgatcgcggaccaggccctggacgactgcagcgtcctggggtgcaacgtaccgtgcctcgtattcgaaaacatgaaccgtcaattctgcaagatgaaggaaggccgcgatacctggtacggcgatgccttagcgcggctgacgccggagcagcacgaggagtgcccggtggagtggatggacgcggaggatgtgctgttcctgctctacacctccggcagcaccgggaaacccaaggccatcgtgcacacgacggcgggctacatggtgtacgcctccaccaccttcatgtacagcttcgactaccacatggacgacgtgtacttctgcacggctgatattggctggatcacaggccacagctacgtcgtgtatggtccgatgatccactgcgccacgtcggtgctgttcgagggtgtgccgaactaccccgactactcgcgctggtggcagctcgtcgagaagtacaaggtgtccattctctacaccgcgcccaccgcaatccgctccctcatgcaggccggcgacgactacgtcaaggtgggcaaccgcagcaccctgcgtgtgctgggctccgtcggcgagccgatcaacgtggaggcgtggaagtggctgcgcgatgtcggcggcgagggccactgcgacgtgtcagacacgtggtggcagactgagacgggtggccacatgattacaccgatgccgggctgcacccccatgaagcccggtagtgcaacgctgccgttcttcggtgtccagccggttattctcgaccccatgaagctgaatgagaagcagggcccagcggagggcctgctcgccattcgtgcgccgtggccaggtatggcccgcaccatctacggcgaccacgcacgctttgagaagacctactttgacgtggacgggtactacatgacaggcgacggtgctcgccgcgactcggacggctattactggatcacgggccgcgtcgatgacgtgctgaacgtgagcgggcaccgcatcggcaccagcgagatcgaggacgccgtcaacacccacccggcagtggtggagagcgccgtggtcggcttccctcaaagcatcaagggtgagggcatctacgtcttccttacgttccaccaggggacggaggtgacgcccgagctgctggcggcggtaaaggcgactgtgcgcaaggtgattggtccgctggccacgccagatgtgcttcaccccacgcaggaaggtctgccgaaaacgcgctccggcaagattgtgcgccgcatcttgcgcaagatcgccactcacaacgacgacgacctgggcgacacctcgaccctggcagaccccaccgtcgtggaggcgctgaagcgctcgcgtgcaaagtgggtggataaaaagtag

SEQ ID NO: 1046 - protein, 695 aa, Leishmania major
MSSQVVSSPVTLKSPLSVSQHVGEFNSVRDTNVVEPTEANRTKSHVGPHLGSRMRIYEYSIEHNDVFWAEIARRDFYWKTTWPDDQHVKSYNFDKSKGPIFVKWFEGAVTNICYNALDRHLPAHKDRVCFYFEGNDPSVTEKVTYGSMYTRVVELANVLKHQYGITKGDRVGLYLPMIPFAAVAMLACARIGAVASVIFGGFSAQAIVTRVTDCSPKLIITADASSRGDKPILLKTIADQALDDCSVLGCNVPCLVFENMNRQFCKMKEGRDTWYGDALARLTPEQHEECPVEWMDAEDVLFLLYTSGSTGKPKAIVHTTAGYMVYASTTFMYSFDYHMDDVYFCTADIGWITGHSYVVYGPMIHCATSVLFEGVPNYPDYSRWWQLVEKYKVSILYTAPTAIRSLMQAGDDYVKVGNRSTLRVLGSVGEPINVEAWKWLRDVGGEGHCDVSDTWWQTETGGHMITPMPGCTPMKPGSATLPFFGVQPVILDPMKLNEKQGPAEGLLAIRAPWPGMARTIYGDHARFEKTYFDVDGYYMTGDGARRDSDGYYWITGRVDDVLNVSGHRIGTSEIEDAVNTHPAVVESAVVGFPQSIKGEGIYVFLTFHQGTEVTPELLAAVKATVRKVIGPLATPDVLHPTQEGLPKTRSGKIVRRILRKIATHNDDDLGDTSTLADPTVVEALKRSRAKWVDKK

SEQ ID NO: 1047 - DNA, 1956 bp, Tetrahymena pyriformis
  CDS (1)..(978)
atgagccaacataagaacgcttacgaaatagcttacgaaagagctaccaacgacaagactcgtgaagacttttggagagaccaaacctaccttgtagactggttcaagaagcctgaagttatcctcgacagaactcaccccaaccccggtttctggcgttggttcaaggatagcagagtcaacatgtgctacaatgctgttgatagtcacgttggagaactcggtaacaaacccgccatgcactgggtcagtggttatgaaggtgttgagaagacctacacttgggctgaattgcttgacaacgtctctagacttgctggtgttttgagaaagctcggtgtcgttaagggtgacagagtcatcatctacatgcccatggttcctgaagccgttttcggtatgcttgcctgtgccagacttggtgctatccactctgtcgtctttggtggttttgcagctaaggaattgtctggtcgtatccaagactgcaaacccgctctgatcttgggtgcttcttatggtttcgaacctaacaaagtcattaactacaagactattttagatgaagctattaccctctctggtgtccctggaattaaggttctccaattacaaagaggtgacaaaatgactggtcctgtcaaggttggaagagacttcgactatcactccttaatgctccaagctgaaagagtcgactgcgttcctgtcgaaggtgatcaccccttatacatcctctacacctccggtactactggtcaacctaagggtatcgttagagataccgctggtacctgcgtcgcttcatcctggaacatgcaacacattaatgatatccacaaaggagatgtctacttctctggtagtgatatcggttgggtcgtcggtcaccagttcatcgtctatggacctttactcagaggtgcaactactattttgtatgaaggaaagcccactggtactcccgaccctggttaattctggagactcattgaaaagtacaaagttaagggtctctacactgctcctactgctcttagagccatcagaaaggatgaccttaatggtgactggatcaagaaattcgacatttcttccttgaccaacatttctatggctggtgaaagatgtgatgttcccacttatgagtggattcaaaaggcagttcccgttctcatcaatgataactattggcaaaccgaaactggttggattatttcctgtaactataagaatctttacactcaccctgtcaagcctggtactgctatcaagcctgctcctggtttcgatgttcgtattcttgatcaaaacaataatgaaattcttgaacccaacaaactcggaagaatctgtatcaagcttcctatgccaccttccttcatgcttactttatacaacaacgatgaagctttcattgctaaatatttagctgattctcctggatactatctcgttggtgatagtggttatttcgatgaagatcgttacttgaacgttatggctagaatcgatgatatcattaacactgctggtcacagactctcaactgctgccatggaagaagctttgctcaagcatcctaacattgttgaagctgctgtcgttgccaaggttgacgatttcaagggagaaatccccattggtttcgttgttgccaagaccactggacctatcaaggatttgaaggcatttgaaaaggaatgcactgcagtagttagaaaggaaataggtcctgttgcttccttcaacaactgtattttagttgacaagttgcctaagactagaagtggtaagattttgagatagactcttaagaaaattgttgatggtgaaaagattgagaagattcctccaaccattgatgatgcctctgttatccctgctatcattactgatgttgacaactatggtcttttaaagaaaaaacctactctccctcaacccaagctttga

SEQ ID NO: 1048 - protein, 325 aa, Tetrahymena pyriformis
MSQHKNAYEIAYERATNDKTREDFWRDQTYLVDWFKKPEVILDRTHPNPGFWRWFKDSRVNMCYNAVDSHVGELGNKPAMHWVSGYEGVEKTYTWAELLDNVSRLAGVLRKLGVVKGDRVIIYMPMVPEAVFGMLACARLGAIHSVVFGGFAAKELSGRIQDCKPALILGASYGFEPNKVINYKTILDEAITLSGVPGIKVLQLQRGDKMTGPVKVGRDFDYHSLMLQAERVDCVPVEGDHPLYILYTSGTTGQPKGIVRDTAGTCVASSWNMQHINDIHKGDVYFSGSDIGWVVGHQFIVYGPLLRGATTILYEGKPTGTPDPG

SEQ ID NO: 1049 - DNA, 2267 bp, Drosophila melanogaster
  CDS (113)..(2137)
ttgtgctgagctcgtttgatccaaaaaattcaaaaagaatatatataataaatacatatatacattaacttgacttgaatatatacaagaacggaagttatacaaagttacaatggaacccggtcctagtgcagtgaactacgaaggcagtgaatctgtatgcggcatgccggtggaggctcacgatcctctctacttgaaggcctatcgccagagtgttcagaatccggctgcattttgggaggagcagggtaacctgctcgactgggatcggccatgggagaaggtactggacaacagtaatccgccattcaccaagtggtatgtgggtggctacctgaatgcctgctacaattccattgatcgccacatactggccggccgcggctccaatgtggccctaatccatgacagccccttgactggcacactgcgtcgggttacctatcaggagctgtatgaccagatcgttctgctggcaggcggcctggccaaattgggcgtggtcaaaggtgatcgcgtcgtgatctacatgcccctcatcccggagaccatcattgccatgctggcaattgtgcgtctgggtgcgattcactccgtggtcttcggtggcttcgctgcccgcgaactctgctcgcgcatcgaacatgtggaaccaaaactggtgatcgcctccaatgtgggcgtggagccgggcaaagtggtgccctacctggacatccttcattcagctattagcatgtcgcgatggcgaccaccgcagcgtaacataatctttcggcgtgataatgtttcgccagataccaccaaactggatcctctgacggatgtgctctggtcggatattcttaagatggcggagggcgagcggcccatagcctgtgttcccatcgaggccaacgatcctttgtatatcctctatacctctggaacgacggataagcccaagggagtacttcgcaccatcggaggtcacttggttgctctggtgtacacgctgagaactctctatggcatcaatcctggccacacctggtgggcggcctcagatatgggctgggtggtgggtcactcgtacatctgctacggtccactctgcctcggagccaccagtgttatgtacgagggtaaaccggaccgtactcctgacccgggtcagtactttaggatcatcgaccaataccaggtgcgctcgatcttctcggtacctacctccttccgtgttatccgtcgtgctgatccggacatcagctatgggcgacagtactccatgaagtcgctgcgtgccatcttcattgccggcgagcactgcgactacgagaccaagtcctggatcgagaagaccttcaaggtgcccgtgctcaaccactggtggcagacggagactggttccgcggtcaccgccacatgcctgggcttccagcagaacctcagtccgcccacttactccactggcttgccactcatgggctacgacgtcaagatcctgaaagcggacggcagcgaggcgcagacctcggagctgggcaggattgctcttaagctaccactgccacccggaaacatggccactctttacaaaaacgaagagctcttccgcacgctttactttcaaaagtttccgggttactatgatacaatggatgcgggctacaaggacgaacgtggctatatctttgtgacagctcgcgacgatgatgtaatcaatgtggctggccatcgcttgtccacctctagcctggaagacgccgtgcttcggcatccggacgtcgtggacgtggccgttttcggggtgcccgaggccaccaagggacaggtaccactgtgcctgtacattccggtggagaactgcaagaagaccgatgccaagctgtcgacggagatcatcaagctgatccgcgacgtcgtaggccccatagccgccttccggctggtcacgtccgtcaacaacctgccacgcactcgatccggtaagacgatgcgcaaggcgatggcggactttgcccgcaatgagcgcgttgtcctgccggcgactatcgatgatgccagcgtgttcatcgagatccggagggctctgaaccagttgggctatgccatgaccgcaccggatccgattgtggccaagttactcgactgatgggttgcaaggaccctcaaccttaaccttagcttgtacgatacgattcccaagaagtaaataaaatgtaagccagtttggctgggggttttcctccgcttatctgcgtaggccgcaaagtggcgaaaat

SEQ ID NO: 1050 - protein, 674 aa, Drosophila melanogaster
MEPGPSAVNYEGSESVCGMPVEAHDPLYLKAYRQSVQNPAAFWEEQGNLLDWDRPWEKVLDNSNPPFTKWYVGGYLNACYNSIDRHILAGRGSNVALIHDSPLTGTLRRVTYQELYDQIVLLAGGLAKLGVVKGDRVVIYMPLIPETIIAMLAIVRLGAIHSVVFGGFAARELCSRIEHVEPKLVIASNVGVEPGKVVPYLDILHSAISMSRWRPPQRNIIFRRDNVSPDTTKLDPLTDVLWSDILKMAEGERPIACVPIEANDPLYILYTSGTTDKPKGVLRTIGGHLVALVYTLRTLYGINPGHTWWAASDMGWVVGHSYICYGPLCLGATSVMYEGKPDRTPDPGQYFRIIDQYQVRSIFSVPTSFRVIRRADPDISYGRQYSMKSLRAIFIAGEHCDYETKSWIEKTFKVPVLNHWWQTETGSAVTATCLGFQQNLSPPTYSTGLPLMGYDVKILKADGSEAQTSELGRIALKLPLPPGNMATLYKNEELFRTLYFQKFPGYYDTMDAGYKDERGYIFVTARDDDVINVAGHRLSTSSLEDAVLRHPDVVDVAVFGVPEATKGQVPLCLYIPVENCKKTDAKLSTEIIKLIRDVVGPIAAFRLVTSVNNLPRTRSGKTMRKAMADFARNERVVLPATIDDASVFIEIRRALNQLGYAMTAPDPIVAKLLD

SEQ ID NO: 1051 - DNA, 2383 bp, Solanum tuberosum
  CDS (271)..(2166)
cgggggcagtcccttggtgaggatggaagacccgttcactgcttcattgtcgtcatcgattactgttagtccaaggaagaacttgacgacatccaatcacttgcgccatgtggaatccatggcccacttgccttccggagccggcagataaccagattgaatgctcttatcttaggcgaggcacttgcttccgaggaggatgatctcgtctttcccagcgaagatttctctagccagtctcatgtttcttctcctcagaagtatttggagatgtatcaaaggtcggtccacgatccctcaggattctggtctgacattgcatcagaattttactggagagagaaatggggccagcaggtttaccatgagaattttgatgttcgaaaggggaaaatcaagatcgagtggttcaagggtggaatgacaaatatctgctacaactgcttggatagaaacatcgagtctggaaagggtgacaaaacagcaatttactgggaaggaaatgaacctggtcttgatagttctatgacgtacaatcaactcttggctagagtttgccagctagcaaattatttgaaagatgttggagtccacaagggtgatgcagttgtcatctacttacccatgcttatggagctaccaattgcaatgcttgcttgtgctcgtattggtgccattcactcggttgtgtttgctggtttctcagctgaatctcttgctcaaaggatcatagattgcagaccgaaggttgtcataacatgcaatgctgttaggagggggtccaagattatttatctcaaagaaattgttgatagtgcccttctagaatctgctcagaagggcatcgttacagatgtgtgtttgacatatgaaaatgattcagcaatgaaaaaggaaatgactaaatggaccaaggggagagacatttggtggcaggatgttattctgaaatatccagtaacatgtgatgtggagtgggttgatgcagaagatccccttttcctgctttacactagtgggagtaccggaaagcctaagggtgtcttgcatacaacgggaggatatatggtgtacactgctactacattcaagtatgcatttgactacaagccgacagacatatattggtgtacagctgactgtggttggattactgggcatagttatgtaacctatggacctttgctaaatggagcaactgttgtggtttttgaaggggccccaaattatcccgatgtcgggcgttgttgggatattgttgataagtataaggtttcaatattttatacagctccaacactggtgagatctctgatgcgtgagggagacgagcatgtctctcgatattcacgcaaatctttacgggtgcttggaagtgtgggtgagcctatcaatccaagtgcatggaggtggtttttcaatgtgataggtgatgcaaggtgccccatatctgatacatggtggcaaacagaaaccggtggcttcatgattactcctttaccaggagcgtggccgcagaaacctggttctgctacttttcctttctttggagtccagccagtaatagtggatgagaaaggtgttgagattgaaggtgagtgcagtgggtatctgtgcgtgaaaagctcgtggcctggggcattccgaacacttcatggggatcatgagagatatgaaaccacatattttagtgccttcccgggctattatttcagtggtgatggctgcagcagggacaaagatggttactactggctcaccggaagagtagatgatgtgattaatgtgagtggacatcgtattggcacagctgaagtggaatctgctctagtttcacatcctcagtgtgctgaagcagctgtggttggtgtggagcatgaggttaaaggacaggggatatatgcatttgttactctagtcgaaggtgttccatacagcgatgacctgcgaaaaagtcttgtgatggttgttaggaatcagattggggcttttgcagcgccagacaagatacattgggcaccaggtcttccaaagacgagaagtgggaaaataatgagaagaattctgaggaaaatcgcttccaggcagttagatgagcttggggacactagtacccttgcagacccaactgtggttgatcagcttattgcacttgctgattgctaaagtaacaacttctaaatatagtgaagttagaggtttagctaactgtgttggtagagattggtattttgtttccgttttagtgtgagtacctttttcctccaaatttgaaacaacttatggttaacacacttttgaagatcaggttacatttaaaatcaagaaataaaataccaagatgtgattatcttttcaatgttaaaaaaaaaaaaaaaaaact

SEQ ID NO: 1052 - protein, 631 aa, Solanum tuberosum
MYQRSVHDPSGFWSDIASEFYWREKWGQQVYHENFDVRKGKIKIEWFKGGMTNICYNCLDRNIESGKGDKTAIYWEGNEPGLDSSMTYNQLLARVCQLANYLKDVGVHKGDAVVIYLPMLMELPIAMLACARIGAIHSVVFAGFSAESLAQRIIDCRPKVVITCNAVRRGSKIIYLKEIVDSALLESAQKGIVTDVCLTYENDSAMKKEMTKWTKGRDIWWQDVILKYPVTCDVEWVDAEDPLFLLYTSGSTGKPKGVLHTTGGYMVYTATTFKYAFDYKPTDIYWCTADCGWITGHSYVTYGPLLNGATVVVFEGAPNYPDVGRCWDIVDKYKVSIFYTAPTLVRSLMREGDEHVSRYSRKSLRVLGSVGEPINPSAWRWFFNVIGDARCPISDTWWQTETGGFMITPLPGAWPQKPGSATFPFFGVQPVIVDEKGVEIEGECSGYLCVKSSWPGAFRTLHGDHERYETTYFSAFPGYYFSGDGCSRDKDGYYWLTGRVDDVINVSGHRIGTAEVESALVSHPQCAEAAVVGVEHEVKGQGIYAFVTLVEGVPYSDDLRKSLVMVVRNQIGAFAAPDKIHWAPGLPKTRSGKIMRRILRKIASRQLDELGDTSTLADPTVVDQLIALADC

SEQ ID NO: 1053 - DNA, 3584 bp, Mus musculus
  CDS (33)..(2081)
ggctaccgcacccgcgtggggcgtcgggcgagatggcggcgcgcagcctcggcagcggtgtggggcgactgctgcgtggcctgcaagggcgctctggacaatcggggtggtcactgagcgtgtcccgctcgaccgccacccgactcccgggctgcgttcctgcagcagcgcaaccaggctcgtaccccgcgttgagcgctcaggcagcccaggagccggccgccttctgggggccgctggcccgtgacacactagtttgggacactccttaccatactgtctgggactgtgacttcaggacgggcaagatcggctggttcctgggaggccagttgaatgtgtctgtcaactgcctggatcagcatgtgcagaagtctcctgagaccatagctttgatctgggagagagatgaacctgggacagaagtgagaatcacttacagggagcttctggagaccacatgccgcctggccaatacactgaagagacatggagtgcaccgaggggaccgtgtggccatctacatgcctgtgtccccactggctgtggcagcaatgctggcctgtgccaggattggagctatccacacagtggtatttgctggctttagtgcagagtccttggctgggaggatcaatgatgccaaatgcaaggctgttatcaccttcaaccaaggactcaggggagggcgtgtggtggagctgaagaaaatagtggatgaagctgtgaagagctgcccaacagtccagcatgtcctggtggctcacaggacggacaccaaggttcccatggggagtctggatatcccccttgaacaggagatggccaaggaggcccctgtttgcacccctgagagcatgagcagtgaagacatgctctttatgctctacacctcagggagcaccgggacacccaagggactcgttcatacacaggcaggctatctactgtatgccgccatgacgcacaagctcgtgtttgactaccagccaggtgatgtctttggctgtgtggctgacatcggttggatcacaggacacagctatgtggtgtatggacccctctgcaatggagctaccacagtcctttttgagagcaccccagtttaccctgatgctggtcgttactgggagacagtgcagaggctaaagatcaaccagttctatggtgccccgacagctgtccggctgctgctgaagtatggggatgcctgggtgaaaaagtatgaccgctcttccctgcgcacactggggtcagtgggagagcctatcaaccacgaagcctgggagtggctccacaaagtcgtgggtgatggcagatgtacactggtggacacttggtggcaaacggaaactggaggcatctgcattgcaccacggccctcggaagatggggcagagatcctcccgggcatggccatgaggccgttttttggcatcgttcctgtactcatggatgagaagggcaatgttttggagggtggagatgtctctggggccttgtgtatttcccaagcttggccaggcatggcaaggaccatctatggtgaccaccagaggttcgtagatgcctacttcagagcgtacccaggttattacttcactggagacggagctcaccggacagagggtggctattaccagatcacggggcgcatggatgatgtcatcaatatcagtggtcatcgcctggggactgcagagattgaggatgcaatggctgaccatcccgctgttccagagactgctgtcattgggtaccctcatgatatcaaaggagaagctgcatttgccttcattgtgctgaaagataacatcagtgatgagaacatggtagtgaatgaactcaaattgtcggtggccaccaagatcgccaagtatgctgtgcctgaccagatcctggtggtgaagcgtctccccaaaaccagatctgggaaagtgatgaggagactactgaggaagatcatcaccagcaggggacaggatctaggggacaccactaccctggaggaccccagcgtcatcacagaaatcttgagtgccttccagaagtatgaagagcagcgggctgctaccaactgagaggtgtgcctctgtgttgttcagacaaggctgcacaggacccctggacgtcctcaggggaagcaacttcaaaagtggcttgtttcttccgaacacatgacccatctactgccctatttgaagctgaagcccctttttctttctcctggggctcagagggctgcttctggaggctgggggaaggcctttgtcatacatctggtttccagaatcaagtcataattggcactaagccagcacagggtgaccagaggtcttagctccaaaactgtcatgctttctccagatgtgtttagatacaaaacacaaattattttttttttgtactttttctatttggggagaatagcagaacatttgagtataatgtgaacatttagttacacacacacacacacacacacacacacacacacacaccgtgggaagaatctcccttcttacctccccaggggatgaagataacagaatgcgcttttttttaaaaattttattaccattcaatgtgcttaaagtccaaaccagacatgtttgtgcctctggcacataactctcctgctaatccaagtcaccatgtccaactcctgcgtctatttcatatttggttcatttggtttattttatgatcgaacaaactggacaattcttacattttgtatggtaggaattgcactcagggcctcctgcacactaggcaagcaagcgctctacctctgagctgcacaccacacctctaactcccaagaagacggagtgaatgtcctctcctttacttgtgaaatcatttgggttcgtttctctaagctgtgatctggaaggagtttctttccccaaggtgcctcatagtaggagatcatattgcttcaaacgtgtgaggttgttcatggtagccagtgaaaactcgggtgtctttactaagcctctggtcccatctgaactgagatcctgaagactctgcctgtcctttcttttgtggttggggcagcaagaactcactgtggtccaatgacgatgacacttggtgctcctgagcaaggtctcttttgatgtgccttaagttctctggacattggtgagtgatgcaaatagtgaagtcatgaaaagcttattttgcagctagattgtggctaagcatgggagggctgaaggggaggcagctctgtgagcagggcccctgggggcaaaggaagcctgttctgtctggtccacagaacttagctatatgggtgtttcagggtatcttagctactgcacacttactgtctgtcctgacgtcttgggtaatggggtaaacatgctgacgctcccaggaggcggagcggttgtagtatgaacaaatcttaatagtcctttgttacaatcagcagtgaagagccatgtgatggacgtggctgagtatagttactgtgccctttgaaatggcctaggtttctaggttactgatagaagctctcggaatgatttatagaaatatccaaataaagctttattttgttcactgtc

SEQ ID NO: 1054 - protein, 682 aa, Mus musculus
MAARSLGSGVGRLLRGLQGRSGQSGWSLSVSRSTATRLPGCVPAAAQPGSYPALSAQAAQEPAAFWGPLARDTLVWDTPYHTVWDCDFRTGKIGWFLGGQLNVSVNCLDQHVQKSPETIALIWERDEPGTEVRITYRELLETTCRLANTLKRHGVHRGDRVAIYMPVSPLAVAAMLACARIGAIHTVVFAGFSAESLAGRINDAKCKAVITFNQGLRGGRVVELKKIVDEAVKSCPTVQHVLVAHRTDTKVPMGSLDIPLEQEMAKEAPVCTPESMSSEDMLFMLYTSGSTGTPKGLVHTQAGYLLYAAMTHKLVFDYQPGDVFGCVADIGWITGHSYVVYGPLCNGATTVLFESTPVYPDAGRYWETVQRLKINQFYGAPTAVRLLLKYGDAWVKKYDRSSLRTLGSVGEPINHEAWEWLHKVVGDGRCTLVDTWWQTETGGICIAPRPSEDGAEILPGMAMRPFFGIVPVLMDEKGNVLEGGDVSGALCISQAWPGMARTIYGDHQRFVDAYFRAYPGYYFTGDGAHRTEGGYYQITGRMDDVINISGHRLGTAEIEDAMADHPAVPETAVIGYPHDIKGEAAFAFIVLKDNISDENMVVNELKLSVATKIAKYAVPDQILVVKRLPKTRSGKVMRRLLRKIITSRGQDLGDTTTLEDPSVITEILSAFQKYEEQRAATN

SEQ ID NO: 1055 - DNA, 2052 bp, Kluyveromyces lactis
  CDS (1)..(2052)
atgaaatctaacgcttcagctgccgctgcagaccaaattaagacccatgaatacgaacatttaacttctgtgcctatagtgcagcctctaccaattactgataggttgagcagcgaagcagctcaaaaatataaacctaatttgccaggtgggttcgaagagtacaagtctttgcacaaggaatcacttgaaaatccagccaagttttaccatgaacgtgctcagctgttgaattggttcaaaccatacgatcaagttttcatcccagataccgaaggtaaaccaacttttgagaacaacgcttggtttaccaacggtcaattgaacgcttgttacaatttggtagacagacatgccttcactcaaccaaacaaggttgccattctttatgaagctgatgaaccaggtcaaggttatagtctcacttatgcggaattgttagaacaagtctgtaaagttgctcaaatcttgcaatactcgatgaacgtcaagaaaggtgacacggtcgcagtttatatgccaatgatcccacaggctttgattaccttgttggcaattactcgtatcggtgccattcattccgttgtttttgctgggttctcttcgaattcattgcgtgatcgtattaacgatgcttactcaaagacagtcatcaccaccgatgaatctaagagaggtggtaagaccatcgaaaccaagcgtatcgtcgatgaagccttgaaggatacccctcaagtaacaaacgttttggtcttcaaacgtactcataacgaaaatatcaagtacattccaggtagggatttggactgggatgaggaagtcaagaagtacaaatcttacaccccatgcgaacctgttgactctgaacatcctttgttcttattgtatacttcgggttccaccggtgctccaaagggtgttcaacattctacagcaggttacttgctccaagcattattaagtatgaaatacacctttgacatccaaaacgatgacatcttcttcaccgcaggtgacattggttggatcactggtcacacatactgtgtttacggtccattgttacaaggttgtactactttggtgttcgaaggtacacctgcctatccaaacttttctcgttattgggaaattgttgacaagtaccaagtgactcaattctatgtagccccaactgcactacgtctattgaagagagctggtgattcctttactgaaggattctctctcaagtcattgcgctccttgggttccgttggtgaacctatcgctgctgaagtttgggaatggtactctgaaaagattggtaagaatgagctaccaatcgtagacacatactggcaaactgaatctggctcccacttggtcactccattggctggtggtgctactccaatgaaaccaggtgcagcggcattcccattctttggtattgatttggcagtgttggatccaaccacaggtatcgagcaaactggtgaacatgcagaaggtgttcttgccattaaaagaccttggccatctttcgcaagaaccatttggaagaataacgataggttcttagacacgtacttgaaaccatacccgggctattacttcactggtgatggtgttgcccgtgataaagatggattcttctggatcttgggtcgtgttgatgatgttgttaacgtctcaggtcacaggttgtctactgctgaaattgaagctgctatcattgaagatgatatggttgccgaatgtgcagttgttgggtttaacgacgaattgactggtcaagccgttgctgcctttgtagtattgaagaacaagtctagtttaactgctgcaagcgagtccgagttacaagacatcaaaaagcatttgatcatcaccgttagaaaggatattggtccattcgctgctcctaagttgatcgtcctagttgatgatctaccaaagactagatctggcaagattatgagacgtattttgagaaagatcctagccggtgaatctgatcaattggcgacgtctccacattatccaaccctggtatcgttaagcacttga

SEQ ID NO: 1056 - protein, 683 aa, Kluyveromyces lactis [sequence omitted]

SEQ ID NO: 1057 - DNA, 2492 bp, Saccharomyces cerevisiae
  CDS (162)..(2303)
aaatagttctcccttcattttgtatataaactgggcggctattctaagcatatttctcccttaggttatctggtagtacgttatatcttgttcttatattttctatctataagcaaaaccaaacatatcaaaactactagaaagacattgcccactgtgctatgtcgccctctgccgtacaatcatcaaaactagaagaacagtcaagtgaaattgacaagttgaaagcaaaaatgtcccagtctgccgccactgcgcagcgaaagaaggaacatgagtatgaacatttgacttcggtcaagatcgtgccacaacggcccatctcagatagactgcagcccgcaattgctacccactattctccacacttggacgggttgcaggactatcagcgcttgcacaaggagtctattgaagaccctgctaagttcttcggttctaaagctacccaatttttaaactggtctaagccattcgataaggtgttcatcccagaccctaaaacgggcaggccctccttccagaacaatgcatggttcctcaacggccaattaaacgcctgttacaactgtgttgacagacatgccttgaagactcctaacaagaaagccattattttcgaaggtgacgagcctggccaaggctattccattacctacaaggaactacttgaagaagtttgtcaagtggcacaagtgctgacttactctatgggcgttcgcaagggcgatactgttgccgtgtacatgcctatggtcccagaagcaatcataaccttgttggccatttcccgtatcggtgccattcactccgtagtctttgccgggttttcttccaactccttgagagatcgtatcaacgatggggactctaaagttgtcatcactacagatgaatccaacagaggtggtaaagtcattgagactaaaagaattgttgatgacgcgctaagagagaccccaggcgtgagacacgtcttggtttatagaaagaccaacaatccatctgttgctttccatgcccccagagatttggattgggcaacagaaaagaagaaatacaagacctactatccatgcacacccgttgattctgaggatccattattcttgttgtatacgtctggttctactggtgcccccaagggtgttcaacattctaccgcaggttacttgctgggagctttgttgaccatgcgctacacttttgacactcaccaagaagacgttttcttcacagctggagacattggctggattacaggccacacttatgtggtttatggtcccttactatatggttgtgccactttggtctttgaagggactcctgcgtacccaaattactcccgttattgggatattattgatgaacacaaagtcacccaattttatgttgcgccaactgctttgcgtttgttgaaaagagctggtgattcctacatcgaaaatcattccttaaaatctttgcgttgcttgggttcggtcggtgagccaattgctgctgaagtttgggagtggtactctgaaaaaataggtaaaaatgaaatccccattgtagacacctactggcaaacagaatctggttcgcatctggtcaccccgctggctggtggtgttacaccaatgaaaccgggttctgcctcattccccttcttcggtattgatgcagttgttcttgaccctaacactggtgaagaacttaacaccagccacgcagagggtgtccttgccgtcaaagctgcatggccatcatttgcaagaactatttggaaaaatcatgataggtatctagacacttatttgaacccttaccctggctactatttcactggtgatggtgctgcaaaggataaggatggttatatctggattttgggtcgtgtagacgatgtggtgaacgtctctggtcaccgtctgtctaccgctgaaattgaggctgctattatcgaagatccaattgtggccgagtgtgctgttgtcggattcaacgatgacttgactggtcaagcagttgctgcatttgtggtgttgaaaaacaaatctagttggtccaccgcaacagatgatgaattacaagatatcaagaagcatttggtctttactgttagaaaagacatcgggccatttgccgcaccaaaattgatcattttagtggatgacttgcccaagacaagatccggcaaaattatgagacgtattttaagaaaaatcctagcaggagaaagtgaccaactaggcgacgtttctacattgtcaaaccctggcattgttagacatctaattgattcggtcaagttgtaatgatgatttctttcctttttatattgacgactttttttttttcgtgtgtttttgttctcttataaccgagctgcttacttattattatttcaccttctctttttatttatacttataattatttattctttacatactgttacaagaaactcttttctacattaattgcataaagtgtcaatcagcaca

SEQ ID NO: 1058 - protein, 713 aa, Saccharomyces cerevisiae [sequence omitted]

SEQ ID NO: 1059 - DNA, 3543 bp, Kluyveromyces lactis
  CDS (817)..(2871)
ccaacgggagctgaacggtgcaacaatattattgccccgttaaactttatgatatgtttcttgatgctcctttactatatacagtctagatagtcacagtggcagcagtcgacggccatatgttgagtcatggtgattctttttctttttctttccttcacagtttgcttgcaacccgtagccaaaccctagagcgaaccggacctttgcaatggccattgtcgcctttcctaccttttttatatcttcaacccgatatatctttatttcttcaccagtgtcaccgcttagaagtcgccaaaactcatgagaaacagtaattttccaaccaaaaagtttggaatcgcaaaaggaaaaaaaaaatacctgaaaaactaaaatcatatatatataagatcaggcgaattaggaaaagttaggttcgaacgtttggtgaggcagaaagtttatatacacagaggttatttttattgattagacgaattgattcagaaaggattttttatttatatatgttttttttcttgtgtttattttagttgcaatccattgtagtctaagtcaattcttcagcggtacattcccagaactttattactgttagtgtctctcttttcggggtcttaactggttaattgtcatttctgaatcttcaagtttaacagaaaccttcattgttttcaagaatatcaactctggaccgtattcactaattagcagatttaatctctctacacatcttgaaaagaattataacgttaacgcgcaggaagcaaggttaacaaaggaaaaaaaaaacgattcattactatcactatgtcgtcggataaattgcataaggttgtgcatgaagctcacgatgttgaagctcgtcatgctccagaacatttctacaattctcaaccgggtaaatcgtactgtactgatgaagaacattaccgtgagatgtacactcagtccattgaggacccagcagggtttttcggtccattggccaaggaatatctagattgggatcgtccattcacccaagtccaaagcggttctttggaacacggtgacattgcctggttcttaaatggtgaactgaatgcttcttataactgtgttgacagacacgcttttgccaacccagacaagccagctttaatctacgaagccgacgatgaatctgaaaacaaggtgatcacttttggcgaattgttgagacaggtctctgaagtggctggtgtcttgcaatcttggggtgtcaagaaaggagacaccgtcgccgtttacttgccaatgattcctgctgcagttgttgctatgttggccgttgcaagattaggtgccattcattcggttatctttgccggtttctctgccggttccttgaaggaaagagttgtcgatgcaggctgtaaagtggtcatcacttgcgatgaaggtaagagaggtggtaagaccgttcataccaagaagattgtcgacgaaggtttggccggtgtcgattccgtttccaagatcttggttttccaaagaactggtactcaaggtatcccaatgaagccagctagagatttctggtggcacgaagagtgtgtcaagcaaagaggttacttgccacctgtcccagtcaactccgaagatccattgttcttgttgtacacctctggttccaccggttctccaaaaggtgtcgtgcactctactgctggttacttgttaggttctgctttgaccaccagattcgttttcgatattcatccagaagatgttttgttcactgctggtgacgtcggttggattaccggccacacttacgccttgtacggtccattgaccttaggtaccgctaccattattttcgaatctactccagcttacccagattatggtagatactggagaatcattgaacgtcatagagctacccacttctacgtcgccccaactgccctaagattgatcaaacgtgtcggtgaagaagaaattgccaagtatgatacctcctccttaagagtcttgggttctgtcggtgaaccaatctctccagatctatgggaatggtaccacgaaaaggttggtaagaataactgtgttatctgtgacaccatgtggcaaaccgaatccggttcacacttgattgccccattggctggtgctgtcccaaccaaaccaggttccgctaccgtcccattcttcggtattaacgcctgtatcatcgacccagtttctggtgaagaattgaagggtaacgatgttgaaggtgtcttggcagtgaagtccccatggccttctatggacagatctgtctggaacaaccatgctcgttacttcgaaacttatttgaagccatacccaggatactacttcacaggtgatggtgctggtagagatcacgacggttactactggatcagaggtagagttgacgatgtcgttaacgtttccggtcacagactttctactgctgaaatcgaagctgctctagctgaacacgaaggtgtttctgaagctgccgttgttggtatcactgatgaactaacaggtcaagctgtcattgcattcgtttccttgaaggacggctatctgtctgaaaatgcggtagagggtgacagtacccacatctctccagacaacttacgtcgtgagttgattctacaagtcagaggtgaaattggtccattcgctgcaccaaagaccgttgttgttgtcaacgatttgccaaaaactagatccggtaaaattatgagaagagtcttgagaaaggttgcatccaaggaagctgatcaattgggtgatctaagtaccttagccaatgcagacgttgtaccatctatcatttctgcagtagaaaatcaatttttcagtcagcagaagaaataagagttctttcaaatttaatcataaattctaaagccaactaaaaatatcgaaaaaggatagtatttcaaaacttaccatcaggatgatcagaaaaattccacagtgacgatccattcaatgtcctctgttgtatattatgctgcctttctcagaattcaaagataacaatgggactctcgtacttcgtgggtttgctccaacttaacactggaatcagtacactttcattcaattctcgaaaccactggagctttatcgattttaacaccgtagtttgtctttttaacgtcatggtcagatagagtgcttccattgcaaataatcaaataagcacggcccgctcacactattatatatttatatatattacatgtatgatattcactacatcatcctcctttaagagtaattattcaacgacgtgttttctctttgggcataaacaggagcaaatatctaccactttaggaagcgaagcgccagaaatctgacggaaattacttgctttgcgtaagattattctctgtttactgtgtgattactcaccaaacataatgtccttatgcttctttacttttttaccaataatcattcggcaaaagtgatgatccattcaaagaatgtttgcagcaaaagcagtgaaaagataaaagaatacacatatatatataa

SEQ ID NO: 1060 - protein, 684 aa, Kluyveromyces lactis
MSSDKLHKVVHEAHDVEARHAPEHFYNSQPGKSYCTDEEHYREMYTQSIEDPAGFFGPLAKEYLDWDRPFTQVQSGSLEHGDIAWFLNGELNASYNCVDRHAFANPDKPALIYEADDESENKVITFGELLRQVSEVAGVLQSWGVKKGDTVAVYLPMIPAAVVAMLAVARLGAIHSVIFAGFSAGSLKERVVDAGCKVVITCDEGKRGGKTVHTKKIVDEGLAGVDSVSKILVFQRTGTQGIPMKPARDFWWHEECVKQRGYLPPVPVNSEDPLFLLYTSGSTGSPKGVVHSTAGYLLGSALTTRFVFDIHPEDVLFTAGDVGWITGHTYALYGPLTLGTATIIFESTPAYPDYGRYWRIIERHRATHFYVAPTALRLIKRVGEEEIAKYDTSSLRVLGSVGEPISPDLWEWYHEKVGKNNCVICDTMWQTESGSHLIAPLAGAVPTKPGSATVPFFGINACIIDPVSGEELKGNDVEGVLAVKSPWPSMDRSVWNNHARYFETYLKPYPGYYFTGDGAGRDHDGYYWIRGRVDDVVNVSGHRLSTAEIEAALAEHEGVSEAAVVGITDELTGQAVIAFVSLKDGYLSENAVEGDSTHISPDNLRRELILQVRGEIGPFAAPKTVVVVNDLPKTRSGKIMRRVLRKVASKEADQLGDLSTLANADVVPSIISAVENQFFSQQKK

SEQ ID NO: 1061 - DNA, 1935 bp, Pseudomonas putida
  CDS (1)..(1935)
atgttcgatatccgcaaatacccccaggccctggccgtcagccagtccgccgccctcacccccgaagactaccgccgcctctaccgccagtcggtcgaagacccagacaccttctgggccgaacaggccaaacgcctggactggatcaaaccgtggtcaagcgtgcagcaatgcgacctgcataccggcaaggcccgctggttcgacggtgcgcaactcaacgtcagctacaactgcatcgaccgtcacctggcccagcgcggcgagcaaacggccctgctgtgggaaggcgacgatcccaaggactccaaggccatcacctaccgcgaactgcaccgtcaggtctgccgcctggccaatgcaatgaaagcgcgcggtgtgaagaaaggcgaccgggtaagcatctacatgccaatgattcccgaggccgccttcgccatgctcgcctgcacccgcatcggcgccatccactcggtggtgttcggcggtttctcccccgatgccttgcgagaccgcattctcgatgccgactgccgcaccgtgatcaccgccgatgaaggcgtgcgtggcggcaaacgcatcccgctgaaacagaacgtcgacaaggccctggccagctgcccagcggtcagtagcgtgttggtggtgcgccgcactggcggcgatgttgcctggaccgagggccgcgacctctggtatcacgaagcgacgaaggatgccggcgacgactgccccccagaaccgatggaggccgaagacccgctgttcatcctctacacctccggcagcaccggcaaacccaaaggggtgctgcataccaccggcggctacctgctgcaggcaacgatgaccttcaaggtggtgttcgattatcgtgacggcgaggtgttctggtgcaccgccgatgtcggctgggtgaccggccacagctacatcgtctatggcccgctggccaatggcgcaatctcgctgatgttcgaaggcgtgcccaactaccccgatacctcgcgcttctggcaggtggtggacaagcaccaggtgaacatcttctacaccgccccgaccgccctgcgcgcactgatgcgtgagggctccgcgccactgcagagcacctcacgcaaaagcctgcgtctgctgggcagcgtcggcgagccgatcaacccggaagcctgggaatggtacttcgaggaggtcgggcaaaagcgctgcccgattgtggatacctggtggcagaccgaaaccggcggcatcatgctcaccccactgcccggcacacagtcactcaaacccggctgcgccacccagccgatgttcggcgtgcaaccggtgctgctggacgaaaaaggcaaactgatcgaaggccccggcgccggcgtgctggcgatcaaagccagctggcccgggcagatccgcagcgtctacggcgaccaccagcggatggtcgacacctacttcaagcccctgcccggctactacttcactggcgacggtgcccgtcgcgatgccgacggcgactactggatcaccgggcgcatcgacgatgtgatcaacgtgtccgggcaccgcatcggcaccgctgaagtggaaagtgcactggtgctgcatgacagcgtggccgaagccgcggtggtcggctacccccacgacctcaagggccaaggcgtctacgccttcgtcacgaccatgaatggcgtgacaccagatgacacgctcaaggccgagctgctggccctggtcagcaaggaaatcggcagcttcgccaagcctgagctgattcagtgggcgccagcgctacccaagacgcgctcaggcaagatcatgcggcgtatactgcgcaaaatcgcctgcaatgagctggaaaacctgggcgatacctcgaccctggccgacccgagcgtggtacagggcctgatcgacaaacgcctcaaccagtaa

SEQ ID NO: 1062 - protein, 644 aa, Pseudomonas putida [sequence omitted]

SEQ ID NO: 1063 - DNA, 1950 bp, Rhizobium meliloti
  CDS (1)..(1950)
atggacgtcaagacctacccggtcctggaagcggccaagaaccgcacgctgctcgacaatgcgacctatctcgaatggtatcgcgagagcgttgccgatccggagaagttctggggcgagcacggcaagcggatcgaatggttcgagccctataccaaggtcaagaacacgtccttcgagggcgatgtctcgatcaagtggttcgaagacggactgaccaacgtctcctacaattgcatcgaccgccacctgaagacgcacggcgaaaagacggcgatcatctgggagggagacaatccctatctcgacaagaagatcacctataacgagctctacgacaaggtttgccgtcttgccaacgtcttgaaggagcagggcgtaaagaagggggaccgcgtcaccatctacatgccgatgatcccggaagcagcctatgcgatgctcgcctgtgcccgcatcggcgcgatccattcggtcgttttcggcggcttttcgcccgaggcgctcgccggccgcatcgtcgattgcgagtccaccttcgtgatcacctgcgacgagggcgtgcgcggcggcaagccggttgcgctcaaggagaacaccgataccgcgatcgacatcgctgccagacagcacgtcacggtcagcaaggtcctcgtcgtgcgccgcaccggcggcaaggtcggctgggcaccgggccgcgatctctggtatcaccaggagaccgcggcggcagagccgcattgcccgccggaaaagatgaatgcggaggacccgctcttcattctctatacttcgggttcgaccgggaagccgaaaggcgtgctgcacacgaccggcggctatctcgtctatgcttcgatgacgcatcaatacgtgttcgactaccaggacggcgacatctactggtgcacggccgatgtcggctgggtcaccggtcactcctacatcgtctacgggccgctcgccaatgcggcgacgacgctgatgttcgagggcgtgccgaacttccccgacgcgggacggttctgggaagtagtcgacaagcacaaggtcaacatcttctataccgcgccgaccgcgatccgctcgctgatgggagcgggcgacgatttcgtcaagcgctcctcgcgttcttcgctgcgcctgctcggaacggtcggcgagccgatcaatccggaagcctgggagtggtactatcacgtcgtcggcgacgagcgctgccctgtcgtcgatacctggtggcagaccgaaaccggcggcatactgatcacgccgctgccgggggctaccgatctcaaacccggctccgcgacgcggcccttcttcggcgtccagccgcagatcgtcgacagcgacggcaaggtcgtagatggcgcggccgacggcaacctttgcatcaccgatagctggcccggacagatgcggacggtctatggcgatcacgaacgcttcatccagacctacttctccacctacaagggcaagtatttcacgggcgacggctgccgccgcgacgaggacggctactattggatcaccggccgcgtcgacgacgtcctgaacgtttccggccaccggctcggcacggcggaggtggaatcggcgctcgtctcgcacaacctcgtttccgaggcggcggtcgtcggctacccgcatccgatcaagggtcagggcatctattgctacgtttcgctgatggccggcgaggtcggagacgacgaactgcgccaggcgctcgtcaagcacgtccgctcggaaatcggaccgatcgcgacaccggacaagatccagttcgcgcccggcctgccgaaaacacgctcaggcaagatcatgcgccggattctccgcaagatcgccgaggacgatttcggttcgctcggcgacacttcgacgctcgccgatccgggcgtcgtcgacgacctgatcgccaatcgtcagaaccgcgcttga

SEQ ID NO: 1064 - protein, 649 aa, Rhizobium meliloti [sequence omitted]

SEQ ID NO: 1065 - DNA, 1959 bp, Agrobacterium rhizogenes
  CDS (1)..(1959)
atgtcggaaaagatttatccggtcgccaagccggtggagagccatgcgttgatcaacaaggccgagtaccaggaatggtacgcggaaagcgtcgccgaccccgagcagttctggggcaagcacggcaagcgcattgactggttcaagccctacaccagcgtaaaggacacctcctttaccggcgacgtctcgatcaaatggttcgaggacggtgagaccaatgtctcctacaactgcatcgaccggcacctcgcgacaaacggcgaccaggtcgccatcatctgggaaggcgacgatccgtcgctcgacaggaagatcacctaccgcgagctctacgagcacgtctgtcgtatggcgaacgtcctgaagaagcacggggtcaagaagggcgaccgcgtcaccatctacatgccgatggtgccggaagcggcctatgcgatgctcgcctgcgcccgtatcggcgcgatccattcggtggtgttcggcggcttttcacccgaggcgctgggtggccgtatcgtcgattgccagtcgaccttcgtcatcacttgcgacgaaggcctgcgcggcggcaagccggttccgttgaaagccaatgtcgacaaggcgatcgatatcgccgcgcgcggtcacgtcatggtcaagaacgttctggtgatccgccgcaccggcagcccgctcagttgggcgccgggccgcgacctctggcatcacgaggaagcagccactgtttcggcggactgcccgcccgagccgatgaaagccgaggatccgctgttcatcctctatacgtcaggctcgaccggcaaaccgaagggcgttctacacaccaccggcggctatctcgtttacgcctcgatgacgcatgaatatgtgttcgactaccagcacggtgatatctactggtgcacggccgatgtcggctgggtcaccggacattcctatatcgtctatgggccgctcgccaactgcgcgacgacgctgatgttcgaggggatcccgaccttccccgatgctggccgtttctgggatgtgatcgacaagcacaaggtcaacatcttctacaccgcgccgaccgcaatccgctcgctgatgggcgccggcgatgatttcgtcaaacgatccagccgatccagcctgcgattgcttggctcggtcggcgagccgatcaatccggaagcctgggaatggtactatcatacggtcggcgacgggcgctgccctgttgtcgatacctggtggcagacggaaaccggcggcatcatgatcacgccgctgcctggcgcgaccgacctgaagcccggctcggctacacggcccttcttcggcatcagaccggagctcgtcgatgccgaaggcaagctcatcgaaggggccgccgacggtaatctttgcatcgccgacagctggccgggtcaggcgcgttcggtctatggcgaccacgagcgcttcatccagacctacttctccacctacgaggggaaatatttcaccggcgacggctgtcgccgcgacgccgatggctactactggatcaccggccgtgttgacgacgtgctcaacgtctccggccaccggctcgggacggcggaagtcgaatccgccctggtatcgcatcacctcgtctccgaggcagccgtcgtcggctatccgcacaacatcaagggccagggcatctattgctatgtcacgctgatggcgggcagcgaagggtccgaagagctccgccagcagctggtgaaacatgtccgcgcggaaatcgggccgatcgcctcgcctgataagatccagttcgcgccgggcctgccgaagacccgctcgggaaagatcatgcgccgcatcctgcgcaagatcgccgaggacgatttcgggtcgctgggcgacacctcgacgcttgccgatcccgctgtcgtcgacgacctgatcgccaaccggcagaacagagccgaggcggcctag

SEQ ID NO: 1066 - protein, 652 aa, Agrobacterium rhizogenes
MSEKIYPVAKPVESHALINKAEYQEWYAESVADPEQFWGKHGKRIDWFKPYTSVKDTSFTGDVSIKWFEDGETNVSYNCIDRHLATNGDQVAIIWEGDDPSLDRKITYRELYEHVCRMANVLKKHGVKKGDRVTIYMPMVPEAAYAMLACARIGAIHSVVFGGFSPEALGGRIVDCQSTFVITCDEGLRGGKPVPLKANVDKAIDIAARGHVMVKNVLVIRRTGSPLSWAPGRDLWHHEEAATVSADCPPEPMKAEDPLFILYTSGSTGKPKGVLHTTGGYLVYASMTHEYVFDYQHGDIYWCTADVGWVTGHSYIVYGPLANCATTLMFEGIPTFPDAGRFWDVIDKHKVNIFYTAPTAIRSLMGAGDDFVKRSSRSSLRLLGSVGEPINPEAWEWYYHTVGDGRCPVVDTWWQTETGGIMITPLPGATDLKPGSATRPFFGIRPELVDAEGKLIEGAADGNLCIADSWPGQARSVYGDHERFIQTYFSTYEGKYFTGDGCRRDADGYYWITGRVDDVLNVSGHRLGTAEVESALVSHHLVSEAAVVGYPHNIKGQGIYCYVTLMAGSEGSEELRQQLVKHVRAEIGPIASPDKIQFAPGLPKTRSGKIMRRILRKIAEDDFGSLGDTSTLADPAVVDDLIANRQNRAEAA

SEQ ID NO: 1067 - DNA, 1956 bp, Agrobacterium tumefaciens
  CDS (1)..(1956)
atgtctgccaaaatctacccggtgctcaaatcggcgaaagcccgcacgctcatcgacaatgagcgttaccagaaatggtatcaggagagcgtcgaggatccggaaaaattctgggacaagcacggccggcggatcgactggttcaagccctataccaaggtcaagaacacctcattcaaggggcgtgtgccgatcaaatggttcgaagacggcctgacgaacgtctcctataactgtatcgaccggcatttgaagacgcatggcgagcgcacggcgatcatctgggaaggcgacaatccctatatcgacaagaagatcacctataaccagctctatgattatgtctgccgtctggccaatgtgctgaagaagcacggcgttaagaagggtgaccgcgtcaccatctacatgccgatgattcccgaggcggcctatgccatgcttgcctgcgcccgcatcggtgccgtgcattccgtcgtctttggcggcttctcgcccgaagcgctggccggtcgtatcgttgactgcgaatcgaccttcgtcatcacctgcgatgaaggcgttcgcggcggcaagccgatcccgctcaaggaaaataccgacaaggcgatcgatatcgccgccaagcaatatgtcatcgtcaacaaggttctggtcgtgcgccgcaccggcggcaagaccggctgggcgccgggccgcgacatctggtatcatcaggaaattgcgaccgtgaagccggattgcccgccggtgaagatgcgggcggaagatccgctgttcatcctctacacttcaggctccaccggcaagcccaagggtgtgttgcacaccacgggcggctatctcgtctatacgtcgatgacgcatgaatatgtgttcgattacaaggatggtgaagtcttctggtgtacggccgatgttggctgggttaccggccattcctacatcgtctacgggccactcgccaattgtgcgacaacgctgatgttcgagggtgttcccaacttcccggatcaggggcgtttctgggaggtcatcgacaagcacaaggtcaatatcttctataccgcgccgacggcgctccgatcgctgatgggggcgggcgaccagttcgttcagcgctcgtcgcgcgaaagcctgcggcttctcggaacggtgggtgagccgatcaatccggaagcgtgggagtggtattaccatgtggtcggcgaggacaagagcccgatcgtagacacctggtggcagacggaaacgggcggcattctcatctcgccgttgccgggtgcgaccgatctgaagccagggtcggcaacaaggccgttcttcggcgtgcagccgcagcttgtcgatgccgagggcaatgtgctggaagggccggcggacggcaatctctgcatcatcgacagctggccgggccagtcgcggtccgtttatggggatcaccagcgattcgtcgacacctacttctcgacctacaagggcaagtacttcaccggtgacggctgccggcgcgacgaggacggttattactggatcacaggtcgcgtcgatgacgtgctcaacgtctccggccaccgcctaggcacggccgaggtagaatcggcactggtctcgcatcatcaggtttcggaagcggcggtggtcggttatccgcaccccatcaaggggcagggcatttattgttatgtcacgctgatggcggggcagagtggcgattatgcgctgcgcgaggagctggtaaagcatgtgcgcaacgagatcggaccggttgcgacgcccgacaagatccagtttgcgcccggcctgccgaagacccgctcaggcaagatcatgcggcgcattctgcgcaaaatcgccgaggacgatttcggtgcgcttggggatacgtcgacgcttgccgatccggcggtggtggaagatctcatcgccaaccgccagaaccgcacggcgtcctga

SEQ ID NO: 1068 - protein, 651 aa, Agrobacterium tumefaciens
MSAKIYPVLKSAKARTLIDNERYQKWYQESVEDPEKFWDKHGRRIDWFKPYTKVKNTSFKGRVPIKWFEDGLTNVSYNCIDRHLKTHGERTAIIWEGDNPYIDKKITYNQLYDYVCRLANVLKKHGVKKGDRVTIYMPMIPEAAYAMLACARIGAVHSVVFGGFSPEALAGRIVDCESTFVITCDEGVRGGKPIPLKENTDKAIDIAAKQYVIVNKVLVVRRTGGKTGWAPGRDIWYHQEIATVKPDCPPVKMRAEDPLFILYTSGSTGKPKGVLHTTGGYLVYTSMTHEYVFDYKDGEVFWCTADVGWVTGHSYIVYGPLANCATTLMFEGVPNFPDQGRFWEVIDKHKVNIFYTAPTALRSLMGAGDQFVQRSSRESLRLLGTVGEPINPEAWEWYYHVVGEDKSPIVDTWWQTETGGILISPLPGATDLKPGSATRPFFGVQPQLVDAEGNVLEGPADGNLCIIDSWPGQSRSVYGDHQRFVDTYFSTYKGKYFTGDGCRRDEDGYYWITGRVDDVLNVSGHRLGTAEVESALVSHHQVSEAAVVGYPHPIKGQGIYCYVTLMAGQSGDYALREELVKHVRNEIGPVATPDKIQFAPGLPKTRSGKIMRRILRKIAEDDFGALGDTSTLADPAVVEDLIANRQNRTAS

SEQ ID NO: 1069 - DNA, 1947 bp, Bradyrhizobium japonicum
  CDS (1)..(1947)
atgtccgagaagatttacgacgtgccggcggaatgggcaaagcgcgcctgggtcgaccaagccaagtacaaggaaatgtacgcccgctcgatctcggacccgaacggtttctgggccgaacaggccaagcgcatcgactggatgaaggcgccgacgaaaatcgagaacgtctccttcgcgccgggcaacgtctcgatcaaatggttcgaggacggcgtcctcaacgtcgcccataactgcatcgaccgtcatctgcacaagcgcgccaaccagaccgcaatcatctgggaaggtgacgatccctcgcagtcccgccacatcacctacaaggagctccacgacgaggtctgccggatggccaacatcctgcgtacccgcaacgtcaagaagggcgaccgcgtcaccatctacctgccgatgattccggaagcggcctacgcgatgctggcgtgcgcgcggatcggcgcgatccactccgtggtgttcgcgggcttctcgcccgacagcctcgcccaacgcatcaacgactgccagtccaaggtgatcatcaccgccgacgaaggcctgcgcggcggcaagaaggtgccgctgaaggccaatgtcgacgcggcgctcgccaaggccgacggcgtcgactgggtcgtcgtggtcaagcgcaccggcggcaagatcgacatgaacccgacccgcgacctctggtatcacgaggcggcggcgatggtgacgacggaatgcccggtcgagcatatgcacgccgaggatccgctgttcatcctctatacctcaggctcgaccggccagcccaagggcgtgctgcacacctccgccggctatctcgtctatgccgcgatgacgcatcaatacgtcttcgactatcacgacggcgacatctactggtgcaccgccgacgtcggctgggtcacgggccacagctacattctctacgggccgctcgccaacggcgcgaccacgctgatgttcgagggcgtgccgaattatccggacaattcccgcttctggaacgtcatcgacaagcacaaggtcaataccttctacaccgcgccgaccgcgatccgcgcgctgatgcagggtggcgacgagccggtgaagaagacctcgcgcgcctcgctgcgcctgctcggctcggtcggcgagcccatcaatccggaagcctgggagtggtatcaccgcgtcgtcggcgaggaccgctgcccgatcgtcgatacctggtggcagaccgagaccggcggcatcctgatcacgccgctgccgggcgccactaagctcaagccgggctcggcgacgcagcccttcttcggcgtggtgccggagatcgtcgatgccgacggcaaggttctggaaggcgagaccaccggcaatctctgtctcacccgggcatggccgggcatgatgcgcacggtctatggcgatcacgcgcggttcgagcagacctatttctcgacctacaagggcaagtattttacgggcgacggctgccggcgcgacgccgacggctattactggatcaccggccgcgtcgacgacgtcatcaacgtctccggccaccgcatgggcaccgcggaggtcgagagcgcgctggttgcgcatgagaaggtgtcggaagctgccgtcgtcggcttcccgcacgacatcaagggccagggcatctacgcctatgtcaccctgatggccggcgtccagccgaccgaggatctgcgcaaggagctcgtgacctgggtgcgcaaggagatcggcccgatcgcctcgcccgaccagatccagttcgcgccgggcctgcccaagacccgctccggcaagatcatgcgccgcatcctgcgcaagatcgccgaggacgagccgggcagcctgggcgacacctcgaccctggccgatcccgccgtggtcgacgacctcgtcaagaaccggcagaacaagaagtcggcgtaa

SEQ ID NO: 1070 - protein, 648 aa, Bradyrhizobium japonicum [sequence omitted]

SEQ ID NO: 1071 - DNA, 1956 bp, Brucella suis
  CDS (1)..(1956)
atgtcggaaaagctttaccccgtgctgccggaggcaaagaaaaacacgctcatcgacaacgagacttatctcgaatggtatgaggagagcgtgagcgacccggatggcttctgggccaagcacggccggcgtatcgactggttcaagcctttcaccaaggtcaagaacaccgatttcaacggcgatgtaacgatcaagtggtatgaggatggcgtcaccaacgtctcatataattgcatcgaccgccatctgaagagccgcggcgacaaggtcgccatcatctgggaaggcgacaacccctatatcgacaagaagatcacctatcgcgagctttacgagaatgtctgccgcatggcgaatgtgctcaagaagcatggggtgaagaagggcgaccgcgtcacgatctatctgccgatgatcccggaagccgcctatgccatgctcgcctgcgcgcgcatcggcgccgtgcattcggtcgtctttgccggtttctcgccggaggcgctcgctggccgcatcgttgactgcgaatccactttcgtcatcaccgccgatgaaggtgtgcgcggcggcaagcctgttgcgctgaaggaaaacaccgataccgccatcgacatcgccgccaagcaatatgtgatggtcaacaaggtgctggtcgtgcgccgcaccggcggcaaggtaagctggggccgcggccgcgatctgtggtaccatcaggaagtcgcaagcgtcgaaccgcattgcgaaccggaaccgatgaatgcggaagacccgcttttcattctctacacatccggttccaccggcaagccgaagggtgtgctgcataccaccggcggctacctcgtctatgcctcgatgacgcatcaatatgtcttcgattaccatgatggcgagatctactggtgcacggcggatgtgggttgggtaacgggccactcctatatcgtctacggaccgctggccaatggcgcgacaacgctgatgtttgaaggcgtgcccaacttccccgatcagggccgtttctgggaagtcgtcgacaagcaccatgtcaatatcttctacaccgcgccaaccgcgctgcgcgcgcttatgggcgcgggcgatgaattcgtaacccgctcatcgcgttcgacgctgcgcctgctgggctcggtcggcgagccgatcaatccagaggcctgggagtggtattacaatgtcgtgggcgaccagaaatgccccatcgtcgatacctggtggcagacggaaaatggcggcatcctcatcaccccacttcccggcgcgaccgatttgaaacccggttcggcaacacgcccgttcttcggcgtcaagccggtgctggtggacaatgaaggcaatgtgcaggagggcgtagccgacggcaacctgtgcatctccgactcctggccgggccagatgcgcaccgtctatggcgaccacaagcgtttcatcgaaacctacttctccacctataaggggatgtatttttcgggcgatggctgccgccgcgacgaggacggctattactggatcaccggccgcgtcgatgacgtgctgaatatttccggccatcgcctcggcacggcagaaatcgaatcggcacttgtctcgcatcactcggtttcggaagccgccgtggtcggctatccgcacccgatcaagggacagggcatctattgctatgtcacgctgatgaccggcgcagacgcgcaggacccggacgagttgcgcaaggaactggtccagcatgtgcgcaaggaaatcggccccatcgccacaccggacaagatccagtttgcgcccggactgccgaaaacccgttccggcaagatcatgcgccgcatcctgcgcaagatcgccgaagacgagttcggcgcattgggcgacacctcaacgctcgccgatccgggcgtggtggacgacctgatcgaaaatcgccagaacaagaaatga

SEQ ID NO: 1072 - protein, 651 aa, Brucella suis
MSEKLYPVLPEAKKNTLIDNETYLEWYEESVSDPDGFWAKHGRRIDWFKPFTKVKNTDFNGDVTIKWYEDGVTNVSYNCIDRHLKSRGDKVAIIWEGDNPYIDKKITYRELYENVCRMANVLKKHGVKKGDRVTIYLPMIPEAAYAMLACARIGAVHSVVFAGFSPEALAGRIVDCESTFVITADEGVRGGKPVALKENTDTAIDIAAKQYVMVNKVLVVRRTGGKVSWGRGRDLWYHQEVASVEPHCEPEPMNAEDPLFILYTSGSTGKPKGVLHTTGGYLVYASMTHQYVFDYHDGEIYWCTADVGWVTGHSYIVYGPLANGATTLMFEGVPNFPDQGRFWEVVDKHHVNIFYTAPTALRALMGAGDEFVTRSSRSTLRLLGSVGEPINPEAWEWYYNVVGDQKCPIVDTWWQTENGGILITPLPGATDLKPGSATRPFFGVKPVLVDNEGNVQEGVADGNLCISDSWPGQMRTVYGDHKRFIETYFSTYKGMYFSGDGCRRDEDGYYWITGRVDDVLNISGHRLGTAEIESALVSHHSVSEAAVVGYPHPIKGQGIYCYVTLMTGADAQDPDELRKELVQHVRKEIGPIATPDKIQFAPGLPKTRSGKIMRRILRKIAEDEFGALGDTSTLADPGVVDDLIENRQNKK

SEQ ID NO: 1073 - DNA, 2028 bp, Candida albicans
  CDS (1)..(2028)
atgccggaatctactcaacaatctcatctttctttggaccatgagaagatgcaacaacctcctaaagggttcactgaacgttctaaaacaaaaccaaacttagctgattttgaaacttatcaaaaattatataaacaatcaattgaaaaccccaatgaatttttcactcaacaagccaaagaaaatttggattggtttaaaccatttgatttagctagattccctgttgatcctaaagatgattacaaaaatggtgatttgccagcttggttcatcaatggacaattgaatgcttgttataatgctgttgatagatgggccattaaaaaccctgataaaccagcaattatttatgaaggtgatgaacctgaccaaggaagaattatcacttatggagaattattaaaacaagttagtaaattagctcaagccttaactaaattgggggttaaaaagggtgattcagttgctgtttatttaccaatgattcctgaagccattgtcactttattagccattgttagaattggtgctatgcattcagttgtttttgctgggttttcttctgcttcattaagagatagaattttggatgctgattcaagaattgttattactgctgatgaatctaaaagaggtggtaaaaccattgaaaccaaaaaaattgttgatgatgccttgaaagaatgtccaaaagttagaaatgtcattgttttcaaaagaactggtaattctcatgtcccattttctcctggtagagatttgtggtggcacgatgaaatggctaaatatggtccatacttcccaccagttcctgtcaattctgaagacccattgttcttgttgtatacttctggttctactggtaaaccaaagggggttcaacacaacactgctggttatttgttaggagcagttttaaccaccaaatacacttttgatgttcatgaagatgatattttgtttactgctggtgacattggttggatcacaggtcatacttattgtgtttatggtccattgttagctggtgccacatcagtggtttttgaaggtaccccagcttatccaaattattccagatattgggaaattgttgataaatataaagttaatcaattttatgttgctccaactgctttaagattattgaaaagagctggtaccaaatatgttgaaaaatacgatttatcatctttaagagtcttgggttccgttggtgaaccaattgctgctgaagtttggcattggtataatgataacattggtaggggtcaagctcatattgttgatacttattggcaaactgaatcaggatctcatttgttgactccgttagctggtatcacaccaactaaaccaggttcagcttcattaccattctttggagttgatccaaagattttagacccaaccactggtgaagaattacctgataatgatgttgaaggggttcttgccattaaatcagcttggccatcaattactagaggtatttacaatgattacaatagatttattgatacttatttggcaccatacgccaattattatttctccggtgatggtgctgctagagatagagatggtttttactggattttgggtagagttgatgatgttgttaatgtttctggtcacagattatcaactgctgaaattgaagctgccttgattgaacatccaattgtcggtgaatctgccgttgttggttatgccgatgaattgactggtcaagccgttgctgcatatgtttcgttaaagaaggataaagctgttggtgaagatgtagaaaacattaaaaaggaaatgattttaactgttagaaaagaaattggaccatttgctgctccgaaaatgattttattagttgatgatttacctaaaactagatctggtaagatcatgagaagaattttaagaaaagtattggcaggtgaagaagatcaattgggtgatatttctactttatctaatccaggtgttgttcaacaaatcattgatgttgttcatcatgcaaagaaataa

SEQ ID NO: 1074 - protein, 675 aa, Candida albicans [sequence omitted]

SEQ ID NO: 1075 - DNA, 1980 bp, Chlorobium tepidum
  CDS (1)..(1980)
atggctactgagcaaacgaaaggccagtcctctgaatcgatcagttcggttctctccgagcggaggaagtttcctccgccggaagcgttctcttcccagtcgcacatttcaagcatggagcagtacgaaaaactctatgccgatgcagccgcggatcccgacaagtactggggcgatctggcggaacagttccactggttcaagaaatgggactcggttcttgaatggaatgctccatatgccaaatggttcaatggcggcaccaccaacatcgcctacaactgccttgacgtgcacgtaggcagctggcgcaagaacaaggcggctatcatatgggaaggtgaagagggcaacgagcgcatcctcacctatggcgagctgcaccgccaggtcagcaaattcgccaacgtcctgaaaatcgccggcatcaaaccgggtgacaaggtggcgatctacatggggatggtgcctgagctggtcatcgccgtgctcgcctgcgcaagggtcggtgcggtgcacaacgtgatcttcgccggttttgccgcccacgccatcaccgaaagggtcaacgactcacgcgccaaaatagtcatctgcgccgacggcacccgccgccgtggtagcaccatcaacctcaaaaatatcgtcgacgaagcgatcatcaacactccttcggtcaaaaacgtcatcgtcctcaaagtgaccggcgaagagatccacatgcacgacggcatggatcactggtggcacgacctgatggggctagccgtggacgaatgcgaaccggcgcaggtcgattccgagcacccgctctttttgctctacaccagcggctcgaccggcaaaccgaaaggcattctgcacaccaccgccgggtacatggtgcacgccgccagctcgttcaaatatgtgttcgacatcaaggacgaggacatctacttctgcaccgccgacatcggctggatcaccggccacacctacataatctacggcccgctgctcaacggcgcaaccgtcttcatgtacgaaggcgctccgaactacccgcagtgggatcgtttctgggacatcatcaatcgccacaagatcacaatcctctacaccgctccgacggctatccgcgccttcatccgcgccggtaacgagtgggtcaccaagcacgacctcagctcgctcaggctgctcggcacggtcggcgaaccgatcaaccccgaggcctggatgtggtaccacaagtatgtcggtcaggaaaaatgcccgatcgtggacacctggtggcagaccgaaaccggcggcatcatgatttcgccgatgccgggcgcgaccccgaccaaaccgggcacagccacccgcccgctgccgggcattatggtcgatgtcgtccgcaaggatggcaccccgtgcaacgccaacgaaggtggctacctggtcgtcaaacgcccatggccctcgatgctccgcaccatctatggtgacaacgagcgttacgaaaagacctactggtctgaattccccggcatgtacttcaccggcgacggtgcaagaaaagatgatgacggctacatctggatcatgggccgcgtcgatgacgtggtcaacgtctcgggtcaccgcctcggcaccagcgaggtcgaaagcgcgctcgtttcacacgaggctgtcgccgaagccgccgtcgtcagccgtccggacgaaatcaagggcaacgccctcgtcgcattcgtgacgctgaaagacggctacgaaggcgacgccaaactgcgcgactcgctcggcaagcacgtcgccaaggagatcggcgctattgctaagcctgacgaaatccgctgggccaaaggtctgccgaaaacccgcagcggcaaaatcatgcgccgcctgcttcgcgaacttgccacttccaacgagatcaaaggcgacgtcaccaccctcgaagacctcggcgtcatcgagaacctccgcgaacaggaagacgaaggctga

SEQ ID NO: 1076 - protein, 659 aa, Chlorobium tepidum [sequence omitted]

SEQ ID NO: 1077 - DNA, 2041 bp, Coprinus cinereus
  CDS (20)..(2005)
caccgcctcgctctctgcaatgtccgaaggtccaatccgagtcgctccccaccccatcgccaagcgcgtcaagcatggctgcaagacgccccatgtctcccacattgacgattaccgaagccagcaccgggaaaccattggtcacgaatcggacaagtggtgggcaaagaaagctcatgagcttctctattgggatcgaccattccatactgtccgctcgggcagcttcgagaatggcgacattgcttggttccccgagggtggtttgaacgcctcctataactgcgttgaccgctgggcgttcaaacatccggaaaagaccgcgattatctacgaagcagatgaacctggcgagggaagggagatctcttacgcggaactcctccgggaagtctgcagcatcgcaaacgtgctcaagtcgttcggcgtcaagaagggcgacaccgtctccgtctacctccccatgacctggcaagccgtcgccgccttcctcgcctgtgcccgcatcggcgccatccactctgtcgtctttgctggcttctcggccgaagcattgcgtgatcgtatgcaagattgcaaatcgcgtgtgctcatcacgtccgatgaagggcggcgcggtgggaaggcgattgctaccaaggccatcgcggatgcggccctcaaggagtgcccggcggttgagaaggtgttggtgttgaagaggacgggtaacccggttccgtggactgagggtcgggatgtgtggtggcacgaggcggtcgccagggtaccgaggtactgccctcccgaggtcatggcatccgaggaccctctcttcatcctctacacttctggctcgactggcaaacccaagggtgtcgtgcacacgactggtggatatctactctgcgccgccttgactgtcaaatacgtcttcgatgtccaccccgacgacaggttcgcttgcatggccgacgttggctggatcacgggccacacttacatcgtctacggtcctctcgctattggcgctaccaccaccgtgttcgagtccactcccgtataccccactccttcacgatactgggaaaccgtcgagaagtacaagcttacccagttctactcggcccctaccgctatccgactcttgcgtcgcctcggacacgagcacgtcaacaagcacgatttgagcagtttgcgtgtgttgggaagcgttggagagcccatcaaccccgaggcttggcactggtacaacgagcacgtcggaaagaccgagtgcgccatcgttgataccttctggcaaactgagactggttccatcgtcgttactcctttccccggtgctatcgagaccaagcctggtgcggcgactgtacccttcttcggtattgagcccgccatcttggagcctaccactggaaaggtgctcgagggcaatgatgtcgagggtgttctcactatcgctcatccctggccttctatcgctcgaaccatctacggagaccatcagcgctacctcgagacttacatgaagccttatcccggctacttctacaccggtgatggcgctgctcgtgatgaggacggctacatctggatcaagggtcgtgttgatgatgtcattaacgtctctggccatcgtttgtccaccgccgaaatcgaatccgctctcatcacccacactggagttgctgagaccgccgtcatcggtaccgccgacgaactgaccggccaggccgtctacgccttcgtcactctcaagcctgaattcaagttcgacgccgagaacgaggctggcctctccaaggagctcatcctccaagtccgcaagatcatcggtccctttgctgcgcccaagcggatctatatcgtcagtgacctccccaagactcgctccggcaagatcatgcgacgtatcctccgcaagatcgtcgctggcgaggctgaccagctcggtgacctcagcaccttcgccgacccgggcatcgtcgaagtcatcaaggagaaggttgcctctgctgcgtaagcgcacgacagagtagactcatctagcacctgccca

SEQ ID NO: 1078 - protein, 661 aa, Coprinus cinereus [sequence omitted]

SEQ ID NO: 1079 - DNA, 2222 bp, Cryptosporidium parvum
  CDS (70)..(2154)
gaattcttcttgttactcttaagattttgcctcacattagtatattatattaataattattgaaaaaaaatgagtgataaaagacctagatcgccatgttctaacaataatgatgaattaaatgattcatcagtacttactgagaacatggataccgttgcaactcgttccaagaacttgccatttcacgaaacatacaaatcaaaaccaactcctgctgataagccttatagagtagatgggattgataaatataaagaactctacgaacaaagtattagagatcctgagggtttttggagccaaatggctagaaaagaacttcgatggctaagagattttactaaagtaaggagttctggtacttgtcttcaagatagacttgcttggtttttgaatggaaagttaaatgtatgcgataattgcgtagatagatgggctgaaatacaaccaaatactactgcattaatttgggaaggagatgatccatcatctattagacatattagctatattgaactgtttagaaacgtttgtaaaatggccaatgttttgaaacgatttggtatcaaaaaaggtgattctgttggtatttatatgccaatgatacctgaaactatatatactatgttagcttgcgctagaataggagctgtacatatggtagtttttgctggatttgcagctcagaatcttcttgagagacttgttaatgctagatgtaaaatagtagtaactgcagatcaaggatccagaggtaagaagattattaacttgaaagatgttgttgataaagctcttgaaaagattcctgagattaaaacatgcattgtttttagacacttgaatggacctattgaatttgtcaagggaagagattttgatggagaaactttaatgagatctgaaaaaccttattgtcctttagaagacatggatagtgaggatccactattttatttatatacctcaggtagtactggaactccaaaaggtgttcaacactctactgcaggatacttactttatgctgctgttacacaaaagtacttattcaacattcatcctggggatatttttggatgtgctggagatattggttggattactggccactcttacttggtatatgctcctctttgtaatggtataaccactttaatttttgagggagtaccgacttatcctaatgctgggagatactgggaaatggtggagagacacagaattactcatttttacgctgctccaactgcaatcagaactcttaaacgccttggagatgattttgttaaaaaacacgatagatcatcattgagagttctaggatcagttggagagcctattaatccctctgcatggagatggtaccattcagttgttggtgaagagagatgttctatagttgatacttattggcaaactgagacaggaggaattgttattgctccaattcctggttgttttgatactaaacctggttcagcaacatttcccttctttggtattgagcctgcgatacttgatcctgatacaggaaaagaaattgatggaccagggtctggagttctttgtataaaaaactcatggccaggtatgtttagaggtatttttggagctcattatcttcatgagatctatacaaaaccattccccaaatactattttactggggatggtgttttaagagatcaggatggatatctttggattactggtagaattgacgatacaattaatgtttctggtcatagactaagctctaaggaaattgaagatgctcttaccaaccattttggcattgcagaagctgcagctgttgcaattgatcatgatgttaaaggtaatgctcttgtttgctttgtagttttaaaggattctggtaatagaacttttgacttgaataattcaagtcctcatccttttgaatatgaacttaggatgtgtgtcaggacccaaatcggccctgtggcaacacctgatcatattattgttgttgagaatatccctaaaacaagatcaggaaaagttgtaagacgtcttcttagaaagattgctactggttgcaatgactatggagatatttcaacggttgcaaatcctgagtgtattaaatccattgagtcatcctgggcacaataccttaagagataatataaggagccctgtataagtaaatttaacaatattacaggattttgcattttgtatttttccaatgt

SEQ ID NO: 1080 - protein, 694 aa, Cryptosporidium parvum [sequence omitted]

SEQ ID NO: 1081 - DNA, 2874 bp, Drosophila melanogaster
  CDS (451)..(2463)
cacggcactcagccatcacctgatggattcgatgatggaccgatgacacacctacctctctggaaagttacgccgtgctctggcgataaggatgtccaagtcgcgccttgaaaatacatatgcccgatcaagttgataagccttacaaaaagcgccgcccatgtctcattgaacttgaagagcgtgttcgcggaagcttttccattcggaaagctatggcaacggaggcgaaaagcttggcagtagctcattcgaatggtcagtgctcaaaaagaactcattccgtgcggtgcgagaagcgcatgctgctcgagaaccaacccctgaaaataataaaaacaatcacacaaagctaaggataattgcaaaacaggataattgaaaacctaaagcaaggaaaaacagttgaaggacatacacaaataactaaaaccacaactcaataacaaaatgccagcggaaaaatcaatatacgatcccaacccggccatcagccaaaatgcctacatatccagcttcgaggagtaccagaagttctaccaggagtcactggacaatccggccgagttctggtcccgcgtggccaagcagttccactgggaaacgccagccgatcaggataagttcctcaagtacaacttcaacatctcgaagggacccatttcgatcaaatggatggagggtgcctccaccaatctgtgctacaatctcctagatcgcaacgttaggaacggcctgggcgaccagatagcctactactgggagggcaaccaccccgacgattattcccggggtctcacctatcgcaagttgctggaggaggtgtgccgcttcgccaacgtgctgaaggatcatggcattcgaaagggcgatcgtgtatccatttacatgcccatgattctggagctgcctatcgcgatgctggcctgcgctcgcattggagccgtgcactcgatcgtattcgccggattctcaccggactcactggcggagcggatgttcgattgcaaggccaagctgctgattacggcggatggagcctggcgtggagagaaacccctgtacctgaaggctctgtgcgacacggccttggagaaagtcgaggagatggggcactccgtggagaagtgcatcgtggtgtcgcatttgaagcgagtgactccgtgccagccggatcatgtcgaggaggaaatcccatggaccgatgaccgcgattactggtggcacgaggagatggaggacaaggagccggcctgctatccggagtggatggacgccgaggatccattgttcatgctctacaccagtggctccactggcaagcccaagggagtgctccacacgactgccggatatctgctgtatgcggccacgacctttaagatcgtatttgactataagccaggggatatctactggtgcaccgccgatgttggctggatcacgggacacacctacgtggtgtacggaccattggccaatggagccacttcagtgattttcgaaggcacaccattcttccctggaaacgatcggtactggagtgtcattgacaaatataaggtaactcagttctacacagctccaacggcgattcgtgccctcatgaagttcggcgagggtcccgttctaaagcacaacctgagcggactcaaagttttgggcagcgtgggtgagcccatcaacccggaggcctggctctggtattacaaatacattggaaaggagcagtgctccattgtggacaccttttggcaaacggaaaccggtggtcatgtcattacacctctgcctggagcgactcccatgaagccgggatctgcttcattccccttctttggagtgaagcccactttgctggatgagtgcggcattgaaattaagggggagggagagggctacttggtcttctcgcaaccttggccgggaatgatgcgcactttgtacaacaaccatgaacgcttcgaggacacttatttctccaagttcccaggctactactgcactggcgatggagcccgacgcgatgctgacggctatttgtggatcactggtcgtgtggacgacatgttaaacgtgtccgggcacctgatgtccactgccgaggtagagtcggttctcacagagcatcctcgcgtggctgagtccgccgtggtttcccgtccgcatcccgtcaagggcgagtgtctctactgcttcataacgccgaacgagaacgaggtattcgaccagaagctaatttcggacctgaagaagatggtgcgagaacgtatcggaccttttgccatgccggatgtcattcaaaacgctcccggactgcccaaaactcgttccggcaagattatgcgtcgtgtgctgcgcaagatcgcggttaacgatcgcaacgtgggcgacacatctaccttggccgatgagcaaattgtggagcaactgttcgccaaccggccagtggaggccaagtagatggtagctgttggaccaactggcagcagccaggatcccttaacccaaggctttctccggttgcactgaccactccactttgccatcgcatttccaccacttacgtatcgcgattacgtatcctgtaaatctccctctacttatatgaattacccactgcttaatgtttgttccgttccgggctacggcgtggttagcacctttcaaattctacttagctcgtaagcctaagcgtgtgcgtaagtaagtgactggatggtttccgatcccagttatatatcgtctatatgattttgtgtacttgcctgttcatcgtagttgacatgctcaccacgcacacattttccagttcttttgtttcttcgttgtagtcgtagtttaagttctcgctaattcgttgtgatacaaatt

SEQ ID NO: 1082 - protein, 670 aa, Drosophila melanogaster [sequence omitted]

SEQ ID NO: 1083 - DNA, 1986 bp, Leptospira interrogans
  CDS (1)..(1986)
atgccgaattcggaggaagttatggcaaaagaacgagtcgtttcaccgtccgcagaatttaaaaagaatgcgaacattagtcttaagaattataaatctctttataaagaatccatagaaaacccgaacaagttttgggcaagagaagccaaccgcttgatttggtttaaaaaatggactaaagttttaagccacgattttaaaaacgcaaaagtagaatggtttaaaggtggcaaactcaatgtttcttacaactgtttagatcgtcatatcagcactcccttaaaaaacaaagccgctttaatttgggaaggtgataatcccacagaatctagagtgcttacctattatgatgtttacagagaagtaaatcgttttgcgaacattcttaaaaaatttggagtaaaaaaaggggatcgggttttggtttatctacctatgattccagaattagctattacaattcttgcatgtactcgaatcggtgcgatccattctgtcgtgttcggaggattttccccggaagcccttcaaagtagaatcgacgattgtaaaccaaagttagttgtcactgcggacggaggttttagaggtggaaagccaatcgagttgaaaaaaaacgtggaccttgctctcgaaaagtccaaagaaaaagtaaaaaccgtaatcgtagttcgtcgtactggaaacgagtccggtcttacttggaaagacggtcaagactactggtatcattttttgatgaacgatccggaactttctgcatattgtaagccggaagagatggatgctgaagatcctctttttatcctttatacttccggttcgactggaaaaccaaagggagttttacatactaccggaggttatctcttaggagctaatttaacatttcattatgtatttgatattaaacccgaagacacgtattggtgtaccgctgatattggttgggtaactggtcattcttatttagtttatggcccgttgtccaacggagcttcttccgtaatgtttgaaggggttccttcttatccggacgctgggagattttgggacgttatcgataaatacggtgtaaatatattttatacggcaccgactgcaattcgagctttgatgagagagggactaaatcatattcaaaaaagagatttaagttctcttcgtcttttgggttctgttggagaaccgatcaatccagaagcttgggaatggtattttaaaaatataggaaaaggaaaatgtcctatcgtggatacttggtggcagacagaaacaggatcgattatgattacagctcttccgggagcgattcctcagaagccaggttctgcgacgttgccattttttggagtacagcctgttttagtggataacgatggtaaggagattactgataagggagaagtttctggaaatctatgtatcaaaggtccttggccttcaatgatgcgcggagtttacggagatcctaaacgattttttgaaacttacttttctcagtttaaaggatattattttacaggagacggagcgcgtagagataaagacggatatttttggatcactggaagagtggacgatgtgattaacgtttccggtcataggatcggaagcgcagaagtggaaagtgcactcgttgaaaataaatctgttgccgaagccgctgtagtaggttttccacacgacatcaaaggtcagggaatttacgcctacgttacggttaaagaaggtgttacgactaacgatgttttgaaaaaagagcttatctcaactgtggaaaaaatgatcggtaaaattgcaaggccggacgtgattcattgggctccaggtcttccaaaaacgcgttctggaaaaattatgagaaggattttaagaaaaattgtttctggagaatttgaaggtttaggagatacttctactcttgcagatccatctgtggttcaaaaattgatcgaagataaaaagaaatttcacagttaa

SEQ ID NO: 1084 - protein, 661 aa, Leptospira interrogans [sequence omitted]

SEQ ID NO: 1085 - DNA, 2535 bp, Mus musculus
  CDS (15)..(2120)
cggaacttgatgcgatggggcttcccgaggagcggcgcaagagcggcagtggaagccgggctcgtgaggagaccggcgccgagggccgggtgcggggttggtccccgccgccggaggtcagacgctcggcgcacgtcccctctctgcagcgctaccgcgagctgcaccggcgttctgtggaggagccacgggagttttggggaaacattgccaaggaattttactggaaaactgcatgccctggcccattcctccagtacaactttgatgtgactaaagggaaaatattcactgagtggatgaaaggagcaactacaaacatctgctacaacgtgctggatcgaaatgtccatgagaaaaaacttggcgacaaagttgctttttactgggagggcaatgagccaggggagaccaccaagatcacataccgtgaactcctggtccaggtgtgtcagttcagcaatgttctccgtaaacagggcattcagaagggtgaccgagtggccatctacatgcctatgatcttggaacttgtggtggctatgctggcatgtgctcgccttggagctttgcactccattgtgtttgcaggcttctctgcagagtctctctgtgaaaggatcttggattccagttgctgcctgctcatcactacagatgccttctacaggggggaaaaacttgtgaacctgaaggagctggctgatgagtccttggagaagtgccgagagaagggcttcccagtgagatgctgcattgtggtcaaacatctggggcgggcagagctgggcatgaatgactcccccagccagtccccaccagttaagaggccatgtccagatgtccagatctgctggaacgaaggggttgacttatggtggcatgaactcatgcagcaggcaggagacgagtgtgagcctgagtggtgtgatgctgaggacccactcttcatcttgtacaccagtggctccacaggcaaacctaagggtgtggtgcacacaattggaggctatatgctctatgtggctacaactttcaagtatgtgtttgatttccacccggaagatgtgttctggtgcacagcagacatcggctggatcactggtcattcctatgtcacctatgggccactggctaatggtgccactagtgttttgtttgaggggatccccacatacccagatgaagggcgcttgtggagcattgtggacaaatacaaggtgaccaagttctacacggcaccaacagccatccggatgctcatgaagtttggagatgatcctgtcaccaagcatagccgggcatccctgcaggtgctgggcacagtaggtgaacccatcaaccctgaagcctggttatggtaccaccgggtagtaggttcccagcgctgccccattgtagacaccttctggcaaacagaaacaggtggccatatgctgacccctctccctggcgccacacccatgaaacctggttctgcttctttcccattcttcggtgtagcgctgcaatccttgaatgagtccggggaggagctggaaggggaagctgaaggttatctggtgttcaagcagccctggccagggatcatgcgcacagtctatgggaaccacacacggtttgagaccacctactttaagaagttccctggctactatgtgaccggagatggctgccgacgggatcaggatggctattactggatcacgggcaggattgatgacatgctcaatgtgtctggacatctcctgagtacagcagaggtggaatcggcacttgtggaacacgaggctgtcgcagaggcagctgtggtgggccaccctcatcctgtgaagggcgaatgcctctactgctttgttaccttgtgtgatggccataccttcagccccacactcacagaggaactcaagaagcagattagagaaaagattggccccattgccacaccagactacatccagaatgcacctggcttgcttaaaccacgctcagggaaaatcatgaggcgagttctccggaagattgctcagaatgaccatgacctgggggatacatctacggtggctgacccatctgtcatcaaccatctcttcagtcaccgctgcctgaccacccagtgaacaagactcttgtccaggatttccctgtgcttggctctccaaatttctgcccatccatcctgcccctcacacagtagtactagttgacagtactagttggttgaaactagggagacagttacctagactaccaggtagaagggacaggggtcaggtcaacctcacactgatatgctcctcgactagagaggtctccaagcccagaacagagacttgaacaccatgtccttaaccaaagtcagctcttcagagtgtaaatgagggtctgactggaagcagggcagcagctgtaattcttccagctctctccaaaagcaccagttcttatcttgggcctcactaggctttagaaatgagtttgtgagtctatgaataattatttttaaaaaaactttgttgtctctgttctgagtct

SEQ ID NO: 1086 - protein, 701 aa, Mus musculus
MGLPEERRKSGSGSRAREETGAEGRVRGWSPPPEVRRSAHVPSLQRYRELHRRSVEEPREFWGNIAKEFYWKTACPGPFLQYNFDVTKGKIFTEWMKGATTNICYNVLDRNVHEKKLGDKVAFYWEGNEPGETTKITYRELLVQVCQFSNVLRKQGIQKGDRVAIYMPMILELVVAMLACARLGALHSIVFAGFSAESLCERILDSSCCLLITTDAFYRGEKLVNLKELADESLEKCREKGFPVRCCIVVKHLGRAELGMNDSPSQSPPVKRPCPDVQICWNEGVDLWWHELMQQAGDECEPEWCDAEDPLFILYTSGSTGKPKGVVHTIGGYMLYVATTFKYVFDFHPEDVFWCTADIGWITGHSYVTYGPLANGATSVLFEGIPTYPDEGRLWSIVDKYKVTKFYTAPTAIRMLMKFGDDPVTKHSRASLQVLGTVGEPINPEAWLWYHRVVGSQRCPIVDTFWQTETGGHMLTPLPGATPMKPGSASFPFFGVALQSLNESGEELEGEAEGYLVFKQPWPGIMRTVYGNHTRFETTYFKKFPGYYVTGDGCRRDQDGYYWITGRIDDMLNVSGHLLSTAEVESALVEHEAVAEAAVVGHPHPVKGECLYCFVTLCDGHTFSPTLTEELKKQIREKIGPIATPDYIQNAPGLLKPRSGKIMRRVLRKIAQNDHDLGDTSTVADPSVINHLFSHRCLTTQ

SEQ ID NO: 1087 - DNA, 1956 bp, Mycobacterium bovis
  CDS (1)..(1956)
atgagtgagtccacccccgaagtctcctcgtcatacccgccgccagcgcacttcgccgagcacgcgaacgcccgcgccgagctttaccgcgaggccgaggaagaccggctggctttttgggccaagcaggccaaccgactgtcctggacgacgccgttcaccgaggtgttggactggtcggaggcgccgttcgccaagtggttcgtgggcggcgagctcaacgtcgcctacaactgtgtggatcgtcacgtcgaggccggccatggagatcgggtcgccatccactgggaaggcgagccggtcggcgaccggcgcacgctgacctattccgatctgcttgccgaggtatccaaagccgcgaacgcgctcaccgacctcggtctggtggccggtgaccgcgtcgccatctacctgccgttgatccctgaggccgtgatcgccatgctggcctgtgcccggctaggcatcatgcatagcgttgttttcggcgggttcaccgctgcggccttgcaggcccggatcgtcgacgcccaagccaagctgctgatcaccgcggacgggcagtttcggcgcggcaagccatcgcccctcaaggcggccgctgacgaggcccttgcagcgatccccgactgctcggtcgagcacgttctggtggtgcggcgcacgggaattgagatggcctggagcgagggccgcgacctgtggtggcaccatgtcgtcggctcagcttcaccggcacacaccccggagcctttcgattccgagcacccgctgttcctgctgtacacgtcaggcaccaccggcaagcccaaaggcattatgcacaccagcggcggctatctcactcagtgttgctacacgatgcgcaccattttcgatgtcaagccggacagcgacgtgttctggtgcaccgccgacatcggctgggtcaccggccacacctacggcgtctacggcccgctgtgcaacggagtcaccgaggttctctacgagggcacgccggatacccccgaccgacaccggcatttccagatcatcgaaaaatacggcgtgacaatctattacaccgcccccaccctcatccggatgtttatgaagtggggccgtgagatccccgacagccacgacctgtccagcctgcggctgctggggtcggtcggcgaaccgatcaaccccgaggcttggcgttggtaccgcgatgtcatcggcggcggacgcaccccgctggtagacacctggtggcagaccgagaccggctccgcgatgatctccccgctgcccggaatcgctgcggccaaaccgggttcagcgatgacgccgctgcccgggatctcggccaagatcgtcgacgatcacggtgatccgttgccaccgcacaccgagggcgcccagcatgttaccgggtacctcgtcctagaccagccgtggccgtcgatgttgcgcggcatctggggcgaccccgcgcggtattggcactcttactggtccaaattttccgacaagggctactacttcgccggggacggcgctcgcatagaccccgacggcgcgatctgggtactaggccgcatcgacgacgtgatgaacgtgtccgggcaccggatctcgaccgccgaggtggaatcggcgctggtcgctcactctggcgtggccgaggcggcggtggtcggggttaccgacgagaccacgacccaggccatctgtgcgttcgtcgtgctacgcgccaactacgccccccatgaccgcacagccgaagagttgcgcaccgaagtggctcgagtgatctcgcccatcgcacggccacgcgacgtccacgtagtgcccgaactacccaagactcgtagcggcaaaatcatgcgtcgactgctgcgcgacgtcgcggaaaaccgtgagcttggcgacacgtcgacgctgctcgatcccaccgtattcgacgcgatccgggccgccaagtag

SEQ ID NO: 1088 - protein, 651 aa, Mycobacterium bovis [sequence omitted]

SEQ ID NO: 1089 - DNA, 1968 bp, Nitrosomonas europaea
  CDS (1)..(1968)
atggccacgatcgaatcaattttgcacgaaaaccggatattcccccctgccagtgaatttgtcaggaacgccaatctatccggaagggaagcctatgaaactctgcgccaggaagccgagcatgactataccggcttctgggcgaaactcgcacaacagtacattgcctggcacaaacctttcacacgggttctcaatgacgccaacccacccttttataaatggttcgacgatggcgaactgaatatctcgtggaattgtctggatcgacacctggcaacccaggctgacaaaactgccatcatctttgaatctgacgcaggagaagtgaatcactgcagttatcgtgagttacaccgccaggtctgtcattttgccaatggactgaaatcacttggaatccgtcagggtgaccgtgtcgtcatctatatgcccatgcggattgaagctgtagttgcgatgcaggcatgtgcacgcattggtgccatccattcggtagtgttcggcggtttttcagcaaaaagtgtatacgagcgcatcatcgatgccggtgcatccgctgtaatcactgcagatgaacagatccgcggaggcaggtaccatccactgaaagcaaccgtagacgaagcactggcgatgggtgacacagccacggtccacagtgtcatcgttttccggcacaccggtaccggaattacctggcagccggaacgagaccactggtggcatgatctcattgccggacaaccggatgaatgcgagccagcatggatcaatgctgaacaccccctgtttacactgtatacctcgggctctaccgggaaaccaaaaggcgtgcagcattcctcggccggttatctgctcggggcagtgaccagcatgcagtgggtattcgactatcatgcagatgatgtattctggtgtactgcggatgtaggctgggttaccggacacagctatgtcgcctatggcccgcttgccatcggtgcaactcaggtgatttttgaaggaactccgactcatccacatgccgggcgattctgggaaatcatccagaaacacaggatcacgactttttatactgcccccactgccatccgctcactgatcaaactgggatccgatctgcccgcaaaatatgatctttcttcattgcgcctgcttggatcagtaggtgaaccgatcaacccggaagcatggatgtggtattacacggtcgtcggccagtcacgctgcccggtagtcgatacctggtggcaaaccgaaaccggttgtcacatgatcgctcctgctcccggtgccatatcgaccaaacccggttcctgcactctcccgctacccggtatcgatgccgcagtggtagatgaaactggccacccggtagaacagggaaaaggtggatttctggtgatcaagcgtcccttcccttcgatgttacgcaccttgtggaatgatcctgaacgattcagaaaaacttactttccaacagatattgccggtggtcgttattatcttgccggcgattcagctcatcgggatcaggatggttatttctggatcatgggacgagttgatgacgttctgaatgtctccggccatcgtctgggtaccatggaaatcgaatctgcactggtggcgcatcctctggttgccgaagcagctgttgtagggaaaccgcacgaaatcaagggagaagtggtcgtagcatttgtcacactgagagaaaaactgcctgatgaccaacgggctgctgaaattgctgcaactttacgtgaatgggttgccagcgagattggtgcaattgctcgccccgaagaaatccggtttggtgaaaacctgcccaaaacgcgttccggcaaaattatgcgacgcctcctgcgcgccctggcaagaggtgagaccattactcaagatgtctcaacactggaaaatccggtgatcctcgaacaactcagccagacggtatga

SEQ ID NO: 1090 - protein, 655 aa, Nitrosomonas europaea [sequence omitted]

SEQ ID NO: 1091 - DNA, 1962 bp, Pasteurella multocida
  CDS (1)..(1962)
atgccgcataattcgatgttaaaagaaaatcgtcttttcaaaccaacagatgaatttcgtcgccaagccaatatttcgggcttagaaacctatcaagcgctttgggaatttgctgacaaagattatctcacctattggagtgatctggcgcgtgaattaatcacttggaaaaagccttttatgcacatctttgatgattcagaagcgcctttctataaatggttttccgatggcactttaaatgtgtcctataactgtttagatcgccacttaccagacaaagcagataaaaccgcgctgatttttgaatcagattttggtcaagtccaactctatacttatgccaaattacataatcgcgtttgccgttttgctaatgcattgcgtgaattagggatcaaaaaaggggatcgggtcattatttatttacccatgctcgtggaagctgtgattgcgatgcaagcctgtgcccgtatcggtgcggttcattcagtggtatttggtggtttttctgccagcgcactacgtgatcggattgaagatgctgaagccaaattagtgattaccgcgaatgctggattacgtggtggtaaaattattccacttaaagagaccgtggatgaagctttagaaatgggctgtaaaacaattgaaaatgttatcgtctttcaccgagtgaatattgataccccgtggaaaaaagggcgtgatctctggtggaatgaacttactgcaaaccaacccgctttctgtgagccagaatggatgaatgcggaagacccgctatttattttatacacctcgggatcaacgggtaaaccgaaaggcattgtacacagtaccggtggttatttattaggtgcattaaattcgtttcgcaatgtgtttgataataagccaaatgatattttctggtgtacggcagatgttggctggatcacgggacattcttatgtctgctatggtccgctcgccaatggcgcaacacaggtaatttttgaaggcgtaccgacttatccagatccgggacggatttggcgaatgatacaacgtcacaaaattaatgtattttacacttcaccgactttaattcgttcattgacacgcttaggcgaccatatccccaataagtatgatttatcttcactacgcttacttggcagcgtgggcgaaccaattaacccatcggcttggatgtggttttatgaagtggttggtaaaagtcgctgtccaattgttgatacctggtggcaaacagaaaccggctcgattatgctcgcaccgatacccggcgtaaccgcaaccaaaccaggttcttgtaccctaccattaccgggtattatggctgaggtgttagatgaaaatggtcaaaaatgtgcggtagaacaaggcggtgcgctcgctattaaacgtccattcccatcgatgttacgcacaatttggaatgatcctgaacgttataaatctacctatttccctgcggaatatggcggcaaatactacatcgcaggcgataatgcccatcgcgataaagacgggtatttttggattcttggacgcacagatgatgtgcttaatgtctcaggacatcgacttggtaccatggaaattgaatctgcgctcgtcgccagtccaaaagtggctgaagcggcagtggtcggtaagccagatgagatcaaaggggaagcaattgttgctttcgtagtgctgaatgatttccgtccagaaggtgaagaagcacgtcagctggcagaagaactcaaagcctgggtatccaatgaaattggtaaaattgcccgtcctgaagatatccgctttgccgataacttaccaaaaacacgctcaggcaagattatgcgtcgtttattgcgatctatcgccaaaaacgaaatgatcacacaagatatttccaccttagaaaatccacagatcatcggtcaattacaacaacaatggctttaa

SEQ ID NO: 1092 - protein, 653 aa, Pasteurella multocida [sequence omitted]

SEQ ID NO: 1093 - DNA, 1926 bp, Gamma
  CDS (1)..(1926)
atgcctcgaaagctttatagcccaaaacattcaagtaatccttatataaaagactttgatgaatacaaagaactttacaagcaatccatagaagatccttctaaattttttaaaaatctagcaaacgaaaacataagctggatggaagacttcaaaacaacattcaataatcaatttaataatgcgaagtggtttgagggtggtaaaacaaatattagcttaaactgcatcgataggcatttagaaaatgatccaaacaaaatagcattaatatgggaaggagatgaccctgctgattctaaagaattgacctacaaagagctccatgacgaagtatgtaagttcgctaatgttttaaaagacctgggtgttcaaaagggctcgagagtttgtatttatatgcctatgatcattgagactgcgttcgcaatgcttgcttgcacgcgaataggtgccgtgcactctgttgtctttggtggcttttctccagaatcactcaaagatagaattcttgatgctgattgtaaaattgttataactgctgatgaaggtttaaggggcggcaaaaaagtgccacttaaatctaatgtagatgaggctcttctgggctgtccagatgttaaaaatacactggttataaaaagaactggtggcgaaattaattgggatgataaaaaagatgtttggtatgaagatcttgttaaagatgtttctaataagtgtgctccagagcctatggattccgaagaccctcttttcattctctatacatcaggctctacaggcaagccaaagggtgttctacatactactgcaggttatctattaggcgctcatattagtttcaaatatctttttggaataaggccagaggacaaatactggtgtactgcagatgtgggatggataacaggacatacttatatcttgtacggacctctttcaaatggagcaacaacacttatgtttgaaggagtgccaacctacccttcagcatcaaggtgttgggagatatgcgataagcatgacattagtattttttatacagctccaactgccattagagctctgatggcccaaggcgatgatcctgttaaaaagacaaaaagagatagcctaagaattttaggtacagttggagagccaattaatccagaggcgtgggattggtactacagtgttgtcggtaaatctaattgcgaggttattgatacttggtggcaaaccgaaactggttctgtacttatctctccaatagcgggtattactccaacaaaacctgggtcagcaactctgcccttcttcggagttaagccatctctctatgacgagcatggaaatacgctagaaggctctaatgcaggtaatttagttattgagcaatcttggcctagtcaaattagaagtatttatggtgatcaccaaagaatgatcgacacctattttggtatgtataaagatatttactttactggtgatggagccaggcgagacgaggatggatacttctggataaccggaagagttgatgatgttcttaatgtttctggccacagactaggtacagctgaaattgaaagtgctcttgtgctccaccctaaaattgctgaagcagctgttgttggttttgatcatccaattaaggggcaaggaatatatgcttttgttactttaatgataaatgaatcatttgatgacaactttagttatgaattgaaacaatttgttgctaaagaaattggagctattgcaaaaccagatttaattcaaaatgctccaggcttgcctaaaacaagatcgggaaaaattatgcgcagaattcttagaaagattgctgagaatgatctatctaatttaggagacacgacaacccttgccgatccttcggttgttgagtctcttatagaaaacaaacaaagtttatga

SEQ ID NO: 1094 - protein, 641 aa, Gamma [sequence omitted]

SEQ ID NO: 1095 - DNA, 1983 bp, Ralstonia solanacearum
  CDS (1)..(1983)
atggctggcattgaatctgttctgcaggaaacgcgtgtcttcgagccgcccgcgtccttcgtcaaacaggccaacatcgccggcatggacgcctaccgcaccctgtgcgccgaggccgagcgcgactacgaaggcttctgggcgcgtctggcgcacgagcacctgctgtggcacaagcccttctccaaggtcctcgacgaatccagggcgccgttctacacctggttcgaggacggtgagctcaacgcctcgtacaactgcctcgagcgcaacctggagaacggcaacgccgacaaggtcgccgtgatcttcgaggccgacgatggctcggtcgcgcgcatcacctatcgcgagctgcatgcccgcgtgtgccgcttcgccaatggcctgaaggcactgggcatccgcaagggcgaccgcgtggtgatctacatgccgatgtcgatcgagggcgtcgtcgccatgcaggcctgcgcgcgcatcggggcgacgcactcggtggtgttcggcgggttctcggccaagtcgttgcaggagcggatcgtcgacgtgggggccgttgccgtcatcacggccgacgagcagatgcgcggcggcaaggcgctgccgctcaaggccatcgccgacgaggcgctggcgatggagggcagcgaggccgtccgccacgtgatcgtctatcggcgcaccggcgccggcgtgaactgggtcgagggccgcgaccgcgccatggacgaagtcgaagccggccagcccgacacctgcgaggtcaccccggtcggcgccgagcatccgctgttcatcctctacacctcgggctcgaccggcaagcccaagggcgtgcagcacagcaccggcggctacctgctgtgggcgctgctgacgatgcagtggaccttcgacctgaagcccgacgatgtcttctggtgcaccgccgacatcggctgggtcaccggccacacctatatcgcgtatggcccgctcgccgccggcgccacccaggtggtgttcgagggcgtgccgacctacccgaacgccggccgcttctgggacatgatccagaagcaccgggtcaacaccttctacactgcgccgacggcgatccgctcgctgatcaaggccgccgaggccgatgagacgagccacccgaagcggtacgacctgtccagcctgcgcctgctgggcaccgtgggcgagccgatcaacccggaagcctggatgtggtaccacacgaacatcggcggcggccgctgcccgatcgtcgacaccttctggcagaccgagaccggcggccacatgatctcgccgctgccgggcgcgacgccgctggtgccgggctcatgcacgctgccgctgccgggcatcatggccgccatcgtcgacgagaccgggcaggacctgccggacgggcagggcggcatcctcgtcgtcaagcggccgtggccggcgatgatccgcaccatctggggcgatccggagcgcttccgcaagagctacttcccggccgaactgggcggcaagctctacttggccggcgacggctcggtgcgcgacaaggaaaccggctacttcaccatcatgggccgcatcgacgacgtgctgaacgtctcgggccaccgcatgggcacgatggagatcgaatcggcgctggtggccaacccgctggtggccgaggccgccgtggtgggccgcccggacgacatgaccggcgaggccatctgcgccttcgtggtgctcaagcgcacgcgcccgaacggggacgaggcccggcagatcgccaccgacctgcgcaactgggtcggcaaggagatcggcccgatcgccaagccgaaggacatccgcttcggcgacaacctgcccaagacgcgctcgggcaagatcatgcggcgcctgctgcgctcgatcgccaagggcgaggacatcacgcaggacacctccacgctggagaacccggccatcctggagcagctcaaggaagcccgctga

SEQ ID NO: 1096 - protein, 660 aa, Ralstonia solanacearum
MAGIESVLQETRVFEPPASFVKQANIAGMDAYRTLCAEAERDYEGFWARLAHEHLLWHKPFSKVLDESRAPFYTWFEDGELNASYNCLERNLENGNADKVAVIFEADDGSVARITYRELHARVCRFANGLKALGIRKGDRVVIYMPMSIEGVVAMQACARIGATHSVVFGGFSAKSLQERIVDVGAVAVITADEQMRGGKALPLKAIADEALAMEGSEAVRHVIVYRRTGAGVNWVEGRDRAMDEVEAGQPDTCEVTPVGAEHPLFILYTSGSTGKPKGVQHSTGGYLLWALLTMQWTFDLKPDDVFWCTADIGWVTGHTYIAYGPLAAGATQVVFEGVPTYPNAGRFWDMIQKHRVNTFYTAPTAIRSLIKAAEADETSHPKRYDLSSLRLLGTVGEPINPEAWMWYHTNIGGGRCPIVDTFWQTETGGHMISPLPGATPLVPGSCTLPLPGIMAAIVDETGQDLPDGQGGILVVKRPWPAMIRTIWGDPERFRKSYFPAELGGKLYLAGDGSVRDKETGYFTIMGRIDDVLNVSGHRMGTMEIESALVANPLVAEAAVVGRPDDMTGEAICAFVVLKRTRPNGDEARQIATDLRNWVGKEIGPIAKPKDIRFGDNLPKTRSGKIMRRLLRSIAKGEDITQDTSTLENPAILEQLKEAR

SEQ ID NO: 1097 - DNA, 1956 bp, Rhizobium loti
  CDS (1)..(1956)
atgtccgaggttcatgtccatcgcgtccagccggcgtggaagaagaatgcgctgatcgacaacgacacgtacctgaaatggtatgccgacagcatcaagaacccggacaagttctggggcaagcacggcaagcgcatcgactggttcaagcccttcagcaaggtcaagaacacctccttcgacggcaaggtctcgatcaaatggttcgaggacgggctgaccaatgtttcctacaactgcatcgaccgccatctgaagaagcgcggcgaccagacggccatcatctgggaaggcgacaacccctacgacgacaagaagatcacctacaacgagctctacgagcgcgtttgccggctcgccaatgtgatgaagaagcacggcgtcaagaagggcgaccgcgtcaccatctacatgccgatgatcccggaagccgcctatgcgatgctggcctgcacgcgtatcggcgccatccattcgatcgtcttcggcggcttttcgcccgatgcgctggccggccgcatcgtcgactgcgaatcgaccttcgtcatcaccgccgatgaaggcctgcgcggcggcaagtcgattccgctgaaggagaacaccgacaaggcgatcgacatcgccgcgaagaacttcgtcatggtgaagaacgtcctcgtcgtgcgccgcaccggcggcaaggtcggctgggcgccgggccgcgacctctggtatcacgacgaggtcgcgacggtgaaggccgagtgcaagcccgagaagatgaaggcggaagacccgctgttcatcctttatacctcaggctcgaccggcaagccgaagggcgtgctgcacaccaccgccggctatctcgtctatgcctcgatgacgcaccaatatgtcttcgactaccatgacggcgatatctactggtgcaccgccgatgtcggctgggtgacgggccacagctacatcgtctatggcccgctcgcgaacggcgccaccacgctgatgttcgagggtgtgccgaattacccctcgcagtcgcgcttctgggaagtcatcgacaagcacaaggtcaacatcttctacaccgccccgacggcgctgcgcgcgctgatgggcgccggcaacgacccggtgaagaagacctcgcgcaaatcactgcgtgtgctcggctcagtcggcgagccgatcaatccggaagcctgggagtggtatttcaacgtcgtcggcaacggcaaggtgccgatcgtcgacacatggtggcagaccgagaccggcggcatcctgatcacgccgctgccaggcgccaccgacctcaaggcaggctcggcgacgcggcccttcttcggagtcaagccgcagctagtcgacggcgaaggcaaggtgctggaaggagccgccgacggcaatctttgcatcaccgattcctggccgggccagatgcgcaccgtctatggcgatcacgaccgcttcgtgcagacctatttctccacctacaagggcaagtacttcaccggcgacggctgccgccgcgacgccgacggctactactggatcaccggccgcgtcgacgacgtcatcaacgtctccggccaccgcatgggcacggccgaggtcgaatcggcgctggtgagccatgacaaggtctcggaggccgccgtcgtcggctacccccacgacattaagggccagggcatttacagctacgtcaccttgatgaagggcgaggaaccgaccgaggatctgcgcaaggagctcatcgcccatgtccgcaaggagatcggcgccatcgcctcgcccgacaagatccagttcgcccctggcctgcccaagacacgttccggcaagatcatgcgccgcatcctgcgcaagatcgccgaggacgatttttctacccttggcgacacctcgacgctcgccgatccggccgtcgtcgacgacctcatcgccaaccggcagaacaagaagggctga

SEQ ID NO: 1098 - protein, 651 aa, Rhizobium loti
MSEVHVHRVQPAWKKNALIDNDTYLKWYADSIKNPDKFWGKHGKRIDWFKPFSKVKNTSFDGKVSIKWFEDGLTNVSYNCIDRHLKKRGDQTAIIWEGDNPYDDKKITYNELYERVCRLANVMKKHGVKKGDRVTIYMPMIPEAAYAMLACTRIGAIHSIVFGGFSPDALAGRIVDCESTFVITADEGLRGGKSIPLKENTDKAIDIAAKNFVMVKNVLVVRRTGGKVGWAPGRDLWYHDEVATVKAECKPEKMKAEDPLFILYTSGSTGKPKGVLHTTAGYLVYASMTHQYVFDYHDGDIYWCTADVGWVTGHSYIVYGPLANGATTLMFEGVPNYPSQSRFWEVIDKHKVNIFYTAPTALRALMGAGNDPVKKTSRKSLRVLGSVGEPINPEAWEWYFNVVGNGKVPIVDTWWQTETGGILITPLPGATDLKAGSATRPFFGVKPQLVDGEGKVLEGAADGNLCITDSWPGQMRTVYGDHDRFVQTYFSTYKGKYFTGDGCRRDADGYYWITGRVDDVINVSGHRMGTAEVESALVSHDKVSEAAVVGYPHDIKGQGIYSYVTLMKGEEPTEDLRKELIAHVRKEIGAIASPDKIQFAPGLPKTRSGKIMRRILRKIAEDDFSTLGDTSTLADPAVVDDLIANRQNKKG

SEQ ID NO: 1099 - DNA, 2016 bp, Rhodopirellula baltica
  CDS (1)..(2016)
atgcccaccgcgtccgcgtctgaatccagttccaaccaacccgaatcctcaaatgcgtcgggatcaatcgatcacgtgttggtggaagaccgtctgtttcacccgtcggccgagtttacgtccaaggcggtgatctcgacggaagaacagtacgaaaagctggccaccgcagctcgcgaaaatccagatgagttctggcgggcggaggctctggaacatctgcattggttcgaaccgtttggcaccgtatgcgattggcagccgcctcacgcgaaatggtttgtgaacggcaaaaccaacgcgtgctacaacagcgtcgacgctcacgtggcagccggtcgtggtgatcggaccgcgattatttgggaaggcgaaccggtcgaagacggtcagccacgcgaccagcggacgttgacgtatgccgaattgcaaaccgaagtcgccaagtgtgccgaaggattgacgcagttgggcattggtgtcggcgacgtcgtgagcatctacatgccgatgacacctgaactcgccgtcgcgatgctggcgtgtgctcgaatcggtgcgattcactcggtgattttcgcgggattcagcgcagaatcgattgcggagcggaacaatgacgcatcggccaagttggtcatcacttccgacggtctgtatcgccgcggcaaagtgctgccgttgaaagcgaccgtggacgaagcactcgaaaagtcaccaacggttgaaaagtgcttggtgcttcgccgaaccggggatgatgcaccgatgcaggaaggtcgcgacgtttggtggcatgatgtcgttgaaaaccaacctggcgagatggcggccaagccactcgacagtgaaacgccgttgttcatcctctacacctccggcagcaccggcaaaccaaagggcattctgcacaccaccgcgggatacaacttgtgggctaaacggacctttgagtgggtgttcgatcatcgcgaaggcgatgtttattggtgcacggcagattgcggttggatcaccggtcacagctatgttgtgtacggacctttgtcggctggcgcgacgtgtttgatgtacgaaggggcgccgaacttccccgccgaagatcgtttttgggacatcgtcgagcgtcacaaggtcagcattctttacaccgctccgaccgccgttcgagcgttcatcaaatggggcgacgaacatgtcgacaagcatgatttgtcgagtctgcgattgctaggaagtgtcggcgaaggcatcaatccagaagcttggatgtggtaccacaaaaagatcggtggcgagaaatgtccgatcgtcgacacgtggtggcaaaccgaaacgggcggcatcatgatgagtcccctgccagggatcacgcctacgaaaccgggatcttgcacccgtccattgcctggcgtggtgcccagcattgtcgacgaacttggcaactcggtggacagtgagcacggcggaaaactttgtatttcgcaaccctggcccggaatgttacgtgggatctacggcgatgaagaacgcttcgttgaacagtattggtctgacgtgccggacaagtatctgacgggtgacaacgctcgctgcgataccgatggctattactggatcatgggacgcatcgacgatgtgatcaatgtttccggccaccgcttgagcacgatcgaggtggagtccgcgttggtttctcaccccgatgtatgcgaagccgccgttgtgggacgtccgcatgatttgaagggacaagccatcgcggcatttgtcacttccaatgaccgcgggcacgacgacgaattccgaaacgagttgaagcagcacgtgcgaaagcagatcggcgcgttggctcagcccgatgacattcgcttcacggcggcgcttcccaagacccgaagtggcaaaatcatgcggcgattgctgcgagatgttgccgcgggacgcgaattggtgggcgacacatcgacgctggaagacctttcctcgctcgcgaaactgcgtgaggaagactag

SEQ ID NO: 1100 - protein, 671 aa, Rhodopirellula baltica [sequence omitted]

SEQ ID NO: 1101 - DNA, 1959 bp, Salmonella typhimurium
  CDS (1)..(1959)
atgagccaaacacataaacacgccattcccgccaacattgcggatcgttgcctgataaatccagagcagtatgagactaaatataaacagtctattaacgaccccgatacgttttggggcgaacagggaaaaattctcgattggatcacgccgtaccaaaaagtgaaaaacacctcctttgcgccaggcaatgtgtcgattaaatggtacgaggacggcacgctgaatctggcggcgaactgtcttgaccgccatttgcaggaaaatggcgatcgcaccgccattatctgggaaggcgatgacacgtcgcagagtaaacatatctcttatcgcgaactgcatcgcgatgtctgccgtttcgcgaatacgctgctggatctgggcattaaaaaaggcgatgtggtagcgatttatatgccgatggtgccggaagcggcggtggcaatgttggcctgcgcccgcatcggtgcggtgcattcggtgatcttcgggggcttctcgccggaagccgtcgccggacgcattatcgactccagctcgcggctggtgatcaccgctgacgaaggtgtacgtgccggacgcagtatcccgctgaaaaagaatgtcgatgacgcgctgaaaaacccgaatgtcactagcgttgagcatgtgatcgtcctgaagcgcaccggcagcgacattgactggcaagaaggccgcgacctgtggtggcgcgatttgattgaaaaagccagccctgagcaccagcctgaagcgatgaatgccgaagatccgctgtttatcctttatacctccggctccaccggcaagccgaaaggcgtgctgcacaccaccggcggctatctggtctacgccgcgaccacctttaagtatgtctttgattatcaccctggcgatatttactggtgtaccgccgatgtgggttgggtgacggggcacagctatctgttgtatggcccgctggcctgcggcgcgaccaccttaatgtttgaaggcgtgccgaattggccaacgcccgctcgcatgtgccaggtggtcgacaaacaccaggtcaacattctctataccgccccgacggccatccgcgcgctgatggcggaaggcgataaagccattgaaggcaccgaccgttcttcactgcgcattctgggttccgtcggcgagccgatcaatcccgaagcgtgggaatggtactggaagaagatcggcaaggaaaaatgtccggtcgtcgacacctggtggcagactgaaacaggcggttttatgatcacgccgctaccaggcgctatcgaactgaaagccggttccgccacccgtcctttctttggcgtacagcctgcgctggtggataacgaaggccatccgcaagaaggcgcgacggaaggcaatctggtcatcaccgattcctggccgggccaggcgcgcactctgttcggcgatcatgaacgttttgagcagacctatttctctacctttaagaatatgtatttcagcggcgacggcgcgcgtcgcgatgaggacggctattactggatcaccggtcgcgtggacgacgtgttaaacgtctccggccaccgtctgggtacggcggaaatcgagtcagcgctggtggcgcatccgaagatcgccgaagcggcggtggtgggtattccacacgctatcaaaggccaggcgatttacgcttatgtgacgctcaaccacggcgaggagccgtcgccagaactgtacgcggaggtgcgcaactgggtacgtaaagagattggcccactggcgacgccggacgtgctgcactggaccgactcactgccaaaaacccgttccggcaaaattatgcgccgcattttgcgcaaaatcgcggcgggcgataccagcaatctgggcgatacctcgactctcgccgatcctggcgtggtggagaaactgctcgaagagaagcaggccatcgcgatgccgtcataa

SEQ ID NO: 1102 - protein, 652 aa, Salmonella typhimurium
MSQTHKHAIPANIADRCLINPEQYETKYKQSINDPDTFWGEQGKILDWITPYQKVKNTSFAPGNVSIKWYEDGTLNLAANCLDRHLQENGDRTAIIWEGDDTSQSKHISYRELHRDVCRFANTLLDLGIKKGDVVAIYMPMVPEAAVAMLACARIGAVHSVIFGGFSPEAVAGRIIDSSSRLVITADEGVRAGRSIPLKKNVDDALKNPNVTSVEHVIVLKRTGSDIDWQEGRDLWWRDLIEKASPEHQPEAMNAEDPLFILYTSGSTGKPKGVLHTTGGYLVYAATTFKYVFDYHPGDIYWCTADVGWVTGHSYLLYGPLACGATTLMFEGVPNWPTPARMCQVVDKHQVNILYTAPTAIRALMAEGDKAIEGTDRSSLRILGSVGEPINPEAWEWYWKKIGKEKCPVVDTWWQTETGGFMITPLPGAIELKAGSATRPFFGVQPALVDNEGHPQEGATEGNLVITDSWPGQARTLFGDHERFEQTYFSTFKNMYFSGDGARRDEDGYYWITGRVDDVLNVSGHRLGTAEIESALVAHPKIAEAAVVGIPHAIKGQAIYAYVTLNHGEEPSPELYAEVRNWVRKEIGPLATPDVLHWTDSLPKTRSGKIMRRILRKIAAGDTSNLGDTSTLADPGVVEKLLEEKQAIAMPS

SEQ ID NO: 1103 - DNA, 1953 bp, Shewanella oneidensis
  CDS (1)..(1953)
atgagctcgcagtctctctacaaagtctccggcaatatcgctgccaatgcacttgtaaataacgatcaatataaaacaatgtaccaagagtcgattgtcaatccagagggtttctggagagagcacggcaaacggatcgattggataaagccatacactaaaatcaaaaaaaccacttttgacgatcataacttatcgattaactggttctatgacggcaccctaaacgcctcagctaactgcttagatcgccatctagctgcgcacagcgatcgcgtcgccattatttgggaaggcgataacgccaacgaacaacgtaaaattacctacggtgagctgcacactcaagtatgtaagtttgccaacgcgttacgcagccaaggcgtacgccgtggcgatatcgtcacgatttatatgccgatggtgccagaagccgccgtcgcgatgctggcctgtgctcgcattggtgctgtgcattccgttgtttttggtggtttctcacccgattctatcgcctcacgggttatcgatggtaaatccaaaatcgtcatcacctccgatgaaggtatgcgtggtggccgcgccattccgctcaaacgcaacatcgacgatgcgttaaaacatcccgatgtaaccagtgttgagaaagtcattgtacttaaacgtactggcggcaagattgactgggtagaaggtcgggatgtgtggtggcattcactggttgaaaccgcatccgaacattgcgctgtcgaagaaatgggcgccgaagatccgctgttcttactctatacctcaggttcaacgggtaatccaaagggcgtattgcacactactggcggttatatggtgtatgcctccatgacccacgaatatgtgttcgattacaaacccggtgagatttactggtgtacggccgatgtaggttggatcaccggtcactcttacatggtttatggtcctcttgcgaacggcgcaactgtgcttatccacgaaggggtacccaatcacccaagcccagcgcgtttaggcgagatgattgaccgccataaagtcaatattctctatactgcacctacgcttattcgcgcactgatggccgaaggtaagcaacattttgataagtacaatggcagctcactgcgcatcatgggctctgtaggtgaaccaatcaacccagaagcttggcgttggtaccatgaagtcatcggccacgagcattgcccgattgtcgatacttggtggcaaaccgaaactggcggtattttgatcaccccactgccaggcgcaaccgataccaaaccaggctcggcgactcgccccttctttggcgtgcaacccgcgcttgtggacaacatgggtaacattttagaaggtgcaaccgaaggtaacttagtgctgctcgactcatggccaggccaaatgcgtaccgtgtatggcgaccatgaaagattcgtactcacctattttaaaaccttccgcggcatgtatttcactggtgacggcgctcgccgcgatgaagatggttattactggatcacaggccgtgtggacgatgtgattaacgtctctggccacagattaggtaccgccgaagtcgaaagtgcgctggtttcacacgagctggtcgctgaggccgcagttgtgggctatccccatgatattaaaggccaagggatttatgcctatgtcaccttaacccgcggcacagaagaaagtgaagaacttcgccaagaactgcgccaatgggttcgtaaggaaattggcgccttagccacaccggatcttatccagtgggcgacaggattgcctaagacccgttctggcaaaatcatgcgccgcttcctgcgtaagattgccgctaacgaagtgaccaatttaggggatgcatcaacactggcagacccagccgtgattgaaaccttgattgagactcgcttaaatcgcaacgagtaa

SEQ ID NO: 1104 - protein, 650 aa, Shewanella oneidensis [sequence omitted]

SEQ ID NO: 1105 - DNA, 1959 bp, Streptomyces avermitilis
  CDS (1)..(1959)
atgagcaacgaaagcctggccaacctgctgaaggaagagcgcaggttcgcgccgcccgccgacctggcggcgaacgccaatgtcaccgcggaggcgtatgagcaggccaaggctgacaggctcggcttctgggccgagcaggcccgccggctgacctgggccaccgagccgaccgaaacgctggactggtcgaacccgccgttcgccaagtggttcaaggacggcaagctcaatgtcgcgtacaactgcgtcgaccgccacgtcgaggcgggccacggcgaccgcgtcgcgatccacttcgagggcgaacccggcgacagccgtgccatcacctacgccgagctcaaggacgaggtctccaaggccgccaacgccctgaccgagctgggagttcagaagggcgaccgggtcgccgtctacctcccgatgatccccgaggcggtcgtcgcgatgctcgcgtgcgcccgcatcggcgccgcgcactccgtcgtcttcggcggattctcggccgacgcgatcgcggcccgtatcaaggacgccgacgccaagctggtcatcaccgccgacggtggctaccggcgcggcaagccctccgcgctcaagcccgccgtcgacgacgccgtcagccgcggggacggggtcgagaaggtgctcgtcgtgcggcgtacgggccaggaagtcgcctggaccgagggccgcgacgtctggtggcacgagatcacggccaagcagtccgccgaacacacgcccgaggccttcgacgccgagcaccccctgttcatcctctacacgtccgggaccacgggtaagccgaagggcatcctgcacacctccggcggctacctcacccagacgtcgtacacccaccacgccgtcttcgacctcaagccggagaccgacgtctactggtgcacggccgacatcggctgggtgaccggccactcgtacatcacgtacgggccgctctcgaacggcgcgacgcaggtcatgtacgagggcacgcccgacaccccgcaccagggccgcttctgggagatcgtccagaagtacggcgtcaccatcctctacaccgcgcccaccgcgatccgtacgttcatgaagtggggcgacgacatccccgcgaagttcgatctgtcctccctccgggttctggggtccgtcggcgagcccatcaaccccgaggcgtggatctggtatcgcaagcacatcggcggcgaccgcacgccgatcgtggacacctggtggcagaccgagaccggcgcgatgatgatctcgccgctgccgggcgtcaccgagaccaagccgggctccgcccagcgcccgctgccgggcatctcggcgacggtggtggacgacgaggcccgggaagtacccaacgggggcggtggctatctcgtcctcaccgaaccgtggccgtcgatgctgcgcaccatctggggcgacgaccagcggttcctcgacacgtactggtcgcgcttcgagggcaagtacttcgccggtgacggcgcgaagaaggacgaggacggcgacatctggctgctcggccgcgtcgacgacgtcatgctcgtgtccgggcacaacatctcgacgaccgaggtcgagtcggcgctcgtctcccacccgtcggtcgccgaggcggccgtggtcggtgccgccgacgagacgaccgggcaggccatcgtcgccttcgtgatcctgcgcgggacggcgaacgccgaggacgacaacctggtcgccgacctgcgcaaccacgtcggcaccacgctcggcccgatcgccaagcccaagcggatcctcccggtggccgagctgccgaagacccgctccggcaagatcatgcggcgcctgctgcgcgacgtcgccgagaaccgggccctcggagacgtcaccaccctgaccgattcctcggtgatggatctgatccagtccaagctcccggcggcgccgagcgaggactga

SEQ ID NO: 1106 - protein, 652 aa, Streptomyces avermitilis [sequence omitted]

SEQ ID NO: 1107 - DNA, 1971 bp, Synechococcus elongatus
  CDS (1)..(1971)
atgagtcatcccacgattgagtcgattcttcaggaaaaccgccttttttatccccccgatgattttgtggccaaggcgcggattcattcccttgaggcctacaatgccctctacgaaaaggcaaaagctgatcccgccgctttttggggagagcttgcccagcaggagctagagtggtttcaaccttgggagcaagtactggattggcagccgcccaatgccaagtggtttgtcaatggcaaaatcaacatcacctacaactgcttggatcgccacctcaaaacatggcgcaagaataaagccgccttaatctgggaaggcgaacccggtgatagccgcactctcacctatgcccaactgcaccgtgaggtgtgccaatttgccaatgttctcaagcaactaggggtgaaaaagggcgatcgcgttggtatttatatgccgatgattccagaggcagccattgccatgttggcctgtgcgcgcattggtgcgccccactcagtggtctttggcggttttagtgctgaagccttgcgcgatcgcctcattgatgcccaagccaaactggttgttaccgctgacggtggctggcgtaaagatgccattgtacccctgaaagatcaggtggataaagcccttgcccatcaaggcgttcccagcgttgaaaatgtcttggtggtgcagcgcacccagcagccagtaaccatggtgcccggtcgcgatcactggtggcacgatttgcaaaagggagtcagtgccgactgtcctgccgaacctatggacagcgaggatttactctttatcctttacacctccggctccaccggcaaacccaagggtgttgtccacaccaccgcaggatacaacctctacacccatatcaccactcaatgggtctttgacctccaagataccgatgtctattggtgtaccgccgatgttggctggattacgggtcacagctatattgtctatgggccgctgtccaatggtgccaccaccctcatgtatgaaggggcaccccgcccctccaaccccggttgcttctgggatgtgattgagaagtatggggtgacgattttttacacggctcccactgctattcgtgccttcatcaaaatgggtgaacacttgccgcgggcgcgcgacctctcctccctacgccttttgggaaccgtgggtgaacccatcaaccccgaagcatggatgtggtactaccgcgtcatcggcggtgagcgctgcccgattgtggatacctggtggcaaacggaaaccgggggtcacatgatcacctcactgccgggggcacttcctatgaagcccggctctgctagcaagccctttccggggattctcgccgatgtcgtggaccttgagggcaacccggtcggcgtcaatgagggtggctatctggtcattcgtcatccttggccggggatgatgcgcacggtgtatggggatcccgatcgcttccgccgcacctattgggagcacattccccctcgcgatggtcagtatttttactttgccggcgatggtgcccgcagggatgaagatggctacttttgggtgatgggacgggttgacgatgtgatcaatgtctcgggccaccgcctgggcaccatggaaattgaatcggcattggtctcccaccctgccgttgctgaagccgccgttgtgggtaaacccgacgaggtcaaaggggaagagatcgttgcttttgtgattcttgaaggatcggcgacccccagtgatgccctccaacaggaattaaagcaacacgttgtcaatgaaattggtgccttggcacgtccagcggagattcgctttaccgatgccctacccaagacacggtcaggcaaaatcatgcggcggctgctccgttccctagccgcaggtcaagaggtagttggcgatacttcaaccttggaggatcgctcagtcctcgataggctgcgccaagggagttga

SEQ ID NO: 1108 - protein, 656 aa, Synechococcus elongatus [sequence omitted]

SEQ ID NO: 1109 - DNA, 1950 bp, Vibrio cholerae
  CDS (1)..(1950)
atgagtgaagcccatatttatccggtcaaacagaacatcaaagcgcatacgcatgccgataacgacacctatctggcgatgtatcaacagtccatcaaagatccggaaggcttttggagcgaacacggcaaaatcgtcgactggattaaacctttcaccaaggtgaaacacacctcttttgacccagggcacatcgatatccgctggtttgaagatggcacgttaaacgtttctgccaactgtattgatcgccatttggcgacccgtggcgaccaagtcgcgatcatttgggaaggcgacgacccgactcaagacaaaactctgacgtataagcaactgcaccaagaagtgtgccgttttgccaatgcgctgaaagagcaaggcgtacgcaagggtgatgttgtctgtatctacatgcctatggtgccagaagcggcggttgctatgttggcttgtacccgtattggcgcagtgcacactatcgtctttggtggcttctcgccagaagcactggctggacgcattatcgactcgaacgccaaattagtgatcactgccgacgaaggtgttcgcggcggccgcgccgtccccctaaagaaaaacgtcgatgaagcactgtgcaatccagaagtcaaaaacatcagtaaagtgatggttcttaagcgtactggcggcaatgtcgcttggcatgaacaccgtgacatttggtggcatgaagcaaccgcaaaagcctccgataattgtccaccagaagagatgaaagccgaagatccgctgtttatcctctacacctctggctcaaccggtaaaccgaaaggcgtattgcacaccactggcggttatttggtttatgcgactatgaccttcaaatatgtattcgactatcagcccaatgaagtgttctggtgtaccgctgatgtgggttggataacgggtcactcctatctggtgtatggcccattggcgaatggcgcaaaaaccattctgtttgaaggcgtgccaaactaccccaccaccgcacgcatgagcgaggtggtagacaagcataaggtcaatatcctttacactgcgccaacggcgatccgtgcgctgatggccaaaggtgatgaagcgattaaaggcactagccgtgacagcttgcgcattatgggctctgtgggtgaaccgattaacccagaagcgtgggagtggtactaccgcacgatcggtaacgaaaaatcaccgattgtggatacttggtggcaaaccgaaaccggcggtatcttgatcacgccactgccgggggcaacggcgttgaaaccaggttcggccacacgcccgttctttggtgtgcagccagcgttagtcgataacatgggcgaaattgtggaaggcgcaactgaaggcaacttggtactgctcgattcatggccgggtcaaatgcgcactgtgtatggcgatcacgaccgctttgaacaaacctacttctctacctttaaaggcatgtactttaccggtgacggcgcgcgtcgcgatgaagacggttactactggatcacaggccgtgtcgatgacgtactcaacgtttcgggtcaccgtatgggaacggcagaaattgaatccgcactggtggcattcaataagattgcagaagccgccgtggtcggtgttccacacgatatcaaaggccaagcgatttacgcttacatcacactcaatgatggggtgtatccgagcgctgaactgcataaagaagtgaaagattgggtacgcaaagagattggcgctatcgcgacaccggatgtcctacactggaccgatgcgctaccgaaaacccgttcaggtaaaattatgcgccgtattttgcgtaaaattgccaccggcgataccagtaacttgggggatacctcaacgctggccgatccaagcgtggttgaccgcctgattgcggaaaaagcccaacttaaataa

SEQ ID NO: 1110 - protein, 649 aa, Vibrio cholerae [sequence omitted]

SEQ ID NO: 1111 - DNA, 1953 bp, Vibrio parahaemolyticus
  CDS (1)..(1953)
atgagcgaagcccacgtttatccggtaaaagaaaatattaaaactcatacacacgcggataatgatacctacctagccatgtatcagcagtcggtcaccgatccagagggcttctggaacgagcacggcaaaatcgttgattggatcaaacctttcaccaaagtaaaaagtacctcattcgacaccggccacgttgacattcgctggtttgaagatggcacactgaacgtatctgcaaactgtatcgaccgtcatctcgcagaacacggcgacgacgtagcgatcatctgggaaggcgatgatccagcagacgacaaaacgctgactttcaacgaactgcacaaagaagtgtgcaagttctctaacgcattaaaagaccaaggcgtgcgcaaaggcgacgtggtgtgtttatacatgccaatggtgccagaagcagctatcgctatgctggcgtgtacacgcatcggcgcggtgcataccgtggtgtttggtggtttctcaccagaagcactgtctggtcgtatcatcgactctgacgcgaaagttgtgatcactgcggacgaaggtgtgcgcggtggacgtgccgttccactgaaaaagaacgtggacgaagcactcactaacccagaagtaaaaactatcagcaaagttgtggtactaaaacgcacaggcggcaatgtagattggcatgggcatcgtgatgtttggtggcacgaagcaaccgcaaaagtatctgatgtttgtccaccagaagagatgaaagcggaagacccactgttcatcctctacacatctggctcgacaggcaaaccaaaaggcgtacttcacaccacaggtggctaccttgtttatgcggccatgacgtttaaatacgtcttcgattaccaaccaggtgaaaccttctggtgtaccgcagacgtaggctggattactggccacacgtaccttatctacggaccacttgcgaacggcgcgaaaaccatcctgttcgaaggtgtaccaaactacccgaacacaagccgtatgagcgaagtggtcgataagcatcaagtgaacattctgtacaccgcaccaacagctattcgtgcgctgatggcaaaaggcaacgaagcggttgctggcacgtctcgctcaagccttcgcatcatgggctcagtgggcgaaccaatcaacccagaggcatgggagtggtactacaaaacgatcggaaacgaaaattcacctatcgtcgacacttggtggcaaacggaaaccggcggcatcttgattgctccacttccgggagcgacagatctcaaaccaggttcagcaactcgcccattcttcggcgtacaacctgcgctggttgataacatgggtaatatccttgaagacaccgtggctgaaggtaacttggtaattcttgattcttggccaggtcaaatgcgtacggtttacggcgaccatgaacgcttcgaacaaacctacttctcaacctttaagggcatgtacttcaccagtgacggcgcgcgtcgtgacgaagacggctattactggatcactggccgcgtcgatgacgtactgaacgtgtctggacaccgtatgggcaccgctgaaattgaatctgcgctagtcgcgcatcataaaattgccgaagccgcgattgttggtattccacacgacattaaaggccaagcgatctacgcctacatcacgctcaacgatggcgagttcccatccgcagagctgcacaaagaagtgaaagattgggtgcgtaaagagattggtccaattgcaacgcctgacgtactgcactggacagactctctaccaaagactcgttcaggtaagatcatgcgtcgtattctgcgtaagattgcgacaggtgatacaagcaacctaggcgatacttcaacgcttgccgatccaagtgtagtagacaaactcatcgccgaaaaagcagaactggtataa

SEQ ID NO: 1112 - protein, 650 aa, Vibrio parahaemolyticus
MSEAHVYPVKENIKTHTHADNDTYLAMYQQSVTDPEGFWNEHGKIVDWIKPFTKVKSTSFDTGHVDIRWFEDGTLNVSANCIDRHLAEHGDDVAIIWEGDDPADDKTLTFNELHKEVCKFSNALKDQGVRKGDVVCLYMPMVPEAAIAMLACTRIGAVHTVVFGGFSPEALSGRIIDSDAKVVITADEGVRGGRAVPLKKNVDEALTNPEVKTISKVVVLKRTGGNVDWHGHRDVWWHEATAKVSDVCPPEEMKAEDPLFILYTSGSTGKPKGVLHTTGGYLVYAAMTFKYVFDYQPGETFWCTADVGWITGHTYLIYGPLANGAKTILFEGVPNYPNTSRMSEVVDKHQVNILYTAPTAIRALMAKGNEAVAGTSRSSLRIMGSVGEPINPEAWEWYYKTIGNENSPIVDTWWQTETGGILIAPLPGATDLKPGSATRPFFGVQPALVDNMGNILEDTVAEGNLVILDSWPGQMRTVYGDHERFEQTYFSTFKGMYFTSDGARRDEDGYYWITGRVDDVLNVSGHRMGTAEIESALVAHHKIAEAAIVGIPHDIKGQAIYAYITLNDGEFPSAELHKEVKDWVRKEIGPIATPDVLHWTDSLPKTRSGKIMRRILRKIATGDTSNLGDTSTLADPSVVDKLIAEKAELV

SEQ ID NO: 1113 - DNA, 1944 bp, Xanthomonas axonopodis
  CDS (1)..(1944)
atggctgatgtttatcccgtcgatcccgcgttcgccgccgatgcgcgcgtgacgcgcgagcagtacgccgcgctgtaccgcgaatcgatccaacaccccgagcagttctggggcaaggccgcgcagcggctcgagtggttcaagcaacccacccagatcaaggacgtcagctacgcgctggacgacttccatatccgctggttcggcgatggcgagctcaatgccagcgtcaactgcctggaccgccagctggccacgcgcggcgacaagaccgcgctgctgttcgaacccgacagcccggacgcagcgtcgtacccggtgacctaccgcgagttgtacgagcgcgtctgcaagctgggcaatgcgctgcgcaacctgggcgtcaagaagggcgaccgggtcaccatctatctgccgatgatcgtcgatgctgccgtggccatgctcgcctgcgcgcgcatcggtgcggtgcactcggtggtgttcggcggctttgccgccaactcgatcgccgaccgcgtgatcgattgccagagcaagctgatcatcaccgccgacgaaggcctgcgtggcggcaagaagattccgctcaaggccaatgtcgatgcagcgctgaagattcccggcaccaatacggtggaaaccgtgctggtggtgcgtcataccggcggcgcagtggagatgcaggcaccgcgcgaccgctggttccatgatgtggtcgacggccagccggccgcgtgcgaacccgagcgcatgaacgccgaagacccgctcttcatcctctacacctccggctccaccggcaaacccaagggcgtgctgcacaccaccgccggctatctgttgtttgccagttacacgcatgaagtagtgttcgacctgcgcgaggacgacatctattggtgcactgcggacgtgggctgggtcactggccacagctacatcgtctacggcccgctcgccaatggcgccaccgcggtgatgttcgaaggtgtgcccaattacccgaacgtgtcgcgcttctgggaagtgatcgacaagcatcaggtcaccatcttctacaccgcacctactgcgattcgcgcgttgatgcgcgacggtgcggacccggtcaaaaagacctcgcgcaagagcctgcgcctgctcggcagcgtcggcgagccgatcaatccggaagcctggcgctggtattacgaggtggtcggcgacagccgttgcccgatcgtggacacgtggtggcagaccgaaaccggcggcatcctgatctcgccgctggccggcgcggtcgatctcaagccgggctcggccaccttgccgttcttcggcgtgcagccggcgctggtcgatgccgaaggcaagattctggaaggcgccaccgaaggcaacctggtgctgctcgattcctggccgggccagatgcgtagcgtgtatggcgaccaccagcgtttcatcgacacctacttccgcacctatccgggcagctacttcaccggcgacggctgccgccgcgatgccgacggctactactggatcaccggccgcgtggacgatgtgatcaacgtctccgggcaccgcatcggcaccgccgaagtggaaagcgcgctggtctcgcaccccaaggtcgccgaagcggccgtggtgggcttcccgcatgacgtcaagggccagggcatctatgcctacgtcaccctgatcgcggggcagaccccgagcgaggacctgcacaaggaattggtcagctgggtgcgcaaggagatcggcccgatcgcctcgcccgatcacctgcagtgggcgcccggcctgcccaagacccgctcgggcaagatcatgcgccgcatcctgcgcaagatcgccgaaaacgcccctgaccagttgggcgatacctccacgctggcagatccgtcggtggtggattcgctggtcaatgagcgtctggcgcgctga

SEQ ID NO: 1114 - protein, 647 aa, Xanthomonas axonopodis [sequence omitted]

SEQ ID NO: 1115 - DNA, 1944 bp, Xanthomonas campestris
  CDS (1)..(1944)
atggctgatgtttatcccgtcgatcccgcgttcgccgctgatgcgcgcattacgcgcgagcagtacgcaacgctgtaccgcgaatcgatcgaacaccccgagcagttctggggcaaggccgcgcagcggctggactggttcaagcaacccacccagatcaaggacgtcagcttcgcgctggacgacttccacgtgcgctggttcggcgacggcgaactcaatgccagcgtcaactgcctggaccgccagctggccacccgcggcgacaagaccgcgctgctgttcgaacccgacagcccggattcgccgtcctacccggtcacctaccgcgagctctatgagcgcgtgtgcaagctgggcaacgcgctgcgcaacctgggcgtcaagaagggcgaccgggtcaccatctatctgccgatgatcgtcgatgcggccgtggcgatgctcgcctgcgcgcgcatcggtgcggtgcactcggtggtgtttggcggctttgcggccaactccatcgccgaccgcgtgatcgactgccagagcaagctgatcatcaccgccgacgaaggcctgcgcggcggcaagaagatcccgctcaaggcgaacgtggacgcggcgctgaagatccccggcaccaacacggtcgaaaccgtgctggtggtgcgccacaccggcggtgcagtggacatgcaggccccgcgcgaccgctggttccatgacgtggtcgatggccagccggccgagtgcgaacccgagcgcatgaacgcggaagacccgttgttcatcctctacacctccgggtccacaggcaagcccaagggcgtgctgcacaccaccgccggctacctgctgtttgccagctatacgcatgaagtggtgttcgacctgcgcgaggacgacatctactggtgcaccgccgacgtgggctgggttaccggccacagctacatcgtctacggcccgctggccaacggcgccaccgcggtgatgttcgaaggcgtgccgaattaccccaacgtctcgcgtttctgggaagtgatcgacaagcaccaggtcaccatcttctacaccgcgcccaccgccatccgcgcgctgatgcgcgaaggcgaagcaccggtcaagaagacctcgcgcagcagcctgcgcctgctcggcagcgttggcgagccgatcaatcccgaagcctggcgctggtactacgaggtggtcggcgacagccgttgcccgatcgtggacacctggtggcagaccgaaaccggcggcatcctgatctcgccgctggccggcgcggtggacctcaagcccggctcggccaccctgccgttcttcggcgtgcagccggccctggtcgatgccgaaggcaagatcctggaaggcgccaccgagggcaacctggtgctgctggattcgtggccgggccagatgcgcaccgtctacggcgaccaccagcgcttcatcgacacctacttccgcacctacccgggtagctacttcaccggtgacggctgccgccgcgacgccgatggctactactggatcaccggccgcgtggacgacgtgatcaacgtctccggccaccgcatcggcaccgccgaggtggaaagcgcgttggtgtcgcacccgaaggtggccgaagcggccgtggtcggcttcccgcacgacgtcaagggccagggcatctacgcctacgtgaccctgatcgccggcgagacgcccagcgaagagctgcacaaggaactggtgagctgggtgcgcaaggagatcggcccgatcgcctcgccggaccatctgcaatgggccccgggcctgccgaagacccgctcgggcaagatcatgcgccgcatcctgcgcaagatcgccgaaaacgccccggatcagctgggcgatacctccacgctggccgatccatcggtggtggattcgctggtcaatgagcggctgacgcgctga

SEQ ID NO: 1116 - protein, 647 aa, Xanthomonas campestris
MADVYPVDPAFAADARITREQYATLYRESIEHPEQFWGKAAQRLDWFKQPTQIKDVSFALDDFHVRWFGDGELNASVNCLDRQLATRGDKTALLFEPDSPDSPSYPVTYRELYERVCKLGNALRNLGVKKGDRVTIYLPMIVDAAVAMLACARIGAVHSVVFGGFAANSIADRVIDCQSKLIITADEGLRGGKKIPLKANVDAALKIPGTNTVETVLVVRHTGGAVDMQAPRDRWFHDVVDGQPAECEPERMNAEDPLFILYTSGSTGKPKGVLHTTAGYLLFASYTHEVVFDLREDDIYWCTADVGWVTGHSYIVYGPLANGATAVMFEGVPNYPNVSRFWEVIDKHQVTIFYTAPTAIRALMREGEAPVKKTSRSSLRLLGSVGEPINPEAWRWYYEVVGDSRCPIVDTWWQTETGGILISPLAGAVDLKPGSATLPFFGVQPALVDAEGKILEGATEGNLVLLDSWPGQMRTVYGDHQRFIDTYFRTYPGSYFTGDGCRRDADGYYWITGRVDDVINVSGHRIGTAEVESALVSHPKVAEAAVVGFPHDVKGQGIYAYVTLIAGETPSEELHKELVSWVRKEIGPIASPDHLQWAPGLPKTRSGKIMRRILRKIAENAPDQLGDTSTLADPSVVDSLVNERLTR

SEQ ID NO: 1117 - DNA, 1944 bp, Xylella fastidiosa
  CDS (1)..(1944)
atgtctgacctgtacaccattgatccgatgttggccaaagatgcgcacatagaccgtgcgcactacaaaacgctttaccacgaatccatcgaacaaccagaagcattctggaacaaagtctcacagcgcctggagtggtttaaagcgccgaccaaaatcaaaaatgtcagctaccaactggaagatgttcacatccgttggttcgaagacggtgaactcaatgccagcgtcaactgcctggaccgccatctcaccttacgtggcgacaaaacagcactcctgtttgaacctgacgccccagacgccccatcctcacgcatcacctaccgtgaactatacgagcgcgtctgccaactcggtaacgcactgcgtcacctcggcatcgaaaagggcgaccgcgtcaccatctacttaccaatgattccagatgcagtcgtcgccatcctcgcttgcgcacgcattggagcaatccactccgtcgtcttcggcggttttgcagcaaactccattgccgaccgagtgaatgactgcggtagcaaactcatcatcaccgcagatgaaggcctgcgtggtggcagaaaaattccattgaaagccaatgtcgatgccgcattaaaaatccacggaacccagtccgtcgaaaccgtactcgtcgtgcgtcacaccggcagtacgatcaacatgcataccccgcgcgaccgctggttccatgacctcgtcgacatccaagcaaccgaatgcgccccagaacgcatgaacgctgaagactcccttttcatcctctatacctccggctccacaggcaaacccaaaggagtcctgcacaccaccggcggctacctggtgtacaccagctacactcatgaaaccgtgtttgacctacgcgaaaacgacatctactggtgcactgccgacatcggctggattactggtcacagctacatcgtttacggccccctagccaatggcaccaccgtcttgctgtttgaaggcaccccccactacccaaccgtgtcgcgcttctgggaagtgatcgacaaacatcacgtcaccctcttctacaccgcgccgaccgcaatccgtgcattgatgcgcgaaggcgacactcctgtaaaaaaaacctcccgcaaaagcttgcggttacttggcagcgttggcgaacccatcaaccccgaagcctggcactggtactacaccatcgttggcaacggacgttgtcccattgtcgacacctggtggcaaaccgagacaggaggaatcctcatcaccccactgatcggtgcaaccgaccttaaaccaggctcagtcaccctccccttcttcggcatacgccccgccctagtggataccaacggacaaacactggatggccccgcagcaggtaacctagtcctgctcgattcctggccgggtcaaatgcgtaccctctacggtgaccaccaacgttttatagacacttactttcgcacctaccccaatacttacttcaccggcgacggctgccgccgcgatgccgacggctattactggatcactggacgtgttgatgacgtcatcaacatctccggccatcgcatcggcaccgccgaaatcgaaagcacactcgtcgctcaccccaaagtggctgaagccgcggtcgtcggcttccctcacccgatcaaaggccagggcatctacgcatacgtgacattaattaccggcgagacacccagcgaagcactgcaccaagaactgctcacctgggtacgcaaagaaatcggagcaatcgccatacccgatcacgtgcaatgggcatccaacctccccaaaacccgctccggaaagatcatgcgccgcatcctgcgcaaaattgcagaaaacgcaccagaccaactcggtgacacctccacactagctgatccgtctatcgtcgacttattgctcaacgaacgactgaaacactga

SEQ ID NO: 1118 - protein, 647 aa, Xylella fastidiosa
MSDLYTIDPMLAKDAHIDRAHYKTLYHESIEQPEAFWNKVSQRLEWFKAPTKIKNVSYQLEDVHIRWFEDGELNASVNCLDRHLTLRGDKTALLFEPDAPDAPSSRITYRELYERVCQLGNALRHLGIEKGDRVTIYLPMIPDAVVAILACARIGAIHSVVFGGFAANSIADRVNDCGSKLIITADEGLRGGRKIPLKANVDAALKIHGTQSVETVLVVRHTGSTINMHTPRDRWFHDLVDIQATECAPERMNAEDSLFILYTSGSTGKPKGVLHTTGGYLVYTSYTHETVFDLRENDIYWCTADIGWITGHSYIVYGPLANGTTVLLFEGTPHYPTVSRFWEVIDKHHVTLFYTAPTAIRALMREGDTPVKKTSRKSLRLLGSVGEPINPEAWHWYYTIVGNGRCPIVDTWWQTETGGILITPLIGATDLKPGSVTLPFFGIRPALVDTNGQTLDGPAAGNLVLLDSWPGQMRTLYGDHQRFIDTYFRTYPNTYFTGDGCRRDADGYYWITGRVDDVINISGHRIGTAEIESTLVAHPKVAEAAVVGFPHPIKGQGIYAYVTLITGETPSEALHQELLTWVRKEIGAIAIPDHVQWASNLPKTRSGKIMRRILRKIAENAPDQLGDTSTLADPSIVDLLLNERLKH

SEQ ID NO: 1119 - DNA, 26 bp, artificial sequence
  Artificial sequence
  Primer
atgacaatcaaggaacataaagtagt

SEQ ID NO: 1120 - DNA, 28 bp, artificial sequence
  Artificial sequence
  Primer
ttatttctttttttgagagaaaaattgg

SEQ ID NO: 1121 - DNA, 1164 bp, Saccharomyces cerevisiae
  CDS (1)..(1164)
atgactgaattcgaattgcctccaaaatatatcaccgctgctaacgacttgcggtcagacacattcaccactccaactgcagagatgatggaggccgctttagaggcctctatcggtgacgctgtctacggtgaagatgttgacaccgttaggctcgaacagaccgttgcccgcatggctggcaaagaagcaggtttgttctgtgtctctgggactttgtccaaccagattgccatcagaactcacttgatgcaacctccatactctattctatgtgattacagggctcacgtttacactcacgaagccgctggactggcgatcttgtctcaagcgatggtggttcctgtggttccttccaacggtgactacttgaccttggaagacatcaagtcacactacgtcccagacgacggtgatattcacggtgcccccaccagattgatttctctggaaaacactttacacggtattgtttatccattggaagaactggtccgcatcaaagcttggtgtatggaaaatggtctcaaactacattgtgacggtgccagaatctggaatgccgctgcacaatctggcgtgccattaaagcaatatggggaaatcttcgactccatctccatctgtctatccaagtctatgggtgctcctattgggtccgtcttggttgggaaccttaagtttgtcaagaaggccacccatttcagaaaacaacaaggtggtggtattagacaatctggtatgatggctagaatggctcttgtaaacatcaacaacgattggaagtcccaattgctgtactcgcactctttggctcatgaattagccgaatattgtgaggcaaagggcatcccgctagagtctccagcagacaccaactttgtctttattaacctgaaggccgctagaatggacccagatgtccttgttaagaagggtttgaagtacaacgttaagctaatgggtggtagagtctcgttccactatcaagtcaccagagatactttggaaaaagtcaaattggccatctccgaggccttcgactatgctaaagaacatcctttcgactgtaacggacctacccagatttaccgtagtgaatccaccgaggtcgacgttgatggcaacgctatccgcgaaataaaaacctacaaatactga

SEQ ID NO: 1122 - protein, 387 aa, Saccharomyces cerevisiae
MTEFELPPKYITAANDLRSDTFTTPTAEMMEAALEASIGDAVYGEDVDTVRLEQTVARMAGKEAGLFCVSGTLSNQIAIRTHLMQPPYSILCDYRAHVYTHEAAGLAILSQAMVVPVVPSNGDYLTLEDIKSHYVPDDGDIHGAPTRLISLENTLHGIVYPLEELVRIKAWCMENGLKLHCDGARIWNAAAQSGVPLKQYGEIFDSISICLSKSMGAPIGSVLVGNLKFVKKATHFRKQQGGGIRQSGMMARMALVNINNDWKSQLLYSHSLAHELAEYCEAKGIPLESPADTNFVFINLKAARMDPDVLVKKGLKYNVKLMGGRVSFHYQVTRDTLEKVKLAISEAFDYAKEHPFDCNGPTQIYRSESTEVDVDGNAIREIKTYKY

SEQ ID NO: 1123 - DNA, 1041 bp, Pseudomonas aeruginosa
  CDS (1)..(1041)
atgaccgatcacacccaacagttcgccagcgacaactattccggcatctgccccgaagcctgggcggcgatggccgaagccaaccgcggccacgaacgcgcctatggcgacgaccagtggaccgcgcgtgcttcggactacttccgccagttgttcgagaccgattgcgaagtgttcttcgccttcaacggcaccgccgccaactccctggccctggctgcgctgtgccagagctaccacagcgtgatctgctcggagaccgcccacgtcgagaccgacgagtgcggcgcgccggagttcttctccaatggctccaagctgctgctggcgcagaccgaggtcggcaagctgaccccggcgtcgatccgcgacatcgctctcaagcgccaggatatccactatccgaagccgcgcgtggtgactctcacccaggccaccgaggtcggcacggtgtaccgcccggacgagctgaaggcgatcagcgccacctgcaaggagctcggcctgcacctgcacatggacggcgcgcgcttctccaacgcctgcgccttcctcggctgctcgccggcggagctgagctggaaggccggggtcgacgtgctctgcttcggcggcaccaagaacggcatggcggtgggcgaggcgatcctgttcttcaaccgcgacctggccgaggacttcgactaccgctgcaagcaggccggccaactggcctcgaagatgcgcttcctcgccgcgccctgggtcggcgtactgcaggacgatgcttggctgcgctacgccgatcacgccaaccgctgcgcgcggctgttggccgaactggtggccgacgttcccggcgtcagcctgatgttcccggtagaagccaacggcgtgttcctgcagctttccgagccggcgatcgaagccttgcgcgcgcgcggctggcgcttctacaccttcatcggtgaaggtggcgcgcgtttcatgtgttcctgggataccgatatcgagcgggtccgcgaactggcgcgggacatccgcctggtgatgggcgcctga

SEQ ID NO: 1124 - protein, 346 aa, Pseudomonas aeruginosa
MTDHTQQFASDNYSGICPEAWAAMAEANRGHERAYGDDQWTARASDYFRQLFETDCEVFFAFNGTAANSLALAALCQSYHSVICSETAHVETDECGAPEFFSNGSKLLLAQTEVGKLTPASIRDIALKRQDIHYPKPRVVTLTQATEVGTVYRPDELKAISATCKELGLHLHMDGARFSNACAFLGCSPAELSWKAGVDVLCFGGTKNGMAVGEAILFFNRDLAEDFDYRCKQAGQLASKMRFLAAPWVGVLQDDAWLRYADHANRCARLLAELVADVPGVSLMFPVEANGVFLQLSEPAIEALRARGWRFYTFIGEGGARFMCSWDTDIERVRELARDIRLVMGA

SEQ ID NO: 1125 - DNA, 1077 bp, Listeria monocytogenes
  CDS (1)..(1077)
atgacaaacacactaaaaaccagttaccaaaaaacaccttataaactaggcgggaatggcccgcgcaatgtgggtgttttaacagaagcacttcaaaatatagatgataatttagaaagcgatatttacggaaacggtgcagttattgaagactttgaaacaaaaatcgcgaaaattctcgggaaacaatctgcggtatttttcccaagtgggacgatggcacaacaaatcgcgttaaggatttgggctgaccggaaagagaatcggcgcgtagcatatcatccgctctctcatttggagattcatgagcaagatgggctaaaagaattgcagcaaatcacgccactattacttggtacagcgaatcagcttttgacaattgacgatattaaaagtcttcgcgagccagtttctagtgtgcttatcgaacttcctcaacgagaaattggtgggcaactacctgcttttgaagagcttgagaagatttcagagtattgccatgaacagggtatttcgttgcatctggacggggcgcggttatgggaaattacgccgttttatcagaagtctgcggaagaaatttgtgcgctgtttgatagtgtgtatgtgtcgttttataaagggattggcgggattgctggggcgattttggctgggaatgatgattttgtgcaagaggcgaaaatctggaaacgacggtatggcggggatttgattagtctgtatccatatattttgtccgcggattattattttgaaaaacggattgggaaaatggcggagtattttgaagcggcgaaaggattggctgagcgatttaattcgtgttcgggcgtgaagactgtgccggaagtgccggtttctaatatgtttcatgtttattttgagaattcggctgatgagattggggcaattttgacgaagattcaggatgaaactggcgttgggatttcggggtatttgcaggagaaatcagcggatgtttgtgcgtttgaggtttcggttggggatgcgtttgcggaaataccagcaaaaaatttagaactagtttttagatgtttggaaaaggaactttga

SEQ ID NO: 1126 - protein, 358 aa, Listeria monocytogenes
MTNTLKTSYQKTPYKLGGNGPRNVGVLTEALQNIDDNLESDIYGNGAVIEDFETKIAKILGKQSAVFFPSGTMAQQIALRIWADRKENRRVAYHPLSHLEIHEQDGLKELQQITPLLLGTANQLLTIDDIKSLREPVSSVLIELPQREIGGQLPAFEELEKISEYCHEQGISLHLDGARLWEITPFYQKSAEEICALFDSVYVSFYKGIGGIAGAILAGNDDFVQEAKIWKRRYGGDLISLYPYILSADYYFEKRIGKMAEYFEAAKGLAERFNSCSGVKTVPEVPVSNMFHVYFENSADEIGAILTKIQDETGVGISGYLQEKSADVCAFEVSVGDAFAEIPAKNLELVFRCLEKEL

SEQ ID NO: 1127 - DNA, 1053 bp, Agrobacterium tumefaciens
  CDS (1)..(1053)
atgttttttgcttcagacaattgggctggcgcccatccggccgtcaatgaacggctgtcgcgggaatccacgcgttttgccgccgcttacggcaccagcgaactcgatctctccatcgaaaaacgcttcaacgaaatcttcgaacgcgaagtcgcggttttttttgtcgccaccggcacggcggccaattcgctttcgctggccagcatcgcccgtcccggcggcctgaccttctgtcattcggaagcgcatgtgatcgaggacgaatgtggcgcgccggatttcttttcaggcatgcgcatggtcgccgtcgaggggcctgatggcaagatgctgccggagaacctcatcgagcgcattgcgcgctatccgcaggatgccgtgcaccatgggcgcgccgcagccattaccatgacgcaggcgactgaagccggcaccgtctatacgcttgatgaaatcgacgctatatccaaaatcgccaaggaaaacggcctgccgttgcatatggatggcgcgcggtttgccaatgcacttgccgcactcggcacgacgccggctgaaatgacctggaaacgcggcgtcgatgtcctgtctttcggcggcacgaaaaacggctgctggtgcgcggaagcgatcgtgtttttcgatccttcgcttgcccgggacttctccttcctgcgcaagcgtaccgcccagcttttttcgaaatcgcgtttcatcgccgcgcaattcgaagcctacctgcaggacgacctgtggctcggtctcgccggccacgccaatgccatggccaaccggctgcgcgccggtttcggctcactgaacagcgcccgcctggcatggccgacacaggccaacgaggttttcgccattctgcccaaggcagccgctgaagcggcgacgcaaaaaggcgcgaagttctatgactggctggagccgcgcgacatgccggaaaatgtcggcaaggacgaagtactgatccgcatggtcacgagctttgcgacgaccgaagctgatgtggacgaattcctgtcgatctgcgctgccgtctga

SEQ ID NO: 1128 - protein, 350 aa, Agrobacterium tumefaciens
MFFASDNWAGAHPAVNERLSRESTRFAAAYGTSELDLSIEKRFNEIFEREVAVFFVATGTAANSLSLASIARPGGLTFCHSEAHVIEDECGAPDFFSGMRMVAVEGPDGKMLPENLIERIARYPQDAVHHGRAAAITMTQATEAGTVYTLDEIDAISKIAKENGLPLHMDGARFANALAALGTTPAEMTWKRGVDVLSFGGTKNGCWCAEAIVFFDPSLARDFSFLRKRTAQLFSKSRFIAAQFEAYLQDDLWLGLAGHANAMANRLRAGFGSLNSARLAWPTQANEVFAILPKAAAEAATQKGAKFYDWLEPRDMPENVGKDEVLIRMVTSFATTEADVDEFLSICAAV

SEQ ID NO: 1129 - DNA, 1002 bp, Salmonella enterica subsp. enterica serovar Typhi
  CDS (1)..(1002)
atgattgatttacgcagtgataccgttacccgaccgggccgcgccatgctcgaggcgatgatgaccgccccggtcggggacgacgtatacggcgatgcccctaccgttaacgcccttcagcgctacgccgccgacctttccggtaaagaagcggcgctttttttacccaccggcacccaggccaatctggtcgcgctgcttagccattgtgaacgcggcgaagagtatatcgtcggtcagggcgcacataattatctctatgaagctggcggcgctgcggtgctcggcagcattcagccgcagcctattgatgccgccgcggacggtacgctgccgctggagaacgtagcggcgaagattaaagcggatgacatccacttcgcgcgcacgcgcttgctcagtctggaaaatacgcataacgggaaagtgctgccgcgcgcgtatctgaaagacgcctggacgtttacccgcgaacgtgggctggcgctgcacgttgacggcgcccgaatttttaacgcggtggttgcctacggctgtgagttaaaagagattacgcagtattgcgactcttttaccatctgcctgtcaaaaggtctcgggacgccggtcggttcgctgctggtcggcaaccgcgattacattaaacgcgcgacgcgctggcgtaaaatggtcggcggcggaatgcgtcaggccgggattctggcagcggccggactgtatgcgctgaagcataacgtggcgcgtctgcaagaggatcatgacaacgccgcctggctggcgcagcagcttcgcgaagcgggcgcggatgtcatgcgccacgaaacgaatatgctgtttgttcgcgttggcgaagcacaggccgccgcgcttggcggctatttgcgggaacggaatatcctgattaacgccgcgccgattgtgcgtctggtgacgcatctggatgtctctcgcgaacagcttgccgacgtcgtcgcccactggcgcgcctttttagcccgctaa

SEQ ID NO: 1130 - protein, 333 aa, Salmonella enterica subsp. enterica serovar Typhi
MIDLRSDTVTRPGRAMLEAMMTAPVGDDVYGDAPTVNALQRYAADLSGKEAALFLPTGTQANLVALLSHCERGEEYIVGQGAHNYLYEAGGAAVLGSIQPQPIDAAADGTLPLENVAAKIKADDIHFARTRLLSLENTHNGKVLPRAYLKDAWTFTRERGLALHVDGARIFNAVVAYGCELKEITQYCDSFTICLSKGLGTPVGSLLVGNRDYIKRATRWRKMVGGGMRQAGILAAAGLYALKHNVARLQEDHDNAAWLAQQLREAGADVMRHETNMLFVRVGEAQAAALGGYLRERNILINAAPIVRLVTHLDVSREQLADVVAHWRAFLAR

SEQ ID NO: 1131 - DNA, 1038 bp, Nostoc sp. PCC 7120
  CDS (1)..(1038)
atgaatagcaacttagaacagtttgccagtgacaactacgctggtatttgtccagaagcaatgaactatatgattcaagctaatcaaggtagtgcgccagcttatggaaatgatgaatggacgcaaaaagcaacagactattttcgagaactttttgaaattgattgcgaagtattttttacttttaacggtacagcagcaaattcattatctttagctgcactttgtcagtcatatcacagcgttatttgtcatgaaacagcacatatagaaacagatgaatgtggcgcaccagagtttgcgtctaatggttctaagttgttacttgctaaaggagaaaatggtaagttaacaccacaagagatagagtctgtaatcacgaagcgagttgatattcattatcctaaaccaaaagtaattagtattactcaagctacagaattagggactttatattctatagaagaacttttagatattaaaaaagttgcccaaaagtatcaattaaaaattcacatggacggcgcacgctttgccaatgcagttgcagccatgaataaaagtccggcagagatgagttggaaaagtggcgtggatgtattgtgtttttgtgggacaaaaaatggtatggcattaggggaagccattatattttttaatcgagcattggcagaagattttgattatcgttgtaaacaagcaggacaattagcatcaaaaatgcggtttatttctgcgccgtggttaggtttgttagaaactggtgcgtggttgaaaaatgctcaacacgcgaatcaatgtgcggcttatttagagaatgaattgttaaaaatagaaggtgtggaaattatgtttccccgtgaagtaaatgcagtttttgtcaaactgccagagcaagttatcaatggcttaaaagcaaacaattggttgttttatacttttattggggtaggtggtgtacgctttatgtgttcttggaataccaccaaaagcagaattgatgaattagttggagatattaaaacaggattgggctaa

SEQ ID NO: 1132 - protein, 345 aa, Nostoc sp. PCC 7120
MNSNLEQFASDNYAGICPEAMNYMIQANQGSAPAYGNDEWTQKATDYFRELFEIDCEVFFTFNGTAANSLSLAALCQSYHSVICHETAHIETDECGAPEFASNGSKLLLAKGENGKLTPQEIESVITKRVDIHYPKPKVISITQATELGTLYSIEELLDIKKVAQKYQLKIHMDGARFANAVAAMNKSPAEMSWKSGVDVLCFCGTKNGMALGEAIIFFNRALAEDFDYRCKQAGQLASKMRFISAPWLGLLETGAWLKNAQHANQCAAYLENELLKIEGVEIMFPREVNAVFVKLPEQVINGLKANNWLFYTFIGVGGVRFMCSWNTTKSRIDELVGDIKTGLG

SEQ ID NO: 1133 - DNA, 1032 bp, Thermotoga maritima
  CDS (1)..(1032)
atgatcgatctcaggtccgacaccgttacaaaaccaacagaagagatgagaaaagccatggcacaggctgaggtgggagacgatgtgtacggagaagatccaaccatcaacgaactcgaaaggctcgccgcagagacctttggaaaggaagcggctctctttgtaccctccggcaccatgggaaatcaagtgagcataatggctcacacccagaggggcgatgaagtgatactggaggcagacagccacatcttctggtacgaggtcggagccatggcggttctctccggagtcatgccccatcctgtacctggaaaaaatggagccatggaccccgatgatgtgaggaaggccataagacccagaaacatacacttccccagaacttcgctcattgccatcgaaaacacacacaaccgttccggtggaagagtggtcccgcttgaaaacataaaagagatttgcacgatagccaaagaacacggcataaacgttcacatagatggtgcgaggatcttcaacgcctcaatcgcttcaggtgttcccgtgaaggagtacgccgggtacgccgattccgtgatgttctgtctttcaaaaggtctctgcgcacccgtcggttcggtggttgtaggagacagggacttcatagaaagagcgagaaaggcgagaaagatgctcggtggagggatgagacaggcaggtgttctcgctgccgctggaataatcgccttgacaaagatggtagatcgattgaaagaagatcatgaaaacgccagatttctcgccctgaagttgaaagaaatagggtactccgtgaatcccgaagatgtgaaaaccaacatggtgattctgaggaccgacaacctgaaggtgaacgcgcacgggttcatagaagcgctcagaaacagcggggtgctcgcgaacgccgtatccgacacggagatcagactggtaacccacaaagacgtttcaagaaacgacatagaagaggctctgaacatcttcgaaaaactcttcagaaaattctcctga

SEQ ID NO: 1134 - protein, 343 aa, Thermotoga maritima
MIDLRSDTVTKPTEEMRKAMAQAEVGDDVYGEDPTINELERLAAETFGKEAALFVPSGTMGNQVSIMAHTQRGDEVILEADSHIFWYEVGAMAVLSGVMPHPVPGKNGAMDPDDVRKAIRPRNIHFPRTSLIAIENTHNRSGGRVVPLENIKEICTIAKEHGINVHIDGARIFNASIASGVPVKEYAGYADSVMFCLSKGLCAPVGSVVVGDRDFIERARKARKMLGGGMRQAGVLAAAGIIALTKMVDRLKEDHENARFLALKLKEIGYSVNPEDVKTNMVILRTDNLKVNAHGFIEALRNSGVLANAVSDTEIRLVTHKDVSRNDIEEALNIFEKLFRKFS

SEQ ID NO: 1135 - DNA, 978 bp, Bacillus halodurans
  CDS (1)..(978)
atgagacaagcgatggcttcagcagaagtaggggatgatgtataccaagaggacccaagtgttcgcgcattagaagaacgagcagcggaattaacaggaaaagaagcagcgctgttcgtaacgagcggaacacaaggcaatcaggtggcagttgcgacacactgcgtccctggccaagaaatcattttagaagcggatgcccatctgttcctatatgaaggtggtgcagcttccgcttttgctggtgtacaaacatacgcgattaaagggacaaacggaatgttctctgccgagcaagtaaggagagctatacgtccagaagacgaccacgatcctgagacgggtttaatctgtttagaaaacacgcataatcgagcgggaggagccgttatttcaccagaacagatgaaggatgtctacgacgtggcaaaggcgtacaatgtacctgttcatctagatggagcgcgcctatttcacgcggctgttgccctaggtcagccactatcctccttcactcagtacacggacaccgttcaactgtgcctttcgaaagggcttggggcgccagtaggctccattcttgccggtgatgcttcatttattaaacgggcaagaaaatggcgaaaacgccttggtggcgggtggcgacaagccggtgtgttagctgcacctgcccttctcgccttaaatacaatggtcgagcgtttggcggaagaccacgagcatgctaaaatactcgcagacggtattcacgggttgcatggattaaccgtcattcacaaagttgaaacaaatatcattctcgttgacgtagaaaaaacaggccatacgagtgatacatttgtagaggcgttaaaagagcgcggcgtgcgagccgttgcctttgatccatacattgttcggtttgtcacccataaagacgtatctaaggacgatgtcatgcaaacattggctgttctttcctcgcttgtttcatga

SEQ ID NO: 1136 - protein, 325 aa, Bacillus halodurans
MRQAMASAEVGDDVYQEDPSVRALEERAAELTGKEAALFVTSGTQGNQVAVATHCVPGQEIILEADAHLFLYEGGAASAFAGVQTYAIKGTNGMFSAEQVRRAIRPEDDHDPETGLICLENTHNRAGGAVISPEQMKDVYDVAKAYNVPVHLDGARLFHAAVALGQPLSSFTQYTDTVQLCLSKGLGAPVGSILAGDASFIKRARKWRKRLGGGWRQAGVLAAPALLALNTMVERLAEDHEHAKILADGIHGLHGLTVIHKVETNIILVDVEKTGHTSDTFVEALKERGVRAVAFDPYIVRFVTHKDVSKDDVMQTLAVLSSLVS

SEQ ID NO: 1137 - DNA, 1032 bp, Caulobacter crescentus
  CDS (1)..(1032)
atgacccagaccgcgccccgctacgatttcgcctccgacaacgtcgccggcgccatgcccgaggtgatggaggcgttgatcgcggccaatgcggggacggcctcgggctacgggaccgaccatgtcagccgtgccgccgccgatcgcatccgcgcggcgctggacgccgacgcgcaggtgcggttcacagcctcgggcacggcggccaacgccttcgccctgaccctgctggcccagccgcacgaggcggtgctggcccacgagcacgcccacatctgcacggacgagaccggcgcgcccggcttctttggccagggcgtcggcctgatcggcttgccgggcgcatcgggcaagatggagttggcggccctggaggcggcgctggcccagccggacgtctcgtaccgccagccggcggcggccttgtcgctgaccaccgccaccgagtacggcacggtctattcggaagaccacctgcgggccctgatcgcgccggtgaaggccaagggctatggcgtccacctggacggcgcgcggctggccaatgcggtcgcggggggctttgacctgaaaagcatcgccaagatgggcgtcgacatcctggtgatgggcggcaccaaggccggctcgacgcccaccgaggccgtggtgttcctgaaccccgaccacgccaaacgcctggacgcgcgcctcaagcacgccggccagctgatctcgaagggacgcttcctggccgcgccgtggctgggcctgctgggcgagaacggtcagaccgccccctgggccgcccgcgccgcccacgccaacgccatggcgcagaagctggccgcgctgatgcccgtcccgatcaagcacccggtcgaggccaacggcatcttcgtcgagatggacgaacttgccctggaacgcctgcgcggcgaaggctggttcgtctatcgcttcctggacggcacggtgcgcttcatgtgctcgtgggccacgacgcccgagatggtcgaggatctgggcgcggcgctgaagcgagtggcttag

SEQ ID NO: 1138 - protein, 343 aa, Caulobacter crescentus
MTQTAPRYDFASDNVAGAMPEVMEALIAANAGTASGYGTDHVSRAAADRIRAALDADAQVRFTASGTAANAFALTLLAQPHEAVLAHEHAHICTDETGAPGFFGQGVGLIGLPGASGKMELAALEAALAQPDVSYRQPAAALSLTTATEYGTVYSEDHLRALIAPVKAKGYGVHLDGARLANAVAGGFDLKSIAKMGVDILVMGGTKAGSTPTEAVVFLNPDHAKRLDARLKHAGQLISKGRFLAAPWLGLLGENGQTAPWAARAAHANAMAQKLAALMPVPIKHPVEANGIFVEMDELALERLRGEGWFVYRFLDGTVRFMCSWATTPEMVEDLGAALKRVA

SEQ ID NO: 1139 - DNA, 1035 bp, Clostridium acetobutylicum
  CDS (1)..(1035)
atgttacgttttgattgtgattatactgagggggctcatcctaaaatattagaaaagcttactataacaaattatgagcaaacaataggctatggggaagatcaatattgtagggaagctgcaaatataataaaaaagaagtgccaacgtgaagacgtcgatgttcactttttagttggaggaactcaaacgaaccttacagtaatttcagctgccttgagacctcaccaaggagcaattactgtagtaactggccatgttaatactcatgaaactggtgctatagaagccactggtcacaaggtgcttactgtggaagataatgaaggtaagataactgctaaacaaatacaggatgtttatgatagtcattttaatgatgcatctcctgaacatactgtacaacctaagatggtttatatttcaaatccaactgaaataggaacaatatattcaaaagcagagcttacttctataagtgaaacctgcagaaaaaataatcttatactatacatagatggtgctagattaggttatgggctttgtgctgaaaataatgacttagatttaccaactatagctaagctttgtgatgctttctatattggaggtaccaaggtaggtgctttattcggagaagctttagttatatcaaatgaagctttaaaatctgattttcgttatttcattaaacaaaaaggtggtctattagcaaaaggaagacttcttggtatacaattcgcaactttatttgaagatgacttatattttgagatatcaagacatgcagacgaaatggcaacattaataaatgatgcctgcaataaaaagggatattcatttctatctccttcaactactaatcagcagttccctgtattacctgattctgtcattgaaaagttaaaacaagattatgccttttcttattgggaacgagttaataaaactcacagtgctgttcgcttctgtacaagttgggcaactaaaaaagaatccgtattaaaattagtagacgctatcgagaaggcttaa

SEQ ID NO: 1140 - protein, 344 aa, Clostridium acetobutylicum
MLRFDCDYTEGAHPKILEKLTITNYEQTIGYGEDQYCREAANIIKKKCQREDVDVHFLVGGTQTNLTVISAALRPHQGAITVVTGHVNTHETGAIEATGHKVLTVEDNEGKITAKQIQDVYDSHFNDASPEHTVQPKMVYISNPTEIGTIYSKAELTSISETCRKNNLILYIDGARLGYGLCAENNDLDLPTIAKLCDAFYIGGTKVGALFGEALVISNEALKSDFRYFIKQKGGLLAKGRLLGIQFATLFEDDLYFEISRHADEMATLINDACNKKGYSFLSPSTTNQQFPVLPDSVIEKLKQDYAFSYWERVNKTHSAVRFCTSWATKKESVLKLVDAIEKA

SEQ ID NO: 1141 - DNA, 1074 bp, Halobacterium sp. NRC-1
  CDS (1)..(1074)
atgtttcggaacgtaactggcaggatgacttttccccctgggggtggatgtcccgatatgatcgatcttcgcagcgacacggtcgccacgccgaccgaggcgatgcgggaggcggcggcccaggcgccggtcgagcacggcgagcacggcgacgacccggctgtggcagcggtggaggcgacggcggcggacgccgtgggcatggcggcggccgtgttcgtgccgagccggacgatggccaaccagatcggggcgcaggtacacaccgcccgcgggcagagcgtgctcgtcgagcgggccagccacagctacaggcgggggagtggcgggctggcacaacacgctggggtgcaggcgcgcgcgttcgacggcggcgaaaccggctgtccgaccgcggagcaggtggccgccgagatcacggcggggggtgggcaccggccggaggtcgggctggcgtgcgtggagatcgcacacggggcgaacggcggggtcgtggcgcccgtcgacgcgttcgcggctgccgtggagaccgcccacgagcacgacgtgccggtgcacgtcgacgggacgcgggtgttcagcgctgcgaccgcgctgggcgtcgatgcggcgacgctgctgtcgccggtggattcggtggcggtgtgtctgtcgacggggctgggcgcacccatgggggcagtgctggcgggaagcgagtcgttcgtggcgtcggcccgacgcgtgcaggagatgtacgggggtgggatgcagcaggcgggcatggtcgcggcggcgggcgtgtgcgccctggagaaccgccaccgagtccacgaggaccacgagaacgcgcgtcggttggccgaggacctcgacgcgctcccgggggtgacggcggccgaaccggacacgaacatcgtgctcgcggacacccgggacgcggacgtgaccgccgcggcgttcctggcgggctgtgaggaagagggcgtgctggggacggcggacggcgagtacacggtccggttctgcacgcaccgcgacatcgggggcgcggacatcgcggcggtggtgtcggcggcgggggaggtcgtctaa

SEQ ID NO: 1142 - protein, 357 aa, Halobacterium sp. NRC-1
MFRNVTGRMTFPPGGGCPDMIDLRSDTVATPTEAMREAAAQAPVEHGEHGDDPAVAAVEATAADAVGMAAAVFVPSRTMANQIGAQVHTARGQSVLVERASHSYRRGSGGLAQHAGVQARAFDGGETGCPTAEQVAAEITAGGGHRPEVGLACVEIAHGANGGVVAPVDAFAAAVETAHEHDVPVHVDGTRVFSAATALGVDAATLLSPVDSVAVCLSTGLGAPMGAVLAGSESFVASARRVQEMYGGGMQQAGMVAAAGVCALENRHRVHEDHENARRLAEDLDALPGVTAAEPDTNIVLADTRDADVTAAAFLAGCEEEGVLGTADGEYTVRFCTHRDIGGADIAAVVSAAGEVV

SEQ ID NO: 1143 - DNA, 1029 bp, Deinococcus radiodurans
  CDS (1)..(1029)
atggtgtgcgccatgacccgcccgccgctgatcgccgacctgcgctccgataccgtcaccaagcccactcccgccatgcgtgaggcgatggcgaccgccgaggtgggcgacgacgtgtacggcgaagaccccaacgtcaacgccctgcaaaacgaactcgcgcacctgaccggctttgaggcggggctgttcatgccgtcgggcagcatgacgaaccaggtggcgattgccgtgcacacccgccggggcgaggaagtcatctgcgccgagggcagccacatctacgagtgggaactggggatgatggcggccttttccggcgtggtcccgcgcttcgtgcccgcgccgctgggcgtgccgagtcccgaggacgtgcggctggcggtccgccgcagcgtccaccagtcacccaccggcctgatcagcctggaaaacacccacaacaaggccgggggcacggtgattccgctggcggtgctgcggcagatgcgggcagtggccgacgccgagggactgcctctgcacctcgacggagcgcgggtcttcaacgccgccgtgaagctgggcgtggacgtgcgcgaaatcacgcgctgcttcgacaccgtgagcgtgtgcctgagcaaggggctcggcgccccggtgggcagcgtgctgctcggctcggcgcaggcgattcggcaggcgcaccgctaccgcaagatgctcggcggcgggatgcggcaggccggaattctggcggcggcggcgcgggtggccctgcgcgaaggtccggcgcgactggccgacgaccacttgcggacccggcgattggcccgcgccctggtcgaagcgggctacgacgtggacctcgccgccgtgcagaccaacatcatctatgcccggctgcccgaggccgagcgccgcgccgctgcctgggccgaacagggcgtgctcgccagtgcgctggggcacgactcggtgcgcttcgtgctgcaccatcaggtggacgacgacgcgctcgaccaggccattcgcgtgctgaccgcctga

SEQ ID NO: 1144 - protein, 342 aa, Deinococcus radiodurans
MVCAMTRPPLIADLRSDTVTKPTPAMREAMATAEVGDDVYGEDPNVNALQNELAHLTGFEAGLFMPSGSMTNQVAIAVHTRRGEEVICAEGSHIYEWELGMMAAFSGVVPRFVPAPLGVPSPEDVRLAVRRSVHQSPTGLISLENTHNKAGGTVIPLAVLRQMRAVADAEGLPLHLDGARVFNAAVKLGVDVREITRCFDTVSVCLSKGLGAPVGSVLLGSAQAIRQAHRYRKMLGGGMRQAGILAAAARVALREGPARLADDHLRTRRLARALVEAGYDVDLAAVQTNIIYARLPEAERRAAAWAEQGVLASALGHDSVRFVLHHQVDDDALDQAIRVLTA

SEQ ID NO: 1145 - DNA, 1032 bp, Vibrio cholerae
  CDS (1)..(1032)
atgcggatatttgtaggagaaaatatggactttcgatcggataccgttacccaaccgaccgacgcgatgcgtcaagcgatggcacaagcccctgtgggtgacgatgtgtatggcgatgaccccaccgtcaacgagttagaacagtgggcggcagagcgccatggctttgaagccgcgctgtttaccacctcaggcactcaagccaatttgttaggtttactcgcccattgcgaacgcggcgacgaatatttgtgtggccagcaagcccataactatcgttatgaagctggcggtgctgccgtacttggctctatccagccacaaccgattgacaatgaaccggatggcacactcgatttcgccaaactcaaagccgcgatcaaaccggatgatgcacattttgcccgcaccaaactgctcagcttggaaaacaccatcaatggtaaagtgcttccactcagttatttggcgaaggcgcgcgagtttgttgatcaacatggtttgcaactgcaccttgatggggctcgggtctacaacgcggcggtcgcactggatgtggatgtcaaagagatcgcgcaatattttgattcgatcaccgtgtgtctatccaaaggcttagccgcgccagtcggttcgttactgctcggttccaaggactttattgccaaagcgagacgctggcgaaaaatggtcggtggcggtatgcgccaagcgggcattttagccgcagcggggaaattggcgctcaccgagcaagtcatgcagctcaagaccgatcatgataatgctcgtcatctggctttggggctgaatgctttaccggggttttcggttaataccgaatgggtacagaccaatattgtgtttgctaaattggactcgacagtcgatatccagtccatcgcccagcaacttcgccaagcaggcattatcatcaccgcgggtaatccagtgcgcttcgtgacacataaagacattacacgtcaggatattgataccctactcgccaaactgcgcaccttactggcttga

SEQ ID NO: 1146 - protein, 343 aa, Vibrio cholerae
MRIFVGENMDFRSDTVTQPTDAMRQAMAQAPVGDDVYGDDPTVNELEQWAAERHGFEAALFTTSGTQANLLGLLAHCERGDEYLCGQQAHNYRYEAGGAAVLGSIQPQPIDNEPDGTLDFAKLKAAIKPDDAHFARTKLLSLENTINGKVLPLSYLAKAREFVDQHGLQLHLDGARVYNAAVALDVDVKEIAQYFDSITVCLSKGLAAPVGSLLLGSKDFIAKARRWRKMVGGGMRQAGILAAAGKLALTEQVMQLKTDHDNARHLALGLNALPGFSVNTEWVQTNIVFAKLDSTVDIQSIAQQLRQAGIIITAGNPVRFVTHKDITRQDIDTLLAKLRTLLA

SEQ ID NO: 1147 - DNA, 1280 bp, Escherichia coli
  CDS (61)..(1062)
gcgaaaacaaactggctaaggtaaaaagggtggcatttcccgtcataataaggacatgccatgattgatttacgcagtgataccgttacccgaccaagccgcgccatgctcgaagcgatgatggccgccccggttggggacgacgtttacggagacgaccctaccgttaatgctctgcaggactacgcagcagagctttccggtaaagaagccgccatttttctgcctaccggcactcaggccaacctggtcgctctgctcagtcactgcgaacgcggcgaagagtatattgtcggtcaggccgcgcataactatctgtttgaagccggtggcgcggcggtgctgggcagtattcaaccgcaacccatagacgcggctgccgacggcacgctaccgctggataaagtggcgatgaaaatcaaacccgacgatatccatttcgcccgcaccaaattactcagtctggaaaacacccacaacggcaaagtgttgccgcgggaatacctgaaagaagcatgggaatttacccgcgagcgcaatctggcgctgcatgttgacggtgcgcgcatctttaatgccgtggtggcttacggctgcgaactgaaagagatcacgcaatattgtgattcgttcaccatttgcctgtcgaaaggtcttgggacgccagtcggttcattactcgtcggtaatcgtgattacattaaacgtgccattcgctggcggaaaatgacaggtggcgggatgcgccagtccggcattctggctgccgccgggatatatgccctgaaaaataacgttgcgcgcttgcaggaagaccacgacaacgctgcctggatggcggagcagctgcgtgaagcaggcgcggatgtgatgcgtcaggacaccaatatgctgtttgttcgcgtcggggaagaaaatgctgccgcgttaggcgaatacatgaaagcgagaaacgtgctgattaacgcctcgccgattgtccgcctggtgacgcatcttgacgtctcgcgcgaacaactggcggaagtcgccgcccactggcgtgcattcctggcgcgttaaggagagagacgtgccgcaacgcattttagttctcggtgccagtggctacattggtcagcatctggtgcgcacactcagccagcaagggcatcagatcctggcggcggcacgtcatgtcgacaggcttgcaaagctgcaactggcaaacgtcagttgccataaagtcgatctcagctggccggataacctaccggccctgttgcaggatatcgatacgg

SEQ ID NO: 1148 - protein, 333 aa, Escherichia coli
MIDLRSDTVTRPSRAMLEAMMAAPVGDDVYGDDPTVNALQDYAAELSGKEAAIFLPTGTQANLVALLSHCERGEEYIVGQAAHNYLFEAGGAAVLGSIQPQPIDAAADGTLPLDKVAMKIKPDDIHFARTKLLSLENTHNGKVLPREYLKEAWEFTRERNLALHVDGARIFNAVVAYGCELKEITQYCDSFTICLSKGLGTPVGSLLVGNRDYIKRAIRWRKMTGGGMRQSGILAAAGIYALKNNVARLQEDHDNAAWMAEQLREAGADVMRQDTNMLFVRVGEENAAALGEYMKARNVLINASPIVRLVTHLDVSREQLAEVAAHWRAFLAR

SEQ ID NO: 1149 - DNA, 1005 bp, Pseudomonas aeruginosa
  CDS (1)..(1005)
atgcctgtcatcgacctgcgcagcgacaccgtcacccagcccaccgccggcatgcgcgaagccatggccgcggccgaactgggcgacgacgtctatggcgaggaccccacggtcaaccgcctggaggccgaactggcggcgcgcctgggcttcgccgcggcgctcttcgtaccgaccgggaccatgagcaacctgctcggattgatggcccactgcgagcgcggcgacgaatacatcgtcggccagcaggcgcatacctacaaatacgagggcggcggtgccgcggtgctgggctcgatccagccgcagccgatcgacggcgaggccgacggatcgctccacctggacaaggtcgcggcggcgatcaaggccgacgatttccacttcgccaggacccgcctgctggccctggaaaacaccatgcagggcaaggtgctgccgctcgactacctggccgcggcgcgcgccttcactcgcgcgcgtggcctggccctgcacctggatggcgcgcgcctgtacaacgcggcggtgaagctgggcgtagacgccagcgagatcacccgacacttcgactcggtgtcggtgtgcctgtccaagggcctcggtgcgccggtgggctcggtgctttgcggcagcgtcgaactgatcggcaaggcccgccgctggcgcaaaatggtcggcggcgggatgcgccaggccggcctgttggcggctgccggactgtacgccctcgaccaccaggtggcacgcctggccgacgaccacgccaacgccgcgcgcctgggcgacgggctgcgcgaactgggctatgcggtggagccggtgcagaccaacatggtctacgtcgatgtcggcgagcgggcggtcgcgctgcgcgacttcctcgccgagcgcggggtgcggatcagcgcggcggcgcgtttgcgcctggtcacccacctggacgtttccgccgagtccataggacaagtactggatgccttcgcggcctttcgtcgctcataa

SEQ ID NO: 1150 - protein, 334 aa, Pseudomonas aeruginosa
MPVIDLRSDTVTQPTAGMREAMAAAELGDDVYGEDPTVNRLEAELAARLGFAAALFVPTGTMSNLLGLMAHCERGDEYIVGQQAHTYKYEGGGAAVLGSIQPQPIDGEADGSLHLDKVAAAIKADDFHFARTRLLALENTMQGKVLPLDYLAAARAFTRARGLALHLDGARLYNAAVKLGVDASEITRHFDSVSVCLSKGLGAPVGSVLCGSVELIGKARRWRKMVGGGMRQAGLLAAAGLYALDHQVARLADDHANAARLGDGLRELGYAVEPVQTNMVYVDVGERAVALRDFLAERGVRISAAARLRLVTHLDVSAESIGQVLDAFAAFRRS

SEQ ID NO: 1151 - DNA, 1080 bp, Leishmania major
  CDS (1)..(1080)
atgtcaacgccaaggacgacggcgacggcggccaagccgaagccgtacagctttgtgaatgactacagcgtgggtatgcatcccaagattttagatctgatggcgcgcgataacatgacgcagcacgcgggctacggacaggacagccactgcgcgaaggcggcacgcctgatcggcgagttgcttgagcggccggacgcggacgtccattttatttccggcggcacgcagacgaacctgatcgcctgcagtctggcgctacgcccgtgggaagctgtcatcgcaacgcagctgggccacatcagcacgcacgagacgggcgccattgaggcgacggggcacaaagtcgtcacggcgccgtgcccggacggtaagctgcgcgttgccgacatcgagagcgcactgcacgagaatcgctcggagcacatggtgatacccaaactcgtctacatctccaacacgacggaggtaggcacgcagtacacgaagcaggagttggaggacatctccgcctcatgcaaggagcacggcctgtacctcttcctcgacggcgcccgcctcgcctcggccctaagcagccctgtgaacgatctgacgttggcagatatcgctcgcctgacggacatgttctacattggcgccacgaaggccggtggcatgtttggcgaagcgctcatcatcttgaatgacgccctaaagccgaacgcgcgccacctcatcaagcagcgcggcgccctcatggcgaagggatggctgctcggcatccaattcgaggtgctcatgaaggacaacctcttcttcgagctcggcgcccactcgaacaagatggccgccatcctcaaggctggactggaggcgtgcggcatccgacttgcctggccatccgccagcaatcagctcttcccgatcctggaaaacaccatgatcgcagagctgaacaacgacttcgacatgtacaccgtcgagcccttgaaagatggcacgtgcatcatgcgactctgcacgtcgtgggcgacggaggagaaggagtgccatcgttttgtggaggtgctgaagcgcctcgtcgcgtcaacggcctaa

SEQ ID NO: 1152 - protein, 359 aa, Leishmania major
MSTPRTTATAAKPKPYSFVNDYSVGMHPKILDLMARDNMTQHAGYGQDSHCAKAARLIGELLERPDADVHFISGGTQTNLIACSLALRPWEAVIATQLGHISTHETGAIEATGHKVVTAPCPDGKLRVADIESALHENRSEHMVIPKLVYISNTTEVGTQYTKQELEDISASCKEHGLYLFLDGARLASALSSPVNDLTLADIARLTDMFYIGATKAGGMFGEALIILNDALKPNARHLIKQRGALMAKGWLLGIQFEVLMKDNLFFELGAHSNKMAAILKAGLEACGIRLAWPSASNQLFPILENTMIAELNNDFDMYTVEPLKDGTCIMRLCTSWATEEKECHRFVEVLKRLVASTA

SEQ ID NO: 1153 - DNA, 1302 bp, Caenorhabditis elegans
  CDS (1)..(1302)
atgatatctagacacttcactgtattaacagcactcaacttgcaaaccaagatcaaaatttgcattcgaaacttttcaattagaggagcaatgactaaagttaatggaaattcaaatggaaatggaatatctgcttccacagatcttcttgatacgccatctgcatatactcaaaagtccaataaaactcatacttcaatcgacttgagatcggatacggtcaccgttccatcggttgaaatgagaagagcaatggcagaagctattgttggtgatgatgtctatggagaagatacaacaactaatagacttgagcaaagatgtgccgagttatttggaaaagaagctggactgtttgttaccagtggaacaatgggaaatcttttggcaatcatggcacattgtcaacgtggcgaggagataatcgtcggacggtacaatcatattcatcgttgggaacagggaaattatgctcaatttgctgggatctctgccacgacattggaggtgaagcccgatggaacgatggatttgaatgacatcgaacaggcgatccgtgtcaagggaggttatgttcaaattaaagatgagagttgtgatgacttggaagtgacgagtatacccgattgtcacatgccagcttcaaagctgatttgcatcgagaacacccataattatactggaggaaaagcgcttccaattgagtggatgagatctgtaaagcagcttgctgaacgtcgtgatctcaaagttcatatggatggagctcggatctataatgcagcagttgcctccaactgttccgtcagcaaaatcgcctcgttcgccgacactgtccaaatgtgtttctccaaaggactcggtgctccagttggatcaattgttgtaggaccgaaagatttcattgatcgtgctagacacagtcgtaaggctttgggtggaggatggagacaaagtggaattctcgctgctgctgcacatattgctcttgatcatgccgatgcaacaattcgagctgatcatgaaagagctaaaacattggcaagaatgattaatgacgctactccagaagaatttagaacgaaggtctttgctgcggaaaaagacatcaccaacatggttcttgttcattgccaaaatggagttacagttcaacagctcactgatttcttccaaaaacacgatattctggcaatgacttttgacgcaagacgtattcgaatggttctcaactggaatgtgagcgatgagaatttggaaactatcgtcgaagtctacaagaagtttttgaaacaattgtga

SEQ ID NO: 1154 - protein, 433 aa, Caenorhabditis elegans
MISRHFTVLTALNLQTKIKICIRNFSIRGAMTKVNGNSNGNGISASTDLLDTPSAYTQKSNKTHTSIDLRSDTVTVPSVEMRRAMAEAIVGDDVYGEDTTTNRLEQRCAELFGKEAGLFVTSGTMGNLLAIMAHCQRGEEIIVGRYNHIHRWEQGNYAQFAGISATTLEVKPDGTMDLNDIEQAIRVKGGYVQIKDESCDDLEVTSIPDCHMPASKLICIENTHNYTGGKALPIEWMRSVKQLAERRDLKVHMDGARIYNAAVASNCSVSKIASFADTVQMCFSKGLGAPVGSIVVGPKDFIDRARHSRKALGGGWRQSGILAAAAHIALDHADATIRADHERAKTLARMINDATPEEFRTKVFAAEKDITNMVLVHCQNGVTVQQLTDFFQKHDILAMTFDARRIRMVLNWNVSDENLETIVEVYKKFLKQL

SEQ ID NO: 1155 - DNA, 1212 bp, Streptomyces coelicolor
  CDS (1)..(1212)
atgagcgacacggcagaacaggaagagcgggcggcaccggccagaccggaagcgccgccggcccaggacgagccggcggagcagcgcgacaggcgcagccgggagcggcgcgtggccgccctccgcggcgcgcggcgcgtactcgcccgccccggcttcgtcacgaccctgcgcgagcgcatcgccctgctcgacggggccgaggagctgtacgacctcgacgagccctccgacatgtacggcaacggcgtcgtcgaggccctggaggagaggaccgccgccctgctcggcacggaggccgccgccttcttcccgaccgggaccatggcccagcaggtggccctgcgctgctgggcgggccgcaccggcaacccggtcgtcgccctgcacggtctcggccatcccgagcagcacgagcgcaacgccttcagccgggtcggcggcctgcacccggtacggctgaccgacgcgcccaggccgccgaccgccgacgaggtgcgcggcttcgaggagccgttcggggcgctgatgctggaactgccgctcagggaggccggatacctgctgcccacctgggaggagctcaccgaggtcgtcgaggccgcccgggagcgcgacgcggtggtccatttcgacggggcccggctgtgggagtgcaccgtccacttcggccgccccctggccgagatcgcgggcctggcggacagcgtgtacgtctcgttctacaagtccctcaagggctacggcggcggcgccctggccggtccccggacgctggtcgaggaggcgaaggcctggcggcaccggtacggcggccaggtgttccagcagttccccacggcgctgtccgccctggcaggcctggagcgcgagctgccccgactgccctcgtacgtggcccacgcgcgcgtggtggcggccgcgctgcgcgcgtcactcgcggcggcgggactgccgtgggcgcgggtgcaccccgcggtgccgcacacgcacgagttccaggtctggctgccctgcgaccccgacgcggcgagtgaggccgcgctccggcaggccgaggagaccgggacgatgctgttctcccagccctgggacgcgggcggccccgggatcgccctcaccgaggtctcggtgggcgagtcgggactggagtggacggccgacgacgtgcgggcggcggtcgccgacttcgccgcccggctgacggcgtga

SEQ ID NO: 1156 - protein, 403 aa, Streptomyces coelicolor
MSDTAEQEERAAPARPEAPPAQDEPAEQRDRRSRERRVAALRGARRVLARPGFVTTLRERIALLDGAEELYDLDEPSDMYGNGVVEALEERTAALLGTEAAAFFPTGTMAQQVALRCWAGRTGNPVVALHGLGHPEQHERNAFSRVGGLHPVRLTDAPRPPTADEVRGFEEPFGALMLELPLREAGYLLPTWEELTEVVEAARERDAVVHFDGARLWECTVHFGRPLAEIAGLADSVYVSFYKSLKGYGGGALAGPRTLVEEAKAWRHRYGGQVFQQFPTALSALAGLERELPRLPSYVAHARVVAAALRASLAAAGLPWARVHPAVPHTHEFQVWLPCDPDAASEAALRQAEETGTMLFSQPWDAGGPGIALTEVSVGESGLEWTADDVRAAVADFAARLTA

SEQ ID NO: 1157 - DNA, 1131 bp, Schizosaccharomyces pombe
  CDS (1)..(1131)
atgagcggatccgttacttctacgactaccgaaacaagattatgcccttccaaccaagggagcgctaaaaagtatcgtccttggaatgatttccgtagtgacactttgactgttcctaccgatgaaatgcgtcgcatcatgtatgaggcctctgatggtgattgcgtttatgaggaagatgaggatactagaaagttggaagtttatgttgcaaagttgactggtaaggaagctgctttgttcgtaacatctggtactcaaggtaatcagttgtgtattcgtagtcatttgcatcaacctcctcatagtatcatttgtgatgatcgcgcccatatttataactgggaagcgggtgcaattggtttgtttacgcaagctattgttcgtcctatttctccaaaaaataatgtatatattactgccgaggaaattgagaacaagcttatcctgggaaatgatattcacttttcacccactgggttgatttgtttagaaaatactattaaaggtgctgtcgttccattggatgaagtggctcgtatatctggtttagctaaggctcacaagatccccctgcattgcgacggtgctcgcttatgggatgctgctgttgcttccaacgtttcaattaaggagtactgctcttactttgattccgttagtctttgcctaagcaaaggtcttgcggctcctgttggtagcattattgtgggaccacgagactttattgctaaagccaaatggttccgtaaggcttatggtggtggattgagacaatctggtatgcttgctgctgcaggattatactcaattcagcataactttcctttgttgaagcaggtccataaatatgctattgaagtcgccgaatacgcagaatctcttggaattgagcttgaagttcccactcaaagtaacatggtgacattggccaatatcaacgttgctattctttgcgatgaagccaaaaagtctggaatcattttaatgggacctcgtatcgtgtttcatattcagatcactcctgatgctgtcgagattttgaagaacgttttacgtcgcacagttgagcgtcaagcagttgaaacccatattgttgccaaacctggtgagttttgtgtcggctattaa

SEQ ID NO: 1158 - protein, 376 aa, Schizosaccharomyces pombe
MSGSVTSTTTETRLCPSNQGSAKKYRPWNDFRSDTLTVPTDEMRRIMYEASDGDCVYEEDEDTRKLEVYVAKLTGKEAALFVTSGTQGNQLCIRSHLHQPPHSIICDDRAHIYNWEAGAIGLFTQAIVRPISPKNNVYITAEEIENKLILGNDIHFSPTGLICLENTIKGAVVPLDEVARISGLAKAHKIPLHCDGARLWDAAVASNVSIKEYCSYFDSVSLCLSKGLAAPVGSIIVGPRDFIAKAKWFRKAYGGGLRQSGMLAAAGLYSIQHNFPLLKQVHKYAIEVAEYAESLGIELEVPTQSNMVTLANINVAILCDEAKKSGIILMGPRIVFHIQITPDAVEILKNVLRRTVERQAVETHIVAKPGEFCVGY

SEQ ID NO: 1159 - DNA, 1017 bp, Aeromonas jandaei
  CDS (1)..(1017)
atgcgctatatcgatttacgaagtgatacggtcacccagcccacggatgccatgcgtcagtgcatgctccatgccgaggtcggggatgatgtttatggggaggatccgggcgtcaacgcgttggaagcctatggcgccgacctgctgggaaaagaggctgcgctgttcgtgccatccggcaccatgtccaacttgctggcggtgatgagccattgccagcgtggggaaggggctgtgctgggctcggcagcccacatctatcgctatgaggcgcagggttctgctgtgctggggtctgtggccctgcaacctgtgcccatgcaggctgatggctcgctggcgctggcggatgtgcgggcggccatcgcccctgacgatgtccattttaccccgactcgcctcgtctgcctcgaaaacacccataacggcaaggtgctgcccttgccttatctgcgcgagatgcgcgaactggtcgatgagcatggtttgcagttgcatctggacggtgctcgtctgttcaatgccgtggtggcgagtggccatacggtgcgcgaactggtcgcgccgtttgacagtgtctccatctgcctctccaaggggctgggcgcgccggtgggatcgctgctggtgggttctcatgcctttattgcccgtgccagaaggctgcgcaagatggtggggggcggtatgcgtcaggcggggatcctggctcaggctggcctgtttgcgttgcagcagcatgtggtacgcctcgcggacgatcatcgccgtgccagacagttggccgaggggctggctgcgctgcctggcatcaggctggatctggcgcaggttcagaccaacatggtgttcctgcaactgacgagtggcgagagtgcacccttgctggccttcatgaaggcgcgggggatcctcttctccggttatggtgagctgcggttggtgacccatctgcagatccacgatgatgacattgaagaggtgattgacgcctttaccgagtatctcggggcgtga

SEQ ID NO: 1160 - protein, 338 aa, Aeromonas jandaei
MRYIDLRSDTVTQPTDAMRQCMLHAEVGDDVYGEDPGVNALEAYGADLLGKEAALFVPSGTMSNLLAVMSHCQRGEGAVLGSAAHIYRYEAQGSAVLGSVALQPVPMQADGSLALADVRAAIAPDDVHFTPTRLVCLENTHNGKVLPLPYLREMRELVDEHGLQLHLDGARLFNAVVASGHTVRELVAPFDSVSICLSKGLGAPVGSLLVGSHAFIARARRLRKMVGGGMRQAGILAQAGLFALQQHVVRLADDHRRARQLAEGLAALPGIRLDLAQVQTNMVFLQLTSGESAPLLAFMKARGILFSGYGELRLVTHLQIHDDDIEEVIDAFTEYLGA

SEQ ID NO: 1161 - DNA, 1152 bp, Tolypocladium inflatum
  CDS (1)..(1152)
atgaagatttgcccgatactgaattccaaggcaggtcattggggagatcccactctcactggctcagcctttgatttcaggagcgacgctattactacaccatcccatggaatgctggaagcaatcgccggggccacgctcaatgatgatgtctatggcgaggaccagctaacacggtccttcgaggagcacatggcgagcatctgtggcaaagaagcagctctgtttgttgtgtccgggaccatggccaaccagattgccttaggagcgctgtcacgacgatgcacaggtgtactagcagatgctacctctcatatcgtacattttgaggccggtggccttgccggtctctccggggcatccatccagcccgtgcggccggcgaatgggcattatctcacccttgatgatgtggaacgacacgcagtgaccaccaacatgatagaacggttgcccaccagcatcatcagcctcgagaacacagctcacggcagcgtaatcccactacaagagctccgcaagatgaaggcttgggctgacgagcaggagatcgccattcacatcgacggtgcgcggatatggcacgccgtggcaggcgggggcggtagtctaaaggagatcgcgggctgctgcgacgcgatgaccctctccttcggtaaagggctcgcagcaccgataggatcggccatcgtgggctcgagggaccttatagcaagggcgagaagactgcgccaaagcatcggcggcggcgtccgcaaggctggggccattgtggctgcagcttggcaggccatgatagagaactttggtcccggcgatgtcgacacacggggcatcatccagagaacacatgtgttggcgagagcggtggccaacatgtggacctcgaggggcggtctgcttcttcgcccggtgatgacgaaccttgtctggctcgacttgaagagcgctggtctcgacaagtccacactggacacggctgctcagcaccgtgacatacgcatcagggcaccacgcatcgttctgcatcaccagatatcaaccgatgctatgcgacgactggaggcggtgttcgaggaggtgttagagaaaaaggcaagtcaaagtcctttgcggtcaagagcggagcgagcaggtctagaacgcctttag

SEQ ID NO: 1162 - protein, 383 aa, Tolypocladium inflatum
MKICPILNSKAGHWGDPTLTGSAFDFRSDAITTPSHGMLEAIAGATLNDDVYGEDQLTRSFEEHMASICGKEAALFVVSGTMANQIALGALSRRCTGVLADATSHIVHFEAGGLAGLSGASIQPVRPANGHYLTLDDVERHAVTTNMIERLPTSIISLENTAHGSVIPLQELRKMKAWADEQEIAIHIDGARIWHAVAGGGGSLKEIAGCCDAMTLSFGKGLAAPIGSAIVGSRDLIARARRLRQSIGGGVRKAGAIVAAAWQAMIENFGPGDVDTRGIIQRTHVLARAVANMWTSRGGLLLRPVMTNLVWLDLKSAGLDKSTLDTAAQHRDIRIRAPRIVLHHQISTDAMRRLEAVFEEVLEKKASQSPLRSRAERAGLERL

SEQ ID NO: 1163 - DNA, 1104 bp, Debaryomyces hansenii
  CDS (1)..(1104)
atggatttctctaattattcagacctcagtccagcacacaatgagttcagaagtgatacatttacgaccccaacattatctatggttgcatcgctaacgaaggctactttaggagattctgtttataatgaagatgattctacaattcaattggaaaaaaaggttgctgacatgactgggaaggaagctggcctattctgtgtaagtgggacgttatctaatcagatctgtttacgtgttaatttaaaacagccaccatatagtatactatgcgattatagggcccatgtatacgtgaatgaagcaggggggatggcaacattatgtcaagcaatggcacaaccaattaaacctaagaatggtatttatttgactttagaagacgatatattgccaaacttcattccggacgatggagaaattcatggggctccaactaagcttatctccttagagaatactttacatggtatgcttttccccattgaagagattgctaaaatatccaaattttgcaaaaataacgatgtcaagcttcacttagatggtgccagattatggaatgcatcaattgccacagggatttctttaaaagagtattgttcgtattttgattctgtttccttatgtctttcaaagagtttgggggcacctatcggtacagtattaattgccgataaaaattttgttaagaaggccaatcacttcaagaagcaaagtggtggaggaattagacaatcgggtctcttggctactatggctatgaccgctattgacgaaaactttggaaagatacaaaggtcccatgatatggctaaagaattaggcaaactatgtgaagaaaatggaattgtcttagaacacccagttgacactaattttgtctttatcgactttgctaaaaacaaaatgagttctgacgttctaactaaattactgaaagaaaacggtatcaagctatatgctggcagagttgctttccactaccaggtatctctggaaagctttgagaaatgcaaaaaagtagtactcgaatgttataaagattcactacaaaacccttacattggtaagtcatcttcctcgtattaccaagccaagtaa

SEQ ID NO: 1164 - protein, 367 aa, Debaryomyces hansenii
MDFSNYSDLSPAHNEFRSDTFTTPTLSMVASLTKATLGDSVYNEDDSTIQLEKKVADMTGKEAGLFCVSGTLSNQICLRVNLKQPPYSILCDYRAHVYVNEAGGMATLCQAMAQPIKPKNGIYLTLEDDILPNFIPDDGEIHGAPTKLISLENTLHGMLFPIEEIAKISKFCKNNDVKLHLDGARLWNASIATGISLKEYCSYFDSVSLCLSKSLGAPIGTVLIADKNFVKKANHFKKQSGGGIRQSGLLATMAMTAIDENFGKIQRSHDMAKELGKLCEENGIVLEHPVDTNFVFIDFAKNKMSSDVLTKLLKENGIKLYAGRVAFHYQVSLESFEKCKKVVLECYKDSLQNPYIGKSSSSYYQAK

SEQ ID NO: 1165 - DNA, 1128 bp, Debaryomyces hansenii
  CDS (1)..(1128)
atgacagtagaaattgcaccagaatattctactcataatgaattcagaagtgatactttcaccgtgccaaccaagaccatgttggagtccatccgaaacagcacatttggagactccgtgtataacgaggataaaactacgttgatgttagagaagaagatgtgcgagttgacaggaaagccagccgctttattctgtgttagtggaacgttatccaaccaaattggattgagagccaacttgttccagccaccatattcgattttatgtgactatagagcacatgtattcattcacgaagccggtggattggctaccttgtcacaagccatggtacacccggtacatccttctaacggagtatacttgacgttggaagacattgctgaaaatatcactccagacgatggagacatccatgcggcacctactaagctcatctcattagaaaacaccttacacggaactatcatgcctatagaagagattgccaggatcagtgcttttgctaaggagaataatattaaattgcatttagatggggccagattgtggaattctgccgcggaaacgggtatttcgatcgagaaatattgctcatacttcgattcggtttcgttatgtctttcgaagtcgatcggagctccagtcggttctatcttggttggagagcctaccctcattgccaaggcaaaccatttcaagaaacaaaacggtggtggtatcagacaagccggtattttggcgtcgatggctatggtggctattgatgagaatttcgcaaaattgccttactcgcattccctcgctaaagatgtcgcgagcttctgcgaaggtcacggaatcgccttggaaagtccggctcataccaattttgttttcattgatctcgtcaaaaacaagatggacgactcattactcattgaattaggtaaaaagtacaatgttaagttgatgggtggtagaatcgcattccactaccagttatcggaagaaagtgtcgaaaatgtcaaaagggctatattggaatgttaccaagatgcattcaaaaacccatacaccaaaaccaagtgtaacaagaagatgtataattttgatgccatcaagaattcattagtttctaattaa

SEQ ID NO: 1166 - protein, 375 aa, Debaryomyces hansenii
MTVEIAPEYSTHNEFRSDTFTVPTKTMLESIRNSTFGDSVYNEDKTTLMLEKKMCELTGKPAALFCVSGTLSNQIGLRANLFQPPYSILCDYRAHVFIHEAGGLATLSQAMVHPVHPSNGVYLTLEDIAENITPDDGDIHAAPTKLISLENTLHGTIMPIEEIARISAFAKENNIKLHLDGARLWNSAAETGISIEKYCSYFDSVSLCLSKSIGAPVGSILVGEPTLIAKANHFKKQNGGGIRQAGILASMAMVAIDENFAKLPYSHSLAKDVASFCEGHGIALESPAHTNFVFIDLVKNKMDDSLLIELGKKYNVKLMGGRIAFHYQLSEESVENVKRAILECYQDAFKNPYTKTKCNKKMYNFDAIKNSLVSN

SEQ ID NO: 1167 - DNA, 1071 bp, Yarrowia lipolytica
  CDS (1)..(1071)
atgactgcctgctctcacgatttcagatcggatacgatcacaaatcccaccaaagagatgatggaagccatcaccaactcgtactctgctcttggcgacgcagtgtacgaggaggacaccatcaccaccaactttgagagccgaatcaaggagctcaccggccacgaggctgctgtcttcgccgtctccggtacgatgactaaccagctggccatcagatcccacctgttccagcctccacactcgatcctgtgtgatcatcgagcacatgtgtacacctgcgaagctggtggcatagccacactgtctcaggccatggtgacccccgtcatcccctccaatggcatttacatgactctggaggacatcaaggccaagatcattgtcggagaagatgttcatgtcgcacctaccaagctcatctgtctggaaaacacaatgggtggcgccatttaccccattgaggagattcgtcgcatttcaaagtttgcacgggacaatgacatccctatccatctggatggcgccagactgtggaatgcaagcattgctacaggcgtgtcaatgcgggagtatggttcactctttgactcgatctctttatgtctatcaaaaggcttatgtgcccctgtaggcagtgtgcttgtggggtcaaagaagctgatcaagaccgctacctggtttaagaagcaggccggaggaggaattcggcagtccggtatcctgacatctgcagctaacgttgcattggaccaagtctggccctcaatggcaaaaactcatgctactgcgaaggagttcgccaactttgttacttctgacctgggcctcaagctcctttttcccgctgataccaactttgtttacattgatgaaacggacaaatttgattctgatgtctttgtcaagcttggagcggagcggggcatcaagttgctcggaggcagaatcgtcttccactaccatacttcacccgaggccattgagaccttgaaggaggtgcttcaagaggctatcaaacagtattctggggtaaaggaagacaagcttaagactagtggctacatctaa

SEQ ID NO: 1168 - protein, 356 aa, Yarrowia lipolytica
MTACSHDFRSDTITNPTKEMMEAITNSYSALGDAVYEEDTITTNFESRIKELTGHEAAVFAVSGTMTNQLAIRSHLFQPPHSILCDHRAHVYTCEAGGIATLSQAMVTPVIPSNGIYMTLEDIKAKIIVGEDVHVAPTKLICLENTMGGAIYPIEEIRRISKFARDNDIPIHLDGARLWNASIATGVSMREYGSLFDSISLCLSKGLCAPVGSVLVGSKKLIKTATWFKKQAGGGIRQSGILTSAANVALDQVWPSMAKTHATAKEFANFVTSDLGLKLLFPADTNFVYIDETDKFDSDVFVKLGAERGIKLLGGRIVFHYHTSPEAIETLKEVLQEAIKQYSGVKEDKLKTSGYI

SEQ ID NO: 1169 - DNA, 1188 bp, Kluyveromyces lactis
  CDS (1)..(1188)
atgactgcttctgataagaaatctactgctgctgctccttcagagccagcttacacctcagctgccaatgaccttcggtctgatactttcaccactccaactaaggaaatgttggaagctgctttcaatgcttccatcggtgatgcagtctataacgaagacgtcgacaccattgagctagaaaccgtcgtagctcgtttagctggtaaagaagccgggttattctgtgtctctggtactttatcgaaccaaattggtttgagaacgcatctattccaacctccatactctatcttgtgtgattacagagctcatgtttatactcatgaagcagctgggttggcaatcttgtctcaagcgatggtcactccggtgatcccatctaacggtgattatatgactttggaagatatcaaggctcattacatcccggacgacggggatattcacggtgcgccaacaagagtgttatcgttggaaaacactttgcacggtatcgtttacccattggaagaattgatccgtatcaaagggtggtgtttggaaaacgatatcaaattacactgtgacggtgctagaatttggaacgcagttgtcgaatccggtgtctctttgaaacagtacggtgaaattttcgactctatctccatttgtctatctaagtccatgggtgctccaatggggtctgttcttgttggtagcaacaagtttgtcaagaaatgtaaccatttcagaaaacaacaaggtggtggtgttagacaatcaggtattatgtgcagaatggcactttgcgctgtgaacggtgactggaagactaagatgggatactctcaccagttggcccacgaattggctaaattctgtaaagataacggtattccattggagtctccagctgacaccaacttcgtcttcttggacttgcaaaaggcaaagatgaacccagacgttcttgtcaagaaaggtttgaaatatggggtcaaattgatgggtggtagagtttctttccactaccaagtcaccagagaaactttggaaaatgttaagtctgctgtcttggaaactttccaatacgcaaaggaaaacccattcgacactaacggtccaacaaaaatctaccgtagtgaatctactgattttgatatccatggtaaccctatcagtgatatcaagacttacaagtactga

SEQ ID NO: 1170 - protein, 395 aa, Kluyveromyces lactis
MTASDKKSTAAAPSEPAYTSAANDLRSDTFTTPTKEMLEAAFNASIGDAVYNEDVDTIELETVVARLAGKEAGLFCVSGTLSNQIGLRTHLFQPPYSILCDYRAHVYTHEAAGLAILSQAMVTPVIPSNGDYMTLEDIKAHYIPDDGDIHGAPTRVLSLENTLHGIVYPLEELIRIKGWCLENDIKLHCDGARIWNAVVESGVSLKQYGEIFDSISICLSKSMGAPMGSVLVGSNKFVKKCNHFRKQQGGGVRQSGIMCRMALCAVNGDWKTKMGYSHQLAHELAKFCKDNGIPLESPADTNFVFLDLQKAKMNPDVLVKKGLKYGVKLMGGRVSFHYQVTRETLENVKSAVLETFQYAKENPFDTNGPTKIYRSESTDFDIHGNPISDIKTYKY

SEQ ID NO: 1171 - DNA, 1182 bp, Kluyveromyces lactis
  CDS (1)..(1182)
atgcctattccacctttgtatacttcttctgcaggggatttcagatccgacacattcacgataccgacaaaagatttctggagccaagtgaccgatgcttcattgggagatactatcaatttagaagatacagatacgtgttcattggaagctagattatctgacgagattcttggtggcagggttcacagtggcgagaaatcagagggtttgttttgcatgtcaacaacattggcaaaccaaatagctgtccgctcccacttgaatttcgcaccaccttactctgtactttgtgataaacgagctcatatttttgttgatgaatgtgccgggattgcagtactttcccaagctttggtaatgcctaccatggcaagtaacggctgttacttaacattggaagatataaaggagaattatgtccctgacataggcgatatacacctagctccaacaagattaatatgcttggagaacaccttgcatggtatgttgtttcctctgactgaacttcaaagaatcagcgactgggctcattcccaagacattaaaattcatctcgatggagcaagattgtggaatgctgccgccgccaccgccgccgctaataattcctcttcggagtttgagactgaaatagaatacatgcaaaaagtgtcaaaattagtggactcagtctcgatctgtctttctaagtccatcggagcaccaattggttcagtgttagtggggtcgtctcaattcatcaagaaagctaggcacatacagaaacaacaaggtggcggtataagacaagccgggtttatcactaagattgctaattactgtattgatctcaacttcccgaacaggattgttgaagttaacaaggctaccagcaggttttggacagatttattccatacactaaaggaccagtatcagtttgaattggtcttacaacatcctgttgagacaaattttatatttgtggatttagctaagtcaaaaatatcattgaagctcttgttggaatttgcggaaaagaataatgttagattatgggatggcagactagcattccattaccagaatatcgaccaagaaggtttggatcgtttaaaacaaacctttattgacatcgcgaagtattacaaagagcatccatatgttgcagaagagagaagtgccagaatttattga

SEQ ID NO: 1172 - protein, 393 aa, Kluyveromyces lactis
MPIPPLYTSSAGDFRSDTFTIPTKDFWSQVTDASLGDTINLEDTDTCSLEARLSDEILGGRVHSGEKSEGLFCMSTTLANQIAVRSHLNFAPPYSVLCDKRAHIFVDECAGIAVLSQALVMPTMASNGCYLTLEDIKENYVPDIGDIHLAPTRLICLENTLHGMLFPLTELQRISDWAHSQDIKIHLDGARLWNAAAATAAANNSSSEFETEIEYMQKVSKLVDSVSICLSKSIGAPIGSVLVGSSQFIKKARHIQKQQGGGIRQAGFITKIANYCIDLNFPNRIVEVNKATSRFWTDLFHTLKDQYQFELVLQHPVETNFIFVDLAKSKISLKLLLEFAEKNNVRLWDGRLAFHYQNIDQEGLDRLKQTFIDIAKYYKEHPYVAEERSARIY

SEQ ID NO: 1173 - DNA, 1161 bp, Candida glabrata
  CDS (1)..(1161)
atgactactgaactaccaccacaatataccagtgcttccaatgacctgcgttccgacactttcaccactcctaccaggaagatgaaggaggctgctctggaggcttctattggtgacgctgtctacaacgaggacgtcgacaccatccgtctcgagcagcacgtcgcaaagctggccggtatggaggccggtctgttctgtgtctccggtacgctgtccaaccaaatcgctctgagagcgcacttgtaccagccaccttactccatcctgtgcgactacagagcgcacgtctacacacacgaggcagctggtctggccatcctgtcccaagccatggtcgtcccagtgatcccatccaatggcaactacatgaccctcgaggacatcaagagccactatgtcccagacgatggtgacatccacggtgccccaaccaaggtcatctccctggagaacaccttgcatggtatcatctacccgctagaagaactggtccgcatcaaggcctggtgtatggagaacggcctcaagctgcactgtgacggtgcccgtatctggaacgcagccgctgagtccggtgtcccactgaaacagttcggtgaactcttcgactccatctccatctgcctgtcaaagtccatgggtgccccaatgggctccatcctggtcggtaacaccaagttcatcaagaagtgtaaccacttcagaaagcagcaaggtggtggtgtaagacaatcaggtatgctatccagaatggccctctgcaacatcgacgccgactggaagtcaaacctactgtactcccacagactagcccacaacttggcagacttctgtaaagaaaagggtatccctctcgagtccccagccgacactaacttcgtcttcgtcgacttgagagcagcaaagatgaaccctgacgtcctggttaagaaaggtctgaaatacggtgtaaagctgatgggtggtagaatctccttccactaccaagtctcagaagaatccttggaaaaggtaaaactggctttgctcgaagccttcgaatactctaaggaacacccattcgatgaaaacggagctactaagatctaccgtagtgcctccaccgaagtcgacatcgaaggtaacgctatccaagagatcaagacttacaagtactaa

SEQ ID NO: 1174 - protein, 386 aa, Candida glabrata
MTTELPPQYTSASNDLRSDTFTTPTRKMKEAALEASIGDAVYNEDVDTIRLEQHVAKLAGMEAGLFCVSGTLSNQIALRAHLYQPPYSILCDYRAHVYTHEAAGLAILSQAMVVPVIPSNGNYMTLEDIKSHYVPDDGDIHGAPTKVISLENTLHGIIYPLEELVRIKAWCMENGLKLHCDGARIWNAAAESGVPLKQFGELFDSISICLSKSMGAPMGSILVGNTKFIKKCNHFRKQQGGGVRQSGMLSRMALCNIDADWKSNLLYSHRLAHNLADFCKEKGIPLESPADTNFVFVDLRAAKMNPDVLVKKGLKYGVKLMGGRISFHYQVSEESLEKVKLALLEAFEYSKEHPFDENGATKIYRSASTEVDIEGNAIQEIKTYKY

SEQ ID NO: 1175 - DNA, 1026 bp, Staphylococcus aureus subsp
  CDS (1)..(1026)
atgatttcattcgaaaatgattatttagaaggtgctcatgaaaaagtattaaaacgattagtagatacaaatcttgtacaagcttcgggatatggctttgatcaattcacagctcaggcaattgaaaagattaaagatacaattgactgtccaaatgctacaattcgttttttagtaggtggaacacaaaccaatcaggttgttattaattcaatgttagaaagttacgaaggggtcatttcagcagacactggtcatgttgctgtgcatgagggcggtgcaattgaatatagtggacataaagtaattactataccctctaaggaaggaaaagttagtgcttcagatgttgaaacttacatggagacatttaaaagtgattttaaaaaggaccatatggtattcccaggaatggtatatatttctcatcctactgaatatggcacattatactctaaatcagaattggaagagttatgcaaagtatgtaagcaatatcagcttccattatttatggatggtgcacgattagggtatggattgatgagtgatcaatcagatatgactattaaagacatcgctaaatattgtgatgtattttatataggtggtacgaagataggtgcattatgcggagaagcaattgtttttacgaagaataatgaaccgaaacaatttaccactcgaatcaaacatcacggtgcacttttagcaaaaggacggttaacaggcatacaatttttagaattatttacggataatttatattttaatataagcagacatgctatcgaaatggcaaataagatgaaagacgggtttataaataaaggctatcgtctttactttgattctccaaccaatcaacaattttttattttaagtaacgagaaaatagcagagttagaacaaaaagttaaatttgctgtttgggaaaaatacgatgatcaacatcgtgttgttagattcgcaaccagttgggcgacaaccgaagaaaatttaaataaactattagaattaatctaa

SEQ ID NO: 1176 - protein, 341 aa, Staphylococcus aureus subsp
MISFENDYLEGAHEKVLKRLVDTNLVQASGYGFDQFTAQAIEKIKDTIDCPNATIRFLVGGTQTNQVVINSMLESYEGVISADTGHVAVHEGGAIEYSGHKVITIPSKEGKVSASDVETYMETFKSDFKKDHMVFPGMVYISHPTEYGTLYSKSELEELCKVCKQYQLPLFMDGARLGYGLMSDQSDMTIKDIAKYCDVFYIGGTKIGALCGEAIVFTKNNEPKQFTTRIKHHGALLAKGRLTGIQFLELFTDNLYFNISRHAIEMANKMKDGFINKGYRLYFDSPTNQQFFILSNEKIAELEQKVKFAVWEKYDDQHRVVRFATSWATTEENLNKLLELI

SEQ ID NO: 1177 - DNA, 1008 bp, Photobacterium profundum
  CDS (1)..(1008)
atgattgattttcgctcagacacagtaacacgtccatccgattcaatgttggaaacaatgatgaaagcccctgtcggcgacgatgtatatggtgatgaccctacggtaaatgatttagaacagtggacagcagaacgccacggctttgaagcggctattttttgtagctcaggtacgcaagcaaacttgttaggtttaatggcacattgtgaacgtggtgatgagtacctttgcggccagcaagcacacaattataagtttgaaggcggtggtgcagcggtattaggttctattcaaccacaacctatcgaaaatgaaaaagacggttcaatttctattgataaactaaaagctgcaattaaaccaatagatcctcactttgcgcgcaccaccctactcagccttgaaaataccattaatggtaaagtactgccgttatcatatttgaaagaagcgcgtgaatttgtcaatcagcacggcttaaaattgcatttagatggcgctcgcgtatataacgcatcggtagcattagatgtagacatcaaagagatctcgcaacacttcgattcaatgacaatctgtttatcaaaagggttaggtgctcctattgggtcattgctactaggcaaccatgagctaatagccaaagcacgtcgttggagaaaagtattaggtggcggtatgcgtcaagctggtattttagcggcagcaggaaaaatagcccttactgaaaatgtaactcgtctggcagacgatcatgccaacgctcgttatcttgcacaagaattagcaaaagttgacggcttttcagttaatcttgaacatgttcaaacgaatatgctttttgccaaggttgactcaactatcaatcaacagcagttagttgataacttaaaagagcaaggtatcttatttagcgcaggtaaccctatgcgtttagtcactcatttagatataagccgagtagacatcgatacctttataacggcgttaaaatgcgctttataa

SEQ ID NO: 1178 - protein, 335 aa, Photobacterium profundum
MIDFRSDTVTRPSDSMLETMMKAPVGDDVYGDDPTVNDLEQWTAERHGFEAAIFCSSGTQANLLGLMAHCERGDEYLCGQQAHNYKFEGGGAAVLGSIQPQPIENEKDGSISIDKLKAAIKPIDPHFARTTLLSLENTINGKVLPLSYLKEAREFVNQHGLKLHLDGARVYNASVALDVDIKEISQHFDSMTICLSKGLGAPIGSLLLGNHELIAKARRWRKVLGGGMRQAGILAAAGKIALTENVTRLADDHANARYLAQELAKVDGFSVNLEHVQTNMLFAKVDSTINQQQLVDNLKEQGILFSAGNPMRLVTHLDISRVDIDTFITALKCAL

SEQ ID NO: 1179 - DNA, 1026 bp, Bdellovibrio bacteriovorus
  CDS (1)..(1026)
atgaaacgcggttttggcagcgacaatcatgccggtgtccacccacggattctgcaatctatcctggacgccaacaccgaacacgcccccgcctacggaaccgatgaatggaccgaacgcgcggtgggggaattcaaaaaccaattcggcaaagacgcccacgtgttcttcgtcttcaatggcacggccgccaacgtcacggccttaagagccatggcccgcccctggcaatcggtgttctgttcagacgtggcgcacatcaatgtggatgaatgcggctcgccggaatttttaagtggttgcaaactgctgccactgccctcccacaacggaaaactgtctgtggaagaacttgaaaaggccttcatccgccggggggaccagcatttttcccagactcaggtgctcagcctgactcagcctacagaactgggaaccacctattctttggatgagctcaaagccctgatcgcttgggccaaaagcaaaaaactgctggtgcacattgacggagccagactgagcaacgcggccttgtacttgaaaaagaccttgaaagaaatcaccaccgacctgggggtggatgtggtttctttcggtggcaccaaaaatggtttgatgatgggtgaagccgttgtgatcctgaataaggatctggcgcaggattttaaatacatccgcaaacaaagcgcgcagctgccttccaagacccgctttatcgcctgtcagtttgaagcttacttcaaagacggtctatggcagcagattgctgaacattcccaccagatggccctgtatctgtatgaacagtgcaaaggacttgccggggtgaccgtgcgcgaagtcccgcaaagcaatgcggtctttgcgacaattcccagccactgggtgaaacccttgcgggaacattattttttctatgtctgggacgaaaacacatttgaatgtcgctggatgacctcctgggacacgcaaaaatcggatatcgatggtttcgtcgcacttctaaaggagcaacgtctatga

SEQ ID NO: 1180 - protein, 341 aa, Bdellovibrio bacteriovorus
MKRGFGSDNHAGVHPRILQSILDANTEHAPAYGTDEWTERAVGEFKNQFGKDAHVFFVFNGTAANVTALRAMARPWQSVFCSDVAHINVDECGSPEFLSGCKLLPLPSHNGKLSVEELEKAFIRRGDQHFSQTQVLSLTQPTELGTTYSLDELKALIAWAKSKKLLVHIDGARLSNAALYLKKTLKEITTDLGVDVVSFGGTKNGLMMGEAVVILNKDLAQDFKYIRKQSAQLPSKTRFIACQFEAYFKDGLWQQIAEHSHQMALYLYEQCKGLAGVTVREVPQSNAVFATIPSHWVKPLREHYFFYVWDENTFECRWMTSWDTQKSDIDGFVALLKEQRL

SEQ ID NO: 1181 - DNA, 1101 bp, Rhodopseudomonas palustris
  CDS (1)..(1101)
atgatctacgcccccgcccctgacgatccgcgactgccgccggtgcggatcaatttgctgtcggacacccagactcagcccagtgcggcgatgcgggaggcgatggcgcgggcgccggtgggagacgaacagatcggtgccgatccgaccgtgaacgcgctgtgcgcccgtgtcgccgatctgctcggcaaggaggcggcggtgttcatggcgtccggcacgatctgcaacattgcggcgacgttggcgcattgccgagccggcgacgaaattctcgcgcacgagacgtcccatgtcgtctcgctggagggctgcacacacgcggctctcggcggctttcagatccacccgctgccgggcgcaggcggtcagttctccgctgaaacgctgcgatcggcgctgcatcggccagaccggcatcaggcgaggcagagcctggtgtgcgtcgagcagaccaccaatctcggcggcggcacggtgtggaacgctttgacgctccggcagatcgcggaattggctcgcgccaatggattagccacccatatggacggtgctcgcctgatgaacgccagcgtcgccagcggcatctcgccccggcagatcgccgccggctgggactcggtgtggatcgacttcagcaagggcctcggcgcgccactcggtgccgtgcttgcgggatcgcgcgatttcatcgacgaggtctggctgtggaagcagcggctcggcgggtcgctgcgtcaggccggcatttgcgccgccgcctgcctgtatgcgctcgaccacaatgtcgggcgcctcgctgaggatcacgccaatgcccgattgctcgcggcaggcttgtcgcagatcgacggcgtgagcgctgcaccgccggagaccaacctggtctatttcgacgtctccggcgccgcgtggtcaaagcaggcaattgtcgacgcgctgcgggcccgtggtgtgctgatctcgatcctcagcgaccggctacgcgcctgcacgcatctcgacgtcacgcccgcgatgatccaagaggcgctcgcagtgatccgcaacgtggtcgaaggcgatacgacggcccggatcggccgcagcgcacagatctga

SEQ ID NO: 1182 - protein, 366 aa, Rhodopseudomonas palustris
MIYAPAPDDPRLPPVRINLLSDTQTQPSAAMREAMARAPVGDEQIGADPTVNALCARVADLLGKEAAVFMASGTICNIAATLAHCRAGDEILAHETSHVVSLEGCTHAALGGFQIHPLPGAGGQFSAETLRSALHRPDRHQARQSLVCVEQTTNLGGGTVWNALTLRQIAELARANGLATHMDGARLMNASVASGISPRQIAAGWDSVWIDFSKGLGAPLGAVLAGSRDFIDEVWLWKQRLGGSLRQAGICAAACLYALDHNVGRLAEDHANARLLAAGLSQIDGVSAAPPETNLVYFDVSGAAWSKQAIVDALRARGVLISILSDRLRACTHLDVTPAMIQEALAVIRNVVEGDTTARIGRSAQI

SEQ ID NO: 1183 - DNA, 1083 bp, Rhodopseudomonas palustris
  CDS (1)..(1083)
atgttagcctcgggtatggcctacatcccttccctacccgatccgaacgcgccgccggtgcggatcaatctgctctccgacacccagacgcggccgacgccggcgatgcgcgaggcgatggcgctggccgaggtcggcgacgagcagaccggcgacgatccgaccaccaacctgttgcaggagcgcgtcgcggcgctgctcggcaaacaggccgcagtgttcctcccttcagggacgatgtgcaacgtcacgactacgctcgcgacctgccggcccggggacgagatcatcgcccatcgcaccgcgcatatcctgtcacgcgaaggcggtgcgcacgccgcgctcggcggcttccagatcaccggcctggacggcgacgacggccagttctcactcgagacgttccgcgccgcgctgcatccgaagacgcgctacgaaccgccacaagtgatggtcagcgccgaacagaccgccaatatcggcggcggcacaatctggccgcaggccacgctcgacgcggtcgccgcggccggcaaggacgccgggctgtggacgcatatcgacggcgcacggctgatgaacgcggtggtcgccacgggtatcagtgccaaggcgatgacggcgggttgggactcggcgtggatcgatttcagcaagggcctcggtgcaccggtcggcgccgtgctggccggcccgcgtgccttcatcgacgaggtgtggcgctggaagcagcggctcggaggcgcgatgcggcagtccggcgtgattgccgcggcgtgtctgtacgcgctcgatcatcacgtcgatcgccttgccgacgatcatgccaacgcgcgccgtcttgcctccgggctagcgcagatcgacggcatcgaggtgcagacgccgcagaccaatctggtgttcttcaaaccggaccgcaccggcgtctccggcgccgacatggtcgcacagctccgccggcgcggcgtggtgttggcgatgatggagggacggatccgcgcctgcacgcatctcgacgtcagcgcggacatgatcgagcaaacgctcgaccacgtccgcgagatcgtgcgggcagcctga

SEQ ID NO: 1184 - protein, 360 aa, Rhodopseudomonas palustris
MLASGMAYIPSLPDPNAPPVRINLLSDTQTRPTPAMREAMALAEVGDEQTGDDPTTNLLQERVAALLGKQAAVFLPSGTMCNVTTTLATCRPGDEIIAHRTAHILSREGGAHAALGGFQITGLDGDDGQFSLETFRAALHPKTRYEPPQVMVSAEQTANIGGGTIWPQATLDAVAAAGKDAGLWTHIDGARLMNAVVATGISAKAMTAGWDSAWIDFSKGLGAPVGAVLAGPRAFIDEVWRWKQRLGGAMRQSGVIAAACLYALDHHVDRLADDHANARRLASGLAQIDGIEVQTPQTNLVFFKPDRTGVSGADMVAQLRRRGVVLAMMEGRIRACTHLDVSADMIEQTLDHVREIVRAA

SEQ ID NO: 1185 - DNA, 1855 bp, Mus musculus
  CDS (128)..(1330)
atagtgccccgggcttgcccagttcaggtccgcgcggggtcagaagagtccagttacacgggttccccgctggcacggaagagactgtcctccgctcctgcggccgagaaagacgagtgccacagccatgctatgcagcctgttccgggccgccatgctacgcagcctgttccgggccacggtcccggggctcagggtgccctgggctcagtggtctaggaattgggcgggggtcccagcccacgtggtggacctacgcagcgacacggtgacccggccagggccggccatgaggcgcgctatggccgaagcggttgtaggagacgatgattacggcgaagaccctacggtccacgaactgcaggaaaaggctgcagagttgcttggggtagagaggacgctgtttgtgcccaccaacactatggccaacctcatctctgtgatgggtcactgccggcgccggggttcccaggtcctccttgggcaggaatgccacctccacgtctatgagcagggcggggtggcacagatcgctggggtgcattcccaccccctccccgacctgccctatggcaccttggacctgaatgagctagagagggcactcacgcggggctctgggagtccctaccatccagtctgtgagctcgtgtacctggagaacactcacagcagcgcgggaggccgggtcctccctgtcgactacctccgccaggtgtgcctcctggcccacgcccacggagcaagggtccacatggatggagctcggttgatgaatgcagcagtggctctgcgcataccccctgcccgccttgtagagcactgtgactctgtatccttctgtttctctaagggcctaggtgcaccagtgggagctctggttggcggatccaaagacttcattggagaagcatggcgcctccgcaaggccctgggtggaggcatgcgccaggctggagtgctggctgcggctgccctggtgggactagctgaggcagaggaggtgctaccaagggaccacgagaatgcccagagattcgctaaaggactccaagacctggcgtcacccatttgctctgtggatcctgccaccgtggagaccaacatggtgctggtgcaggtagctgggctgcctccctcggagctatgccagcgcctgcaggctgtgagtgcagaggaggtggctcagactggccgtgccgtgcgcgtgctgctgtttccctggacagaacagtctgtgcgggctgtgtggcaccgagatgtgtctgctcaggacacggaactggcactgaagaagtgggagtttgtgctgagacagttgcggccctgaggccaggggatccgggaccccgtgctacgattggagtgggcagtgagatgcctgaagctgttagcctggtgaaggctcatcctctctggaggatggtgacatcattccgtctctggtttgctccagtgacactcctgggatggccttacgcagtcaggaataaccaggcataaggtggggaaagctgtgactgcatatccagagaaggaagcgcatagaggaggcaggccctggggttggggttggccctggggtgtagcaggattgcctagtgtgcataagccctgggctccatccccagcactgtgggttcgaaccccagcagctcacagctcacaactgtaaccctaccatgctaggggattagaagctcaaggccactctcagctactcagagaatttgatgcaagcctgggctacacgagaccctgtcttcaagaaaatagatccttagtgactgacacagtggagttgtcagaggtggactgtgaaataaaatactgaaggcacaaaaaaaaaaaaaaa

SEQ ID NO: 1186 - protein, 400 aa, Mus musculus
MLCSLFRAAMLRSLFRATVPGLRVPWAQWSRNWAGVPAHVVDLRSDTVTRPGPAMRRAMAEAVVGDDDYGEDPTVHELQEKAAELLGVERTLFVPTNTMANLISVMGHCRRRGSQVLLGQECHLHVYEQGGVAQIAGVHSHPLPDLPYGTLDLNELERALTRGSGSPYHPVCELVYLENTHSSAGGRVLPVDYLRQVCLLAHAHGARVHMDGARLMNAAVALRIPPARLVEHCDSVSFCFSKGLGAPVGALVGGSKDFIGEAWRLRKALGGGMRQAGVLAAAALVGLAEAEEVLPRDHENAQRFAKGLQDLASPICSVDPATVETNMVLVQVAGLPPSELCQRLQAVSAEEVAQTGRAVRVLLFPWTEQSVRAVWHRDVSAQDTELALKKWEFVLRQLRP

SEQ ID NO: 1187 - DNA, 1080 bp, Listeria monocytogenes
  CDS (1)..(1080)
atgataaacacactaaaaaccagctaccaaaaaacaccatataaactaggcgggaacggtccgcgcaatgtaggtgttctgacagaagcacttcaaaatatagatgataacctagaaagcgatatttacggaaatggcgcagttattgaaaactttgaaacaaaaatcgcgaaaattctcgggaaacaatctgcggtattttttccaagtgggacgatggctcagcaaattgcgttaaggatttgggctgaccggaaagagaatcggtgcgtggcatatcatccactctctcatttggagattcacgagcaagatgggttaaaagaattgcaacaaatcacgcccatattacttggaacagctaatcgacttttgacaattgacgatattaaaagccttcgcgagccagtttctagtgtgcttatcgaacttccacaacgagaaattggtgggcagctgcctgcttttgaagagcttgaggagatttcggagtattgccatgaacagggtatttcgttgcatcttgacggggcacggttatgggaaatcacgccgttttatcagaagtctgcggaagaaatttgtgcgctgtttgatagtgtgtatgtgtcgttttacaaaggaattggcgggattgctggggcgattctggctgggaatgatgattttgtgcaagaggcgaaaatctggaaacgacggtatggcggagatttgattagtctgtatccgtatattttgtccgcggattactattttgaaaaacggattgggaaaatggcggaatattttgaagcggcgaaaggattggctgagcgatttaattcgtgttcgggcgtgaagactgtgccggaagtgccggtttctaatatgtttcatgtttattttgagaagtcggccgatgaggttggggcgattttgacgaagattcaggatgaaactggagttggaatttcggggtatttgcaggagaaatcggcggatgtttgcgcgtttgaggtttcggttggggatgcatttgcggagataccggtggagattttggatgatttatttaagaaacttgtaaattcagtaaaatag

SEQ ID NO: 1188 - protein, 359 aa, Listeria monocytogenes
MINTLKTSYQKTPYKLGGNGPRNVGVLTEALQNIDDNLESDIYGNGAVIENFETKIAKILGKQSAVFFPSGTMAQQIALRIWADRKENRCVAYHPLSHLEIHEQDGLKELQQITPILLGTANRLLTIDDIKSLREPVSSVLIELPQREIGGQLPAFEELEEISEYCHEQGISLHLDGARLWEITPFYQKSAEEICALFDSVYVSFYKGIGGIAGAILAGNDDFVQEAKIWKRRYGGDLISLYPYILSADYYFEKRIGKMAEYFEAAKGLAERFNSCSGVKTVPEVPVSNMFHVYFEKSADEVGAILTKIQDETGVGISGYLQEKSADVCAFEVSVGDAFAEIPVEILDDLFKKLVNSVK

SEQ ID NO: 1189 - DNA, 1023 bp, Desulfovibrio vulgaris
  CDS (1)..(1023)
atgctcaagagtttcgccagcgacaacacagcaggggtgcatccgcgcatcctcgccgccatggcctccgccaacgaaggccacgccaaggcctacggcatggacccgtggacaagtgaggctgcggatgtcttccgcggacacttcggtgatgacatcgacctgtatttcgtctttctgggcaccgctgcgaacgtgctgggactcaaatccgtcacgcgcccctggcattcggtggtctgcgccgatgtggcccatatcaatgtcgatgaatgcggcgcgccggagtcggtgaccgggtcgaagttgcaggtcatcccgtcgcacgacggtcgcatccgggtcatggacatcgtgcccctcatgcactcgctgggtaatttccaccacagccagccccgtgtcatctccatcacccagacgactgaactcggcacggtgtactcgccggcgcagatacgcgcgctggccgatttcgcccacgccaacggcatgctgctgcacatggatggtgcacggctgtgcaacgcggcggcggcactcgataccgggctggcggccctcacccgtgacacgggggtcgatgtgctctcgttcggcggcaccaagaacggcatgatgttcggtgaagccgtcatcttcttcaatcgtgaactggcaagcgaattcaagttcatccgcaagcaggggatgcaactggtctcgaagatgcgcttcatcgcggcgcagttcatcgaacttctgcgtgatggtctgtggcttgagaacgcccgtaacgccaacagcatggcacggctcatggctgaaagcctgcgcggtctgccccatgtgaccatcacccggcccgttgaggcaaacgccgtgttcgcccggctttcgccggaacatatcgcggcactgcagaaggacttctatttctatgagtgggacccggtgctgcacgaggtgcgctggatgaccagcttcgactccaccgaggaacaggtcatggagttcgtgcacgccatcaaacggctggcatag

SEQ ID NO: 1190 - protein, 340 aa, Desulfovibrio vulgaris
MLKSFASDNTAGVHPRILAAMASANEGHAKAYGMDPWTSEAADVFRGHFGDDIDLYFVFLGTAANVLGLKSVTRPWHSVVCADVAHINVDECGAPESVTGSKLQVIPSHDGRIRVMDIVPLMHSLGNFHHSQPRVISITQTTELGTVYSPAQIRALADFAHANGMLLHMDGARLCNAAAALDTGLAALTRDTGVDVLSFGGTKNGMMFGEAVIFFNRELASEFKFIRKQGMQLVSKMRFIAAQFIELLRDGLWLENARNANSMARLMAESLRGLPHVTITRPVEANAVFARLSPEHIAALQKDFYFYEWDPVLHEVRWMTSFDSTEEQVMEFVHAIKRLA

SEQ ID NO: 1191 - DNA, 1023 bp, Thermus thermophilus
  CDS (1)..(1023)
atgcgcctcgtggacctgaggagcgacaccctcacccgccccaccccggccatgcgcaaggccatggcggaggcggaggtgggggacgacgtctacggcgaagaccccacggtgaaccgcctcgaggccctggcggcggaaaggctcgggtttgaacgggccctcttcctgccctcgggcaccatggccaaccaggtggccctcctcctccacctgccccggggcggcgaggtcctggcccccgagggggcccacctctacgagtacgagctcggcgccccggccctcctcgccggggccctggtccgccccgtgcccgccccaggggggaggccggacctgaaggccctggaggaggccctaaggcggggccccttccaggcccccatcgggctactcgccctggagaacacccacaacctggccggggggcgggtggtgcccctggaggtccaaaggcgggtccaagacctggcccgcgcccggggcctccccacccacctggacggggcccgcctccacaacgccgccgtcttcttgggggtggaggcccgggaggtggcccggggcttcaccaccgccatggtctccctctccaaggggctcggggccccggtgggaagcctcctcctcctgcccaaggagctggaggccgaggcccggcgttaccgcaagctcctcgggggcgggtggcggcaggcgggggtcttggccgcggcggggatcctggccctagaggaaggccccaagcacctccggcgcgaccacgagatggcccgcgccctggcggaggggctttttcgcctggggctcgccgtggacctgggggcggtggagaccaacatggtctacctggaggtggaggaccccgagggctttctccagggtctaagggcccggggggtgctcgcggggcgcgtggggggaagggtgcggttcgtgacccaccgggacctcatggacgaggacatcccccttaccctggagagggtccaagacctccttcactccaggcccaggtag

SEQ ID NO: 1192 - protein, 340 aa, Thermus thermophilus
MRLVDLRSDTLTRPTPAMRKAMAEAEVGDDVYGEDPTVNRLEALAAERLGFERALFLPSGTMANQVALLLHLPRGGEVLAPEGAHLYEYELGAPALLAGALVRPVPAPGGRPDLKALEEALRRGPFQAPIGLLALENTHNLAGGRVVPLEVQRRVQDLARARGLPTHLDGARLHNAAVFLGVEAREVARGFTTAMVSLSKGLGAPVGSLLLLPKELEAEARRYRKLLGGGWRQAGVLAAAGILALEEGPKHLRRDHEMARALAEGLFRLGLAVDLGAVETNMVYLEVEDPEGFLQGLRARGVLAGRVGGRVRFVTHRDLMDEDIPLTLERVQDLLHSRPR

SEQ ID NO: 1193 - DNA, 1053 bp, Wolbachia pipientis wMel
  CDS (1)..(1053)
atgagagtaaaaatagatttctttagcgattcaaacactgacccttcagctaaaatgagggaagcgatggctaaagcaaaagttggaaacgaagctgcatgtgaagatccaactgtgaacgaattagtggcaaccgcatgtaaaatattaggtaaacctgcaggaatctttttgatttcaggaacgatgtccaatgtaattgcttataaagtacacattcaaagacctggtgattacttgctgcttgatgaaacttcacatccactcatagtacaatctggcttgatcgcagcccaggcacatgctactcctttgcccatcaaaggtacaagaggaatatttactggagaacaaattgttgagtttattactcgtcctagtttaagaaatattccgagagttgggcttgtttctatcgaacaaacgacaaattttggtggtggagctgtgtggcctttagaatatattcaagagatctcaagtctctgcaaagagaatgacgtattcactcatttagatggagcaagactgttcaacgcttgtgctcatactaaaatatctccaaaggagtatgcaagttattttgattcggtattcattgattttagtaaaggattaggtgctccaatgggtgcaatattgcttggaagtgaagattttattgaaaaagcttggtactataagtttcaaattggcggaggtatgcaccaagctggcattatttcagctgcatgtttatatgctctacgtaataatgtaaattctttagaagaagatcataaaaaaatgcagcaccttatagaaggcctagactccatagatcaagttataattgatatcgacctgtataaaactaatatagcgtatttttcattacgtactaattgtatatctactcaagaattaataaacgtactaatgacaaattatggaattagaatggctaacatcaaaggtaaaatcagagctataacacatagagatataagctatgaagatattaatactactgtatctgctataagaaagatactaagtaattttctgcactaa

SEQ ID NO: 1194 - protein, 350 aa, Wolbachia pipientis wMel
MRVKIDFFSDSNTDPSAKMREAMAKAKVGNEAACEDPTVNELVATACKILGKPAGIFLISGTMSNVIAYKVHIQRPGDYLLLDETSHPLIVQSGLIAAQAHATPLPIKGTRGIFTGEQIVEFITRPSLRNIPRVGLVSIEQTTNFGGGAVWPLEYIQEISSLCKENDVFTHLDGARLFNACAHTKISPKEYASYFDSVFIDFSKGLGAPMGAILLGSEDFIEKAWYYKFQIGGGMHQAGIISAACLYALRNNVNSLEEDHKKMQHLIEGLDSIDQVIIDIDLYKTNIAYFSLRTNCISTQELINVLMTNYGIRMANIKGKIRAITHRDISYEDINTTVSAIRKILSNFLH

SEQ ID NO: 1195 - DNA, 1050 bp, Wolbachia pipientis wMel
  CDS (1)..(1050)
atggaaaaaattattgatctgagaagtgacactacaactctgcagagctccaacgttatacatgcaataagtaatgcaactgttggagattttgcttatggtgaagacaaaagctgtaatgacttatcagaatattgcaaacaattattcaaagtagaagaagcattatttgcaaccagcggtatgcttgcaaatagattagccattgccagtcaaacaagtcctggtgatgaactaataactcattataattatcacgttaattttttcgatagcgcaggcaatgcaaaagtaaataatatcgtatttaattgtattagaaataatagcggaatcttagatgttgctgaagtagaatatgctattaattctaagccaaggtacaaaatttttgctcaggtgagtcttgtttctatagaaaatagtataaacgggtttaatggtaaaatttatccttttgaaaaacaagtcgagttatatcactttttaaaagctcacaatgtaaatcttcatttagacggtgcaagaatatttaatgctcatgtcgaaacaaatattgctttagcagattatgctaaatatgtggatacaatgagcttttcttttaccaaaggactgggagctccttttggttcaatgcttatgggtaaaagagagataattgaaagggctaaaaagctacaggtttggctaggtagtggttatcatcagatagggtattgtgctaatgcagcaaagtatgtactacagaacaatatttctaggcttaaagaagacaataaactcgccaaactgtttgcagacaagattaaggaaattccacacataaaactggtactaccttatccagaaactaatatagtaagctttagtataaaagcactaaatgtaactaatgaggttttcttgagtaagtgccaagcttatggtttattgctttttccttggctcgagtctcatataagagcagttacccatcttggcacaaaggaaacagacatcatgaaagctgctgaaattataaaggaggttgtgttaaatttaatatga

SEQ ID NO: 1196 - protein, 349 aa, Wolbachia pipientis wMel
MEKIIDLRSDTTTLQSSNVIHAISNATVGDFAYGEDKSCNDLSEYCKQLFKVEEALFATSGMLANRLAIASQTSPGDELITHYNYHVNFFDSAGNAKVNNIVFNCIRNNSGILDVAEVEYAINSKPRYKIFAQVSLVSIENSINGFNGKIYPFEKQVELYHFLKAHNVNLHLDGARIFNAHVETNIALADYAKYVDTMSFSFTKGLGAPFGSMLMGKREIIERAKKLQVWLGSGYHQIGYCANAAKYVLQNNISRLKEDNKLAKLFADKIKEIPHIKLVLPYPETNIVSFSIKALNVTNEVFLSKCQAYGLLLFPWLESHIRAVTHLGTKETDIMKAAEIIKEVVLNLI

SEQ ID NO: 1197 - DNA, 1056 bp, Treponema denticola
  CDS (1)..(1056)
atgtatttttttataaatgattacagtgaaggttgtcatccaaaaattcttaaagcattgacggaaacaaatgaagagcaaaccgtcggttacggctgtgacgaatattgtgcagaagctgcagaccttatcttaaaagaactggatgcacctcaaagtaaggtttatttcttttctggcggaacacaaaccaacctgaccatgatagcctcagtactaagaccccatcagggagttatcgccgccgatacagggcatataaacgtacatgagtcgggagccatcgaagcttgcggacacaaggttctaaccatcgaatcggcaaacggaaaaataacggcggagcaggctgaagctcttataagggcacattacgatgatcccacagccgagcacatggttcagcccggaatgatttatatttcaaatcctacggaactcggcaccatttattcaaaaaaagaattacaggctttaaagctgaccgctcaaaaatattccgtacccctctatgttgacggcgcccgcctagggacagccctcaccgctgacaataacgacttaagccttgcagacatggcaagatatacggatgccttttatataggcggaacaaagatgggcgctcttttcggtgaagcccttatcatcaacaaccaagatcttcaaaaagactttagatatatacaaaaacaaaaaggcggtctttttgcaaagggcagacttttaggccttcagtttaaaactctttttaaggataagctttacttcgaaataggaagaacaatgaacgaaacggcaaagatgatccgtaaaggtttttccgataggggcttttctttttttatgaaaagcgaaacaaaccagagctttccgataatagaaaatagtcttttagctaaaatagaaaaagaatttaaatgcgaattttgggcaaaaatttcagaaaaccaaacagcagttcgcttttgtacctcatgggcaacaacaaaagaggcggtaaaaaaactttttgaatacgtggacgagataaacagcaatgcgattaaaagataa

SEQ ID NO: 1198 - protein, 351 aa, Treponema denticola
MYFFINDYSEGCHPKILKALTETNEEQTVGYGCDEYCAEAADLILKELDAPQSKVYFFSGGTQTNLTMIASVLRPHQGVIAADTGHINVHESGAIEACGHKVLTIESANGKITAEQAEALIRAHYDDPTAEHMVQPGMIYISNPTELGTIYSKKELQALKLTAQKYSVPLYVDGARLGTALTADNNDLSLADMARYTDAFYIGGTKMGALFGEALIINNQDLQKDFRYIQKQKGGLFAKGRLLGLQFKTLFKDKLYFEIGRTMNETAKMIRKGFSDRGFSFFMKSETNQSFPIIENSLLAKIEKEFKCEFWAKISENQTAVRFCTSWATTKEAVKKLFEYVDEINSNAIKR

SEQ ID NO: 1199 - DNA, 1056 bp, Geobacter sulfurreducens
  CDS (1)..(1056)
atgaacaactgcacgaccaccgagcgccgcaaccagtttgccagtgacaactacgccggaatctgccccgaggcatggcaggccatggaagaggccaaccgtgggtatgcctgttcctacggcgacgacacctggacggagagggcgtgccgcctgctgcgcgacacctttgaaaccgactgcgaggtgttcttcgtcttcaacggcacggcggccaactcactggccctggcatccctctgccagtcgtaccacagcatcatctgccacgagacatcccatatcgaaaccgacgaatgcggggccgccgaatttttttccaacggcacaaaaatacttctggttcccggcccccacggcaaggtcgacccggacgcagttgagcacacggtcaaacggcgcctcgacattcattaccccaagcccaaggtcctcagcatcacccaggcaacggaattggggaccctctattcggtggatgaactgcgcgagctgggccatcttgctcgacgcctggatctacgcgtccacatggacggggcccgttttgcaaatgccgttgccgccctcggtgtccacccgagcgagatcacctggaaggccggggtcgacgtgctctgtttcggcgggaccaagaacggcatggccgtaggtgaagcagtcgtgtttttcaaccgggagcttgcccgcgagttcgactaccgctgcaagcaggcaggacagcttgcctcgaagatgcgctttctggccgctccctggatcggcatgctggaaagcggtgcctggttgacccgctcagcccatgcgaatgcctgcgcagccagacttgaagcccggcttcgcgatattcccggcgtcggcatccgctttccccgccaggcaaactcggtctttgccgatctcccgccgggggtcgtcgacgccctccatgggcttggttggcatttctacaccttcatcggctccggcggagcgcgcttcatgtgctcctgggagacgagcgatcaggacatcgacctactggcgactgacatagcaggttgctgtaataggtaa

SEQ ID NO: 1200 - protein, 351 aa, Geobacter sulfurreducens
MNNCTTTERRNQFASDNYAGICPEAWQAMEEANRGYACSYGDDTWTERACRLLRDTFETDCEVFFVFNGTAANSLALASLCQSYHSIICHETSHIETDECGAAEFFSNGTKILLVPGPHGKVDPDAVEHTVKRRLDIHYPKPKVLSITQATELGTLYSVDELRELGHLARRLDLRVHMDGARFANAVAALGVHPSEITWKAGVDVLCFGGTKNGMAVGEAVVFFNRELAREFDYRCKQAGQLASKMRFLAAPWIGMLESGAWLTRSAHANACAARLEARLRDIPGVGIRFPRQANSVFADLPPGVVDALHGLGWHFYTFIGSGGARFMCSWETSDQDIDLLATDIAGCCNR

SEQ ID NO: 1201 - DNA, 1047 bp, Geobacter sulfurreducens
  CDS (1)..(1047)
atgaacatcattgacctgcgcagcgacaccgttacccggccgagccctgccatgcgcgccgccatggcgggagccgaggtaggggacgacgtctatggcgaagacccgaccgtgaaccggctggaggaactgggcgccgccacgctcggcacggaagcggccctgttcaccgccagcggtacccaggccaatcttctggctctcctggcccactgccggcgtggtgacgaatacattgccggccagaccgcccactgctatcgctacgaagggggcggtgccgccgctttggggggcatccagccccagcccctggaggtggaacccgacgggaccctcgatctctcagccgtggccgccgccatcaagccggacgacctccacttcgcccgcacccggctcctctgcctggaaaacacccatgccgggcgggttcttcccctggactacctggcacgcgccagacggctctgcaacgagcagagccttggcctgcacatggacggtgcccgcatcttcaatgccgccgtaaagctcggcgtaccggtccgcgagatcgccggtcacgtggattcggtgtcggtctgcctctccaaggggctcggcgccccggtggggtcgctgctctgcgggggaagggagttcgtcgccacggcccgccggtggcgcaaggcggtcggaggaggcatgcgccaggccggcatcctggcggccgccggcatcctggcgctgaccgaaaacgttgaccggctcgccgaggaccatgccaacgcccgccgcttggccgaggggttggccgccatcccggggctgggccttgacccgtcccaggtccagaccaacatggtattcctgtgcctccctctccggacggcggaccggctcgcctcatttctcaacgaacagggaattctcatctccggccgggaaagtatccgtctcgtcacccaccttgacgtaacctcttcggacgtggaacgggttatcgcggcattcggcgcattcttcgccggccacggcgagatgcaaccgggagcatcgtcatga

SEQ ID NO: 1202 - protein, 348 aa, Geobacter sulfurreducens
MNIIDLRSDTVTRPSPAMRAAMAGAEVGDDVYGEDPTVNRLEELGAATLGTEAALFTASGTQANLLALLAHCRRGDEYIAGQTAHCYRYEGGGAAALGGIQPQPLEVEPDGTLDLSAVAAAIKPDDLHFARTRLLCLENTHAGRVLPLDYLARARRLCNEQSLGLHMDGARIFNAAVKLGVPVREIAGHVDSVSVCLSKGLGAPVGSLLCGGREFVATARRWRKAVGGGMRQAGILAAAGILALTENVDRLAEDHANARRLAEGLAAIPGLGLDPSQVQTNMVFLCLPLRTADRLASFLNEQGILISGRESIRLVTHLDVTSSDVERVIAAFGAFFAGHGEMQPGASS

SEQ ID NO: 1203 - DNA, 1056 bp, Yersinia pestis
  CDS (1)..(1056)
atgatgaaatctatttttctagccaatgagaagacgatgctgatcgatttacgcagtgacacagtaacgcaaccctgtgccgccatgcgcgccgcgatggcgaatgccgaggtcggtgatgatgtgtatggcgatgacccaaccgtcaatgcgcttgaagccaaagccgccagtttatccggtaaagaagccgcgctgtttctgccaacaggcactcaggcaaatttggtggcgctattgacccattgtcagcgtggtgaagagtatattgtcggccaaaaagcccataactatttgtatgaagccgggggtgccgccgttttgggcagtatccaaccacaacctattgatgccaacgatgacggcacactaccactggataacgttctggccgccatcaaacccgatgacattcactttgcccccacccggctgttaagtttggaaaatactcacaatggcaaagtcttgcctttgcgttatttacagcaagcctgggcgttgacccgcgaaaaaaaactggcgttacatattgatggcgcacgtgtttttaatgctgcggtggcgctgaatgtgccactgaacgatattagccagtattgcgataccctgacaatttgtctgtcaaaaggattagggacgcctgttggttccctgctctgtggcagcgcagaattcattcatcgcgcccggcgctggcgaaaaatgaccggtggtggtatgcgtcaggccggtattttagcggcagccgggttgtatgcgctgcaacataatgtggcgagactcaaagatgatcacgataacgcccagtggttggaacagcaattacgtgacttaggcattgagatagccgcccccggcgcgcaaacaaacgtgctgtacattacgcaatctgccgaatcagcgttgaaacttggcccctggatgcgtgaacgtggtgtgctgatcagtgccgggccgctcacccgcctgattactcaccttaacgtgagccgaaaagatctggaaaaagtcgtcgcgctgtggcgtgaatttattgccgagcaacattcatga

SEQ ID NO: 1204 - protein, 351 aa, Yersinia pestis
MMKSIFLANEKTMLIDLRSDTVTQPCAAMRAAMANAEVGDDVYGDDPTVNALEAKAASLSGKEAALFLPTGTQANLVALLTHCQRGEEYIVGQKAHNYLYEAGGAAVLGSIQPQPIDANDDGTLPLDNVLAAIKPDDIHFAPTRLLSLENTHNGKVLPLRYLQQAWALTREKKLALHIDGARVFNAAVALNVPLNDISQYCDTLTICLSKGLGTPVGSLLCGSAEFIHRARRWRKMTGGGMRQAGILAAAGLYALQHNVARLKDDHDNAQWLEQQLRDLGIEIAAPGAQTNVLYITQSAESALKLGPWMRERGVLISAGPLTRLITHLNVSRKDLEKVVALWREFIAEQHS

SEQ ID NO: 1205 - DNA, 1140 bp, Ashbya gossypii
  CDS (1)..(1140)
atgttgccggcgcggtatctgacatcgaggaacgacttccggtcggacacgttcacgctgccgacggcggaggtgtgggcggcgggcgcgggcgcgtcgctgggggacacggtctaccaggaggacacggacacgtgcgcgctggaggcgcgggtggcgcaggagttcgggggcgcgcgcggcggggacgcggcggggctgatgtgcgtgtcgacgacgatggcgaaccagctggcggtgcgtgcgctgctggaccgggcgccaccgtactcggtgctgtgcgaccggcgcgcgcatgtgtacgtggacgagtgcgcggggctggcggtgctgtcgcaggcgctggtgattcctgcggaagccgcgaacgggcggcacctgacgctggaggacgtgcagcgcgcgtacgtgccggacgacggcgacacgcacggcgcgccgacgcgcgtcgtggcgctggagaacacgctgcacgggatgtgctttccgctggaggagatgcggcgcatctgcgactgggcgcacgcgcaggggatgctagtgcacctcgacggcgcgcggctgtggaacgcggccgcggcgcagccgggcgacgcggcggcgtacatgcggcgcgtgtgcgcgctgttcgactccgtgtcgctgtgcctgtcgaagtccgtgggcgcgccggtgggctccgtgctggtgggcggccgcgacctgatccggcgcgcgcgccacctgcagaagcagcagggcggcggcatccgccaggccgggtttctggcgcgcatggcggactactgcatcacgaaaaacgtgcctgggctgggcgacgtcgctgcgcgcgcggcggcgttctggcgggatctgcacgacgacctgcgtgaccaccacggtatgcagctgcatctagcgcacccggtggagaccaacttttttttcatagacctggagcgctcgggcatcgagccctcgagtctgctggagttcggcgccaagaacgacgtgcggcttttcgacgggcggctggcgttccacttccagaatgtggaggacagctcgctggcgcagctcaagcaagtctttgtcgacctggccgcctattaccgagagcatccgtacgtggcccccgctggcccccaacgccgctactag

SEQ ID NO: 1206 - protein, 379 aa, Ashbya gossypii
MLPARYLTSRNDFRSDTFTLPTAEVWAAGAGASLGDTVYQEDTDTCALEARVAQEFGGARGGDAAGLMCVSTTMANQLAVRALLDRAPPYSVLCDRRAHVYVDECAGLAVLSQALVIPAEAANGRHLTLEDVQRAYVPDDGDTHGAPTRVVALENTLHGMCFPLEEMRRICDWAHAQGMLVHLDGARLWNAAAAQPGDAAAYMRRVCALFDSVSLCLSKSVGAPVGSVLVGGRDLIRRARHLQKQQGGGIRQAGFLARMADYCITKNVPGLGDVAARAAAFWRDLHDDLRDHHGMQLHLAHPVETNFFFIDLERSGIEPSSLLEFGAKNDVRLFDGRLAFHFQNVEDSSLAQLKQVFVDLAAYYREHPYVAPAGPQRRY

SEQ ID NO: 1207 - DNA, 1008 bp, Vibrio vulnificus
  CDS (1)..(1008)
atggattttcgttctgacaccgtaactcgccctactcccgccatgcgcgaagccatggctaacgccatcgtcggcgatgatgtttacggtgatgacccaaccgtaaatgaactggaagcctttgccgccaaagaagccggctttgaagcggcgctctttactacttcaggtacgcaagcaaacctgctaggtttgatggcgcattgtgaacgcggtgatgagtatctttgtggccaacaagcgcacaactatcgttacgaggctggcggcgcggcagtattaggttcaatccaacctcaaccggttgagaacaatcccgatggcactttaccgtttgacaagctagccgccgccatcaaacccgatgacagccactttgcgcgcactaagctgcttagccttgaaaataccatcaacggtaaagtgctgcctttgagctatttgcaggaggcgcgtgctttcgtcgataaacacaatctaaaactccatcttgatggtgctcgtgtttataacgcagcaacggcgttggatgttccagtaagagacatcgctcagtattttgattcaatgaccatttgtctttccaaaggattgggcgctccggtgggttctctgctgctgggttctaaagaatacatcgcaaaagcacgacgtttacgcaaaatggtcggtggcggtatgcgccaagcgggtattttagccgcggcaggtaagcttgctttgaccgaacaagtggctcagttgaaagtcgatcatgccaatgccaaagcattggcgcagggtttgtctgagttgccaggtgtgcatgtcaatcctgatttcgtgcaaacaaacattgtgtttgccaaactggatgacaatgtcgacatcaacgcgattgcgcaaaaattggcggaagaatcgatcatcattaccccgggaaatccgattcgttttgtgactcacaaagatatttctcgccaagatattgatctatttctagaaaagttgcgattcttcctcggctaa

SEQ ID NO: 1208 - protein, 335 aa, Vibrio vulnificus
MDFRSDTVTRPTPAMREAMANAIVGDDVYGDDPTVNELEAFAAKEAGFEAALFTTSGTQANLLGLMAHCERGDEYLCGQQAHNYRYEAGGAAVLGSIQPQPVENNPDGTLPFDKLAAAIKPDDSHFARTKLLSLENTINGKVLPLSYLQEARAFVDKHNLKLHLDGARVYNAATALDVPVRDIAQYFDSMTICLSKGLGAPVGSLLLGSKEYIAKARRLRKMVGGGMRQAGILAAAGKLALTEQVAQLKVDHANAKALAQGLSELPGVHVNPDFVQTNIVFAKLDDNVDINAIAQKLAEESIIITPGNPIRFVTHKDISRQDIDLFLEKLRFFLG

SEQ ID NO: 1209 - DNA, 1038 bp, Porphyromonas gingivalis
  CDS (1)..(1038)
atgagcaagatcagcttcaaaaacgactattctgaaggtgcgcatcctgacatactgcatgcgctgacagataccaacttcgttccacaagagggatacggctatgactcctattgcgaggaagcgcgtgcgatgatccgccgtgaatgcaataagcccgatgccgaggtccatttcgtatcgggtgggacacagaccaatctcttggcaatcagtcacctgctccgtccgcacgaagctgtcatagcagcacagtcagggcatatcaacgtacacgaaaccggtgccatcgaatccaccggacataaggtttgcacagtacctactccactcggcaaactcagtgtggagcatatccgcgaagtccttgcttttcatacggacgaacacatggtaaggccgtccatggtctatatctcccaatccacagagttgggcacactctattctcgtcatgagctgtcggatctgtccaccttttgccgtgcaaacggtctcctactctacctcgacggtgcccgtatcggttcggcgatcatggcagagacagaggacaatccgaccctgaccgatatagccaccctgaccgatgcgttctacatcggcggcaccaagaacggagcactccttggagaagccattgtcttccctcgtccacgtccggacgatgctttcctctatcaaatcaaacagcgtggagccatgttggccaaagggcgcgtgctgggtatccagtttgccacgcttttccgcgatgggctttactaccggcttgcagctcatgccaacagaatggcagcagatctggcgacagctatctccttctgcggttattccttcctctaccctccgcaaaccaaccagatcttcccgatcctccccaacgatctgatcgaaagactgaaaaccgtattcgacttctacgtgtggcaagccgtatcacccgacagctcagccattcgtctggtcacttcatgggctactccatcggagaatgtagccgcctttgccgaatacctttccacctctcacatctaa

SEQ ID NO: 1210 - protein, 345 aa, Porphyromonas gingivalis
MSKISFKNDYSEGAHPDILHALTDTNFVPQEGYGYDSYCEEARAMIRRECNKPDAEVHFVSGGTQTNLLAISHLLRPHEAVIAAQSGHINVHETGAIESTGHKVCTVPTPLGKLSVEHIREVLAFHTDEHMVRPSMVYISQSTELGTLYSRHELSDLSTFCRANGLLLYLDGARIGSAIMAETEDNPTLTDIATLTDAFYIGGTKNGALLGEAIVFPRPRPDDAFLYQIKQRGAMLAKGRVLGIQFATLFRDGLYYRLAAHANRMAADLATAISFCGYSFLYPPQTNQIFPILPNDLIERLKTVFDFYVWQAVSPDSSAIRLVTSWATPSENVAAFAEYLSTSHI

SEQ ID NO: 1211 - DNA, 1035 bp, Gloeobacter violaceus
  CDS (1)..(1035)
atgcccgacccggttgtcgatctgcgcagcgacacggtgacccgaccgacccgggcgatgcgcgccgccatgttcgaagccgaagtcggggacgatgtctacggcgaagatccgaccgtcaaccgcctccaggagcgtgtcgcccacctgctcggcaaagaaaaggggctattttttccgagcggcacgatgtgcaaccaggtggccatcgccacccatacccgccccggccaagaaatcatctgtgatcgcgactgccatgtgttcaattacgagcgggccggggcaagccacctgggcggcgtgcaactccatcccctcgacggccgccacggggtcctgagtgcccagcaggtgcgctccgccgtccgccccatcgagttgcacgaaccgcccacgggcttgattctgctcgagaatacccacaaccgcggcggcggcacggtctatccccaggacgtcatcgaacaaatcgccgccgtcgccggcgccgcgggcatccccatgcacctcgacggtgcccggctattgaacgccagcgtcgccggttcccacagtccggcgacgctggcggcaccctttgattcggtctacttttgtctttccaagggcctcgggtgtccggcgggctcggtgctcgccggcaaagccgatttcatcgcccaggcgacacgcctgcgtaaggcctttggcggaggcatgcgccaggtgggttttctggcggctgccggtctgtacgccctcgatcaccacatcgagcgcctcgcggacgatcatcgccgggcacggcagttggccgtccacctaaaagatctcaacgccttcgatgtcgagctcgacgctgtgcacaccaacatcgtgatggtggatgtgcacgcggattgcacggcggcggcggtggcggcggatctgaccgcccacggcgtgcgggtgagtgtctttggtccccggcgtctgcggttggtcacccaccttgatatcgatgacgcgggagtggagcggaccgtcgccgtcttcaagcggctctacggctag

SEQ ID NO: 1212 - protein, 344 aa, Gloeobacter violaceus
MPDPVVDLRSDTVTRPTRAMRAAMFEAEVGDDVYGEDPTVNRLQERVAHLLGKEKGLFFPSGTMCNQVAIATHTRPGQEIICDRDCHVFNYERAGASHLGGVQLHPLDGRHGVLSAQQVRSAVRPIELHEPPTGLILLENTHNRGGGTVYPQDVIEQIAAVAGAAGIPMHLDGARLLNASVAGSHSPATLAAPFDSVYFCLSKGLGCPAGSVLAGKADFIAQATRLRKAFGGGMRQVGFLAAAGLYALDHHIERLADDHRRARQLAVHLKDLNAFDVELDAVHTNIVMVDVHADCTAAAVAADLTAHGVRVSVFGPRRLRLVTHLDIDDAGVERTVAVFKRLYG

SEQ ID NO: 1213 - DNA, 1029 bp, Chromobacterium violaceum
  CDS (1)..(1029)
atgcagtggatagaccttcgcagcgataccgtcacccatccgaccccggcgatgcgccgcgcgatggccgaggccgaagtcggcgacgatgtctacggcgacgaccccaccgtgctgaagctggaggcgctggccgccgacaggctgggcaaggaggcggcgctgctcgtccccagcggcaccttcggcaaccagctggcgctgttcacccactgccgccgcggcgacgaggtgattgtcgaggacaacagccacatcgtctggcacgaggccggcgcggcggcggtgatcgccggcgcccacctgcggacgatagagggcgataacggcctgatggcggtggacgcgatcgagcggcgcatccgcgtcggcgacgacatccacgagcctcgcaccggtctgatctgcctggaaaacgcccatggcaacggccgcgtgctgccgttgtcggcgatggccgacaccgcggcgctggcgcgcgagcacggcgtgccggtgcacctggacggcgcgcgggtgttcaacgccgccgcccatctgggctgcgacgtgcgcgaggtcacccgccacgtcgacagcgtgatggcctgcctgtccaagggcctggccgcgccgatcggctccatcctggccggttccgccgatttcatcgatcaggcgcgccgcaagcgcaagctgctgggcggcggcctgcgccaggccggcgtgatcgccgcgcccggcatcctggcgctgaccgagatggccgcgcgtctggacgaggaccaccgcaatgcccgctacctggccgagggcctggccaagctgccgtgcgtggacttgaatccggccgatgtccacatcaacctggtgtggttccgcttcaacgccgacatcgacgccgctgaactgatggccgcgctgaagcaggccggcttcctcgccaatccgccgcatcagggcgcgatgcgcctggtgacccactggcaggtaggccgcgccgacatcgaccgcctgttggaggtgatgcagcgcgtgctctgcgactga

SEQ ID NO: 1214 - protein, 342 aa, Chromobacterium violaceum
MQWIDLRSDTVTHPTPAMRRAMAEAEVGDDVYGDDPTVLKLEALAADRLGKEAALLVPSGTFGNQLALFTHCRRGDEVIVEDNSHIVWHEAGAAAVIAGAHLRTIEGDNGLMAVDAIERRIRVGDDIHEPRTGLICLENAHGNGRVLPLSAMADTAALAREHGVPVHLDGARVFNAAAHLGCDVREVTRHVDSVMACLSKGLAAPIGSILAGSADFIDQARRKRKLLGGGLRQAGVIAAPGILALTEMAARLDEDHRNARYLAEGLAKLPCVDLNPADVHINLVWFRFNADIDAAELMAALKQAGFLANPPHQGAMRLVTHWQVGRADIDRLLEVMQRVLCD

SEQ ID NO: 1215 - DNA, 1047 bp, Fusobacterium nucleatum subsp
  CDS (1)..(1047)
atgagtataaggaggaaaattattatgttaaattttaaaaatgattatagtgaaggagcttgttcagaagtattagaagcacttgttaaaacaaattatgaacaaactgttggttatggagaagatgaatattgtgaagaagctagaaatttaattaaagaaaatattaattattctaatgcagatatttattttttagttggagggacacaggcaaatacaacagttatttctcactctttaaaaccttatgaagctgttattgcttgtaaaacaggtcatatatctatacatgaaacaggagctattgaagcaacaggacataaaataattgaagtagatggaattgatggaaaattaactcctgatttaattttaaatgaattaagaaaacatgaagatcatcatatggtaaaaccaaaaatggtttatatttcaaataccactgaaataggaactgtctacactaaaagtgaattagaaaatattagtaaagtttgtaaggataataatttatacttatatttagatggtgcaagacttgcatctgcacttacctctgaaaaatgtgatataaatttagaagattatccaaaatattgtgatgttttctatattggaggaacaaaatgtggcttattgtttggtgaagcagttgtaattataaatgatgaaataaaaaaagaatttcaattctctgttaaacaaaaaggtggattatttgcaaaaggaagattattaggagtacagtttgcaactttatttaaagatgatttatactatagaataggtgttcattcaaataaaatggcattaaagataaaaaatgcttttgcagaaaagggtattaagttagctactgattcttatactaatcaagtttttgtagatttaagtcaagaacaaataaaaaaattagaaaaagatgttgttttttcagtagaattttttggaataggagaaaatcaatcatcaagatttgtaacttcttgggcaactaaggaagaagatgttaataaacttgtggaactgataaaaaatctttaa

SEQ ID NO: 1216 - protein, 348 aa, Fusobacterium nucleatum subsp
MSIRRKIIMLNFKNDYSEGACSEVLEALVKTNYEQTVGYGEDEYCEEARNLIKENINYSNADIYFLVGGTQANTTVISHSLKPYEAVIACKTGHISIHETGAIEATGHKIIEVDGIDGKLTPDLILNELRKHEDHHMVKPKMVYISNTTEIGTVYTKSELENISKVCKDNNLYLYLDGARLASALTSEKCDINLEDYPKYCDVFYIGGTKCGLLFGEAVVIINDEIKKEFQFSVKQKGGLFAKGRLLGVQFATLFKDDLYYRIGVHSNKMALKIKNAFAEKGIKLATDSYTNQVFVDLSQEQIKKLEKDVVFSVEFFGIGENQSSRFVTSWATKEEDVNKLVELIKNL

SEQ ID NO: 1217 - DNA, 1083 bp, Neurospora crassa
  CDS (1)..(1083)
atgacaactcccacggcgtccatgcttgccgctatccagtcctgctctctgctcgacgatgtcatgcaagaagatcccaccaccagcgaccttgaggcccactgcgctgctttgtgcggcaaggaggccggcctcctcgttttgtcaggcaccatgggcaatcagctagctatgaggtccttgctcacccaaccgcctcacggtgtgctctgcgatgcccgctgccacattgtaaaatatgaggctggaggtgtctcatctctaacgggcgccatgctcaagcctgtcatgcctagcaacggcgtctaccttaccctcgaagacgtcaaggccaacattcatctcgatgacgacgtgcacacttgcccgactcgcgttctcgagctcgagaacacactcaatggcatgatcatgccgctctccgaggtgcgccgcatctccgcctttgctcgcgagcatgggatcaagatgcactgcgacggcgcgcgcttgtgggaggcggtggcctctggtgctggaagccttgccgaatttgcaaagtgctttgacacaatcagcctatgcttctccaagggccttggagcacccattggcagcatgctggtaggccccaaggacgtgatcaagcatgcccggtgggtaagaaagtcgattggcggtggactaagacagtcgggcgtcgtggcggctgctgcgagggttgccgttgacgaaacgtttggcaaggggcccagtggcgaaggcggcaagttgaagggagcgcatattttggccaaggagatcgagaggatatggacgggcttgggcggcaagcttcttcatcctgttgacaccaacatggtgtggctcgatttgaacgatgcgaagtgttcggcggagaggatgaatgagctcggcaaagaatcgggactcaagttatgggcacctcgcttggtcatcagctaccaggtttttgaaaaccgtgaccatgtaatacccaagctggagagcatcttcgagacgatcatgcaggagaagacaacaaagacgggagaaggttttcagaaggctgatggagagatatcgcaatatcggagcaaatag

SEQ ID NO: 1218 - protein, 360 aa, Neurospora crassa
MTTPTASMLAAIQSCSLLDDVMQEDPTTSDLEAHCAALCGKEAGLLVLSGTMGNQLAMRSLLTQPPHGVLCDARCHIVKYEAGGVSSLTGAMLKPVMPSNGVYLTLEDVKANIHLDDDVHTCPTRVLELENTLNGMIMPLSEVRRISAFAREHGIKMHCDGARLWEAVASGAGSLAEFAKCFDTISLCFSKGLGAPIGSMLVGPKDVIKHARWVRKSIGGGLRQSGVVAAAARVAVDETFGKGPSGEGGKLKGAHILAKEIERIWTGLGGKLLHPVDTNMVWLDLNDAKCSAERMNELGKESGLKLWAPRLVISYQVFENRDHVIPKLESIFETIMQEKTTKTGEGFQKADGEISQYRSK

SEQ ID NO: 1219 - DNA, 1020 bp, Bordetella pertussis
  CDS (1)..(1020)
atgatcgatctgcgcagcgataccgtgacccgtcccagcgccgccatgcggcaggccatggcggccgcgccggtgggtgacgatgtgatgggcgatgaccccagcgtacggcgcctgcaggacgaggttgccgcgcgggcgggcaaggaggccgggctgttcttcccgtcgggcacgcagagcaacctggccgcgctgatggcgcattgcgcccgcggcgacgagtatctggtggggcagcaggcccatacgtacaaattcgagggaggcggcgctgcggtgctgggcagcatccagccgcagcccgtcgaccatgccgccgacggcagcctgccgctggacaggctggcggccgcgctcaagccgggcggcgatccgcatttcgcccgtacccggctgttggcgctggaaaacaccttccagggccgggtcatgcccgccggctatgtcgcgcaggccacgggctgggcccgcgagcatggcctgtccacccatctggacggcgcgcgcgtcttcaatgcggccgtggccagcggcgtgccggtgcaacagctgtgcgagccgttcgatacggtttcgatctgtttttccaaggggctgggcgcgccggtcggatcggtgctggtcggcagccgcgccctgatcgagcaggcgcatcgctggcgcaagatgctgggcggcggcatgcggcaggccggcatactggctgccgcctgcctgcacgcgctgcaccaccacgtcgagcgcctggcgctagaccacgacaacgcggcgcggctggccgcgggcctggacggcatcgacggcgtgcgcgtgctggggcagcacaccaacatggtgttcgccgagttcgatccggcccggtgcgaatcgctgaccacggcgctgcgcgggcagggcattctgatgcgggcggtctatggcgggccgacccgcctggtgacgcacctggacgtggacgccgacggcatcgatcgcgtcgtcgacgcggtacgcgggcattgcgcggccgcgcgctga

SEQ ID NO: 1220 - protein, 339 aa, Bordetella pertussis
MIDLRSDTVTRPSAAMRQAMAAAPVGDDVMGDDPSVRRLQDEVAARAGKEAGLFFPSGTQSNLAALMAHCARGDEYLVGQQAHTYKFEGGGAAVLGSIQPQPVDHAADGSLPLDRLAAALKPGGDPHFARTRLLALENTFQGRVMPAGYVAQATGWAREHGLSTHLDGARVFNAAVASGVPVQQLCEPFDTVSICFSKGLGAPVGSVLVGSRALIEQAHRWRKMLGGGMRQAGILAAACLHALHHHVERLALDHDNAARLAAGLDGIDGVRVLGQHTNMVFAEFDPARCESLTTALRGQGILMRAVYGGPTRLVTHLDVDADGIDRVVDAVRGHCAAAR

SEQ ID NO: 1221 - DNA, 1376 bp, Oryza sativa
  CDS (115)..(1233)
ctgctgcggaccgcgcctcatcgcgtcccgtctccacccgcgcctctcctctcgtcccgcgcctcggccgccgtctgattccgtgcagttggaggctaggaggagctcctcaaaatggtgaccaacgtggtggacctacggtcggacacggtgacgaagccctccgacgcgatgcgcgccgccatggccgccgcggacgtggacgacgacgtccttggcgccgacccgaccgcgcaccgcttcgagatggagatggcgaggatcacgggcaaggaggccgcgctgttcgtgccgtccggcaccatggccaacctcatctccgtcctcgtccactgcgacaccaggggcagcgaggtcatcctcggcgacaactcccacatccatatctacgagaacggcgggatctccaccatcggcggcgtccaccccaagaccgtcaggaacaaccccgatggaaccatggacatcgacaagattgtcgtcgccatcaggcatccggatggggcgctgtattatccgaccacaaggctgatctgcctggagaatacccatgcaaactgtggtggaaagtgtctgtctgctgaatatactgacgaggttggtgaagttgccaagagtcatggtctgaagcttcacatagatggagctcgcatttttaatgcttctgtggcccttggagttcctgttcatcgacttgtgaaagctgcggattcagtctcggtgtgcatatctaaagggttaggcgctcctgttggatcagttattgttggttcgacggccttcatagaaaaggctaaaattcttaggaagacactaggtggtggaatgaggcaagtgggaattctttgtgcggctgcctatgttgccgttcgcgacactgtaggaaaacttgctgatgaccatagaagggctaaagttttagcagatggtctgaagaaaatcaagcattttagagttgatacaacttcagtggagaccaatatggtattctttgatattgtggattcacgcatatcacctgacaaactgtgtcaagtccttgaacaacgcaatgtgcttgccatgccagcaggctcgaagagcatgaggcttgtcatccactaccaaatttctgatagtgatgttcagtatgcactgacatgcgtggagaaagctgctgaagaaatactgacaggcagtaagaagtttgaacatctgacaaacggtactaccaggaattcatacgggcactagtagatcactcctttcgtgcccactgatgcatcagtccagcgtccagcttgcttgtcatctcatgactgatgtactcacaacttggcttaataataactgatgttcactctgttggaaaaaaaaaaaaaaaaaaaaaaaaaaaa

SEQ ID NO: 1222 - protein, 372 aa, Oryza sativa
MVTNVVDLRSDTVTKPSDAMRAAMAAADVDDDVLGADPTAHRFEMEMARITGKEAALFVPSGTMANLISVLVHCDTRGSEVILGDNSHIHIYENGGISTIGGVHPKTVRNNPDGTMDIDKIVVAIRHPDGALYYPTTRLICLENTHANCGGKCLSAEYTDEVGEVAKSHGLKLHIDGARIFNASVALGVPVHRLVKAADSVSVCISKGLGAPVGSVIVGSTAFIEKAKILRKTLGGGMRQVGILCAAAYVAVRDTVGKLADDHRRAKVLADGLKKIKHFRVDTTSVETNMVFFDIVDSRISPDKLCQVLEQRNVLAMPAGSKSMRLVIHYQISDSDVQYALTCVEKAAEEILTGSKKFEHLTNGTTRNSYGH

SEQ ID NO: 1223 - DNA, 1242 bp, Streptomyces avermitilis
  CDS (1)..(1242)
atgagcgatacggcggagcagggcgaggaacgggcggcggagcgggccggggaggcgtcggcggaggggaccggggagacatctgcggaggggaccggggaggcgtcggctcagctgcggcgcgcgcggcggacggcggcctaccggggggcccggcgcgtcctgtcgcgccccgggttccgggccaccatcagggagcggctggcgctcctggaggacgcgtcgcggctgtacgacctggacgagtccgtggacatgtacggggacgggatcgtcgcggccctggaggagcgggtcgccgggctgctgggcatggaggccgcggcgttcttccccaccgggacgatggcccagcaggtggccctgcgctgctgggcgggtcgtaccggcaacccgaccgtggcgctgcacgcgctgagccaccccgaagtgcacgaacggaacgcgctcggcacggtcggcggactgcgcccggtccgcgtgacggacgagccccggctgccgaccgccgacgaggtgcgcgacttcgaggagcccttcggggccctcatgctcgaactgcccctgcgggacgtcggctacgtcctgccctcctgggaggagctgtccgaggtcgtggcggccgcccgggaacgtgacgcggtggtccacttcgacggcgcacgcctgtgggagtgcacaccccacttcagccgccccctggacgagatcgcgggcctcgcggacagcgtctacgtgtcgttctacaaatcgctcggcgggttcagcggcgcggcactggccggcccgaaaaccctggtcgacgaggcgaagacctggcggcaccggtacggcggcatggtcgtccaacagttcccggcggtgctgtccgcgctggccgggctggaggaggagctgccccggctgccggagtacgtggcgcacgcgcgcgtggtcgccgcggcgctgcgcgaggggttcgcggcggcgggggtgccctggctgcgcgtgcaccccgaggagccgcacacccatgagttccagctctggctgccgtacgaccccgaggtggtgacggaagccgccacgcggcaggccgaggagaccgggaccttcctgttcgccaacgcctggacccgcggcgggccgggcctggcggtcaccgaggtctccgtacgggcgcacggccttcagtggacggccgaagacgtcaaggcggccgtccaggagttcgtgacgcgcctgcccggcgctgccgggtag

SEQ ID NO: 1224 - protein, 413 aa, Streptomyces avermitilis
MSDTAEQGEERAAERAGEASAEGTGETSAEGTGEASAQLRRARRTAAYRGARRVLSRPGFRATIRERLALLEDASRLYDLDESVDMYGDGIVAALEERVAGLLGMEAAAFFPTGTMAQQVALRCWAGRTGNPTVALHALSHPEVHERNALGTVGGLRPVRVTDEPRLPTADEVRDFEEPFGALMLELPLRDVGYVLPSWEELSEVVAAARERDAVVHFDGARLWECTPHFSRPLDEIAGLADSVYVSFYKSLGGFSGAALAGPKTLVDEAKTWRHRYGGMVVQQFPAVLSALAGLEEELPRLPEYVAHARVVAAALREGFAAAGVPWLRVHPEEPHTHEFQLWLPYDPEVVTEAATRQAEETGTFLFANAWTRGGPGLAVTEVSVRAHGLQWTAEDVKAAVQEFVTRLPGAAG

SEQ ID NO: 1225 - DNA, 1071 bp, Streptomyces avermitilis
  CDS (1)..(1071)
atgaaccctcctaagaccgacgcccggcggcatcacgacccggaggtacgtggcttcgccagcgacaactacgcgggggcccaccccgaggtgctcgccgccctggccctggccaacggcgggcaccagatcgcgtacggcgaggacgagtacacggacaacctccagcgcatcgtccgcagccacttcggcgccggcgccgaggcgttccccgtcttcaacggcaccggcgcaaacgtcgtcgccctccaggcggtcaccgaccgctggggcgcggtgatctgcgcggagagcgcgcacatcaacgtggacgagggcggcgcccccgagcgcatgggcggcctcaaactcctcaccgtgcccacgcccgacggcaagctcacgcccgagctgatcgaccggcaggcgtacggctgggacgacgagcaccgtgcgatgccgcaggtcgtctcgatcgcccagaacaccgaactgggcaccgtctacacgcccgacgagatccgcgcgatctgcgaccacgcccacgggcacggcatgaaggtgcacctcgacggcgcccggatagccaacgcggccgcctcgctgaacgtccccatgcggacgttcaccaacgcggtcggcgtcgacatcctctccctgggcgggacgaagaacggcgcgctgttcggcgaggccgtcgtggtcatcaaccaggacgccgtcagccacatgaagcacctgcgcaagctgtccatgcagctggcctcgaagatgcgtttcgtctcggtgcagctggaggcgctgctcgccaaggatctgtggctgcgcaacgcccggcacgccaacgagatggcccagcggctcgcggagggcgtgcgcgcggtccacggcgtggagatcctctacccggtgcaggccaacgcggtcttcgcgcgtctcccgcacgacgtgagtgagcgcctgcagaagcactaccgcttctacttctggaacgaggccgcgggcgacgtccgctggatgtgcgccttcgacacgaccgaggacgacgtcgacggattcgtggcggcgctcaaggaggagatggcccggtag

SEQ ID NO: 1226 - protein, 356 aa, Streptomyces avermitilis
MNPPKTDARRHHDPEVRGFASDNYAGAHPEVLAALALANGGHQIAYGEDEYTDNLQRIVRSHFGAGAEAFPVFNGTGANVVALQAVTDRWGAVICAESAHINVDEGGAPERMGGLKLLTVPTPDGKLTPELIDRQAYGWDDEHRAMPQVVSIAQNTELGTVYTPDEIRAICDHAHGHGMKVHLDGARIANAAASLNVPMRTFTNAVGVDILSLGGTKNGALFGEAVVVINQDAVSHMKHLRKLSMQLASKMRFVSVQLEALLAKDLWLRNARHANEMAQRLAEGVRAVHGVEILYPVQANAVFARLPHDVSERLQKHYRFYFWNEAAGDVRWMCAFDTTEDDVDGFVAALKEEMAR

SEQ ID NO: 1227 - DNA, 1005 bp, Vibrio parahaemolyticus
  CDS (1)..(1005)
atggattttcgttcagacacagtgactcaacccacccaagctatgcgcgaagtaatgttcagcgcccctgttggcgatgatgtttatggtgacgatcctaccgtaaacgagctagagcaattcgcggctgaattagcagggtttgaggcagcgttgtttaccacttctggcacacaagcaaaccttttaggattaatggcgcactgtgagcgtggcgatgaatatttatgcggccagcaagcgcacaattacaaatatgaagcaggtggcgcagcggtactgggttctatccagcctcaaccaatagaaaacaatccagatggcacgttgccatttgacaaattagaggcggcaattaaacctgatgacgcgcactttgctcgtactcgtctgctaagtttagaaaacaccatcaacggtaaagtgatcccactgtcttacttagcggaagctcgtgaattcgttaataaacacaatctgaaactgcatctcgacggtgcccgtgtgtttaacgcagctgttgcgctcgatgttcccgtcaaagatattggtcagtactttgattccatgacgatttgtttatcgaaaggtcttgcggcacccgttggttcactgctgcttggcagcaaggaatacatcgcgaaagctcgccgtttaagaaagatggtcggtggcggaatgcgtcaggcaggtattctagcggcagcaggtaaactggcgatcactgaacaagtcgcgcagttaaagcaagatcacatcaatgcaaaagcattggcggaaggtttagctgaactaccgggtttctcggtaaatcctgacttcgttcaaaccaacattgtgtttgctaagttggatgctaaagtcgatatccaaagcatcgcggaacaactcaagcaacaaaacatcatcatcagcccaggaaacccaattcgctttgtcacacacaaagacatctctgctgaagatattcaaaccttcctatcgagccttaaatctctgctttag

SEQ ID NO: 1228 - protein, 334 aa, Vibrio parahaemolyticus
MDFRSDTVTQPTQAMREVMFSAPVGDDVYGDDPTVNELEQFAAELAGFEAALFTTSGTQANLLGLMAHCERGDEYLCGQQAHNYKYEAGGAAVLGSIQPQPIENNPDGTLPFDKLEAAIKPDDAHFARTRLLSLENTINGKVIPLSYLAEAREFVNKHNLKLHLDGARVFNAAVALDVPVKDIGQYFDSMTICLSKGLAAPVGSLLLGSKEYIAKARRLRKMVGGGMRQAGILAAAGKLAITEQVAQLKQDHINAKALAEGLAELPGFSVNPDFVQTNIVFAKLDAKVDIQSIAEQLKQQNIIISPGNPIRFVTHKDISAEDIQTFLSSLKSLL

SEQ ID NO: 1229 - DNA, 1077 bp, Vibrio parahaemolyticus
  CDS (1)..(1077)
atgagtacccacctaaaacagctttgtcatacccacctcccaggtaataaagaagactctccagccgagcactttgcaaaaatggcaaagtggtgtgaagagaacaaagtgaatcacgatgtctatggcgagggagaaacgattcacgcattcgagcaaaaggttgccgatctgctgggttacgaggcgggcctttttgttgtcactgggacgatgacacagccaacggtgctagaaatcgtcacaagacaaaagcgtaatcctattgttgcgatgcatgcatctagccatatacctgaacatgaaaagcaaggctatcagcttcaacatcgctttagtgttttgccagtagggaacgtttaccaaacgtggaagcttgaggatctcactgcgtggccggatgaaatcgcagccgttttgtatgaactcccgatgcgagaaattggcggtcagttaccttcatggcaagaactggaagaaatcaaagcttactgcgccgaaaaagacattcatctccacatggagggtgcaaggctttgggaaaccgcagcgtattatcagaaagaataccgcgagatcgccgctggttttgatacgacgtatgtatcactctataaaggcattaacggcatgggcggatctatgctgcttggttcaaaggcgttcattgaactggcctcaatgtggatgaagcgacaaggtggcaacctgtaccacagaacaccttatgtagtgtctgcggcaatgcagttcgatgaaaggttggcgcagctaccggatctgtttgagcgaacaaaacaaatctacaagatcattgatgagttcccatctttggcggtaagaccaacccaaccgcaagcaaacatgttgcaccttatcctgcctttcagctgtgaaaagttgaaagaactccaacatattttcgctacagaaaagggcatttggtttggtaatccgcaagtcacggcacatccacatcaatccatcgttgagtggtatgtcggtgactacctgctcaaccttggtgacgaagaattaaggtcatttttcaaccagttactcggtggtaaggcataa

SEQ ID NO: 1230 - protein, 358 aa, Vibrio parahaemolyticus
MSTHLKQLCHTHLPGNKEDSPAEHFAKMAKWCEENKVNHDVYGEGETIHAFEQKVADLLGYEAGLFVVTGTMTQPTVLEIVTRQKRNPIVAMHASSHIPEHEKQGYQLQHRFSVLPVGNVYQTWKLEDLTAWPDEIAAVLYELPMREIGGQLPSWQELEEIKAYCAEKDIHLHMEGARLWETAAYYQKEYREIAAGFDTTYVSLYKGINGMGGSMLLGSKAFIELASMWMKRQGGNLYHRTPYVVSAAMQFDERLAQLPDLFERTKQIYKIIDEFPSLAVRPTQPQANMLHLILPFSCEKLKELQHIFATEKGIWFGNPQVTAHPHQSIVEWYVGDYLLNLGDEELRSFFNQLLGGKA

SEQ ID NO: 1231 - DNA, 1005 bp, Pseudomonas syringae
  CDS (1)..(1005)
atgacggtcatcgatctgcgcagcgacacagtgactctgcccaccgcaggcatgcttgacgccatggcacatgcgccggtgggcgatgatgtctacggtgaagaccctacggtcaatctgctcgaggccacgctcgccgagcgcctcgggttcgacgccgccttgttcgtgccctccggcaccatgagcaatctgctggcgttgatggcgcactgtgagcggggcgatgaatacatcgtcggtcagcaggcccacacctataaatacgaagggggtggcgcggcggtactgggctcgattcagcctcagccgctggacgtgcaggcggacggttcgctgagcctgcaacaggtgctcgacaccatcaagccggacgacttccactttgcccgcacacgcctgctggccctggaaaacaccatgcagggcaaggtgctgccgcttgagtacctggccgccgcgcgcaagctgaccctggaaaaaggcctcgcgctgcacctcgacggcgcgcggctgtacaacgcggcggtcaagctgggcgttgatgcccgggagatcacccggcacttcgattcagtctccatctgcctatccaaaggcctgggcgcccccattggctcggtgctgtgcggctcgcagccgctgatggtcaaggcgcggcgtctgcgcaagatgctcggcgggggcatgcgtcaggcaggcgggctggccgctgccgggctctatgcgctggatcatcaggtccagcggctggccgacgatcatgccaatgcggcgtttctggccgagagcttgagcgggctgggttacagtgtcgagcctgtgcagaccaacatggtctatgtgcagatcggtgatcgcgccgcagcgctcaaggcattctgcgccgagcgtggcatcgtgctcactgccgcgtcgcggctgcgcatggtcactcacctgaatgtttcgcgtgctcaggcagagcaagtgatcgcggcattcgcagcctttgaacacccatga

SEQ ID NO: 1232 - protein, 334 aa, Pseudomonas syringae
MTVIDLRSDTVTLPTAGMLDAMAHAPVGDDVYGEDPTVNLLEATLAERLGFDAALFVPSGTMSNLLALMAHCERGDEYIVGQQAHTYKYEGGGAAVLGSIQPQPLDVQADGSLSLQQVLDTIKPDDFHFARTRLLALENTMQGKVLPLEYLAAARKLTLEKGLALHLDGARLYNAAVKLGVDAREITRHFDSVSICLSKGLGAPIGSVLCGSQPLMVKARRLRKMLGGGMRQAGGLAAAGLYALDHQVQRLADDHANAAFLAESLSGLGYSVEPVQTNMVYVQIGDRAAALKAFCAERGIVLTAASRLRMVTHLNVSRAQAEQVIAAFAAFEHP

SEQ ID NO: 1233 - DNA, 1041 bp, Pseudomonas syringae
  CDS (1)..(1041)
atgacagaccaaagccaacagttcgccagtgacaactactccggtatctgccctgaagcgtgggccgcgatggagcaggcgaacaaaggccatcaacgtgcctatggggacgatcaatggactgcgcgcgcctcggatgatttccgccgtttgtttgaaaccgactgcgaagtgttttttgctttcaacggcacagcggccaactcgctggcgctgtcctcgctgtgccagagttaccacagtgtcatctgttcggaaacggctcacgtcgaaaccgatgaatgcggcgcgccggaatttttctccaacggctccaagctgctgaccgcccgcagcccgggcggcaagctgaccccggaatcgattcgtgaagtggcgctcaagcgtcaggacattcactaccccaagccgcgcgttgtaaccctgacccaggccacggaagtgggcggcgtctatcagccagaagagctcaaggccatcagcgccacctgcaaggaactgggcctgcacctgcacatggacggtgcgcgcttctccaatgcctgcgcgtttctggatgcatcgccggccgagctgacctggaagtccggcgttgatgtgctgtgctttggcggcaccaaaaacggcatggcggtgggcgaggcgatcctgtttttcgaccacgatctggccgtcgatttcgattatcgctgcaagcaagccgggcaactggcgtcgaaaatgcgcttcctgtccgcgccctgggttggcctgctggaaaacgacgcgtggctcaaacatgctcgccacgccaaccggtgcgcacagttgctggctgatctggtcaaggacattgccggcgtcgaactgatgttcccggtgcaggccaatggcgtgtttctgcaactgtcggagcctgccatcgcagccttgaccgccaggggctggcgcttctacaccttcatcggcaatggcggcgcgcgcttcatgtgctcgtgggataccgaagaagaccgcgtgcgtgaactcgccgcggacatccgcctggtgatgcagggctga

SEQ ID NO: 1234 - protein, 346 aa, Pseudomonas syringae
MTDQSQQFASDNYSGICPEAWAAMEQANKGHQRAYGDDQWTARASDDFRRLFETDCEVFFAFNGTAANSLALSSLCQSYHSVICSETAHVETDECGAPEFFSNGSKLLTARSPGGKLTPESIREVALKRQDIHYPKPRVVTLTQATEVGGVYQPEELKAISATCKELGLHLHMDGARFSNACAFLDASPAELTWKSGVDVLCFGGTKNGMAVGEAILFFDHDLAVDFDYRCKQAGQLASKMRFLSAPWVGLLENDAWLKHARHANRCAQLLADLVKDIAGVELMFPVQANGVFLQLSEPAIAALTARGWRFYTFIGNGGARFMCSWDTEEDRVRELAADIRLVMQG

SEQ ID NO: 1235 - DNA, 1041 bp, Pseudomonas putida
  CDS (1)..(1041)
atgacagacaagagccaacaattcgccagcgacaactattccggtatctgccccgaagcctgggtggcgatggagaaagccaaccgcggccacgaccgcgcctacggcgacgaccagtggaccgagcgtgcatcggagtacttccgcaatctgttcgaaaccgactgcgaggtgttctttgccttcaacggcaccgcggccaactccctggccctggcatccctgtgccagagctatcacagcgtgatctgctccgagaccgcccacgtcgaaaccgacgaatgcggtgcaccggagtttttctccaacggctccaagctgctgacggcggccagcgtcaacggcaagctgacgccacagtcgatccgcgaagtggcgctcaaacgccaggatatccactaccccaagccgcgcgtggtgaccattacccaggccaccgaagtgggcacggtgtaccgccccgacgagctgaaggcgatcagcgccacctgcaaggagctgggcctgaacctgcacatggacggcgcacgctttaccaatgcctgtgcgttcctgggctgcagcccggccgaactgacctggaaggccggtgtggatgtgctgtgctttggcggcaccaagaacggcatggcggtgggcgaagcgattctgttcttcaaccgccagctggccgaagacttcgattatcgctgcaagcaggccgggcaactggcgtcgaagatgcgcttcttgtcggcgccctgggtcgggctgctggaagatggcgcatggttacgccatggcaaccacgccaatcattgcgcgcaactgctggcatcgctggtcagtgacctgccgggggtagagctgatgttcccggtggaggccaacggggtgttcctgcagatgccagagcacgccatcgaggcgctgcggggcaagggctggcgcttctatacctttatcggcagcggtggcgcgcgcttcatgtgctcgtgggataccgaagaagcgcgggtgcgtgagctggcggcggatatccgcacgatcattggtggctga

SEQ ID NO: 1236 - protein, 346 aa, Pseudomonas putida
MTDKSQQFASDNYSGICPEAWVAMEKANRGHDRAYGDDQWTERASEYFRNLFETDCEVFFAFNGTAANSLALASLCQSYHSVICSETAHVETDECGAPEFFSNGSKLLTAASVNGKLTPQSIREVALKRQDIHYPKPRVVTITQATEVGTVYRPDELKAISATCKELGLNLHMDGARFTNACAFLGCSPAELTWKAGVDVLCFGGTKNGMAVGEAILFFNRQLAEDFDYRCKQAGQLASKMRFLSAPWVGLLEDGAWLRHGNHANHCAQLLASLVSDLPGVELMFPVEANGVFLQMPEHAIEALRGKGWRFYTFIGSGGARFMCSWDTEEARVRELAADIRTIIGG

SEQ ID NO: 1237 - DNA, 1026 bp, Clostridium tetani
  CDS (1)..(1026)
atggattttttagatttgagaagtgataccgtaacaaaaccaacagaaaatatgagaaaagctatgtttaaagctaatgttggtgatgatgtatatggtgatgaccctacagtaaatgaactagaagagtatgctgctaatttggtggggaaagaaacagccttatttgttccaagtggagtttttggtaatcaactgtccctttttactcattgcaaaagaggtgatgaagttattttaggagaggattgtcatataataatgcatgaaacgggagcacctgctgttatagctggtgtacaattaagacctataaaaagcgaaaatggattcatgtcattagatgatatacaaagtaaaattagaggtgaaaatattcatttccctgatacttctcttatatgcgtggaaaatgctcattcctgtggaagagttatctctttgaaacatatggagaaaatatataatatatcaaggcaacataatataccaatacatttagatggagctaggctatttaatgcagctgcatatttagatgtaggtgttaaagacataaccaaatactgtgattctgtaatgttttccatttctaaaggactttgtgctcctgttggatcaatacttgcaggtagcaaggattttattaaaaaagctagaaagaaaagaaaactcatgggtggcggcttaagacaagcaggggtgttagcagcacctggactagtagctttaaaggaaatgattcctcaattaaaaaaagactatgaaaatgcattattattaggaaaagaattaagtaaaataccaaatataaaagtaaatttagatgatataaatattaacatggtatttttttctatagaaaatatagattatgatgaagtagatataataaataaattttatagtaagggtataaaaattaatggtaccgaagacggtaaatttagatttgccacacattattggattaaagaagaggatatttcatatataatagaaaccatgaaaatttctctgcaataa

SEQ ID NO: 1238 - protein, 341 aa, Clostridium tetani
MDFLDLRSDTVTKPTENMRKAMFKANVGDDVYGDDPTVNELEEYAANLVGKETALFVPSGVFGNQLSLFTHCKRGDEVILGEDCHIIMHETGAPAVIAGVQLRPIKSENGFMSLDDIQSKIRGENIHFPDTSLICVENAHSCGRVISLKHMEKIYNISRQHNIPIHLDGARLFNAAAYLDVGVKDITKYCDSVMFSISKGLCAPVGSILAGSKDFIKKARKKRKLMGGGLRQAGVLAAPGLVALKEMIPQLKKDYENALLLGKELSKIPNIKVNLDDININMVFFSIENIDYDEVDIINKFYSKGIKINGTEDGKFRFATHYWIKEEDISYIIETMKISLQ

SEQ ID NO: 1239 - DNA, 1083 bp, Bradyrhizobium japonicum
  CDS (1)..(1083)
atgacgagaccagccatgctctacaccccgcccccgatcgatcccaaggcgccgccggtgcgcatcaatctgctgtcggacacccagaccaagccgacggctgcgatgcgcgaggcgatggcgcgcgccgaggtcggcgacgagcaggtcggcgacgatccgaccgtgaacgcgctgtgcgagcgcgttgcggatctgctcggcaaggaggccgccgtgtacatgccctcgggcacgatgtgcaacgtcaccgcgacgctggtgcattgccggcccggcgacgagattctcgcgcacgagaccgcgcacatcatcgcccgtgagggcggcgcgcatgccgcgatcggcggcttccaggttacgcagctcaagggccccgacggccagttcacgccggagacgttccggaaagctctgcacccgcgcacgcgctaccagccgccgcagaccgtcgtcagcgtcgagcagaccgccaatatcggcggcggcacgatctggaagaaggccgcactcgacgagatcgtcgagatcgccaggcagcacggcctcgtcacccacatggacggcgcgcggctgctcaacgccacggtggcgagcggcatctctccgcgcgacatgaccgctggctgggattcggcctggatcgacttctccaagggcctgggcgcgccgatcggcggcgtgctcgccggctcgcgcgccttcatcgacgcggtctggcagtggaagcagcgcctcggcggctcgatgcggcaggccggaatctgcgccgccgcctgcatctacgccctcgaccatcacgtcgatcgccttgccgacgatcatgcccatgcgcgcgcactcgcccgcggactgtcgcagatcgcaggcatcgaggtgcaggagcccgagaccaacctcgtgttcttcaagcccgatggcgccggcgtccccggcgacaagatggtcgccgcactgcgccagcgcggcgtgacgctcgcgatgatggacggccgcatccgcgcctgcacgcatctcgacgtcaatgcgagccagatcgaggaaacgatcggatacgtgcgcgagatcgtgcgcggggcgtaa

SEQ ID NO: 1240 - protein, 360 aa, Bradyrhizobium japonicum
MTRPAMLYTPPPIDPKAPPVRINLLSDTQTKPTAAMREAMARAEVGDEQVGDDPTVNALCERVADLLGKEAAVYMPSGTMCNVTATLVHCRPGDEILAHETAHIIAREGGAHAAIGGFQVTQLKGPDGQFTPETFRKALHPRTRYQPPQTVVSVEQTANIGGGTIWKKAALDEIVEIARQHGLVTHMDGARLLNATVASGISPRDMTAGWDSAWIDFSKGLGAPIGGVLAGSRAFIDAVWQWKQRLGGSMRQAGICAAACIYALDHHVDRLADDHAHARALARGLSQIAGIEVQEPETNLVFFKPDGAGVPGDKMVAALRQRGVTLAMMDGRIRACTHLDVNASQIEETIGYVREIVRGA

SEQ ID NO: 1241 - DNA, 1044 bp, Bradyrhizobium japonicum
  CDS (1)..(1044)
atggtcgcgcaagagagaggccgcgacggcgtcgtcgatctgcgcagcgacaccgtcacgctgccgacggccgcgatgctggagcgcatgcagcgggccccgctcggcgacgacggccgcgagggcgacccgaccgtccgcgcgctcgaagcgcggggcgccgcgttgaccggcaaggaagctgccctgttcgtgccgagcggcacgatgggcaatctcctggcgatgctcgcccatgccgagcgcggcggagaggtcttcgccgacgctggtgcgcacctgctcaactccgagctcggcagcgtcgtgacgatcgcggggctggtgcccaagcccatgccgagccgtcgcggtgcaatggacgaagcggcgcttgcagacgcgatccgcggctcggaacgtcccggcctgatcgcaatggagactgcgcataacggcgccggcggcgccgtgctgcccccgccgcacatgatgcgaattcacgcgctcggacagagcaacgggatccccgtgcatctggacggcgcccgcctgttcaatgcctcggtcgcgctcggcgtgccggcggcacggatcgccgagcatgccgacagcgtgatggtctgcctgtccaagggcctgagcgcgccggtcggcagcctgctgtgcggcggcgcggcgttcgtcgcacgggcgcgcacgttgcggaaactcgtcggcggcaccatgcgccagtccggtgtcgtcgcagccgcgggcctcgtcgcgctggagacgatgatcgagcgcctctccaaggatcacgcggcagcaaggcggctcgccgcggccttgagctggctcgacccggcactcgccgatcccgaccaggtgcaaaccaacatcctgcgcgtcgacgtctccgcaagcggacgcgaggccgccgcatgggccgagggcgtgaagcagcgcggcatcctggtgcaggccagcggcccctcgcagctccggctcgtcacccatcgccacatcgacggagcggcggtggaccgcaccattgccgccttcgcggcgctcggccgctag

SEQ ID NO: 1242 - protein, 347 aa, Bradyrhizobium japonicum
MVAQERGRDGVVDLRSDTVTLPTAAMLERMQRAPLGDDGREGDPTVRALEARGAALTGKEAALFVPSGTMGNLLAMLAHAERGGEVFADAGAHLLNSELGSVVTIAGLVPKPMPSRRGAMDEAALADAIRGSERPGLIAMETAHNGAGGAVLPPPHMMRIHALGQSNGIPVHLDGARLFNASVALGVPAARIAEHADSVMVCLSKGLSAPVGSLLCGGAAFVARARTLRKLVGGTMRQSGVVAAAGLVALETMIERLSKDHAAARRLAAALSWLDPALADPDQVQTNILRVDVSASGREAAAWAEGVKQRGILVQASGPSQLRLVTHRHIDGAAVDRTIAAFAALGR

SEQ ID NO: 1243 - DNA, 1014 bp, Bacteroides thetaiotaomicron
  CDS (1)..(1014)
atgagaagttttgcctctgataataattccggtgtgcatccgttggtgatggaagcattgagccgggcaaacgcagatcatgcgttgggttatggtgatgatcgatggacggaagaagccgtagccaagataaaagaaacctttacacaggactgtgtccctttgtttgtattcaatggcacgggcagcaatgtggtggctttgcaagtaatgacgcgtccgtatcattcaatcttctgtgcagaaactgcccatatttatgtagacgagtgcggctctcccgtgaaaatgacaggttgtcagattcggccgattgccacaaccgatggtaagttgactcccgaactgatgcagccttatctgcacggtttcggcgaccagcatcattcgcaaccccgtgcgctttacatctctcaatgcaccgaactcggaacgatttatacacccgaagaactgaaacgtctgactgactttgcccatctgaacggtatgtatgtccacatggacggagcaaggattgccaatgcctgtgccgctcttcatctttcgctcaaagaactgactgtagactgtggaattgacatccttagtttcggcggaacaaaaaacggactgatgatgggggaatgtgtgattatatttaataaggacctgcaacgggaagcccgttttgtccggaaacaatctgcccaactggcttccaagatgcgttacctttcctgtcagtttactacctacttgacggatgacctgtggctgaagaatgccgctcatgccaatgcgatggcaggcaagctctatcgggcacttaaggaactgcccgaagtcacctttacccaaaagccggagagcaaccagttatttctgaccatgccccgtccgactatcgaccggatgctggaatcttatttcttttatttctggaatgaggcgaatcacgaaatccgcctggtgacttcttttgacacaacggaagaggatgtaaatcaatttattcgacttttgagacgttaa

SEQ ID NO: 1244 - protein, 337 aa, Bacteroides thetaiotaomicron
MRSFASDNNSGVHPLVMEALSRANADHALGYGDDRWTEEAVAKIKETFTQDCVPLFVFNGTGSNVVALQVMTRPYHSIFCAETAHIYVDECGSPVKMTGCQIRPIATTDGKLTPELMQPYLHGFGDQHHSQPRALYISQCTELGTIYTPEELKRLTDFAHLNGMYVHMDGARIANACAALHLSLKELTVDCGIDILSFGGTKNGLMMGECVIIFNKDLQREARFVRKQSAQLASKMRYLSCQFTTYLTDDLWLKNAAHANAMAGKLYRALKELPEVTFTQKPESNQLFLTMPRPTIDRMLESYFFYFWNEANHEIRLVTSFDTTEEDVNQFIRLLRR

SEQ ID NO: 1245 - DNA, 1077 bp, Vibrio vulnificus
  CDS (1)..(1077)
atgaaaaaggatttacgtgcgcattgccacaccattattgcgggcaatcacgagcaaagcccggcagaacatttctacgcgatggcgaaatggtgtgaagaacaccaagtgaagcacgatgtgtatggtgatggggaattcatcaactcattccaacaaaaagtagccgaccttttaggctttgaagcgggtttgtttgttatcacgggcaccatgacgcaggccacggcccttgagttggtgtgccgtaaaaaacgcaatcctgtggtcgcgatgcatgaatccagtcatatttatcgttttgaacgtcagggttatcaactgcagaatcgtttttccatcttgcctctgggcgatatgttccgaccttggacagcaaaagatctcaacgcctggccagatgaaatttcagcggtcctgtatgagctgccaatgcgtgagttaggcgggcaattgccaagttgggacgaactcaatgacatcaaagccgagtgtgaacaccgcgacattcacctccatatggatggtgctcgtttatgggagtgcgccgcctattatcaaaagtcgtacaaagagattgccacgggttttcagtcggcttatgtctctctctataagggcatcaatggcttagggggatcattgctactcggggacaagcaattcatcgagcaggcgtcgatttggatgaagcgccaaggtggcaatgtgtatcatcgcacgccttacgtggtgtcggctgcaatgcagtttgatcagcaattggcgaaaatgccagcgctgtttgcgcgcactcagcagatctaccaaatcctccgcgagttcccacagctggctgtgagcccgtatgagccgcacgccaacatgctgcacttgattgtgccgctgagcgttgagaacgccatcgagttgcgtgatcgagtggcagagcaaaaaggcatttggttagggcatccacaaaccacgcaacaccccgatcaatcgatcttcgagtggtatgtgggcgataggttgctcaacatcgctgatgatcagttgcgtgaagtgttggcttacttagcaaatgcagagtgttga

SEQ ID NO: 1246 - protein, 358 aa, Vibrio vulnificus
MKKDLRAHCHTIIAGNHEQSPAEHFYAMAKWCEEHQVKHDVYGDGEFINSFQQKVADLLGFEAGLFVITGTMTQATALELVCRKKRNPVVAMHESSHIYRFERQGYQLQNRFSILPLGDMFRPWTAKDLNAWPDEISAVLYELPMRELGGQLPSWDELNDIKAECEHRDIHLHMDGARLWECAAYYQKSYKEIATGFQSAYVSLYKGINGLGGSLLLGDKQFIEQASIWMKRQGGNVYHRTPYVVSAAMQFDQQLAKMPALFARTQQIYQILREFPQLAVSPYEPHANMLHLIVPLSVENAIELRDRVAEQKGIWLGHPQTTQHPDQSIFEWYVGDRLLNIADDQLREVLAYLANAEC

SEQ ID NO: 1247 - DNA, 1026 bp, Streptococcus agalactiae
  CDS (1)..(1026)
atgttacattttgaaaatgattataataaaggagctcatccagagcttttgaatgcccttattgaaactaatgatcaaggtctatcgggatatgggacagatagttactgtcaacaagcggcagataaaattcgagaagtctgttcctgtccacaagctgaagttgagtttttagtgggtggtactcaaacaaatcaagtagttatcagtagtatgcttgcttcttatgaaggagttattgctgcagaaacaggtcatgtgagtagtcatgaagcaggagccatagaattttcaggtcataaggtattgactttaccttctcataatgggaaattactcgcaagcgaagttgcaacttatattgagactttttatgctgatggtaattaccaacacatggtttttccaggaatggtttatatatcacatccaacagaatatggaacactttatagtaaagcagaactagaagagttatcgaagatttgtaaacattatcaaatccccttatttattgacggtgctcgtctggggtatggtttggctgcgaaagatacagatgttgatttcccaacgattgcagccttatcagatgttttttacattggtggaaccaaaatgggggctcttgctggggaagcagttgttttcacaaagaaaaatcgtccaaaacagtttactacaattgtaaagcagcatggtgcgttattagccaagggaagattgctggggcttgcttttgatcgtttctttacggatgacctttacttaaagattggaaagcatgcgattgacttagcagaggaattaaaaatcattttagaagaaaaaggttactcgttctatttaaaatcaccaactaatcaacaatttgttattgtagaaaatacaaaactaacagatttagcaaagaatgtagcttatagtttttgggaaaaatatgatgaccatcatactgtaatacgtctagcaactagttggtcaactagtcgcgaagatgtaactgctttaagaaatgtcttgtga

SEQ ID NO: 1248 - protein, 341 aa, Streptococcus agalactiae
MLHFENDYNKGAHPELLNALIETNDQGLSGYGTDSYCQQAADKIREVCSCPQAEVEFLVGGTQTNQVVISSMLASYEGVIAAETGHVSSHEAGAIEFSGHKVLTLPSHNGKLLASEVATYIETFYADGNYQHMVFPGMVYISHPTEYGTLYSKAELEELSKICKHYQIPLFIDGARLGYGLAAKDTDVDFPTIAALSDVFYIGGTKMGALAGEAVVFTKKNRPKQFTTIVKQHGALLAKGRLLGLAFDRFFTDDLYLKIGKHAIDLAEELKIILEEKGYSFYLKSPTNQQFVIVENTKLTDLAKNVAYSFWEKYDDHHTVIRLATSWSTSREDVTALRNVL

SEQ ID NO: 1249 - DNA, 1014 bp, Shewanella oneidensis
  CDS (1)..(1014)
atgatcgatttgcgcagtgataccgtgacccagccaactgaggcgatgcgtttagccatgtctagggcagaagtgggcgacgatgtttatggtgatgatccgaccgtgaacagtttgcaggacatggccgccgagatgtttggttttgagagcgctctttttacggcatcgggcactcaagccaatttgctcgcactgatggcgcattgcgagcgtggggatgaatatttatgtggtcagcaggcccataactacaaatttgaaggtggtggcgcggcggtattgggtagcattcaaccacaaccgttgacgaatcaactggatggcactattgcccttactgatgttgaagcagccatcaagcccgatgatattcattttgcccgcacacgcttactgagtttagaaaatactattggggggaaagtgttgtcgcaggcctatcttgccaatgcgcaggcgttggcttttcaacgtggtttaaaaattcatttagatggtgcaagggtggccaatgctgcagtagcacaaggtattgctattgctgatatagcagcgcattttgattcagtttccatttgtttatcaaaaggattatgtgcgccagtagggtcgttactcttaggggatgaacgcctgattaaaaaagcgacacgttggcgaaaaatgcttggtggcggtatgcgtcaagcgggtattttagcggcggctggcaagttagccttaactgaacaagttgaaagacttgcagaagatcatgaaaatgcggcttatctggctcagcagttaagccagttggatgagtttgacattgacttagcctcagttcaaaccaatatggtgtttgcaacattggcatcccatgtcgatgaacaggccttagtgaaacgctgtcgtggcgagggcattctgattagtcctggacgtaccttacgttttgttacccataaagatgtctcgcgtcaggatattgataaggtattgcaggtatttaaattacatctgcaggcgtaa

SEQ ID NO: 1250 - protein, 337 aa, Shewanella oneidensis
MIDLRSDTVTQPTEAMRLAMSRAEVGDDVYGDDPTVNSLQDMAAEMFGFESALFTASGTQANLLALMAHCERGDEYLCGQQAHNYKFEGGGAAVLGSIQPQPLTNQLDGTIALTDVEAAIKPDDIHFARTRLLSLENTIGGKVLSQAYLANAQALAFQRGLKIHLDGARVANAAVAQGIAIADIAAHFDSVSICLSKGLCAPVGSLLLGDERLIKKATRWRKMLGGGMRQAGILAAAGKLALTEQVERLAEDHENAAYLAQQLSQLDEFDIDLASVQTNMVFATLASHVDEQALVKRCRGEGILISPGRTLRFVTHKDVSRQDIDKVLQVFKLHLQA

SEQ ID NO: 1251 - DNA, 1002 bp, Escherichia coli O6
  CDS (1)..(1002)
atgattgatttacgcagtgataccgttacccgaccgagccgcgccatgctcgaagcgatgatggccgccccggttggggacgacgtttacggagacgaccctaccgttaatgctctgcaggactatgcagccgagctttccggtaaagaagccgccatttttctgcctaccggcactcaggccaacctggtcgctctgctcagtcactgcgaacgcggcgaagagtatatcgtcggtcaggccgcgcataactatctgtttgaagccggtggcgcagcagtgctgggcagtattcagccgcaacccatcgacgcagctgccgacggcacgctaccgctggataaagtggcgatgaaaatcaaacccgacgatatccatttcgcccgcaccaaattactcagtctggaaaacacccacaacggcaaagtgctgccgcgtgaatacttaaaagaggtatgggaatttacccgcaagcgcaatctggcgctgcatgttgacggtgcgcgcatctttaatgccgtggtggcttacggctgcgaactgaaagagatcacacaatattgtgactcgttcaccatttgcctgtcgaaaggtcttgggacgccagtcggttcattactcgtcggtaatcgtgattacattaaacgtgccattcgctggcggaaaatgacaggtggcgggatgcgccagtccggcattctggctgccgccgggctgtatgcgctgaaaaataacgtcgcacgtttgcaggaagaccacgacaacgccgcctggatggcgaagcaactgcgtgaagcaggcgcggatgtgatgcgtcaggacaccaatatgctgtttgttcgcgtcggggaagaaaatgctgccgcgttaggcgaatacatgaaagcgagaaacgtactgattaacgcctcgccgattgtccgcctggtgacgcatcttgacgtctcgcgcgctcagctggcggaagtcgccgcccactggcgcgcattcctggcgcgttaa

SEQ ID NO: 1252 - protein, 333 aa, Escherichia coli O6
MIDLRSDTVTRPSRAMLEAMMAAPVGDDVYGDDPTVNALQDYAAELSGKEAAIFLPTGTQANLVALLSHCERGEEYIVGQAAHNYLFEAGGAAVLGSIQPQPIDAAADGTLPLDKVAMKIKPDDIHFARTKLLSLENTHNGKVLPREYLKEVWEFTRKRNLALHVDGARIFNAVVAYGCELKEITQYCDSFTICLSKGLGTPVGSLLVGNRDYIKRAIRWRKMTGGGMRQSGILAAAGLYALKNNVARLQEDHDNAAWMAKQLREAGADVMRQDTNMLFVRVGEENAAALGEYMKARNVLINASPIVRLVTHLDVSRAQLAEVAAHWRAFLAR

SEQ ID NO: 1253 - DNA, 1026 bp, Bifidobacterium longum
  CDS (1)..(1026)
atgctgtcttttgagaacgattactcccgcgccgcccatcccgcggtgcttgaagccgtggctgaagccaacaaccatctgtattcgggctacgggtccgacgaactgagcgatcaggccaaggccaagatccgcgaggcctgcggccagccggacgcggatgtgtggttcctcgtcggcggcacgcagaccaaccaggtcgtcatcgacaccatcaccccggcgtatgcaggcgtggtcgcggtcgcctccggccatccgaacgtgcacgaggccggcgccatcgagttctccgggcacaaggtgctcacgattccccagcacaacggcaaaatggacccgaccgaactggacgagttctgcaagaccttctatgcggacggcaactacgagcacatggtgttcccgggctccgtgtacgtctcgcaaagcaccgaatatggcaccatctactccaaggccgagttgcaggccatcgccgatgtggcgcacaagtacgacatgccgctgttcgtggatggcgcgcgactcggctacgcgctgaccgccaccggttcagacatgacgctcgcggatctggcgaccatcgccgacgtgttctacatcggcggtaccaaggtgggtgccctgttcggcgaggccgtggtgtttaccaagcacaacacgccgaagcacttcttgaccctcatcaagcagcacggtgccttgctggccaagggctttgtgctgggcgcgcagtttgacgctttgttcaccgacaacctgtatttcaagatcgcccgcaacgccaatgaggcggccgatcgtattcgcgaggccctgcgcgccaagggctacacgctcactttcgaagcgcccaccaaccagattttcgtgacgatggatcagccgaccatcgaccgtctggagcgcgagatcaagctcggctttaccgaaaaggccgacgacacgcacaccgtgatgcgcatctgcaccagctgggccaccacgcctgaagaggtcgatcaacttattgagttgttgtaa

SEQ ID NO: 1254 - protein, 341 aa, Bifidobacterium longum
MLSFENDYSRAAHPAVLEAVAEANNHLYSGYGSDELSDQAKAKIREACGQPDADVWFLVGGTQTNQVVIDTITPAYAGVVAVASGHPNVHEAGAIEFSGHKVLTIPQHNGKMDPTELDEFCKTFYADGNYEHMVFPGSVYVSQSTEYGTIYSKAELQAIADVAHKYDMPLFVDGARLGYALTATGSDMTLADLATIADVFYIGGTKVGALFGEAVVFTKHNTPKHFLTLIKQHGALLAKGFVLGAQFDALFTDNLYFKIARNANEAADRIREALRAKGYTLTFEAPTNQIFVTMDQPTIDRLEREIKLGFTEKADDTHTVMRICTSWATTPEEVDQLIELL

SEQ ID NO: 1255 - DNA, 1116 bp, Rhizobium loti
  CDS (1)..(1116)
atggatgaaacgagcgtcaagaccatgagcgacagcaagcagacccgcccccgcggcttcaccagcgacaacatcgccggcgtctcccccgaggtgatcgcagccatcaccgcgtgcgcgtcgggtcaggcgcttccctacggcaacgatgagctgacgcataccgtcgagcgccagctcgccgaggtgttcgagcatgcggtcgacgtgttcctcgtttcgacggggtcggcggcgaacgcgctggcgctcgcggcgattacgccgccatggggcagcatcctctcgcacgccgacgcacacatcaaccgcgacgagtgcggcgcgccggagttctacaccgccggtgcgaagttggtgcagcttccaggcgaggctggcaaaatcgccatcgacgccttggcggccaatgcaacgcgcatggtgggcgatatccactcggtccagccctccagcgtcagcatcacgcaggcgaccgagatgggatcggtctacgcgctcgacgaaatcagggcgatcggacatatctgccggtcagcgaacctgccgctccacatggacggtgctcgcttcgccaacgccctcgtcactctgcgctgctcgccggccgagatgacgtggaaggccggcgtcgacctagtgtcgtttggcgccaccaagaacggaacgtttggggtcgatgcggtcgtctcgtttcgcagagatctcgcgagcacgatcgcctttcgccgcaagcgggccggccagttgagttccaagatgcgcttcatggcggcgcaaatggacggttatctgagggacggtgtctggcttcgcaacgcggtccatgccaatgcgatggcatcggcgctcgcgcgggggttggccctggtgccaggcgtgaaaatccagcagcggcccgaggccaatatactgttctgccgacttcccacgtccctgatccgggggctgctcgacatgggattccgcttctaccatgatcgctgggagcccgggatcgtgaggttcgtcacctctttcgcgacgaccgaggccgacgtgtccgacttgatcggcgcggcgaccagcctctgcgcaccggtcggctcggctcgtgttccggctggcgccgaatga

SEQ ID NO: 1256 - protein, 371 aa, Rhizobium loti
MDETSVKTMSDSKQTRPRGFTSDNIAGVSPEVIAAITACASGQALPYGNDELTHTVERQLAEVFEHAVDVFLVSTGSAANALALAAITPPWGSILSHADAHINRDECGAPEFYTAGAKLVQLPGEAGKIAIDALAANATRMVGDIHSVQPSSVSITQATEMGSVYALDEIRAIGHICRSANLPLHMDGARFANALVTLRCSPAEMTWKAGVDLVSFGATKNGTFGVDAVVSFRRDLASTIAFRRKRAGQLSSKMRFMAAQMDGYLRDGVWLRNAVHANAMASALARGLALVPGVKIQQRPEANILFCRLPTSLIRGLLDMGFRFYHDRWEPGIVRFVTSFATTEADVSDLIGAATSLCAPVGSARVPAGAE

SEQ ID NO: 1257 - DNA, 1074 bp, Xanthomonas campestris
  CDS (1)..(1074)
atgatggacgggcagggcagcgctgcacgcatcagctttcgcaacgattacagcgagggcgcacatccgcgcgtcttgcaggcattggcgcaggccagtgacgagcaaaatggcggctacggcaccgatcggcatagcgaacgtgctgcggcattgatccgcaatgccatcgcgcaaccgcaggccgccgtgcatctgctggtcggtggcacgcagaccaacctgattgcgatcagcgcgtttttgcgcccgcatcaggcggtgattgcggtggaagcgggccacatcgccacgcacgaaaccggcgcgatcgaggccaccgggcacaaggtgctcaccgtccccgcgctgcacgacaagctgacgcctgcattgatcgcgccactgcttgcggtgcacagcaacgagcacatggtgcagccgcgcctggtttatctttccaacagcaccgagagcggcaccatctacacgcgtgccgaacttgaggcgctcgcgcagttctgccgcgcgcacgacttgctgctgtatctggatggcgcgcgcctgggcgcggcattgactgcccatggcaacgatctggatctaccgacgattgccgcgctcaccgatgcgttctacatcggcggcaccaagaatggcgccttgctcggcgaagcgctgatcatcgtgacgccggcgttgcaggccgatttccgctacctgatcaagcaacgcggcgcgctgctggccaagggcatggtgctgggtgcgcagttcgctgcgcttttcgaagaggggctgttctttgagttagccgcgcatgccaatgcaatggcgcagcggctgcgtgccggcttgctggccgccggcgccgaattcaccagcaactcgccgaccaaccagcaattcattgccgtgagcgcgcagcaggccgagcagatcgcgcagcgctacgacttcgaacgctgggaaacgcgcagcgacggccgcctggtgattcgcttcgtgacctcgtgggccaccacgcctgccgcagttgatcgtctgtgcgcgtatgttgcggcccttttgcagcatcctgcggtgcagtcatga

SEQ ID NO: 1258 - protein, 357 aa, Xanthomonas campestris
MMDGQGSAARISFRNDYSEGAHPRVLQALAQASDEQNGGYGTDRHSERAAALIRNAIAQPQAAVHLLVGGTQTNLIAISAFLRPHQAVIAVEAGHIATHETGAIEATGHKVLTVPALHDKLTPALIAPLLAVHSNEHMVQPRLVYLSNSTESGTIYTRAELEALAQFCRAHDLLLYLDGARLGAALTAHGNDLDLPTIAALTDAFYIGGTKNGALLGEALIIVTPALQADFRYLIKQRGALLAKGMVLGAQFAALFEEGLFFELAAHANAMAQRLRAGLLAAGAEFTSNSPTNQQFIAVSAQQAEQIAQRYDFERWETRSDGRLVIRFVTSWATTPAAVDRLCAYVAALLQHPAVQS

SEQ ID NO: 1259 - DNA, 1065 bp, Xanthomonas axonopodis
  CDS (1)..(1065)
atgatggacgggcagggtagcgctacgcgcatcagctttcgcaacgactacagcgaaggcgcgcatccgcggctgttgcaggcgttggcgcaggccagcgccgagcagcatgccggctatggcaccgatcggcacacagcgcgtgcggttgcgttgatccgcaccgcagtcgcgcagccgcaggccgacgtgcatctgctggtcggcggcacgcagaccaatctgattgcgatcagcgcgttcttgcgcccgcatcaggcagtcatcgcggtggacgcggcgcatatcgccacgcacgagaccggcgccatcgaagcgaccggccacaaggtgctcaccgtgccggcgctgcacgacaagctgacgcctgcgctgattcagccggtgctggctgtgcacagcaacgaacacatggtgcagccgcgtctggtctacatttccaacagcaccgaaagcggcaccatctatacgcgcgccgaactcgatgcgttgtcgcggttttgtcgcgcgaacgatttgctgctgtacctggatggcgcgcgtctgggtgcggcgctgaccgccgacggcaacgatctggatctgccggccattgccacgctgaccgacgcgttctatatcggtggcaccaagaatggtgcgctgctcggcgaagcgctggtcatcgtcaatcccgccctgcaggcggatttgcgttatctgatcaagcagcgcggcgcgctactggccaagggcatggtggttggtgcgcaatttgcggcgttgttcgaagacagtctgttcttcgaactggccgcgcatgccaatgccatggcgcaacgcttgcgcgccggcctgcttgcggccggcgcgcacttcaccagcgactcgccgaccaaccagcagttcatcgccgtcagcgcgcaacacgctgcgcagctcgtgcaacgctacgacttcgagcgctgggaagtgcgcaccgatggcagtcaggtaatccgcttcgtgacctcgtgggcgaccacagccgcgtcggtcgatcggctgtgtgcggatgttgccgcacttcatcgcggcgtgtcgtaa

SEQ ID NO: 1260 - protein, 354 aa, Xanthomonas axonopodis
MMDGQGSATRISFRNDYSEGAHPRLLQALAQASAEQHAGYGTDRHTARAVALIRTAVAQPQADVHLLVGGTQTNLIAISAFLRPHQAVIAVDAAHIATHETGAIEATGHKVLTVPALHDKLTPALIQPVLAVHSNEHMVQPRLVYISNSTESGTIYTRAELDALSRFCRANDLLLYLDGARLGAALTADGNDLDLPAIATLTDAFYIGGTKNGALLGEALVIVNPALQADLRYLIKQRGALLAKGMVVGAQFAALFEDSLFFELAAHANAMAQRLRAGLLAAGAHFTSDSPTNQQFIAVSAQHAAQLVQRYDFERWEVRTDGSQVIRFVTSWATTAASVDRLCADVAALHRGVS

SEQ ID NO: 1261 - DNA, 1041 bp, Thermoanaerobacter tengcongensis
  CDS (1)..(1041)
atgaaatatattgacctaagaagcgacacagtaacccagcccactcctgagatgagagaagccatgtacaaagctgaagtgggcgatgacgtatacggagaagaccctactgtgagaaaacttgaagaaatggcagcagaaatgctaggaaaagaagcagcaatgcttgtgaccagcggaactcaagggaaccaagtctcaataatgactcacactcatccaggagaagaaatcatactagaggaaaattcccacataataacctatgaagttggagggataggctatctcgctggagtacaggcaaaaactttgaagggcaataaaggagttttaaatccggaagatgtggaaaaagctataaggcctaaaaacatacactttcctgagacaagcctaatctgccttgaaaacacacacaatagagcaggtggcactgtgactccaattgaagtcatgaaaaagatatatgaaatcgcacaaaagcatggaatacctgtacatctggacggcgccagaatatttaacgccgcgacatatctcaaagtagatgtaaaagaaattgcgaaatatgctgacagcgtgatgttctgcctttcaaaagggttatgtgcccctatcgggtctatcgtcgtcggaacaaaagaatttattgaaagggcgaggaaataccgcaagatgctgggaggaggaatgaggcaggcaggtttcatcgctgctgctggcatcgtagcccttgaaaaaatgacaaaaaggcttcaagaagaccatgacaatgcaaggcttctggccgaaggtctgaaaaacatccccgggatagaccttgatatggaaacagtgcaaactaacatagtaatgactgatatttctggcactggaatgacaggaagggaattttctctaaagttaaaagaacacggcgttttagtaaatgggggagatgacttttcagtaagatttgtgactcactattacataactaaagaagacgtaaagaaggccttgagtgcaattgaaaaagtggtaagagaaaagcattaa

SEQ ID NO: 1262 - protein, 346 aa, Thermoanaerobacter tengcongensis
MKYIDLRSDTVTQPTPEMREAMYKAEVGDDVYGEDPTVRKLEEMAAEMLGKEAAMLVTSGTQGNQVSIMTHTHPGEEIILEENSHIITYEVGGIGYLAGVQAKTLKGNKGVLNPEDVEKAIRPKNIHFPETSLICLENTHNRAGGTVTPIEVMKKIYEIAQKHGIPVHLDGARIFNAATYLKVDVKEIAKYADSVMFCLSKGLCAPIGSIVVGTKEFIERARKYRKMLGGGMRQAGFIAAAGIVALEKMTKRLQEDHDNARLLAEGLKNIPGIDLDMETVQTNIVMTDISGTGMTGREFSLKLKEHGVLVNGGDDFSVRFVTHYYITKEDVKKALSAIEKVVREKH

SEQ ID NO: 1263 - DNA, 1023 bp, Fusobacterium nucleatum
  CDS (1)..(1023)
atgataaattttaaaaatgattatagtgaaggagcttgttcagaagtactggaagcattgataaaaactaattatgagcaaacagtaggttatggagaagatgaatactgtgaaaaggctaaaaatttaattaaagaaaatattaattatcctaatgcaaatatttattttttagttggtgggacacaagcaaatacaactgttatttctcactctctaagaccttatgaagctgttattgcttgtaagacaggacatatctctatacatgaaacaggagctattgaagctactggacataaaataattgaagtagatggaattgatgggaaattaactcctgatttaattttaaatgaattaagaaaacatgaagatcatcacatggtaaaacctaaaatggtttatatttcaaatactactgaaataggaactgtttatactaaaaaagaattagaaaatattagtaaagtttgtaaagataataatttatatttatatttagatggtgcaagacttgcatctgcacttacctctgaaaaatgtgatataaatttagaagattatccaagatattgtgatgttttctatattggtggaacaaaatgtggcttattatttggtgaagcagttgtgattataaatgatgagataaagaaagaatttaacttttctgttaaacaaaaaggtggattatttgcaaaaggaagattattaggaatacagtttgcaactttatttaaagatgatttatattatagaataggtgttcattcaaataaaatggcattaaaaataaaaaatgcttttatagaaaaaggtattaagttagctactgattcttatactaaccaagtttttgtagatttaagtcaagaacaaataaaaaaattagaaaaagatgttatattttcagtagaattttttggaataggagaaagtcaatcatcaagatttgtaacttcttgggcaacaaaagaagaagatattgataaacttgtagaactgattaaatctctttaa

SEQ ID NO: 1264 - protein, 340 aa, Fusobacterium nucleatum
MINFKNDYSEGACSEVLEALIKTNYEQTVGYGEDEYCEKAKNLIKENINYPNANIYFLVGGTQANTTVISHSLRPYEAVIACKTGHISIHETGAIEATGHKIIEVDGIDGKLTPDLILNELRKHEDHHMVKPKMVYISNTTEIGTVYTKKELENISKVCKDNNLYLYLDGARLASALTSEKCDINLEDYPRYCDVFYIGGTKCGLLFGEAVVIINDEIKKEFNFSVKQKGGLFAKGRLLGIQFATLFKDDLYYRIGVHSNKMALKIKNAFIEKGIKLATDSYTNQVFVDLSQEQIKKLEKDVIFSVEFFGIGESQSSRFVTSWATKEEDIDKLVELIKSL

SEQ ID NO: 1265 - DNA, 1533 bp, Arabidopsis thaliana
  CDS (303)..(1379)
gataatatttcattttcgtcgtttctttctttctaagtttcgatgtcagttcctaatctctatggcgttcatgatagccaaatggtaactttggtggcctaatgtatgtcacgtaaattatccacgtggcactcacttttttgcatctttctcaaaatatatcaaaggagacttcataaagaaagaatctttagtgtggagagactaaaaggacaccacaagcttatttcataagaaacttcaaattagaatcagaaacaagagcatccttcttcatttacacaggtaaattaggtgtaaaaatggtgatgagaagtgtggatctacgatcagataccgttactagaccgacagatgcgatgcgagaagcaatgtgtaacgcagaggtggatgatgacgtcctcggatatgacccaacggctagacgtcttgaagaggagatggctaagatgatggggaaagaggctgctctgttcgtgccatccgggacaatggggaatctgatcagcgtgatggttcactgcgacgtgagaggcagcgaggtgattcttggcgacaattgtcacatccatgtttacgagaatggagggatatcgactatcgggggagtgcatcctaagacagtcaagaatgaagaagacgggaccatggacttggaggccattgaagcagctattagagatcctaaaggaagcacgttttatccatcaacaaggttgatttgcttggagaacacacatgccaactctggtgggagatgtttgagcgtggaatacactgagaaagttggagagattgcgaagagacatggcgtgaagctccatatcgacggagcccgtcttttcaatgcttccattgcacttggagttccagtccataagcttgttaaggctgcggactccgttcaggtgtgtctctctaaaggtcttggagctccggtaggatctgtaatcgttggttcgcaaagcttcatagagaaggcgaaaacggttaggaaaacattaggtggaggaatgagacaaataggtgttctgtgcgcagccgctttggtcgcactccaagaaaacctcccaaagctacaacatgaccacaagaaggctaagttgttagctgaagggttgaatcaaatgaaagggattagagtaaatgttgcagccgtggagaccaacatgattttcatggatatggaggatggttcaagacttacggctgagaaactgcggaagaatctagaggagaatggcattctccttatccggggaaactcatcccggatcagaatagttatacaccaccagataacaacaagtgatgtgcattacacattgtcttgctttcagcaagcaatgctaacgatgcaggaaccaagccgaacctaatttggcgaaaccgaaatgcttcttcttttcttttcaacttattaaatattgttgtctaaagtacattttaattaaaactataagcatttcaatgaaattgtcaccctcattcctggatgtttgagtttttaatttataagttgttttacctttg

SEQ ID NO: 1266 - protein, 358 aa, Arabidopsis thaliana
MVMRSVDLRSDTVTRPTDAMREAMCNAEVDDDVLGYDPTARRLEEEMAKMMGKEAALFVPSGTMGNLISVMVHCDVRGSEVILGDNCHIHVYENGGISTIGGVHPKTVKNEEDGTMDLEAIEAAIRDPKGSTFYPSTRLICLENTHANSGGRCLSVEYTEKVGEIAKRHGVKLHIDGARLFNASIALGVPVHKLVKAADSVQVCLSKGLGAPVGSVIVGSQSFIEKAKTVRKTLGGGMRQIGVLCAAALVALQENLPKLQHDHKKAKLLAEGLNQMKGIRVNVAAVETNMIFMDMEDGSRLTAEKLRKNLEENGILLIRGNSSRIRIVIHHQITTSDVHYTLSCFQQAMLTMQEPSRT

SEQ ID NO: 1267 - DNA, 1098 bp, Ralstonia solanacearum
  CDS (1)..(1098)
atgaaccgcgatccgatgccgaccaccagaacacccgccctgggctttaccagcgacaacatcgaaggcgcgtcgcccgaggtgctcgatgccatccttgccgccaatgccggtcaggcggccccatacggcgcggatgactgcaccgcccgggtcgagcaaacgctgagcgagctgttcgagcgcgaagtcaaagtcttcctggtcccgaccggcaccgcggccaatgcgctctgcctgggcgcgatgacgccgccctggggcaacgtgtactgccacccgtcaagccacatcaacaacgacgagtgcggtgcccccgagttctatacgaacggcgcgaaactggtcgcagtggatgggccatccgccaagatcgatgtggagaagcttcgcgccgccacccgcgtgaaggtgggcgacgtgcattccacccagcccgcttgcgtcagcctgacgcaagcgacggaagtcgggagcctctacacgctgaatgagatcgaagcgatcggacagctctgcaaggacgcccgcatcaagctgcagatggatggctcgcgctttgccaacgcgctggtctccctgggctgctcgcccgcggcaatgacatggaaagcgggcgtcgatgcgctgtcgttcggcgcgaccaagaatggcgtcgtcgcggcggaagccattgtgctgtttgacctgtcgctcgcggccgagatgggctaccgccgcaagcgggccggccatctgttctcgaagatgcgttttctgtcggcccagatcgaagcctacctggccaacgatctctggttgcgcaacgcacgccaggcaaacgacatggccctgcgcctggcccgtggccttgaagggatgcatggggccagcgtgctgggcgccacggaagccaacatcgtcttctgccgcctcccctcgaccctcattgaaaacctgctccaggcgggattccgcttttatcacaatcgctgggagccgaacgtggtgcgctttgtgacgtccttcgccaccacggccgatgatgtcgacaacctgctgcggcatatgaaggccgcagccgccgggccatcggcagacacccatgccaccgcatga

SEQ ID NO: 1268 - protein, 365 aa, Ralstonia solanacearum
MNRDPMPTTRTPALGFTSDNIEGASPEVLDAILAANAGQAAPYGADDCTARVEQTLSELFEREVKVFLVPTGTAANALCLGAMTPPWGNVYCHPSSHINNDECGAPEFYTNGAKLVAVDGPSAKIDVEKLRAATRVKVGDVHSTQPACVSLTQATEVGSLYTLNEIEAIGQLCKDARIKLQMDGSRFANALVSLGCSPAAMTWKAGVDALSFGATKNGVVAAEAIVLFDLSLAAEMGYRRKRAGHLFSKMRFLSAQIEAYLANDLWLRNARQANDMALRLARGLEGMHGASVLGATEANIVFCRLPSTLIENLLQAGFRFYHNRWEPNVVRFVTSFATTADDVDNLLRHMKAAAAGPSADTHATA

SEQ ID NO: 1269 - DNA, 1038 bp, Ralstonia solanacearum
  CDS (1)..(1038)
atgcaacacttcgcctccgacaactacgccggcttctgcccggaatccctgaagtacttcctggaagcgaacggcagcggccacgagcccgcctacggcgacgactcctggacgcagcgcgtatgcgaccgcatccgcgatctgttcgagaccgattgcgaagtctttttcgtcttcaacggcaccgccgccaattcgctggcgctgtccgcgctgtgccagtcgtaccactccgtcatctgccatgagctggcgcacatcgagacggacgagtgcggcggccccgagttcttctccaacggctccaagctgctgaccgccgagggcgccgacggcaagctgacgcccgacgcggtggaggcgctggtcacgcgccgctccgacatccactaccccaagcccaaggtggtctcgctcacgcagtcgaccgaggtgggcacggtctacacggtggacgaggtgcgggcgattgccgctgtcgcccgccgccggcagctgcgcgtgcacatggacggcgcgcgcttcgccaacgcggtggcctcgctcggcgtgcatccgtccgagatcacctggcgcgcgggggtggacgtgctgtgcttcggcggcaccaagaatggcctgccggtgggcgaggcggtggtgttcttcaaccgccgcctggccgaggacttcgcctaccgcgtcaagcaggccgggcaactggcctccaagatgcgcttcatctccgcgccgtggctgggcctgctggagaacgacgtgtggctgcgcaacgcgcgccatgccaacgcgatggcgcaactgctgcaccagcgcatccgcgaggtgccgggcgtgcgcatcatgttcccgccgcaggccaatgccgtgttcgccgagctgccgctgcccgccatcgagacgctgcgcgcgcgcggctggcgcttctacaccttcatcggcgcaggcggctgccgcttcatgtgtgcgtgggacttgcagcccgagacggtggaggcgctcgccggcgacatccgcctggcctgcggacaggccgcatag

SEQ ID NO: 1270 - protein, 345 aa, Ralstonia solanacearum
MQHFASDNYAGFCPESLKYFLEANGSGHEPAYGDDSWTQRVCDRIRDLFETDCEVFFVFNGTAANSLALSALCQSYHSVICHELAHIETDECGGPEFFSNGSKLLTAEGADGKLTPDAVEALVTRRSDIHYPKPKVVSLTQSTEVGTVYTVDEVRAIAAVARRRQLRVHMDGARFANAVASLGVHPSEITWRAGVDVLCFGGTKNGLPVGEAVVFFNRRLAEDFAYRVKQAGQLASKMRFISAPWLGLLENDVWLRNARHANAMAQLLHQRIREVPGVRIMFPPQANAVFAELPLPAIETLRARGWRFYTFIGAGGCRFMCAWDLQPETVEALAGDIRLACGQAA

SEQ ID NO: 1271 - DNA, 1002 bp, Salmonella typhimurium
  CDS (1)..(1002)
atgattgatttacgcagtgataccgttacccgaccgggccgcgccatgctcgaggcgatgatgaccgccccggtcggggacgacgtatacggcgatgaccctactgttaacgcccttcagcgctacgccgccgacctttccggtaaagaagcggcgctttttttacccaccggcacccaggccaatctggtcgcgctgcttagccattgtgaacgcggcgaagagtatatcgtcggtcagggcgcgcataattatctctatgaagctggcggcgcggcggtgctcggcagcattcagccgcagcccatcgacgccgccgcggacggtacgctgccgctggagaacgtggcggcgaagattaaagcggatgacatccacttcgcgcgcacgcgcttgctcagtctggaaaatacgcataacgggaaagtgctgccgcgcgcgtatctgaaagacgcctggacatttacccgcgaacgtggactggcgctgcacgttgacggcgcccgaatttttaacgcggtggttgcctacggctgtgagttaaaagagattacgcagtattgcgactcttttaccatctgcctgtcaaaaggtctcggaacgccggtcggttcactgctggtcggcaaccgcgattacattaaacgcgcgacgcgctggcgtaaaatggtcggcggcggaatgcgtcaggccgggattctggcagcggccggactgtatgcgctgaagcataacgtggcgcgtctgcaagaggatcatgataacgccgcctggctggcgcagcagcttcgggaagcgggcgcggaggtcatacgccacgaaacgaatatgctgtttgttcgcgttggcgaagcacaggccgccgcgcttggcgactatttgcgggaacggaatatcctgattaacgccgcgccgattgtgcgtctggtgacgcatctggatgtctctcgcgaacagcttaccgacgtcgtcgcccactggcgcgcctttttagcccgctaa

SEQ ID NO: 1272 - protein, 333 aa, Salmonella typhimurium
MIDLRSDTVTRPGRAMLEAMMTAPVGDDVYGDDPTVNALQRYAADLSGKEAALFLPTGTQANLVALLSHCERGEEYIVGQGAHNYLYEAGGAAVLGSIQPQPIDAAADGTLPLENVAAKIKADDIHFARTRLLSLENTHNGKVLPRAYLKDAWTFTRERGLALHVDGARIFNAVVAYGCELKEITQYCDSFTICLSKGLGTPVGSLLVGNRDYIKRATRWRKMVGGGMRQAGILAAAGLYALKHNVARLQEDHDNAAWLAQQLREAGAEVIRHETNMLFVRVGEAQAAALGDYLRERNILINAAPIVRLVTHLDVSREQLTDVVAHWRAFLAR

SEQ ID NO: 1273 - DNA, 1047 bp, Rhizobium meliloti
  CDS (1)..(1047)
atgatcttctcctccgacaactgggccggcgcccatccggcgattgccgaaagtctggtcgcgaatgcgcagggctatgcttccgcctacggcacgagcgaactcgaccggagggtggaacagagattttcggagattttcgagagggacgtcgcggtattcttcgtgggcaccggaaccgccgcaaattcccttgcgctttcgagcgccaatcgggcgggcggaatcgctttctgccatcgcgaagcgcatgtgaacgtcgacgagtgcggcgcgccggagttcttctcgcacggcgcgaggctgtgcccggtcgagggcgcccgcggcaggatggagccggcgaagctcgaggccgaaattcggcggctcccgagggagaacgtccatggcggtcagccgatggcggtgacgctgacgcaggcgaccgagagcggcaccgtctattcgctcgaccagatcgaaacgatcggttcgatcgcccgctcccataaactgccgctgcacatggatggcgcccgtttcgccaatgccctggtcagccttggtacgacaccggccgagatgacctggaagcgtggcgtcgatctgctttcgttcggcggaaccaagaacggctgctggtgcgccgaggcgctggtgctcttcgacctttcgaaggcgcaggagatgcacttcctgcgcaagcgctcggctcaactcttctccaagtcgcgcttcgtcgccgcccagttcgacgcctatcttgccggcgatctctggctcgatcttgcgcgccacgccaacgcgatggcacagcgcctcgccgacggcatcaccgcttcggccgggagccggcttgcctgggcgcccgatgccaacgaggtcttcgtcgtgctgaaacgggaggccgcgggtcggctgcagcggcagggcgcgcttttctacgattgggaagtgccgcacgatctcgaaggcagcctcgcggaagacgaagggctctatcgcctggttaccagcttcgccacccgcgccgaggacgtcgaccgtttcgtcgccgcctgctga

SEQ ID NO: 1274 - protein, 348 aa, Rhizobium meliloti
MIFSSDNWAGAHPAIAESLVANAQGYASAYGTSELDRRVEQRFSEIFERDVAVFFVGTGTAANSLALSSANRAGGIAFCHREAHVNVDECGAPEFFSHGARLCPVEGARGRMEPAKLEAEIRRLPRENVHGGQPMAVTLTQATESGTVYSLDQIETIGSIARSHKLPLHMDGARFANALVSLGTTPAEMTWKRGVDLLSFGGTKNGCWCAEALVLFDLSKAQEMHFLRKRSAQLFSKSRFVAAQFDAYLAGDLWLDLARHANAMAQRLADGITASAGSRLAWAPDANEVFVVLKREAAGRLQRQGALFYDWEVPHDLEGSLAEDEGLYRLVTSFATRAEDVDRFVAAC

SEQ ID NO: 1275 - DNA, 1092 bp, Rhizobium loti
  CDS (1)..(1092)
atgaacgaaagcaagcagacccgcccccgcggctttaccagcgacaacatcgccggcgtctcccccgaggtgatcgcagccatcaccgcgtgcgcgtcaggtcaggcgcttccctacggcaacgatgagctgacgcataccgtcgagcaccagctcgccgaggtgttcgagcatgcggtcgacgtgttcctcgtttcgacggggtcggcggcgaacgcgctggcgctcgcggcgattacgccgccatggggcagcatcctctcgcacgccgacgcacacatcaaccgcgacgagtgcggcgcgccggagttctacaccgccggtgcgaagttggtgcagcttccaggcgaggctggcaaaatcgacatcgacgccttggcggccaatgccatgcgcatggtgggcgatatccactcggtccagccctccagcgtcagcatcacgcaggcgaccgagatgggatcggtctacgcgctcgacgagatcaaggccatcagccatatctgccggtcagcgaacctgccgctccacatggacggtgctcgcttcgccaacgccctcgtcactctgcgctgctcgccggccgagatgacgtggaaggccggcgtcgaccttgtgtcatttggcgccacgaagaatggaacgtttggggtcgatgcggtcgtctcgttccgcggagatctcgcgagcacgatcgcctttcgccaaaagcgggccggccagttgagttccaagatgcgcttcatggcggcgcaaatggacggttatctgagggacggtgtctggcttcgcaacgcggtccatgccaatgcgatggcatcggcgctcgcgcgggggttggccctggtgccaggcgtgaagatccagcagcgtcccgaggccaacatcctgttctgccgacttcccacgtccctgatccgggggctgctcgacatgggattccgcttctaccatgatcgctgggagcccgggatcgtgaggttcgtcacctctttcgcgacgaccgaggccgacgtgtccgacttgatcggcgcggcaaccagcctctgcgcaccggtcggctcggctcgtgttccggctggcgccgaatga

SEQ ID NO: 1276 - protein, 363 aa, Rhizobium loti
MNESKQTRPRGFTSDNIAGVSPEVIAAITACASGQALPYGNDELTHTVEHQLAEVFEHAVDVFLVSTGSAANALALAAITPPWGSILSHADAHINRDECGAPEFYTAGAKLVQLPGEAGKIDIDALAANAMRMVGDIHSVQPSSVSITQATEMGSVYALDEIKAISHICRSANLPLHMDGARFANALVTLRCSPAEMTWKAGVDLVSFGATKNGTFGVDAVVSFRGDLASTIAFRQKRAGQLSSKMRFMAAQMDGYLRDGVWLRNAVHANAMASALARGLALVPGVKIQQRPEANILFCRLPTSLIRGLLDMGFRFYHDRWEPGIVRFVTSFATTEADVSDLIGAATSLCAPVGSARVPAGAE

SEQ ID NO: 1277 - DNA, 1313 bp, Arabidopsis thaliana
  CDS (91)..(1158)
gagtcacccgaagcacatctctttttatctcttcgccaagaaaacaaaaagcatagcctaacagaacagaatctagtgagccaaatcaagatggtgacgccaactacaattagaaccgtcgatctccgctccgacacggtgactaaaccaacagagtcaatgcgttcagcaatggcaaacgcggaagtagacgacgacgttttgggaaacgatccaacggctctgcgtttggagaaagaggtggctgagatcgctggaaaagaggcggcgatgtttgttccgtcagggacaatggggaatctgataagcgtgttggtccattgtgatgagagagggagtgaagtgattcttggagacgactctcacattcatatatatgaaaacggcggcgtttcaagcctcggtggtgtgcatccgaggacggtgaagaatgaggaagacggtacgatggagattggtgctattgaagctgccgtgaggagtcccaaaggagatctccatcatccggttactaagcttatatgtcttgagaatactcaagcaaattgtggaggtagatgccttcctatagaatatatagacaaagtcggagaattagccaagaaacatggtttgaagcttcacattgacggagctaggattttcaacgcttctgtggcacttggagttcccgtgaagaggattgttcaagcagctgattctgtctcgatctgtttgtcgaaaggtattggtgcaccggtcggttcggtaatcgtgggaagcaagaagttcattactaaagcaaggtggttaaggaaaacattaggcggaggaatgagacagatcggcgtgctctgcgccgccgcattggtggctctccatgaaaacgtcgccaagctcgaagatgaccataagaaagccagggttttggcagaaggactgaaccggattgaacggttaagagtgaacgttgcagctgtggaaaccaacatcatatacgtagacataccagaagatccaaaatttggagcagaagaggcatgtaagagcttggaagatgtcggtgtgcttgtcataccccaagctacattcagaatcaggattgttctacaccaccaaatctcagacgtcgacgtggaatatgtactctcttgctttgagaaaatatttcactcgtgaagagaagagaaggcgttattattttaagtaatttcactcgttggacatgtgtaaggttgtatttgaatcttcattcagaataaggttgtatttgaatcgattttcttggtttacaaatgaaaacctttaaccaagaagtagaaaactctttcatc

SEQ ID NO: 1278 - protein, 355 aa, Arabidopsis thaliana
MVTPTTIRTVDLRSDTVTKPTESMRSAMANAEVDDDVLGNDPTALRLEKEVAEIAGKEAAMFVPSGTMGNLISVLVHCDERGSEVILGDDSHIHIYENGGVSSLGGVHPRTVKNEEDGTMEIGAIEAAVRSPKGDLHHPVTKLICLENTQANCGGRCLPIEYIDKVGELAKKHGLKLHIDGARIFNASVALGVPVKRIVQAADSVSICLSKGIGAPVGSVIVGSKKFITKARWLRKTLGGGMRQIGVLCAAALVALHENVAKLEDDHKKARVLAEGLNRIERLRVNVAAVETNIIYVDIPEDPKFGAEEACKSLEDVGVLVIPQATFRIRIVLHHQISDVDVEYVLSCFEKIFHS

SEQ ID NO: 1279 - DNA, 1059 bp, Arabidopsis thaliana
  CDS (1)..(1059)
atggtgatgagaagtgtggatctacgatcagataccgttactagaccgacagatgcgatgcgagaagcaatgtgtaacgcagaggtggatgatgacgtcctcggatatgacccaacggctagacgtcttgaagaggagatggctaagatgatggggaaagaggctgctctgttcgtgccatccgggacaatggggaatctgatcagcgtgatggttcactgcgacgtgagaggcagcgaggtgattcttggcgacaattgtcacatccatgtttacgagaatggagggatatcgactatcgggggagtgcatcctaagacagtcaagaatgaagaagacgggaccatggacttggaggccattgaagcagctattagagatcctaaaggaagcacgttttatccatcaacaaggttgatttgcttggagaacacacatgccaactctggtgggagatgtttgagcgtggaatacactgagaaagttggagagattgcgaagagacatggcgtgaagctccatatcgacggagcccgtcttttcaatgcttccattgcacttggagttccagtccataagcttgttaaggctgcggactccgttcaggtgtgtctctctaaaggtcttggagctccggtaggatctgtaatcgttggttcgcaaagcttcatagagaaggcgaaaacggttaggaaaacattaggtggaggaatgagacaaataggtgttctgtgcgcagccgctttggtcgcactccaagaaaacctcccaaagctacaacatgaccacaagaaggctaagttgttagctgaagggttgaatcaaatgaaagggattagagtaaatgttgcagccgtggagaccaacatggatggttcaagacttacggctgagaaactgcggaagaatctagaggagaatggcattctccttatccggggaaactcatcccggatcagaatagttatacaccaccagataacaacaagtgatgtgcattacacattgtcttgctttcagcaagcaatgctaacgatgcaggaaccaagccgaacctaa

SEQ ID NO: 1280 - protein, 352 aa, Arabidopsis thaliana
MVMRSVDLRSDTVTRPTDAMREAMCNAEVDDDVLGYDPTARRLEEEMAKMMGKEAALFVPSGTMGNLISVMVHCDVRGSEVILGDNCHIHVYENGGISTIGGVHPKTVKNEEDGTMDLEAIEAAIRDPKGSTFYPSTRLICLENTHANSGGRCLSVEYTEKVGEIAKRHGVKLHIDGARLFNASIALGVPVHKLVKAADSVQVCLSKGLGAPVGSVIVGSQSFIEKAKTVRKTLGGGMRQIGVLCAAALVALQENLPKLQHDHKKAKLLAEGLNQMKGIRVNVAAVETNMDGSRLTAEKLRKNLEENGILLIRGNSSRIRIVIHHQITTSDVHYTLSCFQQAMLTMQEPSRT

SEQ ID NO: 1281 - DNA, 1071 bp, Streptomyces coelicolor
  CDS (1)..(1071)
atgaacccaccgaagaccgacgcgcgtcgccatcacgaccccgaggtccgcggtttcgccagtgacaactacgccggggctcacccggaagtactcgccgcgctggcgctggccaacggcgggcaccaggtcgcgtacggcgaggacgactacaccgagaacctccagcgcgtgatccgcagccacttcggctccggcgccgaggcgttcccggtcttcaacggcaccggcgccaacgtcgtcgcgctccaggcggtcaccgaccgctggggcgcggtgatctgcgccgagagcgcgcacatcaacgtcgacgagggcggcgcccccgagcgcatgggcggcctcaagctgctcaccgtccccacccccgacggcaagctcacgcccgagctgatcgaccgccaggcctacggctgggacgacgagcaccgggcgatgccgcaggtcgtctcgatcacccagagcaccgagctgggcaccctctacacgcccgacgagatccgcgccgtctgcgagcacgcccacgcgcacggcatgaaggtgcacctggacggctcccggatagccaacgccgccgcctcgctggacgtgcccatgcgcacgttcaccaacgcggtcggcgtcgacctcctctccctcggcggcaccaagaacggcgcgctgttcggcgaggcggtcgtcgtcctgaaccaggacgccgtgcgccacatgaagcacctgcgcaagctgtccatgcagctggcctccaagatgcgcttcgtgtccgtgcagctggaggcgctgctggccaaggacctgtggctgcgcaacgcccggcactccaacgagatggcccagcgcctggccgagggcgtgcgcgccgtgcacggcgtggagatcctctacccggtgcaggccaacgcggtcttcgcccggctgccgcacgaggtgagcgagcgcctgcagaagcggttccgcttctacttctgggacgaggccgccggcgacgtgcgctggatgtgcgccttcgacaccaccgagaacgacgtcgacgctttcgtgtccgccctcaaggaagagatggcgcgctga

SEQ ID NO: 1282 - protein, 356 aa, Streptomyces coelicolor
MNPPKTDARRHHDPEVRGFASDNYAGAHPEVLAALALANGGHQVAYGEDDYTENLQRVIRSHFGSGAEAFPVFNGTGANVVALQAVTDRWGAVICAESAHINVDEGGAPERMGGLKLLTVPTPDGKLTPELIDRQAYGWDDEHRAMPQVVSITQSTELGTLYTPDEIRAVCEHAHAHGMKVHLDGSRIANAAASLDVPMRTFTNAVGVDLLSLGGTKNGALFGEAVVVLNQDAVRHMKHLRKLSMQLASKMRFVSVQLEALLAKDLWLRNARHSNEMAQRLAEGVRAVHGVEILYPVQANAVFARLPHEVSERLQKRFRFYFWDEAAGDVRWMCAFDTTENDVDAFVSALKEEMAR

SEQ ID NO: 1283 - DNA, 1113 bp, Arabidopsis thaliana
  CDS (1)..(1113)
atggtgacgccaactacaattagaaccgtcgatctccgctccgacacggtgactaaaccaacagagtcaatgcgttcagcaatggcaaacgcggaagtagacgacgacgttttgggaaacgatccaacggctctgcgtttggagaaagaggtggctgagatcgctggaaaagaggcggcgatgtttgttccgtcagggacaatggggaatctgataagcgtgttggtccattgtgatgagagagggagtgaagtgattcttggagacgactctcacattcatatatatgaaaacggcggcgtttcaagcctcggtggtgtgcatccgaggacggtgaagaatgaggaagacggtacgatggagattggtgctattgaagctgccgtgaggagtcccaaaggagatctccatcatccggttactaagcttatatgtcttgagaatactcaagcaaattgtggaggtagatgccttcctatagaatatatagacaaagtcggagaattagccaagaaacatggtttgaagcttcacattgacggagctaggattttcaacgcttctgtggcacttggagttcccgtgaagaggattgttcaagcagctgattctgtctcgatctgtttgtcgaaaggtattggtgcaccggtcggttcggtaatcgtgggaagcaagaagttcattactaaagcaaggtggttaaggaaaacattaggcggaggaatgagacagatcggcgtgctctgcgccgccgcattggtggctctccatgaaaacgtcgccaagctcgaagatgaccataagaaagccagggttttggcagaaggactgaaccggattgaacggttaagagtgaacgttgcagctgtggaaaccaacatcgtaaatccaaaatttggagcagaagaggcatgtaagagcttggaagatgtcggtgtgcttgtcataccccaagctacattcagaatcaggattgttctacaccaccaaatctcagacgtcgacgtggaatatgtactctcttgctttgaggtatgtagtttgctttcatctactgatatgtgctttgatatttttaatttctttgctacgctttattcattcattgattaa

SEQ ID NO: 1284 - protein, 370 aa, Arabidopsis thaliana
MVTPTTIRTVDLRSDTVTKPTESMRSAMANAEVDDDVLGNDPTALRLEKEVAEIAGKEAAMFVPSGTMGNLISVLVHCDERGSEVILGDDSHIHIYENGGVSSLGGVHPRTVKNEEDGTMEIGAIEAAVRSPKGDLHHPVTKLICLENTQANCGGRCLPIEYIDKVGELAKKHGLKLHIDGARIFNASVALGVPVKRIVQAADSVSICLSKGIGAPVGSVIVGSKKFITKARWLRKTLGGGMRQIGVLCAAALVALHENVAKLEDDHKKARVLAEGLNRIERLRVNVAAVETNIVNPKFGAEEACKSLEDVGVLVIPQATFRIRIVLHHQISDVDVEYVLSCFEVCSLLSSTDMCFDIFNFFATLYSFID

SEQ ID NO: 1285 - DNA, 1327 bp, Drosophila melanogaster
  CDS (79)..(1230)
agtttttcgctagctctgaacggagcacgttgtgtgatttttttcgcttagtttttttatcaattaggtttccaaaaaatgaccacccattccgttgttgacctgcgctcggacaccgtcagccagccgacggacaagatgcgggcccggatggccaccgccgtggtcggggatgacgtttatggcgaggatcccaccgtcaacgaactggaggcgcgaacagcggccattttcggcaaggaggcgggcctctttgtgcccagcggcaccatgggaaatctactggcaattatggttcactgccatcgtcgtggcacggaggccctggtcggcgatttatcgcacatctttctgtacgaacaaggtggcgcctcgcatttggccggagtccaattagccactctgaagaacgagcaggatggcacctttagtctgcaggatctgcgccgcaggatacgccacgaagactgccacgagcccatcacctcgctggtggtggtggagcagacccacaatatctgcggtggcaaagtggtgcctctggccttcttggatgagctagctgctctggtccgacagccgggcgtgggcactgggaacgcccgtatcgctctacacatggacggagcgagggtctttaatgcggccaccgccttgggcgtgggagtggagcgcatctgccgcgatttcgattcggtatctatctgcctcagcaagggcttatcggctcccgtgggatccgtgttagtcggctccaaggccttcatttcggaagcccatcgactgcgcaaagctttgggaggcggaatgcggcaggtgggagtgttagcagcagctggactggtagctttggatgaagtggtaccacttctgagcaaagatcacgagcggaccaataaaattgccaacgctatatatgaactgaaaagtcccaacattaccgtacacgtgtcgtctgtccagagcaatatccttctggtagagataacccaacccaaactgacggccagtgagttctccacccggttgagcatcgttgatgctggtgaagtggaagccggagtgaaggacaaaaacggagccggaatcgtggtgaaggctagtgcccgggattgggcatttgcgagacttgtgctctaccatcaggtggacgatgagcaagtggacctggccatcaggaagctgaagtacgtcatcggccagtacgacaagcaatttcccaggacctagacatttgtaattcttttgaatattactggaaagacaaacacaattagattttgcattttgtcgtttaattaaagacatagagggagcaaaagaagat

SEQ ID NO: 1286 - protein, 383 aa, Drosophila melanogaster
MTTHSVVDLRSDTVSQPTDKMRARMATAVVGDDVYGEDPTVNELEARTAAIFGKEAGLFVPSGTMGNLLAIMVHCHRRGTEALVGDLSHIFLYEQGGASHLAGVQLATLKNEQDGTFSLQDLRRRIRHEDCHEPITSLVVVEQTHNICGGKVVPLAFLDELAALVRQPGVGTGNARIALHMDGARVFNAATALGVGVERICRDFDSVSICLSKGLSAPVGSVLVGSKAFISEAHRLRKALGGGMRQVGVLAAAGLVALDEVVPLLSKDHERTNKIANAIYELKSPNITVHVSSVQSNILLVEITQPKLTASEFSTRLSIVDAGEVEAGVKDKNGAGIVVKASARDWAFARLVLYHQVDDEQVDLAIRKLKYVIGQYDKQFPRT

SEQ ID NO: 1287 - DNA, 1014 bp, Zymomonas mobilis
  CDS (1)..(1014)
atgcaaagtattcgtttcttttccgataacgctgccactgtcgcagcccccgtcatggatgctattatcgccgccaatcaaagcgacatggcttatgattccgataaatggagtcagaaacttgacgctattttctcggaattattcggaacagacgtaacggctcattgggcagtcaccggaacggcggccaatgccctgtctttatccgctatctgcccgccttttgggggtgttttatgcagtcaggatgcccatgtccaaacggatgaggggggcgctcctgaattttacaccggcggttccaaattgctgttggttccgggcgaaggcgctaaaattacgcccgaagccttaaagacaagagccgaagcgattgctgacagcgtccatatggtgcaacctcatgcggtgaccattaccaattcaactgaattaggtcaggtttacacgccagaagaaacagcggctattggtgccgttgcccgtgaaaaaggcttgcgtttccatctggatggcgcccgttttgctaatgcggttgctgctctcggctgcaatccggctgatctgacatggaaagccggtgttgatttgatgagcttcggctttaccaaaaatggtgccatggccgcagaagcgatcgttttcttcgatcgtgagcttgctgcccacaataaacgtcgccggaaacgggccggtcatttgctgtccaaaggtcgcttcattgccgcccaaatcgaagccatgttgaaaaatgatttatggcttgatctggcgcgttcttccaataccgttgccaaacggattgcagaagccgttgatcccaaaagacatgcctatccggtcaaagccaatgaagtcttcttattcatctcgatggaagaacgggcagaattgcggaaacagggctttgttttctatgactggggtcatgacaaaatccgtctggttgcctcatgggatcagccagaacatgaagtcgttgcattagaaaaagccttaaaggctttataa

SEQ ID NO: 1288 - protein, 337 aa, Zymomonas mobilis
MQSIRFFSDNAATVAAPVMDAIIAANQSDMAYDSDKWSQKLDAIFSELFGTDVTAHWAVTGTAANALSLSAICPPFGGVLCSQDAHVQTDEGGAPEFYTGGSKLLLVPGEGAKITPEALKTRAEAIADSVHMVQPHAVTITNSTELGQVYTPEETAAIGAVAREKGLRFHLDGARFANAVAALGCNPADLTWKAGVDLMSFGFTKNGAMAAEAIVFFDRELAAHNKRRRKRAGHLLSKGRFIAAQIEAMLKNDLWLDLARSSNTVAKRIAEAVDPKRHAYPVKANEVFLFISMEERAELRKQGFVFYDWGHDKIRLVASWDQPEHEVVALEKALKAL

SEQ ID NO: 1289 - DNA, 1149 bp, Ashbya gossypii
  CDS (1)..(1149)
atgaatcaggatatggaactaccagaggcgtacacgtcggtttcgaacgacttccgttcggacacgttcaccactccaacgcgcgaaatgatcgaggctgcgctaacggcgaccatcggtgacgccgtctaccaagaggacatcgacacgttgaagctagaacagcacgtcgccaagctggccggcatggaggccggtatgttctgcgtatctggtactttgtccaaccagattgctttgcggacccacctaactcagccaccatattcgattctttgcgactaccgtgcgcatgtgtacacgcacgaggctgcggggttggcaattttgtcccaggccatggtgacacctgtcattccttccaacggcaactacttgactttggaagacatcaagaagcactacattcctgatgatggcgacatccacggtgctccaacaaaggttatctcgttggaaaacaccttgcacggtatcattcacccactagaggagcttgttcggatcaaggcttggtgtatggagaacgacctcagactacactgcgatggtgcgagaatctggaacgcgtccgcagaatccggtgtgcctctaaaacagtacggagagctattcgactccatttccatctgcttgtccaagtccatgggtgccccaatgggctccattctcgtcgggtcgcacaagttcataaagaaggcgaaccacttcagaaagcagcaaggtggtggtgtcagacagtctggtatgatgtgcaagatggcgatggtggctatccagggtgactggaagggcaagatgaggcgttcgcacagaatggctcacgagctggccagattttgcgcagagcacggcatcccattggagtcgcctgctgacaccaactttgtctttttggacttgcagaagagcaagatgaaccctgacgtgctcgtcaagaagagtttgaagtacggctgcaagctaatgggcgggcgtgtctccttccactaccagatatctgaggagtcccttgagaagatcaagcaggccatcctagaggcgttcgagtactcgaagaagaacccttacgatgaaaacggccccacgaagatctacagaagtgagtccgctgacgctgtgggtgagatcaagacctacaagtattaa

SEQ ID NO: 1290 - protein, 382 aa, Ashbya gossypii
MNQDMELPEAYTSVSNDFRSDTFTTPTREMIEAALTATIGDAVYQEDIDTLKLEQHVAKLAGMEAGMFCVSGTLSNQIALRTHLTQPPYSILCDYRAHVYTHEAAGLAILSQAMVTPVIPSNGNYLTLEDIKKHYIPDDGDIHGAPTKVISLENTLHGIIHPLEELVRIKAWCMENDLRLHCDGARIWNASAESGVPLKQYGELFDSISICLSKSMGAPMGSILVGSHKFIKKANHFRKQQGGGVRQSGMMCKMAMVAIQGDWKGKMRRSHRMAHELARFCAEHGIPLESPADTNFVFLDLQKSKMNPDVLVKKSLKYGCKLMGGRVSFHYQISEESLEKIKQAILEAFEYSKKNPYDENGPTKIYRSESADAVGEIKTYKY

SEQ ID NO: 1291 - DNA, 1530 bp, Candida albicans
  CDS (117)..(1241)
aagcttttggtttgctattttggtttaatagattaataaccttttttcctttttcctttccttttcccttttttttgcatctatacgacacatattactcagcacaccacattaatatgacagcagacgaagaagaaacttttaccacctttaatgagttcagaagcgatacattcactgttccaactagggccatggttgaagatggatttatgaatgccacatttggtgattccgtataccaagaagacgaaaccacattacgtttggaaagtaaaatgtgtgagataactgggaaaccagcagctttattttgtgttagtggaaccatgtcaaatcaaattggattaagagctaatcttgttcaacctccatatagtatattatgtgactaccgtgctcatgtgtttttacatgaagctggtggattggctacattgagtcaagctatggtacatccagttcgaccatcaaatggaaattacttgacctttgaagatgttttgggcaatgtaacttatgatgatgatggagatattcatgctgctccaaccaaagtaatctcattggaaaataccttacacggaatcataattccaatagaagaaatacgtaaaatcagtgaattttgtcgtgaaaatgatatcaggttgcatttagacggggccagattatggaatgctagtgtggcaaccggaattagtattaaagaatactgttcatattttgacagtgtttcattgtgtttatccaagtcattgggagcaccaattggttcagtattggttggagatgaaaaattcattcgtaaagctaaccatttcaaaaaacaaagtggtggaggaataaggcaggccggtataatgtctgctatggccatacatgctattgattataatctttcaaaacttgaattatcacacaattatgctaaacaaattggcgacttttgccaagaacacggaatcaaattggaatcaccagtggataccagtcttgtgtttctcgatttgaaggccaataaaatggatccgaatagattagttgaattgggaagaacaaagtataacgtcaagcttatgggacaaagaatagcatgtcatttccaattgagtcaagaaagtgttgataatgtgaagaaatgtattttagagtgtttggaatatcatcaaaaacatcctcataaagatgatggtaggaataataagaagatgtatagtttggacgccattaaaaaataaatgaattgtaatgagtctattcttgtcgtagtattgtaaaactgtctcttgttgtttggttgcaattgcacgtggcaaatttaagttgtatgcttttttctttggggcaattgtcgtttttttttttgggtgacgcttcttggtgtaatttggtgtgtgtatctattgttgtttgttttttgggcaaatatatatttatcacttattattcatccatccatcgattaattagcaatcgtttattttactttatttcgagtttactttttcctttttttacttttctttt

SEQ ID NO: 1292 - protein, 374 aa, Candida albicans
MTADEEETFTTFNEFRSDTFTVPTRAMVEDGFMNATFGDSVYQEDETTLRLESKMCEITGKPAALFCVSGTMSNQIGLRANLVQPPYSILCDYRAHVFLHEAGGLATLSQAMVHPVRPSNGNYLTFEDVLGNVTYDDDGDIHAAPTKVISLENTLHGIIIPIEEIRKISEFCRENDIRLHLDGARLWNASVATGISIKEYCSYFDSVSLCLSKSLGAPIGSVLVGDEKFIRKANHFKKQSGGGIRQAGIMSAMAIHAIDYNLSKLELSHNYAKQIGDFCQEHGIKLESPVDTSLVFLDLKANKMDPNRLVELGRTKYNVKLMGQRIACHFQLSQESVDNVKKCILECLEYHQKHPHKDDGRNNKKMYSLDAIKK

SEQ ID NO: 1293 - DNA, 1041 bp, Pseudomonas sp
  CDS (1)..(1041)
atgaccgatcaaagccaacaattcgccagcgacaactattccggtatctgccccgaagcctgggccgccatggaaaaggccaaccacggccacgaacgtgcctatggcgacgaccaatggaccgcacgggcagccgatcactttcgcaagctgtttgaaaccgactgcgaagtgttctttgccttcaacggcaccgccgccaactcgctggcgctatcgtcgttgtgccagagctaccacagcgtgatctgctcggagaccgcccacgtcgaaaccgacgaatgcggcgcgccggagtttttctccaacggttccaagctgctgaccgcccgcagcgaaggcggcaagctgaccccggcttcgatccgcgaagtagcgctcaagcgccaggacatccactaccccaaaccccgggtagtgaccatcacccaggctaccgaggtgggcagcgtctaccgcccggatgaactcaaggcgatcagcgccacctgcaaggaactgggcctgaacctgcacatggacggtgctcgtttcagcaacgcctgcgccttcctcggctgcaccccggccgagctgacctggaaggccggtatcgacgtgctgtgctttggcggcaccaaaaacggcatggcggtgggtgaggcgatcctgttcttcaaccgcaaactggccgaggacttcgactaccgttgcaagcaggccgggcaactggcgtcgaaaatgcgcttcctctcggcgccctgggtaggcctgctggaggacggcgcctggctgcgccacgccgcccatgccaaccactgcgcacaattgctcagctcgctggtcgcggacatccccggcgttgaactgatgttcccggtggaggccaacggtgtattcctgcaaatgtcggaacccgccctggaagcattgcgcaacaagggctggcgtttttacaccttcatcggcagcggcggcgcccggttcatgtgctcctgggacaccgaggaagcccgggtacgcgaactggcggcagatatccgcgccgtgatgagcgcctga

SEQ ID NO: 1294 - protein, 346 aa, Pseudomonas sp
MTDQSQQFASDNYSGICPEAWAAMEKANHGHERAYGDDQWTARAADHFRKLFETDCEVFFAFNGTAANSLALSSLCQSYHSVICSETAHVETDECGAPEFFSNGSKLLTARSEGGKLTPASIREVALKRQDIHYPKPRVVTITQATEVGSVYRPDELKAISATCKELGLNLHMDGARFSNACAFLGCTPAELTWKAGIDVLCFGGTKNGMAVGEAILFFNRKLAEDFDYRCKQAGQLASKMRFLSAPWVGLLEDGAWLRHAAHANHCAQLLSSLVADIPGVELMFPVEANGVFLQMSEPALEALRNKGWRFYTFIGSGGARFMCSWDTEEARVRELAADIRAVMSA

SEQ ID NO: 1295 - DNA, 1170 bp, Cochliobolus carbonum
  CDS (1)..(1170)
atgtcgaacatggttttgaatggaaacattgacaaatccgataggaattccatactagacatacttcaatcgcttgagaatattgcatggggacaaccaggctctgcaaggtgcgattttaggagtgatgttattacacgccctagccttaggatgttgtccgcggtcctcaagactacactcggcgatgacgtatttcgagaagacctaacgactgcccacttcgaagcgcatgtggctgaaatcagcggccgagaagaaggcatgttcgtgatcacagggacgatggccaatcagctttgtttgcatgctctagtctcaactagaccgtgtgggattttacttagctcagagtcccatgccatacactatgaggcaggtggctcttcgatgcttagcggcgccatgcttcagcctgtgcagccgtcgaatggtaaatatctgagagtggaagatttggaggagcacgcaattctaaccgacgatgtccacaaatgccccacaagcattgtttctatggaaaatacagctggtggagcagtcgttcctgtccatgagctccgccgcatccgggattgggcaaagcaaaataacgtgaggactcacctggacggtgctagacttttcgaggctgttgctaccggtgctgggactctcaaagaatattgcagccttattgacctagtctccgtggattttagtaagaatcttggagccccaatgggcgcaatgattcttggtgacaaaaaattgattcagcagatgcgaagaactcgaaaagggattggaggaggaatgagacaaggaggggtaatcactgcagctgcacgggaggcactgtttgaaaactttggactgggagcggaaatcgaaagtcaaaccctattgcaagtgcacaaagtcgcaaagcgtctaggggaagaatggactagaaaaggtgggaagttgagcaaagagatcgagacaaatatcatatggctcgatcttgatgcggttggaattaagaaaagtcaatttattgataagggaagggaatatggggtgattctagacggctgtcgcattgtttgccatcaccagattgatatatatgcagtagaggctcttatcgacgtcttccatgatatactaaaagcagatcctatcaaaaacaagaatagcgatagatag

SEQ ID NO: 1296 - protein, 389 aa, Cochliobolus carbonum
MSNMVLNGNIDKSDRNSILDILQSLENIAWGQPGSARCDFRSDVITRPSLRMLSAVLKTTLGDDVFREDLTTAHFEAHVAEISGREEGMFVITGTMANQLCLHALVSTRPCGILLSSESHAIHYEAGGSSMLSGAMLQPVQPSNGKYLRVEDLEEHAILTDDVHKCPTSIVSMENTAGGAVVPVHELRRIRDWAKQNNVRTHLDGARLFEAVATGAGTLKEYCSLIDLVSVDFSKNLGAPMGAMILGDKKLIQQMRRTRKGIGGGMRQGGVITAAAREALFENFGLGAEIESQTLLQVHKVAKRLGEEWTRKGGKLSKEIETNIIWLDLDAVGIKKSQFIDKGREYGVILDGCRIVCHHQIDIYAVEALIDVFHDILKADPIKNKNSDR

SEQ ID NO: 1297 - DNA, 25 bp, artificial sequence
  Artificial sequence
  Primer
atgactgaattcgaattgcctccaa

SEQ ID NO: 1298 - DNA, 26 bp, artificial sequence
  Artificial sequence
  Primer
tcagtatttgtaggtttttatttcgc

SEQ ID NO: 1299 - protein, 66 aa, artificial sequence
  Consensus
  Variant (1)..(1): Xaa in Position 1 is Val, Leu, Ile, Met or Ala
  Variant (2)..(2): Xaa in Position 2 is any amino acid
  Variant (3)..(3): Xaa in Position 3 is Ile, Val or Leu
  Variant (4)..(4): Xaa in Position 4 is any amino acid
  Variant (6)..(6): Xaa in Position 6 is Gly or Ala
  Variant (7)..(7): Xaa in Position 7 is Gly or Ala
  Variant (8)..(8): Xaa in Position 8 is any amino acid
  Variant (9)..(9): Xaa in Position 9 is Val, Ala or Ile
  Variant (11)..(13): Xaa in Position 11 to 13 is any amino acid
  Variant (14)..(14): Xaa in Position 14 is Ala, Ser, Leu or Gly
  Variant (15)..(16): Xaa in Position 15 to 16 is any amino acid
  Variant (17)..(17): Xaa in Position 17 is Leu, Ile or Phe
  Variant (18)..(25): Xaa in Position 18 to 25 is any amino acid
  Variant (26)..(33): Xaa in Position 26 to 33 is no amino acid or any amino acid
  Variant (34)..(34): Xaa in Position 34 is Leu, Val or Ile
  Variant (35)..(35): Xaa in Position 35 is Ile, Val or Leu
  Variant (36)..(36): Xaa in Position 36 is Glu, Asp or Ala
  Variant (37)..(44): Xaa in Position 37 to 44 is any amino acid
  Variant (45)..(57): Xaa in Position 45 to 57 is no amino acid or any amino acid
  Variant (58)..(58): Xaa in Position 58 is Arg, Gln or Lys
  Variant (59)..(60): Xaa in Position 59 to 60 is any amino acid
  Variant (61)..(61): Xaa in Position 61 is Ala, Ser or Thr
  Variant (62)..(62): Xaa in Position 62 is Leu, Ile, Val or Phe
  Variant (63)..(65): Xaa in Position 63 to 65 is any amino acid
  Variant (66)..(66): Xaa in Position 66 is Ser, Thr or Ala
XXXXGXXXXGXXXXXXXXXXXXXXXXXXXXXXXXXXXXXXXXXXXXXXXXXXXXXXXXXXXXXXXX

SEQ ID NO: 1300 - protein, 65 aa, artificial sequence
  Consensus
  Variant (1)..(1): Xaa in Position 1 is Leu, Val or Trp
  Variant (2)..(2): Xaa in Position 2 is Leu, Val, Ile or Ala
  Variant (3)..(3): Xaa in Position 3 is Val, Ile, Ala or Leu
  Variant (4)..(4): Xaa in Position 4 is Gly or Ala
  Variant (8)..(9): Xaa in Position 8 to 9 is any amino acid
  Variant (11)..(17): Xaa in Position 11 to 17 is any amino acid
  Variant (18)..(18): Xaa in Position 18 is no amino acid or any amino acid
  Variant (19)..(19): Xaa in Position 19 is Ile, Val, Leu or Met
  Variant (20)..(25): Xaa in Position 20 to 25 is any amino acid
  Variant (26)..(26): Xaa in Position 26 is Tyr or Phe
  Variant (27)..(30): Xaa in Position 27 to 30 is any amino acid
  Variant (31)..(31): Xaa in Position 31 is Ile, Val, Leu or Met
  Variant (32)..(32): Xaa in Position 32 is Val, Leu, Ile or Thr
  Variant (33)..(34): Xaa in Position 33 to 34 is any amino acid
  Variant (35)..(35): Xaa in Position 35 is Val, Leu, Ile, Met or Phe
  Variant (36)..(45): Xaa in Position 36 to 45 is any amino acid
  Variant (46)..(51): Xaa in Position 46 to 51 is no amino acid or any amino acid
  Variant (52)..(52): Xaa in Position 52 is Gln or Glu
  Variant (53)..(53): Xaa in Position 53 is any amino acid
  Variant (54)..(54): Xaa in Position 54 is Phe, His or Ile
  Variant (55)..(57): Xaa in Position 55 to 57 is any amino acid
  Variant (58)..(58): Xaa in Position 58 is Gly, Ser or Ala
  Variant (59)..(60): Xaa in Position 59 to 60 is any amino acid
  Variant (61)..(61): Xaa in Position 61 is Ala, Ser, Gly or Val
  Variant (62)..(62): Xaa in Position 62 is any amino acid
  Variant (63)..(63): Xaa in Position 63 is Leu or Val
  Variant (65)..(65): Xaa in Position 65 is Leu, Met, Phe or Ile
XXXXADGXXSXXXXXXXXXXXXXXXXXXXXXXXXXXXXXXXXXXXXXXXXXXXXXXXXXXXXXPX

SEQ ID NO: 1301 - protein, 105 aa, artificial sequence
  Consensus
  Variant (1)..(1): Xaa in Position 1 is Leu or Val
  Variant (2)..(12): Xaa in Position 2 to 12 is any amino acid
  Variant (13)..(13): Xaa in Position 13 is Arg, Gly or Asn
  Variant (14)..(14): Xaa in Position 14 is any amino acid
  Variant (15)..(15): Xaa in Position 15 is Ala, Val or Leu
  Variant (16)..(16): Xaa in Position 16 is Leu, Val, Ile, Thr or Phe
  Variant (17)..(17): Xaa in Position 17 is Val, Ile, Leu or Ala
  Variant (19)..(19): Xaa in Position 19 is Asp, Asn or Glu
  Variant (20)..(20): Xaa in Position 20 is Ala or Ser
  Variant (22)..(22): Xaa in Position 22 is His, Gln or Val
  Variant (23)..(24): Xaa in Position 23 to 24 is any amino acid
  Variant (25)..(25): Xaa in Position 25 is His, Asn or Pro
  Variant (27)..(27): Xaa in Position 27 is Leu, Ile or Val
  Variant (28)..(28): Xaa in Position 28 is Ala, Gly or Thr
  Variant (29)..(29): Xaa in Position 29 is Gly or Ala
  Variant (30)..(30): Xaa in Position 30 is Gln, His or Leu
  Variant (32)..(32): Xaa in Position 32 is any amino acid
  Variant (34)..(34): Xaa in Position 34 is any amino acid
  Variant (35)..(35): Xaa in Position 35 is Gly or Cys
  Variant (36)..(37): Xaa in Position 36 to 37 is any amino acid
  Variant (38)..(38): Xaa in Position 38 is Asp or Ser
  Variant (39)..(41): Xaa in Position 39 to 41 is any amino acid
  Variant (42)..(42): Xaa in Position 42 is Leu, Ile or Phe
  Variant (43)..(45): Xaa in Position 43 to 45 is any amino acid
  Variant (46)..(46): Xaa in Position 46 is Leu, Met, Ile or Val
  Variant (47)..(52): Xaa in Position 47 to 52 is any amino acid
  Variant (53)..(59): Xaa in Position 53 to 59 is no amino acid or any amino acid
  Variant (60)..(60): Xaa in Position 60 is Gly, Ala or Asn
  Variant (61)..(64): Xaa in Position 61 to 64 is any amino acid
  Variant (65)..(65): Xaa in Position 65 is Leu or Met
  Variant (66)..(67): Xaa in Position 66 to 67 is any amino acid
  Variant (68)..(68): Xaa in Position 68 is Tyr, Phe or Trp
  Variant (69)..(71): Xaa in Position 69 to 71 is any amino acid
  Variant (72)..(72): Xaa in Position 72 is Arg, His, Ala or Cys
  Variant (73)..(89): Xaa in Position 73 to 89 is any amino acid
  Variant (90)..(90): Xaa in Position 90 is Phe, Tyr or Leu
  Variant (91)..(100): Xaa in Position 91 to 100 is any amino acid
  Variant (102)..(103): Xaa in Position 102 to 103 is any amino acid
  Variant (104)..(104): Xaa in Position 104 is Gly, Ala or Val
  Variant (105)..(105): Xaa in Position 105 is Leu, Met or Phe
XXXXXXXXXXXXXXXXXGXXAXXXXPXXXXGXNXXXXXXXXXXXXXXXXXXXXXXXXXXXXXXXXXXXXXXXXXXXXXXXXXXXXXXXXXXXXXXXXXXXRXXXX

SEQ ID NO: 1302 - protein, 851 aa, artificial sequence
  Consensus
  Variant (1)..(851): Xaa in all Positions is any amino acid
XXXXXXXXXXXXXXXXXXXXXXXXXXXXXXXXXXXXXXXXXXXXXXXXXXXXXXXXXXXXXXXXXXXXXXXXXXXXXXXXXGGGXXGXXXAXXXXXXXXXXXXXXXXXXXXXXXXXXXXXXXXXXXXXXXXXXXRXXAXXXXXXXXXXXXXXXWXXXXXXXXXXXXXXXXXXXXXXXXXXXXXXXXXXXXXXXXXXXXXXXXXXXXXXXXEXXXXXXXLXXXXXXXXXXXXXXXXXXXXXXXXXXXXXXXXXXXXXXXXXXXXXXXXXXXXXXXXXXXXXXXXLXXXXXXXXXXXXXXXXLXXXADGXXSXXRXXXXXXXXXXXXYXXXXXXXXXXXXXXXXXXXXXXXXXXXFXXXGXXAXLPXXXXXXXXXXXXXXXXXXXXXXXXXXXXXXXXXXXXXXVWXXXXXXXXXXXXXXXXXXXXXXXXXXXXXXXXXXXXXXXXXXXXXXXXXXXXXXXXXXXXXXXXXXXXXXXXXXXXXXXXXXXXXXXXXXPLXXXXXXXXXXXXXXLXGXAAXXXHPXAGQGXNLGXXDXXXLXXXXXXXXXXXXXXXXXXXXXXLXXYXXXRXXXXXXXXXXXXXXXXXXXXXXXXXXXXRXXXLXXXXXXXXXXXXXXXXXXGXXXXXXXXXXXXXXXXXXXXXXXXXXXXXXXXXXXXXXXXXXXXXXXXXXXXXXXXXXXXXXXXXXXXXXXXXXXXXXXXXXXXXXXXXXXXXXXXXXXXXXXXXXXXXXXXXXXXXXXXXXXXXXXXXXXXXXXXXXXXXXXXXXXXXXXXXXXXXXXXXXXXXXXXXXXXXXXXXXXXXXXXXXXXXXXXXXXXXXXXXXXXXXXXXXXXXXXXXXXXXXXXXXXXXXXX

SEQ ID NO: 1303 - protein, 266 aa, artificial sequence
  Consensus
  Variant (3)..(3): Xaa in Position 3 is any amino acid
  Variant (6)..(8): Xaa in Position 6 to 8 is any amino acid
  Variant (10)..(10): Xaa in Position 10 is Arg or Lys
  Variant (11)..(11): Xaa in Position 11 is any amino acid
  Variant (13)..(13): Xaa in Position 13 is any amino acid
  Variant (15)..(16): Xaa in Position 15 to 16 is any amino acid
  Variant (19)..(20): Xaa in Position 19 to 20 is any amino acid
  Variant (26)..(26): Xaa in Position 26 is any amino acid
  Variant (29)..(29): Xaa in Position 29 is Leu or Ile
  Variant (36)..(36): Xaa in Position 36 is Ile or Val
  Variant (37)..(37): Xaa in Position 37 is any amino acid
  Variant (44)..(44): Xaa in Position 44 is Ile or Leu
  Variant (46)..(46): Xaa in Position 46 is any amino acid
  Variant (47)..(47): Xaa in Position 47 is Ala or Ser
  Variant (48)..(48): Xaa in Position 48 is any amino acid
  Variant (53)..(53): Xaa in Position 53 is Val or Ile
  Variant (56)..(56): Xaa in Position 56 is Arg or Lys
  Variant (58)..(58): Xaa in Position 58 is Phe or Tyr
  Variant (60)..(60): Xaa in Position 60 is Ser or Thr
  Variant (61)..(61): Xaa in Position 61 is any amino acid
  Variant (63)..(64): Xaa in Position 63 to 64 is any amino acid
  Variant (65)..(65): Xaa in Position 65 is no amino acid or any amino acid
  Variant (67)..(67): Xaa in Position 67 is any amino acid
  Variant (68)..(68): Xaa in Position 68 is Tyr or Trp
  Variant (71)..(71): Xaa in Position 71 is Ser or Thr
  Variant (72)..(73): Xaa in Position 72 to 73 is any amino acid
  Variant (79)..(79): Xaa in Position 79 is any amino acid
  Variant (80)..(80): Xaa in Position 80 is Leu or Met
  Variant (82)..(84): Xaa in Position 82 to 84 is any amino acid
  Variant (87)..(87): Xaa in Position 87 is Ile or Met
  Variant (88)..(88): Xaa in Position 88 is Val or Ile
  Variant (92)..(92): Xaa in Position 92 is Leu, Ile, Val or Met
  Variant (94)..(96): Xaa in Position 94 to 96 is any amino acid
  Variant (98)..(98): Xaa in Position 98 is Asp or Glu
  Variant (99)..(99): Xaa in Position 99 is any amino acid
  Variant (106)..(106): Xaa in Position 106 is Leu or Met
  Variant (108)..(108): Xaa in Position 108 is any amino acid
  Variant (111)..(112): Xaa in Position 111 to 112 is any amino acid
  Variant (114)..(114): Xaa in Position 114 is any amino acid
  Variant (116)..(116): Xaa in Position 116 is Phe or Tyr
  Variant (117)..(117): Xaa in Position 117 is any amino acid
  Variant (122)..(122): Xaa in Position 122 is Phe or Tyr
  Variant (124)..(125): Xaa in Position 124 to 125 is any amino acid
  Variant (127)..(127): Xaa in Position 127 is Gly or Ala
  Variant (134)..(134): Xaa in Position 134 is any amino acid
  Variant (136)..(136): Xaa in Position 136 is any amino acid
  Variant (137)..(137): Xaa in Position 137 is Gly or Ala
  Variant (138)..(138): Xaa in Position 138 is Met or Ile
  Variant (145)..(145): Xaa in Position 145 is any amino acid
  Variant (147)..(147): Xaa in Position 147 is any amino acid
  Variant (149)..(149): Xaa in Position 149 is Ser or Thr
  Variant (154)..(154): Xaa in Position 154 is Ile or Val
  Variant (163)..(163): Xaa in Position 163 is Leu or Met
  Variant (165)..(165): Xaa in Position 165 is Thr or Ser
  Variant (169)..(169): Xaa in Position 169 is Leu or Ile
  Variant (172)..(172): Xaa in Position 172 is any amino acid
  Variant (176)..(176): Xaa in Position 176 is Leu or Ile
  Variant (179)..(179): Xaa in Position 179 is Ala or Ser
  Variant (187)..(191): Xaa in Position 187 to 191 is any amino acid
  Variant (193)..(193): Xaa in Position 193 is Glu or Asp
  Variant (206)..(206): Xaa in Position 206 is any amino acid
  Variant (208)..(208): Xaa in Position 208 is any amino acid
  Variant (211)..(211): Xaa in Position 211 is any amino acid
  Variant (212)..(212): Xaa in Position 212 is Ile, Leu or Val
  Variant (216)..(216): Xaa in Position 216 is any amino acid
  Variant (226)..(226): Xaa in Position 226 is Lys or Arg
  Variant (228)..(228): Xaa in Position 228 is any amino acid
  Variant (230)..(232): Xaa in Position 230 to 232 is any amino acid
  Variant (235)..(235): Xaa in Position 235 is Arg or Lys
  Variant (238)..(238): Xaa in Position 238 is any amino acid
  Variant (240)..(240): Xaa in Position 240 is any amino acid
  Variant (246)..(246): Xaa in Position 246 is any amino acid
  Variant (249)..(249): Xaa in Position 249 is Glu or Asp
  Variant (250)..(250): Xaa in Position 250 is Ile or Leu
  Variant (251)..(251): Xaa in Position 251 is any amino acid
  Variant (253)..(253): Xaa in Position 253 is any amino acid
  Variant (254)..(254): Xaa in Position 254 is Leu or Met
  Variant (255)..(255): Xaa in Position 255 is any amino acid
  Variant (256)..(256): Xaa in Position 256 is Leu or Val
  Variant (257)..(258): Xaa in Position 257 to 258 is any amino acid
  Variant (260)..(261): Xaa in Position 260 to 261 is any amino acid
  Variant (264)..(264): Xaa in Position 264 is Glu or Asp
DAXEAXXXEXXMXLXXALXXYPKAAXWSXLVSTTLXXEGYDTAXLXXXYALPXFQXKXGXXNXXXGXXEIXXXWQIGLXXCXXXGEXXGLQXTXXXVXXMGNRYTXIXALXXLXAXXFILYXCXXLXMIAVGQXLXXXPWGCFQXLXVXYASEXCPLALRYYXTXYSNXCWXFGQXFAXGIMKNSQXXXXXSXLGYKLPFALQWIXPXPLXXGIFXAPESPWWLVXKXRXXXARXSLXRXLSGKGXEKXXXVXXXXXXIXXTIXKE

SEQ ID NO: 1304 - protein, 89 aa, artificial sequence
  Consensus
  Variant (2)..(2): Xaa in Position 2 is any amino acid
  Variant (7)..(7): Xaa in Position 7 is Ile or Leu
  Variant (8)..(8): Xaa in Position 8 is any amino acid
  Variant (11)..(11): Xaa in Position 11 is any amino acid
  Variant (13)..(13): Xaa in Position 13 is any amino acid
  Variant (14)..(14): Xaa in Position 14 is Gly or Ala
  Variant (16)..(16): Xaa in Position 16 is any amino acid
  Variant (17)..(17): Xaa in Position 17 is Thr or Ser
  Variant (18)..(18): Xaa in Position 18 is any amino acid
  Variant (20)..(21): Xaa in Position 20 to 21 is any amino acid
  Variant (23)..(23): Xaa in Position 23 is Ile or Leu
  Variant (25)..(25): Xaa in Position 25 is any amino acid
  Variant (30)..(30): Xaa in Position 30 is Tyr or Phe
  Variant (32)..(32): Xaa in Position 32 is Lys or Arg
  Variant (35)..(35): Xaa in Position 35 is Val or Met
  Variant (36)..(36): Xaa in Position 36 is any amino acid
  Variant (38)..(38): Xaa in Position 38 is Asp or Glu
  Variant (39)..(39): Xaa in Position 39 is any amino acid
  Variant (45)..(45): Xaa in Position 45 is Ile or Leu
  Variant (52)..(52): Xaa in Position 52 is Ile or Leu
  Variant (53)..(53): Xaa in Position 53 is any amino acid
  Variant (54)..(54): Xaa in Position 54 is Ala or Gly
  Variant (56)..(57): Xaa in Position 56 to 57 is any amino acid
  Variant (60)..(61): Xaa in Position 60 to 61 is any amino acid
  Variant (63)..(65): Xaa in Position 63 to 65 is any amino acid
  Variant (68)..(68): Xaa in Position 68 is Phe, Tyr or Trp
  Variant (69)..(69): Xaa in Position 69 is any amino acid
  Variant (70)..(70): Xaa in Position 70 is Leu or Ile
  Variant (71)..(72): Xaa in Position 71 to 72 is any amino acid
  Variant (73)..(73): Xaa in Position 73 is Phe or Tyr
  Variant (77)..(77): Xaa in Position 77 is any amino acid
  Variant (79)..(79): Xaa in Position 79 is any amino acid
  Variant (80)..(80): Xaa in Position 80 is Ile or Val
  Variant (81)..(82): Xaa in Position 81 to 82 is any amino acid
  Variant (88)..(88): Xaa in Position 88 is Leu or Met
NXRRTRXXCLXWXXQXXXGXXLXGXSTYFXEXAGXXTXXAFTFSXIQYCLGXXXTXXSWXXSXXXGRXXXXXXGLAXQXXXXFIIGGXG

SEQ ID NO: 1305 - protein, 125 aa, artificial sequence
  Consensus
  Variant (1)..(1): Xaa in Position 1 is Ala or Ser
  Variant (2)..(3): Xaa in Position 2 to 3 is any amino acid
  Variant (5)..(5): Xaa in Position 5 is Ser or Ala
  Variant (7)..(7): Xaa in Position 7 is any amino acid
  Variant (10)..(10): Xaa in Position 10 is Met or Ile
  Variant (11)..(11): Xaa in Position 11 is any amino acid
  Variant (12)..(12): Xaa in Position 12 is Val or Leu
  Variant (13)..(13): Xaa in Position 13 is Ala or Ser
  Variant (18)..(18): Xaa in Position 18 is any amino acid
  Variant (21)..(21): Xaa in Position 21 is Ala or Gly
  Variant (22)..(22): Xaa in Position 22 is any amino acid
  Variant (25)..(25): Xaa in Position 25 is Phe or Tyr
  Variant (27)..(27): Xaa in Position 27 is Leu or Ile
  Variant (29)..(29): Xaa in Position 29 is Ser or Ala
  Variant (31)..(31): Xaa in Position 31 is Met or Ile
  Variant (34)..(34): Xaa in Position 34 is Ser or Ala
  Variant (35)..(35): Xaa in Position 35 is any amino acid
  Variant (40)..(40): Xaa in Position 40 is Thr or Ser
  Variant (42)..(42): Xaa in Position 42 is Ile or Val
  Variant (46)..(47): Xaa in Position 46 to 47 is any amino acid
  Variant (50)..(50): Xaa in Position 50 is Val, Leu or Met
  Variant (51)..(52): Xaa in Position 51 to 52 is any amino acid
  Variant (53)..(53): Xaa in Position 53 is Ile or Val
  Variant (54)..(54): Xaa in Position 54 is Ile or Val
  Variant (55)..(56): Xaa in Position 55 to 56 is any amino acid
  Variant (57)..(57): Xaa in Position 57 is Val or Ile
  Variant (59)..(60): Xaa in Position 59 to 60 is any amino acid
  Variant (62)..(62): Xaa in Position 62 is any amino acid
  Variant (65)..(67): Xaa in Position 65 to 67 is any amino acid
  Variant (74)..(74): Xaa in Position 74 is Ser or Thr
  Variant (76)..(76): Xaa in Position 76 is any amino acid
  Variant (77)..(77): Xaa in Position 77 is Phe or Tyr
  Variant (80)..(84): Xaa in Position 80 to 84 is any amino acid
  Variant (87)..(87): Xaa in Position 87 is any amino acid
  Variant (89)..(89): Xaa in Position 89 is any amino acid
  Variant (90)..(90): Xaa in Position 90 is Val or Ile
  Variant (91)..(91): Xaa in Position 91 is Val or Ile
  Variant (97)..(97): Xaa in Position 97 is any amino acid
  Variant (99)..(99): Xaa in Position 99 is Arg or Lys
  Variant (102)..(102): Xaa in Position 102 is any amino acid
  Variant (109)..(110): Xaa in Position 109 to 110 is any amino acid
  Variant (113)..(113): Xaa in Position 113 is any amino acid
  Variant (118)..(118): Xaa in Position 118 is any amino acid
  Variant (121)..(121): Xaa in Position 121 is any amino acid
XXXGXGXLLXXXXFFYNXGIXXVVXCXVXEXPSXXLRTKXIXLARXXYNXXXXXXXXLXXYXLNXXXWNWGAKXGXXWGXXXXXTLXWXXXDLPETXGXTFXEINELFXXGVXARKFXSTXVDPF

SEQ ID NO: 1306 - protein, 622 aa, artificial sequence
  Consensus
  Variant (1)..(622): Xaa in all Positions is any amino acid
MKXLSXLINRXKXXXXXXXXXXXXXXXXXXXXXXEXXXIEMXXQXKKXXXDXXHXEXXPXXXXPXDXNXXXXXXXDXXXXXXDAKEADESERGMPLXTALXTYPKAAAWSLLVSTTLIXEGYDTAILGAFYALPXFQXKXGSXNXXTGXXEISXSWQIGLXLCXXAGEIVGLQXTGPXVDXXGNRYTLIXALXXLAAFXFILYFCXSLGMIAVGQXLCGMPWGCFQCLTVSYASEICPLALRYYLTTYSNLCWXFGQLFAAGIMKNSQXKYXXSELGYKLPFALQWIXPXPLAXGIFFAPESPWWLVKKGRXDXARRSLXRXLSGKGPEKEXLVXXEXDXIKXTIXKEXXLXXXEGXYXDCXXDXXNRRRTRIXCLCWXGQXXCGXXLIGYSTYFYEKAGVXTXXXFTFSIIQYCLGIXATFXSWWASKYXGRXDLYAFGLAFQXXXXFIIGGLGCSXXHGXXMGSGXLLMXXXFFYNLGIAPVVFCLVSEXPSSRLRTKTIILARNXYNXXXXXXXVLIXYQLNSXKWNWGAKSGFFWGXXCXXTLXWAVXDLPETAGXTFXEINELFXLGVXARKFKSTKVDPFXXXKXXXXXXXXXXPXXXXXXXXXXXXXXXXXXXXX

SEQ ID NO: 1307 - protein, 65 aa, artificial sequence
  Consensus
  Variant (4)..(4): Xaa in Position 4 is Glu, Gln, Lys or Ala
  Variant (5)..(5): Xaa in Position 5 is Thr or Ser
  Variant (6)..(6): Xaa in Position 6 is any amino acid
  Variant (7)..(7): Xaa in Position 7 is Trp, Phe or Tyr
  Variant (8)..(8): Xaa in Position 8 is Asn, Ser or Ala
  Variant (9)..(13): Xaa in Position 9 to 13 is any amino acid
  Variant (14)..(14): Xaa in Position 14 is Gln or Thr
  Variant (15)..(15): Xaa in Position 15 is Gly or Ser
  Variant (16)..(16): Xaa in Position 16 is no amino acid or any amino acid
  Variant (17)..(18): Xaa in Position 17 to 18 is any amino acid
  Variant (19)..(19): Xaa in Position 19 is Asp, Asn or Glu
  Variant (20)..(21): Xaa in Position 20 to 21 is any amino acid
  Variant (23)..(25): Xaa in Position 23 to 25 is any amino acid
  Variant (26)..(26): Xaa in Position 26 is Gly or Ser
  Variant (27)..(29): Xaa in Position 27 to 29 is any amino acid
  Variant (30)..(30): Xaa in Position 30 is Ala, Met, Val or Ile
  Variant (31)..(36): Xaa in Position 31 to 36 is any amino acid
  Variant (37)..(37): Xaa in Position 37 is Leu, Ile, Val, Ala or Phe
  Variant (38)..(44): Xaa in Position 38 to 44 is any amino acid
  Variant (45)..(55): Xaa in Position 45 to 55 is no amino acid or any amino acid
  Variant (56)..(56): Xaa in Position 56 is Thr, Ser, Ala or Val
  Variant (58)..(60): Xaa in Position 58 to 60 is any amino acid
  Variant (62)..(62): Xaa in Position 62 is Ala, Thr or Pro
  Variant (63)..(64): Xaa in Position 63 to 64 is any amino acid
RHGXXXXXXXXXXXXXXXXXXLXXXXXXXXXXXXXXXXXXXXXXXXXXXXXXXXXXSXXXRXXXT

SEQ ID NO: 1308 - protein, 43 aa, artificial sequence
  Consensus
  Variant (1)..(1): Xaa in Position 1 is Gly, Asn or Asp
  Variant (2)..(2): Xaa in Position 2 is Asp, Glu or Gln
  Variant (3)..(3): Xaa in Position 3 is any amino acid
  Variant (4)..(4): Xaa in Position 4 is Val or Ile
  Variant (5)..(7): Xaa in Position 5 to 7 is any amino acid
  Variant (8)..(8): Xaa in Position 8 is Met, Leu, Ile or Ala
  Variant (9)..(18): Xaa in Position 9 to 18 is any amino acid
  Variant (19)..(19): Xaa in Position 19 is Leu, Met, Gln, Phe or Tyr
  Variant (20)..(20): Xaa in Position 20 is Ala, Gly or Ser
  Variant (21)..(23): Xaa in Position 21 to 23 is any amino acid
  Variant (24)..(24): Xaa in Position 24 is Ile, Leu, Val or Ala
  Variant (26)..(26): Xaa in Position 26 is Ala, Gly, Val or no amino acid
  Variant (27)..(34): Xaa in Position 27 to 34 is any amino acid
  Variant (35)..(35): Xaa in Position 35 is Phe, Tyr or Leu
  Variant (36)..(39): Xaa in Position 36 to 39 is any amino acid
  Variant (40)..(40): Xaa in Position 40 is Leu, Ile or Val
  Variant (41)..(42): Xaa in Position 41 to 42 is any amino acid
  Variant (43)..(43): Xaa in Position 43 is Arg or Gln
XXXXXXXXXXXXXXXXXXXXXXXXGXXXXXXXXXXXXXXXXXX

SEQ ID NO: 1309 - protein, 14 aa, artificial sequence
  Consensus
  Variant (1)..(1): Xaa in Position 1 is Ile, Leu, Met or Val
  Variant (2)..(2): Xaa in Position 2 is any amino acid
  Variant (3)..(3): Xaa in Position 3 is Tyr, Phe or Ser
  Variant (4)..(4): Xaa in Position 4 is Thr or Ser
  Variant (7)..(7): Xaa in Position 7 is Thr or Ser
  Variant (10)..(10): Xaa in Position 10 is any amino acid
  Variant (11)..(11): Xaa in Position 11 is Pro, Ala or Ser
  Variant (13)..(13): Xaa in Position 13 is any amino acid
  Variant (14)..(14): Xaa in Position 14 is Val, Ile, Leu, Ala or Thr
XXXXSGXTGXXKXX

SEQ ID NO: 1310 - protein, 55 aa, artificial sequence
  Consensus
  Variant (1)..(1): Xaa in Position 1 is Tyr, Trp, Phe, Leu or His
  Variant (2)..(3): Xaa in Position 2 to 3 is any amino acid
  Variant (4)..(4): Xaa in Position 4 is Gly, Ala or Phe
  Variant (6)..(12): Xaa in Position 6 to 12 is any amino acid
  Variant (13)..(13): Xaa in Position 13 is no amino acid or any amino acid
  Variant (14)..(14): Xaa in Position 14 is Gly, Asp or no amino acid
  Variant (15)..(19): Xaa in Position 15 to 19 is any amino acid
  Variant (20)..(20): Xaa in Position 20 is Gly, Ser, Ala or Asp
  Variant (22)..(22): Xaa in Position 22 is any amino acid
  Variant (23)..(23): Xaa in Position 23 is Asp or Lys
  Variant (24)..(24): Xaa in Position 24 is Asp, Glu, Ser, Ala or Thr
  Variant (25)..(25): Xaa in Position 25 is any amino acid
  Variant (26)..(26): Xaa in Position 26 is Ile, Leu, Met or Val
  Variant (27)..(29): Xaa in Position 27 to 29 is any amino acid
  Variant (31)..(31): Xaa in Position 31 is any amino acid
  Variant (32)..(32): Xaa in Position 32 is Arg, Lys, Gln or Leu
  Variant (33)..(33): Xaa in Position 33 is Leu, Ile, Val or Met
  Variant (34)..(36): Xaa in Position 34 to 36 is any amino acid
  Variant (37)..(37): Xaa in Position 37 is Glu, Asp, Thr or Ala
  Variant (38)..(38): Xaa in Position 38 is Ile, Val, Met or Leu
  Variant (39)..(39): Xaa in Position 39 is Glu, Tyr or Asp
  Variant (40)..(41): Xaa in Position 40 to 41 is any amino acid
  Variant (42)..(42): Xaa in Position 42 is Leu, Ile, Val or Met
  Variant (43)..(47): Xaa in Position 43 to 47 is any amino acid
  Variant (48)..(48): Xaa in Position 48 is Val or Ile
  Variant (49)..(49): Xaa in Position 49 is any amino acid
  Variant (50)..(50): Xaa in Position 50 is Glu or Asp
  Variant (51)..(51): Xaa in Position 51 is Ala, Cys, Ser, Val or Thr
  Variant (52)..(53): Xaa in Position 52 to 53 is any amino acid
  Variant (54)..(54): Xaa in Position 54 is Val, Ile, Leu, Thr or Phe
  Variant (55)..(55): Xaa in Position 55 is Gly, Ala, Ser or Pro
XXXXDXXXXXXXXXXXXXXXRXXXXXXXXGXXXXXXXXXXXXXXXXXXXXXXXXX

SEQ ID NO: 1311 - protein, 14 aa, artificial sequence
  Consensus
  Variant (1)..(1): Xaa in Position 1 is Leu, Ile or Met
  Variant (3)..(3): Xaa in Position 3 is Lys, Arg, Met or His
  Variant (4)..(4): Xaa in Position 4 is Thr or Ser
  Variant (5)..(5): Xaa in Position 5 is any amino acid
  Variant (6)..(6): Xaa in Position 6 is Ser, Thr, Asn or Val
  Variant (7)..(7): Xaa in Position 7 is Gly, Ala or Ser
  Variant (9)..(9): Xaa in Position 9 is Ile, Val, Leu, Met, Lys or Arg
  Variant (10)..(10): Xaa in Position 10 is any amino acid
  Variant (11)..(11): Xaa in Position 11 is Arg or Glu
  Variant (12)..(13): Xaa in Position 12 to 13 is any amino acid
  Variant (14)..(14): Xaa in Position 14 is Leu, Ile, Val or Met
XPXXXXXKXXXXXX

SEQ ID NO: 1312 - protein, 1077 aa, artificial sequence
  Consensus
  Variant (1)..(1077): Xaa in all Positions is any amino acid
XXXXXXXXXXXXXXXXXXXXXXXXXXXXXXXXXXXXXXXXXXXXXXXXXXXXXXXXXXXXXXXXXXXXXXXXXXXXXXXXXXXXXXXXXXXXXXXXXXXXXXXXXXXXXXXXXXXXXXXXXXXXXXXXXXXXXXXXXXXXXXXXXXXXXXXXXXXXXXXXXXXXXXXXXXXXXXXXXXXXXXXXXXXXXXXXXXXXXXXXXXXXXXXXXXXXXXXXXXXXXXXXXXXXXXXXXXXXXXXXXXXXXXXXXXXXXXXXXXXXXXXXXXXXXXXXXXXXXXXXXXXXXXXXXXXXXXXXXXXXXXXXXXXXXXXXXXXXXXXXXXXXWXXXXXXNXXXXXXXXXXXXXXXXXXXXXAXXXXXXXXXXXXXXXXXXXXXXXXLXXXXXXXXXXLXXXXXXXXGXXXGDXVXXXXPXXXXXXXXXLAXXXXGAXXXXXFXXFXXXXXXXRXXXXXXXXXXXXXXXXXXXXXXXXXXXXXXXXXXXXXXXXXXXXXXXXXXXXXXXXXXXXXXXXXXXXXXXXXXXXXXXXXXXXXXXXXXXXXXXXXXXXXXXXXXXXXXXXXXXXXXXXXXXXXXXXXXXXXXYTSGXTGXPKGXXXXXXXXXXXXXXXXXXXXXXXXXXXXXXXXXXXXXXXXDXGWXXXXXXXXXXXLXXGXXXXXXXGXXXXXXXXXXXXXXXXXXXXXXXXXXXXXPTXXRXXXXXXXXXXXXXXXXXXXXXXXLXXXXXXGEXXXXXXXXWXXXXXXXXXXXXXXXXXXXXXXXTEXXXXXXXXXXXXXXXXXXXXXXXXXXXXXXXXXXXGXXXXXXXXXGXXXXXXXXXXXXXXXXXXXXXXXXXXXGXXXXXXXXXXPXXXXXXXXXXXXXXXXXXXXXXXXXXXXXXXXXXXXXXXXGDXXXXDXXXGXXXXXGRXDDXXXXXGXRXXXXEXEXXXXXXXXXXEXAXXGXXXXXXGXXXXXXXXLXXXXXXXXXXXXXXXXXXXXXXXXXXXXXXXXXXXXXXXXXXXXXXXXXXXXXXXXXXLPKTXSGKIXRXXXXXXXXXXXXXXXXXXXXXXXXXXXXXXXXXXXXXXXXXXXXXXXXXXXXXXXXXX

SEQ ID NO: 1313 - protein, 94 aa, artificial sequence
  Consensus
  Variant (1)..(1): Xaa in Position 1 is Asp or Gly
  Variant (2)..(9): Xaa in Position 2 to 9 is any amino acid
  Variant (10)..(10): Xaa in Position 10 is Met, Val, Ile, Leu or Ser
  Variant (11)..(26): Xaa in Position 11 to 26 is any amino acid
  Variant (27)..(27): Xaa in Position 27 is no amino acid or any amino acid
  Variant (28)..(28): Xaa in Position 28 is no amino acid or any amino acid
  Variant (29)..(29): Xaa in Position 29 is Asp, Gly or Ser
  Variant (30)..(34): Xaa in Position 30 to 34 is any amino acid
  Variant (35)..(35): Xaa in Position 35 is Leu, Ala, Phe, Val or Ile
  Variant (36)..(52): Xaa in Position 36 to 52 is any amino acid
  Variant (53)..(57): Xaa in Position 53 to 57 is no amino acid or any amino acid
  Variant (58)..(58): Xaa in Position 58 is Ser, Thr, Asn or Gly
  Variant (60)..(60): Xaa in Position 60 is Thr or Ser
  Variant (61)..(61): Xaa in Position 61 is any amino acid
  Variant (62)..(62): Xaa in Position 62 is Ala, Ser, Thr, Gly or Cys
  Variant (63)..(63): Xaa in Position 63 is Asn or Gln
  Variant (64)..(66): Xaa in Position 64 to 66 is any amino acid
  Variant (67)..(67): Xaa in Position 67 is Leu, Ile, Val, Met or Thr
  Variant (68)..(72): Xaa in Position 68 to 72 is any amino acid
  Variant (73)..(73): Xaa in Position 73 is no amino acid or any amino acid
  Variant (74)..(74): Xaa in Position 74 is no amino acid or any amino acid
  Variant (75)..(75): Xaa in Position 75 is Pro, Arg or Ser
  Variant (76)..(84): Xaa in Position 76 to 84 is any amino acid
  Variant (85)..(85): Xaa in Position 85 is Ala, Ser, Gly or Cys
  Variant (87)..(90): Xaa in Position 87 to 90 is any amino acid
  Variant (92)..(92): Xaa in Position 92 is any amino acid
  Variant (93)..(93): Xaa in Position 93 is Gly, Ala, Gln or Asp
  Variant (94)..(94): Xaa in Position 94 is Gly, Ala or Ser
XXXXXXXXXXXXXXXXXXXXXXXXXXXXXXXXXXXXXXXXXXXXXXXXXXXXXXXXXXGXXXXXXXXXXXXXXXXXXXXXXXXXXHXXXXEXXX

SEQ ID NO: 1314 - protein, 89 aa, artificial sequence
  Consensus
  Variant (2)..(2): Xaa in Position 2 is any amino acid
  Variant (3)..(3): Xaa in Position 3 is Val, Ile, Leu or Cys
  Variant (4)..(8): Xaa in Position 4 to 8 is any amino acid
  Variant (9)..(9): Xaa in Position 9 is Leu, Ile, Met, Val or Thr
  Variant (10)..(20): Xaa in Position 10 to 20 is any amino acid
  Variant (21)..(21): Xaa in Position 21 is Leu, Val, Ile or Met
  Variant (22)..(22): Xaa in Position 22 is any amino acid
  Variant (23)..(23): Xaa in Position 23 is Leu, Val, Ile, Met or Thr
  Variant (24)..(24): Xaa in Position 24 is His, Tyr or Phe
  Variant (25)..(25): Xaa in Position 25 is Leu, Met, Ile, Val or Cys
  Variant (28)..(28): Xaa in Position 28 is Ala or Ser
  Variant (30)..(30): Xaa in Position 30 is Leu, Ile, Phe or Val
  Variant (31)..(32): Xaa in Position 31 to 32 is any amino acid
  Variant (33)..(33): Xaa in Position 33 is Ala, Gly, Ser or Ile
  Variant (34)..(48): Xaa in Position 34 to 48 is any amino acid
  Variant (49)..(52): Xaa in Position 49 to 52 is no amino acid or any amino acid
  Variant (54)..(57): Xaa in Position 54 to 57 is any amino acid
  Variant (58)..(58): Xaa in Position 58 is Cys, Gly or Ser
  Variant (59)..(59): Xaa in Position 59 is Leu, Gly, Phe or Ala
  Variant (60)..(60): Xaa in Position 60 is Ser, Thr or Tyr
  Variant (62)..(62): Xaa in Position 62 is any amino acid
  Variant (63)..(63): Xaa in Position 63 is Leu, Gly, Ile, Met or Val
  Variant (64)..(67): Xaa in Position 64 to 67 is any amino acid
  Variant (68)..(68): Xaa in Position 68 is Gly or Glu
  Variant (69)..(69): Xaa in Position 69 is Ser or Ala
  Variant (70)..(70): Xaa in Position 70 is Val, Leu, Ile or Met
  Variant (71)..(71): Xaa in Position 71 is Leu, Val or Ile
  Variant (72)..(85): Xaa in Position 72 to 85 is any amino acid
  Variant (86)..(86): Xaa in Position 86 is Lys, Arg or Gln
  Variant (87)..(88): Xaa in Position 87 to 88 is any amino acid
  Variant (89)..(89): Xaa in Position 89 is Gly, Ala or Met
GXXXXXXXXXXXXXXXXXXXXXXXXDGXRXXXXXXXXXXXXXXXXXXXXXXXDXXXXXXXKXXXXXXXXXXXXXXXXXXXXXXXXXXXX

SEQ ID NO: 1315 - protein, 464 aa, artificial sequence
  Consensus
  Variant (1)..(464): Xaa in all Positions is any amino acid
XXXXXXXXXXXXXXXXXXXXXXXXXXXXXXXXXXXXXXXXXXXXSDXXXXXXXXXXXXXXXXXXXXXXXXYGXDXXXXXXXXXXXXXXXXXXXXXXXXXFXXXGTXXNXXXXXXXXXXXXXXXXXXXXXXHXXXXEXGXXXXXXXXXXXXXXXXXXXXXXXXXXXXXXXXXXXXXXXXHXXXXXXXXXXXXXXXXXGXXXXXXXXXXXXXXXXXXXXXXXHXDGARXXXAXXXXXXXXXXXXXXXXXXXDXXXXXXXKXXXXXXXXXXXXXXXXXXXXXXXXKXXGXXXXXXXXXXXXXXXXXXXXXXXXXXXXXXXXXXXXXXAXXXXXXXXXXXXXXXXXXXXXXXXXXNXXXXXXXXXXXXXXXXXXXXXXXXXXXXXXXXXXXXXXXXXXXXXXXXRXXXXXXXXXXXXXXXXXXXXXXXXXXXXXXXXXXXXXXXXXXXXXXXXXXXXXXXXXXXXXXX

SEQ ID NO: 1316 - protein, 122 aa, artificial sequence
  Consensus
  Variant (1)..(1): Xaa in Position 1 is Asp or Glu
  Variant (2)..(2): Xaa in Position 2 is Phe or Leu
  Variant (6)..(7): Xaa in Position 6 to 7 is any amino acid
  Variant (9)..(9): Xaa in Position 9 is any amino acid
  Variant (11)..(11): Xaa in Position 11 is Thr or Ser
  Variant (12)..(13): Xaa in Position 12 to 13 is any amino acid
  Variant (14)..(14): Xaa in Position 14 is Met or Val
  Variant (15)..(20): Xaa in Position 15 to 20 is any amino acid
  Variant (21)..(21): Xaa in Position 21 is no amino acid or any amino acid
  Variant (22)..(22): Xaa in Position 22 is no amino acid or any amino acid
  Variant (23)..(23): Xaa in Position 23 is Ala, Ser or Thr
  Variant (24)..(24): Xaa in Position 24 is Thr, Ser or Ala
  Variant (25)..(25): Xaa in Position 25 is any amino acid
  Variant (26)..(26): Xaa in Position 26 is Gly or Asn
  Variant (28)..(28): Xaa in Position 28 is any amino acid
  Variant (30)..(30): Xaa in Position 30 is Tyr or Phe
  Variant (31)..(31): Xaa in Position 31 is any amino acid
  Variant (34)..(35): Xaa in Position 34 to 35 is any amino acid
  Variant (37)..(38): Xaa in Position 37 to 38 is any amino acid
  Variant (39)..(39): Xaa in Position 39 is Leu or Phe
  Variant (41)..(42): Xaa in Position 41 to 42 is any amino acid
  Variant (43)..(43): Xaa in Position 43 is Val, Met or Ile
  Variant (44)..(47): Xaa in Position 44 to 47 is any amino acid
  Variant (49)..(53): Xaa in Position 49 to 53 is no amino acid or any amino acid
  Variant (54)..(55): Xaa in Position 54 to 55 is any amino acid
  Variant (56)..(56): Xaa in Position 56 is Ala or Glu
  Variant (57)..(57): Xaa in Position 57 is Gly or Ala
  Variant (58)..(58): Xaa in Position 58 is Leu, Met or Val
  Variant (59)..(59): Xaa in Position 59 is Phe or Met
  Variant (60)..(61): Xaa in Position 60 to 61 is any amino acid
  Variant (62)..(62): Xaa in Position 62 is Ser or Thr
  Variant (63)..(63): Xaa in Position 63 is Gly or Thr
  Variant (65)..(66): Xaa in Position 65 to 66 is any amino acid
  Variant (69)..(69): Xaa in Position 69 is Ile or Leu
  Variant (70)..(70): Xaa in Position 70 is any amino acid
  Variant (71)..(71): Xaa in Position 71 is Leu, Val or Ile
  Variant (72)..(74): Xaa in Position 72 to 74 is any amino acid
  Variant (75)..(75): Xaa in Position 75 is Leu, Val or Ser
  Variant (76)..(76): Xaa in Position 76 is any amino acid
  Variant (77)..(77): Xaa in Position 77 is no amino acid or any amino acid
  Variant (78)..(78): Xaa in Position 78 is no amino acid or any amino acid
  Variant (79)..(79): Xaa in Position 79 is Pro or Arg
  Variant (80)..(80): Xaa in Position 80 is Pro or Cys
  Variant (81)..(81): Xaa in Position 81 is any amino acid
  Variant (82)..(82): Xaa in Position 82 is Ser or Gly
  Variant (83)..(83): Xaa in Position 83 is Ile or Val
  Variant (84)..(84): Xaa in Position 84 is Leu or Ile
  Variant (85)..(85): Xaa in Position 85 is any amino acid
  Variant (86)..(86): Xaa in Position 86 is Asp or Ser
  Variant (87)..(88): Xaa in Position 87 to 88 is any amino acid
  Variant (89)..(89): Xaa in Position 89 is Ala or Ser
  Variant (91)..(91): Xaa in Position 91 is Val, Ile or Ala
  Variant (92)..(94): Xaa in Position 92 to 94 is any amino acid
  Variant (96)..(96): Xaa in Position 96 is Ala or Cys
  Variant (97)..(97): Xaa in Position 97 is Gly or Ala
  Variant (98)..(98): Xaa in Position 98 is Gly or Ala
  Variant (99)..(99): Xaa in Position 99 is any amino acid
  Variant (100)..(100): Xaa in Position 100 is Ala, Ser or Gly
  Variant (101)..(101): Xaa in Position 101 is any amino acid
  Variant (102)..(102): Xaa in Position 102 is Leu or Phe
  Variant (103)..(103): Xaa in Position 103 is Ser, Thr or Cys
  Variant (104)..(104): Xaa in Position 104 is Gln or Gly
  Variant (106)..(106): Xaa in Position 106 is any amino acid
  Variant (107)..(107): Xaa in Position 107 is Val, Leu, Ile or Ala
  Variant (108)..(108): Xaa in Position 108 is any amino acid
  Variant (110)..(110): Xaa in Position 110 is Val, Ile or Ala
  Variant (111)..(111): Xaa in Position 111 is any amino acid
  Variant (112)..(112): Xaa in Position 112 is Pro or Ala
  Variant (113)..(113): Xaa in Position 113 is any amino acid
  Variant (115)..(115): Xaa in Position 115 is Gly or Asn
  Variant (116)..(116): Xaa in Position 116 is any amino acid
  Variant (117)..(117): Xaa in Position 117 is Tyr or His
  Variant (118)..(118): Xaa in Position 118 is Leu, Ile or Met
  Variant (119)..(119): Xaa in Position 119 is Thr or Arg
  Variant (120)..(120): Xaa in Position 120 is any amino acid
  Variant (121)..(121): Xaa in Position 121 is Glu or Asp
  Variant (122)..(122): Xaa in Position 122 is Asp or Glu
XXRSDXXTXPXXXXXXXXXXXXXXXXDXVXXEDXXTXXXEXXXXXXXGXXXXXXXXXXXXXXXTXXNQXXXXXXXXXXXXXXXXXXXXXHXXXXEXXXXXXXXXAXXXPXXXXNXXXXXXXX

SEQ ID NO: 1317 - protein, 50 aa, artificial sequence
  Consensus
  Variant (1)..(1): Xaa in Position 1 is Asp, Glu or Met
  Variant (2)..(2): Xaa in Position 2 is Ile, Val or Thr
  Variant (3)..(3): Xaa in Position 3 is His or Glu
  Variant (4)..(5): Xaa in Position 4 to 5 is any amino acid
  Variant (8)..(8): Xaa in Position 8 is any amino acid
  Variant (9)..(9): Xaa in Position 9 is Leu, Ile or Val
  Variant (10)..(10): Xaa in Position 10 is Ile, Val or Leu
  Variant (11)..(11): Xaa in Position 11 is any amino acid
  Variant (12)..(12): Xaa in Position 12 is Leu or Met
  Variant (16)..(17): Xaa in Position 16 to 17 is any amino acid
  Variant (19)..(21): Xaa in Position 19 to 21 is any amino acid
  Variant (23)..(23): Xaa in Position 23 is Leu, Val or Ile
  Variant (24)..(24): Xaa in Position 24 is any amino acid
  Variant (26)..(26): Xaa in Position 26 is Leu, Ile, Val or Met
  Variant (27)..(27): Xaa in Position 27 is any amino acid
  Variant (28)..(28): Xaa in Position 28 is Arg or Lys
  Variant (29)..(29): Xaa in Position 29 is Ile or Met
  Variant (30)..(31): Xaa in Position 30 to 31 is any amino acid
  Variant (32)..(32): Xaa in Position 32 is Trp, Phe or Leu
  Variant (33)..(33): Xaa in Position 33 is Ala or Cys
  Variant (34)..(35): Xaa in Position 34 to 35 is any amino acid
  Variant (36)..(36): Xaa in Position 36 is Asn, Gln or His
  Variant (37)..(37): Xaa in Position 37 is any amino acid
  Variant (38)..(38): Xaa in Position 38 is Ile, Val, Leu or Met
  Variant (39)..(39): Xaa in Position 39 is any amino acid
  Variant (40)..(40): Xaa in Position 40 is Leu, Val, Ile or Thr
  Variant (42)..(42): Xaa in Position 42 is any amino acid
  Variant (47)..(47): Xaa in Position 47 is Leu or Ile
  Variant (48)..(48): Xaa in Position 48 is Trp or Phe
  Variant (49)..(49): Xaa in Position 49 is any amino acid
  Variant (50)..(50): Xaa in Position 50 is Ala or Ser
XXXXXPTXXXXXENTXXGXXXPXXEXXXXXXXXXXXXXXXHXDGARXXXX

SEQ ID NO: 1318 - protein, 62 aa, artificial sequence
  Consensus
  Variant (1)..(1): Xaa in Position 1 is Leu, Ile or Met
  Variant (2)..(2): Xaa in Position 2 is Lys, Arg or Glu
  Variant (3)..(8): Xaa in Position 3 to 8 is any amino acid
  Variant (10)..(10): Xaa in Position 10 is Ser, Ala or Leu
  Variant (11)..(11): Xaa in Position 11 is Val, Ile or Met
  Variant (12)..(12): Xaa in Position 12 is Ser or Thr
  Variant (13)..(13): Xaa in Position 13 is Leu, Ile or Val
  Variant (14)..(14): Xaa in Position 14 is any amino acid
  Variant (15)..(15): Xaa in Position 15 is Leu or Phe
  Variant (16)..(16): Xaa in Position 16 is Ser or Gly
  Variant (18)..(18): Xaa in Position 18 is any amino acid
  Variant (19)..(19): Xaa in Position 19 is Leu, Met, Ile or Val
  Variant (20)..(20): Xaa in Position 20 is Gly, Ala or Cys
  Variant (23)..(23): Xaa in Position 23 is Ile, Val or Met
  Variant (25)..(25): Xaa in Position 25 is Ser, Thr or Ala
  Variant (26)..(26): Xaa in Position 26 is Val, Ile, Met or Ala
  Variant (27)..(27): Xaa in Position 27 is Leu or Ile
  Variant (28)..(28): Xaa in Position 28 is Val, Leu or Ile
  Variant (29)..(29): Xaa in Position 29 is Gly or Ala
  Variant (30)..(32): Xaa in Position 30 to 32 is any amino acid
  Variant (33)..(33): Xaa in Position 33 is Phe or Leu
  Variant (34)..(34): Xaa in Position 34 is Ile or Val
  Variant (35)..(40): Xaa in Position 35 to 40 is any amino acid
  Variant (41)..(41): Xaa in Position 41 is Arg, Lys or Gln
  Variant (42)..(42): Xaa in Position 42 is Lys or Gln
  Variant (43)..(44): Xaa in Position 43 to 44 is any amino acid
  Variant (48)..(48): Xaa in Position 48 is Ile, Val, Leu or Met
  Variant (50)..(50): Xaa in Position 50 is Gln or Lys
  Variant (51)..(51): Xaa in Position 51 is Ser, Ala or Gly
  Variant (53)..(53): Xaa in Position 53 is any amino acid
  Variant (54)..(54): Xaa in Position 54 is Leu, Ile or Met
  Variant (55)..(56): Xaa in Position 55 to 56 is any amino acid
  Variant (57)..(57): Xaa in Position 57 is Met or Ala
  Variant (58)..(58): Xaa in Position 58 is Ala or Gly
  Variant (59)..(61): Xaa in Position 59 to 61 is any amino acid
  Variant (62)..(62): Xaa in Position 62 is Ile, Leu, Met or Val
XXXXXXXXDXXXXXXXKXXXAPXGXXXXXXXXXXXXXXXXXXXXGGGXRXXGXXXXXXXXXX

SEQ ID NO: 1319 - protein, 65 aa, artificial sequence
  Consensus
  Variant (1)..(1): Xaa in Position 1 is Gly or Gln
  Variant (2)..(2): Xaa in Position 2 is Ile, Gly or Leu
  Variant (3)..(3): Xaa in Position 3 is any amino acid
  Variant (5)..(6): Xaa in Position 5 to 6 is any amino acid
  Variant (7)..(7): Xaa in Position 7 is Pro or Glu
  Variant (8)..(9): Xaa in Position 8 to 9 is any amino acid
  Variant (10)..(10): Xaa in Position 10 is Thr or Ser
  Variant (11)..(11): Xaa in Position 11 is Asn or Ser
  Variant (12)..(12): Xaa in Position 12 is any amino acid
  Variant (13)..(13): Xaa in Position 13 is Val, Phe or Ile
  Variant (14)..(14): Xaa in Position 14 is Phe, Trp, Tyr or Thr
  Variant (15)..(15): Xaa in Position 15 is Leu, Ile or Val
  Variant (16)..(16): Xaa in Position 16 is Asp, Ala or Asn
  Variant (17)..(20): Xaa in Position 17 to 20 is any amino acid
  Variant (21)..(21): Xaa in Position 21 is no amino acid or any amino acid
  Variant (22)..(22): Xaa in Position 22 is Met, Ile, Leu or Phe
  Variant (23)..(24): Xaa in Position 23 to 24 is any amino acid
  Variant (25)..(25): Xaa in Position 25 is Asp, Ser or Asn
  Variant (26)..(26): Xaa in Position 26 is any amino acid
  Variant (27)..(27): Xaa in Position 27 is Leu, Phe or Ala
  Variant (28)..(31): Xaa in Position 28 to 31 is any amino acid
  Variant (32)..(36): Xaa in Position 32 to 36 is no amino acid or any amino acid
  Variant (37)..(37): Xaa in Position 37 is Val, Ile or Cys
  Variant (38)..(38): Xaa in Position 38 is Lys, Ile or Arg
  Variant (39)..(39): Xaa in Position 39 is Leu or Ile
  Variant (40)..(40): Xaa in Position 40 is any amino acid
  Variant (41)..(41): Xaa in Position 41 is Gly, Ala or Asp
  Variant (42)..(42): Xaa in Position 42 is any amino acid
  Variant (44)..(44): Xaa in Position 44 is Ile, Val or Leu
  Variant (45)..(45): Xaa in Position 45 is Ala, Ser or Val
  Variant (46)..(46): Xaa in Position 46 is Phe, Cys or Leu
  Variant (48)..(48): Xaa in Position 48 is any amino acid
  Variant (49)..(49): Xaa in Position 49 is Gln or His
  Variant (50)..(50): Xaa in Position 50 is no amino acid or any amino acid
  Variant (51)..(51): Xaa in Position 51 is Val, Leu, Ile or Thr
  Variant (52)..(54): Xaa in Position 52 to 54 is any amino acid
  Variant (55)..(55): Xaa in Position 55 is Ser, Ala or Thr
  Variant (56)..(58): Xaa in Position 56 to 58 is any amino acid
  Variant (59)..(59): Xaa in Position 59 is Val, Leu, Ile or Cys
  Variant (60)..(60): Xaa in Position 60 is Lys, Ile or Glu
  Variant (61)..(61): Xaa in Position 61 is any amino acid
  Variant (62)..(62): Xaa in Position 62 is Val, Ala or Cys
  Variant (63)..(64): Xaa in Position 63 to 64 is any amino acid
  Variant (65)..(65): Xaa in Position 65 is Glu, Asp or Arg
XXXLXXXXXXXXXXXXXXXXXXXXXXXXXXXXXXXXXXXXXXRXXXHXXXXXXXXXXXXXXXXXX

SEQ ID NO: 1320 - protein, 432 aa, artificial sequence
  Consensus
  Variant (1)..(432): Xaa on all Positions is any amino acid
XXXXXXXXXXXXXXXXXXXXXXXXXXXXXXXXXXXXXXXXRSDTXTXPTXXMXXXXXXXXXXXGDXVYXEDXXTXXXEXXXXXXXGXXXXXXXAXXFXVSGTXXNQXXXRXXLXXXPPXSILCDXRAHXXXXEAXGXAXLSQAXXXPXXPXNGXYXTXEDXXXXXXXXXXXDXHXXPTXXXXLENTXXGXXXPXXEXXXIXXXXXXXXXXXHXDGARXWXAXXXXXXXXXXXXXXXXXXFDSXSXCLSKXXXAPXGSXXVGXXXXXXXXXXXXKXXGGGXRQXGXXXXXAXXXXXXXXXXXXXXXXXXXXXXHXXAXXXXXXXXXXGXXLXXPXXTNXVXXDXXXXXXXXXXXXXXXXXXXXXXLXXXRXXXHXQXXXXXXXXXXKXXXXXXXXXXXXXXXXXXXXXXXXXXXXXXXXXXXXXXXXXXXXXX

SEQ ID NO: 1321 - protein, 432 aa, artificial sequence
  Consensus
  Variant (1)..(432): Xaa in all Positions is any amino acid
XXXXXXXXXXXXXXXXXXXXXXXXXXXXXXXXXXXXXXXXRSDXXTXPXXXXXXXXXXXXXXXXDXVXXEDXXTXXXEXXXXXXXGXXXXXXXXXXXXXXXTXXNQXXXXXXXXXXXXXXXXXXXXXHXXXXEXXXXXXXXXAXXXPXXXXNXXXXXXXXXXXXXXXXXXXXXXXXPTXXXXXENTXXGXXXPXXEXXXXXXXXXXXXXXXHXDGARXXXXXXXXXXXXXXXXXXXXXXXDXXXXXXXKXXXAPXGXXXXXXXXXXXXXXXXXXXXGGGXRXXGXXXXXXXXXXXXXXXXXXXXXXXXXXXXXXXXXXXXXXXXXXXXXLXXXXXXXXXXXXXXXXXXXXXXXXXXXXXXXXXXXXXXRXXXHXXXXXXXXXXXXXXXXXXXXXXXXXXXXXXXXXXXXXXXXXXXXXXXXXXXXXXXXXXX

SEQ ID NO: 1322 - protein, 101 aa, artificial sequence
  Consensus
  Variant (2)..(23): Xaa in Position 2 to 23 is any amino acid
  Variant (24)..(30): Xaa in Position 24 to 30 is no amino acid or any amino acid
  Variant (32)..(32): Xaa in Position 32 is any amino acid
  Variant (37)..(39): Xaa in Position 37 to 39 is any amino acid
  Variant (41)..(55): Xaa in Position 41 to 55 is any amino acid
  Variant (56)..(56): Xaa in Position 56 is no amino acid or any amino acid
  Variant (57)..(57): Xaa in Position 57 is no amino acid or any amino acid
  Variant (59)..(62): Xaa in Position 59 to 62 is any amino acid
  Variant (64)..(64): Xaa in Position 64 is any amino acid
  Variant (67)..(70): Xaa in Position 67 to 70 is any amino acid
  Variant (72)..(72): Xaa in Position 72 is any amino acid
  Variant (75)..(77): Xaa in Position 75 to 77 is any amino acid
  Variant (79)..(85): Xaa in Position 79 to 85 is any amino acid
  Variant (87)..(90): Xaa in Position 87 to 90 is any amino acid
  Variant (92)..(93): Xaa in Position 92 to 93 is any amino acid
  Variant (97)..(97): Xaa in Position 97 is any amino acid
  Variant (100)..(100): Xaa in Position 100 is any amino acid
GXXXXXXXXXXXXXXXXXXXXXXXXXXXXXHXDGARXXXAXXXXXXXXXXXXXXXXXDXXXXCXSKXXXXPXGSXXXGXXXXXXXAXXXXKXXGGGXRQXG

SEQ ID NO: 1323 - DNA, 1047 bp, Escherichia coli K12
  CDS (1)..(1047)
atgaacagaactgacgaactccgtactgcgcgtattgagagcctggtaacgcccgccgaactcgcgctacggtatcccgtaacgcctggcgtcgccacccatgtcaccgactcccgccgcagaattgaaaaaatactgaatggtgaagataagcgactgttggtcattattggcccctgctcgatccacgatctcaccgctgcaatggagtacgccacccgtctgcagtcgctgcgcaaccagtaccagtcacggctggaaatcgtaatgcgcacctattttgaaaaaccacgaactgttgtcggctggaaaggactaatctccgatccagatttaaacggcagctatcgggtaaatcacggtctggagctggcgcgcaaattacttttacaggtaaatgagctgggcgtcccaaccgcgaccgagttcctcgatatggtgaccggtcagtttattgctgatttaatcagttggggcgcgattggcgcacgtactaccgaaagtcagatccaccgcgaaatggcttcggcactctcctgtccggtaggttttaaaaatggtaccgatggcaatacgcggattgctgtggatgctatccgcgcagcccgcgccagccatatgttcctctcgccagacaaaaatggtcagatgaccatctatcagaccagcggcaacccgtatggccacattattatgcgtggcggcaaaaaaccgaattatcatgccgatgatatcgccgcagcctgcgatacgctgcacgagtttgatttacctgaacatctggtggtggatttcagccacggtaactgccagaagcagcaccgtcgccagttagaagtttgtgaggatatttgtcagcaaatccgcaatggctctacggcgattgctggaattatggcggaaagtttcctgcgcgaaggaacgcaaaaaatcgtcggcagtcagccgctcacttacggtcaatccattaccgacccgtgtctgggctgggaggataccgaacgcctggtcgaaaaactcgcctctgcggtagatacccgcttctga

SEQ ID NO: 1324 - protein, 348 aa, Escherichia coli K12
MNRTDELRTARIESLVTPAELALRYPVTPGVATHVTDSRRRIEKILNGEDKRLLVIIGPCSIHDLTAAMEYATRLQSLRNQYQSRLEIVMRTYFEKPRTVVGWKGLISDPDLNGSYRVNHGLELARKLLLQVNELGVPTATEFLDMVTGQFIADLISWGAIGARTTESQIHREMASALSCPVGFKNGTDGNTRIAVDAIRAARASHMFLSPDKNGQMTIYQTSGNPYGHIIMRGGKKPNYHADDIAAACDTLHEFDLPEHLVVDFSHGNCQKQHRRQLEVCEDICQQIRNGSTAIAGIMAESFLREGTQKIVGSQPLTYGQSITDPCLGWEDTERLVEKLASAVDTRF

SEQ ID NO: 1325 - DNA, 1235 bp, Salmonella typhimurium
  CDS (165)..(1235)
gtgtaaagtttttgatacgaaatgagggagattaatcgacgattgcgcatggtgtaaagtttattttacgaaatatggattgaaatctttactttttgtggtatggtttaaacatcctcgtggaggatcaactatcgcaaacaagaaaagacaggatcgccatcatgcaaaaagacgcgctgaataacgtacgtatcaccgatgaacaggtattaatgacgccggagcagcttaaagcggcctttcccttgagcctggcgcaggaagcccagatagcgcagtcccggggaatcatttctgacattattgccgggcgcgatccgcgtctcttggtggtatgcggtccttgttctattcacgatcctgaaaccgctctggaatatgcccgtcgatttaaagcccttgccgcagaggtcagcgatagcctctatctggtaatgcgcgtctattttgaaaagccgcgaactaccgtcggctggaaagggctgattaacgatcctcacatggatggctcatttgatgtggaagccgggttgaaaatagcgcgtcagctactggtggaactggtgaatatggggttgccattggcgaccgaagcgttggatccgaacagcccgcaatacctgggcgatctgtttagctggtcggcgataggggcgcgcacaaccgaatcgcaaacccaccgcgaaatggcgtctggtctttctatgccggtcgcgtttaaaaacggcacggatggcagcctggcgacagcgattaacgccatgcgcgccgctgcgcaacctcatcgttttgttggcattaaccaggccggtcaggttgcgttattgcaaacccagggaaatccgcatggccatgtgattctgcgtggcggcaaagcgccgaactatagcccggcagatgtcgctcagtgtgaaaaagagatggaacaggcgggactacgtccttcgctgatggtagattgcagtcatggtaactccaataaagattatcgccgccagccagccgttgccgaatctgtggttgcgcagattaaagatggcaatcgttcaatcattggcttaatgattgaaagtaatattcatgagggtaaccagtcttccgaacagccgcgcagcgaaatgaagtatggcgtttccgtcaccgatgcttgtattagctgggagatgaccgatgccctgttacgtgaaattcataaagatttgagcggccagctggcggtgcgcgtcgcataa

SEQ ID NO: 1326 - protein, 356 aa, Salmonella typhimurium
MQKDALNNVRITDEQVLMTPEQLKAAFPLSLAQEAQIAQSRGIISDIIAGRDPRLLVVCGPCSIHDPETALEYARRFKALAAEVSDSLYLVMRVYFEKPRTTVGWKGLINDPHMDGSFDVEAGLKIARQLLVELVNMGLPLATEALDPNSPQYLGDLFSWSAIGARTTESQTHREMASGLSMPVAFKNGTDGSLATAINAMRAAAQPHRFVGINQAGQVALLQTQGNPHGHVILRGGKAPNYSPADVAQCEKEMEQAGLRPSLMVDCSHGNSNKDYRRQPAVAESVVAQIKDGNRSIIGLMIESNIHEGNQSSEQPRSEMKYGVSVTDACISWEMTDALLREIHKDLSGQLAVRVA

SEQ ID NO: 1327 - DNA, 1086 bp, Deinococcus radiodurans
  CDS (1)..(1086)
atgacccagccccccgccccctctaccaccgaaaacctcaacgtgaccggcttcacgccgctgatgaccccgcgtgaactcaaggccgaggtgccgctgaccgacgctgccgagcgcaccgtgctcgccggacgccgggcggcgcaggccatcctgagcggcgaggacgaccgcctactggtggttgtcgggccgtgcagcattcacgaccaggcgcaagcgctggagtacgccgggcggctcgcggcgctgcgtgagcgggtgaaagaccggctggaagtgcagatgcgcgtctacgtggacaaaccgcgcacgacggtgggctggcgcggctacctgctcgaccccgacatggacggcagcaacgacatgggcaagggcgtgcgccgcacccgcgagctgatggtggcggtgagcgaactcgggctgccggtggcgaccgaactgcttgaccccttcgcgccgcagtacctcttcgacgccgtagcctgggcctgcctgggcgcgcgcaccgccgagtcgcagacccaccgggtaatggcgagcgccgtcagtgccccgatgggcttcaagaacggcaccggcggcggtatcaagctcgcggtggacgcggtggtggccgccagtcacccgcacgcttttttcaccattgacgaagatgggcgcgccgcgattgtccacaccaagggcaacgcgcacgggcacgtcattttgcgcggcgggcgtgccggccccaactacgccccgcagttcgtgcaggaagcagcagacctgctgcgcgcggcgggccgcgaagaagccgtcatggtggactgctcgcacgccaactcggggtcggactggacccggcagcgcttggtgtggcgcgacgtgctgggccagcgcctcgccggacagcgcgccatccggggcgccatgctggagagcaacctgcaagccggcaaacagagcctgcctgccgacctcacgcagctcaagcccggcgtgagcgtcaccgacgcctgcgtgggctgggacgaaaccgaggccctgctgctggaggcccacgaacagctcagtggccgcgcggcactggcgacctgctga

SEQ ID NO: 1328 - protein, 361 aa, Deinococcus radiodurans
MTQPPAPSTTENLNVTGFTPLMTPRELKAEVPLTDAAERTVLAGRRAAQAILSGEDDRLLVVVGPCSIHDQAQALEYAGRLAALRERVKDRLEVQMRVYVDKPRTTVGWRGYLLDPDMDGSNDMGKGVRRTRELMVAVSELGLPVATELLDPFAPQYLFDAVAWACLGARTAESQTHRVMASAVSAPMGFKNGTGGGIKLAVDAVVAASHPHAFFTIDEDGRAAIVHTKGNAHGHVILRGGRAGPNYAPQFVQEAADLLRAAGREEAVMVDCSHANSGSDWTRQRLVWRDVLGQRLAGQRAIRGAMLESNLQAGKQSLPADLTQLKPGVSVTDACVGWDETEALLLEAHEQLSGRAALATC

SEQ ID NO: 1329 - DNA, 1056 bp, Neisseria meningitidis
  CDS (1)..(1056)
atgacacaccattaccccacagacgatattaagattaaagaagttaaagagttgttgccgccgattgcccatctttacgagctgccgatttccaaagaggcttcgggcttggttcaccgcacccgtcaggaaatttccgatttggttcacggcagggacaagcggctgttggttattatcgggccgtgttcgattcacgatccgaaagcggcgttggaatatgcggagcgtttgttgaaactccgcaagcagtatgaaaacgagcttttgattgtgatgcgcgtttatttcgagaagccgaggacgacggtgggttggaaaggtttgattaacgacccgcatttggacggtacgtttgacatcaatttcggtttgcgtcaggcacgcagcctgttgttgtcgctgaacaatatgggtatgcctgcctctaccgagtttttggatatgattacgccgcaatattatgcggacttgatttcttggggggcaatcggcgcgcggacgaccgaaagccaagttcaccgcgaattggcaagcgggctgtcctgccccgtcggctttaaaaacggtacggatggcaatttgaagattgccatcgacgcaatcggtgcggcgagccattcgcatcatttcctgtctgtaaccaaggccgggcattccgccattgtccataccggcggcaatcctgactgtcatgtcattttgcgcggcggaaaagagccgaattatgatgcgggacacgtcagcgaggcggcggaacaactgcgtgcggcaggcgtaaccgacaagctgatgattgattgcagccacgccaacagccgcaaggattacacccgacagatggaagtggcgcaagacattgccgcccaattggaacaggacggcggcaatattatgggcgtgatggtggaaagccatttggtcgaaggcaggcaggacaagccggaagtgtacggcaaaagcattaccgatgcgtgtattggttgggacgcgactgaagaactgttggcattgttggcaggtgcaaacaaaaaacgtatggcgcgcgccggttga

SEQ ID NO: 1330 - protein, 351 aa, Neisseria meningitidis
MTHHYPTDDIKIKEVKELLPPIAHLYELPISKEASGLVHRTRQEISDLVHGRDKRLLVIIGPCSIHDPKAALEYAERLLKLRKQYENELLIVMRVYFEKPRTTVGWKGLINDPHLDGTFDINFGLRQARSLLLSLNNMGMPASTEFLDMITPQYYADLISWGAIGARTTESQVHRELASGLSCPVGFKNGTDGNLKIAIDAIGAASHSHHFLSVTKAGHSAIVHTGGNPDCHVILRGGKEPNYDAGHVSEAAEQLRAAGVTDKLMIDCSHANSRKDYTRQMEVAQDIAAQLEQDGGNIMGVMVESHLVEGRQDKPEVYGKSITDACIGWDATEELLALLAGANKKRMARAG

SEQ ID NO: 1331 - DNA, 1047 bp, Yersinia pestis
  CDS (1)..(1047)
atgtacaagatagatgaactgcggaccgctcgcatcgatagcttgattacaccgcagcaactggctgaaaagttaccgatttctgaggttattgcagataacgtgacggcgtcacgtaaacgaatagagaaaatacttattggtgaagacccacgtctactcgtggtgattggcccctgctctattcacgaccttgatgcagccgttgattatgccacccggctcaaggtgctacgagaacgctatcaagaccggctggaaatcgtgatgcgcacctatttcgagaaaccacggactgtagtgggttggaaggggctgatttctgatccggcacttgacggctcatgccaggtgaacttgggtattgaactggcacgtaagctactgttagccgtgaatgaactcgggctgccgaccgctaccgagttcctcaatatggtaacaggccaatatattgccgacctcatcagttggggggcaataggcgcacgtaccaccgaaagccagatccaccgagagatggcctcggcactctcctgccccgtgggtttcaaaaatggtacagatggcaatgtgcgtattgctattgatgccattcgcgccgcacaagccagccatatgttcctttctccggataaaaccggccaaatgacgatttaccaaaccagtggtaacccctatgggcatattattatgcggggtggaaagcaacctaactatgatgcctctgatatcgcagccgcctgtgacagcttgcgggaatttgatttgccagaacatctggtggtagattttagccacggcaattgccagaagatgcatcgccgccagttggatgttgccgaaaatatcgggctacagatccgtgcgggttcaacagcgattgtcggtgttatggctgagagtttcctgattgagggcacacagaagattgttgccggacagcccttaacttatgggcaatccatcactgacccttgcctgaattgggatgatactgaacaactgttaagcctattggcagatgcagtagacagccggttttaa

SEQ ID NO: 1332 - protein, 348 aa, Yersinia pestis
MYKIDELRTARIDSLITPQQLAEKLPISEVIADNVTASRKRIEKILIGEDPRLLVVIGPCSIHDLDAAVDYATRLKVLRERYQDRLEIVMRTYFEKPRTVVGWKGLISDPALDGSCQVNLGIELARKLLLAVNELGLPTATEFLNMVTGQYIADLISWGAIGARTTESQIHREMASALSCPVGFKNGTDGNVRIAIDAIRAAQASHMFLSPDKTGQMTIYQTSGNPYGHIIMRGGKQPNYDASDIAAACDSLREFDLPEHLVVDFSHGNCQKMHRRQLDVAENIGLQIRAGSTAIVGVMAESFLIEGTQKIVAGQPLTYGQSITDPCLNWDDTEQLLSLLADAVDSRF

SEQ ID NO: 1333 - DNA, 1071 bp, Escherichia coli
  CDS (1)..(1071)
atgcaaaaagacgcgctgaataacgtacatattaccgacgaacaggttttaatgactccggaacaactgaaggccgcttttccattgagcctgcaacaagaagcccagattgctgactcgcgtaaaagcatttcagatattatcgccgggcgcgatcctcgtctgctggtagtatgtggtccttgttccattcatgatccggaaactgctctggaatatgctcgtcgatttaaagcccttgccgcagaggtcagcgatagcctctatctggtaatgcgcgtctattttgaaaaaccccgtaccactgtcggctggaaagggttaattaacgatccccatatggatggctcttttgatgtagaagccgggctgcagatcgcgcgtaaattgctgcttgagctggtgaatatgggactgccactggcgacggaagcgttagatccgaatagcccgcaatacctgggcgatctgtttagctggtcagcaattggtgctcgtacaacggaatcgcaaactcaccgtgaaatggcctccgggctttccatgccggttggttttaaaaacggcaccgacggcagtctggcaacagcaattaacgctatgcgcgccgccgcccagccgcaccgttttgttggcattaaccaggcagggcaggttgcgttgctacaaactcaggggaatccggacggccatgtgatcctgcgcggtggtaaagcgccgaactatagccctgcggatgttgcgcaatgtgaaaaagagatggaacaggcgggactgcgcccgtctctgatggtagattgcagccacggtaattccaataaagattatcgccgtcagcctgcggtggcagaatccgtggttgctcaaatcaaagatggcaatcgctcaattattggtctgatgatcgaaagtaatatccacgagggcaatcagtcttccgagcaaccgcgcagtgaaatgaaatacggtgtatccgtaaccgatgcctgcattagctgggaaatgaccgatgccttgctgcgtgaaattcatcaggatctgaacgggcagctgacggctcgcgtggcttaa

SEQ ID NO: 1334 - protein, 356 aa, Escherichia coli
MQKDALNNVHITDEQVLMTPEQLKAAFPLSLQQEAQIADSRKSISDIIAGRDPRLLVVCGPCSIHDPETALEYARRFKALAAEVSDSLYLVMRVYFEKPRTTVGWKGLINDPHMDGSFDVEAGLQIARKLLLELVNMGLPLATEALDPNSPQYLGDLFSWSAIGARTTESQTHREMASGLSMPVGFKNGTDGSLATAINAMRAAAQPHRFVGINQAGQVALLQTQGNPDGHVILRGGKAPNYSPADVAQCEKEMEQAGLRPSLMVDCSHGNSNKDYRRQPAVAESVVAQIKDGNRSIIGLMIESNIHEGNQSSEQPRSEMKYGVSVTDACISWEMTDALLREIHQDLNGQLTARVA

SEQ ID NO: 1335 - DNA, 1131 bp, Nostoc sp. PCC 7120
  CDS (1)..(1131)
atgatgaatttgtgttgtacatttcatctacaatatgtatacccaatctgcctaaaatcctacccagacaattcagagcaatcctccatgcacaataaattaactaacgcaaatattgaaaattatcacgttctcttaactccaaacgcagtaaaagaaaaattaccgttaacagaaactgcggcagaaatagttttacagtttagatgtgaaatagagaaaatcttagattttcaagatagacgcaaatttatagtagttgggccttgttccattcatgaccctaatgcagcattggaatacgcccataagttaaaaaaattagctgaacgtgtccaggataaactactgttgattatgcgggtgtattttgaaaagccccgcacaactgtaggctggaaaggattaattaatgatccagaaatggatgattcttttcatgtggaaaatggtttattgctagccagagatttactgatcaagctaacagagttagggctacccaccgctacagaagctctagaccctatcgtaccccaatatattggtgaattgatcacatgggcggcgatcggcgcacgcacaacagaatcccagactcacagggaaatggctagtggtctgtctatgcccgtgggctttaaaaatggcactgatggtaatattcaagtagctttaaatgctttacattctgccagaatgactcataattttttgggcattaatcctgagggacaggtcagtgtatttgaaacgaaaggtaatgcttacggtcatgtgattttgcgtgggggaaatcaacctaattttgatgttgcaagtgttaaacaagtagaagaaaaattaaaacaggctcagttacctccgagaattgtcattgattgtagtcatggtaatactaataagaattacaggttgcaatctgatgttttagaaaacgttgtacaacaaatagttgatggtaatacatcgattgtggggatgatgctggaatcaaatttatatgaaggtaatcaacccattaactgcaaacgggaagaattgaaatatggggtttctgtaactgacccctgtatcggttgggagcaaacggaaaaaattatcttggctgcttacgaaaaacttaattga

SEQ ID NO: 1336 - protein, 376 aa, Nostoc sp. PCC 7120
MMNLCCTFHLQYVYPICLKSYPDNSEQSSMHNKLTNANIENYHVLLTPNAVKEKLPLTETAAEIVLQFRCEIEKILDFQDRRKFIVVGPCSIHDPNAALEYAHKLKKLAERVQDKLLLIMRVYFEKPRTTVGWKGLINDPEMDDSFHVENGLLLARDLLIKLTELGLPTATEALDPIVPQYIGELITWAAIGARTTESQTHREMASGLSMPVGFKNGTDGNIQVALNALHSARMTHNFLGINPEGQVSVFETKGNAYGHVILRGGNQPNFDVASVKQVEEKLKQAQLPPRIVIDCSHGNTNKNYRLQSDVLENVVQQIVDGNTSIVGMMLESNLYEGNQPINCKREELKYGVSVTDPCIGWEQTEKIILAAYEKLN

SEQ ID NO: 1337 - DNA, 1053 bp, Salmonella enterica subsp. enterica serovar Typhi
  CDS (1)..(1053)
atgaattatcagaatgacgatttacgcattaaagaaatcaacgagttattacctccggtcgcgctgctggaaaagtttcccgccacggaaaatgcagcaaataccgttgctcacgcacgcaaagccatccataaaattctcaaaggcaatgacgatcgtctgctggtggtgatcggtccttgttcaattcatgatccggcagcggcgaaagagtatgccgcccgtttgctggcgctacgcgatgagcttcaaggcgagcttgaaattgtcatgcgcgtctattttgagaaaccgcgtactaccgtcggctggaaagggctgattaacgatccgcacatggataacagcttccagattaacgacggtctgcgtattgcgcgcaaactgctgctggatattaacgacagcggcctgcctgccgccggcgaattcctcgatatgatcacgccgcaatatctggccgatctgatgagctggggcgccattggcgcacggactactgaatcccaggttcatcgcgaactggcgtctggcctctcttgtccggtcggttttaaaaatggtactgatggcacgattaaagtcgccattgacgccatcaacgccgccggcgcgccgcattgcttcctctccgtcactaaatggggtcattcggcgattgtgaataccagcggcaacggcgactgccatatcattctgcgcggcggtaaagcgccaaactatagcgcgcaacatgttgctgaggtgaaagaaggcctcatcaaagcgggactgacgccgcaggtcatgatcgatttcagccatgccaactcctgtaagcaatttcaaaagcagatggaggtttgcgccgatgtctgtcagcagatagcgggcggtgaaaaagcgattattggcgtgatggtagagagtcatctggtagaaggaaaccagagtctggaaagcggtcagccgctgacctacggtaaaagcattactgacgcctgtattggctgggaagataccgatgcgctgcttcgtcagttgtcggcagcggtaaaagcccgtcgaggttaa

SEQ ID NO: 1338 - protein, 350 aa, Salmonella enterica subsp. enterica serovar Typhi
MNYQNDDLRIKEINELLPPVALLEKFPATENAANTVAHARKAIHKILKGNDDRLLVVIGPCSIHDPAAAKEYAARLLALRDELQGELEIVMRVYFEKPRTTVGWKGLINDPHMDNSFQINDGLRIARKLLLDINDSGLPAAGEFLDMITPQYLADLMSWGAIGARTTESQVHRELASGLSCPVGFKNGTDGTIKVAIDAINAAGAPHCFLSVTKWGHSAIVNTSGNGDCHIILRGGKAPNYSAQHVAEVKEGLIKAGLTPQVMIDFSHANSCKQFQKQMEVCADVCQQIAGGEKAIIGVMVESHLVEGNQSLESGQPLTYGKSITDACIGWEDTDALLRQLSAAVKARRG

SEQ ID NO: 1339 - DNA, 1077 bp, Pseudomonas aeruginosa
  CDS (1)..(1077)
atggctgatttacagatcgacgaccttaacgttgcctccaacgagaccctgatcacgccggagcagctcaagcgtgaaattcccctgaccgacaaggccctgcagaccgtggcccagggtcgccaggtggtgcgcgacatcctggatggcaaggaccaccgtctgttcgtggtgatcggcccctgctccatccacgacatcaaggccgcccacgaatacgccgaccgcctcaaggcgctcgcggccgaagtggcggatacgctgttcctggtgatgcgcgtgtacttcgagaagccgcgtaccacggtgggctggaaaggcctgatcaacgatccgtacctggacgactcgttcaagatccaggatggcctgcacatcggccgccaactgctccgcgaccttgccgagaaaggcttgcccaccgccaccgaagcgctcgacccgatttccccgcagtacctgcaggacctgatcagttggtcggcgatcggcgcccgtaccaccgaatcgcagactcaccgcgagatggcctccggcctgtcttccgcggtcggcttcaagaacggcaccgatggcagcctgaccgtggcgatcaatgccctgcagtcggtctccagcccgcatcgcttcctcggcatcaaccagcagggcggcgtgtccatcgtgaccaccaagggcaaccgctacggtcacgtggtgttgcgcggcggcaacggcaagccgaactacgattcggtcagcgtcgcgctctgcgagcaggacctgaacaaggcgaaaatcccgctgaacatcatggtcgactgcagccacgccaactccaacaaggacccggccctgcaaccgctggtgatggacaacgtcagcaaccagatcgtcgaaggcaacaactcgatcgtcggcctgatggtggaaagccacctgggctggggcagccagccgattccgaaggatctcgaccaacttcagtacggcgtctccatcaccgacgcctgcatcgactgggcgaccaccgagaagagcatccgcagcatgcacgccaagctcaaggacgtgctgccgaaacgccagcgcggctga

SEQ ID NO: 1340 - protein, 358 aa, Pseudomonas aeruginosa
MADLQIDDLNVASNETLITPEQLKREIPLTDKALQTVAQGRQVVRDILDGKDHRLFVVIGPCSIHDIKAAHEYADRLKALAAEVADTLFLVMRVYFEKPRTTVGWKGLINDPYLDDSFKIQDGLHIGRQLLRDLAEKGLPTATEALDPISPQYLQDLISWSAIGARTTESQTHREMASGLSSAVGFKNGTDGSLTVAINALQSVSSPHRFLGINQQGGVSIVTTKGNRYGHVVLRGGNGKPNYDSVSVALCEQDLNKAKIPLNIMVDCSHANSNKDPALQPLVMDNVSNQIVEGNNSIVGLMVESHLGWGSQPIPKDLDQLQYGVSITDACIDWATTEKSIRSMHAKLKDVLPKRQRG

SEQ ID NO: 1341 - DNA, 1047 bp, Buchnera sp
  CDS (1)..(1047)
atgaaaaaaacagatgaactacgtacaatacgaattgatccattaataactccagctgaattagcaaggcagtacgcgatcacttcagacatcatggacactgttatcgcaacaagacaaaatattgctcgtattatgactggacaagatgcgcgactacttgttgtaataggaccatgttcagttcatgatcctatcgcagcagtagaatatgcacatcgattgtatgaattacgagtaaaatataaagatcgtcttgaaattataatgcgtacatattttgaaaaaccaagaacagttgttggatggaaagggctgatttctgatccagatttaaatggtagttttcgagttaatcatggattagccgtagcacgtaaattattattagatattaatgcattaggaatgcctgcagcaacagagtttctcgatatagttataggacaatttatagcagatttaattagttggggtgctattggagcaagaactactgaaagtcaaattcatagagaaatggcttccgctctttcctgtccagtaggttttaaaaatggaactgacggtaatatacgcattgcaattgatgctattcgcgcagctaaagttagacatttatttttcgcgcctaataaagatggtcaaatgacgattaatcataccagtggcaatccatatgggcatataatcatgcgaggtggtcgtgcgccgaattaccatcctgatgatattaactcagcagtaaagcatttacgtgaatttgatctattagaacatttaatgattgattttagtcacggtaattgtttaaaagaacatcttcgtcaaaaaaatgtttctaagtctgtttcatatcaaatttctcatggttcgaaagctatttttggtgttatgattgaaagctttttagaagaaggttttcaaacagtaacgaataatcaaccattaatatatggtaaatcgattactgatgcctgtttaaattggaaagacagtgttttaattatcgaacaattagcagatgccgtagatgctcgtttttaa

SEQ ID NO: 1342 - protein, 348 aa, Buchnera sp
MKKTDELRTIRIDPLITPAELARQYAITSDIMDTVIATRQNIARIMTGQDARLLVVIGPCSVHDPIAAVEYAHRLYELRVKYKDRLEIIMRTYFEKPRTVVGWKGLISDPDLNGSFRVNHGLAVARKLLLDINALGMPAATEFLDIVIGQFIADLISWGAIGARTTESQIHREMASALSCPVGFKNGTDGNIRIAIDAIRAAKVRHLFFAPNKDGQMTINHTSGNPYGHIIMRGGRAPNYHPDDINSAVKHLREFDLLEHLMIDFSHGNCLKEHLRQKNVSKSVSYQISHGSKAIFGVMIESFLEEGFQTVTNNQPLIYGKSITDACLNWKDSVLIIEQLADAVDARF

SEQ ID NO: 1343 - DNA, 1074 bp, Vibrio cholerae
  CDS (1)..(1074)
atgaaaaaaagtgaattgagtgatgtgaatatcagtaatgaacagatattgatcaccccagatgccttaaaagccaagattccactcagtgacaaggcgcgtaagtttattcgtgagtcacgtcagacggtggcggacattatccacaaacgcgatcctcgcttgctgatcgtctgtggtccttgctcaattcatgatgtggatgcggcgaaagagtacgccaaaaaactcaaagcactctcggcgcagctgagcgaccagctctacatcgtaatgcgcgtgtactttgaaaaaccgcgtactacggtcggttggaaagggctgattaacgatccgcatcttgatggcagttttgatatcgaacacggtctgcatgttgggcgtcaactcttggtcgatttggccgaaatggaaattccactggcaaccgaagcgttggacccgattagcccgcaatacttggcggatacttttagttgggcggcgattggtgcgcgtaccacggaatcacaaactcaccgcgagatggcaagtggcctttccatgccaatcggctttaaaaatggcacggatggtaacttggcaacggcgattaatgccatgcaggccgcttcatccagtcaccgctttatgggaattaaccgcgaaggacaagtggcactgctcacgacacaaggcaacccgaatgggcatgtgattttacgtggtggcaaacagaccaactacgattcggtttctgtcgcggaatgtgaagaagagatgcaaaaagcgcgtttggaaccctctttgatggtggattgcagccatgcgaactcacgtaaagattaccgccgtcagccgttggtggcagaagatgtgattcatcaaatccgtgaaggcaatcgctcgatcattggcctgatgattgaaagccatctcaatgaaggaaatcagtcttcggatctgcctcgtgaaaagatgcaatacggagtctcgatcactgacggctgtataaattggtcaacgactgaggcattattacgtcgtgcgcatcaggaacttattccctttttgcacaatcgtttgcaaggataa

SEQ ID NO: 1344 - protein, 357 aa, Vibrio cholerae
MKKSELSDVNISNEQILITPDALKAKIPLSDKARKFIRESRQTVADIIHKRDPRLLIVCGPCSIHDVDAAKEYAKKLKALSAQLSDQLYIVMRVYFEKPRTTVGWKGLINDPHLDGSFDIEHGLHVGRQLLVDLAEMEIPLATEALDPISPQYLADTFSWAAIGARTTESQTHREMASGLSMPIGFKNGTDGNLATAINAMQAASSSHRFMGINREGQVALLTTQGNPNGHVILRGGKQTNYDSVSVAECEEEMQKARLEPSLMVDCSHANSRKDYRRQPLVAEDVIHQIREGNRSIIGLMIESHLNEGNQSSDLPREKMQYGVSITDGCINWSTTEALLRRAHQELIPFLHNRLQG

SEQ ID NO: 1345 - DNA, 1038 bp, Lactococcus lactis subsp. lactis
  CDS (1)..(1038)
atgagttttaaagaaataagtcctaagataaatattgatgcaattaagatgttgggacatctcaacagtgagcaacaagaaaaaaaattgcaacgagataaagaacttgaagcaattataaaaggtgaagatgaccgtttactcttgattattgggccatgttcgtcagacaatgaagaagcagttttagaatatgctcgccgtttagctaaacttcaagaagcagttaaagataaaatttttatggtcatgcgtgtctatactgcaaaacctcgtacaaatggcgatggctataaaggattgattcacgaaccagatgctgatggtcataccgatttaatcaatggaatcaaaatggttcgtgacttacattacaaggtcatcactgaaactggtttaacaactgctgatgaaatgctttacccagaaaatcttccaatggtagatgatttggtcagctaccatgcgattggtgcacgttctgttgaaaatcaacaacaccgttttgttgcttctgggattgatgtgccaactggtttgaaaaatccaacatcaggaaatttgaaagtgatgtttaatggaatttacgcggctcaacaatcacaagatttcctctttggtcgtgcagaagttcaaacatcaggaaatcctttagcacatgcgattttgcgtggtggacaagatgaaaatggaaaataccatccaaactactacactgataacttgcttgatacaattgaaatttatgaaaaaatgggcttgaaaaatccttttattgtcattgatacaaaccatgataactctggtaagaaatttatggaacaaatccgtattgttcgtcaaaccttagttaatcgtgactgggatgataaaattcgccaaaatgttcgtggcttcatgattgaatcttacctagaagatggtcgccaagataaaccagaagtatttggtaaatcaattactgacccatgtttaggttgggataaaacagaagcacttgttcaagaaatttacgaagctgaaaacaaaaataactaa

SEQ ID NO: 1346 - protein, 345 aa, Lactococcus lactis subsp. lactis
MSFKEISPKINIDAIKMLGHLNSEQQEKKLQRDKELEAIIKGEDDRLLLIIGPCSSDNEEAVLEYARRLAKLQEAVKDKIFMVMRVYTAKPRTNGDGYKGLIHEPDADGHTDLINGIKMVRDLHYKVITETGLTTADEMLYPENLPMVDDLVSYHAIGARSVENQQHRFVASGIDVPTGLKNPTSGNLKVMFNGIYAAQQSQDFLFGRAEVQTSGNPLAHAILRGGQDENGKYHPNYYTDNLLDTIEIYEKMGLKNPFIVIDTNHDNSGKKFMEQIRIVRQTLVNRDWDDKIRQNVRGFMIESYLEDGRQDKPEVFGKSITDPCLGWDKTEALVQEIYEAENKNN

SEQ ID NO: 1347 - DNA, 1023 bp, Lactococcus lactis subsp. lactis
  CDS (1)..(1023)
atgacttttaaagaactcagtaacaaaattaacattaaagatgtaagagagctaaatcatttaaatgatgagcaacaagaaaagaaagaaaaacgtgataaggaacttgaagcgataattaagggtgaagacgatagaatcctcttagtcattggcccctgctcatcggataatgaagctgcagttctagaatatgctcacagattgttaaaacttcaaaaagaagtagaagataaaatttttattgtgatgcgtgtttatactgcaaaaccgcggacaaacggagatggctataaaggcctcattcacgaacctgatgcagatggacatacagaccttatcaatgggataaaaatggttcgtgaccttcactataaagtaattactgaaactggtctgactacagcagatgagatgctatacccagaaaatctaccattagttgatgacttagtaagttactatgcagttggcgctcgctcagttgaaaatcaacaacatcgctttgttgcctcaggaatagatgccccaacaggaatgaaaaacccgacatcagggaatttaaaagttatgtttaatggaatgtatgcagcccaacaatctcaagattttctatttgggaatgctgaagtagaaacatcaggaaatccattagctcatgccatccttcgtggtggacaagatgaaaatggtaaaaaccatccaaattactatacagataatcttcttgaaagtatcgaaatatacgaaaaaatgggtttacaaaatccatttattgttattgatactaatcatgataactctgggaagaagtatatggaacaaataagaattgttcgtcaaacattagtcaatcgtaattgggatgaacaaattcataaatatgtcagaggatttatgattgaatcatatcttgaagacggtcgtcaagacaaaccagaagtatttggaaaatcaatcactgacccatgtttgggttgggataaaacagaagaacttattaatgaaatttataattcgtga

SEQ ID NO: 1348 - protein, 340 aa, Lactococcus lactis subsp. lactis
MTFKELSNKINIKDVRELNHLNDEQQEKKEKRDKELEAIIKGEDDRILLVIGPCSSDNEAAVLEYAHRLLKLQKEVEDKIFIVMRVYTAKPRTNGDGYKGLIHEPDADGHTDLINGIKMVRDLHYKVITETGLTTADEMLYPENLPLVDDLVSYYAVGARSVENQQHRFVASGIDAPTGMKNPTSGNLKVMFNGMYAAQQSQDFLFGNAEVETSGNPLAHAILRGGQDENGKNHPNYYTDNLLESIEIYEKMGLQNPFIVIDTNHDNSGKKYMEQIRIVRQTLVNRNWDEQIHKYVRGFMIESYLEDGRQDKPEVFGKSITDPCLGWDKTEELINEIYNS

SEQ ID NO: 1349 - DNA, 1032 bp, Streptococcus pneumoniae
  CDS (1)..(1032)
atggcatttattgaaaaaggtcaagaaatcgatatggaagtcatcaaggctgaaacccaattgtctgcggaagccttgagactcaaggaaagccgtgacagggaattggcagatattatttcaggggaagatgaccgtattctcttggtgattggtccttgctcttctgataatgaagaggcggtcttggaatatgctcgccgtttatctgccttgcaaaagaaggtagcggataagattttcatggtcatgcgcgtgtatactgctaagcctcgtaccaatggagacggctataaaggattagttcaccagccagatacttctaaggctccaagcctgattaatggcttgcaggctgtgcgccagttgcactaccgcgtgattacagagactggtttgacaacggcagatgagatgctttatccgtcaaatctgatcttggtggatgacttggtcagctaccatgccgttggagctcgttctgtggaagaccaagagcaccgctttgtggcttctgggattgatgcaccagtagggatgaaaaatccaacctcaggaaatttgggtgttatgtttaacgccatctatgctgctcaaaacaagcaaaccttcctttatcatgggcaggaagttgagacatcaggtaatcctttggcccatgttatcctccgtggagcagtcaacgagtatggcaattatatgccgaattactactatgaaaatctactccaagccattgaacgctatgaaaccatgggacttgaaaatccttttatcctcattgacaccaaccatgataactcaggcaagcaatatatggagcagattcgaattgttcgccagaccttgcagaatcgtgattggaatgagaaaattaaaaagacggttcgaggatttatgattgaatcttacctagcagatggtcgtcaaaaccaaccagagatctttggttgctctattactgacccttgcctaggttgggaaaatacagaggccttggtagaagagatttatgttaccttgacaaaataa

SEQ ID NO: 1350 - protein, 343 aa, Streptococcus pneumoniae
MAFIEKGQEIDMEVIKAETQLSAEALRLKESRDRELADIISGEDDRILLVIGPCSSDNEEAVLEYARRLSALQKKVADKIFMVMRVYTAKPRTNGDGYKGLVHQPDTSKAPSLINGLQAVRQLHYRVITETGLTTADEMLYPSNLILVDDLVSYHAVGARSVEDQEHRFVASGIDAPVGMKNPTSGNLGVMFNAIYAAQNKQTFLYHGQEVETSGNPLAHVILRGAVNEYGNYMPNYYYENLLQAIERYETMGLENPFILIDTNHDNSGKQYMEQIRIVRQTLQNRDWNEKIKKTVRGFMIESYLADGRQNQPEIFGCSITDPCLGWENTEALVEEIYVTLTK

SEQ ID NO: 1351 - DNA, 1095 bp, Pseudomonas aeruginosa
  CDS (1)..(1095)
atgaactcatccgtatccgcactgaccaccctttcgccgaacgtccaggccgtcgccctgcccagcgccaccgcccgtaccgccctggaacgcctgcccagcccgctcgaactcaaggcccgccagccgttgccgctggagctggccagccaggtcgccgccagccgcgacgccatccgcgccatcctcgacggcgacgacccgcgcctgctggtggtagtcggtccctgttcgatccacgatccccgctccgccctcgaatacgccgaacgcctcgccgcgctgagcgacgaactcgacggccagttgctcctggtgatgcgcgcctacgtggaaaagccacgcaccacggtgggctggaagggcctcgcctacgatccgcacctggatggcagcgacgacatggccgccggcctggcgctgtcccggcaactgatgctggacatgctgcgcctcggcctgccgctggccaccgaactcctgcaaccgctggccgccggctacttcgacgacctgctgagctgggcggcgatcggcgcgcgcaccagcgaatcgcagatccaccgcgagctggtcagcggcctcggcctgccggtgggcttcaagaacggcaccgacggcggcgtcggcatcgcctgcgacgcgatccgttcggcggcccacggccaccgccatttcggcctcgacccgcacggtcacccggcgctgatcgagacccgcggcaatccggacacccatgtggtgctgcgcggcggccgccacggttcgaactacggccccgagcaggtgcaggccgtgcgccaggccctggaaagccagggcatcgccacgcggatgatggtcgattgcagtcacgccaacagcggcaagaacccgctgaaccagcccggcgtcctcgccagcgtgctggaccagcgcctggccggtgccagcgacctggtcggggtaatgctggaaagccacctgttcgacggttgccaggcgctcggcggcgaactgcgctacggcgtctcgatcaccgacggctgcctcggctgggaaggcaccgagcggattctccgcgacgccgcccggcggctcgccgagcggcgctga

SEQ ID NO: 1352 - protein, 364 aa, Pseudomonas aeruginosa
MNSSVSALTTLSPNVQAVALPSATARTALERLPSPLELKARQPLPLELASQVAASRDAIRAILDGDDPRLLVVVGPCSIHDPRSALEYAERLAALSDELDGQLLLVMRAYVEKPRTTVGWKGLAYDPHLDGSDDMAAGLALSRQLMLDMLRLGLPLATELLQPLAAGYFDDLLSWAAIGARTSESQIHRELVSGLGLPVGFKNGTDGGVGIACDAIRSAAHGHRHFGLDPHGHPALIETRGNPDTHVVLRGGRHGSNYGPEQVQAVRQALESQGIATRMMVDCSHANSGKNPLNQPGVLASVLDQRLAGASDLVGVMLESHLFDGCQALGGELRYGVSITDGCLGWEGTERILRDAARRLAERR

SEQ ID NO: 1353 - DNA, 1110 bp, Caulobacter crescentus
  CDS (1)..(1110)
atgccgtccacgtccaccgctcacctcgtcaccctgcccgttccgaccgatgatctgcggatcgagaaactccagaccctgagcccgccggctcaggtcatcggagaagctcccgccacctcgtcagtggccgagatcgtcggcggggcgcgtcaggcggttcatcagatcctgcacggccaggacgaccgcctcgtcgtggtcatcggcccctgctccattcacgaccccaaggcggcgatcgactacgcccggcgcctcgccgccgagcgcgagcgccacgcgggcgaactggaagtgatcatgcgggtctatttcgagaagccgcgcacgaccgtgggctggaagggcctgatcaacgatccgggcctcgacggcggcttccggatcaatgacggcctgcgtctggcgcgacgggttctgctggacgtcagcgcgcagggcctgccggccgcctgcgagttcctggacgtgaccaccccgcagtacatcgctgacctggtatcctggggcgcgatcggcgcccgcaccaccgagagccagattcaccgcgaactggcctcgggcctttcctgccccgtcggtttcaagaacggcaccaatggcgatgtgaagatcgccgtcgacgccgtaatggccgcgtcccagccgcaccacttcctggccgtcaccaaagagggccgcgcggcgatcgccaccacgacgggcaatggtgactgtcacctcgtgctgcgcggcggcaagaccccgaactacgacgccgccagcgtcgccgccgccgcagaggttctgagcaaggccggactgccgcagcgcctgatggtcgatgtcagccacgccaacagcggcaagaaccatgagaaccaacccgccgtgatcgccgacgtctgcgcccaggtcgcgaccggcgcctcgccggtcatgggcgtgatgatcgagagcaatctcgtggccggccgccaggatatcgtccaaggccagggcctgacctatggtcagtcggtcaccgacgcctgcgtcgactgggaaacctcggtgcggctgctggacgacctggcgggcgcagttcgcgcgggtcgcctggcgcggggctctaaatcaagcacttag

SEQ ID NO: 1354 - protein, 369 aa, Caulobacter crescentus
MPSTSTAHLVTLPVPTDDLRIEKLQTLSPPAQVIGEAPATSSVAEIVGGARQAVHQILHGQDDRLVVVIGPCSIHDPKAAIDYARRLAAERERHAGELEVIMRVYFEKPRTTVGWKGLINDPGLDGGFRINDGLRLARRVLLDVSAQGLPAACEFLDVTTPQYIADLVSWGAIGARTTESQIHRELASGLSCPVGFKNGTNGDVKIAVDAVMAASQPHHFLAVTKEGRAAIATTTGNGDCHLVLRGGKTPNYDAASVAAAAEVLSKAGLPQRLMVDVSHANSGKNHENQPAVIADVCAQVATGASPVMGVMIESNLVAGRQDIVQGQGLTYGQSVTDACVDWETSVRLLDDLAGAVRAGRLARGSKSST

SEQ ID NO: 1355 - DNA, 1032 bp, Streptococcus pneumoniae
  CDS (1)..(1032)
atggtatttacagcaaaaagctctaaaataaatatagaagaagttcgtgccttgtcaaaattagaaggtcaggctttggagaggaaatcacagcgagatcaagagctagaagccattatacgtggagaagaccagcgaattctcttggtaatcgggccatgctcatctgacaacgaagaagctgtccttgaatacgctaatcgtttggcagtcctacaagaagaagtggcagatcgtatctttatggttatgcgtgtttatactgccaaaccccgtaccaacggagatggctataagggtttgattcaccagcctaacgcgacagaagcgcctagtcttatcaatggaatcaaagccgttcgccatcttcactatcgtgtcatcacagaaacagggatgacaactgctgatgaaatgctttatcctgaaaaccttccgcttgtagatgatttgatttcttacatggcagttggtgcccgttcagttgaagaccagcaacaccgctttgtggcaagtggggcaggattttctactggttttaaaaatccaacctctggaaatctcaatgtcatgtttaatgggatttatgctgctcaaaacaaacaaagtttccttttcttaggaaaagaagtagaaacaactgggaacccgctttcacacgctattcttcgtggtgctcttaatgagtatggaaaaaatattcccaactactattatgacaatttaattgataccattgcccagtatgagaaaatgggcttggaaaatccttttatcatcattgataccaatcatgacaattctggtaagcagtatattgaacagatccgaattgtccgccagaccttgattaaccgtgcttggaatgaaaaaattaagcagttcgttcgtggttttatgattgagtcttatctggaagatggtcgacaaaatgagccagaagtatttggtaagtctatcacagacccttgcctgggttgggataacacagaagctcttgtcagagaaatttacaaaacgttaggagaataa

SEQ ID NO: 1356 - protein, 343 aa, Streptococcus pneumoniae
MVFTAKSSKINIEEVRALSKLEGQALERKSQRDQELEAIIRGEDQRILLVIGPCSSDNEEAVLEYANRLAVLQEEVADRIFMVMRVYTAKPRTNGDGYKGLIHQPNATEAPSLINGIKAVRHLHYRVITETGMTTADEMLYPENLPLVDDLISYMAVGARSVEDQQHRFVASGAGFSTGFKNPTSGNLNVMFNGIYAAQNKQSFLFLGKEVETTGNPLSHAILRGALNEYGKNIPNYYYDNLIDTIAQYEKMGLENPFIIIDTNHDNSGKQYIEQIRIVRQTLINRAWNEKIKQFVRGFMIESYLEDGRQNEPEVFGKSITDPCLGWDNTEALVREIYKTLGE

SEQ ID NO: 1357 - DNA, 1047 bp, Buchnera aphidicola
  CDS (1)..(1047)
atgaaaaaaacagatgaactacgtacaatacgaattgatccattgataacaccatctgaattagcaaaaaaatatgctattacttcagaaatcatggataatgttattataacgagacaaaatatagctcgaattatgactggagaagatttgcgtttgcttgttgtaataggtccatgttcagtacatgatccaattgcagcagttgaatatgctcatcgattatatgaactacgtaaaaaatatcaagatcgtcttgaaattataatgcgtacatattttgaaaaaccaagaacagtagttggttggaagggattaatttcagatccagatttaaatggtagtttcagagttaatcatggtttagctgttgcacgtaaattattattagatatcaatgaactaggatgcctgcagcaacagagttttttagatatggtaatagggcaatttattgcggatttaattagctggggtgcgattggagctagaactactgaaagtcaaattcatagagaaatggcttcagctctttcttgtccagtaggttttaaaaatggaacagatggaaatatacgtattgcaattgatgctattagagcagcacaagcacgtcatttgttttttgctccgaataaagatggacaaatgactattaatcataccagtggaaatccttatggacatataattatgagaggtggtcgaactcctaattatcatgctcacgatattaattcagcaatagaacatttacgtgaatttaatttgttagaacatttaatgattgattttagtcatggtaattgtttaaaggaacatattcgtcaaaaagatgttgctaaatctgtttcaaaacaaatttctcaaggttcaaaaactatatttggtgtaatgattgaaagttttttagaagaaggttttcaaacagttaaagaaaatcaaccactaatatatggaaaatcaattactgatgcatgtttaaattggaaagacagtgtccttattattaagcaattagcagatgcggtagatactcgtttttaa

SEQ ID NO: 1358 - protein, 348 aa, Buchnera aphidicola
MKKTDELRTIRIDPLITPSELAKKYAITSEIMDNVIITRQNIARIMTGEDLRLLVVIGPCSVHDPIAAVEYAHRLYELRKKYQDRLEIIMRTYFEKPRTVVGWKGLISDPDLNGSFRVNHGLAVARKLLLDINELGCLQQQSFLDMVIGQFIADLISWGAIGARTTESQIHREMASALSCPVGFKNGTDGNIRIAIDAIRAAQARHLFFAPNKDGQMTINHTSGNPYGHIIMRGGRTPNYHAHDINSAIEHLREFNLLEHLMIDFSHGNCLKEHIRQKDVAKSVSKQISQGSKTIFGVMIESFLEEGFQTVKENQPLIYGKSITDACLNWKDSVLIIKQLADAVDTRF

SEQ ID NO: 1359 - DNA, 1089 bp, Haemophilus influenzae
  CDS (1)..(1089)
atggctaaagagaaaattgaaattgtcgtggcaaacgacgatacgcgaattgaaaaagtcgatcaggtgttaccacccattgccttattagaaaaatacccagcaagtgaacaggctgcggcgttagtgaagcaaactcgtcatgaggcacataatattattcatggtaaagatgatcgtttattagtcgtgattgggccttgctctattcatgatccgaaagcagccattgaatatgcgactcgtttaaaaccattacgtgaaaaatacaaagatagccttgaaattattatgcgtgtgtattttgagaaaccgcgtacaacggtgggttggaaaggtttaattaatgaaccatatttgaatgatacttatcgtttaaatgatgggttacgtattgcacggaaattactttcagatattaatgatcttggtgtgcctgcagcgggcgagtttttagatatgattacacctcagtatttggcagattttatgagctggggggcgattggggctagaacaacagaatcacaagttcatcgtgagttggcttcaggtttatcttgtgctgttgggtttaaaaatgccactaatggtggtgtgaaagtcgctttagatgcaattggtgcagcggaagctcctcactatttcttatctgtcactaaatttggtcattctgcaattgtttctacaaaagggaatgaagattgccatattattttacgaggtggagataaaggccctaactatagtgctgaagatgtagaaaaagtttgtgctgatattgaaaaaacagggcgtattccacacgttatggttgattttagccatgcaaacagcagtaaacaatataaaaagcaaatggatgtttgccaagacgtatgtaatcagattgcatttggttctaaacaaatctttggcgtaatggtggaaagccatttagtggaaggtcgtcaagatttagttgatggcaaagcacagacttatggacaaagtattacggatgcgtgcattggatgggaagattctgaaagattattgcaacaactttctgatgcagttattgctagacgtaaagcgacgagtaattaa

SEQ ID NO: 1360 - protein, 362 aa, Haemophilus influenzae
MAKEKIEIVVANDDTRIEKVDQVLPPIALLEKYPASEQAAALVKQTRHEAHNIIHGKDDRLLVVIGPCSIHDPKAAIEYATRLKPLREKYKDSLEIIMRVYFEKPRTTVGWKGLINEPYLNDTYRLNDGLRIARKLLSDINDLGVPAAGEFLDMITPQYLADFMSWGAIGARTTESQVHRELASGLSCAVGFKNATNGGVKVALDAIGAAEAPHYFLSVTKFGHSAIVSTKGNEDCHIILRGGDKGPNYSAEDVEKVCADIEKTGRIPHVMVDFSHANSSKQYKKQMDVCQDVCNQIAFGSKQIFGVMVESHLVEGRQDLVDGKAQTYGQSITDACIGWEDSERLLQQLSDAVIARRKATSN

SEQ ID NO: 1361 - DNA, 1502 bp, Candida albicans
  CDS (336)..(1442)
acactgactaatcattaggccgcagagagagcaaggtactcaccaactcaccatgaattgtagattaattattagacattagtacacacactacaaactataaactataggcacgcactccctaatgactaacaattgtacagtttttgtgtcattgactaattgttctaatttttttttttcagtttaaatatcccgaaccaattttccaaatttttcatatctgtttttcctttttcttttttaattcctttctagatatcttgtatatatactcaatcctcatagatatattccatatatatatatatattaattcattacattaacacacaatgtttattacaaacgaacacgttggtgacagaagtcgtatggaagattggagaatccgtggttacgatccattaactcctccagatcttttacaacatgaatacccattaactcctgaatcacagaagattatcgttgaaggtagaaatgctgcttgtgatattttgaacggcaaagaccgaagattgattggaccttgttcgattcatgatcctcaagctgccttggattactgtgaaagattatatcaagcttctgaaaaacacaagggtgaattattgattgttatgagagcatacttggaaaaaccaagaaccacagttggttggaaaggtttaattaacgacccagatatcgatggtaccttccatataaataaggggttgagaattgctagaaagttgtttgttcaattaacttcaaaattaccaattgctggtgaaatgttggatacaatctcacctcaatttttatctgatttattctcagtgggggctattggtgcaagaaccaccgaatcgcaattgcacagagagttggcatctggttatcattcccagttggattcaaaaacggtaccgatggtactttgggtgttgccattgacgcctttgagagctgcttctcatccacatcatttcctttcagtcacaaaacctggtgttgttgctattgttgggactgatgggaaccaagactgttttgttatattaagaggtggtaagaagggtacaaactatgatgccaaatccgtacaagaaacacaagaagaattaatcaaatcaaaagttgttaccgaaatgaaacctggtccaagaattatggttgattgttctcatggtaattctaataaagatcatagaaaccaaccgaaagttgcccaagttgttgctgaacaagtggccggtggtgataaatccatatgtggattaatgattgagagtaatataaatgatggaagacaagatgttccaccaaaggaacaaggtggtaaagatgctttgaaatacggtgtttctattaccgatgcttgtattggttgggaaaccacagaagaagttttggaggttttagccaatgctgtcaaaaccagaagatctttatagttgattatgtaatcctatttttattaatttgaacaaacaatgatattaaaaaaaaaaaaa

SEQ ID NO: 1362 - protein, 368 aa, Candida albicans
MFITNEHVGDRSRMEDWRIRGYDPLTPPDLLQHEYPLTPESQKIIVEGRNAACDILNGKDRRLIGPCSIHDPQAALDYCERLYQASEKHKGELLIVMRAYLEKPRTTVGWKGLINDPDIDGTFHINKGLRIARKLFVQLTSKLPIAGEMLDTISPQFLSDLFSVGAIGARTTESQLHRELASGYHSQLDSKTVPMVLWVLPLTPLRAASHPHHFLSVTKPGVVAIVGTDGNQDCFVILRGGKKGTNYDAKSVQETQEELIKSKVVTEMKPGPRIMVDCSHGNSNKDHRNQPKVAQVVAEQVAGGDKSICGLMIESNINDGRQDVPPKEQGGKDALKYGVSITDACIGWETTEEVLEVLANAVKTRRSL

SEQ ID NO: 1363 - DNA, 1113 bp, Saccharomyces cerevisiae
  CDS (1)..(1113)
atgttcattaaaaacgatcacgccggtgacaggaaacgcttggaagactggagaatcaaaggttatgatccattaacccctccagatctgcttcaacatgaatttccaatttcagccaaaggtgaggaaaacattatcaaggcaagagactccgtctgtgatattttgaatggtaaagatgatcgtttagttatcgtgatcgggccatgttccctacatgaccccaaagccgcttacgattacgctgacagattggctaaaatttcagaaaagttgtcaaaagacttattgattattatgagagcgtatttagaaaaaccaaggactactgttggctggaaagggttgattaacgaccctgatatgaataactcttttcaaatcaataaaggtctacggatttcgagagaaatgttcataaaactggttgaaaaattacccattgctggtgagatgttggataccatttctccgcagtttttgagtgattgtttctccttgggtgccatcggcgccagaactactgaatcccaactgcacagagaattagcatccggtctatctttccctattggatttaagaacggtactgatggtggtttgcaagtcgccatcgacgctatgagagccgctgcacatgaacattacttcctttctgtcacaaagccaggtgtcactgctatcgtgggcactgaaggtaacaaggataccttcctgatcttgagaggtggtaagaacggtactaactttgacaaagaaagtgttcaaaatactaagaaacagttagaaaaggccggtttgactgatgattcccagaaaagaattatgatcgattgttcccacggcaacagtaataaagatttcaagaaccaaccaaaggttgccaaatgtatttatgaccagctgacggagggtgagaatagtctctgtggtgttatgattgagtccaacataaatgaaggtagacaagatattcccaaagaaggtggcagagagggattgaagtatggttgttctgttacggatgcttgtattggctgggagtccaccgaacaggtattggagctattggcagaaggtgttagaaacagaagaaaggccttgaaaaaatag

SEQ ID NO: 1364 - protein, 370 aa, Saccharomyces cerevisiae
MFIKNDHAGDRKRLEDWRIKGYDPLTPPDLLQHEFPISAKGEENIIKARDSVCDILNGKDDRLVIVIGPCSLHDPKAAYDYADRLAKISEKLSKDLLIIMRAYLEKPRTTVGWKGLINDPDMNNSFQINKGLRISREMFIKLVEKLPIAGEMLDTISPQFLSDCFSLGAIGARTTESQLHRELASGLSFPIGFKNGTDGGLQVAIDAMRAAAHEHYFLSVTKPGVTAIVGTEGNKDTFLILRGGKNGTNFDKESVQNTKKQLEKAGLTDDSQKRIMIDCSHGNSNKDFKNQPKVAKCIYDQLTEGENSLCGVMIESNINEGRQDIPKEGGREGLKYGCSVTDACIGWESTEQVLELLAEGVRNRRKALKK

SEQ ID NO: 1365 - DNA, 2048 bp, Saccharomyces cerevisiae
  CDS (619)..(1731)
gtatacagctagccttgaaagtgatggaaaacattgtcatcggcacataaataaaaaaattatgaatcacgtgatcaacagcaaattatgtactcgtatatatgcaagcgcattccttatattgacactctttcattgggcatgaggctgtgtaaacataagctgtaacggtctcacggaacactgtgtagttgcattactgtcaggcagttatgttgcttaatataaaggcaaaggcatggcagaatcactttaaaacgtggccccacccgctgcaccctgtgcattttgtacgttactgcgaaatgactcaacgatgaaatgaaaaaattttgcttgaaattttgaaaaaaagatgtgcgggacgcattgttagctcattgaatacatcgtgatcgaatccaatcaatgtttaatttcatattaatacagaaactttttctcatactttcttcttcttttcattggtatattatctatatatcgtgttaattcctctttcgtcatttttagcatcgttataagagtaattaagaataactagaagagtctctctttatattcgtttattttatatatttaaccgctaaatttagtaaacaaaagaatctatcagaaatgagtgaatctccaatgttcgctgccaacggcatgccaaaggtaaatcaaggtgctgaagaagatgtcagaattttaggttacgacccattagcttctccagctctccttcaagtgcaaatcccagccacaccaacttctttggaaactgccaagagaggtagaagagaagctatagatattattaccggtaaagacgacagagttcttgtcattgtcggtccttgttccatccatgatctagaagccgctcaagaatacgctttgagattaaagaaattgtcagatgaattaaaaggtgatttatccatcattatgagagcatacttggagaagccaagaacaaccgtcggctggaaaggtctaattaatgaccctgatgttaacaacactttcaacatcaacaagggtttgcaatccgctagacaattgtttgtcaacttgacaaatatcggtttgccaattggttctgaaatgcttgataccatttctcctcaatacttggctgatttggtctccttcggtgccattggtgccagaaccaccgaatctcaactgcacagagaattggcctccggtttgtctttcccagttggtttcaagaacggtaccgatggtaccttaaatgttgctgtggatgcttgtcaagccgctgctcattctcaccatttcatgggtgttactaagcatggtgttgctgctatcaccactactaagggtaacgaacactgcttcgttattctaagaggtggtaaaaagggtaccaactacgacgctaagtccgttgcagaagctaaggctcaattgcctgccggttccaacggtctaatgattgactactctcacggtaactccaataaggatttcagaaaccaaccaaaggtcaatgacgttgtttgtgagcaaatcgctaacggtgaaaacgccattaccggtgtcatgattgaatcaaacatcaacgaaggtaaccaaggcatcccagccgaaggtaaagccggcttgaaatatggtgtttccatcactgatgcttgtataggttgggaaactactgaagacgtcttgaggaaattggctgctgctgtcagacaaagaagagaagttaacaagaaatagatgtttttttaatgatatatgtaacgtacattctttcctctaccactgccaattcggtattatttaattgtgtttagcgctatttactaattaactagaaactcaatttttaaaggcaaagctcgctgacctttcactgatttcgtggatgttatactatcagttactcttctgcaaaaaaaaattgagtcatatcgtagctttgggattatttttctctctctccacggctaattaggtgatcatgaaaaaatgaaaaattcatgagaaaagagtcagacatcgaaacatacataagttgatattcctttgatatc

SEQ ID NO: 1366 - protein, 370 aa, Saccharomyces cerevisiae
MSESPMFAANGMPKVNQGAEEDVRILGYDPLASPALLQVQIPATPTSLETAKRGRREAIDIITGKDDRVLVIVGPCSIHDLEAAQEYALRLKKLSDELKGDLSIIMRAYLEKPRTTVGWKGLINDPDVNNTFNINKGLQSARQLFVNLTNIGLPIGSEMLDTISPQYLADLVSFGAIGARTTESQLHRELASGLSFPVGFKNGTDGTLNVAVDACQAAAHSHHFMGVTKHGVAAITTTKGNEHCFVILRGGKKGTNYDAKSVAEAKAQLPAGSNGLMIDYSHGNSNKDFRNQPKVNDVVCEQIANGENAITGVMIESNINEGNQGIPAEGKAGLKYGVSITDACIGWETTEDVLRKLAAAVRQRREVNKK

SEQ ID NO: 1367 - DNA, 1107 bp, Schizosaccharomyces pombe
  CDS (1)..(1107)
atggacaagcacactcctcttcttcctggcgacagtgttttttcacgttgtaaaactgaagatagtcgtatcaaaggctatgatccagtaatttcacctgctttaattcaatcagaattagcagcctctgatgaaacacttgcttttgtgtcggatcaaagacgccaagccgccgatatcattgcgggacgtgatgatagacttcttctaatcgttggaccctgttctttacacgatcctgttgccgccaaggagtatgccattcgcttgcaaaaggaggctattaagcacaagaaggacttgcatattattatgcgcgcctatcttgaaaagcctcgtacaactgttggatggaaagggttgattaatgatcccgatttggatggatcttataacattaataagggtattcgtgtcgctcgacgcatttttctggagcttctggaaactggtgtcggtatagcgtcagagatgctggacactataagtccccaatatttagctgatctaatttgctggggcgctattggtgctcgtaccactgagtcccaattgcatcgagaacttgcttcagggctttcttttccaataggttttaagaatgctactgacggtaacattggtattgctatagatgctatgaattcttctgccaaccctcatcatttcttgtctgtcacaaagcagggtgttgtagccattgttactactacaggtaaccctgatacacacattattttgcgtggtggtaaaagtgggactaacttcgatgctgattcagtggctggtgccaaggctaaactcgaagaatgcaacaagctacctagtatcatgatcgactgttctcatggaaactcatctaaaaaccataagaatcaacccaaggttgctgcttgtattgctgagcaggtggcaaacggtcagaaagcaattactggtgtcatgatcgaatctcaccttaacgaaggtaagcaagctatacctgaggatgatttgtcaagtatgaaatatggagtcagtgtcaccgatgcttgcattggttgggacgacactaccgccgtttttgaacagttggctgctgccgtccgttctcgtcgttctcattaa

SEQ ID NO: 1368 - protein, 368 aa, Schizosaccharomyces pombe
MDKHTPLLPGDSVFSRCKTEDSRIKGYDPVISPALIQSELAASDETLAFVSDQRRQAADIIAGRDDRLLLIVGPCSLHDPVAAKEYAIRLQKEAIKHKKDLHIIMRAYLEKPRTTVGWKGLINDPDLDGSYNINKGIRVARRIFLELLETGVGIASEMLDTISPQYLADLICWGAIGARTTESQLHRELASGLSFPIGFKNATDGNIGIAIDAMNSSANPHHFLSVTKQGVVAIVTTTGNPDTHIILRGGKSGTNFDADSVAGAKAKLEECNKLPSIMIDCSHGNSSKNHKNQPKVAACIAEQVANGQKAITGVMIESHLNEGKQAIPEDDLSSMKYGVSVTDACIGWDDTTAVFEQLAAAVRSRRSH

SEQ ID NO: 1369 - DNA, 1089 bp, Amycolatopsis orientalis
  CDS (1)..(1089)
atgacaacatctactcccgccgccgcggtcgacctcgacaaccagaggatcgaccgcatagtcccattggtgacaccggccctgctgcaccatgaactgccgctcagcgccaaggcagccgacaccgtgcgacgaggtcgtgagaacgtccttcgcgtcctcgacggtacggatgaccggctgctcgtgatcactggaccgtgctccatccacgacccggccgcggccctcgactacgccgaccacctcgccacgatggccggccggttcactgacgacctcctgatcgtcatgcgcgtgtacttcgagaaaccgcgaacggtcggtggctggaaagggctcatcaacgacccccacctcgacggcaccggcgacgtgaaccacggcctgcgaatcgcccggcacctgttgctggagctcgccgaacgcggcctgcccgtcgcgtgcgagtggctggacacgaccatcccggcctacctcgccgacaccgtttcctggggcgcgatcggtgcccgcaccgtggaaagccaaaaccaccgcatgctcgccagcggtctgtccatgccggtcggcttcaagaaccgccgcgacggcgacatcaccgtggccatcgacgcgatccgcgctgcggcggcccgtcacgtcgttcctggcgtcgaccccggcggcttgcccgccatcctgcacaccgccggcaaccccgactgccatcttgttctgcgcggcggcaattccgcgcccaaccacgacgcctcgtctgtccacacagcactcaccgcgctgcaggacgccggtcttccccgccgggtcgtgatcgatgccagccatgacaacagccgcaaggaccaccaccggcaacctgttgtcgccgggcagatcgccgaccaggtcaagggcggccaacgcggcattgttggcgtgatgctcgaatccaacctccgcgccggccgccaggacctccgccccggccagcctctgacctacggccagtccatcacggacgcctgcatcgacatccccacgacgcagaccgttctgcagaccctcgccacggcaaccgcggctcggcggcgtctcagccagaactga

SEQ ID NO: 1370 - protein, 362 aa, Amycolatopsis orientalis
MTTSTPAAAVDLDNQRIDRIVPLVTPALLHHELPLSAKAADTVRRGRENVLRVLDGTDDRLLVITGPCSIHDPAAALDYADHLATMAGRFTDDLLIVMRVYFEKPRTVGGWKGLINDPHLDGTGDVNHGLRIARHLLLELAERGLPVACEWLDTTIPAYLADTVSWGAIGARTVESQNHRMLASGLSMPVGFKNRRDGDITVAIDAIRAAAARHVVPGVDPGGLPAILHTAGNPDCHLVLRGGNSAPNHDASSVHTALTALQDAGLPRRVVIDASHDNSRKDHHRQPVVAGQIADQVKGGQRGIVGVMLESNLRAGRQDLRPGQPLTYGQSITDACIDIPTTQTVLQTLATATAARRRLSQN

SEQ ID NO: 1371 - DNA, 1119 bp, Schizosaccharomyces pombe
  CDS (1)..(1119)
atgtctccggtttttttacccagcggtgaaacttacgatcaagagcatcttgatgacaaccgtgtcttaggttacaaccctttggttcctgccgctttggttcaacaagagattcctgtttctgaaacttctcgcaaagtcatcactgactccagaaaggagattcaagctattctcaacaaacaagatgacagaattatcgttgttgtcggtccttgctccattcatgaccctaaattggccatggactatgctaagttgctgaagcccaaagctgacgagcttcaggatgctttgtgcgttgtcatgcgttgttatttggagaagccccgtactactatcggatggaagggtttggtcaacgaccctaacttggatggttcttttgctatcaacaagggtattaggatggctcgtcaaatgtattgcgacgttaccaattttggcattcctttggccagtgagatgttggacaacatttctccccaattcttcgccgacttactcagttttggtgctatcggtgctcgtactaccgagtctcaattacatcgtgaattggcttctgccctttccttccctgttggtttcaagaatggtactgatggtactgttggtgtggcgattgatgccattggtgctaccgcccatcctcacacaatgctaggagttactaaacaaggtctcgccgctattaccatgaccaggggcaacaaggataccttcatcattttgcgtggtggtaagaagggtcctaactatgatgctgagcacgttgccgccgttcgcaaagatcttgagaaggccaaccttcctcctcgtatcatgatcgattgctctcatggcaactcaagcaagaatcatttgaaccaaccaaaggtctccaagagcatcgccgaacaaatcagaaatggcgactcttccattgttggtgttatgattgaatctcatatcaatgaaggtcgtcaagatgctccaatccgtcctggcgttaaggatactctcaagtacggtgtcagtatcactgatgcttgtgttagctgggaacaaactgctccaatgctagacgatcttgctgaagctgtccgtgctcgccgtcaaaaccaaaaaagtaattaa

SEQ ID NO: 1372 - protein, 372 aa, Schizosaccharomyces pombe
MSPVFLPSGETYDQEHLDDNRVLGYNPLVPAALVQQEIPVSETSRKVITDSRKEIQAILNKQDDRIIVVVGPCSIHDPKLAMDYAKLLKPKADELQDALCVVMRCYLEKPRTTIGWKGLVNDPNLDGSFAINKGIRMARQMYCDVTNFGIPLASEMLDNISPQFFADLLSFGAIGARTTESQLHRELASALSFPVGFKNGTDGTVGVAIDAIGATAHPHTMLGVTKQGLAAITMTRGNKDTFIILRGGKKGPNYDAEHVAAVRKDLEKANLPPRIMIDCSHGNSSKNHLNQPKVSKSIAEQIRNGDSSIVGVMIESHINEGRQDAPIRPGVKDTLKYGVSITDACVSWEQTAPMLDDLAEAVRARRQNQKSN

SEQ ID NO: 1373 - DNA, 1248 bp, Corynebacterium glutamicum
  CDS (101)..(1228)
tagttgtgccacctaaaacgcgaacagaaccggagtcgagcagcacctccccgcaagggtagaggggctgcttttttgtttcctaaattcaccccatcccatgcatagccctgaaaggcaagaaaaaatgagttctccagtctcactcgaaaacgcggcgtcaaccagcaacaagcgcgtcgtggctttccacgagctgcctagccctacagatctcatcgccgcaaacccactgacaccaaagcaggcttccaaggtggagcaggatcgccaggacatcgctgatatcttcgctggcgacgatgaccgcctcgttgtcgttgtgggaccttgctcagttcacgatcctgaagcagccatcgattacgcaaaccgcctggctccgctggcaaagcgccttgatcaggacctcaagattgtcatgcgcgtgtacttcgagaagcctcgcaccatcgtcggatggaagggattgatcaatgatcctcacctcaacgaaacctacgacatcccagagggcttgcgcattgcgcgcaaagtgcttatcgacgttgtgaaccttgatctcccagtcggctgcgaattcctcgaaccaaacagccctcagtactacgccgacactgtcgcatggggagcaatcggcgctcgtaccaccgaatctcaggtgcaccgccagctggcttctgggatgtctatgccaattggtttcaagaacggaactgacggaaacatccaggttgcagtcgacgcggtacaggctgcccagaacccacacttcttcttcggaacctccgacgacggcgcgctgagcgtcgtggagaccgcaggcaacagcaactcccacatcattttgcgcggcggtacctccggcccgaatcatgatgcagcttcggtggaggccgtcgtcgagaagcttggtgaaaacgctcgtctcatgatcgatgcttcccatgctaactccggcaaggatcatatccgacaggttgaggttgttcgtgaaatcgcagagcagatttctggcggttctgaagctgtggctggaatcatgattgagtccttcctcgttggtggcgcacagaaccttgatcctgcgaaattgcgcatcaatggcggtgaaggcctggtgtacggacagtctgtgaccgataagtgcatcgatattgacaccaccatcgatttgctcgctgagctggccgcagcagtaagggaacgccgagcagcagccaagtaattaagggcgctagactgtta

SEQ ID NO: 1374 - protein, 375 aa, Corynebacterium glutamicum
MHSPERQEKMSSPVSLENAASTSNKRVVAFHELPSPTDLIAANPLTPKQASKVEQDRQDIADIFAGDDDRLVVVVGPCSVHDPEAAIDYANRLAPLAKRLDQDLKIVMRVYFEKPRTIVGWKGLINDPHLNETYDIPEGLRIARKVLIDVVNLDLPVGCEFLEPNSPQYYADTVAWGAIGARTTESQVHRQLASGMSMPIGFKNGTDGNIQVAVDAVQAAQNPHFFFGTSDDGALSVVETAGNSNSHIILRGGTSGPNHDAASVEAVVEKLGENARLMIDASHANSGKDHIRQVEVVREIAEQISGGSEAVAGIMIESFLVGGAQNLDPAKLRINGGEGLVYGQSVTDKCIDIDTTIDLLAELAAAVRERRAAAK

SEQ ID NO: 1375 - DNA, 1083 bp, Methylophilus methylotrophus
  CDS (1)..(1083)
atgactgcatacgaaaaattagccaccgatgatgtgcgcgtgcttgaaatcaagccgctggtaaagcccgcggagctattgtctcgcctgcaggaaagtacagtcagtacccaaaacatccttaaaacgcggtcagcgattcatcatattctccatcagggcgacgaccggttgctggtgattgttggcccttgttccatccatgacacggaagctggcatggagtacgcgcgacgcctgctcgatgtgcgtcagcgactgggtggcgaattgctcattgtcatgcgcgtctattttgagaaaccccgtaccacggtagggtggaaaggcctgatcaacgacccgcatctggatgggacttatgatatcaatcttggattggagaaggcccgccgtttcctgctggatgtgaatgaaattggcatgcctgcagccacagaattcctcgatgtggtctccccgcaatatactgctgacctggtcagctggggagctattggcgctcggacgacagagtctcagattcaccgcgaattggcctctggcctgtcttgtccggttggctttaaaaatgggaccgatggcggcgtcaaagttgccattgatgcgattaaggcagcagccagtccgcatcactttttgtccgtgaccaaagaaggcgaatccgctatttttgccaccaagggtaatgaagactgccatgtgattttacgtggcggtaaagcgccgaactttgatgcgcctagtgtggcagcagtatgcgaccaattggcagacgctggcctggcaccggtattgatggtggattgcagtcatggcaatagccagaagcaatataaaaaccaaatttcggtggtgaatgatgtggctagccaaatagcgggtggagatgctcgcataatcgggatcatgctagagtcgcatttgaacgaagggcgacaggatcattcgccaggctgcagccttaattatgggcaatccatcaccgatgcctgtttgggatgggaggactcagtggctgtgctggaaacgctggctgctgcagtcaaggcccgccgtgacaagcatgccgctgctgaataa

SEQ ID NO: 1376 - protein, 360 aa, Methylophilus methylotrophus
MTAYEKLATDDVRVLEIKPLVKPAELLSRLQESTVSTQNILKTRSAIHHILHQGDDRLLVIVGPCSIHDTEAGMEYARRLLDVRQRLGGELLIVMRVYFEKPRTTVGWKGLINDPHLDGTYDINLGLEKARRFLLDVNEIGMPAATEFLDVVSPQYTADLVSWGAIGARTTESQIHRELASGLSCPVGFKNGTDGGVKVAIDAIKAAASPHHFLSVTKEGESAIFATKGNEDCHVILRGGKAPNFDAPSVAAVCDQLADAGLAPVLMVDCSHGNSQKQYKNQISVVNDVASQIAGGDARIIGIMLESHLNEGRQDHSPGCSLNYGQSITDACLGWEDSVAVLETLAAAVKARRDKHAAAE

SEQ ID NO: 1377 - DNA, 1107 bp, Debaryomyces hansenii
  CDS (1)..(1107)
atgagtaaaacaccaatcccagacgaatacgatgataccaggattttaggatacgatcctttgataccacctgcgttattacagcacgaaatcagagcaagtaaagaatcattggacgttgtgatcagaggacgtattgaatcatcagagattataagcggaaaggatgaccgttgtttggtcattgttggaccatgttctatccatgacactgaagcagcattggaatatgctaccagattgaagaagttgtcgttggaattggaaaatgacttagtaattgtcatgagagcatacttggaaaagccaagaactaccgttggttggaaagggttgatcaacgacccagatgtggacaactcgtttgatatcaacagagggttaagaatctcccgtcagttatactctgatttgaccggcaagactggcttaccaattggttccgagatgttggataccatttctccacaatacttctcagactttttgagttttggtgctattggtgctagaaccaccgagtcgcaattacaccgtgagttagcatctggtttatctttcccaattggtttcaagaatggtaccgatggtaacttaggcgttgccttagatgctgttcaagcgtcttctaagggtcaccacttcatgggtgtcaccaagaatggtactgctgccattactactaccaagggtaacgaaaactgtttcatcatcttgagaggtggtaagaagattaccaactacgaccctgaatctgtcgctgccgcaaaggaagccatcaacaagagtaccgatccaaatatcaagttgatggttgattgctctcatgataattctcaaaaagactacagaaaccaacctaaggtaatggaaagtgttgttgaccaaatctctaagggtgaaaacgctcttatcggtgtcatgattgaatctcacattaatgaaggtaaacaaagcatgccaggtccaaaagaagacaagagcgctttgaagtacggtgtctctatcactgatggatgtgttggttgggaaactactgttgaattattgcacaacttgagtaaggccgtgcaagaaagaagacaaattaataagtctaaagcttaa

SEQ ID NO: 1378 - protein, 368 aa, Debaryomyces hansenii
MSKTPIPDEYDDTRILGYDPLIPPALLQHEIRASKESLDVVIRGRIESSEIISGKDDRCLVIVGPCSIHDTEAALEYATRLKKLSLELENDLVIVMRAYLEKPRTTVGWKGLINDPDVDNSFDINRGLRISRQLYSDLTGKTGLPIGSEMLDTISPQYFSDFLSFGAIGARTTESQLHRELASGLSFPIGFKNGTDGNLGVALDAVQASSKGHHFMGVTKNGTAAITTTKGNENCFIILRGGKKITNYDPESVAAAKEAINKSTDPNIKLMVDCSHDNSQKDYRNQPKVMESVVDQISKGENALIGVMIESHINEGKQSMPGPKEDKSALKYGVSITDGCVGWETTVELLHNLSKAVQERRQINKSKA

SEQ ID NO: 1379 - DNA, 1074 bp, Yarrowia lipolytica
  CDS (1)..(1074)
atgtcccgttcctcctctcccaacgcctcctctgctgaggacgtgcgaattctgggctacgaccccctcctcgctcccgctcttctccagactgaggttgcctccaccaaaaacgcccgagagaccgtctccaagggccgaaaggactccattgatgtcatcaccggcaagtccgacaagttgctgtgcattgtcggtccctgctccctccacgaccccaaggccgccatggagtacgcccagcgactcaaggagctgtctgacaagctgtctggtgagctcgtcatcgttatgcgagcctacctcgagaagccccgaaccaccgttggctggaagggtctgatcaacgaccccgacatggacgagtctttcaacatcaacaagggtctgcgactctcccgaaaggtcttctgcgaccttaccgacttgggtctgcccattgcctccgagatgctcgataccatttctccccagttcctggccgacctgctctccctgggtgccattggtgctcgaaccaccgagtcccagctgcaccgagagctcgcctccggtctgtctttccccgttggtttcaagaacggaaccgacggtactctgggtgttgccgttgatgctgtccaggccgcctctcaccctcaccacttcatgggtgtcaccaagcagggtgttgccgccatcaccaccaccaagggtaacgagaactgcttcatcattctgcgaggaggtaagaagggcaccaactacgacgccgagtccgtcgccgagtgcaagaaggccaccgagtccatgctcatggttgactgctctcacggcaactccaacaaggactaccgaaaccagcccaaggtttccaaggccgttgctgagcaggttgctgctggcgagaagaagatcatcggtgtcatgatcgagagtaatatccacgagggcaaccagaaggtccccaaggagggcccctctgcccttaaatacggtgtctccatcaccgacgcctgtgtctcttgggagaccaccgtggacatgctcaccgagctggccaacgccgtcaaggagcgacgaaacaagaactaa

SEQ ID NO: 1380 - protein, 357 aa, Yarrowia lipolytica
MSRSSSPNASSAEDVRILGYDPLLAPALLQTEVASTKNARETVSKGRKDSIDVITGKSDKLLCIVGPCSLHDPKAAMEYAQRLKELSDKLSGELVIVMRAYLEKPRTTVGWKGLINDPDMDESFNINKGLRLSRKVFCDLTDLGLPIASEMLDTISPQFLADLLSLGAIGARTTESQLHRELASGLSFPVGFKNGTDGTLGVAVDAVQAASHPHHFMGVTKQGVAAITTTKGNENCFIILRGGKKGTNYDAESVAECKKATESMLMVDCSHGNSNKDYRNQPKVSKAVAEQVAAGEKKIIGVMIESNIHEGNQKVPKEGPSALKYGVSITDACVSWETTVDMLTELANAVKERRNKN

SEQ ID NO: 1381 - DNA, 1089 bp, Yarrowia lipolytica
  CDS (1)..(1089)
atgcccgctatgcacaacgcttctaacgctcagggagaccgaaaccggaccgaggactggcgaatccggggctacaaccctctcacagcccccgatctgctccagcatgagatccctctgaccaagcagtccaaggccaccattctcaagggccgacaggacgcctgtgatattctggatggtaaggacgaccgaatcattgttgtggttggcccctgttccatccatgaccccaaggctgccatggagtacgccgagcgactcaagcagatctctgacaagctgtctggcgagcttctgatcgtcatgcgagcctacctcgaaaagcctcgaaccaccgttggctggaagggccttattaatgatcctgacatggacggctctttcaagatcaacaagggcctgcgagtcgctagagatctcttcgtgaagctcaccgagctcaaccccattgcttctgagcttctggacaccatttctccccagttcctggctgatctcttctctgtcggagccattggtgctcgaaccaccgagtcccagcttcaccgagagcttgcctctggtctgtctttccccgttggtttcaagaacggtactgacggaggtattaaggtggctctggacgccatccaggccgccgcccacccccaccacttcctttccgtcaccaagcccggtgtggttgccattgtcggcaccgacggaaacgaggactgcttcctgattctgcgaggaggttccaagggccccaactacgatgctgagcacgtcgccgaggtcaagaagcaggttggagagaccaagggtccccgaatcatggtagactgctcgcacggcaactcatcaaagaaccacaagaaccagcctctggtcgcctctaacgtggctcagcagattgctgctggtgagaagtccatttgcggtcttatgattgagtccaacatccacgagggtcgacaggacatctgcgataacaaggaggacatgaagtacggtgtgtctgtcaccgatgcctgcatcaactgggaggacactgagaaggtgctcgaggagctggcccaggccgtcaagactcgacgaggttag

SEQ ID NO: 1382 - protein, 362 aa, Yarrowia lipolytica
MPAMHNASNAQGDRNRTEDWRIRGYNPLTAPDLLQHEIPLTKQSKATILKGRQDACDILDGKDDRIIVVVGPCSIHDPKAAMEYAERLKQISDKLSGELLIVMRAYLEKPRTTVGWKGLINDPDMDGSFKINKGLRVARDLFVKLTELNPIASELLDTISPQFLADLFSVGAIGARTTESQLHRELASGLSFPVGFKNGTDGGIKVALDAIQAAAHPHHFLSVTKPGVVAIVGTDGNEDCFLILRGGSKGPNYDAEHVAEVKKQVGETKGPRIMVDCSHGNSSKNHKNQPLVASNVAQQIAAGEKSICGLMIESNIHEGRQDICDNKEDMKYGVSVTDACINWEDTEKVLEELAQAVKTRRG

SEQ ID NO: 1383 - DNA, 1119 bp, Kluyveromyces lactis
  CDS (1)..(1119)
atgttcatcactaacgatcatattggggacagaagtagtttagaagactggagaatcaagggatatgatccattgaccccaccggacttattacaacatgaatatcccatcggtgaaaaggccaaaaagatcatcgttgaagctagagagaaagtatgtgacattttgaatgggaaggacgaccgtttagttgtagttattgggccatgttctattcatgatccaaaggctgcctacgaatacgcagaccttttgaagaaaatttctgatgaattatccgatgatctattaatcattatgagagcgtacttggagaaacctagaaccactgttggctggaaaggtttgatcaatgatccagatatcgataattctttccaaattaacaaaggtttaagaatttctagagagatgttcaccagattgactgaaaaattaccaatcgctggtgaaatgttggacaccatttctccacaatttttgagtgactgtttctctctgggtgctatcggcgctagaaccactgaatctcaactacatagggaattagcttctggtctttctttcccaattggttttaagaatggtactgacggtggtctccaagttgctgttgatgccatgagatctgctgcacactcacattacttcttgtctgttactaaacctggtgtcactgccatcgttggaacagaaggtaacgaagatacctttgttatcttaagaggtggtaagactggaactaatttcgatgctgaaaacgtaaaaaagacgcaagccgaattggtcaaggcaaaggttgctgatgctgaaggtgtccaaagaagaatcatggttgattgttctcatgggaattcaaagaaagatttcagaaatcaaccaaaggtggctcagtcactttacgaacaactatcagctggtcaaaatgctatctgtggtgtcatgatcgaatctaacttagtcgaaggtagacaagacgttcctccagaaggtggccgtgaaaagttgatttacggatgttctatcaccgatgcctgtatcggttgggaaacaactgaagatgttctaagattattggcaaagggtgttaaaaacagaagagctctttcaaaggcttga

SEQ ID NO: 1384 - protein, 372 aa, Kluyveromyces lactis
MFITNDHIGDRSSLEDWRIKGYDPLTPPDLLQHEYPIGEKAKKIIVEAREKVCDILNGKDDRLVVVIGPCSIHDPKAAYEYADLLKKISDELSDDLLIIMRAYLEKPRTTVGWKGLINDPDIDNSFQINKGLRISREMFTRLTEKLPIAGEMLDTISPQFLSDCFSLGAIGARTTESQLHRELASGLSFPIGFKNGTDGGLQVAVDAMRSAAHSHYFLSVTKPGVTAIVGTEGNEDTFVILRGGKTGTNFDAENVKKTQAELVKAKVADAEGVQRRIMVDCSHGNSKKDFRNQPKVAQSLYEQLSAGQNAICGVMIESNLVEGRQDVPPEGGREKLIYGCSITDACIGWETTEDVLRLLAKGVKNRRALSKA

SEQ ID NO: 1385 - DNA, 1095 bp, Kluyveromyces lactis
  CDS (1)..(1095)
atgtcacaaactccaacacctatgttccatgaacaagaagatgtcagaatcttgggttacgatccattggtttcaccagctctccttcaggcccaagttcctgcctctcaagagtgtctagaaactgcgcaaaagggtagaaaagagtcaattgacatcatcactggtaaagacgacagagttctggttgttgttggtccatgttccatccatgacttgaaagaagcgcaagactacgctaagggattaaaggctttgtctgacgaactaaaaggtgatttatgtattataatgagagcttacttggaaaagccaagaactactgttggttggaaaggtttgatcaacgatccagatgtggataacacttacaacattaacaagggtttgcaagtctctagacaattgtttgtgaatttgactagtttaggtttgccaattggttccgaaatgttggacaccatttctccacaatacttggccgatttgttgtccttcggtgccattggtgccagaaccactgaatcacaattgcatagagaactagcatccggtttgtctttcccagtaggtttcaagaacggtaccgatggtaccttgggtgttgcattggacgctgttcaagctgcctctcactctcaccatttcatgggtgtcaccaagcacggtgtcgctgctattaccaccaccaagggtaacgaacactgtttcgtcattctaagaggtggtaagcaaggtaccaactacgacagtgtttctgtcgcagaagccaagaaagctctacctccaaccggtgttctaatgattgattactctcacggtaattctaataaagacttcagaaaccaaccaaaggttaacgacgccgtttgcgaacaaatcgctaacggtgaagacaaaatcatcggtgtcatgattgaatcccacatcaacgaaggtaagcaatctattccagcggaaggtaaagctggtttgaaatacggtgtttctatcacagatggatgtataagtttggaaacaactgctgaagtactaagaaaattggctgcagcagttagagcaagaagagaactaaaaaagaagaacactgaataa

SEQ ID NO: 1386 - protein, 364 aa, Kluyveromyces lactis
MSQTPTPMFHEQEDVRILGYDPLVSPALLQAQVPASQECLETAQKGRKESIDIITGKDDRVLVVVGPCSIHDLKEAQDYAKGLKALSDELKGDLCIIMRAYLEKPRTTVGWKGLINDPDVDNTYNINKGLQVSRQLFVNLTSLGLPIGSEMLDTISPQYLADLLSFGAIGARTTESQLHRELASGLSFPVGFKNGTDGTLGVALDAVQAASHSHHFMGVTKHGVAAITTTKGNEHCFVILRGGKQGTNYDSVSVAEAKKALPPTGVLMIDYSHGNSNKDFRNQPKVNDAVCEQIANGEDKIIGVMIESHINEGKQSIPAEGKAGLKYGVSITDGCISLETTAEVLRKLAAAVRARRELKKKNTE

SEQ ID NO: 1387 - DNA, 1074 bp, Erwinia carotovora subsp
  CDS (1)..(1074)
atgcaaaaagattcgcttaataatattaatatcagtgcagaacaggttttgattactcccgatgaattgaaagccaagtttccgcttaacgacgtggagcaacgcgacattgcgcaagcgagagcgaccattgcggacatcattcatggccgtgatgaccggttattgatcgtctgcggaccttgctctattcatgatacagatgcagcgctggaatatgcgcgccgcttgcagttgcttgccgctgaattgaacgatcgtctctacattgtgatgcgcgtttattttgaaaagccacgtacaacagtgggttggaaagggctcatcaacgatccattcatggatggttcatttgatgtggaatctgggttgcacatcgctcgtgggctgcttctgcaactggtgaatatggggctgccgctggcgacagaagcgcttgatccgaacagtccgcagtacctgggcgatctatttagctggtcagctatcggcgcacgtacgactgaatcacaaacgcaccgtgagatggcttctggcctgtcgatgcctgttgggttcaaaaacggaacggatggcagtctgggaacggcgatcaatgcgatgagagctgccgcgatgccacatcgcttcgtcggtatcaatcaaactgggcaagtttgtctgctgcaaacgcaggggaatggtgatggccatgtgattctgcgcggtggtaaaaccccaaactacagtgcacaggatgtcgccgaatgtgaaaaacagatgcaggaagcaggactgagacctgcgctgatgatagattgtagccacggtaattcgaataaagactaccgccgtcagccactggttgttgaatctgcgattgaacaaatcaaggcgggaaatcgttcgattataggactgatgctggaaagccaccttaacgaggggagccagtcttcagaacaaccacgttcagatatgcgctacggtgtatcagtcacggatgcttgtatcagttgggaaagtacagaaacgttgctgcgttccgttcatcaagatctgagtgccgcacgtgtgaaacattcaggagagtaa

SEQ ID NO: 1388 - protein, 357 aa, Erwinia carotovora subsp
MQKDSLNNINISAEQVLITPDELKAKFPLNDVEQRDIAQARATIADIIHGRDDRLLIVCGPCSIHDTDAALEYARRLQLLAAELNDRLYIVMRVYFEKPRTTVGWKGLINDPFMDGSFDVESGLHIARGLLLQLVNMGLPLATEALDPNSPQYLGDLFSWSAIGARTTESQTHREMASGLSMPVGFKNGTDGSLGTAINAMRAAAMPHRFVGINQTGQVCLLQTQGNGDGHVILRGGKTPNYSAQDVAECEKQMQEAGLRPALMIDCSHGNSNKDYRRQPLVVESAIEQIKAGNRSIIGLMLESHLNEGSQSSEQPRSDMRYGVSVTDACISWESTETLLRSVHQDLSAARVKHSGE

SEQ ID NO: 1389 - DNA, 1047 bp, Erwinia carotovora subsp
  CDS (1)..(1047)
atgctacaaacagatgaactgcggagcgcgcgcatcgagagtctggttacgccccaaacgctacttgccagactcccgattacccctgacgttgccgaaaatgtcacctcctcacgcaagaaaattgaagccattctcaccggccacgatccccgtttactcgttgtgattggcccctgttcgatccatcacaccgacagcgccttggactatgcgcgccgtctggctgtgctacgcacgcagtatcaggatcggctggaaattgtcatgcgcacttattttgaaaaaccgcgcacggtggtcggttggaaggggcttatctccgatcccgcactcaatggctcgttccaggtgaacgaagggctggagattgctcgccgtctgctgctggacgtcaatcaacttggattgccgaccgcaacggaattcctcgatatggtcaccggccaatatatcgccgatttgattagctggggcgcgattggtgcgagaaccaccgaaagccaaatccaccgcgagatggcgtctgcactatcctgccctgtcggcttcaaaaacgggacggatggcaatacacgcatcgccgtcgatgcgatccgtgccgcacgcgcccaacacatgttcctctcgccggacaaacaaggcttcatgtcggtttacaaaacgcagggcaacccgtttggccacataattatgcgcggcgggaaaaaaccgaactatcacgcggaagatattgccgctgcctgcgcgcatctcagcgagttttctctgcccgaacatctggtgatcgatttcagccatgctaactgtcagaaacagcatcgccgccagctcgatgttgccgatgatatctgccagcaaattcgcgctggttcacgcgccatcgcaggcatcatggcggaaagtttcttaatcgaagggagtcagccggcgatcaacccgctggcgctgacgtatgggcaatccattaccgatccttgcctaagctggcaggacaccgaaacgctgctggcacgtctggcaagcgctgtcgatagccgattctag

SEQ ID NO: 1390 - protein, 348 aa, Erwinia carotovora subsp
MLQTDELRSARIESLVTPQTLLARLPITPDVAENVTSSRKKIEAILTGHDPRLLVVIGPCSIHHTDSALDYARRLAVLRTQYQDRLEIVMRTYFEKPRTVVGWKGLISDPALNGSFQVNEGLEIARRLLLDVNQLGLPTATEFLDMVTGQYIADLISWGAIGARTTESQIHREMASALSCPVGFKNGTDGNTRIAVDAIRAARAQHMFLSPDKQGFMSVYKTQGNPFGHIIMRGGKKPNYHAEDIAAACAHLSEFSLPEHLVIDFSHANCQKQHRRQLDVADDICQQIRAGSRAIAGIMAESFLIEGSQPAINPLALTYGQSITDPCLSWQDTETLLARLASAVDSRF

SEQ ID NO: 1391 - DNA, 1056 bp, Erwinia carotovora subsp
  CDS (1)..(1056)
atgaattaccaaaatgatgatttaagaattaaagagattaatgaacttttgccgccggttgctttgctagaaaagtttccagccacggagaaggccgcggaaacggtatcgttcgcgcgtacagccatccataaaattcttaacggcaatgatgaccgcctgctggtggtgattggtccttgctcgatccacgacacgaaagccgcgaaagagtatgccgcacgtctgctgacgctgcgtagcgagctgagcgacgatctggaagtggtcatgcgggtttattttgaaaaaccacgcaccacgattggctggaaagggctaatcaacgatccgcacatggataatagtttccagatcaacgatggtctacgcattgcgcgccagctgctgctggaaattaacgataccggtttacctgctgcgggtgaattcctggatatgattactccgcaatacctggcggatctgatgagctggggcgctattggcgcacgtactacagaatctcaggtacaccgtgaattagcgtctggcctgtcatgtcctgtgggctttaaaaacggcactgacggcacgatcaaagtagcgattgatgcgatcaacgcagccagtgcgccgcactgcttcctgtctgtcaccaaatggggacattcggctatcgtgaataccagtggtaacaacgattgccacatcattctgcgtggtggtaaaacgccgaactatagcgctgagcacgttaaagacgtgaaaattggcttggaaaaagcgggcctgacaccgcaggtcatgatcgatttcagccatgcgaacagcagcaagcagttcaaaaagcagatggaagtctgtactgatgtctgtgggcagatcgcacagggtgaaaaagcgattatgggcgtgatggtggaaagccatctggttgaaggcaaccagaatctggaaagcggcgaacctctggtttatggccgtagcgttaccgatgcctgtattagctgggaagacacagaatcactgttgcgccagttagcgtctgctgtacgagagcgccgcaataagtaa

SEQ ID NO: 1392 - protein, 351 aa, Erwinia carotovora subsp
MNYQNDDLRIKEINELLPPVALLEKFPATEKAAETVSFARTAIHKILNGNDDRLLVVIGPCSIHDTKAAKEYAARLLTLRSELSDDLEVVMRVYFEKPRTTIGWKGLINDPHMDNSFQINDGLRIARQLLLEINDTGLPAAGEFLDMITPQYLADLMSWGAIGARTTESQVHRELASGLSCPVGFKNGTDGTIKVAIDAINAASAPHCFLSVTKWGHSAIVNTSGNNDCHIILRGGKTPNYSAEHVKDVKIGLEKAGLTPQVMIDFSHANSSKQFKKQMEVCTDVCGQIAQGEKAIMGVMVESHLVEGNQNLESGEPLVYGRSVTDACISWEDTESLLRQLASAVRERRNK

SEQ ID NO: 1393 - DNA, 1113 bp, Acinetobacter sp
  CDS (1)..(1113)
atgatccaatcagtgacagcaatgaatactttacagtccaatccagtttcacagccagatatcgatgatgttaacatcaaaagcatccagcctcttgttacgcctgccgagttaaaagcagagcttccactgacagaaagtgcttatcaaaccgtactccacggtcgtgaaaccattcgcaacattcttgatggtacagacaaacgtatttttgttgtcattgggccatgctctattcacgaccctaaagcagcgcatgaatacgcaacacgcttaaaagtactcagcgaaaaagtaaaagacagtttgtatattgtgatgcgtgtttattttgaaaaaccacgtacaacagtaggctggaaaggtttgattaatgatcctgatatgaatgactcattcaatattgaaaaaggtctgcgtattggacgtaaattactccttgaactaaacgaacaaggtctaccttgtgctacagaagcgcttgatccaaactctcctcagtattatcaagatctgatttcatggtcggctattggcgctcgtaccactgaaagtcagacacatcgtgagatgtcatctggattatcatcaccagttggctttaaaaacggaacagatggtgggcttacagtcgcaacaaatgcgatgcaatctgtcaaacacggtcacagctttttaggtttgaatgaagctggtcaggtttctgtcattcataccagtgggaatccatatgcacacgttgtattacgtggcggtaacggaaagccaaactatgatgcagggtcagtcgcagaagctgaaaatgcactggcaaaagcaaaagtcagcactaaaatcatgattgatgccagccatgccaattcaaataaagacccatacttacagccacttgtactcaaaaatgtaaccgagcaaatcatcgacggtaataagtcaatagtgggtgtcatggttgaaagtcacctcaaaggcggacgtcaggatattcctgaaaacctatgtgatcttgaatacggcaagtctgttaccgatggctgtattgattgggaaaccacagaaaatgttttgcttgaaatgcatgaagcactcaaagatgttttagctcagcgttaa

SEQ ID NO: 1394 - protein, 370 aa, Acinetobacter sp
MIQSVTAMNTLQSNPVSQPDIDDVNIKSIQPLVTPAELKAELPLTESAYQTVLHGRETIRNILDGTDKRIFVVIGPCSIHDPKAAHEYATRLKVLSEKVKDSLYIVMRVYFEKPRTTVGWKGLINDPDMNDSFNIEKGLRIGRKLLLELNEQGLPCATEALDPNSPQYYQDLISWSAIGARTTESQTHREMSSGLSSPVGFKNGTDGGLTVATNAMQSVKHGHSFLGLNEAGQVSVIHTSGNPYAHVVLRGGNGKPNYDAGSVAEAENALAKAKVSTKIMIDASHANSNKDPYLQPLVLKNVTEQIIDGNKSIVGVMVESHLKGGRQDIPENLCDLEYGKSVTDGCIDWETTENVLLEMHEALKDVLAQR

SEQ ID NO: 1395 - DNA, 1056 bp, Acinetobacter sp
  CDS (1)..(1056)
atgaacgcgcttaatacattgatccagaaaaatacgacaaaagaaattacacttagcttgccacagcaattaaaagcaaaatattcgcttgctcccatttttttagagcagatcgcagagcatcgtcaaaccattcaaaatatccttgctggcaaagattcacggcttttggtcgtaactggtccatgttcgattcatgatcctgtttctgcgctgcaatacgcacaaaggcttgtcaaattacaagatcaagttaaagatcagatttttttagtgatgcgtgcttatctcgaaaaaccacgtacaacaattggctggaagggttttttatacgatccaaatcttgatggttcatcagatttacagctgggtttagaaaaatctcgcgcattatatttgcaaattattgaaatggggcttccaattgccagtgaaattttaagcccaatggcgactggctattttgatgatttactggcttggggagctattggggcacgtaccagtgaatctcagattcatcgtgaaatttcaagtcatatgccgtttccaattggttttaaaaatggtactgatggttcgattcagatcgcattggatgccattcaatctgcacaaaatgaacatcagtttttagggatgagtcagcttggccagcctgcaattttacaaagttctgggaatccactgccgcatttgatcttgcgtggagcaaatgatggaccaaattatgatattcagtccatttcgaatattagagcaaaacataagggcgaattacctgcgcttgtaattgactgtagtcatggcaatagttcaaaagatccgatgaaacaaccgcaagtacttcgacaaatcattgcagaaagaattgaaagtgatgttcgaggtgtgatgttggaaagccatttggtcgatggaaatcagaagatttcatgcgacataacctatggccaatctgtgactgatggttgccttgggtgggagaagacagagaatttacttttagaaatggctgatcaactcgcacaatgtcctttacgccaatcagcttaa

SEQ ID NO: 1396 - protein, 351 aa, Acinetobacter sp
MNALNTLIQKNTTKEITLSLPQQLKAKYSLAPIFLEQIAEHRQTIQNILAGKDSRLLVVTGPCSIHDPVSALQYAQRLVKLQDQVKDQIFLVMRAYLEKPRTTIGWKGFLYDPNLDGSSDLQLGLEKSRALYLQIIEMGLPIASEILSPMATGYFDDLLAWGAIGARTSESQIHREISSHMPFPIGFKNGTDGSIQIALDAIQSAQNEHQFLGMSQLGQPAILQSSGNPLPHLILRGANDGPNYDIQSISNIRAKHKGELPALVIDCSHGNSSKDPMKQPQVLRQIIAERIESDVRGVMLESHLVDGNQKISCDITYGQSVTDGCLGWEKTENLLLEMADQLAQCPLRQSA

SEQ ID NO: 1397 - DNA, 1119 bp, Candida glabrata
  CDS (1)..(1119)
atgttcatcaagaatgactacagaggtgacagaacccgtctagaagactggagaatcaaaggttacgatccattgactcctcctgatcttcttcagcatgaatacccaatcagtgagaaaggtgctgccaacatactgaaagctagagattctgtgtgtgacatcttgaatggtaaggatgaccgtatggttattgtcattggtccatgctccattcatgacccaaaggcagcttacgaatacgccgataagctagcagtaatcgctgagaagctatccgatgatctacttattatcatgagagcgtacttagagaagccaagaaccaccgttggatggaagggtctgataaatgacccagatattgataactctttccaaatcaacaaaggtttaagaatctcaagagaaatgttcacaaagctgatcgaaaagcttcctattgccggtgaaatgttagacactatctccccacaattcttgagtgactgtttctctctaggtgccattggtgccagaacaactgaatcccaactgcatagagaactagcttcaggtctatctttcccaattggtttcaagaatggtaccgatggtggcctacaagttgccatcgatgctatgagagctgcatctcacgaacattacttcctttctgtcacaaagcctggtgtcaccgctattgttggtactgaaggtaactccgacacttttatcattttaagaggtggtaagcatggtaccaactacgatgctgaaaatgtgaagtccaccaaagaacaactaaggaaagcaaaattgattgatgaagctgacagtaccagaagaataatgattgactgttctcacggtaacagtaataaggactacagaaatcaaccaaaggtcgctcaagagatctacaaccaactgagtgctggtgaaaacggtttgtgtggtgttatgatcgaatctaacctagtggaaggcagacaagatgttcctccagaaggtggtcgtgagggtctaaaatatggttgctctatcactgatgcttgtattggctgggatactaccgaaagcgttttggaacttctagccgaaggtgttagaaacagaagaaagcatttatccaagtaa

SEQ ID NO: 1398 - protein, 372 aa, Candida glabrata
MFIKNDYRGDRTRLEDWRIKGYDPLTPPDLLQHEYPISEKGAANILKARDSVCDILNGKDDRMVIVIGPCSIHDPKAAYEYADKLAVIAEKLSDDLLIIMRAYLEKPRTTVGWKGLINDPDIDNSFQINKGLRISREMFTKLIEKLPIAGEMLDTISPQFLSDCFSLGAIGARTTESQLHRELASGLSFPIGFKNGTDGGLQVAIDAMRAASHEHYFLSVTKPGVTAIVGTEGNSDTFIILRGGKHGTNYDAENVKSTKEQLRKAKLIDEADSTRRIMIDCSHGNSNKDYRNQPKVAQEIYNQLSAGENGLCGVMIESNLVEGRQDVPPEGGREGLKYGCSITDACIGWDTTESVLELLAEGVRNRRKHLSK

SEQ ID NO: 1399 - DNA, 1071 bp, Candida glabrata
  CDS (1)..(1071)
atgtctgatgcgaatgctaacgaagacgtgagaatcctgggctacgacccgctggtgtcgcctgcgctgctgcaggtgcaagtgccagccacagaggtgtctatccagaccgctaggcgcgggaggaaagagtccatcgagatcatcaccggccgtgacgaccgtgtgctcgtgatcgtcggaccttgctcggttcacgacctcgacgccgcgcaggagtacgcgcagaggctgaagaagctgtccgacgagctgcagaaggacctgtgcatcgtgatgagagcgtacctggagaaaccaagaaccacggtcggctggaaagggttgatcaacgaccctgacgtcaacaacaccttcaacatcaacaagggcctgcagagcgccagacagctgttcgtgaacttgaccaacaccggtgtccctatcggctctgagatgctggataccatctccccacagtacctcgcagacctgctctccttcggtgccatcggcgcaagaaccaccgagtcccaactgcacagagaactggcatcaggtctgtccttccctatcggcttcaagaacgggaccgacggtaccttgggcgtcgccgtagacgcctgccaggccgcatcccactcccaccacttcatgggtgtcaccaagcatggtgtcgccgccatcaccaccaccaagggtaacgagcactgcttcgtcatcctgagaggtggtaagaaaggtaccaactacgacgccaagtccgtcgccgaggccaagaaacagctaccggagggcgcaaacggcctgatgatcgactactcccacggtaactccaacaaggacttcagaaaccagccaaaggtcaacgacgccgtctgcgagcaaatcgccaacggtgaaaaggccatcgtcggtgtcatgatcgagtccaacatcaacgagggcaaccagtgcatcccaccagaaggtaaggccggcctaaagtacggtgtctccatcacggatgcctgtatctcctgggaaaccaccgaagacgtcttgagaaagttggctgccgccgtcagacaaagaagagaacactacaaataa

SEQ ID NO: 1400 - protein, 356 aa, Candida glabrata
MSDANANEDVRILGYDPLVSPALLQVQVPATEVSIQTARRGRKESIEIITGRDDRVLVIVGPCSVHDLDAAQEYAQRLKKLSDELQKDLCIVMRAYLEKPRTTVGWKGLINDPDVNNTFNINKGLQSARQLFVNLTNTGVPIGSEMLDTISPQYLADLLSFGAIGARTTESQLHRELASGLSFPIGFKNGTDGTLGVAVDACQAASHSHHFMGVTKHGVAAITTTKGNEHCFVILRGGKKGTNYDAKSVAEAKKQLPEGANGLMIDYSHGNSNKDFRNQPKVNDAVCEQIANGEKAIVGVMIESNINEGNQCIPPEGKAGLKYGVSITDACISWETTEDVLRKLAAAVRQRREHYK

SEQ ID NO: 1401 - DNA, 1083 bp, Photobacterium profundum
  CDS (1)..(1083)
atggctattcacccatcagtgatgagaacgacgacatgccgtcggcttccttcaccagcagaactgctcagtgactacccgtgcaaggccgacactgaacaccacattatgacatcgcgtaatgatgtgagggatattttacatggcaaagatgatcggcttttggtcgtgattggtccatgctcaattcatgacccggatgcagcactggcatacgcaaagcagcttaagccactggtcgaacagtttagtgatcacttacatattgtaatgcgaacgtatttcgaaaagccccgaacaacaactggttggaaaggcttaatattcgatccgcatctcgacaacagtaatgaccttattactgggttaacaacagcgcgtcagttagtgctcgctattaatgaacttggtgtaccaacctcaaccgaatttttggataataccagttttctatatttggccgacctcatgagctggggagccattggcgcccgcactacagagtcacaagttcaccgacagttaacctcgggcttaccctgccccgtcggtttcaaaaacggcaccgatggtaacattcgtattgcgacagatgccattctttcgagccaatcccctcacttgtataccgttacggggcacgatggacatttatatgcagtagaaagtacaggtaatgccgattgccacatcatcctacgtggtgggcaagaacctaactacagtccgggccatattcaagctgccagcaaagcgctataccaagccaagttaccagtaagtattatggtagattgcagccatggaaacagccaaaagcgtcataaaaaccaattagttgtcgcacaatcgttatgtgaacaactgtctcagggcgaacaagcaatcacgtcaattatggtggagagtttctttgaggaaggcagtcaagcgatcagtgccaatatgacctacggacaatcggtaacggatgcctgtatcaactggagcgacacagaaatattgcttaaccaatttgccgctgccattgcgactcgccgcgcactgtaccaatcggcctcgccagtcgccatgcacggctaa

SEQ ID NO: 1402 - protein, 360 aa, Photobacterium profundum
MAIHPSVMRTTTCRRLPSPAELLSDYPCKADTEHHIMTSRNDVRDILHGKDDRLLVVIGPCSIHDPDAALAYAKQLKPLVEQFSDHLHIVMRTYFEKPRTTTGWKGLIFDPHLDNSNDLITGLTTARQLVLAINELGVPTSTEFLDNTSFLYLADLMSWGAIGARTTESQVHRQLTSGLPCPVGFKNGTDGNIRIATDAILSSQSPHLYTVTGHDGHLYAVESTGNADCHIILRGGQEPNYSPGHIQAASKALYQAKLPVSIMVDCSHGNSQKRHKNQLVVAQSLCEQLSQGEQAITSIMVESFFEEGSQAISANMTYGQSVTDACINWSDTEILLNQFAAAIATRRALYQSASPVAMHG

SEQ ID NO: 1403 - DNA, 1053 bp, Photobacterium profundum
  CDS (1)..(1053)
atgcaaaaaacagatgacgtacgcattagcgagatcaaagaacttttaccaccagttgctgtattggaaagatttccagccactgaactggcggctgaaactgtatatcagtcacgtaaatcgattcacaacattctgaacgatgaagatgaccgtttgttggttgttgttgggccttgttcaattcatgacactgaagctgctatcgaatacggtaaaaagctgaaagtattacgtgaagaattaaaaggtgaccttgaaatcgtaatgcgtgtttactttgaaaaaccacgcaccacagtaggttggaaagggttaattaacgacccgtatatggacaatagctttaagttaaatgatggtttacgtattggacgtaagttgctacttgatttgaccgatatgggcttaccaacagcgggtgagttccttgatatgattaccccacaatacatgggtgatttgatcagctggggcgcaattggtgcgcgtactacagaatcgcaagttcaccgtgagctatcttcaggactatcttgccctgttggttttaaaaacggtacagatggcaacattaagatcgcgaccgatgcgattggatcggcaagtgcacctcaccactttttatcagtgactaagtatggtcattcagctattgtttctactttgggtaatgaagactgtcatatcattcttcgtggcggtaaagagcctaattacagctcagaacacgttaacgcggtgacatcacagctgggtaatgctggtcagcgtaagaaagtaatgattgattttagtcatgctaatagttcgaagaagtttgaacgtcagattattgtttctgaagatgtcggtcagcaagttgctggcggtaacaaagatatttttggtgttatggttgaaagccaccttgttgaaggtcgtcaagatatcgtagaaggcacagagccaacgtatggtcaaagtattaccgatgcatgtattggttgggcagatacagaaacagtacttcgtcaattagcacgtgatgttgctaagcgtcgtcaagcatag

SEQ ID NO: 1404 - protein, 350 aa, Photobacterium profundum
MQKTDDVRISEIKELLPPVAVLERFPATELAAETVYQSRKSIHNILNDEDDRLLVVVGPCSIHDTEAAIEYGKKLKVLREELKGDLEIVMRVYFEKPRTTVGWKGLINDPYMDNSFKLNDGLRIGRKLLLDLTDMGLPTAGEFLDMITPQYMGDLISWGAIGARTTESQVHRELSSGLSCPVGFKNGTDGNIKIATDAIGSASAPHHFLSVTKYGHSAIVSTLGNEDCHIILRGGKEPNYSSEHVNAVTSQLGNAGQRKKVMIDFSHANSSKKFERQIIVSEDVGQQVAGGNKDIFGVMVESHLVEGRQDIVEGTEPTYGQSITDACIGWADTETVLRQLARDVAKRRQA

SEQ ID NO: 1405 - DNA, 1113 bp, Photobacterium profundum
  CDS (1)..(1113)
atgccttctactacccagaatagattgaggaaagccaccatgcaaaaagaccaactgaataatgtacatattcaagatgaatgcgtattgatcactcctcaacaactaaaagccaggttgccactcagtgaaacagcactgaacttcattcgtgaatctcgtcaaaccattgcagatattactcacaagcgtgaccaccgtttactcgtggtatgcggaccatgctcaattcacgatattgacgcagcgaaagcgtacgcccaaaaattgaagcagctttctgaagagctaagtgatcaactgtacattgtaatgcgcgtttattttgaaaaaccacgtacaacagttggttggaaaggtcttatcaatgacccgcatcttgatggctcttttgaagtggaagaaggtttacacattggtcgtcagctactcattgacttggttgaaatggggattcctttagcaacagaagcgcttgatccgatcagtcctcaatacttaggtgatttattcagttgggcagccattggtgcacgtaccactgaatcacaaacacaccgtgaaatggcaagtggcctttcaatgcccgttgggtttaaaaatggtactgatggaagtttggcaacggctatcaatgccatgaaagctgcagcttctgggcaccgttttatggggattaatccagaaggtcaggtggcgctgttgaacacccaaggaaaccctgatggccatgtaattttacgtggcggtaagcaaacgaattatgattcagtctcggttactgagtgtgaaaatgagatgcatcagtcaggtctttcaccatccttgatggtagactgtagccatgcgaattcacgtaaagattaccgtcgtcagccattagtcgctgaagatgtacttcatcaaatccgtgaaggtaataaatcgatcattggtttgatgattgaaagccatttaaatgaaggtagtcaaagcgctgatttaccgcgcgaagaaatggcttatggggtatcgattaccgatgcatgtatcagctgggaagatacagaaacactattacgtcgtacgcgtaaagaattaacgcctttcttaaaggatcgctgcgaaggataa

SEQ ID NO: 1406 - protein, 370 aa, Photobacterium profundum
MPSTTQNRLRKATMQKDQLNNVHIQDECVLITPQQLKARLPLSETALNFIRESRQTIADITHKRDHRLLVVCGPCSIHDIDAAKAYAQKLKQLSEELSDQLYIVMRVYFEKPRTTVGWKGLINDPHLDGSFEVEEGLHIGRQLLIDLVEMGIPLATEALDPISPQYLGDLFSWAAIGARTTESQTHREMASGLSMPVGFKNGTDGSLATAINAMKAAASGHRFMGINPEGQVALLNTQGNPDGHVILRGGKQTNYDSVSVTECENEMHQSGLSPSLMVDCSHANSRKDYRRQPLVAEDVLHQIREGNKSIIGLMIESHLNEGSQSADLPREEMAYGVSITDACISWEDTETLLRRTRKELTPFLKDRCEG

SEQ ID NO: 1407 - DNA, 1056 bp, Photobacterium profundum
  CDS (1)..(1056)
atgccaatgaaaactgatgaactccgtaccgttagcctagggttaatgccaactccggcagaaattgaagctgtctctcctattactgacgaaattgcagcgcacgttgctgattctcgccgtcaagttgaagacatcctaaccggtaaggattctcgacttttagttgtcgtaggaccatgttctgttcacgatacagatgcagcaatggattatgctaaacaccttgttgctgttcaggaacaatacagagatgaactttgtattgttatgcgcacatactttgaaaagcctcgtaccgttgtaggctggaaagggttaatttcagatccacaccttgacggtagcttagattttgtcgcaggtttacataaagcacgtaagttattagtagatgtaaatgctttaggtttggctactgctactgaattccttgatatgattacaggacagtatcttgctgacttaatcacatggggagcaattggcgcgcgtacaactgagtctcaaattcaccgtgaaatggcttctgccctttcttgtcctgttggtttcaaaaatggtactgacggaaatatcaaaatagccattgatgcgattcgtgcaacacgtgaatctcacctattttgctcaccagcgaaaaatggtcaaatgacgatttaccgtacagcaggtaacccacacggtcatgtgattttacgtggtggcaaaatgccaaattaccaccaagctgatgttgaaacatcatgtaatacactggctgaatttgatttaccaacacgccttgttgttgacttcagccacggtaattgccaaaagcaacaccgtcgtcaacttgatgtcgcagctgatatctgtactcaaattcgtgaaggcagcaattacattgcgggtattatggctgaaagctttattattgaaggcaaccaagctgttgttgctggaaaagaaaaagaacttgtctacggtcaatctattacagacccttgtgtaaactgggaagataccgtcactatgctagatatgcttgctgacgcgatcaaaactcgtaaataa

SEQ ID NO: 1408 - protein, 351 aa, Photobacterium profundum
MPMKTDELRTVSLGLMPTPAEIEAVSPITDEIAAHVADSRRQVEDILTGKDSRLLVVVGPCSVHDTDAAMDYAKHLVAVQEQYRDELCIVMRTYFEKPRTVVGWKGLISDPHLDGSLDFVAGLHKARKLLVDVNALGLATATEFLDMITGQYLADLITWGAIGARTTESQIHREMASALSCPVGFKNGTDGNIKIAIDAIRATRESHLFCSPAKNGQMTIYRTAGNPHGHVILRGGKMPNYHQADVETSCNTLAEFDLPTRLVVDFSHGNCQKQHRRQLDVAADICTQIREGSNYIAGIMAESFIIEGNQAVVAGKEKELVYGQSITDPCVNWEDTVTMLDMLADAIKTRK

SEQ ID NO: 1409 - DNA, 1092 bp, Parachlamydia sp
  CDS (1)..(1092)
atggaacttctcccctcatataaagaattaaaaagccaatttccggcaagcgcatctcaagataatttcattgaagattgtcgagaaactgtaaaatctattttaaatggtactgataagcgattgttattgattgtagggccctgctcaatccatgattttcattctgctaaggaatttgcatttagattaaaatgcttagcagaatctctttcgtctcattttttcattttaatgcgtgtctattgtgaaaaagcgagaacagcaacgggctggaaaggatttttgtatgatccacttttagacggttccaatcaacttttactcggaatcaaaaagacaagagaattgttgctagagctttgcgatttgcgaatccctgccgcaaccgaatttttagatcctttaaccgcttattattatgaagatttaatttcttgggggtcgattggagcgagaacttcctcttcacaaatccacaggcaatttgcttcgaatttgcaaattccgataggctttaaaaatggaattgctggtaatatttcagctgctgttcaaggagcctatgcggcttctcaaccccatgcttacatggctttacacgaaaatggatggccaattgcaacgcaatctaaaggaaatctcgatactcacattgttttaagaggtggggaaacaaaaaccaattttgactctcattcgatatctgaagcgcttgcaaggttatcccatgcaaacttgccagaaagagtgttgatcgattgttctcatcataattcaaataaaaaacatgaaaaacaaccaattgtttttcaatccattatcgatcaagtactggcaggaaattcctttattaaaggtttaatgatagaaagtcacctttatgccggcaatcaaccttttcatttcaatccacaagagcttcgttatggtgtttcgattacggattcttgcttagattggaattcaactcaaacactcattgaatggggtgctcatcaattgcaagaaaatcttaatccgagtaagaagttatctttgtcttcagaatctctttttagttcgatgatatgtacaaagctaaaaagttaa

SEQ ID NO: 1410 - protein, 363 aa, Parachlamydia sp
MELLPSYKELKSQFPASASQDNFIEDCRETVKSILNGTDKRLLLIVGPCSIHDFHSAKEFAFRLKCLAESLSSHFFILMRVYCEKARTATGWKGFLYDPLLDGSNQLLLGIKKTRELLLELCDLRIPAATEFLDPLTAYYYEDLISWGSIGARTSSSQIHRQFASNLQIPIGFKNGIAGNISAAVQGAYAASQPHAYMALHENGWPIATQSKGNLDTHIVLRGGETKTNFDSHSISEALARLSHANLPERVLIDCSHHNSNKKHEKQPIVFQSIIDQVLAGNSFIKGLMIESHLYAGNQPFHFNPQELRYGVSITDSCLDWNSTQTLIEWGAHQLQENLNPSKKLSLSSESLFSSMICTKLKS

SEQ ID NO: 1411 - DNA, 1095 bp, Rhodopseudomonas palustris
  CDS (1)..(1095)
atgttgaccaccacagacgaccttcgccttcagaaaatcaccgagctgagtacgcctgccgaggtgatgggcgagattccgcgcacactgaccgcaacgcgtaccgttgcggcgagccgcagcgcgattcatgccatcctgaacggagccgacgaccggctcctcgtcgtcgtcggcccctgttcgattcacgatccggccgcagccatggactatgccagccgtctggcggcgctgcgcgagaccctggccgaccggctcgagatcgtgatgcgggtgtatttcgaaaagccgcgcaccacggtgggttggaagggactgatcaacgaccccgatctcgatggcagcttccggatcgacaaggggctacggttggcgcgggaagtactctcggccgtgaacaatctcggcctgccagcggcgaccgaattcctcgatctgatcacgcctcaatacatcgcggatctcgtcgcctggggcgcgatcggcgcgcgcaccaccgagagccagatccaccgcgaactcgcgtcaggcctgtcatgcccaatcggcttcaagaatggcaccgacggcaatgtccggatcgccgcggaggcggtgaagtccgcggcgcagccgcatcatttcatggcggtgaccaagggcgggcgcaatgcgatcgcggccaccactggtaacagcgactgccacgtcatcctgcgcggcggcgtcacaccgaactacgatgccgcaagtgtggaagccgccgcagcggtcctcggcaagatcggcctgccgccgcgcctgatgatcgacgccagccacgccaacagcagcaagcagccggacaaccagccgaaggtaacggccgatatcgggcgtcagatggcggctggcgagagccgcatcatcggcgtgatgatcgagagcaatctggtcgccggtcggcaggatgtggcgccgggtcggccgctgcaatacggccagagcatcaccgacggctgtatcgactgggcgacgaccgagacggtgctgcacgagctagccgatgcggtcgagagccggcgagctgcgcggcacgccgcaagcgctcagcagaaaggtgctgcggcgtga

SEQ ID NO: 1412 - protein, 364 aa, Rhodopseudomonas palustris
MLTTTDDLRLQKITELSTPAEVMGEIPRTLTATRTVAASRSAIHAILNGADDRLLVVVGPCSIHDPAAAMDYASRLAALRETLADRLEIVMRVYFEKPRTTVGWKGLINDPDLDGSFRIDKGLRLAREVLSAVNNLGLPAATEFLDLITPQYIADLVAWGAIGARTTESQIHRELASGLSCPIGFKNGTDGNVRIAAEAVKSAAQPHHFMAVTKGGRNAIAATTGNSDCHVILRGGVTPNYDAASVEAAAAVLGKIGLPPRLMIDASHANSSKQPDNQPKVTADIGRQMAAGESRIIGVMIESNLVAGRQDVAPGRPLQYGQSITDGCIDWATTETVLHELADAVESRRAARHAASAQQKGAAA

SEQ ID NO: 1413 - DNA, 1100 bp, Amycolatopsis methanolica
  CDS (1)..(1086)
atgtctctcagcgcaggccccgcggaaatttccgaaggcctcgacaaccagcgcaccctcggcgtcagcccgctgatctcccccgccctgctgcggcaggagctgccggtggacgcggcgatcgccaagaccgtcgcgcatggccggtcgtcggccgtcgacatcctccacggcgacgacgaccgcctcatcgtggtcgtcggcccctgctcggtgcacgaccccgcggccgccctcgactacgcccaccggctggccgagcacgccgccggtgtgcgcgacgaactgcacgtgatcatgcgggtgtacttcgagaagccacgcaccacgctgggctggaagggcctcatcaacgacccggacctggacggcagctacgccgtcaacaagggcctgcggatggcgcgcaagctgctgctggacatctccgcactggggctgccggtcgggtgcgagttcctggacccgatcacgccgcagttcatcgccgacaccgtgagctggggatccatcggcgcgcggaccgcggccagccaggtgcaccgccagctgtgcagcgcgctgtccatgccggtggggatcaagaactccactgagggcgatgtgcaggtggcggtggacgcgacccgcgcggcggcggcgagccacgtgttcgcgggcatcaacaacgacggcctggcggcgctgttcaccacggcgggcaacccggactgccacgtcatcctgcgcggcggttccgcaggcccgaactacgacgcggcgacggtggccgacacgctcgcgcggcaggccaaggccgggctgccggagcgggtgatcatcgacgcgagccacggcaacagcggcaaggaccacgtccgccagggcgtggtggccggggagatcgcggaccggatcgccgccggcgagcgcgggatcgccgggatcatgctggagagcttcctcgaggccgggcggcaggacctggtgctggggcacgcgggcgagctgacctacgggcagtcgatcaccgatgcgtgcctggactggcgaagcacgggtgagctgctggaccgcctctcggaggcggtggcggcgcggcggtgaggggggctacgcgg

SEQ ID NO: 1414 - protein, 361 aa, Amycolatopsis methanolica
MSLSAGPAEISEGLDNQRTLGVSPLISPALLRQELPVDAAIAKTVAHGRSSAVDILHGDDDRLIVVVGPCSVHDPAAALDYAHRLAEHAAGVRDELHVIMRVYFEKPRTTLGWKGLINDPDLDGSYAVNKGLRMARKLLLDISALGLPVGCEFLDPITPQFIADTVSWGSIGARTAASQVHRQLCSALSMPVGIKNSTEGDVQVAVDATRAAAASHVFAGINNDGLAALFTTAGNPDCHVILRGGSAGPNYDAATVADTLARQAKAGLPERVIIDASHGNSGKDHVRQGVVAGEIADRIAAGERGIAGIMLESFLEAGRQDLVLGHAGELTYGQSITDACLDWRSTGELLDRLSEAVAARR

SEQ ID NO: 1415 - DNA, 1071 bp, Treponema denticola
  CDS (1)..(1071)
atgataaaaaaccttattgacctccgaatcgagaggattcattgcataagttctcctgccgaaatggtagaaaaaatacccgcctcggattctctttattcttttatagccgaagcccgaaaaactatcagcaatataataaacggaaaggatgagcgttttttactcatagtcggcccctgctcgattcatgacacggaggcagccgaggattatgctatgcgcctattagagctaaaaaagaaatgctccgattctttctatattataatgcgtacctactttgaaaaacccagaaccgttttaggctggagaggccttatcgtagaacctgaacttgacggctttatcaatattgaaggcggcattcaaaagacaagaaaatttcttattaaacttgccgaaataggcattcctgcagcctccgaaatggtagaccctatgattccccaatacattgccgaccttgtaagctgggcttcgataggagcacgctcagccgaaagtcaaatccacagagaactggcctcaggactttcaatgccggtcggctttaaaaataccacctacggagacataacggccgctataaacggagttattgtttcccgcctgccccatgcctttgtaggcattgcccgaaacggactttcggcaatagtgcacacaaccggaaatcccgacactcacttggttttaaggggaggggtttcaaagcccaattataatagagaagaaattgaaaaagcagcctctcttatgaaggaaaaaatgctgaaaccgagcatagtaatagactgctcccacggaaattcgggaaaggacccgaaaaaacagataaacatctttgaagaaagcttaaaactccgcttcgataagaatgaacctcttgactatataaggggctgtatgattgaaagctttatccaagagggaagcacctcgatcgaaaaagcaaaggaacgcagcgaatacggtaaatccataaccgacccctgcctaggctgggaagaaactcaaacagaaatactaaaaatctatgaaaaatacaaaaggagaaagcaaaaatga

SEQ ID NO: 1416 - protein, 356 aa, Treponema denticola
MIKNLIDLRIERIHCISSPAEMVEKIPASDSLYSFIAEARKTISNIINGKDERFLLIVGPCSIHDTEAAEDYAMRLLELKKKCSDSFYIIMRTYFEKPRTVLGWRGLIVEPELDGFINIEGGIQKTRKFLIKLAEIGIPAASEMVDPMIPQYIADLVSWASIGARSAESQIHRELASGLSMPVGFKNTTYGDITAAINGVIVSRLPHAFVGIARNGLSAIVHTTGNPDTHLVLRGGVSKPNYNREEIEKAASLMKEKMLKPSIVIDCSHGNSGKDPKKQINIFEESLKLRFDKNEPLDYIRGCMIESFIQEGSTSIEKAKERSEYGKSITDPCLGWEETQTEILKIYEKYKRRKQK

SEQ ID NO: 1417 - DNA, 1068 bp, Geobacter sulfurreducens
  CDS (1)..(1068)
atgattcgcacgagcaacctgaagatcaaaagtattacccccatcattgcaccgggggaattacgccaggtgtttccccagtcggaggaggcggccgagttcgtcaactccagccgcgcccatatcaagaatatcctcaagggcaaggatccgcgcctgatggtggtggtgggcccctgttccattcacgatccgaaatcggctctggagtatgcggggcggctggcacgcctggcggccgaactgtcggatcagctattcatcgtgatgcgggtctacttcgaaaagccccgcactaccgtaggctggaagggactcatcaatgaccccgacatgaacggcacccatcagatatccaaggggctcggcatcgcccggcggctgctgtccgaaataacggaaatgctcctgccggtggcaaccgaaatgcttgaccccatcacgcccgactacctcgcggattgcatctcctggggagccatcggcgctcgtaccaccgagagccagacccaccgcgagatggccagcggcctctcgttccccgtgggattcaagaacggcaccgacggcaatctccagatagccatcgacgccatgaatgcggcactccattcccacagctttctcggcgtcaaccgggaggggcgcacctccatcattcagaccaccggcaaccccgatgtccacatcgtcctgcggggaggcaaaaaaccgaactatttccccgaagacatcagaaagaccgaagagatgctggaaaagggggggctcttccccaccatcatggtcgactgcagccacggcaactcggaaaaacgccacgagaagcagcccgacgtactctcttccgtcgtggaccagattgcggccggcaaccgctccatctccggcgtcatgatcgagagttttctggaagaagggaaccagtcgatccccagagatctctcaaccctcaagtacggcgtatccatcaccgacaagtgcattgactggaagaccaccgaaaccatcctgcgctcggcccacgaccgcctcaaggccgcgggaggcaggcccctgcacgggtaa

SEQ ID NO: 1418 - protein, 355 aa, Geobacter sulfurreducens
MIRTSNLKIKSITPIIAPGELRQVFPQSEEAAEFVNSSRAHIKNILKGKDPRLMVVVGPCSIHDPKSALEYAGRLARLAAELSDQLFIVMRVYFEKPRTTVGWKGLINDPDMNGTHQISKGLGIARRLLSEITEMLLPVATEMLDPITPDYLADCISWGAIGARTTESQTHREMASGLSFPVGFKNGTDGNLQIAIDAMNAALHSHSFLGVNREGRTSIIQTTGNPDVHIVLRGGKKPNYFPEDIRKTEEMLEKGGLFPTIMVDCSHGNSEKRHEKQPDVLSSVVDQIAAGNRSISGVMIESFLEEGNQSIPRDLSTLKYGVSITDKCIDWKTTETILRSAHDRLKAAGGRPLHG

SEQ ID NO: 1419 - DNA, 1095 bp, Ashbya gossypii
  CDS (1)..(1095)
atgacctcatttccgatgttcgcagcggacgctgaccaggccgaagacgtccgaatcctcggctacgaccctctggtgtcgccggcgctgcttcagtcgcaaattcccgcgacgcaggcgtgcctcgagacggcgcagaagggtcggcgggaggccatcgacatcataacagggaaggacgaccgggtgctggtggtggtcgggccgtgctcgatccacgacctggacgcggcgcaggagtacgcgcagcggctgaagaagctggcggaggagctggagggcgacctggtggtggtgatgcgcgcgtacctggagaagccgcggacgacagtggggtggaagggcctgatcaacgacccggacgtgaacaacactttcaacatcaacaagggcctacaggcggcgcggcagctgttcgtgaacctgacgtcgatcggcgtgccaattgggtccgagatgctcgacaccatctcgccgcagtacctcacggacctgctgtcgttcggcgctatcggcgcgcgcacgacggagtcgcaactgcaccgcgagctagcgtcggggctgtcgtttccgattgggttcaagaacggcacggacggctcgctggacgtggcactggacgcggtcaaggcgtcgtcccactcgcaccacttcatgggcgtgaccaagcacggcgtggccgccatcaccacgacgaagggcaacgagcactgctttgtcatcctgcgcggcggcaagcgcggcacgaactacgacgctacgtccgtggcggaggcgaaggccaagctgccccccacgggcgtgctgatgatcgactattcgcatgggaactccaacaaggacttccgcaaccagccgaaggtgaacgaggttgtgtcggagcagattgccaacggcgaggacaagatcgtcggcgtcatgatcgagtccaacatcaacgagggcagccagaagattccgcccgagggcaaagctggcctcaagtacggtgtttcgatcacggacggctgcatatcctgggagaccaccgaggaggtgctgaggaagctcgccggcgccgtccgcaagcggcgcgacctgcggaagaccaaataa

SEQ ID NO: 1420 - protein, 364 aa, Ashbya gossypii
MTSFPMFAADADQAEDVRILGYDPLVSPALLQSQIPATQACLETAQKGRREAIDIITGKDDRVLVVVGPCSIHDLDAAQEYAQRLKKLAEELEGDLVVVMRAYLEKPRTTVGWKGLINDPDVNNTFNINKGLQAARQLFVNLTSIGVPIGSEMLDTISPQYLTDLLSFGAIGARTTESQLHRELASGLSFPIGFKNGTDGSLDVALDAVKASSHSHHFMGVTKHGVAAITTTKGNEHCFVILRGGKRGTNYDATSVAEAKAKLPPTGVLMIDYSHGNSNKDFRNQPKVNEVVSEQIANGEDKIVGVMIESNINEGSQKIPPEGKAGLKYGVSITDGCISWETTEEVLRKLAGAVRKRRDLRKTK

SEQ ID NO: 1421 - DNA, 1122 bp, Ashbya gossypii
  CDS (1)..(1122)
atgttcattaaaaacgagtacattggtgacaaaagcaggctcgaggactggaggattaagggctacgacccactgactccgccgaatgtgctccagcacgagctacctgtcagtgcaaatgggcgcgcgataattgtacgggcacgcgagggggtggttcaagtgctttccggcagggatgaccggcttctggttgtggttgggccctgctccatccacgaccccgaggccgctctggaatacgcgcagaggcttagcgaggtggcctcgcggctgcgcggggagctgctggttattatgcgtgcgtatctggaaaaaccgcggaccacggtggggtggaaggggctcatcaacgaccccgacatcgataattcgttccaaataaacaagggattgcgtatctcgcgggagatgtacacgcagctggtggagcacattccaattgcgggcgaaatgctagacaccatatcgccgcagttcttaagcgactgcttctccttgggcgccattggcgcccggacgacagaatcgcagctgcaccgtgagctggcttctggactatcgttcccgatcggattcaagaacgggacagatggctgcttacaggttgctattgacgctatgcgtgccgctgctcactctcattactttctttcggttaccaagcctggagtgactgcgattgttgggactgaaggtaacgaggacaccttcatcattctacgcggtggtaaagatggcacaaactatgacgctgccagtgtacaacaggctaagcaggacttggtcaatgcgaagctagttgacagcgctggggtccagcggaggattatgattgactgctcgcatggaaattccaacaaggattaccgcaaccagccgaaagtcgcccaagatatctatgagcagctgagtaaaggtgagaatgccatttgtggggtgatgattgaatccaatcttgtagaggggcggcaggatatccccgaggggaacggtcgtgtgggcctaaagtatggttgttcgatcaccgacgcgtgcataggctgggatcaaacagtagaagtattagagctgcttgcaaagggcgtcataaacaagagagctgtaatgtcgacaaattaa

SEQ ID NO: 1422 - protein, 373 aa, Ashbya gossypii
MFIKNEYIGDKSRLEDWRIKGYDPLTPPNVLQHELPVSANGRAIIVRAREGVVQVLSGRDDRLLVVVGPCSIHDPEAALEYAQRLSEVASRLRGELLVIMRAYLEKPRTTVGWKGLINDPDIDNSFQINKGLRISREMYTQLVEHIPIAGEMLDTISPQFLSDCFSLGAIGARTTESQLHRELASGLSFPIGFKNGTDGCLQVAIDAMRAAAHSHYFLSVTKPGVTAIVGTEGNEDTFIILRGGKDGTNYDAASVQQAKQDLVNAKLVDSAGVQRRIMIDCSHGNSNKDYRNQPKVAQDIYEQLSKGENAICGVMIESNLVEGRQDIPEGNGRVGLKYGCSITDACIGWDQTVEVLELLAKGVINKRAVMSTN

SEQ ID NO: 1423 - DNA, 1098 bp, Amycolatopsis balhimycina
  CDS (1)..(1098)
atggccgcgatgacccacaccgtcgccacgaccgacctcgacaaccagcgcatcgagcggatcgtccccctggtcacccccgccctgctgcatcacgaactgccgctcagcgccaccgcggccgagacggtgcgaaagggccgcgagagcgtcgtccgcgtcctcgacggcacggacgaccggctgctcgtgatcaccgggccgtgctccatccacgaccccgccgcggcgctcgactacgccggccacctcgccgccatcgccggcgaggtcgccggcgacctgctcgtcgtcatgcgcgtgtacttcgagaaaccccggacgatcggcggctggaaggggctcatcaacgacccccacctcgacggcaccggcgacgtcaaccacgggctgcgcacggcccggcacctcctgctggagctcgccgaacgcggcctgcccgccgcgtgcgaatggctggacaccaccattcccgcgtacttcgcggacacggtctcgtggggcgccatcggcgcccgcaccgtggaaagccagaaccaccgcatgctcgccagcggcctgtccatgcccgtcggcttcaagaaccgccgcgacggcgacatcaccgtcgccatcgacgcgatccgggccgccgcggtccgccacgtggtccccggcgtcgaccccggcgggttgcccgccatcctgcacacggcgggcaacccggactgccacgtcgtcctgcgcggtggtgacggcgcgcccaaccacgactccgcgtccgtccacaagacactgaccgcgctggaggccgcgggcctgcccggccgggtggtgatcgacgccagccacgacaacagcggcaaggaccaccaccgccagcccctcgtcgcggccgagatcgcgggccaggtcgagaacgggcggaacggcatcgtcggggtgatgctcgagtccaacctccgcgccggccgccaggacctccagccgggccgtccgccggcatacggccagtccatcaccgacgcctgcatcgacgtccccaccacccggacggtcctccacggcctcgccgcggcggccgcggcccggcgaaagctcggcaagcaagcaagctga

SEQ ID NO: 1424 - protein, 365 aa, Amycolatopsis balhimycina
MAAMTHTVATTDLDNQRIERIVPLVTPALLHHELPLSATAAETVRKGRESVVRVLDGTDDRLLVITGPCSIHDPAAALDYAGHLAAIAGEVAGDLLVVMRVYFEKPRTIGGWKGLINDPHLDGTGDVNHGLRTARHLLLELAERGLPAACEWLDTTIPAYFADTVSWGAIGARTVESQNHRMLASGLSMPVGFKNRRDGDITVAIDAIRAAAVRHVVPGVDPGGLPAILHTAGNPDCHVVLRGGDGAPNHDSASVHKTLTALEAAGLPGRVVIDASHDNSGKDHHRQPLVAAEIAGQVENGRNGIVGVMLESNLRAGRQDLQPGRPPAYGQSITDACIDVPTTRTVLHGLAAAAAARRKLGKQAS

SEQ ID NO: 1425 - DNA, 1071 bp, Vibrio vulnificus
  CDS (1)..(1071)
atgcctacgctcagcaaattgattcactccactccttgtggaacactcccttctgtggaagagatcattcaacacgcctcactggacgaagagagcgaagcgtttatccgacaacgtcgccaagacatcactcgaattctaaatggccaagaccctcgattactggtgatcatcggcccatgttcaattcacgacccgcaagcaggcctagaatatgcgcagaaactggccaacattcagcatcagcatgaaaagcaacttctgattgtgatgcgaacttactttgaaaaaccacgcacacgcgcaggatggaaagggctgatcgtcgatcccgatctcgataacagccacgacattaataaaggtctgcggcttgctcgacatttcttacagcaagtcatcaagcttggcctcgcgacggcaaccgagtatttagacaccacgacttacccctatatttctgacctcatttgttggggggccattggcgcgaggacaactgaatctcaaattcaccgtcaaatggcctcggcgcttccctgccctattggtttcaaaaacgggaccgacggcaatgttgatattgctatcgacgcgatacacgcggcaaactcaccccatctcatctgtgtgccaggatttggggcacgtactctcacagccatcagtcatggtaaccccaatggccatatcattttgcgaggtggcaaaacaccaaactacaccaccgagcatgtttgccaaatcagccaacaactggaagccaacgatcttaacccgcgcctgatcattgattgcagccatggcaatagcctgaaagtggcaaagaaccaactcgatgtggcgagaaacatcgcctgtcagttgatcgaaggagaaaaatgcattgcaggcgtgatggcggagagcttcttggtagcaggcgcgcaaaagatcaccgatcgtccgttgatcaaaggcatgtcgattactgatgaatgtttggggtgggaagagacagaaagtattctcaatatttttgcggaagcggtgaatatcgtgatgacggagcgcttttccaccgttgcctaa

SEQ ID NO: 1426 - protein, 356 aa, Vibrio vulnificus
MPTLSKLIHSTPCGTLPSVEEIIQHASLDEESEAFIRQRRQDITRILNGQDPRLLVIIGPCSIHDPQAGLEYAQKLANIQHQHEKQLLIVMRTYFEKPRTRAGWKGLIVDPDLDNSHDINKGLRLARHFLQQVIKLGLATATEYLDTTTYPYISDLICWGAIGARTTESQIHRQMASALPCPIGFKNGTDGNVDIAIDAIHAANSPHLICVPGFGARTLTAISHGNPNGHIILRGGKTPNYTTEHVCQISQQLEANDLNPRLIIDCSHGNSLKVAKNQLDVARNIACQLIEGEKCIAGVMAESFLVAGAQKITDRPLIKGMSITDECLGWEETESILNIFAEAVNIVMTERFSTVA

SEQ ID NO: 1427 - DNA, 1047 bp, Photorhabdus luminescens
  CDS (1)..(1047)
atgtacaaaacagatggtttaaggactcaccgtgtcgatagtttagtcacacctcaaactcttgcaattcaatttcctgtatccgaaaaaatcgtcaataatgtgacagcgtcacggaaacgtattgccgatattctcagcgggaatgatccacggcttatggtaatcatcggtccttgttctattcatgatattgatgctgctttagattatgctcagcgactgaacaggttacgtgaaaaataccagcacagactggaaattattatgcgcacctattttgagaaaccacgcacagtggtgggctggaaaggtttaatttcagacccctatctcgacggttcttgccaggtaaatcggggtattactttggcccggaaattattggttgatgtcaatgagttgggtttacccacagcaaccgaatttctggatatggtgaccggccaatatattgccgatctgatcagttggggcgcgatcggagccagaacaacagaaagccagattcaccgagaaatggcatctgccctctcctgtccagttggctttaaaaatggaacggatggcaacatccgtatcgccatagatgcaatccgcgcagccggggtctgtcacacattcctctcgccggataagcgcggtcagatgaccatctatcaaaccgaaggcaacccatacggccacattattatgcgtggaggcaaacagcctaattacagtgccaaagatattgctacagcttgtactcaactacgtgaatttaatttaccagaacatttagttatcgatttcagtcatggtaattgtcaaaaaattcataaacgccaactgactatagcaaaagaggtgggtcaccagattcaagagggttctaccgctattgtcggtgtaatggttgaaagttttctggttgaaggcacccagcaagtcattcagggacaaccgctaaattacggtcaatcgatcaccgatccttgtctaaactggcaagatacagaacagcttattgacattctcgccgaagcagtaagttaccgtttctga

SEQ ID NO: 1428 - protein, 348 aa, Photorhabdus luminescens
MYKTDGLRTHRVDSLVTPQTLAIQFPVSEKIVNNVTASRKRIADILSGNDPRLMVIIGPCSIHDIDAALDYAQRLNRLREKYQHRLEIIMRTYFEKPRTVVGWKGLISDPYLDGSCQVNRGITLARKLLVDVNELGLPTATEFLDMVTGQYIADLISWGAIGARTTESQIHREMASALSCPVGFKNGTDGNIRIAIDAIRAAGVCHTFLSPDKRGQMTIYQTEGNPYGHIIMRGGKQPNYSAKDIATACTQLREFNLPEHLVIDFSHGNCQKIHKRQLTIAKEVGHQIQEGSTAIVGVMVESFLVEGTQQVIQGQPLNYGQSITDPCLNWQDTEQLIDILAEAVSYRF

SEQ ID NO: 1429 - DNA, 1053 bp, Photorhabdus luminescens
  CDS (1)..(1053)
atgaattaccagaatgacgatataagaattaaagagataaaagaattattacctcctgtggcactacttgaaaaatttccagcaactgaaaaggctgcattgacagtatgtaaggcgcgtaaaacgattcatcaaattctgacgggtgaagatgagcgtctgttggtggtgattgggccatgttctattcatgatcctaaagcagcaatggaatatgccgggcggttgaatgaattgcgtgaagagctgaaagaggatctggaagttgtcatgcgagtttattttgaaaaaccgcgcacaactattggctggaaagggttaattaatgaccctcatatgaatcacagttttgatattaatgatggtttgcgtttagctcgtcagttgttacgggatattaatgatatggggctaccggctgcgggtgaatatctggatatgatttctccacagtatttagccgatttgatgagttggggagcaattggcgctcgtacaacggaatctcaggtccatcgtgagttggcttctggtctttcctgtccggttggttttaaaaatggtactgatggtgcgataaaagttgccattgatgcgattaatgcagcgggttcccctcacagtttcctttctgtcactaagtggggacattctgcgattgtaaataccagcggaaacaacgattgtcatattatcctgcgtggcggtaaagagccgaattacagttctgaacatgttgctgtcgtgaagcaaaacttggaaaaagcaggtttaccggcaagaattatgattgatttcagtcatgccaatagttctaagcaatttaaaaagcagatggatgtgtgttcagatgtgagccggcagcttattgctggggagaaagcgattattggtgtcatggtagaaagtcatttggaagagggaaatcagaacccggatagcggtctgccattggtatatggcaaaagtattactgatgcttgcattggttgggctgacactgaaattttgttacgtcaattgtcgtcggcaataaaagcgcgtcgtggctga

SEQ ID NO: 1430 - protein, 350 aa, Photorhabdus luminescens
MNYQNDDIRIKEIKELLPPVALLEKFPATEKAALTVCKARKTIHQILTGEDERLLVVIGPCSIHDPKAAMEYAGRLNELREELKEDLEVVMRVYFEKPRTTIGWKGLINDPHMNHSFDINDGLRLARQLLRDINDMGLPAAGEYLDMISPQYLADLMSWGAIGARTTESQVHRELASGLSCPVGFKNGTDGAIKVAIDAINAAGSPHSFLSVTKWGHSAIVNTSGNNDCHIILRGGKEPNYSSEHVAVVKQNLEKAGLPARIMIDFSHANSSKQFKKQMDVCSDVSRQLIAGEKAIIGVMVESHLEEGNQNPDSGLPLVYGKSITDACIGWADTEILLRQLSSAIKARRG

SEQ ID NO: 1431 - DNA, 1095 bp, Photorhabdus luminescens
  CDS (1)..(1095)
atgttcatgcaaagagatgcacttaataacgttcacatcagtggtgagcaaattcttatcaccccaaaagaattaaagcaacaatacccactgagtgatgatgatctgcatgttattgcaaatgcacgtaaaacaattgcggatattattcagcgccgtgatccccgtttgctggtagtgtgtggtccttgctctattcatgacgtggatgcggcgctggattatgctcaccgtttggccgctctttctgctgaattgagtgatagcttgtacattgtcatgcgtgtctattttgaaaagcctcgaacaacagtgggttggaaaggtcttattaatgatccatacatggatggttcatttgatgtggaagctggcctgcatattgcccgccgcttactacttagtttagtgaaaatgggattgcctcttgcaacagaagctttagatccgaatagcccacaatatttgggggatttattcagttggtctgcaattggtgcgagaaccacagaatcccagacacaccgggaaatggcttcaggtttatctatgccggttggtttcaaaaatgggactgacggtagcttgaacacggcaattaatgcgatgtgtgcagccgctatgccacatcgttttgtgggaataaaccagtcggggcaggtgtgtttattacaaacgcaaggaaacccgaatggacatattatcttgcgtggtggtaagacccctaattacagtgttcaacatgtaatggaatgtgaacagcaaatgatgcaggctggattattgccatccttgatgattgattgtagtcatggtaactctaataaggattttcgtcgccaaagtttggttgtagattctgttgcggatcagatcatttcaggtaatcaatctattactggcattatgttggagagccatattaatgaaggtaaccaatcttctgagcaaccgcgtagtgaaatgaaatatggtgtatcagtcactgacgcgtgtattagttggcagacgacagaagcagttctaagaaaattacatcagcaaattagcatgcaattgtcgcaaagaatggcagtattgaaaaaagcgggataa

SEQ ID NO: 1432 - protein, 364 aa, Photorhabdus luminescens
MFMQRDALNNVHISGEQILITPKELKQQYPLSDDDLHVIANARKTIADIIQRRDPRLLVVCGPCSIHDVDAALDYAHRLAALSAELSDSLYIVMRVYFEKPRTTVGWKGLINDPYMDGSFDVEAGLHIARRLLLSLVKMGLPLATEALDPNSPQYLGDLFSWSAIGARTTESQTHREMASGLSMPVGFKNGTDGSLNTAINAMCAAAMPHRFVGINQSGQVCLLQTQGNPNGHIILRGGKTPNYSVQHVMECEQQMMQAGLLPSLMIDCSHGNSNKDFRRQSLVVDSVADQIISGNQSITGIMLESHINEGNQSSEQPRSEMKYGVSVTDACISWQTTEAVLRKLHQQISMQLSQRMAVLKKAG

SEQ ID NO: 1433 - DNA, 1119 bp, Gloeobacter violaceus
  CDS (1)..(1119)
atgcccggcggctctcgcgatgtcggcgagttcgcctttgagccgctcgacgatttgcggatcgtctcggtgagtgagattcctcctccagtgcaactgcgcgagcaattgcctctggatgcggctgcccagaatacagtgcgccggggccgctcgcagattcgcgctgtattgggcggctttgattcacgcctgttggtggtggtcggcccctgttcggtgcacgacgccgatgcggcgcgcgagtacgcccagaggctggccgagtgcgcccgccgctatgcggacgaactgctcatcgccatgcgcgtttacttcgagaaaccgcgcaccacggtcggctggaaaggactcatcaacgatcccggcctcgacggcagctgtcgtatcggtgagggactgaccaccgcccgcgcgttgctgctcgacattgcccggctcggactgccggcggccaccgaatttctcgacccgatcacccccgagtacatcgtcgatctgatcagttggggggcgattggggcgcgcacggtcgaaagtcaggtgcacaggcaagtggcttcggcgctttcctgtccggtgggttttaaaaacggctcctccggcgacatcgccgttgccgtcgaagcggtgctctcggcgcgcaacgcccatcagttcctttcgcacacccgcgagggtcgcacggctatcgtgctgaccagcggcaatcccgattgccatgtcgtgttgcgcggcggcaaaaacggccccaaccactcggctgaacatctcgcgcaggcagggcggttgttgcgcgaggcgggcttgccggagcgggtgatggtcgactgcagccacgccaacagctccaaagatcaccgccgccagggggaagtctgcaaacagttggcggcacggattgccgagggggatatgcggatgatgggcctgatgatcgaaagtcacctagtcgaagggcggcaggagttaggcgacggctgcaacttgcgccacggtcagagcatcaccgatgcgtgcatcggctgggaacagacagagcaattgcttaccggcctacacgaggcggccggcgctagacggtgtaagccggccgtccgcgccgagttgctggtttga

SEQ ID NO: 1434 - protein, 372 aa, Gloeobacter violaceus
MPGGSRDVGEFAFEPLDDLRIVSVSEIPPPVQLREQLPLDAAAQNTVRRGRSQIRAVLGGFDSRLLVVVGPCSVHDADAAREYAQRLAECARRYADELLIAMRVYFEKPRTTVGWKGLINDPGLDGSCRIGEGLTTARALLLDIARLGLPAATEFLDPITPEYIVDLISWGAIGARTVESQVHRQVASALSCPVGFKNGSSGDIAVAVEAVLSARNAHQFLSHTREGRTAIVLTSGNPDCHVVLRGGKNGPNHSAEHLAQAGRLLREAGLPERVMVDCSHANSSKDHRRQGEVCKQLAARIAEGDMRMMGLMIESHLVEGRQELGDGCNLRHGQSITDACIGWEQTEQLLTGLHEAAGARRCKPAVRAELLV

SEQ ID NO: 1435 - DNA, 1107 bp, Chromobacterium violaceum
  CDS (1)..(1107)
atgacaacgcttgccaggccggaacacggcctactcgcgcccgaacacggccacgcgtcgccgccgtccagccaggcggactaccgcgcgatggccagccccgccgaactattgcgcagcctgccggccggcccgcgcgccagcgcctcggtccattccggccgcgaggcggtgaaacgcgtactgagcggagcagatccgcgctggctggtggtggtgggcccctgctccatccacgacccgcgcgccggcctggactacgccgcccggctggcggacctcgcctccgagctggacgacacgctgctgatcgtgatgcgcgcctacttcgaaaagccgcgcaccagcgtgggctggaagggcctgatcaacgatccctacatggacgacagctattgcgtggacgagggcatgcacatcgcccgccgcttccttttggccgccgccgaactgggcctgccgctggccggcgaggcgctggacccgatgtcgccgctgtatctggccgacctctatagctggatggcgatcggcgcgcgcaccaccgaatcgcaaatccaccgcgagctggcctcggcgctggacagcgccgtcggattcaagaacagcaccgacggctcgctggacgcggcgctcaacgccatcgtctccgccagcgcgccgcacgcctacctcggcatgggcaaggacggccgggtggcggtggtgaacagccgcggcaacccgcactgccacctggtgctgcgcggcggcggcggccggcccaattacgactcggtgagcatcgcgctggccgagcaggcaatgaagaagcacgacattccgcccgccatcatggtggactgcgcgcacgccaactcatggaagcagcacacgctgcagccgcgcgtgctggccgacgcggtgtcccagatccgccacggcaaccgcagcatccgcgccttcatgctggagagcttcatcgaagccggcaaccagtccatcccggccgatctgtcgcagctgcgctacggctgctcggtgaccgatccctgcgtcgactggcacaccaccgccgacatcctgcgcgacgcgcgcgccaagctgcggccgctgctggaaagctga

SEQ ID NO: 1436 - protein, 368 aa, Chromobacterium violaceum
MTTLARPEHGLLAPEHGHASPPSSQADYRAMASPAELLRSLPAGPRASASVHSGREAVKRVLSGADPRWLVVVGPCSIHDPRAGLDYAARLADLASELDDTLLIVMRAYFEKPRTSVGWKGLINDPYMDDSYCVDEGMHIARRFLLAAAELGLPLAGEALDPMSPLYLADLYSWMAIGARTTESQIHRELASALDSAVGFKNSTDGSLDAALNAIVSASAPHAYLGMGKDGRVAVVNSRGNPHCHLVLRGGGGRPNYDSVSIALAEQAMKKHDIPPAIMVDCAHANSWKQHTLQPRVLADAVSQIRHGNRSIRAFMLESFIEAGNQSIPADLSQLRYGCSVTDPCVDWHTTADILRDARAKLRPLLES

SEQ ID NO: 1437 - DNA, 1059 bp, Chromobacterium violaceum
  CDS (1)..(1059)
atgcaacgccagaccgacgacgtcagaatccgcgaaatcaaggaactgcttcccccgatcgcccacctttacgagctgccgatcagcgagtcggcctccgagctgatctacaacacccgtcgcgaaatctcggccttgctgcgcggcgaggacgaccgcctgctggtggtgatcggcccctgttccatccacgacgtcgacgccgcggtcgagtacgcgcagaagctggcgccgctgcgccaggcgctggcggatgagctggtggtggtgatgcgggtgtatttcgagaagccgcgcaccacggtcggctggaagggcctgatcaacgacccgcacctgaacgagtcctacgacatcaacgccggcctgcgcatcgcgcgccgcctgctgctgacgctgaacaacctgggcatgccggccgccaccgaattcctcgacatgatcacgccgcagtacttcgccgacctgatcagctggggcgcgatcggcgcccgcaccaccgagagccaggtgcaccgcgagctggcctccggcctgtcctgcccggtcggtttcaagaacggcaccgacggcaacctgaagatcgccgtcgacgccatccgctcgtccagcgtgccgcaccatttcctgtcggtgaccaagaccggccattccgccatcgtttccaccggcggcaacccggactgccacgtgatcctgcgcggcggcaaggaacccaattactcggccgagcatgtgcgcgccgccgccgccgagctgaccgcggtcggcctgccgcacaagctgatggtggacttcagccacgccaacagccgcaaggactaccgccgccagatggaggtcagcgccgacgtggccggccagatcgccggcggcgaccgcaacatcttcggcgtgatggtggaaagccacctggtggaggggcgccaggatcagaagcccggctgcgagctcaagtacggccagagcatcaccgacgcctgcctgggctgggacgacaccgagacgctgctgcgccagctggccgacgccgtcaaggcgcgccgcgccgccgagtaa

SEQ ID NO: 1438 - protein, 352 aa, Chromobacterium violaceum
MQRQTDDVRIREIKELLPPIAHLYELPISESASELIYNTRREISALLRGEDDRLLVVIGPCSIHDVDAAVEYAQKLAPLRQALADELVVVMRVYFEKPRTTVGWKGLINDPHLNESYDINAGLRIARRLLLTLNNLGMPAATEFLDMITPQYFADLISWGAIGARTTESQVHRELASGLSCPVGFKNGTDGNLKIAVDAIRSSSVPHHFLSVTKTGHSAIVSTGGNPDCHVILRGGKEPNYSAEHVRAAAAELTAVGLPHKLMVDFSHANSRKDYRRQMEVSADVAGQIAGGDRNIFGVMVESHLVEGRQDQKPGCELKYGQSITDACLGWDDTETLLRQLADAVKARRAAE

SEQ ID NO: 1439 - DNA, 1140 bp, Neurospora crassa
  CDS (1)..(1140)
atggtcggccctgatatggtggcccttcgggctgatgacacaagagtcgagggacaggatcccctcatccctcctgctcttctcatttccgagattcccatgacggatgccgctctcgagactgttgtcaagggcaggaaggaggccgtaggtgtcatcatgggcaaggatgaccgtctccttgtcgttgttggcccctgctcccttcacgatcctgctacagctctcgagtactgcagcaggctcaaggctctttccgagaagctcaaggacgacctcgttatcgtgatgagagcctacctcgagaagcctcgcacgaccgtcggctggaagggtctcatcaacgatcccgatatcgactcttctttcaagatcaacaagggtcttcgtatctccagacagcttttctgcgatttgacctctgccggtatgcctattgcttcggagatgttggacaccatctcccctcagttccttgccgacttcatctctgtcggtgctatcggcgcccgtactaccgaaagccagcttcaccgcgagcttgcctctggtctctctttccctgtcggtttcaagaacggaaccgacggaaacctcggtgttgccattgatgccattggcgctgccgcggctaagcaccacttcatgggcgttaccaagcagggcttggccgctatcacccgcaccaagggcaacgagcacggtttcgttatcctccgtggtggcaccaagggccccaactacgacaaggagaacgtccaggctgcgaaggagactctcatcaagaagggccagaagctcgccatcatggtcgactgctctcacggcaactccaacaaggaccaccgcaaccagcccaaggttgccaaggtcgttgccgaccagattcgcgagggcgagaaagccatcattggtgtcatgatcgagtccaacatcaacgagggcaaccagaaggttcctgctgagggtccctcggcgctcaagaagggcgtcagcatcaccgatgcctgcattgactgggagtccactgtctcgaccctcgaggagctcgctgaggcggttcgcgagcgtcgtgaggtgaacggtggcctcgccagcggtgtggctacccccaagcccaaccctctcgaggaggactag

SEQ ID NO: 1440 - protein, 379 aa, Neurospora crassa
MVGPDMVALRADDTRVEGQDPLIPPALLISEIPMTDAALETVVKGRKEAVGVIMGKDDRLLVVVGPCSLHDPATALEYCSRLKALSEKLKDDLVIVMRAYLEKPRTTVGWKGLINDPDIDSSFKINKGLRISRQLFCDLTSAGMPIASEMLDTISPQFLADFISVGAIGARTTESQLHRELASGLSFPVGFKNGTDGNLGVAIDAIGAAAAKHHFMGVTKQGLAAITRTKGNEHGFVILRGGTKGPNYDKENVQAAKETLIKKGQKLAIMVDCSHGNSNKDHRNQPKVAKVVADQIREGEKAIIGVMIESNINEGNQKVPAEGPSALKKGVSITDACIDWESTVSTLEELAEAVRERREVNGGLASGVATPKPNPLEED

SEQ ID NO: 1441 - DNA, 1092 bp, Neurospora crassa
  CDS (1)..(1092)
atgtcgcaacatttctacattgagaaccgcaacgtcggcaatcaggccgaaagcgaggattggcgcattcgcggctacaacccgctgacccctcccgacctgctccaacatgagatcccccagaccgctgaatcgaaacaaaccgtcatcaatggccgcaaggaggtggtcgccgttgtcaatggcaccgacgagaaggaaaggttactagtagtcatcggtccctgctccatccacgatcccaatgccgccctcgaatactgcgatctactactcaaggagaaggagaagcacaaggatgagctgttgattgtcatgcgatcctacctcgaaaagccccggacgaccgttggctggaagggcctgatcaacgaccccgatatcgacaacagcttccagatcaacaagggcttgcgcctgagcagacagttgttcgttgacctcacctccaagggcatgcccctcgccagcgagatgttggataccatcagcccgcaattccttgccgatctgttgagtgtcggcgctgtcggtgctcgcaccaccgaaagccagctccaccgcgagttggccagtggcctcagtttccccgtaggcttcaagaacggcactgacggtaccctgggtgttgccattgatgctattggcgctgtcagacatccccatcactttttgtccgtcaccaagcccggtgtcgttgccatcgtcggaactgttggcaacgaggactgcttcgtcatcctccgtggcggtaccaagggcaccaactacgatgcgaagagcatcgctgaggccaaggctgcgctggagaagagcggcttgcgccagcgcctgatgattgactgcagccacggcaactcgaataagaaccacaagaaccagcccaaggtcgctgccgaaattgcgcaacaacttgagaacggcgaaactggtaaccagaaggtgcccgaggaaggcaagtgcggcctcaagtacggtgtcagtatcactgatgcttgtattggctgggaggacactgtcgccactctcgacacgcttgcgcaggccgtcaaaaagaggagagaagtcctgagcaagaacgccgctgcctaa

SEQ ID NO: 1442 - protein, 363 aa, Neurospora crassa
MSQHFYIENRNVGNQAESEDWRIRGYNPLTPPDLLQHEIPQTAESKQTVINGRKEVVAVVNGTDEKERLLVVIGPCSIHDPNAALEYCDLLLKEKEKHKDELLIVMRSYLEKPRTTVGWKGLINDPDIDNSFQINKGLRLSRQLFVDLTSKGMPLASEMLDTISPQFLADLLSVGAVGARTTESQLHRELASGLSFPVGFKNGTDGTLGVAIDAIGAVRHPHHFLSVTKPGVVAIVGTVGNEDCFVILRGGTKGTNYDAKSIAEAKAALEKSGLRQRLMIDCSHGNSNKNHKNQPKVAAEIAQQLENGETGNQKVPEEGKCGLKYGVSITDACIGWEDTVATLDTLAQAVKKRREVLSKNAAA

SEQ ID NO: 1443 - DNA, 1068 bp, Synechococcus sp
  CDS (1)..(1068)
atggccaccacctcggatttgcatgtggtggagacccgtccgctggtggctccggctctgctgcacggagatctgccgattgatgccgccgccacggagacggtcgcatcggcccgtcgtcggatccaggccattttgcgcggcgatgatcagcgtcagctggtggtggtgggcccctgctcggtccacgatgtgaaggcggcgcgggagtacgccgaacggctggccccgatccgggaacggctgaaggatcagctggaggtggtgatgcgggtttatttcgaaaagccgcgtacgacggttggttggaaaggcctcatcaatgacccccacctcgatggctcgtacgacatcaacacaggcctgaggcgggctcgtggcttactgctggacctgtccagggagggcatgccggcagcgacggaactgctggatccggtggttccccagtacatcgctgatctgatcagctggactgcgatcggagcccgcaccacggaaagccagacccatcgggagatggcttcaggcttgtcgatgccgatcggctacaagaacagtaccgatggcagcgcctgcatcgccatcaatgcgatgcaggcggcatcgaaacctcatcattttctgggaatcaaccacgacggccatgcctcgatcgtgagcacgactggcaacccggatggtcatctagtgctgcgtggcggtcatcagggcagcaactaccacctggaggccgttcaggctgctgcagcggaactgagcaaggcgggcctgaaggatcgtctgatggtggactgcagccatgccaactcgaacaaggatttccgccgccaggccgatgtactcgccacggtggctgatcagttgaaggctggttccggccatgtgatgggcgtgatgatcgaaagtcatctggtggaaggcaatcagaaactgaccgctggtctctcccagctcacctatggccagagcattacggatgcctgcatcagcctggagaccacggatgcgctgctgtcccagctggctgcagccgtggccgatcgcagcagcgctttgacggcataa

SEQ ID NO: 1444 - protein, 355 aa, Synechococcus sp
MATTSDLHVVETRPLVAPALLHGDLPIDAAATETVASARRRIQAILRGDDQRQLVVVGPCSVHDVKAAREYAERLAPIRERLKDQLEVVMRVYFEKPRTTVGWKGLINDPHLDGSYDINTGLRRARGLLLDLSREGMPAATELLDPVVPQYIADLISWTAIGARTTESQTHREMASGLSMPIGYKNSTDGSACIAINAMQAASKPHHFLGINHDGHASIVSTTGNPDGHLVLRGGHQGSNYHLEAVQAAAAELSKAGLKDRLMVDCSHANSNKDFRRQADVLATVADQLKAGSGHVMGVMIESHLVEGNQKLTAGLSQLTYGQSITDACISLETTDALLSQLAAAVADRSSALTA

SEQ ID NO: 1445 - DNA, 1053 bp, Rhodopirellula baltica
  CDS (1)..(1053)
atgatccgcaccgatgaccttcgtatcggcgccatcaaaaatctgatgtcccccagtgaattgctatccgaaattccggccagcgatgcgatttcacagacggtcgctgacggtcgaaccgcgatccaaaacgtgcttcagcagaaggacgaccgtttgctcgtcgtcgtcgggccgtgttcgattcacgatccggattccgctcgtcagtacgcggagaagttggcggtcgagcaaaaaaagcacgccgatgagctgttgatcgtcatgcgggtttacttcgaaaaacctcgaacaacggttggctggaagggtctgatcaacgaccccaaacttgacgacagcttcgaaatcaatcacggattgcgaaccgctcggcgtttgctcagcgacatcaacgcgatgggactgccgaccggaaccgagtttttggatttgatcagcccgcagtatgtggctgacttggtcgggtggggtgccatcggagcacgcacgaccgaaagccaaggtcaccgcgaattggcgtcggggctgtcttgcccggtcggcttcaaaaatggaaccagcggcaacgttcagatcgctgtcgatgcgatttgctccgcacgtcgaccacaccacttcctatccgtcacgaaggaaggaacctcggcgatcttcgcaacaaccggaaacccggactgccacatcattctgcgtggcggaaagcacaccaactacgatgccgccagcatcgatatggcatcgggattgctcgagaaagcggacctgccagcacgaatcatgatcgattgcagccacgcgaacagccgcaagattttcaaacgtcaatcgtacgtttgccgggacatctgtgcccaagtatccgatggcgaccaacgcatcatgggcgtgatgatcgaaagcaatctgctcgagggcaaccaaaaactcagcgattcgccgcttgttcagggtctcagcgtcaccgatgcgtgtatcggttgggaaaccaccgagcaactcttcagcgacctgggaaaatccgtcgccgcacgccgtaaagtcggctga

SEQ ID NO: 1446 - protein, 350 aa, Rhodopirellula baltica
MIRTDDLRIGAIKNLMSPSELLSEIPASDAISQTVADGRTAIQNVLQQKDDRLLVVVGPCSIHDPDSARQYAEKLAVEQKKHADELLIVMRVYFEKPRTTVGWKGLINDPKLDDSFEINHGLRTARRLLSDINAMGLPTGTEFLDLISPQYVADLVGWGAIGARTTESQGHRELASGLSCPVGFKNGTSGNVQIAVDAICSARRPHHFLSVTKEGTSAIFATTGNPDCHIILRGGKHTNYDAASIDMASGLLEKADLPARIMIDCSHANSRKIFKRQSYVCRDICAQVSDGDQRIMGVMIESNLLEGNQKLSDSPLVQGLSVTDACIGWETTEQLFSDLGKSVAARRKVG

SEQ ID NO: 1447 - DNA, 1068 bp, Prochlorococcus marinus subsp
  CDS (1)..(1068)
atgacgacttcatccaataatcaatctttagaaaaaacatctgatttgcatgttgttgaaacacgtccattaatacctccaagcaaacttcataatgatatacctttagattatacctctgcagaaactgtctctaatactagaagatcaatacaaaatattttgcacaataatgatcctcggattctagtcatagtgggaccatgttcaattcatgatattgaggctgctaaagattattcagaatatattcaggaatttagaaaaatttataaagataaattagaaattgtaatgcgagtatatttcgaaaaacccagaactacaattggttggaaaggattaataaatgaccctcatttagatggttcatatgacattaatacaggtttacgaagagcgagaaatttactatcttatttggcaacgcgtgggataccctctgctactgagttattagatccaattgttcctcaatatattgctgatttaatcagttggacagcaattggtgcaaggactaccgaaagtcaaactcatagagaaatggcttcaggattatccatgcctattggttttaaaaatggtactgatggttcttttagtactgctattaatgcgatgcagtcggcttcaaaatctcatcatttcttaggtgttaatgatcaaggttatgcttctattgtaaatacaaccggcaatccagatggacatatagttttaaggggaggttctaaaggagttaatttcgaaaatcaacatgtaaaaagtatttcttccgaattaaaagaaggtaatcttccttacaaagttatgattgattgtagccatggaaattctaataaagattacacaaagcaatctgatgtccttaaaaacgtagcaaatcagattaagaatggtgaaaaaaatattttaggagtaatgcttgaaagtcatctgaaggagggtaatcaaaaactttcaaatatgaaagatcttgaatatggtacgagtattactgatgcttgcataaatatagaaacaacgaaaaatttgcttcagattctatatgattcaattttgtaa

SEQ ID NO: 1448 - protein, 355 aa, Prochlorococcus marinus subsp
MTTSSNNQSLEKTSDLHVVETRPLIPPSKLHNDIPLDYTSAETVSNTRRSIQNILHNNDPRILVIVGPCSIHDIEAAKDYSEYIQEFRKIYKDKLEIVMRVYFEKPRTTIGWKGLINDPHLDGSYDINTGLRRARNLLSYLATRGIPSATELLDPIVPQYIADLISWTAIGARTTESQTHREMASGLSMPIGFKNGTDGSFSTAINAMQSASKSHHFLGVNDQGYASIVNTTGNPDGHIVLRGGSKGVNFENQHVKSISSELKEGNLPYKVMIDCSHGNSNKDYTKQSDVLKNVANQIKNGEKNILGVMLESHLKEGNQKLSNMKDLEYGTSITDACINIETTKNLLQILYDSIL

SEQ ID NO: 1449 - DNA, 1083 bp, Prochlorococcus marinus
  CDS (1)..(1083)
atgaattctggcgaaatgaccaccacttccgacttgcatgtggtggatacgcggcccttggtgtcgccgctcttgcttcatcaggagctgccccttgatctagtggctctcaaaaccgttgcagatactcgtaagcgcatccaggcaattctgcgtggtgaggatccccgcttgctggtgattgttggtccctgctcggttcatgacattgcctctgcaagggactatgcccgtcagttggagccattgcgacagcgatatgccgcccagttggaggtggttttgcgggtctatttcgaaaaacctcgcaccacagttggctggaaaggtctcatcaatgatccccatctcgatggttcctatgacatcaacactggcttgaggcgtgcgcggtcgttgttgctcgaccttgctcgcgagggtatgccgacggccactgaattgctggatccggttgtgcctcaatacatcgctgatttgatcagttggacggcgattggagccagaaccactgagagtcagacccatcgggagatggcttctggattgtcaatgcccgtcggttacaaaaacggtaccgatggcagtgccaagattgcgatccatgcgatgcaggcagcatctagaccgcatcattttcttgggatcaatcggcagggtcaggcttcgattgtgcataccactggaaaccctgatggccatctcgtgttgcggggaggtaatggctgtaccaattaccatcccgaagcggtggaagaggttgcaaaagaattagtgaaggctggcttggttgatcggttgatggtggattgcagccatgacaattcgaagaaagattttcggcgacagtcagaggtgcttcaggctgttgctactcaggtacgccaaggatcaacccatctcatgggtgtgatgttggaaagtcatcttgtcgagggcaatcagaagttgcctgaagacctctctactcttgtctatggtcaaagcattacggatgcttgtatcgatatagagacaacggcaactctccttgaggatttggcggctgcagtggcttcagtgacgttgtcaccaataacttga

SEQ ID NO: 1450 - protein, 360 aa, Prochlorococcus marinus
MNSGEMTTTSDLHVVDTRPLVSPLLLHQELPLDLVALKTVADTRKRIQAILRGEDPRLLVIVGPCSVHDIASARDYARQLEPLRQRYAAQLEVVLRVYFEKPRTTVGWKGLINDPHLDGSYDINTGLRRARSLLLDLAREGMPTATELLDPVVPQYIADLISWTAIGARTTESQTHREMASGLSMPVGYKNGTDGSAKIAIHAMQAASRPHHFLGINRQGQASIVHTTGNPDGHLVLRGGNGCTNYHPEAVEEVAKELVKAGLVDRLMVDCSHDNSKKDFRRQSEVLQAVATQVRQGSTHLMGVMLESHLVEGNQKLPEDLSTLVYGQSITDACIDIETTATLLEDLAAAVASVTLSPIT

SEQ ID NO: 1451 - DNA, 1074 bp, Prochlorococcus marinus
  CDS (1)..(1074)
atgaccttttcaacgaattttcagatatctgataaaacttccgatctacacgttgttgagactaggccattagtccctccagcttcccttcacaaggatttgccattagatcatcactcttcaaccattgtttctaagacaagaaaaacaatacaagcaattctggcaggatcagattcacgattattggtaattgttggcccttgttcaattcatgatattgctgctgccaaagattatgcaaatcagctgcttccgctaagagaaaaattttctaagcaactcgaaattgtaatgagagtttattttgaaaaacctaggacaactactggttggaagggtctcattaatgatcctcatcttgatgggtcttatgacattaatactggtttaagaagagcgagatctttgcttctagatttagcaaatttaggtattccaacagcaactgagcttttagatcctgttgttcctcaatatatagctgatttaattagttggactgcaattggggcaagaacgactgagagtcaaactcatagagaaatggcttccggattatctatgccaataggatataagaatggaacagatgggactattgctattgctattaatgctatgaaagcagcttcaaagcctcatcattttctaggtattaatcatgaaggccatgcatctattattagtacgacaggcaaccctgatggtcatcttgttttgagagggggaagtagtggtactaattatcatctggaatcagtgcaaaaagttgctcaagaacttctacaatcaggctcaaaaagtaaagtgatggttgactgtagtcacggtaactcagataaggattttcgaaaacaaggtattgtcttgaaagaggttgctaagcaggttaaagaaggttcgtctaatgtcatgggagtgatgcttgagagccatttggttgaaggtaatcaaaaattaactaaggacttatcaacattgatttatggaaaaagtattacagatgcctgtatagatttgaagacgacagaaactttgtttgagcaacttgctgatgctgttactttttaa

SEQ ID NO: 1452 - protein, 357 aa, Prochlorococcus marinus
MTFSTNFQISDKTSDLHVVETRPLVPPASLHKDLPLDHHSSTIVSKTRKTIQAILAGSDSRLLVIVGPCSIHDIAAAKDYANQLLPLREKFSKQLEIVMRVYFEKPRTTTGWKGLINDPHLDGSYDINTGLRRARSLLLDLANLGIPTATELLDPVVPQYIADLISWTAIGARTTESQTHREMASGLSMPIGYKNGTDGTIAIAINAMKAASKPHHFLGINHEGHASIISTTGNPDGHLVLRGGSSGTNYHLESVQKVAQELLQSGSKSKVMVDCSHGNSDKDFRKQGIVLKEVAKQVKEGSSNVMGVMLESHLVEGNQKLTKDLSTLIYGKSITDACIDLKTTETLFEQLADAVTF

SEQ ID NO: 1453 - DNA, 1113 bp, Haemophilus ducreyi
  CDS (1)..(1113)
atgccttataaaaatgatgatcttcgtatcactaaaattgaacagctattacccccgatcgctttattagagcgttttccagccagtgatgttgctgagcatactgttgctagagcaagagaagctattcataaaattattcacggtgaagacgatcgtttattagttgttattgggccttgctcaattcatgatccagaatctgctctagattatgctaaacgaattaaagcattacgtgataatccacagattaatcaaaacttagagttagtaatgcgcgtttattttgaaaaaccacgaacaaccgttggttggaaagggttaattaatgacccctatctgaatgaaacttatgcattaaacgatggtttacgaattgcacgaaaagtactgtccgatattaatgatttaaccgtgcctgccgcgggtgagtttttagatatgatcattccacaatatgtagccgattttatgagttggggagccattggagcacggaccgctgaatcacaagttcatcgtgagttagcctcaggtttatcttgtgcggtaggtttcaaaaatgccactaatggcagtgttaaaaccgctttagatgcaataaaatctgctgaagtttcacatcacttcttatccgtgaccaaatttgctcattcagctgttatttctaccgcaggtaatgaggattgccacattattttgcgtggtggcgataatggcacaaattatgatattgcgtctgtaaaaaaagtgtgtgcagatattgagaaagcagggcggcgtcctcacgtaatgattgactttagtcatgctaatagccaaaaacaatttaaacgacaaatggaagtttgtactaatgtatgccaacagattgcaaatggttcatcattaatttctggtgtgatgatagaaagccatttagtcgaaggtcggcaagatcttgtcgaaggtggtttagataaattagtatatggtcaaagtgttacagatgcttgtattggttgggaagacagcgaaacagcactgtttgccttagctgaagcggtcgcattacgccgacaacggaccaacaataatgctaatgatttggttaatcatatagtaaaatag

SEQ ID NO: 1454 - protein, 370 aa, Haemophilus ducreyi
MPYKNDDLRITKIEQLLPPIALLERFPASDVAEHTVARAREAIHKIIHGEDDRLLVVIGPCSIHDPESALDYAKRIKALRDNPQINQNLELVMRVYFEKPRTTVGWKGLINDPYLNETYALNDGLRIARKVLSDINDLTVPAAGEFLDMIIPQYVADFMSWGAIGARTAESQVHRELASGLSCAVGFKNATNGSVKTALDAIKSAEVSHHFLSVTKFAHSAVISTAGNEDCHIILRGGDNGTNYDIASVKKVCADIEKAGRRPHVMIDFSHANSQKQFKRQMEVCTNVCQQIANGSSLISGVMIESHLVEGRQDLVEGGLDKLVYGQSVTDACIGWEDSETALFALAEAVALRRQRTNNNANDLVNHIVK

SEQ ID NO: 1455 - DNA, 1080 bp, Haemophilus ducreyi
  CDS (1)..(1080)
atggattctgtagcaaatcaagatagtttacataatgtaaatatctctactgaaaaagtattacttactccaaaacaactaaaaactgagtttccattacccgatcatttacgtaagcaaattgaaaaatcacgccaagaaattgccgcgattattcataaaaaagatccacgtaaacttattatcatcggaccttgttctattcacgatatctctgccgcattagagtatggccaaaaactaaaaaaattagccgaccaagtaagcgatcaactttatattgtaatgcgggtatattttgaaaaaccgcgcaccaccgtaggatggaagggcttaattaacgatccacaaatagatggcacttttaatgttgaagccggtttacgcattgcacgtaaattgtgcttagatttaactgaactaggcttaccattagccacagaagcactagatccaatgacaccacaatatttagcagatctttttagctggtcagcgattggagcaagaacgactgaatcacaaacacatcgtgaattagcttctggtttatctatggccgttggctttaaaaatggcactgatggcggcctagctgtggcgattaacgccatgcaatctgccgcacaaccgcatcgtttcattggtatcaatcaaaatggacaggtcaatttattaaataccaaagggaatcctgatggccacgtgattttacgtggcggtaaaaaacctaactttgaacaaaaatatgtaatggaatgtgaaactgcattacgtaaagcgggtttagaagaagcaataatgattgattgtagccacggtaattcaaataaagatcacacacgtcaacctatagttgcagaaaatgtactcacgcaattattggcaggtaaccgatcgatcatcggcttaatgattgaaagccatttaaatgcgggtaatcagccctctgaacaatcattccaagagatgaaatacggcatatccattacagatgcttgtattgattggcaaaccactgaacatatacttctcaacttcgccgcaaaattaagaaatcccccatcttcctttcagtaa

SEQ ID NO: 1456 - protein, 359 aa, Haemophilus ducreyi
MDSVANQDSLHNVNISTEKVLLTPKQLKTEFPLPDHLRKQIEKSRQEIAAIIHKKDPRKLIIIGPCSIHDISAALEYGQKLKKLADQVSDQLYIVMRVYFEKPRTTVGWKGLINDPQIDGTFNVEAGLRIARKLCLDLTELGLPLATEALDPMTPQYLADLFSWSAIGARTTESQTHRELASGLSMAVGFKNGTDGGLAVAINAMQSAAQPHRFIGINQNGQVNLLNTKGNPDGHVILRGGKKPNFEQKYVMECETALRKAGLEEAIMIDCSHGNSNKDHTRQPIVAENVLTQLLAGNRSIIGLMIESHLNAGNQPSEQSFQEMKYGISITDACIDWQTTEHILLNFAAKLRNPPSSFQ

SEQ ID NO: 1457 - DNA, 1086 bp, Candidatus Blochmannia floridanus
  CDS (1)..(1086)
atgcaaaagaataatttaggtaatataaatttttgtgatataagttctttgctttctcctaaacaattaaaatctcaatttcctttaacgtatgttgatcaactttttattgaagaaacacaaaatattattataaatattattcaaaaaaaagatcctcgtttgttgattatatgtggtccttgttctattcatgatgtgaacgctgcttttgattatgccaagaaattaaaatctttatcattagaattgcaagatcaattatatattgtaatgagagtatatttagaaaaacctcgtactacaattggatggaaaggattaattaatgatccttatatagatggttcttgtgatattcagtctggattaaaaattgctcgtcaattattattgcaattaataaaaattaaattgcctgtagcgactgaaatattaaatccaaatgttcctcaatatattggagatttatttagttgggtagctattggggctcgtactacagagtcacagatacatcgagaaatagcttctagttttcagtcggtaataggttttaaaaatagtactcatggagatattgatcatgcaattaatgcaatacgtgcagcttccatgtctcataattatattagtattgatcaatctgggcaggtgtgttcattacatactaaaggaaatacaaatagtcatataattttaagaggagggattcaacctaattattatccagaaaatattatttgttgtgaaaaaaaaataacagaaatagggttacctataacattaatgatcgattgtagtcatggtaattctaataaggattatcatcgtcaaatagatgtagctcaatctattttaaatcaaataaagttgggtaatcattctattataggattaatgatggaaagttatatttatcctggaaatcaaatagtagatttgacgcatacttcttctattaaaatgcagtatggggtatctataacagatgcttgtatagattgggattcaactgaacgattattaagatgcttacataaagaattgaaaccatttctttctactcgtttaaaaagagtatga

SEQ ID NO: 1458 - protein, 361 aa, Candidatus Blochmannia floridanus
MQKNNLGNINFCDISSLLSPKQLKSQFPLTYVDQLFIEETQNIIINIIQKKDPRLLIICGPCSIHDVNAAFDYAKKLKSLSLELQDQLYIVMRVYLEKPRTTIGWKGLINDPYIDGSCDIQSGLKIARQLLLQLIKIKLPVATEILNPNVPQYIGDLFSWVAIGARTTESQIHREIASSFQSVIGFKNSTHGDIDHAINAIRAASMSHNYISIDQSGQVCSLHTKGNTNSHIILRGGIQPNYYPENIICCEKKITEIGLPITLMIDCSHGNSNKDYHRQIDVAQSILNQIKLGNHSIIGLMMESYIYPGNQIVDLTHTSSIKMQYGVSITDACIDWDSTERLLRCLHKELKPFLSTRLKRV

SEQ ID NO: 1459 - DNA, 1074 bp, Bordetella pertussis
  CDS (1)..(1074)
atgtcgcacaataccgatgaccttcgtatccgtgaaatcaaagagctgaatcctcccgcgcatgtcatgcgcgagtttccgtgctcgaaggatgtttctgaaatcgtctacgccgcccgccagggcatgcatcgcatcctgcatggcatggatgaccgcctgatcgtcgtgatcggcccttgctcgatccacgataccaaggcggcgctcgaatacgcggatcgcctcaagccggtgcgcgaccgcctggccgccgatctcgaggtggtgatgcgcgtctacttcgaaaagccgcgcaccaccgtgggctggaagggcctgatcaacgaccccgacctggatggcagcttcgatatcaacaagggcgtgcgcgtggcgcgcgaactgctgctggacatcaacagccgcggcctgccggcgggttgcgagttcctcgacatgattaccccgcagtacatcgccgacctggtgtcgtggggggcgatcggggcgcggacgaccgaaagccaggttcaccgcgagctggcttccggcctgtcgtgtcctgtcggtttcaagaatggcaccgacggcaatgtgaagatcgccgtcgacgccatcaaggccgcctcgcaaccgcaccatttcctctcggtgaccaagggcgggcattcggccatcgtctcgaccgcgggcaacgaggactgccacgtcattctgcgcggcggcaaggcgcccaactacgatgccgccagcatcgaagcggcctgccaggacatggccaaggccggcctggcccagcgcatcatgatcgacgccagccacgccaacagcagcaagaagcccgagaatcagccgctggtggtcgatgatgtggccaaccagatcgagcagggcgatgcccgcatcgtgggcctgatgatagaaagccatctgctgggcggccgccaggacctggtgcccggccaggccttgacgtacgggcagagcatcaccgacggttgcatcgactgggatgcttcggtgcaggtgctggagcgcctggcccatgcggtgcgcgaacgccggcgcgcgtcgctgagcgccggcaagtag

SEQ ID NO: 1460 - protein, 357 aa, Bordetella pertussis
MSHNTDDLRIREIKELNPPAHVMREFPCSKDVSEIVYAARQGMHRILHGMDDRLIVVIGPCSIHDTKAALEYADRLKPVRDRLAADLEVVMRVYFEKPRTTVGWKGLINDPDLDGSFDINKGVRVARELLLDINSRGLPAGCEFLDMITPQYIADLVSWGAIGARTTESQVHRELASGLSCPVGFKNGTDGNVKIAVDAIKAASQPHHFLSVTKGGHSAIVSTAGNEDCHVILRGGKAPNYDAASIEAACQDMAKAGLAQRIMIDASHANSSKKPENQPLVVDDVANQIEQGDARIVGLMIESHLLGGRQDLVPGQALTYGQSITDGCIDWDASVQVLERLAHAVRERRRASLSAGK

SEQ ID NO: 1461 - DNA, 1119 bp, Bordetella bronchiseptica
  CDS (1)..(1119)
atgacccgtatcgatgacccgctgcacgatcgcgaggccggccaggccgacgcgacgcaagacaccacccgcatcgacgacgtgcgcatcggcgccgtgcgtcccctgatttcgcccgccctgctgcaggacgaactgccggtatcggcgccgctacaggcgctggtcgaggacagccgcgcgcgcatcgccgacgtgctgcacggccgcgacgaccggctggtggtggtggtcggcccctgctccatccacgaccacgaacaggccatggagtacgcgcgccagctcaaggaggcggccgacacgctggccgacgacctgctcatcgtcatgcgcgtgtacttcgagaagccgcgcaccaccgtgggctggaagggctacatcaacgatccgcgcctggacggcagtttccgcatcaacgaaggcctgcgccgcgcgcgccacctgctgctggaaatcggcgccctgggactgcccatcgccaccgaattcctggacctgctcagcccgcaatacatcgccgacctgatcgcctggggcgcgatcggcgcgcgcaccaccgaaagccccagccaccggcaactggcctcgggcctgagctgcccgctgggtttcaagaacggcaccgacggcggcatccaggtggcggctgacgccatcgtggccgccagcgccccgcatgccttcatgggcatgaccaagatgggcaccgccgccatcttcgagacgcgcggcaacgacgacacccacgtcatcctgcgcggcggcaagcaaggccccaactacgacgcggccgccatcgacgcctgctgtgcggcgctggccaaggccggcctgcgcgagcaggtcatggtcgactgctcgcacgccaattcgaacaagtcgcacgcgcgccaggtcgacgtggcgcgcgacctggcccggcagctggccggcggcgaccgccgcatcatcggcatcatgatcgaaagcaacctcgaggaaggccgccaggatctcaagcccggcgtgccgctcaagcgcggcgtgtccatcaccgacgcctgcctgagctgggcccagaccgagccggtgctggccgagctggcccaggccgtgcgccagcgccgcgaaggctga

SEQ ID NO: 1462 - protein, 372 aa, Bordetella bronchiseptica
MTRIDDPLHDREAGQADATQDTTRIDDVRIGAVRPLISPALLQDELPVSAPLQALVEDSRARIADVLHGRDDRLVVVVGPCSIHDHEQAMEYARQLKEAADTLADDLLIVMRVYFEKPRTTVGWKGYINDPRLDGSFRINEGLRRARHLLLEIGALGLPIATEFLDLLSPQYIADLIAWGAIGARTTESPSHRQLASGLSCPLGFKNGTDGGIQVAADAIVAASAPHAFMGMTKMGTAAIFETRGNDDTHVILRGGKQGPNYDAAAIDACCAALAKAGLREQVMVDCSHANSNKSHARQVDVARDLARQLAGGDRRIIGIMIESNLEEGRQDLKPGVPLKRGVSITDACLSWAQTEPVLAELAQAVRQRREG

SEQ ID NO: 1463 - DNA, 1179 bp, Nitrosomonas europaea
  CDS (1)..(1179)
atgaagtcgggcagtctgtattgccagtgtggcaaggaagtgcaaaaagaaatagtcatcaaggaatcatctgtggaacataaaactgacgaccggcgcattatcagaggagatgagctgatcacgccggtgaaactgcttcatgatcatcctctgactgaacaggcgactgaaactgtggttactgccagacaggagtgccacgatattttgcggggagaggatgaccggttactggtggtatgtggcccatgctcgattcatgatgtggatgcggcagtggaatatgcttcccgactgagtcatctgcgtcaggagctgaaagatcagttacatatcatcatgcgggtttatttcgagaaacctcgcacaacagttggctggaaaggcctgatcaacgacccagacctggataacagtttcaacattgacaagggattgcggcttgcccgcgacctgttgctgaaactgggtaatataaatatgccggctgcaactgaatttcttgatctgatcagcccgcaatatgtggctgacctcatcagttgggcggccatcggcgcacgcacgactgaaagccagggacatcgtgaactggcctccggtgtttcgtgtccagtggggttcaagaatggtacctacggcaatctgaatatcgcaatcgatgcgattggtgctgcatcccacccgcataatttcctgtcagtcaccaaagaaggccgggttgctactttcaccaccaggggaaatgaagattgtcatatcatcctgcgcggcggaagatcaccgaattacgatgcagagagtgttgcttctgcggtcgaagcactgcggaaagccaagctgcctccttatctgatgatcgattgcagtcacgccaacagccacaaggattaccggcgtcagccggaagtggctgccgatgtggctcagcaaattgcggaaggaaactgctcaatcagcgggatcatgcttgaaagtcacctggtggccggcaggcagaatgttgaaggtaagcggcgggaagagctggtttacgggcaaagcatcacggatggctgtatcgatttcgatacgacacagcaggtgctgttcgagctggcggaagcggtggaaaaacgaagaaatttgcagaataccccgatactggttccagatcattccactgcgctttcctga

SEQ ID NO: 1464 - protein, 392 aa, Nitrosomonas europaea
MKSGSLYCQCGKEVQKEIVIKESSVEHKTDDRRIIRGDELITPVKLLHDHPLTEQATETVVTARQECHDILRGEDDRLLVVCGPCSIHDVDAAVEYASRLSHLRQELKDQLHIIMRVYFEKPRTTVGWKGLINDPDLDNSFNIDKGLRLARDLLLKLGNINMPAATEFLDLISPQYVADLISWAAIGARTTESQGHRELASGVSCPVGFKNGTYGNLNIAIDAIGAASHPHNFLSVTKEGRVATFTTRGNEDCHIILRGGRSPNYDAESVASAVEALRKAKLPPYLMIDCSHANSHKDYRRQPEVAADVAQQIAEGNCSISGIMLESHLVAGRQNVEGKRREELVYGQSITDGCIDFDTTQQVLFELAEAVEKRRNLQNTPILVPDHSTALS

SEQ ID NO: 1465 - DNA, 1083 bp, Coxiella burnetii
  CDS (1)..(1083)
atgcagaaaactgacaatttaagaataaaagccatccaccccctgatgctccccgcccttctcatcgaagagctgcccatcacagccgctgtagcttcaaccgtcaacctagctcgattagctgccagagacatcattcacggccaagatgaccgtttgttagtagtccttggcccttgctccattcacgacgttaaagccgccctcgaatacgctaatcgactcaaacgctgtattgatcgacacgctaaggaactgtgcatcatcatgcgcgtttattttgaaaaaccccgaacgaccgttggatggaagggcttgattaacgacccccagctcgatggaagtttccacattaaccaagggctgcgggtcgcccggcgtttactgctcgacattaatgaaatcggggttcctaccggaagcgaatttctagacaccattataccccagtatatttctgatttaacttcgtggtccgccatcggcgctcgcacgaccgaaagccaaacccaccgagagctagcttctggcctttcaatgccaattggcttcaaaaacggtaccacgggcaatgtccaaatcgccattgatgcagtgctggctgcccgacaagcccatcattttttaggggtatccaaacaaggcatcgctgctattatcattacaaaaggaaaccctgacggtcacgtgattttgcgcggctcctcccagagcaccaactatgatcccaaatccattgaagaagccattctgaaactcaaagctaaccatttacccccctcggtgatggttgactgtagccacggcaatagccgcaaaaaccacaaaaatcaaatgcgagttgttgacgccttatacgatcaaattacccaaggcagctcttatttattgggcgccatgattgaaagtaatttagttgaagggaaacaaaccctcgaatccggaaaagctttaacctatgggcagagcatcaccgatgcttgcatctcgtgggaagataccgaacttgcgttggaaaaactggcacaagccgttattattcggcgccaacacagcgaagagagaaaacatcatggcgaataa

SEQ ID NO: 1466 - protein, 360 aa, Coxiella burnetii
MQKTDNLRIKAIHPLMLPALLIEELPITAAVASTVNLARLAARDIIHGQDDRLLVVLGPCSIHDVKAALEYANRLKRCIDRHAKELCIIMRVYFEKPRTTVGWKGLINDPQLDGSFHINQGLRVARRLLLDINEIGVPTGSEFLDTIIPQYISDLTSWSAIGARTTESQTHRELASGLSMPIGFKNGTTGNVQIAIDAVLAARQAHHFLGVSKQGIAAIIITKGNPDGHVILRGSSQSTNYDPKSIEEAILKLKANHLPPSVMVDCSHGNSRKNHKNQMRVVDALYDQITQGSSYLLGAMIESNLVEGKQTLESGKALTYGQSITDACISWEDTELALEKLAQAVIIRRQHSEERKHHGE

SEQ ID NO: 1467 - DNA, 834 bp, Vibrio anguillarum
  CDS (1)..(834)
atggggcggatacctttgaaattagtcatgcgaacttattttgaaaaaccacgaacacgaagaggatggaaaggatttattgttgacccagatctcaatggtaaattcgatttactcaaggggattactcacagtcggaaactaatgcaatcgattctagaacttggtgttcccacagccaatgagtttctcgatactaatatcgccttatatattgcagacctagtatgttggggagccatcggtgctcgcactactgaatcacaacctcatcgacagttggcttctgggttacattgccctatgggctttaaaaacggtactgacggtaatattgacatatccattgatgctatacacgcagcacaagattgtcatacgatgctaacacaaacaaccgacaaccaaactgttgcaatacaaactcaaggcaacaatcactgccacgtaatcttacgtggtggggcaactccaaattattcgtcccaacatataaaacaaacctcgctccaacttaaacgaagtaaactctcacccaaaatagttgtcgactgcagtcatgggaatagcggaaaactcgcaaaaaaccagttaatcgttgttgaagatattgctcgccagatctcttccggtgaaatcaacatcgcaggtgtcatgtgtgaaagctatctagttggcggcaatcaaaaactcggtaacggagctctcaattacggccaatcaattactgatgaatgcttaagttgggaagatactttaatatttctcgaccacttgaatgttgcaatgttaaaaaaagtgagctctcaactaactccaaccgagtacgtttaa

SEQ ID NO: 1468 - protein, 277 aa, Vibrio anguillarum
MGRIPLKLVMRTYFEKPRTRRGWKGFIVDPDLNGKFDLLKGITHSRKLMQSILELGVPTANEFLDTNIALYIADLVCWGAIGARTTESQPHRQLASGLHCPMGFKNGTDGNIDISIDAIHAAQDCHTMLTQTTDNQTVAIQTQGNNHCHVILRGGATPNYSSQHIKQTSLQLKRSKLSPKIVVDCSHGNSGKLAKNQLIVVEDIARQISSGEINIAGVMCESYLVGGNQKLGNGALNYGQSITDECLSWEDTLIFLDHLNVAMLKKVSSQLTPTEYV

SEQ ID NO: 1469 - DNA, 1143 bp, Xylella fastidiosa
  CDS (1)..(1143)
atgtctcctccgcttggtctatgtctaaatgttctgagattacatcccatgccaccatttaccgacgacctccgtatccgaaaaattgaaccactgacacctcctaacaagctcctcttacaactaccatgcgatgagcaggcatcgctgactgttgcgacctcacgcaacgcactgcacgatatcctgcacggccacaatgaccgtttagccgtcgtgataggcccatgctcaatccatgatccaattgcagccattgattactcgcaacgtctacgcccattgcgtgagatgtacaaggatgcactagaaatcgtgatgcgagtttactttcagaaaccgcgcaccactattggttggaaaggattggtcaacgatccggatcttgatggcagcttccagatcaataagggcttgcatatcgcgcgcaacctgctgcgcgatatcaatcatctcggcttacccgctggtgtggaatttctagacacgatttcgccgcaatatctggctgacttagtcgcctggggtgccattggtgctcgcaccactgaaagccaaatacaccgtgaaatggcttcaggtttatcgtgcccgattggctttaaaaacagtaccagtggtgatgtgaagattgctgctgacgcgattaaagcagcttcgcatccgcaccatttcctttcagtgacaaagacaggtgttgccgcagtcgtcgccacccagggtaaccccgattgtcacgtgattctgcgtggaggcaaggtcccgaattacgacgcaatcaatgtcgaagctgccagccaaacattgcttaaatccaagctaccggtgcgactgatgattgatgcgagccatgccaatagcggcaaaaatccaaacaatcaacctaaggtgatcgagaacatcgtagaacagcttaaagccggtgaacgccgcatcatcggtgtcatgattgaaagccacattgttggtggccggcaagaattagtccttggaaacacacttaactatggacagagcattaccgatgcttgcatcgactgggatacctcggttgcaatgttagaacagctcgctcaggccgtacgcgtcagacagactctaccaacgaccactacagctaacaaaacatcaaaaacccaataa

SEQ ID NO: 1470 - protein, 380 aa, Xylella fastidiosa
MSPPLGLCLNVLRLHPMPPFTDDLRIRKIEPLTPPNKLLLQLPCDEQASLTVATSRNALHDILHGHNDRLAVVIGPCSIHDPIAAIDYSQRLRPLREMYKDALEIVMRVYFQKPRTTIGWKGLVNDPDLDGSFQINKGLHIARNLLRDINHLGLPAGVEFLDTISPQYLADLVAWGAIGARTTESQIHREMASGLSCPIGFKNSTSGDVKIAADAIKAASHPHHFLSVTKTGVAAVVATQGNPDCHVILRGGKVPNYDAINVEAASQTLLKSKLPVRLMIDASHANSGKNPNNQPKVIENIVEQLKAGERRIIGVMIESHIVGGRQELVLGNTLNYGQSITDACIDWDTSVAMLEQLAQAVRVRQTLPTTTTANKTSKTQ

SEQ ID NO: 1471 - DNA, 1053 bp, Vibrio parahaemolyticus
  CDS (1)..(1053)
atgtttcaaactgatgatgtaagaattaatagagtaaaagagttattgccccctgttgcagttctagagaagttcccagcgaccgaaaccgcttcttcgaccacttttgattgccgtaatgccattcacaatattcttgaaggaaaagatgatcgtttacttgtgatcgttggtccttgctctatccatgatcctgcagctgcagttgaatacggcaaaaagctgaaagtgttgcgtgatgaacttggtgagcaactggaagttgtgatgcgagtttactttgaaaaaccacgtacgacagtcggctggaaaggtttgatcaacgacccatacctgaacgacacatttaagctaaatgacggtcttcgtattggacgtaagctgcttttggatctcactgacatgggcctaccaacagcgagtgaattcctagacatgattacgcctcaatacgttgcggatttgatcagctggggcgcgattggtgcacgcacgacggaatcgcaagttcaccgcgaactcgcttctggtctttcttgcccggttggtttcaaaaacggtactgacggtaacattaaaatcgcgagtgatgctattcgctctgcaagcgcttctcaccatttcctatcggtaacgaagtacggtcattcagcgattgttgaaaccgcaggtaacccagactgccacatcattttacgtggtggtaaagaaccaaactacagtgcagcacacgttgctcaaatcaaagacgagttggacgcggctggtctaccgaagaaagtgatgatcgattttagccacgcgaacagctctaagcagttcaaacgtcaaatgcttgtgtctgatgatgtatcagagcaaatcgctggtggtgaagatgcaatctttggcgtgatgatcgagtctcatttggttgaaggccgccaagatttagtggatggtaaagtggcaacttacggtcagtcgattactgatgcatgtattggttgggacgatacggaaacggtacttcgtcagctttctgaagcagtaaaagcgcgccgtagcaaataa

SEQ ID NO: 1472 - protein, 350 aa, Vibrio parahaemolyticus
MFQTDDVRINRVKELLPPVAVLEKFPATETASSTTFDCRNAIHNILEGKDDRLLVIVGPCSIHDPAAAVEYGKKLKVLRDELGEQLEVVMRVYFEKPRTTVGWKGLINDPYLNDTFKLNDGLRIGRKLLLDLTDMGLPTASEFLDMITPQYVADLISWGAIGARTTESQVHRELASGLSCPVGFKNGTDGNIKIASDAIRSASASHHFLSVTKYGHSAIVETAGNPDCHIILRGGKEPNYSAAHVAQIKDELDAAGLPKKVMIDFSHANSSKQFKRQMLVSDDVSEQIAGGEDAIFGVMIESHLVEGRQDLVDGKVATYGQSITDACIGWDDTETVLRQLSEAVKARRSK

SEQ ID NO: 1473 - DNA, 1053 bp, Vibrio parahaemolyticus
  CDS (1)..(1053)
atgcctataaaaacagatgaattgagaacccaacctttgggtccaatgcctaccccagcggagctaggtagtgtacatccgatcacggatgacgttgcagatcgcatcgctcaatctcgtcgtcagattgaaaacattttaacaggtgaagacgatcgccttcttgctatcgttggtccatgttctgttcacgatactgaagccgcaattgattacgcgaaacgcttgagtgaaatccaagataagtacaaagacgagctatttatcgttatgcgtacttactttgaaaagcctcgtacagtagttggttggaaaggtcttatcaccgaccctaacctagacggttcttacgcgcttgaagctggccttcacaaagctcgtaaactgctactggatatcaacaagcttggtcttgcgactgctactgagtttcttgatatgatcactggccaatacattgcggatttgatcacttggggcgcaattggcgcacgtacgacagaatctcaaattcaccgtgaaatggcatcagcgctatcttgccctgttggctttaaaaatggcacaaacggtaatgtgaaaatcgcgattgacgcgattcgtgcctcccaagcttcacactacttctactcgccagataagaatggtcgtatgacggtgtaccgcacaagtggcaacccattcggtcatattattttgcgtggcggcgaaaaaggtccaaactttgacgaagcatctgtgaagcaagcgtgtgattcacttgctgagtttggtttacctgagcgtcttattgtagacttcagtcatgcaaactgtcagaagcagcaccgaaaacaacttgatgttgcgagcgacatttgtactcaaattaagtcaggcagcactcgcattgcgggtatcatggcggaaagcttcattatggaaggcaaccagccaatgactgacattaacaacctaacttacggtcaatcaattactgacccttgtttaggttgggacgatacagtaactatgctagatatgctggcagaagctgtaaaatccactaagtaa

SEQ ID NO: 1474 - protein, 350 aa, Vibrio parahaemolyticus
MPIKTDELRTQPLGPMPTPAELGSVHPITDDVADRIAQSRRQIENILTGEDDRLLAIVGPCSVHDTEAAIDYAKRLSEIQDKYKDELFIVMRTYFEKPRTVVGWKGLITDPNLDGSYALEAGLHKARKLLLDINKLGLATATEFLDMITGQYIADLITWGAIGARTTESQIHREMASALSCPVGFKNGTNGNVKIAIDAIRASQASHYFYSPDKNGRMTVYRTSGNPFGHIILRGGEKGPNFDEASVKQACDSLAEFGLPERLIVDFSHANCQKQHRKQLDVASDICTQIKSGSTRIAGIMAESFIMEGNQPMTDINNLTYGQSITDPCLGWDDTVTMLDMLAEAVKSTK

SEQ ID NO: 1475 - DNA, 1074 bp, Vibrio parahaemolyticus
  CDS (1)..(1074)
atgcaaaaaagtgaattgagcaatattaacatcagcgatgaacaggttcttattacgccagatgagctaaaagtgaagcttcctcttagtgaaaaggcacgccgttttattcaagaatctcgccaaaccatcgccaacatcattcacaaaaaagaccatcgcctacttgtcgtatgtggaccatgctctatccatgacattgaagccgcaaaggattacgcgaagcgtctaaaagctctttctgaacaactaagcgaccaactgtatattgtaatgcgtgtttactttgagaagccgcgcaccacggtcggctggaaaggcctgatcaatgacccacacctagatggcagcttcgacattgaacacggtctgcatgtaggacgtgaactgctggtggaactggcggaaatggaaatcccacttgcaaccgaagctcttgacccaattagcccacaatacttagccgatacttttagttgggcagcgatcggcgcacgcacaacagaatcacaaacacaccgtgagatggctagtggtctttcgatgccgattggctttaagaatggcacagatggtagtttggcaaccgcaatcaatgcgatgcaggcagcctcttctagccaccgctttatgggtatcaaccgtgaaggtcaagttgcgttgctcacaacccaaggtaacccgaatggccacgtgatcctacgtggtggtaaacagacgaactacgattcagtatccgttacggaatgcgaacaagaaatggcgaaatcaggtcttgaagcgtcattgatggtggattgcagccatgcaaactcacgcaaagattaccgtcgtcagccattggtcgcagaagatgtgattcaccaaatccgtgaagggaacaagtcgatcatcggtttgatgatcgagagccacatcaatgaaggtaatcaatcttctgagctggcgttggatgagatgaaatacggcgtatctatcactgacgcttgtattaattgggagtcaactgaggcactattacgtcatgcacacgaagagctggtgcctttcttagaaaaccgccttaaaggctaa

SEQ ID NO: 1476 - protein, 357 aa, Vibrio parahaemolyticus
MQKSELSNINISDEQVLITPDELKVKLPLSEKARRFIQESRQTIANIIHKKDHRLLVVCGPCSIHDIEAAKDYAKRLKALSEQLSDQLYIVMRVYFEKPRTTVGWKGLINDPHLDGSFDIEHGLHVGRELLVELAEMEIPLATEALDPISPQYLADTFSWAAIGARTTESQTHREMASGLSMPIGFKNGTDGSLATAINAMQAASSSHRFMGINREGQVALLTTQGNPNGHVILRGGKQTNYDSVSVTECEQEMAKSGLEASLMVDCSHANSRKDYRRQPLVAEDVIHQIREGNKSIIGLMIESHINEGNQSSELALDEMKYGVSITDACINWESTEALLRHAHEELVPFLENRLKG

SEQ ID NO: 1477 - DNA, 1083 bp, Pseudomonas syringae
  CDS (1)..(1083)
atgaattcgcccgttgccgtaaaatcgtccgacctgtccagccatgccgtcacattggcggacaacaaccccgcctcgaaacgcctgcccagcacgcttgagcttaaaatgcgcctgccactcaatgccacgctgaccgaacaggttgcagcccatcgccgcgccgtgcgcgccattctcaatggcgaagactcacgactgctggtcatcgtgggcccctgctcgatccatgatccgcaatccgcgctggaatatgccgagcgactcgccagcctggccgcagaagtcagcgatcagatgctgctggtgatgcgtgcctacgtcgaaaaaccgcgcaccaccgtaggctggaaaggcctggcgtacgaccccgacctggatggcagtgacgacatggccggcggcttgacgctgtcgcggcagttgatgcgtgacatgctgggcatgggcctgccgatcgccaccgaaatactgcagcccatggctgccggctacttcgacgacctgctcagctgggtcgccattggcgctcgcaccaccgaatcgcagatccaccgggaaatggccagcgggctgcccatggcggttggcttcaagaacggcacggatggcggcgtagcggtggccagcgacgcaatgcgctcagcggcgcacccgcatcgtcatttcggcatggacgctcacggtcacccggcgatcatcgagacgcagggcaatccggacacgcacatcgtgcttcgcggcggacacagcggccccaactacgatcgccagagcgttgctcaggtgcaggccggcctgagcaataacgccatagcgtcgcgaatcatggtcgattgcagccacgccaacagcggcaaggacccggcgcgtcagcctcacgtgttcaacgatgtgcttgaacagcgcttgtccggcaacccgtcactgattggcatgatgatcgagagccatctacacgatggctgccaggcgctgggcgaaacgctgcagtacggggtgtcggttaccgacggctgcctgggctggaccgcgaccgagcagttgttgcgtgaagcggtcgaccgcttgcgttacagataa

SEQ ID NO: 1478 - protein, 360 aa, Pseudomonas syringae
MNSPVAVKSSDLSSHAVTLADNNPASKRLPSTLELKMRLPLNATLTEQVAAHRRAVRAILNGEDSRLLVIVGPCSIHDPQSALEYAERLASLAAEVSDQMLLVMRAYVEKPRTTVGWKGLAYDPDLDGSDDMAGGLTLSRQLMRDMLGMGLPIATEILQPMAAGYFDDLLSWVAIGARTTESQIHREMASGLPMAVGFKNGTDGGVAVASDAMRSAAHPHRHFGMDAHGHPAIIETQGNPDTHIVLRGGHSGPNYDRQSVAQVQAGLSNNAIASRIMVDCSHANSGKDPARQPHVFNDVLEQRLSGNPSLIGMMIESHLHDGCQALGETLQYGVSVTDGCLGWTATEQLLREAVDRLRYR

SEQ ID NO: 1479 - DNA, 1077 bp, Pseudomonas syringae
  CDS (1)..(1077)
atggctgatttaccgattaacgacctcaacgttgcctccaacgagactctgatcacaccggatcagctcaagcgcgacatcccgctgaccgacgctgcactgcagactgtcagccagggtcgcgaagtgattcgcaacattctcgatggcaatgatcaccgcctgttcatcgtgatcggcccgtgctcgatccacgacctgaaagcggccaaagagtacgccgagcgcctcaaggtactggcggcggaagtttccgacacgctgtatctggtcatgcgcgtgtacttcgagaagcctcgcaccacagtgggctggaaaggcctgatcaacgacccgtacctggatgactcgttcaagatccaggatggcttgcacatcggccgccaactgctgctggacctggctgaaatgggcctgccgaccgcaaccgaagcgctggacccgatctccccgcaatacctgcaggacctgatcagctggtcggccatcggcgcgcgcaccaccgaatcgcagacccaccgcgagatggcttccggcctgtcttcggccgtcggcttcaagaacggcaccgacggcggcctgaccgttgccatcaacgctctgcagtcggtctcaagcccgcatcgcttcctgggcatcaaccaggaaggcggcgtgtcgatcgtgaccaccaagggcaacgcctatggccacgtcgtgctacgcggtggcaatggcaagcccaactatgattcggtcagcgtcgcgctctgcgagcaggcgctgaacaaggccggcattcgccccaacatcatggtcgattgcagccacgccaactccaacaaggacccggccctgcaaccgctggtgatggaaaacgtcgccaaccagattctggaaggcaacgagtcgatcatcggcctgatggtcgagagccatctgaactggggttgtcaggcgattcccaaggatctgtcggaattgcagtacggcgtctccatcaccgatgcctgcatcgactgggaaagcactgaaaaaaccctgcgcagcatgcatgccaagctcaagggcgtactgccggcgcgcacgcgtaaatga

SEQ ID NO: 1480 - protein, 358 aa, Pseudomonas syringae
MADLPINDLNVASNETLITPDQLKRDIPLTDAALQTVSQGREVIRNILDGNDHRLFIVIGPCSIHDLKAAKEYAERLKVLAAEVSDTLYLVMRVYFEKPRTTVGWKGLINDPYLDDSFKIQDGLHIGRQLLLDLAEMGLPTATEALDPISPQYLQDLISWSAIGARTTESQTHREMASGLSSAVGFKNGTDGGLTVAINALQSVSSPHRFLGINQEGGVSIVTTKGNAYGHVVLRGGNGKPNYDSVSVALCEQALNKAGIRPNIMVDCSHANSNKDPALQPLVMENVANQILEGNESIIGLMVESHLNWGCQAIPKDLSELQYGVSITDACIDWESTEKTLRSMHAKLKGVLPARTRK

SEQ ID NO: 1481 - DNA, 1062 bp, Pseudomonas putida
  CDS (1)..(1062)
atgcacgcttccagcctcgccctgcccctgacccagccgcaagcggccaacaccactgtcagcagacgcctgcccagcccgcacctgctcaagcagcagatgccactgcccagcgaactggcccagcaagtccaggcccatcgccaggccatccgcaacatcctcgaaggccgcgacccgcgcctgctggtcatcgtcggcccctgctcgattcatgacccacgctcggccctggaatacgccgaccgcctggccgcccttggccgcgaagtcaacgacaagctgctgctggtgatgcgcgcctacgtcgaaaaaccgcgtactacagtgggctggaaaggcctggcctacgacccgcacctcgatggcagtgacgacatgcactcgggtatcgccttgtctcgcgggctgatgctgagcatgatcgaacgcggcctgccgatcgctaccgagttgctgcaaccgatggccgccggttacttcgacgacctgttggcctgggcggcgatcggcgcacgcaccaccgaatcgcaaatccaccgcgaaatggtcagtggcctggagctgccggtcggcttcaagaacggtacggacggcggcatcgccatcgccagcgacgccatgcgcagcgctgcccacccgcaccgccacttcggtatggatgctcagggccacccggcgatcatcgagaccttgggcaacccggacacacaccttgtactgcgcggcggccacaaaggcccgaaccatgatgccaacagcatcgccatggcccgccaggcgttggccaaggccggtctgcaggcacggatcatggtcgattgcagccacgccaacagcggcaaggacccggcgcgccagccagcggtcttcaatgatgtgctggaacagcgcctggccggcgaccgttcgttggtcggcgtcatgatcgaagggcacttgttcgatggctgccaggcgttgggcaagggcacactgaaatacggtgtgtcgattaccgacggctgcctgggctgggcctcgaccgaaaccctgttgcgtgaggcggcacaaaaactgtag

SEQ ID NO: 1482 - protein, 353 aa, Pseudomonas putida
MHASSLALPLTQPQAANTTVSRRLPSPHLLKQQMPLPSELAQQVQAHRQAIRNILEGRDPRLLVIVGPCSIHDPRSALEYADRLAALGREVNDKLLLVMRAYVEKPRTTVGWKGLAYDPHLDGSDDMHSGIALSRGLMLSMIERGLPIATELLQPMAAGYFDDLLAWAAIGARTTESQIHREMVSGLELPVGFKNGTDGGIAIASDAMRSAAHPHRHFGMDAQGHPAIIETLGNPDTHLVLRGGHKGPNHDANSIAMARQALAKAGLQARIMVDCSHANSGKDPARQPAVFNDVLEQRLAGDRSLVGVMIEGHLFDGCQALGKGTLKYGVSITDGCLGWASTETLLREAAQKL

SEQ ID NO: 1483 - DNA, 1113 bp, Pseudomonas putida
  CDS (1)..(1113)
atggcggccggcacccgtgacctgacgagtaacacgatggctgatttaccgatcgatgacttgaacgttgcctccaacgagaccctgatcacccctgatcagctcaagaaggaaatccccctcagcgccaaggccctgcagaccgtgactgccggccgtgaagtggtgcgcaatattctcgacggcaaggaccatcgcctgttcgtcgtggtcggcccttgctccatccacgacatcaaggcagcccacgaatacgccgagcgcctgaaagtgctggccgaagaagtgtccgatacgctgtacctggtcatgcgcgtgtacttcgaaaagccgcgcaccaccgtcggctggaaaggcctgatcaacgatccgtacctggatgactcgttcaagatccaggacggcctgcacatcggccgcaagttgctgctggacctggccgaaatgggcctgccgaccgccaccgaagcgctcgacccgatttcgccgcagtacctgcaagacctgatcagctggtcggccatcggtgcccgcaccaccgaatcgcaaacacaccgcgagatggcctcgggcctgtcctcggcggtgggtttcaagaacggtaccgatggcggcctgaccgttgccatcaatgccctgcagtcggtgtccaagccgcaccgcttcctgggcatcaaccaggaaggcggcgtgtcgatcgtcaccaccaagggcaacccatacggccacgtggtactgcgcggcggcaatggcaagccgaactacgactcggtcagcgtcgccctgtgcgaacaggacctggccaaggccaagatcaaggccaacatcatggtcgactgcagccatgccaactccaacaaggacccggccctgcaaccgctggtgatggagaacgtcgccaaccagattctcgaaggcaaccagtcgatcatcggcctgatggtcgaaagccacctgaactggggctgtcagtccattccgaaaaacctggacgatttgcagtatggcgtgtcgatcacggacgcctgcatcgactggtcggctaccgagaaaaccctgcgcagcatgcatgccaagctcaaggatgtgctgccgcagcgtaagcgcggctga

SEQ ID NO: 1484 - protein, 370 aa, Pseudomonas putida
MAAGTRDLTSNTMADLPIDDLNVASNETLITPDQLKKEIPLSAKALQTVTAGREVVRNILDGKDHRLFVVVGPCSIHDIKAAHEYAERLKVLAEEVSDTLYLVMRVYFEKPRTTVGWKGLINDPYLDDSFKIQDGLHIGRKLLLDLAEMGLPTATEALDPISPQYLQDLISWSAIGARTTESQTHREMASGLSSAVGFKNGTDGGLTVAINALQSVSKPHRFLGINQEGGVSIVTTKGNPYGHVVLRGGNGKPNYDSVSVALCEQDLAKAKIKANIMVDCSHANSNKDPALQPLVMENVANQILEGNQSIIGLMVESHLNWGCQSIPKNLDDLQYGVSITDACIDWSATEKTLRSMHAKLKDVLPQRKRG

SEQ ID NO: 1485 - DNA, 1086 bp, Bradyrhizobium japonicum
  CDS (1)..(1086)
atgctgagcacgactgacgatcttcgtatccgtgaactgaaagagctgagcacgccggatgaggtaatgcgggaggtcccgcgcacgctcaccgcaacgcgtgtggtgatggcggcgcgcaacgccatccatgccatcctcaccggccaggacgaccgcctgctggtggtggtcggcccgtgctcggtgcatgatccccgggccgcgctcgactacgctgagcgtctgacaaaactgcgcgaggacctcgccgaccagctcgagatcgtaatgcgggtctatttcgagaagccgcgcaccaccgtcggctggaagggcctgatcaacgaccccgatctcgacggcagcttcgacatcaacaagggcctgcggctggcgcgcaacgtgctgtcagcggtgaacaatctcggcctcccggccggcgccgaattcctggacatgacgacgccgcaatacatcgctgacctcgtgtcctgggccgcgatcggcgcgcgcacgaccgagagccagatccatcgcgagctggcctccgggctgtcctgcccggtcggcttcaagaacggcaccgatggcaatgtgcggatcgcggcggacgcagtgaagtcggcctcgcatccgcatcatttcatggcggtgaccaagctcggccgctcggcgatcgcctcgaccgcgggcaacgaggactgccacatcatcctgcgcggcggcagcacgccgaactacgatgcggcaagcgtcgcggcggcctgcaacgagctggcgaaatccggcgtcgcgccgctggtgatggtggatgcgagccacgccaattcgagcaagaagccggagaaccagccgctggtcatggccgacattgccggccagatttccggtggcgagagccgcatcatgggtgtgatgatcgagagcaatctcgtcgccggccgccaggacgtggttccgggcaagccgctcacctacggccagagcatcacggacggctgtatcgactgggcgaccacggcaactgtgctcgagcagctcgccgatgcggtcgaaatccggcgcaacgcccagcgcgcggggctgcacgagcgctcggcgtaa

SEQ ID NO: 1486 - protein, 361 aa, Bradyrhizobium japonicum
MLSTTDDLRIRELKELSTPDEVMREVPRTLTATRVVMAARNAIHAILTGQDDRLLVVVGPCSVHDPRAALDYAERLTKLREDLADQLEIVMRVYFEKPRTTVGWKGLINDPDLDGSFDINKGLRLARNVLSAVNNLGLPAGAEFLDMTTPQYIADLVSWAAIGARTTESQIHRELASGLSCPVGFKNGTDGNVRIAADAVKSASHPHHFMAVTKLGRSAIASTAGNEDCHIILRGGSTPNYDAASVAAACNELAKSGVAPLVMVDASHANSSKKPENQPLVMADIAGQISGGESRIMGVMIESNLVAGRQDVVPGKPLTYGQSITDGCIDWATTATVLEQLADAVEIRRNAQRAGLHERSA

SEQ ID NO: 1487 - DNA, 1053 bp, Yersinia pestis
  CDS (1)..(1053)
atgaattaccagaatgatgatttacggattaaagaaattaaggaactcctacctcctgttgcgttgttagagaaatttccctccacagttaatgcggcagaaaccgtcgccaagacccggaatgctattcacaacatcttgcgtgctcaggatgatcgcttgctggtggtgattggcccatgctctattcatgatacgcaagcggctaaagaatatgcggcccgtttgctggcactgcgtgaagaactgcagggcgagctggaagttgtcatgcgtgtttattttgaaaagccgcgtacaacggtgggttggaaaggcctgattaacgatccgcatatggacaatagctacgacatcaatgaaggtttacgtctggcgcgtgaattactcgtcgaaattaacgacagcgggttaccggccgccggtgagtttttggatatgattacgccgcagtatctggctgatctgatgagctggggagccattggcgcacgtactactgaatctcaggttcaccgcgaactggcttctggtctgtcttgccccgttggttttaaaaatggtaccgacggcaccattaaagtggctattgatgcgatcaacgcggccagtgccccacactgtttcttgtcggtgaccaaatggggtcattcggcgattgtgaatactgccggcaatggtgattgccatatcattttacgtggtggtaaagagccgaattacagcagtaagcatgtgaatgcggttaaagaagggctgattaaagcgggcctggaaccccagattatgatcgatttcagccacgctaacagttgcaaacagtttcaaaagcagatggaagtgggaacggatgtttgccaacaaattgcgcaaggtgaaaaatctatcataggcgtgatgatcgaaagccatttagtcgaaggtagccaaaacctggaaagtggtgaaccactaacctatggccagagtattaccgatgcctgtattggctggaaagatactgaggcgctgttgcgccagttggctggagcagtgagagctcgccgccagtag

SEQ ID NO: 1488 - protein, 350 aa, Yersinia pestis
MNYQNDDLRIKEIKELLPPVALLEKFPSTVNAAETVAKTRNAIHNILRAQDDRLLVVIGPCSIHDTQAAKEYAARLLALREELQGELEVVMRVYFEKPRTTVGWKGLINDPHMDNSYDINEGLRLARELLVEINDSGLPAAGEFLDMITPQYLADLMSWGAIGARTTESQVHRELASGLSCPVGFKNGTDGTIKVAIDAINAASAPHCFLSVTKWGHSAIVNTAGNGDCHIILRGGKEPNYSSKHVNAVKEGLIKAGLEPQIMIDFSHANSCKQFQKQMEVGTDVCQQIAQGEKSIIGVMIESHLVEGSQNLESGEPLTYGQSITDACIGWKDTEALLRQLAGAVRARRQ

SEQ ID NO: 1489 - DNA, 1077 bp, Yersinia pestis
  CDS (1)..(1077)
atgatcatgcaaaaagactcgctcaataacgtccatatcagtgccgaacaaatcctgataaccccggaagaactgaaaaatcagtttccactgagcgaaaatgatcagtattcgatagagcgcgcacgtaaaaccattgctgacattattcaggggcgagatccgcgtctgttggtcgtttgtgggccctgttcaattcatgatgtggatgcggcactggattacgcgcgtcgtttgaaaaaactctctgtggaattggatgacagcttatatatcgttatgcgtgtctattttgagaagccaagaactaccgtgggttggaaaggcctgatcaatgaccctgcaatggatggttcatttgatgtagaggcaggtttacacattgcccgtcgtttattgctggatttagtgggcatggggttgccgttagcgactgaagctctggatcctaatagcccacaatatttaggtgacctgttcagttggtcggccattggtgcccgtacaacggagtcacagacccaccgtgaaatggcatcaggcttgtctatgccggttggatttaaaaatggcactgacggtagcctaggcacggcaatcaatgcaatgcgcgccgctgccatgccacatcgctttatggggatcaatcagtcgggccaggtctgcctgttacaaactcagggtaacccacacggccatgtcattctacggggaggtaaaacaccaaactacagtgcacaagatgtcgctcagtgtgaaaaacagatgcaggatgcgggactcatcccatccttaatgatagattgcagtcacggtaattcaaataaagactaccgccgtcaggttgcggtggctgaatctgtggttgaacagatcaaggcgggcaatcgttcaattacaggtgtgatgctggaaagccacatccacgaaggaaatcagtcatctgaacagccacgtgctgatatgcgctacggtgtttctgtgactgacgcctgtattaactgggaaagcactgaaaccctgttacgtggtatgcgccaagaattgcttgcagcactgacggcacggactgcatga

SEQ ID NO: 1490 - protein, 358 aa, Yersinia pestis
MIMQKDSLNNVHISAEQILITPEELKNQFPLSENDQYSIERARKTIADIIQGRDPRLLVVCGPCSIHDVDAALDYARRLKKLSVELDDSLYIVMRVYFEKPRTTVGWKGLINDPAMDGSFDVEAGLHIARRLLLDLVGMGLPLATEALDPNSPQYLGDLFSWSAIGARTTESQTHREMASGLSMPVGFKNGTDGSLGTAINAMRAAAMPHRFMGINQSGQVCLLQTQGNPHGHVILRGGKTPNYSAQDVAQCEKQMQDAGLIPSLMIDCSHGNSNKDYRRQVAVAESVVEQIKAGNRSITGVMLESHIHEGNQSSEQPRADMRYGVSVTDACINWESTETLLRGMRQELLAALTARTA

SEQ ID NO: 1491 - DNA, 1038 bp, Wigglesworthia glossinidia brevipalpis
  CDS (1)..(1038)
atgaattatatttgtgaaaaaattaaatataaaaaattaataagcccaaaaaaattaaaaaaaatttttaaaataaaaaaagaagaagaattttttgttttaagatctagaaaaactattagtaatattattaataaaaaagacaatagaaaattaattatatgtggtccttgctctattcatgatatagaatccacaattgaatatgcaagaaaattaaatattttgtacaaaaaattaatagataaaatatatattgtaataatgatacgttatgaaaaaaaaataaatttttcagaatggaagggaatgatttatgatccatatttgaatggattacatgatattaatcatggattaaaagttattagaaatttgttaattaagttaataaaaatcaaacaacctatagcaatagatatattgaatccatttttttattattatttcgatgatgttattagttgggcatctattggatctgatctaataaattctcaaattagtttagcattttcgtctaattcatcaatcccaataggttttaaaaatagttcagatggaaatatagaaaatactttaaatgcaattataaagtattctaaaattaatgaatttattggaataaatgaaagtggaaaatcttgtattataagaagcccaggaaatattaataatcatattatattaataggtggaaattttccaaattattttcttcaaaatatatatgattgcaaaaaaagaatgaagaattctagaattactacatctataatgatagattgcaacaatggaaattattataaaaattataatgatcaaatagaagtaattaaatcatgtattaagtttttaaaaaaaaataataaaataattataggactaataataaaaagctatattaattctggaaatcagaagtttatttttcctaaaaataaaataaaatatggattatcaataaccagtccttgtattaatttaaaagatactaaactttttttacataatttatatgaatcaataaatatataa

SEQ ID NO: 1492 - protein, 345 aa, Wigglesworthia glossinidia brevipalpis
MNYICEKIKYKKLISPKKLKKIFKIKKEEEFFVLRSRKTISNIINKKDNRKLIICGPCSIHDIESTIEYARKLNILYKKLIDKIYIVIMIRYEKKINFSEWKGMIYDPYLNGLHDINHGLKVIRNLLIKLIKIKQPIAIDILNPFFYYYFDDVISWASIGSDLINSQISLAFSSNSSIPIGFKNSSDGNIENTLNAIIKYSKINEFIGINESGKSCIIRSPGNINNHIILIGGNFPNYFLQNIYDCKKRMKNSRITTSIMIDCNNGNYYKNYNDQIEVIKSCIKFLKKNNKIIIGLIIKSYINSGNQKFIFPKNKIKYGLSITSPCINLKDTKLFLHNLYESINI

SEQ ID NO: 1493 - DNA, 1053 bp, Vibrio vulnificus
  CDS (1)..(1053)
atgttccaaacagatgatgtaagaattaataacgttaaagagttacttccaccagtagctgttttagagaagtacccggcgactgaaaccgcttcttcgacaactttccaatcgagaaacgacattcacaacattctcatcggcaaggacgatcgcctgctggttattgtcggcccttgctctatccacgatcctgtggccgcggttgaatacggcaagcgtttgaaaacgttgcgtgacgagctcaaaggtgagctcgaaattgttatgcgcgtttactttgaaaagccacgtaccactgtgggttggaaaggtttgattaatgacccgtaccttaacgacacctacaagttgaatgatggtttacgcatgggccgaaaactgttgttggatcttaccgatatgggtcttccaacggcgagtgagttccttgacatgatcacaccacagtatgtggctgatttgatcagttggggtgcgattggtgcacgtactacggaatctcaggttcaccgtgaactggcgtcgggtctttcttgtccggttggttttaaaaatggcacggatggcaacattaagattgcaagtgatgcgattcgctcagcaagtgcttctcaccatttcctatcggtaacgaaatacggccattctgctatcgttgaaaccgcgggtaatccagactgccacattattttgcgtggtggtaaagagccaaactacagtgcagcgcatgtttcagcagtaaaagaagagctagctacatcgggtttaccacaaaaagtgatgatcgacttcagccacgccaacagctccaagcagtataagcgtcaaatgttggtggccgacgatgtctctgagcagctagcggccggtgaagaggcaatctttggggtgatgatcgaatcacatcttgtggaaggtcgacaagatcttgttgatggtaaagcggcgacttatggtcagtcgattaccgacgcttgcatcggttgggaagatactgaaactgtgcttcgccaattggcaaatgcagtggcagctcgtcgagcgaaatag

SEQ ID NO: 1494 - protein, 350 aa, Vibrio vulnificus
MFQTDDVRINNVKELLPPVAVLEKYPATETASSTTFQSRNDIHNILIGKDDRLLVIVGPCSIHDPVAAVEYGKRLKTLRDELKGELEIVMRVYFEKPRTTVGWKGLINDPYLNDTYKLNDGLRMGRKLLLDLTDMGLPTASEFLDMITPQYVADLISWGAIGARTTESQVHRELASGLSCPVGFKNGTDGNIKIASDAIRSASASHHFLSVTKYGHSAIVETAGNPDCHIILRGGKEPNYSAAHVSAVKEELATSGLPQKVMIDFSHANSSKQYKRQMLVADDVSEQLAAGEEAIFGVMIESHLVEGRQDLVDGKAATYGQSITDACIGWEDTETVLRQLANAVAARRAK

SEQ ID NO: 1495 - DNA, 1053 bp, Vibrio vulnificus
  CDS (1)..(1053)
atgccactaaaaacagatgaattgagaacccaacctttgggtccaatgccaactcccgctgagttgagccaagcccatccgattaccgacgatgtggccgagcgaattgcgaaatctcgcagacaaattgaagatattttaacgggtaaggacaaccgccttttggtgattgtcggtccttgctctgtgcacgatactgaagccgcgattgattacgcgacgcgtttaagctcgattcaagagctgtatcgcgatgagctgttcatcgttatgcgcacctactttgaaaaaccacgcactgtggtgggctggaaaggcctcattaccgacccaaatctggatggctcttacgcactagaagcaggcctgcataaagcacgtaagctattgctcgacatcaacaaacttggccttgctaccgcaactgagtttcttgacatgatcactggtcaatatattgctgatttgatcacttggggcgcgattggtgctcgaaccactgaatcgcaaattcaccgtgaaatggcatctgcactctcctgcccggttggctttaaaaacggcaccaacggcaacgtgaaaattgcgattgacgcaattcgagcatcaaaagcttcgcattacttctactctccagataaaaatggccgcatgaccgtttaccgcaccagtggtaacccatatggacacattattctgcgtggtggtgataccggccctaactttgatgcaaaatcggttgagtctgcctgtcaatcactggctgagttcgatttgccacagcgtttgatcgttgatttcagtcacgcgaactgtgaaaagcaacatcgtaaacagctcgatgtcgcgcaagacatttgtaaccagctaaaagcaggcagcacttatatcgcaggcatcatggcagaaagctttattaccgaaggcaatcagccgatgactgaccttgataacttgacctacggccaatcgatcactgacccttgcctaagctgggaacacacagcgcaaatgctggacatgcttgcgactgctgtaaaagaaagccgttaa

SEQ ID NO: 1496 - protein, 350 aa, Vibrio vulnificus
MPLKTDELRTQPLGPMPTPAELSQAHPITDDVAERIAKSRRQIEDILTGKDNRLLVIVGPCSVHDTEAAIDYATRLSSIQELYRDELFIVMRTYFEKPRTVVGWKGLITDPNLDGSYALEAGLHKARKLLLDINKLGLATATEFLDMITGQYIADLITWGAIGARTTESQIHREMASALSCPVGFKNGTNGNVKIAIDAIRASKASHYFYSPDKNGRMTVYRTSGNPYGHIILRGGDTGPNFDAKSVESACQSLAEFDLPQRLIVDFSHANCEKQHRKQLDVAQDICNQLKAGSTYIAGIMAESFITEGNQPMTDLDNLTYGQSITDPCLSWEHTAQMLDMLATAVKESR

SEQ ID NO: 1497 - DNA, 1071 bp, Vibrio vulnificus
  CDS (1)..(1071)
atgcagaaaagtgaactaagcaatattaatatcagcgatgaacaagtgctgattacgccagaacagctaaaacagaaactgccactgagcgacaacgcccgccgcttcattcaagagtcgcgtaataccgtcgccaatattattcataagcaagatcatcgtctgctggtggtttgtggtccttgttctattcacgatctggacgcggcaaaggattacgcgcgtcgcctaaaagcgctctccgccgagttaagcgatcaactgtatattgtgatgcgtgtttactttgaaaaacctcgtactactgtgggttggaaagggctcatcaacgaccctcatctggatggtagcttcgatattgagcatggtctgcatgttggccgtcaattgctggtggagctggctgaaatggagatccctctggcgacagaagcactcgacccaattagcccgcaatacttggctgatacattcagttgggctgcgattggtgcgcgtacgacagaatcacaaactcaccgtgaaatggccagtggtttgtctatgccgattggttttaaaaatggcacggatggcagcttgtcaacggcgatcaacgcaatgcaagcggcctcttcaagccaccgttttatggggatcaaccgtgaaggccaagtggcattgctgacgactcaaggtaacccaaatggtcacgtgattttgcgtggtggtaagcagaccaactacgattctgtgtcggtggcggagtgtgagcaagacatggccaaagtgggtttagatgcgtcattgatggtggattgtagccatgccaattcacgcaaagattaccgtcgtcagcctttagtcgccgaagacgtgattcatcaaattcgcgaaggcaacaaatcgatcattggtttgatgattgaaagccacattaatgaaggtaatcaatcctcagatttaccgctttctgagatgcggtacggtgtttctattaccgatgcctgtatcaattggcaggcaactgaggcactattgcgtaaagcacacaaagagttagtgccacatttagaaaaccgtctcaaataa

SEQ ID NO: 1498 - protein, 356 aa, Vibrio vulnificus
MQKSELSNINISDEQVLITPEQLKQKLPLSDNARRFIQESRNTVANIIHKQDHRLLVVCGPCSIHDLDAAKDYARRLKALSAELSDQLYIVMRVYFEKPRTTVGWKGLINDPHLDGSFDIEHGLHVGRQLLVELAEMEIPLATEALDPISPQYLADTFSWAAIGARTTESQTHREMASGLSMPIGFKNGTDGSLSTAINAMQAASSSHRFMGINREGQVALLTTQGNPNGHVILRGGKQTNYDSVSVAECEQDMAKVGLDASLMVDCSHANSRKDYRRQPLVAEDVIHQIREGNKSIIGLMIESHINEGNQSSDLPLSEMRYGVSITDACINWQATEALLRKAHKELVPHLENRLK

SEQ ID NO: 1499 - DNA, 1062 bp, Synechococcus elongatus
  CDS (1)..(1062)
atgccgcaaacctttgatcttcacgttgttgagacacgacccttgttgacgcctgctaccctgctggcggatttaccgctgactgaatcccaagctacccttgtggccacaactcgcgatcgcattcgtgagattttcaaggggcgcgatcgccgcctgctggtgattgtggggccttgttcaattcacgatgtcaaggcagcgctggaatatggggaaaagttggcccggatacgcgatcgcctgcgggatagtctcgaaattgtgatgcgggtttactttgaaaaaccacggacctctgtaggttggaaaggcctcatcaacgatccgcacctcgatggcagctatgatatcaacaccgggctacgccttgcccgcaagctactgctggatttggccaacttaggaatacccgccgctacagaattactcgatccgatcattccccagtacattgccgatgttgtcagttggactgctattggcgctcgcaccaccgaaagccaaactcaccgtcaaatggcctcgggtctctcgatgcccgtaggcttcaaaaatggcaccgatggtcacttagattctgccattaatgccatgattgcggcccagcagtcccaccattttttgggcattaatgctgaaggccgcgccagtattgttgccaccactgggaatcccgatactcacctggtgctacggggcggcaaagacggccccaactattctgccgcccacattgagatggctgccgcactcttagagcgtaagggactcacaccacggctcatggtggattgtagtcatgccaacgctgccaaagacccccaacgccaagtgctagtgtgtgagaacctcgcccatcaggtccagcaaggctcccgttatttggcgggtgtgatgatcgaaagtcatctcaaggcgggtaatcaaccaattcccaaggatctctcgcagttggtctatggccaaagtattaccgatccctgcgtggactttgcaacaacagtaacaatgctcgaacaattggctagtgcggtaggatcgcaactggtggccagataa

SEQ ID NO: 1500 - protein, 353 aa, Synechococcus elongatus
MPQTFDLHVVETRPLLTPATLLADLPLTESQATLVATTRDRIREIFKGRDRRLLVIVGPCSIHDVKAALEYGEKLARIRDRLRDSLEIVMRVYFEKPRTSVGWKGLINDPHLDGSYDINTGLRLARKLLLDLANLGIPAATELLDPIIPQYIADVVSWTAIGARTTESQTHRQMASGLSMPVGFKNGTDGHLDSAINAMIAAQQSHHFLGINAEGRASIVATTGNPDTHLVLRGGKDGPNYSAAHIEMAAALLERKGLTPRLMVDCSHANAAKDPQRQVLVCENLAHQVQQGSRYLAGVMIESHLKAGNQPIPKDLSQLVYGQSITDPCVDFATTVTMLEQLASAVGSQLVAR

SEQ ID NO: 1501 - DNA, 1032 bp, Streptococcus mutans
  CDS (1)..(1032)
atgtcttttaaagcaactagtgataaaattaatatagaagaaatgcggagcttgtcaaaattaacaggtgaagctttagcccaaaaggaagcacgtgatcgtgaattggtttccattatcaagggagaggacaaccgtttactcttgattattggtccttgttcatcagataatgaagaagctgttcttgagtatgctaaacgtcttgctaaattgcaggaagaagttaaagatcgcatctttatggtgatgcgtgtttatacggcaaagccacgcactaatggtgatggctacaaaggaatggtccatcaacctaatacaggcgcggctcccagtctgattaacggtattacagctgtacgccatctgcattatcgtgtgattactgaaacgggtattacaacagcagatgaaatgctctatcctgaaaaccttcctttgattgatgatttagtatcctatattgcagttggtgcccgttcagttgaggatcaacaacaccgttttgtagcttcaggcattgatgtgcctactggcatgaaaaatccaacatcaggaaatcttaatatcatgtttaatggtatttatgctgcgcaaaataaacaatcgttccttttcaatggcgaagaagttgaaaccagcggcaatcctacagctcacgttatcttgcgaggcggcgttaatgaatatggaaaaaatattccaaattattactatgacaatgttttagatacgattgatcagtatgaaaagatggggctgcaaaatccttttattgttgttgataccaatcatgataactctggtaaaaactatttggaacaagtaagaattgttcggcaaacccttattaaccgtgactggaatgacaaaatcaataaatatgttcgcggctttatgattgaatcttatctggaagatggtcgtcagaatgagccagaagtttttggcaagtctattacggatccttgtttgggttgggaaaatactaaacaattggttcatgaaatttatgatactttaggaaattaa

SEQ ID NO: 1502 - protein, 343 aa, Streptococcus mutans
MSFKATSDKINIEEMRSLSKLTGEALAQKEARDRELVSIIKGEDNRLLLIIGPCSSDNEEAVLEYAKRLAKLQEEVKDRIFMVMRVYTAKPRTNGDGYKGMVHQPNTGAAPSLINGITAVRHLHYRVITETGITTADEMLYPENLPLIDDLVSYIAVGARSVEDQQHRFVASGIDVPTGMKNPTSGNLNIMFNGIYAAQNKQSFLFNGEEVETSGNPTAHVILRGGVNEYGKNIPNYYYDNVLDTIDQYEKMGLQNPFIVVDTNHDNSGKNYLEQVRIVRQTLINRDWNDKINKYVRGFMIESYLEDGRQNEPEVFGKSITDPCLGWENTKQLVHEIYDTLGN

SEQ ID NO: 1503 - DNA, 1035 bp, Streptococcus mutans
  CDS (1)..(1035)
atgggtattcatcaaaaaagcaaaaccatagatcttttcacggttaaacaaggcacgcaattaaaaggtcaggatttggctaagaaagaagcacgtgatcgtgaattggtttccattatcaagggagaggacaaccgtttactcttgattattggtccttgttcatcagataatgaagaagctgttcttgagtatgctaaacgtcttgctaaattgcaggaagaagttaaagatcgcatctttatggtgatgcgtgtttatacggcaaagccacgtactaatggtgatggttataaaggcctcattcatcaaccaaatacttctaaattgccagatttgattaatggcattcatgctgttcgtaatttgcattatcgtgtgattactgagacaggattgacaacagcagatgaaatgctttacccttctaatcttgtcttagtagatgatttggtttcttatcatgctgttggtgctcgttcggttgaagatcaggaacatcgctttgtggcttcaggcattgatgtgcctactggcatgaaaaatccaacgtctggtaatctcaaggttatgcttaatgctttacatgcagcacaaaattcacaaaattttatctataatggagcagaagtagaaacagacggcaattccttggctcatgttattttgcgcggaggcagcaatgagcatggtgactatgaacctaattattattatgacgttctcttaaaactgatccaacagtatgaaaatatgaatttaatcaatccctttattgttgttgataccaatcatgataactctggcaaaaattatttggaacaagtaagaattgttcggcaaacccttattaaccgtgactggaatgataaaatcaataagtatgttcgcggctttatgattgaatcttatctagaagatggtcgtcaggataagccagaagtttttggcaagtctattacggatccttgtttgggttgggaaaatactcaacagttgatttatgagatttaccatactctcaaagcaaaataa

SEQ ID NO: 1504 - protein, 344 aa, Streptococcus mutans
MGIHQKSKTIDLFTVKQGTQLKGQDLAKKEARDRELVSIIKGEDNRLLLIIGPCSSDNEEAVLEYAKRLAKLQEEVKDRIFMVMRVYTAKPRTNGDGYKGLIHQPNTSKLPDLINGIHAVRNLHYRVITETGLTTADEMLYPSNLVLVDDLVSYHAVGARSVEDQEHRFVASGIDVPTGMKNPTSGNLKVMLNALHAAQNSQNFIYNGAEVETDGNSLAHVILRGGSNEHGDYEPNYYYDVLLKLIQQYENMNLINPFIVVDTNHDNSGKNYLEQVRIVRQTLINRDWNDKINKYVRGFMIESYLEDGRQDKPEVFGKSITDPCLGWENTQQLIYEIYHTLKAK

SEQ ID NO: 1505 - DNA, 1008 bp, Streptococcus agalactiae
  CDS (1)..(1008)
atgggatttcatcagttaagtgataaaattaatattgaaatattgaagcagaaaactagcttagatctagaagttagccaaaaaaaattagccaaagaagaagagttaaaaaatatcataaaaggtgaggatcagcggtttctagtaatagtaggtccttgttctgcggataatccaaaggcggtgctaacttatgcaaagcgtttagctaaattggaagctgcctttaaagataaaatgtttttggttatgagagtttataccgctaagccaagaacgaatggtgatggttataaaggcttagttcaccattctgacaaactaggagttttttttcaagcacgtaagatgcactatgacatcattcgagagactggactcctgacagctgatgaattactttatccagagatgttatcagtgatggatgatttagtttcttactatgctattggtgcgcgttcagtggaagatcagggacaccgttttatatcttcaggtatagatgcaccagtaggtatgaaaaatccaacgtctggtaatttaagagtcatgcttaatgcggtctatgcagcacaaaatcaacaggaattattctatcaaaataagcaagttagaacagatggtaatttgctgtcacatgttattttgagaggatatcataatgccgactatcgaagtatccctaattatcattatgaaaaccttttagaaactattactcattatgaagagactgatttgcaaaatccctttattgttgttgatacaaatcatgacaattcaggtaagcaatttttagaacaaattcgcattgtgaaatcagtacttgcagaccgacagtggcatactaaaattagaaactatgttcgtggttttttgatagaatcttatttagaagatggaagacaagataaaccagatgtttttggtaagtctatcacagatccatgtctaggttgggataaaacagaaatgctaattagggatatttacaatagtttgtaa

SEQ ID NO: 1506 - protein, 335 aa, Streptococcus agalactiae
MGFHQLSDKINIEILKQKTSLDLEVSQKKLAKEEELKNIIKGEDQRFLVIVGPCSADNPKAVLTYAKRLAKLEAAFKDKMFLVMRVYTAKPRTNGDGYKGLVHHSDKLGVFFQARKMHYDIIRETGLLTADELLYPEMLSVMDDLVSYYAIGARSVEDQGHRFISSGIDAPVGMKNPTSGNLRVMLNAVYAAQNQQELFYQNKQVRTDGNLLSHVILRGYHNADYRSIPNYHYENLLETITHYEETDLQNPFIVVDTNHDNSGKQFLEQIRIVKSVLADRQWHTKIRNYVRGFLIESYLEDGRQDKPDVFGKSITDPCLGWDKTEMLIRDIYNSL

SEQ ID NO: 1507 - DNA, 1065 bp, Shewanella oneidensis
  CDS (1)..(1065)
atgaccattaaaacagacgaattacgcacttccttattagctaaagtcatctcacctgcacaactggcatctgagtaccccttaacccaagatgctgccgactacctcgttcaacaacgtcgtgaagttgaagccatcattatgggcgaagaccaacgcctgttggtgatcattggcccttgctctatccacgatacgcaagccgccctcgattacgcccgccgcttagcagtgctacatcaagagttaaaggacgacctctgtattttaatgcgagtgtattttgaaaagccgcgcacgattgtgggttggaaggggttgatttccgatcctgacttagatggcagcttcgagccaaataaaggattgcgtattgcacgccagcttctacagcaaatcactgagcttaagctgcccatcgctaccgaatttttagatatggtgaacgggcaatatattgccgatttaatcacctggggcgcgattggtgctcgcaccaccgaaagccaagtacaccgtgaaatggcctcagccctttcttgccctgtgggctttaaaaacggaaccgatggcaatattaatatcgccgttgatgcggtacgtgccgcaaaagtgccgcatatcttctactcaccggataaagatggtgcgatgtctgtctatcgcacccatggtaatccttacggacacatcattttacgtggcggtaaaaaacccaattactttgagcaagacattgaacaagcaagattaaaacttgagtctgtcaatgttacaccgcgtgtggtggttgattttagccacggaaatagtgaaaaaaatcacctaaaacaactggtcgttgctgaaaatatcatggcgcaaatgcgtgctggtagtacggccattgccggcatcatggccgaaagtttcttacaagaaggcaaccaaaaggtgattgaaggtcaacccctatgttatggccaaagcatcacggatgcctgcttacattgggctgactccgaaaaattactgcgagatcttgccagcgcctcacgcgatagacgcgaactccttggcaaataa

SEQ ID NO: 1508 - protein, 354 aa, Shewanella oneidensis
MTIKTDELRTSLLAKVISPAQLASEYPLTQDAADYLVQQRREVEAIIMGEDQRLLVIIGPCSIHDTQAALDYARRLAVLHQELKDDLCILMRVYFEKPRTIVGWKGLISDPDLDGSFEPNKGLRIARQLLQQITELKLPIATEFLDMVNGQYIADLITWGAIGARTTESQVHREMASALSCPVGFKNGTDGNINIAVDAVRAAKVPHIFYSPDKDGAMSVYRTHGNPYGHIILRGGKKPNYFEQDIEQARLKLESVNVTPRVVVDFSHGNSEKNHLKQLVVAENIMAQMRAGSTAIAGIMAESFLQEGNQKVIEGQPLCYGQSITDACLHWADSEKLLRDLASASRDRRELLGK

SEQ ID NO: 1509 - DNA, 1092 bp, Shewanella oneidensis
  CDS (1)..(1092)
atgcagcaggatacaattaataacgtccatatcagttcagagaatgttcttattaccccgcaggagctcaaagcggctctaccactctctgagcatgcatatcgttatatcctcaatgcacgcaaaactgtggcggatatcgtccataagcgcgataaccgcgtgctcatcatcactggaccttgttcgattcatgatatcgatgccgccaaagaatacgctttaaaactcaaaaaattacacgatgaacttagtgatgaattttacatcctgatgcgggtgtactttgagaagccacgtaccacagtgggttggaaggggatgattaacgaccccgatatggatggctcttttgatgtggaaaagggcttaaagctggcccgtgagttgatgatttggctggcggaacttgagctgcctgttgcaaccgaagcactcgaccctatcagccctcagtacatttctgagctagtgacttggtcggccataggtgcccgcaccaccgaatcgcaaacccatagggaaatggcgtcgggcttatctatgcccgttggctttaaaaatggtacagatggtaagctcgatgtggcaatcaatgccctcaaatcggcagccagtagccacagatttatggggatcaaccaacagggtcaagtggcgctgttgcaaaccgcgggcaacccagatggtcatgtgattttacgtggtggcgtaacacctaactacgatgcggccagtgtggctgaatgtgaggcgcagcttcataaggccaaactcaatgcccgtcttattatcgattgtagccatggcaactcctctaaggattacgcaaggcaagtccctgtgtgtgaagatgtatttgcgcagatctacaatggtaacaagtccattattggcgtgatgttagagagccatttaaacgaaggtaatcaaagttgtgataaaccatcaggcgaactggcctatggggtttcggtaacagactcctgtattaattgggaaaaaaccgaaagcgttttacgtgcgggcgcatcgaagttatcttcagtgttaccaactcgtttcgatttgcgtaaagtggccaatgcttaa

SEQ ID NO: 1510 - protein, 363 aa, Shewanella oneidensis
MQQDTINNVHISSENVLITPQELKAALPLSEHAYRYILNARKTVADIVHKRDNRVLIITGPCSIHDIDAAKEYALKLKKLHDELSDEFYILMRVYFEKPRTTVGWKGMINDPDMDGSFDVEKGLKLARELMIWLAELELPVATEALDPISPQYISELVTWSAIGARTTESQTHREMASGLSMPVGFKNGTDGKLDVAINALKSAASSHRFMGINQQGQVALLQTAGNPDGHVILRGGVTPNYDAASVAECEAQLHKAKLNARLIIDCSHGNSSKDYARQVPVCEDVFAQIYNGNKSIIGVMLESHLNEGNQSCDKPSGELAYGVSVTDSCINWEKTESVLRAGASKLSSVLPTRFDLRKVANA

SEQ ID NO: 1511 - DNA, 1059 bp, Shewanella oneidensis
  CDS (1)..(1059)
atgtattaccaaaatgatgacgttcgcattaatgaagttaaagagttacttccccctattgcgatcctagaacgatttcctgcctccgaaaacgctgctgcaactgtgtttaatgcccgtcaaagcatccataatattctcgctcgtgaagatgatcgcctattagtggtcattggtccctgctctattcatgatcctaaagcggcgctggaatacggtcagcgattggttgtccttagagagcgctatcaagatcaacttgagattgtgatgcgagtgtattttgaaaagccgcgaactaccgtagggtggaaggggctgatcaatgatccttacatggataacagtttcaaactgaatgatggtttgcgaacagcgcgtaaactcttggtcgatttgaatgattcaggcatgccgacagcgggtgagttcctcgacatgattactccgcaatatgtggcggatatgatgtgttggggcgccattggtgcccgcacaacagaatcacaagtccaccgcgaactggcctcgggtttatcttgtcctgtgggctttaaaaatggcacagacggcacaatcaaagtggcaatcgatgccattggtgccgctaatgcgccgcatcactttttatctgtgaccaaatttggccattcggcgattgtctccactaaaggcaacccagattgccatatcatccttcgcggcggccgagagccgaattacagtgcgagccacgtcgcccaaatcagtgaccaactgaaaaaagccaaactggtcgacaacatcatgatcgactttagccatgccaatagcagcaaacaatatcagcggcaaatggtggtggccaatgaggttgccgaacaagtcgcggcgggcaatcaggcgatttttggggtgatggttgaaagccacttagtcgaagggcgccaagatctgatcgagggccaagcgttatgctacggccagagtgtgactgatgcttgtattggttgggaagattctgagcgtttgttagctgtgctaaatcagagtgttgttgagcgacgtcagcgggtttaa

SEQ ID NO: 1512 - protein, 352 aa, Shewanella oneidensis
MYYQNDDVRINEVKELLPPIAILERFPASENAAATVFNARQSIHNILAREDDRLLVVIGPCSIHDPKAALEYGQRLVVLRERYQDQLEIVMRVYFEKPRTTVGWKGLINDPYMDNSFKLNDGLRTARKLLVDLNDSGMPTAGEFLDMITPQYVADMMCWGAIGARTTESQVHRELASGLSCPVGFKNGTDGTIKVAIDAIGAANAPHHFLSVTKFGHSAIVSTKGNPDCHIILRGGREPNYSASHVAQISDQLKKAKLVDNIMIDFSHANSSKQYQRQMVVANEVAEQVAAGNQAIFGVMVESHLVEGRQDLIEGQALCYGQSVTDACIGWEDSERLLAVLNQSVVERRQRV

SEQ ID NO: 1513 - DNA, 1053 bp, Escherichia coli O6
  CDS (1)..(1053)
atgaattatcagaacgacgatttacgcatcaaagaaatcaaagagttacttcctcctgtcgcattgctggaaaaattccccgctactgaaaatgccgcgaatacggtcgcccatgcccgaaaagcgatccataagatcctgaaaggtaatgatgatcgcctgttggtggtgattggcccatgctcaattcatgatcctgtcgcggctaaagagtatgccactcgcttgctgacgctgcgtgaagagctgcaagatgagctggaaatcgtgatgcgcgtctattttgaaaagccgcgtactacggtgggctggaaagggctgattaacgatccgcatatggataacagcttccagatcaacgacggtctgcgtattgcccgcaaattgctgctcgatattaacgacagcggtctgccagcggcgggtgaattcctggatatgatcaccccacaatatctcgctgacctgatgagctggggcgcaattggcgcacgtaccaccgaatcgcaggtgcaccgcgaactggcgtctggtctttcttgtccggtaggtttcaaaaatggcactgatggtacgattaaagtggctatcgatgccattaatgccgccggtgcgccgcactgcttcctgtccgtaacgaaatgggggcattcggcgattgtgaataccagcggtaacggcgattgccatatcattctgcgcggcggtaaagagcctaactacagcgcgaagcacgttgctgaagtgaaagaagggctgaacaaagcaggcctgccagcgcaggtgatgatcgatttcagccatgctaactcgtcaaaacaattcaaaaagcagatggatgtttgtactgacgtttgccagcagattgccggtggcgaaaaggccattattggcgtgatggtggaaagccatctggtggaaggcaatcagagcctcgagagcggggaaccgctggcctacggtaagagcatcaccgatgcctgcattggctgggatgataccgatgctctgttacgtcaactggcgagtgcagtaaaagcgcgtcgcgggtaa

SEQ ID NO: 1514 - protein, 350 aa, Escherichia coli O6
MNYQNDDLRIKEIKELLPPVALLEKFPATENAANTVAHARKAIHKILKGNDDRLLVVIGPCSIHDPVAAKEYATRLLTLREELQDELEIVMRVYFEKPRTTVGWKGLINDPHMDNSFQINDGLRIARKLLLDINDSGLPAAGEFLDMITPQYLADLMSWGAIGARTTESQVHRELASGLSCPVGFKNGTDGTIKVAIDAINAAGAPHCFLSVTKWGHSAIVNTSGNGDCHIILRGGKEPNYSAKHVAEVKEGLNKAGLPAQVMIDFSHANSSKQFKKQMDVCTDVCQQIAGGEKAIIGVMVESHLVEGNQSLESGEPLAYGKSITDACIGWDDTDALLRQLASAVKARRG

SEQ ID NO: 1515 - DNA, 1170 bp, Corynebacterium efficiens
  CDS (1)..(1170)
atgtttccccatatgatttcccccataaacggtttccacaccaccatcaccgcccgaaaggcagaccccagcaccatgagcgccccagtgtccctccccaacccggcatccaccagcaacaaacgggtggttgccttccatgagctgcccagcccggccgaactcaccgccgacaaccccctgagtccacgtcaggcggagaaggttgagcgcgaccgccaggagatcgccgatatcttcgccggcgatgatgaccgcctcgtggttgtggtcggcccgtgttcggtccatgacccggaggctgcgatcgactacgccaaccgcctggcgcccctggccaagcggctggaccaggacctgaagatcgtcatgcgtgtctacttcgagaagccacgcaccaccgtcgggtggaaggggctgatcaatgatccgcacctcaacgagacctacgacatcgccgagggactgcgcctggcacgcaaggtgcttatcgacgttgtgaacctcgacctgcccgtcggttgtgaattcctcgaaccgaacagcccgcagtactacgccgatgccgtggcctggggtgccatcggtgcacgcaccaccgaatcccaggtccaccgccagctcgcctccgggatgtccatgcccatcggtttcaagaacggcaccgacggcaatgtccaggttgccatcgatgcggtggaatccgcccggagcccccacttcttctttggcacctccgaccacggtgcaccctcggtggtgcagaccgcgggtaactccaacagccatatcatcctccgtggtggcaccaccggacccaaccacgatgcggcatccgtggcgcaggccgtggagaagctgggggagggggcacgtctcatgatcgatgcctcccacgccaactcaggcaaggaccatatccgtcaggtcggtgtggtccgtgagatcgccgagcagatcgccgctggtgatgaggccatcgccggcatcatgatcgagtccttcctcgtcggtggcgcccagaacctggatcctgccaggctgaagatcaacggcggtgaggggctggtctacggccagtccgtcaccgacaagtgcatcgacatcgacaccaccgtcgatctgctcggtgagctcgccgcggcggtccgtacccgccggcaggcctga

SEQ ID NO: 1516 - protein, 389 aa, Corynebacterium efficiens
MFPHMISPINGFHTTITARKADPSTMSAPVSLPNPASTSNKRVVAFHELPSPAELTADNPLSPRQAEKVERDRQEIADIFAGDDDRLVVVVGPCSVHDPEAAIDYANRLAPLAKRLDQDLKIVMRVYFEKPRTTVGWKGLINDPHLNETYDIAEGLRLARKVLIDVVNLDLPVGCEFLEPNSPQYYADAVAWGAIGARTTESQVHRQLASGMSMPIGFKNGTDGNVQVAIDAVESARSPHFFFGTSDHGAPSVVQTAGNSNSHIILRGGTTGPNHDAASVAQAVEKLGEGARLMIDASHANSGKDHIRQVGVVREIAEQIAAGDEAIAGIMIESFLVGGAQNLDPARLKINGGEGLVYGQSVTDKCIDIDTTVDLLGELAAAVRTRRQA

SEQ ID NO: 1517 - DNA, 1134 bp, Bifidobacterium longum
  CDS (1)..(1134)
atggcagcactacgtggtccggatagttccgaggatgaacgtcgtttgggggagcaggccgtctttcctgagaccgtcgatgtcaacattcgtcagcttgaccccattcccgcgccgcgtgctttcctcagggagcagccgctcaccgatgagatgagcgagctcgtgctccactcgcggcaggaaatccgcgatgtgctcaacggccgcgacgaccgactgctcgtcatcgtgggcccctgctcaatccacgacccgaaggccgcgcacgagtacgcagaaaagctggctgccgtcaagcgcgagttggaagaccgactcgtgatcgtgatgcgcgtgtacttcgagaagccgcgcaccaccatcggctggaaaggcctcatcaacgaccccgatctggacggtcgcttcaatattcgtaagggcatgtggctggcccgcaaggtgctcaccgacgtgctgagcctcggtctgcccgccgccaccgaatggcttgaccccatcaccccgcagtacatctgcgacgcgatcagctggggtgccatcggcgcgcgtaacaccgaatcccaagtccaccgcgaactggccagtggcctgtccatgccggtgggcttcaagaactccaccgacggctccatcaaggccgccgccgattcctgtttcgcggccggcttcgagcatcacttcctgtccattaacttggacggtcgcgtgatttccgccgaaaccaaaggcaacccggattgccatctggttctgcgcggctccagccacggcccgaactacgatgccgaatccgtgcgtcaagctctggaagacctcaaggtttccaaagcgtccggcccgagccagcatggcctcgtcatcgatgccgcccacggcaactgcggcaaagacgaaaaccgcgaagccgaagtcatcgaagagatcgctgagcgcctggcgcacggcgaacaaggcatcaccggcgtaatgatggaaagcttcttggtcggcggtcaccaaaagccggccccgctcgaccagttggtctacggtcagtccgtcaccgactcttgcgtgccgtgggaacgcaccaacgaactgctgcacaccctagccgacgccgtcaccgctcgccgctcggctaaatag

SEQ ID NO: 1518 - protein, 377 aa, Bifidobacterium longum
MAALRGPDSSEDERRLGEQAVFPETVDVNIRQLDPIPAPRAFLREQPLTDEMSELVLHSRQEIRDVLNGRDDRLLVIVGPCSIHDPKAAHEYAEKLAAVKRELEDRLVIVMRVYFEKPRTTIGWKGLINDPDLDGRFNIRKGMWLARKVLTDVLSLGLPAATEWLDPITPQYICDAISWGAIGARNTESQVHRELASGLSMPVGFKNSTDGSIKAAADSCFAAGFEHHFLSINLDGRVISAETKGNPDCHLVLRGSSHGPNYDAESVRQALEDLKVSKASGPSQHGLVIDAAHGNCGKDENREAEVIEEIAERLAHGEQGITGVMMESFLVGGHQKPAPLDQLVYGQSVTDSCVPWERTNELLHTLADAVTARRSAK

SEQ ID NO: 1519 - DNA, 1233 bp, Bifidobacterium longum
  CDS (1)..(1233)
atgcagcagcaggaggaagcagcacattcgctgcatccgttgcaagtcggtccgcagccgttgaacaccccagaagagcttcgcgccattcgtcaggcgatgggggaggggaagaacccgctcgttgccactgatgtgccgcgttgggaagatcaggtgggtgtcagtcgcatcatcaaccgccgcgtattggagttggagccgctgcccacgcccgcgcaagtgctcgctgaactcccgctgactgatcaggctcaggaaatcgtcgcctactcgcgtgatgagattcgcgcgtgcctgtacggccaagacgacaggctgttggtcatcgtcggcccctgttcggttcatgacccgaaggccgcgctggactacgcgcgccgattggccaagctgaaagatgagctcggtgaacagctgctcatcgtcatgcgcgtgtacttcgagaagccgcgcactaccattggctggaagggcctgatcaacgacccggatattgatggcagccacaatattcgcaagggcctgttgcttgctcgcaaaaccttgcttggtgtgctgaaggaaggattggcggccgccacggaatttctggagcccaccagcccgcagttcatctcggacgcggtgagttggggcgccattggtgcgcgcaacacggaaagccagatccaccgccaattggccagcgggctttccatgccggtcggctttaagaatgccactgacggctcggtgaaggcagcggtcaacggttgcttcgccgctgctcagcagcacacgttcttcggcattgaccatctggggcgtgcctgcgcagtcgagacccttggcaacccggactgccatgtggtgttgcgcggctcgattcacggcccgaactacgatgccgaatccgtggccaaagccatggaagacgtacgcgccgaaatgcccgccgaatccgcagcctcgcatggtctgattgttgattgctcgcacggtaactccggcaaggacgaacatcgtcaggccgaagtcgtgcgcaatattgccagcagaattgcagctggcgaacagggtattaccggcatcatgatggaaagctttattgaaggaggcaatcagaaggccgcgccgcttgatcagctggtctatggcaagtcgattactgacaagtgcatcagctgggaagaaaccgaggccttgctgcgcgagcttgcggaagccgtagccacacggcgttggcactga

SEQ ID NO: 1520 - protein, 410 aa, Bifidobacterium longum
MQQQEEAAHSLHPLQVGPQPLNTPEELRAIRQAMGEGKNPLVATDVPRWEDQVGVSRIINRRVLELEPLPTPAQVLAELPLTDQAQEIVAYSRDEIRACLYGQDDRLLVIVGPCSVHDPKAALDYARRLAKLKDELGEQLLIVMRVYFEKPRTTIGWKGLINDPDIDGSHNIRKGLLLARKTLLGVLKEGLAAATEFLEPTSPQFISDAVSWGAIGARNTESQIHRQLASGLSMPVGFKNATDGSVKAAVNGCFAAAQQHTFFGIDHLGRACAVETLGNPDCHVVLRGSIHGPNYDAESVAKAMEDVRAEMPAESAASHGLIVDCSHGNSGKDEHRQAEVVRNIASRIAAGEQGITGIMMESFIEGGNQKAAPLDQLVYGKSITDKCISWEETEALLRELAEAVATRRWH

SEQ ID NO: 1521 - DNA, 1221 bp, Phytophthora infestans
  CDS (20)..(1153)
cggacctgttaagtaagaaatgccgagcacccagccgcaccctgcacctgaaaccgaacgtgtgaccaagcgtcagcgtctagaagaccgtaatgtcgtcgccattaagccgctggtgcctcctgcctgcgtcctggaggaactgcccgtgactcctgaggtgcacgaactggtggacgctacgcgcgacgccgtgtcccgcatcctgcacggtcaagatgaccgcctcgtcgtggtcgtcggcccttgctccattcacgacgtggacgctgccatggactacgccaagcgtctgaaaactcttgcgggcgagctgaacggagaacttctggtgatcatgcgcacctacttcgagaagccccgaacgactgtgggctggaagggtctgatcaatgacccggacctcgaccagtctttcaagatcaacaagggtattcgcattgcccgtaagctgttgctggacgtgaattcgctgggtcttcccgtgagtctggagttcctcgacaccatctcgccccagttcacctcagacctcatttcgtggggagccatgggcgcgcgtactaccgagtcccagctgcaccgcgaacttaccagtggcctgtcgattcctgtgggattcaagaatggcacgggcggcaacgccaaggtggcagtggacgctgccgttgcttcgtcgcagcctcacaacttcctcggtctgaacgaacacggattggcatcgattgtgcgcaccaagggcaacaaggactgccacgtcatcctgcgcggcggctccgatggccccaactacgagcaaaagtacattgatgaggctgctgccatgctaaagaaggctaagcagccgtccaaaatcatggtggactgctcgcacggcaactcgcgcaagctgcacgctaaccagcgaaaggtagttagctacctggctggtattgtttccgagggaaacacgaatgtgcttggtgttatgatcgagtccaatatcgtggagggcaaccagtcgcttggcgacgacccgtccaagctcgtctacggccagagcatcacggatgcgtgcatcaactgggatgacacagtcacgacgctgaaggaacttgcaggtgccgtcgcaaagcggcgcaaacttgatgccgcgaacccggccaccaagtagttgtcagaaacctaaagcacaccaatagcacatgtatcacgatagacacaccaaaaaaaaaaaaaaaa

SEQ ID NO: 1522 - protein, 377 aa, Phytophthora infestans
MPSTQPHPAPETERVTKRQRLEDRNVVAIKPLVPPACVLEELPVTPEVHELVDATRDAVSRILHGQDDRLVVVVGPCSIHDVDAAMDYAKRLKTLAGELNGELLVIMRTYFEKPRTTVGWKGLINDPDLDQSFKINKGIRIARKLLLDVNSLGLPVSLEFLDTISPQFTSDLISWGAMGARTTESQLHRELTSGLSIPVGFKNGTGGNAKVAVDAAVASSQPHNFLGLNEHGLASIVRTKGNKDCHVILRGGSDGPNYEQKYIDEAAAMLKKAKQPSKIMVDCSHGNSRKLHANQRKVVSYLAGIVSEGNTNVLGVMIESNIVEGNQSLGDDPSKLVYGQSITDACINWDDTVTTLKELAGAVAKRRKLDAANPATK

SEQ ID NO: 1523 - DNA, 1062 bp, Chlorobium tepidum
  CDS (1)..(1062)
atgcaacaactacaggatttacgagtttcaagaatcattactcttagctcgccaaaggcactgaaggaaaaattgcccgtaacggagcatattgccgatacggtctacaaggctaggcaggaagttgagaatattctgaccggcaaggacagccgtatgctggtcatcgtcggcccatgctccattcacgacatcaaggcggctcgtgactatgcctcgcgcctttttgctttgcgcaaagaactcgaatcggagttctgcattgtcatgagggtttatttcgagaaaccacggacgaccatcggctggaaagggttcatcaacgaccctcatctcaacgatacctacgatatcgagcatggcctgttccatgcccgaaagctgttgattgagctgaatgaaatgggcctgcccgcagccacggagtttctcgatccgatctcgccgcaatatgttgctgacctgatcagctgggcagccattggcgcgcgtaccatcgagtcacagactcaccgccagatggccagtggcctgtcaatgccggtcggttttaaaaacgcgaccgatgggcgccttcaggtggccatcgacgctattcggtcggcgatgcaccagcacagttttctcggaatcgaccaagacgggcacagcagcgtcatcaccaccaaagggaacccgtttggccatctcgtgctgcgcggcggctctagcaagccgaactacgatgccgacagcatcgcccatgctgaaaaacagttgcgcaaggccgacctgactccgcatctgctggtcgattgcagccatgctaactccggcaagaagtgtggtaatcagctcaaggtctgggccgatattcttgcccagaaggagcagggcaacaccagcatcgtaggggtcatgatcgagagcaatatcttctctggaaaccagcctttcccggtcgatccgagagagctgcaatacggcgtctcgattaccgacgagtgcgtctcttgggaggagaccgagaggatgcttcgggatggagccgcattcatgaagcaggttcgctcgaaagcctga

SEQ ID NO: 1524 - protein, 353 aa, Chlorobium tepidum
MQQLQDLRVSRIITLSSPKALKEKLPVTEHIADTVYKARQEVENILTGKDSRMLVIVGPCSIHDIKAARDYASRLFALRKELESEFCIVMRVYFEKPRTTIGWKGFINDPHLNDTYDIEHGLFHARKLLIELNEMGLPAATEFLDPISPQYVADLISWAAIGARTIESQTHRQMASGLSMPVGFKNATDGRLQVAIDAIRSAMHQHSFLGIDQDGHSSVITTKGNPFGHLVLRGGSSKPNYDADSIAHAEKQLRKADLTPHLLVDCSHANSGKKCGNQLKVWADILAQKEQGNTSIVGVMIESNIFSGNQPFPVDPRELQYGVSITDECVSWEETERMLRDGAAFMKQVRSKA

SEQ ID NO: 1525 - DNA, 1074 bp, Xanthomonas campestris
  CDS (1)..(1074)
atgccgccgctgaccgatgacctgcgtatccgcaagatcgaaccgttgaccccgccctcgcagctgctgtcgctgctgccctgcgatgagcgcgcttccgaaaccgtcaccaacgcacgtgccgccctgcacgagattctgcacgggcgcgatgaccgcctggcggtggtgatcggcccctgttcgatccacgaccctgtggctgccatggagtacgcgcagcgtctgcgccccttgcgtgagcagtttggcgacgcgctggaaatcgtgatgcgcgtgtacttcgaaaagccgcgcaccaccattggctggaagggcctgatcaacgacccggacctggatggcagtttccagatcaacaagggcctgcgcgtggcgcgtggcttgctgcgcgatatcaacaacctcggcctgccggccggcgtggaatttctcgacatcatctcgccgcagtacatcgctgacttggtggcctggggcgcgatcggtgcgcggaccaccgaaagccaggtgcatcgcgaaatggcctccggcctgtcgtgcccagtggggttcaagaacggcaccggtggcgacgtcaagattgccgtggacgcggtgggtgcggcctcgcatccgcatcatttcctggcggtgaccaaggatggccacacggcggtggcggccaccgcgggcaacccggattgtcatgtgattttgcgtggcggcaagcagcctaacttcgacgcggccaatgtggaagcatccagccaggtgctcaacaaggccggcttgccggcgcggctgatgatcgacgccagccacgccaacagcggcaagaacccggacaaccagcccaaggtcatcgacgacatcgccacgcagctggagggcggcgagacgcgcatcgttggcgtgatggtggaaagccacctggtcggcggccggcaggaactggtgccgggcggcacgctgacctacggccaaagcatcaccgacggctgcctggattgggacgcctcgctgcaggtgctggagcgcttggcgattgcggtgcgtgcacgtcgtgcgcggcgggttgccgaggctgcgtga

SEQ ID NO: 1526 - protein, 357 aa, Xanthomonas campestris
MPPLTDDLRIRKIEPLTPPSQLLSLLPCDERASETVTNARAALHEILHGRDDRLAVVIGPCSIHDPVAAMEYAQRLRPLREQFGDALEIVMRVYFEKPRTTIGWKGLINDPDLDGSFQINKGLRVARGLLRDINNLGLPAGVEFLDIISPQYIADLVAWGAIGARTTESQVHREMASGLSCPVGFKNGTGGDVKIAVDAVGAASHPHHFLAVTKDGHTAVAATAGNPDCHVILRGGKQPNFDAANVEASSQVLNKAGLPARLMIDASHANSGKNPDNQPKVIDDIATQLEGGETRIVGVMVESHLVGGRQELVPGGTLTYGQSITDGCLDWDASLQVLERLAIAVRARRARRVAEAA

SEQ ID NO: 1527 - DNA, 1074 bp, Xanthomonas axonopodis
  CDS (1)..(1074)
atgccgcccgtcaccgatgacctgcgtatccgcaagatcgaagccctcgcaccgcccgcgcagctgctgtcgctgctgccctgcgatgagcgcgcctccgaaaccgtgaccaacgcgcgcgccgcgctgcacgacatcctgcatgggcgcgacgaccgcctggccgtggtgatcgggccatgctcgatccacgacccggtcgcggcgatggagtacgcgcaacgcttgcgcccgttgcgcgatcagttcggcgacgcgctggagatcgtgatgcgggtgtacttcgaaaagccgcgcaccaccatcggctggaagggcttgatcaacgatccggacctggacggcagcttccagatcaacaagggcctgcgcgtggcgcgtggcctgctgcgcgatatcaacaatctcggcctgccggccggcgtggaatttctcgacatcatttcgccgcaatacatcgccgacctggtggcctggggcgcgatcggcgcacgcaccaccgagagccaggtgcatcgcgaaatggcgtccgggctgtcatgcccggtgggcttcaagaacggcaccggtggcgacgtcaagattgcggtggacgcggtgggcgcggcctcgcatccgcatcatttcctggccgtgaccaaggacggacataccgccgtggcagcgacggcgggcaatccggattgccatgtgatcctgcgcggcggcaaacagcccaacttcgatgcggccaatgtggaagcggccagccaggtgctcaatgcatccggcctgcccgcgcgcctgatgatcgatgccagccacgccaacagcagcaagaatcccgagaaccagcccaaggtcgtcgaggacatcgccaaccagctggaaggcggcgaaacacgcatcgtcggcgtgatggtggaaagtcacctggtcggtggacgccaggacctcttgccggggtgcgagctgacctacggccagagcattaccgacggctgcatcggctgggacagttcggtgcaggtgctggaacgcctggcgaccgcagtgcgcgcacggcgcatgcgccggattgccgaggctgcatga

SEQ ID NO: 1528 - protein, 357 aa, Xanthomonas axonopodis
MPPVTDDLRIRKIEALAPPAQLLSLLPCDERASETVTNARAALHDILHGRDDRLAVVIGPCSIHDPVAAMEYAQRLRPLRDQFGDALEIVMRVYFEKPRTTIGWKGLINDPDLDGSFQINKGLRVARGLLRDINNLGLPAGVEFLDIISPQYIADLVAWGAIGARTTESQVHREMASGLSCPVGFKNGTGGDVKIAVDAVGAASHPHHFLAVTKDGHTAVAATAGNPDCHVILRGGKQPNFDAANVEAASQVLNASGLPARLMIDASHANSSKNPENQPKVVEDIANQLEGGETRIVGVMVESHLVGGRQDLLPGCELTYGQSITDGCIGWDSSVQVLERLATAVRARRMRRIAEAA

SEQ ID NO: 1529 - DNA, 1080 bp, Ralstonia solanacearum
  CDS (1)..(1080)
atgccgaagaacaccgacgacctgcgcattcgcgaactgaaagagctgaccccgccggcgcacctgatccgcgaattcccgtgcaacgacgccgtttccgagctgatctaccagagccgcacggcgatgcaccgcatcctgcacggcatggacgaccgcctgatcgtcatcatcgggccgtgctcgatccacgacaccaaggccgccctcgactacgcgcgccgcctggtcgaacagcgcgagcgcttcaaggccgacctggaaatcgtcatgcgcgtgtacttcgagaagccgcgcaccacggtcggctggaagggcctgatcaacgacccgtacatggacggcagcttcaagatcaacgacggcctgcgcaccgcgcgcgagctgctggtgaacatcaacgagctgggcgtgccggcgggcaccgaatacctcgacatgatcagcccgcagtacatcgccgacctggtgagctggggcgcgatcggggcgcgcacgaccgaatcgcaggtgcaccgcgaactcgcctccggactgtcgtgcccggtcggcttcaagaacggcaccgatggcaacgtgaagatcgccgtggacgcgatcaaggcggcgtcgcagccgcaccacttcctgtcggtcaccaagggcggccactcggccatcgtgtcgacggcgggcaacgaggattgccacatcatcctgcgcggcggcaaggcgcccaactacgatgccgccagcgtgcaggcggcctgcgaagacatcgccaagtccggcctggccgcgcgcctgatgatcgatgcctcgcacgccaacagcagcaagaagcacgagaaccagatcccggtctgcgaagacatcggccgccagatcgccggcggcgacgaccgcatcgtcggcgtgatggtggaatcgcacatcaatgccggccgccaggaccacgtgcagggcaccccggtcgaggacctgaactacggccagagcgtgaccgacgcctgcatcggctgggacgattcgctcaaggtactggaaacgctggccgacgccgtgcgcaagcgccggctggtgccccgcaacggcaactga

SEQ ID NO: 1530 - protein, 359 aa, Ralstonia solanacearum
MPKNTDDLRIRELKELTPPAHLIREFPCNDAVSELIYQSRTAMHRILHGMDDRLIVIIGPCSIHDTKAALDYARRLVEQRERFKADLEIVMRVYFEKPRTTVGWKGLINDPYMDGSFKINDGLRTARELLVNINELGVPAGTEYLDMISPQYIADLVSWGAIGARTTESQVHRELASGLSCPVGFKNGTDGNVKIAVDAIKAASQPHHFLSVTKGGHSAIVSTAGNEDCHIILRGGKAPNYDAASVQAACEDIAKSGLAARLMIDASHANSSKKHENQIPVCEDIGRQIAGGDDRIVGVMVESHINAGRQDHVQGTPVEDLNYGQSVTDACIGWDDSLKVLETLADAVRKRRLVPRNGN

SEQ ID NO: 1531 - DNA, 1179 bp, Ralstonia solanacearum
  CDS (1)..(1179)
atgggcaatcggcggactgccccggtttcggcgcaccgctcgtgtttccaggagttttccgtgattcgcatcgacaatccccaaagcgaccaagaagtcggcgtggccgacgctacccaggacaccacccgcatcgatgacgtgcgcatcggtgcggtccgtccgctcatttccccggcactcctgctcgacgagttgcccgtgtcgcccgccgtgcaggcgcacgtcgaagcgagccgggccgcggtcacggacatcctgcacggacgggacgatcgcctgcttgccgtggtgggcccgtgctcgatccacgatcacgaccaggcgctcgactacgcccatcggctcgggacggccgcgaatcgcctgcgcgacgatctgctgatcgtcatgcgcgtgtatttcgaaaagccgcgcacgaccgtcggctggaagggctacatcaacgatccgcggctcgacggcagcttccgcatcaacgaagggctgcgccgtgcgcgccagttgctcctggaagtcaacgcgatgggattgccggcggccaccgagtttctcgatctgctgagtccgcagtacatcgcggacctgattgcctggggcgcgatcggcgccaggacgacggaaagccagagccatcggcagctcgcctcgggactgagctgtcccatcggcttcaagaacggcacggatggcggtgtccagatcgcggcggacgcgattctggcggcgcggtcgagccactcgttcatgggcatgacgaagatggggatggccgcgattttcgagacgcgcggcaacggtgatgcgcacgtcattcttcgcggcggcaagaagggaccgaactatgacgcggcggccatcgaagacagctgcgcgattctccgggcggccgggctgcgcgagcaggtgatggtcgactgttcgcacgcgaactcgggcaagtcccatgcccgtcaagccgacgttgcgcgggatctggcgcagcagctgtcgtccggcgagcggcgcatcagcggcgtgatgatcgagagccatctggaagaggggcgccaggatctgaaacccggcgtgccgttgcagcgcggcgtgtccattaccgatgcctgccttgggtggtcccagacggaaccgttgctggaaaccctcgcaacggctgtgcgtgcgcggcggcgcggctag

SEQ ID NO: 1532 - protein, 392 aa, Ralstonia solanacearum
MGNRRTAPVSAHRSCFQEFSVIRIDNPQSDQEVGVADATQDTTRIDDVRIGAVRPLISPALLLDELPVSPAVQAHVEASRAAVTDILHGRDDRLLAVVGPCSIHDHDQALDYAHRLGTAANRLRDDLLIVMRVYFEKPRTTVGWKGYINDPRLDGSFRINEGLRRARQLLLEVNAMGLPAATEFLDLLSPQYIADLIAWGAIGARTTESQSHRQLASGLSCPIGFKNGTDGGVQIAADAILAARSSHSFMGMTKMGMAAIFETRGNGDAHVILRGGKKGPNYDAAAIEDSCAILRAAGLREQVMVDCSHANSGKSHARQADVARDLAQQLSSGERRISGVMIESHLEEGRQDLKPGVPLQRGVSITDACLGWSQTEPLLETLATAVRARRRG

SEQ ID NO: 1533 - DNA, 1065 bp, Synechococcus sp
  CDS (1)..(1065)
atgaaacagacttccgatctccacgtcgtcgagacgcgttccttgatcagtcctgcggaaattcaccagaagctgcccctttccgagacagcagcagacttggtggcttctacccgcgatcgcgttcgtagcattttgcgcaatagcgatcgccgcctgttggtgattgtcgggccctgctccattcacgacgtcaacgcagcttacgactacggccaaaagctcttgccactgcgcgaagagctggcggatgaacttgaaatcgtgatgcgggtctactttgaaaagccccgcacgacggtcggctggaaaggattgatcaacgatccccacctcgacggcagctacgacatcaataccggcatccagcgggctcgcaagttattgctcggtttggcagatatgggcttgcccgccgcgacagaactgctcgacccgattattccgcagtacatcgctgatgtaattgcttggacggcgattggggcgcgaaccaccgaaagtcaaactcaccgcgaaatggcttcgggcctgtcgatgccgatcggcttcaaaaatggcaccgatggtagcttccatatcgcagccaatgccatgctttccgccagccagccccaccatttcctgggaattaaccatgacggtctggccagcattgtctcgaccaccggcaatccagacggtcatttagtgctgcgcggcggcagcaaaggtccaaattacgcagcagcggacattgaagaagcagcctatcaactggctagcatgggcctccatgcacgagtgatggtggactgcagccacggcaactccaacaaggactatcgccgtcagtcagtggtgctctcagatctggccgaacaggttgctgagggatcgcgtcacctgatgggcgtgatgattgaaagccacctggttgaaggcaatcaacccatcccagccgacttgtcagagttgcgctacggccaaagcatcaccgatccctgcgtcgactttccgaccacagagaaaatgctgcgggagctagcccgagcccagcgcggcttagtcccgtccttggcttaa

SEQ ID NO: 1534 - protein, 354 aa, Synechococcus sp
MKQTSDLHVVETRSLISPAEIHQKLPLSETAADLVASTRDRVRSILRNSDRRLLVIVGPCSIHDVNAAYDYGQKLLPLREELADELEIVMRVYFEKPRTTVGWKGLINDPHLDGSYDINTGIQRARKLLLGLADMGLPAATELLDPIIPQYIADVIAWTAIGARTTESQTHREMASGLSMPIGFKNGTDGSFHIAANAMLSASQPHHFLGINHDGLASIVSTTGNPDGHLVLRGGSKGPNYAAADIEEAAYQLASMGLHARVMVDCSHGNSNKDYRRQSVVLSDLAEQVAEGSRHLMGVMIESHLVEGNQPIPADLSELRYGQSITDPCVDFPTTEKMLRELARAQRGLVPSLA

SEQ ID NO: 1535 - DNA, 1035 bp, Escherichia coli
  CDS (1)..(1035)
atgcagtcagtcagtaaatcaatctaccgagggaagttgcttggcagtttacctgctgtgggcgagattcataaagaaatcgcagtatcagaagaaaccgtaacatggatctctctgcaacgagagattatagcgaatattttgctgggaaaagatcctcgcttgcttgtgattgttggtccatgctcaatccatgacgttcaggctgccgttgaatatgcgaaacgattgtccgtattacagaataagtacttatcgcaaatgtacattgtaatgcgcacttattttgagaaacctcgaactcgtaaaggctggaaaggaataatgcacgagcctgatctaaatggaagctataatgttgagaaagggatacgatatgctcgccagtgtttgtcctcaatcacaacaatgcgtgtcgcaaccgctacagaattcctcgatcctttccttactccctatattgctgatttaatatgttggggggctgttggtgccagaactactgaatcacaaacgcatcgtcaacttgcatctggtttacattgtcctgttggatttaaaaacagcactgatggaaatattaacttagctattgatgctattcttgcagcccgtgaacaacatgttgtatatatgacatctttaacaaaatgtatatctaccctattaaccgatggcaatccacatggacatctcatattacgtggtggtagagagccgaactatggtttgtcggatataacgaaggcagtgaaattaatgcatgatgaaggtatcaatcatcgtctgataattgactgtagccatggtaatagtggtaaagtggctgaacggcaaatctctgttgctcgtgaagtcattgataatcggaaaaagatgccgggatatgtagctggaattatgctggaaagctttttacaaggtggaaaacaatcagacagccttccgcgagagtatggtcagtctgttactgatgagtgtctttcatggcaacagacagaacaattattatcaactctggcagcacaactttaa

SEQ ID NO: 1536 - protein, 344 aa, Escherichia coli
MQSVSKSIYRGKLLGSLPAVGEIHKEIAVSEETVTWISLQREIIANILLGKDPRLLVIVGPCSIHDVQAAVEYAKRLSVLQNKYLSQMYIVMRTYFEKPRTRKGWKGIMHEPDLNGSYNVEKGIRYARQCLSSITTMRVATATEFLDPFLTPYIADLICWGAVGARTTESQTHRQLASGLHCPVGFKNSTDGNINLAIDAILAAREQHVVYMTSLTKCISTLLTDGNPHGHLILRGGREPNYGLSDITKAVKLMHDEGINHRLIIDCSHGNSGKVAERQISVAREVIDNRKKMPGYVAGIMLESFLQGGKQSDSLPREYGQSVTDECLSWQQTEQLLSTLAAQL

SEQ ID NO: 1537 - DNA, 1200 bp, Stigmatella aurantiaca
  CDS (62)..(1147)
aattcagcgaaaccttggaatcgggccccctccatcggccaagatggcggcgagaccgcacatgaccgctcgcactgaaaatctgaacgtagttggtttcgaccacatgccctccccctccgagatcaaggagcgcgtgccgatgacaagcctcgcagccgacaccgtgctctccggacggcgcgcgctgatggacatcctcaaccgcaaggatccacgcatcttcgtcatcgtgggcccctgctccatacatgatcccaaggccggcatcgagtacgcccgtcgacttcgcaacctctccgacgagatccgggagacgatcctcgtggtgatgcgggtgtacttcgagaaaccgcgcacctccaccggctggaagggcttcatcaacgacccgaggatggacgactccttccacatcgaggaaggcatggagcggggccgccgcttcttgagggacgtggccgaactgggcctgcccgcggcgaccgaagcgctcgatcccattgccccccagtattacggcgacctgatttcctggacggcgattggcgcgcgcacggcggagtcccagacccaccgcgagatggcctcggggctgtcgacgcccgtgggcttcaagaacggaaccgacggctcgctggacgcggcggtcaacggcatcctctccgcctcgcacccccacagcttcctggggctgaacgagggcggtgaggcggcgatcatccgcaccggaggcaatgcctacagccacctggtgctccgaggcggagggggacggcccaactacgacacggtgtccatcgcgctcgccgaacaggcgctcaccaaggccaagctgccggggaacatcgtggtggactgctcccacgccaactcctggaagaagccggagttgcagcccctggtcatgcgcgacgtggtgcaccagatccgcgaaggcaaccgctccgtggtgggtttgatgctcgaaagcttcctggaagcgggcaaccagcccatccccgccgatctctcgaagctgcgctacggctgctcggtgaccgatgcgtgcgtggactggggcaccaccgaagagacgctgcgcaacgcccacaaggtgctgcgcgaggcattgcccacgcggagctcgggccgcccagcgccctgaacttgcgccccacccctctccgccctgctcgggggcggagaggcgctgtcaca

SEQ ID NO: 1538 - protein, 361 aa, Stigmatella aurantiaca
MTARTENLNVVGFDHMPSPSEIKERVPMTSLAADTVLSGRRALMDILNRKDPRIFVIVGPCSIHDPKAGIEYARRLRNLSDEIRETILVVMRVYFEKPRTSTGWKGFINDPRMDDSFHIEEGMERGRRFLRDVAELGLPAATEALDPIAPQYYGDLISWTAIGARTAESQTHREMASGLSTPVGFKNGTDGSLDAAVNGILSASHPHSFLGLNEGGEAAIIRTGGNAYSHLVLRGGGGRPNYDTVSIALAEQALTKAKLPGNIVVDCSHANSWKKPELQPLVMRDVVHQIREGNRSVVGLMLESFLEAGNQPIPADLSKLRYGCSVTDACVDWGTTEETLRNAHKVLREALPTRSSGRPAP

SEQ ID NO: 1539 - DNA, 1092 bp, Rhizobium loti
  CDS (1)..(1092)
atgttgaccaccacagacgacctccgggtcaaggaaatccgagaactgagcacgccggaccaggtgatgcgggaaatcccgcgcacgctgacggcgacgcgcaccgtgagcgcctcacgcaatgcgatccacgctattctgaacggcaccgacgaccggctgcttgtcgtcgtcggtccctgttcgatccacgatccggtcgcggccgttgactatgccagccgtctggcggcgctgcgcgagaccctgtccgaccggcttgagatcgtgatgcgggtgtatttcgagaagccgcgcaccacggtcggctggaagggcctgatcaacgatcccgaccttgacggcagcttcaacatcgacaaggggctcaggatggcacgcaacgtgctttccgccgtcaacaatctcggcctgccggcggccaccgaattcctcgacatgaccacgccgcaatacattgccgacctcgtcgcctggggtgccatcggcgcgcgcaccaccgaaagccaaatccaccgtgagctggcctcgggcctgtcctgcccggtcggtttcaagaacggcaccgacggcaatctcaggatcgccggcgaggcggtgaaatcggccgcccagccgcatcatttcatggcggtgaccaagggcggacgcagcggcatcgccaccaccaccggcaatgaggactgccatgtcatcctgcgcggcggcgttcagcccaactacgacgcggcgagcgtcgaggcggcctcggtcgaactcgcccgcatcggtgtcgcgccgcggctgatgatcgatgtcagccacgccaactccgccaagaagcctgagaaccagccgaaggtggcggccgatgtggccggccaggtggcggcgggcgacgagcgcatcatcggcctgatgatcgagagcaatctcgtcgccggccggcaggacgtggtgcccggcaagccgctcgtctatggccagagcatcaccgatggctgcatcgactgggcgaccaccgagaccgtgctgcatggccttgccggtgccgtcgagtggcgccggtcggcacgccgcgccatgctggaaagccggcagggtgctgcctga

SEQ ID NO: 1540 - protein, 363 aa, Rhizobium loti
MLTTTDDLRVKEIRELSTPDQVMREIPRTLTATRTVSASRNAIHAILNGTDDRLLVVVGPCSIHDPVAAVDYASRLAALRETLSDRLEIVMRVYFEKPRTTVGWKGLINDPDLDGSFNIDKGLRMARNVLSAVNNLGLPAATEFLDMTTPQYIADLVAWGAIGARTTESQIHRELASGLSCPVGFKNGTDGNLRIAGEAVKSAAQPHHFMAVTKGGRSGIATTTGNEDCHVILRGGVQPNYDAASVEAASVELARIGVAPRLMIDVSHANSAKKPENQPKVAADVAGQVAAGDERIIGLMIESNLVAGRQDVVPGKPLVYGQSITDGCIDWATTETVLHGLAGAVEWRRSARRAMLESRQGAA

SEQ ID NO: 1541 - DNA, 1083 bp, Amycolatopsis mediterranei
  CDS (1)..(1083)
atgacgctctccgccggaccggccaccatcggtgacctcgacgccgcccgcaccacgtcgatcagtccgctcatttcgcccgcactgctgcgcgaagaccatccggtcgacgccgcggtcgcgaaggtggtgcgccacggccgcgccgagacggtcgacatcctcgaaggccgcgacgaccggctgctcgtcgtggtcggcccgtgctcggtgcatgaccccgaagccgccctcgactacgcccgccggctggcggcgaaggccgaggagctgcgcggcgagctgcacgtcgtgatgcgcgtgtacttcgagaagccgcgcaccacgctgggctggaagggcctgatcaacgacccggacctcgacggcacgttctccgtcaacaagggcctgcggatggcgcgcaagctgctgctcgacgtgtccgagctggggttgccggtcggctgcgagttcctcgacccgatcacgccgcagttcatcgcggacatcgtgacgtggggttcgatcggtgcccgcacggcggccagccaggtccaccgccagctgtgcagcgcgctgtcgatgccggtgggcatcaagaactccaccgagggcgacgtccaggtggcgatcgacgccacccgcgcggcggcggccagccacgtgttcccgggcatcaacaccgacggcctggcggcgctgctgacgacgtccggcaacccggactgccacgtgatcctgcgcggccacaacaccggcccgaactacgactcgctcactgtcgccgacaccctggcccggctggcgaaggcgggcctgccggagcgggtgatcatcgacgcttcgcacgggaacagcggcaaggaccacgtgcggcagggcgcggtggtgtccgagctggctgcgcggatcgcggcgggcgagcgcgggatttccgggctgatgatggagagcttcctggccggtgggcggcaggagctttcgctggggcacgcctcggagctgacctacgggcagtcgatcacggacgcgtgcctggcctgggacgacaccgcgccgctgctggacgagctcgcctcggcggtgcgggcgcgccgctga

SEQ ID NO: 1542 - protein, 360 aa, Amycolatopsis mediterranei
MTLSAGPATIGDLDAARTTSISPLISPALLREDHPVDAAVAKVVRHGRAETVDILEGRDDRLLVVVGPCSVHDPEAALDYARRLAAKAEELRGELHVVMRVYFEKPRTTLGWKGLINDPDLDGTFSVNKGLRMARKLLLDVSELGLPVGCEFLDPITPQFIADIVTWGSIGARTAASQVHRQLCSALSMPVGIKNSTEGDVQVAIDATRAAAASHVFPGINTDGLAALLTTSGNPDCHVILRGHNTGPNYDSLTVADTLARLAKAGLPERVIIDASHGNSGKDHVRQGAVVSELAARIAAGERGISGLMMESFLAGGRQELSLGHASELTYGQSITDACLAWDDTAPLLDELASAVRARR

SEQ ID NO: 1543 - DNA, 1053 bp, Pasteurella multocida
  CDS (1)..(1053)
atgaataaagataacatacataatgtcaatattgttggtgaaaaggtactgattaccccaaaagaattgaaggaaaaactccctctatcccttcctcttcgtagccaaatagcgcaatcacgccgtgatattgcgaatatcatccataaaaaagatcagcgtttattggttgtgattggaccatgttctattcatgatccgatcgcggctttagaatacgcttcacgtttaaaacacttagcagaagaattacaagatcaattgtatattgtgatgcgagtgtattttgaaaaaccaagaacaactgttggctggaaaggattgattaatgatccgaaattggatggttcatttgatgtggaacatggcttacatattgcacgagcattactgctagagctggctgaaatgggactccctttggcaaccgaagcacttgatcccattatgccgcaatatattgctgatctatttagttggtctgcgattggtgcgagaacgacagaatcacaaacgcacagagaaatgtcatcaggtttatccatggcagtgggatttaaaaatggtacggatggcagtttagccaccgcaattaatgcaatgaaagcagcgtcagttggacacagttttattgggattaatcaacaaggtcaagtcaatctattacatacagcgggcaaccctaatgggcatgtgattttgcgtggcggaaaatcaccaaattatgaagctgaacatatcgcactttgtgaacaagaattgcaaaaagcaggtttgacgcaagcaattatgatcgattgtagccatggtaactcgaataaagattaccgtttgcagccgaaagtggcaaaaaatgccgtacagcaaattgtgaagggaaatcgctctattatcgggttgatgttagaaagtcatttatacgcaggtaatcaaagtgctgatcagccattgagtgaaatgcaatatggggtttcgattacggatgcctgtattgattggcagacgacagaacaattattacgtgaaatgacgagcgcattgcgccaaaaataa

SEQ ID NO: 1544 - protein, 350 aa, Pasteurella multocida
MNKDNIHNVNIVGEKVLITPKELKEKLPLSLPLRSQIAQSRRDIANIIHKKDQRLLVVIGPCSIHDPIAALEYASRLKHLAEELQDQLYIVMRVYFEKPRTTVGWKGLINDPKLDGSFDVEHGLHIARALLLELAEMGLPLATEALDPIMPQYIADLFSWSAIGARTTESQTHREMSSGLSMAVGFKNGTDGSLATAINAMKAASVGHSFIGINQQGQVNLLHTAGNPNGHVILRGGKSPNYEAEHIALCEQELQKAGLTQAIMIDCSHGNSNKDYRLQPKVAKNAVQQIVKGNRSIIGLMLESHLYAGNQSADQPLSEMQYGVSITDACIDWQTTEQLLREMTSALRQK

SEQ ID NO: 1545 - DNA, 1086 bp, Pasteurella multocida
  CDS (1)..(1086)
atgacagaatataaaaatgaaatttatatcgaaaatgatgacaccagaattgataaaattgagcaagttttaccgcctgtggcgttattagaaaaatttcctgccagtgatgtggcagtagaaaccgtcagacaaacacgaaaaaaagcacataatattattcatcgaaaagatgaccgtttattagttgtcatgggaccttgttccattcatgatcctgtttctgcgctggagtatgcgaaacggattaaaatgatgcgcgaaaaataccaagatagcttggagattattatgcgtgtctattttgaaaaaccgcgaaccacggtagggtggaaaggcttgattaatgatcctcacctaaatggtacctttgagctgaatgaagggttgcgtcttgcgcgtaaattattatcggacgttaatgatttaggggtaccggctgcgggtgaatttttggacatgattacaccacaatatctggctgatttcatgagttggggtgcgattggtgccagaaccacagaatcacaggtgcaccgtgaacttgcctctggtctatcttgtgcagttggctttaaaaatggcacgaatggtggggtcagaatcgcgttagatgcgattggggcagcagaagcaccacattattttctttctgtcacgaaatttggtcattctgcgattgtatctacaaaagggaatgaagactgccacattattttacgaggcggtgataaaggtcctaattatgatgcagagcatattgctatggtttgtgcagagatcgaaaaaacagggcgtattccacatgtgatggtcgatttcagccatgctaacagttgtaaacaatttaaaaaacaattagaggtttgtgacagtgtttgccagcaaatcgctatgggttctactcaaatctttggtgtgatggtagaaagccatcttgttgaagggcgacaagatttagtagatggaaaagcggtcacttatgggcagagtatcacggacgcctgtattgggtgggaagatagcgagaaagttttggaatcgctttcaaaagctgtcatccaacgccgaaatttgcagcaataa

SEQ ID NO: 1546 - protein, 361 aa, Pasteurella multocida
MTEYKNEIYIENDDTRIDKIEQVLPPVALLEKFPASDVAVETVRQTRKKAHNIIHRKDDRLLVVMGPCSIHDPVSALEYAKRIKMMREKYQDSLEIIMRVYFEKPRTTVGWKGLINDPHLNGTFELNEGLRLARKLLSDVNDLGVPAAGEFLDMITPQYLADFMSWGAIGARTTESQVHRELASGLSCAVGFKNGTNGGVRIALDAIGAAEAPHYFLSVTKFGHSAIVSTKGNEDCHIILRGGDKGPNYDAEHIAMVCAEIEKTGRIPHVMVDFSHANSCKQFKKQLEVCDSVCQQIAMGSTQIFGVMVESHLVEGRQDLVDGKAVTYGQSITDACIGWEDSEKVLESLSKAVIQRRNLQQ

SEQ ID NO: 1547 - DNA, 1125 bp, Emericella nidulans
  CDS (1)..(1125)
atgtcctccttcttccttccaaatcctaatttaggagatagcaatcaccttgaggattcaagaatccgcggatacaaccctctcacaccacccaacctcctgcaacatgagattgctctaacagagaaagcgcggcaaacggtccttcaaggccgagccgaggccattgccgtcgcccacggcacagacacagacaagcgccgcctcctcgtcgtcattggaccctgctcaattcacgaccccgaaatggccttagagtactgcgaccggctattgaaattgaaggagaaatacaaggatgagttgctaattgttatgcgctcttatctggagaagccccgaacgaccgtcggttggaagggcctcatcaacgacccggatatcgacaacagcttcaacatcaacaagggcctgcgcatctcgcgtcagctcttcgtcgacttgaccaacaagggaatgccaattgccagtgagatgctggacactatctccccgcagtttctggcggactgtctctccgtcggtgcggtcggcgcacggacaaccgaatcgcaggtccatcgtgaattggcctctgggctctcgttccccgttggcttcaagaacggtacagatggctcgttagacgtcgcggttgatgcgattggatccgtaaaacaccctcatcacttcctgtccgtcaccaagcctggtgttgtcgccattgtcggtaccgttggcaatcctgattgctttgttatcctccgcggcggcaagaaagggccgaactacgatgctgctagcatcaccgaagcaaaggagaagctcatagctaagggtctggcaccccgtctgatggtcgactgcagccacggcaactcacaaaaggatcacaagaaccagcctaaggtggcagctgttcttgcggagcagattgctgcaggcgaaaccgcaatcatgggcgtcatgatagagagtaatatcaacgagggcaaccaaaaggtcccacccgagggcaaggccggcctcaaatacggcgtcagtatcaccgacgcctgtatcaattgggaagacaccgagtcaacgctagagacccttgcaaaggctgttgcgactcggagagaaaagctcgcccccagttcatag

SEQ ID NO: 1548 - protein, 374 aa, Emericella nidulans
MSSFFLPNPNLGDSNHLEDSRIRGYNPLTPPNLLQHEIALTEKARQTVLQGRAEAIAVAHGTDTDKRRLLVVIGPCSIHDPEMALEYCDRLLKLKEKYKDELLIVMRSYLEKPRTTVGWKGLINDPDIDNSFNINKGLRISRQLFVDLTNKGMPIASEMLDTISPQFLADCLSVGAVGARTTESQVHRELASGLSFPVGFKNGTDGSLDVAVDAIGSVKHPHHFLSVTKPGVVAIVGTVGNPDCFVILRGGKKGPNYDAASITEAKEKLIAKGLAPRLMVDCSHGNSQKDHKNQPKVAAVLAEQIAAGETAIMGVMIESNINEGNQKVPPEGKAGLKYGVSITDACINWEDTESTLETLAKAVATRREKLAPSS

SEQ ID NO: 1549 - DNA, 1089 bp, Emericella nidulans
  CDS (1)..(1089)
atgagcggtcaaaacgaagatacccgcgtcctgggttacgaccctctgctttcgcctgagtttgttcagtccgagattccttctaacgagcactccattcctacggtccgctctggccgcaaccaggctgtcgaaattattgaacagcgcgatgaccgccttctagtggtcgttggcccttgctccatccacgatcccgaaaccgccctcgaatatgccactcgtcttaaggaacttgctgctcgtctctcctccgacctctgcgtcatcatgcgcgcctacctcgaaaagccccgcacaacagttggatggaaaggtctgatcaacgaccctgatattgacgagtcctaccagatcaacaagggtctccgcgtgtcccgcaagctctacgccgacctcacaggcatgggcatgcctattgccagcgagatgctcgacaccatctccccgcagtacatggctgacctgatttccctcggtgccattggtgcccgcaccaccgagtcgcaactgcaccgtgagcttgcctccggtctcagtttccccatcggttacaagaatggcactgacggcaacctgaccgttgccattgacgcgatcggcgctgctgcccacccccaccgcttccttggtgtcaccaagcaaggtcttgcggccattaccaagaccgccggtaaccctcacggcttcgtgattatgcgtggaggaaacaagggcacaaattacgaccgcgagagcatccagggggcccgcgaagcccttcgcggcaagaagcagcgtgaggttctcatggttgactgctcacatggcaactccaagaaaaaccaccgtaaccagcctctcgttgccaaggaggtcgctgaccaactccgtgagggccaggatgccatcattggtgtcatgattgaatccaacatcaacgagggtaaccagaaggttccccctgagggtccctccggtctcaagaagggtgtcagtatcaccgatgcctgcattgactgggagaccaccgtcactgtgttggaggacctcgccgatgccgtccgtgccaggcgcgccgtcaagtcaaaagccaacggtactgcttaa

SEQ ID NO: 1550 - protein, 362 aa, Emericella nidulans
MSGQNEDTRVLGYDPLLSPEFVQSEIPSNEHSIPTVRSGRNQAVEIIEQRDDRLLVVVGPCSIHDPETALEYATRLKELAARLSSDLCVIMRAYLEKPRTTVGWKGLINDPDIDESYQINKGLRVSRKLYADLTGMGMPIASEMLDTISPQYMADLISLGAIGARTTESQLHRELASGLSFPIGYKNGTDGNLTVAIDAIGAAAHPHRFLGVTKQGLAAITKTAGNPHGFVIMRGGNKGTNYDRESIQGAREALRGKKQREVLMVDCSHGNSKKNHRNQPLVAKEVADQLREGQDAIIGVMIESNINEGNQKVPPEGPSGLKKGVSITDACIDWETTVTVLEDLADAVRARRAVKSKANGTA

SEQ ID NO: 1551 - DNA, 1239 bp, Vibrio cholerae
  CDS (114)..(1175)
cggtttttacttcaatttacacccctttccgcagctgttttcggcgtaatggtttattctcgttgacaaattcgttatctttagcgcttcgcaataaaaggacaggcgctcctatgccactgaaaaccgatgaattaagaacccaagcattgggacctatgcctactccggcagaattaagtcacgcacatcctatcactgatgaagttgcgctacggatcgcgcagtctcgtcgccaaattgaaagcattcttaccggtgaagatgatcgcctattagtgatagtggggccttgttcggtgcatgataccgatgccgcactcgactacgctcgccgccttgctgcgctacaagaaaactatactgatgagctttttgtggtgatgcggacctatttcgaaaaaccacgtactgtggtgggttggaaaggactgatcaccgatccaaacttagatggctcttacgctttagaaaccggtctcaataaagcgcgaaagttgctgcttgatgtaaacaagctcggattggctaccgcgaccgagtttcttgatatgatcacaggccaatacatcgcggaccttatcacgtggggcgcaattggtgcgcgtaccactgagtcgcaaattcaccgtgagatggcctctgcgctctcctgccctgtgggttttaaaaatggcactaacggtaatgtgaaaatcgcgattgatgcgatccgcgcggccaaagcgtcacattacttctattcaccagataagaatggtcgtatgacggtttaccgtaccagtggtaacccatttggtcatattattctgcgtggtggtgatagcggaccaaactttgatgcggcttcgattaatgaagcttgccagcagttggcgcaattcaacttaccagagcgtttagtggtggatttcagccacgcgaactgtcaaaaacaacaccgtaaacaagtggatgtcgcgcgcgatatttgccagcaaattgaagctggcagccacaaaattgcgggcatcatggcggaaagcttccttgtggaaggcaatcagccaatgcacgatctcaataatctgacttatggtctgtcgatcaccgatccttgtttaggatggaaagataccgccaccatgcttgatatgctggctcaatcgatcaaagtccgtcgttctcgtcattaaggaaatacctcatgccttcttttgatattgtttcagaaattgatgcggttgagctgcgtaacgc

SEQ ID NO: 1552 - protein, 353 aa, Vibrio cholerae
MPLKTDELRTQALGPMPTPAELSHAHPITDEVALRIAQSRRQIESILTGEDDRLLVIVGPCSVHDTDAALDYARRLAALQENYTDELFVVMRTYFEKPRTVVGWKGLITDPNLDGSYALETGLNKARKLLLDVNKLGLATATEFLDMITGQYIADLITWGAIGARTTESQIHREMASALSCPVGFKNGTNGNVKIAIDAIRAAKASHYFYSPDKNGRMTVYRTSGNPFGHIILRGGDSGPNFDAASINEACQQLAQFNLPERLVVDFSHANCQKQHRKQVDVARDICQQIEAGSHKIAGIMAESFLVEGNQPMHDLNNLTYGLSITDPCLGWKDTATMLDMLAQSIKVRRSRH

SEQ ID NO: 1553 - DNA, 2184 bp, Candida albicans
  CDS (461)..(1573)
agggatttgctaatctacaaatggagtcataagtggtggtttgtaattgtcaagattttattgccccccctgtgttgcagaacgaagggaaaaaaaaaaaaaagtttttcattgttttattcaacggactatttacaaaatgtaatatgtgtgtttgtgatgactgaaaaaaaaacagaaaagttttttatgactaaatcaattcaaaccaccaccacgcaccatttctgaaaaatttaaaaaaggaacagaattttgccatttttcaagttttctttggaatatccaatttaataaattttttcttttcctcttttcttctcttttcccttctttacttatttctttcgcttttcttgttgatattagttattctttgtcaaataaataatatcattatataatactttcattaatttgtcttttgttaaattatttgaaagtataccagtttccttaaatgagtaaaactcctgttcctaccgaatacgacgacacaagaatattgggttacgatcctttagttccaccagccttattacaacacgaaataaaggcatctgccgaatcattggatgttgttataaaaggccgttacgattctgcccaaatccttaagggtaatgatgacagatgtattgtaattgttggtccatgttcaattcacgatcctccacaagccttagaatatggtaaacgtttgaagaaattggctgatgaattaaaagatgacttggtgattatcatgagagcttatttggaaaaaccaagaactaccgttggttggaaaggtttgatcaatgatcctgatgttgataattcttttgatattaaccgtgggttgaagatatctcgtcaattatattccgatttgactagtgttgttggattaccaattggatcagaaatgttagacaccatttctccacaatacttttccgatttcttgagttttggggccattggagctagaaccaccgaatcacaattacacagagaattagcttctggtttaagcttcccaattggatttaaaaatggtaccgatggtggtttagccgttgccttggatgccgtgcaagcttcttcaaaaggacatcacttcatgggtgtcaccaaaaacggtatggctgccattaccactactaaaggtaacgattgttgtttcattatattaagaggtggtaaaaaaatcaccaattacgatgttgaatcagttaaagctgctaaagaagctattgccaaatgtaccgatccaagtatcaagttgatggttgattgctctcacgacaactcaagaaaagactacagaaaccaacctcaagtattagacagtgttgctgaacaaataagtaatggtgaagactccattattggggttatgattgaatccaatattcatgaaggtaaacaaccaatgcccccagcaggtagtggtaaagaagcattgaaatacggtgtgtctatcaccgatggatgtgtttcttgggaaaccactgttgaaatgttgaccaaattgagtcaagcagtccaaactagaagaagtttaaagaaacaaaaagtttccaattaaatagagtgtttttaagtgaataaagtgaaaacaaaacaaaaacaaaaaacaaaaaacaacctaaaaaatttttcttcttgtgtataatttcgatacttctaatagcatatatattcttctatatatatatatatcttttgagtttttaaaagaataaataaaaagttgtttgtcttattcaacccaaaccatatccaagagtaaatctctaatattttcatttgaacgtgtagtagaggtggtggtggtggtgatgtcatcttttattgctcgtaggaaatcagccaatttcgggttactttcactatacccatggtatcgattaaatggatttcgagcaatctttttctttaacaaagatcccagtaatccataccaatcattctgaaaatgtttaacagcatatttgaattcactttcatttaattcttgaaaatatttttcaatttctaattcatcaagatcttttggatcaggggaattcccaatataattgattcctattttcaggaaataataatgcttgttgtaaatggtgttttaacaaatctttctcgttttaaattcaaatcccactatggtgattttctctggatacattgcaaataatt

SEQ ID NO: 1554 - protein, 370 aa, Candida albicans
MSKTPVPTEYDDTRILGYDPLVPPALLQHEIKASAESLDVVIKGRYDSAQILKGNDDRCIVIVGPCSIHDPPQALEYGKRLKKLADELKDDLVIIMRAYLEKPRTTVGWKGLINDPDVDNSFDINRGLKISRQLYSDLTSVVGLPIGSEMLDTISPQYFSDFLSFGAIGARTTESQLHRELASGLSFPIGFKNGTDGGLAVALDAVQASSKGHHFMGVTKNGMAAITTTKGNDCCFIILRGGKKITNYDVESVKAAKEAIAKCTDPSIKLMVDCSHDNSRKDYRNQPQVLDSVAEQISNGEDSIIGVMIESNIHEGKQPMPPAGSGKEALKYGVSITDGCVSWETTVEMLTKLSQAVQTRRSLKKQKVSN

SEQ ID NO: 1555 - DNA, 1047 bp, Buchnera aphidicola
  CDS (1)..(1047)
atgaaaaaaacagatgaactacgtacaatacgaattgatccattgataacaccatctgaattagcaaaaaaatatgctattacttcagaaatcatggataatgttattataacgagacaaaatatagctcgaattatgactggagaagatttgcgtttgcttgttgtaataggtccatgttcagtacatgatccaattgcagcagttgaatatgctcatcgattatatgaactacgtaaaaaatatcaagatcgtcttgaaattataatgcgtacatattttgaaaaaccaagaacagtagttggttggaagggattaatttcagatccagatttaaatggtagtttcagagttaatcatggtttagctgttgcacgtaaattattattagatatcaatgaactaggaatgcctgcagcaacagagtttttagatatggtaatagggcaatttattgcggatttaattagctggggtgcgattggagctagaactactgaaagtcaaattcatagagaaatggcttcagctctttcttgtccagtaggttttaaaaatggaacagatggaaatatacgtattgcaattgatgctattagagcagcacaagcacgtcatttgttttttgctccgaataaagatggacaaatgactattaatcataccagtggaaatccttatggacatataattatgagaggtggtcgaactcctaattatcatgctcacgatattaattcagcaatagaacatttacgtgaatttaatttgttagaacatttaatgattgattttagtcatggtaattgtttaaaggaacatattcgtcaaaaagatgttgctaaatctgtttcaaaacaaatttctcaaggttcaaaaactatatttggtgtaatgattgaaagttttttagaagaaggttttcaaacagttaaagaaaatcaaccactaatatatggaaaatcaattactgatgcatgtttaaattggaaagacagtgtccttattattaagcaattagcagatgcggtagatactcgtttttaa

SEQ ID NO: 1556 - protein, 348 aa, Buchnera aphidicola
MKKTDELRTIRIDPLITPSELAKKYAITSEIMDNVIITRQNIARIMTGEDLRLLVVIGPCSVHDPIAAVEYAHRLYELRKKYQDRLEIIMRTYFEKPRTVVGWKGLISDPDLNGSFRVNHGLAVARKLLLDINELGMPAATEFLDMVIGQFIADLISWGAIGARTTESQIHREMASALSCPVGFKNGTDGNIRIAIDAIRAAQARHLFFAPNKDGQMTINHTSGNPYGHIIMRGGRTPNYHAHDINSAIEHLREFNLLEHLMIDFSHGNCLKEHIRQKDVAKSVSKQISQGSKTIFGVMIESFLEEGFQTVKENQPLIYGKSITDACLNWKDSVLIIKQLADAVDTRF

SEQ ID NO: 1557 - DNA, 1047 bp, Buchnera aphidicola
  CDS (1)..(1047)
atgaaaaaaacagatgaattgcgaacaatacgcattgacccgttagttactccagctgaattagcacaacgtcatgttataactccttcaattatggatactgttatttcaacgagaaaaaatattgctaatattatgacgggattagatcctcgtttacttgtcattataggaccttgttcagtacatgatcctgttgctgcagtagaatatgctggaagattacaagtattgcgtaagaaatatgaatcgcgtcttgaaattgttatgcgaacttattttgaaaaacctcgtacagtaataggttggaaggggctaatttcagatcctgaccttaatggtagctttcacgtaaataatggtttatcgatagctagaaaattattgttggacattaataagttaggagttccagctgcgactgaatttttagacatggtaataggacaatttattgctgatctcattagttggggcgctattggtgcgcgtactactgaaagtcaaattcatcgtgaaatggcatcagcattatcttgtcctgtaggttttaaaaatggtacggatggtaatataagaattgctgtagatgctattcgtgctgctagtgtagaacatttatttttagcgcctaacaaatatggtcaaatgactattaattataccagtggaaatcccttcggtcatgttattatgcgcggtggaaaatctccaaattatcatgctaaagatattgctattgcaataaaatacttacacgaatttactctttcagagtatttgatgatagactttagtcatggaaattgtttaaaacaacatcgtcgtcaattagatgtgggtgaatctattgctaagcagataagagatggatcaacagctatttttggtgttatgattgaaagttttttagaagaaggttctcaaaaagttattgacaataaatctttagtatatggaaaatctattactgatccttgtttgggttggaatgatagtgcatttttacttgaaaagttggcaaatgctgttgatagtagattttaa

SEQ ID NO: 1558 - protein, 348 aa, Buchnera aphidicola
MKKTDELRTIRIDPLVTPAELAQRHVITPSIMDTVISTRKNIANIMTGLDPRLLVIIGPCSVHDPVAAVEYAGRLQVLRKKYESRLEIVMRTYFEKPRTVIGWKGLISDPDLNGSFHVNNGLSIARKLLLDINKLGVPAATEFLDMVIGQFIADLISWGAIGARTTESQIHREMASALSCPVGFKNGTDGNIRIAVDAIRAASVEHLFLAPNKYGQMTINYTSGNPFGHVIMRGGKSPNYHAKDIAIAIKYLHEFTLSEYLMIDFSHGNCLKQHRRQLDVGESIAKQIRDGSTAIFGVMIESFLEEGSQKVIDNKSLVYGKSITDPCLGWNDSAFLLEKLANAVDSRF

SEQ ID NO: 1559 - DNA, 1047 bp, Erwinia herbicola
  CDS (1)..(1047)
atgaacaaaaccgacgaactgcgtaccgcacgcattggtagtctgattaccccccccagcctggcggctgagcatcctgtctctccggcaattgccgacaatgtcaccgctgcccgtaaacgtattgcctgtattctgacgggtgaagatcaccgcctgctggtggtgattggcccctgctcgctgcacgacccgaaagcggcactggaatatgctgagcgtctgaacgcgttacgccgccgctatgaagatcggctggagattgtgatgcgcgcctactttgaaaagccgcgcaccgtagtgggctggaaaggcttaatctccgatccggatctggatgggagctacgatgtgaaccgcggcataggcatcgcccgccagctgctgattgatatcaacgcgctgggcctgcctaccgccacggaattcctggatatggtgatcggccagtttattgccgatctgattagctggggcgcgattggcgcacgcaccaccgaaagccagatccaccgcgaaatggcatcggccctctcctgcccggtcggctttaaaaacggcaccgatggtaacgtacagattgccgtggatgcgattcgcgccgcgcgcgccagccacatgttcctttcgcccgataagctgggccagatgactatctatcagaccagcggcaacccgcatggtcatgtgatcctgcgtggcggcaaacagcctaactatcatgccagtgatgtcgccgccgcagccgaaagtctgtcggcgtttaatctgccacagcagctggtgatcgacttcagtcacggtaactgcctgaagcagcatcgtcgtcagatggatgtcgcggcagaggtggcagaacagattaaagcgggatcgcaggccgttgccggtgtgatgattgaaagcttcctggaagagggcaatcagaaagtcgtcagcggcgaaccgctggtctatggcaagtcgattaccgatccctgcctcggctggcaggagagcgaaaaggtgctcgccctgctggccgaggcggtttctcaccgcctctga

SEQ ID NO: 1560 - protein, 348 aa, Erwinia herbicola
MNKTDELRTARIGSLITPPSLAAEHPVSPAIADNVTAARKRIACILTGEDHRLLVVIGPCSLHDPKAALEYAERLNALRRRYEDRLEIVMRAYFEKPRTVVGWKGLISDPDLDGSYDVNRGIGIARQLLIDINALGLPTATEFLDMVIGQFIADLISWGAIGARTTESQIHREMASALSCPVGFKNGTDGNVQIAVDAIRAARASHMFLSPDKLGQMTIYQTSGNPHGHVILRGGKQPNYHASDVAAAAESLSAFNLPQQLVIDFSHGNCLKQHRRQMDVAAEVAEQIKAGSQAVAGVMIESFLEEGNQKVVSGEPLVYGKSITDPCLGWQESEKVLALLAEAVSHRL

SEQ ID NO: 1561 - DNA, 1047 bp, Salmonella typhimurium
  CDS (1)..(1047)
atgaacagaaccgacgaactccgtactgcgcgtatcgacagcctggtaacaccgaccgaactcgcgcagcggtatcctgtatcgtcctccgtcgccagtcacgttaccgactcccgacgccggatagaaaagattttaaatggtgaagatccacggctactggtcgtcattggcccctgttcgattcacgatctgaatgctgccatggaatacgcgacgcagctccaggcacaacgccaaaagcatcaggcgcgtctggagatcgtcatgcgcacctattttgaaaaaccgcgcaccgtcgtgggatggaaaggcctgatttccgatcccgacttgaatggcagttaccgcgtcaattatgggcttgaactggcgcgtcgcttgctattgcaggtgaacgaactgggagtaccgaccgccacagagtttcttgatatggtcaccggccagtttattgccgatctgatcagttggggagcgattggcgcgcgtaccaccgaaagccaaatccatcgggaaatggcttctgcgctctcttgtccggtcggctttaaaaatggtacggatggcaatacccgcattgccgttgatgctattcgcgcctcccgcgccagtcatatgtttctctcgccggataaagacggacagatgactatctaccagacgagtggcaacccgtatgggcacatcatcatgcgcggcggtaaaaaaccgaactaccacgctgaagatattgccgccgcctgcgatacgttgcatgaatttgatctgccggaacatctggtcgtcgacttcagccacggcaactgtcaaaaacagcatcgccgccagttagaggtatgtgatgatatttgccagcagattcgtaatggctccacggcaattgccgggattatggcagagagttttttacgggaaggcacgcaaaaaattatcagcggtcaaccattaatctatggtcagtccattaccgatccttgcctgaactgggaagatacggaagttttgttggaaaaacttgccgcggcggtagacagccgcttttaa

SEQ ID NO: 1562 - protein, 348 aa, Salmonella typhimurium
MNRTDELRTARIDSLVTPTELAQRYPVSSSVASHVTDSRRRIEKILNGEDPRLLVVIGPCSIHDLNAAMEYATQLQAQRQKHQARLEIVMRTYFEKPRTVVGWKGLISDPDLNGSYRVNYGLELARRLLLQVNELGVPTATEFLDMVTGQFIADLISWGAIGARTTESQIHREMASALSCPVGFKNGTDGNTRIAVDAIRASRASHMFLSPDKDGQMTIYQTSGNPYGHIIMRGGKKPNYHAEDIAAACDTLHEFDLPEHLVVDFSHGNCQKQHRRQLEVCDDICQQIRNGSTAIAGIMAESFLREGTQKIISGQPLIYGQSITDPCLNWEDTEVLLEKLAAAVDSRF

SEQ ID NO: 1563 - DNA, 23 bp, Artificial sequence
  Primer sequence
atgaacagaactgacgaactccg

SEQ ID NO: 1564 - DNA, 24 bp, Artificial sequence
  Primer sequence
ttagaagcgggtatctaccgcaga

SEQ ID NO: 1565 - DNA, 1071 bp, Escherichia coli K12; identical to SEQ ID NO: 1333
  CDS (1)..(1071)

SEQ ID NO: 1566 - protein, 356 aa, Escherichia coli K12; identical to SEQ ID NO: 1334

SEQ ID NO: 1567 - DNA, 1235 bp, Salmonella typhimurium; identical to SEQ ID NO: 1325
  CDS (165)..(1235)

SEQ ID NO: 1568 - protein, 356 aa, Salmonella typhimurium; identical to SEQ ID NO: 1326

SEQ ID NO: 1569 - DNA, 1086 bp, Deinococcus radiodurans; identical to SEQ ID NO: 1327
  CDS (1)..(1086)

SEQ ID NO: 1570 - protein, 361 aa, Deinococcus radiodurans; identical to SEQ ID NO: 1328

SEQ ID NO: 1571 - DNA, 1056 bp, Neisseria meningitidis; identical to SEQ ID NO: 1329
  CDS (1)..(1056)

SEQ ID NO: 1572 - protein, 351 aa, Neisseria meningitidis; identical to SEQ ID NO: 1330

SEQ ID NO: 1573 - DNA, 1047 bp, Yersinia pestis; identical to SEQ ID NO: 1331
  CDS (1)..(1047)

SEQ ID NO: 1574 - protein, 348 aa, Yersinia pestis; identical to SEQ ID NO: 1332

SEQ ID NO: 1575 - DNA, 1047 bp, Salmonella enterica subsp. enterica serovar Typhi
  CDS (1)..(1047)
atgaacagaaccgacgaactccgtactgcgcgtatcgacagcctggtaacaccaaccgaactcgcgcagcggtatcctgtatcgtcctccgtcgccagtcacgttaccgactcccgacgccggatagaaaagattttaaatggtgaagatccacggctactggtcgtcattggcccctgttcgattcacgatctgaatgctgccatggaatacgcgacgcagctccaggcacaacgccaaaagcatcaggcgcgtctggaaatcgtcatgcgcacctattttgaaaaaccgcgcaccgtcgtgggatggaaaggcctgatttccgatcccgacttgaatggcagttaccgcgtcaatcatgggcttgaactggcgcgtcgcttgctattgcaggtgaacgaactgggagtaccgaccgccacagaatttcttgatatggtcaccggccagtttattgccgatctgatcagttggggaacgattggcgcgcgtaccaccgaaagccaaatccatcgggaaatggcttctgcgctctcttgcccggtcggctttaaaaatggtacggatggcaatacccgcattgccgttgatgctattcgcgcctcccgcgccagtcatatgtttctctcgccggataaagacggacagatgactatctaccaaacgagtggcaacccgtatgggcacatcatcatgcgcggcggtaaaaaaccgaactaccacgctgaagatattgccgccgcctgcgacacgttgcatgaatttgatctgccggaacatctggtcgtcgacttcagccacggcaactgtcaaaaacagcatcgccgccagttggacgtatgtgatgatatttgccagcagattcgtaatggctccacggcaattgccgggattatggcagagagttttttacgggaaggcacgcaaaaaattatcagcggtcaaccgttaatctatggtcaatccattaccgatccctgcctgaactgggaagatacggaagttctgttggaaaaacttgccgcggcggtagacagccgcttttaa

SEQ ID NO: 1576 - protein, 348 aa, Salmonella enterica subsp. enterica serovar Typhi
MNRTDELRTARIDSLVTPTELAQRYPVSSSVASHVTDSRRRIEKILNGEDPRLLVVIGPCSIHDLNAAMEYATQLQAQRQKHQARLEIVMRTYFEKPRTVVGWKGLISDPDLNGSYRVNHGLELARRLLLQVNELGVPTATEFLDMVTGQFIADLISWGTIGARTTESQIHREMASALSCPVGFKNGTDGNTRIAVDAIRASRASHMFLSPDKDGQMTIYQTSGNPYGHIIMRGGKKPNYHAEDIAAACDTLHEFDLPEHLVVDFSHGNCQKQHRRQLDVCDDICQQIRNGSTAIAGIMAESFLREGTQKIISGQPLIYGQSITDPCLNWEDTEVLLEKLAAAVDSRF

SEQ ID NO: 1577 - DNA, 1047 bp, Escherichia coli; identical to SEQ ID NO: 1323
  CDS (1)..(1047)

SEQ ID NO: 1578 - protein, 348 aa, Escherichia coli; identical to SEQ ID NO: 1324

SEQ ID NO: 1579 - DNA, 1188 bp, Escherichia coli
  CDS (92)..(1144)
caggtcgacaccccgtttacacattctgacggaagatatagattggaagtattgcattcactaagataagtatggcaacactggaacagacatgaattatcagaacgacgatttacgcatcaaagaaatcaaagagttacttcctcctgtcgcattgctggaaaaattccccgctactgaaaatgccgcgaatacggttgcccatgcccgaaaagcgatccataagatcctgaaaggtaatgatgatcgcctgttggttgtgattggcccatgctcaattcatgatcctgtcgcggcaaaagagtatgccactcgcttgctggcgctgcgtgaagagctgaaagatgagctggaaatcgtaatgcgcgtctattttgaaaagccgcgtaccacggtgggctggaaagggctgattaacgatccgcatatggataatagcttccagatcaacgacggtctgcgtatagcccgtaaattgctgcttgatattaacgacagcggtctgccagcggcaggtgagtttctcgatatgatcaccccacaatatctcgctgacctgatgagctggggcgcaattggcgcacgtaccaccgaatcgcaggtgcaccgcgaactggcatcagggctttcttgtccggtcggcttcaaaaatggcaccgacggtacgattaaagtggctatcgatgccattaatgccgccggtgcgccgcactgcttcctgtccgtaacgaaatgggggcattcggcgattgtgaataccagcggtaacggcgattgccatatcattctgcgcggcggtaaagagcctaactacagcgcgaagcacgttgctgaagtgaaagaagggctgaacaaagcaggcctgccagcacaggtgatgatcgatttcagccatgctaactcgtccaaacaattcaaaaagcagatggatgtttgtgctgacgtttgccagcagattgccggtggcgaaaaggccattattggcgtgatggtggaaagccatctggtggaaggcaatcagagcctcgagagcggggagccgctggcctacggtaagagcatcaccgatgcctgcatcggctgggaagataccgatgctctgttacgtcaactggcgaatgcagtaaaagcgcgtcgcgggtaaggtttaattgtcggatgcgccgtcagagtggcgtatccgatgga

SEQ ID NO: 1580 - protein, 350 aa, Escherichia coli
MNYQNDDLRIKEIKELLPPVALLEKFPATENAANTVAHARKAIHKILKGNDDRLLVVIGPCSIHDPVAAKEYATRLLALREELKDELEIVMRVYFEKPRTTVGWKGLINDPHMDNSFQINDGLRIARKLLLDINDSGLPAAGEFLDMITPQYLADLMSWGAIGARTTESQVHRELASGLSCPVGFKNGTDGTIKVAIDAINAAGAPHCFLSVTKWGHSAIVNTSGNGDCHIILRGGKEPNYSAKHVAEVKEGLNKAGLPAQVMIDFSHANSSKQFKKQMDVCADVCQQIAGGEKAIIGVMVESHLVEGNQSLESGEPLAYGKSITDACIGWEDTDALLRQLANAVKARRG

SEQ ID NO: 1581 - DNA, 1131 bp, Nostoc sp. PCC 7120; identical to SEQ ID NO: 1335
  CDS (1)..(1131)

SEQ ID NO: 1582 - protein, 376 aa, Nostoc sp. PCC 7120; identical to SEQ ID NO: 1336

SEQ ID NO: 1583 - DNA, 1053 bp, Salmonella enterica subsp. enterica serovar Typhi; identical to SEQ ID NO: 1337
  CDS (1)..(1053)

SEQ ID NO: 1584 - protein, 350 aa, Salmonella enterica subsp. enterica serovar Typhi; identical to SEQ ID NO: 1338

SEQ ID NO: 1585 - DNA, 1077 bp, Pseudomonas aeruginosa; identical to SEQ ID NO: 1339
  CDS (1)..(1077)

SEQ ID NO: 1586 - protein, 358 aa, Pseudomonas aeruginosa; identical to SEQ ID NO: 1340

SEQ ID NO: 1587 - DNA, 1047 bp, Buchnera sp; identical to SEQ ID NO: 1341
  CDS (1)..(1047)

SEQ ID NO: 1588 - protein, 348 aa, Buchnera sp; identical to SEQ ID NO: 1342

SEQ ID NO: 1589 - DNA, 1032 bp, Streptococcus pneumoniae
  CDS (1)..(1032)
atggtatttacagcaaaaagctctaaaataaatatagaagaagttcgtgccttgtcaaaattagaaggtcaggctttggagaggaaatcacagcgagatcaagagctagaagccattatacgtggagaagaccagcgaattctcttggtaatcgggccatgctcatctgacaacgaagaagctgtccttgaatacgctaagcgtttggcagtcctacaagaagaagtggcagatcgtatctttatggttatgcgtgtttatactgccaaaccccgtaccaacggagatggctataagggcttgattcaccagcctaacgcgacagaagcgcctagtcttatcaatggaatcaaagccgttcgccatcttcactatcgtgtcatcacagaaacagggatgacaactgctgatgaaatgctttatcctgaaaaccttccgcttgtagatgatttgatttcttacatggcagttggtgcccgttcagttgaagaccagcaacaccgctttgtggcaagtggggcaggattttctactggttttaaaaatccaacctctggaaatctcaatgtcatgtttaatgggatttatgctgctcaaaacaaacaaagtttccttttcttaggaaaagaagtagaaacaactgggaacccgctttcacacgctattcttcgtggtgctcttaatgagtatggaaaaaatattcccaactactattatgacaatttaattgataccattgcccagtatgagaaaatgggcttggaaaatccttttatcatcattgataccaatcatgacaattctggtaagcagtatattgaacagatccgaattgtccgccagaccttgattaaccgtgcttggaatgaaaaaattaagcagttcgttcgtggttttatgattgagtcttatctggaagatggtcgacaaaatgagccagaagtatttggtaagtctatcacagacccttgcctgggttgggataacacagaagctcttgtcagagaaatttacaaaacgttaggagaatag

SEQ ID NO: 1590 - protein, 343 aa, Streptococcus pneumoniae
MVFTAKSSKINIEEVRALSKLEGQALERKSQRDQELEAIIRGEDQRILLVIGPCSSDNEEAVLEYAKRLAVLQEEVADRIFMVMRVYTAKPRTNGDGYKGLIHQPNATEAPSLINGIKAVRHLHYRVITETGMTTADEMLYPENLPLVDDLISYMAVGARSVEDQQHRFVASGAGFSTGFKNPTSGNLNVMFNGIYAAQNKQSFLFLGKEVETTGNPLSHAILRGALNEYGKNIPNYYYDNLIDTIAQYEKMGLENPFIIIDTNHDNSGKQYIEQIRIVRQTLINRAWNEKIKQFVRGFMIESYLEDGRQNEPEVFGKSITDPCLGWDNTEALVREIYKTLGE

SEQ ID NO: 1591 - DNA, 1074 bp, Vibrio cholerae; identical to SEQ ID NO: 1343
  CDS (1)..(1074)

SEQ ID NO: 1592 - protein, 357 aa, Vibrio cholerae; identical to SEQ ID NO: 1344

SEQ ID NO: 1593 - DNA, 1038 bp, Lactococcus lactis subsp. lactis; identical to SEQ ID NO: 1345
  CDS (1)..(1038)

SEQ ID NO: 1594 - protein, 345 aa, Lactococcus lactis subsp. lactis; identical to SEQ ID NO: 1346

SEQ ID NO: 1595 - DNA, 1023 bp, Lactococcus lactis subsp. lactis; identical to SEQ ID NO: 1347
  CDS (1)..(1023)

SEQ ID NO: 1596 - protein, 340 aa, Lactococcus lactis subsp. lactis; identical to SEQ ID NO: 1348

SEQ ID NO: 1597 - DNA, 1032 bp, Streptococcus pneumoniae
  CDS (1)..(1032)
atggcatttattgaaaaaggtcaagaaatcgatatggaagtcatcaaggctgaaacccaattgtctgcggaagccttgagactcaaggaaagccgtgacagggaattggcagatattatttcaggggaagatgaccgtattctcttggtgattggtccttgctcttctgataatgaagaggcggtcttggaatatgctcgccgtttatctgccttgcaaaagaaggtagcggataagattttcatggtcatgcgcgtgtatactgctaagcctcgtaccaatggagacggctataaaggattagttcaccagccagatacttctaaggctccaagcctgattaatggcttgcaggctgtgcgccagttgcactaccgcgtgattacagagactggtttgacaacggcagatgagatgctttatccgtcaaatctgatcttggtggatgacttggtcagctaccatgccgttggagctcgttctgtggaagaccaagagcaccgctttgtggcttctgggattgatgcaccagtagggatgaaaaatccaacctcaggaaatttgggtgttatgtttaacgccatctatgctgctcaaaacaagcaaaccttcctttatcatgggcaggaagttgagacatcaggtaatcctttggcccatgttatcctccgtggagcagtcaacgagtatggcaattatatgccgaattactactatgaaaatctactccaagccattgaacgctatgaaaccatgggacttgaaaatccttttatcctcattgacaccaaccatgataactcaggcaagcaatatatggagcagattcgaattgttcgccagaccttgcagaatcgtgattggaatgagaaaattaaaaagacggttcgaggatttatgattgaatcttacctagcagatggtcgtcaaaaccaaccagagatctttggttgctctattactgacccttgcctaggttgggaaaatacagaggccttggtagaagagatttatgttaccttgacaaaatag

SEQ ID NO: 1598 - protein, 343 aa, Streptococcus pneumoniae; identical to SEQ ID NO: 1350

SEQ ID NO: 1599 - DNA, 1095 bp, Pseudomonas aeruginosa; identical to SEQ ID NO: 1351
  CDS (1)..(1095)

SEQ ID NO: 1600 - protein, 364 aa, Pseudomonas aeruginosa; identical to SEQ ID NO: 1352

SEQ ID NO: 1601 - DNA, 1110 bp, Caulobacter crescentus; identical to SEQ ID NO: 1353
  CDS (1)..(1110)

SEQ ID NO: 1602 - protein, 369 aa, Caulobacter crescentus; identical to SEQ ID NO: 1354

SEQ ID NO: 1603 - DNA, 1143 bp, Xylella fastidiosa
  CDS (1)..(1143)
atgtctcctccgcttggtctatgtctaaatgttctgagattacatcccatgccaccatttaccgacgacctccgtatccgcaaaattgaaccactgacacctcctaaccagctcctattgcaactaccatgcgatgagcaggcatcgctgactgttgcgacctcacgcaacgcactgcacgatatcctgcacggccacaacgaccgtttagccgtcgtgataggcccatgctcaatccatgatccaattgcagccattgattacgcgcaacgtctacacccattgcgtgagatgtacaaggatgcactagagatcgtgatgcgggtttactttcagaaaccgcgcaccaccattggttggaaaggattggtcaacgatccggatcttgatggcagcttccaaatcaataagggcctgcatatcgcgcgcaacctgctacgcgatatcaatcatctcggcttacccgctggtgtggaatttctagacacgatttcgccgcaatatctggctgacttagtcgcctggggtgccattggtgcacgcaccactgagagccaaatacaccgtgaaatggcttcaggtttatcgtgcccgattggctttaaaaacagtaccagtggtgatgtgaaaattgctgctgacgcgattaaagcagcttcgcatccgcaccatttcctttcagtgacaaagacaggtgttgccgcagtcgtcgccacccagggtaaccccgattgtcacgtgattctacgtggaggcagggtcccgaattacgacgcaatcaatgtcgaagctgccagccaaacattgcttaaatccaagctaccggtgcgactgatgattgatgcgagccatgccaatagcggcaaaaacccaaacaatcaacccaaggtgatcgagaacatcgtagaacagcttgaagccggtgaacgccgcatcgtcggtgtcatgattgaaagccacattgttggtggtcggcaagaattagtccttggaaacacacttacctatggacagagcattaccgatgcttgcatcgactgggatacctcggtcgcaatgttagagcagctcgctcaggccgtacgcgtcagacagactctaccaacgaccgctacaactaacaaaacatcaaaaacccaataa

SEQ ID NO: 1604 - protein, 380 aa, Xylella fastidiosa
MSPPLGLCLNVLRLHPMPPFTDDLRIRKIEPLTPPNQLLLQLPCDEQASLTVATSRNALHDILHGHNDRLAVVIGPCSIHDPIAAIDYAQRLHPLREMYKDALEIVMRVYFQKPRTTIGWKGLVNDPDLDGSFQINKGLHIARNLLRDINHLGLPAGVEFLDTISPQYLADLVAWGAIGARTTESQIHREMASGLSCPIGFKNSTSGDVKIAADAIKAASHPHHFLSVTKTGVAAVVATQGNPDCHVILRGGRVPNYDAINVEAASQTLLKSKLPVRLMIDASHANSGKNPNNQPKVIENIVEQLEAGERRIVGVMIESHIVGGRQELVLGNTLTYGQSITDACIDWDTSVAMLEQLAQAVRVRQTLPTTATTNKTSKTQ

SEQ ID NO: 1605 - DNA, 1047 bp, Buchnera aphidicola; identical to SEQ ID NO: 1357
  CDS (1)..(1047)

SEQ ID NO: 1606 - protein, 348 aa, Buchnera aphidicola; identical to SEQ ID NO: 1358

SEQ ID NO: 1607 - DNA, 1089 bp, Haemophilus influenzae; identical to SEQ ID NO: 1359
  CDS (1)..(1089)

SEQ ID NO: 1608 - protein, 362 aa, Haemophilus influenzae; identical to SEQ ID NO: 1360

SEQ ID NO: 1609 - DNA, 1502 bp, Candida albicans; identical to SEQ ID NO: 1361
  CDS (336)..(1442)

SEQ ID NO: 1610 - protein, 368 aa, Candida albicans; identical to SEQ ID NO: 1362

SEQ ID NO: 1611 - DNA, 1113 bp, Saccharomyces cerevisiae; identical to SEQ ID NO: 1363
  CDS (1)..(1113)

SEQ ID NO: 1612 - protein, 370 aa, Saccharomyces cerevisiae; identical to SEQ ID NO: 1364

SEQ ID NO: 1613 - DNA, 2048 bp, Saccharomyces cerevisiae; identical to SEQ ID NO: 1365
  CDS (619)..(1731)

SEQ ID NO: 1614 - protein, 370 aa, Saccharomyces cerevisiae; identical to SEQ ID NO: 1366

SEQ ID NO: 1615 - DNA, 1107 bp, Schizosaccharomyces pombe; identical to SEQ ID NO: 1367
  CDS (1)..(1107)

SEQ ID NO: 1616 - protein, 368 aa, Schizosaccharomyces pombe; identical to SEQ ID NO: 1368

SEQ ID NO: 1617 - DNA, 1089 bp, Amycolatopsis orientalis; identical to SEQ ID NO: 1369
  CDS (1)..(1089)

SEQ ID NO: 1618 - protein, 362 aa, Amycolatopsis orientalis; identical to SEQ ID NO: 1370

SEQ ID NO: 1619 - DNA, 1248 bp, Corynebacterium glutamicum; identical to SEQ ID NO: 1373
  CDS (101)..(1228)

SEQ ID NO: 1620 - protein, 375 aa, Corynebacterium glutamicum; identical to SEQ ID NO: 1374

SEQ ID NO: 1621 - DNA, 1083 bp, Methylophilus methylotrophus; identical to SEQ ID NO: 1375
  CDS (1)..(1083)

SEQ ID NO: 1622 - protein, 360 aa, Methylophilus methylotrophus; identical to SEQ ID NO: 1376

SEQ ID NO: 1623 - DNA, 1047 bp, Yersinia pseudotuberculosis IP 32953
  CDS (1)..(1047)
atgtacaagacagatgaactgcggaccgctcgcatcgatagcttgattacaccgcagcaactggctgaaaagttaccgatttctgaggttattgcagataacgtgacagcgtcacgtaaacgaatagagaaaatacttattggtgaagacccacgtctactcgtggtgattggcccctgctctattcacgaccttgatgcagccgttgattatgccacccggctcaaggtgctacgagaacgctatcaagaccggctggaaatcgtgatgcgcacctatttcgagaaaccacggactgtagtgggttggaaggggctgatttctgatccggcacttgacggctcatgccaggtgaacttgggtattgaactggcacgtaagctactgttagccgtgaatgaactcgggctgccgaccgctaccgagttcctcgatatggtaacaggccaatatattgccgacctcatcagttggggggcaataggcgcacgtaccaccgaaagccagatccaccgagagatggcctcggcactctcctgccccgtgggtttcaaaaatggtacagatggcaatgtgcgtattgctattgatgccattcgcgccgcacaagccagccatatgttcctttctccggataaaaccggccaaatgacgatttaccaaaccagtggtaacccctatgggcatattattatgcggggtggcaagcaacctaactatgatgcctctgatatcgcagccgcctgtgacagcttgcgggaatttgatttgccagaacatctggtggtggattttagccacggcaattgccagaagatgcatcgccgccagttggatgttgccgaaaatatcgggctacagatccgcgcgggttcaacagcgattgtcggtgttatggctgagagtttcctgattgagggcacacagaagattgttgccggacagcccttaacttatgggcaatccatcactgacccttgcctgaattgggatgatactgaacaactgttaagcctattggcagatgcagtaaacagccggttttaa

SEQ ID NO: 1624 - protein, 348 aa, Yersinia pseudotuberculosis IP 32953
MYKTDELRTARIDSLITPQQLAEKLPISEVIADNVTASRKRIEKILIGEDPRLLVVIGPCSIHDLDAAVDYATRLKVLRERYQDRLEIVMRTYFEKPRTVVGWKGLISDPALDGSCQVNLGIELARKLLLAVNELGLPTATEFLDMVTGQYIADLISWGAIGARTTESQIHREMASALSCPVGFKNGTDGNVRIAIDAIRAAQASHMFLSPDKTGQMTIYQTSGNPYGHIIMRGGKQPNYDASDIAAACDSLREFDLPEHLVVDFSHGNCQKMHRRQLDVAENIGLQIRAGSTAIVGVMAESFLIEGTQKIVAGQPLTYGQSITDPCLNWDDTEQLLSLLADAVNSRF

SEQ ID NO: 1625 - DNA, 1053 bp, Yersinia pseudotuberculosis IP 32953; identical to SEQ ID NO: 1487
  CDS (1)..(1053)

SEQ ID NO: 1626 - protein, 350 aa, Yersinia pseudotuberculosis IP 32953; identical to SEQ ID NO: 1488

SEQ ID NO: 1627 - DNA, 1107 bp, Debaryomyces hansenii CBS767; identical to SEQ ID NO: 1377
  CDS (1)..(1107)

SEQ ID NO: 1628 - protein, 368 aa, Debaryomyces hansenii CBS767; identical to SEQ ID NO: 1378

SEQ ID NO: 1629 - DNA, 1074 bp, Yarrowia lipolytica CLIB99; identical to SEQ ID NO: 1379
  CDS (1)..(1074)

SEQ ID NO: 1630 - protein, 357 aa, Yarrowia lipolytica CLIB99; identical to SEQ ID NO: 1380

SEQ ID NO: 1631 - DNA, 1089 bp, Yarrowia lipolytica CLIB99; identical to SEQ ID NO: 1381
  CDS (1)..(1089)

SEQ ID NO: 1632 - protein, 362 aa, Yarrowia lipolytica CLIB99; identical to SEQ ID NO: 1382

SEQ ID NO: 1633 - DNA, 1119 bp, Kluyveromyces lactis NRRL Y; identical to SEQ ID NO: 1383
  CDS (1)..(1119)

SEQ ID NO: 1634 - protein, 372 aa, Kluyveromyces lactis NRRL Y; identical to SEQ ID NO: 1384

SEQ ID NO: 1635 - DNA, 1095 bp, Kluyveromyces lactis NRRL Y; identical to SEQ ID NO: 1385
  CDS (1)..(1095)

SEQ ID NO: 1636 - protein, 364 aa, Kluyveromyces lactis NRRL Y; identical to SEQ ID NO: 1386

SEQ ID NO: 1637 - DNA, 1074 bp, Erwinia carotovora; identical to SEQ ID NO: 1387
  CDS (1)..(1074)

SEQ ID NO: 1638 - protein, 357 aa, Erwinia carotovora; identical to SEQ ID NO: 1388

SEQ ID NO: 1639 - DNA, 1047 bp, Erwinia carotovora; identical to SEQ ID NO: 1389
  CDS (1)..(1047)

SEQ ID NO: 1640 - protein, 348 aa, Erwinia carotovora; identical to SEQ ID NO: 1390

SEQ ID NO: 1641 - DNA, 1056 bp, Erwinia carotovora; identical to SEQ ID NO: 1391
  CDS (1)..(1056)

SEQ ID NO: 1642 - protein, 351 aa, Erwinia carotovora; identical to SEQ ID NO: 1392

SEQ ID NO: 1643 - DNA, 1113 bp, Acinetobacter sp; identical to SEQ ID NO: 1393
  CDS (1)..(1113)

SEQ ID NO: 1644 - protein, 370 aa, Acinetobacter sp; identical to SEQ ID NO: 1394

SEQ ID NO: 1645 - DNA, 1056 bp, Acinetobacter sp; identical to SEQ ID NO: 1395
  CDS (1)..(1056)

SEQ ID NO: 1646 - protein, 351 aa, Acinetobacter sp; identical to SEQ ID NO: 1396

SEQ ID NO: 1647 - DNA, 1119 bp, Candida glabrata CBS138; identical to SEQ ID NO: 1397
  CDS (1)..(1119)

SEQ ID NO: 1648 - protein, 372 aa, Candida glabrata CBS138; identical to SEQ ID NO: 1398

SEQ ID NO: 1649 - DNA, 1071 bp, Candida glabrata CBS138; identical to SEQ ID NO: 1399
  CDS (1)..(1071)

SEQ ID NO: 1650 - protein, 356 aa, Candida glabrata CBS138; identical to SEQ ID NO: 1400

SEQ ID NO: 1651 - DNA, 1083 bp, Photobacterium profundum; identical to SEQ ID NO: 1401
  CDS (1)..(1083)

SEQ ID NO: 1652 - protein, 360 aa, Photobacterium profundum; identical to SEQ ID NO: 1402

SEQ ID NO: 1653 - DNA, 1053 bp, Photobacterium profundum; identical to SEQ ID NO: 1403
  CDS (1)..(1053)

SEQ ID NO: 1654 - protein, 350 aa, Photobacterium profundum; identical to SEQ ID NO: 1404

SEQ ID NO: 1655 - DNA, 1113 bp, Photobacterium profundum; identical to SEQ ID NO: 1405
  CDS (1)..(1113)

SEQ ID NO: 1656 - protein, 370 aa, Photobacterium profundum; identical to SEQ ID NO: 1406

SEQ ID NO: 1657 - DNA, 1056 bp, Photobacterium profundum; identical to SEQ ID NO: 1407
  CDS (1)..(1056)

SEQ ID NO: 1658 - protein, 351 aa, Photobacterium profundum; identical to SEQ ID NO: 1408

SEQ ID NO: 1659 - DNA, 1092 bp, Parachlamydia sp; identical to SEQ ID NO: 1409
  CDS (1)..(1092)

SEQ ID NO: 1660 - protein, 363 aa, Parachlamydia sp; identical to SEQ ID NO: 1410

SEQ ID NO: 1661 - DNA, 1095 bp, Rhodopseudomonas palustris; identical to SEQ ID NO: 1411
  CDS (1)..(1095)

SEQ ID NO: 1662 - protein, 364 aa, Rhodopseudomonas palustris; identical to SEQ ID NO: 1412

SEQ ID NO: 1663 - DNA, 1100 bp, Amycolatopsis methanolica; identical to SEQ ID NO: 1413
  CDS (1)..(1086)

SEQ ID NO: 1664 - protein, 361 aa, Amycolatopsis methanolica; identical to SEQ ID NO: 1414

SEQ ID NO: 1665 - DNA, 1071 bp, Treponema denticola; identical to SEQ ID NO: 1415
  CDS (1)..(1071)

SEQ ID NO: 1666 - protein, 356 aa, Treponema denticola; identical to SEQ ID NO: 1416

SEQ ID NO: 1667 - DNA, 1020 bp, Geobacter sulfurreducens
  CDS (1)..(1020)
atgatcatcgtcatgaaagcgggagcggcaaaaaaagaccgggacgaggtaatcaggcggatcagggagctgggctacaagccccatgtcatccatggcaccacgcgggacgtgatcggggccgtgggggacgagcggggcaagttggtccttcagggcgtcgaatccatgcacggcgtggagagcgtggtgccgatcctgaagccgtacaagctggcatcaagggaggtgaagcccgaaccgagtgttgtcgccattacggataccgtggtcatcggcggccctgaagtcattgtcatggccggtccctgttcggtcgagggagaggccatgattatcgagacggccagggcggtaaaggcggccggcgcccaggtgcttcggggcggagcgttcaagccgcgcacctctccctactccttccagggactcgaagaggaagggctcaagctgctggccaaggcgcgcgaggagacgggtctccccatcgtgaccgaggtggtcaatcccgagacggccgaactggtgtccgagtactccgacattctccagatcggagcccgcaatgcccagaactttgccctgctcaagaaggtggggcagcttcggcgcccggtgctcctcaagcggggcatgtccatgaccatccaggagttcctcatgagcgccgagtatgtcatgagtgaagggaatcagtcggttatcctctgcgaacgcggtatccgcaccttcgagaccgccacccgcaacacgctggatctctcggccattccggtgttgaagcagatgacccatctgccggtcattgccgatccttcccacggcaccggaaactatcactatgtggcacccatggccctggcagctgttgccgccggcgcggacgggctcatgatcgaggtgcatcccgatcccgagcgtgcgtcgtccgatgggccccagtcgctcaagccgaagaaattcgacgcgcttatggcaaagttgcggctcgtggcggcgtccgtggacaggcgactgtaa

SEQ ID NO: 1668 - protein, 339 aa, Geobacter sulfurreducens
MIIVMKAGAAKKDRDEVIRRIRELGYKPHVIHGTTRDVIGAVGDERGKLVLQGVESMHGVESVVPILKPYKLASREVKPEPSVVAITDTVVIGGPEVIVMAGPCSVEGEAMIIETARAVKAAGAQVLRGGAFKPRTSPYSFQGLEEEGLKLLAKAREETGLPIVTEVVNPETAELVSEYSDILQIGARNAQNFALLKKVGQLRRPVLLKRGMSMTIQEFLMSAEYVMSEGNQSVILCERGIRTFETATRNTLDLSAIPVLKQMTHLPVIADPSHGTGNYHYVAPMALAAVAAGADGLMIEVHPDPERASSDGPQSLKPKKFDALMAKLRLVAASVDRRL

SEQ ID NO: 1669 - DNA, 1068 bp, Geobacter sulfurreducens; identical to SEQ ID NO: 1417
  CDS (1)..(1068)

SEQ ID NO: 1670 - protein, 355 aa, Geobacter sulfurreducens; identical to SEQ ID NO: 1418

SEQ ID NO: 1671 - DNA, 1122 bp, Ashbya gossypii; identical to SEQ ID NO: 1421
  CDS (1)..(1122)

SEQ ID NO: 1672 - protein, 373 aa, Ashbya gossypii; identical to SEQ ID NO: 1422

SEQ ID NO: 1673 - DNA, 1098 bp, Amycolatopsis balhimycina; identical to SEQ ID NO: 1423
  CDS (1)..(1098)

SEQ ID NO: 1674 - protein, 365 aa, Amycolatopsis balhimycina; identical to SEQ ID NO: 1424

SEQ ID NO: 1675 - DNA, 1053 bp, Vibrio vulnificus
  CDS (1)..(1053)
atgttccaaacagatgatgtaagaattaataacgttaaagagttacttccaccagtagctgttttagagaagtacccagcgactgaaaccgcttcttcgacaactttccaatcgagaaacgacattcacaacattctcatcggcaaggacgatcgcctgctggttattgtcggcccttgctctatccacgatcctgtggccgcggttgaatacggcaagcgtttgaaaacgttgcgtgacgatctcaaaggtgagcttgaaattgttatgcgcgtttactttgaaaagccacgtaccactgtgggttggaaaggtttgattaatgacccgtaccttaacgacacctacaagttgaatgatggtttacgcatgggccgaaaactgttgttggatcttaccgatatgggtcttccaacggcgagtgagttccttgacatgatcacaccacagtatgtggctgatttgatcagttggggtgctattggtgcacgtaccacggaatctcaggttcaccgtgaactggcgtcgggtctttcttgtccggttggttttaaaaatggcacggatggcaacattaagattgcaagtgatgcgattcgctcagcaagtgcttctcaccatttcctatcggtaacgaaatacggccattctgctatcgttgaaaccgcgggtaatccagactgccacattattttgcgtggtggtaaagagccaaactacagtgcagcgcatgtttcagcggtaaaagaagagttagctacatcgggtttgccacaaaaagtgatgatcgacttcagccacgccaacagctccaagcagtataagcgtcaaatgttggtcgccgacgatgtctctgagcagctagcggctggtgaagaggcaatctttggggtgatgatcgaatcacatcttgtggaaggtcgacaagatcttgttgatggtaaagcggcgacttatggtcagtcgattaccgacgcttgtatcggttgggaagatactgaaactgtgcttcgccaattggcaaatgcagtggcagctcgtcgagcaaaatag

SEQ ID NO: 1676 - protein, 350 aa, Vibrio vulnificus
MFQTDDVRINNVKELLPPVAVLEKYPATETASSTTFQSRNDIHNILIGKDDRLLVIVGPCSIHDPVAAVEYGKRLKTLRDDLKGELEIVMRVYFEKPRTTVGWKGLINDPYLNDTYKLNDGLRMGRKLLLDLTDMGLPTASEFLDMITPQYVADLISWGAIGARTTESQVHRELASGLSCPVGFKNGTDGNIKIASDAIRSASASHHFLSVTKYGHSAIVETAGNPDCHIILRGGKEPNYSAAHVSAVKEELATSGLPQKVMIDFSHANSSKQYKRQMLVADDVSEQLAAGEEAIFGVMIESHLVEGRQDLVDGKAATYGQSITDACIGWEDTETVLRQLANAVAARRAK

SEQ ID NO: 1677 - DNA, 1047 bp, Photorhabdus luminescens; identical to SEQ ID NO: 1427
  CDS (1)..(1047)

SEQ ID NO: 1678 - protein, 348 aa, Photorhabdus luminescens; identical to SEQ ID NO: 1428

SEQ ID NO: 1679 - DNA, 1053 bp, Photorhabdus luminescens; identical to SEQ ID NO: 1429
  CDS (1)..(1053)

SEQ ID NO: 1680 - protein, 350 aa, Photorhabdus luminescens; identical to SEQ ID NO: 1430

SEQ ID NO: 1681 - DNA, 1095 bp, Photorhabdus luminescens; identical to SEQ ID NO: 1431
  CDS (1)..(1095)

SEQ ID NO: 1682 - protein, 364 aa, Photorhabdus luminescens; identical to SEQ ID NO: 1432

SEQ ID NO: 1683 - DNA, 1119 bp, Gloeobacter violaceus; identical to SEQ ID NO: 1433
  CDS (1)..(1119)

SEQ ID NO: 1684 - protein, 372 aa, Gloeobacter violaceus; identical to SEQ ID NO: 1434

SEQ ID NO: 1685 - DNA, 1107 bp, Chromobacterium violaceum; identical to SEQ ID NO: 1435
  CDS (1)..(1107)

SEQ ID NO: 1686 - protein, 368 aa, Chromobacterium violaceum; identical to SEQ ID NO: 1436

SEQ ID NO: 1687 - DNA, 1059 bp, Chromobacterium violaceum; identical to SEQ ID NO: 1437
  CDS (1)..(1059)

SEQ ID NO: 1688 - protein, 352 aa, Chromobacterium violaceum; identical to SEQ ID NO: 1438

SEQ ID NO: 1689 - DNA, 1140 bp, Neurospora crassa; identical to SEQ ID NO: 1439
  CDS (1)..(1140)

SEQ ID NO: 1690 - protein, 379 aa, Neurospora crassa; identical to SEQ ID NO: 1440

SEQ ID NO: 1691 - DNA, 1092 bp, Neurospora crassa; identical to SEQ ID NO: 1441
  CDS (1)..(1092)

SEQ ID NO: 1692 - protein, 363 aa, Neurospora crassa; identical to SEQ ID NO: 1442

SEQ ID NO: 1693 - DNA, 1068 bp, Synechococcus sp; identical to SEQ ID NO: 1443
  CDS (1)..(1068)

SEQ ID NO: 1694 - protein, 355 aa, Synechococcus sp; identical to SEQ ID NO: 1444

SEQ ID NO: 1695 - DNA, 1053 bp, Rhodopirellula baltica; identical to SEQ ID NO: 1445
  CDS (1)..(1053)

SEQ ID NO: 1696 - protein, 350 aa, Rhodopirellula baltica; identical to SEQ ID NO: 1446

SEQ ID NO: 1697 - DNA, 1068 bp, Prochlorococcus marinus subsp; identical to SEQ ID NO: 1447
  CDS (1)..(1068)

SEQ ID NO: 1698 - protein, 355 aa, Prochlorococcus marinus subsp; identical to SEQ ID NO: 1448

SEQ ID NO: 1699 - DNA, 1083 bp, Prochlorococcus marinus; identical to SEQ ID NO: 1449
  CDS (1)..(1083)

SEQ ID NO: 1700 - protein, 360 aa, Prochlorococcus marinus; identical to SEQ ID NO: 1450

SEQ ID NO: 1701 - DNA, 1074 bp, Prochlorococcus marinus; identical to SEQ ID NO: 1451
  CDS (1)..(1074)

SEQ ID NO: 1702 - protein, 357 aa, Prochlorococcus marinus; identical to SEQ ID NO: 1452

SEQ ID NO: 1703 - DNA, 1113 bp, Haemophilus ducreyi; identical to SEQ ID NO: 1453
  CDS (1)..(1113)

SEQ ID NO: 1704 - protein, 370 aa, Haemophilus ducreyi; identical to SEQ ID NO: 1454

SEQ ID NO: 1705 - DNA, 1080 bp, Haemophilus ducreyi; identical to SEQ ID NO: 1455
  CDS (1)..(1080)

SEQ ID NO: 1706 - protein, 359 aa, Haemophilus ducreyi; identical to SEQ ID NO: 1456

SEQ ID NO: 1707 - DNA, 1086 bp, Candidatus Blochmannia floridanus; identical to SEQ ID NO: 1457
  CDS (1)..(1086)

SEQ ID NO: 1708 - protein, 361 aa, Candidatus Blochmannia floridanus; identical to SEQ ID NO: 1458

SEQ ID NO: 1709 - DNA, 1074 bp, Bordetella pertussis; identical to SEQ ID NO: 1459
  CDS (1)..(1074)

SEQ ID NO: 1710 - protein, 357 aa, Bordetella pertussis; identical to SEQ ID NO: 1460

SEQ ID NO: 1711 - DNA, 1119 bp, Bordetella bronchiseptica; identical to SEQ ID NO: 1461
  CDS (1)..(1119)

SEQ ID NO: 1712 - protein, 372 aa, Bordetella bronchiseptica; identical to SEQ ID NO: 1462

SEQ ID NO: 1713 - DNA, 1179 bp, Nitrosomonas europaea; identical to SEQ ID NO: 1463
  CDS (1)..(1179)

SEQ ID NO: 1714 - protein, 392 aa, Nitrosomonas europaea; identical to SEQ ID NO: 1464

SEQ ID NO: 1715 - DNA, 1083 bp, Coxiella burnetii; identical to SEQ ID NO: 1465
  CDS (1)..(1083)

SEQ ID NO: 1716 - protein, 360 aa, Coxiella burnetii; identical to SEQ ID NO: 1466

SEQ ID NO: 1717 - DNA, 1143 bp, Xylella fastidiosa; identical to SEQ ID NO: 1469
  CDS (1)..(1143)

SEQ ID NO: 1718 - protein, 380 aa, Xylella fastidiosa; identical to SEQ ID NO: 1470

SEQ ID NO: 1719 - DNA, 1053 bp, Vibrio parahaemolyticus; identical to SEQ ID NO: 1471
  CDS (1)..(1053)

SEQ ID NO: 1720 - protein, 350 aa, Vibrio parahaemolyticus; identical to SEQ ID NO: 1472

SEQ ID NO: 1721 - DNA, 1053 bp, Vibrio parahaemolyticus; identical to SEQ ID NO: 1473
  CDS (1)..(1053)

SEQ ID NO: 1722 - protein, 350 aa, Vibrio parahaemolyticus; identical to SEQ ID NO: 1474

SEQ ID NO: 1723 - DNA, 1074 bp, Vibrio parahaemolyticus; identical to SEQ ID NO: 1475
  CDS (1)..(1074)

SEQ ID NO: 1724 - protein, 357 aa, Vibrio parahaemolyticus; identical to SEQ ID NO: 1476

SEQ ID NO: 1725 - DNA, 1083 bp, Pseudomonas syringae; identical to SEQ ID NO: 1477
  CDS (1)..(1083)

SEQ ID NO: 1726 - protein, 360 aa, Pseudomonas syringae; identical to SEQ ID NO: 1478

SEQ ID NO: 1727 - DNA, 1077 bp, Pseudomonas syringae; identical to SEQ ID NO: 1479
  CDS (1)..(1077)

SEQ ID NO: 1728 - protein, 358 aa, Pseudomonas syringae; identical to SEQ ID NO: 1480

SEQ ID NO: 1729 - DNA, 1062 bp, Pseudomonas putida; identical to SEQ ID NO: 1481
  CDS (1)..(1062)

SEQ ID NO: 1730 - protein, 353 aa, Pseudomonas putida; identical to SEQ ID NO: 1482

SEQ ID NO: 1731 - DNA, 1113 bp, Pseudomonas putida; identical to SEQ ID NO: 1483
  CDS (1)..(1113)

SEQ ID NO: 1732 - protein, 370 aa, Pseudomonas putida; identical to SEQ ID NO: 1484

SEQ ID NO: 1733 - DNA, 1086 bp, Bradyrhizobium japonicum; identical to SEQ ID NO: 1485
  CDS (1)..(1086)

SEQ ID NO: 1734 - protein, 361 aa, Bradyrhizobium japonicum; identical to SEQ ID NO: 1486

SEQ ID NO: 1735 - DNA, 1077 bp, Yersinia pestis; identical to SEQ ID NO: 1489
  CDS (1)..(1077)

SEQ ID NO: 1736 - protein, 358 aa, Yersinia pestis; identical to SEQ ID NO: 1490

SEQ ID NO: 1737 - DNA, 1038 bp, Wigglesworthia glossinidia brevipalpis; identical to SEQ ID NO: 1491
  CDS (1)..(1038)

SEQ ID NO: 1738 - protein, 345 aa, Wigglesworthia glossinidia brevipalpis; identical to SEQ ID NO: 1492

SEQ ID NO: 1739 - DNA, 1071 bp, Vibrio vulnificus
  CDS (1)..(1071)
atgcctacgctcagcaaattgattcactccactccttgtggaacactcccttctgtggaagagatcattcaacacgcctcactggacgaagagagcgaagcgtttatccgacaacgtcgccaagacatcactcgaattctgaatggccaagaccctcgattactggtgatcatcggcccatgttcaattcacgacccgcaagcaggcctagaatatgcgcagaaactggccaacattcagcatcagcatgaaaagcaacttctgattgtgatgcgaacttactttgaaaaaccgcgcacacgcgcaggatggaaagggctgatcgtcgatcccgatctcgataacagccacgacattaataaaggtctgcggcttgctcgacaattcttacagcaagtcatcaagcttggccttgcgacggcaaccgagtatttagacaccacgacttacccctatatttctgacctcatttgctggggtgccattggcgcgaggacaactgaatctcaaattcaccgtcaaatggcctcggcgcttccctgtcctattggtttcaaaaacgggaccgacggcaatgttgatattgctatcgacgcgatacacgcggcaaactcaccccatctcatctgtgtgccaggatttggggcacgtactctcacagccatcagtcatggtaaccccaatggccatatcattttgcgaggtggcaaaacgccaaactacaccaccgagcatgtttgccaaatcagccaacaactggaagccaacgatcttaacccgcgcctgatcattgattgcagccatggcaatagcctgaaagtggcaaagaaccaactcgatgtggcgagaaacatcgcctgtcagttgatcgaaggagaaaaatgcattgcaggcgtgatggcggagagcttcttggtagcaggcgcgcaaaagatcaccgatcgtccgttggtcaaaggcatgtcgattactgatgaatgtttggggtgggaagagacggaaagtattctcaatatttttgcggaagcggtgaatgtcgtgatgacggagcgcttttccaccgttgcctaa

SEQ ID NO: 1740 - protein, 356 aa, Vibrio vulnificus
MPTLSKLIHSTPCGTLPSVEEIIQHASLDEESEAFIRQRRQDITRILNGQDPRLLVIIGPCSIHDPQAGLEYAQKLANIQHQHEKQLLIVMRTYFEKPRTRAGWKGLIVDPDLDNSHDINKGLRLARQFLQQVIKLGLATATEYLDTTTYPYISDLICWGAIGARTTESQIHRQMASALPCPIGFKNGTDGNVDIAIDAIHAANSPHLICVPGFGARTLTAISHGNPNGHIILRGGKTPNYTTEHVCQISQQLEANDLNPRLIIDCSHGNSLKVAKNQLDVARNIACQLIEGEKCIAGVMAESFLVAGAQKITDRPLVKGMSITDECLGWEETESILNIFAEAVNVVMTERFSTVA

SEQ ID NO: 1741 - DNA, 1053 bp, Vibrio vulnificus; identical to SEQ ID NO: 1495
  CDS (1)..(1053)

SEQ ID NO: 1742 - protein, 350 aa, Vibrio vulnificus; identical to SEQ ID NO: 1496

SEQ ID NO: 1743 - DNA, 1071 bp, Vibrio vulnificus; identical to SEQ ID NO: 1497
  CDS (1)..(1071)

SEQ ID NO: 1744 - protein, 356 aa, Vibrio vulnificus; identical to SEQ ID NO: 1498

SEQ ID NO: 1745 - DNA, 1062 bp, Synechococcus elongatus; identical to SEQ ID NO: 1499
  CDS (1)..(1062)

SEQ ID NO: 1746 - protein, 353 aa, Synechococcus elongatus; identical to SEQ ID NO: 1500

SEQ ID NO: 1747 - DNA, 1032 bp, Streptococcus mutans; identical to SEQ ID NO: 1501
  CDS (1)..(1032)

SEQ ID NO: 1748 - protein, 343 aa, Streptococcus mutans; identical to SEQ ID NO: 1502

SEQ ID NO: 1749 - DNA, 1035 bp, Streptococcus mutans; identical to SEQ ID NO: 1503
  CDS (1)..(1035)

SEQ ID NO: 1750 - protein, 344 aa, Streptococcus mutans; identical to SEQ ID NO: 1504

SEQ ID NO: 1751 - DNA, 1008 bp, Streptococcus agalactiae; identical to SEQ ID NO: 1505
  CDS (1)..(1008)

SEQ ID NO: 1752 - protein, 335 aa, Streptococcus agalactiae; identical to SEQ ID NO: 1506

SEQ ID NO: 1753 - DNA, 1065 bp, Shewanella oneidensis; identical to SEQ ID NO: 1507
  CDS (1)..(1065)

SEQ ID NO: 1754 - protein, 354 aa, Shewanella oneidensis; identical to SEQ ID NO: 1508

SEQ ID NO: 1755 - DNA, 1092 bp, Shewanella oneidensis; identical to SEQ ID NO: 1509
  CDS (1)..(1092)

SEQ ID NO: 1756 - protein, 363 aa, Shewanella oneidensis; identical to SEQ ID NO: 1510

SEQ ID NO: 1757 - DNA, 1059 bp, Shewanella oneidensis; identical to SEQ ID NO: 1511
  CDS (1)..(1059)

SEQ ID NO: 1758 - protein, 352 aa, Shewanella oneidensis; identical to SEQ ID NO: 1512

SEQ ID NO: 1759 - DNA, 1053 bp, Escherichia coli O6; identical to SEQ ID NO: 1513
  CDS (1)..(1053)

SEQ ID NO: 1760 - protein, 350 aa, Escherichia coli O6; identical to SEQ ID NO: 1514

SEQ ID NO: 1761 - DNA, 1170 bp, Corynebacterium efficiens; identical to SEQ ID NO: 1515
  CDS (1)..(1170)

SEQ ID NO: 1762 - protein, 389 aa, Corynebacterium efficiens; identical to SEQ ID NO: 1516

SEQ ID NO: 1763 - DNA, 1134 bp, Bifidobacterium longum; identical to SEQ ID NO: 1517
  CDS (1)..(1134)

SEQ ID NO: 1764 - protein, 377 aa, Bifidobacterium longum; identical to SEQ ID NO: 1518

SEQ ID NO: 1765 - DNA, 1233 bp, Bifidobacterium longum; identical to SEQ ID NO: 1519
  CDS (1)..(1233)

SEQ ID NO: 1766 - protein, 410 aa, Bifidobacterium longum; identical to SEQ ID NO: 1520

SEQ ID NO: 1767 - DNA, 1221 bp, Phytophthora infestans; identical to SEQ ID NO: 1521
  CDS (20)..(1153)

SEQ ID NO: 1768 - protein, 377 aa, Phytophthora infestans; identical to SEQ ID NO: 1522

SEQ ID NO: 1769 - DNA, 1062 bp, Chlorobium tepidum; identical to SEQ ID NO: 1523
  CDS (1)..(1062)

SEQ ID NO: 1770 - protein, 353 aa, Chlorobium tepidum; identical to SEQ ID NO: 1524

SEQ ID NO: 1771 - DNA, 1074 bp, Xanthomonas campestris; identical to SEQ ID NO: 1525
  CDS (1)..(1074)

SEQ ID NO: 1772 - protein, 357 aa, Xanthomonas campestris; identical to SEQ ID NO: 1526

SEQ ID NO: 1773 - DNA, 1074 bp, Xanthomonas axonopodis; identical to SEQ ID NO: 1527
  CDS (1)..(1074)

SEQ ID NO: 1774 - protein, 357 aa, Xanthomonas axonopodis; identical to SEQ ID NO: 1528

SEQ ID NO: 1775 - DNA, 1080 bp, Ralstonia solanacearum; identical to SEQ ID NO: 1529
  CDS (1)..(1080)

SEQ ID NO: 1776 - protein, 359 aa, Ralstonia solanacearum; identical to SEQ ID NO: 1530

SEQ ID NO: 1777 - DNA, 1179 bp, Ralstonia solanacearum; identical to SEQ ID NO: 1531
  CDS (1)..(1179)

SEQ ID NO: 1778 - protein, 392 aa, Ralstonia solanacearum; identical to SEQ ID NO: 1532

SEQ ID NO: 1779 - DNA, 1065 bp, Synechococcus sp; identical to SEQ ID NO: 1533
  CDS (1)..(1065)

SEQ ID NO: 1780 - protein, 354 aa, Synechococcus sp; identical to SEQ ID NO: 1534

SEQ ID NO: 1781 - DNA, 1035 bp, Escherichia coli; identical to SEQ ID NO: 1535
  CDS (1)..(1035)

SEQ ID NO: 1782 - protein, 344 aa, Escherichia coli; identical to SEQ ID NO: 1536

SEQ ID NO: 1783 - DNA, 1200 bp, Stigmatella aurantiaca; identical to SEQ ID NO: 1537
  CDS (62)..(1147)

SEQ ID NO: 1784 - protein, 361 aa, Stigmatella aurantiaca; identical to SEQ ID NO: 1538

SEQ ID NO: 1785 - DNA, 1092 bp, Rhizobium loti; identical to SEQ ID NO: 1539
  CDS (1)..(1092)

SEQ ID NO: 1786 - protein, 363 aa, Rhizobium loti; identical to SEQ ID NO: 1540

SEQ ID NO: 1787 - DNA, 1083 bp, Amycolatopsis mediterranei; identical to SEQ ID NO: 1541
  CDS (1)..(1083)

SEQ ID NO: 1788 - protein, 360 aa, Amycolatopsis mediterranei; identical to SEQ ID NO: 1542

SEQ ID NO: 1789 - DNA, 1053 bp, Pasteurella multocida; identical to SEQ ID NO: 1543
  CDS (1)..(1053)

SEQ ID NO: 1790 - protein, 350 aa, Pasteurella multocida; identical to SEQ ID NO: 1544

SEQ ID NO: 1791 - DNA, 1086 bp, Pasteurella multocida; identical to SEQ ID NO: 1545
  CDS (1)..(1086)

SEQ ID NO: 1792 - protein, 361 aa, Pasteurella multocida; identical to SEQ ID NO: 1546

SEQ ID NO: 1793 - DNA, 1089 bp, Emericella nidulans; identical to SEQ ID NO: 1549
  CDS (1)..(1089)

SEQ ID NO: 1794 - protein, 362 aa, Emericella nidulans; identical to SEQ ID NO: 1550

SEQ ID NO: 1795 - DNA, 1239 bp, Vibrio cholerae; identical to SEQ ID NO: 1551
  CDS (114)..(1175)

SEQ ID NO: 1796 - protein, 353 aa, Vibrio cholerae; identical to SEQ ID NO: 1552

SEQ ID NO: 1797 - DNA, 1113 bp, Candida albicans
  CDS (1)..(1113)
atgagtaaaactcctgttcctaccgaatacgacgacacaagaatattgggttacgatcctttagttccaccagccttattacaacacgaaataaaggcatctgccgaatcattggatgttgttataaaaggccgttacgattctgctcaaatccttaagggtaatgatgacagatgtattgtaattgttggtccatgttcaattcacgatcctccacaagccttagaatacggtaaacgtttgaagaaattggctgatgaattaaaagatgacttggtgattatcatgagagcttatttggaaaaaccaagaactaccgttggttggaaaggtttgatcaatgatcctgacgttgacaattcttttgatatcaaccgtgggttgaagatatctcgtcaattatattccgatttgactagtgttgttggattaccaattggatcagaaatgttagacaccatttctccacaatacttttccgatttcttgagttttggggccattggagctagaaccaccgaatcacaattacacagagaattagcttctggtttaagcttcccaattggatttaaaaatggtaccgatggtggtttagccgttgccttggatgccgtgcaagcttcttcaaaaggacatcatttcatgggtgtcaccaaaaacggtatggctgccattaccactactaaaggtaacgattgttgtttcattatattaagaggtggtaaaaaaatcaccaattacgatgttgaatcagttaaagctgctaaagaagccattgccaaatgtaccgatccaagtatcaagttgatggttgattgctctcacgacaactcaagaaaagactacagaaaccaacctcaagtattagacagtgttgccgaacaaataagtaatggtgaagactccattattggggttatgattgaatccaatattcatgaaggtaaacaaccaatgcccccagcaggtagtggtaaagaagcattgaaatacggtgtgtctatcaccgatggatgtgtttcttgggaaaccactgttgaaatgttgaccaaattgagtcaagcagtccaaactagaagaagtttaaagaaacaaaaagtttccaattaa

SEQ ID NO: 1798 - protein, 370 aa, Candida albicans; identical to SEQ ID NO: 1554

SEQ ID NO: 1799 - DNA, 1047 bp, Buchnera aphidicola; identical to SEQ ID NO: 1557
  CDS (1)..(1047)

SEQ ID NO: 1800 - protein, 348 aa, Buchnera aphidicola; identical to SEQ ID NO: 1558

SEQ ID NO: 1801 - DNA, 1047 bp, Erwinia herbicola; identical to SEQ ID NO: 1559
  CDS (1)..(1047)

SEQ ID NO: 1802 - protein, 348 aa, Erwinia herbicola; identical to SEQ ID NO: 1560

SEQ ID NO: 1803 - DNA, 23 bp, Artificial sequence
  Primer sequence
atgcaaaaagacgcgctgaataa

SEQ ID NO: 1804 - DNA, 21 bp, Artificial sequence
  Primer sequence
ttaagccacgcgagccgtcag

SEQ ID NO: 1805 - DNA, 2374 bp, Escherichia coli K12
  CDS (86)..(2281)
ctgcaggacaacagtaaaatcagagcgtttctgcttttactgatgtctggcggtcggagctggtgaccagtttgacccatatctcatggggcagggttttccaccttgtccggtattcttacttccccgaaacgggtttgcgcttatgaaatcaatgaatattgccgccagtagtgaactggtatcccgactttcttctcatcgtcgcgtggtggcgttgggagatactgattttacggacgtcgcggcagtcgtcattaccgctgcggatagtcgcagtggcattcttgcgttgcttaagcgcaccggttttcatctaccggtgtttttgtattccgaacatgctgttgaattacctgcgggcgttacggcggtaatcaacggcaacgagcagcagtggctggagctggaatccgcagcctgtcagtatgaagagaatttgctgccaccgttttatgacacgctgacgcagtacgttgagatgggcaacagcacctttgcttgccctggacatcaacatggtgcgttttttaaaaagcatcctgccggacgccatttttacgatttctttggtgagaacgtctttcgcgccgatatgtgtaacgctgacgtaaaattgggcgatctgcttattcatgaaggatcggcgaaagatgcgcagaaattcgcagccaaagtctttcatgccgataaaacctattttgtgctgaacggcacatcggcagcgaataaagtggtgacgaatgcgctgttaacgcgtggcgatctggtgctcttcgaccgtaacaaccataagtcgaatcatcacggcgcgctgattcaggcgggggcgacgccggtctatctggaagcttcacgcaacccgtttggtttcattggcggtattgatgcgcactgttttaatgaagagtatctgcgccagcaaattcgcgacgttgcgccagaaaaagccgacctgccgcgcccgtatcgcctggcgattattcagctgggaacctatgacggcactgtctataacgcccgtcaggtgatcgataccgttgggcatctgtgtgattacattctgtttgattccgcgtgggtcggttatgaacaatttatcccgatgatggcggatagctcgccgctgctgttagaacttaacgaaaacgatccggggatctttgtgactcagtcggtgcacaaacagcaggcgggattctcacagacgtcgcagatccataaaaaagataaccatatccgcggacaggcgcgtttttgcccgcataagcggttgaataacgcctttatgctccatgcttctaccagccctttctatccgctgtttgctgcactggatgttaacgccaaaattcatgaaggggagagtgggcgtcggctgtgggctgagtgtgttgagatagggattgaagcgcgcaaggctattcttgcgcgctgtaagctgttccgcccgtttatcccgcccgttgttgatggcaaattgtggcaggattatccgacatcagtgttagccagcgaccgccgttttttcagttttgagccgggggcgaagtggcacggctttgaaggatatgccgcggatcagtattttgttgatccgtgcaagctgttactcactacaccaggtatcgatgccgaaaccggcgaatatagcgactttggcgttccggcgacgattctggcgcactatctgcgtgagaacggcattgtgccggagaagtgcgatctcaactccattctgtttttattaactccggcggaaagccacgagaagctggcacaactggtggcgatgctggcgcaatttgaacagcatattgaggatgactcgccgctggttgaggtgttgccgagcgtttataacaagtatccggtgcgctatcgcgactacaccctgcgccagttgtgtcaggagatgcacgatctgtatgtcagtttcgacgtcaaagacctacaaaaagcgatgttccgccagcagagtttcccgtcagtggtgatgaacccccaggatgcgcatagcgcttatattcgcggtgacgtggagttggtgcggattcgtgatgccgaagggcgaattgcggcagaaggggcgttgccttatccacctggcgtgctttgcgtggtacccggggaagtctggggtggggcggttcaacgttatttccttgcactggaagaaggggtgaatttgttgccgggattttcgccggagctgcaaggtgtttatagcgaaaccgatgcggatggcgtgaaacggttgtacggttatgtgttgaagtaagaataaaaaaaacgggtcaccttctggcgacccgtttttctttgcgtaattagtggctaaccgtctgtgtgcctgtcgggacacgaacgtgtt

SEQ ID NO: 1806 - protein, 731 aa, Escherichia coli K12
MGQGFPPCPVFLLPRNGFALMKSMNIAASSELVSRLSSHRRVVALGDTDFTDVAAVVITAADSRSGILALLKRTGFHLPVFLYSEHAVELPAGVTAVINGNEQQWLELESAACQYEENLLPPFYDTLTQYVEMGNSTFACPGHQHGAFFKKHPAGRHFYDFFGENVFRADMCNADVKLGDLLIHEGSAKDAQKFAAKVFHADKTYFVLNGTSAANKVVTNALLTRGDLVLFDRNNHKSNHHGALIQAGATPVYLEASRNPFGFIGGIDAHCFNEEYLRQQIRDVAPEKADLPRPYRLAIIQLGTYDGTVYNARQVIDTVGHLCDYILFDSAWVGYEQFIPMMADSSPLLLELNENDPGIFVTQSVHKQQAGFSQTSQIHKKDNHIRGQARFCPHKRLNNAFMLHASTSPFYPLFAALDVNAKIHEGESGRRLWAECVEIGIEARKAILARCKLFRPFIPPVVDGKLWQDYPTSVLASDRRFFSFEPGAKWHGFEGYAADQYFVDPCKLLLTTPGIDAETGEYSDFGVPATILAHYLRENGIVPEKCDLNSILFLLTPAESHEKLAQLVAMLAQFEQHIEDDSPLVEVLPSVYNKYPVRYRDYTLRQLCQEMHDLYVSFDVKDLQKAMFRQQSFPSVVMNPQDAHSAYIRGDVELVRIRDAEGRIAAEGALPYPPGVLCVVPGEVWGGAVQRYFLALEEGVNLLPGFSPELQGVYSETDADGVKRLYGYVLK

SEQ ID NO: 1807 - DNA, 2961 bp, Hafnia alvei
  CDS (185)..(2404)
gatcatcctgatgttctactctcgtaagatgggtagaaaccaagagaagttaaccacgccgacggatcgtcagtcttaatccactcaaccattaacacgcaagttggtaacagcacacagcacagaggatgaatttccgcctctgtgctaataacccagcccacacaagtctggagagttttgcatgaatatcattgccatcatgaacgatttaagcgcttattttaaggaagaacccctgcgcgagctgcatcaagagttagagaaggaaggcttccgtattgcttatcccaaagaccgcaacgatctgctgaagctgattgaaaacaactcccgcctgtgtggcgtcattttcgactgggataaatataacctcgaactcagcgctgaaatcagcgagctcaacaaactgctgccaatttatgccttcgccaatacctattcgacgcttgacgtcaacatgagcgacctgcgtcttaatgttcgcttctttgaatatgcattaggcagcgcgcaagacattgccaccaagatccgccaaagcaccgatcagtatattgataccattctgccaccgctgaccaaggcgctgttcaaatacgtcaaagaagagaaatacacagtctgtacgccggggcatatgggcggaactgcgttcgataaaagccctgtcggtagcctgttctatgatttcttcggtgaaaacaccatgcgttcggatatctcgatctccgtatctgagctcggatcgctgctcgatcatagcggcccacaccgtgacgccgaagagtatatcgcgcgcacgttcaacgccgatcgcagctatatcgtaaccaacggaacatctacggcgaataaaattgtcggcatgtattcatctcctgccggtgccactattctgatagaccgtaactgccataaatcattgacccatttgatgatgatgagcaacgttgtccccgtctatctgcgcccaacccgtaacgcctacggcattttaggcgggataccgcaaagcgagttcacccgcgccagcattgaagagaaagtgaaaaatacgcccaatgcgacatggccggtgcatgcggtagtcaccaactctacctatgacggcctgttctacaataccgaatacatcaaaaacacgcttgatgttaagtcgattcacttcgattcggcatgggtgccttacaccaacttccatccgatttaccaaggcaaagcagggatgagcggtgaacgtgtgccggggaaaatcatctacgagactcagtccacccacaaactgctggcggcattctcgcaggcatcgatgatccacgtgaaaggtgagatcaacgaagaaaccttcaatgaagcctatatgatgcatacctcaacatcaccgcattacgggatcgttgcgtcgacggaaaccgcggcggctatgatgaagggcaacgccggtaagcgtttaattaacggttcaattgaacgagcgatccgcttccgtaaagagatccgccgcttacgtacagaatctgatggctggttctttgacgtatggcagccggataacattgacgaggttgcttgctggccactcaatccacgtaatgaatggcatggattcccgaacatcgacaacgatcatatgtatcttgatccgatcaaagtcactctgctgaccccaggtttaagccccaatggcactctggaagaggaagggataccggcgtcgatcgtgtcgaaatatctggatgagcacggcatcatcgtggaaaaaaccgggccatataacctgctcttcctgtttagtatcgggatcgataaaaccaaggcgttgagcttgttgcgggcattaaccgatttcaaacgcgtgtatgacctcaacctgcgcgtgaaaaacgtgttgccatcgctctataacgaggcgcctgatttctataaagagatgcgaattcaggagttggctcaggggattcatgctctggtgaaacaccacaatctaccagacctgatgtatcgtgcatttgaggtattaccaaagctggtgatgacgccgcatgatgcgttccaagaagaagtgcgtggcaatattgagccatgtgccttggatgatatgttagggaaagttagcgccaacatgatcttgccgtatcctccgggtgttccggtggttatgccgggagaaatgctcactaaggagagccgccctgttctgagcttcttgcagatgctatgtgaaattggcgcacactatccgggctttgaaacggatattcacggcgttcatcgtgatggtgcaacgggtaaatacatggtcgtggtgctcaaacaaggcgcagatgaaccgggtgataaaccgagtgatacggtgaagaaagcgccgggtaaaaaaccatcagcggcgaagaagtcataacggcgagaagttacaggtaacgcttatcccctgagtgataggttcttgtcatgatggggataaagcgggtgcctgagagccaaccatgcatgaaaacaatttgagaagactgggaaggttaggcgccatcccagtctgattttgccgttacatattgccgttacaacgcgtgcttatcttcgtagtttaagaacgcggcaacctctgtttttccctgcttaattcgtagctcacacagcgaaccacgtaccatccaggtaaagatcaatagcgtaaaacacatcactattaatccgtaaagcaacagcttacgcgacatcaaagcctccaattgcattgctgcattgaagaggctatcctcacattgttcagatgtggttaggattgcctcaggttaatgtaagttgacctggggcttttactttctgcctcaccacatatttcatgctcaaggcaaaaagcctcaagcacccgccgtgattctatccaaacaatgcttagctatcgcgcgtctattgccgttacatcagagttgcttgaataactgcaaaacgctt

SEQ ID NO: 1808 - protein, 739 aa, Hafnia alvei
MNIIAIMNDLSAYFKEEPLRELHQELEKEGFRIAYPKDRNDLLKLIENNSRLCGVIFDWDKYNLELSAEISELNKLLPIYAFANTYSTLDVNMSDLRLNVRFFEYALGSAQDIATKIRQSTDQYIDTILPPLTKALFKYVKEEKYTVCTPGHMGGTAFDKSPVGSLFYDFFGENTMRSDISISVSELGSLLDHSGPHRDAEEYIARTFNADRSYIVTNGTSTANKIVGMYSSPAGATILIDRNCHKSLTHLMMMSNVVPVYLRPTRNAYGILGGIPQSEFTRASIEEKVKNTPNATWPVHAVVTNSTYDGLFYNTEYIKNTLDVKSIHFDSAWVPYTNFHPIYQGKAGMSGERVPGKIIYETQSTHKLLAAFSQASMIHVKGEINEETFNEAYMMHTSTSPHYGIVASTETAAAMMKGNAGKRLINGSIERAIRFRKEIRRLRTESDGWFFDVWQPDNIDEVACWPLNPRNEWHGFPNIDNDHMYLDPIKVTLLTPGLSPNGTLEEEGIPASIVSKYLDEHGIIVEKTGPYNLLFLFSIGIDKTKALSLLRALTDFKRVYDLNLRVKNVLPSLYNEAPDFYKEMRIQELAQGIHALVKHHNLPDLMYRAFEVLPKLVMTPHDAFQEEVRGNIEPCALDDMLGKVSANMILPYPPGVPVVMPGEMLTKESRPVLSFLQMLCEIGAHYPGFETDIHGVHRDGATGKYMVVVLKQGADEPGDKPSDTVKKAPGKKPSAAKKS

SEQ ID NO: 1809 - DNA, 4341 bp, Escherichia coli
  CDS (660)..(2858)
ggatcccgcccgcccacgccatttcattactgaaaccggtattggctatcggtttatgctttgaatattaattttaatacagcctgccttttattaattaaagccgtaataataaatacggctttttatcttaaacaacacacaaaaataacaattcaatattttatattactgagtaaaaagctcatcattaaataaattaagattgatcattttttattgatcaccttcacagttcaaccgtatttcctggatagaatatcttcaccttcattcacatcaggaaaggtaaattaaatggaaaataacagccgcactatgccccatataaggcggacaactcatattatgaagtttgctcatcgcaatagcttcgactttcacttcttcaatgcccgttagtctaccgactaagggcacttcagcgtacaggtcttcctgactctctgtattacaggcatatgcctgtattccgcagtgctcattctctgttaacccttgtattatcagccacctgactggtaagggtttctgcattctgaaaaaagcaatctacctgatttatttatcagcggggtaactttgcttttttccggcacgatcgatttctcattcgagaaattgaggacctgctattacctaaaataaagagatgaaaaatgtcaaaattaaaaattgcggttagtgattcttgcccggactgttttaccacgcagcgagaatgtatctacattaatgaaagtcgtaatatcgatgtggcggcaatagttttatcgctcaacgatgttacatgcggaaaactcgatgaaatcgatgccacgggttatggcatcccggtatttattgctactgaaaatcaagaacgtgtacccgcagagtatttgccccgtatttcgggtgtctttgagaattgcgaatcgcgacgagaattttatggtcgccagttagaaaccgctgccagccattatgaaactcaactgcgcccacctttcttccgcgcactggtcgattatgtcaatcaaggtaacagcgcgtttgattgccctggtcatcagggcggcgaatttttccgtcgccatccggcggggaatcagtttgtggaatactttggtgaggcgctgttccgtgccgacttgtgcaacgccgacgtagcgatgggcgatctgctgattcacgaaggcgcgccatgcattgcacagcaacatgcggcaaaagtgtttaatgccgataaaacctacttcgttttaaatggcacttcatcttctaacaaagtggttttaaacgccctgctaacaccgggtgatctggtgctgtttgatcgcaataaccacaaatctaaccaccacggagcgttgctacaggctggtgcaacaccggtttatctggaaacggcacgtaacccgtatggctttatcggtggcattgatgcgcactgttttgaagaaagttacctgcgtgagctgatcgcggaagtcgcaccgcagcgggcaaaagaggctcgtcctttccgcctcgctgtgattcagttaggcacctacgacggtacgatttataacgcccgccaagtggtggataaaattggtcatctgtgtgactacatcctgtttgactcagcatgggtcggctatgaacagtttattccgatgatggcggactgttcgccgctgttgctggatcttaatgagaacgatccgggtattctggttacgcaatctgtgcataaacaacaggctggtttttctcagacttcacaaattcataaaaaagacagccacatcaaagggcaacagcgttatgtaccgcacaaacgcatgaacaacgcctttatgatgcacgcctccaccagcccgttctatccgctgtttgccgcactgaatatcaacgccaaaatgcatgaaggtgtcagcggtcgtaatatgtggatggattgtgtggtaaatggcattaatgcccgcaaactgatcctcgataactgtcagcatattcgtccgttcgtacctgaactggtggatggtaaaccctggcagtcgtatgaaacagcgcaaattgcggttgatctgcgcttcttccagtttgtaccaggggaacactggcattcttttgaaggctatgcagagaatcaatactttgtcgatccatgcaaactgttgctgacaaccccaggtattgatgcacgtaacggcgaatatgaagcgttcggtgtacccgcgacgattcttgctaacttcctgcgcgaaaatggcgtagtgccggaaaaatgcgatcttaactccatcctcttcctgctgactccggcagaagatatggccaaacttcagcaacttgttgccctgctggtacgcttcgaaaaactgcttgagtccgacgcgccattagcagaagtgctaccttccatctacaaacagcatgaagagcgctacgccggttataccctgcgtcagttgtgtcaggaaatgcatgatttgtatgcccgccacaacgtgaaacaactgcaaaaagagatgttccgtaaggagcacttcccacgcgtcagcatgaatccgcaagaagccaactacgcctatttacgcggtgaagtggaactggttcgtctgccggatgcagaaggccgtatcgctgccgaaggtgcgcttccttatcctccgggtgtgctgtgtgttgttccgggtgaaatctggggtggtgctgttctgcgttacttcagcgctctggaagaagggatcaacctgctgccaggttttgcaccggagctgcagggtgtctatatcgaagaacatgatggtcgtaagcaagtttggtgctatgtcatcaagcctcgtgatgcgcaaagcaccctgttgaaaggggaaaaattatgagtcaggctaaatcgaacaaaatgggcgtcgttcagttaaccatactgacgatggtcaacatgatgggctccggtatcatcatgctgccgacaaagcttgccgaagtcgggacaatctcaattatctcctggctggtgacagccgtaggctcaatggcactggcatgggcattcgcaaaatgcggtatgttcagccgtaaatcaggcggtatgggcggttatgccgagtatgctttcggtaaatccggtaactttatggcgaactatacctacggcgtctcactgctgattgctaacgtcgcgattgctatttcggcggttggttacggcaccgaactgctcggcgcgagtttgtcgccagtgcagattggtcttgcgaccatcggggtgctgtggatttgtaccgtggctaactttggtggtgcgcgcattaccgggcaaatcagtagcattaccgtgtggggggtcattattccggtcgtcggtctgtgcattattggctggttctggtttagcccgacgctgtacgttgattcctggaatccgcatcatgcaccgttcttcagtgcggtaggttcttccatcgctatgacgctgtgggcttttcttggtctggagtctgcgtgtgcgaatactgatgtagtggaaaacccggaacgtaatgtgccaatcgcggtactcggcggtacgttaggtgcggcggtgatttatatcgtctccaccaacgtgattgccgggattgtgccaaatatggagctggcaaattcaacggcaccatttggtctggccttcgcgcagatgttcacgccggaagtgggtaaagtcattatggcgctgatggtgatgtcctgctgcggttcgctacttggctggcagttcaccattgcccaggtgtttaaatcttcatctgatgaaggctacttccctaaaattttctcccgtgtaaccaaagtggatgcaccggtgcagggaatgttgaccattgtgattattcagagtggattggcactgatgaccattagcccgtcgctaaacagtcagttcaacgtgctggttaacctggccgtggtgaccaatatcattccgtatattctgtcaatggcggcattagtcattattcagaaggtcgctaatgtgcccccctcaaaagcgaaagttgcaaactttgttgcttttgttggcgcgatgtatagcttttatgcgctgtactcatccggggaagaagccatgctgtacggttccatcgtgaccttccttggttggacactgtatggtctggtatcaccacgctttgaactgaaaaataaacacggttaataaaacaaagtaaaaaagggcgattgaatgatcgccctttctgtttgttggcaaatagttcgttatttatgccgcatccggcagatgtagggtctaaacgcgatcgaacacagcaactatttgcgtaattatatggggcatctgcgacaaaaactggaacaggatcc

SEQ ID NO: 1810 - protein, 732 aa, Escherichia coli
MSKLKIAVSDSCPDCFTTQRECIYINESRNIDVAAIVLSLNDVTCGKLDEIDATGYGIPVFIATENQERVPAEYLPRISGVFENCESRREFYGRQLETAASHYETQLRPPFFRALVDYVNQGNSAFDCPGHQGGEFFRRHPAGNQFVEYFGEALFRADLCNADVAMGDLLIHEGAPCIAQQHAAKVFNADKTYFVLNGTSSSNKVVLNALLTPGDLVLFDRNNHKSNHHGALLQAGATPVYLETARNPYGFIGGIDAHCFEESYLRELIAEVAPQRAKEARPFRLAVIQLGTYDGTIYNARQVVDKIGHLCDYILFDSAWVGYEQFIPMMADCSPLLLDLNENDPGILVTQSVHKQQAGFSQTSQIHKKDSHIKGQQRYVPHKRMNNAFMMHASTSPFYPLFAALNINAKMHEGVSGRNMWMDCVVNGINARKLILDNCQHIRPFVPELVDGKPWQSYETAQIAVDLRFFQFVPGEHWHSFEGYAENQYFVDPCKLLLTTPGIDARNGEYEAFGVPATILANFLRENGVVPEKCDLNSILFLLTPAEDMAKLQQLVALLVRFEKLLESDAPLAEVLPSIYKQHEERYAGYTLRQLCQEMHDLYARHNVKQLQKEMFRKEHFPRVSMNPQEANYAYLRGEVELVRLPDAEGRIAAEGALPYPPGVLCVVPGEIWGGAVLRYFSALEEGINLLPGFAPELQGVYIEEHDGRKQVWCYVIKPRDAQSTLLKGEKL

SEQ ID NO: 1811 - DNA, 1850 bp, Bacillus subtilis
  CDS (312)..(1784)
aagctttaagcagttcttcacgatccgcccctttttcatatgcaagctcaacctgctggaaaaatgcaatcacatccactgcttcttcggttgtccaatcttcattcatcggatattgatactccattttcttcactccttgtagatttacttcccttaagagaaagcatcttcatttgatcataaattgttctttacattctttcaagttcataatataattcatttgttttacgtctaaaaaacggttgagaaactgattttaatacacactattatgcataggtatgattacaaaggtgggaaaacaaatgtcgcaacatgaaacacccttatacacaggactgaaaaagcatgcaagcagacagcctgttcaattccacattcccggccataaaaaaggggcaggaatggacccagaattcagacaatttatcggtgaaaacgcgttaagcatagatttgattaatattgaaccattagacgatctgcacgcgccaaaaggcattattaaacaagcacaagatctggctgctgaagcatttggagcggatcatacatttttttctgttcaaggaacaagcggcgccattatgacaatggtaatggctgtttgcggacctggtgataaaattattattccaagaaatgttcataaatcaattatgacagctattgtattttccggagcggttccaatttttattcatcctgaaattgacaatgaattgggcatctcccacggaattacacttgaatctgctaaacgggcgcttaccgagcatccggatgcaaaagggcttctcgtcatcaacccgacatatttcggtgttgcagccgacttaaaaagcatcgtagaactcgctcattcgtttgatgtgccagtgcttgtggatgaagcacacggcgttcacattcattttcacgacgaattgccgctatcggctatgcaggcaggagcggacatagcagcgacaagtgtacacaagctgggcggatcactgacacaaagctctattttaaacatgagagaaggccttgtatctaaagacagagtgcaatccatcctgagcatgctgacaactacgtcaacttcttacttgcttctcgcttctttggatgttgccagaaaacgccttgcaacagaaggccgccagcttgctgaggaaacactcaagcttgccaatcagacgagagatcgcctcaatcagattgaaggcatttattgtgtcggttctgagattcttgggtcgaaagcagcttacagctatgatccgacaaaattgattatctctgtgaaaagtcttggcctgacaggacatgacgtggaaaaatggcttcgtgaatcctttaatattgaggtggagctttctgatctgtacaatattttgtgtattttcactcctggtgacagccaaaatgatgcagaccggcttgtagaggctttaactgagatcgcacagcaaatgtcagaacaagatgtaacacatcagcaaactgaggttctgcttccagaaatacctttattggcaatgactccgcgtgatgctttctatgcaaatacggaagtcatcccattaaaagaagcatccggacggattattgctgaatttgtcatggtatatccgcctggtattccaatcttcatcccaggagaaattattacagaagaaaacatcagctacatttttaaaaaccttgacgcaggcctccctgttcaaggacctgaggactcgactttacatatgatccgggtcatcaaagaacaaaaagcaattcaataaaaaataaaaagccatgcggctttaagccgcatgcttttttttactcttcatcaacaggacattgac

SEQ ID NO: 1812 - protein, 490 aa, Bacillus subtilis
MSQHETPLYTGLKKHASRQPVQFHIPGHKKGAGMDPEFRQFIGENALSIDLINIEPLDDLHAPKGIIKQAQDLAAEAFGADHTFFSVQGTSGAIMTMVMAVCGPGDKIIIPRNVHKSIMTAIVFSGAVPIFIHPEIDNELGISHGITLESAKRALTEHPDAKGLLVINPTYFGVAADLKSIVELAHSFDVPVLVDEAHGVHIHFHDELPLSAMQAGADIAATSVHKLGGSLTQSSILNMREGLVSKDRVQSILSMLTTTSTSYLLLASLDVARKRLATEGRQLAEETLKLANQTRDRLNQIEGIYCVGSEILGSKAAYSYDPTKLIISVKSLGLTGHDVEKWLRESFNIEVELSDLYNILCIFTPGDSQNDADRLVEALTEIAQQMSEQDVTHQQTEVLLPEIPLLAMTPRDAFYANTEVIPLKEASGRIIAEFVMVYPPGIPIFIPGEIITEENISYIFKNLDAGLPVQGPEDSTLHMIRVIKEQKAIQ

SEQ ID NO: 1813 - DNA, 3091 bp, Lactobacillus sp
  CDS (572)..(2767)
cactgccatataggaacgatgatagtatctcttcatgagtatcgataaatactctgtaaatattaatcatgggcaattagcaccttctcattgaatatagtaatattaactattaataacagattatgattaatataatatgaacatacctaagtgtcccttccgttcaagcacttagacggtaaattacaacattcgcttacaacttctattaaatcgaaaaagttaatatttcatatataaacagtaattagttatattgatccacaaagccccctagtttccgcaataaattccgatccgccttttttatacacattctcattattgtctcagttgcaaacattccctttttcacttttaaagtaaccgttacctttacttatacgtcggcgtttgttcccattaatttttagttctatttttttattcttttaaagaaaaataaggatgattccgccttgattaaaatcaataatggtttatactagattatgtattcaagttgaattcggttacatcacatagtgtgttgtaattacggatttacatatttttaggaggttttatgatgagttcttctcttaaaattgcttcgactcaagaagcgcgtcaatatttcgatactgaccgcgttgttgtcgatgctgtaggctctgattttactgatgtcggtgctgttatcgcaatggattacgaaacagatgtcatcgacgctgctgatgcaactaagtttggtattcctgtttttgccgtaactaaggatgcccaagctatcagtgctgatgagctgaagaagattttccacatcattgatttggaaaacaaatttgatgctactgttaacgctcgtgaaatcgaaactgctgttaacaactacgaagacagcattttaccaccattcttcaagtcattgaaagaatacgttagccgtggtttaatccaattcgactgcccaggtcaccaaggtggtcaatactacagaaagcacccagctggtcgtgaattctacgacttcttcggcgaaactgtcttccgtgcagacttatgtaacgctgacgttgccttgggtgacttgctgatccacgaaggtcctgctgttgctgctgaaaagcatgctgcacgtgtttacaacgctgacaagacttacttcgttttaggtggttcttccaacgctaacaacactgtaacatctgctttagtttctaacggcgacttggtattgttcgaccggaacaaccacaagtccgtttacaactcagctttagctatggctggtggccgtcctgtttacctccaaacaaaccgtaacccatacggcttcatcggtggtatctacgacagcgacttcgatgaaaagaagatccgtgaactggcagctaaggttgacccagaacgtgctaagtggaagcgtccattccgtctggctgttatccaattaggtacttacgatggtactatctacaacgcacacgaagttgtaaagcgtatcggtcacctttgtgattacatcgaattcgactctgcttgggtaggttacgaacaattcattcctatgatgcgtaactcttcaccattattgattgatgaccttggtccagaagatcctggtatcattgttgttcaatcagttcacaagcaacaagccggcttctcacaaacttcacaaatccacaagaaggatagccacatcaagggtcaattacgttactgtgaccacaagcactttaacaactccttcaacttgttcatgtctacttcaccattctacccaatgtatgcagcattagacgttaacgctgctatgcaagaaggcgaagcaggtcgcaagttatggcatgaccttctgattactaccattgaagctcgtaagaagttgatcaaggctggctcaatgttccgtccattcgttccacctgttgttaacggcaagaagtgggaagatggcgacactgaagatatggctaacaacattgactactggcgctttgaaaagggtgctaagtggcatgcttacgaaggctacggcgacaaccaatactacgttgatccaaacaagttcatgttaactacacctggtatcaacccagaaactggtgactacgaagacttcggtgttccagctactatcgttgctaactacttacgtgaccacggtatcatccctgaaaagtctgacttgaactctatcttgttcttgatgactccagctgaaactccagctaagatgaacaacctgatcactcaacttcttcaattacaacgcttgatcgaagaagatgctccattgaagcaagttcttccttcaatctacgctgctaacgaagaacgttacaatggctacactatccgtgaactttgccaagaattgcacgacttctacaagaacaacaacacgttcacataccagaagcgtctcttcttacgtgaattcttcccagaacaaggtatgcttccatacgaagctcgtcaagaattcatccgcaaccacaacaagcttgttccattgaacaagatcgaaggcgaaatcgccctcgaaggtgctcttccataccctccaggagtattctgtgtagcaccaggtgaaaagtggtcagaaactgctgttaagtacttcactatcttacaagatggtatcaacaacttccctggattcgctccagaaatccaaggtgtatacttcaagcaagaaggcgacaaggttgttgcttacggtgaagtttacgatgcagaagttgctaagaacgatgatcgttacaacaactaataactgcattgcctgattaacaggcaggaaaaaaccggcgttatgccggttttttgttgcacaatttttcttttttaacttgattgtcaataagtaagttttatccatagtagttccatagctattgaactattaaaccaagaccaatatccgtgcaaattttaaggacctggcagaagttaacgagttagatactccttgatctctacacactacggagctcactcattgtggagattaaggttcctaacataggtagtacaccttccgatcactaaatctaacaggacgaggatatatgcagattcctcgaatccggttcca

SEQ ID NO: 1814 - protein, 731 aa, Lactobacillus sp
MSSSLKIASTQEARQYFDTDRVVVDAVGSDFTDVGAVIAMDYETDVIDAADATKFGIPVFAVTKDAQAISADELKKIFHIIDLENKFDATVNAREIETAVNNYEDSILPPFFKSLKEYVSRGLIQFDCPGHQGGQYYRKHPAGREFYDFFGETVFRADLCNADVALGDLLIHEGPAVAAEKHAARVYNADKTYFVLGGSSNANNTVTSALVSNGDLVLFDRNNHKSVYNSALAMAGGRPVYLQTNRNPYGFIGGIYDSDFDEKKIRELAAKVDPERAKWKRPFRLAVIQLGTYDGTIYNAHEVVKRIGHLCDYIEFDSAWVGYEQFIPMMRNSSPLLIDDLGPEDPGIIVVQSVHKQQAGFSQTSQIHKKDSHIKGQLRYCDHKHFNNSFNLFMSTSPFYPMYAALDVNAAMQEGEAGRKLWHDLLITTIEARKKLIKAGSMFRPFVPPVVNGKKWEDGDTEDMANNIDYWRFEKGAKWHAYEGYGDNQYYVDPNKFMLTTPGINPETGDYEDFGVPATIVANYLRDHGIIPEKSDLNSILFLMTPAETPAKMNNLITQLLQLQRLIEEDAPLKQVLPSIYAANEERYNGYTIRELCQELHDFYKNNNTFTYQKRLFLREFFPEQGMLPYEARQEFIRNHNKLVPLNKIEGEIALEGALPYPPGVFCVAPGEKWSETAVKYFTILQDGINNFPGFAPEIQGVYFKQEGDKVVAYGEVYDAEVAKNDDRYNN

SEQ ID NO: 1815 - DNA, 1449 bp, Bacillus halodurans
  CDS (1)..(1449)
atgaaaaaagcctcaacattgccgctatttgaacggctcgttcagcatgatcgcgggggacctatctcgtgccatgttccaggccataagcagggggctctttttcataaggatgcctgttcatattttcaaagcattttatcccttgatgtaacggagctaaccggccttgatgatctccatgatcccagaggagttattgcagaggctcaagctttgacagcccgctacgtcggggcagaagcgacgtgttttttagtcaatggctcgacggttggtaatttggcaatgattttaggtacacttgagcctggcgatactgtttttgtacaaagggattcgcataaatcggtgatgaatgggttagcgatggcaagggtccatccaatctttctttcaccatcctacgatgagagaacgcaattaccaacaggtattaccgaacaaacgttaaaacaagcactaatagaacacccgaatgggaaagcacttattttaacatatccatcgtattatggggttgcccgctcgatccgtccgctcgtccagatggcgaaagaagctggattgtacgtacttgtggatgaggcgcacggagcacattttccggtaggtgatccatttccgaaacaagcacttgagcaaggggccgacgtagtcgttcaatctgcgcataaaaccttacccgccttaacaatgggctcctatcttcactttgctcatggactacattcgaaaatcaaggattccattcgagagcaattgcagattttgcagtcgagcagcccatcctatccgattcttgcctcattagatgcagcaagaggatttttagaggatctcacgaatgtaaaagatacgctcgattccatcgcggagatgaataggcggattgaacaggtcgagcgtttgtcggttgctacattttccccgctacccaccgatccattaaaaacggtgattacagtagaaggggcaacaggatttgccttgcaaaccgaacttgaaaaagaggggatatactcagagctggcagacgatcgtcatgttttgcttatgtgggggctaacccctttacagaaagtccgacaagaggaaatcatcgacaaaatgtgccgagcaaccaagcggcttcctgcgcttgagcaaataagtaaagggtgccccctatcgttatcgtggcaagcacacacgtcgcttgatctatcatatgatgaacaaaaacgatattcaattgaagaggttgccgtggaagaggctgtggggaaagtgagtggagcaacggttatcccttatcccccaggggtacctctcctattaaaaggggaaaaaatcacagaaccgttaattgcccaatttcagcagttgcaggaggcaggggcccgttttcaggggagaccttctgagcaacaagggttgtatgtgtttacgttggaggctatgacatga

SEQ ID NO: 1816 - protein, 482 aa, Bacillus halodurans
MKKASTLPLFERLVQHDRGGPISCHVPGHKQGALFHKDACSYFQSILSLDVTELTGLDDLHDPRGVIAEAQALTARYVGAEATCFLVNGSTVGNLAMILGTLEPGDTVFVQRDSHKSVMNGLAMARVHPIFLSPSYDERTQLPTGITEQTLKQALIEHPNGKALILTYPSYYGVARSIRPLVQMAKEAGLYVLVDEAHGAHFPVGDPFPKQALEQGADVVVQSAHKTLPALTMGSYLHFAHGLHSKIKDSIREQLQILQSSSPSYPILASLDAARGFLEDLTNVKDTLDSIAEMNRRIEQVERLSVATFSPLPTDPLKTVITVEGATGFALQTELEKEGIYSELADDRHVLLMWGLTPLQKVRQEEIIDKMCRATKRLPALEQISKGCPLSLSWQAHTSLDLSYDEQKRYSIEEVAVEEAVGKVSGATVIPYPPGVPLLLKGEKITEPLIAQFQQLQEAGARFQGRPSEQQGLYVFTLEAMT

SEQ ID NO: 1817 - DNA, 2196 bp, Sinorhizobium meliloti
  CDS (1)..(2196)
atgcgcagcctcgcagaggcgattgaaaaggaaggttatcgggtcgttgcagggctcacctatgaggatgcacgccgcctcgtgaacgtcttcaacaccgagtcctgctggctgatttcagtcgacgggacggaatcaagtacgacgcgctgggagattttagccgagctgctcgccgcgaaacgctcccggaacaacctgctgccaatctttctgtttggcgacgatacaacggcggaaatggtgccggcgcccgtgctgcgccacgccaatgcctttatgcgtcttttcgaggattctccggaattcatggcgcgcgcgatcgtgcgcgcggcgcagaattatcttgagaggcttccgcctccaatgttcaaggcgttgatggaatacacgcttcacggcgcctattcctggcacacgccagggcacggaggcggggtggcgtttcgcaagagcccggttggccagctcttttatacgttttttggagagaacacattgaggtcggacatttctgtgtccgtcggcagcgttggttcgctcctcgatcatgttgggccgattggcgagggtgagcgcaatgccgctcgcatatttggtgcggatgagacgctgttcgttgtcggcggcacctcgaccgccaataagatcgtgtggcagggtatggtcactcggaacgacctcgtcctctgcgaccgaaactgccataagtctatcctgcactcgctgattatgacgggtgcaacgccgatttacctgacgccctcacgcaacggcctcggcatcatcggaccgattgcgaaggagcagtttaccccagaggcaatcgcgcacaagatcgtcgccagtccgtttgccagtgagacgaacggtaaagtgcgcctgatggtagtgacaaactccacctatgatgggctctgctacaatgtagatggaatcaaatcggcgctcggcgatgcggtggaggtactgcatttcgacgaggcctggtttgcttacgccaattttcacgaattctacgatggttatcacgcgatctcttcaacgaagcccgcgcgctcgcaagaagccatcacattcgcaacccagtccacgcacaagctgctggccgccttctctcaagcttcaatgcttcatgtgcagcatgccgtggcgaagcaactcgacatcacacgcttcaacgaagcgttcatgatgcacacatcgacatcgccgcaatatgggatcatcgcctcgtgcgacgtggctgctgccatgatggagcagcccgccgggcgggcgctggtacaggagaccattgacgaagccatgagtttccgccgagccgtcaacgccgtgcggacacagatgcaggattcctggtggttcgaagtctgggagccccccatcgcggatcgggccccgagcgacgccacgtcggattggcttctaaagcccggtgacgcttggcatggtttcgaagacctggctgagaatcacgttatggttgacccgatcaaggtcacgatcctttcgcccggactcaatgcgggcggagcgatgctggagcatggtattccggctgcagtcgtcacgaagttcctttcttctcgccggatcgaaatcgagaaaaccggcctctactctttcctggtgctcttctccatggggatcacacggggcaagtggagcaccctgatcaccgagctcttgaacttcaaagacctctatgatgccaatgcgcctctttcacgcgcccttcccgccctcgcggcagcccatccggacgtctaccgtgcaatgggccttagagatctttgcgagaaaattcacgacgtgtaccgcagcgatggcgtgccgaatgcccagcgcgagatgtacaccgtgctacccgaaatggcactgcgcccggcagacgcctacaaccgcctggtcaaggggtgcgtcgaaagcgtcgatatcgacgaattgatcggccggacactcgcagtcatgattgtaccctatcctccgggcatcccgctcatcatgcctggcgagcggatcactgcagccacaagatcgatccaggactatctcgtctacgcccggagtttcgacaggaaattcccgggatttgagacggacatccacggactccgtttcgtcgctaacccgagtggacggagatatctcgtggattgcatcgtcgaggagggacaagatgataccgcgtga

SEQ ID NO: 1818 - protein, 731 aa, Sinorhizobium meliloti
MRSLAEAIEKEGYRVVAGLTYEDARRLVNVFNTESCWLISVDGTESSTTRWEILAELLAAKRSRNNLLPIFLFGDDTTAEMVPAPVLRHANAFMRLFEDSPEFMARAIVRAAQNYLERLPPPMFKALMEYTLHGAYSWHTPGHGGGVAFRKSPVGQLFYTFFGENTLRSDISVSVGSVGSLLDHVGPIGEGERNAARIFGADETLFVVGGTSTANKIVWQGMVTRNDLVLCDRNCHKSILHSLIMTGATPIYLTPSRNGLGIIGPIAKEQFTPEAIAHKIVASPFASETNGKVRLMVVTNSTYDGLCYNVDGIKSALGDAVEVLHFDEAWFAYANFHEFYDGYHAISSTKPARSQEAITFATQSTHKLLAAFSQASMLHVQHAVAKQLDITRFNEAFMMHTSTSPQYGIIASCDVAAAMMEQPAGRALVQETIDEAMSFRRAVNAVRTQMQDSWWFEVWEPPIADRAPSDATSDWLLKPGDAWHGFEDLAENHVMVDPIKVTILSPGLNAGGAMLEHGIPAAVVTKFLSSRRIEIEKTGLYSFLVLFSMGITRGKWSTLITELLNFKDLYDANAPLSRALPALAAAHPDVYRAMGLRDLCEKIHDVYRSDGVPNAQREMYTVLPEMALRPADAYNRLVKGCVESVDIDELIGRTLAVMIVPYPPGIPLIMPGERITAATRSIQDYLVYARSFDRKFPGFETDIHGLRFVANPSGRRYLVDCIVEEGQDDTA

SEQ ID NO: 1819 - DNA, 1380 bp, Listeria innocua
  CDS (1)..(1380)
atgcgagatcaatctaaaatgcctttagtggaacggttagatgctcatgctaaatcctgcccaatatcactccatgttccaggacacaaaagtggagccatttatccagctgtatggcaaaatttattaaaatgggatgtaacagaaatcaccgggatggacgacttacatcacccagaagacgtgattttggaagcagaggagttactttctgaatgctatggaagtaaaaaaagctattttctagtcaatgggacaagcggaggaagcttggcggttattatggcgacgttaaagcgcggggagaaagttttagtgccaagagatgcacataaatcaatcttgcatggcatcgaactcgccggtggaaaaccgattttcttaactccggcaaccaataaagaagtcggcgtcgcgagtggcgtgacaaccgaacttctggaagaaaccttacataatcacccagatataaaactatgtattttcacttatccgagctattatggaacgacttttaatttagaaaaatgtattcgaattgcgcatcaatatggcgcggttgtgtttgtcgatgaggcgcacggggcacattttttaacgagctctgagtttccaaaaagtgcagtggagcttggtgcggatgtagttgttcagtcggcgcataagacgctaccggcgctaacgatgggatcctatttacatgtcgtgaatgatttaccggtttttgaaaaactagcttattatctgcaagtatttcaaacgagtagcccatcttatttaatcatggcgtcactggatgcggcgcggaaatatgcggcaacttacacagcagcagacgtcgaagctttttggaaaatgcgtgctagatggattaaatggctaacgaagaataaatttgaagtcattttgccagatgatccacttaaaatcatcgtccgcaaaacaggctacacgggctacgaattgcaaacgatttttgaagaaagttcttattttccagagcttgccgacgagtcacaggtattactgattttaccattaatcaaaaaagggattgatttcacgccaattagtcggattcattctccatcgaaaaaagaaatcgcgaaacaaccatatgaaatgtcagcgccttttgcgtcaggtcttgcgttaacttacgaagaaatgcacgcccgcgcgaccgaatttgtgtcattagatgaagctacgacacgcgtttcggctgaaacaatctcgctttatccgccgggaatcccagctattatccgcggagaaagtatcacagaaaaacatatccgcgaactaaaaagtattcgctcgcggcactaccaaggcggcgaaaaactagccgagaattacatccgtatattccgctaa

SEQ ID NO: 1820 - protein, 459 aa, Listeria innocua
MRDQSKMPLVERLDAHAKSCPISLHVPGHKSGAIYPAVWQNLLKWDVTEITGMDDLHHPEDVILEAEELLSECYGSKKSYFLVNGTSGGSLAVIMATLKRGEKVLVPRDAHKSILHGIELAGGKPIFLTPATNKEVGVASGVTTELLEETLHNHPDIKLCIFTYPSYYGTTFNLEKCIRIAHQYGAVVFVDEAHGAHFLTSSEFPKSAVELGADVVVQSAHKTLPALTMGSYLHVVNDLPVFEKLAYYLQVFQTSSPSYLIMASLDAARKYAATYTAADVEAFWKMRARWIKWLTKNKFEVILPDDPLKIIVRKTGYTGYELQTIFEESSYFPELADESQVLLILPLIKKGIDFTPISRIHSPSKKEIAKQPYEMSAPFASGLALTYEEMHARATEFVSLDEATTRVSAETISLYPPGIPAIIRGESITEKHIRELKSIRSRHYQGGEKLAENYIRIFR

SEQ ID NO: 1821 - DNA, 2307 bp, Yersinia pestis
  CDS (1)..(2307)
atgattgatttaagcagtcacaagaaacgcaacgttttagtggttgacagcaatattcgtgatatcaataccgctaatggtcgggcggtaaacgaacttatcattgcgcttaatgacattaattttaatgtgattgcggcggcgacgtttgaagatggcgcggcaacagtgatctccgactcttcgttgtgctgtatttttgtcgattggacttcgggtggtaatgatgatgaatcccatagtcaggcatttgcattgctacaagacattcgtcgccgtaataaatcagtgcctgtgttattgatggctgagcattcatgtatcaatagcttaagtttggagaccatgcagcttgttaatgaatttgtttggatgcatgaagatacctccgagtttatcgctgctcgtgccaaagcactcatcatcaagtattaccagcagttgctgccgccttttacgcaagcgctgtttcaatatacgcaagataatcctgaatattcatgggctgcccccggtcatcaagggggcgttgccttcagtaagacggcggttggacgcgagtttcttgatttctttggcgagaatctatttcgtacggatactggtattgaacgtgagtcattgggatctttactggatcacagtgggccgataaaagagtcagaagcgtatgccgcacaagtttttggtgcacatgcaagttactcgatgcttaatggcacatcgggctctaatcgcgccattatggccgctgtcgtgggagataagcagatcgcattgtgtgatcgtaactgtcataaatccattgagcagggattggtcctgtcgggtgcattaccggtattttttattccaacccgtaaccgctatggcattattggaccaattcctaaagcacaattccaacccacggctattgcacaaaaaattgaacaaaaccccttaaagtcattggcttgtgatagcaagcccgtctatgcagttatcacgaattgtacctatgacggtatgtgctataacgcccaacaggcacaggatttattggcaaaaagcgttgatcagattcatttcgacgaagcttggtacgcctatgcccgttttaatcccctttatcgggagcgttttgcgatgcgtggtgacccggctgaccatgatgcgctgggaccaactatttttgctacacaatcaacgcataaattattggcagcgctgtcgcaagcttcttatattcatgtgagaaatggcaaaaagccgatagaacattcgcggtttaatgagtcgtatatgttgcagtcaaccacttcgccattgtacgccattattgctgccaatgaagtgggggcggcgatgatggaaggcgggcaggggctagcattgacacaagaggtgatcgatgaagctgttgattttcggttggcgctggctcgtgcacatgatgcttttgcaaaacaaggcgaatggttctttaaaccttggaatacaccggaaataacggatagcaaaagcggtaaaaagttacctttctcccaagcatcacgagagcaactgacaaccgatcccgcctgttgggttctcaagccgggagacccgtggcatggtttcgagcagttggaagaagattggtgcatgttggatccgatcaaggccgggattatggtgccgggaatgggggatgacggtaagttgtcagaaaagggaattcccgcagcgatagtgaccgccttccttgggcagcggggaattgtaccgtcgcggaccacggattttatggtgctgtgcttgttttcggtgggtgtaacgaaaggtaaatggggcacactcattaatgtgttactggaatttaagcagcactacgatagcaatacaccgatatcggtgtgcctacctgacttggcgaaaaattatcctcatcaatacgctcataaggggttaaaagtgttgtgtgatgagatgtttgcttatatgaagatcagtgaaatggataaactgcaagctgaggcatttagccatttgcctacgccagtggtcttaccccgtcaggcttttcaagatcatatggctgggcggtgtgagctactacctatcgataagcttgctgggcgtgtttccgctgtcggggttattccatatccgccgggcatcccaattgtcatgccgggggagagttttggtagccatgaagaaccatggctacgttatatcttaagtatcaccaaatggggccagcattttcccggcttcgagaagatcttggaagggtccgagcagaagaatgggcaatattttatttgggtactaaagcagtaa

SEQ ID NO: 1822 - protein, 768 aa, Yersinia pestis
MIDLSSHKKRNVLVVDSNIRDINTANGRAVNELIIALNDINFNVIAAATFEDGAATVISDSSLCCIFVDWTSGGNDDESHSQAFALLQDIRRRNKSVPVLLMAEHSCINSLSLETMQLVNEFVWMHEDTSEFIAARAKALIIKYYQQLLPPFTQALFQYTQDNPEYSWAAPGHQGGVAFSKTAVGREFLDFFGENLFRTDTGIERESLGSLLDHSGPIKESEAYAAQVFGAHASYSMLNGTSGSNRAIMAAVVGDKQIALCDRNCHKSIEQGLVLSGALPVFFIPTRNRYGIIGPIPKAQFQPTAIAQKIEQNPLKSLACDSKPVYAVITNCTYDGMCYNAQQAQDLLAKSVDQIHFDEAWYAYARFNPLYRERFAMRGDPADHDALGPTIFATQSTHKLLAALSQASYIHVRNGKKPIEHSRFNESYMLQSTTSPLYAIIAANEVGAAMMEGGQGLALTQEVIDEAVDFRLALARAHDAFAKQGEWFFKPWNTPEITDSKSGKKLPFSQASREQLTTDPACWVLKPGDPWHGFEQLEEDWCMLDPIKAGIMVPGMGDDGKLSEKGIPAAIVTAFLGQRGIVPSRTTDFMVLCLFSVGVTKGKWGTLINVLLEFKQHYDSNTPISVCLPDLAKNYPHQYAHKGLKVLCDEMFAYMKISEMDKLQAEAFSHLPTPVVLPRQAFQDHMAGRCELLPIDKLAGRVSAVGVIPYPPGIPIVMPGESFGSHEEPWLRYILSITKWGQHFPGFEKILEGSEQKNGQYFIWVLKQ

SEQ ID NO: 1823 - DNA, 2145 bp, Salmonella enterica subsp. enterica serovar Typhi
  CDS (1)..(2145)
atgaacgttattgctatcatgaaccacatgggcgtctactttaaagaagagcctattcgtgaactgcatcgtgcactggaaggtttaaatttccgtatcgtctatccaaacgaccgagaagacctgctgaagctgattgaaaataactcccgcctttgcggcgtcattttcgactgggataaatataaccttgagctttgcgaagagattagcaagctgaacgagtatatgccgctgtacgccttcgccaacagctactctacgctggacgtcagcctcaacgatctgagaatgcaggttcgcttctttgaatatgctttaggcgccgcagccgatatcgcggcgaaaattcgccagaataccgatgaatacatcgacaatattctgccgccgctgacaaaagcgctgttcaaatatgtgcgcgaagggaaatatactttctgtacgcctggccacatgggcgggaccgctttccagaaaagccccgtcggcagcatcttttatgatttcttcggcccgaacacgatgaaatccgatatttcgatttccgtttctgaactgggttcgctgctggaccactccggcccgcataaagaagcggaagagtatatcgcccgcgtctttaacgccgaacgtagctacatggtgacgaacggcacctctacggcgaacaaaatcgtcggtatgtactccgcgccggcaggcagcacggtactgattgaccgtaactgccataaatcgctgacccatctgatgatgatgagcgacattacgccgatttatttccgcccaacccgtaacgcctacggtattcttggcggtattccgcaaagcgagttccagcacgccactatcgctaaacgggtaaaagagacgcctaacgcaacctggccggtccatgctgttattactaactcaacctatgacggtctgttgtataacactgactacatcaagaaaactctggatgtgaagtccattcattttgactccgcctgggtgccttataccaatttctcccctatttatcagggtaaatgcggtatgagcggcgaccgtgtggaaggcaaaatcatttatgaaacccagtccacgcataaactgctggcggcgttttcacaggcatccatgattcatgttaaaggcgacattaacgaagaaacctttaacgaagcctacatgatgcataccaccacttctccgcactacggtatcgtagcgtctactgaaaccgcagcggcgatgatgaaaggtaatgcgggtaaacgcctgattaacggctctattgaacgtgcgattaaattccgtaaagaaattaaacgcctgaaaagcgaatctgacggctggttctttgacgtatggcagccggaacatatcgatggagctgagtgctggccgctgcgttcagatagcgcatggcatggcttcaaaaatatcgataacgaacacatgtacctcgacccgatcaaagtcactatcctgacgccggggatgaagaaagacggtacgatggatgagttcggtattccggcaagtctggtcgccaaatatctcgatgaacgcggcatcatcgtagaaaaaaccggtccatacaacctgctgttcctgttcagcattggtatcgacaaaaccaaagctctgagcctgctgcgcgcgctcactgaatttaaacgcgcctttgacctgaacctgcgcgtcaaaaacattctgccggcactgtaccgcgaagcgcctgagttttatgaaaatatgcgcatccaggaactggcgcagaatattcataaactggtcgaacatcataatctgccggacttaatgtaccgtgcgtttgaagtgctgccgaaaatggtgatgacgccgtatactgcgttccagaaagagctgcatggcgaaacggaagaggtgtatcttgaagagatggttggacgcgtcaacgccaacatgatccttccttaccctccgggagtgccgctggtgatgcctggtgaaatgatcaccgaggaaagccgtccggtactggaattcctgcaaatgctgtgcgaaatcggcgcccactatccgggcttcgaaaccgatatccacggcgcctatcgtcaggcagacggacgttacaccgttaaggtgctgaaagaaaatacgaaataa

SEQ ID NO: 1824 - protein, 714 aa, Salmonella enterica subsp. enterica serovar Typhi
MNVIAIMNHMGVYFKEEPIRELHRALEGLNFRIVYPNDREDLLKLIENNSRLCGVIFDWDKYNLELCEEISKLNEYMPLYAFANSYSTLDVSLNDLRMQVRFFEYALGAAADIAAKIRQNTDEYIDNILPPLTKALFKYVREGKYTFCTPGHMGGTAFQKSPVGSIFYDFFGPNTMKSDISISVSELGSLLDHSGPHKEAEEYIARVFNAERSYMVTNGTSTANKIVGMYSAPAGSTVLIDRNCHKSLTHLMMMSDITPIYFRPTRNAYGILGGIPQSEFQHATIAKRVKETPNATWPVHAVITNSTYDGLLYNTDYIKKTLDVKSIHFDSAWVPYTNFSPIYQGKCGMSGDRVEGKIIYETQSTHKLLAAFSQASMIHVKGDINEETFNEAYMMHTTTSPHYGIVASTETAAAMMKGNAGKRLINGSIERAIKFRKEIKRLKSESDGWFFDVWQPEHIDGAECWPLRSDSAWHGFKNIDNEHMYLDPIKVTILTPGMKKDGTMDEFGIPASLVAKYLDERGIIVEKTGPYNLLFLFSIGIDKTKALSLLRALTEFKRAFDLNLRVKNILPALYREAPEFYENMRIQELAQNIHKLVEHHNLPDLMYRAFEVLPKMVMTPYTAFQKELHGETEEVYLEEMVGRVNANMILPYPPGVPLVMPGEMITEESRPVLEFLQMLCEIGAHYPGFETDIHGAYRQADGRYTVKVLKENTK

SEQ ID NO: 1825 - DNA, 1467 bp, Nostoc sp. PCC 7120
  CDS (1)..(1467)
atgcttgatcaaaaccaaacaccactaatagaatctataaaagcttgtactgctcgacatcatgcagcgttttatactcctgggcataagcaggggagggggattgctcaacctttggctgatttgttgggtaaagcggtatttagtgctgatttgacggagttggctgatttagataatttatctgcgccccaaggagtgattcaggaagcccaacaattagcggcggcggcgtttggtgcctcacagacatggtttttggtcaatggttctacttgcggtgtcgaggcggcaattctggctacttgtagaccgggggataaaattattttgcctcggaatgtacattcatcggcgatcgctggtttaattctctctggtgctatcccgatttttatttatcctgaatatgacccagttttagatatcgcccatagcatcacgcctgaggctgtaaaagcagctttgcaacaacatcctgatgctaaagcggtgttgacagtttaccctacatattacggtgtatgtggggatttagaggcgatcgcccaagtcacccaccactacaatattcctttactagtagatgaagcccacggcgcacacttcgcttttcacccagaattacccacctcggccttagccgcaggtgcagatttaactgtacagtcgattcacaaggtactgggtgcaatgacgcaagcttcaatgcttcacatccaaggtgacagaataaatgcggttcgagttagtcaggctttgcagctgctacagtctactagccccagttatgtacttctagcttccctggatgcggctcgtcaacaaatggctttgtctggtaaacagttaatgtcccgtaccttacaactagcgaatgaagccagagaaagaattagtcaaattcctggcttatcagttttacagcctcctaccaagacaccatcaccagggtttacaactttggataaaacacgcttaactgtgactgtttccggcttgggtttaacgggttttgcggcggaagaaattttagatgaacaactgggggtaacggctgaatttgctacgttgcaacatctcacctttattattagcttgggaaacacagctactgatattgagcagttagtccaaggtttcacaactttagcagaaacaacactgcctactaaggcattagtcaacccaaaagttaatagtaatctggaatatttttcagaaatttctccccgtgatgccttttttgccgatagtgaaacgttatccatcgaacaggcgtgcgatggcatttgtgcagaaattgtctgtccttatcccccaggaatccccgtccttatgccaggagaagttatcacaaaacccgccattgaatatttgcaacatatccaaagtttaggcggattcattactggttgtgccgatactagtctgaatactttaaaagttttagtcaatagtcattag

SEQ ID NO: 1826 - protein, 488 aa, Nostoc sp. PCC 7120
MLDQNQTPLIESIKACTARHHAAFYTPGHKQGRGIAQPLADLLGKAVFSADLTELADLDNLSAPQGVIQEAQQLAAAAFGASQTWFLVNGSTCGVEAAILATCRPGDKIILPRNVHSSAIAGLILSGAIPIFIYPEYDPVLDIAHSITPEAVKAALQQHPDAKAVLTVYPTYYGVCGDLEAIAQVTHHYNIPLLVDEAHGAHFAFHPELPTSALAAGADLTVQSIHKVLGAMTQASMLHIQGDRINAVRVSQALQLLQSTSPSYVLLASLDAARQQMALSGKQLMSRTLQLANEARERISQIPGLSVLQPPTKTPSPGFTTLDKTRLTVTVSGLGLTGFAAEEILDEQLGVTAEFATLQHLTFIISLGNTATDIEQLVQGFTTLAETTLPTKALVNPKVNSNLEYFSEISPRDAFFADSETLSIEQACDGICAEIVCPYPPGIPVLMPGEVITKPAIEYLQHIQSLGGFITGCADTSLNTLKVLVNSH

SEQ ID NO: 1827 - DNA, 2163 bp, Yersinia pestis
  CDS (1)..(2163)
atgacactattaaaaatagcaacaagcgcccgcctggcttcttatgtagaaactcagcgcggagtggtgtacctcaatcagactgactttactgatgttgccgcggtggtaatgtcggttgaagatgcaaatgcgggtatattgtcaatgctgcatgaccttggttttgctattcctgcgtttattgccgtgacggcagaacagacggtctctgctgattatttgcccttgattaaaggtgtcattacgcttggtgaagcaaataaagctttttataacgctcaggtagaagctgccgccagtgaatatcaaaagaatctcttaccgccttttttctcaacactgaaaaaatatgtcgagatgaataactcgacctttgcttgccctggccatcaggggggcgaattttttcgcaagcatcctgcaggacgccagttttttgaattctacggtgagacgatttttcgttcagatatgtgtaatgccgatgtcaaattaggtgatttacttatccatgaaggggcggcaaaagatgcacagaaatatgctgctaaggtattcaatgccgataaaacctattttgtcctgaacggtacctcggcggccaacaaggtcgtgaccaacgctttactgacccgtggtgatttagtgttgtttgaccgcaataaccataaatctaaccatcatggtgcgctgatccaggcgggcgcgacgccggtttatctggaaacggcccgtaacccctttggttttattggtggtattgatgcgcactgcttcaatgaagattatttacgtcaacaactgcgtgaagttgctcccgagcgtgcagaagaggctcggccattccgattagcgatcattcaattgggtacctacgacggtacggtatataacgcccgccaagtagttgatagtattggtcatttatgcgattacattttgtttgattctgcttgggtgggttacgaacaatttattccgatgatgaaggatttctcaccgttattactggaattaaatgaaaatgaccctgggattattgtgactcaatcggtacacaagcagcaggccggtttttctcagacctctcaggtacataaaaaagataatcacattaaaggacagaaacgtcactgtaaccataagcgttttaataatgcctttatgttgcatgcatcgaccagtccgttttatccattatttgcggcattggatgttaatgccaaaatacactctggtgacagtggccgccgtatgtggatggattgtgtaaaactcggtattgaaacccgtaaatcgttattggcacgctgttcgatgttacggccttttattcctccagttgttggcggtaaaaattggcaagattatgctactgatgtgattgccaatgatgcgcgcttctttaattttgtcccagatgaacgctggcatggatttgagggatataaccaagatcagtatttggttgatccgtgcaaattattgctgacgacgccgggaattgatgccagtactggccgatatacttcgtttggtattccggcggctattttggcgactttcctgcgtgaaaatggaattgtgccagaaaaatgtgatcttaactcgatcctattcctgctgaccccggcagaaaataccgccaaaatggcacacctggtggatatgttggtgcagtttgaacgctatgttgaacaagatgcgaagctgtgtgatgtattaccgacgatctatcgtaagaatgaagagcgttatcacggttataccttgcgtcagttatgccaagaaatgcatgacctgtacgtcagccatgacgttaagcaattgcaaaaggatatgttccgtaaagccagtttcccgcaggtagtcatgaacccgcaagacgccaatattcagtttatccgcgataatattgagttgattcctattgctgaagctgaaggccgtattgccgccgaaggcgctttgccttatccaccgggtgtgctgtgtgtggtgcccggtgaagtgtggggtggggcggttcagcgttattttctggcgctggaagaggggattaacttactgccgggcttttcacctgagttacagggcgtttatatcgaaaaaggtgatgtgtcttggcggcgtatctttggttatgtgattacgcaatag

SEQ ID NO: 1828 - protein, 720 aa, Yersinia pestis
MTLLKIATSARLASYVETQRGVVYLNQTDFTDVAAVVMSVEDANAGILSMLHDLGFAIPAFIAVTAEQTVSADYLPLIKGVITLGEANKAFYNAQVEAAASEYQKNLLPPFFSTLKKYVEMNNSTFACPGHQGGEFFRKHPAGRQFFEFYGETIFRSDMCNADVKLGDLLIHEGAAKDAQKYAAKVFNADKTYFVLNGTSAANKVVTNALLTRGDLVLFDRNNHKSNHHGALIQAGATPVYLETARNPFGFIGGIDAHCFNEDYLRQQLREVAPERAEEARPFRLAIIQLGTYDGTVYNARQVVDSIGHLCDYILFDSAWVGYEQFIPMMKDFSPLLLELNENDPGIIVTQSVHKQQAGFSQTSQVHKKDNHIKGQKRHCNHKRFNNAFMLHASTSPFYPLFAALDVNAKIHSGDSGRRMWMDCVKLGIETRKSLLARCSMLRPFIPPVVGGKNWQDYATDVIANDARFFNFVPDERWHGFEGYNQDQYLVDPCKLLLTTPGIDASTGRYTSFGIPAAILATFLRENGIVPEKCDLNSILFLLTPAENTAKMAHLVDMLVQFERYVEQDAKLCDVLPTIYRKNEERYHGYTLRQLCQEMHDLYVSHDVKQLQKDMFRKASFPQVVMNPQDANIQFIRDNIELIPIAEAEGRIAAEGALPYPPGVLCVVPGEVWGGAVQRYFLALEEGINLLPGFSPELQGVYIEKGDVSWRRIFGYVITQ

SEQ ID NO: 1829 - DNA, 2271 bp, Salmonella enterica subsp. enterica serovar Typhi
  CDS (1)..(2271)
atgatgaaagtattaattgttgaaagtgagtttctgcatcaggacacctgggttggcaacgcggttgagcgtctggcggatgccttgagccaacaaaatgttaccgtcattaaatcgacatccttcgatgacggctatgccatcttgtccgcgaacgaagccattgactgtctgatgtttagctaccaaatggaacaaccggatgagcacctgagcgtcaggcaattgatcggtaagcttcacgagcgtcagcaaaacgtgcccgttttcctgttaggcgacagggaaaaagcgacggcatcgctggaccgcgacctgctggagcttgtcgatgaattcgcctggattctggaagacaccgctgactttatcgccggacgcgccgttgccgccatgacccggtatcgccagcaactgttaccgccgctgtttaacgcgttgatgaaatacagcgacattcatgaatattcatgggcggcgccgggacaccagggcggcgtcggtttcactaaaacgcctgccggtcgcttttatcacgattattatggcgaaaacctgttccgcagcgatatggggattgagcgtaccacgctcggttcactcctcgaccataccggcgcgtttggcgaaagcgagaaaaacgccgcccgcgtattcggtgctgaccgctcctggtccgtggttgtcgggacctcaggttctaaccgtactattatgcaggcctgtatgacggataatgatgtcgttgtactggatcgtaactgccataaatccatcgaacaggggctgatcctcactggggccaaaccggtatatatggtgccaagccgtaaccgttacggcattatcgggccaatctacccgcaggaaatgcagcctgaaaccttgcagaaaaaaatcagcgccagcccgctgaccaaaaccaaagccggacagaaaccgtcttacagcgtggtgaccaactgtacctatgacggcgtatgctataacgccaaagaggcgcaggatctgctggcaaaaaccagcgatcgcattcacttcgacgaagcatggtacggctatgcgcgcttcaacccgatttattgcgatcactacgcgatgcgcggcgagccaggcgaccataacggtccgaccgtgtttgccacccactccacgcacaaattactgaacgcgctttcacaagcttcctacattcacgtccgtgaaggccgtggcgcggtgaatttctcccgcttcaaccaggcctatatgatgcatgccaccacctctccgttatatgccatctgcgcatccaacgatgtggcggtatcgatgatggacggtaacagcggcctgtccctgactcaagaggtgattgacgaagcggttgatttccgtcaggcgatggcgcgtctttataaagagtttaccgatgaaggcgactggttctttaaaccgtggaataaagacgtcgtcaccgatccacaaaccggtaaaacgtatgacttcgccgacgcgccggcaaaactgctggcaaccgaccagaactgctgggtcatgcgccccggggaaacctggcacggctttaaagacctgccggataactggagtatgctggacccgattaaagtcagtatcctggcgccgggtatgggcgacgatggcgaactggaagcatccggcgtacctgctgcgctggtcacagcatggcttggccgccacggtatcgtgccgacccgcaccaccgacttccagattatgttcctgttctccatgggggtaactcgcgggaaatggggaacgctgatcaacacgctgtgctccttcaaacatcattacgacgcgaatacgccgctggcgcaggtgatgccggaactggtgcaggattatcctgacacttacgcgaacatgggtattcatgacctgggcgataaaatgtttgcctggctacgtgaaaataacccgggcgcccgtctcaatgccgcctattccaccctgccggttgcggagattaccccgcgcgacgcctacaacgcgatcgtgaacaacaatattgaaatggtggcgattgaaaatctaccgggtcgcattgcggcgaactccgttattccttacccgccaggcatcccgatgctgctctccggtgaaaactttggcgatgaaaacagtccgcaggtgggttacttacgctcactgcaatcctgggatcatcacttccctggctttgagcatgaaaccgaaggcacggaaattattgatggcgtatatcacgttatgtgcgtgaaagcctaa

SEQ ID NO: 1830 - protein, 756 aa, Salmonella enterica subsp. enterica serovar Typhi
MMKVLIVESEFLHQDTWVGNAVERLADALSQQNVTVIKSTSFDDGYAILSANEAIDCLMFSYQMEQPDEHLSVRQLIGKLHERQQNVPVFLLGDREKATASLDRDLLELVDEFAWILEDTADFIAGRAVAAMTRYRQQLLPPLFNALMKYSDIHEYSWAAPGHQGGVGFTKTPAGRFYHDYYGENLFRSDMGIERTTLGSLLDHTGAFGESEKNAARVFGADRSWSVVVGTSGSNRTIMQACMTDNDVVVLDRNCHKSIEQGLILTGAKPVYMVPSRNRYGIIGPIYPQEMQPETLQKKISASPLTKTKAGQKPSYSVVTNCTYDGVCYNAKEAQDLLAKTSDRIHFDEAWYGYARFNPIYCDHYAMRGEPGDHNGPTVFATHSTHKLLNALSQASYIHVREGRGAVNFSRFNQAYMMHATTSPLYAICASNDVAVSMMDGNSGLSLTQEVIDEAVDFRQAMARLYKEFTDEGDWFFKPWNKDVVTDPQTGKTYDFADAPAKLLATDQNCWVMRPGETWHGFKDLPDNWSMLDPIKVSILAPGMGDDGELEASGVPAALVTAWLGRHGIVPTRTTDFQIMFLFSMGVTRGKWGTLINTLCSFKHHYDANTPLAQVMPELVQDYPDTYANMGIHDLGDKMFAWLRENNPGARLNAAYSTLPVAEITPRDAYNAIVNNNIEMVAIENLPGRIAANSVIPYPPGIPMLLSGENFGDENSPQVGYLRSLQSWDHHFPGFEHETEGTEIIDGVYHVMCVKA

SEQ ID NO: 1831 - DNA, 2148 bp, Escherichia coli
  CDS (1)..(2148)
atgaacgttattgcaatattgaatcacatgggggtttattttaaagaagaacccatccgtgaacttcatcgcgcgcttgaacgtctgaacttccagattgtttacccgaacgaccgtgacgacttattaaaactgatcgaaaacaatgcgcgtctgtgcggcgttatttttgactgggataaatataatctcgagctgtgcgaagaaattagcaaaatgaacgagaacctgccgttgtacgcgttcgctaatacgtattccactctcgatgtaagcctgaatgacctgcgtttacagattagcttctttgaatatgcgctgggtgctgctgaagatattgctaataagatcaagcagaccactgacgaatatatcaacactattctgcctccgctgactaaagcactgtttaaatatgttcgtgaaggtaaatatactttctgtactcctggtcacatgggcggtactgcattccagaaaagcccggtaggtagcctgttctatgatttctttggtccgaataccatgaaatctgatatttccatttcagtatctgaactgggttctctgctggatcacagtggtccacacaaagaagcagaacagtatatcgctcgcgtctttaacgcagaccgcagctacatggtgaccaacggtacttccactgcgaacaaaattgttggtatgtactctgctccagcaggcagcaccattctgattgaccgtaactgccacaaatcgctgacccacctgatgatgatgagcgatgttacgccaatctatttccgcccgacccgtaacgcttacggtattcttggtggtatcccacagagtgaattccagcacgctaccattgctaagcgcgtgaaagaaacaccaaacgcaacctggccggtacatgctgtaattaccaactctacctatgatggtctgctgtacaacaccgacttcatcaagaaaacactggatgtgaaatccatccactttgactccgcgtgggtgccttacaccaacttctcaccgatttacgaaggtaaatgcggtatgagcggtggccgtgtagaagggaaagtgatttacgaaacccagtccactcacaaactgctggcggcgttctctcaggcttccatgatccacgttaaaggtgacgtaaacgaagaaacctttaacgaagcctacatgatgcacaccaccacttctccgcactacggtatcgtggcgtccactgaaaccgctgcggcgatgatgaaaggcaatgcaggtaagcgtctgatcaacggttctattgaacgtgcgatcaaattccgtaaagagatcaaacgtctgagaacggaatctgatggctggttctttgatgtatggcagccggatcatatcgatacgactgaatgctggccgctgcgttctgacagcacctggcacggcttcaaaaacatcgataacgagcacatgtatcttgacccgatcaaagtcaccctgctgactccggggatggaaaaagacggcaccatgagcgactttggtattccggccagcatcgtggcgaaatacctcgacgaacatggcatcgttgttgagaaaaccggtccgtataacctgctgttcctgttcagcatcggtatcgataagaccaaagcactgagcctgctgcgtgctctgactgactttaaacgtgcgttcgacctgaacctgcgtgtgaaaaacatgctgccgtctctgtatcgtgaagatcctgaattctatgaaaacatgcgtattcaggaactggctcagaatatccacaaactgattgttcaccacaatctgccggatctgatgtatcgcgcatttgaagtgctgccgacgatggtaatgactccgtatgctgcattccagaaagagctgcacggtatgaccgaagaagtttacctcgacgaaatggtaggtcgtattaacgccaatatgatccttccgtacccgccgggagttcctctggtaatgccgggtgaaatgatcaccgaagaaagccgtccggttctggagttcctgcagatgctgtgtgaaatcggcgctcactatccgggctttgaaaccgatattcacggtgcataccgtcaggctgatggccgctataccgttaaggtattgaaagaagaaagcaaaaaataa

SEQ ID NO: 1832 - protein, 715 aa, Escherichia coli
MNVIAILNHMGVYFKEEPIRELHRALERLNFQIVYPNDRDDLLKLIENNARLCGVIFDWDKYNLELCEEISKMNENLPLYAFANTYSTLDVSLNDLRLQISFFEYALGAAEDIANKIKQTTDEYINTILPPLTKALFKYVREGKYTFCTPGHMGGTAFQKSPVGSLFYDFFGPNTMKSDISISVSELGSLLDHSGPHKEAEQYIARVFNADRSYMVTNGTSTANKIVGMYSAPAGSTILIDRNCHKSLTHLMMMSDVTPIYFRPTRNAYGILGGIPQSEFQHATIAKRVKETPNATWPVHAVITNSTYDGLLYNTDFIKKTLDVKSIHFDSAWVPYTNFSPIYEGKCGMSGGRVEGKVIYETQSTHKLLAAFSQASMIHVKGDVNEETFNEAYMMHTTTSPHYGIVASTETAAAMMKGNAGKRLINGSIERAIKFRKEIKRLRTESDGWFFDVWQPDHIDTTECWPLRSDSTWHGFKNIDNEHMYLDPIKVTLLTPGMEKDGTMSDFGIPASIVAKYLDEHGIVVEKTGPYNLLFLFSIGIDKTKALSLLRALTDFKRAFDLNLRVKNMLPSLYREDPEFYENMRIQELAQNIHKLIVHHNLPDLMYRAFEVLPTMVMTPYAAFQKELHGMTEEVYLDEMVGRINANMILPYPPGVPLVMPGEMITEESRPVLEFLQMLCEIGAHYPGFETDIHGAYRQADGRYTVKVLKEESKK

SEQ ID NO: 1833 - DNA, 2835 bp, Escherichia coli
  CDS (571)..(2712)
cccgggggcttatcctggcgtgggcgcagaagagcgtggtcagtctgaagccattgcacgcaacctgcgtgaaatgtctcgcctcggcgtaccggtagtttgtacggttatcggtgaaggtggttctggcggtgcgctggcgattggcgtgggcgataaagtgaatatgctgcaatacagcacctattccgttatctcgccggaaggttgtgcgtccattctgtggaagagcgccgacaaagcgccgctggcggctgaagcgatgggtatcattgctccgcgtctgaaagaactgaaactgatcgactccatcatcccggaaccactgggtggtgctcaccgtaacccggaagcgatggcggcatcgttgaaagcgcaactgctggcggatctggccgatctcgacgtgttaagcactgaagatttaaaaaatcgtcgttatcagcgcctgatgagctacggttacgcgtaattcgcaaaagttctgaaaaagggtcacttcggtggcccttttttatcgccacggtttgagcaggctatgattaaggaaggattttccaggaggaacacatgaacatcattgccattatgggaccgcatggcgtcttttataaagatgagcccatcaaagaactggagtcggcgctggtggcgcaaggctttcagattatctggccacaaaacagcgttgatttgctgaaatttatcgagcataaccctcgaatttgcggcgtgatttttgactgggatgagtacagtctcgatttatgtagcgatatcaatcagcttaatgaatatctcccgctttatgccttcatcaacacccactcgacgatggatgtcagcgtgcaggatatgcggatggcgctctggttttttgaatatgcgctggggcaggcggaagatatcgccattcgtatgcgtcagtacaccgacgaatatcttgataacattacaccgccgttcacgaaagccttgtttacctacgtcaaagagcggaagtacaccttttgtacgccggggcatatgggcggcaccgcatatcaaaaaagcccggttggctgtctgttttatgattttttcggcgggaatactcttaaggctgatgtctctatttcggtcaccgagcttggttcgttgctcgaccacaccgggccacacctggaagcggaagagtacatcgcgcggacttttggcgcggaacagagttatatcgttaccaacggaacatcgacgtcgaacaaaattgtgggtatgtacgccgcgccatccggcagtacgctgttgatcgaccgcaattgtcataaatcgctggcgcatctgttgatgatgaacgatgtagtgccagtctggctgaaaccgacgcgtaatgcgttggggattcttggtgggatcccgcgccgtgaatttactcgcgacagcatcgaagagaaagtcgctgctaccacgcaagcacaatggccggttcatgcggtgatcaccaactccacctatgatggcttgctctacaacaccgactggatcaaacagacgctggatgtcccgtcgattcacttcgattctgcctgggtgccgtacacccattttcatccgatctaccagggtaaaagtggtatgagcggcgagcgtgttgcgggaaaagtgatcttcgaaacgcaatcgacccacaaaatgctggcggcgttatcgcaggcttcgctgatccacattaaaggcgagtatgacgaagaggcctttaacgaagcctttatgatgcataccaccacctcgcccagttatcccattgttgcttcggttgagacggcggcggcgatgctgcgtggtaatccgggcaaacggctgattaaccgttcagtagaacgagctctgcattttcgcaaagaggtccagcggctgcgggaagagtctgacggttggtttttcgatatctggcaaccgccgcaggtggatgaagccgaatgctggcccgttgcgcctggcgaacagtggcacggctttaacgatgcggatgccgatcatatgtttctcgatccggttaaagtcactattttgacaccggggatggacgagcagggcaatatgagcgaggaggggatcccggcggcgctggtagcaaaattcctcgacgaacgtgggatcgtagtagagaaaaccggcccttataacctgctgtttctctttagtattggcatcgataaaaccaaagcaatgggattattgcgtgggttgacggaattcaaacgctcttacgatctcaacctgcggatcaaaaatatgctacccgatctctatgcagaagatcccgatttctaccgcaatatgcgtattcaggatctggcacaagggatccataagctgattcgtaaacacgatcttcccggtttgatgttgcgggcattcgatactttgccggagatgatcatgacgccacatcaggcatggcaacgacaaattaaaggcgaagtagaaaccattgcgctggaacaactggtcggtagagtatcggcaaatatgatcctgccttatccaccgggcgtaccgctgttgatgcctggagaaatgctgaccaaagagagccgcacagtactcgattttctactgatgctttgttccgtcgggcaacattaccccggttttgaaacggatattcacggcgcgaaacaggacgaagacggcgtttaccgcgtacgagtcctaaaaatggcgggataacttgccagagcggcttccgggcgagtaacgtgctgttaacaaataaaggagacgttatgctgggtttaaaacaggttcaccatattgcgattattgcgacggattatgcggtgagcaaagctt

SEQ ID NO: 1834 - protein, 713 aa, Escherichia coli
MNIIAIMGPHGVFYKDEPIKELESALVAQGFQIIWPQNSVDLLKFIEHNPRICGVIFDWDEYSLDLCSDINQLNEYLPLYAFINTHSTMDVSVQDMRMALWFFEYALGQAEDIAIRMRQYTDEYLDNITPPFTKALFTYVKERKYTFCTPGHMGGTAYQKSPVGCLFYDFFGGNTLKADVSISVTELGSLLDHTGPHLEAEEYIARTFGAEQSYIVTNGTSTSNKIVGMYAAPSGSTLLIDRNCHKSLAHLLMMNDVVPVWLKPTRNALGILGGIPRREFTRDSIEEKVAATTQAQWPVHAVITNSTYDGLLYNTDWIKQTLDVPSIHFDSAWVPYTHFHPIYQGKSGMSGERVAGKVIFETQSTHKMLAALSQASLIHIKGEYDEEAFNEAFMMHTTTSPSYPIVASVETAAAMLRGNPGKRLINRSVERALHFRKEVQRLREESDGWFFDIWQPPQVDEAECWPVAPGEQWHGFNDADADHMFLDPVKVTILTPGMDEQGNMSEEGIPAALVAKFLDERGIVVEKTGPYNLLFLFSIGIDKTKAMGLLRGLTEFKRSYDLNLRIKNMLPDLYAEDPDFYRNMRIQDLAQGIHKLIRKHDLPGLMLRAFDTLPEMIMTPHQAWQRQIKGEVETIALEQLVGRVSANMILPYPPGVPLLMPGEMLTKESRTVLDFLLMLCSVGQHYPGFETDIHGAKQDEDGVYRVRVLKMAG

SEQ ID NO: 1835 - DNA, 1446 bp, Clostridium acetobutylicum
  CDS (1)..(1446)
atgtctaagacaccaatcatagatggaataatgaaatatataagtgaaaagaataatctgttttgcactccagggcataagggaggcagaggattcgcaaatagcgaaggtggcagaagcttatatgaaaatatcataaagatagatttaacagaagttgatggacttgataacttacatgatcctcaaggaattatcaaggaatcagaagagagacttagagatttatatgaaagtaaaaaatcatattttcttgttaacggaagtacaagtggtaatctcgctatgatattttcatgttttaatgagggagacaaggtaatagttgaaagaaattgccataaatctatatttaatggaattatacttaggaagcttaatcctgtgtatataaaaaattactttgacgaggatataaatgctcctttatctatagatgaggagtattttttcaagattataagagaaaatatggatgcaaaagggataatacttacatatcctaattactatggagtatgctgtgaccttgaagctatagtgagagaggcaaaaaaatataatatgaaggtattagttgactctgctcatggcgctcattttggtatatcagagaagttaccagaaagtgctgttaagttaggagcagatatggttgttatgagttgtcataaaacgcttccgagtttcacacaaactgcatttcttcatttatgtggagatgtcgaggaaagcaaagttgatttttatgtaagttcatttttgagtacaagcccatcgtatatgtttatgagctcaatggattatgctagatgctatcttgaggaaagaggaaagcatgattatgataacctggtagatttatgtataaagtattcaaaaaagattaatgaaatcaatggattgcatgtattaggtaagagtgatttaaggataaatggtaaggtgcttaattttgatgcaacaagattagttatcaatgtagaggatggttgcagtgggtttaaattatatacgtatttaaaagaaaatagaatacaacctgaaatgtgcgatcatagaaatgttgttttaatttgttcaccatttgacggagaattgcagttacaaaacttatataatacacttagaaaatgcaatattataaaattaaatgacgataataaggtatctgtgcttttgtcatctatgccagaaaataaatttgccccgtatgaggtattgaatttagaaagtgaaaagatcaatattaaagatagtgtgggaaaagtgtgtaaaaaagcattagtgccatatccacctggaataccggtgattatgccaggagaagtaataaatgaaaatgttgttgatattatattgaaagctgttaaagataacattacagttttaggaattgaaaatcgaaataaagaaattaccatagatgtagtttgtgaagattaa

SEQ ID NO: 1836 - protein, 481 aa, Clostridium acetobutylicum
MSKTPIIDGIMKYISEKNNLFCTPGHKGGRGFANSEGGRSLYENIIKIDLTEVDGLDNLHDPQGIIKESEERLRDLYESKKSYFLVNGSTSGNLAMIFSCFNEGDKVIVERNCHKSIFNGIILRKLNPVYIKNYFDEDINAPLSIDEEYFFKIIRENMDAKGIILTYPNYYGVCCDLEAIVREAKKYNMKVLVDSAHGAHFGISEKLPESAVKLGADMVVMSCHKTLPSFTQTAFLHLCGDVEESKVDFYVSSFLSTSPSYMFMSSMDYARCYLEERGKHDYDNLVDLCIKYSKKINEINGLHVLGKSDLRINGKVLNFDATRLVINVEDGCSGFKLYTYLKENRIQPEMCDHRNVVLICSPFDGELQLQNLYNTLRKCNIIKLNDDNKVSVLLSSMPENKFAPYEVLNLESEKINIKDSVGKVCKKALVPYPPGIPVIMPGEVINENVVDIILKAVKDNITVLGIENRNKEITIDVVCED

SEQ ID NO: 1837 - DNA, 1464 bp, Clostridium acetobutylicum
  CDS (1)..(1464)
atgtataaattaaatcaaaatgaaacaccactttttaacgctttgatggaatatgtaaatagagatactattccctttcacgtaccaggacataaaaaaggtaatggaattgataaggaattcaaaaactttatcggtgagaacccttttaaaattgatgtaactgtattcaaattggtagacagcttacaccaccctacaggtcctataaaaaaggctcaagaattagctgctgatgcctacggttccaaggctgctttttattctgtaaacggaacttctggagctatacaaggtatgattctatctgtagtaggtgatggagataaaataatagtgcctagaaacgttcataaatctgtaactgccggaatcattctaagtggtgctgtacctgtatatatgcatccagaagtcgatagaagagttggaatagcccatggtgtatctccagaaactgttggagaaactcttaaaaataatcctgatgcaaaggctgtacttcttataaatcctacatattacggagtatctacagatataaaaaaaatagctgatatagttcacagctatgatatacctctcatcgttgatgaggctcatggacctcatttgagttttaatgatagacttcctgtatcagctttgaaagccggagcagatatgtgtgctcaaagtacacataaaataataggtgctcttactcaaatgtctcttctacatgtaaactcagatagaatagatatgaacagagttcagcaaataatgaatctacttcaaaccacatcaccatcctacatattgatggcttctatggattgcgctagacgacaaatagctcttcacggaaaggaactattagatggcacaatagatttatgcaattatgcaaggcgtgaaataaataaaatacctggcttctattgctttggtgaagaagttttagggaaacccggatcatatgctttcgatccaactaagcttacaattacctgcactgatttaggaataacaggttatgatcttgatatgcttttagccaatgattaccacatacaagtggagctttctgatttatataatgtacttgctgtgggttcttttggtgatacaaaagagaatattgatgctttaattaatgctttaagacaaataagcaaaagtatttcttcaactgttaaaaataagaagaattcatttatcgatattcccgatgtacccgagagaatactttcacctagagatgcatttaatggtgcaaaggaatccatgctaattaaagacagcgtaggtaaaacaagcggagaatttttaatggcttatccgccaggcatacctgtactatgtccaggagaaattataacccaggaaataattgactacgtcagcgacttaaaagctgctggtctatatgttcaaggaacagaagatcctgatgtaaattatataaaggtactaaaataa

SEQ ID NO: 1838 - protein, 487 aa, Clostridium acetobutylicum
MYKLNQNETPLFNALMEYVNRDTIPFHVPGHKKGNGIDKEFKNFIGENPFKIDVTVFKLVDSLHHPTGPIKKAQELAADAYGSKAAFYSVNGTSGAIQGMILSVVGDGDKIIVPRNVHKSVTAGIILSGAVPVYMHPEVDRRVGIAHGVSPETVGETLKNNPDAKAVLLINPTYYGVSTDIKKIADIVHSYDIPLIVDEAHGPHLSFNDRLPVSALKAGADMCAQSTHKIIGALTQMSLLHVNSDRIDMNRVQQIMNLLQTTSPSYILMASMDCARRQIALHGKELLDGTIDLCNYARREINKIPGFYCFGEEVLGKPGSYAFDPTKLTITCTDLGITGYDLDMLLANDYHIQVELSDLYNVLAVGSFGDTKENIDALINALRQISKSISSTVKNKKNSFIDIPDVPERILSPRDAFNGAKESMLIKDSVGKTSGEFLMAYPPGIPVLCPGEIITQEIIDYVSDLKAAGLYVQGTEDPDVNYIKVLK

SEQ ID NO: 1839 - DNA, 2256 bp, Pseudomonas aeruginosa
  CDS (1)..(2256)
atgtataaagacctcaaatttcccgtcctcatcgtccatcgcgacatcaaggccgacaccgttgccggcgaacgcgtgcggggcatcgcccacgaactggagcaggacggcttcagcattctctccaccgccagctccgccgaggggcgcatcgtcgcttccacccaccacggcctggcctgcattctggtcgccgccgaaggtgccggggaaaaccagcgcctgctgcaggatgtggtcgaactgatccgcgtggcccgcgtgcgggcgccgcaattgccgatcttcgccctcggcgagcaggtgaccatcgagaacgcgccggccgagtccatggccgacctgcaccagttgcgcggcatcctctacctgttcgaagacaccgtgccgttcctcgcccgccaggtcgcccgggcggcgcgcaactacctggccgggctgctgccgccattcttccgtgcgctggtcgagcacaccgcgcagtccaactattcctggcatacgccgggccacggcggcggtgtcgcctatcgcaagagtccggtgggacaggcgttccaccagttcttcggggagaacacgctgcgttccgacctgtcggtctcggtccccgagctgggatcgctgctcgaccataccggccccctggccgaggccgaggaccgtgccgcgcgcaatttcggcgccgaccataccttcttcgtgatcaatggcacttccaccgcgaacaagatcgtctggcactccatggtcggtcgcgaagacctggtgctggtggaccgcaactgccacaagtcgatcctccactcgatcatcatgaccggggcgataccgctctacctgactccggaacgcaacgaactggggatcatcgggccgatcccgctgagcgaattcagcaagcagtcgatcgccgcgaagatcgccgccagcccgctggcgcgcggccgcgagccgaaggtgaagctggcggtggtgactaactccacctacgacggcctgtgctacaacgccgagctgatcaagcagaccctcggcgacagcgtcgaggtgttgcacttcgacgaggcttggtacgcctatgccgcgttccacgagttctacgacggacgctatggcatgggcacctcgcgcagcgaggagggacccctggtgttcgccacccactccacgcacaagatgctcgccgccttcagccaggcctcgatgatccacgtgcaggatggcgggacccggaagctggacgtggcgcgcttcaacgaagccttcatgatgcacatctcgacctcgccgcagtacggcatcatcgcttcgctggacgtggcttcggcgatgatggaagggcccgccgggcgttcgctgatccaggagaccttcgacgaggccctcagcttccgccgggccctggccaacgtacggcagaacctggaccggaacgactggtggttcggcgtctggcagccggagcaggtggagggcaccgaccaggtcggcacccatgactgggtgctggagccgagcgccgactggcacggcttcggcgatatcgccgaagactacgtgctgctcgacccgatcaaggtcaccctgaccaccccgggcctgagcgctggcggcaagctcagcgagcaggggattccggccgccatcgtcagccgcttcctctgggagcgcgggctggtggtggagaaaaccggtctctactccttcctggtgctgttctcgatgggcatcaccaagggcaagtggagcaccctggtcaccgaactgctcgaattcaagcgctgttacgacgccaacctgccgctgcttgacgtcttgccctccgtggcccaggccggcggcaagcgctacaacggagtgggcctgcgcgacctcagcgacgccatgcacgccagctaccgcgacaacgccacggcgaaggccatgaagcgcatgtacacggtgctgccggaggtcgcgatgcggccgtccgaggcctacgacaagctggtgcgcggcgaggtcgaggcggtaccgatcgctcggttggaagggcgcatcgcggccgtcatgctggtaccctatccgccgggtatcccgctgatcatgccgggtgagcgcttcaccgaggcgacccgctcgatcctcgactatctcgagttcgcgcggaccttcgagcgcgccttccctggtttcgactccgatgtgcatggcctgcagcatcaggacggaccgtccgggcgctgctataccgttgaatgcataaaggaatga

SEQ ID NO: 1840 - protein, 751 aa, Pseudomonas aeruginosa
MYKDLKFPVLIVHRDIKADTVAGERVRGIAHELEQDGFSILSTASSAEGRIVASTHHGLACILVAAEGAGENQRLLQDVVELIRVARVRAPQLPIFALGEQVTIENAPAESMADLHQLRGILYLFEDTVPFLARQVARAARNYLAGLLPPFFRALVEHTAQSNYSWHTPGHGGGVAYRKSPVGQAFHQFFGENTLRSDLSVSVPELGSLLDHTGPLAEAEDRAARNFGADHTFFVINGTSTANKIVWHSMVGREDLVLVDRNCHKSILHSIIMTGAIPLYLTPERNELGIIGPIPLSEFSKQSIAAKIAASPLARGREPKVKLAVVTNSTYDGLCYNAELIKQTLGDSVEVLHFDEAWYAYAAFHEFYDGRYGMGTSRSEEGPLVFATHSTHKMLAAFSQASMIHVQDGGTRKLDVARFNEAFMMHISTSPQYGIIASLDVASAMMEGPAGRSLIQETFDEALSFRRALANVRQNLDRNDWWFGVWQPEQVEGTDQVGTHDWVLEPSADWHGFGDIAEDYVLLDPIKVTLTTPGLSAGGKLSEQGIPAAIVSRFLWERGLVVEKTGLYSFLVLFSMGITKGKWSTLVTELLEFKRCYDANLPLLDVLPSVAQAGGKRYNGVGLRDLSDAMHASYRDNATAKAMKRMYTVLPEVAMRPSEAYDKLVRGEVEAVPIARLEGRIAAVMLVPYPPGIPLIMPGERFTEATRSILDYLEFARTFERAFPGFDSDVHGLQHQDGPSGRCYTVECIKE

SEQ ID NO: 1841 - DNA, 2853 bp, Mycobacterium leprae
  CDS (1)..(2853)
atgaatcgagacagtggccatccgcgacgacttcgtgtttccgcgctggcggcagtagccaacccgtcatacacgcgcattgacacgtggaacgtgctcgatgacgcctgccgtcacttggctgaggtcgaccgcgccgggctggacaccgcccacgatgttgcgcgtgttaagcgtttgctcgaccgcatcggtgcctacgaacggtactggctgtaccctggtgcggcaaatctggcggcgttccgcggctatcttgccaccatggcgacggttcagcttaccgaagaggtatcgctggccgtccgtctgttgtctgaatatggtgaccgcacagcgctttttgatacttcagcgccgctggccgaccaggagctggtggcccaagccaagcagcaacagttctacaccgtgttgctcgccgacgatgccccatccacggctcccgactgtctggcagagagcttgcgggagctgcgcaatccatccgacgatgtgcagttcgagctccttgttgtgtccagtgttgaggacgccatcaccgcggtcgcgctgaacggcgagattcaggctgcgatcatccgccatgacctgccactgcggtcccgcgaccgggtgccgttgatgaataccttgcttggggccaacgactcggagggcgcactggtcaccattgaccgcccacacgactgggtcgaatgcggtgagtggatcagggagctgcggccccatatcgacctctatctgctcaccgacgagtcgatcgcggcgggcaatgatgacgagcccgatgtctacgaccggacgttttatcgactcaacgacgttaccgacctaaacagcaccgtacttgcaggcttgcgaaaccgtttcgccacaccatttttcgatgccttgcgcgcctacgcagcagcaccggtcggccaattccatgctcttccggtcgcgcgtggtgccagtatctttaactctaggtcgctgcaagacatgggcgagttctacggtcggaacatcttcatggccgagacatcgaccacctctggtggcctggattcgttgctggatccgcacggcaacatcaaaaaagcgatggacaaagccgcagttacttggcgcgccaaccacacctactttgtcaccaacggaacttccacagccaacaaaatcgtcgtacagtcgttgacccggccaggtgacattgtacttatagaccgcaactgccacaagtcgcaccattatggcctggtattggctggtgcatacccgatgtacttggatgcttatccgttgccgcagttcgcgatctatggagcggtatcgctgcgcacaatcaagaaggcgctgctggatctagaggcagtccgacaactggatcgggtccgcatgttgttgctcaccaactgcacttttgatggcgtcgtctgtaacccgcagcgggtaatggaggaggtgctggcgatcaagccagacatttgcttcctatgggacgaggcgtggtatgcgtttgccactgccgtgccgtgggctcgtcagcggaccgcaatggtgtctgctgagcaactcgaacagaagttgtggtctgtcgaatacgccgaggaatatcggaattggtgcgcatcgatggccgagatccctcggtcccagtgggttgaccagcggctactgccggaccccaatcgggcgcggattcgcgtatatgcgacacactctactcacaagtcgctgtcggcgcttcggcaggcgtcgatgattcatgtccgcgatcaagatttcaatgcgctagcccgggatgcgttcggtgaggcattcttgacgcacacctcgacatcgccgaaccaacaacttctcgcgtcgttggatctggcgcgccgccaggttgacatcgagggatttcaactggtccggctggtgtacgacatggcgctggtctttcgtcaccgcgtccgcaaagaccggctgatcagcaaatggttccgtatcctcgatgaatccgacctggtgcccgacgagtaccgggcatcggcggtcagctcgtaccgtcaggttcggcagggtgctctggcggagtggaatgaggcatggcggtccgaccagttcgtgctggatccgacgagggtcaccttgttcgtcgggaagaccggaatgaacggatatgacttccgcgagaagatcttgatggagcgattcggcatacagatcaacaagacatccatcaacagtgtgctgttgatcttcaccatcggtgtcacgtggtcgagcgtgcattatctgctagatgtgttacgccgggtggccagtgactttgacaggattcagaaggtggccagcggggccgacctcgcgctgcatcagcgccatgttgaggagatcacccaggatttgccccacttgcccgacttcagcgagttcgatgttgccttccgtcccgaaaatgccagctcgttcggtgacatgcggtcggccttctacgccgggtacgaagaatcggaccgcgagtacgtgcatatcggcacggccgggcgtcagcttgctgaggggaggaccctggtgtccaccacgttcgtggtgccctacccgcccggcttcccggtactagtccctggtcaggtggtttctaaggagataatctacttcttggctcagctcgacgtgaaggaaattcacggatacaaccatgaactgggattatcagtattcactgagaaagcgttggctcggatgatcgcgaggcgcaacgcggcgtcggccgcggtgggttctgcgttcgcggctttcgagatcccatcggactctgctgctatgggcggggacgtgaacggcgacagagtcgaggctgttgcagaagacgcgtga

SEQ ID NO: 1842 - protein, 950 aa, Mycobacterium leprae
MNRDSGHPRRLRVSALAAVANPSYTRIDTWNVLDDACRHLAEVDRAGLDTAHDVARVKRLLDRIGAYERYWLYPGAANLAAFRGYLATMATVQLTEEVSLAVRLLSEYGDRTALFDTSAPLADQELVAQAKQQQFYTVLLADDAPSTAPDCLAESLRELRNPSDDVQFELLVVSSVEDAITAVALNGEIQAAIIRHDLPLRSRDRVPLMNTLLGANDSEGALVTIDRPHDWVECGEWIRELRPHIDLYLLTDESIAAGNDDEPDVYDRTFYRLNDVTDLNSTVLAGLRNRFATPFFDALRAYAAAPVGQFHALPVARGASIFNSRSLQDMGEFYGRNIFMAETSTTSGGLDSLLDPHGNIKKAMDKAAVTWRANHTYFVTNGTSTANKIVVQSLTRPGDIVLIDRNCHKSHHYGLVLAGAYPMYLDAYPLPQFAIYGAVSLRTIKKALLDLEAVRQLDRVRMLLLTNCTFDGVVCNPQRVMEEVLAIKPDICFLWDEAWYAFATAVPWARQRTAMVSAEQLEQKLWSVEYAEEYRNWCASMAEIPRSQWVDQRLLPDPNRARIRVYATHSTHKSLSALRQASMIHVRDQDFNALARDAFGEAFLTHTSTSPNQQLLASLDLARRQVDIEGFQLVRLVYDMALVFRHRVRKDRLISKWFRILDESDLVPDEYRASAVSSYRQVRQGALAEWNEAWRSDQFVLDPTRVTLFVGKTGMNGYDFREKILMERFGIQINKTSINSVLLIFTIGVTWSSVHYLLDVLRRVASDFDRIQKVASGADLALHQRHVEEITQDLPHLPDFSEFDVAFRPENASSFGDMRSAFYAGYEESDREYVHIGTAGRQLAEGRTLVSTTFVVPYPPGFPVLVPGQVVSKEIIYFLAQLDVKEIHGYNHELGLSVFTEKALARMIARRNAASAAVGSAFAAFEIPSDSAAMGGDVNGDRVEAVAEDA

SEQ ID NO: 1843 - DNA, 2202 bp, Vibrio cholerae
  CDS (1)..(2202)
atggcgctcgtcttactcactgtgcagtgcacagagagcgccttttttcgccttggagatgtccaaatgaatattttcgctatcttgaaccacatgggtgtgttctttaaagaagagcctgttcgccaactgcatgcagcattagaaaaagccggttacgacgtggtttatccggtggatgacaaagatctgatcaagatgattgagatgaacccacgcatttgcggcgtgctgttcgactgggataaatactcgctagagctgtgtgagcgcatcagtaaagtcaatgaaaaactgcctgtgcacgcctttgctaacgagcaatcgacgttagatatttcgctaaccgatctgcgcctcaacgtgcatttcttcgaatacgctctgggcatggccgacgatatcgccatcaagatcaatcaagcgactcaagagtacaaagacgcgatcatgcctccgtttactaaggcgctgttcaaatatgtagaagagggtaaatacaccttctgtactccgggccatatgggcggtactgcgttccagaaaagccctgttggcagcattttctacgatttctacggtccaaataccttcaaagcggacgtatcgatttcgatgccagaactgggctcactgctcgatcactccggtccacacaaagaagcggaagagtacatcgcgcgcacgttcaatgccgatgcttcttacatcgtgaccaacggtacatcgacctcgaacaagatcgtcggtatgttctccgcgcctgcgggtagcacagtgctggtggatcgtaactgccataaatcattgactcacttaatgatgatgacggatgtaacgccaatttacttccgtccaacccgtaacgcttacggcattcttggtggtattccacagaacgaattcagccgtgaagtgattgcagagaaagtggcaaacaccccgggggcgagcgcaccaagctacgcggtgatcaccaactcgacttacgatggcctgctgtacaacactcagttcattaaagagtcgctggattgcaaacacatccacttcgacagtgcatgggtgccttacactaacttcaaccgtatttatgaaggcaagtgcggcatgagtggcgaagcgatgccgggtaaagtgttctacgaaacccagtccacgcacaaactgctggcggcgttctcgcaagcctcgatgattcatgtcaaaggtgagtttgaccgcgagtcgttcaacgaagcctttatgatgcacacctcaacctcaccgcagtacggcattgtggcatcgacggaaactgccgctgcaatgatgcgtggcaacaccggccgtaagcttatgcaggattcgattgatcgtgcgattcgcttccgtaaagagatcaaacgtctgaaaggcgagagcgaaggctggttcttcgatgtgtggcaacccgagaacattgagaccaccgagtgctggaaactcgatccaaaccaagattggcacggcttcaagaatcttgatgacaaccacatgtaccttgaccccatcaaaatcactctgctgactccgggaatgagcaaagatggcgaattggagcagagcggtattccggcatcactggtctctaaataccttgatgaacacggtatcgtggttgagaaaactggcccttacaacctgctgttcctgttctctatcggtattgataagtcaaaagcgatgcagttgctgcgcggcttgacggagttcaaacgcggttacgatctgaacctgaccattcgtaccatgctgccttcactgtaccgtgaagacccagttttctacgaaggcatgcgtattcaagagttggcgcaaggcattcacgacttaactcgtaaataccaattgccagagctgatgtacaaagcgttcgatgtgctgccagagatgaaagtgacgccacacgtggcatggcaacaagagctgcgcggtcaaactgaagagatcctgcttaacgagatggtgggtcgcgtgagcgccaatatgatcctgccttatcctccaggcgtgccattggtactgccaggtgaaatggtgacagacagctctcgccctgtgttggatttcttggaaatgctgtgcgaaatcggcgcgcattacccaggttttgagaccgacattcatggtttgtatcgccaaaaagatggctcttacaccgtaaaagtgctgaaggactaa

SEQ ID NO: 1844 - protein, 733 aa, Vibrio cholerae
MALVLLTVQCTESAFFRLGDVQMNIFAILNHMGVFFKEEPVRQLHAALEKAGYDVVYPVDDKDLIKMIEMNPRICGVLFDWDKYSLELCERISKVNEKLPVHAFANEQSTLDISLTDLRLNVHFFEYALGMADDIAIKINQATQEYKDAIMPPFTKALFKYVEEGKYTFCTPGHMGGTAFQKSPVGSIFYDFYGPNTFKADVSISMPELGSLLDHSGPHKEAEEYIARTFNADASYIVTNGTSTSNKIVGMFSAPAGSTVLVDRNCHKSLTHLMMMTDVTPIYFRPTRNAYGILGGIPQNEFSREVIAEKVANTPGASAPSYAVITNSTYDGLLYNTQFIKESLDCKHIHFDSAWVPYTNFNRIYEGKCGMSGEAMPGKVFYETQSTHKLLAAFSQASMIHVKGEFDRESFNEAFMMHTSTSPQYGIVASTETAAAMMRGNTGRKLMQDSIDRAIRFRKEIKRLKGESEGWFFDVWQPENIETTECWKLDPNQDWHGFKNLDDNHMYLDPIKITLLTPGMSKDGELEQSGIPASLVSKYLDEHGIVVEKTGPYNLLFLFSIGIDKSKAMQLLRGLTEFKRGYDLNLTIRTMLPSLYREDPVFYEGMRIQELAQGIHDLTRKYQLPELMYKAFDVLPEMKVTPHVAWQQELRGQTEEILLNEMVGRVSANMILPYPPGVPLVLPGEMVTDSSRPVLDFLEMLCEIGAHYPGFETDIHGLYRQKDGSYTVKVLKD

SEQ ID NO: 1845 - DNA, 2163 bp, Vibrio cholerae
  CDS (1)..(2163)
atgaattcattaaaaattgctacgagtttatcggttcgctcttgcttcacaacccaacgtgaagtggtggatgtactgaaaaccgacttctgtgacattggtgcggcggtggtttccgtcgaagacgtacaaaacggcatcatagataaaatgaatgcgaccggtttgaaactgccgatctttgttgctgtgtgctgcgaagaccaattcccagatgatttttgcgccgatatcaccggggtatttgagctgtgtgatgccaaagtcgagttctacggtaagcaagtggaaactgccgtgcgtcgttatcaagaaagtttgttgccacctttctttggtacattgaaaaaatacgtggacatgggtaactccacttttgcttgcccaggccatcaaggtggtcagttcttccgtaagcacccggttggtcgccagttttttgatttctttggtgaaaccttgttccgctctgatatgtgtaacgcggacgtacgtttgggcgacttgctgatccatgaaggtgcaccgcatgatgcacaggcttacgccgcgaaagtgtacaacgcggataaaacctacttcgtacttaacgggacttcagcttccaacaaagtggtgtgtaacgccctgctgacaccgggagatctggtgctgtttgatcgcaacaaccataaatccaaccaccacggtgcgttaattcaagcgggtgcgacaccggtttacttagaaacggcgcgtaacccattcggttttatcggtgggattgatacgcactgctttaacgaatcttacctacgtgatgcggtacgtaatgtcgacccaagccgcgcggaagcgaaacgcccattccgtcttgccatcattcagcttggcacttacgacggtacgatttacaacgcgcgtcaggtggtggatcgcatcggtcatttgtgtgactacatcctgtttgactcagcatgggtgggctatgaacagttcattcccatgatgaaagactgctcgccacttcttctcgatctaaagcctgaagatccgggcatcatcgtcactcagtccgtgcataaacagcaggcaggtttctcgcaaacttcgcaaattcacaagaaagatcaccacatcaaaggccaagagcgttactgcaaccataaacgctttaacaatgcctttatgctgcacgcttcaaccagcccattctacccgctgtttgcggcgctcgatgtgaacgccaagatgcacgaaggggacagtggccgctacctatggcgtgaagcggtaaaaaccggtatcgaagcccgtaagcttctaatgaaaaaatgcaaatacatcaagccgttcattccaccaatgatcgaaggtaaaccttggcagtctcaccccaccgagcaaattgccgatgatttacgtttctttgaatttgagccgggccagaaatggcatgcgtttgaaggttacgagcatggtcagtatttcgttgacccttgtaagttcctgctgaccacaccggggattgacccagaaactggcgaatacgagcactttggtattccggccaccatactggccaacttcctgcgtgagaacaacatcatcccagagaagtgcgatttgaactctatcctcttcctgctcaccccagccgaagatatggcgaagatgcagcatttagtggcacaaattgctcgttttgaacgcttgattgaagaagatgcaccactgagcgaagtattgccgaacgtgtaccgcgcgaatcgcgaacgctacaaaggctacaccatccgtcagttgtgtcaggaaatgcacgatctgtatgtcagccatgatgtgaaacagctgcaaaaagagatgttccgcgcgcgttatttcccacgtgcggtaatgaacccacaagaagcgaacttggcctttgtacgtggtcaggttgagctagtcccactgcgtgaagtggaaggccgtatcgccgctgaaggcgcactgccttaccctccgggtgtgttgtgtgtggttccgggagaaatatggggcggttcagtacagcgttacttcctcgctctagaagaaggcattaacttgctgccgggttttgcgcctgaattgcaaggggtgtatttggagccgacaggcgagggacgagtgcaagccatgggctatgtactgaaacgttaa

SEQ ID NO: 1846 - protein, 720 aa, Vibrio cholerae
MNSLKIATSLSVRSCFTTQREVVDVLKTDFCDIGAAVVSVEDVQNGIIDKMNATGLKLPIFVAVCCEDQFPDDFCADITGVFELCDAKVEFYGKQVETAVRRYQESLLPPFFGTLKKYVDMGNSTFACPGHQGGQFFRKHPVGRQFFDFFGETLFRSDMCNADVRLGDLLIHEGAPHDAQAYAAKVYNADKTYFVLNGTSASNKVVCNALLTPGDLVLFDRNNHKSNHHGALIQAGATPVYLETARNPFGFIGGIDTHCFNESYLRDAVRNVDPSRAEAKRPFRLAIIQLGTYDGTIYNARQVVDRIGHLCDYILFDSAWVGYEQFIPMMKDCSPLLLDLKPEDPGIIVTQSVHKQQAGFSQTSQIHKKDHHIKGQERYCNHKRFNNAFMLHASTSPFYPLFAALDVNAKMHEGDSGRYLWREAVKTGIEARKLLMKKCKYIKPFIPPMIEGKPWQSHPTEQIADDLRFFEFEPGQKWHAFEGYEHGQYFVDPCKFLLTTPGIDPETGEYEHFGIPATILANFLRENNIIPEKCDLNSILFLLTPAEDMAKMQHLVAQIARFERLIEEDAPLSEVLPNVYRANRERYKGYTIRQLCQEMHDLYVSHDVKQLQKEMFRARYFPRAVMNPQEANLAFVRGQVELVPLREVEGRIAAEGALPYPPGVLCVVPGEIWGGSVQRYFLALEEGINLLPGFAPELQGVYLEPTGEGRVQAMGYVLKR

SEQ ID NO: 1847 - DNA, 2163 bp, Haemophilus influenzae
  CDS (1)..(2163)
atgccaaatttaaaaattgcatatagtccaaaagttgaacaatatttctctacaaatagagaattagttgagattgctaaaacagactttacagatgttgcagctatcgtattaagttcaagtgatgtaggtgaatacctcgatagaattaaagcaacgaaatttgatgttccagtgtttattgttcaaaccgacgaacaacaggtggatccaaaattctatgattctatttaccatatccaagatttaaacggttatgacatcaaactttatagccgccaaatcgaaactgcagcaaaactttatgaagaaaaaatgttaccgccattcttcaaaatgttaagtgaatatgtggaaatgggtaatatcgctttcgactgtccgggacatcaaggtggtcaatactatcgtaaacatccagctggtcgtttcctttatgacttctacggtgaaaacattttccgttcggacatttgtaatgcggacgtgaaattaggtgacttgttaattcacgaaggggcagcttgtgatgcacaaaaatatgcggctcaagtattcaatgcagataaaacttacttcgtattgaatggtacatcttcttcaaacaaagttgcgttaaatgctgtacttgctcctggcgatttagtgttatttgatcgtaataaccataaatcaaaccaccatggtgcattaattcaagcgggtgctaccccaatttacttagaaactgcacgtaacccatttggtttcattggtggtattgatagtcactgcttcgaagaagattatctgaaatcattaattaaagaagttgcacctgaaaaattaaaccaaaaacgtccattccgtttggcagtgattcaattaggtacttatgacggtacaatttataacgcacgccaagtagtggataaaataggtcacctttgtgattacatcttattcgactctgcatgggtaggttatgaacaattcattccaatgatgaaagactgctcgccattattgcttgaattaaatgaaaatgacccaggtattttagtgacacaatctgttcataaacaacaagcaggtttctcacaaacttcacaaattcacaaaaaagataaacacattaaaggtcaagatcgttatgtaaatcacaaacgtttcaataatgcctttatgttacatgcgtcaactagtccgttctatccgttatttgctacgttagatgtgaatgcgaaaattcaaggtagtgaagctggtcgtcgattatggcatgaatgtgtgaaagtaggtatcgaagcgcgtaaattagtgttaaaccactgtgaattaattcgtccatttattccaaccacaattaaaggtaaaaaatggcaagattatgacacagaggaaatcgcaactaatctcgagttcttcaaattccacccaacagatacatggcataaatttgaaggttatgctgatgaacaatacttcgttgatccatgtaaattcttgcttaccacaccgggtattagcttagaaacaggtgaatatgaagaatttggtgtaccagcaaccattcttgctaactacttacgtgaaaacggtattattccggaaaaatgtgacttgaactcaatcttattcttgctcactccagcagaaaccatcaccaaaatgcaaactttagttgctcaaatcgccttgtttgaaaaacacattaaacaagactctttattaaaatatgtcttaccaactgtgtataaaaacaatgaagatcgttacaaaggttacaccattcgtcaattatgccaagaaatgcatgatctttatgtaagccgaaatgtaaaacaacttcaaaaagatttgttccgcaaagcgacattaccagaatatgtattaaatccacatgatgcaaatattgagttaatacgtaacaaagttgaactcgttccgttgactgatattgttggtcgtgtggctgcggaaggtgcgttaccttaccctccaggtgtgttatgtgtagtgccaggagaaaaatggagcactacagcacaccaatatttccttgcgttagaagaagggatcaacacattacctggtttcgcacctgaaatccaaggggtttacttacaaaaagaccctgatggacgtactcgtgcatatggctatgttttaactgactattaa

SEQ ID NO: 1848 - protein, 720 aa, Haemophilus influenzae
MPNLKIAYSPKVEQYFSTNRELVEIAKTDFTDVAAIVLSSSDVGEYLDRIKATKFDVPVFIVQTDEQQVDPKFYDSIYHIQDLNGYDIKLYSRQIETAAKLYEEKMLPPFFKMLSEYVEMGNIAFDCPGHQGGQYYRKHPAGRFLYDFYGENIFRSDICNADVKLGDLLIHEGAACDAQKYAAQVFNADKTYFVLNGTSSSNKVALNAVLAPGDLVLFDRNNHKSNHHGALIQAGATPIYLETARNPFGFIGGIDSHCFEEDYLKSLIKEVAPEKLNQKRPFRLAVIQLGTYDGTIYNARQVVDKIGHLCDYILFDSAWVGYEQFIPMMKDCSPLLLELNENDPGILVTQSVHKQQAGFSQTSQIHKKDKHIKGQDRYVNHKRFNNAFMLHASTSPFYPLFATLDVNAKIQGSEAGRRLWHECVKVGIEARKLVLNHCELIRPFIPTTIKGKKWQDYDTEEIATNLEFFKFHPTDTWHKFEGYADEQYFVDPCKFLLTTPGISLETGEYEEFGVPATILANYLRENGIIPEKCDLNSILFLLTPAETITKMQTLVAQIALFEKHIKQDSLLKYVLPTVYKNNEDRYKGYTIRQLCQEMHDLYVSRNVKQLQKDLFRKATLPEYVLNPHDANIELIRNKVELVPLTDIVGRVAAEGALPYPPGVLCVVPGEKWSTTAHQYFLALEEGINTLPGFAPEIQGVYLQKDPDGRTRAYGYVLTDY

SEQ ID NO: 1849 - DNA, 2844 bp, Mycobacterium tuberculosis
  CDS (1)..(2844)
atgaacccaaacagcgtccgcccgcgacggctgcatgtctccgcgctggccgcggtggccaacccgtcctacacccgcctggacacctggaacctgctcgatgacgcgtgtcgtcacctggcggaggtcgacctcgccgggctcgacaccacacacgacgtggctcgggcgaagcggctgatggaccgcatcggcgcctatgagcggtactggctgtatccgggggcacagaatctggcgactttccgcgctcatctggatagtcattccacggtgcggcttaccgaggaagtgtcgttggccgtacgactgctgtccgaatacggcgaccgcacagcgctgttcgacacctccgcgtcactggcggagcaggagctggtagcgcaggccaaacagcagcagttctacaccgtgctgctcgccgacgactccccggcgacggctccggacagcttggccgagtgcctgcggcagttgcgcaatccggccgacgaggtgcagttcgagttgctcgtggtggccagcatcgaagatgccatcaccgcggtggcgctgaatggcgagattcaggcggcgatcatccgtcacgacctgccgctgcggtcccgcgaccgggtgccgctgatgaccacgctgctgggcaccgatggcgacgaagcggtggcaaacgagacccacgactgggtggaatgcgccgagtggatccgtgagttgcggccccacatcgacctctatctgctcaccgacgagtcgatcgccgccgagacccaggacgagcccgacgtctacgaccgcaccttctaccggctcaacgacgtcaccgacctgcacagcacggtgctcgcgggtttacgaaaccgttatgccacaccgtttttcgatgcgctgcgggcctatgcggcggcgccggtcggccaatttcatgcccttcccgtcgcgcgcggcgccagcatcttcaactccaagtcactgcacgacatgggcgagttctacggccgcaacatcttcatggccgagacctcgacaacctctggtggactggactcgctgctggacccgcatggcaacatcaagacggcgatggacaaagccgcggtgacctggaacgccaaccagacctacttcgtcaccaacggaacatcgaccgccaacaagatcgtcgtgcaggccctgacccgccccggcgacatcgtgctcatcgaccgcaattgccacaagtcgcaccactacggcctggtacttgccggcgcgtacccgatgtacctcgacgcatatccgctgccgcagtacgcgatttatggtgccgtgccgttgcgcaccatcaagcaggcgctgctggacctcgaggccgccggacagctgcaccgggtgcgcatgctgttgctcaccaactgcacgtttgacggcgtggtgtacaacccgcgccgggtgatggaggaggtgctagcgatcaaaccggacatctgctttttgtgggacgaggcgtggtatgcgtttgcgacggcggtgccctgggcccggcagcggaccgcgatgattgctgccgagcgactcgagcagatgttgtccactgcggaatacgctgaggaataccggaattggtgtgcgtcgatggacggagtggaccgctccgagtgggttgatcaccggctgttgccagaccccaaccgcgctcgggtccgagtgtatgcgacgcattcgactcacaagtcgctgtccgcgctacggcaggcatcgatgatccacgtgcgcgaccaggatttcaaagcgctcacccgggacgcgttcggtgaggcattcttgacccacacctcgacctcgcccaaccagcaacttctcgcctcgttggacttggcgcgccgacaggttgacatcgaagggttcgagctggtccgccatgtttacaacatggcgctggtgttccgccatcgcgtccgcaaagaccggctgatcagcaagtggttccgcatccttgacgagtccgacctggttcccgatgcctttcggtcctcgacggtcagctcgtaccgtcaggtcaggcagggggctctggccgattggaacgaagcctggcggtccgatcaattcgtgctcgatccgacgcggctcaccctgtttatcggggcgaccgggatgaacgggtacgacttccgcgagaagatcctgatggagcgattcggcatccagatcaacaaaacgtctatcaacagcgtgttgctgatcttcacgatcggcgtcacctggtcgagcgtgcactatctgctcgatgtgttgcgtcgggtggcgatcgatctggaccgcagccagaaggcggccagcggggccgaccttgctctacaccgacgccacgtcgaggagatcacgcaggatctgccgcatctaccagatttcagcgagttcgaccttgccttccgccccgacgacgccagctctttcggtgacatgcggtcggctttctacgccggctacgaagaggccgaccgtgagtacgtgcagatcggcttggccgggcgccggctggctgagggcaagactctggtatccaccacgttcgtggtgccctacccgcccggcttcccggtactggtgccgggtcaactggtttccaaggagatcatctactttcttgcccagctcgacgtcaaagagatccacggatacaaccccgacctggggttgtcggtgttcacccaggcggcattggcccggatggaggccgcgcgcaacgccgtcgccacggtaggtgccgcgctgccggccttcgaggtaccgcgggacgcttcggctttgaatggcaccgtcaacggcgacagtgtgctgcagggggtcgccgaagacgcgtga

SEQ ID NO: 1850 - protein, 947 aa, Mycobacterium tuberculosis
MNPNSVRPRRLHVSALAAVANPSYTRLDTWNLLDDACRHLAEVDLAGLDTTHDVARAKRLMDRIGAYERYWLYPGAQNLATFRAHLDSHSTVRLTEEVSLAVRLLSEYGDRTALFDTSASLAEQELVAQAKQQQFYTVLLADDSPATAPDSLAECLRQLRNPADEVQFELLVVASIEDAITAVALNGEIQAAIIRHDLPLRSRDRVPLMTTLLGTDGDEAVANETHDWVECAEWIRELRPHIDLYLLTDESIAAETQDEPDVYDRTFYRLNDVTDLHSTVLAGLRNRYATPFFDALRAYAAAPVGQFHALPVARGASIFNSKSLHDMGEFYGRNIFMAETSTTSGGLDSLLDPHGNIKTAMDKAAVTWNANQTYFVTNGTSTANKIVVQALTRPGDIVLIDRNCHKSHHYGLVLAGAYPMYLDAYPLPQYAIYGAVPLRTIKQALLDLEAAGQLHRVRMLLLTNCTFDGVVYNPRRVMEEVLAIKPDICFLWDEAWYAFATAVPWARQRTAMIAAERLEQMLSTAEYAEEYRNWCASMDGVDRSEWVDHRLLPDPNRARVRVYATHSTHKSLSALRQASMIHVRDQDFKALTRDAFGEAFLTHTSTSPNQQLLASLDLARRQVDIEGFELVRHVYNMALVFRHRVRKDRLISKWFRILDESDLVPDAFRSSTVSSYRQVRQGALADWNEAWRSDQFVLDPTRLTLFIGATGMNGYDFREKILMERFGIQINKTSINSVLLIFTIGVTWSSVHYLLDVLRRVAIDLDRSQKAASGADLALHRRHVEEITQDLPHLPDFSEFDLAFRPDDASSFGDMRSAFYAGYEEADREYVQIGLAGRRLAEGKTLVSTTFVVPYPPGFPVLVPGQLVSKEIIYFLAQLDVKEIHGYNPDLGLSVFTQAALARMEAARNAVATVGAALPAFEVPRDASALNGTVNGDSVLQGVAEDA

SEQ ID NO: 1851 - DNA, 1476 bp, Streptococcus pneumoniae
  CDS (1)..(1476)
atgaaagagttagatcaaaaccaagccccaatttatgaggccttggtgaagttacgcaagaaaaggattgttccctttgatgttccaggtcacaagcgtggacggggaaatccagaacttgtcgaactcttaggagaaaaatgtgtaggcattgatgtcaattcgatgaaacctttggataatttaggccatcctatttcgattattcgtgatgcagaggagctggctgcagatgcttttggagctagccatgcctttctaatgattggtggaacaacttcatcggtgcagactatgattctggcaacctgcaaggcaggagataagattattctgccacgaaatgtccataaatctgctatcaatgcgttggttctatgtggtgccattcccatctatatcgagatgagtgtagatcctaagattggtatcgctttaggtcttgaaaatgaccgagtagcacaggccataaaggaccatccagatgctaaggctatcctaatcaacaatcctacttactacggcatctgttcagacctaaaggggttgacagaaatggctcatgaagctggcatgatggttttagtagatgaagcccacggagcgcatttgcatttcactgataaacttccaatttctgctatggatgcaggggctgatatggcagcagtttccatgcataagtctggtgggagtttgacccaaagctccattttacttatcggggagcagatgaattctgaatacgttcgtcagataattaacctgacccagtctacatctgcctcttacttgttgatggctagtttggatatttcacgtcgcaacttggcccttcgtggtaaagagtcgtttgagaaagtcattgagctatctgagtatgcccgccgtgaaatcaatgctatcggtggctactatgcctactcaaaagagttaatagacggtgtttcggtttgcgattttgacgtaactaagctgtcagtttacactcagggtattggcttaacaggtatcgaggtttatgacctcttgcgagacgaatacgacattcagatcgagtttggtgatatcggcaatatcttggcctatatttccatcggcgaccgcatccaagacatcgagcgcttggttggtgctctggctgatattaagagactctattcaagagatggaaaagatttgatagcaggagaatatattcagcccgagttagtgctgtctccgcaagaagccttctattcagaaagaaaaagtttaactttggatgattctgttggacaggtctgtggagaatttgttatgtgttaccctccaggtattcctatcttggctcctggtgaacgcattacacgagaaattgtcgactatatccaattcgccaaggaacgtggttgctccctccaagggacggaagatccagaggtcaatcatatcaacgttattaagagaaagacaaactataagaaaagtcaatag

SEQ ID NO: 1852 - protein, 491 aa, Streptococcus pneumoniae
MKELDQNQAPIYEALVKLRKKRIVPFDVPGHKRGRGNPELVELLGEKCVGIDVNSMKPLDNLGHPISIIRDAEELAADAFGASHAFLMIGGTTSSVQTMILATCKAGDKIILPRNVHKSAINALVLCGAIPIYIEMSVDPKIGIALGLENDRVAQAIKDHPDAKAILINNPTYYGICSDLKGLTEMAHEAGMMVLVDEAHGAHLHFTDKLPISAMDAGADMAAVSMHKSGGSLTQSSILLIGEQMNSEYVRQIINLTQSTSASYLLMASLDISRRNLALRGKESFEKVIELSEYARREINAIGGYYAYSKELIDGVSVCDFDVTKLSVYTQGIGLTGIEVYDLLRDEYDIQIEFGDIGNILAYISIGDRIQDIERLVGALADIKRLYSRDGKDLIAGEYIQPELVLSPQEAFYSERKSLTLDDSVGQVCGEFVMCYPPGIPILAPGERITREIVDYIQFAKERGCSLQGTEDPEVNHINVIKRKTNYKKSQ

SEQ ID NO: 1853 - DNA, 1476 bp, Bacillus halodurans
  CDS (1)..(1476)
atgtctcgtcaagaacagacccccctcttctcgggagtcgttgctcacgctaaacataaccctgtacaatttcatattcccggtcataaaaaaggagctggtatggacccagcgttccgttcatttatcggtgacaatgctctatcgatcgatttaatcaatataggcccgcttgacgatctacatcatccccatgggatcattaaagaagcacaagagttagccgccgaagcatttggggcagatcatacgtttttttctgtccaagggacaagcggtgccatcatgacgatgattatgtccgttgtcgggcctggtgaaaagatcatcgtgccacgaaatgttcacaagtcgatcatgtctgcgatcgttttttcaggagcgacacctgtgttcatccatccagaaatcgatccccttctagggatttcccatggaatcacgattgaagcggtggaaaaggcgcttgacgctcaccctgatgccaaaggacttcttgttattaacccgacatactttggcattgctgcaaacttaaaaaaaattgtagagctttgccatagcagggacgttcctgttcttgtcgatgaagcgcatggggtgcacattcatttccatgaagcccttcccttatcggcaatgcaggccggagctgatatggcggcaacgagtgttcataagcttggaggttccttgacacagagctccattttaaatgttcgcgaaggcctcgtctctgcgaagcgtgtgcaaacgattataagtatgctaacaacaacctccacgtcctatttgctcctcgcctcccttgatgcggcgagaaagcatttagcgacaaacggtagagatcttattggctataccattcagttggctgatcaggcaagagatcaaattaacgccattgatggcttgtactgtgtcggcaaggagattcttggaacgattgctacctatgattacgatccaacgaaactgatcatttctgtgaagaatcttggaattactggctacgatgcagaagtatggttaagggaacattatcagatcgaggttgagctgtcagatctatataatattctttgcatcgtttcctttggtgacactgagcgggagatggatctgcttgtcaaagctctctctgagctggctgacctgcacaaacatgggatttgtgaacggagtccagtctctgtctacgttccaaatatccctacactcgccatgtctccgcgagatgccttttatgctgaaactgaggtcgttccattcgaagattctgtcggacgtaccattgcagaatttattatggtttaccccccaggaattccaatcctaattcctggtgaaattataaccgaaagcaatctcgcctacattcgtgaaaacaaccgtgccggtcttcctgtgcaaggtccagaagacgacacctttcgaacgttgcgtgtcataaaagagcacgaagccatccgttaa

SEQ ID NO: 1854 - protein, 491 aa, Bacillus halodurans
MSRQEQTPLFSGVVAHAKHNPVQFHIPGHKKGAGMDPAFRSFIGDNALSIDLINIGPLDDLHHPHGIIKEAQELAAEAFGADHTFFSVQGTSGAIMTMIMSVVGPGEKIIVPRNVHKSIMSAIVFSGATPVFIHPEIDPLLGISHGITIEAVEKALDAHPDAKGLLVINPTYFGIAANLKKIVELCHSRDVPVLVDEAHGVHIHFHEALPLSAMQAGADMAATSVHKLGGSLTQSSILNVREGLVSAKRVQTIISMLTTTSTSYLLLASLDAARKHLATNGRDLIGYTIQLADQARDQINAIDGLYCVGKEILGTIATYDYDPTKLIISVKNLGITGYDAEVWLREHYQIEVELSDLYNILCIVSFGDTEREMDLLVKALSELADLHKHGICERSPVSVYVPNIPTLAMSPRDAFYAETEVVPFEDSVGRTIAEFIMVYPPGIPILIPGEIITESNLAYIRENNRAGLPVQGPEDDTFRTLRVIKEHEAIR

SEQ ID NO: 1855 - DNA, 2349 bp, Sinorhizobium meliloti
  CDS (1)..(2349)
atgaaggctccgaccgtccccattccattccacaagctgctcaaggtcgtggcattcgtcgacgaaagcaatctggaaacgaagagacttcttgcgcacattgtcgcggaaaatttcgaagtcgagttgcgcggcagctataacgccgacgtgtccgaggacgcttcggttggtgcctatattgggacggtcgagggcggacggctcgaagatgcccgcaagttcgtccgtgcggtcagagacatcggattccgcacgccgctatgggccctcgcagactcccacggcattgcggacattgcggcgattaaaatggccggtgaagtggacggcttcgtttatcttgggcagcagacaccggcgttctacgcaaagcagatcatttcaagtctggtcaattacggcaagacgctcctcccgccgtttttcggcggcctcatggcttacgatggagaagccaacatcgcgttcgactgtccaggacaccaaggcggacagttttaccggaagtcgcccgcaggccagctctttttcaattatttcggcgaaagcatatttcgcgccgatctttgcaatgccgacgtcgaccttggcgacctgctaatccatgaagggccggcggccgaggcgcagaagaatgcggcaaggattttcggcgcggaccggacctacttcattctgaacggcacaagcacatcgaacaaagtggttacgaacgcggtactgcgcgcaggcgacctcgtgttgttcgaccgcaacaatcacaaatcgcttcatcagggcgcgctggtgcaggcgggagcgataccagtttacctgccgacctcacgcaactcgttcgggatgatcggtgccgtggactgggacgcctgggacgaagcgagcctgcgccggcagatcgaaaggcatcccctggtcgaggacaaggcgcgagccagtgcagagcgaccgttccgactcgcctgcatccaacttgcgacctatgacggcactatttacaacgtccgcaaggtgttggaacagatcggacacctgtgcgactacgtactctgggacgaggcgtggatcggctacaacgctttccacccgttgtttgaagaccacagtccgatgcggatcgacacgcttgatgccgaaatgccggggttgttctcaacgcaatccgtccacaagcaaggggcgggcttttcgcaagcctcgcagattcacaagcgcgacgagcacatccgtgatcagcgccgctacgtcgaacataagcgcttcaacgagtcgcttctcatgcatgtttcgacttcaccattctacccgctattcgcctcgttggacgtcaatgccaagatccacgagggcaaggctggtgaaatgctctgggatcgctgtatcgagctgggtatcgaggcacgcaagaagctcagagaattcacccggtactacgagtcgtcgggtgcggggccccaggagcagtggttcttcgaccccttcgtacccgatgtggtcacgatctcgggctccaaacataccgaggatgttgtcgagtcccgttgggaggcgctcccgacggaggtcatcaaacgggaacagcagtgctggcgcttccgtccaggggcttcatggcatggatattccggctactccgatggctacgcaatggtggatccaaacaagcttacgcttctcactccaggcatagaccgtgcgaccggggagtatcgagacttcggcatcccagcaacgatggttgccaattatcttcgcgaacagcgcatcgttcccgagaagtgcgacctcaacagcatactgtttctgctcacacctgccgaggacgagagcaagctcaacacgctgatagccaagttggtgaagttcaagaacttatgggatcgggacgcacctttggccgaggttctaccaaccgtgtttgcggcgaacagagagcgctatgcaggatacacactccggcaggtctgcgcagagatgcacgacttctatcggcaagcaggggtcaaggaattgcagcgcctctgcttcagggcggagagcatgcccgagcccgcaatgacgccgaaagcggcttatgaagccctcgtggcaaacgaagttgattatgtggcactcgacgaggctttcggcaggatttcggccacgctcgcgttgatctacccgccgggcataggcgtcatagtccccggggagcgctgggacgaaagggcgcggccgatgcacaactatttcctggcattccaagagtccttcaaccgcttccccggcttcaattacgaggtccagggtgtgtttcaggagcgcgttgacggccagatcaaattctacacctacgccgtgcgcgagtaa

SEQ ID NO: 1856 - protein, 782 aa, Sinorhizobium meliloti
MKAPTVPIPFHKLLKVVAFVDESNLETKRLLAHIVAENFEVELRGSYNADVSEDASVGAYIGTVEGGRLEDARKFVRAVRDIGFRTPLWALADSHGIADIAAIKMAGEVDGFVYLGQQTPAFYAKQIISSLVNYGKTLLPPFFGGLMAYDGEANIAFDCPGHQGGQFYRKSPAGQLFFNYFGESIFRADLCNADVDLGDLLIHEGPAAEAQKNAARIFGADRTYFILNGTSTSNKVVTNAVLRAGDLVLFDRNNHKSLHQGALVQAGAIPVYLPTSRNSFGMIGAVDWDAWDEASLRRQIERHPLVEDKARASAERPFRLACIQLATYDGTIYNVRKVLEQIGHLCDYVLWDEAWIGYNAFHPLFEDHSPMRIDTLDAEMPGLFSTQSVHKQGAGFSQASQIHKRDEHIRDQRRYVEHKRFNESLLMHVSTSPFYPLFASLDVNAKIHEGKAGEMLWDRCIELGIEARKKLREFTRYYESSGAGPQEQWFFDPFVPDVVTISGSKHTEDVVESRWEALPTEVIKREQQCWRFRPGASWHGYSGYSDGYAMVDPNKLTLLTPGIDRATGEYRDFGIPATMVANYLREQRIVPEKCDLNSILFLLTPAEDESKLNTLIAKLVKFKNLWDRDAPLAEVLPTVFAANRERYAGYTLRQVCAEMHDFYRQAGVKELQRLCFRAESMPEPAMTPKAAYEALVANEVDYVALDEAFGRISATLALIYPPGIGVIVPGERWDERARPMHNYFLAFQESFNRFPGFNYEVQGVFQERVDGQIKFYTYAVRE

SEQ ID NO: 1857 - DNA, 1476 bp, Streptococcus pneumoniae
  CDS (1)..(1476)
atgaaagagttagatcaaaaccaagccccaatttatgagtccttggtgaagttacgcaagaaaaggattgttccctttgatgttccaggtcacaagcgtggacggggaaatccagaacttgtcgaactcttaggagaaaaatgtgtaggcattgatgtcaattcgatgaaacccttggataatttaggccatcctatttcgattattcgtgatgcagaggagctggctgcagatgcttttggagctagccatgcctttctaatgattggtggaacaacttcatcggtgcagactatgattctggcaacctgcaaggcaggagataagattattctgccacgaaatgtccataaatctgctatcaatgcgttggttctatgtggtgccattcccatctatatcgagatgagtgtagatcctaagattggtatcgctttaggtcttgaaaatgaccgagtagcacaggccataaaggaccatccagatgctaaggctatcctaatcaacaatcctacttactacggcatatgttcagacctaaaggggttgacagaaatggctcatgaagctggcatgatggttttagtagatgaagcccatggagcgcatttgcatttcactggtaaacttccaatttctgctatggatgcaggagctgatatggcagcagtttccatgcataagtctggtgggagtttgacacaaagttcgcttcttttaatcggggagcagatgaatcccgagtacgttcgtcagattataaacctgacacagtctacatctgcctcttacttattgatggctagtttggatatttcacgtcgcaacttggcccttcgtggtaaagagtcgtttgaggaagtcattgagctatccgagtacgctcgtcatgaaatcaatgccattggcggttactatgcttactcaaaagagttaatagatggtgtgtcggtctgtgattttgatgtaaccaagttgtcagtttacactcagggaataggcttaacaggtatcgaggtttatgacctcttgcgagacgaatacgacattcagatcgagtttggtgatatcggcaatatcttggcctatatttccatcggcgaccgcatccaagacatcgagcgcttggttggtgctctggctgatattaagagactctattcacgagatgggaaggacttaatagctggagaatatattcagcccgagttggtgctgtctccacaagaagccttctattcagagagaaaaagtttgaccttagatgagtctgttggacaggtctgtggagaatttgtcatgtgctatcctccagggattcctatcttggctcctggtgaacgcattacacgagaaattgtagactatatccaattcgccaaggaacgtggttgctccctccaagggacggaagatccagaggtcaatcatatcaacgttattaagagaaagacaaactataagaaaagtcaatag

SEQ ID NO: 1858 - protein, 491 aa, Streptococcus pneumoniae
MKELDQNQAPIYESLVKLRKKRIVPFDVPGHKRGRGNPELVELLGEKCVGIDVNSMKPLDNLGHPISIIRDAEELAADAFGASHAFLMIGGTTSSVQTMILATCKAGDKIILPRNVHKSAINALVLCGAIPIYIEMSVDPKIGIALGLENDRVAQAIKDHPDAKAILINNPTYYGICSDLKGLTEMAHEAGMMVLVDEAHGAHLHFTGKLPISAMDAGADMAAVSMHKSGGSLTQSSLLLIGEQMNPEYVRQIINLTQSTSASYLLMASLDISRRNLALRGKESFEEVIELSEYARHEINAIGGYYAYSKELIDGVSVCDFDVTKLSVYTQGIGLTGIEVYDLLRDEYDIQIEFGDIGNILAYISIGDRIQDIERLVGALADIKRLYSRDGKDLIAGEYIQPELVLSPQEAFYSERKSLTLDESVGQVCGEFVMCYPPGIPILAPGERITREIVDYIQFAKERGCSLQGTEDPEVNHINVIKRKTNYKKSQ

SEQ ID NO: 1859 - DNA, 2271 bp, Escherichia coli
  CDS (1)..(2271)
atgatgaaagtattaattgttgaaagcgagtttctccatcaagacacctgggtcggtaacgccgttgagcgtctggcagatgctttaagccagcaaaatgttaccgtgattaaatccacctcctttgatgatggttttgccattctctcttcaaacgaagccattgactgcctgatgttcagctatcaaatggaacatccggacgaacatcaaaacgtcagacaattgatcggtaagcttcatgagcgccaacaaaacgtgccggtcttcctgttgggcgatcgggaaaaagccctcgccgcaatggatcgcgacctgctggagcttgtcgatgaattcgcctggattctggaagataccgccgactttatcgccggacgcgccgttgccgcgatgacccgctaccgccagcagctgttgccgccactgttcagcgcgctgatgaaatatagtgacatccatgaatattcctgggcagcgccaggccaccagggcggcgttggttttaccaaaacacccgccggacgtttctaccatgactactatggtgaaaatctgttccgcaccgacatgggcatcgaacgaacttccctcggttctttgcttgaccatactggcgcatttggcgaaagcgaaaaatatgccgcacgcgtatttggtgccgatcgctcctggtcggtagtcgtcggtacttccggctctaaccgcaccatcatgcaggcttgcatgaccgataacgatgtcgtggtcgttgaccgtaactgccataaatccatcgaacaaggtttgatgctgacaggcgcgaaaccggtctatatggtgccaagccgcaaccgctacggcattatcgggccaatctatccgcaggaaatgcaacctgaaaccttgcagaagaaaatcagtgaaagcccgctgaccaaagacaaagccgggcaaaaaccgtcttactgcgtggtgaccaactgcacctatgacggcgtgtgttataacgctaaagaagcgcaggatctgctggaaaaaacctccgatcgtctgcactttgacgaagcctggtacggctatgcacgtttcaacccgatctatgccgatcactatgccatgcgcggcgaacctggcgatcacaacggtcctaccgttttcgccacccactccacccacaaactgctgaatgcgctgtcacaggcttcttatattcatgtacgtgaaggtcgtggggcgattaacttctcccgcttcaaccaggcctacatgatgcatgccaccacctccccgctgtatgccatctgcgcatccaacgacgtggcggtgtcgatgatggacggcaacagcggcctgtcactgacacaggaagtgattgacgaagcggttgatttccgtcaggcgatggcgcggctatataaagagttcaccgctgacggtagctggttcttcaaaccgtggaacaaagaagtcgtcaccgacccacaaaccggcaaaacctatgactttgctgacgcaccaaccaaactgctgaccaccgttcaggactgctgggtaatgcatccgggcgaaagctggcacggcttcaaagatattccggataactggagtatgctcgacccgattaaagtcagcatccttgctccgggaatgggtgaagatggtgaactggaagaaaccggtgttccggcggcgctggtcactgcctggcttggtcgccacggcattgtacctacccgcaccactgacttccaaattatgttcctgttctctatgggcgtaacccgtgggaaatggggaactctggttaacaccctttgctccttcaaacgccactatgacgccaacacaccgctggcgcaggtgatgccggaacttgttgaacaatatcctgacacttacgcgaacatggggattcacgatctgggtgacaccatgtttgcctggctgaaagaaaacaaccctggcgcacggttgaacgaagcctattccggcctgccggtggcggaagtcaccccgcgtgaagcgtacaacgcgattgtcgacaacaatgtcgaactggtatccattgaaaatctgccaggacgcatcgcggcaaactcagttatcccgtatccgccaggaatcccgatgctgctgtctggtgaaaacttcggcgataaaaacagtccgcaagtaagttatttacgctcgctgcaatcctgggaccaccatttccctggatttgaacacgaaactgaagggactgaaattattgacggtatttaccacgttatgtgcgtgaaagcgtaa

SEQ ID NO: 1860 - protein, 756 aa, Escherichia coli
MMKVLIVESEFLHQDTWVGNAVERLADALSQQNVTVIKSTSFDDGFAILSSNEAIDCLMFSYQMEHPDEHQNVRQLIGKLHERQQNVPVFLLGDREKALAAMDRDLLELVDEFAWILEDTADFIAGRAVAAMTRYRQQLLPPLFSALMKYSDIHEYSWAAPGHQGGVGFTKTPAGRFYHDYYGENLFRTDMGIERTSLGSLLDHTGAFGESEKYAARVFGADRSWSVVVGTSGSNRTIMQACMTDNDVVVVDRNCHKSIEQGLMLTGAKPVYMVPSRNRYGIIGPIYPQEMQPETLQKKISESPLTKDKAGQKPSYCVVTNCTYDGVCYNAKEAQDLLEKTSDRLHFDEAWYGYARFNPIYADHYAMRGEPGDHNGPTVFATHSTHKLLNALSQASYIHVREGRGAINFSRFNQAYMMHATTSPLYAICASNDVAVSMMDGNSGLSLTQEVIDEAVDFRQAMARLYKEFTADGSWFFKPWNKEVVTDPQTGKTYDFADAPTKLLTTVQDCWVMHPGESWHGFKDIPDNWSMLDPIKVSILAPGMGEDGELEETGVPAALVTAWLGRHGIVPTRTTDFQIMFLFSMGVTRGKWGTLVNTLCSFKRHYDANTPLAQVMPELVEQYPDTYANMGIHDLGDTMFAWLKENNPGARLNEAYSGLPVAEVTPREAYNAIVDNNVELVSIENLPGRIAANSVIPYPPGIPMLLSGENFGDKNSPQVSYLRSLQSWDHHFPGFEHETEGTEIIDGIYHVMCVKA

SEQ ID NO: 1861 - DNA, 1443 bp, Bacillus subtilis
  CDS (1)..(1443)
atgaacacacctttatataaagcattaattcaacatgcgagaagaaattctcattcatttcatgttccgggacatcacaatggagatgtcttttttgatgacgctaagtcaatattcgatccgcttctcaccattgatgtaactgaactggcaggactggatgatctccatcatccttctggggtgattaaggaagctcaggagcttgccagtcaattatatggatcggcggaaagtttttttctggtaaatggtacgactgtcggaaacttagcgatgattttatctgtttgtgaacctggtgatacaattctggttcaaagaaactgtcataaatctgtatttcatgctgttgatttgtccggtgctgagccggtttatcttgcacctgacgttgattcagcgatgcatgtgcctacgcatgttccgcttggaacaattaaagaggccctggaagcatatccagatgcgaaaggcttggtactgaccaatccgacatattacggacatagtgctgatttgactgagatcattactgaagcccatcattacgggattcctgttttggtcgatgaagcgcatggcgcacattttattttaggtgagccttttccggtctcagctttaaaaatgggggcagatattgttgttcagtcggcccacaaaacgttgccagccatgacgatgggttcttatttgcatctcaacagcagctgcaggattaacagggatcgggtggcagagtatttaaaccgattacaaagcagcagcccgtcttatccgattatggcttcgttagatattgcccgcgcttatgtacagcatattatagaagaacaaaagctttctgacattctgcagcggatagaaacacttaaacaaacgtttgattcacttacaaatgcagaagctgttaaccctgctaatccactgatcatcacggatccgctaaagctcacaattcgttcaaaacgcgggcattctggctatacgctgcaaagcattttagagcgtgccaacatattcactgagcttgctgatgaaaatcaagttctgctcgttctcccattgggaggaaaacggagaataaacgctgaaatcattagaagcatcgatgaagagattgagaaaacgcctccggatcagacgtttgtttctgcagaatggggtgtgcagcctgttactgtcttgccttatccaaaaaaggtcttacattcgtttaagaaagaatatgtgagctttgaggaagcagctggccggcttaatgcagaagatatcatcccttatcctccgggtatcccgatgattatggcgggagaaagaataacaaaagaaagtgtgcaaaagctcagccgcttgatcagcatgaaaacgcatgttcaagggaatatgaaaatcaaagagaaacaactacttgtttatatagaagaggagaaatcatga

SEQ ID NO: 1862 - protein, 480 aa, Bacillus subtilis
MNTPLYKALIQHARRNSHSFHVPGHHNGDVFFDDAKSIFDPLLTIDVTELAGLDDLHHPSGVIKEAQELASQLYGSAESFFLVNGTTVGNLAMILSVCEPGDTILVQRNCHKSVFHAVDLSGAEPVYLAPDVDSAMHVPTHVPLGTIKEALEAYPDAKGLVLTNPTYYGHSADLTEIITEAHHYGIPVLVDEAHGAHFILGEPFPVSALKMGADIVVQSAHKTLPAMTMGSYLHLNSSCRINRDRVAEYLNRLQSSSPSYPIMASLDIARAYVQHIIEEQKLSDILQRIETLKQTFDSLTNAEAVNPANPLIITDPLKLTIRSKRGHSGYTLQSILERANIFTELADENQVLLVLPLGGKRRINAEIIRSIDEEIEKTPPDQTFVSAEWGVQPVTVLPYPKKVLHSFKKEYVSFEEAAGRLNAEDIIPYPPGIPMIMAGERITKESVQKLSRLISMKTHVQGNMKIKEKQLLVYIEEEKS

SEQ ID NO: 1863 - DNA, 1452 bp, Synechocystis sp
  CDS (1)..(1452)
atggtcaacctcaatcaacaagatttgcccctggtcaatgcgttaaaagccctagctcaacaaccggatacgcctttttatgcgccgggccataaaaggggtcagggtatttcccctagttttaaacaatggttggggccaaacctcttccaagctgatctgccggaattgccggaattagataatctctttgctcccaccggggcgatcgccaaagctcaggagttagccgcggatttatggggggcagaacacacttggttttctgttaacggttccaccgccggtattgtggccgcaattttggccacctgtggggatggggataaaattctcttgcctcggaatgttcaccaagcggcgatcgccggcattatccatgctggggcagtgccaatatttttggaaccggaggttaaccccgattgggatttggctttgggggtgacggaggaaactttaagtaaagcattgcaagaacatgacgatgcaaaagcagtatttttgctcaatcctacctaccacggtgttgtgggggacttacaaaaattaattaaattaagtcatagagttaacctacctgtcattgttgatgaagcccacggtgcccattttgctttccatccatccttacccagaccggctttagaattaggggcggatattgtcatccaatccacccataaaatgctgggagctttgagtcaatgtgccatgatccatggccaaggaaacttaattaatcccccaagaattagtcaatgtttgcaattaattcaatccactagtcccaattatgttttattggcttccctcgatgatgcgcggcaccaaatggccaatggcggcagagaaaagatggcggaattattgaattttaccctccattatcgacaacaattaagtcaaattcctgggttaactttattagaaattaccaaacctttgcccggagctttaatcctcgatcccacccgcattaccgtcgatgtcactgcctggggaatgtcaggatttgaggtagatgatttgttacgggaaaagtttcaaattacagcggaattgcccaccctaaggcagttaagttttatcgttagtattggcaatcaagcccaggatttaggacatttattggaagctttaacccagttagcacctacgaatcctcaacaaccttttcacctaactttacccgtcttacccggtactattctggctatgactccccgccgagcggcccatgctgcccaaaaatcggtaaccgttaatgaagcgattgggaaaattagtgctggtctgctttgcccctatccccccggtattcccgtccttgttcccggagaaattatcaccccggaggcgatcgcctttttgacagaagttttaaatttagggggtaccatcagcggtttagctagtgaggaattaacccatttggctgtggtgaattaa

SEQ ID NO: 1864 - protein, 483 aa, Synechocystis sp
MVNLNQQDLPLVNALKALAQQPDTPFYAPGHKRGQGISPSFKQWLGPNLFQADLPELPELDNLFAPTGAIAKAQELAADLWGAEHTWFSVNGSTAGIVAAILATCGDGDKILLPRNVHQAAIAGIIHAGAVPIFLEPEVNPDWDLALGVTEETLSKALQEHDDAKAVFLLNPTYHGVVGDLQKLIKLSHRVNLPVIVDEAHGAHFAFHPSLPRPALELGADIVIQSTHKMLGALSQCAMIHGQGNLINPPRISQCLQLIQSTSPNYVLLASLDDARHQMANGGREKMAELLNFTLHYRQQLSQIPGLTLLEITKPLPGALILDPTRITVDVTAWGMSGFEVDDLLREKFQITAELPTLRQLSFIVSIGNQAQDLGHLLEALTQLAPTNPQQPFHLTLPVLPGTILAMTPRRAAHAAQKSVTVNEAIGKISAGLLCPYPPGIPVLVPGEIITPEAIAFLTEVLNLGGTISGLASEELTHLAVVN

SEQ ID NO: 1865 - DNA, 2307 bp, Yersinia pseudotuberculosis IP 32953
  CDS (1)..(2307)
atgattgatttaagcagtcacaagaaacgcaacgttttagtggttgacagcaatattcgtgatatcaataccgctaatggtcgggcggtaaacgaacttatcattgcgcttaatgacattaattttaatgtgattgcggcggcgacgtttgaagatggcgcggcaacagtgatctccgactcttcgttgtgctgtatttttgtcgattggacttcgggtggtaatgatgatgaatcccatagtcaggcatttgcattgctacaagacattcgtcgccgtaataaatcagtgcctgtgttattgatggctgagcattcatgtatcaatagcttaagtttggagaccatgcagcttgttaatgaatttgtttggatgcatgaagatacctccgagtttatcgctgctcgtgccaaagcactcatcatcaagtattaccagcagttgctgccgccttttacgcaagcgctgtttcaatatacgcaagataatcctgaatattcatgggctgcccccggtcatcaagggggcgttgccttcagtaagacggcggttggacgcgagtttcttgatttctttggcgagaatctatttcgtacggatactggtattgaacgtgagtcattgggatctttactggatcacagtgggccgataaaagagtcagaagcgtatgccgcacaagtttttggtgcacatgcaagttactcgatgcttaatggcacatcgggctctaatcgcgccattatggccgctgtcgtgggagataagcagatcgcattgtgtgatcgtaactgtcataaatccattgagcagggattggtcctgtcgggtgcattaccggtattttttattccaacccgtaaccgctatggcattattggaccaattcctaaagcacaattccaacccacggctattgcacaaaaaattgaacaaaaccccttaaagtcattggcttgtgatagcaagcccgtctatgcagttatcacgaattgtacctatgacggtatgtgctataacgcccaacaggcacaggatttattggcaaaaagtgttgatcagattcatttcgacgaagcttggtacgcctatgcccgttttaatcccctttatcgggagcgttttgcgatgcgtggtgacccggctgaccatgatgcgctgggaccaactatttttgctacacaatcaacgcataaattattggcagcgctgtcgcaagcttcttatattcatgtgagaaatggcaaaaagccgatagaacattcgcggtttaatgagtcgtatatgttgcagtcaaccacttcgccattgtacgccattattgctgccaatgaagtgggggcggcgatgatggaaggcgggcaggggctagcattgacacaagaggtgatcgatgaagctgttgattttcggttggcgctggctcgtgcacatgatgcttttgcaaaacaaggcgaatggttctttaaaccttggaatacaccggaaataacggatagcaaaagcggtaaaaagttacctttctcccaagcatcacgagagcaactgacaaccgatcccgcctgttgggttctcaagccgggagacccgtggcatggtttcgagcagttggaagaagattggtgcatgttggatccgatcaaggccgggattatggtgccgggaatgggggatgacggtaagttgtcagaaaagggaattcccgcagcgatagtgaccgccttccttgggcagcggggaattgtaccgtcgcggaccacggattttatggtgctgtgcttgttttcggtgggtgtaacgaaaggtaaatggggcacactcattaatgtgttactggaatttaagcagcactacgatagcaatacaccgatatcggtgtgcctacctgacttggcgaaaaattatcctcatcaatacgctcataaggggttaaaagtgttgtgtgatgagatgtttgcttatatgaagatcagtgaaatggataaactgcaagctgaggcatttagccatttgcctacgccagtggtcttaccccgtcaggcttttcaagatcatatggctgggcggtgtgagctactacctatcgataagctcgctgggcgtgttaccgctgtcggggttattccatatccgccgggcatcccaattgtcatgccgggggagagttttggtagccatgaagaaccatggctacgttatatcttaagtatcaccaaatggggtcagcattttcccggcttcgagaagatcttggaagggtccgagcagaagaatgggcaatattttatttgggtactaaagcagtaa

SEQ ID NO: 1866 - protein, 768 aa, Yersinia pseudotuberculosis IP 32953
MIDLSSHKKRNVLVVDSNIRDINTANGRAVNELIIALNDINFNVIAAATFEDGAATVISDSSLCCIFVDWTSGGNDDESHSQAFALLQDIRRRNKSVPVLLMAEHSCINSLSLETMQLVNEFVWMHEDTSEFIAARAKALIIKYYQQLLPPFTQALFQYTQDNPEYSWAAPGHQGGVAFSKTAVGREFLDFFGENLFRTDTGIERESLGSLLDHSGPIKESEAYAAQVFGAHASYSMLNGTSGSNRAIMAAVVGDKQIALCDRNCHKSIEQGLVLSGALPVFFIPTRNRYGIIGPIPKAQFQPTAIAQKIEQNPLKSLACDSKPVYAVITNCTYDGMCYNAQQAQDLLAKSVDQIHFDEAWYAYARFNPLYRERFAMRGDPADHDALGPTIFATQSTHKLLAALSQASYIHVRNGKKPIEHSRFNESYMLQSTTSPLYAIIAANEVGAAMMEGGQGLALTQEVIDEAVDFRLALARAHDAFAKQGEWFFKPWNTPEITDSKSGKKLPFSQASREQLTTDPACWVLKPGDPWHGFEQLEEDWCMLDPIKAGIMVPGMGDDGKLSEKGIPAAIVTAFLGQRGIVPSRTTDFMVLCLFSVGVTKGKWGTLINVLLEFKQHYDSNTPISVCLPDLAKNYPHQYAHKGLKVLCDEMFAYMKISEMDKLQAEAFSHLPTPVVLPRQAFQDHMAGRCELLPIDKLAGRVTAVGVIPYPPGIPIVMPGESFGSHEEPWLRYILSITKWGQHFPGFEKILEGSEQKNGQYFIWVLKQ

SEQ ID NO: 1867 - DNA, 1467 bp, Symbiobacterium thermophilum
  CDS (1)..(1467)
atgaatcagcacgagactccgctgttcaccgggctggtgcggcacgccgagcgcaatccgatccagtttcacattcccggccacaagaagggcacagggatggcgccggaattccgcgcgtacatcggcgagcgcgcactggccattgacctgatcaacatcgcgccgctcgacgacctgcacaacccccacggcatcatccgggaggcgcaggccctggccgccgaggccttcggggcggaccactccttcttcagcgtccagggcaccagcggagcgatcatcgcgatgatcatgaccgtctgcggccccggcgacaagattctggtcccccgcaacgtgcacaagtcggtcctcaccggcattgtgctgtcgggggccctgcccatattcatgaaccccgacctggactacgagctgggcatcgcccatggggtgagcctggaggcggtgcgccacgccctggaccagcaccccgacgccaagggcgtgctggtgatcaacccgacctattacggcgtggcggcggacctgaaggggatcgtcgagctggcccactcccgcggggtgccggtcctggtggacgaggcccacggcgtccacctgtgctttcacgacgagctgccgctctcggccatgcaggccggcgcggacatggcggccacctcggtgcacaagctgggcggttcgctgacgcagaccagcatcctcaacgtgcgcgaggggttcatcaaccccgggcgggtgcaggcgattctgtccatgctgacgaccacttccacctcgtacctgctgctggcctcgctggacgtcgcccgcaagcaactggccacccgggggcgggagctgatcgaccgggcggtccgcctcgccgagcgcgcccgccgggagatcgcggagatccccggcctgtactgcctcgggcccgacgtggtcggccagtcgtcgtcccgcttcgacctcgacccgacgaagctctgcatcaacgtgaaggagctgggcgtgaccggcgtggaggtcgaggcgatcctccgggaggaatttaacattgaagtggaactctcggacctctacaacatcctgtgcatcatctcgctgggcgacacggcggaggacgtggacgcgctggtggccgcgctcggggagatctcccgccgcttctaccggcagcgcccggccaacgtggtgaaggtcaaggtgcctgtgacgcctatcctcgccatgcatccccgcaccgcgttctacgcggagaccgaggtggtgccgatccgcgaggcggagggccgggtgatcgccgagtcgatcatggtgtatccccccgggatccccatcctgctgccgggggagatcgtggcggaggagaacctggattacctggaggagtgcatccaggcggggctgccggtccaggggaccgaggaccccgagatccggatggtaaaggtcgtgaaggacgctcaccgttaa

SEQ ID NO: 1868 - protein, 488 aa, Symbiobacterium thermophilum
MNQHETPLFTGLVRHAERNPIQFHIPGHKKGTGMAPEFRAYIGERALAIDLINIAPLDDLHNPHGIIREAQALAAEAFGADHSFFSVQGTSGAIIAMIMTVCGPGDKILVPRNVHKSVLTGIVLSGALPIFMNPDLDYELGIAHGVSLEAVRHALDQHPDAKGVLVINPTYYGVAADLKGIVELAHSRGVPVLVDEAHGVHLCFHDELPLSAMQAGADMAATSVHKLGGSLTQTSILNVREGFINPGRVQAILSMLTTTSTSYLLLASLDVARKQLATRGRELIDRAVRLAERARREIAEIPGLYCLGPDVVGQSSSRFDLDPTKLCINVKELGVTGVEVEAILREEFNIEVELSDLYNILCIISLGDTAEDVDALVAALGEISRRFYRQRPANVVKVKVPVTPILAMHPRTAFYAETEVVPIREAEGRVIAESIMVYPPGIPILLPGEIVAEENLDYLEECIQAGLPVQGTEDPEIRMVKVVKDAHR

SEQ ID NO: 1869 - DNA, 1410 bp, Symbiobacterium thermophilum
  CDS (1)..(1410)
atggcggaggagcaggcccggacgccgctgttttcggcgctgagggagtacgttgcgcgggtccgggcgccgctgcacgtgcccgggcacaagatgggacgcgccgcgccctcggcgtggcgggagttcctggggccgaatgcactggcgatcgacctgacggaggcgccggggctggacgacctgcacgcgccggagggggtcatcgccgaggcccaggagctggcggcccgggcgttcggcgcgtggcggagttattttctggtgggcggtaccaccgccggcctgcacgccctcatcctcgccgcctgccatccgggagaggcgatcgcggtgccgcgcaacgcgcaccgctccgtgctgggcgccctgattctggccggggtccgtcctcactgggtgagggtggccttcgacccggacctgggcatcgccacgggcccggtcctcacgtcgctggaggaggcgctttccggcgccgcggccgcggtgctggtccatcccacgtattacggcatcgccggagacacggccgccgcgatcgacctgatccaccgcgcggccgtcccggccctggtggacgaggcgcacggcgcccacttcccgttccaccccgcgctgccgccctcggccctggaactgggcgcggacggcgtcgtgcagtcgctgcacaagaccgggggcagcctgacccagtcgtccctgtgccacctggggcacggcagccgcatcgcccccgaacggctgcaggagatgctgcggctcgtgcagtccacaagcccgtcgtacctgctcatggcttccctggacctggcccggcgcgagctggccctcgggggccgggaggcctgggggcgggccctggagctggcccacgaggcgaaacggcgcatcgacgccctgcccgggctccgggtgcgccccaccgacgacccgaccaagctgctcatcgacgtgcggggacggtccatttcgggcttccgggcggcggagcggctctgggaggaggccggcgtcgccgtcgaggcctccgggctgacctacgtgctcgccgtgctctcgcccggggactcccgggagcagatcgacgccctggtcgcggggctggagcggctgtcctccgagggggatgtcccggcccttccgccggagccgccctggcccgaggtggttctgccgccgcgggaggcatacttagcccgtaagaaggcggttccgcttcgccaggcccgggggcgcatcgcggcggagctggtggccccgtacccgccgggcattccggtggtggccccgggtgagcggctgacggctgacgtgctggactacctccggcgcgccgccgatgccggctggcaccttcagggcccggcagaccccgcgctgcgaagcatccaggtcgtggaggagtga

SEQ ID NO: 1870 - protein, 469 aa, Symbiobacterium thermophilum
MAEEQARTPLFSALREYVARVRAPLHVPGHKMGRAAPSAWREFLGPNALAIDLTEAPGLDDLHAPEGVIAEAQELAARAFGAWRSYFLVGGTTAGLHALILAACHPGEAIAVPRNAHRSVLGALILAGVRPHWVRVAFDPDLGIATGPVLTSLEEALSGAAAAVLVHPTYYGIAGDTAAAIDLIHRAAVPALVDEAHGAHFPFHPALPPSALELGADGVVQSLHKTGGSLTQSSLCHLGHGSRIAPERLQEMLRLVQSTSPSYLLMASLDLARRELALGGREAWGRALELAHEAKRRIDALPGLRVRPTDDPTKLLIDVRGRSISGFRAAERLWEEAGVAVEASGLTYVLAVLSPGDSREQIDALVAGLERLSSEGDVPALPPEPPWPEVVLPPREAYLARKKAVPLRQARGRIAAELVAPYPPGIPVVAPGERLTADVLDYLRRAADAGWHLQGPADPALRSIQVVEE

SEQ ID NO: 1871 - DNA, 2154 bp, Erwinia carotovora
  CDS (1)..(2154)
atgaaacagttaaaaattgcggcgaatgcagcggttgccacccgtttaatcacaacgcgcgagattgtcgcgttgagtcagactgacttcactgatgtggcggcggtcgtggtttctattgaggaagcccgtagcggtattctgtcgatattgcagcacaccggttttagtattccggcgtttgtcgaagagcctgatgaagataaagagtcagatgttctgcctgcgggcagcgaatggctgattcttgatgatgaaggtgagcacgcgagcgtgctggaacgtgcggctaaagcctatcaagatgcgttgctgccgccgtttttcgatacgctgaccaagtacgtcaaaatgaagaacacgacgtttgcctgcccagggcatcagggcggtcagttcttccgtaagcatccggcagggcgtcagttttttgagttttacggtgagaacgtttttcgttcggacatctgtaacgccgacgtcaaactgggcgatttgctgatccatgaaggggcggcgaagaaggcacagaagcacgctgcgcgggtgtttaacgccgataagacctatttcgtgttaaacggcacgtcctctgcgaacaaagtcgtgacaaacgcgctgttagcgcgtggcgatctggtgctgtttgaccgtaacaaccataaatccaaccatcacggtgcgctggttcaggcgggggcgacgcctgtctatctggaaaccgtgcgcaatccgtttggctttatcggtggtgtggatgcgcactgctttgacgaaacctatctgcgcaagctgattgcggaagtcgcgccggaacgtgctaacgagccacgcccgttccgtctagctgtcatccagcttggcacctatgacgggaccatttataacgctcgtcaggttgtcgatagcatcgggcacctgtgtgactacattctgtttgactcggcctgggtcggctacgagcagttcatcccgatgatggagcagtgctcgccgctgttgctggatctgaatgagaacgatccgggcatctttgtcacccagtcggtgcataagcagcaggcgggcttctcccagacctcgcagatccacaaaaaagatacgcatatcaaagggcagcgtcgtttttgcaaccataagcaactgaataacgcttttatgctgcatgcgtcgaccagcccgttttacccgctgttcgccgcgttggatgttaatgccaaaatgcacgaaggggccagcgggcgtcgtatgtggatggactgcgtgaagctgggcattgaggcacgtaagcaactgctgacgcgctgttcgctcatcaaaccgtttgtgcctgttacggtaggcggtgcgctctggcaggatcatgatacggagacgatcgcgcaggacgtgcgtttcttcaactttgagccgggcgagaaatggcacgcgttcgaagggtacgcggaagatcagtattttatcgatccgtgcaaattactgctgactacgccgggtattgatgcaattagcggcgattataccgaatttggtattccggcgacgatccttgctaactatctgcgcgagcacggcatcatccctgaaaaatgcgacatgaactcgatcctgttcctgttaacgccagcggaagacacggccaaaatgcaggagctggttaatgcgctggttcattttgaaacgctgatcgctcgtgatgcgccgctgagcgaagtgttgcccagcctgtatcagaaatacaaagagcgctaccgtggttatcgactgcgtcggttgtgtcaggaaatgcatgatttttatgcccagcacaacgtgaaagatctgcaaaaagcgatgttccgcaaaaccgagtttccgtcagtggcgatgttgccgcaggatgccaacagggaatttgtgcgcgggaatatcgagctggttcccatcgttgaagctgaaggacgtatcgcggcggaaggtgcattgccatacccgccgggcgtgctgtgtgtggtaccgggggaagcctggggcggagcggtacagcgctattttctggcgctggaggatgggattaacctgctgcccggtttttcaccggaattgcagggggtttacagcgttgcggaagaagatggccgcaaacggctgtacggctacgtggtagaaaagtaa

SEQ ID NO: 1872 - protein, 717 aa, Erwinia carotovora
MKQLKIAANAAVATRLITTREIVALSQTDFTDVAAVVVSIEEARSGILSILQHTGFSIPAFVEEPDEDKESDVLPAGSEWLILDDEGEHASVLERAAKAYQDALLPPFFDTLTKYVKMKNTTFACPGHQGGQFFRKHPAGRQFFEFYGENVFRSDICNADVKLGDLLIHEGAAKKAQKHAARVFNADKTYFVLNGTSSANKVVTNALLARGDLVLFDRNNHKSNHHGALVQAGATPVYLETVRNPFGFIGGVDAHCFDETYLRKLIAEVAPERANEPRPFRLAVIQLGTYDGTIYNARQVVDSIGHLCDYILFDSAWVGYEQFIPMMEQCSPLLLDLNENDPGIFVTQSVHKQQAGFSQTSQIHKKDTHIKGQRRFCNHKQLNNAFMLHASTSPFYPLFAALDVNAKMHEGASGRRMWMDCVKLGIEARKQLLTRCSLIKPFVPVTVGGALWQDHDTETIAQDVRFFNFEPGEKWHAFEGYAEDQYFIDPCKLLLTTPGIDAISGDYTEFGIPATILANYLREHGIIPEKCDMNSILFLLTPAEDTAKMQELVNALVHFETLIARDAPLSEVLPSLYQKYKERYRGYRLRRLCQEMHDFYAQHNVKDLQKAMFRKTEFPSVAMLPQDANREFVRGNIELVPIVEAEGRIAAEGALPYPPGVLCVVPGEAWGGAVQRYFLALEDGINLLPGFSPELQGVYSVAEEDGRKRLYGYVVEK

SEQ ID NO: 1873 - DNA, 2790 bp, Acinetobacter sp
  CDS (1)..(2790)
atgacgaatacaaattcattaagccagcatcgtagcgtatgggagatacgttctgatagctggattaatctcgtagaagatattgggtatctggcagatcttcagattaataaccaagatcgtgccaaagttttaactcgtttacggctcactctggattttttaattccaattgaaagttattgggcatttccaagcaagcgagtttttgctgaactctgtcagtatattgaacgtgaagattttactaccgctcgacagcttgcacgccgtattcatcgtgccttgtctgcggggacttatcgtcacgataacaaagtgctccaaagtgaacgtgaattaccctctcacattgaaaccacaagtgagcaacaggcacgtctatctcagccttattttgaagtgctcatcgtggatgaaatgtctccagcagaagaggatgcactgcgtcgtcgagtgattagcaagcgctgttctgacgatccatttatttttgatattgtggttgttccgagctttgaagatgccctgattgcatccctaattaatttcaacttacaagctgtggtgattcggcacggctttccagcacgatcggtcaatcatgttgatatgctggaacgtttatttatagatgtcgatcaggatattgaatcccttccagaaatggagcgtggaacactattaggccgccatatcgcgaagttacgtccagaactggatctctatttagtgaccgatgcaggtgtggaaaatattgcttctcatgctggcagtgaaatctttaaacgcattttctttggcgaagaagaccatatcgagctctacaatgcgattatgaaaggtgtgggtgagcgttaccgtacaccattctttaatgcattacgcgattattccaaacaaccaacaggtatgttccatgcactgccactggcacgtggtaaagccattcttaatagcaactggattggtgatctggcacagttttatggcatgaatttatttatggccgaaacatcagccacttcaggcggtctggattcattactggaacctgttggcccattaaaacatgcgcaggaatatgcagcccgtgcatttggtgccaaacggactttctttgcaaccaatggaacctccacctgtaacaagattgtggtgcaatctctggtacgtgaaggtgatattgtactggtagatcgcaactgtcataaatcacatcattatggtttggtgcttacaggcgccagtgccgcctatctcgattcgtatccactcaatgaatactcaatgtatggggcggtgccaatttggcacattaaacaaactttattgagctttaaacgagcaggtacgcttgatcgcgttaaactggttctactcaccaattgtacctttgatggtgttgtctatgacgtagaacgggtgatgatggaatgcctggccattaaacctgatctgatttttttatgggatgaagcatggtttgcttttgcaagttgtcatcccatttatcgccaacgcacagccatggccaatgccgctaagctggctgaacgttttaaaacgcctgaatatgcccgagaatatgccgagtggaaagacagtattgactgggaagatgatcaacagctcatcaacactcgtctcatgccagaccctgctttggcacgtgttcgcgtttattcaacgcattcgacacacaagaccttaactgcactgcgtcagggttccatgattcatatctgggatcaggattttaaagaaaagagcgaagaagcttttattgaagcttacatgacccatacttcaacttcggccaattatcagattctggcatcgctggatgtaggacggcgtcaggttgaaatggaaggttatcaactggtacagcgacagcttgaacttgcgatgagcctgcgcgaacaggtcatgcatcaccccttactcaagcgtcatttccacttcttgcgcgttggcaatatcattccaactgcttaccgtgaatctggagtcaatagctattttgatgaaggtaaaggctgggcaaatttagagaaagcgtggagcatggatgagtttgtcatggatcctacccgcgcaacgctgatgattggtatggtcgggatggatggagataccttcaaaaataccgaactcatgaataaatacgggattcaaatcaataagacctctcgtaatactgttctgtttattatcaatattggaaccacacgttctgcaattgcttatctgattgaagtgctggtcaagattgcacgtgatgtagatcgtcgtgtagctgacatgagctcagccgagcgtcgcattcacttaaaacgtgttaactctctcactcaagagcaaccaccattacctgatttctctgctttccatcgtgcatttcggggtcaaagtctaaacccagccattcaaacccgtgacggtaatattcgtcaggcattttttctgtcctatgaagattcgagctgtgaatatattgatatgcaggaagcagccgtagctattgcatcaggtcgtgaactggtttcagccctgtttgtaattccatatccgcctggctttccaattttagtacctgggcaggtcatcagctctgaaattttaaaattcatggcagcactggatgtgaaagaaattcatggtttccgccctgaactcggatttcgtgtctttacacaagaaacgcttgatcgagttctacacgcaaaagaatcttttgaatcgattatgcaatatcagcaaatcaataacttacgtgctggatag

SEQ ID NO: 1874 - protein, 929 aa, Acinetobacter sp
MTNTNSLSQHRSVWEIRSDSWINLVEDIGYLADLQINNQDRAKVLTRLRLTLDFLIPIESYWAFPSKRVFAELCQYIEREDFTTARQLARRIHRALSAGTYRHDNKVLQSERELPSHIETTSEQQARLSQPYFEVLIVDEMSPAEEDALRRRVISKRCSDDPFIFDIVVVPSFEDALIASLINFNLQAVVIRHGFPARSVNHVDMLERLFIDVDQDIESLPEMERGTLLGRHIAKLRPELDLYLVTDAGVENIASHAGSEIFKRIFFGEEDHIELYNAIMKGVGERYRTPFFNALRDYSKQPTGMFHALPLARGKAILNSNWIGDLAQFYGMNLFMAETSATSGGLDSLLEPVGPLKHAQEYAARAFGAKRTFFATNGTSTCNKIVVQSLVREGDIVLVDRNCHKSHHYGLVLTGASAAYLDSYPLNEYSMYGAVPIWHIKQTLLSFKRAGTLDRVKLVLLTNCTFDGVVYDVERVMMECLAIKPDLIFLWDEAWFAFASCHPIYRQRTAMANAAKLAERFKTPEYAREYAEWKDSIDWEDDQQLINTRLMPDPALARVRVYSTHSTHKTLTALRQGSMIHIWDQDFKEKSEEAFIEAYMTHTSTSANYQILASLDVGRRQVEMEGYQLVQRQLELAMSLREQVMHHPLLKRHFHFLRVGNIIPTAYRESGVNSYFDEGKGWANLEKAWSMDEFVMDPTRATLMIGMVGMDGDTFKNTELMNKYGIQINKTSRNTVLFIINIGTTRSAIAYLIEVLVKIARDVDRRVADMSSAERRIHLKRVNSLTQEQPPLPDFSAFHRAFRGQSLNPAIQTRDGNIRQAFFLSYEDSSCEYIDMQEAAVAIASGRELVSALFVIPYPPGFPILVPGQVISSEILKFMAALDVKEIHGFRPELGFRVFTQETLDRVLHAKESFESIMQYQQINNLRAG

SEQ ID NO: 1875 - DNA, 1482 bp, Bacillus thuringiensis
  CDS (1)..(1482)
atgtatagattgtcccaatacgaaacaccattgtttaccgctttagttgagcacagtaagcgaaatccaattcaattccatattccaggtcataaaaaagggcaaggcatggatcctgaatttcgcgaatttattgggcataatgcattagcaattgatttaattaacattgcgccgctcgatgatttacatcatccaaaaggtatgattaaagaagcacaagatttagcagccgctgcatttggcgcggatcatactttcttttctattcaaggtacaagtggcgcaataatgacaatggtgatgagcgtttgcggtcctggtgacaaaatactagtgccacgaaacgtgcataaatcagtaatgtcagctattattttctcaggtgcaaaacctattttcatgcatcctgaaatcgatccaaaacttggtatttcacatggaatcacaatccaatctgtcaaaaaagcacttgaagagcactcagatgcgaaaggcttacttgttattaatccaacatactttggctttgctgcggacttagaacagattgtacaattagcacattcttacgatatccctgtactcgttgatgaggctcatggtgttcatattcattttcacgatgaattgccgatgtcagcgatgcaagccggtgcagatatggcagcaacgagtgttcacaaattaggtggatctttaacgcaaagttctattcttaatgtaaaagaaggccttgtgaacgtaaaacatgttcaatctattattagcatgcttacgactacatcaacgtcttacatcttgttagcctccctagatgttgctagaaaacgtcttgctacagaaggaaaggcgctcatagaacaaacaatacaattagcggaacaagttcgtaatgctataaatgatattgaacatctttactgtccagggaaagaaatgctaggtacggatgctacttttaactatgatcctacaaagataattgtatctgtaaaagatttaggtattacaggccatcaggctgaagtatggcttagagagcaatataacattgaagtagaactctcagatttatacaacatactatgtcttgtcacttttggggatacagaaagtgagacgaatacacttattgcagcattacaagatttatcagcaacatttaaaaataaagctgataaaggtgttcgaatacaagtagaaattccagaaatacctgtgttagcactttctcctcgagatgctttttattcggaaacagaagtcatcccatttgaaaatgcagcaggtcgtattatagctgatttcgttatggtttatccgccagggattccaatctttactccgggggaaattattacacaagacaacttagagtatattcgtaaaaacttagaagcaggtttacctgtacaaggtcctgaagatatgacattacaaacattacgcgtgatcaaagagtacaagcctatcagttga

SEQ ID NO: 1876 - protein, 493 aa, Bacillus thuringiensis
MYRLSQYETPLFTALVEHSKRNPIQFHIPGHKKGQGMDPEFREFIGHNALAIDLINIAPLDDLHHPKGMIKEAQDLAAAAFGADHTFFSIQGTSGAIMTMVMSVCGPGDKILVPRNVHKSVMSAIIFSGAKPIFMHPEIDPKLGISHGITIQSVKKALEEHSDAKGLLVINPTYFGFAADLEQIVQLAHSYDIPVLVDEAHGVHIHFHDELPMSAMQAGADMAATSVHKLGGSLTQSSILNVKEGLVNVKHVQSIISMLTTTSTSYILLASLDVARKRLATEGKALIEQTIQLAEQVRNAINDIEHLYCPGKEMLGTDATFNYDPTKIIVSVKDLGITGHQAEVWLREQYNIEVELSDLYNILCLVTFGDTESETNTLIAALQDLSATFKNKADKGVRIQVEIPEIPVLALSPRDAFYSETEVIPFENAAGRIIADFVMVYPPGIPIFTPGEIITQDNLEYIRKNLEAGLPVQGPEDMTLQTLRVIKEYKPIS

SEQ ID NO: 1877 - DNA, 1422 bp, Bacillus thuringiensis
  CDS (1)..(1422)
atgaatcaaaatcgcatacctttatatgaagcattaatagagtttaaagaaagaagaccgttatcctttcatgttccaggtcataaaaatggtttaaacttccctcaggaggtagtagaggagtttaaagatatactatctatcgatgtaactgagttgtcaggattagatgatttacatagtccgtttgaatgtatagatgaggcacaacaattattagctgatgtatatggagtgaacaaaagttattttttaattaatggttcaacagtcgggaatctagcaatgattttgtcttgttgtggggaacatgatattgttcttgtacaaagaaattgtcataaatcgattattaatggtttaaaattagcgggagcaaatcctatttttttagatccatggattgatgaagcttataacgtaccagtgggaattcatgatgagattattaaggaagcgattgaaaaatacccaaatgcgaaagcactcattttaacgcatcctaattattatggtatggggatggatctagaggcaagcattgcttatgcacatacacataaaatccctgtgctagtagatgaagcacatggggctcatttttgtttaggcggggcatttccacagtcagcgttagcatatggtgcagatattgtagttcattctgcgcataaaacattacccgcgatgacgatgggatcctatttacatataaatagtcgtttagtgaaagaagaaaaagtttctacttatttaagtatgctacaatctagtagtccatcgtatccaattatggcttctcttgatattgcacgctttacaatagcacgtataaaagaaaagggacatgatgaaattgtcgagtttttacaggaatttaaagaagaattgagtactattccacaaatagctattttacaatatccattacaagacgggctaaagattcccgtacagacgcgttgtcagttatcaggatacgaattacagtctgtatttgaaaaggtcggtatatatacagaaatggcagatccatataatgtcttatttattttgcctttgcaagtaaataagaaatatatgaaggctatagagatgatccgagtagcattgcaatactatgaggtgaaagacaagacggaatctattcgttatacttataaaggagaaatttctcccctgccgtatacatataaacaactggaagaatacgaaacaaaagtagtacctatagaagaagcagttgggatggtagcagcggaaatggtaattccgtatccacctggtattccattgattatgtatggagaaagaattacttcagaacataaagaacaaattatgtatttagaaaaagcaggtgctcgttttcaaggtagcacgaaatatatgaaagtgtatgatatagaaagtaggttttag

SEQ ID NO: 1878 - protein, 473 aa, Bacillus thuringiensis
MNQNRIPLYEALIEFKERRPLSFHVPGHKNGLNFPQEVVEEFKDILSIDVTELSGLDDLHSPFECIDEAQQLLADVYGVNKSYFLINGSTVGNLAMILSCCGEHDIVLVQRNCHKSIINGLKLAGANPIFLDPWIDEAYNVPVGIHDEIIKEAIEKYPNAKALILTHPNYYGMGMDLEASIAYAHTHKIPVLVDEAHGAHFCLGGAFPQSALAYGADIVVHSAHKTLPAMTMGSYLHINSRLVKEEKVSTYLSMLQSSSPSYPIMASLDIARFTIARIKEKGHDEIVEFLQEFKEELSTIPQIAILQYPLQDGLKIPVQTRCQLSGYELQSVFEKVGIYTEMADPYNVLFILPLQVNKKYMKAIEMIRVALQYYEVKDKTESIRYTYKGEISPLPYTYKQLEEYETKVVPIEEAVGMVAAEMVIPYPPGIPLIMYGERITSEHKEQIMYLEKAGARFQGSTKYMKVYDIESRF

SEQ ID NO: 1879 - DNA, 2358 bp, Rhodopseudomonas palustris
  CDS (1)..(2358)
atggactacttcaggcgtttcaccttcctgttctcggcaccgactttcgaggcggatgatctcgaaggcattcggttcaatcagatcgtcgcggagatcgagcggtccggcttcgagatcgtcaaggcgcgcaagctggaagatgccgagatcgcggtgcagaccgacgccgcgattggctgcatggtggtcgactggggcaagaagggcctcgagggcaagaccgccgcgctgatcaacctgatgcgccggcgcggtctcgatttcccgatcgtgctgctgatccgccgcaagaggttcgaggaagtgccggtcgaggtgctcgatttcatcgacggctacgtgtttctgtccgaggagacgccgaccttcatcgcccgcaacctgatcagccggctgaagcaatatgccgacacgctgaagacgccgttcttcggcgcgctggtcgactatgcggaggagggcaaccagctctggacctgccccggccacaacggcggcatgttctacagccgcagcccgatcgggcgggtgttcatcgagcatctcggcgaggcggtgttccgcgatgacctcgataattcggtgctcgaccttggcgatctgttgacccacgaggggccggcgctgcgcgcgcagaaggaagccgcgcagatcttcggtgccgagaagacctatttcgtgctcaacggcacctcgacctccaacaaggtcgccctcggcgcgctcgtctccgacggcgatctgatcctgttcgatcgcaacaatcacaaggcggcccatcacggcgcgctgatgatgggcggcggcattcccgtctacattcccacggttcgcaacgcctggggcctgatcgggccgatggcgtgggacgcgctggacgagacggcgctgcgcgaacgcattcgcagccatccgctggtcaaggaccctgaggcctggcgcaagccgcgcccgttccgcgtcgcggtggtcgaacagtgcacctacgacggcaccatccacagcgccgagatgatcctgcgccgcatcgggcatttgtgcgattacatcctgttcgacgaagcctgggccggcttcatgaagtttcatccgctgtatgccggccgcttcgcgatggggctggcgaacctcggcgacgatgcgcccggcatcatcgcgacgcagtcgacccacaagcagctcgccagtttctcccaggcgtcgcagatccacatcaaggatcgccacatccgcggccagaagcggcgggtcgagcatcggcgcttcaacgagagcttcatgcagcacgcctcgacgtcgccgttctatccgctgttcgcctcgctcgatgtcggcgcgcagatgatgaagggccgctccggcgaagtgctatgggacgatacgatccggcttggcatcgagctgcgcaagaagatccgcgcggtgcggagggagttcgaggagaaggaggcgcgggcggagcggcgctggttcttcgatccgttcgtgcccgatcgggtgacgatcgcggacgccgcccgtgaaggcgcggtgcacgatgtcgcctgggaggccgtgagcaccgaccagctcgcgaccgacccgacattctggcagatcgcgccgggcgcggcctggcacggctttgccgatatggcgcctggcttcgccatgaccgacccgaacaagctgacgctgctgacgccgggcttcgaccgggccaccggccgctatgccgagcacggcgtgccggcgccggtggtggcgcaatatctgcgcgagaaccgcattgttccggaaaagaacgatctcaactcgctgctatttctgctgacgccgggcgtcgaggcgagcaaggccggtacgctgatcagcggcctcgtcgcgttcaagaagctgcacgacgacaacgcgccgctcgacgaggtgatcccggaattcagccggcgccggcccgctcgctatgccggggtacggctgcgcgatttgtgcgggcagatgcaccggttcttccgcgacgccgatgtcagcgcgctgcaggccaagcagtttctgcccgaacatctacccgagatcgcgatgtcgccgcacgatgcggcgcgctgcctggtccgcaatgacgtcgactatctgccgatcagccagatcgcgggccggatcgccaccacgccgttcgtggtctatccgccggggatcgcgaccatcgtgcccggcgagcggctgagcgagcgagccaagccgatgctcgattacttgcagatgttcgagcgcagcttcaacgaattccccggcttcgaagtcgagattcagggcgtctatcgcgaattcgatgaattgggccgggttcgtctctacacctacgtcgtggccgaataa

SEQ ID NO: 1880 - protein, 785 aa, Rhodopseudomonas palustris
MDYFRRFTFLFSAPTFEADDLEGIRFNQIVAEIERSGFEIVKARKLEDAEIAVQTDAAIGCMVVDWGKKGLEGKTAALINLMRRRGLDFPIVLLIRRKRFEEVPVEVLDFIDGYVFLSEETPTFIARNLISRLKQYADTLKTPFFGALVDYAEEGNQLWTCPGHNGGMFYSRSPIGRVFIEHLGEAVFRDDLDNSVLDLGDLLTHEGPALRAQKEAAQIFGAEKTYFVLNGTSTSNKVALGALVSDGDLILFDRNNHKAAHHGALMMGGGIPVYIPTVRNAWGLIGPMAWDALDETALRERIRSHPLVKDPEAWRKPRPFRVAVVEQCTYDGTIHSAEMILRRIGHLCDYILFDEAWAGFMKFHPLYAGRFAMGLANLGDDAPGIIATQSTHKQLASFSQASQIHIKDRHIRGQKRRVEHRRFNESFMQHASTSPFYPLFASLDVGAQMMKGRSGEVLWDDTIRLGIELRKKIRAVRREFEEKEARAERRWFFDPFVPDRVTIADAAREGAVHDVAWEAVSTDQLATDPTFWQIAPGAAWHGFADMAPGFAMTDPNKLTLLTPGFDRATGRYAEHGVPAPVVAQYLRENRIVPEKNDLNSLLFLLTPGVEASKAGTLISGLVAFKKLHDDNAPLDEVIPEFSRRRPARYAGVRLRDLCGQMHRFFRDADVSALQAKQFLPEHLPEIAMSPHDAARCLVRNDVDYLPISQIAGRIATTPFVVYPPGIATIVPGERLSERAKPMLDYLQMFERSFNEFPGFEVEIQGVYREFDELGRVRLYTYVVAE

SEQ ID NO: 1881 - DNA, 2837 bp, Shigella boydii
  CDS (165)..(2435)
ttagccgtcgataataagcagtgaaaataatttaaaataatcacataacgcattgtttataaaaataaatatttcaaaaatgtttgtttttcacgcgctttacagcccgaaaaggccggaagatacttgcccgcaacgaagattccttcataaccgggtaagcaatgatgaaagtattaattgttgaaagcgagtttctccatcaagacacctgggtcggtaacgccgttgagcgtctggcagatgctttaagccagcaaaatgttaccgtgattaaatccacctcctttgatgatggttttgccattctctcttcaaacgaagccattgactgcctgatgttcagctatcaaatggaacatccggacgaacatcaaaacgtcagacaattgatcggtaagcttcatgagcgccaacaaaacgtgccggtcttcctgttgggcgatcgggaaaaagccctcgccgcaatggatcgcgacctgctggagcttgtcgatgaattcgcctggattctggaagataccaccgactttatcgccggacgcgccgttgccgctatgacccgctaccgccagcagctgttgccgccactgttcagcgcgctgatgaaatatagcgacatccatgaatattcctgggcagcgccaggccaccagggcggcgttggttttaccaaaacacccgccggacgtttctaccatgactactatggagaaaatctgttccgcaccgatatgggcatcgaacgaacttccctcggttctttgcttgaccatactggcgcatttggggaaagcgaaaaatatgccgcacgcgtatttggtgccgatcgctcctggtcggtagtcgtcggtacttccggctctaaccgcaccatcatgcaggcttgcatgaccgataacgatgtcgtggtcgttgaccgtaactgccataaatccatcgaacaaggcttgatgctgacaggcgcgaaaccggtctacatggtgccaagccgcaaccgctacggcattatcgggccaatctatccgcaggaaatgcaacctgaaaccttgcagaagaaaatcagtgaaagcccgctgactaaagacaaagccgggcaaaaaccgtcttactgcgtggtgaccaactgcacctatgacggcgtgtgttataacgctaaagaagcgcaggatctgctggaaaaaacctccgatcgtctgcactttgacgaagcctggtacggctatgcacgtttcaacccgatctatgccgatcactatgccatgcgcggcgaacctagcgatcacaacggtcctaccgttttcgccacccactccacccacaaactgctgaatgcgctttcacaggcttcttatattcatgtacgtgaaggtcgtggggcgattaacttctcccgcttcaaccaggcctacatgatgcatgccaccacctccccgctgtatgccatctgcgcatccaacgacgtggcggtgtcgatgatggacggcaacagcggcctgtcactgacgcaggaagtgatcgacgaagcggttgatttccgtcaggcgatggcgcggctgtataaagagttcaccgctgacggtagctggttcttcaaaccgtggaacaaagaagtcgtcaccgacccacaaaccggcaaaacctatgactttgctgacgcaccaaccaaactgctgaccaccgttcaggactactgggtaatgcatccgggcgaaagctggcacggcttcaaagatattccggataactggagtatgctcgacccgattaaagtcagcatccttgctccgggaatgggtgaagatggtgaactggaagaaaccggtgttccggcggcgctggtcactgcctggcttggtcgccacggcattgtgcctacccgcaccactgacttccaaattatgttcctgttctctatgggcgtaacccgtgggaaatgggggactctggttaacaccctttgctccttcaaacgccactatgacgccaacacaccgctggcgcaggtgatgccggaacttgttgaacaatatcctgacacttacgcgaacatggggattcacgatctgggtgacaccatgtttgcctggctgaaagaaaacaaccctggcgcacggttgaacgaagcctattccggcctgccggtggcggaaatcaccccgcgtgaagcgtacaacgcgattgtcgacaacaatgtcgaattggtatccattgaaaatctgccaggacgcatcgcggcaaactcagttatcccatatccgccaggaatcccgatgctgctgtctggtgaaaacttcggcgataaaaacagtccgcaagtaagttatttacgctcgctgcaatcctgggaccaccatttccctggatttgaacacgaaactgaagggactgaaattattgacggtatttaccacgttatgtgtgtgaaagcgtaaccactattccgctgaaggcgtaattgtttaaataacattacgccgcctggccttaggccttttgagtatggcaacgttttcataaaaattgctgcaaacaaaaatgtcatactttttgcgcggccccaccccgcgcttttttttgcctgttatttaccctgtaaaaaaatatgtacatgagaaattactataaaaatttgtaatattagtaaaactcgttatttttatgtatgtttatattcgtcatacaattatataaccatttcccggtatcgctttgctttagcgagaactggtcttttattcgcactcaggagtacatgtatgaggatttgcagcgaccaaccttgtattgttttattgactgaaaaagatgtctggataagggtgaatgggaaagaa

SEQ ID NO: 1882 - protein, 756 aa, Shigella boydii
MMKVLIVESEFLHQDTWVGNAVERLADALSQQNVTVIKSTSFDDGFAILSSNEAIDCLMFSYQMEHPDEHQNVRQLIGKLHERQQNVPVFLLGDREKALAAMDRDLLELVDEFAWILEDTTDFIAGRAVAAMTRYRQQLLPPLFSALMKYSDIHEYSWAAPGHQGGVGFTKTPAGRFYHDYYGENLFRTDMGIERTSLGSLLDHTGAFGESEKYAARVFGADRSWSVVVGTSGSNRTIMQACMTDNDVVVVDRNCHKSIEQGLMLTGAKPVYMVPSRNRYGIIGPIYPQEMQPETLQKKISESPLTKDKAGQKPSYCVVTNCTYDGVCYNAKEAQDLLEKTSDRLHFDEAWYGYARFNPIYADHYAMRGEPSDHNGPTVFATHSTHKLLNALSQASYIHVREGRGAINFSRFNQAYMMHATTSPLYAICASNDVAVSMMDGNSGLSLTQEVIDEAVDFRQAMARLYKEFTADGSWFFKPWNKEVVTDPQTGKTYDFADAPTKLLTTVQDYWVMHPGESWHGFKDIPDNWSMLDPIKVSILAPGMGEDGELEETGVPAALVTAWLGRHGIVPTRTTDFQIMFLFSMGVTRGKWGTLVNTLCSFKRHYDANTPLAQVMPELVEQYPDTYANMGIHDLGDTMFAWLKENNPGARLNEAYSGLPVAEITPREAYNAIVDNNVELVSIENLPGRIAANSVIPYPPGIPMLLSGENFGDKNSPQVSYLRSLQSWDHHFPGFEHETEGTEIIDGIYHVMCVKA

SEQ ID NO: 1883 - DNA, 1380 bp, Listeria monocytogenes
  CDS (1)..(1380)
atgaggaatcaatctaaaatgcctttagtggaacggttagatgctcatgctaagtcttgcccaatatcactccatgtgccaggacacaaaagcggagccatttatccagatgcatggcaaaaatttttgaaatgggacgtaacagaaattactggaatggatgatttgcatcacccagaagatgtgattttggaagcagaggagttacttgcggaatgttatggaagcaaaaaaagctactttttagtcaatgggacaagcggaggaagcttggcagttattatggcgacgttgaagcacggggagaaagttttagtgccaagagatgcgcataaatcaatcttgcatggaatcgaactggcaggcggagaaccgattttcttaaccccagcgacaaacaaagaagttggcgtcgcgagtggcgtgacaaccgaacttctcgaagaaacattacataatcacccagatataaaactatgtattttcacttatccgagctattatggaacgacttttaacttgcataaatgtattcaaattgcgcatgattttggtgcggttgtgtttgttgatgaagcgcacggagcacattttttaacaagttctgaatttccgaaaagtgcagtggagcttggtgcggatgtggttgttcagtcggcgcataagacgttgccggcgctaacgatgggttcctatttacatgtggtgaatgatttaccgatttttgaaaaactaccttattacctgcaagtattccaaacgagcagcccatcttatttaattatggcgtcacttgatgcggcgaggaaatatgcggcaacttacacagcggcggacgtcgaagctttttggaaaatgcgtgccagatggattaaatggctgacgaagaataaatttgacgttattttgccagatgatccgcttaaaatcatcgtgcgcaaaacaggctacacgggctacgaactgcaagcaatttttgaagaaagctcttatttcccagagcttgccgatgagtcacaggtattactgattttaccattaattaaaaaagggattgatttcacgcctattagccggattcattctccggtgaaaaaagaaatcgcgaaagaaccatatgaaatgtcagcgccttttgcgtcaggtcttgcgctaacttatgaagaaatgcacgcacgcgcgaccgaattcgtattactagatgaagctacgacacgcgtttcggctgaaacaatctcgctctatccgccgggaattccagcaatcatccgcggagaaagcatcacagaaaagcatattcgcgaactaaaaaacattcgcacacgccactaccaaggcggcgaaaaactagccgagaattacatccgtgtattccgctaa

SEQ ID NO: 1884 - protein, 459 aa, Listeria monocytogenes
MRNQSKMPLVERLDAHAKSCPISLHVPGHKSGAIYPDAWQKFLKWDVTEITGMDDLHHPEDVILEAEELLAECYGSKKSYFLVNGTSGGSLAVIMATLKHGEKVLVPRDAHKSILHGIELAGGEPIFLTPATNKEVGVASGVTTELLEETLHNHPDIKLCIFTYPSYYGTTFNLHKCIQIAHDFGAVVFVDEAHGAHFLTSSEFPKSAVELGADVVVQSAHKTLPALTMGSYLHVVNDLPIFEKLPYYLQVFQTSSPSYLIMASLDAARKYAATYTAADVEAFWKMRARWIKWLTKNKFDVILPDDPLKIIVRKTGYTGYELQAIFEESSYFPELADESQVLLILPLIKKGIDFTPISRIHSPVKKEIAKEPYEMSAPFASGLALTYEEMHARATEFVLLDEATTRVSAETISLYPPGIPAIIRGESITEKHIRELKNIRTRHYQGGEKLAENYIRVFR

SEQ ID NO: 1885 - DNA, 1482 bp, Bacillus cereus
  CDS (1)..(1482)
atgtatagattgtcccaatacgaaacaccattgtttaccgctttagttgagcacagtaagcgaaatccaattcaattccatattccagggcataaaaaaggacagggcatggatcctgaatttcgcgaatttattgggcataatgcattagcaattgatttaattaatattgcgccgctcgatgatttacatcatccaaaaggtatgattaaagaagcacaggatttagcagccgctgcatttggtgcggatcatactttcttttctattcaaggtacaagtggcgcaattatgacaatggtgatgagcgtttgcggtcctggtgacaaaatactagtaccacgaaacgtgcataaatcagtaatgtcagctattattttctcaggtgcaaaacctattttcatgcatcctgaaattgatccaaaacttggtatttcacatggaatcacaattcaatctgtcaaaaaggcacttgaagagcactcagatgcgaaaggcctacttgttattaacccaacatactttggctttgctgcggacttagaacagattgtacaattagcacattcttacgatatccctgtactcgttgatgaggctcatggtgttcatattcattttcacgatgaactgccgatgtcagcgatgcaagccggtgcagatatggcagcaacaagtgttcacaaattaggtggatctttaacgcaaagttctattcttaatgtaaaagaaggccttgtgaacgtaaaacatgttcaatctattattagcatgcttacgactacatcaacgtcttacatcttgttagcctccctagatgttgctagaaaacgtcttgctacagaaggaacggcactcatagaacaaacaatacaattagcggaacaagttcgtgatgctataaatgatatcgaacatctttactgtccagggaaagaaatgctaggtacggatgctacttttaactatgatcctacaaagataattgtatctgtaaaagatttaggtattacaggccatcaggctgaagtatggcttagagagcaatataacattgaagtagagctctcagatttatacaacatactatgtcttgtcacttttggggatacagaaagtgagacaaatacacttattgcagcattacaagatttatcagcaacatttaaaaataaagctgataaaggtgttcaagtgcaagtagaaattccagaaatacctgttttagcactttctcctcgagatgctttttattcggaaacagaagtcatcccatttgaaaatgcagcaggtcgtattatagctgatttcgttatggtttatccgccagggattccaatctttactccgggggaaattattacacaagataacttagagtatattcgtaaaaacttagaagcaggtttacctgtacaaggtcctgaagatatgacattacaaacattacgcgtgattaaagagtacaagcctatcagttga

SEQ ID NO: 1886 - protein, 493 aa, Bacillus cereus
MYRLSQYETPLFTALVEHSKRNPIQFHIPGHKKGQGMDPEFREFIGHNALAIDLINIAPLDDLHHPKGMIKEAQDLAAAAFGADHTFFSIQGTSGAIMTMVMSVCGPGDKILVPRNVHKSVMSAIIFSGAKPIFMHPEIDPKLGISHGITIQSVKKALEEHSDAKGLLVINPTYFGFAADLEQIVQLAHSYDIPVLVDEAHGVHIHFHDELPMSAMQAGADMAATSVHKLGGSLTQSSILNVKEGLVNVKHVQSIISMLTTTSTSYILLASLDVARKRLATEGTALIEQTIQLAEQVRDAINDIEHLYCPGKEMLGTDATFNYDPTKIIVSVKDLGITGHQAEVWLREQYNIEVELSDLYNILCLVTFGDTESETNTLIAALQDLSATFKNKADKGVQVQVEIPEIPVLALSPRDAFYSETEVIPFENAAGRIIADFVMVYPPGIPIFTPGEIITQDNLEYIRKNLEAGLPVQGPEDMTLQTLRVIKEYKPIS

SEQ ID NO: 1887 - DNA, 1422 bp, Bacillus cereus
  CDS (1)..(1422)
atgaatcaaaatcgcatacctttatatgaagcattaatagagtttaaagaaagaaggccgttatcttttcatgttccaggtcataaaaatggtttaaacttccctcaaggggcagtagaggagtttaaagatatactatctatcgatgtaactgagttatcagggttagatgatttacatagtccgtttgaatgtatagatgaggcacaacaattattagctgatgtatatgaagtggaaaaaagttattttttaattaatggttcaacagtcgggaacttagcaatgattttgtcttgctgtagggaacatgatattgttcttgtacaaagaaattgtcataaatcaattattaatggtttaaaattagcaggagcaaatccaatttttttagattcatggattgatgaagcttataacgtacccgtgggaattcatgatgagattattaaggaagcaattgaaaaatacccaaatgcgaaagcacttattttaacacatcctaattattatggtatggggatggatttagaggcaagcattgcttatgcacatgcacataaaattcctgtgttagtagatgaagcgcatggagctcatttttgtttaggcggggcatttccaaagtcagctttagcatatggtgcagatattgtagttcattccgcacataaaacattacctgcgatgacgatgggatcctatttacatataaatagccgcttagtgaaagaagaaagagtttctacttatttaagtatgctacaatctagtagtccatcgtatccaattatggcttctcttgatattgcacgctttacgatagcgcgtataaaagaaaagggacatgatgaaattgtcgagtttttacgggagtttaaagaagaattgtcttctatcccacaaatagctattttacaatatccattacaagacgagctaaaagttaccgtacagacgcgttgtcagttatcaggatacgaattacagtctgtattagaaaaggttggtatatataccgaaatggcagatccatataatgtcttatttattttacctttgcaagtaaataagacgtatatgaaggctgtagagatgatccgggcggcattgcaatcttatgaggtgaaagacaagacggaatctattcgttatacttataaaggagaaatttctcctttaccgtatacatataaacaactggaaggatatgaaacaaaagtagtatctgtagaagaagcagttgggatgatagcggcggaaatggtaattccatatccacctggtattccattgattatgtatggggaaagaattacttcagaacataaagagcaaattatgcatttagagagagcaggcgcccgttttcaaggtagcacgaaatatatgaaagtgtatgatatagaaagtaggttttag

SEQ ID NO: 1888 - protein, 473 aa, Bacillus cereus
MNQNRIPLYEALIEFKERRPLSFHVPGHKNGLNFPQGAVEEFKDILSIDVTELSGLDDLHSPFECIDEAQQLLADVYEVEKSYFLINGSTVGNLAMILSCCREHDIVLVQRNCHKSIINGLKLAGANPIFLDSWIDEAYNVPVGIHDEIIKEAIEKYPNAKALILTHPNYYGMGMDLEASIAYAHAHKIPVLVDEAHGAHFCLGGAFPKSALAYGADIVVHSAHKTLPAMTMGSYLHINSRLVKEERVSTYLSMLQSSSPSYPIMASLDIARFTIARIKEKGHDEIVEFLREFKEELSSIPQIAILQYPLQDELKVTVQTRCQLSGYELQSVLEKVGIYTEMADPYNVLFILPLQVNKTYMKAVEMIRAALQSYEVKDKTESIRYTYKGEISPLPYTYKQLEGYETKVVSVEEAVGMIAAEMVIPYPPGIPLIMYGERITSEHKEQIMHLERAGARFQGSTKYMKVYDIESRF

SEQ ID NO: 1889 - DNA, 1458 bp, Mycobacterium paratuberculosis
  CDS (1)..(1458)
atggaccaatccgacgcacctttgctcaacgcgctggccgactatcgcgacaagaaccggtacgggttcgcgccgcccgggcaccggcagggccgcggcaccgacgatcgggtcctcgcggtgctgggccgcgagccctttctcgacgacgtgctggccagcggcgggctcgacgaccgtcgcgccagcaacggctacctgcagcgcgcggaggacctgatggccgaggccgtcggcgccgagatcgcctggttctccacctgcggcagctccctgtcggtgcgcgcggcgatgatggcggtggccggtgggcagggcagcctgctggtcggccgggacagccacaagtcgatcgtggcggggctgatcttctccggggtgcagccgcgctggatcactccccgctgggacgccgagcgccacttttctcatccgccctcgccgcagcaggtcgaagaggcctgggacaagcatcccgatgccgccggtgcgctggtcgtcagccccagcccgtacggcacctgcgccgacatcgccggcatcgccgaggtgtgtcatcggcggggcaagccgttgatcctcgacgaggcgtggggggcgcatctgccgttccacgaggacctgccaacctgggcgatggatgccggcgccgacgtgtgcgtggtcagcgtgcacaagatgggcgccggtttcgagcagggctcggtgttccacgtccagggcgacctcatcgaccgggaccgcctctcggcgtgcgcggatctgctgatgaccaccagccccaacgtcctgatctacgcggcgatggatggctggcgccggcagatggtgcagcacggtcaccaattgctcggcgctgcattggatttggcgcggcaggtgcgcgacgagatcgagctcattcccgatgtggaggtgctcgacgacgagctgctgggcgtgcaggcgtcccacgacctggaccgcatgcaggtgctgatcgacgtatgcggcaccggcacatcgggttatcaggccgccgactggctgcgcgagcacgcgcgcatcgacgtgggcatgagcgaccaccgccgcatcctggccaccttgtccatggccgacgacaaggagacgttgggtcgtctcaccgatgcgctgcgggcgtggcgcaccgcggcgcaggacttcgaccccgccccccggatcgcgctgccgtcgccgtccgaaatgcagttggagacggtcgaattgccacgcgacgcgtttttcggacgggtgcaggaggtgccgaccaaaaccgccgccggccggatcgccgccgaacagatcacgccctatcccccgggcatccccgccgtcgtccccggcgagcggctcaatgatgctgtgctggactacctttgctccggggtggccgcggggatgaacctgcccgacgcggccgatccgtcgctgcagaccatccgggtgctcgcctga

SEQ ID NO: 1890 - protein, 485 aa, Mycobacterium paratuberculosis
MDQSDAPLLNALADYRDKNRYGFAPPGHRQGRGTDDRVLAVLGREPFLDDVLASGGLDDRRASNGYLQRAEDLMAEAVGAEIAWFSTCGSSLSVRAAMMAVAGGQGSLLVGRDSHKSIVAGLIFSGVQPRWITPRWDAERHFSHPPSPQQVEEAWDKHPDAAGALVVSPSPYGTCADIAGIAEVCHRRGKPLILDEAWGAHLPFHEDLPTWAMDAGADVCVVSVHKMGAGFEQGSVFHVQGDLIDRDRLSACADLLMTTSPNVLIYAAMDGWRRQMVQHGHQLLGAALDLARQVRDEIELIPDVEVLDDELLGVQASHDLDRMQVLIDVCGTGTSGYQAADWLREHARIDVGMSDHRRILATLSMADDKETLGRLTDALRAWRTAAQDFDPAPRIALPSPSEMQLETVELPRDAFFGRVQEVPTKTAAGRIAAEQITPYPPGIPAVVPGERLNDAVLDYLCSGVAAGMNLPDAADPSLQTIRVLA

SEQ ID NO: 1891 - DNA, 2853 bp, Mycobacterium paratuberculosis
  CDS (1)..(2853)
atgatccgatacagcacccagccgcgacggctgcgggtgtccgcgctggcggccgtggccaacccgtcgtacgcccgggtggacacctggaacctgctcgacgacgcctgccggcacctcgccgaggtcgacctggccgggctggacaagacgcacgacgtggcccgggtgaagcgcctgctggaccgcatcgccgcctacgagcgctactggctgtaccccggcgcggagaacctggcgatcttccgcgcccacctggacagcctgtccacggtgcggctcaccgaggaggtctccctggcggtgcggctgttgagcgaatacggcgatcgcgcagggcttttcgacacgtcggcgccgctggacgaccaggagctggtggcccaggccaagcaacagcatttctacaccgtgctgctggccgacgacgcccccagcaccgcaccggacagcctggccgaatgcctgcgggcgctgcgcaacccgtccgacgacgtgcagttcgagatcctggtggtgcccagcgtcgaggacgccatcaccgcggtcgcgctgaacggggagatccaggccgcgatcatccgcgacgacctgccgctgcgctcccgcgaccggctgccgctgatgaacaccctgctcgggcccaacgaggacgcggacggcgtcatccccgaccgcgccaacgactgggtggagtgcggcgagtggatccgcgagctgcgcccgcacatcgacctgtatctgctcaccgacgaatcgatcgcggcgggcgacgacaccgaacccgacgtctacgaccgcaccttctaccggctcaacgacgtcaccgacctgcacagcacggtgctcgccgggctgcggaaccgttatgccacaccgtttttcgacgcgctgcgggcgtacgcggcggccccggtcggccagttccacgcgctgccggtggcgcgcggggccagcatcttcaactcccgctcgctgcaggacatgggggagttctacggccgcaacatcttcatggccgaaacctccaccacctccggcggcctggactcgctgctggacccgcacggcaacatcaagaaggcgatggacaaggcggccaagacctggaacgccgaccacacctacttcgtcaccaacggcacgtcgaccgccaacaagatcgtcgtgcagtcactgacccggcccggcgacatcgtgctgatcgaccgcaactgccacaagtcgcaccactacgggctggtgctggccggggcgtacccgctgtacctggacgcctatccgttgccgcagttcgcgatctacggggcggtgtcgctgcgcaccatcaagcagaccctgctggacctggaggcggccgggcagttgcaccgggtgcggatgctgctgctgaccaactgcaccttcgacggcgtggtctacaacccgctgcaggtcatgcaggaggtgctggcgatcaagccggacatctgctttttgtgggacgaggcgtggtacgcgttcgccaccgccgtgccgtgggccaggcagcgcaccgcgatggtggccgccgagcggctcgagcagatgctggcctcgccggattacgttgagcaataccggaaatgggccgcgtcgatgcagggcgtggaccgttcggagtggatcgagcgggagctgctgcccgaccccgccaccgcccgggtgcgggtctacgccacccattccacgcacaagtcgctctcggcgctgcgccaggcgtcgatgatccacgtgcgggaccaggatttcaacgcgctcacccgcgacgcgttcggtgaggcgtttttgacccacacctcgacctcgcccaaccagcagctgctggcgtcgctggatctggcccgccgccaggtcgacatcgagggcttccagctggtccggcaggtctacgacatggcgctggtgttccggcaccgggtccgcaaggaccggttgatcagcaagtggttccgcatcctcgacgagtccgacctggtgcccgaggagttccgggcgtcgtcggtgagctcctaccgcgaggttcggcagggggcgctggccgagtggaacgaggcgtggcgctccgaccagttcgtgctggacgccacccgggtcaccctgttcgtcggcgccaccggcatgaacgggtacgacttccgggagaagatcctgatggaacgcttcggcatccagatcaacaagacctcgatcaacagcgtgctgctgatcttcaccatcggcgtcacctggtccagcgtccactatctgctcgacgtgttacgaagggtggcaacggatttcgatcgcatccagaaggaggccagtgccgccgaccgggcgctgcaacgacgccacgtcgaggagatcaccgaggaccttccgcacctgcccgacttcagcgaatttgacgtcgccttccggccggtcgacgaatgcaacttcggcgacatgcggtcggcgttctacgccgggtacgaggagtccgaccgcgagcacgtgctgatcggcacggccgggcggcggctggccgagggcaagaacctggtgtcgaccaccttcgtggtgccctacccgccgggtttcccggtgctggtgcccggccaggtggtgtccaaggagatcgtctacttcctggcccagctcgacgtgaaggaaatccacggctacaacccggatttggggctgtcggtgttcaccgacaccgcgctggcgcggatggaggcgcagcgcaacgccgcgaccgccgcggtgggttcggtgaccgcggccttcgagttgcccgcggacgcctccggcggcaacggggcgcacaacggcgccggcgcggtgccgtcggtcgccgacggcggctga

SEQ ID NO: 1892 - protein, 950 aa, Mycobacterium paratuberculosis
MIRYSTQPRRLRVSALAAVANPSYARVDTWNLLDDACRHLAEVDLAGLDKTHDVARVKRLLDRIAAYERYWLYPGAENLAIFRAHLDSLSTVRLTEEVSLAVRLLSEYGDRAGLFDTSAPLDDQELVAQAKQQHFYTVLLADDAPSTAPDSLAECLRALRNPSDDVQFEILVVPSVEDAITAVALNGEIQAAIIRDDLPLRSRDRLPLMNTLLGPNEDADGVIPDRANDWVECGEWIRELRPHIDLYLLTDESIAAGDDTEPDVYDRTFYRLNDVTDLHSTVLAGLRNRYATPFFDALRAYAAAPVGQFHALPVARGASIFNSRSLQDMGEFYGRNIFMAETSTTSGGLDSLLDPHGNIKKAMDKAAKTWNADHTYFVTNGTSTANKIVVQSLTRPGDIVLIDRNCHKSHHYGLVLAGAYPLYLDAYPLPQFAIYGAVSLRTIKQTLLDLEAAGQLHRVRMLLLTNCTFDGVVYNPLQVMQEVLAIKPDICFLWDEAWYAFATAVPWARQRTAMVAAERLEQMLASPDYVEQYRKWAASMQGVDRSEWIERELLPDPATARVRVYATHSTHKSLSALRQASMIHVRDQDFNALTRDAFGEAFLTHTSTSPNQQLLASLDLARRQVDIEGFQLVRQVYDMALVFRHRVRKDRLISKWFRILDESDLVPEEFRASSVSSYREVRQGALAEWNEAWRSDQFVLDATRVTLFVGATGMNGYDFREKILMERFGIQINKTSINSVLLIFTIGVTWSSVHYLLDVLRRVATDFDRIQKEASAADRALQRRHVEEITEDLPHLPDFSEFDVAFRPVDECNFGDMRSAFYAGYEESDREHVLIGTAGRRLAEGKNLVSTTFVVPYPPGFPVLVPGQVVSKEIVYFLAQLDVKEIHGYNPDLGLSVFTDTALARMEAQRNAATAAVGSVTAAFELPADASGGNGAHNGAGAVPSVADGG

SEQ ID NO: 1893 - DNA, 2100 bp, Lactobacillus johnsonii
  CDS (1)..(2100)
atgaattttctaaaaattgcattaagcaatcaacttaaaaataatgattttaattcatggcaaactactaatttgaacgatgaaactcaagctagtgaacttgccgctattgttgtagcagagactgataaaagtagtcttaaaactgctcaagatttacaaaaaaaatcagggcttggaattcctattattaaagtttcacatgaaacaatttctaataatgaaaaaaatcaaataattgatgccgcaaatcaatacacagcagaaatggttcctggctttttaactgatttggtcaatttcgcagaagatcgtccaattagttttacgacaccaggtcatcataatggcttatattacgaaaaacatccggcgggggtagtatttaatcgcttctttggtaaaaacctcatgtttgcggataccagtgatacagtaccagaattaggcgatactatgacccacgaagggacgcctttaactgctgagcaaaaagctgccgaaacttatcatgctgataaagtttatttctgtactaatggaacaacgagtgcaaattcaatttgtgcaagtgcactattaactaaagatgacctagttctttttgatcgaaataatcataaatccctctataacagtgccttagtaatgactggtgccaaacctgtatatattccaactgatcgtaatgcacttggattaattggagaaatggatcctgactttttaaatgaagaaaaaattcgagctgaaattgctaaagttgaccctgaaaaagctaaagctaagcgtccatttagactagctatcattcaatcagaaacatatgatggtcttttttacgacgcgaagtggatgattgataaaattggtaaactatgcgattacattctttttgattgtgcttggggtggattcgaacagtttgttccaattatgaatcacctgtctcccctcaacttagactttgggtcagaagatccgggtattttagtaactcaatcacttcataaacaacaagccggaatgggccaagcctcacaaattttgaaaaaggatgctcatattaaaggtcagaaacgttacgttgatcataagcactttaaccacgcttatcttaaatttgttacctcaagttactcttatccactttatgcctcactcaccgttaactcatatttaaccagcggtgagggtaataaaaaatggtgggaccaaatcttacgcttaggaattgaatggcggaaagaattaattaaaaaatcaaaattatttaagccactagtaattgataattttgaaaatattagtactgatgagttagctacaaatgaaaagtactggaatttagattccactaatctgtggcatggatttagcaaaattgcgtctggtcaggccatgatcgatcctctaaaaattactgttgtaactcccggaattgatgttaaaaatgcaaaatatgaagaaataggtattcctggaccagttgttgcagaatttttaatggagaagcggattattcgtgcaaaagatgacctatattctcttcttttcttattaacgccgggagatactaaggctgaattagatatcttgctgaatgcattcttagaatttgaacaatattataacgaggatgcacctctagacaaagtgctccctaagctaactaaagtatacggcgatcgctacaaaggttataccttaaaacagctctgccaagaaatgcatgaatattaccggggaaataatacctttaccctccagcaagaattatttgcgaaaccagatatgcaaaattatcaaatgactcccgagcatgctgactatctctttatgaaaaatgaaagtgaattagttaacttagaagatgttaaaggtcgcattgctgctgaaggtgccttaccttacccaccaggcgtgttcattgttgcgcccggcgaaaaatggagcgatattgatcaaaaatattttgaagttttagtaggtgctatcgagcgtttcccaggctttgtacctgaaattcagggagtctactgggatcaaaaatcagatggtaaaataagagtacaagcagaagtattaaaggagaattag

SEQ ID NO: 1894 - protein, 699 aa, Lactobacillus johnsonii
MNFLKIALSNQLKNNDFNSWQTTNLNDETQASELAAIVVAETDKSSLKTAQDLQKKSGLGIPIIKVSHETISNNEKNQIIDAANQYTAEMVPGFLTDLVNFAEDRPISFTTPGHHNGLYYEKHPAGVVFNRFFGKNLMFADTSDTVPELGDTMTHEGTPLTAEQKAAETYHADKVYFCTNGTTSANSICASALLTKDDLVLFDRNNHKSLYNSALVMTGAKPVYIPTDRNALGLIGEMDPDFLNEEKIRAEIAKVDPEKAKAKRPFRLAIIQSETYDGLFYDAKWMIDKIGKLCDYILFDCAWGGFEQFVPIMNHLSPLNLDFGSEDPGILVTQSLHKQQAGMGQASQILKKDAHIKGQKRYVDHKHFNHAYLKFVTSSYSYPLYASLTVNSYLTSGEGNKKWWDQILRLGIEWRKELIKKSKLFKPLVIDNFENISTDELATNEKYWNLDSTNLWHGFSKIASGQAMIDPLKITVVTPGIDVKNAKYEEIGIPGPVVAEFLMEKRIIRAKDDLYSLLFLLTPGDTKAELDILLNAFLEFEQYYNEDAPLDKVLPKLTKVYGDRYKGYTLKQLCQEMHEYYRGNNTFTLQQELFAKPDMQNYQMTPEHADYLFMKNESELVNLEDVKGRIAAEGALPYPPGVFIVAPGEKWSDIDQKYFEVLVGAIERFPGFVPEIQGVYWDQKSDGKIRVQAEVLKEN

SEQ ID NO: 1895 - DNA, 3625 bp, Vibrio parahaemolyticus
  CDS (1451)..(3625)
gacttgagtagaatagatttggagatgttatgtcatcgaatacgaaaaaaatcggcctaattgcctgtacgggtgtagtcgccggtaacatgatgggtagtggtattgcactgttaccttccagcctagcttcagtaggctctgtttcaattttcagctggctgatctgtttgatcggtgcactgagccttgcgtttgtttacgctcgtctggcaaccaaaaaccctcaagaaggtggtcctatcgcttatgcgggcgaagtttccccagtctttggtttccaaacgggcgtgctttattaccacgcgaactggattggtaacctagctattgctattacaggtgtttcttacctttcagtattcttccctgtgcttaatgacccaatcccagcgggtattgcgacgattgcatcggtatggatcttcactttcgtcaacctacttggtggtagctgggtaagccgtctatgtacgcttggtcttgttctaattctaattccagttgttggtaccgctctatttggttggacgcacttcgacactgcgctatacagccaaaactggaacgtatctgcgggtactgatagccatgcgattgtgactgcggttcttatctgtctatggtcattcgttggtgtggaatcagctgcagtatcgacaggtatggtagaaaaccctaaacgtactgtaccgctagcaaccatgctgggtactggtattgcaggtgtgatttacatcctatcaactcaaatgatcagcggcatgttccctgcttctgaagttgcggcatcaggtgcgccatttgcattggctaccactgagctattcggtagctggactgcaccattcgtatcagcattcactgcactagcatgttttacttcgctaggttcttggatgatgctggtgggcgaagctggtaaacgtgcagcaagcgatggcaacttccctaaaatctacggcgaaactgacaaaaacggtgtgcctaagaaaggtctaatccttgcgtcaatcaagatgacagcattaatggttgtactgatgttcttcagctctaaaacagcacatgcatcagacctgttcaaccaactaacgactgatgcagttctactaactatgctgccttacttctactcaagcattaacttgattcgcttcgaaggtatgacaacacgcaacggcttcgtaatgctgttctctggtgtagcttgtttgttctgcttcattgcccttgctggtgcagaaggcggtacgctaacagcaaccttcatcgtgtctctcgttatcttgatgttctacagcaaaaaagccggcttagctcagtacatgaagctacacgctgacgacatgcctgctcaagcaagcaactaatccccaaacgctggcacttcggtgccagccaataaaaaacaaattcactcggcgctcaccttactcactgcctgtaaatggcagagagcgccttcattcgccttggagatgtccaaatgaatattttcgctatcttgaaccacatgggtgtgttctttaaagaagagccagttcgtcaacttcacgctgctcttgagaaagcgggctacgaagtggtttacccagtagatgataaagacttgatcaaaatgattgagatgaacccgcgcatttgcggtgtgctgttcgactgggataaatactcactagagctatgtgaacgtattagccaaatcaacgaaaaactgcctgttcacgcatttgctaacgaacagtctactctcgatatttcactaacagacctacgtctgaacgtgagcttcttcgagtacgctttaggtatggctgacgacatcgctatcaaaatcaaccaagcgacagaggcatacaaagatgccatcatgcctccattcactaaagcgctattcaaatacgtagaagaaggtaaatacaccttctgtactccaggtcacatgggcggtactgcattccagaaaagccctgctggtagcatcttctatgatttttacggtccaaatacattcaaagcggacgtatcaatctcaatgcctgagctaggttctctactagaccactcaggtccacataaagatgcagaagaatacatcgcacgtacattcaatgcagacagctcgtacatcgtaactaacggtacgtctacatcgaacaaaatcgttggtatgtactcagcacctgcgggcagcacagtactgattgaccgtaactgtcacaaatctctgactcacctaatgatgatgagcgacgtgacaccaatctacttccgtccaactcgtaacgcatacggcatccttggtggtattccacaaagcgaattcagccgtgatgtcattgcagagaaagtggcgaaaacaccaggtgcaacagcgccaagttacgcagtagtgactaactcaacttacgatggtctgttgtacaacacacaattcatcaaagagtcgctagactgtaaacacatccacttcgacagtgcttgggtgccttacactaacttcaacccaatttacgaaggtaaatgtggtatgagtggtgaagcgatgccaggcaaagtgttctacgagacacaatcaacacacaaactgttggcagcgttctcacaagcttcaatgattcacgtgaaaggtgactttgatagagagtctttcaacgaagcattcatgatgcacacttcaacttcacctcagtacggcattgttgcttctactgaaactgcagcggcaatgatgcgcggcaacactggtaagaagttgacgcaagactctatcgatcgcgcaattcgcttccgtaaagagatcaaacgcctagaagcagaaagtgacagctggttcttcgatgtatggcaaccagaaaacatcgataccacagaatgttggaaactagaccctagcgatacatggcacggcttcaagaacatggatgacaaccacatgtatcttgacccaatcaaagtcacgctactgactccggggatgaataaagaaggcgaactagaagaatcaggtattcctgcttcgctggtggctaaattcctagacgagcgcggcatcgtggtagagaaaacaggtccatacaacttgttgttcctattctcaattggtatcgacaaatcaaaagcaatgcaattgctacgcggtctgactgaatttaaacgtggctacgacttaaacctaaccatcaagagcttcctaccttcgctatataacgaagatccaagcttctatgaaggcatgcgcgttcaagaattggcacaagcaattcataacctaactaagaaatacaacctaccagagctaatgtacaaagcgttcgatgttcttccagaaatgaaagtaacaccacacgcagcatggcaagaagagcttcgcggtaacgtagaagaaatcaaactggaagaaatggttggtcgcgtaagtgcgaacatgatccttccctaccttccatatgtgccactagtacttcctggtgaaatggtgactcaagagtctcgccctgtgctggacttcctagagatgctttgtgagatcggggcgcattacccaggtttcgaaaccgatatccacggtctgtaccaacaaaaagatggtagctacaccgtaaaagtattgaagaactaa

SEQ ID NO: 1896 - protein, 724 aa, Vibrio parahaemolyticus
MAESAFIRLGDVQMNIFAILNHMGVFFKEEPVRQLHAALEKAGYEVVYPVDDKDLIKMIEMNPRICGVLFDWDKYSLELCERISQINEKLPVHAFANEQSTLDISLTDLRLNVSFFEYALGMADDIAIKINQATEAYKDAIMPPFTKALFKYVEEGKYTFCTPGHMGGTAFQKSPAGSIFYDFYGPNTFKADVSISMPELGSLLDHSGPHKDAEEYIARTFNADSSYIVTNGTSTSNKIVGMYSAPAGSTVLIDRNCHKSLTHLMMMSDVTPIYFRPTRNAYGILGGIPQSEFSRDVIAEKVAKTPGATAPSYAVVTNSTYDGLLYNTQFIKESLDCKHIHFDSAWVPYTNFNPIYEGKCGMSGEAMPGKVFYETQSTHKLLAAFSQASMIHVKGDFDRESFNEAFMMHTSTSPQYGIVASTETAAAMMRGNTGKKLTQDSIDRAIRFRKEIKRLEAESDSWFFDVWQPENIDTTECWKLDPSDTWHGFKNMDDNHMYLDPIKVTLLTPGMNKEGELEESGIPASLVAKFLDERGIVVEKTGPYNLLFLFSIGIDKSKAMQLLRGLTEFKRGYDLNLTIKSFLPSLYNEDPSFYEGMRVQELAQAIHNLTKKYNLPELMYKAFDVLPEMKVTPHAAWQEELRGNVEEIKLEEMVGRVSANMILPYLPYVPLVLPGEMVTQESRPVLDFLEMLCEIGAHYPGFETDIHGLYQQKDGSYTVKVLKN

SEQ ID NO: 1897 - DNA, 2142 bp, Shigella flexneri
  CDS (1)..(2142)
atgaacatcattgccattatgggaccgcatggcgtcttttataaagatgagcccatcaaagaactggagtcggcgctggtggcgcaaggctttcagattatctggccacaaaacagcgttgatttgctgaaatttatcgaacataaccctcgaatttgcggcgtgatttttgactgggatgagtacagtctcgatttatgcagcgatatcaatcaacttaatgaatatctcccgctttatgccttcatcaacacccactcgacgatggatgtcagcgtgcaggatatgcggatggcgctctggttttttgaatatgcgctggggcaggcggaagatatcgccattcgtatgcgtcagtacaccaacgaatatcttgataacattacgccgccgttcacgaaagccttgtttacctacgtcaaagagcggaagtacaccttttgtacgccggggcatatgggcggcaccgcatatcaaaaaagcccggttggctgtctgttttatgattttttcggcgggaatacccttaaggctgatgtctctatttcggtcaccgagcttggttcgttgcttgaccacaccgggccacacctggaagcggaagagtacatcgcgcggacttttggcgcggaacagagttatatcgttaccaacggaatatcgacgtcgaacaaaattgtgggtatgtacgccgcgccatccggcagtacgctgttgatcgaccgcaactgccataaatcactggcgcatctgttgatgatgaacgatgtagtgccagtctggctgaaaccgacgcgtaatgcgttggggattctgggggggatcccgcgccgtgaatttactcgcgacagcatcgaagagaaagtcgctgccactacgcaagcacaatggccggttcatgcggtgatcaccaactccacctatgatggtttgctctacaacaccgactggatcaaacagacgctggatgtcccgtcgatccacttcgattccgcctgggtgccgtatactcattttcatccaatctaccagggtaaaagtggtatgagcggcgagcgtgttgcgggaaaagttttcttcgaaacgcaatcgacccacaaaatgctggcggcgttatcgcaggcttcactgatccacattaaaggcgagtatgacgaagaggcgtttaacgaagcctttatgatgcataccaccacctcgcccagttatcccattgttgcttcggttaagacggcggcggcgatgctgcgtggtaatccgggcaaacggctgattaaccgttcggtggagcgggcgctgcattttcgcaaagaggtccagcggctgcgggaagagtctgacggttggtttttcgatatctggcaaccgccgcaggtggatgaagccgaatgcaggcccgttgcgcctggcgaacaatggcacggctttaacgatgcggatgccgatcatatgtttctcgatccggttaaagtcactattttgacaccggggatggacgaacagggcaatatgagtgaggaggggatcccggcggcgctggtagcaaaattcctcgacgaacgtgggatcgtagtagagaaaaccggcccttataacctgctgtttctctttagtattggcatcgataaaaccaaagcaatgggattattgcgtgggttgacggaatttaagcgctcttacgatctcaacctgcggatcaaaaatatgctgcccgatctctatgctgaagatcccgatttctaccgcaatatgcgtattcaggatctggcgcaagggatccataagctgattcgtaaacacgatctttccggtttgatgttgcgggcattcgatactttgccggaaatgatcatgacgccacatcaggcatggcagagacagattaaaggtgaagtagaaaccattgcgctggaacaactggtcggtagagtatcggcaaatatgatcctgccttatccaccgggcgtaccgctgttgatgccaggagaaatgctgaccaaagagagccgcacggtactcgattttctactgatgctttgttccgtagggcaacattaccccggttttgaaacggatattcacggcgcgaaacaggacgaagacggcgtttaccgcgtacgagtcctaaaaatggcgggataa

SEQ ID NO: 1898 - protein, 713 aa, Shigella flexneri
MNIIAIMGPHGVFYKDEPIKELESALVAQGFQIIWPQNSVDLLKFIEHNPRICGVIFDWDEYSLDLCSDINQLNEYLPLYAFINTHSTMDVSVQDMRMALWFFEYALGQAEDIAIRMRQYTNEYLDNITPPFTKALFTYVKERKYTFCTPGHMGGTAYQKSPVGCLFYDFFGGNTLKADVSISVTELGSLLDHTGPHLEAEEYIARTFGAEQSYIVTNGISTSNKIVGMYAAPSGSTLLIDRNCHKSLAHLLMMNDVVPVWLKPTRNALGILGGIPRREFTRDSIEEKVAATTQAQWPVHAVITNSTYDGLLYNTDWIKQTLDVPSIHFDSAWVPYTHFHPIYQGKSGMSGERVAGKVFFETQSTHKMLAALSQASLIHIKGEYDEEAFNEAFMMHTTTSPSYPIVASVKTAAAMLRGNPGKRLINRSVERALHFRKEVQRLREESDGWFFDIWQPPQVDEAECRPVAPGEQWHGFNDADADHMFLDPVKVTILTPGMDEQGNMSEEGIPAALVAKFLDERGIVVEKTGPYNLLFLFSIGIDKTKAMGLLRGLTEFKRSYDLNLRIKNMLPDLYAEDPDFYRNMRIQDLAQGIHKLIRKHDLSGLMLRAFDTLPEMIMTPHQAWQRQIKGEVETIALEQLVGRVSANMILPYPPGVPLLMPGEMLTKESRTVLDFLLMLCSVGQHYPGFETDIHGAKQDEDGVYRVRVLKMAG

SEQ ID NO: 1899 - DNA, 2181 bp, Vibrio vulnificus
  CDS (1)..(2181)
atgaagcgtttagttattggtgttagtaattacatgccagaagattttagtttattagctgaatctttagatgaacaatttaatcgtcatcttcatcctttagagcaagtagaattaaccgatgttggtgctgccattattacgtcggcagatattaaggctggtctacacaaagtgatttctgaaacgggttatggcattccggttttcttggtcacagatgaaaacccagtgtcagccgaagattacgtatggttaaccggcgttatcgatttagaaagacaatccattgaatactactgtcgccaaatcaatgaagcggtaaccaaatacgaatgccgcctattgccgcctttcttcaaacaactgacgcactacgtggaaatgggcaactctgcattcgactgtccaggacaccaaggcggtcagttcttcaaaaaacacccagcaggtaaacagttctacgatttcttcggtgaaaacctattccgtagtgacttgtgtaacgcggacgtagatttaggtgacttgttgatccacgaaggctctgcccaccaagctcaagcgcacgcagcaaaagtgttcaactcagacaaaacttacttcgtactcaacggcacttcggcttcaaacaaagtggtttgtaacgcgttagtgaccgagggtgacttggtgatgtttgaccgtaacaaccacaaatcaaaccaccacggcgcattaatccaagcgggcggtatgccagtttacctagaaacggcgcgtaacccttggggctttattggtggcatggatgagcactgttttgatgaagaatacatccgtgcccaaatcgccaaagtatcacccgaacgtgcgcgtgatgcgcgtccattccgtcttgcgatcatccaattgggtacttacgacggtaccatctacaacgcacgctacgtgatggataagattggtcatctatgtgactacatcctgtttgactcggcatgggtaggctacgagcagttcattcctatgatgaaagactgttcgccactgctactggatctgaaaccagaagatgcgggtgtgatcgtgactcagtctgttcacaagcagcaagcaggcttctctcaaacctcgcaaatccacaaaaaagaccaccacatcaaaggtcaggctcgctactgcaaccacaaacgcttcaacaacgcgtttatgatgcacgcgtcaacctcacctttctacgcactgttctccgcattggatgtgaacgcgaagatccacgatggtgaagcgggtctgcgcctatggcgtgatgcggttaagacaggtatcgaagcgcgtaaagaaatcctcaaaagttgtgagctgatccgtccgttcattccagaccaagttgatggtcaaccatggggcagctacgacacggatgtcatcgccaccaacaagaaattcttcatgtttgagccaaacgcaagctggcataaattcgaaggttacggcgaaggccaatacttcgttgacccatgtaaattgctactcaccacagccggtattgccgaagatggtagctacgcagactttggtattcctgccacgctattggcgaacttcctacgtgagaacggcatcatccctgagaagtgtgacttgaactctatcttgttccttcttactccagcagaggacatgggtaagatccgtcatcttgtggcgcaaattaaccgcttcgagaaattcattcgtgatgatgcgccgctaaacatcgtgctgcctcgcgtttacgaagcgaacaaagagcgctaccgtggctacaccattcgtcagctatgtcaggaaatgcatgacatgtacaaagagctgaacgtgaaacagctacaaaaagcgatgttccgtagcgagtacttcccaaccatggtgcacaaaccggatgtggcaacacgcaaatacttccgcggcgagtgtgattacttgccgctgaaagaagcggtcggtcgtgtcgctgcagaaggtgcgcttccttaccctccaggcattatctgtgtgatcacgggcgaaatctggactcaacaagtggtcgattacttcttatctctagaagaaggcatcaaccgattcccaggcttcgcaccagagattcaaggtgtgtacctagaagacgtcaatggccgcaccaccgcccattgctacgcccttaaagattaa

SEQ ID NO: 1900 - protein, 726 aa, Vibrio vulnificus
MKRLVIGVSNYMPEDFSLLAESLDEQFNRHLHPLEQVELTDVGAAIITSADIKAGLHKVISETGYGIPVFLVTDENPVSAEDYVWLTGVIDLERQSIEYYCRQINEAVTKYECRLLPPFFKQLTHYVEMGNSAFDCPGHQGGQFFKKHPAGKQFYDFFGENLFRSDLCNADVDLGDLLIHEGSAHQAQAHAAKVFNSDKTYFVLNGTSASNKVVCNALVTEGDLVMFDRNNHKSNHHGALIQAGGMPVYLETARNPWGFIGGMDEHCFDEEYIRAQIAKVSPERARDARPFRLAIIQLGTYDGTIYNARYVMDKIGHLCDYILFDSAWVGYEQFIPMMKDCSPLLLDLKPEDAGVIVTQSVHKQQAGFSQTSQIHKKDHHIKGQARYCNHKRFNNAFMMHASTSPFYALFSALDVNAKIHDGEAGLRLWRDAVKTGIEARKEILKSCELIRPFIPDQVDGQPWGSYDTDVIATNKKFFMFEPNASWHKFEGYGEGQYFVDPCKLLLTTAGIAEDGSYADFGIPATLLANFLRENGIIPEKCDLNSILFLLTPAEDMGKIRHLVAQINRFEKFIRDDAPLNIVLPRVYEANKERYRGYTIRQLCQEMHDMYKELNVKQLQKAMFRSEYFPTMVHKPDVATRKYFRGECDYLPLKEAVGRVAAEGALPYPPGIICVITGEIWTQQVVDYFLSLEEGINRFPGFAPEIQGVYLEDVNGRTTAHCYALKD

SEQ ID NO: 1901 - DNA, 2307 bp, Photorhabdus luminescens
  CDS (1)..(2307)
atgattaatttagacattaacgaacaaaacaaaattatggtcgtcagcagccatgtatttagaccgacgacggcgaatggtcgagcctttaccgagttaatagaagcattaaaaaagaacaatttcgctgttatcctggcggctacattccaagatggcatagctaccgtttcttctgattcctcactatgctgtatttttgttgattggacttcaggagataataactatgaatctcataaacaagtgttagaattactgaaagagatacgcaaacacaatacaaccattccggtattgttgaccgcggaatattccagcatcgacacactgacacttgaagtcatgggattggcagatgaatttgtctggatgcttgaagacacggctggatttatcgcctctcgcgccagttcgctaattaagaaatattatgcgcaattattaccgcctttcactcgtgcattactgcaatacactcaagaatcaccagaatattcctggactgctcctggacatcaaggcggtgttgcactgactaagacagcggcaggaagagaattaattaatttctttggggaaaatttatttcgaagtgatattggaatagaaagaaaaatacttggctcactgctagatcatacaggtgcgattaaagaatcagaagaatatgccgcaacgatttttggtgcccatcaaagctattgcgtgcttaacggcacttcgggttctaaccgtattatcatgggtgccgttattggtgagaaagagattattatatgcgatcgcaattgccataaatcgattggacaaggtttaataatgactggggctttgcccgtatatcttattcctcaacgcaaccgctatggtattattggccccattcccagagatcaatttcaaccagaatatatccaacaactcattgatcaacacccattaaaagcgatcgcaatagacaataagcctgtttatgcggtcatcaccaactgtacttatgatggaatatgttatcacgcagaacaagcacaagatttactagcaaaaagtgttgatcaaattcattttgatgaagcctggtttgcttatgcgcgttttaatcctatgtataaacatcgttactcaatgcgtgatgacccaaatgattttgacaataatggcccgacaatatttgccactcaatccacgcataagatgttagcagcgctatcacaatcatcctatatccatatccgcaatggcaaaaaacccattgaacattcccgtttcaacgagtcttatatgatgcactccacaacttcaccgctatattcgcttatcgccactaatgaaattgcagcggccatgatggatggcccacaggggcaaagactgatacaaaacgctatcaatgaagccgtagacttccgtctgacattagcaaaaacccatcatcaatttaaacaaaaagatgattggtttttcttaccctggaatgccagagagattattagcgcagatagcggtaaattaattcccttccatgaagcaaacagagaacaattagcaacggatccttcctgttgggtattaaaagagggagaaaaatggcatggatttaccaatctatcagcagaatggtgcctgctagatccaacaaaagttggtattttatgcccaggaatgaatgataatgatgaattgctggaaaatggcattccagccgaaattctttccgcttatctcagccagcatgacattgtgccggcgcgtaccaccgattttattgttctttgcctgttttctatcggcgtcaccaaaggtaaatggggaacattaatcaatgtattgttgaatttcaagaaacactatgacgctaatacttcacttaaacaatgtttgccaaaactcgcgaagcaataccctgaatattatgaaaacatggggctcaaagatatttcggataaaatatttgggtatataaaagaatatgaaatggatattgagcaaaagaaatcatttagccaattacctgagatagtgaaactcccccgacaagcacaccttgatcatatggcaggccgtactgaacatttaccacttaatgaactcgccgggcgcatatcggctgtaagtgtcattccttatccaccaggtataccaataatcctaccgggagaacgttttggtgatgaacatgccccccggttacaatatattcgccaactcggtgaatggaataacaagttccccggctttgaaaaaatcctggaaggcgcagagatgataaacggcgagtaccatatatgggtactaaaagagtga

SEQ ID NO: 1902 - protein, 768 aa, Photorhabdus luminescens
MINLDINEQNKIMVVSSHVFRPTTANGRAFTELIEALKKNNFAVILAATFQDGIATVSSDSSLCCIFVDWTSGDNNYESHKQVLELLKEIRKHNTTIPVLLTAEYSSIDTLTLEVMGLADEFVWMLEDTAGFIASRASSLIKKYYAQLLPPFTRALLQYTQESPEYSWTAPGHQGGVALTKTAAGRELINFFGENLFRSDIGIERKILGSLLDHTGAIKESEEYAATIFGAHQSYCVLNGTSGSNRIIMGAVIGEKEIIICDRNCHKSIGQGLIMTGALPVYLIPQRNRYGIIGPIPRDQFQPEYIQQLIDQHPLKAIAIDNKPVYAVITNCTYDGICYHAEQAQDLLAKSVDQIHFDEAWFAYARFNPMYKHRYSMRDDPNDFDNNGPTIFATQSTHKMLAALSQSSYIHIRNGKKPIEHSRFNESYMMHSTTSPLYSLIATNEIAAAMMDGPQGQRLIQNAINEAVDFRLTLAKTHHQFKQKDDWFFLPWNAREIISADSGKLIPFHEANREQLATDPSCWVLKEGEKWHGFTNLSAEWCLLDPTKVGILCPGMNDNDELLENGIPAEILSAYLSQHDIVPARTTDFIVLCLFSIGVTKGKWGTLINVLLNFKKHYDANTSLKQCLPKLAKQYPEYYENMGLKDISDKIFGYIKEYEMDIEQKKSFSQLPEIVKLPRQAHLDHMAGRTEHLPLNELAGRISAVSVIPYPPGIPIILPGERFGDEHAPRLQYIRQLGEWNNKFPGFEKILEGAEMINGEYHIWVLKE

SEQ ID NO: 1903 - DNA, 1404 bp, Gloeobacter violaceus
  CDS (1)..(1404)
atggaaaccactccgctctgggatgcgctgagggccgtcgctctagcctcgggcacgggctttcacaccccgggccacaacggcggggcgggcctgccgccagccctcaaacactggccggattggggccgtctggacctgaccgaacttgcaggactcgacaacctgcacgctcccaccggggtgatcgcccacgcgcaacggctcgcggcggcagtttggggagccgagcgcagttggtttctggtcaacggtgcgaccgccggaatccaggcgatgctgcttgcggcactcgggcaggggcagaaggtgctcgtgcccagaaactgtcaccaaagtatcgtgcacgccctggtgctgagcggcgcggtgccggtgttcgtccaacctgtatgggacaggcgctggcagttggcccacggactgacggcgacgacggtggaagccgccctggccgtccacccggacatccgggcggtggtggcggtgcacccgacgtacttcggggcggtgggcgagacgcgggccatcgccagggtcgcccacgcaaaagggattgcgctgttggtcgatgccgcccacggcgcccatctgcgcttccatccggacttgcccgagtgcgcactcgcagcgggagcggacttggtcgtccattccgcccacaagacactgcccgccctcacccaggcggcactccttcaccagcagggcaccctggtggacccggccagggtggagatggctctgaaccttctgcaaaccaccagcccgagctacttgctgatggcctcgctcgatctggcccgcgcccacatggtccgccacggccgcgagcagctcgggcacatcctggagatggcccatagactgcgacacaaactgcccttcgcggtgctcgggggcgacggaacgcctggcttcgatccgacccgcctggtcatcgacgtgggtgagaaaggctggagcggtcacgccgctgagacctggctggagcaaaacgcccaggtgcgtgcggagatggccacccaccgccacctggtcttcatcctcaatagcgcccacaccgaattcgacggcgagcaactgcaagcatcccttctggccctggcaacggcccaaccgaccggggcaacgccgccggatctgcttccaccgccgcttccggagctgcgctattcaccccgcgaagctttcggccgctcccaccggagcgttcccctagccgcggcagccggactgaccagtgcggccgatgtctgcacctacccgcccggagtgccggtgctgctgccgggggaagtggttgccgcccagagcgtcgagtatttgggcgccgccattgacactggggccgagacagtcgggatcgacgggcgcggacacatccgggtcactattgactaa

SEQ ID NO: 1904 - protein, 467 aa, Gloeobacter violaceus
METTPLWDALRAVALASGTGFHTPGHNGGAGLPPALKHWPDWGRLDLTELAGLDNLHAPTGVIAHAQRLAAAVWGAERSWFLVNGATAGIQAMLLAALGQGQKVLVPRNCHQSIVHALVLSGAVPVFVQPVWDRRWQLAHGLTATTVEAALAVHPDIRAVVAVHPTYFGAVGETRAIARVAHAKGIALLVDAAHGAHLRFHPDLPECALAAGADLVVHSAHKTLPALTQAALLHQQGTLVDPARVEMALNLLQTTSPSYLLMASLDLARAHMVRHGREQLGHILEMAHRLRHKLPFAVLGGDGTPGFDPTRLVIDVGEKGWSGHAAETWLEQNAQVRAEMATHRHLVFILNSAHTEFDGEQLQASLLALATAQPTGATPPDLLPPPLPELRYSPREAFGRSHRSVPLAAAAGLTSAADVCTYPPGVPVLLPGEVVAAQSVEYLGAAIDTGAETVGIDGRGHIRVTID

SEQ ID NO: 1905 - DNA, 2259 bp, Chromobacterium violaceum
  CDS (1)..(2259)
atgcgttttcacttccccatcgtgatcatcgacgaggacttccgctcggaaaacaccagcggctccggcattcgcgaactggccgccgccatggaggcggaaggcatgagcgtgatcggctacaccagctacggcgacctcacctccttcgcccagcagcaaagccgcgccgccggcttcatcctgtcgatagacgacgaggaattccagaccgaggacacggcgcaagaagcgctgggcaatctgtacggcttcgtcgccgaaatccgccgccgcaacccggacatcccggtctacctgtacggcgagacccgcaccgcccgccacatccccaacgacatcctgcgcgagctgcacggcttcatccacatgcacgaggacacgccggagttcgtcgcccgccacatcatccgcgaggccaagagctatctggacaagctggcgccgccgttcttccgcgcgctggtggactacgcctacgacggctcctactcctggcactgccccggccactccggcggcgtcgccttcctgaagagcccggtcggccagatgttccaccagttcttcggcgagaacatgctgcgcgccgacgtctgcaacgcggtggacgagctgggccagctgctggaccacaccggcccggtggcggcgtccgagcgcaacgcggcgcgcatcttcaatgccgaccacctgttcttcgtcaccaacggcacctccacctcgaacaagatcgtctggcacagctgcgtcgccgccggcgacatcgtgctggtggaccgcaactgccacaagtccaatctgcacgccatcatcatgaccggggccatcccggtgttcctgatgccgacgcgcaaccactacggcatcatcggcccgatcccgaagtccgagttccagccggacaatatcaagaagaagatcctggccaatccgttcgcgcgcgagatgctggaaaagcaccccaaccgcaagccgcgcatcctgacgctgacccagtccacctacgacggcatcctgtacaacgtcgaggagatcaagggcctgctggacggcgaggtggacacgctgcacttcgacgaagcctggctgccgcacgcctgcttccacgacttctaccgcgacttccacgccatcggcgaaggccggccccgctgcgaggacagcctggtgttctccacccagtccacccacaagctgttggccggcatcagccaggcctcgcagatcctggtgcaggatccgcagaaccggcagctcgacaccgcctggttcaacgaagcctacctgatgcacacctcgaccagcccgcaatactcgatcatcgccagctgcgacgtggccgccgcgatgatggagcagccgggcggccagtcgctggtggaagaatcgctggtggaggcgatggaattccgccgcgcgatgcgcaaggtggacgaggaatacggccgcgactggtggttcagcgtatggggcccggacgatctgtccgacgacggcatctgcgaccagaccgactggacgctgcgccccgacgagcgctggcacggcttcgccggcatcgaggacggcttcaacatgctggacccgatcaaggccaccgtgctgacgccgggcctggacgtggacggcagcttcgaggaaatgggcatcccggccgccatcgtcaccaagtatctgaccgaacacggcgtggtcgtcgagaaaaccggcctgtacagcttcttcatcatgttcaccatcggcatcaccaagggccgctggaacacgctgatctcgctgctgcagcagttcaaggacgatttcgacaagaaccagccgatgtggcgcgtgatgccggaattcgtcgccaagcatccgcagtacgagcgcgtcggcctgcaggacctgtgccagcgcatccacggcctgtacgccaagcacgacgtggcgcggctgaccaccgacatctacctgtccgacatggagccggcgatgcgcccggccgacgccttcgccaagatggcgcaccgcgagatcgagcgcgtgccggtggaccagctggaaggccgcgtcaccgcggtgctgctgaccccctacccgccgggcatcccgctgctgatcccgggcgagcgcttcaacaagaccatcgtcgactacctgcgcttcgcccaggccttcaaccgcgagctgccgggcttcgaaaccgacgtccacggcctggtggcggtggaggtgcaggaccgcaaggtgtactgcgtggactgcgtcaagcaataa

SEQ ID NO: 1906 - protein, 752 aa, Chromobacterium violaceum
MRFHFPIVIIDEDFRSENTSGSGIRELAAAMEAEGMSVIGYTSYGDLTSFAQQQSRAAGFILSIDDEEFQTEDTAQEALGNLYGFVAEIRRRNPDIPVYLYGETRTARHIPNDILRELHGFIHMHEDTPEFVARHIIREAKSYLDKLAPPFFRALVDYAYDGSYSWHCPGHSGGVAFLKSPVGQMFHQFFGENMLRADVCNAVDELGQLLDHTGPVAASERNAARIFNADHLFFVTNGTSTSNKIVWHSCVAAGDIVLVDRNCHKSNLHAIIMTGAIPVFLMPTRNHYGIIGPIPKSEFQPDNIKKKILANPFAREMLEKHPNRKPRILTLTQSTYDGILYNVEEIKGLLDGEVDTLHFDEAWLPHACFHDFYRDFHAIGEGRPRCEDSLVFSTQSTHKLLAGISQASQILVQDPQNRQLDTAWFNEAYLMHTSTSPQYSIIASCDVAAAMMEQPGGQSLVEESLVEAMEFRRAMRKVDEEYGRDWWFSVWGPDDLSDDGICDQTDWTLRPDERWHGFAGIEDGFNMLDPIKATVLTPGLDVDGSFEEMGIPAAIVTKYLTEHGVVVEKTGLYSFFIMFTIGITKGRWNTLISLLQQFKDDFDKNQPMWRVMPEFVAKHPQYERVGLQDLCQRIHGLYAKHDVARLTTDIYLSDMEPAMRPADAFAKMAHREIERVPVDQLEGRVTAVLLTPYPPGIPLLIPGERFNKTIVDYLRFAQAFNRELPGFETDVHGLVAVEVQDRKVYCVDCVKQ

SEQ ID NO: 1907 - DNA, 1251 bp, Chromobacterium violaceum
  CDS (1)..(1251)
atgatcttccagaccctgctggcgccgggcgacaagctgctgctggatcgcaactgtcacaaatcggtccaccacggcgtgatcctgtccggcgcgcggccggtatacctggactcgtcggtcaaccgccagtacgggattttcgggccggtgcccaagaccacgatttaccaggcgatagacgacaatccggacgcgcgagtgctgatcctcacctcctgcacctacgacggcctgcgctacgacctgaagcccatcatcgaggccgcgcacgagaagggcatcaaggtgatcgtcgacgaggcctggtacggcttcgcccgcttccaccccgcgttccggccgacggcgctggagtccggcgcggactacgtgacgcagagcacgcacaaggtgctgtcggcgttctcgcaggccagcatgatccacgtcaacgacccgcgcttcgacgagcatttgttccgagagaacttcaacatgcacgcgtccaccagccctcagtacagcctgatcgccagcctggacgtggcgcgcaagcaggcggtgatggagggctaccgcttgttggaccgcacgctgaagctggcgcaggagctgcgcgagaagatcaattccaccggcgccttccgcgtgctggagctggacgatctgctgccggaagaggtgagggaggacggcatcctgctggatccgaccaagctgaccgtggacttcagccgctccggcttcaccgccgacgaactgcagcaggcgctgttcgagcgttacaacattcaggtggagaagtcgacgttcagcaccatcacgctgctgctgaccatcggcaccacccgcagcaagctgtcccgactttacgacgcgatgctgaggctggccaaggagggccgtgcgccgcggccgctggggcgcatgccggagattccgcacttctcccggctggcctgcctgccgcgcgacgccttctacgaggccggcgagcgcctgccgctgctggacgacgacggccggccgaatccggcattgagcgggcgggtgtgctgcgaccagatcgtgccgtatccgcccggcatcccggtgctggtgccggggcaggtggtggacgacaccatcctggcctacctggcgcggctgcagaaaacgcagaagagcatcgagatgcacggcttggcggaggatggcggcgagttttacctgcgggtgctgaagccgcaggagctggcggaattgcccggccgcagtttgttcaattga

SEQ ID NO: 1908 - protein, 416 aa, Chromobacterium violaceum
MIFQTLLAPGDKLLLDRNCHKSVHHGVILSGARPVYLDSSVNRQYGIFGPVPKTTIYQAIDDNPDARVLILTSCTYDGLRYDLKPIIEAAHEKGIKVIVDEAWYGFARFHPAFRPTALESGADYVTQSTHKVLSAFSQASMIHVNDPRFDEHLFRENFNMHASTSPQYSLIASLDVARKQAVMEGYRLLDRTLKLAQELREKINSTGAFRVLELDDLLPEEVREDGILLDPTKLTVDFSRSGFTADELQQALFERYNIQVEKSTFSTITLLLTIGTTRSKLSRLYDAMLRLAKEGRAPRPLGRMPEIPHFSRLACLPRDAFYEAGERLPLLDDDGRPNPALSGRVCCDQIVPYPPGIPVLVPGQVVDDTILAYLARLQKTQKSIEMHGLAEDGGEFYLRVLKPQELAELPGRSLFN

SEQ ID NO: 1909 - DNA, 2352 bp, Fusobacterium nucleatum subsp
  CDS (1)..(2352)
atgtctaaattagaccaaaataagacaccattatttacagtattaaaagatgaatatgtgagaagaaatatacttccatttcatgttcctggacataaaagaggaaggggagttgataaagaattttttaattttatgggagaagctcctttttcaatagatgtaacaatttttaaaatggttgatggtttacatcatccaaaaagttgtataaaagaagctcaagaattacttgcagatgcttatggagttaaacatagtttttttgcagtaaatggaacttctggtgcaatacaagcaatgataatgtcagttataaaagcaggagaaaaaatattagtaccaagaaatgtgcataaatcagtttcagcaggaattattttaagtggttctgaacctgtatatatgaatcctgaaattgatgaaaatttaggaattgccttaggagttaaaccacaaactgttgaaaatatgctaaaacaagatcctgatatagcagcagttcttattataaatccaacttattatggggtggcaacagatattaaaaaaatagctgatatagttcatagctatgatatacctcttattgtagatgaagctcatggaccacatctacatttccatgatgagttaccaatttcagctgttgatgctggagcagatatttgtactcaaagtacacataaaattttaggtgctatgactcaaatgtcagttatccatgtaaattctgatagagttaatgttgaaaaagtaaaacaaattttaagtttacttcatacaacttctccatcatatccattaatggcatctcttgattgttcaagaaggcaaatagctacacaaggtcaagagctacttacaagaactattgagcttgctaagtattttagaagagaggctaatagaatcccaggaatttattgttttggagaagaacttattggaaaagatggttttttcgcttttgatccaacaaagattacaatatctgcaaaagaattaggactaaaaggtggagaacttgaaagcctacttgtagatgattataatattcaaatggaattatcagattactataacactttgggacttattacaataggagatacggaagaaagtgtaaacaaattacttgatgctttaagagatataagtagaagattttttggaaaagggaaaacattggaaaaaaatattataaagcttcctgaaactcctgaattagtattaatgccaagagaagctttttacagtgaaaagaataaagttccatttaaagaaagtgttggaaaaatttctggtgaaatgataatggcatatcctcctggtattccaataatcattgcaggagaaagaattagccaagatatagttgattatattgaagaattaaaagaagctaatttacatattcaaggtatggaggaccctgaacttgaaactataaatgtaattgaagaagaagatgctatttacttatatactgaaaagatgaaaaatgttcttattggagtacaaacaaatcttggagttaacaagacaggaactgaatttggacctgatgatttaattcaagcatacccagatacttttgatgaaatggaattaatttctgtcgaaagacaaaaggaagatttcaatgataaaaaattgaaattcaaaaatacagttttagatacttgtgaaaaaatagctaagagagttaatgaagctgtaattgatggatatagaccaatacttgttggaggagaccactcaatttcattaggaagtgtatcaggtgtttctctagaaaaagaaattggaattttatggataagtgctcatggagatatgaacactcctgaaagtacacttacaggtaatattcatggaatgccattagctttacttcaaggtttaggagatagagaacttgtaaactgtttctatgaaggtgctaaacttgacagcagaaacatagtcatctttggtgcaagagaaattgaagtagaagaaagaaaaattattgaaaaaactggtgtaaaaattgtttactatgatgatattctaagaaaaggtatagacaatgttttagatgaaataaaagattatttaaaaattgataatttgcatattagtatagatatgaatgtatttgacccagaaattgctcctggtgtatctgtacctgttagaagaggaatgtcttatgatgaaatgtttaaatcattgaaatttgtatttaaaaattactcagttacatcagcagatattacagaatttaacccattaaatgatattaatggaaaaactgctgaacttgtaaatggtatagtgcaatatatgatgaacccagattattaa

SEQ ID NO: 1910 - protein, 783 aa, Fusobacterium nucleatum subsp
MSKLDQNKTPLFTVLKDEYVRRNILPFHVPGHKRGRGVDKEFFNFMGEAPFSIDVTIFKMVDGLHHPKSCIKEAQELLADAYGVKHSFFAVNGTSGAIQAMIMSVIKAGEKILVPRNVHKSVSAGIILSGSEPVYMNPEIDENLGIALGVKPQTVENMLKQDPDIAAVLIINPTYYGVATDIKKIADIVHSYDIPLIVDEAHGPHLHFHDELPISAVDAGADICTQSTHKILGAMTQMSVIHVNSDRVNVEKVKQILSLLHTTSPSYPLMASLDCSRRQIATQGQELLTRTIELAKYFRREANRIPGIYCFGEELIGKDGFFAFDPTKITISAKELGLKGGELESLLVDDYNIQMELSDYYNTLGLITIGDTEESVNKLLDALRDISRRFFGKGKTLEKNIIKLPETPELVLMPREAFYSEKNKVPFKESVGKISGEMIMAYPPGIPIIIAGERISQDIVDYIEELKEANLHIQGMEDPELETINVIEEEDAIYLYTEKMKNVLIGVQTNLGVNKTGTEFGPDDLIQAYPDTFDEMELISVERQKEDFNDKKLKFKNTVLDTCEKIAKRVNEAVIDGYRPILVGGDHSISLGSVSGVSLEKEIGILWISAHGDMNTPESTLTGNIHGMPLALLQGLGDRELVNCFYEGAKLDSRNIVIFGAREIEVEERKIIEKTGVKIVYYDDILRKGIDNVLDEIKDYLKIDNLHISIDMNVFDPEIAPGVSVPVRRGMSYDEMFKSLKFVFKNYSVTSADITEFNPLNDINGKTAELVNGIVQYMMNPDY

SEQ ID NO: 1911 - DNA, 2196 bp, Shigella flexneri
  CDS (1)..(2196)
atggggcagggttttccaccttgtccggtattcttacttccccgaaacgggtttgcgcttatgaaatcaatgaatattgccgccagtagtgaactggtatcccgactttcttctcatcgccgcgtggtggcgttgggagatactgattttacggacgtcgcggcagtcgtcattaccgctgcggatagtcgcagtggcattcttgcgttgcttaagcgcaccggttttcatctaccggtgtttttgtattccgaacatgctgttgaattacctgcgggcgttacggcggtaatcaacggcaacgagcagcagtggctggagctggaatccgcagcctgtcagtatgaagagaatttgctgccaccgttttatgacacgctgacgcagtacgttgagatgggcaacagcacctttgcttgccctggacatcaacatggtgcgttctttaaaaagcatcctgccggacgccatttttacgatttctttggtgagaacgtctttcgcgccgatatgtgtaacgctgacgtaaaattgggcgatctgcttattcatgaaggatcggcgaaagatgcgcagaaattcgcagccaaagtctttcatgccgataaaacctattttgtgctgaacggcacatcggcagcgaataaagtggtgacgaatgcgctgttaacgcgtggcgatctggtgctcttcgaccgtaacaaccataagtcgaatcatcacggcgcgctgattcaggcggggacgacgccggtctatctggaagcttcacgtaacccgtttggtttcattggcggtattgatgcgcactgttttaatgaagagtatctgcgccagcaaattcgcgacgttgcgccagaaaaagccgacctgccgcgcccgtttcgcctgacgattattcagctgggaacctatgacggcactgtctataacgcccgtcaggtgatcgataccattgggcatctgtgtgattacattctgtttgattccgcgtgggtcggttacgaacagtttatctcgatgatggcggatagctcgccgctgctgttagaacttaacgaaaacgatccggggatttttgtgacccagttggtgcacaaacagcaggctggattctcacagacgtcgcagatccataaaaaagataaccatatccgcggacaggcgcgtttttgcccgcataagcggttgaataacgcctttatgctccatgcttctaccagccctttctatccgctgtttgctgcactggatgttaacgccaaaattcatgaaggggagagtgggcgtcggctgtgggctgagtgcgttgagttgggtattgagtcgcgcaaggctattcttgcgcgctgtaagctgttccgcccgtttatcccgcccgttgttgatggcaaattgtggcaggattatccgacatcagtgttagccagcgaccgccgttttttcagttttgagccgggggcgaagtggcacggctttgaaggatatgccgcggatcagtattttgttgatccgtgcaagctgttactcactacaccaggtatcaatgccgaaaccggcgaatatagcgactttggcgttccggcgacgattctggcgcactatctgcgtgagaacggcattgtgccggagaagtgcgatctcaactccattctgttcttattaactccggcggaaagccacgagaagctggcacaactggtggcgatgctggcgcaatttgaacagcatattgaggatgactcgtcgctggctgaggtgttgccgagcgtttataacaaatatccggtgcgctatcgcgactacaccctgcgccagttgtgtcaggagatgcacgatctgtatgtcagtttcgacgtcaaagacctacaaaaagcgatgttccgccagcagagtttcccgtcagtggtgatgaacccccaggatgcgcatagcgcttatattcgcggtgaagtggagttggtgcggattcgtgatgccgaagggcgaattgcggcagaaggggcgttgccttatccacctggcgtgctttgcgtggtacccggggaagtctggggtggggcggttcaacgttatttccttgcgctggaagaaggcgtgaatttgttgccgggattttcgccggagttgcaaggtgtctatagcgaaaccgatgcggatggcatgaaacgattgtacggttatgtgttgaagtaa

SEQ ID NO: 1912 - protein, 731 aa, Shigella flexneri
MGQGFPPCPVFLLPRNGFALMKSMNIAASSELVSRLSSHRRVVALGDTDFTDVAAVVITAADSRSGILALLKRTGFHLPVFLYSEHAVELPAGVTAVINGNEQQWLELESAACQYEENLLPPFYDTLTQYVEMGNSTFACPGHQHGAFFKKHPAGRHFYDFFGENVFRADMCNADVKLGDLLIHEGSAKDAQKFAAKVFHADKTYFVLNGTSAANKVVTNALLTRGDLVLFDRNNHKSNHHGALIQAGTTPVYLEASRNPFGFIGGIDAHCFNEEYLRQQIRDVAPEKADLPRPFRLTIIQLGTYDGTVYNARQVIDTIGHLCDYILFDSAWVGYEQFISMMADSSPLLLELNENDPGIFVTQLVHKQQAGFSQTSQIHKKDNHIRGQARFCPHKRLNNAFMLHASTSPFYPLFAALDVNAKIHEGESGRRLWAECVELGIESRKAILARCKLFRPFIPPVVDGKLWQDYPTSVLASDRRFFSFEPGAKWHGFEGYAADQYFVDPCKLLLTTPGINAETGEYSDFGVPATILAHYLRENGIVPEKCDLNSILFLLTPAESHEKLAQLVAMLAQFEQHIEDDSSLAEVLPSVYNKYPVRYRDYTLRQLCQEMHDLYVSFDVKDLQKAMFRQQSFPSVVMNPQDAHSAYIRGEVELVRIRDAEGRIAAEGALPYPPGVLCVVPGEVWGGAVQRYFLALEEGVNLLPGFSPELQGVYSETDADGMKRLYGYVLK

SEQ ID NO: 1913 - DNA, 2271 bp, Bordetella pertussis
  CDS (1)..(2271)
atgaaattccgcttccccattttcatcatcgacgaagactatcgctccgagaacgcctcggggctgggcattcgcgcgctggcttcggcgatcgaggccgagggcgtggaggtcatcggggtgaccagctacggcgacctgagctcgtttgcccagcagcaaagccgcgccagcgccttcatcctgtcgatcgacgatgaggagttcgacgtcgattctccggaagacgtggcgggcgcgatcaagaacctgcgcacgttcatcggcgagctgcgtttccgcaacgccgacatccccatctacctgtacggcgagacgcgcacgtcggaacacatcccgaacgacatcctgcgcgagctgcacggcttcatccacatgttcgaggacacgccggagttcgtggcgcgccacatcatccgcgaagcgcgcagctacgtggacggcctgccgccgccgttcttccgcgagctggtcaaatatgcccaggacggttcgtattcctggcactgcccggggcactcgggcggcgtggcgttcctcaagagcccggtgggccagatgttccaccagttcttcggcgagaacatgctgcgcgccgacgtctgcaacgcggtcgacgagctgggccagctgctggaccacaccggcccggtggccgagtccgagctgaatgccgcgcgcattttccatgccgaccactgcttcttcgtcaccaacggcacctcgacgtcgaacaaggtcgtctggcatgccaacgtggccgccggcgacgtggtggtggtggaccgcaactgccacaagtcgatcctgcacgccatcaccatgaccggcgcgatcccggtgttcctgcgccccacgcgcaaccacctgggcatcatcggaccgatcccgctcgacgaattcgacccggaaaacatccgccgcaagatcgaggccaacccgttcgcgcgcgaggcgctgaacaagaagccgcgcatcctcacgctgacgcagagcacctatgacggcgtcatctacaacgtcgagatgatcaaggaaaagctgggcacctacgtcgacacgctgcatttcgacgaggcctggctgccgcacgcggccttccacgagtactaccgcgacatgcacgcgatcggcccggaccgcccgcgcagccaggacgccatggtgttcgccacgcactccacgcacaagctgctggccggcatctcgcaggcctcgcagatcatcgtgcaggagtccgagagccgcaagctggaccgcaacctcttcaacgaggcctacctgatgcatacgtcgacctcgccgcagtacgcgatcatcgcgtcgtgcgacgtggccgccgccatgatggagccgccgggcggcaccgccctggtcgaggaaagcatccgcgaggccatggactttcgccgcgccatgcgcaaggtggcctccgagttcggcaaggacgactggtggttcaaggtgtggggccccaaccgcctcgcgcccgagggcatcggccatcgcgacgactgggtgctggagtcgggcgaccactggcacggctttggcgacctggcgccgggcttcaacatgctcgacccgatcaaggccaccatcatcaccccgggcctggacatgtcgggcagcttcggcgaaagcggcataccggccgcgctggtgtcgaagtacctggccgagcacggcgtcgtggtggagaagaccggcctgtattcgttcttcatcctgttcaccatcggtatcaccaagggccgctggaacaccctgctgaccgcgctgcagcagttcaaggacgactacgaccgcaaccagcccctgtggcgcatcctgcccgagttctgccgcggtcaccgccgctacgagcgcatgggcctgcgcgacctatgccagcagatccacgaggcctatcgcgaacgcgacgtggcgcgcctgaccaccgagatgtacctgagcgacatggtgccggcgctcaagccctcggacgccttcgcccgcatggcgcaccgcgaagtcgagcgcgtcgagatcgaccagctcgaaggccgcgtgaccggcgtgctgctcacgccgtacccgccgggcattccgctgctgatcccgggcgagcgcttcaaccggaccatcgtgcaatacctgcagttcgcgcgcgagttcaacgagcgcttccccggcttcgagacctacatccacggcctggccgacgaagagggccccgatggcgccaagcgctattacgtcgactgcctgaaggacgccggcgagcagtaa

SEQ ID NO: 1914 - protein, 756 aa, Bordetella pertussis
MKFRFPIFIIDEDYRSENASGLGIRALASAIEAEGVEVIGVTSYGDLSSFAQQQSRASAFILSIDDEEFDVDSPEDVAGAIKNLRTFIGELRFRNADIPIYLYGETRTSEHIPNDILRELHGFIHMFEDTPEFVARHIIREARSYVDGLPPPFFRELVKYAQDGSYSWHCPGHSGGVAFLKSPVGQMFHQFFGENMLRADVCNAVDELGQLLDHTGPVAESELNAARIFHADHCFFVTNGTSTSNKVVWHANVAAGDVVVVDRNCHKSILHAITMTGAIPVFLRPTRNHLGIIGPIPLDEFDPENIRRKIEANPFAREALNKKPRILTLTQSTYDGVIYNVEMIKEKLGTYVDTLHFDEAWLPHAAFHEYYRDMHAIGPDRPRSQDAMVFATHSTHKLLAGISQASQIIVQESESRKLDRNLFNEAYLMHTSTSPQYAIIASCDVAAAMMEPPGGTALVEESIREAMDFRRAMRKVASEFGKDDWWFKVWGPNRLAPEGIGHRDDWVLESGDHWHGFGDLAPGFNMLDPIKATIITPGLDMSGSFGESGIPAALVSKYLAEHGVVVEKTGLYSFFILFTIGITKGRWNTLLTALQQFKDDYDRNQPLWRILPEFCRGHRRYERMGLRDLCQQIHEAYRERDVARLTTEMYLSDMVPALKPSDAFARMAHREVERVEIDQLEGRVTGVLLTPYPPGIPLLIPGERFNRTIVQYLQFAREFNERFPGFETYIHGLADEEGPDGAKRYYVDCLKDAGEQ

SEQ ID NO: 1915 - DNA, 2271 bp, Bordetella parapertussis
  CDS (1)..(2271)
atgaaattccgcttccccattttcatcatcgacgaagactatcgctccgagaacgcctcggggttgggcattcgcgcgctggcttcggcgatcgaggccgagggcgtggaggtcatcggggtgaccagctacggcgacctgagctcgtttgcccagcagcaaagccgcgccagcgccttcatcctgtcgatcgacgatgaggagttcgacgtcgattctccggaagacgtggcgggcgcgatcaagaacctgcgcacgttcatcggcgagctgcgtttccgcaacgccgacatccccatctacctgtacggcgagacgcgcacgtcggaacacatcccgaacgacatcctgcgcgagctgcacggcttcatccacatgttcgaggacacgccggagttcgtggcgcgccacatcatccgcgaagcgcgcagctacgtggacggcctgctgccgccgttcttccgcgagttggtcaaatatgcccaggacggttcgtattcctggcactgcccggggcactcgggcggcgtggcgttcctcaagagcccggtgggccagatgttccaccagttcttcggcgagaacatgctgcgcgccgacgtctgcaacgcggtcgacgaactgggccagctgctggaccacaccggcccggtggccgagtccgagctgaatgccgcgcgcattttccatgccgaccactgcttcttcgtcaccaacggcacctcgacgtcgaacaaggtcgtctggcatgccaacgtggccgccggcgacgtggtggtggtggaccgcaactgccacaagtcgatcctgcacgccatcacgatgaccggcgcgatcccggtgttcctgcgccccacgcgcaaccacctgggcatcatcggtccgatcccgctcgacgaattcgacccggagaacatccgccgcaagatcgaggccaacccgttcgcgcgcgaggcgctgaacaagaagccgcgcatcctcacgctgacgcagagcacctatgacggcgtcatctacaacgtcgagatgatcaaggaaaagctgggcacctacgtcgacacgctgcatttcgacgaggcctggctgccgcacgcggccttccacgagtactaccgcgacatgcacgcgatcggcccggaccgcccgcgcagccaggacgccatggtgttcgccacgcactccacgcacaagctgctggccggcatctcgcaggcctcgcagatcatcgtgcaggagtccgagagccgcaagctggaccgcaacctcttcaacgaggcctacctgatgcatacgtcgacctcgccgcagtacgcgatcatcgcgtcgtgcgacgtggccgccgccatgatggagccgccgggcggcaccgccctggtcgaggaaagcatccgcgaggccatggactttcgccgcgccatgcgcaaggtggcctccgagttcggcaaggacgactggtggtttaaggtgtggggccccaaccgcctcgcgcccgagggcatcggccatcgcgacgactgggtgctggagtcgggcgaccactggcacggctttggcgacctggcgccgggcttcaacatgctcgacccgatcaaggccaccatcatcaccccgggcctggacatgtcgggcagcttcggcgaaagcggcataccggccgcgctggtgtcgaagtacctggccgagcacggcgtcgtggtggagaagaccggcctgtattcgttcttcatcctgttcaccatcggtatcaccaagggccgctggaacaccctgctgaccgcgctgcagcagttcaaggacgactacgaccgcaaccagcccctgtggcgtatcctgcccgagttctgccgcggtcaccgccgctacgagcgcatgggcctgcgcgacctgtgccagcagatccacgaggcctatcgcgaacgcgacgtggcgcgcctgaccaccgagatgtacctgagcgacatggtgccggcgctcaagccctcggacgccttcgcccgcatggcgcaccgcgaagtcgagcgcgtcgagatcgaccagctcgaaggccgcgtgaccggcgtgctgctcacgccgtacccgccgggcattccgctgctgatcccgggcgagcgcttcaaccggaccatcgtgcaatacctgcagttcgcgcgcgagttcaacgagcgcttccccggcttcgagacctacatccacggcctggccgacgaagagggccccgatggcgccaagcgctattacgtcgactgcctgaaggacgccggcgagcagtaa

SEQ ID NO: 1916 - protein, 756 aa, Bordetella parapertussis
MKFRFPIFIIDEDYRSENASGLGIRALASAIEAEGVEVIGVTSYGDLSSFAQQQSRASAFILSIDDEEFDVDSPEDVAGAIKNLRTFIGELRFRNADIPIYLYGETRTSEHIPNDILRELHGFIHMFEDTPEFVARHIIREARSYVDGLLPPFFRELVKYAQDGSYSWHCPGHSGGVAFLKSPVGQMFHQFFGENMLRADVCNAVDELGQLLDHTGPVAESELNAARIFHADHCFFVTNGTSTSNKVVWHANVAAGDVVVVDRNCHKSILHAITMTGAIPVFLRPTRNHLGIIGPIPLDEFDPENIRRKIEANPFAREALNKKPRILTLTQSTYDGVIYNVEMIKEKLGTYVDTLHFDEAWLPHAAFHEYYRDMHAIGPDRPRSQDAMVFATHSTHKLLAGISQASQIIVQESESRKLDRNLFNEAYLMHTSTSPQYAIIASCDVAAAMMEPPGGTALVEESIREAMDFRRAMRKVASEFGKDDWWFKVWGPNRLAPEGIGHRDDWVLESGDHWHGFGDLAPGFNMLDPIKATIITPGLDMSGSFGESGIPAALVSKYLAEHGVVVEKTGLYSFFILFTIGITKGRWNTLLTALQQFKDDYDRNQPLWRILPEFCRGHRRYERMGLRDLCQQIHEAYRERDVARLTTEMYLSDMVPALKPSDAFARMAHREVERVEIDQLEGRVTGVLLTPYPPGIPLLIPGERFNRTIVQYLQFAREFNERFPGFETYIHGLADEEGPDGAKRYYVDCLKDAGEQ

SEQ ID NO: 1917 - DNA, 1422 bp, Bacillus cereus
  CDS (1)..(1422)
atgaatcaaaatcgtatgcctttatatgaggcgttaatagagtttaaagaaagagggccgttatcctttcatgttcctggtcataagaatggtttaaacttccctcaggaggcaataagagagtttaaaggtattctatctattgatgtaactgaattagcaggactagatgatttgcatagtccgtttgaatgtatagatgaggcacaacaattattggctgaagtttataatacaaagagaagttattttttaattaatggttcaacagtcgggaacttagcaatgattttgtcttgttgcggggaacatgatattgttcttgtacaaagaaattgtcataaatcaattattaatggtttaaaacttgcgggagcaaatcccatttttttagatccatggattgatgaagcttataacgtaccagtgggagttcgtaatgaaattattaagaacgcaattggaaagtatccaaatgcgaaagcacttattttaacgcatcctaattattatggtatggggatggatttagaggcaagcatcgcttttgcacatgcacataaaatccctgttttggtagatgaggcacatggggcacatctatgtttgggagaaccatttccgaagtcagcattaacatatggtgcagatattgtagttcattctgcacataaaacattacccgcaatgacaatgggttcctatttacatataaatagtcatttagtagacgaagataaggttactacttatttaagtatgctacaatctagtagtccatcgtatccaattatggcttccttggatatagcacgctttacaatggcgcgtataaaagaagaaggtcacagtgaaattgttgagtttttacgaagatttaaggaacaattacgttctattccccaaatcgccattttagaatatccgttgcaagatgagttaaaggtcaccgtacaaactcgttgtcagttatcagggtacgaattacagtctgtatttgaaaaggtcggtatatatacagagatggctgatccgtacaatgtcctatttattttacccttacaagtaaatgagggatatatgaaggttatagagatgatccgagtagcattgcaacattatgaggtgaaagacaagagggaatctattcgttatacttataatggtgaattctctcttttaccgtatacgtataaacaactagacggatatgaaacaaagatagtatctatagaagaggctgttggaatgatagcggcggaaatggtgattccgtatccacctggaattccattaattatgtatggagagagaattacttcagagcataaagagcaaattatgtatttagaaagagcaggagctcgttttcaaggtaatacgaaatatatgaaagtgtatgatatagaaagtaggttttag

SEQ ID NO: 1918 - protein, 473 aa, Bacillus cereus
MNQNRMPLYEALIEFKERGPLSFHVPGHKNGLNFPQEAIREFKGILSIDVTELAGLDDLHSPFECIDEAQQLLAEVYNTKRSYFLINGSTVGNLAMILSCCGEHDIVLVQRNCHKSIINGLKLAGANPIFLDPWIDEAYNVPVGVRNEIIKNAIGKYPNAKALILTHPNYYGMGMDLEASIAFAHAHKIPVLVDEAHGAHLCLGEPFPKSALTYGADIVVHSAHKTLPAMTMGSYLHINSHLVDEDKVTTYLSMLQSSSPSYPIMASLDIARFTMARIKEEGHSEIVEFLRRFKEQLRSIPQIAILEYPLQDELKVTVQTRCQLSGYELQSVFEKVGIYTEMADPYNVLFILPLQVNEGYMKVIEMIRVALQHYEVKDKRESIRYTYNGEFSLLPYTYKQLDGYETKIVSIEEAVGMIAAEMVIPYPPGIPLIMYGERITSEHKEQIMYLERAGARFQGNTKYMKVYDIESRF

SEQ ID NO: 1919 - DNA, 1422 bp, Bacillus anthracis
  CDS (1)..(1422)
atgaatcaaaatcgcatacctttatatgaagcattaatagagtttaaagaaagaagacggttatcctttcatgttccaggtcataaaaatggtttaaacttccctcaggaggtagtagaggagtttaaagatatactatctatcgatgtaactgagttgtcaggattagatgatttacatagtccgtttgaatgtatagatgaggcacaacaattattagctgatgtatatggagtgaacaaaagttattttttaattaatggttcaacagtcgggaatctagcaatgattttgtcttgttgtggggaacatgatattgttcttgtacaaagaaattgtcataaatcgattattaatggtttaaaattagcgggagcaaatcctatttttttagatccatggattgatgaagcttataacgtaccagtgggaattcatgatgagattattaaggaagcgattgaaaaatacccaaatgcgaaagcgctcattttaacgcatcctaattattatggtatggggatggatctagaggcaagcattgcttatgcacatacacataaaatccctgtgctagtagatgaagcacatggggctcatttttgtttaggcggggcatttccacagtcagcgttagcatatggtgcagatatggtagttcattctgcgcataaaacattacccgcgatgacgatgggatcctatttacatataaatagtcgtttagtgaaagaagaaaaagtttctacttatttaagtatgctacaatctagtagtccatcgtatccaattatggcttctcttgatattgcacgctttacaatagcacgtataaaagaaaagggacatgatgaaattgtcgagtttttacaggaatttaaagaagaattgagtactattccacaaatagctattttacaatatccattacaagacgggctaaagattaccgtacagacgcgttgtcggttatcaggatacgaattacagtctgtatttgaaaaggtcggtatatatacagaaatggcagatccatataatgtcttatttattttgcctttgcaagtaaataagaaatatatgaaggctatagagatgatccgagtagcattgcaatactatgaggtgaaagacaagacggaatctattcgttatacttataaaggagaaatttctcccctgccgtatacatataaacaactggaagaatacgaaacaaaagtagtacctatagaagaagcagttgggatggtagcagcggaaatggtaattccgtatccacctggtattccattgattatgtatggagaaagaattacttcaggacataaagaacaaattatgtatttagaaaaagcaggtgctcgttttcaaggtagcaggaaatatatgaaagtgtatgatatagaaagtaggttttag

SEQ ID NO: 1920 - protein, 473 aa, Bacillus anthracis
MNQNRIPLYEALIEFKERRRLSFHVPGHKNGLNFPQEVVEEFKDILSIDVTELSGLDDLHSPFECIDEAQQLLADVYGVNKSYFLINGSTVGNLAMILSCCGEHDIVLVQRNCHKSIINGLKLAGANPIFLDPWIDEAYNVPVGIHDEIIKEAIEKYPNAKALILTHPNYYGMGMDLEASIAYAHTHKIPVLVDEAHGAHFCLGGAFPQSALAYGADMVVHSAHKTLPAMTMGSYLHINSRLVKEEKVSTYLSMLQSSSPSYPIMASLDIARFTIARIKEKGHDEIVEFLQEFKEELSTIPQIAILQYPLQDGLKITVQTRCRLSGYELQSVFEKVGIYTEMADPYNVLFILPLQVNKKYMKAIEMIRVALQYYEVKDKTESIRYTYKGEISPLPYTYKQLEEYETKVVPIEEAVGMVAAEMVIPYPPGIPLIMYGERITSGHKEQIMYLEKAGARFQGSRKYMKVYDIESRF

SEQ ID NO: 1921 - DNA, 2271 bp, Shigella flexneri
  CDS (1)..(2271)
atgatgaaagtattaattgttgaaagcgagtttctccatcaagacacctgggtcggtaacgccgttgagcgtctggcagatgctttaagccagcaaaatgttaccgtgattaaatccacctcctttgatgatggttttgccattctctcttcaaacgaagccattgactgcctgatgttcagctatcaaatggagcatccggacgaacatcaaaacgtcagacaattgatcggtaagcttcatgagcgccaacaaaacgtgccggtcttcctgttgggcgatcgggaaaaagccctcgccgcaatggaccgggatctgctggagcttgtcgatgaattcgcctggattctggaagataccgccgactttatcgccggacgcgccgttgccgcgatgacccgctaccgccagcagctgttgccgccactgttcagcgcgctgatgaaatatagtgacatccatgaatattcctgggcagcgccaggccaccagggcggcgttggttttaccaaaacacccgccggacgtttctaccatgactactatggtgaaaatctgttccgcaccgacatgggcatcgaacgaacttccctcggttctttgcttgaccatactggcgcatttggcgaaagcgaaaaatatgccgcacgcgtatttggtgccgatcgctcctggtcggtagtcgtcggtacttccggctctaaccgcaccatcatgcaggcttgcatgaccgataacgatgtcgtggtcgttgaccgtaactgccataaatccatcgaacaaggtttgatgctgacaggcgcgaaaccggtctatatggtgccaagccgcaaccgctacggcattatcgggccaatctatccgcaggaaatgcaacctgaaaccttgcaaaagaaaatcagtgaaagcccgctgaccaaagacaaagccgggcaaaaaccgtcttactgcgtggtaaccaactgcacctatgacggcgtgtgttataacgctaaagaagcgcaggatctgctggaaaaaacctccgatcgtctgcactttgacgaagcctggtacggctatgcacgtttcaacccgatctatgccgatcactatgccatgcgcggcgaacctggcgatcacaacggtcctaccgttttcgccacccactccatccacaaactgctgaatgcgctgtcacaggcttcttatattcatgtacgtgaaggtcgtggggcgattaacttctcccgcttcaaccaggcctacatgatgcatgccaccacctccccgctgtatgccatctgcgcatccaacgacgtggcggtgtcgatgatggacggcaacagcggcctgtcactgacacaggaagtgattgacgaagcggttgatttccgtcaggcgatggcgcggctatataaagagttcaccgctgacggtagctggttcttcaaaccgtggaacaaagaagtcgtcaccgacccacaaaccggcaaaacctatgactttgctgacgcaccaaccaaactgctgaccaccgttcaggactgctgggtaatgcatccgggcgaaagctggcacggcttcaaagatattccggataactggagtatgctcgacccaattaaagtcagcatccttgctccgggaatgggtgaagatggtgaactggaagaaaccggtgttccggcggcgctggtcactgcctggcttggtcgccacggcattgtgcctacccgcaccactgacttccaaattatgttcctgttctctatgggcgtaacccgtgggaaatgggggactctggttaacaccctttgctccttcaaacaccactatgacgccaacacaccgctggcgcaggtgatgccggaacttgttgaacaatatcctgacacttacgcgaacatggggattcacgatctgggtgacaccatgtttgcctggctgaaagaaaacaaccctggcgcacggttgaacgaagcctattccggcctgccggtggcggaaatcaccccgcgtgaagcgtacaacgcgattgtcgacaacaatgtcgaactggtatccattgaaaatctgccaggacgcatcgcggcaaactcagttatcccgtatccgccaggaatcccgatgctgctgtctggtgaaaacttcggcgataaaaacagtccgcaagtaagttatttacgctcgctgcaatcctgggaccaccatttccctagatttgaacacgaaactgaagggactgaaattattgacggtatttaccacgttatgtgcgtgaaagcgtaa

SEQ ID NO: 1922 - protein, 756 aa, Shigella flexneri
MMKVLIVESEFLHQDTWVGNAVERLADALSQQNVTVIKSTSFDDGFAILSSNEAIDCLMFSYQMEHPDEHQNVRQLIGKLHERQQNVPVFLLGDREKALAAMDRDLLELVDEFAWILEDTADFIAGRAVAAMTRYRQQLLPPLFSALMKYSDIHEYSWAAPGHQGGVGFTKTPAGRFYHDYYGENLFRTDMGIERTSLGSLLDHTGAFGESEKYAARVFGADRSWSVVVGTSGSNRTIMQACMTDNDVVVVDRNCHKSIEQGLMLTGAKPVYMVPSRNRYGIIGPIYPQEMQPETLQKKISESPLTKDKAGQKPSYCVVTNCTYDGVCYNAKEAQDLLEKTSDRLHFDEAWYGYARFNPIYADHYAMRGEPGDHNGPTVFATHSIHKLLNALSQASYIHVREGRGAINFSRFNQAYMMHATTSPLYAICASNDVAVSMMDGNSGLSLTQEVIDEAVDFRQAMARLYKEFTADGSWFFKPWNKEVVTDPQTGKTYDFADAPTKLLTTVQDCWVMHPGESWHGFKDIPDNWSMLDPIKVSILAPGMGEDGELEETGVPAALVTAWLGRHGIVPTRTTDFQIMFLFSMGVTRGKWGTLVNTLCSFKHHYDANTPLAQVMPELVEQYPDTYANMGIHDLGDTMFAWLKENNPGARLNEAYSGLPVAEITPREAYNAIVDNNVELVSIENLPGRIAANSVIPYPPGIPMLLSGENFGDKNSPQVSYLRSLQSWDHHFPRFEHETEGTEIIDGIYHVMCVKA

SEQ ID NO: 1923 - DNA, 2136 bp, Shigella flexneri
  CDS (1)..(2136)
atgaaatcaatgaatattgccgccagtagtgaactggtatcccgactttcttctcatcgccgcgtggtggcgttgggagatactgattttacggacgtcgcggcagtcgtcattaccgctgcggatagtcgcagtggcattcttgcgttgcttaagcgcaccggttttcatctaccggtgtttttgtattccgaacatgctgttgaattacctgcgggcgttacggcggtaatcaacggcaacgagcagcagtggctggagctggaatccgcagcctgtcagtatgaagagaatttgctgccaccgttttatgacacgctgacgcagtacgttgagatgggcaacagcacctttgcttgccctggacatcaacatggtgcgttctttaaaaagcatcctgccggacgccatttttacgatttctttggtgagaacgtctttcgcgccgatatgtgtaacgctgacgtaaaattgggcgatctgcttattcatgaaggatcggcgaaagatgcgcagaaattcgcagccaaagtctttcatgccgataaaacctattttgtgctgaacggcacatcggcagcgaataaagtggtgacgaatgcgctgttaacgcgtggcgatctggtgctcttcgaccgtaacaaccataagtcgaatcatcacggcgcgctgattcaggcggggacgacgccggtctatctggaagcttcacgtaacccgtttggtttcattggcggtattgatgcgcactgttttaatgaagagtatctgcgccagcaaattcgcgacgttgcgccagaaaaagccgacctgccgcgcccgtttcgcctgacgattattcagctgggaacctatgacggcactgtctataacgcccgtcaggtgatcgataccattgggcatctgtgtgattacattctgtttgattccgcgtgggtcggttacgaacagtttatctcgatgatggcggatagctcgccgctgctgttagaacttaacgaaaacgatccggggatttttgtgacccagttggtgcacaaacagcaggctggattctcacagacgtcgcagatccataaaaaagataaccatatccgcggacaggcgcgtttttgcccgcataagcggttgaataacgcctttatgctccatgcttctaccagccctttctatccgctgtttgctgcactggatgttaacgccaaaattcatgaaggggagagtgggcgtcggctgtgggctgagtgcgttgagttgggtattgagtcgcgcaaggctattcttgcgcgctgtaagctgttccgcccgtttatcccgcccgttgttgatggcaaattgtggcaggattatccgacatcagtgttagccagcgaccgccgttttttcagttttgagccgggggcgaagtggcacggctttgaaggatatgccgcggatcagtattttgttgatccgtgcaagctgttactcactacaccaggtatcaatgccgaaaccggcgaatatagcgactttggcgttccggcgacgattctggcgcactatctgcgtgagaacggcattgtgccggagaagtgcgatctcaactccattctgttcttattaactccggcggaaagccacgagaagctggcacaactggtggcgatgctggcgcaatttgaacagcatattgaggatgactcgtcgctggctgaggtgttgccgagcgtttataacaaatatccggtgcgctatcgcgactacaccctgcgccagttgtgtcaggagatgcacgatctgtatgtcagtttcgacgtcaaagacctacaaaaagcgatgttccgccagcagagtttcccgtcagtggtgatgaacccccaggatgcgcatagcgcttatattcgcggtgaagtggagttggtgcggattcgtgatgccgaagggcgaattgcggcagaaggggcgttgccttatccacctggcgtgctttgcgtggtacccggggaagtctggggtggggcggttcaacgttatttccttgcgctggaagaaggcgtgaatttgttgccgggattttcgccggagttgcaaggtgtctatagcgaaaccgatgcggatggcatgaaacgattgtacggttatgtgttgaagtaa

SEQ ID NO: 1924 - protein, 711 aa, Shigella flexneri
MKSMNIAASSELVSRLSSHRRVVALGDTDFTDVAAVVITAADSRSGILALLKRTGFHLPVFLYSEHAVELPAGVTAVINGNEQQWLELESAACQYEENLLPPFYDTLTQYVEMGNSTFACPGHQHGAFFKKHPAGRHFYDFFGENVFRADMCNADVKLGDLLIHEGSAKDAQKFAAKVFHADKTYFVLNGTSAANKVVTNALLTRGDLVLFDRNNHKSNHHGALIQAGTTPVYLEASRNPFGFIGGIDAHCFNEEYLRQQIRDVAPEKADLPRPFRLTIIQLGTYDGTVYNARQVIDTIGHLCDYILFDSAWVGYEQFISMMADSSPLLLELNENDPGIFVTQLVHKQQAGFSQTSQIHKKDNHIRGQARFCPHKRLNNAFMLHASTSPFYPLFAALDVNAKIHEGESGRRLWAECVELGIESRKAILARCKLFRPFIPPVVDGKLWQDYPTSVLASDRRFFSFEPGAKWHGFEGYAADQYFVDPCKLLLTTPGINAETGEYSDFGVPATILAHYLRENGIVPEKCDLNSILFLLTPAESHEKLAQLVAMLAQFEQHIEDDSSLAEVLPSVYNKYPVRYRDYTLRQLCQEMHDLYVSFDVKDLQKAMFRQQSFPSVVMNPQDAHSAYIRGEVELVRIRDAEGRIAAEGALPYPPGVLCVVPGEVWGGAVQRYFLALEEGVNLLPGFSPELQGVYSETDADGMKRLYGYVLK

SEQ ID NO: 1925 - DNA, 2127 bp, Escherichia coli
  CDS (1)..(2127)
atgaataccatattgattggtagtaagtcttttgacaataaatatgtggcagaaatcatttctcatttacatacaaaaaattttggcactgaactggctggttgtagtgagaaaattgaaaccattataagaaacaacgcaagaatcgctgcagtattactggatttggatgattcgaatgatattcttgacaaaattcgcatgctgaatgaacatctgccagtcttcttacttaagaccgatgatgttgccattaaaaaattttgttttgattcattcgacggaaatgtacatcttattgattgttgcctttattctgttgacgaaattgttaataaaatccagaaaataattaatgactatattgatgcaatattaccacctttaacaaaagcattatttaactatgtgaaggaaggtaaatatactttctgtacgccaggacacatgggaggaacagcttaccagaaatcgcctgcaggtagtttgttctatgatttttttggtgaaaataccatgaaatcagatatttcagtgtctgtcggagaactggggtcgctgcttgatcactcaggacctcattcagaagccgaaaagtatattgctgaaacttttaatgctgacagaagctatattgttacgaacggaacgtcgacagctaataaaattgttgggcaattctccgtacctgcaggatgtactgcactgattgacaggaattgccacaaatctctcacacatatgttgatgatgagtgacatcatcccgatatatctgaaacctacacgaaatgcatatggcattctgggggggatccccagaacggaattctcttctgattcgattaagcagaaaatggctgttacgccaggtgcaacatggccagttcatgccgttatcactaactctacttatgatggtctgttttataataccgactggatcaaagaacatctggatgtaaaatctattcattttgattccgcatgggtgccatataccaatttcagtccgatttattctggcaaaacgggtatgggtggcaagcgtattgaaggaaaagtaatatatgaaacgcagtcaacgcataagctgttagccgctttttcacaggcatccatgattcatgttaaaggtgatattaatgaagaaacctttaatgaagcctatatgatgcaaacctccacctctcctcattacggtattgtcgcctccactgaaatggctgcggctatgatgaaaggcaatcctggcaaacgtcttattcaggaatccatggaacgtgctctggcttttcgtaaggaaatccaggcccgctttgaaaacagtgacacttggttttttaaagtatggcaacctgagaacattaatgaggtagattgctggccattggataaaaacgatcaatggcatggattcaaagatattgatcaagaacatatgtatcttgaccccattaaagtaactttattgacgccgggtcttgataaatacgggaaaattgaagaacaaggtatacccgcagcattagtttcaaaattcctagatgatcgtggtattattgtcgaaaaaacaggtccatataacattttgttcctgttcagcattgggattgatgatactaaggctcttagtcttctgcatggtttgtatgaatttaaggagcggtacgatcgtaatgagctggtcaaagatattctgccagggatctgggccgaatcgccagctttttacaacaatatgagaattcaggagctggcacagggaattcataatctgattcgcaagcataatctgccggagttaatgttccgggctttcgatgtcctgccagaaatggtaatgaaacctcagcaggctttccaggcagaacttcgtggtgaaacggaggaatgtttcattgaagacttggtagggaaaattaatgctaatatgattcttccgtatccaccaggagtacctttagttcttcccggagaaatgattacagagagcaatcgtccggttctggagtttttgttaatgctttgtgaaattggtaaccactatcctggttttgaaaccgatattcatggtctgtatcgaaaggcggataacaggtatactgcaaaagtcattaaaaaataa

SEQ ID NO: 1926 - protein, 708 aa, Escherichia coli
MNTILIGSKSFDNKYVAEIISHLHTKNFGTELAGCSEKIETIIRNNARIAAVLLDLDDSNDILDKIRMLNEHLPVFLLKTDDVAIKKFCFDSFDGNVHLIDCCLYSVDEIVNKIQKIINDYIDAILPPLTKALFNYVKEGKYTFCTPGHMGGTAYQKSPAGSLFYDFFGENTMKSDISVSVGELGSLLDHSGPHSEAEKYIAETFNADRSYIVTNGTSTANKIVGQFSVPAGCTALIDRNCHKSLTHMLMMSDIIPIYLKPTRNAYGILGGIPRTEFSSDSIKQKMAVTPGATWPVHAVITNSTYDGLFYNTDWIKEHLDVKSIHFDSAWVPYTNFSPIYSGKTGMGGKRIEGKVIYETQSTHKLLAAFSQASMIHVKGDINEETFNEAYMMQTSTSPHYGIVASTEMAAAMMKGNPGKRLIQESMERALAFRKEIQARFENSDTWFFKVWQPENINEVDCWPLDKNDQWHGFKDIDQEHMYLDPIKVTLLTPGLDKYGKIEEQGIPAALVSKFLDDRGIIVEKTGPYNILFLFSIGIDDTKALSLLHGLYEFKERYDRNELVKDILPGIWAESPAFYNNMRIQELAQGIHNLIRKHNLPELMFRAFDVLPEMVMKPQQAFQAELRGETEECFIEDLVGKINANMILPYPPGVPLVLPGEMITESNRPVLEFLLMLCEIGNHYPGFETDIHGLYRKADNRYTAKVIKK

SEQ ID NO: 1927 - DNA, 1563 bp, Oryza sativa
  CDS (1)..(1563)
atgcggcatgttgtagtacaatgtgccacttcatgggacactccaagaacgtctactactaatggttcacatgctgaaccttcagcagttgtcaaagctggtactgcccctctgattcaggcactgaaatcaactgcaaatcaagatgtttcttgctttcactttcctggacataatagagggaaagcttctcctccttcattgtcagaacttattggctcaaggacatttttgcatgacttacctgagctacctgagcttgatgatctcttctcccctaaaggtgtgattttagatgctcagaagcgagcagctgaactatttggatcatttaaaacatggttcctggtcaatggaagtacatgtggaatccaggcctcagtgatggctacctgttcccctggtgactacctcatcatacctcgaaattgtcatatttcagtgatctctgcactggttttgtctggtgctgtgcccaaatatatagtacctgagtacaattccgggtgggacattgctgggggtattaccccatcgcaggtggataaagtggttaaggaactggaggaggacagaaagaaggtaggtgctgttcttgttacatcaccaacctatcatggcatatgcagcaatatacaaggaattgtcaatgtttgccacctgcaaggcattcctgttatagttgacgaggcgcatggtgcccatttcaggtttcacagaaattttccaagcagcgcaactgagcaaggtgccgacttggttgtgcaatccacacacaaggttctgtgctcgcttacacagtcctcaatgcttcacatggctggagatcttgtggatgcagataaagtaagccaatgcctccaattgctccagagctcaagcccaagttaccttctactctcttctttggatgccgcaagggctcagctgagtgagaatgcagaatcttttgatgaaccagtatctatggctttagaaacaaaacatcagctgaggattatcccaggaatatctgttttggacttatcaagctttctttctgattttcctgctattgatcccttgcgtatcacattaagtgcttcagatctgcaattatctggatatgaagcagatgattttttagctgaggagcatcaaattgtatctgagctggtcggtacacaggccgtgacatttgcagtcaacttagggaccagaaggcatgatgttcagaggcttgtacattctgtaaagcatctgtcagaaaaatacttctctgaaaatgggtccagttccagaaaagagaatcctgctagtagcccactggacaagttctccatcaagttgacaccaagggaggccttctttttaaagaagaggagagtgtccatcgaggatagccttggtgagatttgtggtgagcttatctgcccttatccaccaggtatcccggtgctgatcccaggtgagatagtaacgcaggattcactgtcatacttgatggatgtcagggacaacggcatagcaatcagtggagcagctgatggtgagctcaagtccattatggtatgcaacgtgtga

SEQ ID NO: 1928 - protein, 520 aa, Oryza sativa
MRHVVVQCATSWDTPRTSTTNGSHAEPSAVVKAGTAPLIQALKSTANQDVSCFHFPGHNRGKASPPSLSELIGSRTFLHDLPELPELDDLFSPKGVILDAQKRAAELFGSFKTWFLVNGSTCGIQASVMATCSPGDYLIIPRNCHISVISALVLSGAVPKYIVPEYNSGWDIAGGITPSQVDKVVKELEEDRKKVGAVLVTSPTYHGICSNIQGIVNVCHLQGIPVIVDEAHGAHFRFHRNFPSSATEQGADLVVQSTHKVLCSLTQSSMLHMAGDLVDADKVSQCLQLLQSSSPSYLLLSSLDAARAQLSENAESFDEPVSMALETKHQLRIIPGISVLDLSSFLSDFPAIDPLRITLSASDLQLSGYEADDFLAEEHQIVSELVGTQAVTFAVNLGTRRHDVQRLVHSVKHLSEKYFSENGSSSRKENPASSPLDKFSIKLTPREAFFLKKRRVSIEDSLGEICGELICPYPPGIPVLIPGEIVTQDSLSYLMDVRDNGIAISGAADGELKSIMVCNV

SEQ ID NO: 1929 - DNA, 2181 bp, Vibrio parahaemolyticus
  CDS (1)..(2181)
atgaaacgtttaattataggtgttagtaattacatgccagaagacttcagtttattagctgaatctttagatgaacaatttaatcgtcatttacaacctttagagcaagttgaattaaccgacgttggtgcggctattattacttcagcagacattaaagcaggtctgcataaaatgatttctgaaacgggttacggtattccagttttcttagtaacggatgaaaacccagtttcggcagaagattacgtttggctaactggcgttatcgatttagaaagacaatctattgagtactactgtcgtcaaatcaacgaagcagtaaccaagtacgaatgtcgtctgcttcctcctttcttcaagcaattaacgcactatgttgagatgggtaactcagcgtttgactgtccgggacaccaaggtggtcagttcttcaaaaaacacccagctggtaaacaattctacgatttctttggcgaaaacctgttccgtagtgacttgtgtaacgcggacgtggatttaggtgacttgctgatccacgaaggttctgcacaccaagcgcaagcgcacgctgcaaaagtatttaacgcggacaaaacttacttcgtactcaacggtacttctgcttcaaacaaagtggtgtgtaacgcgctagtaactgaaggtgatttggtactgttcgaccgtaacaaccacaaatcgaaccaccacggtgcgttaatccaagcgggtggtatgccagtttacttagaaacggcgcgtaacccttggggcttcatcggtggtatggatgagcactgtttcgatgaagaatacattcgtgctcaaatcgcgaaagtggatccagaacgtgcacgcgatgaacgtcctttccgtcttgctattatccagcttggtacttacgacggtactatctataacgctcgctacgtgatggataagatcggtcatctttgtgactacatcctgtttgactctgcgtgggttggttatgagcagttcatccctatgatgaaagactgttcaccactgctgctggatttgaaaccagaagacgcaggtgtgatcgtgactcagtctgttcacaaacaacaagctggtttctctcaaacatcgcaaatccacaaaaaagaccgccatatcaaaggtcaagctcgttactgtaaccacaaacgctttaacaacgcgtttatgatgcacgcatcgacttcaccattctacgcactgttctctgcgcttgatgtgaacgcgaagatccacgacggcgaagccggtctgcgtttatggcgcgatgcggttaagactggtatcgaagcgcgtaaagaaatccttaagagttgtgaattgattcgtccgttcattccagacgaagtcgaaggtcaaccttggggcagctacgacactgacgtgatcgcaacgaacaagaaattcttcatgtttgagccaaacgcaagctggcacaaatttgaaggttacggtgaaggtcaatacttcgttgacccatgtaaattgttgctaactactgcgggtattgcagaagacggcagctacgcagatttcggtattcctgcaacgctattggcgaacttccttcgtgaaaacggcatcatccctgagaagtgtgacttgaactctatcttgttcctactcactcctgcggaagatatgggtaagatccgtcaccttgtggctcaaattaaccgattcgaaaaattcatccgtgatgatgcgcctctaagtatcgtacttccaagcgtctacgaagcgaataaagaacgctaccgtggctacaccatccgtcagctatgtcaggaaatgcatgacatgtacaaagagctgaacgtgaaacagctacaaaaagcgatgttccgcagcgagtacttcccacaaatggttcacaaaccagacgtggcaacacgcaaatacttccgtggtgaatgcgattacctaccacttaaagaggccgttggtcgcgtagccgctgagggtgcacttccttaccctccaggcatcatctgtgtgatcactggtgaaatctggaccccacacgtggtggattacttcctatctctagaagaaggcatcaaccgcttcccaggcttcgcgccagaaattcaaggcgtgtaccttgaagatgttaacggtcgcactaccgcacattgttatgtcctaaaagattaa

SEQ ID NO: 1930 - protein, 726 aa, Vibrio parahaemolyticus
MKRLIIGVSNYMPEDFSLLAESLDEQFNRHLQPLEQVELTDVGAAIITSADIKAGLHKMISETGYGIPVFLVTDENPVSAEDYVWLTGVIDLERQSIEYYCRQINEAVTKYECRLLPPFFKQLTHYVEMGNSAFDCPGHQGGQFFKKHPAGKQFYDFFGENLFRSDLCNADVDLGDLLIHEGSAHQAQAHAAKVFNADKTYFVLNGTSASNKVVCNALVTEGDLVLFDRNNHKSNHHGALIQAGGMPVYLETARNPWGFIGGMDEHCFDEEYIRAQIAKVDPERARDERPFRLAIIQLGTYDGTIYNARYVMDKIGHLCDYILFDSAWVGYEQFIPMMKDCSPLLLDLKPEDAGVIVTQSVHKQQAGFSQTSQIHKKDRHIKGQARYCNHKRFNNAFMMHASTSPFYALFSALDVNAKIHDGEAGLRLWRDAVKTGIEARKEILKSCELIRPFIPDEVEGQPWGSYDTDVIATNKKFFMFEPNASWHKFEGYGEGQYFVDPCKLLLTTAGIAEDGSYADFGIPATLLANFLRENGIIPEKCDLNSILFLLTPAEDMGKIRHLVAQINRFEKFIRDDAPLSIVLPSVYEANKERYRGYTIRQLCQEMHDMYKELNVKQLQKAMFRSEYFPQMVHKPDVATRKYFRGECDYLPLKEAVGRVAAEGALPYPPGIICVITGEIWTPHVVDYFLSLEEGINRFPGFAPEIQGVYLEDVNGRTTAHCYVLKD

SEQ ID NO: 1931 - DNA, 4026 bp, Vibrio parahaemolyticus
  CDS (1779)..(3914)
gatagaggttgataacttttatcgcgattaccgacgagttgatgagagtttatctatcggtagaaggtttgatgtttttcttataactgcatgaataatatggttttatatttttgtgtttatcatatttatctcaacttgatgttgattaactaatcattttattgataacgccaagtttatttttttcccgatttttgggcgtagtcttcacttcgaaatttagcgaggtcgagcaggtatccacttcatagcatctcgctaataaccgttcagtttgagtcacgttgacttgagtggaatagatttggagatgttatgtcatcgaatacgaaaaaaatcggcctaattgcctgtacgggtgtagtcgccggtaacatgatgggtagtggtattgcactgttaccttccagcctagcttcagtaggctctgtttcaattttcagctggctgatctgtttgatcggtgcactgagccttgcgtttgtttacgctcgtctggcaatcaaaaaccctcaagaaggtggtcctatcgcttatgcgggcgaagtttccccagtctttggtttccaaacgggcgtgctttattaccacgcgaactggattggtaacctagctattgctattacaggtgtttcttacctttcagtattcttccctgtgcttaatgacccaatcccagcgggtattgcgacgattgcatcggtatggatcttcactttcgtcaacctacttggtggtagctgggtaagccgtctatgtacgcttggtcttgttctaattctaattccagttgttggtaccgctctatttggttggacgcacttcgacactgcgctatacagccaaaactggaacgtatctgcgggtactgatagccatgcgattgtgactgcggttcttatctgtctatggtcattcgttggtgtggaatcagcagcagtatcgacaggtatggtagaaaaccctaaacgtactgtaccgctagcaaccatgctgggtactggtatcgcaggtgtgatttacatcctatcaactcaaatgatcagcggcatgttccctgcttctgaagttgcggcatcaggtgcgccatttgcattggcaaccactgagctattcggtagctggactgcaccattcgtatcagcattcactgcactagcatgttttacttcgctaggttcttggatgatgctggtgggcgaagctggtaaacgtgcagcaagcgatggcaacttccctaaaatctacggcgaaactgacaaaaacggtgtgcctaagaaaggtttaatccttgcgtcaatcaagatgacagcattaatggttgtactgatgttcttcagctctaaaacagcacacgcatcagacctgttcaaccagctaacgactgatgcagttctactaactatgctgccttacttctactcaagcattaacttgatccgctttgaaggtatgacaacacgcaacggcttcgtaatgctgttctctggtgtggcttgtctgttctgcttcattgcccttgctggtgcagaaggcggtacgctaacagcaaccttcatcgtgtctctcgttatcttgatgttctacagcaaaaaagccggcttagctcagtacatgaagctacacgctgacgacatgcctgctcaagcaagcaactaatccccaaacgctggcacttcggtgccagccaataaaaaacaaattcactcggcgctcaccttactcactgcctgtaaatggcagagagcgccttcattcgccttggagatgtccaaatgaatattttcgctatcttgaaccacatgggtgtgttctttaaagaagagccagttcgtcaacttcacgctgctcttgagaaagcgggctacgaagtggtttacccagtagatgataaagacttgatcaaaatgattgagatgaacccacgcatttgcggtgtgctgttcgactgggataaatactcactagagctatgtgaacgtattagccagatcaacgaaaaactgcctgttcacgcatttgctaacgaacagtctactctcgatatttcactaacagacctacgtctaaacgtgagcttcttcgagtacgctttaggtatggctgacgacatcgctatcaaaatcaaccaagcgactgaggcatacaaagatgccatcatgcctccattcactaaagcgctattcaaatacgtagaagaaggtaaatacaccttctgtactccaggtcacatgggcggtactgcattccagaaaagccctgctggtagcatcttctatgatttttacggtccaaacacattcaaagcggacgtatcaatctcaatgcctgagttaggttctctactagaccactcaggtcctcataaagatgcagaagaatacatcgcacgtaccttcaatgcagacagttcttacatcgtaactaacggtacgtctacatcgaacaaaatcgtgggcatgtactcagcacctgcgggcagcacagtactgattgaccgtaactgtcacaaatctctgactcacctaatgatgatgagcgacgtgacaccaatctacttccgcccaactcgtaacgcatacggcatccttggtggtattccacaaagcgaattcagccgtgatgtcattgcagagaaagtggcgaaaacaccaggtgcaacagcgccaagttacgcagtagtgactaactcaacttacgatggtctgttgtacaacacacaattcatcaaagagtcgctagactgtaaacacatccacttcgacagtgcttgggtgccttacactaacttcaacccaatttacgaaggtaaatgtggtatgagtggtgaagcgatgccaggcaaagtgttctacgagacacaatcaacacacaaactgttggcagcgttctcacaagcttcaatgattcacgtgaaaggtgactttgataaagagtctttcaacgaagcattcatgatgcacacttcaacttcacctcagtacggcattgttgcttctactgaaactgcagcggcaatgatgcgcggcaacactggtaagaagttgatgcaagactctatcgatcgcgcaattcgcttccgtaaagagatcaaacgcctagaagcagaaagtgacagctggttcttcgatgtatggcaaccagaaaacatcgataccacagaatgttggaaactagaccctagcgatacatggcacggcttcaagaacatggatgacaaccacatgtatcttgacccaatcaaagtaacgctactgactccagggatgaacaaagaaggcgaactagaagaatcaggtattcctgcttcgctggtggctaaattcctagacgagcgcggcatcgtggttgagaaaacaggcccatacaacttgttgttcctattctcaatcggtatcgacaaatcaaaagcaatgcaattactacgcggtctgactgaatttaaacgtggctacgacttgaacctaaccatcaagagcttccttccttcgctatataacgaagatccaagcttctatgaaggcatgcgcgttcaagaattggcacaagcaattcatgacctaactaagaaatacaacctaccagagctaatgtacaaagcgttcgatgttcttccagaaatgaaagtaacaccacacgcagcatggcaagaagagcttcgcggtaacgtagaagaaatcaaactggaagaaatggttggtcgcgtaagtgcgaacatgatccttccttatcctccaggtgtgccactagtacttcctggtgaaatggtgactcaagagtctcgccctgtgctggacttcctagagatgctttgtgagatcggggcgcattacccaggtttcgaaaccgatatccacggtctgtaccaacaaaaagatggtagctacaccgtaaaagtattgaagaactaagttcctctcgaagatgacgccattgggaatgcaagcatgctccactcttacgagctcaatgtgtcatcgaacaaccacgacatttagatatacccctagctaatctgtcgta

SEQ ID NO: 1932 - protein, 711 aa, Vibrio parahaemolyticus
MNIFAILNHMGVFFKEEPVRQLHAALEKAGYEVVYPVDDKDLIKMIEMNPRICGVLFDWDKYSLELCERISQINEKLPVHAFANEQSTLDISLTDLRLNVSFFEYALGMADDIAIKINQATEAYKDAIMPPFTKALFKYVEEGKYTFCTPGHMGGTAFQKSPAGSIFYDFYGPNTFKADVSISMPELGSLLDHSGPHKDAEEYIARTFNADSSYIVTNGTSTSNKIVGMYSAPAGSTVLIDRNCHKSLTHLMMMSDVTPIYFRPTRNAYGILGGIPQSEFSRDVIAEKVAKTPGATAPSYAVVTNSTYDGLLYNTQFIKESLDCKHIHFDSAWVPYTNFNPIYEGKCGMSGEAMPGKVFYETQSTHKLLAAFSQASMIHVKGDFDKESFNEAFMMHTSTSPQYGIVASTETAAAMMRGNTGKKLMQDSIDRAIRFRKEIKRLEAESDSWFFDVWQPENIDTTECWKLDPSDTWHGFKNMDDNHMYLDPIKVTLLTPGMNKEGELEESGIPASLVAKFLDERGIVVEKTGPYNLLFLFSIGIDKSKAMQLLRGLTEFKRGYDLNLTIKSFLPSLYNEDPSFYEGMRVQELAQAIHDLTKKYNLPELMYKAFDVLPEMKVTPHAAWQEELRGNVEEIKLEEMVGRVSANMILPYPPGVPLVLPGEMVTQESRPVLDFLEMLCEIGAHYPGFETDIHGLYQQKDGSYTVKVLKN

SEQ ID NO: 1933 - DNA, 1461 bp, Clostridium tetani
  CDS (1)..(1461)
atgtacagattaaatcaatcagaaactccattatttgatgcgttaatggaatatgtgaatagacaaactataccttttcacgttcctggtcataaaaaaggagtaggaatagatgaggaatttaaaaattttataggtgagaatccttttaaaatcgatgttactgtttttaaactagtggatagcttacatcatcctacaggtcctataaaaaaagctcaagcattagcttctgatgcatatggctctgatgcttcatttttttgtattcatggtacctctggtgctatacaggcaatgataatgtctgtggtgaaatctggtgataaaataattatcccaagaaatgtccataaatcagtaacttctggcattatattaagtggggctacccccatttatatgcaaccagaattagataaaagagttggtatcgctcatggcgttactcctgaaactgtagaaaaaacattaaaagaaaatcctgacgctaaagcagttttaataattaatccaacttattatggcgttgctactgatattaagaaaatagcagatatagttcataattatgatattcctttaattgtagatgaagctcatggtcctcatttagcttttaacgatacacttccaatatcagctattgaagctggtgctgatatttgttgccaaagtacacataaaataataggtgctctaactcaatgttcattacttcacgttcgttctaaaagtatagatgtaaatagagttcagcaaatgttaagtttacttcaaactacatctccttcatatatattaatggcttcacttgactgtgctagaagacaaatagctttaaatggtaaggaattattagataaatccatagctttatctaactatgcccgtgaagaaataaataaaattcctggcttctattgtttcggtaaagaaattgttggaagacctggtgtttttgctatagatcctactaaaataactataacctgtagagatttaggtattactggttttgaattagatatgattttatctaaccaatatcacattcaactagaattatcagatttatataatggtcttgctgtaggctcctttggagatacaaaggaaaatatagatgcactaattaatgcactaaaagaaataagtaaagagtatgtaaataatgagaataaaaaatctgactttatagatataccagctataccaaagcaagttcaaattcctagagatgcttttaatagtgaaaaagtagttcttcctttaaaagatagtgaaggaagagttagtggggaatttttaatggcttatcctcctggaatacctgtactttgccctggggaaataattactcaagaaataattgattatatacaaaaattaaaagatactggtctttatgtacaaggtacagaagatttagaagtgaattttataaaagttgtaaaataa

SEQ ID NO: 1934 - protein, 486 aa, Clostridium tetani
MYRLNQSETPLFDALMEYVNRQTIPFHVPGHKKGVGIDEEFKNFIGENPFKIDVTVFKLVDSLHHPTGPIKKAQALASDAYGSDASFFCIHGTSGAIQAMIMSVVKSGDKIIIPRNVHKSVTSGIILSGATPIYMQPELDKRVGIAHGVTPETVEKTLKENPDAKAVLIINPTYYGVATDIKKIADIVHNYDIPLIVDEAHGPHLAFNDTLPISAIEAGADICCQSTHKIIGALTQCSLLHVRSKSIDVNRVQQMLSLLQTTSPSYILMASLDCARRQIALNGKELLDKSIALSNYAREEINKIPGFYCFGKEIVGRPGVFAIDPTKITITCRDLGITGFELDMILSNQYHIQLELSDLYNGLAVGSFGDTKENIDALINALKEISKEYVNNENKKSDFIDIPAIPKQVQIPRDAFNSEKVVLPLKDSEGRVSGEFLMAYPPGIPVLCPGEIITQEIIDYIQKLKDTGLYVQGTEDLEVNFIKVVK

SEQ ID NO: 1935 - DNA, 1416 bp, Clostridium tetani
  CDS (1)..(1416)
atgtcaaaattaccacttgtagaaggggtattaaattatataaaaaagaaaaatatttatttttctatgccaggtcataagcaaggtgaaggttttttatctacagatataggtaaggagataaaagaacaaattttaaaactagatatcaccgaagtaaacggtgtagacaatctgcataatcctacaggtatcataaaagaatcccaaataaaattaagtgaactttatggtagtaagaagtcttattttttagttaatggaagtagtagcggaaatatgattatgatattttcttcttttgaagaaggagacaaaataataattgatagaaattgtcataaatcaatatttaatacaattataataagaaagttaaaagctatatatgtaaagaataaaattcataaaggttttaaccttccactttctgttgatagtagccatattataaaaacaattaaagaaaataaagatgccaaaggaataattataacttatcctaattactatgggatttgttgtgatttagagaaaattattatagaagctaaaaagcacaacatgaaagtgttaattgactgtgcccatggagcacattttgttgcaaacgaaaaattacctaagaatcctgttaaactaggagcggatatggtagttatgagtagtcataaaacacttccaagtttaactcaaacagcatttttacatgttaacaatgaagaacttatagataaggtagatttttactttgatacttttataagtacaagtccttcatatttatttttagtttctatggattattctaggtattatttagaagaatatggagaagaaacttatgaaaaattaataaaattattaaagatatataaacaaaagataaattctctaaaacacctacatataatagatcaggtagatattatgtcagaatatactttagataaaagtagatatattctacacatagaagaaggttatagtgcaaatttattaatggactatcttttaaaaaataatatacaatgtgaaatgaatgatacttataatattgttataatagtatctccttttcatgtagaaaaggaaattaaatatttatatgaagttttattaaactgcgatttttctaagtttaaaattaaagaaatggacatattaaatcataatatacctaaaaaaaagctagaaccttttgaagttttgaataaaggtaaaaaaatagtagaagtagaagaatctttagattgtgtatgtgcagaaaatatagtaccatatccaccaggtattccaattattatgatgggagaaataatggatgaagaaactatagaagttataaaatattatgaagacaatggaatagaagttattggtttacatgaaaatcagatcaatgtggttaaataa

SEQ ID NO: 1936 - protein, 471 aa, Clostridium tetani
MSKLPLVEGVLNYIKKKNIYFSMPGHKQGEGFLSTDIGKEIKEQILKLDITEVNGVDNLHNPTGIIKESQIKLSELYGSKKSYFLVNGSSSGNMIMIFSSFEEGDKIIIDRNCHKSIFNTIIIRKLKAIYVKNKIHKGFNLPLSVDSSHIIKTIKENKDAKGIIITYPNYYGICCDLEKIIIEAKKHNMKVLIDCAHGAHFVANEKLPKNPVKLGADMVVMSSHKTLPSLTQTAFLHVNNEELIDKVDFYFDTFISTSPSYLFLVSMDYSRYYLEEYGEETYEKLIKLLKIYKQKINSLKHLHIIDQVDIMSEYTLDKSRYILHIEEGYSANLLMDYLLKNNIQCEMNDTYNIVIIVSPFHVEKEIKYLYEVLLNCDFSKFKIKEMDILNHNIPKKKLEPFEVLNKGKKIVEVEESLDCVCAENIVPYPPGIPIIMMGEIMDEETIEVIKYYEDNGIEVIGLHENQINVVK

SEQ ID NO: 1937 - DNA, 2766 bp, Bradyrhizobium japonicum
  CDS (1)..(2766)
atggggagagacatgcccaaggacgccaagcctgcgcagcagcgcatcgatcagttcttctccgggcccggcggacgggcggacaattggcgcgatctggtcgacgcggccaaagcatggtcccgcggcggagaccgtgcgaagtatgacgctgcgctggccgatctcttcgtgacggaggaatttcacggctatcctggcctgcagctcatggcagccttgcgggaggcagccacgactggcgatgcggcaacttcgctggcgctcgccacgcggttgacgcaggccctgacgacgagatccttccgtcagcatgcgggcgactggaatacgaatgacgaaggcaacggcgagacgcccgatctggtgccgcagatgttcggtccgcacgcggcgcgccgtccctatttcgagacgctgatcgtcaccggcctcacgtccggcagttggcccgcactcgccaacgaatggcgcaagcttcggcgtccggttgatcagtttgtctacgagccggttatcgtcggcagcctcgaggacgccttctgcgccacgatcctgaacccgaacctcgcagccgtcgtcatcaacgaaggcttcgcgctacgctcacgtcacgacgcgcccgtgctccgccccctgacttcgtcggcgggattgaaggacgagtccgacgcttcggcgctgcggctcgcccatatcatcaagcacgtccgccccgagcttgacctctatctgatgtccaatcgcaacgtggaggagatggccggaaatcccgaggccgatgtcgtccgccggatcttctattcggtcgaggaactgcttgagctgcatctctcgatccttgaaggcgtgcaggatcgctacgacacgccgttcttcgacaatctgaagaaatatgcgcagcgtccgatcggaacgttccatgcgctgccgatcgcgcgcggcaaatcggtcttcaagtcggactggatccgcgacatgggcgagttctacggcctgaacctgttcctggccgaaagtagcgcaaccaccggcggcctggacagcctgttggagccgaccggcaacatcaagaaggcgcaggacaaggccgcgcgcgcgcttggcgccgatcgcgtattcttcgtgaccaatggcacctcgacgtcgaacaagatggcggtgcaggcgctgatcgggccgggcgatatcgccatcgtcgatcgcaattgccacaaatcgcatcactacgggatggtgctggccggcgcgcagccgctctatgtcgaagccttccctatgacggaatattcgatgtacggcgccgtgccgctgaagaccatcaagcaggctttgttgagcgctagggccgacggccggctcgaccgcgtcaagctgctggatctgaccaactgcactttcgacggccacatctacaatacccgccgggtgatggaggagtgccttgccatcaagcccgacctgatcttcctgtgggacgaggcctggttcggcttcgcgcgcttctcgccgttcctgcgacggcgcaccgcgatgggcgccgctagcgagatcgaagcctggatgcgcgatccgagatcggtcgcggcctacgagacgcagcaggccgagctcggcaagagtccttcggaccaggtgctgctcaagacccggctgatccccgatccacgtcagattcgccttcgcgtgtaccagaccaattcgacccacaagtcgatgtcggcgatccggcagggctcgatgctggcggtcaaggacgtcgaattccacacggtcgagcagcagttcaaggaagccgtgttcacgcacgcctccaccagtccgaaccagcagctgatcgcgagcctggatgtctcgcggcgccagatggagctggagggttacggtctcgtggccaatgcgatcgagatcgcgctggccatccgacaggcagtcaacaccaatccgctgatctcgaaatatttccgtatcctcggtgccgacgccatggtgccggcgcaatatcgccaaagcgggttcaccgattatctggcggccggcacgaactgggcgagtgcccttaagagcctggacgacgacgagttttgcctcgatccaacccgcatgacgctggtgtgcggcacagccggcttcgacggcacgcagttcaagggcatcctcgcgaacgactacaacatccaggtcaacaagacctcgcgcaattcggtgctgctccagtccaacatcaacaacacgcgcagcgacgtggcacatctcgtcagggtgctggcggagatcgccggcgaggtcgaccgtggcctgacccagggcggagccaatgcgaagagggccttcgaggcgcgggtcaagagcttgatgaccgacgtgcccgacttgccgaacttctcgcacttccaccagagcttccgcggcgacgccggcgccaagaccaacgaaggcgatatccgcagcggcttctacgcggcctatgacgcggctggttgcgaattcattcgcctcgccgaccccgagatcgaccggcgcctgaaggccggtcccgacctcgtctcagccagtttcgtgatcccgtatccgccgggcttcccgatcatggtgccgggacaggtcatcacccaggaaaccatcgacttcatgcggaagctcgatgtgaaggagatccatggctacgacgccaaggaaggcctgaagctcgtgcgggccgaggccttggcgaagatcggcaggcccaaacccggcgcgcagccgaagctgaaggccgcctcataa

SEQ ID NO: 1938 - protein, 921 aa, Bradyrhizobium japonicum
MGRDMPKDAKPAQQRIDQFFSGPGGRADNWRDLVDAAKAWSRGGDRAKYDAALADLFVTEEFHGYPGLQLMAALREAATTGDAATSLALATRLTQALTTRSFRQHAGDWNTNDEGNGETPDLVPQMFGPHAARRPYFETLIVTGLTSGSWPALANEWRKLRRPVDQFVYEPVIVGSLEDAFCATILNPNLAAVVINEGFALRSRHDAPVLRPLTSSAGLKDESDASALRLAHIIKHVRPELDLYLMSNRNVEEMAGNPEADVVRRIFYSVEELLELHLSILEGVQDRYDTPFFDNLKKYAQRPIGTFHALPIARGKSVFKSDWIRDMGEFYGLNLFLAESSATTGGLDSLLEPTGNIKKAQDKAARALGADRVFFVTNGTSTSNKMAVQALIGPGDIAIVDRNCHKSHHYGMVLAGAQPLYVEAFPMTEYSMYGAVPLKTIKQALLSARADGRLDRVKLLDLTNCTFDGHIYNTRRVMEECLAIKPDLIFLWDEAWFGFARFSPFLRRRTAMGAASEIEAWMRDPRSVAAYETQQAELGKSPSDQVLLKTRLIPDPRQIRLRVYQTNSTHKSMSAIRQGSMLAVKDVEFHTVEQQFKEAVFTHASTSPNQQLIASLDVSRRQMELEGYGLVANAIEIALAIRQAVNTNPLISKYFRILGADAMVPAQYRQSGFTDYLAAGTNWASALKSLDDDEFCLDPTRMTLVCGTAGFDGTQFKGILANDYNIQVNKTSRNSVLLQSNINNTRSDVAHLVRVLAEIAGEVDRGLTQGGANAKRAFEARVKSLMTDVPDLPNFSHFHQSFRGDAGAKTNEGDIRSGFYAAYDAAGCEFIRLADPEIDRRLKAGPDLVSASFVIPYPPGFPIMVPGQVITQETIDFMRKLDVKEIHGYDAKEGLKLVRAEALAKIGRPKPGAQPKLKAAS

SEQ ID NO: 1939 - DNA, 2517 bp, Bradyrhizobium japonicum
  CDS (1)..(2517)
atgatagtcggactcgcggaagctcctcctcacccgaattgctgcgcaatccgcctctccccgcaagcggggagaggcgaaacgccagccgcagctcctgtcatccaactgtcatcgaatgtgccgagagctgtgtctccagtacattcgggacagacaatggactatttcaagcgcttcaacttcctgttcgccgcacccgtgttcgacgccgacgacctcgaaggcgtccgcttcaaccagatcatcgaggaaatccagcgctccggcttcgaggtcgtccgggcccgcaagctggaggacgcggagatcgcggtgcagaccgacgccgcgatcggctgcatggtggtggactggggcaagaagggcctggagggcaagacctcggcgctgatcaatttgatgcggcgccgcggcctcgacttcccgatcatcctgctgatccggcgcaagcggttcgaggatctgccggtcgaggtgctcgacttcatcgacggctatgtcttcctctccgaggagacgccgaccttcatcgccaagaacctgatcagccggctcaagcaatatgccgagacgctgaagacgccgttcttcggcgcgctggtcgactatgccgaggaaggcaaccagctctggacctgtccgggccacaatggcggcgtgttctacaatcgcagcccgatcggccgggtgttcgtcgagcatctcggcgaatccgtgttccgcgacgacctcgacaattccgtgctcgacctcggcgacctccttacccatgagggcccggcgctgaaggcgcagaaggaggcagcggcgatcttcggcgcggagaagacctatttcgtgctcaacggcacctcgacctcgaacaaggtcgcgctcggcgcgctcgtcaccgacggcgatctcgtgctgttcgaccgcaacaaccacaaggccgctcatcacggcgcgctgatgatcaatggcggcatcccggtctacgtcccgaccattcgcaacgcctggggcctgatcggcccgatgcgctgggacgtgctcgacgagaaggcgctgcgcgaggcgatccgcaaccatccgctggttagggatcgcgacgcctggcgcaaggaacggccgttccgcgtcgccgtggtcgaacagtgcacctatgacggctcgatccacagcgccgagatgatcctgaagcgcatcggccatctctgcgaatacatcctgttcgacgaggcctgggccggcttcatgaaattccacccgctctatgccggccgcttcgccatgggcctcgcgaaccttcccccggaagcgcccggcatcatcgcgacgcagtcgacccacaagcaactcgcgagcttctcgcaggcctcgcaaatccacatcaaggaccgtcacatccgcggccagaagcggcgcgtcgagcatcgccgcttcaacgaaagcttcatgcagcacgcttccacgtcaccgttctatccgctgttcgcatccctcgacgtcggcgcgcagatgatgaaggggcgctccggcgaagtgctgtgggacgacacgatccggctcggcatcgagctgcgcaagaagatccgcgcaatgcggcgtgagttcgaggagaaggagcagaaccccgatcggcgctggttcttcgagcccttcgtcccggatcgcgtcgccatccccgacgtcagtcgccccggcgccgcccacaatgtcgcctgggagacgctgtccaccgacgagctcgccaccaatcccgccttgtggcaactctctccggataccaactggcacggctttcccgatctcgcggaaggctttgccatgaccgatccgaacaagctgacgctgctcacgcctggcttcgatcgcaccaccggcgcctatgccgagcacggcatccccgcccccgtcgtcgcgcaatatctgcgcgagaaccgcatcgtgcccgagaagaacgacctcaactccctgctcttcctgctcactcccggcgtcgaggcgagcaaggccggcacgctgatctccggcctcgtcgccttcaagaggctgcacgacgacaatgcgttgctggcggacgcaatcccggaattctaccagcggcggcaggcgcgctatgccggcgtgcggctgcgcgatctctgcggcgacatgcaccgtttcttccgcgccgccgatgtcagcgcgctccaggcgcggcagttcatgcccgagcacatgcctgagatcgcgatgtcgccccgcgatgccgcccgctatttgttccgcaacgacgtcgactatctgccgatcgaggcgatcgcgggccgcatcgccaccacgcccttcgtagtctatccgcccggcatcgccaccatcgtgcccggcgagcggctgacggaacgcgccaagcccatggtcgattatctcaagatgttcgagacctgcttcaacacgttcccgggcttcgacgtcgaaatccagggcgtctacaaggagatcgatgcccagggccgtatcgggctctatacttacgtcgttgccgagtag

SEQ ID NO: 1940 - protein, 838 aa, Bradyrhizobium japonicum
MIVGLAEAPPHPNCCAIRLSPQAGRGETPAAAPVIQLSSNVPRAVSPVHSGQTMDYFKRFNFLFAAPVFDADDLEGVRFNQIIEEIQRSGFEVVRARKLEDAEIAVQTDAAIGCMVVDWGKKGLEGKTSALINLMRRRGLDFPIILLIRRKRFEDLPVEVLDFIDGYVFLSEETPTFIAKNLISRLKQYAETLKTPFFGALVDYAEEGNQLWTCPGHNGGVFYNRSPIGRVFVEHLGESVFRDDLDNSVLDLGDLLTHEGPALKAQKEAAAIFGAEKTYFVLNGTSTSNKVALGALVTDGDLVLFDRNNHKAAHHGALMINGGIPVYVPTIRNAWGLIGPMRWDVLDEKALREAIRNHPLVRDRDAWRKERPFRVAVVEQCTYDGSIHSAEMILKRIGHLCEYILFDEAWAGFMKFHPLYAGRFAMGLANLPPEAPGIIATQSTHKQLASFSQASQIHIKDRHIRGQKRRVEHRRFNESFMQHASTSPFYPLFASLDVGAQMMKGRSGEVLWDDTIRLGIELRKKIRAMRREFEEKEQNPDRRWFFEPFVPDRVAIPDVSRPGAAHNVAWETLSTDELATNPALWQLSPDTNWHGFPDLAEGFAMTDPNKLTLLTPGFDRTTGAYAEHGIPAPVVAQYLRENRIVPEKNDLNSLLFLLTPGVEASKAGTLISGLVAFKRLHDDNALLADAIPEFYQRRQARYAGVRLRDLCGDMHRFFRAADVSALQARQFMPEHMPEIAMSPRDAARYLFRNDVDYLPIEAIAGRIATTPFVVYPPGIATIVPGERLTERAKPMVDYLKMFETCFNTFPGFDVEIQGVYKEIDAQGRIGLYTYVVAE

SEQ ID NO: 1941 - DNA, 2181 bp, Vibrio vulnificus
  CDS (1)..(2181)
atgaagcgtttagttattggtgttagtaattacatgccagaagatttcagtttattagctgaatctttagatgaacaatttaatcgtcatcttcatcctttagagcaagtcgaattaaccgatgttggtgctgccattattacgtcggcagatattaaggctggtctacacaaagtgatttctgaaacgggttatggcattccggttttcttggtcacagatgaaaacccagtgtcagccgaagattacgtatggttaaccggcgttatcgatttagaaagacaatccatcgaatactactgtcgccaaatcaatgaagcggtaaccaaatacgaatgccgcctattgccgcctttcttcaaacaactgacgcactacgtggaaatgggcaactctgcattcgactgtccaggacaccaaggcggtcagttcttcaaaaaacacccagcaggtaaacagttctacgatttcttcggtgaaaacctattccgtagtgacttgtgtaacgcggacgtagatttaggtgacttgttaatccacgaaggctctgcccaccaagctcaagcgcacgcagcaaaagtgttcaactcagacaaaacttacttcgtactcaacggcacttcggcttcaaacaaagtggtgtgtaacgcgttagtgaccgagggggacttggtgatgtttgaccgtaacaaccacaaatcaaaccaccacggcgcattaatccaagcgggcggtatgccagtttacctagaaacggcgcgtaacccttggggctttattggtggtatggatgagcactgttttgatgaagaatacatccgtgcccaaatcgccaaagtatcacccgaacgtgcgcgtgatgaacgtccattccgtcttgcgatcatccaattgggcacttacgacggtaccatctacaacgcacgctacgtgatggataagattggtcatctgtgtgactacatcctatttgactcagcatgggtgggttacgagcagttcattccgatgatgaaagactgttctccattgctactggatctgaaaccagaagatgcgggtgtgatcgtgactcagtctgttcacaagcaacaagctggcttttctcaaacctcgcaaatccacaaaaaagaccaccacatcaaaggtcaggctcgctactgcaaccacaaacgcttcaacaacgcgtttatgatgcacgcgtcaacttcaccattctatgcgctgttctccgcattggatgtgaacgccaagatccacgatggtgaagcgggtctgcgtctatggcgtgatgcggttaagacaggtatcgaagcgcgtaaagaaatccttaagagttgtgaattgattcgtccgttcattccagaccaagtcgaaggtcaaccttggggcagctacgacactgacgtgatcgcaacgaataagaaattcttcatgtttgagccaaacgcaagctggcacaaatttgaaggttacggtgaaggtcaatacttcgttgacccatgtaaattgttgctaactactgcgggtattgcagaagacggcagctacgcagactttggtattcctgccacgctattggcgaacttcctacgtgagaacggcatcatccctgagaagtgtgacttgaactctatcttgttccttctcactccagcagaggacatgggtaagatccgtcatcttgtggcgcaaattaaccgcttcgaaaaattcattcgtgatgatgcgccgctaaacatcgtgctgcctcgcgtttacgaagcgaataaagagcgctaccgcggctacaccatccgtcagctatgtcaggaaatgcatgacatgtacaaagagctgaacgtgaaacagctacaaaaagcgatgttccgtagcgaatacttcccaactatggtgcacaaaccagatgtggcgacacgcaaatacttccgtggcgagtgtgattacttgcctctgaaagaagcggtaggtcgtgtcgcagcagaaggtgcgcttccttaccctccaggcattatctgtgtgatcacaggcgaaatctggactcaacaagtggtcgattacttcttatctctagaagaaggcatcaaccgattcccaggcttcgcacccgagattcaaggtgtgtacctagaagacgtcaatggccgcaccaccgcccattgctacgcccttaaagattaa

SEQ ID NO: 1942 - protein, 726 aa, Vibrio vulnificus
MKRLVIGVSNYMPEDFSLLAESLDEQFNRHLHPLEQVELTDVGAAIITSADIKAGLHKVISETGYGIPVFLVTDENPVSAEDYVWLTGVIDLERQSIEYYCRQINEAVTKYECRLLPPFFKQLTHYVEMGNSAFDCPGHQGGQFFKKHPAGKQFYDFFGENLFRSDLCNADVDLGDLLIHEGSAHQAQAHAAKVFNSDKTYFVLNGTSASNKVVCNALVTEGDLVMFDRNNHKSNHHGALIQAGGMPVYLETARNPWGFIGGMDEHCFDEEYIRAQIAKVSPERARDERPFRLAIIQLGTYDGTIYNARYVMDKIGHLCDYILFDSAWVGYEQFIPMMKDCSPLLLDLKPEDAGVIVTQSVHKQQAGFSQTSQIHKKDHHIKGQARYCNHKRFNNAFMMHASTSPFYALFSALDVNAKIHDGEAGLRLWRDAVKTGIEARKEILKSCELIRPFIPDQVEGQPWGSYDTDVIATNKKFFMFEPNASWHKFEGYGEGQYFVDPCKLLLTTAGIAEDGSYADFGIPATLLANFLRENGIIPEKCDLNSILFLLTPAEDMGKIRHLVAQINRFEKFIRDDAPLNIVLPRVYEANKERYRGYTIRQLCQEMHDMYKELNVKQLQKAMFRSEYFPTMVHKPDVATRKYFRGECDYLPLKEAVGRVAAEGALPYPPGIICVITGEIWTQQVVDYFLSLEEGINRFPGFAPEIQGVYLEDVNGRTTAHCYALKD

SEQ ID NO: 1943 - DNA, 2109 bp, Vibrio vulnificus
  CDS (1)..(2109)
atgggtgtgttctttaaagaagagccagttcgccaattgcatgcagcacttgaaaaagccggttatgaagttgtttatccagtggatgacaaagatttgatcaagatgatcgaaatgaacccgcgcatttgtggtgtgctgtttgactgggataaatactcgcttgagctttgtgagcgtattagccaaatcaacgaaaaactgccagtacacgcgtttgctaacgagcaatcaacgctggatatttcgcttaccgatctacgcctaaacgtgcatttctttgaatacgcattgggcatggcggacgacatcgccatcaagatcaaccaagcgacacaagaatacaaagacgcgattacaccgccattcaccaaagcgctgtttaaatacgtggaagaaggcaaatacaccttctgtactccaggtcacatgggtggtacggcttttcaaaaaagtccagtcggcagcattttctacgatttctacggtccaaatactttcaaagcggacgtgtcgatttctatgccagagctaggctcactgcttgaccattcaggtccacacaaagaagcggaagagtacattgcgcgtacgttcaacgctgacgcatcgtacatcgtgacgaacggtacttcgacgtcaaacaaaattgtcggcatgttctctgcgccagcgggcagcacggtattggttgaccgtaactgtcataaatcattgactcacctaatgatgatgacggacgtaacacctatttacttccgcccaacccgtaacgcttacggcattcttggtggtattccacaaagtgaattcagccgtgaagtgatcgcagaaaaagtggctaaaacaccaggtgcgagcgcgccaagctacgcggtgattaccaactcaacttacgatggtttgttgtacaacacacaattcatcaaagagtctctcgactgtaaacacatccactttgatagtgcgtgggtgccttacactaacttcaaccgtatttacgaaggcaaatgcggcatgagtggcgaagcgatgccaggcaaagtgttctacgaaacacaatccactcacaaactgttggcggcgttctcgcaagcgtcaatgattcacgtaaaaggtgaatttgaccgtgagtcgttcaacgaagcctttatgatgcacacttccacctcgcctcaatacggcattgtggcatcaacagaaaccgcggcggcaatgatgcgtggtaacacgggccgtaagttgatgcaagattcaatcgaccgtgcgattcgtttccgtaaagagatcaaacgcttaaaaggtgaaagtgacggttggttctttgatgtttggcaaccagagaacattgagacaaccgaatgctggaaacttgaccctaaccaagactggcatggcttcaagaacatggacgatgaccacatgtatcttgacccaatcaaaatcactttgctgactcctggaatgagcaaagatggtgagttggaaaccagtggtattcctgcttcattggtggcgaaatatcttgatgaacgtggcattgtggtagaaaaaacaggcccttacaacttgttgttcttgttctcaattggtatcgacaaatcaaaagcgatgcaattgctacgtggtttgactgagttcaaacgtggttacgatctgaacctaacgattcgcaccatgctgcctgcgctgtaccgtgaagatccagcgttctacgaaggcatgcgtattcaagagctggcacaaggcattcacgatctgactcgtaagtaccgtctaccagaattgatgtacaaagcgttcgatgtgctaccagagatgaaagtcacgccacacgcagcttggcaacaagagcttcgtggtcaaaccgaagagatcttgctgaatgatatggtgggccgcgtgagtgccaacatgatccttccttaccctccaggtgtgcctctagtgctaccaggtgaagtggtgacagaaagctctcgtccagtactggatttcttggaaatgttgtgtgaaatcggcgcacattacccaggcttcgagaccgacatccacggcctataccgccaaaaagatggccgttacaccgtaaaagtactgaaagactga

SEQ ID NO: 1944 - protein, 702 aa, Vibrio vulnificus
MGVFFKEEPVRQLHAALEKAGYEVVYPVDDKDLIKMIEMNPRICGVLFDWDKYSLELCERISQINEKLPVHAFANEQSTLDISLTDLRLNVHFFEYALGMADDIAIKINQATQEYKDAITPPFTKALFKYVEEGKYTFCTPGHMGGTAFQKSPVGSIFYDFYGPNTFKADVSISMPELGSLLDHSGPHKEAEEYIARTFNADASYIVTNGTSTSNKIVGMFSAPAGSTVLVDRNCHKSLTHLMMMTDVTPIYFRPTRNAYGILGGIPQSEFSREVIAEKVAKTPGASAPSYAVITNSTYDGLLYNTQFIKESLDCKHIHFDSAWVPYTNFNRIYEGKCGMSGEAMPGKVFYETQSTHKLLAAFSQASMIHVKGEFDRESFNEAFMMHTSTSPQYGIVASTETAAAMMRGNTGRKLMQDSIDRAIRFRKEIKRLKGESDGWFFDVWQPENIETTECWKLDPNQDWHGFKNMDDDHMYLDPIKITLLTPGMSKDGELETSGIPASLVAKYLDERGIVVEKTGPYNLLFLFSIGIDKSKAMQLLRGLTEFKRGYDLNLTIRTMLPALYREDPAFYEGMRIQELAQGIHDLTRKYRLPELMYKAFDVLPEMKVTPHAAWQQELRGQTEEILLNDMVGRVSANMILPYPPGVPLVLPGEVVTESSRPVLDFLEMLCEIGAHYPGFETDIHGLYRQKDGRYTVKVLKD

SEQ ID NO: 1945 - DNA, 2163 bp, Shewanella oneidensis
  CDS (1)..(2163)
atgaaatcattaaaagttgccgcaagcttatctgttagatcttgttttgatatagacagagaagttgtcaatgtattaaccactgatttttgcgatgtgggtgcggctgtagtctctgttgatgatgttaaagatggtattgttgaaaaaattaaaaataccggattaaaactgcctattttcgtatcagtttgctgcgaagaaaccttcccagatgatatttgttcctcgattaccggggtatttgaactctgcggtagcaataccgatttctatggtaagcaggtcgaaaccgctatcaagaaatatgagcaagctctattaccgcccttctttggcactctgaaaaaatacgtcgaaatgggtaactccacctttgcctgcccaggccatcagggcggacaattctttcgtaaacatcccgtaggtcgccaatttttcgatttctttggcgaaaccattttccgctccgacatgtgtaatgctgacgtaaaactcggtgatctgttaatccacgaaggtgcaccactggatgcacaaaaatatgcggcaaaagtctttaacgccgataaaacctactttgtgcttaacggcacttcctcctcgaataaagtcgccaccaatgcgctgcttgctaaaggtgatttagtattattcgaccgtaataaccacaaatccaaccaccatggtgcgttaattcaagccggcgcaacaccgatttacttagaaaccgcccgtaaccccttcggctttattggcggtatcgacgcccactgcttcaaagaagcttatttaagggaacaaattcgcgaagttgcaccagaacgtgccgatgaaaaacgcccgttccgtttagcgattatccaactcggcacctacgacggcaccatctacaatgctcgccaagtggttgatcgtattggtcatctatgtgattacatcctgtttgactcggcttgggttggctatgaacagtttattcctatgatgaatgactgctcgccactgctgctggaactgacgcctgaagatcccggtattatcgtgactcaatcagtacataaacagcaggcaggtttctcacaaacgtcgcaaatccataaaaaagataaacatatcaaaggccaagcgagatattgcaaccataaacgtttcaacaatgcctttatgatgcacgcctccaccagccacttctatccactgtttgccgcattagatgtgaacgctaagatgcacgaaggtgccagcggccgttatctgtggcgtgaagccgtcaaagccgggattgaagcccgtaagttactgcttaaaaaatgtaagtatatcaagccatttatccccagcatgatcgatggccgccaatggcaggattacccaaccgagcaaatggccgatgatttgcgcttctttgaatttgaaccaggacaaaaatggcactcattcgagggctatgaaaaaggccaatatttcgttgacccttgtaagttcctattaaccacaccaggtattgatgccgaaaccggtaaatatactgagtttggtattccagcgactattttggctaacttcttacgtgaaaataatattattcccgagaagtgcgacttaaattcgatattattcctaatgacacctgcggaagatatggcaaaaatgcagcacttagtgtcgcaaatatcccgcttcgagaaattagtcgatgaagatgcgccattatcggaagtattgccaaacgtctataacgccaataaagcccgttataaagactacaccattcgccaactctgccaagaaatgcacaacctttatgtcagccatgacgtaaaacaactgcaaaaagaaatgttccgccatgctcacttcccaaccaaggtgatggacccgcaggaagccaatcttgaatttattcgtggcaatgtcgaattagtgccactgtcgcaaatcgaaggtcgaattgccgcagaaggcgccctgccatatccaccaggggtgttatgtatggtgccaggtgaaatatggggtggcgcagtacaacgttatttcttagctctcgaagaaggcatcaacttattacccggattctcccctgaattacaaggtgtttatctcgaaagcacccctgacggaaaaatccaagccttaggttatgtgttaaataaataa

SEQ ID NO: 1946 - protein, 720 aa, Shewanella oneidensis
MKSLKVAASLSVRSCFDIDREVVNVLTTDFCDVGAAVVSVDDVKDGIVEKIKNTGLKLPIFVSVCCEETFPDDICSSITGVFELCGSNTDFYGKQVETAIKKYEQALLPPFFGTLKKYVEMGNSTFACPGHQGGQFFRKHPVGRQFFDFFGETIFRSDMCNADVKLGDLLIHEGAPLDAQKYAAKVFNADKTYFVLNGTSSSNKVATNALLAKGDLVLFDRNNHKSNHHGALIQAGATPIYLETARNPFGFIGGIDAHCFKEAYLREQIREVAPERADEKRPFRLAIIQLGTYDGTIYNARQVVDRIGHLCDYILFDSAWVGYEQFIPMMNDCSPLLLELTPEDPGIIVTQSVHKQQAGFSQTSQIHKKDKHIKGQARYCNHKRFNNAFMMHASTSHFYPLFAALDVNAKMHEGASGRYLWREAVKAGIEARKLLLKKCKYIKPFIPSMIDGRQWQDYPTEQMADDLRFFEFEPGQKWHSFEGYEKGQYFVDPCKFLLTTPGIDAETGKYTEFGIPATILANFLRENNIIPEKCDLNSILFLMTPAEDMAKMQHLVSQISRFEKLVDEDAPLSEVLPNVYNANKARYKDYTIRQLCQEMHNLYVSHDVKQLQKEMFRHAHFPTKVMDPQEANLEFIRGNVELVPLSQIEGRIAAEGALPYPPGVLCMVPGEIWGGAVQRYFLALEEGINLLPGFSPELQGVYLESTPDGKIQALGYVLNK

SEQ ID NO: 1947 - DNA, 1419 bp, Oceanobacillus iheyensis
  CDS (1)..(1419)
atgaagttggatcaatcttatatgccattcgtagatcatttaagaaatttcagttcaaagagaccggtatcattccatgttccagggcataagcatggggcggtttttcctgaagcagctagagaattatttggctctattttatctgtagatgtaactgaaatagcaggaatggatgacttgcatgcaccaagtgagatcatcgcagaagcagaaaaactagcaacagattatttcaattctgaccatacattttttttagttggaggatctacatcaggtaatctagcaatgattatggcagcatgtaatccgggagatgaggtaatcgtccaacggaattgtcataaatcaattatgaatggcttagaacttgcaggtgcaaagccaatatttatagctccagagtggagagatgatttacaacgatataccgcaccaacatatgatagcataaaacaagcaatgttgaggtttccgaatgcaaaggctcttattctcacctatccagattactttggggcggtttttgatattcagtccatgattgaattagcacacacctatcatattccagtatttgttgatgaagcacatggcgtccatttttcatcatctgaaatgtttccacaatcggctttacagttaggagcagatgttgtagtacaatccgcacataaaatggctccagctatgacaatggctgcatatttacatattggcacttcacgtgtagaaaaacatcgacttgcttattatttgcaaatgttacagtcgagtagtccatcttatccgataatggcttctttggatgtagcaagattttatttagcgcaattatcaaaagaaaaaatccgaggtatcttaaatagtgtagaaaacgtaagaaacatattctccggggcatcattttgggaattggtacctcatgatgatccgttaaaattaacgttccacgtgaaacatggctataaaataagtgagatagaatcgatgctcgaatatcatggaatttatccagagttaacgacagaaaatcaattcttattcatacatggtttagcgccttttgtagaacaagattatttgaaaaaaacaatacaattgatagaggaagaattaaaaaaatcagtgaaacatgctacaatagaaggggcaaagctttttaccaatcctatagaggaactagcattgtcataccaagaaatgaaacacattacatcacttcttgtcccatttgctcaaagtgaaggtgaaattgcagcagaggcagtgatcccatatccccctggtattccagtcatactcaaaggcgagagaattacgaaggcgcatattacaaagattcagcttttgattcaacaaggagtaaccattcagcaacgggaagaaggaatacgtatatataggaaggcatga

SEQ ID NO: 1948 - protein, 472 aa, Oceanobacillus iheyensis
MKLDQSYMPFVDHLRNFSSKRPVSFHVPGHKHGAVFPEAARELFGSILSVDVTEIAGMDDLHAPSEIIAEAEKLATDYFNSDHTFFLVGGSTSGNLAMIMAACNPGDEVIVQRNCHKSIMNGLELAGAKPIFIAPEWRDDLQRYTAPTYDSIKQAMLRFPNAKALILTYPDYFGAVFDIQSMIELAHTYHIPVFVDEAHGVHFSSSEMFPQSALQLGADVVVQSAHKMAPAMTMAAYLHIGTSRVEKHRLAYYLQMLQSSSPSYPIMASLDVARFYLAQLSKEKIRGILNSVENVRNIFSGASFWELVPHDDPLKLTFHVKHGYKISEIESMLEYHGIYPELTTENQFLFIHGLAPFVEQDYLKKTIQLIEEELKKSVKHATIEGAKLFTNPIEELALSYQEMKHITSLLVPFAQSEGEIAAEAVIPYPPGIPVILKGERITKAHITKIQLLIQQGVTIQQREEGIRIYRKA

SEQ ID NO: 1949 - DNA, 2154 bp, Escherichia coli O6
  CDS (1)..(2154)
atgactatgaacgttattgcaatattgaatcacatgggggtttattttaaagaagaacccatccgtgaacttcatcgcgcgcttgaacgtctgaacttccagattgtttacccgaacgaccgtgacgacttattaaaactgatcgaaaacaatgcgcgtctgtgcggcgttatttttgactgggataaatataatctcgagctgtgcgaagaaattagcaaaatgaacgagaacctgccgttgtacgcgttcgctaatacgtattccactctcgatgtaagcctgaatgacctgcgtttacagattagcttctttgaatatgcgctgggtgctgctgatgatattgctaacaagatcaagcagaccactgacgaatatatcaacactattctgcctccgctgaccaaagcactgtttaaatatgttcgtgaaggtaaatatactttctgtactcctggtcacatgggtggtactgcattccagaaaagcccggtaggtagcctgttctatgatttctttggtccgaacaccatgaaatctgatatttccatttcagtatctgaattgggttctctgctggatcacagtggtccacacaaagaagcagaacagtatatcgctcgcgtctttaacgcagaccgcagctacatggtgaccaacggtacttccactgcgaacaaaattgttggtatgtactctgctccggcaggcagcaccattctgattgaccgtaactgccacaaatcgctgacccacctgatgatgatgagcgatgttacgccaatctatttccgcccgacccgtaacgcttacggtattcttggtggtatcccacagagtgaattccagcacgctaccattgctaagcgcgtgaaagaaacaccaaacgcaacctggccggtacatgctgtaattaccaactctacctatgatggtctgctgtacaacaccgacttcatcaagaaaacactggatgtgaaatccatccactttgactccgcgtgggtgccttacaccaacttctcaccgatttacgaaggtaaatgcggtatgagcggtggccgtgtagaagggaaagtgatttacgaaacccagtctactcacaaactgctggcggcgttctctcaggcttccatgatccacgttaaaggtgacgtaaacgaagaaacctttaacgaagcctacatgatgcacaccaccacctctccgcactacggtatcgtggcgtccactgaaaccgctgcggcgatgatgaaaggcaatgcaggtaaacgtctgatcaatggttccattgaacgtgcgatcaaattccgtaaagagatcaaacgtctgagaacggaatctgatggctggttctttgatgtatggcagccggatcatatcgatacgactgaatgctggccgctgcgttctgacagcacatggcacggcttcaaaaacatcgataacgagcacatgtatcttgacccgatcaaagtcaccctgctgactccggggatggaaaaagacggcaccatgagcgactttggtattccggccagcatcgtggcgaaatacctcgacgaacatggcatcgttgttgagaaaaccggtccgtataacctgctgttcctgttcagcatcggtatcgataagaccaaagcactgagcctgctgcgtgctctgactgacttcaaacgtgcgttcgacctgaacctgcgtgtgaaaaacatgctgccgtctctgtatcgtgaagatcctgaattctatgaaaacatgcgtattcaggaactggctcagaatatccacaaactgattgttcaccacaatctgccggatctgatgtatcgcgcatttgaagttctgccgactatggtaatgactccgtatgctgcgttccagaaagagctgcacggtatgaccgaagaagtttacctcgacgaaatggtcggtcgtattaacgccaatatgatccttccgtatccgccgggagttcctctggtaatgccgggtgaaatgatcaccgaagaaagccgtccggttctggagttcctgcagatgctgtgtgaaatcggcgctcactatccgggctttgaaaccgatattcacggtgcataccgtcaggctgatggccgctataccgttaaagtattgaaagaagaaagcaaaaaataa

SEQ ID NO: 1950 - protein, 717 aa, Escherichia coli O6
MTMNVIAILNHMGVYFKEEPIRELHRALERLNFQIVYPNDRDDLLKLIENNARLCGVIFDWDKYNLELCEEISKMNENLPLYAFANTYSTLDVSLNDLRLQISFFEYALGAADDIANKIKQTTDEYINTILPPLTKALFKYVREGKYTFCTPGHMGGTAFQKSPVGSLFYDFFGPNTMKSDISISVSELGSLLDHSGPHKEAEQYIARVFNADRSYMVTNGTSTANKIVGMYSAPAGSTILIDRNCHKSLTHLMMMSDVTPIYFRPTRNAYGILGGIPQSEFQHATIAKRVKETPNATWPVHAVITNSTYDGLLYNTDFIKKTLDVKSIHFDSAWVPYTNFSPIYEGKCGMSGGRVEGKVIYETQSTHKLLAAFSQASMIHVKGDVNEETFNEAYMMHTTTSPHYGIVASTETAAAMMKGNAGKRLINGSIERAIKFRKEIKRLRTESDGWFFDVWQPDHIDTTECWPLRSDSTWHGFKNIDNEHMYLDPIKVTLLTPGMEKDGTMSDFGIPASIVAKYLDEHGIVVEKTGPYNLLFLFSIGIDKTKALSLLRALTDFKRAFDLNLRVKNMLPSLYREDPEFYENMRIQELAQNIHKLIVHHNLPDLMYRAFEVLPTMVMTPYAAFQKELHGMTEEVYLDEMVGRINANMILPYPPGVPLVMPGEMITEESRPVLEFLQMLCEIGAHYPGFETDIHGAYRQADGRYTVKVLKEESKK

SEQ ID NO: 1951 - DNA, 2271 bp, Escherichia coli O6
  CDS (1)..(2271)
atgatgaaagtattaattgttgaaagcgagtttctccatcaagacacctgggtcggtaacgccgttgagcgtctggcagatgctttaagccagcaaaatgttaccgtgattaaatccacctcctttgatgatggttttgccattctctcttcaaacgaagccattgactgcctgatgttcagctatcaaatggaacatccggacgaacatcaaaacgtcagacaattgatcggtaagcttcatgagcgccaacaaaacgtgccggtcttcctgttgggcgatcgggaaaaagccctcgccgcaatggaccgggatctgctggagcttgtcgatgaattcgcctggattctggaagatactgccgactttatcgccggacgcgccgttgccgcgatgacccgctaccgccagcagctgttgccgccactgttcagcgcgctgatgaaatatagcgacatccatgaatattcctgggcagcgccaggccaccagggcggcgttggttttactaaaacacccgccggacgtttctaccatgactactatggtgaaaatctgttccgcaccgacatgggcatcgaacgcacttccctcggttctttgcttgaccatactggcgcatttggcgaaagcgaaaaatatgccgcacgcgtatttggtgccgatcgctcctggtcggtagtcgtcggtacttccggctctaaccgcaccatcatgcaggcttgcatgaccgataacgatgtcgtggtcgttgaccgtaactgccataaatccatcgaacaaggcttgatgctgacaggcgcgaaaccggtctacatggtgccaagccgcaaccgctacggcattatcgggccaatctatccgcaggaaatgcaacctgaaaccttgcagaagaaaatcagtgaaagcccgctgaccaaagacaaagtcgggcaaaaaccgtcttactgcgtggtgaccaactgtacctatgacggcgtgtgttataacgctaaagaagcgcaggatctgctggaaaaaacctccgatcgtctgcactttgacgaagcctggtacggctatgcacgtttcaacccgatctatgccgatcactatgccatgcgcggcgaacctggcgatcacaacggtcctaccgttttcgccacccactccacccacaaactgctgaatgcgctgtcccaggcctcttatattcatgtacgtgaaggtcgtggggcgattaacttctcccgcttcaaccaggcctacatgatgcatgccaccacctccccgctgtatgccatctgcgcatccaacgacgtggcagtgtcgatgatggacggcaacagcggcctgtcactgacccaggaagtgatcgacgaagcggttgatttccgtcaggcgatggcgcggctgtataaagagttcaccgctgacggtagctggttcttcaaaccgtggaacaaagaagtcgtcaccgacccacaaaccggcaaaacctatgactttgctgacgcaccaaccaaactgctgaccaccgttcaggactgctgggtcatgcatccgggcgaaagctggcacggcttcaaagatattccggataactggagtatgctcgacccgattaaagtcagcatccttgctccgggaatgggtgaagatggtgaactggaagaaatcggtgttccggcggcgctggtcacagcctggcttggtcgccacggcattgtgcctacccgtaccactgacttccagattatgttcctgttctctatgggcgtgacccgtgggaaatgggggactctggttaacaccctttgctccttcaaacgccactatgatgccaacacaccgctggcgcaggtgatgccggaacttgttgaacaatatcctgacacttacgcgaacatggggattcacgatctgggtgacaccatgtttgcctggctgaaagaaaacaaccctggcgcacggttgaatgaagcctattctggcctaccggtggcggaaatcaccccgcgtgaagcgtacaacgcgattgtcgacaacaatgtcgaactggtatccattgaaaatctgccaggacgtatcgcggcaaactcagttatcccgtatccgccaggaatcccgatgctgctgtctggtgaaaacttcggcgataaaaacagtccgcaagtaagttatttacgctcactgcaatcctgggaccatcatttccctggatttgaacacgaaacagaagggacagaaattattgacggtatttaccacgttatgtgtgtgaaagcgtaa

SEQ ID NO: 1952 - protein, 756 aa, Escherichia coli O6
MMKVLIVESEFLHQDTWVGNAVERLADALSQQNVTVIKSTSFDDGFAILSSNEAIDCLMFSYQMEHPDEHQNVRQLIGKLHERQQNVPVFLLGDREKALAAMDRDLLELVDEFAWILEDTADFIAGRAVAAMTRYRQQLLPPLFSALMKYSDIHEYSWAAPGHQGGVGFTKTPAGRFYHDYYGENLFRTDMGIERTSLGSLLDHTGAFGESEKYAARVFGADRSWSVVVGTSGSNRTIMQACMTDNDVVVVDRNCHKSIEQGLMLTGAKPVYMVPSRNRYGIIGPIYPQEMQPETLQKKISESPLTKDKVGQKPSYCVVTNCTYDGVCYNAKEAQDLLEKTSDRLHFDEAWYGYARFNPIYADHYAMRGEPGDHNGPTVFATHSTHKLLNALSQASYIHVREGRGAINFSRFNQAYMMHATTSPLYAICASNDVAVSMMDGNSGLSLTQEVIDEAVDFRQAMARLYKEFTADGSWFFKPWNKEVVTDPQTGKTYDFADAPTKLLTTVQDCWVMHPGESWHGFKDIPDNWSMLDPIKVSILAPGMGEDGELEEIGVPAALVTAWLGRHGIVPTRTTDFQIMFLFSMGVTRGKWGTLVNTLCSFKRHYDANTPLAQVMPELVEQYPDTYANMGIHDLGDTMFAWLKENNPGARLNEAYSGLPVAEITPREAYNAIVDNNVELVSIENLPGRIAANSVIPYPPGIPMLLSGENFGDKNSPQVSYLRSLQSWDHHFPGFEHETEGTEIIDGIYHVMCVKA

SEQ ID NO: 1953 - DNA, 2370 bp, Escherichia coli O6
  CDS (1)..(2370)
atgaaatttaaccacaatcttttatttatttcctcacaatatcttgatggcgacaacccttcgcagcaggtactggaagagcttcaaaccgaactcgcggaacgcggttttaaaattcatatcacgcaccagatctctgatggattaaaaatcatcgaaaaaagcccccaatacagcgggattggtttttactgggagccagacaatccgacctttgcagaagagctacagcactttatcagcatattccgcaaaagaaatgccacgacgccgctgataattttctcagaacagaatattaccgatcgtatcccactcgacgtcttaaaagaggtcagcgaatatgtttatctgttctctgaatccgcagccttcactgccaatcgactgtactccttagtccaccgctatgcggataagcttcttcctccctactttaaaacccttaaggactttaccgaggacggtgactattactgggactgcccggggcatatggggggaatggcctatctgaaacatcctgttggcattgagttcattaacttctttggcgaaaacatgatgcgcgctgatattggcgtggctaccgcggagatgggggattatctgatccacgccggaccgcctaaaaaatcggaagaaattgcggcccgactgtttggctctgattggaccttctacggtgtttccggctcatcggggtcgaaccgtattgtggcccaggctgcggttggcgcagatgaaattgccattattgaccgaaattgccacaagtcacttaatcatggcctgaccttgtctcaggcaaggccggtttacctgaaacctacccgcaacgcgtgggggctgattgggcctatcccgaccggacgcctgaagaaggccagtattgatgcgctggtggcaaacagccgactggcatctggtgcggtcagccagtccccgtcctacgccgtggtaaccaactgcacctatgatggcttctgttataacgtgaacgatgtagtcagacacctgggtgaaagcgcaccgcgcatccattttgatgaagcatggtatgcctatgcgcgtttccatccgctataccagagtcgctatgcaatggacgcggaggaaacgccaaatcgtccaaccctattcgccgtacagtccacccataaaatgctgccctcactctccatggcctcaatgattcatgtgaagaaaagcgatcgcgcgccgcttaatttcgatgactttaacgatgcctttatgatgcacggcacgacctcaccctactacccgatcattgcatcaattgatgtggcagtaagcatgatggagggtgaatccggttattcgcttgtgcaggagtcaattgaagaagcgattgccttccgtaaagccgtggtcagcgtcaagcgccagctccaggagcaggaaggtggtgacgcctggttcttcgatgtgcttcagccaaccgaagtgcaggacagcgattctgggcagcgatacagttttgaagaggcacccgtatcgctgctgagccacagcgccgactgctggtcgctgcgctccggtgagcgctggcacggttttgccgatgatgatctggtcgaaaccaacagtatgctcgatccagtaaaagtgaccctgacttgtccagggatcggcccgaagggagaataccagaaaaacggtattccgggatatttgctgacccgttttctcgatgaccgtcgcattgaaattgcccgtactggtgactacaccgtgctgatcctgttctccgtcggcatcaccaaaggcaaatggggaactctgattgaaagcctgctggcctttaaaaagcattacgacaatgacgatctggccacagatgctatcccgtcgctgaaagcgcattctccacactacgacacgctaaccctcaaggagctatgtcagataatgcatgaaaaaatggatgagctggagctgatgtcgcatatcaacgacgcggtaaacaccgatccggaaccagttatgaccccggcagaagcctatcagaaagtcgtacgctacaaaaccgagcatatccggctggatgattttagcggcagaattgccgccagcatgctcgtcccatatcccccaggcattcctgtactgatgccgggcgaacggatgccgcaaggtaacaagggcattattggctatctgcgcgccctgcaggaattcgataagcaattcccaggttttgaacatgagatccagggcgttaacgtcgatgaaaacggggacttctgggtcagagcgattgtggaagaagaacgcgatgggcagtcgctacccggccacataacctttaaacgccaggtctctggtattaaaaagggccgccagtag

SEQ ID NO: 1954 - protein, 789 aa, Escherichia coli O6
MKFNHNLLFISSQYLDGDNPSQQVLEELQTELAERGFKIHITHQISDGLKIIEKSPQYSGIGFYWEPDNPTFAEELQHFISIFRKRNATTPLIIFSEQNITDRIPLDVLKEVSEYVYLFSESAAFTANRLYSLVHRYADKLLPPYFKTLKDFTEDGDYYWDCPGHMGGMAYLKHPVGIEFINFFGENMMRADIGVATAEMGDYLIHAGPPKKSEEIAARLFGSDWTFYGVSGSSGSNRIVAQAAVGADEIAIIDRNCHKSLNHGLTLSQARPVYLKPTRNAWGLIGPIPTGRLKKASIDALVANSRLASGAVSQSPSYAVVTNCTYDGFCYNVNDVVRHLGESAPRIHFDEAWYAYARFHPLYQSRYAMDAEETPNRPTLFAVQSTHKMLPSLSMASMIHVKKSDRAPLNFDDFNDAFMMHGTTSPYYPIIASIDVAVSMMEGESGYSLVQESIEEAIAFRKAVVSVKRQLQEQEGGDAWFFDVLQPTEVQDSDSGQRYSFEEAPVSLLSHSADCWSLRSGERWHGFADDDLVETNSMLDPVKVTLTCPGIGPKGEYQKNGIPGYLLTRFLDDRRIEIARTGDYTVLILFSVGITKGKWGTLIESLLAFKKHYDNDDLATDAIPSLKAHSPHYDTLTLKELCQIMHEKMDELELMSHINDAVNTDPEPVMTPAEAYQKVVRYKTEHIRLDDFSGRIAASMLVPYPPGIPVLMPGERMPQGNKGIIGYLRALQEFDKQFPGFEHEIQGVNVDENGDFWVRAIVEEERDGQSLPGHITFKRQVSGIKKGRQ

SEQ ID NO: 1955 - DNA, 2136 bp, Escherichia coli O6
  CDS (1)..(2136)
atgaaatcaatgaatattgccgccagtagtgaactggtatcccgactttctactcatcgccgcgtggtggcgttgggagatactgattttacggacgtcgcggcagtcgtcattaccgctgcggatagtcgcagtggcattcttgcattgcttaagcgcaccggttttcatctaccggtgtttttgtattccgaacatgctgttgaattacctgcgggcgttacggcggtaatcaacggcaacgagcagcagtggctggagctggaatccgcagcctgtcagtatgaagagaatttgctgccaccgttttatgacacgctgacgcagtacgttgagatgggtaatagcacctttgcttgccctggacatcaacatggtgcgttctttaaaaagcatcctgccggacgccatttttacgatttctttggcgagaacatctttcgcgccgatatgtgtaacgctgacgtaaaattgggcgatctgcttattcatgaaggatcggcgaaagatgcgcagaaatttgcagccaaagtctttcatgccgataaaacctattttgtgctgaacggcacatcggcagcgaataaagtggtgacgaatgcgctgttaacgcgtggcgatctggtgctcttcgaccgtaacaaccataagtcgaatcatcatggcgcgttgattcaggcgggggcgacaccggtctatctggaagcttcacgtaacccgtttggtttcattggcggtattgatgcgcactgttttaatgaagagtatctgcgccagcaaattcgcgacgttgcgccagaaaaagccgacctgccgcgcccgtttcgcctggcgattattcagctgggaacctatgacggcactgtctataacgcccgtcaggtgatcgataccgttgggcatctgtgtgattacattctgtttgattccgcgtgggtcggttacgaacagtttatcccgatgatggcggatagctcgccgctgctgttagaacttaacgaaaacgatccggggatctttgtgactcagtcggtgcacaaacagcaggcgggattctcacagacgtcgcagatccataaaaaagataaccatatccgtggacaggcgcgtttttgcccgcataagcggttgaataatgcctttatgctccatgcttctaccagcccgttctatccgctgttcgccgccctggacgttaacgccaaaattcatgaaggggagagtgggcgtcggctgtgggctgagtgcgttgagttgggtattgagtcgcgcaaggctattcttgcgcgctgtaagctgttccgcccgtttatcccgcccgttgttgatggcaaattgtggcaggattatccgacgtcagtgttagccagcgaccgccgttttttcagttttgagccgggggcgaattggcacggctttgaaggatatgccgcggatcagtattttgttgatccgtgcaagctgttactcaccacgccgggtatcgatgccgaaaccggcgaatatagcgactttggcgttccggcgacgattctggcgcactacctgcgtgagaacggcattgtgccggagaagtgcgatctcaactccattctgttcttattaactccggcggaaagccacgagaagctggcacaactggtggcgatgctggcgcagtttgaacagcatattgaggatgattcgccgctggctgaggtgttgccgagcgtttataacaaatatccggtgcgctatcgcgactacaccctgcgccagttgtgtcaggagatgcacgatttgtatgtcagtttcgacgtcaaagacctacaaaaagcgatgttccgccagcagagtttcccgtcagtggtgatgaatccccaggatgcgcatagcgcttatattcgcggtgaagtggagttggtgcggattcgtgatgccgaagggcgaattgcggcagaaggggcgttgccttatccacctggcgtgctttgcgtggtacccggggaagtctggggtggggcggttcaacgttatttccttgcgctggaagaaggcgtgaatttgttgccgggattttcgccggagttgcaaggtgtctatagcgaaaccgatgcggatggcatgaaacggttgtacggttatgtgttgaagtaa

SEQ ID NO: 1956 - protein, 711 aa, Escherichia coli O6
MKSMNIAASSELVSRLSTHRRVVALGDTDFTDVAAVVITAADSRSGILALLKRTGFHLPVFLYSEHAVELPAGVTAVINGNEQQWLELESAACQYEENLLPPFYDTLTQYVEMGNSTFACPGHQHGAFFKKHPAGRHFYDFFGENIFRADMCNADVKLGDLLIHEGSAKDAQKFAAKVFHADKTYFVLNGTSAANKVVTNALLTRGDLVLFDRNNHKSNHHGALIQAGATPVYLEASRNPFGFIGGIDAHCFNEEYLRQQIRDVAPEKADLPRPFRLAIIQLGTYDGTVYNARQVIDTVGHLCDYILFDSAWVGYEQFIPMMADSSPLLLELNENDPGIFVTQSVHKQQAGFSQTSQIHKKDNHIRGQARFCPHKRLNNAFMLHASTSPFYPLFAALDVNAKIHEGESGRRLWAECVELGIESRKAILARCKLFRPFIPPVVDGKLWQDYPTSVLASDRRFFSFEPGANWHGFEGYAADQYFVDPCKLLLTTPGIDAETGEYSDFGVPATILAHYLRENGIVPEKCDLNSILFLLTPAESHEKLAQLVAMLAQFEQHIEDDSPLAEVLPSVYNKYPVRYRDYTLRQLCQEMHDLYVSFDVKDLQKAMFRQQSFPSVVMNPQDAHSAYIRGEVELVRIRDAEGRIAAEGALPYPPGVLCVVPGEVWGGAVQRYFLALEEGVNLLPGFSPELQGVYSETDADGMKRLYGYVLK

SEQ ID NO: 1957 - DNA, 2208 bp, Escherichia coli O6
  CDS (1)..(2208)
atgaacaaaatgtcagaattaaaaattgccgttagccgttcttgcccggattgcttttccactcatcgtgaatgcgtgaatattgacaaaagtaattatattgacgttgccgctattattttatcagtcaatgatgttgaacgtggaaaactcgatgaaatagacgctactggctatggcattcctgtttttattgcaacggaaaatgaagaacgtgtaccagcagaatatctgccacgtatttctggtgtcttcgagcattgcgaatcacggaaagagttttatggacgtcagttagaaaccgctgccagccattatgaaacgcaactgcgcccgcccttcttccgcgcactggtcgattatgtcaatcagggcaatagcgcttttgactgcccgggtcatcagggaggtgagtttttccgtcgccatccggcaggcaatcagttcgtggaatattttggcgaaatgctcttccgctccgacttgtgtaatgccgacgttgcaatgggtgatcttctgattcatgaaggtgcgccatgcattgcacagcaacatgcggctaaagtgtttaatgccgataaaacgtactttgttttaaacggcacctcctcctccaacaaagtggttttaaacgccctgctgacaccgggtgatctggtgctgtttgaccgcaataaccataagtctaaccatcacggggccttgctacaggctggtgcaacaccggtttatctggaaacagcacgtaacccgtatggttttatcggtggcattgatgcgcactgcttcgaagaaagttatctgcgtgaactgattacagaagttgcaccgcaacgggcaaaagaagcgcgtccgttccgcctcgctgtgattcagttaggcacctacgacggtactatttataacgcccgccaggtggtggataaaatcggtcatctgtgtgactacatcctgtttgactcagcatgggtcggctatgaacagtttattccgatgatggcggactgttcgccgctgctgctggagcttaatgagaacgatccgggtattctggttacgcaatctgtgcataaacaacaggctggtttttctcagacttcacaaattcataaaaaagacagccatatcaaagggcaacagcgttatgtaccgcacaaacgcatgaacaacgcctttatgatgcacgcctccaccagcccgttctatccgctgtttgccgcactggatatcaacgccaaaatgcatgaaggtgtcagcggtcgtaatatgtggatggattgtgtggttaacggtattaatgcccgcaaattgatcctcgataactgccagcacattcgcccgttcgttcctgaactggtggatggtaaaccctggcagtcgtatgaaacagcgcaaattgcggttgatctgcgcttctttaaatttgtacccggtgagcactggcattcttttgaaggctacgcagagaaccaatactttgtcgatccgtgcaaactgttgctgacaactccaggtattgatgcacgtaacggcgaatatgaagcgttcggtgtacctgcaacgattcttgctaacttcctgcgcgaaaatggcgtagtgccggaaaaatgcgatcttaactccatcctcttcctgctgactccggcagaagatatggccaaactgcagcaacttgttgccctgctggtacgcttcgaaaaactactggaagctgatgcgcctctggcggaagtactgccttccatctacaaacagcatgaagagcgctacgccggttataccctgcgtcagttgtgccaggaaatgcatgatttgtatgcccgtcacaacgtgaaacaactgcaaaaagagatgttccgtaaggaacacttccctcgcgtcagcatgaatccgcaagaagccaactacgcctacttacgcggtgaagtggagctggttcgtctgccggatgcagaaggccgtatcgctgccgaaggtgcgcttccttatcctccgggtgtgctgtgtgttgttcctggtgaaatctggggtggtgctgttttgcgttacttcagcgctctggaagaaggcatcaacctgctgccaggttttgcaccggagctgcagggtgtctatatcgaagaacatgatggtcgtaagcaagtttggtgctatgtcatcaagcctcgtgatgcgcaaagcaccctgttgaaaggggaaaaattatga

SEQ ID NO: 1958 - protein, 735 aa, Escherichia coli O6
MNKMSELKIAVSRSCPDCFSTHRECVNIDKSNYIDVAAIILSVNDVERGKLDEIDATGYGIPVFIATENEERVPAEYLPRISGVFEHCESRKEFYGRQLETAASHYETQLRPPFFRALVDYVNQGNSAFDCPGHQGGEFFRRHPAGNQFVEYFGEMLFRSDLCNADVAMGDLLIHEGAPCIAQQHAAKVFNADKTYFVLNGTSSSNKVVLNALLTPGDLVLFDRNNHKSNHHGALLQAGATPVYLETARNPYGFIGGIDAHCFEESYLRELITEVAPQRAKEARPFRLAVIQLGTYDGTIYNARQVVDKIGHLCDYILFDSAWVGYEQFIPMMADCSPLLLELNENDPGILVTQSVHKQQAGFSQTSQIHKKDSHIKGQQRYVPHKRMNNAFMMHASTSPFYPLFAALDINAKMHEGVSGRNMWMDCVVNGINARKLILDNCQHIRPFVPELVDGKPWQSYETAQIAVDLRFFKFVPGEHWHSFEGYAENQYFVDPCKLLLTTPGIDARNGEYEAFGVPATILANFLRENGVVPEKCDLNSILFLLTPAEDMAKLQQLVALLVRFEKLLEADAPLAEVLPSIYKQHEERYAGYTLRQLCQEMHDLYARHNVKQLQKEMFRKEHFPRVSMNPQEANYAYLRGEVELVRLPDAEGRIAAEGALPYPPGVLCVVPGEIWGGAVLRYFSALEEGINLLPGFAPELQGVYIEEHDGRKQVWCYVIKPRDAQSTLLKGEKL

SEQ ID NO: 1959 - DNA, 2142 bp, Escherichia coli O6
  CDS (1)..(2142)
atgaacatcattgccattatgggaccgcatggcgtcttttataaagatgagcccatcaaagaactggagtcggcgctggtggcgcaaggctttcagattatctggccacaaaacagcgttgatttgctgaagtttatcgaacataacccacgaatttgcggcgtgatttttgactgggatgagtacagtctcgatttatgtagcgatatcaatcaacttaatgaatatctcccgctttatgccttcatcaacacccactcgacgatggatgtcagcgtgcaggatatgcggatggcgctctggttttttgaatatgcgctggggcaggcggaagatatcgccattcgtatgcgtcagtacaccaacgaatatcttgataacattacgccgccgttcacgaaagccttgtttacctacgtcaaagagcggaagtacaccttttgtacgccggggcatatgggcggcaccgcatatcaaaaaagcccggttggctgtctgttttatgattttttcggcgggaataccctcaaggcggacgtctctatttcggtcaccgagcttggttcgttgctcgaccacaccgggccacacctggaagcggaagagtacatcgcgcggacgtttggcgcggaacagagttatatcgttaccaacggaacatcgacgtcgaacaaaattgtgggtatgtacgccgcgccatccggcagtacgctgttgatcgaccgcaattgtcataaatcgctggcgcatctgttgatgatgaacgatgtagtgccagtctggctgaaaccgacgcgtaatgcgttggggattctgggtgggatcccgcgcggtgaatttactcgcgacagcatcgaagagaaagtcgctgccaccacgcaggcacaatggccggttcatgcggtgatcaccaactccacctatgatggcttgctctacaacaccgactggatcaaacagacgctggatgtcccgtcgattcacttcgattctgcctgggtgccgtacacccattttcatccaatctaccagggtaaaagtggtatgagcggcgagcgtgttgcaggaaaagtgatcttcgaaacgcagtcgacccacaaaatgctggcggcgttatcgcaggcgtcgctgatccacattaaaggtgagtatgacgaagaggcgtttaacgaagcctttatgatgcataccaccacctcgcccagttatcccattgttgcttctgttgagacggcggcggcgatgttgcgtggtaatccgggcaaacggctgattaaccgttcagtagaacgagctctgcattttcgcaaagaggtccagcggctgcgggaagagtctgacggctggtttttcgatatctggcaaccgccgcaggtggatgaagccgaatgctggcccgttgcgcctggcgaacagtggcacggctttagcgatgcggatgccaatcacatgtttctcgatccggttaaagtcactattttgacaccggggatggacgagcagggcaatatgagcgaggaggggatcccggcggcgctggtggcaaaattcctcgacgaacgtgggatcgtagtagagaaaaccggcccttataacctgctgtttctctttagtattggcatcgataaaaccaaagcaatgggattattgcgtgggttgacggaatttaagcgctcttacgatctcaacctgcggatcaaaaatatgctgcccgatctctatgcagaagatcccgatttctaccgcaatatgcgtattcaggatctggcgcaagggatccataagctgattcgtaaacacgatcttcccggtttgatgttgcgggcatttgataccttgccggagatgatcatgacgccacatcaggcatggcagagacagattaaaggcgaagtagaaaccattgcgctggaacaactggtcggtagagtatcggcaaatatgatcctgccttatccacccggcgtaccgctgctgatgccgggagaaatgcttaccgaagagagccgcacggtactcgattttctactgatgctttgttccgtagggcaacattaccccggttttgaaacggatattcacggcgcgaaacaggacgaagacggtgtttaccgcgtacgagtcctaaaaatggcaggataa

SEQ ID NO: 1960 - protein, 713 aa, Escherichia coli O6
MNIIAIMGPHGVFYKDEPIKELESALVAQGFQIIWPQNSVDLLKFIEHNPRICGVIFDWDEYSLDLCSDINQLNEYLPLYAFINTHSTMDVSVQDMRMALWFFEYALGQAEDIAIRMRQYTNEYLDNITPPFTKALFTYVKERKYTFCTPGHMGGTAYQKSPVGCLFYDFFGGNTLKADVSISVTELGSLLDHTGPHLEAEEYIARTFGAEQSYIVTNGTSTSNKIVGMYAAPSGSTLLIDRNCHKSLAHLLMMNDVVPVWLKPTRNALGILGGIPRGEFTRDSIEEKVAATTQAQWPVHAVITNSTYDGLLYNTDWIKQTLDVPSIHFDSAWVPYTHFHPIYQGKSGMSGERVAGKVIFETQSTHKMLAALSQASLIHIKGEYDEEAFNEAFMMHTTTSPSYPIVASVETAAAMLRGNPGKRLINRSVERALHFRKEVQRLREESDGWFFDIWQPPQVDEAECWPVAPGEQWHGFSDADANHMFLDPVKVTILTPGMDEQGNMSEEGIPAALVAKFLDERGIVVEKTGPYNLLFLFSIGIDKTKAMGLLRGLTEFKRSYDLNLRIKNMLPDLYAEDPDFYRNMRIQDLAQGIHKLIRKHDLPGLMLRAFDTLPEMIMTPHQAWQRQIKGEVETIALEQLVGRVSANMILPYPPGVPLLMPGEMLTEESRTVLDFLLMLCSVGQHYPGFETDIHGAKQDEDGVYRVRVLKMAG

SEQ ID NO: 1961 - DNA, 1488 bp, Thermoanaerobacter tengcongensis
  CDS (1)..(1488)
atgaaaaagctagatcaaactcaaacccctttatttgacgctctaatggaatatgtgaataataatacaattcccttccacgtaccgggacacaaaaaaggggagggaatggccaaaaaatttctagactttgttggaaaaaatgtgctctcaatggatgtaactgtgtttcagcaagtagacagcttgcacaaaccaacaggtcctatcaaatacgctcaagagttggcagcagaagcttttggagcagacgcaacatttttctcaatacacggaacctctggagccatccaagctatgattttaagcgtaatgggagaagatgaaaaaatcattgtaccaagaaacattcacaagtctgtgacctccggaatcatattaagtggcgctataccaatttacatgcagccagaaattgacaaaaatatcggggttgccttgaacgtcacccctgagacggtcgaaaaaactttaagacagcatcctgatgcaaaagcggttttaatcatcaacccaacttattacggagtttctacagacatagtaaaaattgctgaaattgtccacgattatggagcaattttaatggtagatgaagctcatggccctcaccttaaatttaacgaaaaattgcccatttcggctatggaagcaggagccgatatatgcgctcaaagcactcataaaattattggttctatgacacaaagttcaatgcttcatgtaaaaggagacaggatagatataaacagggtaaagcaggtgatgagcttattacagaccacaagcccttcatatatactcctggcgtcactggacgtagcaagaatgcaaatggctacagaaggaaaggaacttctggacaggactatcgaattagctgaatacgccagaagagagataaataaaattaaagggctttactgctttggcgaagaaatagtaggtcgcgatggcgcttatgattttgaccctacaaaagtgaccataactgccaaaggattaggtataactgggcatcaactggaaagaatcttagcagaaaaatactacattcaagtagagctttcggacatgtacaatgtcctctgcgtattctcaattggagacacaaaagaaaaagtagattacttgcttcgcgctttaagagagataagcgacgaattgtacgacgaaaacatagaagtagcaaagccaatagatattccagaaattcccgaattagtagtttcacctagatatgcctttaacgctcctacagtggctcttcctctgagagaaagtgtagggcagataagcgcagaatttttaatggcatatccacctggaataccagtgctctgccctggcgaaagaataacaatggaaattatagaatacgtcgaaaaaatgaaagaggcaaatttaagcattcaaggcacagaagacccagaggcaaattatataaaggtggtaaattacagacaggctctaaatgtaatcgcataa

SEQ ID NO: 1962 - protein, 495 aa, Thermoanaerobacter tengcongensis
MKKLDQTQTPLFDALMEYVNNNTIPFHVPGHKKGEGMAKKFLDFVGKNVLSMDVTVFQQVDSLHKPTGPIKYAQELAAEAFGADATFFSIHGTSGAIQAMILSVMGEDEKIIVPRNIHKSVTSGIILSGAIPIYMQPEIDKNIGVALNVTPETVEKTLRQHPDAKAVLIINPTYYGVSTDIVKIAEIVHDYGAILMVDEAHGPHLKFNEKLPISAMEAGADICAQSTHKIIGSMTQSSMLHVKGDRIDINRVKQVMSLLQTTSPSYILLASLDVARMQMATEGKELLDRTIELAEYARREINKIKGLYCFGEEIVGRDGAYDFDPTKVTITAKGLGITGHQLERILAEKYYIQVELSDMYNVLCVFSIGDTKEKVDYLLRALREISDELYDENIEVAKPIDIPEIPELVVSPRYAFNAPTVALPLRESVGQISAEFLMAYPPGIPVLCPGERITMEIIEYVEKMKEANLSIQGTEDPEANYIKVVNYRQALNVIA

SEQ ID NO: 1963 - DNA, 1419 bp, Thermoanaerobacter tengcongensis
  CDS (1)..(1419)
atgtcaactcctttgtacgatgctctcatggaatacgtgaaaaaggaaactgtaccttttcacatgcccggccataaacaaggaagagtattgccaaaagagtacattgaaaatttagcaaaaattgatttgacagaggtgccaggacttgacaaccttcacaatcccgatggtccaatccttgaagctgagaagcttgcagcaaagacctttgggtcaaaacaagctttctttttggtaaatggcagtactgctggaatatatgcggccatgtatgcagtgctaaaccctacggataaagtgcttgtgatgaggaattctcataaatctgtttacaacggagttgtgcttactcaatcgattcccgtgtatttgctgcccgagatagactatgaaaatggaattgcgatgggaattgatgtagaaaggctagaggaggttttgcaaaaagaaagagatgtaaaagctgtagtagtgacataccctaattattacggtttttgcagtgatattgaaaaaattgtggatattgtgcataagtacggtaaaattttgattgtagatgaagctcatggggctcactttcctttttcaaacaatttgcctaagtcctccataaaagcaggagcggatattgtagtacagagcctgcacaagactcttacttcttttactcaaacttctatactccatttaaattctgatagggtagatgtggatcggttaaaatattctttaagcctttttcaatctacatctccttcttatattctcatgtcttcaattgacatggcaagagaatacatggagaaagaaggcaaaaaaagactagaagaagttattcaattagccctatatgtaagaagagagattgataaaatggaaggtattagatgtttaggagaagatatagttggacggtacggcattgtggattttgatgttacaaagctcactataagtgtaaagaatttgggaattgaagggcctgaagcagaggattttttgaggagagaatgcaatatacaagttgaaatgtcggatgtttacaatatattagcgatggttactgtaggggatgatgaaaaaagggtaaaaatgcttttagaaggtttaaaaaagctttcaaaaaacaggaagagggttaaatttggggatagaattctttttccttctttgcctgaaatggagttgactccttcggaagctgtgaggaaaaagaaggtgagggtaccctttgaaaaggcggaaggggcgatttctgcagattttgtgacaccttatccgccaggagttcctctcatatgtccaggagagaggattgaaaaagatatggtaaaatatatagaagtattgtataataaaggtattaaggttttgggtatacaggataatttactgtcggtgtgtgagatatga

SEQ ID NO: 1964 - protein, 472 aa, Thermoanaerobacter tengcongensis
MSTPLYDALMEYVKKETVPFHMPGHKQGRVLPKEYIENLAKIDLTEVPGLDNLHNPDGPILEAEKLAAKTFGSKQAFFLVNGSTAGIYAAMYAVLNPTDKVLVMRNSHKSVYNGVVLTQSIPVYLLPEIDYENGIAMGIDVERLEEVLQKERDVKAVVVTYPNYYGFCSDIEKIVDIVHKYGKILIVDEAHGAHFPFSNNLPKSSIKAGADIVVQSLHKTLTSFTQTSILHLNSDRVDVDRLKYSLSLFQSTSPSYILMSSIDMAREYMEKEGKKRLEEVIQLALYVRREIDKMEGIRCLGEDIVGRYGIVDFDVTKLTISVKNLGIEGPEAEDFLRRECNIQVEMSDVYNILAMVTVGDDEKRVKMLLEGLKKLSKNRKRVKFGDRILFPSLPEMELTPSEAVRKKKVRVPFEKAEGAISADFVTPYPPGVPLICPGERIEKDMVKYIEVLYNKGIKVLGIQDNLLSVCEI

SEQ ID NO: 1965 - DNA, 2352 bp, Fusobacterium nucleatum
  CDS (1)..(2352)
atgtctaaattagaccaaaataagacaccattatttacagtattaaaagatgaatatgtgagaagaaatatacttccatttcatgttcctggacataaaagaggaaaaggagttgatgaagaattttataacttcatgggagaggctcctttttcaatagatgtaacaatttttaaaatggttgatggtcttcatcatccaaaaagttgtattaaagaatctcaagaattagttgcagatgcttatggggttaaacatagtttctttgcagtaaatggaacttctggtgctatacaagcaatgataatgtcagttgtaaaagcaggggaaaaaatattagtaccaagaaatgttcataaatcagtttcagcaggaattattttaagtggttctgaacctgtgtatatgaatcctgaaattgatgaaaatttaggaattgctttaggtgttaaaccacaaacagttgaaaatatgttaaaacaagatccagacatagcagctgttcttattataaatccaacttattatggggtagcaacagatattaaaaagatagcagacatagttcatagctatgatatacctcttattgtagatgaagctcatggaccacatttacactttcatgatgaattaccagtttcagctgttgatgctggagcagatatctgtactcaaagtacacataaaattttaggtgctatgactcaaatgtctcttattcatgtaaattcagatagagttaatgttgaaaaagtaaaacaaattttaagtttactccatacaacttctccatcatatccattgatggcatctcttgattgtgcaagaaggcaaatagctacacaagggcaagaattgcttacaagaactattgagcttgctaaatattttagaagagaagctaatagaatacctggaatttattgttttggagaagaacttgttggaaaagatggtttctttgcttttgacccaacaaaaattacaatatctgcaaaagaactaggacttaagggtggagagcttgaaagcctacttgtagatgactacaatattcaaatggaattatcagactactataacactttagggcttattacaataggagatacagaagaaagtgtaaataaattgctagatgctttaagagatataagcagaagattttttggaaaaggaaaaacattagaaaaaaatattataaaacttcctgaaactcctgaattagtattaatgccaagagaagctttttacagtgaaaagaataaagttccatttaaagaaagtgttggaaaaatatctggtgaaatgataatggcatatccacctggtatcccaataattattgcaggagaaagaataagtcaagatataattgatcatattgaagaattaaaagaagctgatttacatattcaaggtatggaagacccagaacttgaaaccataaatgtaattgaagaagaagacgctatttacttatacactgaaaagatgaaaaatgttcttattggagtgcaaacaaatcttggagttaataaaacaggaactgaatttggaccagatgatttaattcaagcttatccagatacttttgatgaaatggaattaatttctgttgaaagacaaaaagaagacttcaatgataaaaaattaaaattcaaaaatacagttttagatacttgtgaaaagatagctaagagagttaatgaagctgtaattgatggatatagaccaatacttgttggaggagaccactcaatttcattaggaagtgtatcaggtgtttctctagaaaaagaaattggagttttatggataagtgctcatggagatatgaatacccctgaaagtacacttacaggaaatattcatggaatgccattagctttacttcaaggtctaggagatagggaacttgtaaattgtttctatgaaggagctaaacttgacagcagaaatattgttatctttggtgcaagagaaattgaagttgaagaaagaaaaattattgaaaaaactggtgtaaagattgtttattatgatgatattctaagaaaaggtatagataatgttttagacgaagtgaaagattatctaaaaattgataatttacatatcagtatagatatgaatgtatttgacccagaaattgctcctggtgtatctgtacctgttagaagaggaatgtcttatgatgaaatgtttaaatcattgaaatttgcatttaaaaattactcagttacatcagcagatattacagaatttaatccattgaatgatattaacggaaaaactgctgaacttgtaaatggtatagtacaatatatgatgaacccagattattaa

SEQ ID NO: 1966 - protein, 783 aa, Fusobacterium nucleatum
MSKLDQNKTPLFTVLKDEYVRRNILPFHVPGHKRGKGVDEEFYNFMGEAPFSIDVTIFKMVDGLHHPKSCIKESQELVADAYGVKHSFFAVNGTSGAIQAMIMSVVKAGEKILVPRNVHKSVSAGIILSGSEPVYMNPEIDENLGIALGVKPQTVENMLKQDPDIAAVLIINPTYYGVATDIKKIADIVHSYDIPLIVDEAHGPHLHFHDELPVSAVDAGADICTQSTHKILGAMTQMSLIHVNSDRVNVEKVKQILSLLHTTSPSYPLMASLDCARRQIATQGQELLTRTIELAKYFRREANRIPGIYCFGEELVGKDGFFAFDPTKITISAKELGLKGGELESLLVDDYNIQMELSDYYNTLGLITIGDTEESVNKLLDALRDISRRFFGKGKTLEKNIIKLPETPELVLMPREAFYSEKNKVPFKESVGKISGEMIMAYPPGIPIIIAGERISQDIIDHIEELKEADLHIQGMEDPELETINVIEEEDAIYLYTEKMKNVLIGVQTNLGVNKTGTEFGPDDLIQAYPDTFDEMELISVERQKEDFNDKKLKFKNTVLDTCEKIAKRVNEAVIDGYRPILVGGDHSISLGSVSGVSLEKEIGVLWISAHGDMNTPESTLTGNIHGMPLALLQGLGDRELVNCFYEGAKLDSRNIVIFGAREIEVEERKIIEKTGVKIVYYDDILRKGIDNVLDEVKDYLKIDNLHISIDMNVFDPEIAPGVSVPVRRGMSYDEMFKSLKFAFKNYSVTSADITEFNPLNDINGKTAELVNGIVQYMMNPDY

SEQ ID NO: 1967 - DNA, 1431 bp, Clostridium perfringens
  CDS (1)..(1431)
atgagaaatattcctataattaatggaatatcaatgtacttaagagaagaaatagtacctttttctatgccaggtcataagaatggacgaggctttaagggatttgaagaaatacttttaaaaggtgatttaactgaagttgaaggattagataatttgcagcatccagagggaataattaaagaagctgaggataaactttctaatttatataaaagtaaaaagagttattttttagttaatggaagtacttgtggaaatttaataatgatattttctttgtttaaagaaggagataaagttttagtagaaagaaactgtcacaaaagtataatgaatggaataataatgagaaaattaaaaccagtttttataaataatatatttcattcaaaattaaaagcaccagtaggaattgatttaaatcatttaaaagagcaaataagtttaaataaagatttaaaaggaataatattaacttaccctaattattatggcgtaggagttaatatagatgagactataaaaatagctagagaagcaaatttaaaagtaggaatagattcagctcatggagcacactttggatttaacaagttattgcctgaaagtgtacaagaattaaaggctgatatagttgtaatgagtgctcataaaactttaccaagtttaacacagactgcttggatgcatgttaacaatgaagattttattgaagaaatagaattttataaaaatatttttatgagtactagcccttcatatatgtttatgatgagtttagattattcaagaaactttttagaagaacatggtgaagaggcatataataacttatttaagatcatagaggattttaaaaatcatattaaggacttatcatattttaaaatattagataaggaatttttaattaatgggttagaaaaaaatattaagataaatgatattaagatagataatagtagaatagtactaaacttaagggaaaatttaaatggtaataaactattagattatttaagaagtaaaaatatacaatgtgaaatgagtgataataaaaatgttgttttaataccgtcaccatttaatactgaagaagattttaaaattttaaaagatgctttaaaatcttgtgatataaattgtcttaaagatgaagaaatagatttttatttaacagatttaccagagaaaaaattagaaccttttgaagttttggatttagaatatgaaagaattaatataaatgatgctgtaggtaaaattgtggcagagagtatagttccatacccaccaggagttcctatgataataatgggagaagtgatagaagaaagacatattaaattacttaatgagtatatgaaaagcaaggtagatttaataggtataaaggataaaaaagttaaggtaataaagaataagtaa

SEQ ID NO: 1968 - protein, 476 aa, Clostridium perfringens
MRNIPIINGISMYLREEIVPFSMPGHKNGRGFKGFEEILLKGDLTEVEGLDNLQHPEGIIKEAEDKLSNLYKSKKSYFLVNGSTCGNLIMIFSLFKEGDKVLVERNCHKSIMNGIIMRKLKPVFINNIFHSKLKAPVGIDLNHLKEQISLNKDLKGIILTYPNYYGVGVNIDETIKIAREANLKVGIDSAHGAHFGFNKLLPESVQELKADIVVMSAHKTLPSLTQTAWMHVNNEDFIEEIEFYKNIFMSTSPSYMFMMSLDYSRNFLEEHGEEAYNNLFKIIEDFKNHIKDLSYFKILDKEFLINGLEKNIKINDIKIDNSRIVLNLRENLNGNKLLDYLRSKNIQCEMSDNKNVVLIPSPFNTEEDFKILKDALKSCDINCLKDEEIDFYLTDLPEKKLEPFEVLDLEYERININDAVGKIVAESIVPYPPGVPMIIMGEVIEERHIKLLNEYMKSKVDLIGIKDKKVKVIKNK

SEQ ID NO: 1969 - DNA, 1455 bp, Clostridium perfringens
  CDS (1)..(1455)
atgaaaagactttctcaagaaaatgctcctatttatgaagcattaaaatggtacaagaatcaaagaattgttccttttgatgtaccaggtcataaacaaggaagaggaaatacagaattaagagaatttttaggtgaagattgtgtttcagtagatgtaaattcaatgaaacccttagataatctttgtcatccaacttctgtaataaaggatgcagaagaattagcagctgaggcctttggtgctgataaggcatttttcatggttaatggaaccacatcagctgtacaagccatgataatgagtgtttgcaaagatggagataagattataatgcctaggaatgtgcatagatctgcaataaattctttaataataacaggggtaactcctgtgtatataaatccaggaattcatggtagacttggaatttctctaggaatggcaatggaagatataaaaaaggccattaaggaaaatccagatgctaaggctatttttgttaataacccaacatactatgggatttgctctaatttaagagaaatagttaagttagctcatgaaaataatatgtatgtcttagttgatgaagctcatggaactcatttttattttgataaaagacttccagtatcagctatggaggcaggggcagatatggcagctgttagcatacataaaacaggaggctcattaactcagagttctatgttgcttatgaagtgtaatagaattaagccagattatgtgagaacaataataaacttaacacaaacaactagtggttcttatttacttttatcttctttagatattgctagaagaaatttagccttaaatggagaaaaaatatttgaagaggttgttggaatagctgaatatgcaagagaagaaataaataagataggtggttattacgctttctcaaaagaaataaataatggtgatgatatttatgattttgatgtaactaagcttactataaacactttagaaactggacttgctggaatagaagtttatgacatattaagagatgattatggaattcaaatagagcttggagatgtggctaatattcttgccataatatcagttggagatactagatataacattgagagattagtttcagctttaagtgagattaagagaattcatgaaaaagataaaaaagatatttttgaccacgaatatatagatcctatagttaaggttaagccaaaagaggctttttatgctgataagaagaaggttcttttaagagaaagtgaaggattaatttctggagaatttgtaatgtgttatccaccaggaattccaatacttgccccaggagagcttataactaaggagactatagactatattgagtattctaagaaaaagggaagtttagttacaggccctgaagatatggaaattgaatatataaatgttttagattgttag

SEQ ID NO: 1970 - protein, 484 aa, Clostridium perfringens
MKRLSQENAPIYEALKWYKNQRIVPFDVPGHKQGRGNTELREFLGEDCVSVDVNSMKPLDNLCHPTSVIKDAEELAAEAFGADKAFFMVNGTTSAVQAMIMSVCKDGDKIIMPRNVHRSAINSLIITGVTPVYINPGIHGRLGISLGMAMEDIKKAIKENPDAKAIFVNNPTYYGICSNLREIVKLAHENNMYVLVDEAHGTHFYFDKRLPVSAMEAGADMAAVSIHKTGGSLTQSSMLLMKCNRIKPDYVRTIINLTQTTSGSYLLLSSLDIARRNLALNGEKIFEEVVGIAEYAREEINKIGGYYAFSKEINNGDDIYDFDVTKLTINTLETGLAGIEVYDILRDDYGIQIELGDVANILAIISVGDTRYNIERLVSALSEIKRIHEKDKKDIFDHEYIDPIVKVKPKEAFYADKKKVLLRESEGLISGEFVMCYPPGIPILAPGELITKETIDYIEYSKKKGSLVTGPEDMEIEYINVLDC

SEQ ID NO: 1971 - DNA, 2280 bp, Ralstonia solanacearum
  CDS (1)..(2280)
atgaaattccgttttcccgtcatcatcatcgacgaggacttccgctccgagaacatctccgggtcgggcattcgcgcgctggcgcaggccatcgaagaagagggcatggaggtcacgggcctgaccagctatggcgacctgacctcgttcgcgcagcagtcgagccgggcgtccaccttcatcgtctcgatcgacgacgatgagttcatcaacccggacaacgacaagccggaaccggaagcggtggaaaacctgcgcagcttcgtggccgaagtgcgccgccgcaacgccaacatccccatcttcctgtacggcgagacgcgcacctcgcgccacctgcccaacgacatcctgcgcgagctgcacggcttcatccacatgttcgaggacacgccggagttcgtggcgcgccacatcatccgcgaagcccgcaactacctggattcgctgccgccgccgttcttcaaggcgctgatcgactacgcgcaggacagctcctactcgtggcactgcccggggcactcgggcggcgtggcgttcctcaagagcccggtgggccaggtgttccaccagttcttcggcgagaacatgctgcgcgccgacgtctgcaacgcggtggacgagctcggccagctgctcgaccacaccggcccggtggcggcctccgagcgcaatgccgcgcgcatcttcggctcggaccacatgttcttcgtcaccaacggcacgtccacctcgaacaagatggtgtggcacgccaacgtggcgcccggcgacatcgtggtggtggaccgcaactgccacaagtcgatcctgcacgcgatcatgatgacgggcgcgatccccgtgttcctgatgccgacgcgcaaccactacggcatcatcggcccgattccgcagagcgagttcgagcccgagaccatcgcccgcaagatcgccgagcatccgttcgccagccaggccgcgaacaagaagccgcgcatcctgaccctcacgcagggcacgtacgacggcgtgctgtacaacgccgagcgcatcaagcacatgctgtcgaccgagatcgacacgctgcacttcgacgaggcctggctgccgcacgcctcgttccacccgttctaccgcgacatgcacgccatcggccagggccgcgcgcgcagcaaggacgcgctggtgttcgccacgcagagcacgcacaagctgctggccggcctgtctcaggcttcgcagatcctcgtgcaggattccgagacgcgcaagctcgacacgtaccgcttcaacgaggcgtacctgatgcacacctcgaccagcccgcagtactcgatcatcgcctcgtgcgacgtggccgcggcgatgatggaagcgccgggcggcaccgcgctggtggaagagagcatcgccgaggccctggacttccgccgcgccatgcgcaaggtggagcaggagtacgtcggcacgaatggtggcaacggccgcggcgacgactggtggttcaaggtctggggcccgaacgacctgtccgatgaaggcatcgaggagcgcgaggcctggatgctcaaggccaacgagcgctggcacggcttcggcgacctggccgaggacttcaacctgctcgacccgatcaaggccaccatcatcaccccgggcctggacgtggacggcaagttcagcgagtcgggcatcccggcggccatcgtcacgaagtacctcgccgagcacggcatcatcgtcgagaagaccgggctgtactcgttcttcatcatgttcaccatcggcatcaccaagggccgctggaactcgatggtgaccgagctgcagcagttcaaggacgactacgacaacaaccagccgctgtggcgcgtgctgccggagttcgtgcggcagtatccgcaatacgagcgcatcggcctgcgcgagctgtgcgacgccatccacagcgtctacaaggccaacgacgtggcccgcgtgaccaccgagatgtacctctccaacatggagccggcgatgaagccgtcggacgcatgggccaagatggcgcaccgcgagaccgagcgcgtggccatcgacgacctggagggccgcatcaccgccatcctgctgacgccgtatccgccgggcattccgctgctgatcccgggcgagcgcttcaaccggaccatcgtgcagtacctgcagttcgcgcgcgagttcaacaagctgttcccgggcttcgagaccgatatccacgggctggtggaggaggagattgagggtcgggttgggtactttgtcgactgcgtgaggtga

SEQ ID NO: 1972 - protein, 759 aa, Ralstonia solanacearum
MKFRFPVIIIDEDFRSENISGSGIRALAQAIEEEGMEVTGLTSYGDLTSFAQQSSRASTFIVSIDDDEFINPDNDKPEPEAVENLRSFVAEVRRRNANIPIFLYGETRTSRHLPNDILRELHGFIHMFEDTPEFVARHIIREARNYLDSLPPPFFKALIDYAQDSSYSWHCPGHSGGVAFLKSPVGQVFHQFFGENMLRADVCNAVDELGQLLDHTGPVAASERNAARIFGSDHMFFVTNGTSTSNKMVWHANVAPGDIVVVDRNCHKSILHAIMMTGAIPVFLMPTRNHYGIIGPIPQSEFEPETIARKIAEHPFASQAANKKPRILTLTQGTYDGVLYNAERIKHMLSTEIDTLHFDEAWLPHASFHPFYRDMHAIGQGRARSKDALVFATQSTHKLLAGLSQASQILVQDSETRKLDTYRFNEAYLMHTSTSPQYSIIASCDVAAAMMEAPGGTALVEESIAEALDFRRAMRKVEQEYVGTNGGNGRGDDWWFKVWGPNDLSDEGIEEREAWMLKANERWHGFGDLAEDFNLLDPIKATIITPGLDVDGKFSESGIPAAIVTKYLAEHGIIVEKTGLYSFFIMFTIGITKGRWNSMVTELQQFKDDYDNNQPLWRVLPEFVRQYPQYERIGLRELCDAIHSVYKANDVARVTTEMYLSNMEPAMKPSDAWAKMAHRETERVAIDDLEGRITAILLTPYPPGIPLLIPGERFNRTIVQYLQFAREFNKLFPGFETDIHGLVEEEIEGRVGYFVDCVR

SEQ ID NO: 1973 - DNA, 2271 bp, Salmonella typhimurium
  CDS (1)..(2271)
atgatgaaagtattaattgttgaaagtgagtttctgcatcaggacacctgggttggcaacgcggttgagcgtctggcagatgccttgagccaacaaaatgttaccgtcattaaatcgacatccttcgatgacggctatgccatcttgtccgcgaacgaagccattgactgtctgatgtttagctaccaaatggaacaaccggatgagcacctgagcgtcaggcaattgatcggtaagcttcacgagcgtcagcaaaacgtgcccgttttcctgttaggcgacagggaaaaagcgacggcatcgctggaccgcgacctgctggagcttgtcgatgaattcgcctggattctggaagacaccgctgactttatcgccggacgcgccgttgccgccatgacccggtatcgccagcaactgttaccgccgctgtttaacgcgttgatgaaatacagcgacattcatgaatattcatgggcggcgccgggacaccagggcggcgtcggtttcactaaaacgccttccggtcgcttttatcacgattattatggcgaaaacctgttccgcagcgatatggggattgagcgtaccacgctcggttcactcctcgaccataccggcgcgtttggcgaaagcgagaaaaacgccgcccgcgtattcggtgctgaccgctcctggtccgtagttgtcgggacctcaggttctaaccgtactattatgcaggcctgtatgacggataatgatgtcgttgtactggatcgtaactgccataaatccatcgagcaggggctgatcctcactggggccaaaccggtatatatggtgccaagccgtaaccgttacggcattattgggccaatctacccgcaggaaatgcagcctgaaaccttgcagaaaaaaatcagcgccagcccgctgaccaaaactaaagccggacagaaaccgtcttacagcgtagtgaccaactgtacctatgacggcgtatgctataacgccaaagaggcgcaggatctgctggcaaaaaccagcgatcgcattcacttcgacgaagcatggtacggctatgcgcgcttcaacccgatttattgcgatcactacgcgatgcgcggcgagccaggcgaccataacggtccgaccgtgtttgccacccactccacgcacaaactactgaatgcgctttcacaagcttcctacattcacgtccgtgaaggccgtggcgcggtgaatttctcccgcttcaaccaggcctatatgatgcatgccaccacctctccgttatatgccatctgcgcatccaacgatgtggcggtatcgatgatggacggtaacagcggcctgtccctgactcaagaggtgattgacgaagcggttgatttccgtcaggcgatggcgcgtctttataaagagtttaccgatgaaggcgactggttctttaaaccgtggaataaggacgtcgtcaccgatccacaaaccggtaaaacgtatgacttcgccgacgcgccggcaaaactgctagccactgaccagaactgctgggtcatgcgccccggggaaacctggcacggctttaaagacctgccggataactggagtatgctggacccgattaaagtcagtatcctggcgccgggtatgggcgacgatggcgaactggaagcatccggcgtacctgctgcgctggtcacagcatggcttggccgccacggtatcgtgccgacccgcaccaccgactttcagattatgttcctgttctctatgggggtaactcgcgggaaatggggaacgctgatcaacacgctgtgctccttcaaacatcattacgacgcgaatacgccgctggcgcaggtgatgccggaactggtgcaggattatcctgacacttacgcgaacatgggtattcatgacctgggcgataaaatgtttgcctggctacgtgaaaataacccgggcgcccgtctcaacgccgcctattccaccctgccggttgcggagattaccccgcgcgacgcctacaacgcgattgtgaacaacaatattgaaatggtggcgattgaaaatctaccgggtcgcattgcggcgaactccgttattccttacccgccaggcatcccgatgctgctctccggcgaaaactttggcgatgaaaacagtccgcaggtgggttacttacgctcactgcaatcctgggatcatcacttccctggctttgagcatgaaaccgaaggcacggaaattattgatggcgtatatcacgttatgtgcgtgaaagcctaa

SEQ ID NO: 1974 - protein, 756 aa, Salmonella typhimurium
MMKVLIVESEFLHQDTWVGNAVERLADALSQQNVTVIKSTSFDDGYAILSANEAIDCLMFSYQMEQPDEHLSVRQLIGKLHERQQNVPVFLLGDREKATASLDRDLLELVDEFAWILEDTADFIAGRAVAAMTRYRQQLLPPLFNALMKYSDIHEYSWAAPGHQGGVGFTKTPSGRFYHDYYGENLFRSDMGIERTTLGSLLDHTGAFGESEKNAARVFGADRSWSVVVGTSGSNRTIMQACMTDNDVVVLDRNCHKSIEQGLILTGAKPVYMVPSRNRYGIIGPIYPQEMQPETLQKKISASPLTKTKAGQKPSYSVVTNCTYDGVCYNAKEAQDLLAKTSDRIHFDEAWYGYARFNPIYCDHYAMRGEPGDHNGPTVFATHSTHKLLNALSQASYIHVREGRGAVNFSRFNQAYMMHATTSPLYAICASNDVAVSMMDGNSGLSLTQEVIDEAVDFRQAMARLYKEFTDEGDWFFKPWNKDVVTDPQTGKTYDFADAPAKLLATDQNCWVMRPGETWHGFKDLPDNWSMLDPIKVSILAPGMGDDGELEASGVPAALVTAWLGRHGIVPTRTTDFQIMFLFSMGVTRGKWGTLINTLCSFKHHYDANTPLAQVMPELVQDYPDTYANMGIHDLGDKMFAWLRENNPGARLNAAYSTLPVAEITPRDAYNAIVNNNIEMVAIENLPGRIAANSVIPYPPGIPMLLSGENFGDENSPQVGYLRSLQSWDHHFPGFEHETEGTEIIDGVYHVMCVKA

SEQ ID NO: 1975 - DNA, 2136 bp, Salmonella typhimurium
  CDS (1)..(2136)
atgaaatcaatgaatattgccgccagcggtgaactcattccccgtctctccacccaccgaaacgtagtggcgctggacagtaccgactttaccgatgtggccgcagtcgtcattaccactgccgacagccgtagcggtattctggcgttgcttaaacgcaccggttttcacctgccggtgtttatgcttgcggatgaacccgtcagcgcgcctgtcggcgttacggcggtaatagtcgggaacgcgcaggaatggctggagctggaaaacgctgcctgtcgctacgaagcggaacttctgccgcccttttatggcaccctgacccagtatgtcgacatggggaatagtacttttgcttgcccggggcaccagcatggcgaattttttagaaaacatcccgcaggccgccatttttatgacttttttggtgaaaacctgtttcgtgcggatatgtgtaacgccgatgtgaaacttggcgatctgctaatacatgaaggttctgccaaacacgcgcagaaatttgcggcaaaagtgtttaatgcggataaaacctactttgtgctgaatgggacttcggcggcgaataaagtggtcaccaacgccctgctgacgcgcggcgatctggtgctgtttgatcgtaataatcacaaatccaaccaccacggcgccctgattcaggccggggcgacgccagtctatcttgaagcggcgcgtaacccgtttggttttatcggtggcattgatgcgcactgttttgatgaaacgtacctgcgcgaccagattcgtgacgtgatgccggaaagcgccgatgcgtcgcgtccgttccgcctggcgatcattcagctgggtacctatgacggcactatttacaacgcccgtcaggtggtggataaaatcgggcatctctgcgattacattctgtttgactccgcgtgggtaggctatgagcagtttatcaatatgatggcggatacctcgccgttgcggctggagcttaatgaaaacgaccctgggatctttgtgacccaatcggtacataagcaacaggcggggttctcacaaacctcgcagatccacaaaaaagataaccatattcgcggccaggcgcgtttttgcccgcacaaacgcctgaacaacgccttcatgttgcatgcttcaaccagtccgttctacccgctgtttgcggcgctggatgtcaatgccaaaatccacgaaggggagagcggtcgccgcctgtgggcggagtgcgttgcgctgggcattgacgcgcgtaaagccattctcgcccgttgcaaactgcttcagccctttatcccactggtggttgacggcaagccgtggcaggcatatccgacggagaccattgccagcaatcgtcgtttcttcagttttgaacccggggcgaaatggcatggctttgagggctatgcggatgaccagtattttgtcgacccctgtaaactgttactgaccacgccaggtattgatgccgatagtgggcgatacaccgaattcggcatcccggcgaccattctcgcccactatctgcgtgagaacggtattgtgcctgagaagtgcgatctcaactcgattctgttcttgctgacacccgccgagagcgaagagaagctggcgcgactggtcgcgatgctggcgcaatttgaacggcacattgaagacgatacgccgcttgcggatgtattgccgacggtttttcagaaatacccggtgcgctaccgcgattacaccctgcgtgagctatgtcaggagatgcacaacctgtacgttagctttgacgttaaggatctgcaaaaagcgatgttccgcaaagaaagcctgccgcatgtggcgatgaacccacaggatgccaacagcgcctttattcgcggcgatgtagagctggtgcgtatcagcgaggcgggcgggcgtattgctgccgagggggcattgccatacccgccgggcgtactgtgcgtggtgccgggggagatttggggcggcgcggcgcagcgttattttttggcgctggaagagggcatcaatctgttgcctggtttttcgccggaattgcagggggtatatagcgagaccgatgccgatggaattcaacgcttgtacggatatgttttaaagtaa

SEQ ID NO: 1976 - protein, 711 aa, Salmonella typhimurium
MKSMNIAASGELIPRLSTHRNVVALDSTDFTDVAAVVITTADSRSGILALLKRTGFHLPVFMLADEPVSAPVGVTAVIVGNAQEWLELENAACRYEAELLPPFYGTLTQYVDMGNSTFACPGHQHGEFFRKHPAGRHFYDFFGENLFRADMCNADVKLGDLLIHEGSAKHAQKFAAKVFNADKTYFVLNGTSAANKVVTNALLTRGDLVLFDRNNHKSNHHGALIQAGATPVYLEAARNPFGFIGGIDAHCFDETYLRDQIRDVMPESADASRPFRLAIIQLGTYDGTIYNARQVVDKIGHLCDYILFDSAWVGYEQFINMMADTSPLRLELNENDPGIFVTQSVHKQQAGFSQTSQIHKKDNHIRGQARFCPHKRLNNAFMLHASTSPFYPLFAALDVNAKIHEGESGRRLWAECVALGIDARKAILARCKLLQPFIPLVVDGKPWQAYPTETIASNRRFFSFEPGAKWHGFEGYADDQYFVDPCKLLLTTPGIDADSGRYTEFGIPATILAHYLRENGIVPEKCDLNSILFLLTPAESEEKLARLVAMLAQFERHIEDDTPLADVLPTVFQKYPVRYRDYTLRELCQEMHNLYVSFDVKDLQKAMFRKESLPHVAMNPQDANSAFIRGDVELVRISEAGGRIAAEGALPYPPGVLCVVPGEIWGGAAQRYFLALEEGINLLPGFSPELQGVYSETDADGIQRLYGYVLK

SEQ ID NO: 1977 - DNA, 2199 bp, Salmonella typhimurium
  CDS (1)..(2199)
atgtcagaattaaaaattgccgttagccgtcattgcccggattgtttttctacacaccgtaatattgtaaatgttgatgagagtcgtttcatcgacgtggctgccatcgtgttatccattgacgacattgaacacggaaaactcgatgaaatcgacgcaacgggttacggtattcccgtgtttgtcgcgacacatgacgaagggcgcgtaccgcctgagtatttgccgcgtatctctggtgtattcgaatataatgaatcccgtactgccttctatggtcgccagttggaaaccgcagcaagccactacgaaacgcagttacgtccgccgtttttccgcgcgctggtggattatgtcaaccagggcaacagcgcatttgactgcccggggcatcagggcggcgaattcttccgccgtcatcctgccggtaatcagttcgtggaatactttggcgaaacgctcttccgctccgacctatgcaacgcggacgtggcgatgggcgatctgctgattcacgaaggcgcgccttgcattgcgcagcaacatgcggcgaaagtctttaacgccgataagacctactttgtgctgaacgggacctcctcctctaacaaagtcgtactcaacgcgctgttaacgccgggcgatctggtactgtttgaccgtaacaaccacaaatctaaccaccacggcgcattattgcaggcgggcgcaacgccagtttatctggaaaccgcgcgtaacccgtatggttttatcggcgggatcgacgctcactgcttcgaagaagattacctgcgcgagctgattagcgaagtcgcgccgcagcgtgcccgcgaagcacgtccattccgtctggccgtcatccagttaggcacctacgacggtaccatttataacgcccgtcaggtcgtcgataaaattggtcatctgtgcgactacatcctgtttgactccgcctgggtcggctatgaacaatttattccgatgatggccgattgttcgccgctgctgctggaactgaacgaaaacgatccgggtattctggtgacgcagtccgttcacaaacaacaagccggtttctcccagacctcgcagatccataaaaaagatagccatatcaaagggcaatcgcgctacgttccgcataagcgcatgaacaacgcctttatgatgcacgcctccaccagcccgttctatccgctgttcgccgcgctggacgttaacgccaaaatgcacgaaggcgtcagcggtcgcaatatgtggatggattgcgtggttaacggcatcgatgcccgtaaattgatcctcgaaaactgtcatcacatccgtccgttcgtaccggaactgattgatggtaagccgtggcagtcatacccgacgtcagagatcgccagcgatctgcgcttcttccacttcgttccgggagaacactggcatgcgtttgaaggctatgccgaacatcagtactttgtcgacccttgcaaactgctgctcaccacaccgggcattaatgcagcgagcggcgaatatgaagactttggcgttcctgccacgatcctcgccaacttcctgcgcgagaacggcgttgtgccggaaaaatgcgacctcaactccattctgttcctgctgacgccggcagaagacatggcgaagttacaacagcttgtcgccctgctggctcgtttcgaaaaactgctggaagctgatgcgccgttagcggaagtattaccgtccatctacaaacagcatgaagcgcgttatgccggctataccctgcgtcagctttgccaggagatgcacgatctctatgcgcggcacaacgtgaaacagctgcaaaaagagatgttccgtaaatcgcatttcccgaaagtcagtatgaatccgcaagaggccaactatgcctatctgcgcggcgaggtcgaactggttcgcctgccggaagcggaaggtcgtatcgcggctgaaggcgctctgccttacccgccgggagtgctgtgtgtagttccgggtgaaatctggggcggttctgtcctgcgttacttcagcgccctggaagaagggatcaacctgctgccgggctttgcgcctgaactgcagggcgtttatatcgaagaacacgacggccgtaagcaggtctggtgctacgtcattaaacctcgtgacgcacagcgctccctgctgaaggaggaaaaattatga

SEQ ID NO: 1978 - protein, 732 aa, Salmonella typhimurium
MSELKIAVSRHCPDCFSTHRNIVNVDESRFIDVAAIVLSIDDIEHGKLDEIDATGYGIPVFVATHDEGRVPPEYLPRISGVFEYNESRTAFYGRQLETAASHYETQLRPPFFRALVDYVNQGNSAFDCPGHQGGEFFRRHPAGNQFVEYFGETLFRSDLCNADVAMGDLLIHEGAPCIAQQHAAKVFNADKTYFVLNGTSSSNKVVLNALLTPGDLVLFDRNNHKSNHHGALLQAGATPVYLETARNPYGFIGGIDAHCFEEDYLRELISEVAPQRAREARPFRLAVIQLGTYDGTIYNARQVVDKIGHLCDYILFDSAWVGYEQFIPMMADCSPLLLELNENDPGILVTQSVHKQQAGFSQTSQIHKKDSHIKGQSRYVPHKRMNNAFMMHASTSPFYPLFAALDVNAKMHEGVSGRNMWMDCVVNGIDARKLILENCHHIRPFVPELIDGKPWQSYPTSEIASDLRFFHFVPGEHWHAFEGYAEHQYFVDPCKLLLTTPGINAASGEYEDFGVPATILANFLRENGVVPEKCDLNSILFLLTPAEDMAKLQQLVALLARFEKLLEADAPLAEVLPSIYKQHEARYAGYTLRQLCQEMHDLYARHNVKQLQKEMFRKSHFPKVSMNPQEANYAYLRGEVELVRLPEAEGRIAAEGALPYPPGVLCVVPGEIWGGSVLRYFSALEEGINLLPGFAPELQGVYIEEHDGRKQVWCYVIKPRDAQRSLLKEEKL

SEQ ID NO: 1979 - DNA, 2142 bp, Salmonella typhimurium
  CDS (1)..(2142)
atgaacatcatcgccattatggggccgcacggggtttattataaagatgaacccatcaaggagcttgagcgtgcattacaatccctgggatttcaaattatctggccgcaaaatagcgttgacttgttgaagtttattgaacataacccgcgcatctgcggcgttatttttgactgggatgaatacagtctcgacctttgtagcgaaatcaaccagctaaatgaataccttcctctctacgcctttatcaataccaactccacgctggacgttagcgttcacgatatgcgcatggcgctgtggttttttgagtatgcattggggctggctgaagatatcgcgacgcgcattcatcaatatacaaacgaatatctcgataatattacgccgccgtttaccaaagcgctttttacctacgccaaagaaggaaaatataccttttgtacgccgggtcatatggcgggaacggcgtatcagaaaagcccgccaggctgcctgttttatgacttttttggcggcaataccttaaaagctgatgtgtcgatttcggtgactgaactgggatcgctgctggatcacaccgggccgcatctggaagcggaagagtatatcgcccgtacttttggcgccgagcagagctatatggtgacgaacggtacgtcgacctcgaataaaattgtcggtatgtatgccgcgcctgcgggaagtacgctacttattgatcgtaattgtcataaatcgctggcgcatttgctgatgatgagcgatgtggtgcctctctggttgaagccgacgcgcaatgcgctcggcattctcggcggtattccccgaagggaatttacccgtgcaagcatcgaaagcaagatagaggagacccctcaggcgcaatggccggtgcatgcggttatcaccaattcgacttacgatggtctgctgtataacactaactggatcaagcaaatgctggacgttccctcgatccattttgattccgcctgggtaccctatacccatttccatccgatctaccaggggaaaagcgggatgagcggcgatcgggtgcccggaaaagtgattttcgaaacgcaatccacccataaaatgctggcggctttttcgcaggcgtcgcttattcatatcaaaggggaatatgacgaagagacgtttaacgaagcgtttatgatgcacacttccacatcgccgagctatcccattgtcgcctctatcgagaccgcagcggcgatgctgcgcggcaatccagggaaaagattgattaatcgttcggtggaacgggcgctccattttcgtaaagaggtacagcggctacgtgaagagtccgatagctggttctttgatatctggcagccggaagaggttgatgaggccgaatgctggccggtcacgccgggagaaacctggcatggcttcaccgatgccgatgacgatcatatgttcctcgatccggttaaggtgacaatcctgacgccggggatggatgaacagggcaacatgagcgaagaggggatacccgccgcgctggtggcgaagttccttgatgagcgaggcgtggtggtggaaaaaaccgggccgtataatctgctgtttttgttcagcatagggattgataagacccgtgcgatggggctgctgcgcggactgacggaatttaaacgcgcctacgatcttaacctgcgcgtcaaaaatatgttgccggatctgtatgcggaagatccggatttttatcgcaatatgcgcattcaggatctggcgcaggggatccataaactgatccgccagcacgatcttccggggctgatgctgcgggcgttcgaggttttaccggagatgatcatgaccccgcaccaggcctggcagcgtcagatcaaaggtgaggtggaaaccgtggcgctcgatcaactgccagggcgcgtttccgcgaatatgatcctgccttatccgccaggcgttccgctgttgatgcccggcgagaggatcacgcaacagagtcgggccgtgctcgattttctgctgatgctctgctcgattggccagcattatcccggttttgaaacggatattcacggcgcgaaacggaatgaagacggggtgtaccaggtacgagtcttaaaacacgcctgctag

SEQ ID NO: 1980 - protein, 713 aa, Salmonella typhimurium
MNIIAIMGPHGVYYKDEPIKELERALQSLGFQIIWPQNSVDLLKFIEHNPRICGVIFDWDEYSLDLCSEINQLNEYLPLYAFINTNSTLDVSVHDMRMALWFFEYALGLAEDIATRIHQYTNEYLDNITPPFTKALFTYAKEGKYTFCTPGHMAGTAYQKSPPGCLFYDFFGGNTLKADVSISVTELGSLLDHTGPHLEAEEYIARTFGAEQSYMVTNGTSTSNKIVGMYAAPAGSTLLIDRNCHKSLAHLLMMSDVVPLWLKPTRNALGILGGIPRREFTRASIESKIEETPQAQWPVHAVITNSTYDGLLYNTNWIKQMLDVPSIHFDSAWVPYTHFHPIYQGKSGMSGDRVPGKVIFETQSTHKMLAAFSQASLIHIKGEYDEETFNEAFMMHTSTSPSYPIVASIETAAAMLRGNPGKRLINRSVERALHFRKEVQRLREESDSWFFDIWQPEEVDEAECWPVTPGETWHGFTDADDDHMFLDPVKVTILTPGMDEQGNMSEEGIPAALVAKFLDERGVVVEKTGPYNLLFLFSIGIDKTRAMGLLRGLTEFKRAYDLNLRVKNMLPDLYAEDPDFYRNMRIQDLAQGIHKLIRQHDLPGLMLRAFEVLPEMIMTPHQAWQRQIKGEVETVALDQLPGRVSANMILPYPPGVPLLMPGERITQQSRAVLDFLLMLCSIGQHYPGFETDIHGAKRNEDGVYQVRVLKHAC

SEQ ID NO: 1981 - DNA, 2136 bp, Vibrio vulnificus
  CDS (1)..(2136)
atgaatattttcgctatcttgaaccacatgggtgtgttctttaaagaagagccagttcgccaattgcatgcagcacttgaaaaagccggttatgaagttgtttatccagtggatgacaaagatttgatcaagatgatcgaaatgaacccgcgcatttgtggtgtgctgtttgactgggataaatactcgcttgagctttgtgagcgtattagccaaatcaacgaaaaactgccagtacacgcgtttgctaacgagcaatcaacgctggatatttcgcttaccgatctacgcctaaacgtgcatttctttgaatacgcattgggcatggcggacgacatcgccatcaagatcaaccaagcgacacaagaatacaaagacgcgattacaccgccattcaccaaagcgctgtttaaatacgtggaagaaggcaaatacaccttctgtactccaggtcacatgggtggtacggcttttcaaaaaagtccagtcggcagcattttctacgatttctacggtccaaatactttcaaagcggacgtgtcgatttctatgccagagctaggctcactgcttgaccattcaggtccacacaaagaagcggaagagtacattgcgcgtacgttcaacgctgacgcatcgtacatcgtgacgaacggtacttcgacgtcaaacaaaattgtcggcatgttctctgcgccagcgggcagcacggtattggttgaccgtaactgtcataaatcattgactcacctaatgatgatgacggacgtaacacctatttacttccgcccaacccgtaacgcttacggcattcttggtggtattccacaaagtgaattcagccgtgaagtgatcgcagaaaaagtggctaaaacaccaggtgcgagcgcgccaagctacgcggtgattaccaactcaacttacgatggtttgttgtacaacacacaattcatcaaagagtctctcgactgtaaacacatccactttgatagtgcgtgggtgccttacactaacttcaaccgtatttacgaaggcaaatgcggcatgagtggcgaagcgatgccaggcaaagtgttctacgaaacacaatccactcacaaactgttggcggcgttctcgcaagcgtcaatgattcacgtaaaaggtgaatttgaccgtgagtcgttcaacgaagcctttatgatgcacacttccacctcgcctcaatacggcattgtggcatcaacagaaaccgcggcggcaatgatgcgtggtaacacgggccgtaagttgatgcaagattcaatcgaccgtgcgattcgtttccgtaaagagatcaaacgcttaaaaggtgaaagtgacggttggttctttgatgtttggcaaccagagaacattgagacaaccgaatgctggaaacttgaccctaaccaagactggcatggcttcaagaacatggacgatgaccacatgtatcttgacccaatcaaaatcactttgctgactcctggaatgagcaaagatggtgagttggaaaccagtggtattcctgcttcattggtggcgaaatatcttgatgaacgtggcattgtggtagaaaaaacaggcccttacaacttgttgttcttgttctcaattggtatcgacaaatcaaaagcgatgcaattgctacgtggtttgactgagttcaaacgtggttacgatctgaacctaacgattcgcaccatgctgcctgcgctgtaccgtgaagatccagcgttctacgaaggcatgcgtattcaagagctggcacaaggcattcacgatctgactcgtaagtaccgtctaccagaattgatgtacaaagcgttcgatgtgctaccagagatgaaagtcacgccacacgcagcttggcaacaagagcttcgtggtcaaaccgaagagatcttgctgaatgatatggtgggccgcgtgagtgccaacatgatccttccttaccctccaggtgtgcctctagtgctaccaggtgaagtggtgacagaaagctctcgtccagtactggatttcttggaaatgttgtgtgaaatcggcgcacattacccaggcttcgagaccgacatccacggcctataccgccaaaaagatggccgttacaccgtaaaagtactgaaagactga

SEQ ID NO: 1982 - protein, 711 aa, Vibrio vulnificus
MNIFAILNHMGVFFKEEPVRQLHAALEKAGYEVVYPVDDKDLIKMIEMNPRICGVLFDWDKYSLELCERISQINEKLPVHAFANEQSTLDISLTDLRLNVHFFEYALGMADDIAIKINQATQEYKDAITPPFTKALFKYVEEGKYTFCTPGHMGGTAFQKSPVGSIFYDFYGPNTFKADVSISMPELGSLLDHSGPHKEAEEYIARTFNADASYIVTNGTSTSNKIVGMFSAPAGSTVLVDRNCHKSLTHLMMMTDVTPIYFRPTRNAYGILGGIPQSEFSREVIAEKVAKTPGASAPSYAVITNSTYDGLLYNTQFIKESLDCKHIHFDSAWVPYTNFNRIYEGKCGMSGEAMPGKVFYETQSTHKLLAAFSQASMIHVKGEFDRESFNEAFMMHTSTSPQYGIVASTETAAAMMRGNTGRKLMQDSIDRAIRFRKEIKRLKGESDGWFFDVWQPENIETTECWKLDPNQDWHGFKNMDDDHMYLDPIKITLLTPGMSKDGELETSGIPASLVAKYLDERGIVVEKTGPYNLLFLFSIGIDKSKAMQLLRGLTEFKRGYDLNLTIRTMLPALYREDPAFYEGMRIQELAQGIHDLTRKYRLPELMYKAFDVLPEMKVTPHAAWQQELRGQTEEILLNDMVGRVSANMILPYPPGVPLVLPGEVVTESSRPVLDFLEMLCEIGAHYPGFETDIHGLYRQKDGRYTVKVLKD

SEQ ID NO: 1983 - DNA, 2163 bp, Pasteurella multocida
  CDS (1)..(2163)
atgctaaatttaaaaattgcatatagcccattaattcgaccttattttcatacaaatagagaactcgtttctgttcaagaaacagatttcaccgacattggtgcaattatcctgagttctgaagatattgaagattatattgatagtatacaagcaactgaatttaatattccggtctttgttgctgtcattgaaggtcaatttttagatcctcaattctttgacaaagtctatcacgttcaagatctcaacaactacgacatcaacctatacagtcgccaaattgaaactgcggcgcggttttacgaagaaaaaatcctcccacctttctttaaaatgctaagtgaatatgtggaaatggggaattctgcttttgattgtccgggacaccaaggtggacaatatttccgtaaacatcctgcaggacgttatctctatgatttctacggtgaaaatattttccgctcagatatctgtaatgccgatgtaaaattaggcgatttgctaatccatgaaggagccgcttgtgatgctcaaaaacacgctgctcaagtctttaatgctgataaaacctacttcgtcttaaatgggacatcttctgcaaataaagtcgtcaccaatgcgttactcacaccgggtgatcttgtgctctttgatcgtaacaatcacaaatctatccatcacggtgcattaattcaagctggtgctacccctgtttatttggaaactgcgcgtaatccatttggttttatcggtgggatcgatagccattgttttgatgaagattatttgaaatctttaattaaagatgttgcgcctgaaaaactaacacaagcacgtcctttccgtttagccgttattcagctcggcacttatgacggaaccatctataatgcgcgccaagtcgtagataaaattggtcatttatgtgactacatcttgtttgattctgcgtgggtaggttatgaacaattcattccaatgatgaaagattgctcaccgctcttgcttgaattaaatgaaaatgatcccggcatcatcgtgacacaatcagtacacaaacaacaagccggcttctcacaagcctcacaaattcacaaaaaagacaagcacattaaaggtcaacagcgctactgtaatcataaacgctttaataatgcattcatgttacacgcctccaccagcccattctaccctctttttgccacacttgatgtcaatgcaaaaattcaaggtacccctgcgggtattcgtttatggcatgactgtgtcaaaatcgggatagaagcacgtaaaatggtgctgaatagttgtgatctgatcaaaccgtttattccgccttatgtcaatggcaaaaaatggcaagactacgatacagaagaaatggcaaatgatttaacattcttcaaattccatgctgatgataaatggcatcaatttgaaggctatgtagataaccaatattttgttgatccatgtaaattcatgctaacgacgccgggtattgatattgaaacaggtgaatacgaagacttcggtgtccctgctacgattcttgctaattatttacgtgaaaacggcattattccggaaaaatgtgacttaaactcaattctcttcttattaacgccagcagaaaccctcaccaaaatgcaaagtttggttgcacaaattgcggcatttgaacaacacatcaaaaaagattccttactaaaagaagtcttaccaagtgtttatcacaacaatgaaaaacgctatgaaggttataccatccgtcgtctttgccaagaaatgcatgatttgtatgtcagccgtaacgtgaaaactttacaacgcaacttattcagaaaagcgaccttgcctgaatatgtgatgaatccacatcaagctaatcttgaatttgttcgtaatcgtgtagaactggttccactaaccgaaatcgttaatcgcattgcggcagaaggagcacttccttatccaccgggtgtgctttgtgtcgtaccgggtgaaaaatggagtcagactgcacaggaatatttcttagcactcgaagaaggcattaatttattaccaggtttcgcaccagaaattcaaggggtatatctacaacaagatgcagatggacgtattcgtgcttatggctacgtattaactgaaaactaa

SEQ ID NO: 1984 - protein, 720 aa, Pasteurella multocida
MLNLKIAYSPLIRPYFHTNRELVSVQETDFTDIGAIILSSEDIEDYIDSIQATEFNIPVFVAVIEGQFLDPQFFDKVYHVQDLNNYDINLYSRQIETAARFYEEKILPPFFKMLSEYVEMGNSAFDCPGHQGGQYFRKHPAGRYLYDFYGENIFRSDICNADVKLGDLLIHEGAACDAQKHAAQVFNADKTYFVLNGTSSANKVVTNALLTPGDLVLFDRNNHKSIHHGALIQAGATPVYLETARNPFGFIGGIDSHCFDEDYLKSLIKDVAPEKLTQARPFRLAVIQLGTYDGTIYNARQVVDKIGHLCDYILFDSAWVGYEQFIPMMKDCSPLLLELNENDPGIIVTQSVHKQQAGFSQASQIHKKDKHIKGQQRYCNHKRFNNAFMLHASTSPFYPLFATLDVNAKIQGTPAGIRLWHDCVKIGIEARKMVLNSCDLIKPFIPPYVNGKKWQDYDTEEMANDLTFFKFHADDKWHQFEGYVDNQYFVDPCKFMLTTPGIDIETGEYEDFGVPATILANYLRENGIIPEKCDLNSILFLLTPAETLTKMQSLVAQIAAFEQHIKKDSLLKEVLPSVYHNNEKRYEGYTIRRLCQEMHDLYVSRNVKTLQRNLFRKATLPEYVMNPHQANLEFVRNRVELVPLTEIVNRIAAEGALPYPPGVLCVVPGEKWSQTAQEYFLALEEGINLLPGFAPEIQGVYLQQDADGRIRAYGYVLTEN

SEQ ID NO: 1985 - DNA, 2139 bp, Moritella japonica
  CDS (1)..(2139)
atgaacattattgctattttaaaccacatgggcgtgttctttaaagaagagcctattcgtcaattacacaaatcgttagaagcatgtggatatgaagttgtttatccgcttgatgataacgacctagttaaaatgattgaaatgaatccacgtatctgtggtgctatctttgattgggataaatattctttagaattatgtgaaaaaattaataacttaaatgagaaacttccagttttcgcatttgcaaatgaacaatcagtacttgatatttcactcacagaccttcgcttaaatgtgtctttctttgaatatatgctaggtatgggtgatgatattgctctaaaaatcaatcaagcaattgacctttataaagatgaaataatgcctccatttactaaagcattatttaaatatgtagaagaaggtaagtatactttctgtacgccgggtcacatgggtggtactgcattccagaaaagcccagcaggtagtattttttatgatttttatggaccgaatgcttttaaagcggatgtatcaatctctatgcctgaattaggttcattattggatcactctggtccacataaagaagctgaagagtacattgcaaaaacatttaacgcagatcattcatatattgtaaccaatggtacttctactgcgaataaaattgttggtatgttctctgcaccatctggcagtactgtattagtagaccgtaactgtcataagtcattaactcaccttatgatgatgagtgatgttacacctatctacttccgcccgacgcgtaatgcatacggtattttaggtggtatcccacaaagtgaattcactcgtgaagttattgaagctaaagttgcagcaacaccgggtgctgaaatgccagattatgcagttatcactaactctacttatgatggcctgctttataacacgcaatttattaaagaaacactagatactaagtctattcactttgatagtgcttgggtaccatatactaactttaattctatttatgaaggtaagtgtggtatgagtggtgaagctatgccaggcaaggtgttctatgaaacacaatctacgcataaacttttagctgcattctctcaagcatcaatgatccacattaaaggtgaggttgataaagaaacctttaatgaagcatttatgatgcatacatcaacgtcaccacagtatggtatcgtggcatcagcagaaactgctgcagcaatgatgcgtggcaatactggcaaacgtttaattcaaggctctattgatcgtgctatccgtttccgcaaagaaattaaacgcttagaagcacaaagtgaaggttggttctttgacgtttggcaacctgaagatatcgaaacaacagaatgttggaagttagatccaaaagacgattggcatggctttaaagatattgatgataatcatatgtatcttgatccaattaaagtgacactattaacaccgggaatggggaaagatagcgaacttagtgagtctggtattcctgcagaacttgttgctaaattccttgatgaacgtggtattgttgtcgaaaaaacaggcccatacaacttattattcttgttctcaattggtattgataaagcaaaagcactggaattactacgtggactaacagaatttaaacgtggcttcgatcttaatctgaaagttaagagtttcttaccatcattatatgctgaagatccaagtttctatgaaggtatgaatattcaagatcttgctcaaggtattcataatatgattaagaagtttaagctacctgagctgatgtttaaagcgtttgatgtacttcctgaaatgaaggtcacaccgaacaaagcatgggaacaagaacttcgtggtaacacggaagaagttaaactagaggaaatggtaaatcgtgtaagtgctaatatgatcttgccgtaccctcctggtgtgccactaatccttcctggtgaaatggtaacagatacatcacgtccggtacttgaatttttagaaatgctatgtgagatcggtagtaagttccctggttttgaaacagatattcatggcgtataccttcaagatgatggtagctataccgttaaagtacttaaagaagattag

SEQ ID NO: 1986 - protein, 712 aa, Moritella japonica
MNIIAILNHMGVFFKEEPIRQLHKSLEACGYEVVYPLDDNDLVKMIEMNPRICGAIFDWDKYSLELCEKINNLNEKLPVFAFANEQSVLDISLTDLRLNVSFFEYMLGMGDDIALKINQAIDLYKDEIMPPFTKALFKYVEEGKYTFCTPGHMGGTAFQKSPAGSIFYDFYGPNAFKADVSISMPELGSLLDHSGPHKEAEEYIAKTFNADHSYIVTNGTSTANKIVGMFSAPSGSTVLVDRNCHKSLTHLMMMSDVTPIYFRPTRNAYGILGGIPQSEFTREVIEAKVAATPGAEMPDYAVITNSTYDGLLYNTQFIKETLDTKSIHFDSAWVPYTNFNSIYEGKCGMSGEAMPGKVFYETQSTHKLLAAFSQASMIHIKGEVDKETFNEAFMMHTSTSPQYGIVASAETAAAMMRGNTGKRLIQGSIDRAIRFRKEIKRLEAQSEGWFFDVWQPEDIETTECWKLDPKDDWHGFKDIDDNHMYLDPIKVTLLTPGMGKDSELSESGIPAELVAKFLDERGIVVEKTGPYNLLFLFSIGIDKAKALELLRGLTEFKRGFDLNLKVKSFLPSLYAEDPSFYEGMNIQDLAQGIHNMIKKFKLPELMFKAFDVLPEMKVTPNKAWEQELRGNTEEVKLEEMVNRVSANMILPYPPGVPLILPGEMVTDTSRPVLEFLEMLCEIGSKFPGFETDIHGVYLQDDGSYTVKVLKED

SEQ ID NO: 1987 - DNA, 1479 bp, Streptomyces coelicolor
  CDS (1)..(1479)
atgacagtcgatcaccgccgagcaccggtcctggaagccctcgtcgaataccgccgtgcgggacggctgtcgttcacgccgcccggacacaagcaggcgcgcggggcggaccccgcggtgcgcgaggtgctgggtgacgccgtgttccacggggacgtgctggcgacggccggactcgacgaccggctcacccggggacgggtgctgcagcgcgcccaggagctgatggcggacgccgtgcacgccgatcacaccttcttcacgacgtgcgggagttccctgtcggtgaaggcggcgatgctggcggtggcggggccgcacgagaagctgctgatcggccgggacgcccacaagtccgtggtctcggggctgatcctgtccggcatcgagccggtgtgggtcgaaccgcgctgggacgcggaacggcatctggcccatccgccgtccgccgagtcgttcgaggaggcgttcggggcgcatcccgacgccaagggtgccctgatcaccagcccgacgccgtacggggcgagcgccgatctgcgggccgtcgccgaggtgtgccacgggcgctcgctgccgctgatcgtcgacgaggcttggggggcgcatctgcctttccacccggatctgccgtcctgggcgatggacgcgggggccgacatctgcgtgaccagcatccacaagatgggcagcggtctcgaacagggctcggtgttccacctgcgcggcgacctggtgccgcccaagctgctcggtatgcgcgccgacctgctgagcaccaccagcccgtcggtgctgatcttcgccggtctcgacgggtggcgccgccagatggcgctcggcgggcaggagctgatgggcggcgcgctggagctggcggccggtgtccgggcggccgtcgaggagatcgacggcatgcacgtcaacgaccgcgaggacttctgcggtcccgggctggcccacggcttcgatccgctgccggtcgtcatcgacctcgaagggctcggtgtctcgggcttccgggcggcggactggctgcgggagcaccgcggtgtggtcgcccacctcaccgaccaccgccgtatcggcgcgcagatcacccacggcgacgaccgggggaccgccggcgaactgctcaccgccctcaaggacctcgccctcgccgcccccggcctgggatcggctccgggcgtcgaggtgccgtcgccggccgagctgcggatgcctcaggtgtgcctgccccgggacgcgttcttcggccccaccgaggacgtgcccctggaccgggccgccggccgggtcgcggcggagatgatcactccgtatccgcccggcattccggccgtgctgccgggcgagcggctggccgagccggtcctgcgctatctgcgcagtggcctggaggcggggatgtacctccccgacccgaccgatccggcgctggagacggtcagggtcgtcgcggagcacggtgcgtga

SEQ ID NO: 1988 - protein, 492 aa, Streptomyces coelicolor
MTVDHRRAPVLEALVEYRRAGRLSFTPPGHKQARGADPAVREVLGDAVFHGDVLATAGLDDRLTRGRVLQRAQELMADAVHADHTFFTTCGSSLSVKAAMLAVAGPHEKLLIGRDAHKSVVSGLILSGIEPVWVEPRWDAERHLAHPPSAESFEEAFGAHPDAKGALITSPTPYGASADLRAVAEVCHGRSLPLIVDEAWGAHLPFHPDLPSWAMDAGADICVTSIHKMGSGLEQGSVFHLRGDLVPPKLLGMRADLLSTTSPSVLIFAGLDGWRRQMALGGQELMGGALELAAGVRAAVEEIDGMHVNDREDFCGPGLAHGFDPLPVVIDLEGLGVSGFRAADWLREHRGVVAHLTDHRRIGAQITHGDDRGTAGELLTALKDLALAAPGLGSAPGVEVPSPAELRMPQVCLPRDAFFGPTEDVPLDRAAGRVAAEMITPYPPGIPAVLPGERLAEPVLRYLRSGLEAGMYLPDPTDPALETVRVVAEHGA

SEQ ID NO: 1989 - DNA, 2130 bp, Eikenella corrodens
  CDS (1)..(2130)
atgaagaacatcttattaggctgtggtcataaggaacttggtgactatctgaagagcttgattgaaactttggaaaagggtggtcacaccatccgaatagcccatgacccgcaagaaatcctgacgttcctgaaacatgacgccagaataggctcagtgctttgtacactggatattttcaaccgagaattagacgaacaaattattgcactcaacgatgagctacccgtattcattctgaagcccaccgactgcgacaaacccgtggacttcggcgctgtaggcgaccatgccaccttcatcgattgccatctgttcagcaacgaagacgttgttgataaaattgaaaaagcaatctgtcactatatcgacaatatcaccccgcccttcactaaagccctgtttgactacgttgataaaaacaaatacacattctgtactccgggtcacatgagcggtaccgctttcttgaaatctcccgtaggtagcctgttctacgacttctacggtgaaaacacattcaaatcagatatttcagtttctatgggcgaattgggctctctgctcgaccactccggcccgcacaaagaggccgaagaatacatcgccgaaaccttcaatgccgaccacagctacatcgtaaccaacggtacttccaccgccaacaaaatcgtgggtatgtactccgttccggccggcagcaccgtactgatcgaccgtaactgccacaaatcattaacccacctgttgatgatgagcgacattactccggtgtatctgaaaccgacccgtaacgcctacggtatcttgggtggtattccgcaaaaagaattcaccaaagaagttattaccgaaaaacttaccaaagttccgggcgccacttggccggtacatgccgtgattaccaactccacttatgacggcctgttctacaacaccgacaagatcaaagacaccctggatgtgaaatccatccacttcgactctgcttgggttccctacaccaacttcagcccgatctacaacggcaaaaccggtatgggcggtaagcaggttaaagacaaggtaatctttgaaacccactctacccacaaactgctggccgcattctcacaggcttccatgattcacgttaagggtaacctgaacaccgccaccttcggcgaagcctacatgatgcacacctccacttctccgttctaccccatggtagcctctactgaagtggcagcagccatgatgcgcggcaactccggtaaacgcctgatgcaggattcactggaacgcgccgttaaattccgtaaggaaatcaagaaacacaaagcccatgccgactcatggtatttcgatgtatggcaacctgaaaatgttgacaacatcgaatgctgggaattgcatcagaccgacaaatggcacggcttcaaagacatcgacgcccagcacatgtacctcgacccgattaaggtaactctgcttaccccgggcttggataaaaacggcgagctggaaaaaaccggtatccccgccaacctcgtttccaaattcttggaagaccgcggcatcatcgtggagaaaaccggcccctacaacatcctcgtgctcttcagcatcggcgtggacgacaccaaagccctcagcctgctgcacgcattgaacgagttcaaatccctgtacgatgccaacgccaccgtagaagaagtattgccgcgcgtattcaacgaatcgccctctttctaccaagaaatgcggattcaagaattggcacaaggcatccacagcctgatctgcaaacacaacctgcctgaactgatgttcagcgcattcgaagtgttgccgaccatggtgatgaacccgcacaaagccttccagcttgagctgaaaggtcagattgaagactgctacttggaagacatggtaggcaagatcaacgccaacatgattctgccctatcctcccggcgtaccgttggtaatgcctggtgaaatgatcaccgaagaaagcaagcccatcttggaattcctgatgatgctgtgcgaaatcggcgcccacttccccggcttcgaaaccgacatccacggtgcttaccgtcaagaagacggccgctataaagttaagattgttaaagcttaa

SEQ ID NO: 1990 - protein, 709 aa, Eikenella corrodens
MKNILLGCGHKELGDYLKSLIETLEKGGHTIRIAHDPQEILTFLKHDARIGSVLCTLDIFNRELDEQIIALNDELPVFILKPTDCDKPVDFGAVGDHATFIDCHLFSNEDVVDKIEKAICHYIDNITPPFTKALFDYVDKNKYTFCTPGHMSGTAFLKSPVGSLFYDFYGENTFKSDISVSMGELGSLLDHSGPHKEAEEYIAETFNADHSYIVTNGTSTANKIVGMYSVPAGSTVLIDRNCHKSLTHLLMMSDITPVYLKPTRNAYGILGGIPQKEFTKEVITEKLTKVPGATWPVHAVITNSTYDGLFYNTDKIKDTLDVKSIHFDSAWVPYTNFSPIYNGKTGMGGKQVKDKVIFETHSTHKLLAAFSQASMIHVKGNLNTATFGEAYMMHTSTSPFYPMVASTEVAAAMMRGNSGKRLMQDSLERAVKFRKEIKKHKAHADSWYFDVWQPENVDNIECWELHQTDKWHGFKDIDAQHMYLDPIKVTLLTPGLDKNGELEKTGIPANLVSKFLEDRGIIVEKTGPYNILVLFSIGVDDTKALSLLHALNEFKSLYDANATVEEVLPRVFNESPSFYQEMRIQELAQGIHSLICKHNLPELMFSAFEVLPTMVMNPHKAFQLELKGQIEDCYLEDMVGKINANMILPYPPGVPLVMPGEMITEESKPILEFLMMLCEIGAHFPGFETDIHGAYRQEDGRYKVKIVKA

SEQ ID NO: 1991 - DNA, 2271 bp, Escherichia coli; identical to SEQ ID NO: 1859
  CDS (4)..(2271)

SEQ ID NO: 1992 - protein, 755 aa, Escherichia coli
MKVLIVESEFLHQDTWVGNAVERLADALSQQNVTVIKSTSFDDGFAILSSNEAIDCLMFSYQMEHPDEHQNVRQLIGKLHERQQNVPVFLLGDREKALAAMDRDLLELVDEFAWILEDTADFIAGRAVAAMTRYRQQLLPPLFSALMKYSDIHEYSWAAPGHQGGVGFTKTPAGRFYHDYYGENLFRTDMGIERTSLGSLLDHTGAFGESEKYAARVFGADRSWSVVVGTSGSNRTIMQACMTDNDVVVVDRNCHKSIEQGLMLTGAKPVYMVPSRNRYGIIGPIYPQEMQPETLQKKISESPLTKDKAGQKPSYCVVTNCTYDGVCYNAKEAQDLLEKTSDRLHFDEAWYGYARFNPIYADHYAMRGEPGDHNGPTVFATHSTHKLLNALSQASYIHVREGRGAINFSRFNQAYMMHATTSPLYAICASNDVAVSMMDGNSGLSLTQEVIDEAVDFRQAMARLYKEFTADGSWFFKPWNKEVVTDPQTGKTYDFADAPTKLLTTVQDCWVMHPGESWHGFKDIPDNWSMLDPIKVSILAPGMGEDGELEETGVPAALVTAWLGRHGIVPTRTTDFQIMFLFSMGVTRGKWGTLVNTLCSFKRHYDANTPLAQVMPELVEQYPDTYANMGIHDLGDTMFAWLKENNPGARLNEAYSGLPVAEVTPREAYNAIVDNNVELVSIENLPGRIAANSVIPYPPGIPMLLSGENFGDKNSPQVSYLRSLQSWDHHFPGFEHETEGTEIIDGIYHVMCVKA

SEQ ID NO: 1993 - DNA, 2196 bp, Lactobacillus sp
  CDS (1)..(2196)
atgagttcttctcttaaaattgcttcgactcaagaagcgcgtcaatatttcgatactgaccgcgttgttgtcgatgctgtaggctctgattttactgatgtcggtgctgttatcgcaatggattacgaaacagatgtcatcgacgctgctgatgcaactaagtttggtattcctgtttttgccgtaactaaggatgcccaagctatcagtgctgatgagctgaagaagattttccacatcattgatttggaaaacaaatttgatgctactgttaacgctcgtgaaatcgaaactgctgttaacaactacgaagacagcattttaccaccattcttcaagtcattgaaagaatacgttagccgtggtttaatccaattcgactgcccaggtcaccaaggtggtcaatactacagaaagcacccagctggtcgtgaattctacgacttcttcggcgaaactgtcttccgtgcagacttatgtaacgctgacgttgccttgggtgacttgctgatccacgaaggtcctgctgttgctgctgaaaagcatgctgcacgtgtttacaacgctgacaagacttacttcgttttaggtggttcttccaacgctaacaacactgtaacatctgctttagtttctaacggcgacttggtattgttcgaccggaacaaccacaagtccgtttacaactcagctttagctatggctggtggccgtcctgtttacctccaaacaaaccgtaacccatacggcttcatcggtggtatctacgacagcgacttcgatgaaaagaagatccgtgaactggcagctaaggttgacccagaacgtgctaagtggaagcgtccattccgtctggctgttatccaattaggtacttacgatggtactatctacaacgcacacgaagttgtaaagcgtatcggtcacctttgtgattacatcgaattcgactctgcttgggtaggttacgaacaattcattcctatgatgcgtaactcttcaccattattgattgatgaccttggtccagaagatcctggtatcattgttgttcaatcagttcacaagcaacaagccggcttctcacaaacttcacaaatccacaagaaggatagccacatcaagggtcaattacgttactgtgaccacaagcactttaacaactccttcaacttgttcatgtctacttcaccattctacccaatgtatgcagcattagacgttaacgctgctatgcaagaaggcgaagcaggtcgcaagttatggcatgaccttctgattactaccattgaagctcgtaagaagttgatcaaggctggctcaatgttccgtccattcgttccacctgttgttaacggcaagaagtgggaagatggcgacactgaagatatggctaacaacattgactactggcgctttgaaaagggtgctaagtggcatgcttacgaaggctacggcgacaaccaatactacgttgatccaaacaagttcatgttaactacacctggtatcaacccagaaactggtgactacgaagacttcggtgttccagctactatcgttgctaactacttacgtgaccacggtatcatccctgaaaagtctgacttgaactctatcttgttcttgatgactccagctgaaactccagctaagatgaacaacctgatcactcaacttcttcaattacaacgcttgatcgaagaagatgctccattgaagcaagttcttccttcaatctacgctgctaacgaagaacgttacaatggctacactatccgtgaactttgccaagaattgcacgacttctacaagaacaacaacacgttcacataccagaagcgtctcttcttacgtgaattcttcccagaacaaggtatgcttccatacgaagctcgtcaagaattcatccgcaaccacaacaagcttgttccattgaacaagatcgaaggcgaaatcgccctcgaaggtgctcttccataccctccaggagtattctgtgtagcaccaggtgaaaagtggtcagaaactgctgttaagtacttcactatcttacaagatggtatcaacaacttccctggattcgctccagaaatccaaggtgtatacttcaagcaagaaggcgacaaggttgttgcttacggtgaagtttacgatgcagaagttgctaagaacgatgatcgttacaacaactaa

SEQ ID NO: 1994 - protein, 731 aa, Lactobacillus sp; identical to SEQ ID NO: 1814

SEQ ID NO: 1995 - DNA, 1482 bp, Bacillus anthracis
  CDS (1)..(1482)
atgtatagattgtcccaatacgaaacaccattgtttaccgctttagttgagcacagtaagcgaaatccaattcaattccatattccaggtcataaaaaagggcaaggcatggatcctgaatttcgcgaatttattgggcataatgcattagcaattgatttaattaacattgcgccgctcgatgatttacatcatccaaaaggtatgattaaagaagcacaagatttagcagccgctgcatttggtgcggatcatactttcttttctattcaaggtacaagtggcgcaataatgacaatggtgatgagcgtttgcggtcctggtgacaaaatactagtgccacgaaacgtgcataaatcagtaatgtcagctattattttctcaggtgcaaaacctattttcatgcatcctgaaatcgatccaaaacttggtatttcacatggaatcacaatccaatctgtcaaaaaagcacttgaagagcactcagatgcgaaaggcttacttgttattaatccaacatactttggctttgctgcggacttagaacagattgtacaattagcacattcttacgatatccctgtactcgttgatgaggctcatggtgttcatattcattttcacgatgaactgccgatgtcagcgatgcaagccggtgcagatatggcagcaacgagtgttcacaaattaggtggatctttaacgcaaagctctattcttaatgtaaaagaaggccttgtgaacgtaaaacatgttcaatctattattagcatgcttacgactacatcaacgtcttacatcttgttagcctccctagatgttgctagaaaacgtcttgctacagaaggaaaggcgctcatagaacaaacaatacaattagcggaacaagttcgtaatgctataaatgatattgaacatctttactgtccagggaaagaaatgctaggtacggatgctacttttaactatgatcctacaaagataattgtatctgtaaaagatttaggtattacaggccatcaggctgaagtatggcttagagagcaatataacattgaagtagaactctcagatttatacaacatactatgtcttgtcacttttggagatacagaaagtgagacgaatacacttattgcagcattacaagatttatcagcaatatttaaaaataaagctgataaaggtgttcgaatacaagtagaaattccagaaatacctgtgttagcactttctcctcgagatgctttttattcggaaacagaagtcatcccatttgaaaatgcagcaggtcgtattatagctgatttcgttatggtttatccgccagggattccaatctttactccgggggaaattattacacaagacaacttagagtatattcgtaaaaacttagaagcaggtttacctgtacaaggtcctgaagatatgacattacaaacattacgcgtgatcaaagagtacaagcctatcagttga

SEQ ID NO: 1996 - protein, 493 aa, Bacillus anthracis
MYRLSQYETPLFTALVEHSKRNPIQFHIPGHKKGQGMDPEFREFIGHNALAIDLINIAPLDDLHHPKGMIKEAQDLAAAAFGADHTFFSIQGTSGAIMTMVMSVCGPGDKILVPRNVHKSVMSAIIFSGAKPIFMHPEIDPKLGISHGITIQSVKKALEEHSDAKGLLVINPTYFGFAADLEQIVQLAHSYDIPVLVDEAHGVHIHFHDELPMSAMQAGADMAATSVHKLGGSLTQSSILNVKEGLVNVKHVQSIISMLTTTSTSYILLASLDVARKRLATEGKALIEQTIQLAEQVRNAINDIEHLYCPGKEMLGTDATFNYDPTKIIVSVKDLGITGHQAEVWLREQYNIEVELSDLYNILCLVTFGDTESETNTLIAALQDLSAIFKNKADKGVRIQVEIPEIPVLALSPRDAFYSETEVIPFENAAGRIIADFVMVYPPGIPIFTPGEIITQDNLEYIRKNLEAGLPVQGPEDMTLQTLRVIKEYKPIS

SEQ ID NO: 1997 - DNA, 1383 bp, Bacillus cereus
  CDS (1)..(1383)
atgtcccaatacgaaacaccattgtttaccgctttagttgagcacagtaagcgaaatccaattcaattccatattcctggtcataaaaaaggacagggcatggatcctacatttcgcgaatttattgggcataatgcattagcaattgatttaattaatattgcgccactcgatgatttacatcatccaaaaggtatgattaaagaagcacaagatttagcagcagccgcattcggtgcagatcatactttcttttctattcaaggtacaagtggcgctattatgacaatggtgatgagcgtttgcggtcctggtgacaaaatcctagtaccacgaaacgtgcataaatcagtaatgtcagctattattttctcaggtgcaaaaccgattttcatgcatcctgaaatcgatccgaagctcggtatttctcatggaatcacaattcaatctgtaaaaaaagcacttgaagagcactcagatgcaaagggcttacttgttattaacccaacgtactttgggtttgctgcagacttagaacagattgtacaattagcacattcttatgacatccctgtactagtcgacgaagctcatggtgttcatattcattttcacgatgaattacctatgtcagcgatgcaagctggtgcggatatggcagcaacaagtgttcacaaattaggaggctctttaactcaaagttctattcttaatgtgaaagaaggcttagtgaatgtaaagcatgtccaatctattattagcatgcttacaaccacatcaacttcttacatcttgttagcatcccttgatgttgcgagaaaacgtcttgctacagaaggaacagcactcatagaacaaacaatacaattagctgagcatgttcgtgatgctataaattctattgagcatctttactgtcctggaaaagaaatgttaggtacagatgctacctttaactatgatcctacaaagataattgtatctgtaaaagatttaggtattaccggccaccaagctgaagtatggcttagagagcaatataacattgaagtagaactctcagatctatacaacatactatgtcttatcactttgggagatacagaaagtgatacaaatacacttattgcagcattacaagatttagcagcaacatttagaaatagggcagataaaggtgttcaagtacaagtagagattccagaaattccagtgctagcactttctcctcgagatgctttttattcggaaacagaagtcattccatttgaaaatgcagcggggcgtattatagctgattttgttatggtttatccgccagggattccaatctttactccggggggaaattattacacaagaaaacttagagtatattcgtaa

SEQ ID NO: 1998 - protein, 460 aa, Bacillus cereus
MSQYETPLFTALVEHSKRNPIQFHIPGHKKGQGMDPTFREFIGHNALAIDLINIAPLDDLHHPKGMIKEAQDLAAAAFGADHTFFSIQGTSGAIMTMVMSVCGPGDKILVPRNVHKSVMSAIIFSGAKPIFMHPEIDPKLGISHGITIQSVKKALEEHSDAKGLLVINPTYFGFAADLEQIVQLAHSYDIPVLVDEAHGVHIHFHDELPMSAMQAGADMAATSVHKLGGSLTQSSILNVKEGLVNVKHVQSIISMLTTTSTSYILLASLDVARKRLATEGTALIEQTIQLAEHVRDAINSIEHLYCPGKEMLGTDATFNYDPTKIIVSVKDLGITGHQAEVWLREQYNIEVELSDLYNILCLITLGDTESDTNTLIAALQDLAATFRNRADKGVQVQVEIPEIPVLALSPRDAFYSETEVIPFENAAGRIIADFVMVYPPGIPIFTPGGNYYTRKLRVYS

SEQ ID NO: 1999 - DNA, 20 bp, Artificial sequence
  Primer sequence
atggggcagggttttccacc

SEQ ID NO: 2000 - DNA, 25 bp, Artificial sequence
  Primer sequence
ttacttcaacacataaccgtacaac

SEQ ID NO: 2001 - DNA, 723 bp, Escherichia coli K12
  CDS (1)..(723)
atggtagcaaggcagcgcgcttgcagcgaccagatatgcagagggatgggtgatttattcagttgccaaacccgctggagtattgagataattttcagtctgactctcgcaatatcttatgaggtttcagttcatgtcctgcggcgctctctgagcgaagcgggtttatcattaacgaatagtcttagtagtaccgaaaaaatggcagagaaacgcaatatctttctggttgggcctatgggtgccggaaaaagcactattgggcgccagttagctcaacaactcaatatggaattttacgattccgatcaagagattgagaaacgaaccggagctgatgtgggctgggttttcgatttagaaggcgaagaaggcttccgcgatcgcgaagaaaaggtcatcaatgagttgaccgagaaacagggtattgtgctggctactggcggcggctctgtgaaatcccgtgaaacgcgtaaccgtctttccgctcgtggcgttgtcgtttatcttgaaacgaccatcgaaaagcaacttgcacgcacgcagcgtgataaaaaacgcccgttgctgcacgttgaaacaccgccgcgtgaagttctggaagcgttggccaatgaacgcaatccgctgtatgaagagattgccgacgtgaccattcgtactgatgatcaaagcgctaaagtggttgcaaaccagattattcacatgctggaaagcaactaa

SEQ ID NO: 2002 - protein, 240 aa, Escherichia coli K12
MVARQRACSDQICRGMGDLFSCQTRWSIEIIFSLTLAISYEVSVHVLRRSLSEAGLSLTNSLSSTEKMAEKRNIFLVGPMGAGKSTIGRQLAQQLNMEFYDSDQEIEKRTGADVGWVFDLEGEEGFRDREEKVINELTEKQGIVLATGGGSVKSRETRNRLSARGVVVYLETTIEKQLARTQRDKKRPLLHVETPPREVLEALANERNPLYEEIADVTIRTDDQSAKVVANQIIHMLESN

SEQ ID NO: 2003 - DNA, 507 bp, Aquifex aeolicus
  CDS (1)..(507)
atgaggatttaccttataggctttatgtgctccgggaaaagcacagttggttccctcctctcccgctctttaaacattcccttctatgacgttgacgaagaggtgcagaaaagggaaggactttcaatcccccaaatctttgaaaagaaaggggaagcttacttcagaaagcttgagtttgaagtcttaaaggatttatccgaaaaagaaaacgtagtcatttccacgggaggaggactcggggcaaacgaagaagcattaaactttatgaagagtagaggcacaaccgttttcatagatatcccctttgaggttttccttgaaaggtgtaaggactcaaaggagagaccccttttaaagagacctctcgatgagataaaaaacttatttgaagagaggagaaagatttattcaaaggcggacataaaggtgaagggggaaaaaccccccgaagaggttgtaaaggaaattttattatcccttgaagggaacgcccttggtgggtga

SEQ ID NO: 2004 - protein, 168 aa, Aquifex aeolicus
MRIYLIGFMCSGKSTVGSLLSRSLNIPFYDVDEEVQKREGLSIPQIFEKKGEAYFRKLEFEVLKDLSEKENVVISTGGGLGANEEALNFMKSRGTTVFIDIPFEVFLERCKDSKERPLLKRPLDEIKNLFEERRKIYSKADIKVKGEKPPEEVVKEILLSLEGNALGG

SEQ ID NO: 2005 - DNA, 717 bp, Deinococcus radiodurans
  CDS (1)..(717)
atgaccttttctgagctttcggaaagcgtccagcacgcactggacgaggtgctggcggcgccgccccggcccccggagggtgaggcaggcaccccgcttcagggggatgagggtagactgcctgttatgtttccgtccggcctgattgaacgccctgccaactgggtggcgctggcgggctttatgggcactggcaaaagccggatcggctgggagctgtcccgcgccctggcgctgcatttcgtggacaccgacaagctcatcacccgggtggtcggcaaaagcatccccgaggtgttcgcgcaggagggcgaaggctatttccgcgcctgcgagcgcgaggtggtgcagcgcgtgacccggcttgaccacgctgtgatcagcctcggcggcggcaccttcatccacgaggaaaaccgccgcctgctgctgtcgcgcggcccggtggtcgtgctgtgggccacccccgaaaccgtctaccagcgcaccaagcacagcgaccggcccctcctcaaggtcgaagaccccctctcgcgcattcgcaccctgatgaacgagcgcgaaggcgtctaccgccagggcaccattcacgttcacagcgacgggcgcccctccgaggagatcgtggaagaggtcgtcgaacggctctgggcctggcgcgacgcccaggcggcgtgggccgccctgcccccggactacgaccgtgcgacgagttga

SEQ ID NO: 2006 - protein, 238 aa, Deinococcus radiodurans
MTFSELSESVQHALDEVLAAPPRPPEGEAGTPLQGDEGRLPVMFPSGLIERPANWVALAGFMGTGKSRIGWELSRALALHFVDTDKLITRVVGKSIPEVFAQEGEGYFRACEREVVQRVTRLDHAVISLGGGTFIHEENRRLLLSRGPVVVLWATPETVYQRTKHSDRPLLKVEDPLSRIRTLMNEREGVYRQGTIHVHSDGRPSEEIVEEVVERLWAWRDAQAAWAALPPDYDRATS

SEQ ID NO: 2007 - DNA, 498 bp, Campylobacter jejuni
  CDS (1)..(498)
atgatgaaagctaaaaatatcgtttttataggatttatgggttctggaaaaagcactttagcaagagctttagctaaggatttagatcttgtttttttagatagtgattttttaatagaacaaaaatttaatcaaaaagtcagtgaaatttttgaacaaaaaagggaaaatttttttagagaacaagagcaaaaaatggctgatttttttagttcttgtgagaaagcttgtattgctacaggtgggggttttgttaatgtttcaaatttagaaaaagcaggtttttgtatttatttaaaagcagattttgaatatttaaaaaagcgtttagacaaagatgaaatttctaaaagacctttattttatgatgaaattaaagcaaaaaaattatataatgagcgtttaagcaagtatgaacaaaaggcaaattttattttaaatatagaaaataaaaatatagatgagcttttaagcgagattaaaaaggtgataaaatga

SEQ ID NO: 2008 - protein, 165 aa, Campylobacter jejuni
MMKAKNIVFIGFMGSGKSTLARALAKDLDLVFLDSDFLIEQKFNQKVSEIFEQKRENFFREQEQKMADFFSSCEKACIATGGGFVNVSNLEKAGFCIYLKADFEYLKKRLDKDEISKRPLFYDEIKAKKLYNERLSKYEQKANFILNIENKNIDELLSEIKKVIK

SEQ ID NO: 2009 - DNA, 546 bp, Salmonella enterica subsp. enterica serovar Typhi
  CDS (1)..(546)
atgatgcaacctctttatcttgttggcccgcggggctgtgggaaaaccaccatcggtatggcgctggcgcaggcaaccggttttcggtttgcagataccgaccgctggctgcaatcgcacgtgcagatgagcgtcgctgatatcgttgaaaaagaaggctggggagggttccgcgcccgggaaaccgcggccctggaggcggtaagcgcgccttcgactgtcgtggcgacgggaggcggtattattctcacggagtataaccgacgttatatgcaccgtgttggcgtagtgatttatctgtgcgcgccggtatccacgctggttaaccggcttgaggctgaacctgaagcggatctgcgcccgaccctcaccggcaagccgttgagcgaagaggttcgggaagtgcttgagcagcgtgacgcgttgtatcgcgaaacggcgcattacattattgacgcgacgaaagcgccggcccaggtcgtttctgaaattattgcggcgctgccgccgtcgacgcaacggttacagggagatgtctatacttaa

SEQ ID NO: 2010 - protein, 181 aa, Salmonella enterica subsp. enterica serovar Typhi
MMQPLYLVGPRGCGKTTIGMALAQATGFRFADTDRWLQSHVQMSVADIVEKEGWGGFRARETAALEAVSAPSTVVATGGGIILTEYNRRYMHRVGVVIYLCAPVSTLVNRLEAEPEADLRPTLTGKPLSEEVREVLEQRDALYRETAHYIIDATKAPAQVVSEIIAALPPSTQRLQGDVYT

SEQ ID NO: 2011 - DNA, 522 bp, Salmonella enterica subsp. enterica serovar Typhi
  CDS (1)..(522)
atggcagagaaacgcaatatctttctggttgggcctatgggtgccggaaaaagcactattgggcgccagttagctcaacaactcaatatggaattttacgattctgatcaagagattgagaaacgaaccggagctgatgtgggctgggtcttcgatgttgaaggtgaagacggcttccgtaatcgtgaagaaaaagttatcaacgaattgacggaaaaacagggtattgtgctggcaaccggcggtggctctgtaaaatcgcgtgaaacgcgtaaccgtctctccgcgcgtggcgtcgtggtctaccttgaaacgaccatcgaaaaacaactggcgcgcacgcagcgtgataaaaaacgcccgctgttgcaggttgaagcaccgcctcgcgaagttctggaagcgctggctaacgaacgcaatccgctgtacgaagagattgccgacgtcaccattcgcaccgacgatcaaagcgctaaggttgtggcaaaccagattattcatatgctggaaagcaactaa

SEQ ID NO: 2012 - protein, 173 aa, Salmonella enterica subsp. enterica serovar Typhi
MAEKRNIFLVGPMGAGKSTIGRQLAQQLNMEFYDSDQEIEKRTGADVGWVFDVEGEDGFRNREEKVINELTEKQGIVLATGGGSVKSRETRNRLSARGVVVYLETTIEKQLARTQRDKKRPLLQVEAPPREVLEALANERNPLYEEIADVTIRTDDQSAKVVANQIIHMLESN

SEQ ID NO: 2013 - DNA, 474 bp, Listeria innocua
  CDS (1)..(474)
atgggagctggaaaaacaacagtcggcaatatactcgcgaaattagctgatttgccttatattgatattgacgaagtaattattcgcgaacaaggaatgagtgtatctgaaatttttgcaaagtatggtgaacaagaattccgccgactagaacacgaaaaattaaaagaactagctaataccaaagccgttattgcaacaggcggtggcattgttctaaatcctgaaaatagaaaagtcttaaaaaatacatatccagttatttatttagaaaccgatccggaagtatttatgaaccgcttaaaaggtgatacaacacgcccgctagttcaacaaaagacacctgaagaaatccgagcaattttcgaaccgagaattgcccattatcaagattccgcagacttcattgtcaatacggacaaccgtaatcaacacgaagtcgctaaagccattttaaccatgctagataagtaa

SEQ ID NO: 2014 - protein, 157 aa, Listeria innocua
MGAGKTTVGNILAKLADLPYIDIDEVIIREQGMSVSEIFAKYGEQEFRRLEHEKLKELANTKAVIATGGGIVLNPENRKVLKNTYPVIYLETDPEVFMNRLKGDTTRPLVQQKTPEEIRAIFEPRIAHYQDSADFIVNTDNRNQHEVAKAILTMLDK

SEQ ID NO: 2015 - DNA, 474 bp, Listeria monocytogenes
  CDS (1)..(474)
atgggagctggaaaaacaacggttggaaatatactcgcaaacttagctgacttaccgtacatcgatattgacgaagtaattacaagcgaacaaggaatgagtgtatcggacatttttgctaaatatggtgaaaaagaattccgccgtctagaacatgaaaaattaaaagaattagcaacaaccaaagccgttatagcaacaggtggtggcattgttcttaatcctgaaaatagagaagttttaaaaaatacatatccggttatttatttagaaacggatcccgaagtatttatgaatcgcttaaaaggcgacaccactcgaccgctcgtacagcaaaaaacagccgaagaaattcgtgcaattttcgaaccaagaattgctcattatcaagattccgcagattttattgttaatacggataatcgtaatcaacaagaagttgctcaaactattttaaccatgttagataagtaa

SEQ ID NO: 2016 - protein, 157 aa, Listeria monocytogenes
MGAGKTTVGNILANLADLPYIDIDEVITSEQGMSVSDIFAKYGEKEFRRLEHEKLKELATTKAVIATGGGIVLNPENREVLKNTYPVIYLETDPEVFMNRLKGDTTRPLVQQKTAEEIRAIFEPRIAHYQDSADFIVNTDNRNQQEVAQTILTMLDK

SEQ ID NO: 2017 - DNA, 525 bp, Yersinia pestis
  CDS (1)..(525)
atgacacaaactatcttcatggtaggcgcgcgcggtgcgggtaagaccactattgggaaggcattggcgcaggcattggggtatcggtttgttgatacagatctatttatgcaacaaacctcacaaatgaccgtggctgaagttgttgagagtgaaggttgggatggttttcgtctacgtgaaagcatggcactacaggcagtaacggcacctaaaacagtcgttgccactggtggtggtgcggtactgtccagtgaaaaccgcgcattcatgcgtgatcatgggcgagtcatttatctgcgggcgtctgcagccgtattggcaaagcggctagcggaagatcctgaagaggctcagcggccaagtttaaccggtaaacccatcgttgaagaaatactggatgtgttggctagtcgtgaagcgttgtatcaggacgtcgcccatcatgtacttgatggaacgcaaaccccgtcactggttgtcgaacaaattttacagatgttgactggtgagatggtcaaataa

SEQ ID NO: 2018 - protein, 174 aa, Yersinia pestis
MTQTIFMVGARGAGKTTIGKALAQALGYRFVDTDLFMQQTSQMTVAEVVESEGWDGFRLRESMALQAVTAPKTVVATGGGAVLSSENRAFMRDHGRVIYLRASAAVLAKRLAEDPEEAQRPSLTGKPIVEEILDVLASREALYQDVAHHVLDGTQTPSLVVEQILQMLTGEMVK

SEQ ID NO: 2019 - DNA, 546 bp, Nostoc sp. PCC 7120
  CDS (1)..(546)
atgagtagtttattgcagggagttaacctatacttaatcggcatgatgggcgctggtaagactacagtaggacatttactcgccaaagaattgggttatggctttttagatactgataatgtgattgcccaagctactaaaaaatctatcaatgagatatttgccgaagcaggggaagccggatttcgccagatagaaagcgatgtgttagcccaggtttgttcctatactaagttgactgtagcgacaggtggcggcattgtgttgcggcgagaaaattggagttacctacaccacggtttaattttgtggctagatgtgccagtagatatactctatgcacgtttagcggcagatacaacaagaccacttttacaggatgatgacccaaaaggcaaattgcgatcgctcctggaacaacgcacaccgctttattcgcaagcagatttacgcatctgtgtcaatgcagaagaaacaccagaacaaattgccaataaagttatgcaggcaattcccagcgtcttgaaacaaactgcctctaattag

SEQ ID NO: 2020 - protein, 181 aa, Nostoc sp. PCC 7120
MSSLLQGVNLYLIGMMGAGKTTVGHLLAKELGYGFLDTDNVIAQATKKSINEIFAEAGEAGFRQIESDVLAQVCSYTKLTVATGGGIVLRRENWSYLHHGLILWLDVPVDILYARLAADTTRPLLQDDDPKGKLRSLLEQRTPLYSQADLRICVNAEETPEQIANKVMQAIPSVLKQTASN

SEQ ID NO: 2021 - DNA, 1479 bp, Thermotoga maritima
  CDS (1)..(1479)
atgagaatcttcctcgttggaatgatgggttctggaaagagcactatcggtaaaaggatttccgaggtgctcgaccttcagttcatagatatggatgaagagatagaaagaagagagggaagaagcgttcgaaggattttcgaagaagacggtgaggagtacttccgcctgaaagaaaaagaacttcttaaagaacttgtggaaagagacaacgtggttgtggcaacgggtggaggtgttgtggtcgatccagagaacagagagcttttgaagaaggaaaagactctctttctctacgctccccctgaagtgttgatggaaagagtaacaacagagaacagacctcttctgagcgaaggaaaagagagaatacgggagatctgggaaaagagaaaacagttctacgcggagttcagaaggatcgacacctccaggttgaacgagtgggaaacaaccgcactcgttgtgctggaggctctggacgagaaagaaatctcaacgatagaaaaaccacacctggtgaagatcatcctcggtggcttcaagagggtgagaaacgaagagctggttttcaccacggagagggtggagaagatatacggaaggtacctcccggagaatcggcttctttttccggatggagaggaagtgaagacgctggagcatgtctccagagcgtactacgaactcatccgaatggactttcccaggggaaagaccatagcgggtgtcgggggaggtgctctcaccgacttcaccggctttgtagcgagcacgtttaaaagaggagtgggactttctttctatccaacaacacttctggctcaggtggacgcttccgttggtggaaagaatgccatcgatttcgctggagtgaaaaacgtcgttgggactttcagaatgccagactacgtgatcatagatcccaccgtcacgctttccatggatgagggcaggttcgaagagggagtcgtggaagccttcaagatgacgattctttcgggtcgcggggtagaactcttcgatgagccggagaagattgagaagagaaatctcagagttctcagcgagatggtaaaaatctccgttgaagagaaagcgaggatagtgatggaagatccctacgacatgggtttgaggcacgccctgaatctgggacacacactcggtcatgtgtacgagatgctggaaggggtacctcacggtatagcagtagcatggggcatcgaaaaagagacgatgtacctgtacagaaaaggaatagtgcctaaggaaaccatgagatggatcgtagaaaaggtcaaacagatcgtaccaattcctgttccatccgtcgatgttgagaaagccagaaatctcattctgaacgacaagaagatcctgaaaggttccagagtcaggcttccttacgtgaaagaaatcggaaagatcgaattcttggaggtcgatccgctcgagcttctggaggtggtagattga

SEQ ID NO: 2022 - protein, 492 aa, Thermotoga maritima
MRIFLVGMMGSGKSTIGKRISEVLDLQFIDMDEEIERREGRSVRRIFEEDGEEYFRLKEKELLKELVERDNVVVATGGGVVVDPENRELLKKEKTLFLYAPPEVLMERVTTENRPLLSEGKERIREIWEKRKQFYAEFRRIDTSRLNEWETTALVVLEALDEKEISTIEKPHLVKIILGGFKRVRNEELVFTTERVEKIYGRYLPENRLLFPDGEEVKTLEHVSRAYYELIRMDFPRGKTIAGVGGGALTDFTGFVASTFKRGVGLSFYPTTLLAQVDASVGGKNAIDFAGVKNVVGTFRMPDYVIIDPTVTLSMDEGRFEEGVVEAFKMTILSGRGVELFDEPEKIEKRNLRVLSEMVKISVEEKARIVMEDPYDMGLRHALNLGHTLGHVYEMLEGVPHGIAVAWGIEKETMYLYRKGIVPKETMRWIVEKVKQIVPIPVPSVDVEKARNLILNDKKILKGSRVRLPYVKEIGKIEFLEVDPLELLEVVD

SEQ ID NO: 2023 - DNA, 525 bp, Vibrio cholerae
  CDS (1)..(525)
atggctgagaaacgcaatattttccttgttggccctatgggcgctggcaaaagcacaattggtagacacctagctcaacaactgcacatggagtttatcgactctgatacggttatcgaagaacgtaccggagcggatatcgcatgggtgtttgatgttgaaggtgaagaaggcttccgcaagcgcgaagaagccgttattaatgatctaaccgagcaacagggtatcgtactggcgacgggtggtggctcagtaattagtaaagagaaccgcaaccgactgtctgctcgcggtatcgttgtatacctcgaaactactatcgaaaaacaattagcacgtaccaatcgcgataaaaagcgcccactgctgcaaacggattgcccgcgtgaagtgctagagcaattggctgaagatcgtaatcctctgtacgaagagattgcggacatcacggtacgcactgacgatcaaagtgcaaaagtggtagccaatcagatcgtaaaaatgctagaagaacacataatgtaa

SEQ ID NO: 2024 - protein, 174 aa, Vibrio cholerae
MAEKRNIFLVGPMGAGKSTIGRHLAQQLHMEFIDSDTVIEERTGADIAWVFDVEGEEGFRKREEAVINDLTEQQGIVLATGGGSVISKENRNRLSARGIVVYLETTIEKQLARTNRDKKRPLLQTDCPREVLEQLAEDRNPLYEEIADITVRTDDQSAKVVANQIVKMLEEHIM

SEQ ID NO: 2025 - DNA, 531 bp, Chlamydophila pneumoniae, Chlamydia pneumoniae
  CDS (1)..(531)
atgacaattattctatgtggtctacccacaagcggaaagtcttcgctcgggaaagctttggctaaatttctaaaccttcctttttatgatcttgatgatttaattgtaagcaactacagcagtgcactatactcctcatctgcagagatctataaagcttatggggatcagaaattcagtgaatgtgaagctcgtattcttgaaactttacctccagaagatgccttgatctcccttggtggagggaccttgatgtatgaagcctcttaccgagcgattcaaactaggggagctcttgtatttctctctgtagaactacctttaatttatgaaagactcgagaaacgagggttaccagaacggctgaaagaagccatgaaaacaaaacctctaagcgagattttaactgagcgcatcgacagaatgaaagaaattgctgattacatttttcccgtggatcacgtagatcattcctcgaagagctccttagatcaagcgtctcaagatctcattaccttgttaaagtcatga

SEQ ID NO: 2026 - protein, 176 aa, Chlamydophila pneumoniae, Chlamydia pneumoniae
MTIILCGLPTSGKSSLGKALAKFLNLPFYDLDDLIVSNYSSALYSSSAEIYKAYGDQKFSECEARILETLPPEDALISLGGGTLMYEASYRAIQTRGALVFLSVELPLIYERLEKRGLPERLKEAMKTKPLSEILTERIDRMKEIADYIFPVDHVDHSSKSSLDQASQDLITLLKS

SEQ ID NO: 2027 - DNA, 477 bp, Streptococcus pneumoniae
  CDS (1)..(477)
atggctaaggtgttattagggtttatgggggctggaaaatcgactattgcaagaggcttggaccctaattaccttgatatggatgctctgattgagaatcgcctaggtatgtccattgcgaattttttcgctgaaaagggagaaacagcctttcgtcaggtagaatcagaagtcctagctgatttactacaaacagaccaagtcgtgtcaactggaggaggagtggttatttctcagagaaatcgtgacttactcaagactaatacagataacatctacctgagagcagattttgaaaccctctaccaacgtatcgcagctgataaggacaatcagcgaccgctttttctaaataatagcaaggaagaactagtagctattttccaagaaagacaggcttggtatgaggaagtggctagtcgggttttggatgtgaccaagctaagcccagaggaaattatagaggaactaagatga

SEQ ID NO: 2028 - protein, 158 aa, Streptococcus pneumoniae
MAKVLLGFMGAGKSTIARGLDPNYLDMDALIENRLGMSIANFFAEKGETAFRQVESEVLADLLQTDQVVSTGGGVVISQRNRDLLKTNTDNIYLRADFETLYQRIAADKDNQRPLFLNNSKEELVAIFQERQAWYEEVASRVLDVTKLSPEEIIEELR

SEQ ID NO: 2029 - DNA, 477 bp, Streptococcus pneumoniae
  CDS (1)..(477)
atggctaaggtgttattagggtttatgggggctggaaaatcgactattgcaagaggcttggaccctaattaccttgatatggatgctctgattgagaagcgcctaggtatgtccattgcgaattttttcgctgaaaagggagaagcagcctttcgtcaggtagaatcagaagtcctagctgatttactacaaacagaccaagtcgtgtcaactggaggaggagtggttatttctcagagaaatcgtgacttactcaagactaatacagataacatctacctgaaagcagattttgaaaccctctacctacgtatcgtagctgataaggacaatcagcgaccgctttttctaaataatagcaaggaagaactagtagctattttccaagaaagacaggcttggtatgaggaagtggctagtcgggttttggatgtgaccaagctaagcccagaggaaattatagaggaactaagatga

SEQ ID NO: 2030 - protein, 158 aa, Streptococcus pneumoniae
MAKVLLGFMGAGKSTIARGLDPNYLDMDALIEKRLGMSIANFFAEKGEAAFRQVESEVLADLLQTDQVVSTGGGVVISQRNRDLLKTNTDNIYLKADFETLYLRIVADKDNQRPLFLNNSKEELVAIFQERQAWYEEVASRVLDVTKLSPEEIIEELR

SEQ ID NO: 2031 - DNA, 543 bp, Xylella fastidiosa
  CDS (1)..(543)
atgaatcccgctcccaatcttgtgatgatcggcccgatgggtgccggaaaaagctccatcggacgacgcattgccaaacacttcagcctacacttcgcagatacagatcacgccatcgttgaacgcgccggcacgaacatctccgctatcttcaaatattccggcgagccagaatttcggcgcctggagcgcgaagtactgcacgacttgctgaatcacgaaaaccaactcatcgccaccggtggcggtacgatcctggatccagagaaccgccgctgcatgcaagaacgcggcttcgtcgtgtttctaaagatcaacgtgaatacccaattggagcgactggcacatgaccgctaccggccattactgcaacaaatcgaccgcaaacaggtgctgagcgatctctacgccacacgccaaccgctctaccagcaaatcgcagatatgattgtgaccaccgaccacatgtcgcctaacacagccaccgcccagctcattctggacttaacagcccactggcagaaatcaagcaacgccgcatga

SEQ ID NO: 2032 - protein, 180 aa, Xylella fastidiosa
MNPAPNLVMIGPMGAGKSSIGRRIAKHFSLHFADTDHAIVERAGTNISAIFKYSGEPEFRRLEREVLHDLLNHENQLIATGGGTILDPENRRCMQERGFVVFLKINVNTQLERLAHDRYRPLLQQIDRKQVLSDLYATRQPLYQQIADMIVTTDHMSPNTATAQLILDLTAHWQKSSNAA

SEQ ID NO: 2033 - DNA, 552 bp, Bacillus halodurans
  CDS (1)..(552)
atgaagcgaattccatcgattagagagcggaacattgtgttgattggttttatgggggtagggaaaacatccgttggggaacagctggctaagcggttatttcgtgattttattgacgtcgatcaggaaattgaaaaaacatggaaaatgaagatttccgatatttttcgcttgaagggtgaagaagcgttccgtaaaattgaacgggaaatgacaattgattattgtacgaatacatcacttaaagtgatctcgttaggcggcggcgcctacatgcaagatgcgattcgcactgcgtgtctcgaccattgcatcgtcatttatttagatttgtcttggtccttatggaaggaacggttaaatgtattaatagacaatcgccccgttctacaagacaaaaaagtagaagaaatggaacagctctttacgaagcggcaaccgacctatcaaaagaatagctttcaagtagaaacagatggccgagaggtagcagagatagtatcctatctagaagaagtgatcaagttagggtgggaaatttacggatcataa

SEQ ID NO: 2034 - protein, 183 aa, Bacillus halodurans
MKRIPSIRERNIVLIGFMGVGKTSVGEQLAKRLFRDFIDVDQEIEKTWKMKISDIFRLKGEEAFRKIEREMTIDYCTNTSLKVISLGGGAYMQDAIRTACLDHCIVIYLDLSWSLWKERLNVLIDNRPVLQDKKVEEMEQLFTKRQPTYQKNSFQVETDGREVAEIVSYLEEVIKLGWEIYGS

SEQ ID NO: 2035 - DNA, 489 bp, Helicobacter pylori
  CDS (1)..(489)
atgcagcatttagtcttaatcggttttatggggagcggtaaaagctctttagcgcaagaattggggctagctttgaaattagaagtgttggatacggatatgatcattagcgagagggtgggcttgagcgtgagggagatttttgaagagcttggcgaagacaatttcaggatgtttgaaaaaaatttgattgatgaattaaaaacgctcaaaaccccccatgttatttctaccggtgggggcattgtgatgcatgaaaatcttaagggtttaggcacaactttttatctcaaaatggattttgagaccttgattaagcgtttgaatcaaaaagaaagggaaaaacgcccccttttaaataacctcactcaagccaaagagctttttgaaaaacgccaagccctctatgaaaaaaacgcctcctttatcattgacgccagaggtggtttaaataattctttaaaacaagtgctacaattcatcgcataa

SEQ ID NO: 2036 - protein, 162 aa, Helicobacter pylori
MQHLVLIGFMGSGKSSLAQELGLALKLEVLDTDMIISERVGLSVREIFEELGEDNFRMFEKNLIDELKTLKTPHVISTGGGIVMHENLKGLGTTFYLKMDFETLIKRLNQKEREKRPLLNNLTQAKELFEKRQALYEKNASFIIDARGGLNNSLKQVLQFIA

SEQ ID NO: 2037 - DNA, 600 bp, Mycobacterium leprae
  CDS (1)..(600)
atggcacccaaggcagtactcgtgggtctgccaggagccggcaagtccaccatcgggcggcgactgtccaaggcgctaggggtgagcttgctcgataccgacgctgctattgagaagcagaccggtcgcagcatcgctgacatctttgccatcgacggggaagaagagttccgccgcatcgaagagggcgtggtgcgggctgctttagtcgagcatgacggtgtggtgtcgcttggcggcggtgctgtcactagcccaggggtatgcgcggcgctcgctggccacattgtcatctatctggagatcaacgccgaagaagcaatgcggcgtgcctgtggcagtaccgtgcgaccgttgctggccgggcccgaccgtgctgaaaaattccaggatctgatggccagacgggttcctctttaccggcgagttgcgactatccgggttgataccaactgccacaatctgggggcggtagtccgctacatcatggcccggttgcaggctcaactagccactcctgtctctggtggtgatcgcaagagtagcgaagccgagcgtagtggggcgccacttcgcaaatctagtgaggtcgtcaaatga

SEQ ID NO: 2038 - protein, 199 aa, Mycobacterium leprae
MAPKAVLVGLPGAGKSTIGRRLSKALGVSLLDTDAAIEKQTGRSIADIFAIDGEEEFRRIEEGVVRAALVEHDGVVSLGGGAVTSPGVCAALAGHIVIYLEINAEEAMRRACGSTVRPLLAGPDRAEKFQDLMARRVPLYRRVATIRVDTNCHNLGAVVRYIMARLQAQLATPVSGGDRKSSEAERSGAPLRKSSEVVK

SEQ ID NO: 2039 - DNA, 543 bp, Haemophilus influenzae
  CDS (1)..(543)
atggcggaaaaacgtaatatttttttagtaggaccaatgggtgcaggtaaaagtactatcggtcgtcaattagcacaacagcttaatatggattttattgattccgatgcagtgattgaagaacgtacgggcgcggatattagctggatttttgatttggaaggcgaagacggcttccgaaaacgtgaagaacgcattattaacgaactcacacaaatgcaaggtattgtactttcaactggtgggggagcagtgctttctaaggaaaaccgtaattatttatcagcacgtggtattgtgatttatttagaaacaacggtggaaaaacaattccaacgcactcaacgtgataaaaaacgtccattgctccaagatgcagagaatcctcgtcaagtattggaagatttagcaaaaattcgcaatccgctttatgaagaaattgcggacatcactttgccaaccgatgaacaaaatgccaaaataatggtaaatcaaattgttgatttaattgataatatgaatgggttgaatggtgcactttaa

SEQ ID NO: 2040 - protein, 180 aa, Haemophilus influenzae
MAEKRNIFLVGPMGAGKSTIGRQLAQQLNMDFIDSDAVIEERTGADISWIFDLEGEDGFRKREERIINELTQMQGIVLSTGGGAVLSKENRNYLSARGIVIYLETTVEKQFQRTQRDKKRPLLQDAENPRQVLEDLAKIRNPLYEEIADITLPTDEQNAKIMVNQIVDLIDNMNGLNGAL

SEQ ID NO: 2041 - DNA, 513 bp, Neisseria meningitidis
  CDS (1)..(513)
atgaaaaactttaacggcaaactcatcctcatcggactgatgggcgcgggcaaaaccacgctgggccggcaaatggcgcagcggctggattaccgtttttacgacagcgatcacgaaatcgccgcagccgccggcgttcccatccccaccatatttgaaatggaaggcgaacagggattccgttcgcgcgaaaccgccatactcaaaaagctggttatcctgccccatatcgtcctgtccaccggcggcggcgcggtgttaaaagaagaaaaccgcgcccttatccgcaaaagcggcacggtcgtctatctgcacgccccgcccgaaaccctgctcgaacgcacgcgctgcgacaacagccgtcctttgctgcaagttgccgatcctttggcgaaattacgtgaactctacgccgcacgcgaccccgtttaccgccaaaccgccgactttaccgtagaatcggcaaactgccgggaaaccgtgcaaaccctgctcaaacgcttatcccgataa

SEQ ID NO: 2042 - protein, 170 aa, Neisseria meningitidis
MKNFNGKLILIGLMGAGKTTLGRQMAQRLDYRFYDSDHEIAAAAGVPIPTIFEMEGEQGFRSRETAILKKLVILPHIVLSTGGGAVLKEENRALIRKSGTVVYLHAPPETLLERTRCDNSRPLLQVADPLAKLRELYAARDPVYRQTADFTVESANCRETVQTLLKRLSR

SEQ ID NO: 2043 - DNA, 603 bp, Caulobacter crescentus
  CDS (1)..(603)
atgaccgagaccgatcaaacgcccgacaccgccccagaggccgccccagaggtcgcgcccatcgtctccgacgacctggcgccgctgcgcgccaagaccatcgtgctggtgggcctgatgggcgtgggcaagtccagcgtcgggcggcggctggccaatgtgctgggcctgccgttccgcgacgccgacaatgaggtcgaggccgccgccggacgctcgatctccgagatcttcgccgagctgggtgagccggccttccgcgacggcgagcgccgggtgatcgcccggctgctggacgagccgccgcacgtgctggccaccggcggcggcgcgttcgtcaacgccgagacccgcgccctgatcaacgagaaggccgtgtcggtctggctgaaggccgatgtcgagctcctggcccgccgcgtctcgcgcaaggacaaccgcccgctggtgcgcggcaaggacccggtgaaggtgctgaccgagctcgccgaagcccgctatccggcctatgccgaggcgcaagtccatgtcgagaccggcgacaccccccacatggtggcggtcgaggccattctgacggcgctgcgtcaggcccacgcttaa

SEQ ID NO: 2044 - protein, 200 aa, Caulobacter crescentus
MTETDQTPDTAPEAAPEVAPIVSDDLAPLRAKTIVLVGLMGVGKSSVGRRLANVLGLPFRDADNEVEAAAGRSISEIFAELGEPAFRDGERRVIARLLDEPPHVLATGGGAFVNAETRALINEKAVSVWLKADVELLARRVSRKDNRPLVRGKDPVKVLTELAEARYPAYAEAQVHVETGDTPHMVAVEAILTALRQAHA

SEQ ID NO: 2045 - DNA, 531 bp, Mycobacterium tuberculosis
  CDS (1)..(531)
atggcacccaaagcggttctcgtcggcctgccgggctccggcaagtccaccatcgggcgccggctggccaaggcgctcggggtcggcctgctcgacaccgacgtcgcgatcgagcagcggaccggacgcagcatcgccgacatcttcgccaccgacggggagcaggagttccgacgtatcgaggaggacgtggtgcgcgcggcactggccgaccacgacggtgtgctgtcgctcggcggcggcgcggtgaccagccccggtgtgcgcgcggcgctggccggccacaccgtcgtctacctggagatcagcgccgccgagggcgtgcgccgcaccggcggcaacaccgtgcgcccactgctggccggccccgaccgcgccgaaaaataccgcgcgctgatggccaagcgggcaccgctgtaccggcgcgtcgcgaccatgcgagtggacaccaatcgccgcaaccccggggcggtggtccgccatatcctgtcgcggctgcaggttcccagccccagcgaggcggccacatga

SEQ ID NO: 2046 - protein, 176 aa, Mycobacterium tuberculosis
MAPKAVLVGLPGSGKSTIGRRLAKALGVGLLDTDVAIEQRTGRSIADIFATDGEQEFRRIEEDVVRAALADHDGVLSLGGGAVTSPGVRAALAGHTVVYLEISAAEGVRRTGGNTVRPLLAGPDRAEKYRALMAKRAPLYRRVATMRVDTNRRNPGAVVRHILSRLQVPSPSEAAT

SEQ ID NO: 2047 - DNA, 489 bp, Lactococcus lactis subsp. lactis
  CDS (1)..(489)
atgagtatcattttaattggatttatgggtgcgggaaagtccacagtagcaaaacttttaacagaaaattttactgatttggatcaattaattgaagaagaaattgagatgacaattgctgaattttttgaattatttggggaagctgattttcgtaaaattgaaaatgaggtttttgaacttgcgctgcaaaagaatataattattgcaacgggtggtggaataattgaaaatccaaagaatttagaggctcttgatagagaagctggagttgtctttttgaccgctgattttgaaacgctttgggaacgaatttcgatggatttgcagaatgttcgtcctctagcgcaggataaaaaggccgctcaacttttatttgaaaaaagaaaaaatgactatgcaaaagtggccgatttaacgattgatgttactgataagagtcctgagcaaattgtagaagagattcgtgaaaaatgggggataaattaa

SEQ ID NO: 2048 - protein, 162 aa, Lactococcus lactis subsp. lactis
MSIILIGFMGAGKSTVAKLLTENFTDLDQLIEEEIEMTIAEFFELFGEADFRKIENEVFELALQKNIIIATGGGIIENPKNLEALDREAGVVFLTADFETLWERISMDLQNVRPLAQDKKAAQLLFEKRKNDYAKVADLTIDVTDKSPEQIVEEIREKWGIN

SEQ ID NO: 2049 - DNA, 498 bp, Clostridium acetobutylicum
  CDS (1)..(498)
atgaatttagtacttataggtatgcctggatgcggtaagagtacaataggtaaaattttatcaaaagagctaaatatgaaattttatgatgctgataaatatctagaagatagaaataatatgaagatttccgatatgtttaaaagaggagaagaattttttagaaatttagaaagtgcagccctaaaagaacttagttttgaggagaactccgttatagcaacaggaggaggcgcagtaacaagggaaaaaaatatactttgtttaaagaaaaaaggaaagatagtatttataaataggccgccagaaaagataatggaagatgttgatattgaaaatagacctcttttagaacatggaaagagcagaattcttaagctctatgaagaaagatacaaattatacattaactactgtgattatcaggttttaaatgatggatctatagatagagttgttttaagcataaaaaaataccttgaaggggagggaatttaa

SEQ ID NO: 2050 - protein, 165 aa, Clostridium acetobutylicum
MNLVLIGMPGCGKSTIGKILSKELNMKFYDADKYLEDRNNMKISDMFKRGEEFFRNLESAALKELSFEENSVIATGGGAVTREKNILCLKKKGKIVFINRPPEKIMEDVDIENRPLLEHGKSRILKLYEERYKLYINYCDYQVLNDGSIDRVVLSIKKYLEGEGI

SEQ ID NO: 2051 - DNA, 519 bp, Pseudomonas aeruginosa
  CDS (1)..(519)
atggtcaacctgatcctcgtcggcccgatgggtgctggaaagagcaccatcgggcgcctgctcgccaaggagctgcatctcgcgttcaaggactccgacaaggagatcgaacagcggtgcggcgcgaatatcccatggatcttcgatgtcgagggcgaggtcggtttccgcgagcgtgagcaggccatgctcaccgaactctgcgccgccgacggcatggtgatcgccaccggcggcggggcggtgatgcgcgacggtaaccgccaggtgctgcgcgccggtggccgggttgtgtacctgcatgcctcggtcgagcaccagatcgcgcgcacggcgcgggaccgcaaccgccccttgttgcagaagcccaacccaggacagatcctccgcgacctgatggcgctgcgcgacccgctctaccgcgaaatcgccgatgtggtggtggagaccgacgaaaggccgccgcgcctggtcgtccaggaaattctcgaacgcctgcgcaagttgccgccccgctga

SEQ ID NO: 2052 - protein, 172 aa, Pseudomonas aeruginosa
MVNLILVGPMGAGKSTIGRLLAKELHLAFKDSDKEIEQRCGANIPWIFDVEGEVGFREREQAMLTELCAADGMVIATGGGAVMRDGNRQVLRAGGRVVYLHASVEHQIARTARDRNRPLLQKPNPGQILRDLMALRDPLYREIADVVVETDERPPRLVVQEILERLRKLPPR

SEQ ID NO: 2053 - DNA, 522 bp, Buchnera sp
  CDS (1)..(522)
atggcagaaaaacgaaatatttttctagttgggcccatgggtgctgggaaaagcactattggtcgtcaattatctcaacaacttaatatggaattttttgactccgatcaagaaattgaaaaacgtactggtgctgatataagttgggtttttgatgtagagggtgaaagtggttttcgtttgagagaacaaagagttattgatgaattaactactaaacagggtattgttcttgctacaggaggaggttcagttaaatttagagaaactcgtaattttttgtcatctcgtggtattgtagtttatttagaaactactattgagaaacaattagcacgtactaagagagataaaaaaagacccttgttgcagaatgctgattcaaatcggatgatattagaaaatttagcttatgaaagaaatcctttctatgaagaaattgcagatataaaagttaaaactgatgatcaaagtgctaaatctgtagcttttaatataattcgtttattagaagaaatataa

SEQ ID NO: 2054 - protein, 173 aa, Buchnera sp
MAEKRNIFLVGPMGAGKSTIGRQLSQQLNMEFFDSDQEIEKRTGADISWVFDVEGESGFRLREQRVIDELTTKQGIVLATGGGSVKFRETRNFLSSRGIVVYLETTIEKQLARTKRDKKRPLLQNADSNRMILENLAYERNPFYEEIADIKVKTDDQSAKSVAFNIIRLLEEI

SEQ ID NO: 2055 - DNA, 501 bp, Agrobacterium tumefaciens
  CDS (1)..(501)
atggggctgatgggggctggaaagtcggcggtgggccgcatggtcgcccagcagctcaaggtgcctttcattgatacggatgtcgaaatcgagcgcgtatcgcgcatgacgatatcggagcttttcgccacctatggcgaggaggaattccgggcgctggaaacgcgggtcatcaagcggttgatgcgcggcggtcccaaggtcgtctccacgggcggcggcgcatttatcaacgacactacccgaggccatatcaggcgcggcggcatttcgctgtggctgaaggccgatctcgaggttctgtgggagagggtcaacaagcgcgaccaccgcccgcttctcaagactgaaaaccccaaggcaacgctcgctgccctgatggagaaacgttatccgatctatgcggaggcggacgtcaccatcgaatcccgtgatgtccgcaaggagatcatcgcgaccgaagtgctgacggctttagccggccttaaacagaaagactga

SEQ ID NO: 2056 - protein, 166 aa, Agrobacterium tumefaciens
MGLMGAGKSAVGRMVAQQLKVPFIDTDVEIERVSRMTISELFATYGEEEFRALETRVIKRLMRGGPKVVSTGGGAFINDTTRGHIRRGGISLWLKADLEVLWERVNKRDHRPLLKTENPKATLAALMEKRYPIYAEADVTIESRDVRKEIIATEVLTALAGLKQKD

SEQ ID NO: 2057 - DNA, 561 bp, Bacillus subtilis
  CDS (1)..(561)
atgaacgctaaacgagccatcccagtaagagaaagaaatatcgtcctgatcggattcatgggtgtaggaaaaacaacaatcggccaattggtcgctaaaaaattatatagagattttattgatattgaccagcagatcgaaaaggatttcaatatgtcaattcctgagatatttgagaaaaagggagaagacttttcccggaaaacggagaaggaatatattttagacatctgccatcataaacgattcaaaatcgtatctctgggcgggggatcttttaaacaagaagaaatcagaaattgctgtctggaaaactgtctcgtgcttcatctggacctgtcatgggagaactggaagcagcgcgcggatttattgatcgaaagccgccctgtactgcataaccgttcaatggatgaaatggaacagctgtttaacgaaagaaaagtcatttatgacaagcacaattcaaaagtggcaacagacaacctttccccggaagaggttgccgattacattgttgagacattaaaaattggctgggatctttatcagccgatgtaa

SEQ ID NO: 2058 - protein, 186 aa, Bacillus subtilis
MNAKRAIPVRERNIVLIGFMGVGKTTIGQLVAKKLYRDFIDIDQQIEKDFNMSIPEIFEKKGEDFSRKTEKEYILDICHHKRFKIVSLGGGSFKQEEIRNCCLENCLVLHLDLSWENWKQRADLLIESRPVLHNRSMDEMEQLFNERKVIYDKHNSKVATDNLSPEEVADYIVETLKIGWDLYQPM

SEQ ID NO: 2059 - DNA, 810 bp, Escherichia coli
  CDS (286)..(810)
gatccagaccggcggaccagatagcctttcacaacgtgaccgccaggcctttgccgcggagctggagaagtggtggctggaagtgcaacgtagtcgtggctaaatgtaatttattatttacacttcattcttgaatatttattggtatagtaaggggtgtattgagattttcactttaagtggaattttttctttacaatcgaaattgtactagtttgatggtatgatcgctattctcatgacaccggctttcgccgcattgcgacctattggggaaaacccacgatgacacaacctctttttctgatcgggcctcggggctgtggtaaaacaacggtcggaatggcccttgccgattcgcttaaccgtcggtttgtcgataccgatcagtggttgcaatcacagctcaatatgacggtcgcggagatcgtcgaaagggaagagtgggcgggatttcgcgccagagaaacggcggcgctggaagcggtaactgcgccatccaccgttatcgctacaggcggcggcattattctgacggaatttaatcgtcacttcatgcaaaataacgggatcgtggtttatttgtgtgcgccagtatcagtcctggttaaccgactgcaagctgcaccggaagaagatttacggccaaccttaacgggaaaaccgctgagcgaagaagttcaggaagtgctggaagaacgcgatgcgctatatcgcgaagttgcgcatattatcatcgacgcaacaaacgaacccagccaggtgatttctgaaattcgcagcgccctggcacagacgatcaattgttga

SEQ ID NO: 2060 - protein, 174 aa, Escherichia coli
MTQPLFLIGPRGCGKTTVGMALADSLNRRFVDTDQWLQSQLNMTVAEIVEREEWAGFRARETAALEAVTAPSTVIATGGGIILTEFNRHFMQNNGIVVYLCAPVSVLVNRLQAAPEEDLRPTLTGKPLSEEVQEVLEERDALYREVAHIIIDATNEPSQVISEIRSALAQTINC

SEQ ID NO: 2061 - DNA, 522 bp, Erwinia chrysanthemi
  CDS (1)..(522)
atgacagaacccatttttatggtcggcgccagagggtgcggaaaaaccaccgtcggccgtgagctggcgcgggcgcttggctatgagtttgtcgatacggatatttttatgcagcacaccagcggcatgacagtggcggacgtggtggcagcggaaggctggccggggtttcgccgccgtgaaagcgaggccttgcaggctgtcgcgacaccgaatcgtgtggtggcgaccggtggcggcatggtgttgttggagcaaaaccgccagtttatgcgtgcgcacggaacggtcgtctatttgttcgcgccagccgaggagctggcgttacgcttgcaggcaagcccacaggcacaccagcgaccgacactgaccgggcggcctattgctgaggaaatggaggcggtgctccgtgaacgcgaagcgttgtatcaggatgtagcgcactatgtggtcgatgcgacccaaccgcccgccgcgattgtctgcgaattgatgcagacgatgcgtctgcctgcggcctga

SEQ ID NO: 2062 - protein, 173 aa, Erwinia chrysanthemi
MTEPIFMVGARGCGKTTVGRELARALGYEFVDTDIFMQHTSGMTVADVVAAEGWPGFRRRESEALQAVATPNRVVATGGGMVLLEQNRQFMRAHGTVVYLFAPAEELALRLQASPQAHQRPTLTGRPIAEEMEAVLREREALYQDVAHYVVDATQPPAAIVCELMQTMRLPAA

SEQ ID NO: 2063 - DNA, 1293 bp, Lycopersicon esculentum (tomato)
  CDS (123)..(1025)
gttgttccaattttcattgctcttctgctcagggcagcagaagcttgttgacagtatagagtgcactcttcagctctttctaattttaaaaaaatttcttgtggtgttggtggatagagactatggaggctagagtttcgcagagccttcagttgtcctcatggataaattccgataaggtagtaaggaaaccgagtggtttgttgcgtttctctgagaagtggaatgaaaaaccaaggcatcgggtagttgtatcctgccatttacagcctagaaaagctgcacattctgatagacgagtacagttgaaagtttcatgttctcctcaaaatgttcaagcttcagttctggagtcaggatgtttctctgcatcaattgatgaaatcgagacattaaagaataaagcagaagaagttgaagaatatctagatggacgatgtgtataccttgttggaatgatgggctgcggaaaaacaactgtgggccggattttggcagaaacactgggatattccttttttgactgtgacaggctgatagagcaggctgttggtggaattactgtagctgaaatctttgagcttcgcggagagagcttcttcagggataatgagactgaggtattgcacaaactatctttgatgcatcggcttgttgtttcaacgggtggaggtgcagttgttcgtcccattaattggaggcatatgcacaagggtattagtgtttggttagatgttcctttagaagctttggccaagagaattaccacggaaggaactaaatctcgcccccttttacatgaagaatcaggagacgtttatgatacgactttgaagcggttaactactttaatggagacgaggggtgaaaattatgccaatgcaagtgccagggtttcactagaaaatattgcattgaaaagggaaaaagatgtctgtcatattacacctgctgaaattactttagaggttcttatacaaattgagaacttcttaaagacacaaaagagcgtagttgtgctataagctttttcactaccaatcgtgtggaggtggatggtttggtgctctactctcttgaccagggtacgattttaggtgttcgagacaattgaggttttggtaatgttttgtttctgttatgcactggatatgtaattgtacataatcaaaaccaattttggaactgtagtgtatcctaagcgcccaattgttgtatactaagaatgcaaactcagtagttatttcgtttgtttcaaagtttgtaacagaaataaatacccaaatttccaat

SEQ ID NO: 2064 - protein, 300 aa, Lycopersicon esculentum (tomato)
MEARVSQSLQLSSWINSDKVVRKPSGLLRFSEKWNEKPRHRVVVSCHLQPRKAAHSDRRVQLKVSCSPQNVQASVLESGCFSASIDEIETLKNKAEEVEEYLDGRCVYLVGMMGCGKTTVGRILAETLGYSFFDCDRLIEQAVGGITVAEIFELRGESFFRDNETEVLHKLSLMHRLVVSTGGGAVVRPINWRHMHKGISVWLDVPLEALAKRITTEGTKSRPLLHEESGDVYDTTLKRLTTLMETRGENYANASARVSLENIALKREKDVCHITPAEITLEVLIQIENFLKTQKSVVVL

SEQ ID NO: 2065 - DNA, 489 bp, Lactococcus lactis
  CDS (1)..(489)
atgagtatcattttaattggatttatgggtgccggaaaatcaacggtggcaaaacttttagcagaagaatttactgatttagataagttgattgaagaagagattgaaatgccaattgcgactttttttgaattatttggagaagctgattttcgtaaaattgaaaatgaggtttttgagcttgctgttcaaaaagatattattatcgcaactggtggaggaatcatagaaaatccaaagaatttaaatgttcttgatagagcatcacgagttgtatttttgactgctgattttgatactttatggaagcgaatttccatggattggcagaatgttcgacctttagctcaagacaaagaagctgctcaacttttatttgaaaaaagaatgaaagactattcattggttgcggatttaacaattgatgtgaccgataaaagtccagagcagattgcagagcagattagagaaaagtgggagatagagtag

SEQ ID NO: 2066 - protein, 162 aa, Lactococcus lactis
MSIILIGFMGAGKSTVAKLLAEEFTDLDKLIEEEIEMPIATFFELFGEADFRKIENEVFELAVQKDIIIATGGGIIENPKNLNVLDRASRVVFLTADFDTLWKRISMDWQNVRPLAQDKEAAQLLFEKRMKDYSLVADLTIDVTDKSPEQIAEQIREKWEIE

SEQ ID NO: 2067 - DNA, 570 bp, Synechocystis sp
  CDS (1)..(570)
atggcccaggatctaatcaaagaacaattacaaggcgttaacctgtttctgatcggcatgatgggcagtggtaaatccaccgtcgggccgttgttggcagaacagttggggtaccgttttttcgatgcggatgtgttgattgagcgggtggctggcaaggcgatcgccgacatttttgcggaggatggggaagatacttttcgggatttggagacggaagtgttgggacatctggcggcccaaaccagaagcgtcattgccaccgggggcggagtggtgctccgacgacaaaattggagttatctacaccatggcctggtcatttggcttgatggttccctggaattacttttggccaggctccagggagatgaagcaagacccctgctccaggtggaaaatctggaagaacggttaggaaatttattggcccaacggcaacccctctacgcccaggcggatctccggtttcccctgcaggcagaccaagatcctctggcgatcgccggagaattactggccactattccaggactgcttaaaccccaatgcagtgccgaacaaaattga

SEQ ID NO: 2068 - protein, 189 aa, Synechocystis sp
MAQDLIKEQLQGVNLFLIGMMGSGKSTVGPLLAEQLGYRFFDADVLIERVAGKAIADIFAEDGEDTFRDLETEVLGHLAAQTRSVIATGGGVVLRRQNWSYLHHGLVIWLDGSLELLLARLQGDEARPLLQVENLEERLGNLLAQRQPLYAQADLRFPLQADQDPLAIAGELLATIPGLLKPQCSAEQN

SEQ ID NO: 2069 - DNA, 693 bp, Corynebacterium glutamicum
  CDS (101)..(673)
ctgcagaaattcggcggtgactccctgagcgaaaccaagagcaacattgacacctacctcaaaaacattgaggaacgaatgaaattcgaaggtttagaggatggagcgtaatgaagtgaatgatcaaattcacttagatcatcaatcagatgacacctctgaatgctcctgcccgatcgtggttcttgtgggtttgccaggagctggaaaatccaccattggacgtcgattagcgcgcgccttaaacactgaactcgtcgactccgacgaactgattgagcgcgccaccggaaaagcctgtggcgccgtgttcagcgagctcggcgagccagccttccgcgagctcgaggccatccacgtggccgaagcactgaaatcctccggagtggtgagcttgggaggcggatctgtgctgacagaatccacccgtgaactgctcaaaggccaggacgtggtctggatcgacgtgccagtagaagaaggcatcaggcgcaccgcaaacgagcgttcccgccccgtgctgcaagccgccgaccccgccgagcactaccgcaacctggtgaaagtgcgcaccccgttgtacgaagaggtggcaacctaccgacttcgcaccaacaaccgcagcccccagcaagtggtggcagcagtgttgcatcatctagaaatcgattaattaaaccgggcacctgatta

SEQ ID NO: 2070 - protein, 190 aa, Corynebacterium glutamicum
MERNEVNDQIHLDHQSDDTSECSCPIVVLVGLPGAGKSTIGRRLARALNTELVDSDELIERATGKACGAVFSELGEPAFRELEAIHVAEALKSSGVVSLGGGSVLTESTRELLKGQDVVWIDVPVEEGIRRTANERSRPVLQAADPAEHYRNLVKVRTPLYEEVATYRLRTNNRSPQQVVAAVLHHLEID

SEQ ID NO: 2071 - DNA, 522 bp, Erwinia carotovora subsp
  CDS (1)..(522)
atggcagagaaacgcaatatctttctggttgggcctatgggtgccggcaaaagcactattggccgtcaattagctcagcaactcaatatggagtttttcgactccgatcaagaaattgagcgacgcactggggctgatgtgggctgggtattcgatgtggaaggcgaagaaggcttccgcgatcgtgaagagaaagtcattaatgaattgacggaaaagcaaggcatcgtactggcgacaggcggtggctcagtcaaatcacgtgagacgcgcaatcgtctttcagcgcgcggcgttgtcgtttatttggaaacgacaatcgagaaacaactggcccgcacgcagcgtgacaagaaacgtccgttacttcaggttgaaacccctccacgtgaagtattggaagcgttggcgaaagagcggaacccgctttatgaagaaatcgctgatgttaccattcggactgacgagcaaagtgccaaggtcgttgctaaccagattatcaatatgctggaaagtaactaa

SEQ ID NO: 2072 - protein, 173 aa, Erwinia carotovora subsp
MAEKRNIFLVGPMGAGKSTIGRQLAQQLNMEFFDSDQEIERRTGADVGWVFDVEGEEGFRDREEKVINELTEKQGIVLATGGGSVKSRETRNRLSARGVVVYLETTIEKQLARTQRDKKRPLLQVETPPREVLEALAKERNPLYEEIADVTIRTDEQSAKVVANQIINMLESN

SEQ ID NO: 2073 - DNA, 522 bp, Erwinia carotovora subsp
  CDS (1)..(522)
atgacacaccccatttttatggttggtgccagaggctgtgggaagaccaccgttgggcatcagctggcgcaggcgttgggatatgactttgtcgataccgacctttttatgcagcagacgaccaatatgacggtcgctgatgtggtcgcgcaggaaggatggcatggttttcgccagcgtgaaagtctggcgcttcagcaggtggcgtctaaccgctgcatcgtcgcgacaggcggcggaatggtgctagcggaagccaatcgacgttttatgcatgataaaggcatcgttatttatctccacgcggatgcagagctgctggctcagcggctggaagaaaatccgcaggataaccagcggcctacactgaccggacgccccatcgcagaggaaatggctgacgtactggccgcgcgtgaagcgctttatcgcggtgctgcacatcacgttattgatgcgtcgcagacaccggacgccattgtggtaagtgtgttaaaggcgctgcgtttgtcggcagcgtag

SEQ ID NO: 2074 - protein, 173 aa, Erwinia carotovora subsp
MTHPIFMVGARGCGKTTVGHQLAQALGYDFVDTDLFMQQTTNMTVADVVAQEGWHGFRQRESLALQQVASNRCIVATGGGMVLAEANRRFMHDKGIVIYLHADAELLAQRLEENPQDNQRPTLTGRPIAEEMADVLAAREALYRGAAHHVIDASQTPDAIVVSVLKALRLSAA

SEQ ID NO: 2075 - DNA, 543 bp, Acinetobacter sp
  CDS (1)..(543)
atgccaagcaaagagtttgacaccctgccaaatatttatttggtagggcccatgggagcaggaaagacaacagtcggtcgacatttagcagagttgttagggcgtgagtttctagacagtgatcatgaaattgagcgtagaacaggtgcaaccatcccatggatttttgaaaaagagggtgaaatcggatttagaagtcgggaaaccattgtgctggatgatttaacatctcgacgggatttagtgttagcaacaggtggtggggtggtaacacaaccagccaaccggagctatttaaaaacacgaggtgttgttgtttatttatacacgcctgttgagcttcagttacagcgtacctatcgtgataaaaatagacctttattacaggttgaaaaccctgaacagcgtcttcgtgatttattaaagttaagagatcctttatatcgcgatgttgcacatcatattatcgaaacaaatcaaggtgctgcccgagagctggctcagcaaattttacgtgtgattttaagttctggatcacattaa

SEQ ID NO: 2076 - protein, 180 aa, Acinetobacter sp
MPSKEFDTLPNIYLVGPMGAGKTTVGRHLAELLGREFLDSDHEIERRTGATIPWIFEKEGEIGFRSRETIVLDDLTSRRDLVLATGGGVVTQPANRSYLKTRGVVVYLYTPVELQLQRTYRDKNRPLLQVENPEQRLRDLLKLRDPLYRDVAHHIIETNQGAARELAQQILRVILSSGSH

SEQ ID NO: 2077 - DNA, 633 bp, Bartonella quintana
  CDS (1)..(633)
atgaaaactaatcatcccaaacatatcccgataacacaaataaaaaagcagcttttatcgtctcttgataaacgagcacttgtacttgttggtcttatgggtgcaggcaaatcagtaatcggaaaacgcattgctaccatgctcggtttgcccttctacgattctgaccaggaaattgaaaaagctgcacaaatgacaatcactgaattttttaaagtttatggtgaatcagaattccgtgctcttgaacagcatgttactctaagcctcatgaaaaaaagtcctcttgttttagcaacaggtggcggtgcctacataaatgaagatatccgacaagtcattaataaaaatggtatatctatatggctcaaagcagatcttgatattctcatgaaacgtgtttcgcgacacccaacgcgaccactccttcaaacagcaaaccctaaagaaaccatgaaaaaactcatggaacaacgctaccctatctatgcaaaagcaaacttaacaattaacagttataaggaaagccgccatactgtagcacaaaatgttatacggtctgtacagaactacatctatacagaaattaacgataggaataaccagcatgcaaaccaagaccgtcactgttaa

SEQ ID NO: 2078 - protein, 210 aa, Bartonella quintana
MKTNHPKHIPITQIKKQLLSSLDKRALVLVGLMGAGKSVIGKRIATMLGLPFYDSDQEIEKAAQMTITEFFKVYGESEFRALEQHVTLSLMKKSPLVLATGGGAYINEDIRQVINKNGISIWLKADLDILMKRVSRHPTRPLLQTANPKETMKKLMEQRYPIYAKANLTINSYKESRHTVAQNVIRSVQNYIYTEINDRNNQHANQDRHC

SEQ ID NO: 2079 - DNA, 633 bp, Bartonella henselae
  CDS (1)..(633)
atgaaaagtaatcgaccaaaacatattccgataacaaaaataaagaatcaacttttatcgtctcttgataaccgagcacttgtacttattggtcttatgggtgtaggcaaatcggtgatcggaaaacgtattgccaccatgctctgtttacctttctatgattctgatcaagaaattgaaaaagctgcacaaatgactatcactgaactctttaaaacttatggtgaatcagaattccgggctcttgaacaacgcgttattctaaatctcatgaaaaacagacctcttgttttagcaacaggtggtggtgcctacataaacgaagatatccgaaaagccgttcataaaaatggtatatccatatggcttaaagtcgatcttgataccctcatgcaacgtgtctcaaagcgtccaacacgcccacttcttcaaacagaaaatcctaaagaaactatgcaaaaactcatgaaacagcgctatcctatctatgcaaaagcaaacttaacaattaacagtcataaggaaaaccgtcaaaccgtagcacaaaatgtcatacggtctgtacaacactacctcgatacagaaaagaatgataggaataaccagcatgcaaaccaaaactgtcactgttaa

SEQ ID NO: 2080 - protein, 210 aa, Bartonella henselae
MKSNRPKHIPITKIKNQLLSSLDNRALVLIGLMGVGKSVIGKRIATMLCLPFYDSDQEIEKAAQMTITELFKTYGESEFRALEQRVILNLMKNRPLVLATGGGAYINEDIRKAVHKNGISIWLKVDLDTLMQRVSKRPTRPLLQTENPKETMQKLMKQRYPIYAKANLTINSHKENRQTVAQNVIRSVQHYLDTEKNDRNNQHANQNCHC

SEQ ID NO: 2081 - DNA, 525 bp, Staphylococcus aureus subsp
  CDS (1)..(525)
atgaatcatgataaatcaccaataattttaattggtttcatgggtaccggtaaatctacgattggtaaatacgttgcagatgagcaaaatttatcatttattgatatagattcatatatcgaagaaaagtataagttaacaataccagaaatatttagtaaacatggtgaacaatatttcaggaatttagagttcacatgtttgcaagaatgtattaacactgcagatataattgctactggtggtggtattattgaaagtgaagaggtatttaattttttgaaaaatcaaaaaaacattatttggttagattgtaatattgatattatatatagtcgaatcaatgatgacccacatcgacctaatgcaaataataagacaatcaagcagttaaatgacttgtattgctcgcggattttaagatataatgaaatcgcattcaagaaatttgatagtcatttgctatcaatttcagaaatatattatgaattgctaaatttaataaaagcgagtgatcagtattag

SEQ ID NO: 2082 - protein, 174 aa, Staphylococcus aureus subsp
MNHDKSPIILIGFMGTGKSTIGKYVADEQNLSFIDIDSYIEEKYKLTIPEIFSKHGEQYFRNLEFTCLQECINTADIIATGGGIIESEEVFNFLKNQKNIIWLDCNIDIIYSRINDDPHRPNANNKTIKQLNDLYCSRILRYNEIAFKKFDSHLLSISEIYYELLNLIKASDQY

SEQ ID NO: 2083 - DNA, 528 bp, Photobacterium profundum
  CDS (1)..(528)
atgctaacaatggctgaaaaacgaaatattttcctggtcggacctatgggtgccggcaaaagtactattggtagacaccttgcacaacagttgcacatggagttttttgattctgataccgttatcgaagatcgtaccggagctgatataagctgggtattcgatgttgaaggtgaagaaggcttccgtgttcgcgaagaaggtgttattgacgatctgactcaagagcaaggtattgttctcgcgacaggtggtggttctgttgtcagtaaagagaaccgtaaccgcttatctgctcgtggtgttgttgtttatcttgaaacgacaatcgagaaacagctagcacgtactcaacgagataaaaagcgcccgttgcttcaaacggatgctccacgtgaagtacttgaagctcttgctgcagaacgtaatccaatgtatgaagaagtgtccgactatgttgtacgcactgatgatcagagcgccaaagtagttgccaaccaaatcatcaatatgcttgaagagcgttaa

SEQ ID NO: 2084 - protein, 175 aa, Photobacterium profundum
MLTMAEKRNIFLVGPMGAGKSTIGRHLAQQLHMEFFDSDTVIEDRTGADISWVFDVEGEEGFRVREEGVIDDLTQEQGIVLATGGGSVVSKENRNRLSARGVVVYLETTIEKQLARTQRDKKRPLLQTDAPREVLEALAAERNPMYEEVSDYVVRTDDQSAKVVANQIINMLEER

SEQ ID NO: 2085 - DNA, 612 bp, Parachlamydia sp
  CDS (1)..(612)
atgcatcaaaaagagttttcccaactttattcaagatttaaaaaaacttggggctcggtttacatgatttctaaaagaagcgttgctttgattggtctacctttgtgtgggaaaacaacatgggggcaatggctggctaaaaaatttgagtatgcctttattgatacagactggctaattcaacaaaaacatcctacgttaacatgtcgagaaatttttcaattatttgggcagtcctatttccgttctttagaaagggatgtcattgatgacttaaagccaactaaacaggtgattattgcaaccggaggtggggtgatttataatgatcaaaatcgaaatgcgctaaaaaaatattgtcggttaatttatttgaaactttctttttcaaactggaaagagcgtattttcagtcaaactgagttaccagcctatatttctcaagaacaatcttcggatgtatctttgaaaaaactctatgcaagcagaacgttaatttatgaaaattgggcagaccaaactatcgatatgaacggatctatgaacaacgatttttctgttcatctactcatgagccttcaatttgttaaagaggaaaataatggcatctaa

SEQ ID NO: 2086 - protein, 203 aa, Parachlamydia sp
MHQKEFSQLYSRFKKTWGSVYMISKRSVALIGLPLCGKTTWGQWLAKKFEYAFIDTDWLIQQKHPTLTCREIFQLFGQSYFRSLERDVIDDLKPTKQVIIATGGGVIYNDQNRNALKKYCRLIYLKLSFSNWKERIFSQTELPAYISQEQSSDVSLKKLYASRTLIYENWADQTIDMNGSMNNDFSVHLLMSLQFVKEENNGI

SEQ ID NO: 2087 - DNA, 918 bp, Rhodopseudomonas palustris
  CDS (1)..(918)
atggccgagccagacgataccgacgcgagctttctgctcgacctcggccgccatgtccgcaccatgcgcgggcggcgcggcatgtcgcgcaaggtgctggccaaggtctccggcatctcggagcgctacatcgcccagctcgaaagcggcaaaggcaacgtatcgatcatgctgctgcgccggatctccgaagcgctggcgacgccgctcgaagacctgctgccgtccaatgaatcttcggccgactggccggtgatccgcgatctggtgcggcgcgccaccccggtgcagatcgcgcatgccaaggacgtcttgtccggcctcggccgctacggcggcagcctggagcgggaggcgaccttccatggcatcgggctgatcggcctgcgcggcgccggcaagtcgacgctcggcaagatgctggccgacagcatcggctggagcttcgtcgaactgaatcgcgaaatcgaacgccagaacggcctgtcggtgtccgagatcatcgcgctgtacggccaggaaggcttccgccgcatggagcagactgcgctgtcgcggctgctcgcccgcaaggagccgatcgtgctggcgaccggcggcggcatcgtctccgagccgatcaccttcgatcagatcctgacctcgttctacacgatctggctgaaggccgagccggaggagcacatgtcgcgggtccgcggccagggcgacctgcggccgatggccgacgaccgcgccgcgatgcaggagctgcgcaccatcctgcaaagccgcgagccactgtatgcccgcgccgccggcgtactcgacaccgccgggctgtcggtcgaagccgccgcgcagaagctggtcgcgatggtgtcgccggtgctgagccgcgatgcaggcgcgttcggcctgcgcgaggccacgccgtaa

SEQ ID NO: 2088 - protein, 305 aa, Rhodopseudomonas palustris
MAEPDDTDASFLLDLGRHVRTMRGRRGMSRKVLAKVSGISERYIAQLESGKGNVSIMLLRRISEALATPLEDLLPSNESSADWPVIRDLVRRATPVQIAHAKDVLSGLGRYGGSLEREATFHGIGLIGLRGAGKSTLGKMLADSIGWSFVELNREIERQNGLSVSEIIALYGQEGFRRMEQTALSRLLARKEPIVLATGGGIVSEPITFDQILTSFYTIWLKAEPEEHMSRVRGQGDLRPMADDRAAMQELRTILQSREPLYARAAGVLDTAGLSVEAAAQKLVAMVSPVLSRDAGAFGLREATP

SEQ ID NO: 2089 - DNA, 612 bp, Rhodopseudomonas palustris
  CDS (1)..(612)
atgccgagaatgtctgaaaccgtaccgacggctgctgccggcaggtcgccccaggaagccgagatcgtcgcggcgctgggcgatcgcccggtcgtgctcatcggcatgatgggcgccggcaaatccaccgtcggacgccggctggcgctgcgactcgggctgccgtttctcgacgccgacaccgagattgaatcggcggccgcgatgaccatcccggagatcttcgaaacccatggcgagccgcattttcgcgacggcgaggctcgggtgatttcgcggctgctcgacggcggcaccaaggtgctggcgaccggtggtggggccttcatgcgcgaggaaactcgtgaccggattcgcgagaaggcgatctcgatgtggctcgaggcggaggccgacgtgatcctgcgccgggtcaagcgccgcgcggaccggccgctgctgaagacgccagatccggccggcaccatcgcccggctgatcgcggaacgctatccgctataccgcgaagccgatatcaccatcgcgtcccgcgacgtgccgcacgagaagatcgtcgacgaatgcgtcgcggcgctccacgactatctgtgcgccgcgccgccccaaccttga

SEQ ID NO: 2090 - protein, 203 aa, Rhodopseudomonas palustris
MPRMSETVPTAAAGRSPQEAEIVAALGDRPVVLIGMMGAGKSTVGRRLALRLGLPFLDADTEIESAAAMTIPEIFETHGEPHFRDGEARVISRLLDGGTKVLATGGGAFMREETRDRIREKAISMWLEAEADVILRRVKRRADRPLLKTPDPAGTIARLIAERYPLYREADITIASRDVPHEKIVDECVAALHDYLCAAPPQP

SEQ ID NO: 2091 - DNA, 522 bp, Corynebacterium diphtheriae
  CDS (1)..(522)
atgagtggtcgggttcgcccaatcgttgttttagtaggtccaccggggtcaggtaaaacgactattggccgtcgtcttgcgaatgccctgaatacttcggtggtggatagcgatgtgttgattgaacaactccaaggcaaaccctgtggtgttgtatttgctgaactcggtgagccaaactttcgagatttagaagcagaagtaatagactttgccctcacaacagcaggggtagtgagcctcggtggcggtgccgtgacaacggaatcagtgcgacaaaagcttcgagcgcaaatagtggtatgggtagatgtatccgcagcggaaggcgtgcgtcgaactgcagttgaaaattcgaggccattactggatacaacgaatccacttgaacgctacagcgaattattagctcagcgtcgtgatttttataaagaagtagcagattatcgcgcgcacacagatggtcggagtccacagcaaattgttgctgatattttgggctttcttgaaaccttacgttga

SEQ ID NO: 2092 - protein, 173 aa, Corynebacterium diphtheriae
MSGRVRPIVVLVGPPGSGKTTIGRRLANALNTSVVDSDVLIEQLQGKPCGVVFAELGEPNFRDLEAEVIDFALTTAGVVSLGGGAVTTESVRQKLRAQIVVWVDVSAAEGVRRTAVENSRPLLDTTNPLERYSELLAQRRDFYKEVADYRAHTDGRSPQQIVADILGFLETLR

SEQ ID NO: 2093 - DNA, 543 bp, Desulfovibrio vulgaris
  CDS (1)..(543)
atgatgacacgacgtgaaggcgcacgactttttgaaggatgctgcgtaaccatcatcggcatggccggtgcaggcaagacgacagtgggaagggaacttgcacgccagatggactgggcacatgtggacacggacagcctcatcgaggcgacgtacgggacagtactccagaatgtggccgacagcatgagcaaggaagccttcctcgatgtggaagccggcatcatctgccgcatcggggcgaaacgggctgtcctttccacgggtggcagcgtcgtctaccgggcagaggccatgcgccatctcgcgtcactgggcccggtcgtctatcttgatgtctcgctgccgctcatcctcgaacgcatcgcccgcaaccccgacaggggcctcgccatcgcaccggggcagaccatcgaagacctctacaacgaacgcaaggccctgtacgaaacgtatcaggacttcaccttgaccgccgacaccctcacgcccgaggaatgcggtcgcgccatcctgtcatggctggagacggcagatgcctaa

SEQ ID NO: 2094 - protein, 180 aa, Desulfovibrio vulgaris
MMTRREGARLFEGCCVTIIGMAGAGKTTVGRELARQMDWAHVDTDSLIEATYGTVLQNVADSMSKEAFLDVEAGIICRIGAKRAVLSTGGSVVYRAEAMRHLASLGPVVYLDVSLPLILERIARNPDRGLAIAPGQTIEDLYNERKALYETYQDFTLTADTLTPEECGRAILSWLETADA

SEQ ID NO: 2095 - DNA, 528 bp, Desulfovibrio vulgaris
  CDS (1)..(528)
atggggtcggaagtgtgccgggtcttcctcatcgggggcagggccagcggcaagagtacggtgggcagggcgctcgccgcaaggcttggatgggatttcgcggataccgacgccatggtgacgcggcgtgccgggtgcgacatcgccacactggtggcggaacgcgggtgggatgccttccgtgacatggagagtgacgccctgcgtgatgccgcagcgcgtgaacgtgtcgtcgtcgccacaggcgggggcatggtgctgcgtgcggaaaatagggcgctgctgcgcgaggcgggggtcaccgtgttcctgtcgttgcctgtcgaggtcgtggcggcgcggcttgcccgcaacccggaacatgggcaacgcccctcactgaccggaaaggccgtggcggacgaggtggcggacgtgatgcgcgaacgggcacctctctatgccgaggcggcccgccatgtggtgcgcggcgatgcgcccgtggcgtgcatcgtcgaggacatcaccgcgctgcttgccttttcgtga

SEQ ID NO: 2096 - protein, 175 aa, Desulfovibrio vulgaris
MGSEVCRVFLIGGRASGKSTVGRALAARLGWDFADTDAMVTRRAGCDIATLVAERGWDAFRDMESDALRDAAARERVVVATGGGMVLRAENRALLREAGVTVFLSLPVEVVAARLARNPEHGQRPSLTGKAVADEVADVMRERAPLYAEAARHVVRGDAPVACIVEDITALLAFS

SEQ ID NO: 2097 - DNA, 555 bp, Thermus thermophilus
  CDS (1)..(555)
atggcccgcctcgaggttccccgtcccgccaccttcgtcaccctcaccgggttcatgggggtggggaaaagccgcatcgggcgggagctcgcccgggcgctcatgctccacttcattgacctggaccgctacattgagcggcgcaccgggatctccatccccgacatcttccgccacctcggggaggaggccttccgcaggatggagaaggaagcggtgcgggagctcgtgggaaaggactacctggtcctctccctgggcgggggaaccttcatggacccggaaagccaaaaggccctcctcggccgcgggcccgtggtagccctatgggcgagccccgagaccatcctggaaagggccatgcgcaagcccggggaaaggcccctcctccaggtggaaaaccccctggagaggatccggaccctcctcgaggcccgggcccccatctaccgcaaggcccacatccacgtctccaccgacgggcgtcgcgtggaggaagtggtggaggaaatcgtggagaagctctggcgccatgcagaggctagaggtgcgtga

SEQ ID NO: 2098 - protein, 184 aa, Thermus thermophilus
MARLEVPRPATFVTLTGFMGVGKSRIGRELARALMLHFIDLDRYIERRTGISIPDIFRHLGEEAFRRMEKEAVRELVGKDYLVLSLGGGTFMDPESQKALLGRGPVVALWASPETILERAMRKPGERPLLQVENPLERIRTLLEARAPIYRKAHIHVSTDGRRVEEVVEEIVEKLWRHAEARGA

SEQ ID NO: 2099 - DNA, 513 bp, Bacillus cereus
  CDS (1)..(513)
atgagaggaacgaaaatgaaatctatatacataaccggctatatgggagcagggaaaacaacaattggaaaagcgttaagtaaagaacttcacatggatgttatagatacagatcaaaaaattgaagagaagcaagagaaggagattcgtgatatttttgccgaagaaggtgaaatgacttttcgggaatatgaaagtgagatgttacgttcactacctgttgaaaatgtaatcattacaactggcggcggaatcattgagcgagaggaaaaccgaaagtggatgaaggaaaatggcactgtcgtgtatttatattgtgatccacacgtaattgcagagaggcttcgtgaagatacgacacgtccactatttcagaagaaagatatagatgcatttgtaatgaaattcgaatcgcgccgagcttattatgaagaggctcatattcatattgatacgacgaataagtctgtaaagcaaattatgaatgaattaaaagaaaagattaatggataa

SEQ ID NO: 2100 - protein, 170 aa, Bacillus cereus
MRGTKMKSIYITGYMGAGKTTIGKALSKELHMDVIDTDQKIEEKQEKEIRDIFAEEGEMTFREYESEMLRSLPVENVIITTGGGIIEREENRKWMKENGTVVYLYCDPHVIAERLREDTTRPLFQKKDIDAFVMKFESRRAYYEEAHIHIDTTNKSVKQIMNELKEKING

SEQ ID NO: 2101 - DNA, 531 bp, Mycobacterium paratuberculosis
  CDS (1)..(531)
atggcgcccaaagcggtgctgatcgggctgccgggctccggcaagtccaccatcgggcggcggctggccaaggcgctcggggtgggtttcctggacaccgatgcggccatcgagcagcgcaccggccggcccatcgccgagatcttcgccaccgacggtgagcgggagttccgccgcatcgaggaggaggtggtgcgcgcggcgctgaccgagcacgacggcgtgctgtcgctgggcggcggcgcggtcaccagccccggggtgcgcgaggcgctggccggccacaccgtcgtctacctggagatcagcgccaccgagggggtgcggcgcaccggcggcaacacggtgcgcccgctgctggccgggccggatcgcgccgagaagtaccgcgcgctgctggccgagcgcagcccgctgtaccggcgggccgccaccatccgggtcgacaccaaccggcgcaaccccggcgcggtggtgcgctacatcgtgtcgcggctgcccgccaccgatgcctgccgggccgccacatga

SEQ ID NO: 2102 - protein, 176 aa, Mycobacterium paratuberculosis
MAPKAVLIGLPGSGKSTIGRRLAKALGVGFLDTDAAIEQRTGRPIAEIFATDGEREFRRIEEEVVRAALTEHDGVLSLGGGAVTSPGVREALAGHTVVYLEISATEGVRRTGGNTVRPLLAGPDRAEKYRALLAERSPLYRRAATIRVDTNRRNPGAVVRYIVSRLPATDACRAAT

SEQ ID NO: 2103 - DNA, 528 bp, Geobacter sulfurreducens
  CDS (1)..(528)
atgtccgtgccttctgacgggcgcaacgtggtcctgaccggtttcatgggaaccggcaagagcacggtgggaaagctcctggcaaggcgcctcggctaccgcttcagtgacctggatgcgttgatcgtggagcgggccggcatctccatcaacgagatattcgagcggtatggggaacaacgattccgtgagctggaaacggaagcgattcgttcccttggtggcgtttccggccgggtggtggccaccggcggtggggcggtcattgcgccccggaacagagtgttgctccgcgaggcgggattggtggtgaacctcacggcttcgcttgaggtgatcctgtctcggctgaagggcgatcgggagcgcccgttgttgaagagtaacaacactccggaggctctggccgcgctcatgacagctcgtgagaacgcttacgccgatgcggacttgaggattgacactgccggcaaaagcgtggaagatgtggtcacagaaatcgccacctttgtccgggagcatcaatga

SEQ ID NO: 2104 - protein, 175 aa, Geobacter sulfurreducens
MSVPSDGRNVVLTGFMGTGKSTVGKLLARRLGYRFSDLDALIVERAGISINEIFERYGEQRFRELETEAIRSLGGVSGRVVATGGGAVIAPRNRVLLREAGLVVNLTASLEVILSRLKGDRERPLLKSNNTPEALAALMTARENAYADADLRIDTAGKSVEDVVTEIATFVREHQ

SEQ ID NO: 2105 - DNA, 540 bp, Leptospira interrogans
  CDS (1)..(540)
atgaaaaaaaacttcgctctgatcggccccagaggagtcggaaaatctaaaatttctcgtaaactttctaaaattacaggaatgcccgtagtatccactgatatgatcgcagtctatgagattggtggaatgtcaattcctgaattcattcaaaagaatgaaggagattggagaccatttaggaatttagaatttgaaattcttaccaaactcaaaacctctcaaggaatcatcttagattgtggaggtggaattttgtttgatttggataccaaaggaaaagaaatcctaagtgaccgtaagactacccttttaaaatccattgcagtggtttttggtctttccagacccacggaaattttagtggaaaagattcaaaacgatcctacccgtcctccattgagtacaattcagtcttatcgtactatattagaaagtcgattaccttactatcaaagtatttcggattattatttagaaatagacgatctgaaggtggaagagatttgttctagaattctacagaaaattgaatattga

SEQ ID NO: 2106 - protein, 179 aa, Leptospira interrogans
MKKNFALIGPRGVGKSKISRKLSKITGMPVVSTDMIAVYEIGGMSIPEFIQKNEGDWRPFRNLEFEILTKLKTSQGIILDCGGGILFDLDTKGKEILSDRKTTLLKSIAVVFGLSRPTEILVEKIQNDPTRPPLSTIQSYRTILESRLPYYQSISDYYLEIDDLKVEEICSRILQKIEY

SEQ ID NO: 2107 - DNA, 501 bp, Wolinella succinogenes
  CDS (1)..(501)
atgagctccgctaaaggctctaatctcattctcattggatttatgggaagtggaaaaagtagcgtggctcggattttagccaaggaaagcggtcacctttgggtcgataccgattcattgctggagttacgagaggggatgagcgttgctcagatttttgaacaacacaaagaggagggatttcgcgctctagagagagagcttgcctttcaaatgcgccactccctccaagaatctatcatctccacaggaggcgggatgcctctcttttgtgacctttcctctttgggcaaactcttctttcttgatcttcctttcgaggctattttagagcgcctctccaaagaagagcgtgccaaacgcccccttttaaacgacctatcaaaggctaaagcgctttttaatcagaggcgcagctcctatcttcatctagctaatcacaccctccaagccgaccaatccccactcaaagtagcccaagaaattctctctcttctctag

SEQ ID NO: 2108 - protein, 166 aa, Wolinella succinogenes
MSSAKGSNLILIGFMGSGKSSVARILAKESGHLWVDTDSLLELREGMSVAQIFEQHKEEGFRALERELAFQMRHSLQESIISTGGGMPLFCDLSSLGKLFFLDLPFEAILERLSKEERAKRPLLNDLSKAKALFNQRRSSYLHLANHTLQADQSPLKVAQEILSLL

SEQ ID NO: 2109 - DNA, 561 bp, Porphyromonas gingivalis
  CDS (1)..(561)
atgcacgctccgatttttatcgttggctatatgggttccggcaagagtacggtagggcgtaagatggccgatgtactcggttggcgttttatcgatacggatttctttatcgagaaccgattccgcaagcgcgtggcggatatattccgtgacgaaggcgaggcggtttttcgcaggcgcgagcgtgtcgtcatcgaagaactatccggaatggaggatgctattatcgccacagggggcggattgccctgtcattcggacaatatgacgctgatgaacgaagccggcttgacgctgtatttggaagtttcggatgaggttcttgccgttcgtttggagctgtgcaagcggacaaggccgaaggtgaaagacaagaccggcgaagagctgctctcccacatccgggaggaaatggctttccgaggcgatatatatcgccgtgcaaaggtgattgtaaatagcgacaagctggtggatgaagaggatgagagacagcttgtcactcgtatcgtcgccgatttgcgcgccaaaggatacctaccgcaagcaatacagccataa

SEQ ID NO: 2110 - protein, 186 aa, Porphyromonas gingivalis
MHAPIFIVGYMGSGKSTVGRKMADVLGWRFIDTDFFIENRFRKRVADIFRDEGEAVFRRRERVVIEELSGMEDAIIATGGGLPCHSDNMTLMNEAGLTLYLEVSDEVLAVRLELCKRTRPKVKDKTGEELLSHIREEMAFRGDIYRRAKVIVNSDKLVDEEDERQLVTRIVADLRAKGYLPQAIQP

SEQ ID NO: 2111 - DNA, 525 bp, Photorhabdus luminescens
  CDS (1)..(525)
atgaaccaaatattgtttattgtaggtgcacgtggggcaggaaaaacgacggttggaaaattattagccaatgaattatcgtacacatttattgacactgatcaccatatccaacaaaccagtaatatgaccattgcggatattgttaaccagcaaggatggcaacaatttcggcaattagaaagccaagctttacaacaagttactcaaattaatcgcgttatttctactggaggaggtatcattctttccgctgaaaatcgccaatatatgcgacaaaatggcacggtgatttatcttcaagcttcagcgagcattttggctgagcgattaatgcagcaaccagaaagtacccaacgtcctagtttgacgggaaaatctattgttgaagaaatggaagaagtgcttgccgccagagaaaatctctattgtgaatgtgcgaaccatattattaatgcgcacctttcaccggaaaaaattacaacttatgtgaaagagattatgttctctggaatagtttcctga

SEQ ID NO: 2112 - protein, 174 aa, Photorhabdus luminescens
MNQILFIVGARGAGKTTVGKLLANELSYTFIDTDHHIQQTSNMTIADIVNQQGWQQFRQLESQALQQVTQINRVISTGGGIILSAENRQYMRQNGTVIYLQASASILAERLMQQPESTQRPSLTGKSIVEEMEEVLAARENLYCECANHIINAHLSPEKITTYVKEIMFSGIVS

SEQ ID NO: 2113 - DNA, 534 bp, Gloeobacter violaceus
  CDS (1)..(534)
atgctgaagggtgtcagtctgtatctggtcggcatgatggggtccggcaaatcgacggtgggccggctgctcgctgaaaagctgggctacggctttgtcgatctcgacgcgctcatcgaacaggtaagcggcaagcgggtgggcgaaatttttgagcgcgagggcgaagcggtttttcgtgatctcgaaagccgggtgctcgccgaggtgagcgcctacacccgtctggtcgtcgccaccggcggcggcgtggtgctcgcccggcgcaactggggctatttgcaccacggagtggtcgtctggctcgacgccgatatcgagacgctgctcgggcgggtggagcacgaacctggcacccggcccctgcttgccggcggcgacaggcacctgcgcctggtcgaactgttgggcgagcgcgccaggctttacgcccaggcggacgtgcgcgtgagcgcggcgggactgccgccggcagtggccgaggagacgctgcgctgtctggcggcgcgtctggcggaggacagtgctccgtga

SEQ ID NO: 2114 - protein, 177 aa, Gloeobacter violaceus
MLKGVSLYLVGMMGSGKSTVGRLLAEKLGYGFVDLDALIEQVSGKRVGEIFEREGEAVFRDLESRVLAEVSAYTRLVVATGGGVVLARRNWGYLHHGVVVWLDADIETLLGRVEHEPGTRPLLAGGDRHLRLVELLGERARLYAQADVRVSAAGLPPAVAEETLRCLAARLAEDSAP

SEQ ID NO: 2115 - DNA, 555 bp, Chromobacterium violaceum
  CDS (1)..(555)
atgcctgccatggagaaactggcaggcaacttttttctggtcggtctgatgggcgcgggcaagaccacggtgggcagagcgctggcgcgccgcaccggcaaaacgttctacgactccgaccaggagatcgaggcgcgcaccggcgtgcgcgtggccaccatcttcgacatcgaaggcgaaatgcgcttccgcaaccgcgaggcctgcgtgatccgcgacctggcccagcagcgcgacatcgtgctcgccaccggcggcggcgctgtgctgcgcgaggaaaaccgcaaggtgctggccagccacggcacagtgatctacctgcgcgcctcgatagacgaccttctggcccgcacccagcacgacaagaaccgtccgctgctgcagatcgccgaccctcgcgccaaactggaaagcctgttcaacgagcgcgatccgttttaccgcgaaatcgccgacatcatcatcgacaccacccagcagaacgtcaatctgctggtcggccgtctggtcgaccagttgttggactccccgcaccatcccaaggaaaccgactag

SEQ ID NO: 2116 - protein, 184 aa, Chromobacterium violaceum
MPAMEKLAGNFFLVGLMGAGKTTVGRALARRTGKTFYDSDQEIEARTGVRVATIFDIEGEMRFRNREACVIRDLAQQRDIVLATGGGAVLREENRKVLASHGTVIYLRASIDDLLARTQHDKNRPLLQIADPRAKLESLFNERDPFYREIADIIIDTTQQNVNLLVGRLVDQLLDSPHHPKETD

SEQ ID NO: 2117 - DNA, 576 bp, Synechococcus sp
  CDS (1)..(576)
atgtcggacgcaactctctccttgaagcagcgcctgggcggccgcagcctgtacctggtgggaatgatgggcagcggtaaaaccagcaccggtcgccccctggcggaacaactgggttacggctttgtggatgccgatgccgtgatcgagcaggccgcaggctgcagcattcctgagatttttgagcgggacggtgaagcaggattccgggccctggaaagccaggtgctcaacgccatcggccaacgtcactccctagtggtggccaccggcggcggtgtggtgacgcaacaggagaactgggggctactgcacagcggcatcgtggtctggctggatgtggtgccagagcagctcatgcaacgcctcagagcggacagcacggtgcggccactgctccaaaccgaagatccagacgctgcgctcaacgcgctgctcaaccaacgcaggcccctttatgccgaggccgatctcacggtggtgattaatcaagaaacacccctcgccgtcgccgacgggatcctgcaacttctgccaagcctgctgaaggatccaacccagcgccgaaccgactga

SEQ ID NO: 2118 - protein, 191 aa, Synechococcus sp
MSDATLSLKQRLGGRSLYLVGMMGSGKTSTGRPLAEQLGYGFVDADAVIEQAAGCSIPEIFERDGEAGFRALESQVLNAIGQRHSLVVATGGGVVTQQENWGLLHSGIVVWLDVVPEQLMQRLRADSTVRPLLQTEDPDAALNALLNQRRPLYAEADLTVVINQETPLAVADGILQLLPSLLKDPTQRRTD

SEQ ID NO: 2119 - DNA, 564 bp, Rhodopirellula baltica
  CDS (1)..(564)
atgaacaacgacgaagtgaaacctcagcacctctatttgaccggctaccgtgggtgcggcaaaagtacgcttgcgaaacttttagcgcagaagctgtctctgccctcagtcgacttggacgatgtgatcgaaacgaccgcaggcaaatccatcgccgaaatcttcgcgaatgaaaccgaagtcggttttcgcgaccgggaagaagccgctttgatggaagtttccaggcgaccgcaacatgtgatcgcgcttggcggaggcaccatccttcgcgaagcaaaccggaacatcatcgcgaattcaggctggtgcgtttggctggacgccgaaccagatgtcctggtcgcccgcttggccggtgacgcgacgacggccgatcgacggccttcactgactgaccaatccgtttttgacgaagtccaatccgtgatgagccatcgcgaaccgctctatcgtgcatcggctgacttgcgaattgacacaagccaccggaacatggacgagatattgacagaggttttgaaggcggcgccgtccagcatcggacaagccgacctcagctag

SEQ ID NO: 2120 - protein, 187 aa, Rhodopirellula baltica
MNNDEVKPQHLYLTGYRGCGKSTLAKLLAQKLSLPSVDLDDVIETTAGKSIAEIFANETEVGFRDREEAALMEVSRRPQHVIALGGGTILREANRNIIANSGWCVWLDAEPDVLVARLAGDATTADRRPSLTDQSVFDEVQSVMSHREPLYRASADLRIDTSHRNMDEILTEVLKAAPSSIGQADLS

SEQ ID NO: 2121 - DNA, 558 bp, Prochlorococcus marinus subsp
  CDS (1)..(558)
atggaaaaatctattattgagaaaacaaacaaaataattcaaggaagaagtatatatttgataggtatgatggctagtggtaaatctaaaactggtccagtattagccgagttattgaggtataagtatattgatctggataaattaatagagaatatagcaaaaaaaacaattaatgagatgttccaggaagatggagaaaaagcattccgagaactagaaacaaattgcttaaaagaaacaattaaaatcccttctttaatcgtttctactggtggaggaattatttctaaaccagaaaactggggtgttttaaggcaaggaattattatttggattgacacaaagcaagagattgctcttgagaggttgaaaaaagatattgaaaatagacctctattacagggagaagatttaagtgatttatataaccaaatttttcaatctagaaaaaatttatattctcaggctgacttaagagttgaggttaataacgaagatgttgaagaagttgcaaaacaaatagtttatggaatttacaaaaaaattataaattaa

SEQ ID NO: 2122 - protein, 185 aa, Prochlorococcus marinus subsp
MEKSIIEKTNKIIQGRSIYLIGMMASGKSKTGPVLAELLRYKYIDLDKLIENIAKKTINEMFQEDGEKAFRELETNCLKETIKIPSLIVSTGGGIISKPENWGVLRQGIIIWIDTKQEIALERLKKDIENRPLLQGEDLSDLYNQIFQSRKNLYSQADLRVEVNNEDVEEVAKQIVYGIYKKIIN

SEQ ID NO: 2123 - DNA, 579 bp, Prochlorococcus marinus
  CDS (1)..(579)
atgaacgaaagcccagcccctcaccccctcaagcaaaggcttggtggtcgcaacctctatttggtgggaatgatggccagtggcaagagcagcacaggcaggcctctagccgaacaactcagctatgggtttgttgatacagatgccgtcatcgaacaacttgctggccaaccaatcccgaagatctttagcgaagaaggagaagcagggtttcgaacaatggagtctcaagtactcaatgccattggccaacgccattcacttgttgttgctactggcggagggatagtgagtaagccagaaaactggggggtcttgcatcagggcatcgtgatctggctaaaccctgggcgagaagagctactcagacgcttaaatgccgacagcggcaataggcctttactgcaaacagaagatccagaagcagccttcgactgtttatttgccgagcgcctaccgctttattgcgaagcagacttgcatgtggaagtgggagcagaggaaccagacgggattgcgctaaagattattgagttcctgccccagttattatcgccacctccacaaatgaatggttaa

SEQ ID NO: 2124 - protein, 192 aa, Prochlorococcus marinus
MNESPAPHPLKQRLGGRNLYLVGMMASGKSSTGRPLAEQLSYGFVDTDAVIEQLAGQPIPKIFSEEGEAGFRTMESQVLNAIGQRHSLVVATGGGIVSKPENWGVLHQGIVIWLNPGREELLRRLNADSGNRPLLQTEDPEAAFDCLFAERLPLYCEADLHVEVGAEEPDGIALKIIEFLPQLLSPPPQMNG

SEQ ID NO: 2125 - DNA, 573 bp, Prochlorococcus marinus
  CDS (1)..(573)
atgacttataaattgagacctaatcaagtgataaaaaaattaggaggccgcattatctatctagtaggaatgatgggttcaggaaagagcactacagggccgcatcttgctaaattactgaaatatagttttattgatcaggatgaattaattgagaaagtagctaaatcttccgtttcacagatttttagagaagaaggtgaaaatggttttcgtgatattgagactcaagttctcaagcaaattggtcaaagacattccttggttgttgcaactggaggaggtcttgtaactcgttctgagaactggggtgttttacatcaaggaattgttatttggctggatccaaatcgggaacttttgtttgcaaggttgaagtctgataaaacggttgttcgcccgttgttggacaataaagatcctaaagacgtcttggactctttaataaagcaacgctatttgtcatatgctgaagcagatttacatatctctatcgagagggaaacacctgaagaagttgccttagtaattttcaaaaaattgtctgaaataattagagttcaggaggattaa

SEQ ID NO: 2126 - protein, 190 aa, Prochlorococcus marinus
MTYKLRPNQVIKKLGGRIIYLVGMMGSGKSTTGPHLAKLLKYSFIDQDELIEKVAKSSVSQIFREEGENGFRDIETQVLKQIGQRHSLVVATGGGLVTRSENWGVLHQGIVIWLDPNRELLFARLKSDKTVVRPLLDNKDPKDVLDSLIKQRYLSYAEADLHISIERETPEEVALVIFKKLSEIIRVQED

SEQ ID NO: 2127 - DNA, 558 bp, Candidatus Blochmannia floridanus
  CDS (1)..(558)
atgttaacagataatagaaaaatttttttaattggtcctatgggtgctggtaaaagcactataggtcgtcagttggcgcaacggttgaatttagaattctttgattcagatcgagaaattgaaacgtgtaccggagtaaatattagttgggtatttgatgtagaaggtgaagttggatttcgtaatcgggaggaaaaaattattgatgagttgactcaaaaaaaaagcattgtactggctactggaggaggttctattaaatctcatattgctagagatcatcttgctaaacgaggattagtaatttatttaaaaacgactattgataaacaattagtgcgtactaaacgtgataaaagaagacctttattaaaatcatctacattatttaattatcagaatttaagagagttgttagaggatttagcaaaagaacggaatccattgtacgaggaaatttctgatattacagtatcaactgatgagtacagtgtaaaatgtgtagtaaataagattcttgtacttttaaaaaagaatggtgctatatataaagattaa

SEQ ID NO: 2128 - protein, 185 aa, Candidatus Blochmannia floridanus
MLTDNRKIFLIGPMGAGKSTIGRQLAQRLNLEFFDSDREIETCTGVNISWVFDVEGEVGFRNREEKIIDELTQKKSIVLATGGGSIKSHIARDHLAKRGLVIYLKTTIDKQLVRTKRDKRRPLLKSSTLFNYQNLRELLEDLAKERNPLYEEISDITVSTDEYSVKCVVNKILVLLKKNGAIYKD

SEQ ID NO: 2129 - DNA, 636 bp, Bordetella bronchiseptica
  CDS (1)..(636)
atgaatgcttccgctaatttatgcgcggcgtccgacaacgacccgcaaccgggcgaccaggaggccgcccaccctgtagcctgcgccggtgacgagccggcggcgttcctgccgcacgatctgccgatctttctggtggggatgatgggcgccggcaagaccaccatagggcgaggcctggcgcgtgcgctgaggcgcgaattcatcgatctcgaccatgagttggaggcgcgttgcggcgtgcgggttccggtcatcttcgaaatcgaaggcgaagccgggtttcgccggcgggaagctgccgcattgcaagagtgtacccaacgccggcagataattcttgccaccggcgggggcgcggtgctggccgcggagaaccggcaggccctgcgcgagcgcggcatcgtgatctacctgcgcgccagcgtggaagagctgttccggcgcaccagccgcgatcgcaaccgccccttgctggccaccgccgatccgcgcgctaccctgcgcgagctgatggtggcgcgcgaaccgctgtataacgaggtggccgatctggtcatcgataccggcagcatgcccatcgccacgctggtgaagtccctgctgcccaagctgcaagcctacgagaagaaataa

SEQ ID NO: 2130 - protein, 211 aa, Bordetella bronchiseptica
MNASANLCAASDNDPQPGDQEAAHPVACAGDEPAAFLPHDLPIFLVGMMGAGKTTIGRGLARALRREFIDLDHELEARCGVRVPVIFEIEGEAGFRRREAAALQECTQRRQIILATGGGAVLAAENRQALRERGIVIYLRASVEELFRRTSRDRNRPLLATADPRATLRELMVAREPLYNEVADLVIDTGSMPIATLVKSLLPKLQAYEKK

SEQ ID NO: 2131 - DNA, 864 bp, Oryza sativa
  CDS (1)..(864)
atggacgccggtgtgggtctccgggcgaagcccggcgcctgggccggactcggaaacccacgccgctcttccacggcgagggttccggtgaggttcgcggtggagaagttcgctcagccgttggttttgggctctgatcgccggagctgcggtgccaaactgaaggtttcgtgttccaggaaaccggcaggtattgacaaaacctattactctgctgatgaagctcttgttctaaagcaaaaagcagaggacgtggtcccttatttgaatgaccggtgtatttacttagttggaatgatgggttctggcaaaactacagttgggaagatattagctgaagtattaggctattctttctttgacagcgataagttggttgagaaggcagttggcatatcatctgttgctgaaatctttcagctccatagtgaagcattcttcagagataatgagagtgaggtactaagggatttgtcgtcaatgcatcgattagttgttgcaaccggaggtggtgcggtgatccgaccaatcaattggagttacatgaagaaagggtcaacaatctggttagatgttccattggatgcacttgcaagacgaattgctgcagtaggaactgcttctcggcccctcttgcatcaagaatctggtgatccttatgcaaaggcttatgcaaaactgactgcactttttgaacaaagaatggactcatatgctaatgctgatgccagggtttcactcgaacatattgcagtgaaacaaggacatagtaatgtgacgacacttacaccaagtgccattgctattgaggcattgctaaagatggagagctttcttactgagaaggcaatgatcagaaactaa

SEQ ID NO: 2132 - protein, 287 aa, Oryza sativa
MDAGVGLRAKPGAWAGLGNPRRSSTARVPVRFAVEKFAQPLVLGSDRRSCGAKLKVSCSRKPAGIDKTYYSADEALVLKQKAEDVVPYLNDRCIYLVGMMGSGKTTVGKILAEVLGYSFFDSDKLVEKAVGISSVAEIFQLHSEAFFRDNESEVLRDLSSMHRLVVATGGGAVIRPINWSYMKKGSTIWLDVPLDALARRIAAVGTASRPLLHQESGDPYAKAYAKLTALFEQRMDSYANADARVSLEHIAVKQGHSNVTTLTPSAIAIEALLKMESFLTEKAMIRN

SEQ ID NO: 2133 - DNA, 471 bp, Bacillus cereus
  CDS (1)..(471)
atgggagcagggaaaacaacaattggaaaagcattaagtcaagaacttcaaatggatgttgtagatactgatcaaaaaatcgaagagaagcaagagaaggcaattcgaaatatttttgccgaagaaggcgaaatggcttttcgggaatatgaaagcgaaatgttacgtgcgctaccagtccataatgtcattattacaactggtgggggaattattgaacgagcggaaaatcgcaagtggatgaaagagaacggaactgtcgtgtatttatattgtgatccgcatgtaattgcagaaaggcttcgtgaagatacgacacgtccactatttcaaaagaaagatatagatgcatttgtaacgaaatttgaatcacgccgagcttattatgaagaggctcacattcatatcgatacgacaaataagtctgtaaagcaaattatgaatgaattaaaggaaaagattaatgtataa

SEQ ID NO: 2134 - protein, 156 aa, Bacillus cereus
MGAGKTTIGKALSQELQMDVVDTDQKIEEKQEKAIRNIFAEEGEMAFREYESEMLRALPVHNVIITTGGGIIERAENRKWMKENGTVVYLYCDPHVIAERLREDTTRPLFQKKDIDAFVTKFESRRAYYEEAHIHIDTTNKSVKQIMNELKEKINV

SEQ ID NO: 2135 - DNA, 498 bp, Bacillus anthracis
  CDS (1)..(498)
atgaaatctatatacataaccggttatatgggagctgggaaaacaacaattggaaaagcattaagtaaagaacttcatatggatgttgtagatacagatcaaaaaattgaagagaagcagggaaaagtaattcgtgatatttttgccgaagaaggtgaaatggcttttcgggaatatgaaagtgaaatgttatgttcactacctgttgataatgtaatcattacaactggcggcggaatcgttgagcgagaggaaaaccgaaaatggatgaaggaaaatggaactgtcgtgtatttatattgtgatccacatgtaattgcagaaaggcttcgtgaagatacgacacgtccactatttcagaagaaagatatagatgcatttgtaacgaaattcgaatcgcgccgagcttattatgaagaggctcatattcatatcgatacgacgaataagtctgtaaagcaaattatgaatgaattaaaagaaaagattaatgaataa

SEQ ID NO: 2136 - protein, 165 aa, Bacillus anthracis
MKSIYITGYMGAGKTTIGKALSKELHMDVVDTDQKIEEKQGKVIRDIFAEEGEMAFREYESEMLCSLPVDNVIITTGGGIVEREENRKWMKENGTVVYLYCDPHVIAERLREDTTRPLFQKKDIDAFVTKFESRRAYYEEAHIHIDTTNKSVKQIMNELKEKINE

SEQ ID NO: 2137 - DNA, 522 bp, Chlamydophila caviae
  CDS (1)..(522)
atgaacctatttctatgtggactaccggcagtgggcaagaccttattgggtcgtgcccttgctaactatctatcaatttctttctttgatactgatgatttaattgtaagtaactacgacaacgggctatattcctcagcaggtgagatatttcaagctgttggagaagaggcgtttgcaactttagaggtagaggctttacgctccttaccccgagataatagcgttactgctttaggtgggggtaccattatgcatcaagaagcatatgatataattaagcacaggggaacattgatctatctttctcttcctgttactgaaatttatcaacggctcttgaaacgcggccttcccgaaagattaaaacacacgccaaatgtagaagagattttaaaacaacgtataaatcgtatgcagcgtgtagcaaattacaatttttctctgaatcatatagacctctttgatgaacgctctttattatcggcatgtgaatctcttaatattttactaaatccatga

SEQ ID NO: 2138 - protein, 173 aa, Chlamydophila caviae
MNLFLCGLPAVGKTLLGRALANYLSISFFDTDDLIVSNYDNGLYSSAGEIFQAVGEEAFATLEVEALRSLPRDNSVTALGGGTIMHQEAYDIIKHRGTLIYLSLPVTEIYQRLLKRGLPERLKHTPNVEEILKQRINRMQRVANYNFSLNHIDLFDERSLLSACESLNILLNP

SEQ ID NO: 2139 - DNA, 516 bp, Streptomyces avermitilis
  CDS (1)..(516)
atgaccgttccgcgcgtcgtcctcgtcggccccatgggcgtcggcaagtccacggtgggcgcgctcgtcgccgagcggctcggctgcgcctaccgggacacggacgacgacatcgtgaccgccgagggccgcaccatcgccgacatcttcgtcgacgagggcgagccggtcttccgtgccatcgagaagcgggcggtgcacacggcgctcgccgagcacgacggcgtactggcgctcggcggcggcgcgatcctcgacgcggacacccgcgcgctgctcgccgggcaccgtgtcgtctacctctcgatggaggtcgacgaggccgtcaagcgcaccggcctcaacgcggcccggccgctgctcgccgtcaacccgcgccggcagtggcgggagctgatggaggcgcgccgccacctgtacaccgaagtcgcccgcgcggtggtcgccaccgacggccgcggccccgaagaggtcgcccaagccgtcctcgacgcactggagttgaaggaagcatga

SEQ ID NO: 2140 - protein, 171 aa, Streptomyces avermitilis
MTVPRVVLVGPMGVGKSTVGALVAERLGCAYRDTDDDIVTAEGRTIADIFVDEGEPVFRAIEKRAVHTALAEHDGVLALGGGAILDADTRALLAGHRVVYLSMEVDEAVKRTGLNAARPLLAVNPRRQWRELMEARRHLYTEVARAVVATDGRGPEEVAQAVLDALELKEA

SEQ ID NO: 2141 - DNA, 636 bp, Nitrosomonas europaea
  CDS (1)..(636)
atgcatttccggtacaattaccgcatgcaacgcagcaaaacgccaaacacaaaaaattctgataccgggtcgataccaggcaacatcatcctgatcggtatgatgggctccggtaaaaccacggttggcaagttactagcaaatctcgtcggcaagactttcatcgacatcgatcatgaaatccagcgacgcacaggggtcggaatacccgtgatcttcgaaatagaaggagaagccggttttcgcaaacgtgaaagcgaagtactgcgggatatcgtcaggcagcagaacatcgtactcgctaccggagggggagcaatattacaccccgataatcgtgccttactgcggcagcatggtacggtggtttatctgtgtgcacccgtcacggaattgcgccgccgtacttatctggataaaaaccggcctctgctgcaaaccggaaacgtgcatgccaaactgattgagctatttacccaacgcgatccgctgtatcgcgaaaccgcacatatcatcatggacagcggtcggcaaagtgcccgtgctttcgtccagaaactgatacagaaattacgccagtccaatcaggaattcactgctgccggatctcctccttgcgttaaaccgtctgaataa

SEQ ID NO: 2142 - protein, 211 aa, Nitrosomonas europaea
MHFRYNYRMQRSKTPNTKNSDTGSIPGNIILIGMMGSGKTTVGKLLANLVGKTFIDIDHEIQRRTGVGIPVIFEIEGEAGFRKRESEVLRDIVRQQNIVLATGGGAILHPDNRALLRQHGTVVYLCAPVTELRRRTYLDKNRPLLQTGNVHAKLIELFTQRDPLYRETAHIIMDSGRQSARAFVQKLIQKLRQSNQEFTAAGSPPCVKPSE

SEQ ID NO: 2143 - DNA, 507 bp, Enterococcus faecalis
  CDS (1)..(507)
atggaaagcattgttttaattggtttcatgggtgcgggtaaaacaactatcggccaaagtttggccaataaactgaagatgcctcatcttgatttagatacagcgttaattgaaaaaataggacgctcaattcctgactatttcgaaaaatatggtgaagcagctttccgagaacaggaaacccaacttttaaaggagctgtcaaaaaatacagccgtcctttcaactgggggcgggattgttgtcggaccagaaaatcgtagcttattaaaatcttttcagcaagtgatttatttacatgcgacaccagaagagctgttaaaaagaatcacagaagatactgaaaaccaacggcccttagctatagaacgttcttcaaaagaaatcattactttgtttgagtctcgtaaaaatttttatgaagaatgtgcgaagatgacaattgatacgaccaatcgctcgccagaagaaattatcaatgaaattctgcaacaattaaaggagtag

SEQ ID NO: 2144 - protein, 168 aa, Enterococcus faecalis
MESIVLIGFMGAGKTTIGQSLANKLKMPHLDLDTALIEKIGRSIPDYFEKYGEAAFREQETQLLKELSKNTAVLSTGGGIVVGPENRSLLKSFQQVIYLHATPEELLKRITEDTENQRPLAIERSSKEIITLFESRKNFYEECAKMTIDTTNRSPEEIINEILQQLKE

SEQ ID NO: 2145 - DNA, 540 bp, Coxiella burnetii
  CDS (1)..(540)
atgaaaaaaaatctcaccaatatttatttaatcggcctcatgggcgcgggcaaaaccagcgtcggtagccaacttgctaagttgacgaaacgtatactctacgattccgacaaagagattgaaaaacgaaccggcgctgatatagcttggatttttgaaatggaaggagaggctggtttccgtcgacgtgaaagagaaatgattgaagcgctttgtaaacttgataatatcattttagccactggaggcggtgttgtgttagatgaaaaaaatcgacagcaaatatctgaaaccggtgtcgttatctatttaaccgcttccatcgacactcaattaaaacggattggtcaaaagggtgagatgcgacgccctctttttattaaaaataattccaaagaaaaattacaacagcttaacgaaatccgaaaacccctttatcaggcaatggcggacctcgtttatccgacggacgatctaaatcctcgtcagctagccactcaaattctagttgatattaaacaaacctattcagacctatga

SEQ ID NO: 2146 - protein, 179 aa, Coxiella burnetii
MKKNLTNIYLIGLMGAGKTSVGSQLAKLTKRILYDSDKEIEKRTGADIAWIFEMEGEAGFRRREREMIEALCKLDNIILATGGGVVLDEKNRQQISETGVVIYLTASIDTQLKRIGQKGEMRRPLFIKNNSKEKLQQLNEIRKPLYQAMADLVYPTDDLNPRQLATQILVDIKQTYSDL

SEQ ID NO: 2147 - DNA, 510 bp, Tropheryma whipplei
  CDS (1)..(510)
atggaatcaatggctatcgtactaattggtcctcctgccgtcgggaaaacccttttggggggtcttgttgcaaagcgccttcgggtaatctttaacgatacagattttctagtggaaaaattttttggacccgtgaaagaactgcttttaacctgcgaaagtcagtttagagatgctgagtccatctgcttgcgaaatgccctctctcgcgggggtgttgtcgcaactggtgcagggtgtgttcagcgaaaggaaaatcagaggtacatatccaggcatttagttatttttttgcgcacctcatgcgataacgtcgctccacgcctttgttttgacacacgtcccgtaacgggtgatattgaatcatggattgctgtgtacaacaaacgaaaagatatttattcaaaactggcagatattgaatttgatgtcaataagagcagtccgatatctttagcagatcaacttgtacggtttatttacaatcgctcttggcatcgagaattctga

SEQ ID NO: 2148 - protein, 169 aa, Tropheryma whipplei
MESMAIVLIGPPAVGKTLLGGLVAKRLRVIFNDTDFLVEKFFGPVKELLLTCESQFRDAESICLRNALSRGGVVATGAGCVQRKENQRYISRHLVIFLRTSCDNVAPRLCFDTRPVTGDIESWIAVYNKRKDIYSKLADIEFDVNKSSPISLADQLVRFIYNRSWHREF

SEQ ID NO: 2149 - DNA, 468 bp, Shigella flexneri
  CDS (1)..(468)
atggcccttgccgattcgcttaaccgtcggtttgtcgataccgatcagtggttgcaatcacagctcaatatgacggtcgcggagatcgtcgaaagggaagagtgggcgggatttcgcgccagagaaacggcggcgctggaagcggtaactgcggcatccaccgttatcgctacaggcggcggcattattctgacggaatttaatcgtcacttcatgcaaaataacgggatcgtggtttatttgtgtgcgccagtatcagtcctggttaaccgactgcaagctgcaccggaagaagatttacggccaaccttaacgggaaaaccgctgagcgaagaagttcaggaagtgctggaagaacgcgatgcgctatatcgcgaagttgcgcatattatcatcgacgcaacaaacgaacccagccaggtgatttctgaaattcgtagcgccctggcacagacgatcaattgttga

SEQ ID NO: 2150 - protein, 155 aa, Shigella flexneri
MALADSLNRRFVDTDQWLQSQLNMTVAEIVEREEWAGFRARETAALEAVTAASTVIATGGGIILTEFNRHFMQNNGIVVYLCAPVSVLVNRLQAAPEEDLRPTLTGKPLSEEVQEVLEERDALYREVAHIIIDATNEPSQVISEIRSALAQTINC

SEQ ID NO: 2151 - DNA, 903 bp, Azoarcus evansii
  CDS (1)..(903)
atgagcctcgaacccaccaccgaacagcagcaggaagagctccagacggccgaccaggccgccgaaggcaatatcctgccgacgctcggcaagcgcgtccgcgagatccgcgaccgccgtggcatgacgagaaagctcgtggcgcgtgaagccggcgtttcggaacgccacctcgcccacctcgaaggcggcgacggcaacgtgtccatcgtcctgctgcacaacatcgcccgcgcgctcaacgtttcgctgatcgagctgctcgcgccggaaaccgaagacaccgtcgagaagcgcctcatccgccgcttcctcgagcgcctgccgcagcaccgcctggaagaagtggtgttccgcctgatgcgcgacttcggccacgaggaagccgtgcgccgcaagcgcgtcgcgctgatcggcctgcgcggcgccggaaagtcgacgctcggcaagcgcctcgcgcaggaagaaaacatgcccttcatcgagctcgaccgcgagatcgagaaggaaaccggcatccccgggcgcgagatcttctcgctgtacggccagtccggttatcgccgcatcgagaagcgcaccctcgagcgcgtgctgcgcgacaacccgcgcgccgtgatctcggtcggcggcggcgtcgtgtcgcagccggaaagcttcgagatgctgctgtcgcagtgcatgaccgtgtgggtcaaggcccagccggaagaacacatgtcccgcgtgatggcccagggcgacctgcgcccgatggcgggcaacgacgaggcgatggaggacctcaagcgcatcctcgaggcgcgcttgcccctctacgccaaggccgacaccgtgctcgacacctcgggtgaaacggtggaccagagtttcatcaaattgcgccagctcgtgatgggctga

SEQ ID NO: 2152 - protein, 300 aa, Azoarcus evansii
MSLEPTTEQQQEELQTADQAAEGNILPTLGKRVREIRDRRGMTRKLVAREAGVSERHLAHLEGGDGNVSIVLLHNIARALNVSLIELLAPETEDTVEKRLIRRFLERLPQHRLEEVVFRLMRDFGHEEAVRRKRVALIGLRGAGKSTLGKRLAQEENMPFIELDREIEKETGIPGREIFSLYGQSGYRRIEKRTLERVLRDNPRAVISVGGGVVSQPESFEMLLSQCMTVWVKAQPEEHMSRVMAQGDLRPMAGNDEAMEDLKRILEARLPLYAKADTVLDTSGETVDQSFIKLRQLVMG

SEQ ID NO: 2153 - DNA, 522 bp, Lactobacillus plantarum
  CDS (1)..(522)
atgcgagcaattttaattggatttatgggtagtgggaaaacaacggtcggtcggcttttggcggccgggttagcaactaaacatgctgatttagatgatttgattgttcagcgggcgggacggtcgattacgactatttttgcggagcaaggagaggggtacttccggcaattggagcatcagactttgctccaagcactcgaaacacccgggattttatcgaccggtggtggtactccgaccattgcaatgaatgcaattagtctgaaacaaagcacggtgccagttatctggttgacggctagtgatcaaaccactattaaccgtgttaaaaatgatactagccgaccacttgtcaatgaattggatacaggggcactgattgcgttgaagcaacggcgccaagccttatatgccgctgcggccgatttgacgatcgcaaccgatcaactgacaccccagcagattgcccgccaaattcagcagtggttgaatcagcagccagttgcgctccaagcttga

SEQ ID NO: 2154 - protein, 173 aa, Lactobacillus plantarum
MRAILIGFMGSGKTTVGRLLAAGLATKHADLDDLIVQRAGRSITTIFAEQGEGYFRQLEHQTLLQALETPGILSTGGGTPTIAMNAISLKQSTVPVIWLTASDQTTINRVKNDTSRPLVNELDTGALIALKQRRQALYAAAADLTIATDQLTPQQIARQIQQWLNQQPVALQA

SEQ ID NO: 2155 - DNA, 504 bp, Clostridium tetani
  CDS (1)..(504)
atgccaggggcagggaagtctacctttggaaaagagcttagcaagataatacagtatgattttatagatacagattatgaaatagaaaaaatagaaagaagtgctattaaacatatttttaaagaaaagggagaaaactactttagaaaattggaaagagatttattaaatgatataataaaatttgataaaaaagtagttgctacaggtggaggattgcccatatttttcaacaatatggacatattaaataaaaatggtattactatttttttagatgtgccattggaagaacttttaaaacgaaatgaaaaaaatgacaataggcctttattggataaagaaaataaatatgataaattaaaagaaatatataattctagaatccatatatataataaatgtaaaattaaagtggaaaattataatatatctgcctatgaattaagctataaaatattagaagagatgagaaataaataccaccatattatttgcaaatga

SEQ ID NO: 2156 - protein, 167 aa, Clostridium tetani
MPGAGKSTFGKELSKIIQYDFIDTDYEIEKIERSAIKHIFKEKGENYFRKLERDLLNDIIKFDKKVVATGGGLPIFFNNMDILNKNGITIFLDVPLEELLKRNEKNDNRPLLDKENKYDKLKEIYNSRIHIYNKCKIKVENYNISAYELSYKILEEMRNKYHHIICK

SEQ ID NO: 2157 - DNA, 909 bp, Bradyrhizobium japonicum
  CDS (1)..(909)
atgaccgacagtcccgacgccgaatcccgcttcctcgaacagctcggccagcgtgtgcgcaccacgcgcgcactgcgcggcatgtcgcgcaaagtgctcgccaaggtatcaggaatctcggagcgctacatcgcgcagctcgaaagcggcaagggcaatgtctcgatcgtgctgctccgccgcgtctccgacgcgatgggcgcgcatctcgaagatctgctgcccagcgccgatccgacgccggactggcagatgtttcgcgatctcctgcgcaaggcgacgcccgcgcagatcgcgcaggccaaggacgtgctcgccggcggcagcgcatccgcgccgcggcgcgcgccgttctgcggcatcgcgctgatcggcctgcgcggcgccggcaagtccacgctcggcaagatcctggcgaagaaggtcggctggagcttcgtcgagctcaacaaggaggtcgagcagcagaacggcctctcggtcgccgagatcatcgcgctctacggccaggaaggctttcgccgcatggagcaggcggcgctgcaacagctgctcgcgcgcaacgagttgatggtgcttgcgaccggcggcggcatcgtctccgagcctttgaccttcgaccagatcctgtcgtcgttctacacgatctggctgaaggccgagcccgaggagcacatggcccgcgtccgtcgccagggcgacctgcgcccgatggcggacgaccgctccgcgatggccgagctgcgcaacatcctcttgagccgcgagccgctgtactcgcgtgcgacggcggtggtggacacggcgggcctctccgtcgatgccgccgccgcgcgcctgatcgacgcggtgcgcccggtgctccagaacgaagcgcgcagttttggtctgcgcagcgtggcgctgtag

SEQ ID NO: 2158 - protein, 302 aa, Bradyrhizobium japonicum
MTDSPDAESRFLEQLGQRVRTTRALRGMSRKVLAKVSGISERYIAQLESGKGNVSIVLLRRVSDAMGAHLEDLLPSADPTPDWQMFRDLLRKATPAQIAQAKDVLAGGSASAPRRAPFCGIALIGLRGAGKSTLGKILAKKVGWSFVELNKEVEQQNGLSVAEIIALYGQEGFRRMEQAALQQLLARNELMVLATGGGIVSEPLTFDQILSSFYTIWLKAEPEEHMARVRRQGDLRPMADDRSAMAELRNILLSREPLYSRATAVVDTAGLSVDAAAARLIDAVRPVLQNEARSFGLRSVAL

SEQ ID NO: 2159 - DNA, 735 bp, Bradyrhizobium japonicum
  CDS (1)..(735)
atggcaagagtcctctggcgaggccccctttggggtcgtataggtggccaaagcaggccgcttttggcggcagatcgagcgagacccagagcgagatccagagcgagacccatgtccgacgccgcgttgccgatacaagcatcgcctgaggccgacatcctgtcggcgctcggggcgcgctcgatcgtgctcgtcggcatgatgggggtgggtaaatccaccatcggccgccgcatggcggcccggctcaagctgcccttcgtcgacgcggacaccgagatcgaggcggcggccggcatgaccataccggagattttcgagcgccatggcgagggccatttccgcgacggcgaggcccgcgtgatcgcgcgcctgctcgacggcggcccggtggtgctggcgaccggcggcggcgccttcatgcgcgaggagacgcgtgcgcgcatcgcggccaaggcggtctcgatctggctcaaggccgaccacgacgtcatcatgcgccgcgtccgccgccgcgccgaccgcccgttgctccagaccgccgaccccgagggaaccgtgacgcgcctgctcaccgagcgcgagccggtctacagccatgccgacctcaccatcgcctcgcgcgacgtgccgcacgacaagatcgtcgaggagtgtatcgagacgctgcgcgcccatctctgcggcgaacaggccgcccaaccacctgccgacgttgcgagtgccgtacgatga

SEQ ID NO: 2160 - protein, 244 aa, Bradyrhizobium japonicum
MARVLWRGPLWGRIGGQSRPLLAADRARPRARSRARPMSDAALPIQASPEADILSALGARSIVLVGMMGVGKSTIGRRMAARLKLPFVDADTEIEAAAGMTIPEIFERHGEGHFRDGEARVIARLLDGGPVVLATGGGAFMREETRARIAAKAVSIWLKADHDVIMRRVRRRADRPLLQTADPEGTVTRLLTEREPVYSHADLTIASRDVPHDKIVEECIETLRAHLCGEQAAQPPADVASAVR

SEQ ID NO: 2161 - DNA, 528 bp, Bacteroides thetaiotaomicron
  CDS (1)..(528)
atggttcgtatcttccttaccggctatatgggtgccggaaaaactactttgggcaaggcttttgcccgcaaactgaatgtcccgttcattgatctggactggtatatcgaagaacgttttcataaaactgtcggagaactattcacggaacggggggaagccggatttcgagagttggaaagaaatatgcttcatgaggtagctgagtttgagaacgtcgttatctctacaggcgggggagcaccctgcttttatgacaatatggagtttatgaaccggacggggaaaaccgttttcttgaatgtacatcccgatgtgctgttcagacgcttgcgtattgccaagcagcaacgtcccattcttcagggaaaggaagatgatgaattaatggatttcatcattcaggcgcttgaaaagcgcgcacctttttatacgcaggcgcaatatatctttaatgcggacgaactggaagaccgctggcagattgaatcatctgtgcaacgtctgcaggaactgctggaattataa

SEQ ID NO: 2162 - protein, 175 aa, Bacteroides thetaiotaomicron
MVRIFLTGYMGAGKTTLGKAFARKLNVPFIDLDWYIEERFHKTVGELFTERGEAGFRELERNMLHEVAEFENVVISTGGGAPCFYDNMEFMNRTGKTVFLNVHPDVLFRRLRIAKQQRPILQGKEDDELMDFIIQALEKRAPFYTQAQYIFNADELEDRWQIESSVQRLQELLEL

SEQ ID NO: 2163 - DNA, 477 bp, Streptococcus mutans
  CDS (1)..(477)
atggctaaaattttaatcggttttatgggggcaggaaaatcaactgtttcccgtttattagacccggattttcaagatatggatgatattataactgagaaaattggaatgcctattgcagcattttttgaaaaagaaggtgaggatgcctttcgggaaattgagtctgaaaccttatccaatcttgctgattcagatagtactgtatcaactggaggcggtgttgttgagagtgctcgcaatcgtgatattttggcaaaaaatggtgaaacaatttatttaaaagcagattttgaaactctttgtaagcgaattgaagcagacagtaataacgttcggccactttttattaataatagccgtcaggaatttaaaaagattttcgatcgcagacaggctctctatgaggaagccgctaatattattattgatgttgctggtaaaacaccccaagaaattgttgaggaaataaaatga

SEQ ID NO: 2164 - protein, 158 aa, Streptococcus mutans
MAKILIGFMGAGKSTVSRLLDPDFQDMDDIITEKIGMPIAAFFEKEGEDAFREIESETLSNLADSDSTVSTGGGVVESARNRDILAKNGETIYLKADFETLCKRIEADSNNVRPLFINNSRQEFKKIFDRRQALYEEAANIIIDVAGKTPQEIVEEIK

SEQ ID NO: 2165 - DNA, 513 bp, Streptococcus agalactiae
  CDS (1)..(513)
atgcctaaggtattattgggattcatgggagttggcaagactagtgttgccaactgcttagaaaatgaagtaattgatatggatagtctgattgaaaaacatattggtatgtcaatttcccgattttttacagaagaaggagaagcctcctttcgtgctttagaatctcaatttttaaacgaacttttaaagaaaaaaaatgaaggacttgtgatagctagtggaggaggtattgtactccttgaagaaaatcgtcgtcttttaactttaaatcgtcataataatattcttttaacaggaagttttgaagtcttatatcatcgtataaaaaaagatgagaagaatagaagaccattatttttaaaccattcaaaagaagaattttatgatatttatcaaaaacgcatgttactctatagtggtttgtctgatatgattattgataccgattatcttacaccacaaaaaatagctactgtaattggagagtcactggttaatttatctaactaa

SEQ ID NO: 2166 - protein, 170 aa, Streptococcus agalactiae
MPKVLLGFMGVGKTSVANCLENEVIDMDSLIEKHIGMSISRFFTEEGEASFRALESQFLNELLKKKNEGLVIASGGGIVLLEENRRLLTLNRHNNILLTGSFEVLYHRIKKDEKNRRPLFLNHSKEEFYDIYQKRMLLYSGLSDMIIDTDYLTPQKIATVIGESLVNLSN

SEQ ID NO: 2167 - DNA, 603 bp, Brucella suis
  CDS (1)..(603)
atgagcggtacgaacaaacaaacaaatcttcacaggcagacggaaacgatccgccagctgctcggcagtaaagtggttgttctcgttggcctgatgggagccggaaaatccaccatcggccgcaaggtggcgaacatgctcaacctgccgttcaaggatgcggatacggaaattgaaactgtttcgcggatgacagttgccgaactgttcgaggcctatggggaagtggaatttcgcgatctcgaacgtcgcgtgatcctgcgccttctcgatgacggccccatggtgctggcgaccggcggcggcgcctatatgaacgccgaaacccgcgcggcgattgccgaagcggggatttccatctggattaatgccgatctcgacgtcttgatggagcgcgtttcgcgccgccagaaccgtccccttttgagaaacagcgatccgcgcggcgtcatgcagcggctgatggacgagcgctacccggtttatgcgctggccgagctgcatctgatgacgcgcgatgagaaaaaggaagtgattgccgcagaactgatcgaggttctggcggcgcatctggaaaaggaacaggccgcttccgccggatga

SEQ ID NO: 2168 - protein, 200 aa, Brucella suis
MSGTNKQTNLHRQTETIRQLLGSKVVVLVGLMGAGKSTIGRKVANMLNLPFKDADTEIETVSRMTVAELFEAYGEVEFRDLERRVILRLLDDGPMVLATGGGAYMNAETRAAIAEAGISIWINADLDVLMERVSRRQNRPLLRNSDPRGVMQRLMDERYPVYALAELHLMTRDEKKEVIAAELIEVLAAHLEKEQAASAG

SEQ ID NO: 2169 - DNA, 912 bp, Thauera aromatica
  CDS (1)..(912)
atgagcacccagatcgacgacagcctgaatgccacaccaaatgacggcgatgccgaggtcgacacccgcagcgatgccgaatttctcgacgcgctcggtaagcgcgtgcgcgagatccgcgatcgccgcggcatgacccgcaagctggtggcgcgcgaagcgagcgtatcagagcgccacctcgcccatctcgaagccggcgaaggcaacgtctccatcgtcctgctgcgccacatcagccgcgccctcgacgtgccactgatcgagctgctcgcggtggagaccgaagacaccgtcgaacgccgcctgatccgccgctttctcgaacgcctgccccggcaccggctggaagacgtggtgttccgcctgatgcgcgacttcggtcacgaggaagccgcgcgccgcaagcgcatcgccctgatcggcctgcgcggcgcaggcaagaccacgctcggcaagcgcctcgccaccacacaaggcgtccccttcatcgagctcgacggcgagatcgaaaaggaaaccggcatgccgtcgagcgagcttttcgcgctctacgggcagaccggttaccgccgcatcgagcagcgaacactcgagcgcgtgatccgcgaccacgaccgggcggtgatctcggccggcggcggcgtcgtgtcgcagcccgaaacctacgacatgctgctctccaactgcctgacggtgtggctcaaggcccagcccgaagagcacatgtcacgggtcatggcccagggcgacctgcgcccgatggccggcaacgacgaggcgatggaagatctcaagcgcatcctcaatgcccgcgagccgctgtacgcgcgcgccgataccgtgatcgacacttccggtctgaccatcgacgcctgcttccagaaactgcgggaaatcgtcaccagctga

SEQ ID NO: 2170 - protein, 303 aa, Thauera aromatica
MSTQIDDSLNATPNDGDAEVDTRSDAEFLDALGKRVREIRDRRGMTRKLVAREASVSERHLAHLEAGEGNVSIVLLRHISRALDVPLIELLAVETEDTVERRLIRRFLERLPRHRLEDVVFRLMRDFGHEEAARRKRIALIGLRGAGKTTLGKRLATTQGVPFIELDGEIEKETGMPSSELFALYGQTGYRRIEQRTLERVIRDHDRAVISAGGGVVSQPETYDMLLSNCLTVWLKAQPEEHMSRVMAQGDLRPMAGNDEAMEDLKRILNAREPLYARADTVIDTSGLTIDACFQKLREIVTS

SEQ ID NO: 2171 - DNA, 1300 bp, Arabidopsis thaliana
  CDS (113)..(1024)
aatttttcaaaaaaaaaaaaaaaaaaggtcgactcatcctccggcgggagtagaaaattcttcttggttctgcagggtttttgaatagtttgtgtattgaagattgtctgaaatggaagcagctattactcagaggattcagtacccatcatgggttgattgtagaaaagttgagtgtaagccgcagcgtggttcattgcggtattctcagcaggttaaggtagatagaaggtttagaggtctttctttggctcgcttgcaacctgaaagaagaaatgatcaacgaagagcagtttctccagcggtttcctgttctgataacaattcctcagcgttgttggagactggaagtgtttatccatttgatgaagatattctcaagagaaaagcagaagaggttaaaccgtatttgaatggacgatctatgtaccttgtcggaatgatgggttctgggaaaacaactgtgggaaagttaatgtccaaagtgctcggttatacgttctttgactgcgacactttgattgaacaggcgatgaatggaacttctgttgcagagatatttgttcatcacggagagaatttttttagaggaaaggagaccgatgcgcttaagaagctctcttcgaggtatcaagttgttgtttccacaggtggaggtgcagttataagacccattaactggaagtatatgcataaaggaatcagcatttggctagatgtgcctctagaagcattagcccatagaatcgctgctgttggaactgattcacgaccactgctacacgatgaatcaggaaatgcatactcagtggctttcaaacgtctctcggctatttgggacgagcgcggtgaagcatacacaaacgcaaatgccagagtctccttagaaaatattgcagcaaagcgtggctataaaaatgtctcagatctcacaccaactgaaattgctatcgaggccttcgagcaagttctgagctttctagagaaagaagaaactatggagatcccagacggcgacctctaatttcccagccttcttttctccgtctcttcatttatctgtttaatcaactaaacgaagcaatcactcatcaccaggccattgagcaagttcagagacaaagaagacctctagttactggttccgggtcattggagcttacacgagcctaattttgactggaactatggtttattgaaagaagattcaatacatgtatatataaaatatatacttttttttttttgtttcagtatcatccttcttctcttttccttacaataagaattaagaaaaagg

SEQ ID NO: 2172 - protein, 303 aa, Arabidopsis thaliana
MEAAITQRIQYPSWVDCRKVECKPQRGSLRYSQQVKVDRRFRGLSLARLQPERRNDQRRAVSPAVSCSDNNSSALLETGSVYPFDEDILKRKAEEVKPYLNGRSMYLVGMMGSGKTTVGKLMSKVLGYTFFDCDTLIEQAMNGTSVAEIFVHHGENFFRGKETDALKKLSSRYQVVVSTGGGAVIRPINWKYMHKGISIWLDVPLEALAHRIAAVGTDSRPLLHDESGNAYSVAFKRLSAIWDERGEAYTNANARVSLENIAAKRGYKNVSDLTPTEIAIEAFEQVLSFLEKEETMEIPDGDL

SEQ ID NO: 2173 - DNA, 903 bp, Arabidopsis thaliana
  CDS (1)..(903)
atggaagcagctactgttcagaggtttcagtactcatcatggaatgatttgagaaattttgaagggaagcctcgtggttctctgaggtataatacacagcgaattaaggaagataaaaggtttagagttgttgctttaactcttgacaaaagaagggatcatcgacttagatcagtttctgataagaactcctcagcattgttggaaactggaagtcttcttcattctccatttgatgaagaacaacagattttgaagaaaaaagctgaagaggttaaaccgtatttaaatggacgatcgatgtatcttgttggtatgatgggttccgggaaaacgactgtagggaagattatggcaagatcgcttggttatacattctttgattgtgacactttgatcgagcaggctatgaagggaacttctgtagctgagatatttgagcatttcggtgagagtgtcttcagagaaaaagagactgaagcgttaaagaaactctctttgatgtaccaccaagttgttgtttcaaccgggggaggggcagttataagacccatcaattggaagtacatgcataaaggtattagtatttggcttgatgtacctctagaagccttagcgcatagaatagctgctgtaggaactggttcaagaccattgctacatgatgatgagtcaggggacacatacacagcggctttaaaccgtctttcaacgatttgggatgcacgtggtgaagcatacactaaagccagcgcaagagtttccttggagaatattactttgaagctcggttatagaagtgtctcagatcttacaccagctgaaatcgccattgaggcctttgagcaagttcagagctatttagagaaagaagatggtatggctagaccagatggactctag

SEQ ID NO: 2174 - protein, 300 aa, Arabidopsis thaliana
MEAATVQRFQYSSWNDLRNFEGKPRGSLRYNTQRIKEDKRFRVVALTLDKRRDHRLRSVSDKNSSALLETGSLLHSPFDEEQQILKKKAEEVKPYLNGRSMYLVGMMGSGKTTVGKIMARSLGYTFFDCDTLIEQAMKGTSVAEIFEHFGESVFREKETEALKKLSLMYHQVVVSTGGGAVIRPINWKYMHKGISIWLDVPLEALAHRIAAVGTGSRPLLHDDESGDTYTAALNRLSTIWDARGEAYTKASARVSLENITLKLGYRSVSDLTPAEIAIEAFEQVQSYLEKEDGMARPDGL

SEQ ID NO: 2175 - DNA, 576 bp, Chlorobium tepidum
  CDS (1)..(576)
atgaaacaccactcactcatatttctgaccggcttcagcggttcaggcaaatcgaccatcggcccgctcctggccaactcgctcggcttcgagttcattgacctcgaccgcgaaatcgagcttaccgccgggaagagcatcaaccggattttcgccgaagatggcgaggccgccttccgctcgctcgaactccggacgctcgaaaagatcggccaacaggagcggatggtggtctcgcttggcggcggcgtgctcgaaaacgaccgatgcttcgagctgatccgctcgcacggcaccctgatctacctcaagtccagccctgaaattctcacgctccggctccagcacaagaccgaccgccccctgctcaaaggcccggacgggcggaagctgacgcgagaagagatccagcagcgcatcgcggagcttctgaaaaaacgggaaccccgctacctgaaagccgatctggtgctcttcaccgactcgaaaaagatcggcgcaagtgtcgaggagttgacacgcaaaatcgagcggcacatccgccgcgcgtcgaaaaacaacactaacgagaagtaa

SEQ ID NO: 2176 - protein, 191 aa, Chlorobium tepidum
MKHHSLIFLTGFSGSGKSTIGPLLANSLGFEFIDLDREIELTAGKSINRIFAEDGEAAFRSLELRTLEKIGQQERMVVSLGGGVLENDRCFELIRSHGTLIYLKSSPEILTLRLQHKTDRPLLKGPDGRKLTREEIQQRIAELLKKREPRYLKADLVLFTDSKKIGASVEELTRKIERHIRRASKNNTNEK

SEQ ID NO: 2177 - DNA, 492 bp, Streptococcus pyogenes
  CDS (1)..(492)
atgactaaagtgttattgggatttatgggagtggggaaaacaacggtttcgaaacacctaagtatgcactgtaaagatatggatgctattattgaagctaaaatcggtatgtctattgcagctttttttgaacagcatggagaaatagcatttcgaacaattgaaagtcaagtgttaaaagatctattgtttacaaatgataatagtgtcatcgtaacaggtggcggtgtagtggttttacaagaaaatcgacaattactgagaaaaaatcaccagcataatattttattggtagcttcttttgaaactttgtaccagcgtttaaaacatgataaaaagtctcaaagacctctatttcttaagtactctaaggaagcattttatgaattttatcaacaacgtatggtattttatgagggactttcagatttagtaatcagagttgaccatcgtacgcctgaagaagttgccaacatcattgagggttattag

SEQ ID NO: 2178 - protein, 163 aa, Streptococcus pyogenes
MTKVLLGFMGVGKTTVSKHLSMHCKDMDAIIEAKIGMSIAAFFEQHGEIAFRTIESQVLKDLLFTNDNSVIVTGGGVVVLQENRQLLRKNHQHNILLVASFETLYQRLKHDKKSQRPLFLKYSKEAFYEFYQQRMVFYEGLSDLVIRVDHRTPEEVANIIEGY

SEQ ID NO: 2179 - DNA, 543 bp, Xanthomonas campestris
  CDS (1)..(543)
atgaaccccgctcccaatctcgtgatgatcggcccgatgggcgccggtaaaagctgcatcggccgccgcctggccgagcgcttcgggctggatttcgtggatgtggaccaggccatcgtcgagcaggtcggcagcagcatccccgcgatcttcgaacagcacggcgaagcgcgctttcgccagcacgaagccgaggccctgcacggcctgctcgcgcagagcaacaaactggtctccaccggcggcggcgcgatcctggatgcgggcaatcgccagcgcatccgcgagcgcggcttcgtggtgtacctgcatgtgagcgtgccggcccagctcacccggctggcgcgcgaccgcaatcgcccgctgctgcagcgcccggaccgcgaacaggtgctgcacggcatggccgcgctgcgcaccccgctgtaccaggaagtggccgacctcaccctggaaaccgatcacctttcccccgccgaggccaccgcgcagctggtgctgcgcctggccgcgcaatggcgcatgtcgagtacccctgcatga

SEQ ID NO: 2180 - protein, 180 aa, Xanthomonas campestris
MNPAPNLVMIGPMGAGKSCIGRRLAERFGLDFVDVDQAIVEQVGSSIPAIFEQHGEARFRQHEAEALHGLLAQSNKLVSTGGGAILDAGNRQRIRERGFVVYLHVSVPAQLTRLARDRNRPLLQRPDREQVLHGMAALRTPLYQEVADLTLETDHLSPAEATAQLVLRLAAQWRMSSTPA

SEQ ID NO: 2181 - DNA, 543 bp, Xanthomonas axonopodis
  CDS (1)..(543)
atgaaccccgcacccaatctcgtgatggtcggcccgatgggcgccggaaaaagctgcatcggccgtcgcctggccgagcgcttcgggctggaattcgtcgatgtggaccaggccatcgtcgaacaggtgggcagcagcatcccggccatcttcgagcagcatggcgaagccaggtttcggcagcacgaggcggaaaccctgcaggcgctgctggaacaggacaacaaactgatttccaccggtggcggcgcagtgctggatccgcgcaaccgcgagcgcatctgcgcgcgtgggttcgtggtgtacctgcatgtcagtgtgccggcgcaattgacacgcctggcgcgcgaccgcaatcgcccgctgctgcaacgcgccgaccgcgagcaggtgctgcatgcgatggccgcgcaccgcacgccgctgtaccaccaggtcgcagatctcagcctggaaaccgatcatctttcccccgccgaagccacagcgcagctggtgctgcgcctggccgcgcaatggcgcatgtcgagtaaccccgcatga

SEQ ID NO: 2182 - protein, 180 aa, Xanthomonas axonopodis
MNPAPNLVMVGPMGAGKSCIGRRLAERFGLEFVDVDQAIVEQVGSSIPAIFEQHGEARFRQHEAETLQALLEQDNKLISTGGGAVLDPRNRERICARGFVVYLHVSVPAQLTRLARDRNRPLLQRADREQVLHAMAAHRTPLYHQVADLSLETDHLSPAEATAQLVLRLAAQWRMSSNPA

SEQ ID NO: 2183 - DNA, 531 bp, Methanosarcina mazei
  CDS (1)..(531)
atgggcaggaagcgtgtggtaatgaacataacattaatcggtatggcaggagcggggaaaagtaccataggaaaagcgcttgcaaaacgtctggattatacttttattgatgttgaccgtttgatcacagatagaactggaatgcccctccaggtactcattgataaacagggcgattctgctcttctcagatttgaggaagaagctattctgggtcttgggcaggtggataactgtattatttccccgggagggagcgtaatttattccgaaaaatccatggtctacttaaaaaacatctcaaaagttgtctttctggacgcttctttcaggagcatcgcaaggcgaataccgaatgcaagaagaagaggtatagtgggcctgagggatagaagccttaaagaactatttgaagaaaggctggttctgtataataaatacgctgatttctccgtaaaaatcaggggaaaggaaaatattcaggggattgtagatcgagtgatcaggctctgttttatggtggaatcctga

SEQ ID NO: 2184 - protein, 176 aa, Methanosarcina mazei
MGRKRVVMNITLIGMAGAGKSTIGKALAKRLDYTFIDVDRLITDRTGMPLQVLIDKQGDSALLRFEEEAILGLGQVDNCIISPGGSVIYSEKSMVYLKNISKVVFLDASFRSIARRIPNARRRGIVGLRDRSLKELFEERLVLYNKYADFSVKIRGKENIQGIVDRVIRLCFMVES

SEQ ID NO: 2185 - DNA, 516 bp, Thermoanaerobacter tengcongensis
  CDS (1)..(516)
atgaaaaacatagttttgacaggattcatggggacaggaaaaactactgtagggaaaaaagtggcaactactcttcattttaattttattgacactgacaagctggttgagaaaatggcaggcatgagtgtggcggaaatatttgaaaagcacggggaagaatattttagaaagttggaaaaagcggctgtcataaaagcctctcgcctaaaaaatcacgtaatagctacaggaggcggggttgtattaaacccttcaaatattgtacaattaagaaaaaacggagtaataatcctcttaaaagcaaggccggaagtaattttgaggaatatatccaaaacaaaagataggcctcttcttgcggtggaagaccctgaaaagaggataagagagcttttagaggaaagagagcctttttacagatttgcagattacactatagacgtctctgacaagacaatagaggaagtcgctgaagaagtcataagagcgtatataaagcttaaggggagatga

SEQ ID NO: 2186 - protein, 171 aa, Thermoanaerobacter tengcongensis
MKNIVLTGFMGTGKTTVGKKVATTLHFNFIDTDKLVEKMAGMSVAEIFEKHGEEYFRKLEKAAVIKASRLKNHVIATGGGVVLNPSNIVQLRKNGVIILLKARPEVILRNISKTKDRPLLAVEDPEKRIRELLEEREPFYRFADYTIDVSDKTIEEVAEEVIRAYIKLKGR

SEQ ID NO: 2187 - DNA, 519 bp, Fusobacterium nucleatum
  CDS (1)..(519)
atgaaagataatattgcattaattggttttatgggaagtgggaaaacaactgttggaaaacttcttgctaaaactatggacatgaaatttgttgatatagataaagtaatagaagcccatgaaaaaaaatcaatcaatgatatttttcatgaaaaagggcaaatttattttagagatttagaaagggaaattatcttacaagaatctttaaaaaatgattgtgttattgccactggtggaggttctattttagataatgaaaacattaaaagattaaaagaaacatcttttattgtttttcttaatgcaactattgaatgtttatatttaagacttaaagacaatactactcgtcctattttaaatgatgttgaggataaaagaaagcttatagaagaattattagaaaaaagaaaattcttatatcaaatatcagctgattatattattgatataaatgaacacacaaatatttatgaaacagttgataagattaaagaaatatatataatatcttaa

SEQ ID NO: 2188 - protein, 172 aa, Fusobacterium nucleatum
MKDNIALIGFMGSGKTTVGKLLAKTMDMKFVDIDKVIEAHEKKSINDIFHEKGQIYFRDLEREIILQESLKNDCVIATGGGSILDNENIKRLKETSFIVFLNATIECLYLRLKDNTTRPILNDVEDKRKLIEELLEKRKFLYQISADYIIDINEHTNIYETVDKIKEIYIIS

SEQ ID NO: 2189 - DNA, 528 bp, Methanosarcina acetivorans
  CDS (1)..(528)
atgaaggaagcgggtcctatgaatataactttaattggtatggcaggagcggggaagagtactataggcaaggcacttgcaaaacgcttgaattatacctttattgacgttgacgggattattacgaaaaggacaggtatgcccctccaggctctgattgataaacagggggattcggctttgatccggtatgaagaagaagctattctggaacttgagcagatggacaactgtattatctctcccggagggagcgtggtttattccgaaaaagccatggagcacctgaaaaaaatctcgaagatagtctttctggacgctcctttcagaagcatcgtaagaaggatccctaacgcaagaaagagaggtatagtagggctcagggacaggagccttaaagagctttttgaagagaggctggtcttgtataagaagtatgccgacttttcaataagacttaaaggaaaggaaaatgttcagagaattgcggggaagataattcagctctgttttgggtcagagccctga

SEQ ID NO: 2190 - protein, 175 aa, Methanosarcina acetivorans
MKEAGPMNITLIGMAGAGKSTIGKALAKRLNYTFIDVDGIITKRTGMPLQALIDKQGDSALIRYEEEAILELEQMDNCIISPGGSVVYSEKAMEHLKKISKIVFLDAPFRSIVRRIPNARKRGIVGLRDRSLKELFEERLVLYKKYADFSIRLKGKENVQRIAGKIIQLCFGSEP

SEQ ID NO: 2191 - DNA, 516 bp, Clostridium perfringens
  CDS (1)..(516)
atgaaaaaaagaggagtacttttaattggaatgcctggagcaggaaaaacaaccataggaagagagctttcaaaggtattaaaaatgaattttttagacatggatgaattcatagaaagaagtacaggaaaagaaataaaagaactttttgctcagggagaagaggtttttagagatttagaaagtaaaagttgtgaacttttatcaaccttaaaaaatgtggttatatcttctggtggcggaatagttacaagagaagaaaatatggggaattttaaggagtttataactgtttttataaacagacctttagatttaattatggaagatatagacacagaaggaagacctcttttatgggatggcaaagaaagacttactaatttatatagagatagaattgatttatataaaaagcatagtgatatagaaattataaatgatggtactactaaagaggctattagggaaatagtcgaagctatttctgagttgggtttacaagagaaagaatag

SEQ ID NO: 2192 - protein, 171 aa, Clostridium perfringens
MKKRGVLLIGMPGAGKTTIGRELSKVLKMNFLDMDEFIERSTGKEIKELFAQGEEVFRDLESKSCELLSTLKNVVISSGGGIVTREENMGNFKEFITVFINRPLDLIMEDIDTEGRPLLWDGKERLTNLYRDRIDLYKKHSDIEIINDGTTKEAIREIVEAISELGLQEKE

SEQ ID NO: 2193 - DNA, 573 bp, Ralstonia solanacearum
  CDS (1)..(573)
atgtctgtttccaacgtttttttcgtcggcctgatgggggccggcaagaccactgtcgggcgtgccgtcgcccggcggcttgacttgccgttcttcgactccgaccacgagatcgaagcgcgttgcggcgtgcgcgtgccggtcatcttcgagcatgaaggcgaaatgggctttcgcgaccgcgaaacccagatgatcgatgagctgaccgcgcgccacggcgtggtcgtggccaccggcggcggcgccgtgctgcgcccggaaaaccgcgctttcctgcgcgagcgcggcacggtgatctacctgcgcgccaatccccacgacctgtacctgcgcacgcgccacgacaagaaccgtccgctgctgcagaccgagaacccgcgcgccaggctcgaggaactgcacgcgattcgcgacccgctgtaccgcgaggtggcgcactttgtcatcgaaaccggcaagcccaccgtggcccagcttgttaatatggtgctgatgcaactcgaagtggccggcatcgtggtgccgcccgccgcctcttccccgacctcgcaagtctcccgccagtcatga

SEQ ID NO: 2194 - protein, 190 aa, Ralstonia solanacearum
MSVSNVFFVGLMGAGKTTVGRAVARRLDLPFFDSDHEIEARCGVRVPVIFEHEGEMGFRDRETQMIDELTARHGVVVATGGGAVLRPENRAFLRERGTVIYLRANPHDLYLRTRHDKNRPLLQTENPRARLEELHAIRDPLYREVAHFVIETGKPTVAQLVNMVLMQLEVAGIVVPPAASSPTSQVSRQS

SEQ ID NO: 2195 - DNA, 579 bp, Rhizobium meliloti
  CDS (1)..(579)
atgaacgatgtgaccgaaccggtttccgcgacgctggccgaaagggcgaagcgcactctcggtaagcgcaatctcgttttcatcggcctgatgggggcaggtaaatcggcaatcggtcggctgaccgcccaggcgctcggcgttcctttcgtcgattccgaccacgagatcgagcgggtctcgcgcatgacggtcagcgatctcttcgcgacctacggcgaggaagagttccgggcgctggaggcccgcgtgctgaagcgcctgctcaggtccggcccgcgggtggtgtcgaccggcggcggcgcctatatcaacgagcgctcgcggcggcatatcaagaagggcggcctgacgatctggctcaacgccgagcttgacgtgctatgggagcgggtaaacaagcgcgacacccggccgcttctgaagaccgagaatccgaagcagacgctcgagaacctgatgcgcgcgcgctacccaatctatgccgaggcggacctgaccgttctctcgcgcgatgtgaaaaaggaagcgatggtcgaggaggttctcgccgccgtcgccgatcatcagaaagcctga

SEQ ID NO: 2196 - protein, 192 aa, Rhizobium meliloti
MNDVTEPVSATLAERAKRTLGKRNLVFIGLMGAGKSAIGRLTAQALGVPFVDSDHEIERVSRMTVSDLFATYGEEEFRALEARVLKRLLRSGPRVVSTGGGAYINERSRRHIKKGGLTIWLNAELDVLWERVNKRDTRPLLKTENPKQTLENLMRARYPIYAEADLTVLSRDVKKEAMVEEVLAAVADHQKA

SEQ ID NO: 2197 - DNA, 7122 bp, Rhizobium loti
  CDS (1)..(7122)
atggagggcgccgtgtgcgccacgcattgtaatcggcgcgcatttctcgcctggagacggattatgacgggagttgaccggcgtttgaatgcgcctagcggatcaggcacgcaccgggctgaatcggatcatggcggtggtcaaaaaggctcgaccttcagttctgtcgttcagggcttgcgctctgaagatcgagagttaggggcatcctcagctgaaaggccaccttcggccagcgatgtccggcgccgcacgtccggcgatccctccgtcaataggtgtgacggccagcccgtttttcgcgacttgccgcatctgggagcgacaaatcggcaagaaagttcgtcgcgttccggtgcagaagtccgcaatgccgatcagtccaggagttcacaacaaagtggtccttcctcgcgcaggcagcccgtgtcgggcctggatcgcagaccaaaaaggcggcgcctggacgatgtcgccgcgcagagcgtgcaaagtgcaatctcagaagaacaatctaacaacgcactacacgccatttgttttgcccgtgacattgaggggttctcgcgtgcagtggtggagcatgacagacggctgcaaggggcgggcgacgaggtccatgcagccttcctgcaaaaggccgccgcccagttcaaagctcaatttgtcacatgcttcgaggacaatatccgccgcgggcaatcatggggctacgccaccgcatgcaatacggtgagtcgtgaggctggaggtcaggaaggtgtggaagcttgcaaggcgatggcagctcgggtgtcgcagcttcctagtgcgttaatgtgcgaagtagaccccaaagccttttcgctcttttcggcatcgtttggtcggcatccgcagtcgagaacatgccgaaatggaacgatcagaatcgccgaattttgccgcgatgagggcaggacacttggcgtactgcaaagtcaaagtctgtcgttgctggtgaacggtttcagcaagtggccgcagcggtcggaaactcgtgacggtacggaagccgtcgccagtgaggtccgtcgtcgcgaggaccgccgtttcgggctctctgattttagggagcagcacctggctaatctggtgaacggtttcagcaagtggccggaaaaggagtggtcccgccaagccaccggaacgattgccggtgaagtccttcgccgccgtaacctcgggctctcaacttttaatcaccaggacttggccaacctagtgaacggtttcggaaagtgtgcccaagaggaggtctgttgccaagccacagttgcaatcgcgggcgaggtcctgcgccgcgaccgccgtgcccggctctccgaattcacccaccaggaactggcgaacctggtgcaaggtttcagcaaatggccggaagagcaggcgtcccgcgaagccgccagtgcgatggccggtgaggtccttggtcgtaaccggcgtgccggcgtcgctgatcttaatccccagcacatggcgacccttgtgaacggtttcagtaagtggccgatagaggagcggtgtcgccaagtcaccggagcgattgccgatgaggtaggtcgccgcgccgcccgcggcaggttcgggctctctgattttaatcatcaggacttagcgaacctcgtgaacggttttaggaaatggccggaaggggcggtctaccgccaagccacagccaatatcgccacagaagtctctcgccgcgccggcgagcaagggctgtctcattttactccgcaggagctggctaacctagtgaacgggttcggcaaatgcccggacgatgccgactatcatcacgccacagtcgcgatcgccagtgaggtcatccgccgccgcgcccaactctctgctttcagtcatcagcacttggcaaacttggtgaacggtttcagtaagtggccacaacaggcggactgtcgcgatgcaacactggcgatcgccagcgaggtctttcaacgcgacgaccagttctctcatcttactcagcaggcacttgcgacattggcgaacggttttagcaagtggccggaagaggcggcgtctcgccaggcaacagtcgccatcgccggggaggtcacccgccgcgccgggcgcggcgagttcgggctctctgatttcaatgaccaggacctggcgaacctggtgaacggattcggcaagtggccggaagcggcgtcgactcagcaagccacaatcgctatagccagcgaggtccttcgccgaggcacccgactccgtgactttactcaccagcacctagctaatctggtgaacggtttcagcaagtggccggacggggcggactgtcgcgacgccgcgatcgccatcgccggtgaggtcattcgccgcggcgcccgactctgtgagtttagtcaccagcacctatctaatctggtgaacggtttcagcaagtggccggtcggggaggactgtcgcagagccgcgatcgcaatcgccggggaagcccgtcagcgccagctctccgatttcgctccgcagggagtggcgaccttgatgaacggcttcaccaagtggccggaagagtcggcgtgccagcagtccacgatggacatcgcgcgcagattgggtgctcgagagctacgattcggtgtgttcacgacagctcagctaagtattctcgccaatgctttgtcgcgaatgatcatgaaggcagaagacactggggatattacggacgcggctctgccgaaggatcgcttgcacaagctcgctcattacctgcactatgatgatgatcgcctggcgcaggctgacgttctagacatcacaaccgttttcaaggcacttggtaaggctcggctgtctgatgatctcggtttgctcgcaccgacaggcttgaaccgcctctcggaattgcgtcaagcccctgattttacgacccacaacgatctggaaaccatggctaatctgtgtgcatctctgctgccgctggctcgcagcccacagaggccgctgcgctcgcaccgcacgcaggccctcaatctgctcaacgacctccaatccgtgctcgagcagaagatcgaggcgcatctgaacgcaagcgatgccgagcggacccgtggaccgcttgccagccgccgccccgctttatcgatctatcagacgcttaaggcccgtgcggtcctggagagactattcaggtcaccgtatgtcgagggcaagaggtccgacttgcgggtgaggcagcaagcgctggagcgcaagacgaaggagatcctggacagcacgcgcggcctcattgaaagcgacctttccagcatgagctggaacctgatcgcgcagatcgaggcggagaatccagtggatgcgctggactttttcatagagcaggatgcggcgacgatccaggggcaacatccagcatcggtcttcgacgtgtatcaggtcctgcgaaccatggatcacgagccaagaccgccgcagggtgacgcaggactgatgcagttgccggtagttgacatgcagggacggccggtggccaccgagccggagagacggtattcgatatttcagcgcctgactgccggggctttgccagtcgttgcggtccagatgccaggaacgccgagcgccttcatgctggcgcgtacggtgaacgtcaacggtgtgccataccgcatggacctgttcggaggcagcaagttaaagccgccgcgattgaccgtgtctcagattgcggcccgtgctccaggcgagctagctaagctttccgggggaaagctgctggcgattccgtatgtcgataccgcaccgggcaccgccttcgagcagctgtctcggacttgggcccctttcaaggaggcctattattatacccagcgcaggggttttgcggcgccaccggcgatcaagggcctgggagttcacgactacgcgctggaaggcgccttcaaactgtcgctgctgccggaccgtcccgccaaccaggagcatcccttcaagctgagggggccggacggtcccattgcattgcgaccgcatgacggctgcggtttcatcagggcctcgctagccaaccttatgccagctgtatgtcgcgccggcgagcagggtcctgatcagatgtctgcctttggtgagggaaggaaatcatccctgccagtctcggcgctgcaacactatccgcgctgcgaccaagtggcggatgaggtccgtgaaaaggccacggcctggctcgagagccaacaagagccaacgttgaccaccgaagagctgtttagaacggtgacggccggacacatcgatggtcccggcgcggttgccgtaccctccaacgatgagtgtctccatgtgccgacgctgaagagcgaaacattgacggggacgagcggcgtgctggtcgggcgctcgccctacgataagccgaacctgcgcccgtttgccgccgagcgggtcaagttggccgtcgacggcgatccgaccgctgtatttctcgataactgcacggccattcaatacagcttcaatgtcgcccagaagtcggggagggaactggccgccgacgatccgactttctttgccaaaggcatcctgatcgttgtaccggataagatgtggccggccgcctacgccgaccgtgcgctaatcatgtctgccgaggacgtcaaatgccatgcgagctggaccacgagcaaggaccgcgtcaaggtggacacgacggtcgactgcctcggcatcctgcaggcgaccgaggtgtttgccccgggctcgttggttgccgtcccaactggtgaacagaagaaacttgacggcgacttcgacggagacagcctcgtcatcgtcggcgaccggccacagctttacgagcatgtcaggcaattcgatcaagaggagcaagctcgcggattgcgctcgctcaagccgccaaagtcgcacacgccggcgattgaggatggtcgctacaagttcgggcgcgccagccagatcctcgccgccacgcgcaatgttctggaaatctatacttgtctgcagcgagactttctcgctcaatcccatgaagcccgacagtggtttgccgagcgtgccatcttcggcacgtacgaaggcattcaccaagagctcaagcgagacatccgaggcgtgttggagcaggaacaggtcagtgctcagaacgtccaggagacgcttgaaaaggcgcggcacgacatccaactggcagaccatccggtcgcgcgcgagattgctgagttgctccacgctgagctcgagacgtgggccgcgaggctggatgagcaagctctgcccgaacaactcctgcccgaaacagtcgtcagcctgagcgaggcaccactcgcgatgagccaaccgctttgcgagctgttcccggagctggcggagatctattcggcaacggctcagccacgcgaccgcgtccagcttcttgtcgaccgttaccctacgcgcattgccccgcgaccggatggatacaatccacacgacctcgtgcggagtgcaaagaatctcctgagcctcggtatcaaagtcggaactgacgcatataaatcggacactggggcccacatctttatgttcaagagcaggcaacttcggcgcctgctgcaacaaacaccaggctcgaaatcggtgccctacaccaagagcattgcggctaccctcaaccagggtcggtttgatgtcgatgccacattgcaggatcttcaggacaatccgacgctggcggcttcagttatgcaagcttcgatcaaacttgctgccgagcgaggctttctgcctcaaccctcggctcgaggggcttctgccgatgattcagccacgacgatgaccttgactcccgagctggccgtacagcgagctcaaatggaggcttgccgcgcccgagccgaagagaaggacatcaccccgatggtaatctcggttgccgaagccctcaggagagccgatatcaacgtgaagatgccccatctcgctgagcgtttgagatcggaaagctcgatgacaggccagctcaccgggatacaggccccgtttgaagccggcgcccagctgatcaacaacgctgtacgccactgcttccaactccctgatagagattttacccgtgccttcaagaaagccattatagccttcgacgagagcgggtattctgaggtcagcacgaccaactggttcaggacgcgatcgccgaccttcgtcggcatcaagaccgtgctcgccacgccggggggctaccgcttcgaggtggagttccacactgcagacagctacaagaccaagatttacaatcacgacacctacaaggagctgcagaagctgcaggagctgcagcgagagagccaagatccactggatcagtctatagccgagcaactcttggagcgcgtgcgacaggcctgcaacaaggtcatcatccctcacgaggccatagagatcccccactgggaagcccacgccgatagcacagttggtgccagcctacgtcgtcggttgcaagtcgccccgccgagacgaacggagcgctccccgatcgcaacagagattcttggcgcgttgggcgcgcgatcgatcgtgctcgtcggcgtgaaaggcgcagggaaatccagtttgggccgtgcactcgccaaacgactaggaatgaggttcgtcgattccgatagaaaaatcgaggcgaagaccggcaagtccgtagctaagatcgtcgctgaggatggggaggcctatttcagagatcttgaggtgaatgagatcaggcagtcactcgaactggggtcggcggtgctcgcaaccggcggtgaagcgttcatgatcgaggagatccggcattatgtcggggagaaagccgtctcgatctggctcaataccagcgaggacgtgatcaggcggaacctgagagataacatcagaggcccaaaggtgcagaccgccgaccaagcccagaccatcacagacctgatgcatgtgcggaatccaatctatacacttgccgatctcacgattgccccgcagcatgagcgggatctcaagaacgcgaatgcttgcctgaccgcgctgcacgcctatgtttgcggtgggggcagggcggtacccaagctcgtgacctcatccggggtcgtaccatga

SEQ ID NO: 2198 - protein, 2373 aa, Rhizobium loti
MEGAVCATHCNRRAFLAWRRIMTGVDRRLNAPSGSGTHRAESDHGGGQKGSTFSSVVQGLRSEDRELGASSAERPPSASDVRRRTSGDPSVNRCDGQPVFRDLPHLGATNRQESSSRSGAEVRNADQSRSSQQSGPSSRRQPVSGLDRRPKRRRLDDVAAQSVQSAISEEQSNNALHAICFARDIEGFSRAVVEHDRRLQGAGDEVHAAFLQKAAAQFKAQFVTCFEDNIRRGQSWGYATACNTVSREAGGQEGVEACKAMAARVSQLPSALMCEVDPKAFSLFSASFGRHPQSRTCRNGTIRIAEFCRDEGRTLGVLQSQSLSLLVNGFSKWPQRSETRDGTEAVASEVRRREDRRFGLSDFREQHLANLVNGFSKWPEKEWSRQATGTIAGEVLRRRNLGLSTFNHQDLANLVNGFGKCAQEEVCCQATVAIAGEVLRRDRRARLSEFTHQELANLVQGFSKWPEEQASREAASAMAGEVLGRNRRAGVADLNPQHMATLVNGFSKWPIEERCRQVTGAIADEVGRRAARGRFGLSDFNHQDLANLVNGFRKWPEGAVYRQATANIATEVSRRAGEQGLSHFTPQELANLVNGFGKCPDDADYHHATVAIASEVIRRRAQLSAFSHQHLANLVNGFSKWPQQADCRDATLAIASEVFQRDDQFSHLTQQALATLANGFSKWPEEAASRQATVAIAGEVTRRAGRGEFGLSDFNDQDLANLVNGFGKWPEAASTQQATIAIASEVLRRGTRLRDFTHQHLANLVNGFSKWPDGADCRDAAIAIAGEVIRRGARLCEFSHQHLSNLVNGFSKWPVGEDCRRAAIAIAGEARQRQLSDFAPQGVATLMNGFTKWPEESACQQSTMDIARRLGARELRFGVFTTAQLSILANALSRMIMKAEDTGDITDAALPKDRLHKLAHYLHYDDDRLAQADVLDITTVFKALGKARLSDDLGLLAPTGLNRLSELRQAPDFTTHNDLETMANLCASLLPLARSPQRPLRSHRTQALNLLNDLQSVLEQKIEAHLNASDAERTRGPLASRRPALSIYQTLKARAVLERLFRSPYVEGKRSDLRVRQQALERKTKEILDSTRGLIESDLSSMSWNLIAQIEAENPVDALDFFIEQDAATIQGQHPASVFDVYQVLRTMDHEPRPPQGDAGLMQLPVVDMQGRPVATEPERRYSIFQRLTAGALPVVAVQMPGTPSAFMLARTVNVNGVPYRMDLFGGSKLKPPRLTVSQIAARAPGELAKLSGGKLLAIPYVDTAPGTAFEQLSRTWAPFKEAYYYTQRRGFAAPPAIKGLGVHDYALEGAFKLSLLPDRPANQEHPFKLRGPDGPIALRPHDGCGFIRASLANLMPAVCRAGEQGPDQMSAFGEGRKSSLPVSALQHYPRCDQVADEVREKATAWLESQQEPTLTTEELFRTVTAGHIDGPGAVAVPSNDECLHVPTLKSETLTGTSGVLVGRSPYDKPNLRPFAAERVKLAVDGDPTAVFLDNCTAIQYSFNVAQKSGRELAADDPTFFAKGILIVVPDKMWPAAYADRALIMSAEDVKCHASWTTSKDRVKVDTTVDCLGILQATEVFAPGSLVAVPTGEQKKLDGDFDGDSLVIVGDRPQLYEHVRQFDQEEQARGLRSLKPPKSHTPAIEDGRYKFGRASQILAATRNVLEIYTCLQRDFLAQSHEARQWFAERAIFGTYEGIHQELKRDIRGVLEQEQVSAQNVQETLEKARHDIQLADHPVAREIAELLHAELETWAARLDEQALPEQLLPETVVSLSEAPLAMSQPLCELFPELAEIYSATAQPRDRVQLLVDRYPTRIAPRPDGYNPHDLVRSAKNLLSLGIKVGTDAYKSDTGAHIFMFKSRQLRRLLQQTPGSKSVPYTKSIAATLNQGRFDVDATLQDLQDNPTLAASVMQASIKLAAERGFLPQPSARGASADDSATTMTLTPELAVQRAQMEACRARAEEKDITPMVISVAEALRRADINVKMPHLAERLRSESSMTGQLTGIQAPFEAGAQLINNAVRHCFQLPDRDFTRAFKKAIIAFDESGYSEVSTTNWFRTRSPTFVGIKTVLATPGGYRFEVEFHTADSYKTKIYNHDTYKELQKLQELQRESQDPLDQSIAEQLLERVRQACNKVIIPHEAIEIPHWEAHADSTVGASLRRRLQVAPPRRTERSPIATEILGALGARSIVLVGVKGAGKSSLGRALAKRLGMRFVDSDRKIEAKTGKSVAKIVAEDGEAYFRDLEVNEIRQSLELGSAVLATGGEAFMIEEIRHYVGEKAVSIWLNTSEDVIRRNLRDNIRGPKVQTADQAQTITDLMHVRNPIYTLADLTIAPQHERDLKNANACLTALHAYVCGGGRAVPKLVTSSGVVP

SEQ ID NO: 2199 - DNA, 612 bp, Rhizobium loti
  CDS (1)..(612)
atgaacgcgcaccaggcaaatcccccaggcgagagcctcgccgcgctgcttggccggctgggcagccggtccatcgtctttgtcggcctgatgggcgccggcaagacggcgatcgggcgcaaggtggcgacgatgctttcgctgcctttcatcgacagcgaccaggagatcgagagcgtctcgcgcatgaccgtgccggagctgttcgagcgctatggcgaggccgagttcagggccctggagcagcgcgtcatcctgcgcgtgctggaaaatggcccgcaggtgctgtcgaccggcggcggcgccttcatgaacgcgcagacgcgcgaggccatcgccggccatggcgtgtcggtgtggctgaaggccgagctcgaccttctgatggaccgggtctcgaagaagcagaaccggccgctgttgaagagtgccgatcctcgcgccgtgctggagcggctgatgagcgagcggtatccggtctacgcgacatcggatgtcaccgtgccgacccgcgacgaccgcaaggaagtcatcgctgccgaggtgctgaatgcgctgtgccggcatttcggcatcgatgaaattgcagcgacgggcgagatcgaatcgtga

SEQ ID NO: 2200 - protein, 203 aa, Rhizobium loti
MNAHQANPPGESLAALLGRLGSRSIVFVGLMGAGKTAIGRKVATMLSLPFIDSDQEIESVSRMTVPELFERYGEAEFRALEQRVILRVLENGPQVLSTGGGAFMNAQTREAIAGHGVSVWLKAELDLLMDRVSKKQNRPLLKSADPRAVLERLMSERYPVYATSDVTVPTRDDRKEVIAAEVLNALCRHFGIDEIAATGEIES

SEQ ID NO: 2201 - DNA, 516 bp, Streptomyces coelicolor
  CDS (1)..(516)
atgagcgcaccgctgatcgtcctggtcgggccgatgggggtcggcaagtccaccgtcgggcagctgctcgccgagcggctgggcacgggataccgggacacggacgaggacatcgtcaccgcccaggggcgggccatcgccgaaatcttcgtggacgagggcgaggccgccttccggaccctggagaaggaggccgtgcggaccgcgctcgccgagcacgagggcgtcctcgccctcggcggtggcgcgatcctggacgcggacacccgcgcgctgctcgccgggcagcgggtcgtctacctctcgatggacgtcgaggaggccgtcaagcgcaccggcctgaacgcggcgcgtccgctgctggcggtcaacccgcgcaaacagtggcgcgaactgatggaggcccgtcggcacctctacgaggacgtcgccacggccgtcgtggccacggacggtcgtacgccggaagaagtcacccaagccgccctggacgcagtggagttgaaagaagcatga

SEQ ID NO: 2202 - protein, 171 aa, Streptomyces coelicolor
MSAPLIVLVGPMGVGKSTVGQLLAERLGTGYRDTDEDIVTAQGRAIAEIFVDEGEAAFRTLEKEAVRTALAEHEGVLALGGGAILDADTRALLAGQRVVYLSMDVEEAVKRTGLNAARPLLAVNPRKQWRELMEARRHLYEDVATAVVATDGRTPEEVTQAALDAVELKEA

SEQ ID NO: 2203 - DNA, 843 bp, Arabidopsis thaliana
  CDS (1)..(843)
atggagatcttctctgcgtctgcttctctaactttaactggattcgttcctcgtcttcttcccttgctctctcctcaagctcgaactactctctgcaagccgttgctgtcttcttcttctactagactcatttcttgtcacagtcgtatagctccgtctcggtctctcgcagatcaatccgcctctactgggatcagtgttgttgattcggatcccattgatgttgtaaagaggaaagctatggacatagcccctgaactgaaaggagcttccatatttctggttggaattaataactctattaaaacgaacacggggaagcttttggctgaggcattacgatattactactttgatagtgataatttgatcacagaggcggctggtggaaatgtgtctgctcaagctttgaaggaagctgatgagaaggcttttcaagaatcagagactgaagtgctgaagcagctatcatctatgggtcggcttgtagtttgcgctggagatggtgcggtccaaagcttgagaaatcttgcacttcttagacacgggatctccatatggatcgatgttcctctggatatcactgctaaaggggatgatgattcattccactcagaaccttcccctgagttgtttgacacactaaaagcgagttacgagaaatcaagaaagggttacgaaacagcagatgtatccatttcccttgaaaaaatagctacaaagctagaatttgaagacttggaagcagtaacttctgaagacattgctttggagattctgaaagaaatagagaagttgacaagagtgaagaaaatgatggaagaagcttctcgacctttctag

SEQ ID NO: 2204 - protein, 280 aa, Arabidopsis thaliana
MEIFSASASLTLTGFVPRLLPLLSPQARTTLCKPLLSSSSTRLISCHSRIAPSRSLADQSASTGISVVDSDPIDVVKRKAMDIAPELKGASIFLVGINNSIKTNTGKLLAEALRYYYFDSDNLITEAAGGNVSAQALKEADEKAFQESETEVLKQLSSMGRLVVCAGDGAVQSLRNLALLRHGISIWIDVPLDITAKGDDDSFHSEPSPELFDTLKASYEKSRKGYETADVSISLEKIATKLEFEDLEAVTSEDIALEILKEIEKLTRVKKMMEEASRPF

SEQ ID NO: 2205 - DNA, 1623 bp, Bifidobacterium longum
  CDS (1)..(1623)
atgaccgcacgcccccgcgccgtcatcatcggcatgatgggagccggcaaaacacgtgtcggtaaggaagtggcgcatatgttgcgtctgccgttcgccgatgccgatgtggagatcgaacgtgaagtgggcatgaagattccctcctacttcgaggaatacggtgagccggcattccgcgaggtcgaggccgatctcatcgccgatatgcttgaggatttcgacggtatcttttcgctgggcggtggcgctcccatgacgccatccacccagcatgccctcgcctcctacatcgaccatggcggtcgtgtggtctaccttgatgccgatccggcggaagccatggaacgcgcgaaccgtgggggaggccggcccatgctcaatggcaacgccaactcccgttggaaaaaactgttcaagcagcgtgacccagtattccgcgaggtcgccaacgttcatgtccatacccgggggcttacgcctcagggcgcagcgaagaaagtgattgatatggtatctgagcgagcagtgcatgttaccggagcggcaattgagccgtatgatgtggtcattggcgaaggtgccatgaaccatctggtcgacgtgctgggacccaaacccgccaaaatcgcgcttatccacactcagccggtgcagcgacactccgatcgtgcccgcgccctgttgcgtcagggcggctatgaggtttccgacatcgtgattccggatgccgaacccggcaagaccattaccgtggccaacggcatttgggaacgccttggcaacgaaggtttcacccgatccgatgccgtggtggggcttggcggcggtgccgcaaccgatttggccggtttcgtggctgccacgtggatgcgcggcgtgcgctatgtaaactgcccgacctcgctgctggccatggtcgatgcctccaccggtggcaaaaccggcatcaacaccccgcagggcaagaacctcgtcggctcgttctacacgcctgccggtgtgctggccgacaccaagacgctggctacgctgcccaatgacatcttcatcgagggtctcggcgaagtcgccaaatccggtttcatccgcgaccccgaaatcctgcatatcctcgaagaccacgcagctgaactgcgcgctttcgacggctctacattcctcggctcgccgctcgaagacgtggttgccgagctcattgagcgcacggtaaaggtcaaggcctaccacgtctcctccgatttgaaggagaagggtctgcgtgaattcctcaactacgggcacacgatgggccatgccatcgaaaagctcgagcatttccgctggaggcatggcaatgcggtggccgtcggtatggtgtatgccgccgagctggcccatctgatcggttacatcgatcaggatctggttgactatcaccgctcgttgcttgcttcgatgggtctgccgacgtcgtggaatggcggctcgttcgacgacgtgctcgcattgatgcatcgcgacaagaaggcccgcggcaatgagctgcgcttcgtggtcctcgacgagattggtcacgtcgtacacctcgacaacccgcccgccgaagccgtggaagaagcattccgtcgtatccagcagtaa

SEQ ID NO: 2206 - protein, 540 aa, Bifidobacterium longum
MTARPRAVIIGMMGAGKTRVGKEVAHMLRLPFADADVEIEREVGMKIPSYFEEYGEPAFREVEADLIADMLEDFDGIFSLGGGAPMTPSTQHALASYIDHGGRVVYLDADPAEAMERANRGGGRPMLNGNANSRWKKLFKQRDPVFREVANVHVHTRGLTPQGAAKKVIDMVSERAVHVTGAAIEPYDVVIGEGAMNHLVDVLGPKPAKIALIHTQPVQRHSDRARALLRQGGYEVSDIVIPDAEPGKTITVANGIWERLGNEGFTRSDAVVGLGGGAATDLAGFVAATWMRGVRYVNCPTSLLAMVDASTGGKTGINTPQGKNLVGSFYTPAGVLADTKTLATLPNDIFIEGLGEVAKSGFIRDPEILHILEDHAAELRAFDGSTFLGSPLEDVVAELIERTVKVKAYHVSSDLKEKGLREFLNYGHTMGHAIEKLEHFRWRHGNAVAVGMVYAAELAHLIGYIDQDLVDYHRSLLASMGLPTSWNGGSFDDVLALMHRDKKARGNELRFVVLDEIGHVVHLDNPPAEAVEEAFRRIQQ

SEQ ID NO: 2207 - DNA, 525 bp, Buchnera aphidicola
  CDS (1)..(525)
atgacagaaaaacgaaatatttttttaattggacctatgggagctggaaaaagtactattggtcgtcatttagctcaacaactaagtatggaattttacgattcagatcaagaaatcgaaaaacgtactggtgtagatgttagttggatttttgatattgaaggagaattagggtttagaaaacgggaacaaaaaataattagtgaaataattgacaaaaggggtatagttttgtcaacaggaggaggatctattctttcaagagaaataagaaataaattatcatctcgtggcgtggttatttatttagaaacttctgtggaaaaacaattagttagaactaaaaaaaacaaacaacgtccattattacaagtagataatacatctattcaaactgttcttgaagaattggcttttcatagaaatcctctttatcaatcaatagctgatattacaatacgcatgaatgatagaagtattaaagctattgtattttacattattcgtttgttaaataatttttga

SEQ ID NO: 2208 - protein, 174 aa, Buchnera aphidicola
MTEKRNIFLIGPMGAGKSTIGRHLAQQLSMEFYDSDQEIEKRTGVDVSWIFDIEGELGFRKREQKIISEIIDKRGIVLSTGGGSILSREIRNKLSSRGVVIYLETSVEKQLVRTKKNKQRPLLQVDNTSIQTVLEELAFHRNPLYQSIADITIRMNDRSIKAIVFYIIRLLNNF

SEQ ID NO: 2209 - DNA, 510 bp, Corynebacterium efficiens
  CDS (1)..(510)
atggcacgtcccatcgtcgtcctggtcggtccacccggtgcaggcaaatccaccatcggtcggcgtctggcccgtgcccttaatgcggacctggtggacagtgatgaactgatcgagaaggccaccggcaaggcctgcggggaggtgttctccgaactcggtgagcccgccttccgcgagctggaggcacaccacgtcgccgaggcactcaaccatgacggtgtggtgagcctcggtggtggggccatcctcaccgaatccacccgtgagctgctcagggagcacgatgtggtgtggatcgatgtctccgtcgccgagggggtgcgccgcaccgccggggagcggacccgtccggtcctggcggctgacgacccggtcgagcactaccgcaacctcctggaaacccgccgtccgctctatgaggaggtgtccacgttccgcgtgcgcaccaactcccgcagtccacagcaggtggtggcagagatcctgcaccacctcgaggatgattag

SEQ ID NO: 2210 - protein, 169 aa, Corynebacterium efficiens
MARPIVVLVGPPGAGKSTIGRRLARALNADLVDSDELIEKATGKACGEVFSELGEPAFRELEAHHVAEALNHDGVVSLGGGAILTESTRELLREHDVVWIDVSVAEGVRRTAGERTRPVLAADDPVEHYRNLLETRRPLYEEVSTFRVRTNSRSPQQVVAEILHHLEDD

SEQ ID NO: 2211 - DNA, 525 bp, Haemophilus ducreyi
  CDS (1)..(525)
atggctgaaaaacgtaatattttcttagttggccctatgggggcaggcaaaagcactattggtcgtcagcttgctcagatgttaaacatggatttcattgactccgatgcagttattgaagaacgtgctggtgcaagcattgattggatctttgatattgaaggtgaagcgggtttccgtaaacgtgaagaacgtattattaatgaattaactaaaggtcaacaaggtattgtgctttctaccggtggtggatctattttatccaaagagaatcgcaatgctttgtcggcacgtgggattgttatctacttagaaacaacagtagataaacagtttgagcgtacacaacgagataaaaaacgtccgctcttacaaacagaagatccgcgtaaaatattagaagctatcgcgaaagaacgtaacccactttatgaagaaatcgcagatattaccctccaaactgacgaacaaagtgctaaagtcgtagctacgcatatcattgagttaattgataatttacaataa

SEQ ID NO: 2212 - protein, 174 aa, Haemophilus ducreyi
MAEKRNIFLVGPMGAGKSTIGRQLAQMLNMDFIDSDAVIEERAGASIDWIFDIEGEAGFRKREERIINELTKGQQGIVLSTGGGSILSKENRNALSARGIVIYLETTVDKQFERTQRDKKRPLLQTEDPRKILEAIAKERNPLYEEIADITLQTDEQSAKVVATHIIELIDNLQ

SEQ ID NO: 2213 - DNA, 504 bp, Helicobacter hepaticus
  CDS (1)..(504)
atggagaatatagttttaattggctttatgggaagcggtaaaacaaccatagggcgagaaattgcgttacttggaggacgttttttgcttgacactgaccaaattatagagcaaaatatgggaaaaagtataaacgaaatttttgaatcagtgggcgagagtggatttagacgtatagaatcccaacttattttatggctttccgctaatgttaaaaatgctgtgattgctacaggcggaggtatgcctatttataatgatgtagcatatttaggctatgtgttttggcttgatatgagttttgaaagcattttaaagcgattgactattacagaacaagaaaagcgtccactttttagtgatatttcaaaagcaaggcagctttataatgagcgtaagagtatttataaaaaacaatccaaatatattatcaatggagatgcttctgctttggaaattgcacgtaaaattatagaatgtatggataaagaggtgcaagaatag

SEQ ID NO: 2214 - protein, 167 aa, Helicobacter hepaticus
MENIVLIGFMGSGKTTIGREIALLGGRFLLDTDQIIEQNMGKSINEIFESVGESGFRRIESQLILWLSANVKNAVIATGGGMPIYNDVAYLGYVFWLDMSFESILKRLTITEQEKRPLFSDISKARQLYNERKSIYKKQSKYIINGDASALEIARKIIECMDKEVQE

SEQ ID NO: 2215 - DNA, 552 bp, Oceanobacillus iheyensis
  CDS (1)..(552)
atggggaagtttccattaagagaacaaagtatagttttaataggttttatgggcgttggaaaaacgacgattggtaagacggtagcaaaaaaattataccgtgattttatagatattgatgaagaaatcgaaaaaagattcaagatgccaactaaagatatttttcgattatatggagaaaaaacatttcgcaatgcggaaaaagatattatatctgaaatatgccaacaacgattaaaagttgtttctttaggtggaggagcatttttacaaaaggaaatacaagaaatttgtttaaactctagtattatattttatctcgatttgtcttgggatcgttggaaagaccgtatcgaacttttaatggaaagtcgaccagtacttcaaggcaagactatgaaggaaatgaaacaattatatgaagacagaaagccaatatatgagcaacatcattctagagtagatacagattatcatgagatagaagaagttgccgattatatcgccgaatcactaaaattagcatgggatatatatgaacctacttcatga

SEQ ID NO: 2216 - protein, 183 aa, Oceanobacillus iheyensis
MGKFPLREQSIVLIGFMGVGKTTIGKTVAKKLYRDFIDIDEEIEKRFKMPTKDIFRLYGEKTFRNAEKDIISEICQQRLKVVSLGGGAFLQKEIQEICLNSSIIFYLDLSWDRWKDRIELLMESRPVLQGKTMKEMKQLYEDRKPIYEQHHSRVDTDYHEIEEVADYIAESLKLAWDIYEPTS

SEQ ID NO: 2217 - DNA, 528 bp, Pasteurella multocida
  CDS (1)..(528)
atggcagaaaagcgtaatattttcttaattggaccaatgggcgcgggtaaaagtacgattggccgccaattagcacagctattaagtatggactttgtggattcggataatgaaattgaacaacgagcgggtgctgatattagttggatttttgatgttgaaggtgaagacggttttcgtaagcgtgaagaacgcattattaatgaattaacacaaagacaagggatcgtgttatctacaggtggtggcgcggtgttatcgaaagaaaatcgtaatcacttatcagcacggggtatcgtgatttatttagaaacgacggtagagaaacaatatcagcgtacacagcgtgataaaaaacgccctcttttgcaagaggttgaggatccccgtcaagtccttgaggatttagcaaaaattcgtaatcctttgtatgaagaaattgccgatatcaccttacctactgatgaacaaagcgctaaggtaatggcaacgcaaattgtcgatttaattgataatcttcacggttag

SEQ ID NO: 2218 - protein, 175 aa, Pasteurella multocida
MAEKRNIFLIGPMGAGKSTIGRQLAQLLSMDFVDSDNEIEQRAGADISWIFDVEGEDGFRKREERIINELTQRQGIVLSTGGGAVLSKENRNHLSARGIVIYLETTVEKQYQRTQRDKKRPLLQEVEDPRQVLEDLAKIRNPLYEEIADITLPTDEQSAKVMATQIVDLIDNLHG

SEQ ID NO: 2219 - DNA, 522 bp, Photorhabdus luminescens
  CDS (1)..(522)
atggcagagaaacgtaatatctttctggttgggcctatgggtgccggcaaaagcactattggtcgtcagttagctcagcaactcaatatggagttttacgactccgatcaagaaattgagcgacgtaccggagctgacgtgggctgggtattcgatgtggaaggcgaagaaggcttccgcgaacgcgaagaaaaagtgattaacgaactcacggaaaaacaaggcattgtactggcgactggcggaggttctgtgaaatccagagaaacccgcaatcgtctgtcagcccgtggggtcgtggtctacttggaaaccaccattgaaaaacagttagcacgcactcagcgcgataaaaaacgtcccttacttcaagttgatgcaccagcacgtgaagttttagaaaatttagcaaacgaacgtaatcctctgtatgaggaaattgctgatgtcactatccgtaccgatgaacagagcgctaaagttgtcgctaaccaaatcattgagttactggaaaaaaactga

SEQ ID NO: 2220 - protein, 173 aa, Photorhabdus luminescens
MAEKRNIFLVGPMGAGKSTIGRQLAQQLNMEFYDSDQEIERRTGADVGWVFDVEGEEGFREREEKVINELTEKQGIVLATGGGSVKSRETRNRLSARGVVVYLETTIEKQLARTQRDKKRPLLQVDAPAREVLENLANERNPLYEEIADVTIRTDEQSAKVVANQIIELLEKN

SEQ ID NO: 2221 - DNA, 519 bp, Pseudomonas putida
  CDS (1)..(519)
atgcgaaatttgatacttgtggggcccatgggcgctggtaaaagcaccatcggacgcctgttggccaaagagctgcgcctgctgttcaaggattccgacaaggaaatcgaactgcgatgcggcgcgaacatcccgtggatattcgacaaggaaggcgagccgggtttccgtgatcgcgagcaagcgatgattgccgagttgtgcgcgctcgacggtgtggtgctggccaccggcggtggcgcggtgatgcgcgaagccaaccggcaggcgctgcatcagggtggccgggtgatctacctgcatgcttcggtcgagcagcaagtcggccgcaccgcgcgcgaccgcaatcgcccgctgctgcgcacggccaatcccgaggcgaccttgcgcaccttgctggaaacccgcgacccgctctaccgcgagatcgccgacctggtggttgaaaccgacgagcggccaccacgcatggtggtgatcgatattctcgagcgcttgcagcagttgccgccccgttaa

SEQ ID NO: 2222 - protein, 172 aa, Pseudomonas putida
MRNLILVGPMGAGKSTIGRLLAKELRLLFKDSDKEIELRCGANIPWIFDKEGEPGFRDREQAMIAELCALDGVVLATGGGAVMREANRQALHQGGRVIYLHASVEQQVGRTARDRNRPLLRTANPEATLRTLLETRDPLYREIADLVVETDERPPRMVVIDILERLQQLPPR

SEQ ID NO: 2223 - DNA, 519 bp, Pseudomonas syringae
  CDS (1)..(519)
atgcgaaatttaatacttgtggggccgatgggtgctggcaaaagcaccatcggccgcttgcttgccaaagagttgcgactgccgttcaaggattccgacaaggaaatcgagctgcgcacgggcgccaacatcccctggatcttcgacaaggagggcgaaccgggtttccgggagcgcgagcaggccatgattgccgagttgtgcgaagccgatggcgtggttctggccactggcggcggcgcagtcatgcgcactgaaaaccgtcaggcgctgcgtgccggtgggcgtgtggtgtatctgcatgcctctatcgaacagcaggtcgggcgcaccgcgcgtgaccgaaatcgtcctttgttgcgtactgccgatccggcccgggtgctgagcgaattgctggccatccgcgacccgctgtatcgggaaatcgccgacgtggtgatcgaaaccgatgagcggccaccccgaatggtggttctcgagatactggcgcgccttgcagagcttcctccccgttaa

SEQ ID NO: 2224 - protein, 172 aa, Pseudomonas syringae
MRNLILVGPMGAGKSTIGRLLAKELRLPFKDSDKEIELRTGANIPWIFDKEGEPGFREREQAMIAELCEADGVVLATGGGAVMRTENRQALRAGGRVVYLHASIEQQVGRTARDRNRPLLRTADPARVLSELLAIRDPLYREIADVVIETDERPPRMVVLEILARLAELPPR

SEQ ID NO: 2225 - DNA, 516 bp, Shewanella oneidensis
  CDS (1)..(516)
atggctgaaaaacgtaatatttttctggtaggcccaatgggcgcaggtaaaagcacaattggtcgccatctggcccaaatgctgcatttagaattccacgattcagatcaagagattgagcaacgcactggcgctgatattgcttgggtgtttgatgttgaaggcgaagaaggtttccgccgtcgtgaggctcaggttattgctgatctgtctgaaaaacagggtattgtccttgccactggtggtggttcagttcagagcaaagatatccgtaatcatttatctgctcgcggtattgtggtttatctcgaaaccactatcgacaaacaggtagcgcgaactcaacgagacaagcgccgcccattactgcaagtagatgatccgcgagaagtattagagagcctcgcagaaatccgtaaccctctgtacgaagaaattgctgatgtggtcgttaaaactgacgatcaaagtgcaaaggtagttgcgaatcaaatcatagagaaattaggtttctag

SEQ ID NO: 2226 - protein, 171 aa, Shewanella oneidensis
MAEKRNIFLVGPMGAGKSTIGRHLAQMLHLEFHDSDQEIEQRTGADIAWVFDVEGEEGFRRREAQVIADLSEKQGIVLATGGGSVQSKDIRNHLSARGIVVYLETTIDKQVARTQRDKRRPLLQVDDPREVLESLAEIRNPLYEEIADVVVKTDDQSAKVVANQIIEKLGF

SEQ ID NO: 2227 - DNA, 519 bp, Staphylococcus epidermidis
  CDS (7)..(519)
attaatatgaagagtattcaagtgcctattattttagttggtttcatgggaactggtaaaactactgttggaaaatatctttcagatttatataatttaagttatgtggatttagataattttattgaagtaaatgaatgtaaatctatacctaatatatttaatgatatcggagaaaaaggatttagatcattggagactagatacctaaaatcttgtctcaatactttcgatattatttcaactggaggaggtattatagaagatacgaattcattaaagctcttaaaaaatcaaaagcatgtagtttggctagactgtgacattgaaatcattttcaaacgagttaaaaatgattcacatagacccaatgctaaaagtaaaaatcttaaccaacttgatgccttgtattcttcaagactttcaagatataatgaaatcgcattcatgaaagttgatagtgcacagagtgtttctgaaatttgcactttaattaaaacaaaattattaagcgattga

SEQ ID NO: 2228 - protein, 170 aa, Staphylococcus epidermidis
MKSIQVPIILVGFMGTGKTTVGKYLSDLYNLSYVDLDNFIEVNECKSIPNIFNDIGEKGFRSLETRYLKSCLNTFDIISTGGGIIEDTNSLKLLKNQKHVVWLDCDIEIIFKRVKNDSHRPNAKSKNLNQLDALYSSRLSRYNEIAFMKVDSAQSVSEICTLIKTKLLSD

SEQ ID NO: 2229 - DNA, 552 bp, Synechococcus elongatus
  CDS (1)..(552)
atgaaactgcaagaacgtcttgggggagccaatatctatcttgtgggcatgatgggtgctggtaaaaccaccacgggtcgcctcctggcccaacgcttgggctatagttttgtggataccgatgctgtgattacggcgtttcgccaacgaccgattcgcgaaatctttgcccaagagggggagcctgcctttcgggagttggagcaacaggtcctagcacaggtctctagttaccatcacttagtggtggccaccggtgggggcattgtcctcaacccgatgaactggagttatctgcatcacggtattgtggtctggcttcatgtcccccttgcggtgctctgtcaacgcctgcgccaagatcgggaacgtcccctgttgcaggagcagcctcttgaggaacgcttgggtgaactgctgcaggcgcgtcaacacctctatgctcaggcagatttagagctcaggattacgctggaagataccccggaaacggtgtgcgatcgcctgttggaaaccctaccctgtatcttgaaaccaatggaaccatgctag

SEQ ID NO: 2230 - protein, 183 aa, Synechococcus elongatus
MKLQERLGGANIYLVGMMGAGKTTTGRLLAQRLGYSFVDTDAVITAFRQRPIREIFAQEGEPAFRELEQQVLAQVSSYHHLVVATGGGIVLNPMNWSYLHHGIVVWLHVPLAVLCQRLRQDRERPLLQEQPLEERLGELLQARQHLYAQADLELRITLEDTPETVCDRLLETLPCILKPMEPC

SEQ ID NO: 2231 - DNA, 519 bp, Vibrio parahaemolyticus
  CDS (1)..(519)
atggctgagaaacgtaatattttccttgttggcccaatgggcgccggcaaaagtacaattggtagacatctagcacagcaactgcatatggagtttgttgactccgatacagtgattgaagaacgcactggtgcagacatctcttgggtttttgatgtagaaggtgaagaaggcttccgtaagcgtgaagaagcggtacttgaagatctgactcaagaacaaggcatcgtgctggcaactggcggcggctctgtgaaaagcaaagagaaccgtaaccgtctttctgctcgcggtgtagttgtttacctagaaacgacaattgaaaagcaacttgcacgtactaaccgtgacaagaagcgtcctctacttcaaacggacaaccctcgtgaagtattggagcaattagctgaagaacgtaacccgttatacgaagaagtagcggattacactgttcgcactgacgatcaaagtgcaaaagtggtagccaaccagatcgtaaaaatgctagaagagagataa

SEQ ID NO: 2232 - protein, 172 aa, Vibrio parahaemolyticus
MAEKRNIFLVGPMGAGKSTIGRHLAQQLHMEFVDSDTVIEERTGADISWVFDVEGEEGFRKREEAVLEDLTQEQGIVLATGGGSVKSKENRNRLSARGVVVYLETTIEKQLARTNRDKKRPLLQTDNPREVLEQLAEERNPLYEEVADYTVRTDDQSAKVVANQIVKMLEER

SEQ ID NO: 2233 - DNA, 519 bp, Vibrio vulnificus
  CDS (1)..(519)
atggctgagaaacgtaatattttccttgttggcccaatgggcgctggcaaaagcacaattggtcgatacctagctcaacaactccacatggagtttttggattctgatactgttattgaagagcgcacaggcgctgacatctcttgggtatttgatgttgaaggtgaagagggtttccgcaaacgtgaagaagcggttatcaacgatctgacactagagcagggtatcgtattggcaacgggcggtggctcggtgaaaagccgcgaaaaccgcaatcgtctttctgcacgtggtattgtggtatacctagaaacgactatcgagaaacagctagctcgtactaaccgtgacaaaaaacgtccgttactacaaacggataatccacgtgaagtactagaatcactggctggtgagcgtaaccctctttacgaagagatcgcggattacaccgttcgcactgacgatcaaagtgcaaaagtggtagccaaccagatcgtaaaaatgctagaagaaagctaa

SEQ ID NO: 2234 - protein, 172 aa, Vibrio vulnificus
MAEKRNIFLVGPMGAGKSTIGRYLAQQLHMEFLDSDTVIEERTGADISWVFDVEGEEGFRKREEAVINDLTLEQGIVLATGGGSVKSRENRNRLSARGIVVYLETTIEKQLARTNRDKKRPLLQTDNPREVLESLAGERNPLYEEIADYTVRTDDQSAKVVANQIVKMLEES

SEQ ID NO: 2235 - DNA, 522 bp, Wigglesworthia glossinidia brevipalpis
  CDS (1)..(522)
atggtagaaaaaagaaatatttttttaattggtcctatgggagctggaaaaagcaccattggaagacaaatatctcagcaactaagcatggaattttttgattctgaccaagaaatagaaaaaagaacaggagcagatatatcttgggtattagacttagaaggagaaaataaatttagaattagagaagaaaaaataataaatgagattacagaaaaacaaggaattgttcttgcaactggaggaggatcaattcaatctagaaaaactagaaatcgtttatctgctagaggtcttgtagtttatttagaaacaactatagataaacaattagatagaactaaaagagataaaaaaaaaccaattttacaaaataaaaattctgttaaatcttttttagaaaaattagcgacagaaagaaatcctctatatgaggacatagcagatttaattataaaaacagattttaaaagcgcaaaaataatagcacatcaaataattaatactttgtttaaaacttaa

SEQ ID NO: 2236 - protein, 173 aa, Wigglesworthia glossinidia brevipalpis
MVEKRNIFLIGPMGAGKSTIGRQISQQLSMEFFDSDQEIEKRTGADISWVLDLEGENKFRIREEKIINEITEKQGIVLATGGGSIQSRKTRNRLSARGLVVYLETTIDKQLDRTKRDKKKPILQNKNSVKSFLEKLATERNPLYEDIADLIIKTDFKSAKIIAHQIINTLFKT

SEQ ID NO: 2237 - DNA, 543 bp, Xylella fastidiosa
  CDS (1)..(543)
atgaatcccgcccctaatcttgtgatgatcggcccgatgggcgccggaaaaagctccatcggacgacgcattgccaaacacttcaacctacacttcgcagatacagatcacgccattgttgaacgcgccggtacgagcatctccactattttcaaatattccggcgaaccagaatttcgacgcctggagcgtgaagtactgtacgacttgctgaatcacgaaaaccgactcatcgccaccggcggcggtacgatcctggatccagagaaccgccaccgcatgcaaaaacgcggcttcgtcgtatttctaaagatcaacgtgaacacccaattggagcgactggcacatgaccgctaccgaccattactgcaacaaatcgaccgcaaacaggtactgagcgatctctacgccacacgccaaccgctctaccagaaaatcgcagatatgattgtgaccaccgaccacatgtcccctaacacagccaccgcccagctcattctggacttaacagcccactggcagaaatcaagcaacaccgcatga

SEQ ID NO: 2238 - protein, 180 aa, Xylella fastidiosa
MNPAPNLVMIGPMGAGKSSIGRRIAKHFNLHFADTDHAIVERAGTSISTIFKYSGEPEFRRLEREVLYDLLNHENRLIATGGGTILDPENRHRMQKRGFVVFLKINVNTQLERLAHDRYRPLLQQIDRKQVLSDLYATRQPLYQKIADMIVTTDHMSPNTATAQLILDLTAHWQKSSNTA

SEQ ID NO: 2239 - DNA, 22 bp, Artificial sequence
  Primer sequence
atggtagcaaggcagcgcgctt

SEQ ID NO: 2240 - DNA, 25 bp, Artificial sequence
  Primer sequence
ttagttgctttccagcatgtgaata

SEQ ID NO: 2241 - DNA, 1113 bp, Saccharomyces cerevisiae; identical to SEQ ID NO: 1363
  CDS (1)..(1113)

SEQ ID NO: 2242 - protein, 370 aa, Saccharomyces cerevisiae; identical to SEQ ID NO: 1364

SEQ ID NO: 2243 - DNA, 1086 bp, Deinococcus radiodurans; identical to SEQ ID NO: 1327
  CDS (1)..(1086)

SEQ ID NO: 2244 - protein, 361 aa, Deinococcus radiodurans; identical to SEQ ID NO: 1328

SEQ ID NO: 2245 - DNA, 1071 bp, Salmonella enterica subsp. enterica serovar Typhi
  CDS (1)..(1071)
atgcaaaaagacgcgctgaataacgtacgtatcaccgatgaacaggtattaatgacgccggagcagcttaaagcggcctttcccttgagcctggcgcaggaagcgcagatagcgcagtcccggggaatcatttctgacattattgccgggcgcgatccgcgtctgttggtggtatgcggtccttgttctattcacgatcctgaaaccgctctggaatatgcccgtcgatttaaagcccttgccgcagaggtcagcgatagcctctatctggtaatgcgcgtctattttgaaaagccgcgaactaccgtcggctggaaagggctgattaacgatcctcacatggatggctcatttgatgtggaagccgggttgaaaatagcgcgtcagctactggtggaactggtgaatatggggttgccattggcgaccgaagcgttggatccgaacagcccgcaatacctgggcgatctgtttagctggtcggcgataggggcgcgcacaaccgaatcgcaaacccaccgcgaaatggcgtctggtctttctatgccggtcggctttaaaaacggcacggatggcagcctggcgacagcgattaacgccatgcgcgccgctgcgcaacctcatcgttttgttggcattaaccaggccggtcaggttgcgttattgcaaacccagggaaatccgcatggccatgtgattctgcgtggcggcaaagcgccaaactatagcccggcagatgtcgctcagtgtgaaaaagagatggaacaggcgggactacgtccttcgctgatggtagattgcagtcatggtaactccaataaagattatcgccgccagccagccgttgccgaatctgtggttgcgcagattaaagatggcaatcgttcaatcattggcttaatgattgaaagtaatattcatgagggtaaccagtcttccgaacagccgcgcagcgaaatgaagtatggcgtttccgtcaccgatgcttgtattagctgggagatgaccgatgccctgttacgtgaaattcataaagatttgagcggccagctggcggtgcgcgtcgcataa

SEQ ID NO: 2246 - protein, 356 aa, Salmonella enterica subsp. enterica serovar Typhi
MQKDALNNVRITDEQVLMTPEQLKAAFPLSLAQEAQIAQSRGIISDIIAGRDPRLLVVCGPCSIHDPETALEYARRFKALAAEVSDSLYLVMRVYFEKPRTTVGWKGLINDPHMDGSFDVEAGLKIARQLLVELVNMGLPLATEALDPNSPQYLGDLFSWSAIGARTTESQTHREMASGLSMPVGFKNGTDGSLATAINAMRAAAQPHRFVGINQAGQVALLQTQGNPHGHVILRGGKAPNYSPADVAQCEKEMEQAGLRPSLMVDCSHGNSNKDYRRQPAVAESVVAQIKDGNRSIIGLMIESNIHEGNQSSEQPRSEMKYGVSVTDACISWEMTDALLREIHKDLSGQLAVRVA

SEQ ID NO: 2247 - DNA, 1071 bp, Yersinia pestis
  CDS (1)..(1071)
atgcaaaaagactcgctcaataacgtccatatcagtgccgaacaaatcctgataaccccggaagaactgaaaaatcagtttccactgagcgaaaatgatcagtattcgatagagcgcgcacgtaaaaccattgctgacattattcaggggcgagatccgcgtctgttggtcgtttgtgggccctgttcaattcatgatgtggatgcggcactggattacgcgcgtcgtttgaaaaaactctctgtggaattggatgacagcttatatatcgttatgcgtgtctattttgagaagccaagaactaccgtgggttggaaaggcctgatcaatgaccctgcaatggatggttcatttgatgtagaggcaggtttacacattgcccgtcgtttattgctggatttagtgggcatggggttgccgttagcgactgaagctctggatcctaatagcccacaatatttaggtgacctgttcagttggtcggccattggtgcccgtacaacggagtcacagacccaccgtgaaatggcatcaggcttgtctatgccggttggatttaaaaatggcactgacggtagcctaggcacggcaatcaatgcaatgcgcgccgctgccatgccacatcgctttatggggatcaatcagtcgggccaggtctgcctgttacaaactcagggtaacccacacggccatgtcattctacggggaggtaaaacaccaaactacagtgcacaagatgtcgctcagtgtgaaaaacagatgcaggatgcgggactcatcccatccttaatgatagattgcagtcacggtaattcaaataaagactaccgccgtcaggttgcggtggctgaatctgtggttgaacagatcaaggcgggcaatcgttcaattacaggtgtgatgctggaaagccacatccacgaaggaaatcagtcatctgaacagccacgtgctgatatgcgctacggtgtttctgtgactgacgcctgtattaactgggaaagcactgaaaccctgttacgtggtatgcgccaagaattgcttgcagcactgacggcacggactgcatga

SEQ ID NO: 2248 - protein, 356 aa, Yersinia pestis
MQKDSLNNVHISAEQILITPEELKNQFPLSENDQYSIERARKTIADIIQGRDPRLLVVCGPCSIHDVDAALDYARRLKKLSVELDDSLYIVMRVYFEKPRTTVGWKGLINDPAMDGSFDVEAGLHIARRLLLDLVGMGLPLATEALDPNSPQYLGDLFSWSAIGARTTESQTHREMASGLSMPVGFKNGTDGSLGTAINAMRAAAMPHRFMGINQSGQVCLLQTQGNPHGHVILRGGKTPNYSAQDVAQCEKQMQDAGLIPSLMIDCSHGNSNKDYRRQVAVAESVVEQIKAGNRSITGVMLESHIHEGNQSSEQPRADMRYGVSVTDACINWESTETLLRGMRQELLAALTARTA

SEQ ID NO: 2249 - DNA, 1047 bp, Yersinia pestis; identical to SEQ ID NO: 1331
  CDS (1)..(1047)

SEQ ID NO: 2250 - protein, 348 aa, Yersinia pestis; identical to SEQ ID NO: 1332

SEQ ID NO: 2251 - DNA, 1053 bp, Escherichia coli
  CDS (1)..(1053)
atgaattatcagaacgacgatttacgcatcaaagaaatcaaagagttacttcctcctgtcgcattgctggaaaaattccccgctactgaaaatgccgcgaatacggttgcccatgcccgaaaagcgatccataagatcctgaaaggtaatgatgatcgcctgttggttgtgattggcccatgctcaattcatgatcctgtcgcggcaaaagagtatgccactcgcttgctggcgctgcgtgaagagctgaaagatgagctggaaatcgtaatgcgcgtctattttgaaaagccgcgtaccacggtgggctggaaagggctgattaacgatccgcatatggataatagcttccagatcaacgacggtctgcgtatagcccgtaaattgctgcttgatattaacgacagcggtctgccagcggcaggtgagtttctcgatatgatcaccccacaatatctcgctgacctgatgagctggggcgcaattggcgcacgtaccaccgaatcgcaggtgcaccgcgaactggcatcagggctttcttgtccggtcggcttcaaaaatggcaccgacggtacgattaaagtggctatcgatgccattaatgccgccggtgcgccgcactgcttcctgtccgtaacgaaatgggggcattcggcgattgtgaataccagcggtaacggcgattgccatatcattctgcgcggcggtaaagagcctaactacagcgcgaagcacgttgctgaagtgaaagaagggctgaacaaagcaggcctgccagcacaggtgatgatcgatttcagccatgctaactcgtccaaacaattcaaaaagcagatggatgtttgtgctgacgtttgccagcagattgccggtggcgaaaaggccattattggcgtgatggtggaaagccatctggtggaaggcaatcagagcctcgagagcggggagccgctggcctacggtaagagcatcaccgatgcctgcatcggctgggaagataccgatgctctgttacgtcaactggcgaatgcagtaaaagcgcgtcgcgggtaa

SEQ ID NO: 2252 - protein, 350 aa, Escherichia coli; identical to SEQ ID NO: 1580

SEQ ID NO: 2253 - DNA, 1071 bp, Escherichia coli; identical to SEQ ID NO: 1333
  CDS (1)..(1071)

SEQ ID NO: 2254 - protein, 356 aa, Escherichia coli; identical to SEQ ID NO: 1334

SEQ ID NO: 2255 - DNA, 1131 bp, Nostoc sp. PCC 7120; identical to SEQ ID NO: 1335
  CDS (1)..(1131)

SEQ ID NO: 2256 - protein, 376 aa, Nostoc sp. PCC 7120; identical to SEQ ID NO: 1336

SEQ ID NO: 2257 - DNA, 1053 bp, Salmonella enterica subsp. enterica serovar Typhi; identical to SEQ ID NO: 1337
  CDS (1)..(1053)

SEQ ID NO: 2258 - protein, 350 aa, Salmonella enterica subsp. enterica serovar Typhi; identical to SEQ ID NO: 1338

SEQ ID NO: 2259 - DNA, 1077 bp, Pseudomonas aeruginosa; identical to SEQ ID NO: 1339
  CDS (1)..(1077)

SEQ ID NO: 2260 - protein, 358 aa, Pseudomonas aeruginosa; identical to SEQ ID NO: 1340

SEQ ID NO: 2261 - DNA, 1074 bp, Vibrio cholerae; identical to SEQ ID NO: 1343
  CDS (1)..(1074)

SEQ ID NO: 2262 - protein, 357 aa, Vibrio cholerae; identical to SEQ ID NO: 1344

SEQ ID NO: 2263 - DNA, 1038 bp, Lactococcus lactis subsp. lactis; identical to SEQ ID NO: 1345
  CDS (1)..(1038)

SEQ ID NO: 2264 - protein, 345 aa, Lactococcus lactis subsp. lactis; identical to SEQ ID NO: 1346

SEQ ID NO: 2265 - DNA, 1023 bp, Lactococcus lactis subsp. lactis; identical to SEQ ID NO: 1347
  CDS (1)..(1023)

SEQ ID NO: 2266 - protein, 340 aa, Lactococcus lactis subsp. lactis; identical to SEQ ID NO: 1348

SEQ ID NO: 2267 - DNA, 1032 bp, Streptococcus pneumoniae; identical to SEQ ID NO: 1349
  CDS (1)..(1032)

SEQ ID NO: 2268 - protein, 343 aa, Streptococcus pneumoniae; identical to SEQ ID NO: 1350

SEQ ID NO: 2269 - DNA, 1056 bp, Neisseria meningitidis
  CDS (1)..(1056)
atgacacaccattaccccacagacgatattaagattaaagaagttaaagagttgttgccgccgatagcccatctttacgagctgccgatttccaaagaggcttcgggcttggttcaccgcacccgtcaggaaatttccgatttggttcacggcagggacaagcggctgttggttattatcgggccgtgttcgattcacgatccgaaagcggcgttggaatatgcggagcgtttgttgaaactccgcaagcagtatgaaaacgagcttttgattgtgatgcgcgtttatttcgagaagccgaggacgacggtgggttggaaaggtttgattaacgacccgcatttggacggtacgtttgacatcaatttcggtttgcgtcaggcgcgcagcctgttgttgtcgctgaacaatatgggtatgcctgcctctaccgagtttttggatatgattacgccgcaatattatgcggacttgatttcttggggggcaatcggtgcgcggacgaccgaaagccaagttcaccgcgaattggcaagcgggctgtcctgccccgtcggctttaaaaacggtacggacggcaatttgaagattgccatcgacgcaatcggtgcggcgagccattcgcatcatttcctgtctgtaaccaaggccgggcattccgccattgtccataccggcggcaatcccgactgtcatgtcattttgcgcggcggcaaagagccgaattatgatgcggaacacgtcagcgaggcggcggaacaactgcgtgcggcaggggtaaccgacaagctgatgatagattgcagccacgccaacagccgcaaggattacactcggcagatggaagtggcacaagacattgccgcccaattggaacaggacggcggcaatatcatgggcgtgatggtggaaagccatttggtcgaaggcagacaggacaagccggaagtgtacggcaagagcattaccgatgcgtgtatcggttggggcgcgactgaagaactgttggcattgttggcaggtgcaaacaaaaaacgtatggcgcgcgccagttga

SEQ ID NO: 2270 - protein, 351 aa, Neisseria meningitidis
MTHHYPTDDIKIKEVKELLPPIAHLYELPISKEASGLVHRTRQEISDLVHGRDKRLLVIIGPCSIHDPKAALEYAERLLKLRKQYENELLIVMRVYFEKPRTTVGWKGLINDPHLDGTFDINFGLRQARSLLLSLNNMGMPASTEFLDMITPQYYADLISWGAIGARTTESQVHRELASGLSCPVGFKNGTDGNLKIAIDAIGAASHSHHFLSVTKAGHSAIVHTGGNPDCHVILRGGKEPNYDAEHVSEAAEQLRAAGVTDKLMIDCSHANSRKDYTRQMEVAQDIAAQLEQDGGNIMGVMVESHLVEGRQDKPEVYGKSITDACIGWGATEELLALLAGANKKRMARAS

SEQ ID NO: 2271 - DNA, 1095 bp, Pseudomonas aeruginosa; identical to SEQ ID NO: 1351
  CDS (1)..(1095)

SEQ ID NO: 2272 - protein, 364 aa, Pseudomonas aeruginosa; identical to SEQ ID NO: 1352

SEQ ID NO: 2273 - DNA, 1032 bp, Streptococcus pneumoniae; identical to SEQ ID NO: 1355
  CDS (1)..(1032)

SEQ ID NO: 2274 - protein, 343 aa, Streptococcus pneumoniae; identical to SEQ ID NO: 1356

SEQ ID NO: 2275 - DNA, 1143 bp, Xylella fastidiosa; identical to SEQ ID NO: 1603
  CDS (1)..(1143)

SEQ ID NO: 2276 - protein, 380 aa, Xylella fastidiosa; identical to SEQ ID NO: 1604

SEQ ID NO: 2277 - DNA, 1047 bp, Buchnera aphidicola; identical to SEQ ID NO: 1357
  CDS (1)..(1047)

SEQ ID NO: 2278 - protein, 348 aa, Buchnera aphidicola; identical to SEQ ID NO: 1358

SEQ ID NO: 2279 - DNA, 1104 bp, Corynebacterium glutamicum
  CDS (1)..(1104)
atgagttctccagtctcactcgaaaacgcggcgtcaaccagcaacaagcgcgtagtggctttccacgagctgccaagccctacagatctcatcgccgcaaacccactgacaccaaagcaggcttccaaggtggagcaggatcgccaggacatcgctgatatcttcgctggcgacgatgaccgcctcgttgtcgttgtgggaccttgctcagttcacgatcctgaagcagccatcgattacgcaaaccgcctggctccgctggcaaagcgccttgaccaggacctcaagattgtcatgcgcgtgtacttcgagaagcctcgcaccaccgtcggttggaagggattgatcaacgatcctcaccttaacgaaacctacgacatcccagagggcttgcgcattgcgcgtaaagtgcttatcgacgttgtgaaccttgatctcccagtcggctgcgaattcctcgaaccaaacagccctcagtactacgccgacactgtcgcatggggagcaatcggcgctcgtaccaccgaatctcaggtgcaccgccgccagctggcttctgggatgtctatgccaattggtttcaagaacggaactgacggaaacatccaggttgcagtcgacgcggtacaggctgcccagaacccacacttcttcttcggaacctccgacgacggcgcgctgagcgtcgtggagaccgcaggcaacagcaactcccacatcattttgcgcggcggtacctccggcccgaatcatgatgcagcttcggtggaggccgtcgtcgagaagcttggtgaaaatgctcgtctcatgatcgatgcgtcccacgccaactccggcaaggatcacatccgacaggttgaggttgttcgtgaaatcgcagagcagatttctggcggttctgaggctgtggcaggaatcatgatcgaatccttcctcgttggtggcgcacagaaccttgatcctgcgaaattgcgcatcaacggcggtgaaggcctggtgtacggacagtctgtgaccgataagtgcatcgatattgacaccaccatcgatttgctcgctgagctggccacagcagtaagggaacgccgagcagcagccaagtaa

SEQ ID NO: 2280 - protein, 367 aa, Corynebacterium glutamicum
MSSPVSLENAASTSNKRVVAFHELPSPTDLIAANPLTPKQASKVEQDRQDIADIFAGDDDRLVVVVGPCSVHDPEAAIDYANRLAPLAKRLDQDLKIVMRVYFEKPRTTVGWKGLINDPHLNETYDIPEGLRIARKVLIDVVNLDLPVGCEFLEPNSPQYYADTVAWGAIGARTTESQVHRRQLASGMSMPIGFKNGTDGNIQVAVDAVQAAQNPHFFFGTSDDGALSVVETAGNSNSHIILRGGTSGPNHDAASVEAVVEKLGENARLMIDASHANSGKDHIRQVEVVREIAEQISGGSEAVAGIMIESFLVGGAQNLDPAKLRINGGEGLVYGQSVTDKCIDIDTTIDLLAELATAVRERRAAAK

SEQ ID NO: 2281 - DNA, 1089 bp, Haemophilus influenzae; identical to SEQ ID NO: 1359
  CDS (1)..(1089)

SEQ ID NO: 2282 - protein, 362 aa, Haemophilus influenzae; identical to SEQ ID NO: 1360

SEQ ID NO: 2283 - DNA, 1502 bp, Candida albicans; identical to SEQ ID NO: 1361
  CDS (336)..(1442)

SEQ ID NO: 2284 - protein, 368 aa, Candida albicans; identical to SEQ ID NO: 1362

SEQ ID NO: 2285 - DNA, 2048 bp, Saccharomyces cerevisiae; identical to SEQ ID NO: 1365
  CDS (619)..(1731)

SEQ ID NO: 2286 - protein, 370 aa, Saccharomyces cerevisiae; identical to SEQ ID NO: 1366

SEQ ID NO: 2287 - DNA, 1107 bp, Schizosaccharomyces pombe; identical to SEQ ID NO: 1367
  CDS (1)..(1107)

SEQ ID NO: 2288 - protein, 368 aa, Schizosaccharomyces pombe; identical to SEQ ID NO: 1368

SEQ ID NO: 2289 - DNA, 1089 bp, Amycolatopsis orientalis; identical to SEQ ID NO: 1369
  CDS (1)..(1089)

SEQ ID NO: 2290 - protein, 362 aa, Amycolatopsis orientalis; identical to SEQ ID NO: 1370

SEQ ID NO: 2291 - DNA, 1119 bp, Schizosaccharomyces pombe; identical to SEQ ID NO: 1371
  CDS (1)..(1119)

SEQ ID NO: 2292 - protein, 372 aa, Schizosaccharomyces pombe; identical to SEQ ID NO: 1372

SEQ ID NO: 2293 - DNA, 1083 bp, Methylophilus methylotrophus; identical to SEQ ID NO: 1375
  CDS (1)..(1083)

SEQ ID NO: 2294 - protein, 360 aa, Methylophilus methylotrophus; identical to SEQ ID NO: 1376

SEQ ID NO: 2295 - DNA, 1770 bp, Debaryomyces hansenii
  CDS (1)..(1770)
atggagtcctcgatcgatatgaatgaagaattaaaaaagctaaaatcacataaggatgcgacttttcaattggatgcaaaagaagcagtcagctctgcttgtgaaccagaaaacaaatcaacctgtgaaaccactgtggaaacgaatgatattgaaagcgatattgaaggagaaccaaaatatggtacagtggacaattcgcaacaattgatggatcaattgaataagctcaaaataatgctggaacaggactcggctaaagtttcttcgtcgaatacgagctcgggaggatcgtcgtcggtgagtttggcacccaaatggatttatggtacaacattgcctcctttgaacgcttcaagaaataattattcgtcggcttcgggcttgtgtctaagcgagcgaggtcaagtggctgtagcgcagcccgagcttattcagaacttcttatttccaaccacaactttgttgcaacaaaaggttgtgaaatacagggaaagtattggaaatatattatcggcggatataattagtaaaaaaagtgcttttaagaatcccttgcttgttattacaggaccaagtttcattaccgatgctaatcaagctaaggcatgtgcacaatgggtgggaagcatgaatggaaaaaaatttcatgatttgcctaatgggatattgcccgatagtatattaggtttgtaccacaggtccaatagactagaacttaagaatatattgttgtctttgagaacaaatttaacaaagtacaaccatggttacaatgatccatcgtttttgagaggcttcaactcaatcatgacatacgagattgaacaaggaattccaatatgtagggcgttactttgcgagttagcagaaatttgtcccatagttggtgagacttcagacacaattacacctcagtacttctctgatctattttgtttaggtattgtcagtagtaaattgagagaatcacaattacaccgagaattagtatcaggtgtctcttacgctgtcggtttccacaccctggatgatacactgtgctttgataaagaatcttatacccataatatcacctcggctttggaagcaatgtatgcttcttctaatccccatcaatttttatccgtcactaaaatcggaacagttgcagttgtcgggactattggtaacgacgagacatctattatactactgataaatcttgaattagactactatgaaatcgaacatattattgaccaggtgtatgattattctaagtcaaatataaaaagaccaaaaattatgttagatgttggaaaaatatccaatgaagaatatgaatcaaaattagacctattaagacaacttctcgttctgaataccgatttaaaatacaaaattatcggcgtgatcatagatagtggtaacaactatatttcgcatcgttatacaattgatttaaataagccatttggtgtaaatgaagactttgaaaaccaagattatatcactgacgatgatatcgaaaggaataaaaacgataacgataagtctgaaaacagtatgaaccatcaaatgttaattggcttgaataattattttgtcaaaaataggatatacggtaaaatgtctccttcacgccaatcccaacaaagaccaagttctgagcttgactttgactcttcgttgatacacttggataagtattatgaatattttgttaatgcagataagttcatccaggaactagatgacatgagtagccttcgaatcaactctcaatga

SEQ ID NO: 2296 - protein, 589 aa, Debaryomyces hansenii
MESSIDMNEELKKLKSHKDATFQLDAKEAVSSACEPENKSTCETTVETNDIESDIEGEPKYGTVDNSQQLMDQLNKLKIMLEQDSAKVSSSNTSSGGSSSVSLAPKWIYGTTLPPLNASRNNYSSASGLCLSERGQVAVAQPELIQNFLFPTTTLLQQKVVKYRESIGNILSADIISKKSAFKNPLLVITGPSFITDANQAKACAQWVGSMNGKKFHDLPNGILPDSILGLYHRSNRLELKNILLSLRTNLTKYNHGYNDPSFLRGFNSIMTYEIEQGIPICRALLCELAEICPIVGETSDTITPQYFSDLFCLGIVSSKLRESQLHRELVSGVSYAVGFHTLDDTLCFDKESYTHNITSALEAMYASSNPHQFLSVTKIGTVAVVGTIGNDETSIILLINLELDYYEIEHIIDQVYDYSKSNIKRPKIMLDVGKISNEEYESKLDLLRQLLVLNTDLKYKIIGVIIDSGNNYISHRYTIDLNKPFGVNEDFENQDYITDDDIERNKNDNDKSENSMNHQMLIGLNNYFVKNRIYGKMSPSRQSQQRPSSELDFDSSLIHLDKYYEYFVNADKFIQELDDMSSLRINSQ

SEQ ID NO: 2297 - DNA, 1107 bp, Debaryomyces hansenii; identical to SEQ ID NO: 1377
  CDS (1)..(1107)

SEQ ID NO: 2298 - protein, 368 aa, Debaryomyces hansenii; identical to SEQ ID NO: 1378

SEQ ID NO: 2299 - DNA, 1074 bp, Yarrowia lipolytica; identical to SEQ ID NO: 1379
  CDS (1)..(1074)

SEQ ID NO: 2300 - protein, 357 aa, Yarrowia lipolytica; identical to SEQ ID NO: 1380

SEQ ID NO: 2301 - DNA, 1089 bp, Yarrowia lipolytica; identical to SEQ ID NO: 1381
  CDS (1)..(1089)

SEQ ID NO: 2302 - protein, 362 aa, Yarrowia lipolytica; identical to SEQ ID NO: 1382

SEQ ID NO: 2303 - DNA, 1119 bp, Kluyveromyces lactis; identical to SEQ ID NO: 1383
  CDS (1)..(1119)

SEQ ID NO: 2304 - protein, 372 aa, Kluyveromyces lactis; identical to SEQ ID NO: 1384

SEQ ID NO: 2305 - DNA, 1095 bp, Kluyveromyces lactis; identical to SEQ ID NO: 1385
  CDS (1)..(1095)

SEQ ID NO: 2306 - protein, 364 aa, Kluyveromyces lactis; identical to SEQ ID NO: 1386

SEQ ID NO: 2307 - DNA, 1074 bp, Erwinia carotovora subsp; identical to SEQ ID NO: 1387
  CDS (1)..(1074)

SEQ ID NO: 2308 - protein, 357 aa, Erwinia carotovora subsp; identical to SEQ ID NO: 1388

SEQ ID NO: 2309 - DNA, 1047 bp, Erwinia carotovora subsp; identical to SEQ ID NO: 1389
  CDS (1)..(1047)

SEQ ID NO: 2310 - protein, 348 aa, Erwinia carotovora subsp; identical to SEQ ID NO: 1390

SEQ ID NO: 2311 - DNA, 1056 bp, Erwinia carotovora subsp; identical to SEQ ID NO: 1391
  CDS (1)..(1056)

SEQ ID NO: 2312 - protein, 351 aa, Erwinia carotovora subsp; identical to SEQ ID NO: 1392

SEQ ID NO: 2313 - DNA, 1113 bp, Acinetobacter sp; identical to SEQ ID NO: 1393
  CDS (1)..(1113)

SEQ ID NO: 2314 - protein, 370 aa, Acinetobacter sp; identical to SEQ ID NO: 1394

SEQ ID NO: 2315 - DNA, 1056 bp, Acinetobacter sp; identical to SEQ ID NO: 1395
  CDS (1)..(1056)

SEQ ID NO: 2316 - protein, 351 aa, Acinetobacter sp; identical to SEQ ID NO: 1396

SEQ ID NO: 2317 - DNA, 1119 bp, Candida glabrata; identical to SEQ ID NO: 1397
  CDS (1)..(1119)

SEQ ID NO: 2318 - protein, 372 aa, Candida glabrata; identical to SEQ ID NO: 1398

SEQ ID NO: 2319 - DNA, 1071 bp, Candida glabrata; identical to SEQ ID NO: 1399
  CDS (1)..(1071)

SEQ ID NO: 2320 - protein, 356 aa, Candida glabrata; identical to SEQ ID NO: 1400

SEQ ID NO: 2321 - DNA, 1083 bp, Photobacterium profundum; identical to SEQ ID NO: 1401
  CDS (1)..(1083)

SEQ ID NO: 2322 - protein, 360 aa, Photobacterium profundum; identical to SEQ ID NO: 1402

SEQ ID NO: 2323 - DNA, 1053 bp, Photobacterium profundum; identical to SEQ ID NO: 1403
  CDS (1)..(1053)

SEQ ID NO: 2324 - protein, 350 aa, Photobacterium profundum; identical to SEQ ID NO: 1404

SEQ ID NO: 2325 - DNA, 1113 bp, Photobacterium profundum; identical to SEQ ID NO: 1405
  CDS (1)..(1113)

SEQ ID NO: 2326 - protein, 370 aa, Photobacterium profundum; identical to SEQ ID NO: 1406

SEQ ID NO: 2327 - DNA, 1056 bp, Photobacterium profundum; identical to SEQ ID NO: 1407
  CDS (1)..(1056)

SEQ ID NO: 2328 - protein, 351 aa, Photobacterium profundum; identical to SEQ ID NO: 1408

SEQ ID NO: 2329 - DNA, 1092 bp, Parachlamydia sp; identical to SEQ ID NO: 1409
  CDS (1)..(1092)

SEQ ID NO: 2330 - protein, 363 aa, Parachlamydia sp; identical to SEQ ID NO: 1410

SEQ ID NO: 2331 - DNA, 1095 bp, Rhodopseudomonas palustris; identical to SEQ ID NO: 1411
  CDS (1)..(1095)

SEQ ID NO: 2332 - protein, 364 aa, Rhodopseudomonas palustris; identical to SEQ ID NO: 1412

SEQ ID NO: 2333 - DNA, 1100 bp, Amycolatopsis methanolica; identical to SEQ ID NO: 1413
  CDS (1)..(1086)

SEQ ID NO: 2334 - protein, 361 aa, Amycolatopsis methanolica; identical to SEQ ID NO: 1414

SEQ ID NO: 2335 - DNA, 1071 bp, Treponema denticola; identical to SEQ ID NO: 1415
  CDS (1)..(1071)

SEQ ID NO: 2336 - protein, 356 aa, Treponema denticola; identical to SEQ ID NO: 1416

SEQ ID NO: 2337 - DNA, 1068 bp, Geobacter sulfurreducens; identical to SEQ ID NO: 1417
  CDS (1)..(1068)

SEQ ID NO: 2338 - protein, 355 aa, Geobacter sulfurreducens; identical to SEQ ID NO: 1418

SEQ ID NO: 2339 - DNA, 1095 bp, Ashbya gossypii; identical to SEQ ID NO: 1419
  CDS (1)..(1095)

SEQ ID NO: 2340 - protein, 364 aa, Ashbya gossypii; identical to SEQ ID NO: 1420

SEQ ID NO: 2341 - DNA, 1122 bp, Ashbya gossypii; identical to SEQ ID NO: 1421
  CDS (1)..(1122)

SEQ ID NO: 2342 - protein, 373 aa, Ashbya gossypii; identical to SEQ ID NO: 1422

SEQ ID NO: 2343 - DNA, 1098 bp, Amycolatopsis balhimycina; identical to SEQ ID NO: 1423
  CDS (1)..(1098)

SEQ ID NO: 2344 - protein, 365 aa, Amycolatopsis balhimycina; identical to SEQ ID NO: 1424

SEQ ID NO: 2345 - DNA, 1053 bp, Vibrio vulnificus
  CDS (1)..(1053)
atgccactaaaaacagatgaattgagaacccaacctttgggtccaatgccaactcccgctgagttgagccaagcccatccgattaccgacgatgtggccgagcgaattgcgaaatctcgcagacaaattgaagatattttaacgggtaaggacaaccgtcttttggtgattgtcggtccttgctctgtgcacgatactgaagccgcgattgattacgcgacgcgtttaagctcgattcaagagcagtatcgcgatgagctgttcatcgttatgcgtacctactttgaaaaaccacgcactgtggtgggctggaaaggcctcattaccgacccaaatctggatggctcgtatgcgctagaagctggcctgcataaagcacgtaagctattgctcgatatcaacaaacttggccttgccaccgcaaccgagtttcttgacatgatcaccggtcaatatattgctgatttgatcacttggggcgcgattggagctcgaaccactgaatcgcaaattcaccgtgaaatggcgtctgcactctcctgcccggttggctttaaaaacggcaccaacggcaacgtgaaaattgcgattgacgcaattcgcgcatcaaaagcttcgcattacttctactctccagataaaaatggccgcatgaccgtttaccgcaccagtggtaacccatatggacatattattctgcgtggtggtgatacaggccctaactttgacgcaaaatcggttgagtctgcctgtcaatcactggctgagttcgatttgccacaacgtttgatcgttgatttcagtcacgctaactgtgaaaagcaacatcgtaaacagctcgatgtcgcgcaagacatttgtaaccaactaaaagcgggcagcacttatatcgcaggcatcatggcagaaagcttcattaccgaaggcaatcagccgatgactgaccttgataacttgacctacggccaatcgatcactgacccttgcctaagctgggaacacacagcgcaaatgctggacatgcttgcgactgctgtaaaagaaagccgttaa

SEQ ID NO: 2346 - protein, 350 aa, Vibrio vulnificus
MPLKTDELRTQPLGPMPTPAELSQAHPITDDVAERIAKSRRQIEDILTGKDNRLLVIVGPCSVHDTEAAIDYATRLSSIQEQYRDELFIVMRTYFEKPRTVVGWKGLITDPNLDGSYALEAGLHKARKLLLDINKLGLATATEFLDMITGQYIADLITWGAIGARTTESQIHREMASALSCPVGFKNGTNGNVKIAIDAIRASKASHYFYSPDKNGRMTVYRTSGNPYGHIILRGGDTGPNFDAKSVESACQSLAEFDLPQRLIVDFSHANCEKQHRKQLDVAQDICNQLKAGSTYIAGIMAESFITEGNQPMTDLDNLTYGQSITDPCLSWEHTAQMLDMLATAVKESR

SEQ ID NO: 2347 - DNA, 1047 bp, Photorhabdus luminescens; identical to SEQ ID NO: 1427
  CDS (1)..(1047)

SEQ ID NO: 2348 - protein, 348 aa, Photorhabdus luminescens; identical to SEQ ID NO: 1428

SEQ ID NO: 2349 - DNA, 1053 bp, Photorhabdus luminescens; identical to SEQ ID NO: 1429
  CDS (1)..(1053)

SEQ ID NO: 2350 - protein, 350 aa, Photorhabdus luminescens; identical to SEQ ID NO: 1430

SEQ ID NO: 2351 - DNA, 1095 bp, Photorhabdus luminescens; identical to SEQ ID NO: 1431
  CDS (1)..(1095)

SEQ ID NO: 2352 - protein, 364 aa, Photorhabdus luminescens; identical to SEQ ID NO: 1432

SEQ ID NO: 2353 - DNA, 1119 bp, Gloeobacter violaceus; identical to SEQ ID NO: 1433
  CDS (1)..(1119)

SEQ ID NO: 2354 - protein, 372 aa, Gloeobacter violaceus; identical to SEQ ID NO: 1434

SEQ ID NO: 2355 - DNA, 1107 bp, Chromobacterium violaceum; identical to SEQ ID NO: 1435
  CDS (1)..(1107)

SEQ ID NO: 2356 - protein, 368 aa, Chromobacterium violaceum; identical to SEQ ID NO: 1436

SEQ ID NO: 2357 - DNA, 1059 bp, Chromobacterium violaceum; identical to SEQ ID NO: 1437
  CDS (1)..(1059)

SEQ ID NO: 2358 - protein, 352 aa, Chromobacterium violaceum; identical to SEQ ID NO: 1438

SEQ ID NO: 2359 - DNA, 1140 bp, Neurospora crassa; identical to SEQ ID NO: 1439
  CDS (1)..(1140)

SEQ ID NO: 2360 - protein, 379 aa, Neurospora crassa; identical to SEQ ID NO: 1440

SEQ ID NO: 2361 - DNA, 1092 bp, Neurospora crassa; identical to SEQ ID NO: 1441
  CDS (1)..(1092)

SEQ ID NO: 2362 - protein, 363 aa, Neurospora crassa; identical to SEQ ID NO: 1442

SEQ ID NO: 2363 - DNA, 1068 bp, Synechococcus sp; identical to SEQ ID NO: 1443
  CDS (1)..(1068)

SEQ ID NO: 2364 - protein, 355 aa, Synechococcus sp; identical to SEQ ID NO: 1444

SEQ ID NO: 2365 - DNA, 1053 bp, Rhodopirellula baltica; identical to SEQ ID NO: 1445
  CDS (1)..(1053)

SEQ ID NO: 2366 - protein, 350 aa, Rhodopirellula baltica; identical to SEQ ID NO: 1446

SEQ ID NO: 2367 - DNA, 1068 bp, Prochlorococcus marinus subsp; identical to SEQ ID NO: 1447
  CDS (1)..(1068)

SEQ ID NO: 2368 - protein, 355 aa, Prochlorococcus marinus subsp; identical to SEQ ID NO: 1448

SEQ ID NO: 2369 - DNA, 1083 bp, Prochlorococcus marinus; identical to SEQ ID NO: 1449
  CDS (1)..(1083)

SEQ ID NO: 2370 - protein, 360 aa, Prochlorococcus marinus; identical to SEQ ID NO: 1450

SEQ ID NO: 2371 - DNA, 1074 bp, Prochlorococcus marinus; identical to SEQ ID NO: 1451
  CDS (1)..(1074)

SEQ ID NO: 2372 - protein, 357 aa, Prochlorococcus marinus; identical to SEQ ID NO: 1452

SEQ ID NO: 2373 - DNA, 1113 bp, Haemophilus ducreyi; identical to SEQ ID NO: 1453
  CDS (1)..(1113)

SEQ ID NO: 2374 - protein, 370 aa, Haemophilus ducreyi; identical to SEQ ID NO: 1454

SEQ ID NO: 2375 - DNA, 1080 bp, Haemophilus ducreyi; identical to SEQ ID NO: 1455
  CDS (1)..(1080)

SEQ ID NO: 2376 - protein, 359 aa, Haemophilus ducreyi; identical to SEQ ID NO: 1456

SEQ ID NO: 2377 - DNA, 1086 bp, Candidatus Blochmannia floridanus; identical to SEQ ID NO: 1457
  CDS (1)..(1086)

SEQ ID NO: 2378 - protein, 361 aa, Candidatus Blochmannia floridanus; identical to SEQ ID NO: 1458

SEQ ID NO: 2379 - DNA, 1074 bp, Bordetella pertussis
  CDS (1)..(1074)
atgtcgcacaataccgatgaccttcgtatccgtgaaatcaaagagctgaatcctcccgcgcatgtcatgcgcgagtttccgtgctcgaaggatgtttctgaaatcgtctacgccgcccgccagggcatgcatcgcatcctgcatggcatggatgaccgcctgatcgtcgtgatcggcccttgctcgatccacgataccaaggcggcgctcgaatacgcggatcgtctcaagccggtgcgcgaccgcctggccgccgacctcgaggtggtgatgcgcgtctacttcgaaaagccgcgcaccaccgtgggctggaagggcctgatcaacgaccccgacctagatggcagcttcgatatcaacaagggcgtgcgcgtggcgcgcgaactgctgctggacatcaacagccgcggcctgccggcgggttgcgagttcctcgacatgattaccccgcagtacatcgccgacctggtgtcgtggggggcgatcggggcgcggacgaccgaaagccaggttcaccgcgagctggcttccggcctgtcgtgtcctgtcggtttcaagaacggcaccgacggcaatgtgaagatcgccgtcgatgccatcaaggccgcctcgcaaccgcaccatttcctctcggtgaccaagggcgggcattcggccatcgtctcgaccgcgggcaacgaggactgccacgtcatcctgcgcggcggcaaggcgcccaactacgatgccgccagcatcgaagcggcctgccaggacatggccaaggccggcctggcccagcgcatcatgatcgacgccagccacgccaacagcagcaagaaacccgagaatcagccgctggtggtcgatgatgtggccaaccagatcgagcagggcgatgcccgcatcgtgggcctgatgatagaaagccatctgctgggcggccgccaggacctggtgcccgggcaggccttgacgtacgggcagagcatcaccgacggttgcatcgactgggatgcttcggtgcaggtgctggagcgcctggcccatgcggtgcgcgagcgccggcgcgcgtcgctgagcgccggcaagtag

SEQ ID NO: 2380 - protein, 357 aa, Bordetella pertussis; identical to SEQ ID NO: 1460

SEQ ID NO: 2381 - DNA, 1119 bp, Bordetella bronchiseptica; identical to SEQ ID NO: 1461
  CDS (1)..(1119)

SEQ ID NO: 2382 - protein, 372 aa, Bordetella bronchiseptica; identical to SEQ ID NO: 1462

SEQ ID NO: 2383 - DNA, 1179 bp, Nitrosomonas europaea; identical to SEQ ID NO: 1463
  CDS (1)..(1179)

SEQ ID NO: 2384 - protein, 392 aa, Nitrosomonas europaea; identical to SEQ ID NO: 1464

SEQ ID NO: 2385 - DNA, 1083 bp, Coxiella burnetii; identical to SEQ ID NO: 1465
  CDS (1)..(1083)

SEQ ID NO: 2386 - protein, 360 aa, Coxiella burnetii; identical to SEQ ID NO: 1466

SEQ ID NO: 2387 - DNA, 1053 bp, Vibrio parahaemolyticus; identical to SEQ ID NO: 1471
  CDS (1)..(1053)

SEQ ID NO: 2388 - protein, 350 aa, Vibrio parahaemolyticus; identical to SEQ ID NO: 1472

SEQ ID NO: 2389 - DNA, 1053 bp, Vibrio parahaemolyticus; identical to SEQ ID NO: 1473
  CDS (1)..(1053)

SEQ ID NO: 2390 - protein, 350 aa, Vibrio parahaemolyticus; identical to SEQ ID NO: 1474

SEQ ID NO: 2391 - DNA, 1074 bp, Vibrio parahaemolyticus; identical to SEQ ID NO: 1475
  CDS (1)..(1074)

SEQ ID NO: 2392 - protein, 357 aa, Vibrio parahaemolyticus; identical to SEQ ID NO: 1476

SEQ ID NO: 2393 - DNA, 1083 bp, Pseudomonas syringae; identical to SEQ ID NO: 1477
  CDS (1)..(1083)

SEQ ID NO: 2394 - protein, 360 aa, Pseudomonas syringae; identical to SEQ ID NO: 1478

SEQ ID NO: 2395 - DNA, 1077 bp, Pseudomonas syringae; identical to SEQ ID NO: 1479
  CDS (1)..(1077)

SEQ ID NO: 2396 - protein, 358 aa, Pseudomonas syringae; identical to SEQ ID NO: 1480

SEQ ID NO: 2397 - DNA, 1062 bp, Pseudomonas putida; identical to SEQ ID NO: 1481
  CDS (1)..(1062)

SEQ ID NO: 2398 - protein, 353 aa, Pseudomonas putida; identical to SEQ ID NO: 1482

SEQ ID NO: 2399 - DNA, 1113 bp, Pseudomonas putida; identical to SEQ ID NO: 1483
  CDS (1)..(1113)

SEQ ID NO: 2400 - protein, 370 aa, Pseudomonas putida; identical to SEQ ID NO: 1484

SEQ ID NO: 2401 - DNA, 1086 bp, Bradyrhizobium japonicum; identical to SEQ ID NO: 1485
  CDS (1)..(1086)

SEQ ID NO: 2402 - protein, 361 aa, Bradyrhizobium japonicum; identical to SEQ ID NO: 1486

SEQ ID NO: 2403 - DNA, 1053 bp, Yersinia pestis; identical to SEQ ID NO: 1487
  CDS (1)..(1053)

SEQ ID NO: 2404 - protein, 350 aa, Yersinia pestis; identical to SEQ ID NO: 1488

SEQ ID NO: 2405 - DNA, 1038 bp, Wigglesworthia glossinidia brevipalpis; identical to SEQ ID NO: 1491
  CDS (1)..(1038)

SEQ ID NO: 2406 - protein, 345 aa, Wigglesworthia glossinidia brevipalpis; identical to SEQ ID NO: 1492

SEQ ID NO: 2407 - DNA, 1071 bp, Vibrio vulnificus; identical to SEQ ID NO: 1739
  CDS (1)..(1071)

SEQ ID NO: 2408 - protein, 356 aa, Vibrio vulnificus; identical to SEQ ID NO: 1740

SEQ ID NO: 2409 - DNA, 1053 bp, Vibrio vulnificus; identical to SEQ ID NO: 1493
  CDS (1)..(1053)

SEQ ID NO: 2410 - protein, 350 aa, Vibrio vulnificus; identical to SEQ ID NO: 1494

SEQ ID NO: 2411 - DNA, 1071 bp, Vibrio vulnificus; identical to SEQ ID NO: 1497
  CDS (1)..(1071)

SEQ ID NO: 2412 - protein, 356 aa, Vibrio vulnificus; identical to SEQ ID NO: 1498

SEQ ID NO: 2413 - DNA, 1062 bp, Synechococcus elongatus; identical to SEQ ID NO: 1499
  CDS (1)..(1062)

SEQ ID NO: 2414 - protein, 353 aa, Synechococcus elongatus; identical to SEQ ID NO: 1500

SEQ ID NO: 2415 - DNA, 1032 bp, Streptococcus mutans; identical to SEQ ID NO: 1501
  CDS (1)..(1032)

SEQ ID NO: 2416 - protein, 343 aa, Streptococcus mutans; identical to SEQ ID NO: 1502

SEQ ID NO: 2417 - DNA, 1035 bp, Streptococcus mutans; identical to SEQ ID NO: 1503
  CDS (1)..(1035)

SEQ ID NO: 2418 - protein, 344 aa, Streptococcus mutans; identical to SEQ ID NO: 1504

SEQ ID NO: 2419 - DNA, 1008 bp, Streptococcus agalactiae; identical to SEQ ID NO: 1505
  CDS (1)..(1008)

SEQ ID NO: 2420 - protein, 335 aa, Streptococcus agalactiae; identical to SEQ ID NO: 1506

SEQ ID NO: 2421 - DNA, 1065 bp, Shewanella oneidensis; identical to SEQ ID NO: 1507
  CDS (1)..(1065)

SEQ ID NO: 2422 - protein, 354 aa, Shewanella oneidensis; identical to SEQ ID NO: 1508

SEQ ID NO: 2423 - DNA, 1092 bp, Shewanella oneidensis; identical to SEQ ID NO: 1509
  CDS (1)..(1092)

SEQ ID NO: 2424 - protein, 363 aa, Shewanella oneidensis; identical to SEQ ID NO: 1510

SEQ ID NO: 2425 - DNA, 1059 bp, Shewanella oneidensis; identical to SEQ ID NO: 1511
  CDS (1)..(1059)

SEQ ID NO: 2426 - protein, 352 aa, Shewanella oneidensis; identical to SEQ ID NO: 1512

SEQ ID NO: 2427 - DNA, 1170 bp, Corynebacterium efficiens; identical to SEQ ID NO: 1515
  CDS (1)..(1170)

SEQ ID NO: 2428 - protein, 389 aa, Corynebacterium efficiens; identical to SEQ ID NO: 1516

SEQ ID NO: 2429 - DNA, 1134 bp, Bifidobacterium longum; identical to SEQ ID NO: 1517
  CDS (1)..(1134)

SEQ ID NO: 2430 - protein, 377 aa, Bifidobacterium longum; identical to SEQ ID NO: 1518

SEQ ID NO: 2431 - DNA, 1233 bp, Bifidobacterium longum; identical to SEQ ID NO: 1519
  CDS (1)..(1233)

SEQ ID NO: 2432 - protein, 410 aa, Bifidobacterium longum; identical to SEQ ID NO: 1520

SEQ ID NO: 2433 - DNA, 1221 bp, Phytophthora infestans; identical to SEQ ID NO: 1521
  CDS (20)..(1153)

SEQ ID NO: 2434 - protein, 377 aa, Phytophthora infestans; identical to SEQ ID NO: 1522

SEQ ID NO: 2435 - DNA, 1062 bp, Chlorobium tepidum; identical to SEQ ID NO: 1523
  CDS (1)..(1062)

SEQ ID NO: 2436 - protein, 353 aa, Chlorobium tepidum; identical to SEQ ID NO: 1524

SEQ ID NO: 2437 - DNA, 1074 bp, Xanthomonas campestris; identical to SEQ ID NO: 1525
  CDS (1)..(1074)

SEQ ID NO: 2438 - protein, 357 aa, Xanthomonas campestris; identical to SEQ ID NO: 1526

SEQ ID NO: 2439 - DNA, 1074 bp, Xanthomonas axonopodis; identical to SEQ ID NO: 1527
  CDS (1)..(1074)

SEQ ID NO: 2440 - protein, 357 aa, Xanthomonas axonopodis; identical to SEQ ID NO: 1528

SEQ ID NO: 2441 - DNA, 1080 bp, Ralstonia solanacearum; identical to SEQ ID NO: 1529
  CDS (1)..(1080)

SEQ ID NO: 2442 - protein, 359 aa, Ralstonia solanacearum; identical to SEQ ID NO: 1530

SEQ ID NO: 2443 - DNA, 1179 bp, Ralstonia solanacearum; identical to SEQ ID NO: 1531
  CDS (1)..(1179)

SEQ ID NO: 2444 - protein, 392 aa, Ralstonia solanacearum; identical to SEQ ID NO: 1532

SEQ ID NO: 2445 - DNA, 1065 bp, Synechococcus sp; identical to SEQ ID NO: 1533
  CDS (1)..(1065)

SEQ ID NO: 2446 - protein, 354 aa, Synechococcus sp; identical to SEQ ID NO: 1534

SEQ ID NO: 2447 - DNA, 1035 bp, Escherichia coli; identical to SEQ ID NO: 1535
  CDS (1)..(1035)

SEQ ID NO: 2448 - protein, 344 aa, Escherichia coli; identical to SEQ ID NO: 1536

SEQ ID NO: 2449 - DNA, 1200 bp, Stigmatella aurantiaca; identical to SEQ ID NO: 1537
  CDS (62)..(1147)

SEQ ID NO: 2450 - protein, 361 aa, Stigmatella aurantiaca; identical to SEQ ID NO: 1538

SEQ ID NO: 2451 - DNA, 1083 bp, Amycolatopsis mediterranei; identical to SEQ ID NO: 1541
  CDS (1)..(1083)

SEQ ID NO: 2452 - protein, 360 aa, Amycolatopsis mediterranei; identical to SEQ ID NO: 1542

SEQ ID NO: 2453 - DNA, 1053 bp, Pasteurella multocida; identical to SEQ ID NO: 1543
  CDS (1)..(1053)

SEQ ID NO: 2454 - protein, 350 aa, Pasteurella multocida; identical to SEQ ID NO: 1544

SEQ ID NO: 2455 - DNA, 1086 bp, Pasteurella multocida; identical to SEQ ID NO: 1545
  CDS (1)..(1086)

SEQ ID NO: 2456 - protein, 361 aa, Pasteurella multocida; identical to SEQ ID NO: 1546

SEQ ID NO: 2457 - DNA, 1125 bp, Emericella nidulans; identical to SEQ ID NO: 1547
  CDS (1)..(1125)

SEQ ID NO: 2458 - protein, 374 aa, Emericella nidulans; identical to SEQ ID NO: 1548

SEQ ID NO: 2459 - DNA, 1089 bp, Emericella nidulans; identical to SEQ ID NO: 1549
  CDS (1)..(1089)

SEQ ID NO: 2460 - protein, 362 aa, Emericella nidulans; identical to SEQ ID NO: 1550

SEQ ID NO: 2461 - DNA, 1239 bp, Vibrio cholerae; identical to SEQ ID NO: 1551
  CDS (114)..(1175)

SEQ ID NO: 2462 - protein, 353 aa, Vibrio cholerae; identical to SEQ ID NO: 1552

SEQ ID NO: 2463 - DNA, 2184 bp, Candida albicans; identical to SEQ ID NO: 1553
  CDS (461)..(1573)

SEQ ID NO: 2464 - protein, 370 aa, Candida albicans; identical to SEQ ID NO: 1554

SEQ ID NO: 2465 - DNA, 1047 bp, Buchnera aphidicola; identical to SEQ ID NO: 1555
  CDS (1)..(1047)

SEQ ID NO: 2466 - protein, 348 aa, Buchnera aphidicola; identical to SEQ ID NO: 1556

SEQ ID NO: 2467 - DNA, 1047 bp, Buchnera aphidicola; identical to SEQ ID NO: 1557
  CDS (1)..(1047)

SEQ ID NO: 2468 - protein, 348 aa, Buchnera aphidicola; identical to SEQ ID NO: 1558

SEQ ID NO: 2469 - DNA, 1047 bp, Erwinia herbicola; identical to SEQ ID NO: 1559
  CDS (1)..(1047)

SEQ ID NO: 2470 - protein, 348 aa, Erwinia herbicola; identical to SEQ ID NO: 1560

SEQ ID NO: 2471 - DNA, 1047 bp, Salmonella typhimurium; identical to SEQ ID NO: 1561
  CDS (1)..(1047)

SEQ ID NO: 2472 - protein, 348 aa, Salmonella typhimurium; identical to SEQ ID NO: 1562

SEQ ID NO: 2473 - DNA, 1047 bp, Shigella flexneri
  CDS (1)..(1047)
atgaacagaactgacgaactccgtactgcgcgtattgagagcctggtaacgcccgccgaactcgcgctacggtatcccgtaacgcctggcgtcgccacccatgtcaccgactcccgccgcagaattgaaaaaatactgaatggtgaagataagcgactgttggtcattattggcccctgctcgatccacgatctcaccgctgcaatggagtacgccacccgtctgcagtcgctgcgcaaccagtaccagtcacggctggaaatcgtaatgcgcacctattttgaaaaaccacgaactgttgtcggctggaaagggctaatctccgatccggatttaaacggcagctatcgggtaaatcacggtctggagctggcgcgcaaattacttttacaggtaaatgagctgggtgtccctaccgcgactgagttcctcgatatggtaaccggtcagtttattgctgatttaatcagttggggcgcgattggcgctcgtactaccgaaagtcagatccaccgcgaaatggcttcagcactctcctgtccggtaggttttaaaaatggtaccgatggcaacacgcggattgccgtggatgctatccgcgcagcccgcgccagccatatgttcctctcgccagacaaaaatggtcagatgaccatctatcagaccagcggcaacccgtatggccacattattatgcgtggcggcaaaaaaccgaattatcatgccgatgatatcgccgcagcctgcgatacgctgcacgagtttgatttacctgaacatctggtggtggatttcagccacggtaactgccagaagcagcaccgtcgccagttagaagtttgtgaggatatttgtcagcaaatccgcaatggctctacggagattgctggaattatggcggaaagtttcctgcgcgaaggaacgcaaaaaatcgtcggcggtcagccgctcacttacggtcaatccattaccgacccgtgtctgggctgggaagataccgaacgcctggtcgaaaaactcgcctttgcggtagatacccgcttctga

SEQ ID NO: 2474 - protein, 348 aa, Shigella flexneri
MNRTDELRTARIESLVTPAELALRYPVTPGVATHVTDSRRRIEKILNGEDKRLLVIIGPCSIHDLTAAMEYATRLQSLRNQYQSRLEIVMRTYFEKPRTVVGWKGLISDPDLNGSYRVNHGLELARKLLLQVNELGVPTATEFLDMVTGQFIADLISWGAIGARTTESQIHREMASALSCPVGFKNGTDGNTRIAVDAIRAARASHMFLSPDKNGQMTIYQTSGNPYGHIIMRGGKKPNYHADDIAAACDTLHEFDLPEHLVVDFSHGNCQKQHRRQLEVCEDICQQIRNGSTEIAGIMAESFLREGTQKIVGGQPLTYGQSITDPCLGWEDTERLVEKLAFAVDTRF

SEQ ID NO: 2475 - DNA, 25 bp, Artificial sequence
  Primer sequence
atgttcattaaaaacgatcacgccg

SEQ ID NO: 2476 - DNA, 25 bp, Artificial sequence
  Primer sequence
ctattttttcaaggcctttcttctg

SEQ ID NO: 2477 - DNA, 2772 bp, Saccharomyces cerevisiae
  CDS (1)..(2772)
atgtcaagcggcagtactattgtttcgtctgacaagtcggggcgaacatttaagcatgaggaagaactacccaagttaccattacctaaactctgtgacactttgcagcgtctgaaggagagtttagagccattgtattatgctgatggttactatcaacatcctttagatccagaacaaattgagaagctgtcatccataataagagattttgaagagaatcccgtaagtgagaagctgcaatctaaactacagagctaccatgacactagggattgctaccttgatgaattacacttagacatcaataaccagacctccactagggagattcaggacgatgtcctacccaggaatcccttcttggttctcgcagatgacgctttgccaaacatcactcaagctgataggtcagccgtcctagtgcactctgcggccaggtttatttctgctttgaaacaagatttgttgccaccagatatcaatgccaccaatggcaaaccactgtcaatggctccatttctgaacttgttcggtactactcgtagtcctgtttttcagcgcggtgaggttgaaaattttgatttgaacaaaccttacacagcatctgatttagaagaccctgattattcaagcgatgaggacgataacgacgaacccacccaaaaagactttgatgaccgtaaaagaaaacacgaagaagacatattcactggcaatggtataactataaaaagacatccggatagcaaacacatcttgatcatctccaggggccaatactatacactggaagtacttgattcgacgaataaaattatatacactgctgcagaattaaccacaattttcaaccatataataaaagattcttctggcattgaaaaatcaactgcgttaggtagtttgacctctcactcttttagaaactggaaatatgcaaggaagagactacagaaaaggtatcctaatgaattacatcgcatagactctgctctgttcgtgttagtgctggacgaatcacaagaagaaactaccaatgatggcgatgataccgctgatatcagtcaaatgtttaacaggactatcactgagcgagacaagaaatgtacttccgccaattgtaagagagtgttttacggtacttctataataaatagcaaaggccatcaagtgggttcatgtgtttctcgttggtatgataaattacagttagttgtcactgcagatgcaaaagccacagtgatttgggattccttcacatgtgacgggtcagtcgtgcttcggtttacttctgaaatttatacagaatcagtcttgagattagctagagacgttaacgccggtgacccacagttttcactctggcctaacgtgacacaaatggatcctgaaactaaaaaactgatgacggcgaccataagtgccgacggcggaggcccttctgaaattgaccctaagttggttgtaaataaaatcgattggtctttcagtaacatcctgaacacacatgtccatttgtcagaaaccaaactagctgatctgatttccaagtatgatattgttcgcgcttctattccattgggcagaaggtcagctcaaagattaggagtcaagcccgattcgatggttcaagtagctttacaaatagctcactatgctttgtatggaagaatggtgtttggattagaaccagtatccacacgtggtttcaaaaactcgagatcatcttttattaacattcaaagtcaagcgctgttggaactatgtcaattgtttatttctagctccattgatgggacagataaattagacaaatttatccaaacctgcgaaacacataataacatggttaaacatgcaaagtctggggtaggttatgaaaaacacttcaatgcattgaaatatctcttcaaatttcatgaccattttggtatccacttaagtggtgatgaatcatctgctgcgaaagatcttttcgaaaatccacttgttttacctttctcacagcctgagttgattgttgccaactgtggtaatgctgctaccacgacatttggtataactcctgctgtacctcatggctttggaatagggtacatcattaaagatgatcaagtagatttgaccgtgacatcgcaatttcgacagggtgacaggttaatgtttatgttaagttgggtgttaggcgaaattcgttcctactggaggatgtcacgcggcacttctcataataaaactggcgtgaagatcagtccagtggtcgataaattgtatgaaatggacaatgcagtcaataatcctccgaaacgtaacggccatacagtcaatggctcccgcaaaacatcttcttcatcacaggtaaatttgaacaggtatggcgggtttttcgatttggaaggccacattgacagtaggaatatatctaaaacaccatcgatgaagaatttgcagaaaaccttcaatggcttgaccatgagcgcagacaatgatcattcaagttccgcagtttccgttcccacagaaaaggaaaaattaaatacaggccatgaaattttacagatccaaccgcgggaagtggcaagtaatgggttggaagcagatgatgagacagatattgaaatagttgctggcaatgctgatggcacatcctcttcggcatcttcagctacatctctaaattccaagaaacgtaacgtcatcaactcaagattcgatattgattttgaccgcagtcgtgtgggtagaaaggtggcgaccttagatcaataa

SEQ ID NO: 2478 - protein, 923 aa, Saccharomyces cerevisiae
MSSGSTIVSSDKSGRTFKHEEELPKLPLPKLCDTLQRLKESLEPLYYADGYYQHPLDPEQIEKLSSIIRDFEENPVSEKLQSKLQSYHDTRDCYLDELHLDINNQTSTREIQDDVLPRNPFLVLADDALPNITQADRSAVLVHSAARFISALKQDLLPPDINATNGKPLSMAPFLNLFGTTRSPVFQRGEVENFDLNKPYTASDLEDPDYSSDEDDNDEPTQKDFDDRKRKHEEDIFTGNGITIKRHPDSKHILIISRGQYYTLEVLDSTNKIIYTAAELTTIFNHIIKDSSGIEKSTALGSLTSHSFRNWKYARKRLQKRYPNELHRIDSALFVLVLDESQEETTNDGDDTADISQMFNRTITERDKKCTSANCKRVFYGTSIINSKGHQVGSCVSRWYDKLQLVVTADAKATVIWDSFTCDGSVVLRFTSEIYTESVLRLARDVNAGDPQFSLWPNVTQMDPETKKLMTATISADGGGPSEIDPKLVVNKIDWSFSNILNTHVHLSETKLADLISKYDIVRASIPLGRRSAQRLGVKPDSMVQVALQIAHYALYGRMVFGLEPVSTRGFKNSRSSFINIQSQALLELCQLFISSSIDGTDKLDKFIQTCETHNNMVKHAKSGVGYEKHFNALKYLFKFHDHFGIHLSGDESSAAKDLFENPLVLPFSQPELIVANCGNAATTTFGITPAVPHGFGIGYIIKDDQVDLTVTSQFRQGDRLMFMLSWVLGEIRSYWRMSRGTSHNKTGVKISPVVDKLYEMDNAVNNPPKRNGHTVNGSRKTSSSSQVNLNRYGGFFDLEGHIDSRNISKTPSMKNLQKTFNGLTMSADNDHSSSAVSVPTEKEKLNTGHEILQIQPREVASNGLEADDETDIEIVAGNADGTSSSASSATSLNSKKRNVINSRFDIDFDRSRVGRKVATLDQ

SEQ ID NO: 2479 - DNA, 2296 bp, Rattus norvegicus (Norway rat)
  CDS (63)..(2039)
cctgcttgctcaggaactccctcagccgccgcgttctctagccgccgttgctgcccgggacgatgatgccgcgcctgctgtttcgtgcctggccccgctgcccctcgcttgtcctgggagcccctagtaggcccttaagtgctgtctcggggccggacgattatctgcagcacagcatcgtgcccaccatgcactaccaggacagcctgcccaggctgcctatccctaaacttgaagacaccatgaagagatacctcaatgcacagaagcctctcttggatgacagccagttcaggagaacagaagcgttgtgtaagaattttgagactggcgttgggaaggagctgcatgcccacctgcttgctcaggataagcagaataagcacaccagctacatctcaggcccctggttcgatatgtatttaactgctcgagactctatcgttttaaactttaatccatttatggcattcaatccggacccaaagtctgagtataatgaccagcttaccagggcaaccaacttgactgtttctgcagtccggtttctgaagacacttcaggctggccttttagaaccagaagtgttccacttgaacccttccaaaagtgacacagacgccttcaaaagactcattcgctttgttcctccctctctgtcctggtatggagcctacctggtcaacgcatatcccctggatatgtcccagtatttccggcttttcaattcaactcgtatacccagacccaatcgtgatgaactctttactgacaccaaggctagacacctcctggtcctaagaaaaggacatttctatgtctttgatgtcctcgatcaagatgggaacattgtgaatcccttagagattcaggcacatctaaagtacattctctcagacagcagccctgtgcccgagtttcctgtggcatatctgaccagtgagaaccgagatgtctgggcagagctcagacagaagttgatttttgatggcaatgaggaaaccctgaagaaagtggactctgctgtcttctgcctctgcctagatgacttcccgatgaaggatcttattcacttgtcacacaccatgctgcacggcgatggcacaaaccgctggtttgataagtcctttaacctcattgtagccgaggacggcactgctgcagtccacttcgagcactcgtggggggatggggtggcagtgcttaggtttttcaatgaagtgttcagagacagcactcagacccctgccatcactccccagagccagcctgccgccaccaactcctctgcgtctgtggagacgctcagcttcaacctcagcggtgctctcaaggctggcatcactgctgccaaggagaagttcgacaccacggtgaaaaccctcagcattgactccattcagttccagagaggtggcaaggagttcctgaagaagaagcagctgagccccgatgcggtggcccagctggccttccagatggccttcctgagacagtatggccagacggtggctacctatgagtcctgcagcactgcagccttcaagcacggccgcacagagactatccgcccagcctccatctttactaagagatgctccgaggcgtttgtcagggacccctccaagcacagtgtgggcgagcttcagcacatgatggctgagtgttccaaataccatggccagctgaccaaagaagcagcgatgggccagggctttgaccgacacttgtatgctctgcgctatctggcaacggccagaggactcaacctacctgagctctatctggatcctgcataccagcagatgaaccacaacatcctgtccaccagcactctgaacagcccagcagtgagccttgggggctttgcccctgtggtccctgatggctttggcattgcatatgctgttcacgatgactggataggctgcaatgtctcctcctactcaggacgcaatgcccgagagtttctccactgtgtccagaagtgcttggaagacattttcgatgctctagaaggcaaagccatcaaaacttagcttcctagtcgctgaaaagcctccattcttcctcatgaacatggatgttcatgtagctggaaggtgccatcttgtgcccaacaaaactaatcccaaggtgcttccacagccagtgctgcaggctgagctggaagagcccaactgaaggtagtgagaggtcgcagctgtaaagccctctttgttcaggagatagggtttggaaaactaactcagctgtatttattgtttaaatagaaataaaacctggtgttgcttag

SEQ ID NO: 2480 - protein, 658 aa, Rattus norvegicus (Norway rat)
MMPRLLFRAWPRCPSLVLGAPSRPLSAVSGPDDYLQHSIVPTMHYQDSLPRLPIPKLEDTMKRYLNAQKPLLDDSQFRRTEALCKNFETGVGKELHAHLLAQDKQNKHTSYISGPWFDMYLTARDSIVLNFNPFMAFNPDPKSEYNDQLTRATNLTVSAVRFLKTLQAGLLEPEVFHLNPSKSDTDAFKRLIRFVPPSLSWYGAYLVNAYPLDMSQYFRLFNSTRIPRPNRDELFTDTKARHLLVLRKGHFYVFDVLDQDGNIVNPLEIQAHLKYILSDSSPVPEFPVAYLTSENRDVWAELRQKLIFDGNEETLKKVDSAVFCLCLDDFPMKDLIHLSHTMLHGDGTNRWFDKSFNLIVAEDGTAAVHFEHSWGDGVAVLRFFNEVFRDSTQTPAITPQSQPAATNSSASVETLSFNLSGALKAGITAAKEKFDTTVKTLSIDSIQFQRGGKEFLKKKQLSPDAVAQLAFQMAFLRQYGQTVATYESCSTAAFKHGRTETIRPASIFTKRCSEAFVRDPSKHSVGELQHMMAECSKYHGQLTKEAAMGQGFDRHLYALRYLATARGLNLPELYLDPAYQQMNHNILSTSTLNSPAVSLGGFAPVVPDGFGIAYAVHDDWIGCNVSSYSGRNAREFLHCVQKCLEDIFDALEGKAIKT

SEQ ID NO: 2481 - DNA, 2255 bp, Homo sapiens (man)
  CDS (102)..(2078)
cctgacgcagtgtcttgggcgctaacggcggcggcggccttgtgtttagactccagaactccccacttgccgcgttctcgccgccgcaggctcccgggacgatggtgccccgcctgctgctgcgcgcctggccccggggccccgcggttggtccgggagcccccagtcggcccctcagcgccggctccgggcccggccagtacctgcagcgcagcatcgtgcccaccatgcactaccaggacagcctgcccaggctgcctattcccaaacttgaagacaccattaggagatacctcagtgcacagaagcctctcttgaatgatggccagttcaggaaaacagaacaattttgcaagagttttgaaaatgggattggaaaagaactgcatgagcagctggttgctctggacaaacagaataaacatacaagctacatttcgggaccctggtttgatatgtacctatctgctcgagactccgttgttctgaactttaatccatttatggctttcaatcctgacccaaaatctgagtataatgaccagctcacccgggcaaccaacatgactgtttctgccatccggtttctgaagacactccgggctggccttctggagccagaagtgttccacttgaaccctgcaaaaagtgacactatcaccttcaagagactcatacgctttgtgccttcctctctgtcctggtatggggcctacctggtcaatgcgtatcccctggatatgtcccagtattttcggcttttcaactcaactcgtttacccaaacccagtcgggatgaactcttcactgatgacaaggccagacacctcctggtcctaaggaaaggaaatttttatatctttgatgtcctggatcaagatgggaacattgtgagcccctcggaaatccaggcacatctgaagtacattctctcagacagcagccccgcccccgagtttcccctggcatacctgaccagtgagaaccgagacatctgggcagagctcaggcagaagctgatgagtagtggcaatgaggagagcctgaggaaagtggactcggcagtgttctgtctctgcctagatgacttccccattaaggaccttgtccacttgtcccacaatatgctgcatggggatggcacaaaccgctggtttgataaatcctttaacctcattatcgccaaggatggctctactgccgtccactttgagcactcttggggtgatggtgtggcagtgctcagattttttaatgaagtatttaaagacagcactcagacccctgccgtcactccacagagccagccagctaccactgactctactgtcacggtgcagaaactcaacttcgagctgactgatgccttaaagactggcatcacagctgctaaggaaaagtttgatgccaccatgaaaaccctcactattgactgcgtccagtttcagagaggaggcaaagaattcctgaagaagcaaaagctgagccctgacgcagttgcccagctggcattccagatggccttcctgcggcagtacgggcagacagtggccacctacgagtcctgtagcactgccgcattcaagcacggccgcactgagaccatccgcccggcctccgtctatacaaagaggtgctctgaggcctttgtcagggagccctccaggcacagtgctggtgagcttcagcagatgatggttgagtgctccaagtaccatggccagctgaccaaagaagcagcaatgggccagggctttgaccgacacttgtttgctctgcggcatctggcagcagccaaagggatcatcttgcctgagctctacctggaccctgcatacgggcagataaaccacaatgtcctgtccacgagcacactgagcagcccagcagtgaaccttgggggctttgcccctgtggtctctgatggctttggtgttgggtatgctgttcatgacaactggataggctgcaatgtctcttcctacccaggccgcaatgcccgggagtttctccaatgtgtggagaaggccttagaagacatgtttgatgccttagaaggcaaatccatcaaaagttaacttctgggcagatgaaaagctaccatcacttcctcatcatgaaaactgggaggccgggcatggtgctcatgcctgtaatcccagcattttgagaggctgaggcgggtggatcacttgaggtcaggagtttgagaccaacctggccaacatggtgaaaccttgtctctactaaaaatg

SEQ ID NO: 2482 - protein, 658 aa, Homo sapiens (man)
MVPRLLLRAWPRGPAVGPGAPSRPLSAGSGPGQYLQRSIVPTMHYQDSLPRLPIPKLEDTIRRYLSAQKPLLNDGQFRKTEQFCKSFENGIGKELHEQLVALDKQNKHTSYISGPWFDMYLSARDSVVLNFNPFMAFNPDPKSEYNDQLTRATNMTVSAIRFLKTLRAGLLEPEVFHLNPAKSDTITFKRLIRFVPSSLSWYGAYLVNAYPLDMSQYFRLFNSTRLPKPSRDELFTDDKARHLLVLRKGNFYIFDVLDQDGNIVSPSEIQAHLKYILSDSSPAPEFPLAYLTSENRDIWAELRQKLMSSGNEESLRKVDSAVFCLCLDDFPIKDLVHLSHNMLHGDGTNRWFDKSFNLIIAKDGSTAVHFEHSWGDGVAVLRFFNEVFKDSTQTPAVTPQSQPATTDSTVTVQKLNFELTDALKTGITAAKEKFDATMKTLTIDCVQFQRGGKEFLKKQKLSPDAVAQLAFQMAFLRQYGQTVATYESCSTAAFKHGRTETIRPASVYTKRCSEAFVREPSRHSAGELQQMMVECSKYHGQLTKEAAMGQGFDRHLFALRHLAAAKGIILPELYLDPAYGQINHNVLSTSTLSSPAVNLGGFAPVVSDGFGVGYAVHDNWIGCNVSSYPGRNAREFLQCVEKALEDMFDALEGKSIKS

SEQ ID NO: 2483 - DNA, 4377 bp, Rattus norvegicus (Norway rat)
  CDS (103)..(2424)
agtcggtcgactccgagctcagtgaggacctaaagcagaggactgtggtgcggaggacagtgcttgctccggggagtgcagagcaataggtccccactcaagatggcagaggctcaccaagctgtggccttccagttcaccgtcacccccgatggcattgacctccgcctgagccacgaagccctcaaacagatctgcctgtcggggctgcactcctggaagaagaagttcatccggttcaagaatggcatcatcactggtgtgttccccgcgaatccgtccagctggcttatcgtggtggtgggtgtgatttcatccatgcatgccaaagtggacccctccctgggcatgatcgcaaagatcagtcggaccctagacaccactggccgcatgtcaagccagacgaagaacattgtgagcggcgtcctctttggtacagggctctgggtggcagtcatcatgaccatgcgctactcgctgaaggtgctgctctcctaccacggctggatgtttgcagaacacggcaaaatgagccgcagcaccaagatctggatggctatggtcaaggtcctctcaggtcggaagcccatgttgtacagcttccagacgtctctgccacgcctgcctgtcccagctgtcaaagatactgtgagcaggtacctggaatctgtaaggccactgatgaaggaagaagacttccagcgcatgacagcactggcccaggattttgctgtcaacctcggacccaaattgcagtggtatttgaagctaaaatcctggtgggccacaaattacgtgagtgactggtgggaagaatatatctacctgcggggccgagggccgctcatggtcaacagcaactactacgccatggagatgctgtacatcaccccaacccatatccaggcagcgagagctggcaacaccatccacgccatactgctgtatcgtcgcacattagaccgtgaggaactcaaacccattcgtcttctgggatccaccattccactctgctcagcccagtgggagcgactcttcaatacttcccggatccctggggaggagacagacaccatccaacatatcaaggacagcaggcacattgttgtgtaccacagagggcggtacttcaaggtctggctctaccacgatgggaggctgctgaggccccgagagctggagcagcagatgcagcagatcctggatgatccctcagagccacagcctggggaggccaagctggccgccctcactgctgcagacagagtgccctgggcaaagtgtcggcagacctattttgcacgagggaaaaataagcagtccctggatgcggtggaaaaggcagcgttcttcgtgacgttggacgaatcggagcagggatacagagaggaggatcctgaggcatccatcgacagctacgccaaatccctgctgcatggaagatgctttgacaggtggtttgacaagtccatcacctttgttgtcttcaaaaacagcaagataggcataaatgcagagcactcctgggcggacgcgcccatcgtgggccatttgtgggagtatgtcatggccaccgacgtcttccagctgggttactcagaggatggacactgtaaaggagacaccaaccccaacatccctaagcccacaaggctacaatgggacattccaggagagtgccaggaggtcatagatgcatccctgagcagcgccagtcttttggcaaatgatgtggacctgcattccttcccatttgactctttcggcaaaggcttgatcaagaagtgccggacgagtcccgatgccttcatccagctggcgctgcagctcgcacattacaaggacatgggcaagttctgcctcacatatgaggcctccatgacccggctcttccgagaagggaggacagagactgtacgctcctgcactatggagtcctgcaactttgtgcaggccatgatggaccccaagtcaacggcagagcagaggctcaagctgttcaagatagcttgtgagaagcaccagcacctgtaccgcctcgccatgacgggcgccggcatcgaccgccatctcttctgcctctatgtggtgtccaagtatcttgcagtcgactcacctttcctgaaggaggtattgtctgagccatggaggttgtctacgagccagactcctcagcagcaggtggagctctttgactttgagaaaaaccctgactatgtgtcctgtggagggggctttgggccggttgccgatgacggctatggtgtctcctacattatagtgggagagaatttcatccacttccatatttcttccaagttctctagccctgagacagactcacaccgctttgggaagcacttgagacaagccatgatggacattatcaccttgtttggcctcaccatcaattctaaaaagtaaacccctgagccacacggaaggaaaacggaccctcgtgatacaaaccaaatgaatagatgttgctcctgaccataggacaggcagaaaattgctcttataaaactcagttttccttccagaaggtttaccgtcagtctccctagaacaacagtaggcttcacgtgtgaattgtgaccctactacatccagagatgccttggctccaggaatattgggcacagtcccctgatgtcttttgaatcggctcctactggataaagggatttaaatgctggtgaattcctggattctgggggttgtttcttcacatgtgttggaggtgacagacttcctcagtggtgaccctgtgaatacttgggcgtctgactccacccaggcagtgtgagcatcaccttgtggaaagagaaagtgtcttcagagccagcagaggcaacagctgtagctaacacatctgtaacacactaatggaatggttaggcctggggattaaggttctgctatgagtgacagccactgtccctttggaagttcacatttccaggaagcagagtaccacctccccagtgccaccttcctcacacatcttcaaaacccagtgccttaaagaaggggcccattggcaagcgggaccatagagaagacttagcatctgtgaagcctttgggtggatatgtgaggatgctgcttccccttactggttcctgcataaagatgtccctaagtaagcacttcccccacccctagaaaatgaggtccttggtgaaggcagggatgctggagtctcattgcctgccagttccattaagccacaaaatagcagacatgtgtccacagagggaggggcttggtagtcaaaggctgcatagctggacaacagcgggagagtgtggcttgctgtatttgacagctgttggcaagaggagtgagaccctggtcaccaagtcagacatactgacacaggcagccaaagctcacggagccaggagatatagatagatactggcttgtattctggcagatacacccctgggcttatcttctaatcccacccagtcagattccaaccagagtcaaattccatagaaggctaggtcattttggcgacagactcagggatctcaagtaatgggtgcttttacccacatgccatccctcagtgggagtgcctttcttgaaagcatccaatgggctaaagcagctctaccaagtctgtttggtatttaatgtaaacattagcattaatggagtggtctctcctacctgtcaccatcctgtcctgacaagcttagctctccgaggtttacatcatgtatttattttccagtgcccctttggccttgtttgattcctgcccctgtgccagaagtggcccagaagtgaggggtggggtgaccagcagtgcagagaggtgctggctgaacagttcatgtgtgtcttatgggtatacatgtataaattttgtaatgtaaaaaaaaaaatcatacctaaaagggccaaagttttttttttttttactaaaaccaagaaaacaaaagacaacataaagacataagcagaaacaaactgttgtaagtcagagcggcctgactctcgctgctgtgaccactcaccaacctgtgttactcagagtagcccggctagtgcccgagtgggacattcctctctcaggtttccagtgtccttgctgctcctgagcagttaccaatgcaatttcgcattccttacaaggcagaagagtgggctctcactgtatgtgttcaaaggaggaggtaagactattgtgtatttaatttaatgtggaacaaaatatagtcttaccgcagccaaggttcaaatttggtgttctaatctgtccattgcatgtaaataccatatctgtttggatataaatcttagaagtgcatgtgtgagcgaatgtagctggccattaataaaacattaatactgtctact

SEQ ID NO: 2484 - protein, 773 aa, Rattus norvegicus (Norway rat)
MAEAHQAVAFQFTVTPDGIDLRLSHEALKQICLSGLHSWKKKFIRFKNGIITGVFPANPSSWLIVVVGVISSMHAKVDPSLGMIAKISRTLDTTGRMSSQTKNIVSGVLFGTGLWVAVIMTMRYSLKVLLSYHGWMFAEHGKMSRSTKIWMAMVKVLSGRKPMLYSFQTSLPRLPVPAVKDTVSRYLESVRPLMKEEDFQRMTALAQDFAVNLGPKLQWYLKLKSWWATNYVSDWWEEYIYLRGRGPLMVNSNYYAMEMLYITPTHIQAARAGNTIHAILLYRRTLDREELKPIRLLGSTIPLCSAQWERLFNTSRIPGEETDTIQHIKDSRHIVVYHRGRYFKVWLYHDGRLLRPRELEQQMQQILDDPSEPQPGEAKLAALTAADRVPWAKCRQTYFARGKNKQSLDAVEKAAFFVTLDESEQGYREEDPEASIDSYAKSLLHGRCFDRWFDKSITFVVFKNSKIGINAEHSWADAPIVGHLWEYVMATDVFQLGYSEDGHCKGDTNPNIPKPTRLQWDIPGECQEVIDASLSSASLLANDVDLHSFPFDSFGKGLIKKCRTSPDAFIQLALQLAHYKDMGKFCLTYEASMTRLFREGRTETVRSCTMESCNFVQAMMDPKSTAEQRLKLFKIACEKHQHLYRLAMTGAGIDRHLFCLYVVSKYLAVDSPFLKEVLSEPWRLSTSQTPQQQVELFDFEKNPDYVSCGGGFGPVADDGYGVSYIIVGENFIHFHISSKFSSPETDSHRFGKHLRQAMMDIITLFGLTINSKK

SEQ ID NO: 2485 - DNA, 2300 bp, Mus musculus (house mouse)
  CDS (69)..(2045)
cagcggcctgcttgctcgggaactccctcagccaccgcgtcctcaagccgccattgccgcccgggacgatgatgccgcgcctgctgttgcgtgactggccccggtgcccctcgcttgtcctgggagcccctagtcggcccttaagtgctgtctcggggcccgccgagtatctgcagcacagcatcgtacccaccatgcactaccaggacagcctgcccaggctgcctatccctaaacttgaagacaccatgaagagatacctcagtgcacagaagcctctcttgaatgacagccagttcaggaagacagaagtgttgtgtaaggattttgagaacggcattgggaaggagctgcatgcgcacctgctcgctcaggataaacagaataagcacaccagctacatctcaggcccctggtttgatatgtatttaactgctcgagactctgtcgttttaaactttaatccattcatggcattcaatccggacccgaagtctgagtataatgaccagctcaccagggccaccaacttgactgtttctgcagtgcggtttctgaagacacttcgggctggccttctagagccagaagtgttccacttgaaccctgccagaagtgacacagatgccttcaaaagactcatccgctttgttccttcctctctctcctggtatggagcctacctggtcaatgcatatcccctggatatgtcccaatattttcggcttttcaattcaactcgtatacccaaacccagtcgtgatgaactctttactgataccaaggctagacacctcctggtcctaagaaaaggacatttctatgtctttgatgtcctcgatcaagatgggaacattgtgaatccctcagaaatccaggcacatctaaagtacattctctcagacagcagccctgtgcccgagtttcccctggcttatttgaccagtgagaaccgagatgtctgggcagagctcagacagaagttgattcatggtggcaatgaggaaaccctgaggaaagtggactctgctgtcttctgcctctgcttagatgacttcccgatgaaggatcttgttcacttgtcacacaccatgctgcacggtgacggcacgaaccgctggtttgataagtcctttaacctcattgtagccaaagatggcactgctgcagtccacttcgagcatgcgtggggggatggtgtagcagtccttaggtttttcaatgaagtgttcagagacagcactcagacccctgccattgctccccagagccagccggccgccaccgactcctccgtgtctgtgcagaagctcagttttaagctcagcagtgctctaaaggctggcgtcaccgctgctaaggagaagtttgatgccaccatgaaaaccctcaccattgacgccattcagtttcagagaggtggcaaggaattcttgaagaagaagaagctgagccctgatgcagtggcccagctggccttccagatggctttcctgcgacagtatggccagacagtggctacctatgaatcctgcagcactgcagccttcaaacacggccgcacagagactatctgcccagcttccatctttactaagagatgctccgaggcatttgtcagggagccctccaagcacagtgtgggcgagcttcagcatatgatggctgagtgctccaaataccatggccagctgaccaaagaagcagcgatgggccagggctttgaccgacacttgtttgctctacggtatctggcagcagccagaggggtcaccctgcctgagctctatcaggaccctgcataccagcggataaaccacaacatcctgtccaccagcactctgagcagcccagcagtgagcctcggtggctttgcccctgtggtccctgatggctttggcattgcgtatgctgttcacgatgactggataggctgcaatgtctcctcctactcaggacgcaatgcccgagagtttctccactgtgtccagaagtgcttggaagacatgttcgatgccctcgaaggcaaagccatcaaaacttagcttcttggtcgatgaaaagcctccattcttcctcatgaacattggtgttcatgtagctggaaggtaccatcttgtcaacaaaactagttcctggtgcttgagcagccagtgctgcaggtgtgagcggaagatcccaactgaaggtaatgagagactgcagctctaaagcccttcttaaggagatcgggttggaaagctaactcagctgtatttattgtttaaatagaaataaacccagtgttgcttgcaaaaaaa

SEQ ID NO: 2486 - protein, 658 aa, Mus musculus (house mouse)
MMPRLLLRDWPRCPSLVLGAPSRPLSAVSGPAEYLQHSIVPTMHYQDSLPRLPIPKLEDTMKRYLSAQKPLLNDSQFRKTEVLCKDFENGIGKELHAHLLAQDKQNKHTSYISGPWFDMYLTARDSVVLNFNPFMAFNPDPKSEYNDQLTRATNLTVSAVRFLKTLRAGLLEPEVFHLNPARSDTDAFKRLIRFVPSSLSWYGAYLVNAYPLDMSQYFRLFNSTRIPKPSRDELFTDTKARHLLVLRKGHFYVFDVLDQDGNIVNPSEIQAHLKYILSDSSPVPEFPLAYLTSENRDVWAELRQKLIHGGNEETLRKVDSAVFCLCLDDFPMKDLVHLSHTMLHGDGTNRWFDKSFNLIVAKDGTAAVHFEHAWGDGVAVLRFFNEVFRDSTQTPAIAPQSQPAATDSSVSVQKLSFKLSSALKAGVTAAKEKFDATMKTLTIDAIQFQRGGKEFLKKKKLSPDAVAQLAFQMAFLRQYGQTVATYESCSTAAFKHGRTETICPASIFTKRCSEAFVREPSKHSVGELQHMMAECSKYHGQLTKEAAMGQGFDRHLFALRYLAAARGVTLPELYQDPAYQRINHNILSTSTLSSPAVSLGGFAPVVPDGFGIAYAVHDDWIGCNVSSYSGRNAREFLHCVQKCLEDMFDALEGKAIKT

SEQ ID NO: 2487 - DNA, 2013 bp, Saccharomyces cerevisiae
  CDS (1)..(2013)
atgaggatctgtcattcgagaactctctcaaacttaaaggatcttccgataacgtcaaggagagcaatgcattcggccattgtcaattactccacccaaaaggcccaatttcccgtagagacaaataatggggaacactattgggcggaaaagccgaacaaattctaccagaacaaaaggcccaattttcaaggcattacctttgctaaacaacaagacttaccatcattacccgtgcccgaattgaagtctacacttgacaagtatttgcaaaccatccgcccattttgcaatgatgtagaaacttttgaaagacagcagctgttatgtaaggacttctcggagcacatggggcctatcttacaagaccgattgaaagagtatgccaacgataaaagaaactggatggccaagttttgggatgaacaatcctatttacaatacaacgatcctattgttccatacgtctcttatttttattctcatatgccattaccgaatcatttatcgaagatcgataatgatcctttgattaaggctactgcgattatctcaaccgtggttaaattcatcgaagctattaaagatgaatctttacccgtagaaattatcaaaggtatgccattttgtatgaatagtttttcattgatgtttaacacttcgagattgcctggtaagccagaggataaccaagatacaaatattttttattcagtttatgagaacaactttgtaactatcgcttataaagggaagttttacaaactgatgacccatgacgggaatgacaaaccgctttccgaaaacgaaatctggaggcaactgtactctgtggtattccaaggatcgcagtccgatcccaaactaggtggcattggttctctcacctctttacctcgtgatcaatggcgtgaagtacatctggagcttatgaaggatcctatttctcaggattcactagaaacaatccataagtcttcctttatgctatgtttggatcttgaccaatcccctgtcactttggaagaaaagtcaagaaattgctggcacggtgatggtattaacagattctacgataagtctttacagttcctggtcaccggtaatggttcatcaggtttcttagctgaacactcgaagatggatggtacgccaacattgtttttaaataactacgtttgtcagcagttgaataaactagatgtggatgacttcatgagaaaagtaattacgccatcatctacggtggcaatgaaacctatggaactgcccttcattatcacaccgaagattcataaagcaatcgaatctgcccaactacaatttaaggaaacaattggtgagcatgacctacgtgtttggcactacaacaaatacggaaaaacgtttataaaacgccatggcatgtcacctgatgcatttattcaacaagttatccaactggcggttttcaaatatctgaaacgacaactaccaacttacgaggctgcttccacgagaaaatacttcaaaggccgtactgaaactggtagatctgtgtccaccgcctccttagaatttgtttctaaatggcaaaatggcgatgttcctattgcagaaaagattcaggctttgaaacattctgcaaaagagcattctacgtacctgaaaaatgctgcaaatggtaatggtgtcgatcgtcatttcttcggtctaaagaatatgctaaaatctaatgatgaccaaattccgccccttttcaaagatcccttatttaattattcttcaacttggttgatctccacatctcaactatcttcggaatattttgacggttatggttggtctcaagtaaatgacaacgggtttggactggcatacatgttgaataacgagtggctgcatatcaatattgtcaacaaaccagccaagagtggagccagtgttaacagattacactattatttatctcaagctgctgatgaaatttttgacgccttggaaaatgagaataaacgaaaagcaaagttatga

SEQ ID NO: 2488 - protein, 670 aa, Saccharomyces cerevisiae
MRICHSRTLSNLKDLPITSRRAMHSAIVNYSTQKAQFPVETNNGEHYWAEKPNKFYQNKRPNFQGITFAKQQDLPSLPVPELKSTLDKYLQTIRPFCNDVETFERQQLLCKDFSEHMGPILQDRLKEYANDKRNWMAKFWDEQSYLQYNDPIVPYVSYFYSHMPLPNHLSKIDNDPLIKATAIISTVVKFIEAIKDESLPVEIIKGMPFCMNSFSLMFNTSRLPGKPEDNQDTNIFYSVYENNFVTIAYKGKFYKLMTHDGNDKPLSENEIWRQLYSVVFQGSQSDPKLGGIGSLTSLPRDQWREVHLELMKDPISQDSLETIHKSSFMLCLDLDQSPVTLEEKSRNCWHGDGINRFYDKSLQFLVTGNGSSGFLAEHSKMDGTPTLFLNNYVCQQLNKLDVDDFMRKVITPSSTVAMKPMELPFIITPKIHKAIESAQLQFKETIGEHDLRVWHYNKYGKTFIKRHGMSPDAFIQQVIQLAVFKYLKRQLPTYEAASTRKYFKGRTETGRSVSTASLEFVSKWQNGDVPIAEKIQALKHSAKEHSTYLKNAANGNGVDRHFFGLKNMLKSNDDQIPPLFKDPLFNYSSTWLISTSQLSSEYFDGYGWSQVNDNGFGLAYMLNNEWLHINIVNKPAKSGASVNRLHYYLSQAADEIFDALENENKRKAKL

SEQ ID NO: 2489 - DNA, 2064 bp, Saccharomyces cerevisiae
  CDS (1)..(2064)
atgccaaacttaaagagactacccatcccgccactgcaggacacgctcaaccgctacctggcacgcgtggaacccctgcaggacgagcgccaaaaccgccgtacgcgccgcactgtgctctccgcagaaaacctggacgcattgaacacgctgcacgagcggctgctagaatacgacgcacggctcgcggaaagcaacccagagtcctcatacatcgagcagttctggtatgacgcgtacttgctatatgatgcaactgtcgttctcaacgtcaacccgtacttccaactgcaggacgacccaaccatcaaagacacaccagagacggcggcacagggcccctatggcgcacacacggtgcaggttcgtcgtgccgcacgactcaccacctctattctcaagttcatccgccagattcgccacggcacactccgcacagacactgtgcgcggcaaaacgccgctgtcgatggaccagtatgagcggctattcggctccagtagaatccctccgggtcccggcgagccctcttgccacttgcaaacagacgccacgtcgcatcacgtggtggcgatgtatcgtggccagttctactggttcgacgtgctggacacacgcaacgagcccatcttcgccaccccagaacaactggagtggaacctctactcgatcatcatggacgcggaatccgccggaagcggatccgcgccctttggcgtgttcaccacagagtcgcgccgggtgtggtccaacatcagggactatctgttccatgcggacgactgcaccaactggcgcaatctcaagctgatcgactccgcgctgttcgtggtctgtctcgacgacgtggcgtttgccgccgatcagcaggacgagctcacgcgttcgatgctgtgcgggacttctaccatcaatctcgacccgcaccaacaccagccgccattgaacgtgcagacaggcacctgtctcaaccgctggtacgacaagttacaactgatcgtgaccaagaacggtaaggcgggcatcaacttcgaacacaccggtgtggacggccacactgtgctgcggctcgccacagacatctacacagactcgatcctgagcttcgcacgcggtgtcaccaagaacgtcgtcgacatctttagcgacgacgatggaaaaccatcgtcgtcgtcgttggcctcggcggctcactccgccaacttgatcaccatccctcgtaaactggaatggcgcactgacaatttcctgcaatcgtcgctgcactttgccgagacgcgcatctcggacttgatctcgcaatacgagtttgttaatcttgacttctccaactacggcgcgtcccatatcaagacagtgttcaagtgctcgccagacgccttcgtgcagcaggtgttccaggtcgcatacttcgcgttgtacggtcgcttcgagaccgtgtacgagcctgccatgaccaaggcgttccaaaacggccgcacagaggccatccgctccgtcacgggccaatcgaagctctttgtcaagtcactactggaccaggatgcctcggacgccaccaaaattcagctcttgcacgacgcctgtacggcgcactcgcaaatcacaagggaatgctcccaggggctcggccaggaccgtcacttgtatgcgctctactgcctctggaaccaatggtacaaggacaagttggagctcccacccatcttccgcgacaagtcctggactaccatgcagaacaacgtcttgagcacctccaactgcggtaacccctgcctcaagagcttcgggttcgggcctgtcaccgccaacggcttcggcatcggctacatcatcagagaccactccgtctctgtggtggtgtcctcaaggcatcgccagactgctcggtttgcgtcgctcatggaaaagtcgctgctggagatcgaccgcatcttcaaacggcagcaagctcgcgcagcaaaacccgctgccaggaccactgctagcgccaacaccaaatcagaagacatgaaatacctgttgtccggctacgattacttcgacgtgagcgtgtccggttga

SEQ ID NO: 2490 - protein, 687 aa, Saccharomyces cerevisiae
MPNLKRLPIPPLQDTLNRYLARVEPLQDERQNRRTRRTVLSAENLDALNTLHERLLEYDARLAESNPESSYIEQFWYDAYLLYDATVVLNVNPYFQLQDDPTIKDTPETAAQGPYGAHTVQVRRAARLTTSILKFIRQIRHGTLRTDTVRGKTPLSMDQYERLFGSSRIPPGPGEPSCHLQTDATSHHVVAMYRGQFYWFDVLDTRNEPIFATPEQLEWNLYSIIMDAESAGSGSAPFGVFTTESRRVWSNIRDYLFHADDCTNWRNLKLIDSALFVVCLDDVAFAADQQDELTRSMLCGTSTINLDPHQHQPPLNVQTGTCLNRWYDKLQLIVTKNGKAGINFEHTGVDGHTVLRLATDIYTDSILSFARGVTKNVVDIFSDDDGKPSSSSLASAAHSANLITIPRKLEWRTDNFLQSSLHFAETRISDLISQYEFVNLDFSNYGASHIKTVFKCSPDAFVQQVFQVAYFALYGRFETVYEPAMTKAFQNGRTEAIRSVTGQSKLFVKSLLDQDASDATKIQLLHDACTAHSQITRECSQGLGQDRHLYALYCLWNQWYKDKLELPPIFRDKSWTTMQNNVLSTSNCGNPCLKSFGFGPVTANGFGIGYIIRDHSVSVVVSSRHRQTARFASLMEKSLLEIDRIFKRQQARAAKPAARTTASANTKSEDMKYLLSGYDYFDVSVSG

SEQ ID NO: 2491 - DNA, 1941 bp, Caenorhabditis elegans
  CDS (1)..(1941)
atgcttcgttcctcaaacttgtgtcgatcaattacagcttctcgtggaaagcatgctttgaccggagacgactatcaatatctggaaaaatcagaaattccatcgtatcacttccagaagtcgctgagaagactgcctatcccaaagcttccagatacggtaaatcgctaccttgcttcttctaaagcagtgctctctccggatgtttttgcaaaaactgaagccaccattcgcagttttgaagccaatgaaggtccaaaacttcaagaagcgcttctagaatacgacaaggctcatagggacaccagttacatttctgagccatggtttgatatgtatctaagagccagagttccagttgctgtgaattacaacccatttatgatgtatgctccagatccaaatccgaaattcaatgatcagctaactcgcgccacgaatctcgccatttcctatgctagaatcaagcgatccctcgatgagaacctcttggggccagaggttttccatatgaacccgaaaaagagcgatacaaaattattcagaaccatttgcaaaactcttccaccaagtctctcatggttcggtgcagttgcattcaaagctttcccacttgacatgtcacagtataaatctttattctgcggatcgcgaattccaaagaaagaaaaggatatgctgtatttggatgcctctcaaaagcatttcgttgcgttctacaaaggtcatccatacgcagttcgtatctttgacgatgatggtaaactccttgatgctgaagacgttcatgcatctctcgcttggattttgagtaatggaaaggaagcggcaccagagagcagtattggatccctaacgtcgttggatcgtgactcgtgggctgaagctcgagtggaactcgaaaacgcaggaaatggagaatatttgaagaaaattgatggtggacttttcgcaatttgtcttgatgacctcaaaactgaagaacataaaagactcgtccaatctcttctcatcggagatgatgctcgtaatcgttggtttgacaagtgcttccagactatcatcgatgccaacggtcaagccacaatcaactttgaacactcgtggggagatggagttgccgtgcttcgtttaatggaagaatcattcaaggataccaacaaaaatcattttgtatctccagacgacactccaaaatctcataatccagcacatgtgcaggcactcgaattcaagctcacggattctctcaaatctaaaatcagtgatgctcagaagaaacacgtctctgcaaattctgatcttgattttgcgacaatggaattcgaaggactcaacagagatttgatcaagaaaactaaattgtcaccggattctgtgatgcagcttgctattcaaatggcattctattctttgtacaaagagtttgttccaacgtatgagtcatgttccactgctgctttcttgaagggaagaactgaatgcatgagatcggcaacatcagctacgcgtgccgccaccttggctattcttgaagaaaatcgtaaagatgttcgacaactattgactgattgctccacacaacatttccaacttgtaaaagaagcatcaatgggacaaggatatgatcgacatttgctcggcctcaaaatcacagctcaacgattgagccaaccaactccagatttcttccaagatccaggatacacgagaatgggtcattttgtactttcaacgagcactttgtcaacggatacgattgtcttcggaggattcggaccagttgtgcaagatggattcggtattggatacaacgttgttcccaacaaactcggagccgttatttcgagcaataagtcgaaacgtgacgctgccgccttctcgaatgctctttacaagagtttggacattcttcgtggtcaccttctcgatccgaaataa

SEQ ID NO: 2492 - protein, 646 aa, Caenorhabditis elegans
MLRSSNLCRSITASRGKHALTGDDYQYLEKSEIPSYHFQKSLRRLPIPKLPDTVNRYLASSKAVLSPDVFAKTEATIRSFEANEGPKLQEALLEYDKAHRDTSYISEPWFDMYLRARVPVAVNYNPFMMYAPDPNPKFNDQLTRATNLAISYARIKRSLDENLLGPEVFHMNPKKSDTKLFRTICKTLPPSLSWFGAVAFKAFPLDMSQYKSLFCGSRIPKKEKDMLYLDASQKHFVAFYKGHPYAVRIFDDDGKLLDAEDVHASLAWILSNGKEAAPESSIGSLTSLDRDSWAEARVELENAGNGEYLKKIDGGLFAICLDDLKTEEHKRLVQSLLIGDDARNRWFDKCFQTIIDANGQATINFEHSWGDGVAVLRLMEESFKDTNKNHFVSPDDTPKSHNPAHVQALEFKLTDSLKSKISDAQKKHVSANSDLDFATMEFEGLNRDLIKKTKLSPDSVMQLAIQMAFYSLYKEFVPTYESCSTAAFLKGRTECMRSATSATRAATLAILEENRKDVRQLLTDCSTQHFQLVKEASMGQGYDRHLLGLKITAQRLSQPTPDFFQDPGYTRMGHFVLSTSTLSTDTIVFGGFGPVVQDGFGIGYNVVPNKLGAVISSNKSKRDAAAFSNALYKSLDILRGHLLDPK

SEQ ID NO: 2493 - DNA, 2415 bp, Emericella nidulans
  CDS (1)..(2415)
atggaagctccccgctcacatccggctcctgagccgaagataaggcctaccacagtggatggaggcttgcccgatcaggttaagaccaagagtggtgggatcacattcgcacaccaagactctctgccgaagttacctatcccggatcttgagagcacatgcaagaaatatctcgacgctctgtcgccgctgcagactcctaaagagcaagaagagaccaaggctgctgtacgggagttcctcaaaggcgagggtcccggccttcaagagcggctgcagaaatatgccacatcgcaaacgagttatattgaacaattctggtacgactcctatctgaattacgacagtcctgtcgttctcaacctcaaccccttcttcttgctggaggacgatccaacacctgcgagaaacaaccagctgactagagcggcatcgctggttgtttcggccttatcatttgtgcgcgctgtcagacgggaggagttgcctcccgataccgttcgaggtacgccattgtgcatgtatcaatattcccggctatttggtactgcacgtgttcctactgagaatggctgcgttatcagccaagatcccaagtcaaagcatatcgttgttatgtgccgtggtcagttctactggtttgacgtcctcgacgagaatcatgaccaaatcatgacagaaaaggatatcgcaatgaaccttgaggttattctcgctgatgcagaacaaaccccaattcaagaggcggcgaagggcgcccttggagtcctcagtactgaaaaccgcaaggtgtggtcgggattgagggatatcctaaccaaagatgagcattcaattaacgctgagggcttaaacattgtggatactgccctatttgtcctctgcctggatgacaccgagcctcataacatgtccgagctttgcgcgaacatgctctgtggtacgaacgtggtggaaaagggcgttcaagtgggtacttgcacgaaccggtggtacgacaagctgcagatcatcgtgtgtaagaatgggagtgctggaatcaattttgagcacactggtgttgacggacatactgttcttcgcttcgcgagtgacgtctacacggacacgattcttcgctttgcacgaaccatcaacggccaggctcccagcttgtgggcaaccactagccctgacccgtccaaacgacaccctcgaagcttcggtgacgttagcccgacccccagaaaattagaatgggacatgttgcctgagcttagcattgctatccggtttgccgaatcgcatctcgcagatcttcttcagcagcatgaattccaagtgcttgatttcaagggattcggaaagaactttattacctcaatgggattctcaccggacgcattcgtccagatggcgttccaggcggcttactacgggctttacggacaagtggtaaatacctatgaaccagcaatgaccaaggctttcctgcatggacggaccgaagccattcgatctgtcaccaatgaagccctcgacttcgtgaagacattttgggctgaaaaccctgctgaggataaggtgaatgcccttcgaaaggctactgagaagcactcggcaatcacgaaggaatgctccaagggacaaggacaggaccgtcacctctatgctctttacaccctgtggcagcgacaattcgacgaagcccctagctcccggaacaacagcgtcgatgaagcgtcgaacgggtacacgagtcctgctgagatcgactccatcgctgggtctcctctatccccgtcctctgtatctgaggtggatgggttgtcatccactggcagctatggccgggctatgcgtaatttgcctcccactcccgccatcttcagcgaccccggctgggacaagatcaacaacacaattctttccacttcaaactgtggcaacccctgcttgcggcatttcggcttcggcccaacatctgcagacggattcggcattggctacattatcaaggacgactcaatctcaatttgcgcctcatctaagcaccgccaaaccgcgcgtctcatgcagacacttgagttgtacctgcttgagatccgcaagttgctgcgcgcgactgtccacaagccgtccagcccgcggaccagccgcgctcgtgaaatggagatgattgccgagcgggtccagcgtgatcaacgccggggtcgtattgtccgcacagacgcgggccatctgcgggccggtaccgagacgcccacgacggacagcggggacatggacgatgatggcatgggcggatatggtttctttgatgcagggatgctcctgcatgcgctcaaggggctcaacgtggatcgcgagcggggtggcgacaagacccctcgacgacggttcgttggcaagaagctacggttgaatgaatattga

SEQ ID NO: 2494 - protein, 804 aa, Emericella nidulans
MEAPRSHPAPEPKIRPTTVDGGLPDQVKTKSGGITFAHQDSLPKLPIPDLESTCKKYLDALSPLQTPKEQEETKAAVREFLKGEGPGLQERLQKYATSQTSYIEQFWYDSYLNYDSPVVLNLNPFFLLEDDPTPARNNQLTRAASLVVSALSFVRAVRREELPPDTVRGTPLCMYQYSRLFGTARVPTENGCVISQDPKSKHIVVMCRGQFYWFDVLDENHDQIMTEKDIAMNLEVILADAEQTPIQEAAKGALGVLSTENRKVWSGLRDILTKDEHSINAEGLNIVDTALFVLCLDDTEPHNMSELCANMLCGTNVVEKGVQVGTCTNRWYDKLQIIVCKNGSAGINFEHTGVDGHTVLRFASDVYTDTILRFARTINGQAPSLWATTSPDPSKRHPRSFGDVSPTPRKLEWDMLPELSIAIRFAESHLADLLQQHEFQVLDFKGFGKNFITSMGFSPDAFVQMAFQAAYYGLYGQVVNTYEPAMTKAFLHGRTEAIRSVTNEALDFVKTFWAENPAEDKVNALRKATEKHSAITKECSKGQGQDRHLYALYTLWQRQFDEAPSSRNNSVDEASNGYTSPAEIDSIAGSPLSPSSVSEVDGLSSTGSYGRAMRNLPPTPAIFSDPGWDKINNTILSTSNCGNPCLRHFGFGPTSADGFGIGYIIKDDSISICASSKHRQTARLMQTLELYLLEIRKLLRATVHKPSSPRTSRAREMEMIAERVQRDQRRGRIVRTDAGHLRAGTETPTTDSGDMDDDGMGGYGFFDAGMLLHALKGLNVDRERGGDKTPRRRFVGKKLRLNEY

SEQ ID NO: 2495 - DNA, 2601 bp, Debaryomyces hansenii
  CDS (1)..(2601)
atgacatacacatatgaatatgaagagggtcttcctcgattaccagttcctctgttaacgaacacgtcaacccaattattgaatacattgaaaccattattgagcgtagatgaatataacgaattactccaggaatcgagtgagtttctcagtcatgaagttattaatttgattcaacgtcatttggtggcagcttctttaaatcctaataacacatgctacttaaattgtgtgaataatggaaccagcccggggatttatggcgaaataagaggagatattcttcctcgaaacccgtacttaattttagaagaagatccgtatgcgaagactgttaatccacctaaccaaagtcaaagagcagccaatttggttaattcgtctttgaaatttgtaacaagtcttcgtaatgatacattacaaccagataggacacctaaaaatggtaatcccttatcgatgaactgttataatatattatttggcacaacaagagtgcccctcacagaagacgaaaattcgtaccaaagtgcaactatacaaaagtttaatgatatcaatgattcgagacacattgttatcatttgtaacaaccagtattattgcttggaagtgttgacagagtatagcgaagaggaatacaaggaatctaagaccaagcataaaatttggttcagtgattatgaattatcaataatttttcaagggataatcaacaattctaatactattgatagagttgagtctataaacaattctattggatctttgactacgcaatcattttcaatttggaaaataagcagaagtgaattgaataagtctaacaaaaaaaacttagaattgattgataatgccttattcatagttgtattggatcctaatttgccagattccgatcaagaaaagacatcggtgatagcacatggaacctctgagttgttgaaaggaactaatatgcaagtcggttcatgtacgtctaggtggtatgataagttacagttagtcgttactaagaattcagttgcaggtgtagtctgggaatcatcatcaacagatggcacagcgattttaagattcattagtgacatctatgctgattctattttgaaattagccaaaaacatcaatggagctgagtatacattgtttgatgataatgttgggtttgtatcagcagatggatcgatcaagaagccagagtctgaaagattgataattaccagaaccccagaacttttgaatttgataaggctatcagaaacaagattagccgacttaatacaccaacatgaatacaagaccttgactcttaaattgaacacctatttggtcaataaattcgaactcagtatagactcagttttgcaagttgcatttcagattgcaaattatactttatatgggagtatggcaaatacgttagaacccattaccactagaaagttcagagactcgaggactgaattaattccagttcaaaacgatcatatttctaggttggttaaattatttattacaaactcaaattcttcattgaaatgggacttgttcagagaatgttgtagcgttcatactaagcaatatcgtaatgctatgaatggtaaaggttttgagagacattttaatgcaatcatctctgttttagggagacctcatgcagtcgagactttgaacaaattgaatgctgatgtgcctgatttggaaccgattccagatataaagaaaataaaaaacctacatattccattactctcaaatcccacgattgaaaagctttcctctcctgaattattgatttctaattgtggtaatccagcattacacatgtttggtattccacctgcagcggaccaaggttttgggattggttacgttatccatggtgataaaatcatcattactgttagttcaaagttcagacaaacagagaggtttttgcgtacttttaaaggagtcatgaaggaattcttatcgattattaagcaaaaatcgaatttcttgattaatataaatgattcagaatctagaaaactggagttacaaagacttagaattgagcatgagcttaagaatattaacaaatccctccctctgacaaaacatcctatcgaattgactgttgaaaaaacacgcattccaatagaaaatgttagcattgaaggaaatggggatagtgtgcaatcccgctctagtagatctaactctttatcggacgattataaagaagattacgatattttagggggatatgggtacttcaattttggtgacttagatatgagatcggatgaattatcaagagaagagtcgttcttaaacagtactccacctagcttatcgagcttgaattcgaaacaacattcttcgacaaatcttcataaagcagcaatgactaataacaatagtcctagtgatatcaagcaaaagtttaatttgtctgctgagatcagagacagattgctgttacaagatgattattcgtcgacatcctctgttgcaggaagcatggaggatgcatcatcagaaggttcaaatgaaaattctagtaagccaaagaaattaataggcagagagttggatatttcagatgttcattag

SEQ ID NO: 2496 - protein, 866 aa, Debaryomyces hansenii
MTYTYEYEEGLPRLPVPLLTNTSTQLLNTLKPLLSVDEYNELLQESSEFLSHEVINLIQRHLVAASLNPNNTCYLNCVNNGTSPGIYGEIRGDILPRNPYLILEEDPYAKTVNPPNQSQRAANLVNSSLKFVTSLRNDTLQPDRTPKNGNPLSMNCYNILFGTTRVPLTEDENSYQSATIQKFNDINDSRHIVIICNNQYYCLEVLTEYSEEEYKESKTKHKIWFSDYELSIIFQGIINNSNTIDRVESINNSIGSLTTQSFSIWKISRSELNKSNKKNLELIDNALFIVVLDPNLPDSDQEKTSVIAHGTSELLKGTNMQVGSCTSRWYDKLQLVVTKNSVAGVVWESSSTDGTAILRFISDIYADSILKLAKNINGAEYTLFDDNVGFVSADGSIKKPESERLIITRTPELLNLIRLSETRLADLIHQHEYKTLTLKLNTYLVNKFELSIDSVLQVAFQIANYTLYGSMANTLEPITTRKFRDSRTELIPVQNDHISRLVKLFITNSNSSLKWDLFRECCSVHTKQYRNAMNGKGFERHFNAIISVLGRPHAVETLNKLNADVPDLEPIPDIKKIKNLHIPLLSNPTIEKLSSPELLISNCGNPALHMFGIPPAADQGFGIGYVIHGDKIIITVSSKFRQTERFLRTFKGVMKEFLSIIKQKSNFLININDSESRKLELQRLRIEHELKNINKSLPLTKHPIELTVEKTRIPIENVSIEGNGDSVQSRSSRSNSLSDDYKEDYDILGGYGYFNFGDLDMRSDELSREESFLNSTPPSLSSLNSKQHSSTNLHKAAMTNNNSPSDIKQKFNLSAEIRDRLLLQDDYSSTSSVAGSMEDASSEGSNENSSKPKKLIGRELDISDVH

SEQ ID NO: 2497 - DNA, 1899 bp, Debaryomyces hansenii
  CDS (1)..(1899)
atgaatattgattcgaaaacaatgcttaagactatcagaatgaacaaaatgccagtgtcaatgaaacaattttccacgtcttccttgaaaggggacttattcaaataccaaaaggatttaccaaaattgccggttcctgggttgcaggatactgctaataaatatgtgagatccgtggagccatttttgaccaaggaacagttgcagagaactaatgccaaaattagcgactttacaaaaccaggtgggagtggtgaagtgttgcaacagcgtttggttgaatttgcgcaaggaaaggataactggcttgcggaatggtgggatgattatgcctacatgtcttatagagatccagttgtgccatatgtgtcgtactttttctcgcacaaggacatcaacaacgctattggaaaggaccaattgttaaaggcatcgttgattgcttactacacgcttgagttcatggagctggttcaaagcgagactttggagcctgaaattatcaagggcaatccattctgtatgaatgccttcaaatacatgtttaacaactcgagggttccagcagagaattccgatattaccaagatgtacgagggatctgaacacagatattttactgttattatcaagaatcacttttacaaggtctaccaccatactaaggatggtcaacaattaagcaaagccgacatttacaagcaattgcaatatattttccaggatgtcacaaacaagccaagcggttcaccaattggtgcattgacttcactcaatagagatgaatggttaaactcttacaacagcttgaccaagtcaccaatcaacaatgcgtcattggaatcgatttatgcttcatcatttgtcatttgcttggacgacaacaacccaattactattgaagaaaaatctagaaactgctggcacggtgatggtcaaaatagattttttgacaagccattagaatttttcattagtagcaatggtaactctggatttttaggtgaacactctaagatggatgccaccccaactgtgcaattaaataactttgtttactctcaattggcgaaagaaaatccggctaccgtattatctgaaattgccaatgataccaagcaattgactgatttacaagtcgaagctattcctcaagtcttacaatttgacattaacccagtcgttagaaatgaaattaaccaggctgtcgtcaaatttaatgaaaccatttcctctcttgatcaagaaacattccaatacttcggttacggtaagaacttaattaagcaatttaaggtttctccagatgcttatgttcagatgttaatgcaattggcttactttaagatgacaggtaagatcaggccaacttacgaatcagctgctactagaaaatatttgaagggaagaacagaaactggtagaccagtttctgtcgaatctgccgctttcgttaagacttggactgataataatgctactaccgaagacaaagttgctgctttccaagctgcttgtaagcaacacgtcaagtacttaggtgatgctgctgatggtaagggtgttgaccgtcacttgtttggtttaaagcaaatgttgaagccaaatgaacccgttccagaaatctttactgacgatgtctacggctactcttcatcttggtacctttccacttctcaaattccttctgaatacttccaaagttggggtttctctcaagttacagatgatggttttggattagcatacttaattaactcagattggttaaacgttcatatttcttgcagaaagggtaacggattgagatccgatgtcttaaagtggtacttagttgaatctgctaacgaaatgaaacagatcttgacttcaaatttagctcctaaagcaaaattatga

SEQ ID NO: 2498 - protein, 632 aa, Debaryomyces hansenii
MNIDSKTMLKTIRMNKMPVSMKQFSTSSLKGDLFKYQKDLPKLPVPGLQDTANKYVRSVEPFLTKEQLQRTNAKISDFTKPGGSGEVLQQRLVEFAQGKDNWLAEWWDDYAYMSYRDPVVPYVSYFFSHKDINNAIGKDQLLKASLIAYYTLEFMELVQSETLEPEIIKGNPFCMNAFKYMFNNSRVPAENSDITKMYEGSEHRYFTVIIKNHFYKVYHHTKDGQQLSKADIYKQLQYIFQDVTNKPSGSPIGALTSLNRDEWLNSYNSLTKSPINNASLESIYASSFVICLDDNNPITIEEKSRNCWHGDGQNRFFDKPLEFFISSNGNSGFLGEHSKMDATPTVQLNNFVYSQLAKENPATVLSEIANDTKQLTDLQVEAIPQVLQFDINPVVRNEINQAVVKFNETISSLDQETFQYFGYGKNLIKQFKVSPDAYVQMLMQLAYFKMTGKIRPTYESAATRKYLKGRTETGRPVSVESAAFVKTWTDNNATTEDKVAAFQAACKQHVKYLGDAADGKGVDRHLFGLKQMLKPNEPVPEIFTDDVYGYSSSWYLSTSQIPSEYFQSWGFSQVTDDGFGLAYLINSDWLNVHISCRKGNGLRSDVLKWYLVESANEMKQILTSNLAPKAKL

SEQ ID NO: 2499 - DNA, 2259 bp, Debaryomyces hansenii
  CDS (1)..(2259)
atgacgtaccagtaccaagatcaacttcaaaagttaccaataccagatttacaagaaacatgcaagaactacttgaatgttttagaaccattacaaacggaaagggagcatgagagaaccaaggaggcggtgagactgtttttgttaggaggaaacggagaatacttggataaagagcttcggaaatacagtgagggacgcagttcttatattgagcagttctggtacgattcatacttgaactatgattcgccagtggtgttgaatttaaatccattctttcttttggaagatgacccgttccataacgagtctatgagtgtcaacccacaggtcaagagagctgcatcgttgacattatcgtcgttgaagttcatccgggccttaaaaaacgaaactttgctggtggacaagacaagaaccggccaacctctttgcatgtaccagtattctaagttatttggggcgtcgagaattcccaccgacgacggttgtgtcatgcaaacagacgtcaattcgaaccatatagttgtcatgagcaagtcccaattctattggtttgacgtgttggacaagaacaacaatttgatcttgtcggagccggaattgattgtcaatttcacgtccataattcaggactcattaaatacatcgatcagcgagattgctaaatcttcatttggggtattgactaccgaaaatagaagagtttgggcaaaaataagaaacagtggtactatcaccgataacgctaataataacgaaattttgagcattattgattctgcattatttattttatgtcttgatgacttaagattagaaaacttgtcagatttggctaagaacatgttgtgtggattgtcaatattagacaagggtgtccaggttggtacctgtaccaacagatggtacgacaaattgcaaataatcgtcacccaaaacggtaaggcgggtattaacttcgagcatacaggtgttgatggtcacacagttttacggtttgtaagtgacatctatacagactccattttatcgtttgcacagtccatcaatggccatgccccttcattgtggagtgatgattcgtcgtcaaagcctgactatgaccaagagttggttacaatccccagaaaattggaatgggaattaactccagatttatcgttggcattaagattcggggaaactaggttatcggatttgattaatcaaaatgaattcaaacatttggaattcaagaattacggttcctcaactattaaaaaaatgaaatacagtcctgatgcttttgttcaaatggcatttcaagttacttattatgctttatatggtaaggttgaatgcacttatgagccagccatgacaaagaattttttccacggtagaactgaagcagttcgaactgtatctcaagaatcaaacttgtttgttcgtaagttttttgatctgactgtatcaaataaagacaaacttgcatacttaacgagtgcatgcacaaagcactctcaacagaccaaacaaagttctatgggtaaaggaattgacagacacttatatgcgcttttctgcatctggaaaagatacgtcgattctagtgactacaaagcgatagacttagagcatgacaatgctgttactcttgataatcaaagatcttccattctgacgcttgtggacgatgacaatgaaacacattcttcggacactacaattggtaataattataataactgtaagaacgatttaaccgaattgccatctatatttgctgattcgggttgggataagttgaataatacagtcttatctacttcgaactgtggtaacccagcattgaggttatttggtttcggcccagtatcggctaacggattcggtttggcatatattattaaagacgattctatttcgatatgtgctgcatcaaaacatagacaaactgaaagatttttggtcacattagagctgtacttgaacgagatttacagcatttttcaagagtctagtaaggaacaaattgaatcaccaatcgataccaagattaaaacgaccacacaattactggcccctagaccatctttggttcaaaagaagtcaacagtatctaatttattaggtggatatggttacttcgatatgggtgataatgacatgaaatcgagaggtcctagtcctgaacctcctttccttaacagaaataacagtggtttctcggttagagaaattggcaagaaattgagattatctgaatactag

SEQ ID NO: 2500 - protein, 752 aa, Debaryomyces hansenii
MTYQYQDQLQKLPIPDLQETCKNYLNVLEPLQTEREHERTKEAVRLFLLGGNGEYLDKELRKYSEGRSSYIEQFWYDSYLNYDSPVVLNLNPFFLLEDDPFHNESMSVNPQVKRAASLTLSSLKFIRALKNETLLVDKTRTGQPLCMYQYSKLFGASRIPTDDGCVMQTDVNSNHIVVMSKSQFYWFDVLDKNNNLILSEPELIVNFTSIIQDSLNTSISEIAKSSFGVLTTENRRVWAKIRNSGTITDNANNNEILSIIDSALFILCLDDLRLENLSDLAKNMLCGLSILDKGVQVGTCTNRWYDKLQIIVTQNGKAGINFEHTGVDGHTVLRFVSDIYTDSILSFAQSINGHAPSLWSDDSSSKPDYDQELVTIPRKLEWELTPDLSLALRFGETRLSDLINQNEFKHLEFKNYGSSTIKKMKYSPDAFVQMAFQVTYYALYGKVECTYEPAMTKNFFHGRTEAVRTVSQESNLFVRKFFDLTVSNKDKLAYLTSACTKHSQQTKQSSMGKGIDRHLYALFCIWKRYVDSSDYKAIDLEHDNAVTLDNQRSSILTLVDDDNETHSSDTTIGNNYNNCKNDLTELPSIFADSGWDKLNNTVLSTSNCGNPALRLFGFGPVSANGFGLAYIIKDDSISICAASKHRQTERFLVTLELYLNEIYSIFQESSKEQIESPIDTKIKTTTQLLAPRPSLVQKKSTVSNLLGGYGYFDMGDNDMKSRGPSPEPPFLNRNNSGFSVREIGKKLRLSEY

SEQ ID NO: 2501 - DNA, 2244 bp, Yarrowia lipolytica
  CDS (1)..(2244)
atgagcgacagcacctttgctcaccaggagtcgctgcccaagctgcccattcccgacctcaaagacacatgtgacaattatctggaggcactgcgaccgctgcaaacggcccacgagcatgaacgaacagaaagagctgtccacgagtttctcaacaccagcggacccattctccaggaggagctcaagcagtacggaaagccccgatcgtcatacattgagcagttttggtacgattcgtatctcaactatgactcccccctcgttctcaacctcaaccccttcttcctcattgaagatgaccccaccccggttcaacagagccaggtcgatcgagcagctacattaaccacatcttctctgcggttcatccgagccctccgacgagaggagctgcccccagataacgtccgaggcacaaagctctgcatgtaccagtactcgcgactgtttgccagtgcccgaatcccctctgcaaatggctgtgtcatgcagtctgactccacctccaagcatattgttgtgctctgccgatcgcagttctactggtttgacgtgttggacgacaacaacgacctcatcatggtggaaaaggatatcgcgctcaactttgagactatcatccaggacgcagagggtactcctatcactgagattgcaaagggagccgtcggagtgctcaccacagaaaaccgacgtgtctgggcttctatcagagaccagatgaaccgtgccaccgactcttccaactacgagtgtctcaaactcattgactctgctctgtttgtcgtctgtttggatcacgcagcccccgagtctctttcagatctcacccgaaacgccctttgtggtctttcagagctccagaagggtgtccaggtcggaacatgcacgaacagatggtacgataagctgcaaattatcgtcactcagaatgcaaaggccggggtgactttcgagcatactggtgtcgatggtcacaccgtgctgcggtttgtgtccgacatttacaccgactccattctgcggtttgctaacaccatttctggagctgctccttctctttggaagacagtttctcctgacccagcgaagcgagatccagcttcgttcggtaacgtgtctaccactcctcgaaagctcgagtggtccattggccccgagctccaaactgctctacgttttgccgagacccggaactccgatctcatccaccagaacgagtttgagtgtctttctttcaaccactacggaaagaaagccatctgtgagatgggctgttctcctgacgcctttgttcagatggtcttccaggctgcctactacgttctttacggacgtgtggaatgcacttacgagcccgctatgaccaaaacctttttgcatggccgaaccgagtccattcggtcagtaacaaaggagtcgtctgagttctgccgaaagttctgcgaggaccttcctgctgaaaccaagctggagtacctacgaaaggcttgccagcagcacaccaagaatactaagaagtcctctcaaggtcttggacaggatcgtcatctttacgctcttctgtgcatctggagacgatatcttgaggagtctgatgacaacgactcaaccacctctcagacctccattggttctcagactgcagttgatattggagacgagatgactcccatcactggtctaggagacgtgcatcttcccaaggctggtggatccattcccagcatcttctctgatcccggatgggacaagctgaacaacaccattctgtcgacttccaactgtggtaaccctgctctcaagctgttcggattcggtcccacttctcccgatggatacggtcttggttacatcatcaaggatgactccatcaccatctgtgcatcttctaagcatcgacagactgctcgtttcctcgagactctgtccactgtcatgatggagatccgtctcctgtttcgagaggtcgccaaggccaaggcccagcgacctgctggtgcttctcgagctcggtcttgtgaacgagttcctcaggtacataccaccaagcaagttcactttggccgaactcttccccggtccaggaagccctccgagacagagatctacgacgaggagatgtcttatcttcttggaggttacggatactttgacatggcggactttgagaacgcggctgataccgagcggctgggacgcaaggagattggtagaaagctcagactggctgagtattaa

SEQ ID NO: 2502 - protein, 747 aa, Yarrowia lipolytica
MSDSTFAHQESLPKLPIPDLKDTCDNYLEALRPLQTAHEHERTERAVHEFLNTSGPILQEELKQYGKPRSSYIEQFWYDSYLNYDSPLVLNLNPFFLIEDDPTPVQQSQVDRAATLTTSSLRFIRALRREELPPDNVRGTKLCMYQYSRLFASARIPSANGCVMQSDSTSKHIVVLCRSQFYWFDVLDDNNDLIMVEKDIALNFETIIQDAEGTPITEIAKGAVGVLTTENRRVWASIRDQMNRATDSSNYECLKLIDSALFVVCLDHAAPESLSDLTRNALCGLSELQKGVQVGTCTNRWYDKLQIIVTQNAKAGVTFEHTGVDGHTVLRFVSDIYTDSILRFANTISGAAPSLWKTVSPDPAKRDPASFGNVSTTPRKLEWSIGPELQTALRFAETRNSDLIHQNEFECLSFNHYGKKAICEMGCSPDAFVQMVFQAAYYVLYGRVECTYEPAMTKTFLHGRTESIRSVTKESSEFCRKFCEDLPAETKLEYLRKACQQHTKNTKKSSQGLGQDRHLYALLCIWRRYLEESDDNDSTTSQTSIGSQTAVDIGDEMTPITGLGDVHLPKAGGSIPSIFSDPGWDKLNNTILSTSNCGNPALKLFGFGPTSPDGYGLGYIIKDDSITICASSKHRQTARFLETLSTVMMEIRLLFREVAKAKAQRPAGASRARSCERVPQVHTTKQVHFGRTLPRSRKPSETEIYDEEMSYLLGGYGYFDMADFENAADTERLGRKEIGRKLRLAEY

SEQ ID NO: 2503 - DNA, 2598 bp, Kluyveromyces lactis
  CDS (1)..(2598)
atgactatgtcgacgtttatcaatgagaaaaacttgccaaagttgcctctcccagacttgcaaaagaccttagaggagatggaggattccttgaaaccactgtattatgcagatgggtattataaacatcctttacatccagaagaatccagtgaattgcatgaaaatatcgagaaattcttgcattccaatgctgctgtaaaattacaggaaaaattgaagatgtttgatagatttaacggttgttatttggacaagttgcatctagacatcaataaccatacttccacgaaagagatccaggatgatgtgctaccaagaaatccgtttttaatcttagcagaagatgctacctctgatatctcacaagcagtccgtagtggtgtgctctgttcctctgctttgagatttgtcagtgccttgagacagaaccatttgcctcctgattgtggcagcgatgggaagccgatgagtatgcttccatataccaatcttttcggtacgacaagatgtcccgtgtttgaacatggtgaagtggaatccttcgatttgaacagaccttacgatgaatctgatttggaagccgaattgaataatctttctgcgcagagaaggccttctactgcgtcatcagaggcttctaatcagccatctgccaattctgacgatgatttggaatttttcaacgttcatggcattacaaagaaacagtaccctgattctaaacatattatgatcatttcaaagggtcaatattacactctggaagtgttggatgaaaacgataatgcattgtttacagattcacagttgtcacgtgttttccaacatattatcgatgattcgactacttcttatagtttgaaaagggctaccgcattgggttctctcacatcatattcctttaagaactggaagtatgcaagaaaaagattacagaagcgttatccacaggaattgaacgttatcgattctgctttattcatcgtcgttcttgacgaatcgactagtactagtgatatcaacgaagattgcaagaggttatactatggtactagtattgttgatgatgttacagggttccaagtcgggtcttgcacttcaagatggtatgacaagctacagttagtcgtaactgctgactcaaaggcagcagtgatttgggattcctttacttgtgatggtagcgttgttctaagatttactagtgatatttatgccgaatctattttgagattggctagagaagtccatgctggtgatcctcatttttccttatggccacaggtccctaaagcaagctcaaaagatgcatggactgagaaattttccaagatcacttggtcctttagtcatattttgaatacccatgttcatttatccgaaaccaagttgactgatttgatctcaaagcatgacatagttcacacaactattccatttggtcgtagaacagcccagaaattaggggttcgtgctgactctttgattcaaattgccctccaaatagctcattatgctctttatggtaagatggtattcagtttcgaaccagtgtctactaggttcttccaaaattctagatctacttttatcccaatacaaactcaagagctattagagttgtgccaactattcatatccaattccctaaatgaaacgggaaagttggagaagtttattactgcttgcaatgatcacagcgaaagaatccaaaaggctcaaagaggtacagggtttgaaaaacatttcaatgcaatcaagtaccttttcaagttccacgaccatttcgatattggcctatctcctgaagaattcgaaatctcttcaaaagtcttcaacgatgccatgctggaaccattctcagctcctgagttaattgcatctaattgtggtaattcagcaatgactgcgttcggtgttacaccagcagtaccacaaggatttggtattggttatattatcaaaaatgagcaatgtgacattacgttaacctcacaatacagacaagggagaagacttgctttcatgttgaaatgggtcctaactgaaatcaacaactactgggaattaagttccgttaaatctgtgaaaattagccccaaagttgatcagttatatgaaattgataatgcgattaaccaattgaaattcaactcattatccacaaaaccagaaatagcaaagagccctgttcaattcgctgaaagacctaaccttggatcgtaccaacaatcttcatcctccagtatcttcaatggtggtcatggtttcttagaactcaagggtcatcttgaaagtagagcttcatccaggcctatttctagatctggatccaatttgaagttatctgccatgaatacaacaaattcattacagcccaccttgtcaaatggcttagaagatgcactaacatctacaattagcatcacaagtgaggttttgaagcagaatgccggccatgaaatcttgaagattgatgcttcgaatatcggggaaacacaacctcaggtgcagaaaaagaacgttgtttcatccaagtttgaaattaactttgaccgttcaagtgttggtagaaaagttaatactcgtggttaa

SEQ ID NO: 2504 - protein, 865 aa, Kluyveromyces lactis
MTMSTFINEKNLPKLPLPDLQKTLEEMEDSLKPLYYADGYYKHPLHPEESSELHENIEKFLHSNAAVKLQEKLKMFDRFNGCYLDKLHLDINNHTSTKEIQDDVLPRNPFLILAEDATSDISQAVRSGVLCSSALRFVSALRQNHLPPDCGSDGKPMSMLPYTNLFGTTRCPVFEHGEVESFDLNRPYDESDLEAELNNLSAQRRPSTASSEASNQPSANSDDDLEFFNVHGITKKQYPDSKHIMIISKGQYYTLEVLDENDNALFTDSQLSRVFQHIIDDSTTSYSLKRATALGSLTSYSFKNWKYARKRLQKRYPQELNVIDSALFIVVLDESTSTSDINEDCKRLYYGTSIVDDVTGFQVGSCTSRWYDKLQLVVTADSKAAVIWDSFTCDGSVVLRFTSDIYAESILRLAREVHAGDPHFSLWPQVPKASSKDAWTEKFSKITWSFSHILNTHVHLSETKLTDLISKHDIVHTTIPFGRRTAQKLGVRADSLIQIALQIAHYALYGKMVFSFEPVSTRFFQNSRSTFIPIQTQELLELCQLFISNSLNETGKLEKFITACNDHSERIQKAQRGTGFEKHFNAIKYLFKFHDHFDIGLSPEEFEISSKVFNDAMLEPFSAPELIASNCGNSAMTAFGVTPAVPQGFGIGYIIKNEQCDITLTSQYRQGRRLAFMLKWVLTEINNYWELSSVKSVKISPKVDQLYEIDNAINQLKFNSLSTKPEIAKSPVQFAERPNLGSYQQSSSSSIFNGGHGFLELKGHLESRASSRPISRSGSNLKLSAMNTTNSLQPTLSNGLEDALTSTISITSEVLKQNAGHEILKIDASNIGETQPQVQKKNVVSSKFEINFDRSSVGRKVNTRG

SEQ ID NO: 2505 - DNA, 2079 bp, Kluyveromyces lactis
  CDS (1)..(2079)
atgccatctattaaagatacgaaccaggaagttttgcccaggttgccaatccctcctttggaagatacgttaaagcggtacttggctagattagagcctttgcaagattctagaagctatgaaaagacgaagcgagctgtggcagagtcagagcaaagcttgaggattatagatcatgaattgagaaagtatgacgaacatcttgctcaacgtgaacctatgtcttcgtatatcgaacagttctggtttgattcgtaccttgaatacgacgaatcagttgttttgaatttgaacccttatttccagttagctgatgatccaaccatgaacaatgtgccaaaagtcagttccagattctctcacttcaacaggcaagtcaagagaacatccaaattagtggtatcgatgttgaaattcgttaaagcgatcagaactggtaccttgcctactgacaacgtaaggggcaaatcaatgaccatggatcaatatggtaagttgttcggaagttctagattgccaccttctttgaacgattctactttatcgtcgtgtcatttacagactgatcccacctcacaccatgttgtcatcatgtacaagtcccaattctactggtttgacgtcttggatatcaataacgaacctatctttcaacaaccggaggaattggaatggaatttgtattcaatcataatggattctgagcagaacagtttggatcaaaatcttcaaaatagctgccccatgggtgttttcacaaccgaaaacagacgtgtgtggtcaaacgttagagattacatcagcaagtcagaagatcagactaactggcgtaacttgaagattatcgatagtgctttattcattatatgccttgatgattctgatttggaaggtgaacgtgactggatcaaatccatgatttgtggtacttctaaaattgatttgaatgataaagatgaagataagacgaaaccctctctcggtttacaaacagggacttgtaccaaccgctggtacgataaattgcagttgattgttgacagaggcggaagagcaggtatcaacttcgaacacactggtgttgatggtcatacagtattgcgaatgaccatggacatctataccgattctatcgtcaattttgctcagggtattaccagaaacgttccaaaagttttcgaagatgacgacgacgaccgcagagctaataggtcaactaaacaagctaatctaatcactattcctaggaaattagagtggtccgttgattcgttcatcctttcatctatgcactttgctgaaactcgtgccagtgatttgatatctcagattgagttcgaatatttggacttcaaacagttcggcgccgcccatatcaaaaaccagttcaaatgctcaccagatgcgttcttgcaaatgtgttttcaaacagcttactatgctctatacggtaaatttgagacaacgtacgaaccagctatgaccaagttcttccaaaatggacgtactgaagccatcagaaccgtttctgatcaatcaaaatcgtttgtcaaatcattcttcaacacagcggtatcaaatcctgacaagataaagttactacaagaagcatgcaaacagcattcaaatgtgacaagagaatgttccatggggctgggtcaagaccgtcatttgtatgctctatactgcatttggaaaaaagtatttgcaaaagatcctaaggtcccattaccacaattattccaagacgctggctggtccaccttgaataccaacgtgattagtacttcaaactgtggtaacccttgtttgaaaaactttgggttcggtcccgtttgtagcaacggtttcggtatcggttacattattagaaatgataccctatctgtggttgtctcttcaagacacaggcaaacggctcgtttcgttgaattgatgcaaagattcttgctcgaaatcaacagaattgtccgcaacgaagaacaatcttccaaaacttcaatgggttccttgcaatcggataacatgaaatatttattaagtggatatgattactttgacgttagtgtaactggatag

SEQ ID NO: 2506 - protein, 692 aa, Kluyveromyces lactis
MPSIKDTNQEVLPRLPIPPLEDTLKRYLARLEPLQDSRSYEKTKRAVAESEQSLRIIDHELRKYDEHLAQREPMSSYIEQFWFDSYLEYDESVVLNLNPYFQLADDPTMNNVPKVSSRFSHFNRQVKRTSKLVVSMLKFVKAIRTGTLPTDNVRGKSMTMDQYGKLFGSSRLPPSLNDSTLSSCHLQTDPTSHHVVIMYKSQFYWFDVLDINNEPIFQQPEELEWNLYSIIMDSEQNSLDQNLQNSCPMGVFTTENRRVWSNVRDYISKSEDQTNWRNLKIIDSALFIICLDDSDLEGERDWIKSMICGTSKIDLNDKDEDKTKPSLGLQTGTCTNRWYDKLQLIVDRGGRAGINFEHTGVDGHTVLRMTMDIYTDSIVNFAQGITRNVPKVFEDDDDDRRANRSTKQANLITIPRKLEWSVDSFILSSMHFAETRASDLISQIEFEYLDFKQFGAAHIKNQFKCSPDAFLQMCFQTAYYALYGKFETTYEPAMTKFFQNGRTEAIRTVSDQSKSFVKSFFNTAVSNPDKIKLLQEACKQHSNVTRECSMGLGQDRHLYALYCIWKKVFAKDPKVPLPQLFQDAGWSTLNTNVISTSNCGNPCLKNFGFGPVCSNGFGIGYIIRNDTLSVVVSSRHRQTARFVELMQRFLLEINRIVRNEEQSSKTSMGSLQSDNMKYLLSGYDYFDVSVTG

SEQ ID NO: 2507 - DNA, 2034 bp, Kluyveromyces lactis
  CDS (1)..(2034)
atgagaagtatggcatttagaagcagtgctggtattagtatggggatgagacgcatgggtcaaggtaacaagaaaagttctatattgagacagatgtctggtaagatgcagtattcggggtatcagaagttcccttttgagaccgggactaacgatgagtatattgcagaaagacctaattcgtattatcaggagaagagacctgggttcaaaggagccacttactcaaaacaacaggatatgccatccttaccgattccggagttgaaatcgactttggacaaatatttgaagtctattaaaccgttttgtcagacggatgctgaatatgagaaacagatccagttatgttactcatttctttcagaccaaggccctgctttgcaggagcggttgttgagttattctcaggagcggagaaactggatgcaagaactatgggatagtcagatttatcttggcgataggtcacctgtggttccttttgtgtcatatttttatggtcataagcctttaccaactagtcaccgtgccatcgatggcgacatgcttgttaaggccacggcgattatttctagtgtggtgaagttcgtggaatccttgaaagatgaagccttgccagcagaagtggtgaagggcaaacctttctgtatgaacggattccaatatatgttcaataattcaagggttcctcaattcaatatcgatacgaaccatttttactcgatctatgaacatggctacttgacggttgcctacaaggataattttttcaaagtttatacacacgataaagctggggcagtcttgtccaacgcagtaatctaccaacagttgaatcaaattgtcaaccatttgggttcacagggttctttgatcaatgcaaacgctggaatcggtgcattgacaactcttcctcgtgatgaatgggctggcgcttatcaacaattgcaattagaaccagtatcttcctcctctttagaaaccatccacaaatcctcattcgtcttatgtttggatcaggacactgctccaataactttggaagataagtctagagtgtgctggcacggagacggaaccaatagattctttgacaagcctttgcaattttttgttactggtaacggtttctccggtttcttggcagaacattcgaaaatggatggtactccaactttgtttttaaaccattacgtcgtggatcaattaacaaaattgaatccttcagcgttcgtcgagtccttacattccaacgtatcagcttacccttctgtgaacagtgaacatctaccatttataattacaccaaccttgagaaatactatcgagagtgcaaaattgcaatttataacaacagtggaacgtgaagatttacgcgtttggcactataataggtatggtaagagaattgtgaaaacatttaaagtgtcaccagatgcttacattcaacaggtgattcaacttgctgttttcaagtatttgaagaaacaactaccaacgtacgaagctgcttctaccagagcgtttttccaaggtagaactgaaactggtagaccggtcactgaatcctcttccaagttcgttaaaacatgggaatcacctacttctactactgaagagaaaattgctgctttctacgatgctgccaaggatcatgttgaatatttgaagatggcctctaacggtgaagccgttgatcgccatttctttgggttgaaaaacatggttcatgaatctgatgagccagtacctttgttccaagacgcattgttcaaatacagttctacttggttgatttcaacttcacaattatcctctgaaaactttgaatgttacggttggtctcaagtatacgataatggatttggcttagcctatatgatcaataacgaatttttgcacattaatatcaccaacaaaccagaagcttctggatttagtgttgacgaactacactattatttaactaaggcggcagatgaaatgtatgaaactttgtctctacacaactctgccaaggccaaactatga

SEQ ID NO: 2508 - protein, 677 aa, Kluyveromyces lactis
MRSMAFRSSAGISMGMRRMGQGNKKSSILRQMSGKMQYSGYQKFPFETGTNDEYIAERPNSYYQEKRPGFKGATYSKQQDMPSLPIPELKSTLDKYLKSIKPFCQTDAEYEKQIQLCYSFLSDQGPALQERLLSYSQERRNWMQELWDSQIYLGDRSPVVPFVSYFYGHKPLPTSHRAIDGDMLVKATAIISSVVKFVESLKDEALPAEVVKGKPFCMNGFQYMFNNSRVPQFNIDTNHFYSIYEHGYLTVAYKDNFFKVYTHDKAGAVLSNAVIYQQLNQIVNHLGSQGSLINANAGIGALTTLPRDEWAGAYQQLQLEPVSSSSLETIHKSSFVLCLDQDTAPITLEDKSRVCWHGDGTNRFFDKPLQFFVTGNGFSGFLAEHSKMDGTPTLFLNHYVVDQLTKLNPSAFVESLHSNVSAYPSVNSEHLPFIITPTLRNTIESAKLQFITTVEREDLRVWHYNRYGKRIVKTFKVSPDAYIQQVIQLAVFKYLKKQLPTYEAASTRAFFQGRTETGRPVTESSSKFVKTWESPTSTTEEKIAAFYDAAKDHVEYLKMASNGEAVDRHFFGLKNMVHESDEPVPLFQDALFKYSSTWLISTSQLSSENFECYGWSQVYDNGFGLAYMINNEFLHINITNKPEASGFSVDELHYYLTKAADEMYETLSLHNSAKAKL

SEQ ID NO: 2509 - DNA, 1989 bp, Candida glabrata
  CDS (1)..(1989)
atgactgtaggcaccgaggaagagtacaagaacttccagacattggaaaggcttcctatacctcctctagaggccaccctcaagagatacattgacagaactgaaccactgctgggtagtgaagaagcacagaagactaaaaaagtagtctactcagagagtaacctcgaggtattgagctatttgcaggataaattgttagagtacgaaaactggctcgctacttttgaaccccagtcctcatacattgaacaattctggtacaatgcctatttgatgtatgactctccagtggttcttaacgttaacccattctttgagcttgaagatgaccctacacttgattattcgatgcgcacaggtgtattccaggaatacacattgcaaattaaaagggcatcccgagtggtaacatctgcattgcgttttgcgagtcagatcaggaataatacattaaagccagatattttgcggaatgatgtaccgctgtctatggaccagtaccaaaagttgtttggctcgagccggatcccgccaaaacctaagcagcagtcgtgccatttacagaccgactctacgtctcaccacatagttatcatgtacaaaggtagtttctactggtttgatgtcctggattgtcagaatgagctcatatttcaaagcgccgaagagatagagtggaatttgtactccataattatggatagagagaggctaaacaaggaaaaccacaaaggattcttggaaatgggtattctgactacagagagcagaagaacttgggccaacatccgtgaacacatacacaagcaggactctcggcaaaattggcagaatttgaagattatagacagcgctctatttgtcctatgtcttgatgactacgagtcacacctggatgatccaaactctttgttaaaattgtttctaacaggcacatctgagatagatttcaatagtcctttcgagattgatgagtacgtgcatgcaccaaaaaaccttcagcgaggaacatgcatcaacagatggtttgacaagttacagatcatagtcaccaaatgcggtaaagcaggtgtgaactttgagcacactggtgtagatggccatacagtgctgcgactagcgaatgagatatacactgatgcaattacaagctttgcacagacagtcacttcaagaacgccgaggaccttgccacaagcagacagtaacctgataacagtgcctagaaagctggagtggctgaaagacgagtatctgtgcagggcggtgcactttgcagaagtgaaatgtacagacttgatctcccagtatgagatagagagtctcgagtttggaggctatggttcagcgcggatcaagagcgttttcaagtgctcaccagatgcatttgtacagcagatgttccaagtagcgttctatgcactttacggtacatttgaaaccatatatgagcccgcaatgacgaagacctttcttaatgggcggactgaggctatacgaccagtgactcatgactcgatcaaatttgtcaaatccgtgttcaaccacaggagcacggacactgagcgtatagatcttctgcacagagcatgccaggagcacacgcgcatcacgagggagtgctccatggggatgggccaggacagacacctctatgcgttgcaatgcatatggcagaaactacaagctgagacgccagacgaccccatcacacactcgacaccaccgatcttcgaagacaacgcatggcacaaaattaacaagaacatcctgagcacttcaaactgcggcagtcctgcactgaaatggtttgggttcggacctgtggacaaggacgggttcggcattggatacattatcaaggacagcaagatcagtgtcacagtgtcctcgagacacagacagacagcacggttcatcaccatgctggacagagcacttaacgagctggacaccatattcaacagggcaccaaagactatatag

SEQ ID NO: 2510 - protein, 662 aa, Candida glabrata
MTVGTEEEYKNFQTLERLPIPPLEATLKRYIDRTEPLLGSEEAQKTKKVVYSESNLEVLSYLQDKLLEYENWLATFEPQSSYIEQFWYNAYLMYDSPVVLNVNPFFELEDDPTLDYSMRTGVFQEYTLQIKRASRVVTSALRFASQIRNNTLKPDILRNDVPLSMDQYQKLFGSSRIPPKPKQQSCHLQTDSTSHHIVIMYKGSFYWFDVLDCQNELIFQSAEEIEWNLYSIIMDRERLNKENHKGFLEMGILTTESRRTWANIREHIHKQDSRQNWQNLKIIDSALFVLCLDDYESHLDDPNSLLKLFLTGTSEIDFNSPFEIDEYVHAPKNLQRGTCINRWFDKLQIIVTKCGKAGVNFEHTGVDGHTVLRLANEIYTDAITSFAQTVTSRTPRTLPQADSNLITVPRKLEWLKDEYLCRAVHFAEVKCTDLISQYEIESLEFGGYGSARIKSVFKCSPDAFVQQMFQVAFYALYGTFETIYEPAMTKTFLNGRTEAIRPVTHDSIKFVKSVFNHRSTDTERIDLLHRACQEHTRITRECSMGMGQDRHLYALQCIWQKLQAETPDDPITHSTPPIFEDNAWHKINKNILSTSNCGSPALKWFGFGPVDKDGFGIGYIIKDSKISVTVSSRHRQTARFITMLDRALNELDTIFNRAPKTI

SEQ ID NO: 2511 - DNA, 2856 bp, Candida glabrata
  CDS (1)..(2856)
atgtctgaagaaggtacgttcgcacatgaggaaagtctacccaggcttcccttgccggatctagagtcctcctttgagcagttgaaagccagtttggaaccactttactatgctgacgggtactaccagcacccactggaccccgagcagatcgagtctctgtcctcgagtctgaccagattcgccacgtcggatgctgccaggaagttgcaagccaagttgaaagagtttgaagagaagaacagttgctacctagacaaattacatctcgatattaataaccagacgagtgcgaaagagatcgcagatgatgtgctgccaaggaacccattcttgattctcgctgatgacgcagtgccggacatatcacaagctgagagatccgctgtgctagtacactccgcactgcggtttatttccgctctaaagaacaacaagctgcctcctgatgtcaacacgaagaacggaaagtacttgtctatggaaccttacttgaatctgttcggtactacaagatgccccatctttgaagaaggtgaagtggaaaatttcgatctggacaaaccttacactgcgtctgacctcgatggctctgacgaaagctcagatgagttcgacgatgactatgaattcgaagctggtgaaggaacaaatgattttggtgataacaatagaagaagaaactctttcattggtgccggggatgatgatgacgggctagagcctaagaaattgatcgaggaagctaacaaagaagttgaagaagaagaacaaaaagccgaacatcaacgccgccccacaactgcatccactacaacaactattaacagtacacaatctgccggtgacaaagaagaagaagacgaaagactgggccaagaagtgttcaaacgccatggtatcacagttaaacgccaccatgattcaaaacatattctggtaatatctaagggccagtattatactgtcgatgtcctcgacgaagaaaataaaattctatacaatgcaactgcattgacatccatttttcaccacatactagatgatgctgagaaatcatactcatttaggaaatctacggcattgggtagtttgacttcgcactctttcaaaaattggaaatacgccagaaagagactacagaagagatatccaaacgaattacatttgattgattcagcattatttgttctggtattggatgaatcagctggtaacactgcagatgttgccgcagatgaagcagagctgaaaccaggctccatccaagccacttccaacacttgtaaaaggttgttctacggaactagtattattgataatggtggtcatcaaatcggttcctgtgtctctagatggtatgacaaattgcaattagtggtcaccgctgatgtcaaagctgcagtcatttgggactctttcacatgtgatggttctgtggtgcttaggtttacttctgaagcatacactgaatctattttaagattagctagagctgttaacgctggtgatcctaggttctcattgtggccatctgtagtagattctgtatgcgacaaagaaattgcaaagacagctggtgatattaagtctggtgaaataagtcctgacttgcttgttaacaaaattgattggtccttcagtaatattctaaacacacatgtgcatttgtctgagacgaagctagctgatttgatttcaaaacacaatattgtaagatcttctgttcccttaggaaggagatctgctcaaaaattgggtattaaccctgactccatgatccaagtggctttacaagtggccttctattcactatacggtaaaatggtatatggattcgagcctatttccacaagatgtttcaagaactctaggtcctcgttcattaatatccagaacaaagaactacttgagctttgccaattgttcatatctacttcaatggacggtctaggtaaattggataaattcatacaaagttgtcagaaacatacagaaactgtcagattgaccaaacaaggcaaagggtttgagaaacattttaatgcattgaagtacttgtacaaattccatgatctttatggcatcgagttaagtgaagaagataaacagatggctgcatctgtttttgaaagcgaagccatagcaccattctctgctccagaattaatcattgctaactgtggtaactctgctacgacaaccttcggtatcactcctgcggtaccacacgggtttggtatcggttacattatcaaggatgatcagtgcgatttgacagtaacttcccaatttagacaaggtagcagattactgttcatgctaaactgggttctgaatgagataagaagtttctggagaatggctcgtgccacttctcaaacaaagagtggtgttaaaattagtcctatggtggataggctgtatgagatggacaatgctttgaattcaaagaatcgtacgtcttccaacctgaacatgaacactgcatacggcttatttgacttggatgctcatgttgacagcagaagcgtttcaaaatctccatcgctaaagaacttacctgcgaagtttgctgagatgacacctttcaacccattggtgacagcgcattccagtctagcgctttcagttcctactgagaaggaaaagcacgatacaggtcaccagattttgcagtttcaaccaaagatcattggtgatgaaggcgacgatgacgacatagctcttccaagtgtggaagacatgaacttatcagcagcagatgctgccaagagacgtaatgttatcgactccaaatttgaaattgattttgacaggtcccgtgttggacgtaagattgttacatttgactag

SEQ ID NO: 2512 - protein, 951 aa, Candida glabrata
MSEEGTFAHEESLPRLPLPDLESSFEQLKASLEPLYYADGYYQHPLDPEQIESLSSSLTRFATSDAARKLQAKLKEFEEKNSCYLDKLHLDINNQTSAKEIADDVLPRNPFLILADDAVPDISQAERSAVLVHSALRFISALKNNKLPPDVNTKNGKYLSMEPYLNLFGTTRCPIFEEGEVENFDLDKPYTASDLDGSDESSDEFDDDYEFEAGEGTNDFGDNNRRRNSFIGAGDDDDGLEPKKLIEEANKEVEEEEQKAEHQRRPTTASTTTTINSTQSAGDKEEEDERLGQEVFKRHGITVKRHHDSKHILVISKGQYYTVDVLDEENKILYNATALTSIFHHILDDAEKSYSFRKSTALGSLTSHSFKNWKYARKRLQKRYPNELHLIDSALFVLVLDESAGNTADVAADEAELKPGSIQATSNTCKRLFYGTSIIDNGGHQIGSCVSRWYDKLQLVVTADVKAAVIWDSFTCDGSVVLRFTSEAYTESILRLARAVNAGDPRFSLWPSVVDSVCDKEIAKTAGDIKSGEISPDLLVNKIDWSFSNILNTHVHLSETKLADLISKHNIVRSSVPLGRRSAQKLGINPDSMIQVALQVAFYSLYGKMVYGFEPISTRCFKNSRSSFINIQNKELLELCQLFISTSMDGLGKLDKFIQSCQKHTETVRLTKQGKGFEKHFNALKYLYKFHDLYGIELSEEDKQMAASVFESEAIAPFSAPELIIANCGNSATTTFGITPAVPHGFGIGYIIKDDQCDLTVTSQFRQGSRLLFMLNWVLNEIRSFWRMARATSQTKSGVKISPMVDRLYEMDNALNSKNRTSSNLNMNTAYGLFDLDAHVDSRSVSKSPSLKNLPAKFAEMTPFNPLVTAHSSLALSVPTEKEKHDTGHQILQFQPKIIGDEGDDDDIALPSVEDMNLSAADAAKRRNVIDSKFEIDFDRSRVGRKIVTFD

SEQ ID NO: 2513 - DNA, 2052 bp, Ashbya gossypii
  CDS (1)..(2052)
atggcgcaaaacaacacgggcctcgatgacagccagctggaccggttgcccatcccaccgctggcggacacgctgcagcggtacctggatcggctggagccgctacaggaggagcacaagttccagaggacacttgctgcggtgcgggcgtcggaagaacagctgacgtgcctggacagacggctgcgacaatacgacagcgagctggcgttggtcgagccggcgacgacatatatcgagcagttctggtacgactcgtacctgcagaccgacgaatcggtggtggtgaacatcaacccgtacttccagctggcggacgatccgacgatgcagaacatctcgcggggcggcttaggggagcactccgtgcagataaaacgtgcgtcgaagctggtggtgtctattttgaagtttgtgagggcgatcaggcgcggctcgctgagcccagacacggtgcgcggcgtgcgcctgtcgatggaccagtacgcgaagctgttcgggtcttcgcggataccgccggggcccggagaggactcttgccatctgcagacagatcccacgtcgcaccacgtagtggtgatgtatcagtcgcaattttactggtttgatgttttggatgtcaacaatgagcctattttccagacgcctgaggagctcgagtggaacctgtactccataataatggacaaggagcgcgaacagggtgcgccttacccgtggggcgtgttcagcacagaggtgacgggggtgtggtctgcgattcgccagcacatagcaaatgcggaagatcacactaactggaacaacctgaagatcatagacagcgcgctcttcatcatatgcctcgacgatgtcgagatcgcagaaggagttgaaatggcgcagtccatgctgtgtggtacctctgacatccaggtcccaacgccatccgagttgaagcagaacatcaataacggtatcccatccggagtgcagcgtggcacgtgcctgaatcgctggtactgcaagctgcagctcatcgtcaccaaaaatggcaaggctgggatcaactttgagcacacatgtgtcgatggccacacggttttgcgtttggcgcgggatatctacacggacagcattctgaacttcgctcaggggattacaaaatcagtaccgactgtgttctcatctgagccatcgtcgtgcccgtataggaacggatcttcaggcgccaacttgatcaccatcccgaggcgactggagtggaaacccgactcttatctcttgtcctcgctgcacttcgctgagacacggttaagcgatatgctgtcacagtttgacttcgcggtggtggacttccgtcgctatggctccaatcacatcaagacacacttcaagacctcacccgacgcgttcatgcagatggcattccagacagcatattacgcattgtatggtaaattcgagatgacatatgagcccgctatgacgaaatcgttccgcaatggccgcacagaggcaatccgcaccgtctcgcatgcgtccaagacatttgtgaagtcgatgttcgacaacgttagcaccgataaagagaggatgcagctgctgcaaagcgcgtgcgctcaccactcaaaaatcacccgcgaatgtggcgcaggccagggccaggaccgccatctctacgctctttactgtctgtggaaaaataatctctgtgacgaaatactctccatccctctgttcgaagatccaggttgggagttgctcacgacgaacgtaatcagcacctctaattgcagcaactcctgcctcaagagcttcggctttggtcctgtgtgcgccaatggcttcggcatcggatatatcattcgcggtgacagcctttccattgtgatcacgtcacggcacagacaaaccaggagactggcttcgctgattgagcggtttctcaccgaactagagcgtaccgcccagcgggccagctccgaagccggcttacgcgccgaaaagtccaacgacctcaagtacttgctatccggttacgactatttcgatgtcagcatccttggctag

SEQ ID NO: 2514 - protein, 683 aa, Ashbya gossypii
MAQNNTGLDDSQLDRLPIPPLADTLQRYLDRLEPLQEEHKFQRTLAAVRASEEQLTCLDRRLRQYDSELALVEPATTYIEQFWYDSYLQTDESVVVNINPYFQLADDPTMQNISRGGLGEHSVQIKRASKLVVSILKFVRAIRRGSLSPDTVRGVRLSMDQYAKLFGSSRIPPGPGEDSCHLQTDPTSHHVVVMYQSQFYWFDVLDVNNEPIFQTPEELEWNLYSIIMDKEREQGAPYPWGVFSTEVTGVWSAIRQHIANAEDHTNWNNLKIIDSALFIICLDDVEIAEGVEMAQSMLCGTSDIQVPTPSELKQNINNGIPSGVQRGTCLNRWYCKLQLIVTKNGKAGINFEHTCVDGHTVLRLARDIYTDSILNFAQGITKSVPTVFSSEPSSCPYRNGSSGANLITIPRRLEWKPDSYLLSSLHFAETRLSDMLSQFDFAVVDFRRYGSNHIKTHFKTSPDAFMQMAFQTAYYALYGKFEMTYEPAMTKSFRNGRTEAIRTVSHASKTFVKSMFDNVSTDKERMQLLQSACAHHSKITRECGAGQGQDRHLYALYCLWKNNLCDEILSIPLFEDPGWELLTTNVISTSNCSNSCLKSFGFGPVCANGFGIGYIIRGDSLSIVITSRHRQTRRLASLIERFLTELERTAQRASSEAGLRAEKSNDLKYLLSGYDYFDVSILG

SEQ ID NO: 2515 - DNA, 2535 bp, Ashbya gossypii
  CDS (1)..(2535)
atggtagaggacgatagtgcacccgctatggagttgacgtttgcacatgagacaaggttgcgcaagctgccgctccctgggctgaggtctacagcttcattgttgactgcagcgctggagccatttcatagtggtggcacacatgatggtggtggcgcggacgtcgagttggcaagctacctgggttctctagcagactcgagcggagcgctgaagctgcaagcgaagttggaggaattcgacaagcacagcgcgtgctatctggaccggctgcatctcaatatccacaaccatgttgccggcaaggaaatatcgcaggatatcctgccacgaaatccgttcctagtactggcggaagatgcagagatcgatatcagccaggaggatcgtgccggcgttctttgctactccgccctgcgctttgtgtcggcagtgcggcggcagcagctacctcctgaccacagccgtggccaggccttgtctatgaagccgtatctgaacctctttggcacaacgaggtgtcccattttcgaaccaggtgaggtggagtcattcgatttgaataagccttactccgagagtgatgtagaggcagagacccgaagcgatctgatggagcctgcgactaaagttacatctccagatgacagaccacggtcagagggcagcgacgagccgttcaaccaccatggtatcagcatgaaacagtaccccgcgtcaaagcacattttgatactttccaaggggcagtattatacgctggatgttctggatgacgatcataggattctctatacggacaaggatatggcaaaagtgtttgcatcggtcttggaagactcccggaagtcgtatagtgtggacagatccactgcactaggcagtcttacctcttattcttttaggaactggaagtatgcccgtaagcgccttcagaagcggtttcctgttgaattagaaatgatagattccgcgttgtttgtcatagtaatggatgaatctgatcgctcggacgaagaccaatcttacgccaagcggctattttacggtacgagcgtaattgatgaggtgactggtctccaagttggttcttgtacaacccggtggtacgataagttgcagcttgttgttactgctgatgcaaaggcttgtattatttgggattcttttacctgcgaggggtctgctgtgttgcgttttacctctgaggtatatgctgaatccgtgatgcgcttggctagagatgtcaatgagaattcgtctgcattttctttatggccatcgattgagacacggcgtatattggatgtgggagacaatgcggacaagtttttaaggaaaattgagtggtctttcctcaatgagatgaatacccacattcatctctcggaaaccaaactatcggatattatctcgaagcatgatattataaattacacgctcccgtttggccgtcacattgcgcgccggctcaatattcgtcctgattcgatgatacaggttggcctacaaattgcacattacgcactttatgggaaaattatatttgccctggaacctgtttctgttcgatctttccaaaattctatgtcagccttcataccgatccagagtacgaagcttgcagagctctgtcgacagttcatttcgaattctttggatacatcgctaaaatacatgcagttcatcgaagcttgccgtgcccacagtgagctcattgaacaggctaaacagggacacgccgccgagaaacactttaatgcattgcggcaccttttcaagttccggcgtcattttggtatcgatttagacgtagatgaaattgaacagttgtctggtcttttcgatagcccacaactggtgcctttctttactcccgagatgattgcttcaaattgcggaaacgcagccatgacaatgttcggagttacacctgcaatgagacaaggattcggaattgggtacatcctgaaaaatgaacaatgcgacctgacggtaatttggcagtaccggcagggcaaacgtttaatgttcatgcttgaatgggttctcacagagatatgcgagtattggaagtcaacgcggaagcatagtgaggacattaaaattagtccgacggtagatttgctttacggaattgataacgccctaaaatcagagaaagtggagcggtcagaaagaagaccttctgctttttataatggagggtacggtctttttgatttgaaggggcatgttgaatcaaggagcagcgtgtgctccacccctgtctcacgctctggttctcacctgaaactgaccgaactgatcacgtctctgtcttttaacaatgtcaacgctttgaccacggaggaagacaaacaagttactggctatgaaattgcaaaaatagatcagccaaagtccagttccccagatacagacgaactagcgaccgatgataagccaagtagaaagagcaacgttatcaattctaaatttgtcattaattttgacagatccagcgtaggccgcaaggtgaacacatctgattga

SEQ ID NO: 2516 - protein, 844 aa, Ashbya gossypii
MVEDDSAPAMELTFAHETRLRKLPLPGLRSTASLLTAALEPFHSGGTHDGGGADVELASYLGSLADSSGALKLQAKLEEFDKHSACYLDRLHLNIHNHVAGKEISQDILPRNPFLVLAEDAEIDISQEDRAGVLCYSALRFVSAVRRQQLPPDHSRGQALSMKPYLNLFGTTRCPIFEPGEVESFDLNKPYSESDVEAETRSDLMEPATKVTSPDDRPRSEGSDEPFNHHGISMKQYPASKHILILSKGQYYTLDVLDDDHRILYTDKDMAKVFASVLEDSRKSYSVDRSTALGSLTSYSFRNWKYARKRLQKRFPVELEMIDSALFVIVMDESDRSDEDQSYAKRLFYGTSVIDEVTGLQVGSCTTRWYDKLQLVVTADAKACIIWDSFTCEGSAVLRFTSEVYAESVMRLARDVNENSSAFSLWPSIETRRILDVGDNADKFLRKIEWSFLNEMNTHIHLSETKLSDIISKHDIINYTLPFGRHIARRLNIRPDSMIQVGLQIAHYALYGKIIFALEPVSVRSFQNSMSAFIPIQSTKLAELCRQFISNSLDTSLKYMQFIEACRAHSELIEQAKQGHAAEKHFNALRHLFKFRRHFGIDLDVDEIEQLSGLFDSPQLVPFFTPEMIASNCGNAAMTMFGVTPAMRQGFGIGYILKNEQCDLTVIWQYRQGKRLMFMLEWVLTEICEYWKSTRKHSEDIKISPTVDLLYGIDNALKSEKVERSERRPSAFYNGGYGLFDLKGHVESRSSVCSTPVSRSGSHLKLTELITSLSFNNVNALTTEEDKQVTGYEIAKIDQPKSSSPDTDELATDDKPSRKSNVINSKFVINFDRSSVGRKVNTSD

SEQ ID NO: 2517 - DNA, 1830 bp, Neurospora crassa
  CDS (1)..(1830)
atggcgcaaacaaggaagaacagctccctccccgccggctatgtcgaggacaagtccaaaggccccatgctccgcttccaggagtctctcccccgtcttcccgtccctaccctcgaggagacggctgcccgctactaccagtctttgaagccccttctcagtccccaggagctcgagaacagtaagaaggccattgacgccttcattgcccccaatggccctggtcgcaagctccaggagaagctggtcgcccgtcgcgaagaccccaagcacaagaactggctctacgagtggtggaacgatgcggcctacctctcctaccgcgaccccgttgtcccctacgtcagctacttctactctcaccgcgatgaccgccgccgccgcgaccctgccaagcgcgctgctgccatcaccaccgccgctctcgagtttaagaagatggtcgaccagggcactctcgagcccgagtacatgaagaagctccccatctgcatggactcttacaagtggatgttcaacgccagccgcgttgctgccaagcccgccgattaccccgtcaagttcagcgccgacgagcacaagtacatcctcgccatccgcaagaaccagttctacaagatctaccatgaggttggcggcaagcagctcaacaccgctgagctcgagcaggccttcaagcgcgtctatgagctcgctgcctcgcgcgctcccgctgtcggtgctctcacctccgaaaaccgcgacgtctggaccgacgcccgcgctactctcctctccgccgaccccaagaatgctaaggctctcgaggccattgaggcttcttccttcgtcgtctgccttgacgatgccgcccccgtcaccctcgaggagcgcgctcaccagtactggcacggtgacggccagaaccgctggtacgacaagcctctccagttcatcgtcaacgacaacggcacctcgggtttcatgggcgagcacagcatgatggacggcacgcccactcaccgcctcaacgactttgtcaacgacgtcattttcaacaacaagctcgacttctccgacccctcggtgcgctccaacctgcccgagcccgaagccgtcaagttcaccgtcaccaaggaggtccaggccgagatcgaccgggccattactgacttcagcaacgtcatcggccagcaccagctcgcggtgcaggccttccagggctacggcaagggtctgatcaagaagttcaagtgctcccccgacgcctacgtgcagatgatcatccagctggcctactacaagatgtacggcaagaaccgtccgacctacgagtcggccgccacccgccgcttccagcagggtcgcaccgagacgtgccgctccgtcagcgaggccagcgtggccttttgcaaggccgccaacgacgcgagcgtcgacgacaagaccaaggtcgagctcttccgcaaggccattgactcccacctcgagtacatctcggccgcctcggacggcaagggcgtcgaccgccacttgtttggcctcaagcgcctgctcgagcccaaccaggaggtccccgctctgtaccaggatcccgcctacggatactcgagttcgtggtacctgtctacttcccagctgagctccgagttcttcaacggatacggatggagccaggttattgaccagggattcggtattgcttatatgatcaacgagaacagcctcaactttaacattgtctccaagggcctcggctccgacaggatgagctactacctcaacgaggccgccaacgacctccgcgatctccttacccccactctggaggctcccaagtccaagctctaa

SEQ ID NO: 2518 - protein, 609 aa, Neurospora crassa
MAQTRKNSSLPAGYVEDKSKGPMLRFQESLPRLPVPTLEETAARYYQSLKPLLSPQELENSKKAIDAFIAPNGPGRKLQEKLVARREDPKHKNWLYEWWNDAAYLSYRDPVVPYVSYFYSHRDDRRRRDPAKRAAAITTAALEFKKMVDQGTLEPEYMKKLPICMDSYKWMFNASRVAAKPADYPVKFSADEHKYILAIRKNQFYKIYHEVGGKQLNTAELEQAFKRVYELAASRAPAVGALTSENRDVWTDARATLLSADPKNAKALEAIEASSFVVCLDDAAPVTLEERAHQYWHGDGQNRWYDKPLQFIVNDNGTSGFMGEHSMMDGTPTHRLNDFVNDVIFNNKLDFSDPSVRSNLPEPEAVKFTVTKEVQAEIDRAITDFSNVIGQHQLAVQAFQGYGKGLIKKFKCSPDAYVQMIIQLAYYKMYGKNRPTYESAATRRFQQGRTETCRSVSEASVAFCKAANDASVDDKTKVELFRKAIDSHLEYISAASDGKGVDRHLFGLKRLLEPNQEVPALYQDPAYGYSSSWYLSTSQLSSEFFNGYGWSQVIDQGFGIAYMINENSLNFNIVSKGLGSDRMSYYLNEAANDLRDLLTPTLEAPKSKL

SEQ ID NO: 2519 - DNA, 2388 bp, Candida albicans
  CDS (1)..(2388)
atgtcaacttatagatttcaagaaacattggaaaaacttcctattcctgatttagttcaaacttgtaatgcatatctcgaggcattaaaacctttgcaaactgaacaagaacatgaaaataccaaaattgccgtggacaaatttctcaatggtagcaattccaaaaccactaataatggagtggttacaggaagtggtattggtcattatttagatcgagaattgcgtcaatatgctaaaactagacctagttatatcgaacaattttggtatgattcatatttgaattatgattcccccgttgtattaaatttaaatccattttttcttttagaagatgatccatttactaatgaatcaagtagtattaatcctcaagttaaacgtgccaccaatttaactttatcatcattaaaattcattcaagcattgaaaaatgaaactttaagcgttgatacattgaaaaatgggaaaccgttatgtatgtatcaatatactaaattatttggtgcttcaagaattccatctcaagaaggatgtatgatgcaatctgatccattatcgaatcatattgttgttatgtcaaagtcgcaattttattggtttgatgtattggattctcataataatttgatattaaatgaagcagaattgaatattaattttaattcaatcattcgtgattctttaaatactccttcagatgaaattgctaaatcgtcgtttggggtattgactacggaaaatagacgtgtttgggctaatgtcagaaacaatttgattggtaataataccattaatcgtgaggtgttatcgattattgattcagcattatttattttatgttttgatgatattgccattgatgatttatcagaattgtcgaaaaatatgctttgtggattatctatattagataatggtatccaagttggtacttgtactaatcgttggtatgataaattacaaattattgttaccaagaatgctaaagcagggattaattttgaacatactggtgttgatggtcatactgttttacgatttgtaagtgatatttatactgattcaattttatcctttgctaattccattaacaacaatgctccttcattatggaaatccactaccaaaaatgatgttcccgattatgaattggaagaagaattaattactattccacgtaaattggaatgggatttaacacctgatttatcattggttttaagatttggtgaaactagattgtcggatttaatcaatcaaaatgaattccgtcatttagaatttaaaaattatggttcttctcaaattaaaaaaatgaaattttcaccagatgcttttgttcaaatggcgttccaagcaacttattatgctctttatggtaaagttgaatgtacttatgagccagccatgaccaaacaatattatcatggtcgtactgaagccattcgtacagtttcccaagaatcaaatttatttgttcgaaaattttttgattcaacagtatcaatgaaggaaaaattacaatatttatctgatgcttgtaagaaacattctgaaaagacaagaatgagttctatgggtcaaggtgttgatcgttacttatatgcaatgttttgtatttggaaaagatatttacaagattatgaagaagagcaacaacaacaacaacacccagttgaagaaggaagtggtggtgaacaacagatggaagcagtagggttatctagagatgataccatagttgttcaaatggatggtgaacatgacgatgatgattcaacaactgttgttggaaccaatggtggtaaaaaccttcatgcatctggatctcatggtaataacgatatctatgataattttgatttattaaaaacagtaccagaattatttgctgattcaggttgggataaattaaacagcacaattatttctacatccaattgtggtaatccatcgttaagattgtttggatttggtccagtttctgctaatgggtttggtattggttatattcttaaagatgattcaatttcaatttgtgctagttccaaacatcgtcaaactcaaagatttttggtgacattgaattcgtatttattggaaattcaaagtatttggaaacaagtggaaaccatgaataaattgcaggatgaattggcattgaagattgatattagtaaaaaacaaaaagaaacagaagaggaacaagctagaccaaaacacaatattaatgcattattgggaggttatggatattttgatatgggcgaagaagatattaaaagtagaggacaatctcctgaaccaccatttttaaaccgagcaaattcaagttttagtgttcgtgaaattggtaaaaaattacgattaagtgaatattaa

SEQ ID NO: 2520 - protein, 795 aa, Candida albicans
MSTYRFQETLEKLPIPDLVQTCNAYLEALKPLQTEQEHENTKIAVDKFLNGSNSKTTNNGVVTGSGIGHYLDRELRQYAKTRPSYIEQFWYDSYLNYDSPVVLNLNPFFLLEDDPFTNESSSINPQVKRATNLTLSSLKFIQALKNETLSVDTLKNGKPLCMYQYTKLFGASRIPSQEGCMMQSDPLSNHIVVMSKSQFYWFDVLDSHNNLILNEAELNINFNSIIRDSLNTPSDEIAKSSFGVLTTENRRVWANVRNNLIGNNTINREVLSIIDSALFILCFDDIAIDDLSELSKNMLCGLSILDNGIQVGTCTNRWYDKLQIIVTKNAKAGINFEHTGVDGHTVLRFVSDIYTDSILSFANSINNNAPSLWKSTTKNDVPDYELEEELITIPRKLEWDLTPDLSLVLRFGETRLSDLINQNEFRHLEFKNYGSSQIKKMKFSPDAFVQMAFQATYYALYGKVECTYEPAMTKQYYHGRTEAIRTVSQESNLFVRKFFDSTVSMKEKLQYLSDACKKHSEKTRMSSMGQGVDRYLYAMFCIWKRYLQDYEEEQQQQQHPVEEGSGGEQQMEAVGLSRDDTIVVQMDGEHDDDDSTTVVGTNGGKNLHASGSHGNNDIYDNFDLLKTVPELFADSGWDKLNSTIISTSNCGNPSLRLFGFGPVSANGFGIGYILKDDSISICASSKHRQTQRFLVTLNSYLLEIQSIWKQVETMNKLQDELALKIDISKKQKETEEEQARPKHNINALLGGYGYFDMGEEDIKSRGQSPEPPFLNRANSSFSVREIGKKLRLSEY

SEQ ID NO: 2521 - DNA, 2418 bp, Aspergillus fumigatus
  CDS (1)..(2418)
atggaagccccccggtctcaaccaagcgtcgatgctagggttaatgcctccaacccaacatcagtgaacggcggatcagccccggctcagtcccgtgagaaaaagggcttgacatttgccaaccaggactcactgccaaagttgcctattcctgaccttgagagcacatgcaagaaatacttagaagcactatcagctttgcaaaccccacgagagcaggaagaaacaaaggctgctgttcaggagttcctcaaaacagacggccctattcttcaggagaagttgaagaattatgcctcgtccaaaacgagttacattgaacagttctggtacgactcttacttgaactatgacaatcctgttgtcttgaatcttaatccgttctttttgctggaagacgaccccacgcctgccaggaacaatcaggtgactcgggccgcgtctcttgtcgtatctgctctctcctttgtccgggctgtcagaagggaggaactaccacctgacacggtccgaggcacaccactatgcatgtaccagtactctcgactattcggaactgcgcgtctacccacggacaatgggtgtatcatcagccaggacccgcacgcaaagcacatcgtggttttgtgccggggtcagttctactggtttgatgttcttgacgataacaacgacttgatcatgagcgagaaggatatcgccgtcaatctgcaggtgataattggcgatgccgaacagaccccagtacaggaggccgcaaagggtgcccttggtgttctcagcaccgagaatcggaaagtatggtcgggtctgagagatatactaaccaaggacgaggggtctaacaactcggagtgcctaaacattgtcgacacagcattgtttgtcctctgtctggacgacacagaaccggaaaatacgtcgcagctttgcgccaacatgctctgtggtacgagcgaggtcgtcagaggtgtccaggttggtacctgtaccaaccggtggtacgacaaactgcagattattgtgtgcaagaacggaagtgctgggatcaactttgaacacactggtgtcgacggccacacggttctgcgcttcgctagcgacgtttacacagatacgatccttcgtttcgctaaaaccatcaacggtcaagccccgtcgctctgggcaactgccagccctgatccttcaaagcgggaccccaagagctttggcaatgtcagcacgacaccgcgaaagctcgagtgggacatggttcctgagttgagcattgccttgcggtttgccgagtctcatcttgccgatctccttcaacagcatgaattcgctgttcttgactttgaaggatatggcaaaaatttcatcacttcgatgggcttctctccggatgcctttgtgcagatggcatttcaagccgcttattatgggttgtatggtcgcgtcgaaaacacctacgagccggcaatgaccaaattcttcttgcatgggcggacagaagccatccgaacggtcaccaatgagtgtgttgactttgtgaagaccttttggggcgacaaccctgcggagcagaaggtcaacgctcttcgtaaggcgactgaaaagcacaccgccatcaccaaggaatgctccaagggccggggtcaggatcgccacttgtacgccctgtattgtctttggcaaagatcatttgacgaggacagtccgtcagcgggcaatagcgttgaaaatggatccaacggatactcgagccccgttgagaacggatcggcgatcggttctcccaaaacgtcgtcctccatgtctgaggatggcctctcctcgaacggctatagctaccgcggtatccgcacactgcagcccactccggccatcttcagtgaccccggctgggacaaaatcaacaacacgatcttgtcaacatccaactgcggcaacccgagtctgaggcatttcggtttcggaccgacatccgcagatggatttggtatcggttacatcatcaaagacgattctatctcgatctgtgcctcgtccaagcaccggcagaccgcccggttgatgcaaacactggagtcgtatttgtacgagattcggaagctgctccgagccaccaacagtaaggcggtcagccctcgcacaagcagggcacgcgagatggagatggttgccgaacggttccaaaatgatcatcgtcggggccggctagtgcgtggcgactctggtttggtgcgacggggcacggatacgccaactacggacagtggcgatatcgaggatgatggcatgggtggatatggcttctttgactcgggcatgctgcttcatgctctaaaaggattgagtgtcgaccgagagcgggccgataagcctgcaaaacgtcggttcatcggaaagaagctgcggttaaacgaaatctga

SEQ ID NO: 2522 - protein, 805 aa, Aspergillus fumigatus
MEAPRSQPSVDARVNASNPTSVNGGSAPAQSREKKGLTFANQDSLPKLPIPDLESTCKKYLEALSALQTPREQEETKAAVQEFLKTDGPILQEKLKNYASSKTSYIEQFWYDSYLNYDNPVVLNLNPFFLLEDDPTPARNNQVTRAASLVVSALSFVRAVRREELPPDTVRGTPLCMYQYSRLFGTARLPTDNGCIISQDPHAKHIVVLCRGQFYWFDVLDDNNDLIMSEKDIAVNLQVIIGDAEQTPVQEAAKGALGVLSTENRKVWSGLRDILTKDEGSNNSECLNIVDTALFVLCLDDTEPENTSQLCANMLCGTSEVVRGVQVGTCTNRWYDKLQIIVCKNGSAGINFEHTGVDGHTVLRFASDVYTDTILRFAKTINGQAPSLWATASPDPSKRDPKSFGNVSTTPRKLEWDMVPELSIALRFAESHLADLLQQHEFAVLDFEGYGKNFITSMGFSPDAFVQMAFQAAYYGLYGRVENTYEPAMTKFFLHGRTEAIRTVTNECVDFVKTFWGDNPAEQKVNALRKATEKHTAITKECSKGRGQDRHLYALYCLWQRSFDEDSPSAGNSVENGSNGYSSPVENGSAIGSPKTSSSMSEDGLSSNGYSYRGIRTLQPTPAIFSDPGWDKINNTILSTSNCGNPSLRHFGFGPTSADGFGIGYIIKDDSISICASSKHRQTARLMQTLESYLYEIRKLLRATNSKAVSPRTSRAREMEMVAERFQNDHRRGRLVRGDSGLVRRGTDTPTTDSGDIEDDGMGGYGFFDSGMLLHALKGLSVDRERADKPAKRRFIGKKLRLNEI

SEQ ID NO: 2523 - DNA, 2757 bp, Neurospora crassa
  CDS (1)..(2757)
atgactcttactgaagttcgcactttcactcctccgagagctttcggtgacgctatcagccaaccagttgtcacaccagttatcacaacttcgacaacaccgcgctccatccccgaactccagatcacactcaagcccgccatcagcccatcaccaaaagcacgtcagaacagcatggcctctactcccgaagaaaagtccaaaggcggcgtaacatttgcccaccaggacaagctccccaagcttcctatcccagaactcgaaagcacctgccagagatatctcgcctccctaaaaccgcttcagacccacagggaacatgccgagacaaggcgcgccgttcaggagtttcttcaaacagatggccccgagctgcatgaaaagttgaagaaatacgctgaggaccaaacaagctatatcgagcagttctggtatgattcgtacctcaactacgacaaccccgtcgttctcaacttgaatccctttttcttgctcgaagatgatccgacaccggctcgcaacaaccaagtcactcgggccgcctccttgattgcgtcggctttggagtttgtaagggcagtccgcagggaggagcttccaccagacacggtccggggaacccccctagacatgtaccagtactcacgcctctttggtaccgctcgtgttcccaccgattccggatgccagattcagcaagatgacaagacgaagcacattgtcgtcatgtgccatggccagttctactggttcgatgttttggacgataactctgatgccatcatgaccgagaaggatatcgccatcaacctccagaccattgttgacgacgcccgacaaacccctatccaagaggctgccaagagtgccctcggtgtgctgagcacagagaaccggaaggtctggtcgggacttcgtgacgttctgacgagtgatcccggttccaacaacgccgactgcctgagcatagtcgacagtgctctcttcgttgtctgcctggattatacggaaccaaccaccgctgctgctctttctcagaacatgctctgtggcactagcgagattgagaagggagttcagattggcacctgcaccaaccgctggtacgacaagcttcagatcatcgtgtgcaagaacggcagcgccggtatcaactttgagcacaccggtgtcgatggtcacaccgtgctgcggtttgccagcgacatctacaccgacaccattctccgctttgcccggtctatcaatggcaaggctccctcgatgtgggcttcaacgagtcccgacccgtcgaagcgtgaccctgagagcttcggagacgtgagcaccaccccccacaagctcgagtgggacatgggtcccgagctcagcgtggctgtccgcttcgctgagacccgcctggccgatctcatagagcagaacgagttccaatgtctcgacttccacggctacggcaagaacttcatcacctccatgggcttctccccggacgcctttgtgcagatggccttccaagcagcctactacggcctctacggccgcgtcgagtgcacctatgagcctgccatgaccaaaatgttcctgcacggccgcaccgaggccatccgcaccgtctcggacgactcagtcaactttgtccagactttctgggctgacgcccccggcgacgccaaaatcgacgccctccgcaaggcctgccaggcccacgtcaacaagacccgcgactgcgcgaaagcccagggctgcgataggcacttgtacgccatgctctgcctctggcagcggatgcaggatgacgacgctgccagcaccaccaccgacaacagcatgaatggctattcttttgaagacggctccatcatcggctcgccatccaaggactccgtcttctcccaatccatggagtctcagtctgtcaacggcggtggtcgcgaacgtggcgactccatcaactcccacatctccgccaccccctcccaacgcggtggtgtacctcaaccactacccgccatcttcgccgacgccggctgggacaaactcaacaccaccatcctgtccacttccaactgcggcaacccgtccctccggcactttggctttggccccgtctccggcgaagggttcggtatcggctacattatcaaagatgagtgcatctccatctgcgtgtcgtctcgccatcgtcagacccgccgcttcgttgacactctggaatcctacctgcttgagatccgccgtattttgcgcatcgctgcaaggaacgccgcctccgccggtggtgttggtgccaccggtactaccggaaacaagggtatgagcagggctcgggagattgacgcggctgctatcaaccagaatggacaggaaaagctggctcgccccaagatcgggaacaggattaagtcgagggggaggttgatcacgggtcaaagcagcgggcttatgggtcacggaggaccaacgagcatgtacaccaatggaggcggcagcagtgtggggaacattaagggggcgggagggggcagtgttagtagcgcgatggaggagagcgtggtgatgagtgaggatgatgagattggtggttatggcttcttcgacgccggtatgctgcagcaagcgctcaaggcgcgccaacaggctcactaccaccatcattcccacaaccatgatagcagcagtgatgaccggagtaatcagagcagacaaaggaggagcaggagggatgtgggcaagaagttgcctttgatcgattactag

SEQ ID NO: 2524 - protein, 918 aa, Neurospora crassa
MTLTEVRTFTPPRAFGDAISQPVVTPVITTSTTPRSIPELQITLKPAISPSPKARQNSMASTPEEKSKGGVTFAHQDKLPKLPIPELESTCQRYLASLKPLQTHREHAETRRAVQEFLQTDGPELHEKLKKYAEDQTSYIEQFWYDSYLNYDNPVVLNLNPFFLLEDDPTPARNNQVTRAASLIASALEFVRAVRREELPPDTVRGTPLDMYQYSRLFGTARVPTDSGCQIQQDDKTKHIVVMCHGQFYWFDVLDDNSDAIMTEKDIAINLQTIVDDARQTPIQEAAKSALGVLSTENRKVWSGLRDVLTSDPGSNNADCLSIVDSALFVVCLDYTEPTTAAALSQNMLCGTSEIEKGVQIGTCTNRWYDKLQIIVCKNGSAGINFEHTGVDGHTVLRFASDIYTDTILRFARSINGKAPSMWASTSPDPSKRDPESFGDVSTTPHKLEWDMGPELSVAVRFAETRLADLIEQNEFQCLDFHGYGKNFITSMGFSPDAFVQMAFQAAYYGLYGRVECTYEPAMTKMFLHGRTEAIRTVSDDSVNFVQTFWADAPGDAKIDALRKACQAHVNKTRDCAKAQGCDRHLYAMLCLWQRMQDDDAASTTTDNSMNGYSFEDGSIIGSPSKDSVFSQSMESQSVNGGGRERGDSINSHISATPSQRGGVPQPLPAIFADAGWDKLNTTILSTSNCGNPSLRHFGFGPVSGEGFGIGYIIKDECISICVSSRHRQTRRFVDTLESYLLEIRRILRIAARNAASAGGVGATGTTGNKGMSRAREIDAAAINQNGQEKLARPKIGNRIKSRGRLITGQSSGLMGHGGPTSMYTNGGGSSVGNIKGAGGGSVSSAMEESVVMSEDDEIGGYGFFDAGMLQQALKARQQAHYHHHSHNHDSSSDDRSNQSRQRRSRRDVGKKLPLIDY

SEQ ID NO: 2525 - DNA, 2239 bp, Drosophila melanogaster
  CDS (76)..(2079)
tggactttgaaacgtcgcctctcgagtttaaacaacaaaagttactcaatttggaaagccatcgagtggatagccatgtttcggacccgggtgcaccgcaatctgtcgtggatatcgacgaactcgtcgaggacaacgaccactcatggccagcactaccaatacctgcaatgttccaagctgccaacgctgtactttcagcgctccttgccgcgattgcccattcctctgttggagaacagctgtcggcgtttcctggaggccaccaagccactactctcgccggcggagcaggcgcagacccagcaaacggtggaacagtttcgccaggggatcggcatggaactacacgcgaaactcaagagccatgatgcagagaacaagcataccagctacatctcgcagccctggttcgacatgtatctagccgatcgagcgcccctgccactcaactataatccgctgctggtgatgaaaagcgacgcgcgaccggagtaccagcaacaggtggttagggctaccaacctgatcatcagctcgttacggttctggcgatctctgcaggcggatctcctggagccggaggtgtaccacatgaacgccaagaagagcgacacttccagctaccgcaggtggatgaaggtggctcccaaagcctttgccacctacgcgtcttatgccttcaaggcctttccgctggacatgagccagtacaaccggttgtttggcacctctaggattcctaggatcggcaaggacgagctggtccagtcaccggacgccaagcacattctggttatgcgccgcggtcacatgtacgccgtaaatgtgctggactccagtggatacatcgagagtcccagtgtgattctgggcagactaagggctgtgcttaagcttgatgcagatcgcgaggcagccagcgtgccacttggtgttctgacctccggacagcgtgatgagtgggccaagacaagacagcattttgttagcaacaccaaaaatgccgatcttctggagagagaggtggatgcggctctgttctgcgtttgtctggatggcgaagaagatggagtctttaacgaaaaccagcaggagccgctgctcaagcatttgctggcgggaaaagcgcagaatcgttggttcgacaaatccatttccctgcttataagtgcagatggaacaacggctattaacttcgagcactcgtggggcgatggagtggctgtgcttcgctactttaacgagctctacaaggatactttgaagcagccgtttgtatccacggagacagtgcacactcccgccgaaggcgattttagcaacgtgcggcccatcaacttcgaaatcgacgatgccaccaagtcggccgtttcggaggcttataataaaaacgccagcattgtagataatctggacatgaatgtgctgaagtacccacacatcaacaagcccacatgcaagcagtatggcctaagtccggactccatcattcagctgtccttccagctggcttatcgccaagcctacagcggctatgtgggcagctacgaatcctgcagcacatccgccttccgacacggacgtaccgaaacgatgcgaccgtgcacaaatgccacacgggacttctgtgaagctatcctccagccggagaggagcaagcccagcgccggagaactacgagcaatgatcgacaattgcagcaaggtgcatggccagttaaccaaggaggcggctatgggccagggcttcgatcggcatctctttgcccttcggcacacggcccaaaaggagggaataccaattcccgatctctatgagactgaggcttacaagcgcattaataacaacatcattagtacctcaacactgggttcagatgccctgctagcgggttcctttggtccggtggtcaagaatggcttcggaatcggctattcgattcagaacgattttgccggcgccattgtcaccacgtacaaaaaccaggccgatgggaaggtgttcatagacagtctggaatcggcatttgataaaatttgcgctgtcatccagcagagcagcagtagcaagaagtaggagaaaatcgtgaggagtccgaccccgaatccaatgaatatggctttaacgtaacagggagatttattttgatgcttttacattgtatcccatgtgtctgaattgcaatatctttatctacaatttatagattatacactgaaaacattctaccccatct

SEQ ID NO: 2526 - protein, 667 aa, Drosophila melanogaster
MFRTRVHRNLSWISTNSSRTTTTHGQHYQYLQCSKLPTLYFQRSLPRLPIPLLENSCRRFLEATKPLLSPAEQAQTQQTVEQFRQGIGMELHAKLKSHDAENKHTSYISQPWFDMYLADRAPLPLNYNPLLVMKSDARPEYQQQVVRATNLIISSLRFWRSLQADLLEPEVYHMNAKKSDTSSYRRWMKVAPKAFATYASYAFKAFPLDMSQYNRLFGTSRIPRIGKDELVQSPDAKHILVMRRGHMYAVNVLDSSGYIESPSVILGRLRAVLKLDADREAASVPLGVLTSGQRDEWAKTRQHFVSNTKNADLLEREVDAALFCVCLDGEEDGVFNENQQEPLLKHLLAGKAQNRWFDKSISLLISADGTTAINFEHSWGDGVAVLRYFNELYKDTLKQPFVSTETVHTPAEGDFSNVRPINFEIDDATKSAVSEAYNKNASIVDNLDMNVLKYPHINKPTCKQYGLSPDSIIQLSFQLAYRQAYSGYVGSYESCSTSAFRHGRTETMRPCTNATRDFCEAILQPERSKPSAGELRAMIDNCSKVHGQLTKEAAMGQGFDRHLFALRHTAQKEGIPIPDLYETEAYKRINNNIISTSTLGSDALLAGSFGPVVKNGFGIGYSIQNDFAGAIVTTYKNQADGKVFIDSLESAFDKICAVIQQSSSSKK

SEQ ID NO: 2527 - DNA, 3100 bp, Saccharomyces cerevisiae
  CDS (821)..(2887)
aaattaatcagaattgaatctgagcgtatttatttgataacggtttacgtaactgttggaataaaaatcaactatcatctactaactagtgtttacgttactagtatattatcatatacggtgttagaagatgacgcaaatgatgagaaatagtcatcgttttcaacggaagctgaaatacaaggattgataatgtaataggatcaatgaatatcaacatataaaacgatgataataatatttatagaattgtgtagaattgcagattcccttttatggattcctaaatcctcgagaagaacttctagtatatctacgtacctaatattattgccttattaaaaatggaatcccaacaattatctcaaaattcccccaattctcatcagtaacaccccaccccgtattacttttaccgtgatgaagattggcatcgttactttctaaacgtaggacgtgcggaatgacaaaaccatcagcagtgtcacgatctctccagtcacaatggcaatcatgagtgcatagtccaaagtaaaggggcaaggaaaagcatgattgaaaggactccccatctggactctatatgtcatcagcggctaaaaaaaagcatatagcacaacatcagcatcagcatcagcactagagtcatcggcccggcggtccgcggtcatccccgcggactttccgtccgcccggcgggctgtatcagcgtcaactggaacgcgcatatatatacaagacacacataacatagaagcacacccacgacaataaccacacgacaataaccacacccgcccacccctcctttccgtatacaatgccaaacttaaagagactacccatcccgccactgcaggacacgctcaaccgctacctggcacgcgtggaaaccctgcaggacgagcgccaaaaccgccgtacgcgccgcactgtgctctccgcagaaaacctggacgcattgaacacgctgcacgagcggctgctagaatacgacgcacggctcgcggaaagcaacccagagtcctcatacatcgagcagttctggtatgacgcgtacttgctatatgatgcaactgtcgttctcaacgtcaacccgtacttccaactgcaggacgacccaaccatcaaagacacaccagagacggcggcacagggcccctatggcgcacacacggtgcaggttcgtcgtgccgcacgactcaccacctctattctcaagttcatccgccagattcgccacggcacactccgcacagacactgtgcgcggcaaaacgccgctgtcgatggaccagtatgagcggctattcggctccagtagaatccctccgggtcccggcgagccctcttgccacttgcaaacagacgccacgtcgcatcacgtggtggcgatgtatcgtggccagttctactggttcgacgtgctggacacacgcaacgagcccatcttcgccaccccagaacaactggagtggaacctctactcgatcatcatggacgcggaatccgccggaagcggatccgcgccctttggcgtgttcaccacagagtcgcgccgggtgtggtccaacatcagggactatctgttccatgcggacgactgcaccaactggcgcaatctcaagctgatcgactccgcgctgttcgtggtctgtctcgacgacgtggcgtttgccgccgatcagcaggacgagctcacgcgttcgatgctgtgcgggacttctaccatcaatctcgacccgcaccaacaccagccgccattgaacgtgcagacaggcacctgtctcaaccgctggtacgacaagttacaactgatcgtgaccaagaacggtaaggcgggcatcaacttcgaacacaccggtgtggacggccacactgtgctgcggctcgccacagacatctacacagactcgatcctgagcttcgcacgcggtgtcaccaagaacgtcgtcgacatctttagcgacgacgatggaaaaccatcgtcgtcgtcgtcgttggcctcggcggctcactccgccaacttgatcaccatccctcgtaaactggaatggcgcactgacaatttcctgcaatcgtcgctgcactttgccgagacgcgcatctcggacttgatctcgcaatacgagtttgttaatcttgacttctccaactacggcgcgtcccatatcaagacagtgttcaagtgctcgccagacgccttcgtgcagcaggtgttccaggtcgcatacttcgcgttgtacggccgcttcgagaccgtgtacgagcctgccatgaccaaggcgttccaaaacggccgcacagaggccatccgctccgtcacgggccaatccaagctctttgtcaagtcactactggaccaggatgcctcggacgccaccaagattcagctcttgcacgacgcctgtacggcgcactcgcaaatcacaagggaatgctcccagggtctcggccaggaccgtcacttgtatgcgctctactgcctctggaaccaatggtacaaggacaagttggagctcccacccatcttccgcgacaagtcctggactaccatgcagaacaacgtcttgagcacctccaactgcggtaacccctgcctcaaggcttcggggttcgggcctgtcaccgccaacggcttcggcatcggctacatcatcagagaccactccgtctctgtggtggtgtcctcaaggcatcgccagactgctcggtttgcgtcgctcatggaaaagtcgctgctggagatcgaccgcatcttcaaacggcaacaagctcgcacagcaaaacccgctgccagagccactgctagcgccaacaccaaatcggaagacatgaaatacctgttgtccggctacgattacttcgacgtgagcgtgtccggttgagtttatgctgagtttttgcgcatcaatattatttttactactactactactactactactactactacatactattaaatatactaaataagagaaaaacgctttggaagtgactggcgccgccgctggctactataatagcagcgactgtaatttaatctcatcccgtcgtttggattacctcttttactcgccgagcgaacgtgcaccaaa

SEQ ID NO: 2528 - protein, 688 aa, Saccharomyces cerevisiae
MPNLKRLPIPPLQDTLNRYLARVETLQDERQNRRTRRTVLSAENLDALNTLHERLLEYDARLAESNPESSYIEQFWYDAYLLYDATVVLNVNPYFQLQDDPTIKDTPETAAQGPYGAHTVQVRRAARLTTSILKFIRQIRHGTLRTDTVRGKTPLSMDQYERLFGSSRIPPGPGEPSCHLQTDATSHHVVAMYRGQFYWFDVLDTRNEPIFATPEQLEWNLYSIIMDAESAGSGSAPFGVFTTESRRVWSNIRDYLFHADDCTNWRNLKLIDSALFVVCLDDVAFAADQQDELTRSMLCGTSTINLDPHQHQPPLNVQTGTCLNRWYDKLQLIVTKNGKAGINFEHTGVDGHTVLRLATDIYTDSILSFARGVTKNVVDIFSDDDGKPSSSSSLASAAHSANLITIPRKLEWRTDNFLQSSLHFAETRISDLISQYEFVNLDFSNYGASHIKTVFKCSPDAFVQQVFQVAYFALYGRFETVYEPAMTKAFQNGRTEAIRSVTGQSKLFVKSLLDQDASDATKIQLLHDACTAHSQITRECSQGLGQDRHLYALYCLWNQWYKDKLELPPIFRDKSWTTMQNNVLSTSNCGNPCLKASGFGPVTANGFGIGYIIRDHSVSVVVSSRHRQTARFASLMEKSLLEIDRIFKRQQARTAKPAARATASANTKSEDMKYLLSGYDYFDVSVSG

SEQ ID NO: 2529 - DNA, 2266 bp, Xenopus tropicalis
  CDS (36)..(2012)
caaaggtctcacggctacttttatttgaagtcctcatggctcgcttgctaacctcttcatctgccttgagatggggggcagtgagttcctcgcagtcagttggaagagcgtacagctccgggagccccgatactgagtatgtgcagaggagcattgttccaactatgcacttccagaagagcctgccaaggctgcccattcctaaacttgaagacactataaagagatacttgaatgcacaaagacctcttctggatgatgttcagtttaagaaaactgagcagctggccttgaactttcagaatggtgttgggaagcagctgcatgaagagctagtgcagcaggacaagcagaacaaacatacaagctatatctctggtccttggtttgatatgtatctgtgtgcccgtgaatccattgtgcttaattttaatccctttatatcttttacacctgacccaaggccggattataacaggcagctgatcagagccacaaacatgacagtatctgccatgcgttttctaaagaccatgagagctgggtatttggaacctgaaatcttccacttaaatccagccaaaagtgacacactgacatttcggaaattaatccggtttgtgccctcctctctttcctggtacggtgcatatatggtgaatgcatatcctttagacatgtcacagtatttccgtctttttaacggtactcgcattccaaaacctaacagagatgaactgtggacagatgaaaagggtagacacttattggttctacgaaaagggaacttctatgtgtttgatgtcatagacaaagatggaaatatagtaaaggcatctgaaatccaggcacatctacaacacatcttgtctgataccactccagccccagaattcccactagggtatttaaccagtgaagagaggaacacatgggcagttctaaggcagaaattgttaaacaatggcaaccaagaggctctggcaaaagtggattctgctgtgttttgcttgtgtttggatgatttccccgttgaagatcgtgttagtttatcacacaatatgctgcatggttctggtctaaatcgctggtttgacaagtcatttagcattatcatgactgaagatggtacagccgctgttaattttgagcactcatggggagatggagttgctgttttaaggttccaaaatgaggtttttaaggacagcacacagaggccagcgatatcgccagagtcatgttctgctcctgtggactcaagcaaagcagttcagagactgcactttaacttagatgactctttgaaagctgcaatagcaaatgccaaagaaaaatttgacacttctgtaaatgcactatccattgcaacaatggagttcaagaaaggaggaaaagagttactcaagacacagaagctgagccctgatgctgtgtcacagctgtcctttcagatggcttttctcaggcagtatggcaagacaacggccacatatgaatcctgcagcactgcagcattcaaacatggtcgcacagagactgtaaggccagcttccatatacactaagaagtgctcagaggcttttgttatgcatccgtccaagcatagcccagcagagctccgcagtatgctgcaggactgttccaaataccacggacaactgaccaaggaagcagcaatgggtcagggatttgatcggcatttatttgccctgcgatacttggcatccagcaaggggctttcgcttcctgaaatttaccaggatgcctcatatgcacagattaatcataatgtcctatccaccagcacgctcaccagccctgccgtacagctcgggggttttgctccagtagtgccggatgggtttggcgtaggatatggcgtacatgatgactggattggctgcaatgtttcttcataccagactcgtgatgtgagacagtttgtggagtgcgtgcatcaatccctagatgacatctttacagttttgcaagacaaacccataaaatagtggaacttggaaacctatattgtaacgttttgctctgttatttttttcacaaatttctgcattataccagaagatggcctcttacaggttactaaaaaatgtatccataaagctatatttatatggagccttacaatcatttccttctaaagggaatataaactatagatgtatttttactctaagtattacaggaataattggaaataaaaactattgtatggaaaaaaaaaaaaaaaaaaaaaaaaaaaaaa

SEQ ID NO: 2530 - protein, 658 aa, Xenopus tropicalis
MARLLTSSSALRWGAVSSSQSVGRAYSSGSPDTEYVQRSIVPTMHFQKSLPRLPIPKLEDTIKRYLNAQRPLLDDVQFKKTEQLALNFQNGVGKQLHEELVQQDKQNKHTSYISGPWFDMYLCARESIVLNFNPFISFTPDPRPDYNRQLIRATNMTVSAMRFLKTMRAGYLEPEIFHLNPAKSDTLTFRKLIRFVPSSLSWYGAYMVNAYPLDMSQYFRLFNGTRIPKPNRDELWTDEKGRHLLVLRKGNFYVFDVIDKDGNIVKASEIQAHLQHILSDTTPAPEFPLGYLTSEERNTWAVLRQKLLNNGNQEALAKVDSAVFCLCLDDFPVEDRVSLSHNMLHGSGLNRWFDKSFSIIMTEDGTAAVNFEHSWGDGVAVLRFQNEVFKDSTQRPAISPESCSAPVDSSKAVQRLHFNLDDSLKAAIANAKEKFDTSVNALSIATMEFKKGGKELLKTQKLSPDAVSQLSFQMAFLRQYGKTTATYESCSTAAFKHGRTETVRPASIYTKKCSEAFVMHPSKHSPAELRSMLQDCSKYHGQLTKEAAMGQGFDRHLFALRYLASSKGLSLPEIYQDASYAQINHNVLSTSTLTSPAVQLGGFAPVVPDGFGVGYGVHDDWIGCNVSSYQTRDVRQFVECVHQSLDDIFTVLQDKPIK

SEQ ID NO: 2531 - DNA, 25 bp, Artificial sequence
  Primer sequence
atgtcaagcggcagtactattgttt

SEQ ID NO: 2532 - DNA, 25 bp, Artificial sequence
  Primer sequence
ttattgatctaaggtcgccaccttt

SEQ ID NO: 2533 - DNA, 1518 bp, Saccharomyces cerevisiae
  CDS (1)..(1518)
atgagtgaaggccccgtcaaattcgaaaaaaataccgtcatatctgtctttggtgcgtcaggtgatctggcaaagaagaagacttttcccgccttatttgggcttttcagagaaggttaccttgatccatctaccaagatcttcggttatgcccggtccaaattgtccatggaggaggacctgaagtcccgtgtcctaccccacttgaaaaaacctcacggtgaagccgatgactctaaggtcgaacagttcttcaagatggtcagctacatttcgggaaattacgacacagatgaaggcttcgacgaattaagaacgcagatcgagaaattcgagaaaagtgccaacgtcgatgtcccacaccgtctcttctatctggccttgccgccaagcgtttttttgacggtggccaagcagatcaagagtcgtgtgtacgcagagaatggcatcacccgtgtaatcgtagagaaacctttcggccacgacctggcctctgccagggagctgcaaaaaaacctggggcccctctttaaagaagaagagttgtacagaattgaccattacttgggtaaagagttggtcaagaatcttttagtcttgaggttcggtaaccagtttttgaatgcctcgtggaatagagacaacattcaaagcgttcagatttcgtttaaagagaggttcggcaccgaaggccgtggcggctatttcgactctataggcataatcagagacgtgatgcagaaccatctgttacaaatcatgactctcttgactatggaaagaccggtgtcttttgacccggaatctattcgtgacgaaaaggttaaggttctaaaggccgtggcccccatcgacacggacgacgtcctcttgggccagtacggtaaatctgaggacgggtctaagcccgcctacgtggatgatgacactgtagacaaggactctaaatgtgtcacttttgcagcaatgactttcaacatcgaaaacgagcgttgggagggcgtccccatcatgatgcgtgccggtaaggctttgaatgagtccaaggtggagatcagactgcagtacaaagcggtcgcatcgggtgtcttcaaagacattccaaataacgaactggtcatcagagtgcagcccgatgccgctgtgtacctaaagtttaatgctaagacccctggtctgtcaaatgctacccaagtcacagatctgaatctaacttacgcaagcaggtaccaagacttttggattccagaggcttacgaggtgttgataagagacgccctactgggtgaccattccaactttgtcagagatgacgaattggatatcagttggggcatattcaccccattactgaagcacatagagcgtccggacggtccaacaccggaaatttacccctacggatcaagaggtccaaagggattgaaggaatatatgcaaaaacacaagtatgttatgcccgaaaagcacccttacgcttggcccgtgactaagccagaagatacgaaggataattag

SEQ ID NO: 2534 - protein, 505 aa, Saccharomyces cerevisiae
MSEGPVKFEKNTVISVFGASGDLAKKKTFPALFGLFREGYLDPSTKIFGYARSKLSMEEDLKSRVLPHLKKPHGEADDSKVEQFFKMVSYISGNYDTDEGFDELRTQIEKFEKSANVDVPHRLFYLALPPSVFLTVAKQIKSRVYAENGITRVIVEKPFGHDLASARELQKNLGPLFKEEELYRIDHYLGKELVKNLLVLRFGNQFLNASWNRDNIQSVQISFKERFGTEGRGGYFDSIGIIRDVMQNHLLQIMTLLTMERPVSFDPESIRDEKVKVLKAVAPIDTDDVLLGQYGKSEDGSKPAYVDDDTVDKDSKCVTFAAMTFNIENERWEGVPIMMRAGKALNESKVEIRLQYKAVASGVFKDIPNNELVIRVQPDAAVYLKFNAKTPGLSNATQVTDLNLTYASRYQDFWIPEAYEVLIRDALLGDHSNFVRDDELDISWGIFTPLLKHIERPDGPTPEIYPYGSRGPKGLKEYMQKHKYVMPEKHPYAWPVTKPEDTKDN

SEQ ID NO: 2535 - DNA, 1548 bp, Mus musculus (house mouse)
  CDS (1)..(1548)
atggcagagcaggtggccctgagccggacccaggtgtgtgggatcctgagggaagagttgtaccagggtgatgccttccaccaagctgatacacacatatttatcatcatgggtgcatcgggtgacctggccaagaagaagatctatcctaccatctggtggctgttccgggatggccttctacctgaagataccttcattgtgggctatgcccgctcacgactcacagtggacgacatccgaaagcagagtgagcccttctttaaagccactccagaagaaagacctaagctggaggagttctttgcccgtaattcctatgtagctggccagtatgatgatgcagcctcctataagcacctcaacagccacatgaatgccctgcaccaggggatgcaggccaaccgtctattctacctggccttgccccccacagtctatgaagcagtcaccaagaacattcaagagacctgcatgagtcagacaggctggaaccgcatcatcgtggagaagcccttcgggagagacctacagagctccaatcaactgtcgaaccacatctcctctcttttccgtgaggaccagatctaccgcattgaccactacctgggcaaagagatggtccagaatctcatggtgctgaggtttgccaacaggatctttggacccatctggaatcgagacaacattgcttgtgtgatcctcacatttaaagagccctttggtactgagggtcgtgggggctattttgatgaatttgggatcatcagggatgttatgcagaaccacctcctgcagatgttgtgtctggtggccatggaaaagcctgccactacaggttcagatgatgtccgtgatgagaaggtcaaagtgttgaagtgtatctcagaggtggaaactgacaacgtggtccttggccaatatgtggggaaccccaatggagaaggagaagctgccaatggatacttagatgaccccacagtaccccatgggtccaccactgccacttttgcagcagctgtcctctatgtggagaatgaacggtgggacggggtacccttcatcctgcgctgtggcaaagccctgaatgaacgcaaagctgaagtgagactgcagttccgagacgtggcaggtgacatcttccaccaacagtgcaagcgtaatgagctggtcatccgtgtgcagcccaatgaggcagtatacaccaagatgatgaccaagaagcctggcatgttctttaaccctgaggagtcggagctggatctaacttatggcaacagatacaagaatgtgaagctccctgatgcctatgaacgcctcatcctggatgtcttctgtgggagccagatgcactttgtccggagtgatgaactcagggaagcctggcgtatcttcacaccactgctgcacaagattgatcgagaaaagccccagcccatcccctatgtatatggcagccgcggccccacagaggcagatgagctgatgaagagagtgggcttccagtacgagggtacctacaagtgggtgaaccctcacaagctctga

SEQ ID NO: 2536 - protein, 515 aa, Mus musculus (house mouse)
MAEQVALSRTQVCGILREELYQGDAFHQADTHIFIIMGASGDLAKKKIYPTIWWLFRDGLLPEDTFIVGYARSRLTVDDIRKQSEPFFKATPEERPKLEEFFARNSYVAGQYDDAASYKHLNSHMNALHQGMQANRLFYLALPPTVYEAVTKNIQETCMSQTGWNRIIVEKPFGRDLQSSNQLSNHISSLFREDQIYRIDHYLGKEMVQNLMVLRFANRIFGPIWNRDNIACVILTFKEPFGTEGRGGYFDEFGIIRDVMQNHLLQMLCLVAMEKPATTGSDDVRDEKVKVLKCISEVETDNVVLGQYVGNPNGEGEAANGYLDDPTVPHGSTTATFAAAVLYVENERWDGVPFILRCGKALNERKAEVRLQFRDVAGDIFHQQCKRNELVIRVQPNEAVYTKMMTKKPGMFFNPEESELDLTYGNRYKNVKLPDAYERLILDVFCGSQMHFVRSDELREAWRIFTPLLHKIDREKPQPIPYVYGSRGPTEADELMKRVGFQYEGTYKWVNPHKL

SEQ ID NO: 2537 - DNA, 1593 bp, Fugu rubripes (Japanese pufferfish)
  CDS (1)..(1593)
atgatgattattttatttaactgttttttttgtgcctctttcagagaagatggccaacatcccactgtctcgctcggaggtgtttggggagctgcgaaggagctccacgaagacaaagagttccatcaatcagacgttcatgttttcatcatcatgggcgcatcgggagatctggccaagaagaaaatctacccaactctgtggtggttgttcagagacggccttctacctgagcagacatattttgtgggttttgctcgctctgctctgaccgtggatgctattcgaacatcttgcatgccttacctgaaggtgacagaaacagaatcggaccggctgtcggccttcttcagcaggaactcgtacatcagcgggaattacaccgccgggggctccttctccgagctcaacgcacacatcatgtctctgcctggggcgtccgacgcaaaccgcctcttctacctggcactgcctcccaccatctaccacagcgttactgagaacatcaagcacttctgtatgagcgccaaaggctggaacagggtgattgtagagaaaccgttcggacacgatctgcagagctccgaagagctgtccactcacctctcctcgctcttcactgaagaccagatctaccgaatagatcactacctcggcaaggaaatggtccagaacctaatggtgctcaggttcgggaaccgcatctttgggccaatctggaacagggacaacgtagcctgtgtggttcttacctttaaggagccgttcggcactcaggggagaggcggctattttgatgatttcggaatcatacgtgatgtgatgcagaaccacatgcttcagatgctctgtttggttgccatggagaaaccagcatccactaactcggatgacgtcagagatgaaaaggtgaaggtgttgaagtgcatcgttccagcgtccatgtcagatgtggtgctgggacagtatgtgggggacccagagggggagggagatgctaaactgggttatctcgatgatcccaccgttcccaaagggtcaactcaggccacctttgccacggttgtcctctacgtacacaacgaacgctgggatggggttcctttcatccttcgctgtggaaaagctctgaatgagaggaaggccgaggtgaggctgcagttcacagacgtgccgggggacattttccgtaatcagtgttacaggaacgagctcgtggtgcgcgtgcagcctaacgaggccatctacgccaagatgatgagcaagaaacctggtgtgtacttcaccccagaggaaactgagctggacctcacctacaagagcagatacaaggatgtgaaacttccggacgcctatgaacgtctcatcctggatgtcttctgtgggagtcagatgcactttgtcgcgagtgatgaattaagggaggcgtggcggatcttcacccctcttcttcatcagatagagaaggagaagcctaaacctattccttataaatatggcagtcgtggaccagcagaagcagacgagctcgagaagagagtcgggtttcgctatgaaggcacatacaagtgggtcaacccacacagactgtga

SEQ ID NO: 2538 - protein, 530 aa, Fugu rubripes (Japanese pufferfish)
MMIILFNCFFCASFREDGQHPTVSLGGVWGAAKELHEDKEFHQSDVHVFIIMGASGDLAKKKIYPTLWWLFRDGLLPEQTYFVGFARSALTVDAIRTSCMPYLKVTETESDRLSAFFSRNSYISGNYTAGGSFSELNAHIMSLPGASDANRLFYLALPPTIYHSVTENIKHFCMSAKGWNRVIVEKPFGHDLQSSEELSTHLSSLFTEDQIYRIDHYLGKEMVQNLMVLRFGNRIFGPIWNRDNVACVVLTFKEPFGTQGRGGYFDDFGIIRDVMQNHMLQMLCLVAMEKPASTNSDDVRDEKVKVLKCIVPASMSDVVLGQYVGDPEGEGDAKLGYLDDPTVPKGSTQATFATVVLYVHNERWDGVPFILRCGKALNERKAEVRLQFTDVPGDIFRNQCYRNELVVRVQPNEAIYAKMMSKKPGVYFTPEETELDLTYKSRYKDVKLPDAYERLILDVFCGSQMHFVASDELREAWRIFTPLLHQIEKEKPKPIPYKYGSRGPAEADELEKRVGFRYEGTYKWVNPHRL

SEQ ID NO: 2539 - DNA, 1506 bp, Vibrio cholerae
  CDS (1)..(1506)
atgatggtaatacctgaaaacagcagcatcgtaattttcggtgcttcgggagatttgacgtaccgtaagcttattcctgcgttgtatcacctctatgccagtcagcaactgcctaaatcgtttgcgattttaggtgtgagccgtaccgagtacagtgacgagtcttaccgcgagaagctaaagcgctcactgcaagagctggaaaaaacagaacctgccgctctcgaagccttcatgcagcatgtgcattatcaagcgctgaacacctcagaagtagctgattatcagcacttagcgacccgccttgatacactggctaacgattatcagtttgagcagcgtaatacgctgttttatctcgcaactccaccaagcttgtatggcgtgatcccagcttgccttgcggcacatggcctcaacgatgagagccaaggctggaagcgtctgatcatcgaaaaaccttttggttacgatctgcaatctgcacaagatctggatgtggaaatccaccaccacttcaaagagcatcagatctaccgtatcgaccactaccttggtaaagaaaccgtgcaaaacctgctggtgttccgctttgccaacggcatgtttgagccactgtggaaccgtaactttattgattacgtggaaatcacaggcgcagaattcctaggtgtggaagagcgcggcggttattacgatggttctggcgcggtgcgcgatatgttccaaaaccacctgctgcaagtgctggctatggtgggcatggagccgcctgcggcgatcaacgcggattccattcgtaacgaagtgaacaaggtactgcaaagcctacaaccgctttctgaatctgatctgcgcaacaatctggtgctcggtcaatacaccgaatcggaagtgcgtgggcaatttttacccagctaccgtaatgagccgggcgtggcggcggattcacgcaccgaaacttacgtcgcgctaaaaatgttcatcaataactggcgttggaatggtgtgccattctatgtgcgcagcggtaaacgtttaccaacgcgtgtcaccgaagtggtcattcacttcaaacgtacaccgcatcctgtctttgggcaaaatgcgccagagaacaagctgatcatccgtattcagcctgatgaaggcattctgatgagcttcggcttgaaagagcccggcgcaggtttcaaagccaaagaagtgtcgatgaatttccactacgcctcacttgagcagatcaaaatgctgaccgcttatgagcgtttgctgctggatgcactcaatggtgacgcgacactgtttgcccgtactgatgctgtagaagcttgttggaagtttgtgcagccgatcctcgatttcaaacaagatccgcaatcgctgtatggctacgcctgtggcacttggggcccgaaagagtcggatgacttgctgcgccgtgacggccgtgagtggcgcttcccttgtaaaaacctcactaacacggattactgcgaattatga

SEQ ID NO: 2540 - protein, 501 aa, Vibrio cholerae
MMVIPENSSIVIFGASGDLTYRKLIPALYHLYASQQLPKSFAILGVSRTEYSDESYREKLKRSLQELEKTEPAALEAFMQHVHYQALNTSEVADYQHLATRLDTLANDYQFEQRNTLFYLATPPSLYGVIPACLAAHGLNDESQGWKRLIIEKPFGYDLQSAQDLDVEIHHHFKEHQIYRIDHYLGKETVQNLLVFRFANGMFEPLWNRNFIDYVEITGAEFLGVEERGGYYDGSGAVRDMFQNHLLQVLAMVGMEPPAAINADSIRNEVNKVLQSLQPLSESDLRNNLVLGQYTESEVRGQFLPSYRNEPGVAADSRTETYVALKMFINNWRWNGVPFYVRSGKRLPTRVTEVVIHFKRTPHPVFGQNAPENKLIIRIQPDEGILMSFGLKEPGAGFKAKEVSMNFHYASLEQIKMLTAYERLLLDALNGDATLFARTDAVEACWKFVQPILDFKQDPQSLYGYACGTWGPKESDDLLRRDGREWRFPCKNLTNTDYCEL

SEQ ID NO: 2541 - DNA, 1470 bp, Pseudomonas aeruginosa
  CDS (1)..(1470)
atgcctgatgtccgcgttctgccttgcacgttagcgctgttcggtgcgctgggcgatctcgccttgcgcaagctgttcccggcgctctaccaactcgatcgtgagaacctgctgcaccgcgatacccgcgtcctggccctggcccgtgacgaaggcgctcccgccgaacacctggcgacgctggagcagcgcctgcgcctggcagtgccggcgaaggagtgggacgacgtggtctggcagcgtttccgcgaacgcctcgactacctgagcatggacttcctcgacccgcaggcctatgtcggcttgcgcgaggcggtggatgacgaactgccgctggtcgcctacttcgccacgccggcctcggtgttcggcggcatctgcgagaacctcgccgccgccggtctcgccgagcgcacccgggtggtgctggagaagcccatcggtcatgacctggagtcgtcccgcgaggtcaacgaggcagtcgcccggttcttcccggaaagccgcatctaccggatcgaccattacctgggcaaggagacggtgcagaacctgatcgccctgcgcttcgccaacagcctcttcgagacccagtggaaccagaaccacatctcccacgtggagatcaccgtggccgagaaggtcggcatcgaaggccgctggggctacttcgaccaggccgggcaactgcgcgacatggtgcagaaccacctgctgcaactgctctgcctgatcgccatggatccgcccagcgacctttcggcggacagcattcgcgacgagaaggtcaaggtcctccgcgccctcgagccgattcccgcagaacaactggcttcgcgcgtggtgcgtgggcagtacaccgccggtttcagcgacggcaaggcagtgccgggctacctggaggaggaacatgcgaatcgcgacagcgacgcggaaaccttcgtcgccctgcgcgtggacatccgcaactggcgctggtcgggcgtgccgttctacctgcgcaccggcaagcgcatgccgcagaagctgtcgcagatcgtcatccacttcaaggagccgccgcactacatcttcgctcccgagcagcgttcgctgatcagcaaccggctgatcatccgcctgcagccggacgaaggtatctccctgcaagtgatgaccaaggaccagggcctgggcaagggcatgcaattgcgtaccggcccgctgcaactgagtttttccgagacctaccacgcggcgcggattcccgatgcctacgagcgtctgctgctggaggtcacccagggcaaccagtacctgttcgtgcgcaaggacgaggtggagttcgcctggaagtggtgcgaccagctgatcgctggctgggaacgcctgagcgaagcgcccaagccgtatccggcggggagttgggggccggtggcctcggtggccctggtggcccgcgatgggaggagttggtatggcgatttctga

SEQ ID NO: 2542 - protein, 489 aa, Pseudomonas aeruginosa
MPDVRVLPCTLALFGALGDLALRKLFPALYQLDRENLLHRDTRVLALARDEGAPAEHLATLEQRLRLAVPAKEWDDVVWQRFRERLDYLSMDFLDPQAYVGLREAVDDELPLVAYFATPASVFGGICENLAAAGLAERTRVVLEKPIGHDLESSREVNEAVARFFPESRIYRIDHYLGKETVQNLIALRFANSLFETQWNQNHISHVEITVAEKVGIEGRWGYFDQAGQLRDMVQNHLLQLLCLIAMDPPSDLSADSIRDEKVKVLRALEPIPAEQLASRVVRGQYTAGFSDGKAVPGYLEEEHANRDSDAETFVALRVDIRNWRWSGVPFYLRTGKRMPQKLSQIVIHFKEPPHYIFAPEQRSLISNRLIIRLQPDEGISLQVMTKDQGLGKGMQLRTGPLQLSFSETYHAARIPDAYERLLLEVTQGNQYLFVRKDEVEFAWKWCDQLIAGWERLSEAPKPYPAGSWGPVASVALVARDGRSWYGDF

SEQ ID NO: 2543 - DNA, 1485 bp, Staphylococcus aureus
  CDS (1)..(1485)
atgagtactaaaaacaaacacatcccttgtttaatcacaatctttggtgcaactggtgacttaagccatcgtaagttgtttccatcaatattccatctctaccaacaagacaatttagatgaacatattgccatcatcggtattggacgtcgtgacattactaatgatgatttccgtaatcaagtaaaatcatcaattcaaaagcacgtaaaagatacaaacaaaattgacgcgtttatggaacatgtcttctatcatagacatgatgttagtaatgaagaaagctatcaagaattattagattttagtaatgaattagacagccaatttgaattaaaaggtaatcgactattctatttagcaatggcaccacaattctttggcgttatttctgattatctaaaatcttctggtcttactgatacaaaaggatttaaacgccttgttatcgaaaaaccattcggtagtgatttaaaatcagccgaagcattaaacaatcaaattcgtaaatcatttaaagaagaagaaatttatcgtattgaccactatttaggaaaagacatggttcaaaatatcgaggtattacgttttgcgaatgcgatgtttgaaccattatggaataacaaatatatttcaaacatccaagttacatcttctgaaatactaggtgttgaagatcgtggtggttattatgaatcaagtggtgcgctaaaagatatggtgcaaaaccacatgttacaaatggttgcattattagctatggaagcacctattagtttaaatagtgaagatatccgtgctgagaaagtaaaagtacttaaatcactgcgtcatttccaatctgaagatgttaaaaagaactttgttcgtggtcaatatggcgaaggctatatcgatggtaaacaagttaaagcataccgtgatgaagatcgcgttgcagatgactctaacacacctacatttgtttcaggtaaattaacaattgataactttagatgggctggcgtaccattctatatccgtactggtaaacgtatgaaatctaaaacaattcaagttgtcgttgaatttaaagaagtaccaatgaacttatactatgaaactgataaactgttagattcaaacctattagtaatcaatattcaaccaaatgaaggtgtatctttacatctaaatgctaagaaaaatacacaaggtatcgaaactgaacctgttcaattgtcttattcaatgagcgctcaagataaaatgaatactgtagatgcatatgaaaatctattattcgattgtcttaaaggtgatgccactaactttacgcactgggaagaattaaaatcaacatggaaatttgttgatgcaattcaagatgaatggaatatggttgatccagaattccctaactatgaatcaggtactaatggtccattagaaagtgatttattacttgctcgtgatggtaaccattggtgggacgatattcaataa

SEQ ID NO: 2544 - protein, 494 aa, Staphylococcus aureus
MSTKNKHIPCLITIFGATGDLSHRKLFPSIFHLYQQDNLDEHIAIIGIGRRDITNDDFRNQVKSSIQKHVKDTNKIDAFMEHVFYHRHDVSNEESYQELLDFSNELDSQFELKGNRLFYLAMAPQFFGVISDYLKSSGLTDTKGFKRLVIEKPFGSDLKSAEALNNQIRKSFKEEEIYRIDHYLGKDMVQNIEVLRFANAMFEPLWNNKYISNIQVTSSEILGVEDRGGYYESSGALKDMVQNHMLQMVALLAMEAPISLNSEDIRAEKVKVLKSLRHFQSEDVKKNFVRGQYGEGYIDGKQVKAYRDEDRVADDSNTPTFVSGKLTIDNFRWAGVPFYIRTGKRMKSKTIQVVVEFKEVPMNLYYETDKLLDSNLLVINIQPNEGVSLHLNAKKNTQGIETEPVQLSYSMSAQDKMNTVDAYENLLFDCLKGDATNFTHWEELKSTWKFVDAIQDEWNMVDPEFPNYESGTNGPLESDLLLARDGNHWWDDIQ

SEQ ID NO: 2545 - DNA, 1488 bp, Streptococcus pneumoniae
  CDS (1)..(1488)
atgtcatctaaggttattgttacaattttcggtgcgagtggagacctggctaaacgcaagctctacccttccctttttagactatataaatccggcaatctttccaagcactttgccgttattggaactgcccgtagaccttggagtaaggaatattttgaatctgtagttgtcgagtccatccttgatttggcagatagtaccgagcaagcccaagaatttgctagccacttctactatcaaagccatgatgtcaatgattcggaacattatattgctttgcgtcaattacaagctgagcttaatgaaaaataccaagctgaacacaataagctcttcttcttgtctatggcacctcagttctttggaaccattgccaaacacctcaaatctgaaaacattgtcgatggcaaaggttttgagcgcttgatcgttgaaaaaccatttggtacagattacgcaactgcaaacaagttgaatgacgaactcctagcaacatttgacgaagaacaaattttccgtatcgaccattatcttggtaaggaaatgatccaaagcatctttgcagttcgctttgcaaacttgatttttgaaaacgtttggaacaaggattttatcgacaatgttcaaattacctttgcggagcgcttgggtgtagaagaacgtggtggctactatgaccaatccggtgccctccgtgacatggtccaaaaccacactctacaacttctttcgctcctcgccatggacaaaccagcaagcttcacaaaagacgagattcgtgctgaaaagattaaggtctttaaaaacctctatcatccaactgatgaagaactcaaagaacactttatccgtgggcaataccgctctggtaagattgatggcatgaaatacatctcttatcgtagcgagccaaatgtgaatccagaatcaacaactgaaacctttacatctggtgccttctttgtagacagcgatcgattccgtggtgttcctttctttttccgtacaggtaaacgactgactgaaaaaggaactcatgtcaacatcgtctttaaacaaatggattctatctttggagaaccacttgctccaaatattttgaccatctatattcaaccaacagaaggcttctctcttagcctaaatgggaagcaagtaggagaagaatttaacttggctcctaactcacttgattaccgtacagatgcgactgcaactggtgcttctccagaaccatacgaaaaattgatttatgatgtcctaaataacaactcaactaactttagccactgggatgaagtttgtgcgtcatggaagttgattgaccgtattgaaaagctctgggctgaaaatggtgccccacttcatgactataaagctggaagcatgggacctcaagccagctttgacctacttgaaaaattcggtgccaaatggacttggcaaccagatatcacctatcgtcaagatggtcgcttagaataa

SEQ ID NO: 2546 - protein, 495 aa, Streptococcus pneumoniae
MSSKVIVTIFGASGDLAKRKLYPSLFRLYKSGNLSKHFAVIGTARRPWSKEYFESVVVESILDLADSTEQAQEFASHFYYQSHDVNDSEHYIALRQLQAELNEKYQAEHNKLFFLSMAPQFFGTIAKHLKSENIVDGKGFERLIVEKPFGTDYATANKLNDELLATFDEEQIFRIDHYLGKEMIQSIFAVRFANLIFENVWNKDFIDNVQITFAERLGVEERGGYYDQSGALRDMVQNHTLQLLSLLAMDKPASFTKDEIRAEKIKVFKNLYHPTDEELKEHFIRGQYRSGKIDGMKYISYRSEPNVNPESTTETFTSGAFFVDSDRFRGVPFFFRTGKRLTEKGTHVNIVFKQMDSIFGEPLAPNILTIYIQPTEGFSLSLNGKQVGEEFNLAPNSLDYRTDATATGASPEPYEKLIYDVLNNNSTNFSHWDEVCASWKLIDRIEKLWAENGAPLHDYKAGSMGPQASFDLLEKFGAKWTWQPDITYRQDGRLE

SEQ ID NO: 2547 - DNA, 1476 bp, Salmonella enterica subsp. enterica serovar Typhi
  CDS (1)..(1476)
atggcggtaacgcaaacagcccaggcatgtgacctggtcattttcggcgcgaaaggcgacctggcgcgccggaaactgctgccttccctgtatcagcttgagaaagccggccagatccatccggatacccggatcattggggtggggcgcgcggactgggataaagaagcttatacccacgttgtgcgtgaggcgctggaaaccttcatgaaggaaaaaattgatgaaggcttgtgggatacgctgagcggccgtctggatttttgtaatcttgacgttaacgatacgcctgcgttcagtcgcctgggcgatatgctggatcaaaaaaaccgcaccaccattaactattttgcgatgccgcccagcacgtttggcgctatttgcaaagggttaggggaggctaaactcaacgccaaaccggcgcgtgtcgtgatggagaaaccgttgggtacttcgctggcgacctcgcgtgagattaacgatcgggtcggcgaatactttgaagagtgccaagtatatcgtatcgaccactatctgggcaaagaaacggttctcaacctgctggcgctgcgttttgccaactcgttattcgttaataactgggataaccgcactatcgatcacgttgagattaccgtagcggaagaggtggggattgaagggcgctggggatattttgaccaggccggtcagatgcgcgatatgatccagaaccacttgctgcaaattctctgcatgattgccatgtcaccgccgtctgacctgagcgccgacagtattcgcgatgaaaaagtaaaagtgttgaaatcgttgcgccgtattgatcgctccaacgtgcgtgaaaaaacggttcgtggtcaatacaccgcgggctttgcgcagggtcaaaaggtgccgggctatctggaagaagagggcgcgaataaaagcagcaacaccgaaactttcgtcgcgatccgcgtcgacatcgataactggcgttgggcgggcgtgccattctatctgcgcaccggcaagcgtctgccaactaagtgctctgaagtcgtggtttatttcaagacgcctgaactgaatctctttaaagagtcctggcaagacctgccgcagaacaaattgacgattcgcctgcagccggatgaaggcgtagatattcaggtacttaacaaagtaccgaggctggatcataagcataatctgcaaatcacgaagcttgatctgagctactccgagacctttaatcagacgcacctggcggatgcatatgagcgcctgctgctggaaacgatgcgtggcattcaggcgctgtttgtccgccgtgacgaagtggaagaagcctggaagtgggtggactccattaccgaagcatgggcgatggacaacgacgcgccgaagccgtatcaggcgggcacctggggaccggtagcgtccgtggcgatgattacccgtgacggtcgttcgtggaatgagtttgagtaa

SEQ ID NO: 2548 - protein, 491 aa, Salmonella enterica subsp. enterica serovar Typhi
MAVTQTAQACDLVIFGAKGDLARRKLLPSLYQLEKAGQIHPDTRIIGVGRADWDKEAYTHVVREALETFMKEKIDEGLWDTLSGRLDFCNLDVNDTPAFSRLGDMLDQKNRTTINYFAMPPSTFGAICKGLGEAKLNAKPARVVMEKPLGTSLATSREINDRVGEYFEECQVYRIDHYLGKETVLNLLALRFANSLFVNNWDNRTIDHVEITVAEEVGIEGRWGYFDQAGQMRDMIQNHLLQILCMIAMSPPSDLSADSIRDEKVKVLKSLRRIDRSNVREKTVRGQYTAGFAQGQKVPGYLEEEGANKSSNTETFVAIRVDIDNWRWAGVPFYLRTGKRLPTKCSEVVVYFKTPELNLFKESWQDLPQNKLTIRLQPDEGVDIQVLNKVPRLDHKHNLQITKLDLSYSETFNQTHLADAYERLLLETMRGIQALFVRRDEVEEAWKWVDSITEAWAMDNDAPKPYQAGTWGPVASVAMITRDGRSWNEFE

SEQ ID NO: 2549 - DNA, 1476 bp, Agrobacterium tumefaciens
  CDS (1)..(1476)
atgagcagtcagatcattcctgttgaaccttttgattgtgtcgttttcggcggcacgggcgatcttgccgagcgcaagcttctgccggccctttatcaccggcaggtcgaaggccagttcacggagccgacccgcatcatcggcgcgtcgcgttcggtcatgacccatgaggaatatcgcaaattcgcgcaggacgccctgaaggaacacctgaaggccggcgaatatgacgatgcgcaggtgaccctgttcctcaaccggcttttctacgtgcccgtcgatgccaagtccggcaatggctgggacgtgctgaagaaactgctcgatgagggcaaggaacgcatccgcgcgttttatctggccgtcgcacccggcattttcggcgacatcgccgacaagatccgtgagcacaagctgatcacccgctcgacccgcatcgtcgttgaaaagccgatcggccgggatctcgcatccgcgcaggaactgaacgacaccatcggtcacgtcttcaaggaagagcagatcttccgcatcgaccactatctcggcaaggagacggtgcagaacctgatggcgctgcgtttcgccaatgcgctttacgagccgctgtggaattccgcccatatcgaccacgttcagatcaccgttgccgaagcggtgggtcttgaaggtcgcgccggttattacgacaaggccggtgcgctgcgcgacatggtgcagaaccacattctccagctgctttgcctcgttgccatggagccgcccgcttccatgaaatcggaggcagtgcgcgacgaaaagctcaaggtactgcgctcgctgaagccaatcgataccagcaatgtcgaaaagctgacggtacgcggccagtaccgcgccggcgcttccgcaggcggccccgtcaagggttatctggaagagctggaaggcggcgtttccaacaccgaaaccttcgtcgccatcaaggctgaaatcgccaactggcgctgggccggcgttcccttctacatccgcaccggcaaacgcctcgcgacccgtgtttcggaaatcgtcgtcaccttcaagcagatcccgcactcgatcttcgacgatgcggctggcaagatcgaagccaacaagctggtcattcgcctgcagccggatgaaggcgtcaagcagtcgctcctcatcaaggatcccggtccaggcggcatgcgcctgcgtcaggtctcgctggacatgagctttgccgaagccttcaacgtgcgcagccccgatgcctatgagcggctgttgatggacaccattcgttccaaccagacattgttcatgcgccgcgacgaggtcgaggccgcgtgggactggatcgaccccatcttgaagagctgggaagagctgggacagagcgtacagggttacactgccggcacctggggcccgagcggttcgatcgcactgatcgagcgcgacggccgcacctggcacgatgccgactga

SEQ ID NO: 2550 - protein, 491 aa, Agrobacterium tumefaciens
MSSQIIPVEPFDCVVFGGTGDLAERKLLPALYHRQVEGQFTEPTRIIGASRSVMTHEEYRKFAQDALKEHLKAGEYDDAQVTLFLNRLFYVPVDAKSGNGWDVLKKLLDEGKERIRAFYLAVAPGIFGDIADKIREHKLITRSTRIVVEKPIGRDLASAQELNDTIGHVFKEEQIFRIDHYLGKETVQNLMALRFANALYEPLWNSAHIDHVQITVAEAVGLEGRAGYYDKAGALRDMVQNHILQLLCLVAMEPPASMKSEAVRDEKLKVLRSLKPIDTSNVEKLTVRGQYRAGASAGGPVKGYLEELEGGVSNTETFVAIKAEIANWRWAGVPFYIRTGKRLATRVSEIVVTFKQIPHSIFDDAAGKIEANKLVIRLQPDEGVKQSLLIKDPGPGGMRLRQVSLDMSFAEAFNVRSPDAYERLLMDTIRSNQTLFMRRDEVEAAWDWIDPILKSWEELGQSVQGYTAGTWGPSGSIALIERDGRTWHDAD

SEQ ID NO: 2551 - DNA, 1530 bp, Nostoc sp. PCC 7120
  CDS (1)..(1530)
atggttagtctcctagaaaatcccttgcgcgttggtctgcaacaacaagggatgcccgaaccccaaattatagtcatctttggcgcttctggtgatcttacctggcgcaaactcgtcccagcactttacaaattgcggcgggaacgacgcattcccccagaaactaccattgttggtgtagcccgtcgggaatggagccacgaatacttccgcgaacaaatgcaaaagggcatggaagaggctcatagcagtgtcgaacttggagaactgtggcaagatttctctcaaggtctgttctactgccctggagacatagataacccggaaagttatcaaaaactgaagaatttgttaagcgaattagacgagaaacgaggtacacggggcaaccggatgttttacctctccgtcgcccctaacttcttccctgaagctatcaagcaactagggggagcaggaatgttagacgacccatacaaacatcgtctagtaattgaaaaaccatttggtagagatttggcatcagcccaaagcctgaacgcagtagtgcagaagtattgtaaagaacaccaagtctaccgcatcgaccactacttgggtaaagaaacagttcaaaacttactggtattccgcttcgccaatgccatttttgaacccctgtggaatcgtcagtttgttgaccacgtacaaattaccgtggcagaaaccgtaggcgtggaagaccgggctggttattacgaaaaagccggcgcactgcgggatatgttgcagaaccacctgatgcagctttattgcctgacagcaatggaagcaccaaactcaatggatgccgatagcatccgtacagaaaaagtcaaagtgttacaagctactcgcctggctgacgtacacaacctatcacgttcagcaatacgcggacaatacagcgctggttggatgaaaggtcaacaagttcctgggtatcggacagaaccaggagttgacccaaattcctccacccctacttatgtaggtatgaagtttttagttgacaactggcgttggcaaggtgttcctttctacctgcgtactggcaaacggatgccgaagaaagtcagtgagatttctatccacttccgcgatgtgccttctcggatgttccaatctgccgcgcaacaaagaaacgccaacattttagctatgcggattcagccaaatgaaggaatttccttgcgttttgatgtgaaaatgccaggagccgaattccgtacccgttccgtagatatggatttcagctatggttcctttgggattgaagctacttccgacgcttacgatcgcctattcttagattgtatgatgggcgaccaaacattattcaccagagccgacgaagtagaagcagcttggcaggtagtcacccccgccctttctgtttgggactcacccgccgaccccgccaccattccccagtacgaagccggaacctgggaaccagcagaagcagaatttctgattaaccaagatggtcgtcgctggcgcagactgtag

SEQ ID NO: 2552 - protein, 509 aa, Nostoc sp. PCC 7120
MVSLLENPLRVGLQQQGMPEPQIIVIFGASGDLTWRKLVPALYKLRRERRIPPETTIVGVARREWSHEYFREQMQKGMEEAHSSVELGELWQDFSQGLFYCPGDIDNPESYQKLKNLLSELDEKRGTRGNRMFYLSVAPNFFPEAIKQLGGAGMLDDPYKHRLVIEKPFGRDLASAQSLNAVVQKYCKEHQVYRIDHYLGKETVQNLLVFRFANAIFEPLWNRQFVDHVQITVAETVGVEDRAGYYEKAGALRDMLQNHLMQLYCLTAMEAPNSMDADSIRTEKVKVLQATRLADVHNLSRSAIRGQYSAGWMKGQQVPGYRTEPGVDPNSSTPTYVGMKFLVDNWRWQGVPFYLRTGKRMPKKVSEISIHFRDVPSRMFQSAAQQRNANILAMRIQPNEGISLRFDVKMPGAEFRTRSVDMDFSYGSFGIEATSDAYDRLFLDCMMGDQTLFTRADEVEAAWQVVTPALSVWDSPADPATIPQYEAGTWEPAEAEFLINQDGRRWRRL

SEQ ID NO: 2553 - DNA, 1386 bp, Agrobacterium tumefaciens
  CDS (1)..(1386)
atgaaagcatcagccacggacagacagcgatcggacgtgctggtggtgttcggcgccacgggtgatcttgcctataagatgatctttccctctctctacgccatggtgaaacgcggcgcgctgcaaacgcccatcatcggagtcgctttcgacgattggccgcgtgagcagctgatagcgcgggcgcgcgatgcggtcgccaaccatttggacaagatcgatgaagccgtcttcgaaaaattcgccgcacagctgacctatgtctccggcgattatcgcaacgaagcgacattcgaaaagctgcgcacggcgcttggcgggcaccagcatccgctttattatctcgccattccgccttccctgttcgaaaccgtggtaaccggcctcaacagggcgggcatcgccgcttcggcccggctgatggtggagaaaccctttggccgtgaccttgcctccgccgaagccttaaatgaagcgttgcacgcggttttcgcagaggatgctattttccgcatcgaccatttcctgggcaaggaagccatccagaaccttctttattttcgttttgccaatgcctttctagagcccgtgtggaatcgcgaccacgttgagagcgtgcagatcaccatggccgaagatttcggcatcagggggcgcggcaagttttatgacgaagtcggatgtatccgcgatgtgatccagaaccatctgatcaatgtgctgttgctgctggccatggagccgccagccaccagcgcctcggatgatctcgtcgatgaaaaagtgcagatactgaaagccatgccgccgctcacccgcgatgatgtggtgcgcggacagttcagaggttatctggacgagccgggtgtcgcctcggcgtccaaccgggaaaccttcgccgccgcccgctttcgcgtcgccacctggcgctggaatggcgtgcctttcttcatccggtccggcaagaacctgccggcgcatgcaaccgaagtcgtggtccgcttcaagcggccgccaattgcgctctttggcgatgtcgagacaacgcccgccaattatgtgcgcttccgtctgggcccggatatcgcgatcggaatcggtgcgcgtcgcaaggcagctggcgatggcatgcgcggcgaggccgtagaactcggcgcggtcgatgacggtatcggtgacatggcgccttatgagcggctgatcggcgatgcgatggccggcgagcgtcagctctttacccgccaggatgcggcggaactggcctggaagatcgtggagcctatcctcgatgatcccgccgtgccgcctgtctatgaggtgggaagctggggcccggcggaaatggcagggtttggcccgccaggcggatgggttgatcccgaataa

SEQ ID NO: 2554 - protein, 461 aa, Agrobacterium tumefaciens
MKASATDRQRSDVLVVFGATGDLAYKMIFPSLYAMVKRGALQTPIIGVAFDDWPREQLIARARDAVANHLDKIDEAVFEKFAAQLTYVSGDYRNEATFEKLRTALGGHQHPLYYLAIPPSLFETVVTGLNRAGIAASARLMVEKPFGRDLASAEALNEALHAVFAEDAIFRIDHFLGKEAIQNLLYFRFANAFLEPVWNRDHVESVQITMAEDFGIRGRGKFYDEVGCIRDVIQNHLINVLLLLAMEPPATSASDDLVDEKVQILKAMPPLTRDDVVRGQFRGYLDEPGVASASNRETFAAARFRVATWRWNGVPFFIRSGKNLPAHATEVVVRFKRPPIALFGDVETTPANYVRFRLGPDIAIGIGARRKAAGDGMRGEAVELGAVDDGIGDMAPYERLIGDAMAGERQLFTRQDAAELAWKIVEPILDDPAVPPVYEVGSWGPAEMAGFGPPGGWVDPE

SEQ ID NO: 2555 - DNA, 1476 bp, Brucella melitensis
  CDS (1)..(1476)
atgaccagtcagacaattccggtagatcccttcgactgcatcgtttttggtggcaccggcgatcttgccgagcgcaagcttattccggcgctttatcagcgccagcgcgcaggccagctttccgaccccacacgcatcatcggcgcctcgcgcagccagatgaccgacgacgaatatcgcaccttcgccggcaatgcgatcaaggaacatgtgaaaccggaagaggtggatcaggccgaagttgaaatcttcctcaagcggctgcactatgtggcggtggacgccaagtccgacgagggctgggatgcgctgaagaccctgatcggcaagaagccggaaaagatccgagccttttatctggccgtcagcccgaccctgttcggcgatatcgccacgcggctcaaggcgcatggcctcatcacgcgcgatacgcgcatcgtcgtggaaaagccgattggccgcgatctcgattccgccaaggcgctcaacgacacgctgggcagtgtgttccgcgaagaccagattttccgcatagaccactatctcggcaaggaaacggtgcagaacctgatggcgctgcgctttgccaatgcgctctacgagccgctgtggaactccgcccatatcgaccatgtgcagatcacggtggcggaagccgtgggccttgaaggccgcgcaggctattacgacaaggcgggcgcgctgcgcgacatggtgcagaaccacattctccagcttctctgccttgttgccatggaaccgccatcctcgattgaggccgacgccgtacacgacgagaaggtaaaggttctgcgctccctgcagccgatctccacgcataatgtcgaggaactgacggtccgcggacaatatcgcgcgggcgcttccgcaggcgggccggtcaagggctatctggaagaccttgaaagcgacaccagcaatacggaaacattcgtggcgctgaaggcggaaatcgccaactggcgctgggcgggtgtgccgttctatctgcgcaccggcaagcgccttgccacgcgtgtttcggaaatcgtcatcacgttcaagcccattccgcattccatctttggcgaaagcgcgggcaaggtgattgccaatcagcttgtcatccgcctgcaaccggacgaaggcgtgaagcaatggctgatgatcaaggatcccggtccgggtggaatgcgcctgcgccacatgccgctcgacatgagctttgcggaatccttcgaggatcgcaacccggatgcctatgagcgcctcatcatggatgtggtgcgcggcaaccagaccctgttcatgcgccgcgacgaagtggaagcggcctggcgctggatcgacccgatccttcaggcatgggagttcaacagccagcccgtgcagggctatacggctggcacatgggggccttcgtcctccatcgcgctcattgagcgcgatggccgcacctggcacgaaagcctctaa

SEQ ID NO: 2556 - protein, 491 aa, Brucella melitensis
MTSQTIPVDPFDCIVFGGTGDLAERKLIPALYQRQRAGQLSDPTRIIGASRSQMTDDEYRTFAGNAIKEHVKPEEVDQAEVEIFLKRLHYVAVDAKSDEGWDALKTLIGKKPEKIRAFYLAVSPTLFGDIATRLKAHGLITRDTRIVVEKPIGRDLDSAKALNDTLGSVFREDQIFRIDHYLGKETVQNLMALRFANALYEPLWNSAHIDHVQITVAEAVGLEGRAGYYDKAGALRDMVQNHILQLLCLVAMEPPSSIEADAVHDEKVKVLRSLQPISTHNVEELTVRGQYRAGASAGGPVKGYLEDLESDTSNTETFVALKAEIANWRWAGVPFYLRTGKRLATRVSEIVITFKPIPHSIFGESAGKVIANQLVIRLQPDEGVKQWLMIKDPGPGGMRLRHMPLDMSFAESFEDRNPDAYERLIMDVVRGNQTLFMRRDEVEAAWRWIDPILQAWEFNSQPVQGYTAGTWGPSSSIALIERDGRTWHESL

SEQ ID NO: 2557 - DNA, 1458 bp, Zymomonas mobilis
  CDS (1)..(1458)
atgacaaataccgtttcgacgatgatattgtttggctcgactggcgacctttcacagcgtatgctgttgccgtcgctttatggtcttgatgccgatggtttgcttgcagatgatctgcgtatcgtctgcacctctcgtagcgaatacgacacagatggtttccgtgattttgcagaaaaagctttagatcgctttgtcgcttctgaccggttaaatgatgacgctaaagctaaattccttaacaagcttttctacgcgacggtcgatattacggatccgacccaattcggaaaattagctgacctttgtggcccggtcgaaaaaggtatcgccatttatctttcgactgcgccttctttgtttgaaggggcaatcgctggcctgaaacaggctggtctggctggtccaacttctcgcctggcgcttgaaaaacctttaggtcaagatcttgcttcttccgatcatattaatgatgcggttttgaaagttttctctgaaaagcaagtttatcgtattgaccattatctgggtaaagaaacggttcagaatcttctgaccctgcgttttggtaatgctttgtttgaaccgctttggaattcaaaaggcattgaccacgttcagatcagcgttgctgaaacggttggtcttgaaggtcgtatcggttatttcgacggttctggcagcttgcgcgatatggttcaaagccatatccttcagttggtcgctttggttgcaatggaaccaccggctcatatggaagccaacgctgttcgtgacgaaaaggtaaaagttttccgcgctctgcgtccgatcaataacgacaccgtctttacgcataccgttaccggtcaatatggtgccggtgtttctggtggtaaagaagttgccggttacattgacgaactgggtcagccttccgataccgaaacctttgttgctatcaaagcgcatgttgataactggcgttggcagggtgttccgttctatatccgcactggtaagcgtttacctgcacgtcgttctgaaatcgtggttcagtttaaacctgttccgcattcgattttctcttcttcaggtggtatcttgcagccgaacaagctgcgtattgtcttacagcctgatgaaaccatccagatttctatgatggtgaaagaaccgggtcttgaccgtaacggtgcgcatatgcgtgaagtttggctggatctttccctcacggatgtgtttaaagaccgtaaacgtcgtatcgcttatgaacgcctgatgcttgatcttatcgaaggcgatgctactttatttgtgcgtcgtgacgaagttgaggcgcagtgggtttggattgacggaattcgtgaaggctggaaagccaacagtatgaagccaaaaacctatgtctctggtacatgggggccttcaactgctatagctctggccgaacgtgatggagtaacttggtatgactga

SEQ ID NO: 2558 - protein, 485 aa, Zymomonas mobilis
MTNTVSTMILFGSTGDLSQRMLLPSLYGLDADGLLADDLRIVCTSRSEYDTDGFRDFAEKALDRFVASDRLNDDAKAKFLNKLFYATVDITDPTQFGKLADLCGPVEKGIAIYLSTAPSLFEGAIAGLKQAGLAGPTSRLALEKPLGQDLASSDHINDAVLKVFSEKQVYRIDHYLGKETVQNLLTLRFGNALFEPLWNSKGIDHVQISVAETVGLEGRIGYFDGSGSLRDMVQSHILQLVALVAMEPPAHMEANAVRDEKVKVFRALRPINNDTVFTHTVTGQYGAGVSGGKEVAGYIDELGQPSDTETFVAIKAHVDNWRWQGVPFYIRTGKRLPARRSEIVVQFKPVPHSIFSSSGGILQPNKLRIVLQPDETIQISMMVKEPGLDRNGAHMREVWLDLSLTDVFKDRKRRIAYERLMLDLIEGDATLFVRRDEVEAQWVWIDGIREGWKANSMKPKTYVSGTWGPSTAIALAERDGVTWYD

SEQ ID NO: 2559 - DNA, 1470 bp, Bacillus subtilis
  CDS (1)..(1470)
atgaaaacaaaccaacaaccaaaagcagtaattgtcatattcggtgcaactggagatttagcaaaacgaaaattgtatccgtctattcaccgtttatatcaaaacggacaaatcggagaagagtttgcagtggtaggagttggaagaagaccttggtctaatgaggatcttcgccaaactgttaaaacatccatttcctcatctgcagataagcatatagatgatttcacgtctcatttttactatcacccgtttgacgtgacaaaccctggttcttatcaagagctaaacgtattgcttaaccagctggaagatacatatcaaattcctaacaacagaatgttctacttggcaatggctcctgaattcttcggaacgattgcaaaaacattaaaatcagagggtgtaacagctacaaccggctggtcccgccttgtcatcgaaaaaccgttcggccatgatctgccaagcgcacaggcattgaataaagaaatccgcgaagcatttacggaagatcaaatttacagaatcgaccattatctaggcaaacaaatggttcagaacattgaagtgattcgatttgccaatgcgattttcgaaccgctttggacaaaccgctacatttcaaacattcaaatcacatctagcgaatcactaggcgttgaagaccgcgcaagatattacgaaaaatcaggcgcccttcgcgacatggtgcaaaaccatattatgcagatggttgcccttcttgcaatggagccgcctatcaaattgaacacagaagaaatccgcagcgagaaagtgaaggtgctgagagcactgcgtcctattgcaaaagacgaagtggatgaatactttgtgcgcggacaatatcatgctggtgaaattgacggtgtaccggttcctgcttatacagatgaagataatgtcgctcctgactccaatacagaaacctttgttgccggcaagctcttgatcgacaacttcagatgggctggtgttccattctacatcagaaccggaaaacgaatgagagaaaagtccacaaaaattgtcgttcaatttaaggacattccgatgaacctgtactacggtaatgaaaacaacatgaatccgaacttgcttgtcattcatattcagcctgacgaaggcattacgctttacttaaatgctaaaaagcttggcggagcagcacacgcacagccaatcaaactcgattattgcagcaattgcaatgacgagttgaacacccctgaagcatatgaaaaactaattcacgactgtcttcttggcgatgcaacaaactttgcacactgggatgaagttgccctttcttggagctttgtcgactctatttctgaaacatgggcagcaaacaaaaccttatctcctaactacgaatcaggctcaatgggaccgaaagaatctgatgatcttttggtgaaagacggcttacactggtggaacatataa

SEQ ID NO: 2560 - protein, 489 aa, Bacillus subtilis
MKTNQQPKAVIVIFGATGDLAKRKLYPSIHRLYQNGQIGEEFAVVGVGRRPWSNEDLRQTVKTSISSSADKHIDDFTSHFYYHPFDVTNPGSYQELNVLLNQLEDTYQIPNNRMFYLAMAPEFFGTIAKTLKSEGVTATTGWSRLVIEKPFGHDLPSAQALNKEIREAFTEDQIYRIDHYLGKQMVQNIEVIRFANAIFEPLWTNRYISNIQITSSESLGVEDRARYYEKSGALRDMVQNHIMQMVALLAMEPPIKLNTEEIRSEKVKVLRALRPIAKDEVDEYFVRGQYHAGEIDGVPVPAYTDEDNVAPDSNTETFVAGKLLIDNFRWAGVPFYIRTGKRMREKSTKIVVQFKDIPMNLYYGNENNMNPNLLVIHIQPDEGITLYLNAKKLGGAAHAQPIKLDYCSNCNDELNTPEAYEKLIHDCLLGDATNFAHWDEVALSWSFVDSISETWAANKTLSPNYESGSMGPKESDDLLVKDGLHWWNI

SEQ ID NO: 2561 - DNA, 1401 bp, Mycobacterium tuberculosis
  CDS (1)..(1401)
atggttgacggcggaggtggcgcgtcagatctgttggtgatcttcggaattaccggtgacctggcccgcaagatgaccttccgcgcgttgtatcggctcgagcgccaccagttgctggactgccccatcctgggtgtggccagtgacgacatgtccgtcgggcagttggtcaagtgggctcgcgagtccatcggtcgtaccgaaaagatcgacgatgcggtgttcgaccggttggcgggccggttgtcctacctgcacggtgacgtcaccgacagccagctctacgattcgctggccgaactgattggctcggcctgtcggccgctgtattacctggaaatgccgccggcgctgttcgcgccgattgtcgaaaatctcgcgaacgtgcggctgttggagcgcgcacgcgttgccgtggaaaagccgttcggccacgacctggcctccgcgctcgaactcaacgcccggctgcgagcggtgttgggcgaagaccaaatcctgcgtgtggaccactttctgggcaagcagcccgtcgtcgagctggagtacctgaggttcgccaatcaggcgttagccgagctctgggatcgcaacagcatctccgagatccacatcaccatggccgaggacttcggggtggaggaccgcggcaagttttacgacgccgtcggtgccctgcgtgacgtcgtgcaaaaccatctgctgcaggtgctggcgctggtgacgatggaaccgccggtcggttccagcgccgatgacctcaacgacaagaaggccgaggtcttccgggcgatggcgccgctggatcccgatcggtgcgtgcgtgggcagtacctcggctacaccgaagttgcgggcgtagcaagcgattcggcgaccgaaacgtatgtcgcgctgcgaaccgagatcgacaactggcgctgggccggggtgccgatcttcgtgcgggccggaaaagagctgcccgcgaaggtcaccgaagtacggctatttttacgccgagttccggcattggcctttctgcccaaccgccgaccggccgagcccaaccagattgtgctgcgtatcgaccccgatccgggtatgcgactgcagatttcggcccacaccgacgactcgtggcgagatatccacctggactcctcgttcgcggtggacctcggtgaaccgatacgaccctatgagcggctgctgtatgccggattggtcggcgatcaccagttgttcgcccgcgaggacagcatcgagcagacgtggcggatcgtgcagccgctgctcgacaacccgggtgaaatccatcggtacgatcgcggttcctggggtccggaagccgcgcagtcgttgctgcgcggtcaccgcggttggcagtcgccgtggctgccccgcggcacggacgcatga

SEQ ID NO: 2562 - protein, 466 aa, Mycobacterium tuberculosis
MVDGGGGASDLLVIFGITGDLARKMTFRALYRLERHQLLDCPILGVASDDMSVGQLVKWARESIGRTEKIDDAVFDRLAGRLSYLHGDVTDSQLYDSLAELIGSACRPLYYLEMPPALFAPIVENLANVRLLERARVAVEKPFGHDLASALELNARLRAVLGEDQILRVDHFLGKQPVVELEYLRFANQALAELWDRNSISEIHITMAEDFGVEDRGKFYDAVGALRDVVQNHLLQVLALVTMEPPVGSSADDLNDKKAEVFRAMAPLDPDRCVRGQYLGYTEVAGVASDSATETYVALRTEIDNWRWAGVPIFVRAGKELPAKVTEVRLFLRRVPALAFLPNRRPAEPNQIVLRIDPDPGMRLQISAHTDDSWRDIHLDSSFAVDLGEPIRPYERLLYAGLVGDHQLFAREDSIEQTWRIVQPLLDNPGEIHRYDRGSWGPEAAQSLLRGHRGWQSPWLPRGTDA

SEQ ID NO: 2563 - DNA, 1545 bp, Mycobacterium tuberculosis
  CDS (1)..(1545)
atgaaaccggcccacgccgcggcgtcgtggcgcaacccgctacgagacaagcgggacaagcgattacccagaatcgccggcccgtgcggcatggtgattttcggcgtcaccggcgacctggcccgcaagaaggtgatgccggccgtctacgatttggccaaccgcggcctgctgccgcccacattctcgctggtggggtttgcccgccgagactggagcacccaggatttcggtcaagtggtgtacaacgccgtccaagagcactgccgaacaccgtttcggcaacagaactgggaccggctggccgagggattccgttttgtgccaggcactttcgacgacgacgacgcgttcgcccaactcgccgagacgctggagaagctcgacgccgagcgcggcaccggcggcaaccacgccttctacctggcgatcccgcccaaatccttcccggtggtgtgtgagcagctgcacaagtccggcctggcccgcccgcaaggcgaccggtggagccgagtcgtgatagagaagccgttcggccacgacctggccagcgcacgcgagctgaacaaggcggtcaacgcggtcttcccggaggaagcggtcttccgcatcgaccactacctgggcaaagagacggtgcagaacatcctggcgctgcggttcgccaaccagctgttcgacccgatctggaatgcgcactacgtcgaccacgtacagatcaccatggccgaagacatcggcctgggcgggcgcgcgggctattacgacggcatcggcgcggcccgcgatgtcatccagaaccatctcatgcagctgctggcgctgaccgcgatggaggagccggtcagcttccacccggcagcgttgcaggccgagaagatcaaggtgctctcggccacccgccttgccgagccactcgaccagaccaccagccgcggccagtacgccgccggctggcaaggcggggagaaggtggttgggctgctcgacgaggaggggttcgccgaggactccaccaccgaaaccttcgccgctatcaccctggaagtcgatacgcgccggtgggccggcgtgccgttctatctgcgaacgggaaaacgattgggccgccgggtgaccgagatcgctctggtcttcaggcgggcgccgcatctgccgttcgacgccaccatgaccgacgagctgggcaccaacgcgatggtcatccgcgtgcagcccgacgaaggtgtcacattgcggttcggctccaaggtgccgggcaccgccatggaagtccgcgacgtcaacatggacttctcctacggctcggcattcgccgaagattcaccggaggcctacgagcggctcatcctcgacgtcctgctcggcgagccctcgctgtttccggtcaacgcggaggtcgaactggcgtgggagatcctcgatccagcgttggaacattgggcggcacacgggacgcccgacgcctacgaggcaggtacctggggtccggaatcatccttggagatgctgcgccgcaccggccgggaatggcggcggccatag

SEQ ID NO: 2564 - protein, 514 aa, Mycobacterium tuberculosis
MKPAHAAASWRNPLRDKRDKRLPRIAGPCGMVIFGVTGDLARKKVMPAVYDLANRGLLPPTFSLVGFARRDWSTQDFGQVVYNAVQEHCRTPFRQQNWDRLAEGFRFVPGTFDDDDAFAQLAETLEKLDAERGTGGNHAFYLAIPPKSFPVVCEQLHKSGLARPQGDRWSRVVIEKPFGHDLASARELNKAVNAVFPEEAVFRIDHYLGKETVQNILALRFANQLFDPIWNAHYVDHVQITMAEDIGLGGRAGYYDGIGAARDVIQNHLMQLLALTAMEEPVSFHPAALQAEKIKVLSATRLAEPLDQTTSRGQYAAGWQGGEKVVGLLDEEGFAEDSTTETFAAITLEVDTRRWAGVPFYLRTGKRLGRRVTEIALVFRRAPHLPFDATMTDELGTNAMVIRVQPDEGVTLRFGSKVPGTAMEVRDVNMDFSYGSAFAEDSPEAYERLILDVLLGEPSLFPVNAEVELAWEILDPALEHWAAHGTPDAYEAGTWGPESSLEMLRRTGREWRRP

SEQ ID NO: 2565 - DNA, 1320 bp, Chlamydia trachomatis
  CDS (1)..(1320)
atgaagcttgccgttcagcatttctctcactcatcggaaatagatattcgagtttgggaaagtctggaaaatagaatcttttaccaccaagctaatttttctgatgccgaaggctactctgttctgaaagcttatttggagcaactagatcaacaatatggaacacaagggaatcgtcttttttatttatcaacaccaccagattatttccaggaaatcatccgcaatttaaatcggcatcagctattctatcatgaacaaggagcacaacagccttggtctcggctaattatagaaaagccttttggagttaatttagaaacagctcgagagcttcaacaatgcattgatgccaatattgatgaagagtcggtttatcgaatagaccattatttaggaaaagaaacggttcaaaacattctgactattcgttttgctaatactctctttgagtcttgctggaattctcagtacatagatcatgtgcaaatcagcgttagcgaatcaattggtataggatctcgagggaatttcttcgaaaagtcgggcatgctacgagacatggtacagaatcatttgacgcagctgctatgtctactgactatggaacctccttctgaatttttttccgaagaaataaaaaaagaaaaaattaaaattctaaagaaaattcttcctatccgcgaagaagatgctgttcgtggccagtatggtgaagggattgtgcaagatgtttcagttctgggctatcgggaggaagaaaatgtcgatccgaattcttcagtagaaacctacgttgcgttaaaattatttatcgacaatcctcgctggaaaggggttcccttttacttacaagcagggaaacgtcttcctaaaagaacaacagatatcgctgtgatctttaaaaaatccagctacaatttattcaatgcagagaattgtcctttgtgtccgttagagaatgatttacttattattcgtattcaaccggatgaaggtgttgcgttacaatttaactgcaaggttccaggaacaaataagctcgtacgtcctgtaaaaatggacttccgttacgacagctattttaatactgttactcccgaagcttatgaacggttactgtgcgactgtatccttggggacagaacgctattcactagcaatgaagaagtcttagcatcttgggaactattttctcctctattagaaaaatggtctcaagtacgccctatattccctaactatatggctggatctttacgtcctcaagaagctgatgaactattatctagagatggaaaagcttggcggccctattaa

SEQ ID NO: 2566 - protein, 439 aa, Chlamydia trachomatis
MKLAVQHFSHSSEIDIRVWESLENRIFYHQANFSDAEGYSVLKAYLEQLDQQYGTQGNRLFYLSTPPDYFQEIIRNLNRHQLFYHEQGAQQPWSRLIIEKPFGVNLETARELQQCIDANIDEESVYRIDHYLGKETVQNILTIRFANTLFESCWNSQYIDHVQISVSESIGIGSRGNFFEKSGMLRDMVQNHLTQLLCLLTMEPPSEFFSEEIKKEKIKILKKILPIREEDAVRGQYGEGIVQDVSVLGYREEENVDPNSSVETYVALKLFIDNPRWKGVPFYLQAGKRLPKRTTDIAVIFKKSSYNLFNAENCPLCPLENDLLIIRIQPDEGVALQFNCKVPGTNKLVRPVKMDFRYDSYFNTVTPEAYERLLCDCILGDRTLFTSNEEVLASWELFSPLLEKWSQVRPIFPNYMAGSLRPQEADELLSRDGKAWRPY

SEQ ID NO: 2567 - DNA, 1773 bp, Deinococcus radiodurans
  CDS (1)..(1773)
atgaccgaccggccccgtcccaaaaagagcagtccgaaaaagagtggccccgagaaggccctcgccaaggaaagtgccgcgcagggcgaggcggccaaggcgacccggcaggccactcagcagaccgaggcggccaagaaggtcggtgtggcccagcccggcgctccggcgcagtcccgcaaagcggcccgcaagtcacgccagcgggtgcccaagcacgccggggacaatgcccccaaaagcgacgcgcccggcgccgacggccagaatccctttcgcaccgccatgcgccgcagccgcgcgcccgaacctgccacgctggtgattttcggcgcgaccggcgaccttgcccggcgcaagttgctgcccgccgtgttcggcctgtggcaagacggcctgctcggcagcgcgttcaacatcgtcggcgtgggccggcaggaaatggacgacgagcagttcaaggactacgccatagacgccctgaagacctccaaggaaaccgacgaaatcaaggaaggcagcctggaaaagttccgcgagctgctctactacgaatacggcgaattcggcgaggacgaggtgtacgacaaggtccgcagtgaactcgaccgcgccgagaccgcccgtggcggcggcaagaacgcgctgttttacctctccaccccgccgagcctcttcgagccgatttcgagcggcctggggcggcagggcctgcaagacgagacggaaggctggcggcgcatcgtcatcgaaaaacccttcgggcgcgacctgcaatcggcccgcgaactcaacgacgccattcaccgcgtctgggacgagtcgcaggtgtaccgcatcgaccattatctcggtaaggagacggtgcagaacctgatggcgatccgtttcgggaacgccattttcgagccgctgtggaaccgggggtttgtcgaccacgtgcagatcacggcgtccgaggacctggggctggagggccgcgccgggtactacgaggaagcgggcatcgtgcgcgacatgctgcaaaaccacctgatgcagctttttaccctgaccgccatggaagcgccctcggcgttcgaggccgacgccatccgcgacgagaaggtcaaggtgctgcgggccgtcaagcgcattccggcggaccgggtgcccgaagtcgccgtgcgcgggcagtacggccccggcgccctcgacggccagaccgtgcccggctacaagcaggagccggacgtaaagcgcggcagccgcacgcccacctacgtcgccgtcaagctcgaggtggacaactggcgctggcagggcgtgccgtttttcctgcgcaccggcaagcgcttgcccaagaaagtcaccgaaatcgccgtggtgttcaagcgcccgccgctgggcctctttcccggcggactggagcgcaacgtgctggccttccgcattcagcccgacgaaggcgtgagcctgaagttctcctccaaatcgccggggcaagagatggtgctgcgcgaggtcgtgatggatttccgttacgacgccttcggggcacagctcgaaagcccctactcgcgcttgctgctcgacgcgatgctcggcgacgccaccctctttccccgcgaggacgaggtggaccacgcctggcaaatcgtctcgggcatcttgcaggcctgggaaggcgcggacgcggcggcccccaaattccccaactacgcggcgggcacctggggccccgacgccgccgatgagctgctcggccccggacggcgctggaggcggctgtga

SEQ ID NO: 2568 - protein, 590 aa, Deinococcus radiodurans
MTDRPRPKKSSPKKSGPEKALAKESAAQGEAAKATRQATQQTEAAKKVGVAQPGAPAQSRKAARKSRQRVPKHAGDNAPKSDAPGADGQNPFRTAMRRSRAPEPATLVIFGATGDLARRKLLPAVFGLWQDGLLGSAFNIVGVGRQEMDDEQFKDYAIDALKTSKETDEIKEGSLEKFRELLYYEYGEFGEDEVYDKVRSELDRAETARGGGKNALFYLSTPPSLFEPISSGLGRQGLQDETEGWRRIVIEKPFGRDLQSARELNDAIHRVWDESQVYRIDHYLGKETVQNLMAIRFGNAIFEPLWNRGFVDHVQITASEDLGLEGRAGYYEEAGIVRDMLQNHLMQLFTLTAMEAPSAFEADAIRDEKVKVLRAVKRIPADRVPEVAVRGQYGPGALDGQTVPGYKQEPDVKRGSRTPTYVAVKLEVDNWRWQGVPFFLRTGKRLPKKVTEIAVVFKRPPLGLFPGGLERNVLAFRIQPDEGVSLKFSSKSPGQEMVLREVVMDFRYDAFGAQLESPYSRLLLDAMLGDATLFPREDEVDHAWQIVSGILQAWEGADAAAPKFPNYAAGTWGPDAADELLGPGRRWRRL

SEQ ID NO: 2569 - DNA, 1467 bp, Pseudomonas aeruginosa
  CDS (1)..(1467)
atgagtacaccagccactccaacgtcctgcgacatcctggtcttcggcggtaccggcgacctggccctgcacaagctgctgccggcgctctatcgcctgcaccgggaggaccgcctgccggccgatacacggatcttcgccctcgcccgcagcgcgctggacaacgccgccttcctcgccctcgccgagcgcaacgtccgcgcggtggtggcgcgcagcgagttcgccgccgaacaatggaaaggcttcgccgcgcgcctcgactacctggccatggacgcctcgcagagcgccgacttcggccgtctcgcgcggcacctgaagagcagcgagggccgggtgctggtgcactacctggcgacctcgccgagcctgttcgcgccgatcgcgcagaacctctccatcgccggcctcgccgggccgcaagcgcgcatcgtgctggaaaaaccgctgggccattcgctggactcggcgagggcgatcaaccagtccatcggccgggtgttcgacgagtcgcgggtgttccgcatcgaccactacctgggcaaggaaaccgtgcagaacctgatggccctgcgcttcgccaatgcgttgttcgagccggtctggcgcgcggcgcacatcgaccatgtgcagatcagcgtcaacgagacccttggcgtggagaaccgtggcggctactacgaccacgccggggcgatgcgcgacatggtgcagaaccatctgctccagttgctctgcctggtggcgatggaggcgccggtgcgtttcgacgccgaggctgtgcgcaacgagaagctcaaggtgctgcaggcgctgaagccgatctccgggctcgacgtgcaggacaagacggtacgcggccagtacgccgccggcaggatcggcggccaggaggtgccggcgtactacttcgagaagaacgtcgacaacgacagcgataccgagaccttcgtcgcgctccaggccgaggtcgagaactggcgctgggccggggtgccgttctacctgcgcaccggcaagcgcatggcgcgcaagtgctcggaaatcgtcatccagttcaagccggtgccgcacagcctgatcgacggcggcggcgggccggccaaccgcctgtggataaggttgcagccggaggagcggatcagcgtgcaactgatggccaagaccccgggcaagggcatgcaactggaaccggtggagctggacctcaacctggccgaggccctcagccgcaacaagcggcgctgggacgcctacgaacgcctgctgctggacgtgatcgagggcgactcgacgctgttcatgcgccgcgacgaggtagaggccgcctggggctgggtcgacccgatcctcgccggctggcgcgagcactaccagagcccgcggccctacccggccggcagcaacggcccggaacaggcgcaactgctgctggaactgcagggtcgacgctggctggaatga

SEQ ID NO: 2570 - protein, 488 aa, Pseudomonas aeruginosa
MSTPATPTSCDILVFGGTGDLALHKLLPALYRLHREDRLPADTRIFALARSALDNAAFLALAERNVRAVVARSEFAAEQWKGFAARLDYLAMDASQSADFGRLARHLKSSEGRVLVHYLATSPSLFAPIAQNLSIAGLAGPQARIVLEKPLGHSLDSARAINQSIGRVFDESRVFRIDHYLGKETVQNLMALRFANALFEPVWRAAHIDHVQISVNETLGVENRGGYYDHAGAMRDMVQNHLLQLLCLVAMEAPVRFDAEAVRNEKLKVLQALKPISGLDVQDKTVRGQYAAGRIGGQEVPAYYFEKNVDNDSDTETFVALQAEVENWRWAGVPFYLRTGKRMARKCSEIVIQFKPVPHSLIDGGGGPANRLWIRLQPEERISVQLMAKTPGKGMQLEPVELDLNLAEALSRNKRRWDAYERLLLDVIEGDSTLFMRRDEVEAAWGWVDPILAGWREHYQSPRPYPAGSNGPEQAQLLLELQGRRWLE

SEQ ID NO: 2571 - DNA, 1422 bp, Caulobacter crescentus
  CDS (1)..(1422)
atggtgctgctgggcggagcgggcgatttggccctccggatgctgctgccttctctgtatttcctggagctcgaccgactgctgccgcacgatctgcggatcattggcgtcgcccgggccgaccatgacgcggccagctacaaggcgctggtccgcgagcaactgggcaagcgcgcgacagtggaggaggcggtttggaatcgcctcgccgcgcgcctcgactacgtgcctgcgaacatcaccagtgaggaagacaccaagaagctggccgaacggatcggtgcgcatggcacgctggtcatcttcttctcgctgtcgcccagcctctacggcccggcttgccaggctttgcaggccgccggcctgacggggcccaacacgcgcttgatcctcgaaaagccgcttggccgcgatctcgaaagctccaaggccaccaacgccgccgtcgccgctgtggtcgacgagagccaagtgttccgcatcgaccactatctgggcaaggaaaccgtccagaacctgacggccctgcgcttcgccaacgtgctgttcgagcccctgtgggatcgcaacacgatcgaccatgtgcagatcaccatcgccgagaccgaaaaggtcggcgaccgctggccctactacgacgaatacggcgcgctgcgggacatggtgcagaaccacatgctgcaactgctgtgtctggtcgccatggaagcgccctcaggcttcgatcccgatgcggtgcgcgacgagaaggtcaaggtgctgcgctccctgcggcccttcaccaaggagaccgtggcccacgacaccgtgcgtggccagtacgtcgccggtgtggtcgagggcggcgcgcgcgctggctatgtcgaggaagtgggcaagcccaccaagaccgagactttcgtggccatgaaggtcgcgatcgacaactggcgttgggacggcgtgccgttcttcctgcgcaccggcaagaacctgccggaccgccgcacccagatcgtcgtccagttcaagcctttgccgcacaacatcttcggtccggcgaccgatggcgagctgtgcgccaaccgcctagtcatcgacctgcagccggacgaagacatctcgctgacgatcatgaacaagcgtccgggtctctcggacgagggcatgcgactgcagtcgctgccgctgtcgctgtcgtttggccagaccggcgggcgccgtcgcatcgcttacgaaaagctgttcgtcgacgccttccgcggcgaccgtacgctgttcgtgcgtcgcgatgaggtcgagcaggcctggcgcttcatcgacggcgtctcggcggcctgggaagaggccagtatcgaaccggcgcactatgcggcgggcacctggggaccgcagtccgcccagggcctgatctcgcccggcggccgagcctggaaggcctga

SEQ ID NO: 2572 - protein, 473 aa, Caulobacter crescentus
MVLLGGAGDLALRMLLPSLYFLELDRLLPHDLRIIGVARADHDAASYKALVREQLGKRATVEEAVWNRLAARLDYVPANITSEEDTKKLAERIGAHGTLVIFFSLSPSLYGPACQALQAAGLTGPNTRLILEKPLGRDLESSKATNAAVAAVVDESQVFRIDHYLGKETVQNLTALRFANVLFEPLWDRNTIDHVQITIAETEKVGDRWPYYDEYGALRDMVQNHMLQLLCLVAMEAPSGFDPDAVRDEKVKVLRSLRPFTKETVAHDTVRGQYVAGVVEGGARAGYVEEVGKPTKTETFVAMKVAIDNWRWDGVPFFLRTGKNLPDRRTQIVVQFKPLPHNIFGPATDGELCANRLVIDLQPDEDISLTIMNKRPGLSDEGMRLQSLPLSLSFGQTGGRRRIAYEKLFVDAFRGDRTLFVRRDEVEQAWRFIDGVSAAWEEASIEPAHYAAGTWGPQSAQGLISPGGRAWKA

SEQ ID NO: 2573 - DNA, 1437 bp, Borrelia burgdorferi (Lyme disease spirochete)
  CDS (1)..(1437)
atgaaagaaagaagtgtttctaattttgatattgtaatttttggggttaccgggaatttgtctagaaaaaagcttattccttcactttttaatttatttaaaaataaatgtattagcaattttagggttattggtttttctcgtaagatttttacagataaagaatttagattgtatattaaagattctttatggcaggaagagaccgattcgttgattgagatttttttaaatttttttgtttatgtatttggcgattttaatgaaaaggagtcttataaaaatttatttaaatttttagatagaagtcgagaaacgatatattatctttcgacgtctcctgcattttatggacctataattaatcatttgaaaaagtattttttaagcgaaaaattgactttgtcaaaaatagttcttgagaagccttttggctctagtcttgagacagcaaaaaaattaaatagtttgctttattctgcttttaaagaagatcaaatttatagaatagatcactatttgggtaaagaaacggttcaaaatatttttacatttagattcggcaattctatttttgaaaatatttggaataatcgttatgtagattttgttcagattacggtagcagaagaattaggtcttgatggaagagtagagtattacgattctgttggcgctttgaaggatatggttcaaaatcatattttacaattgttaagccttgttgcaatggagtctcctattaaatttgattctgagtttattcatgatgaaaaagtaaaagttttaaaaagtttgaggaaaattagcaaagaagatattaagaattacattgttaagggtcaatatataggctcacaagttcaaggggtttttaaaaaaggctataaagatgaaacagaatttttgggaaattcaaataccgaaacttatttagctatgaaagtgtttattaataattggcgttggtctggggttcctttttatcttagaactgggaaaggtcttgctaggaaattttcagaaatatatattcaatttaaaaaaccgagctttactctttttaacaatagttctgttgatttttctaatgctttgatatttagaattcagccaagggatggaattgaaatcaaattcaataccaagaagcccggatataattatgaaattcaaactgctaatatggagttttcatatcacggagcatttaaaagattgtttgatgaggcttatgagcgtttattgttagacgcttttttaggagatggtactttatatgcgacaagtgatgagattgaaagttcttgggaatttgtttcagatattgcaaataaatgggcagatattgaaatttgtaattatttttatggctctgaaggaccaaaagagatagactctattttagaaaaagatcatttttggcgtaaaatttaa

SEQ ID NO: 2574 - protein, 478 aa, Borrelia burgdorferi (Lyme disease spirochete)
MKERSVSNFDIVIFGVTGNLSRKKLIPSLFNLFKNKCISNFRVIGFSRKIFTDKEFRLYIKDSLWQEETDSLIEIFLNFFVYVFGDFNEKESYKNLFKFLDRSRETIYYLSTSPAFYGPIINHLKKYFLSEKLTLSKIVLEKPFGSSLETAKKLNSLLYSAFKEDQIYRIDHYLGKETVQNIFTFRFGNSIFENIWNNRYVDFVQITVAEELGLDGRVEYYDSVGALKDMVQNHILQLLSLVAMESPIKFDSEFIHDEKVKVLKSLRKISKEDIKNYIVKGQYIGSQVQGVFKKGYKDETEFLGNSNTETYLAMKVFINNWRWSGVPFYLRTGKGLARKFSEIYIQFKKPSFTLFNNSSVDFSNALIFRIQPRDGIEIKFNTKKPGYNYEIQTANMEFSYHGAFKRLFDEAYERLLLDAFLGDGTLYATSDEIESSWEFVSDIANKWADIEICNYFYGSEGPKEIDSILEKDHFWRKI

SEQ ID NO: 2575 - DNA, 1539 bp, Chlamydophila pneumoniae, Chlamydia pneumoniae
  CDS (1)..(1539)
atgacgaatgttgttcaggaaactataggtggattgaattccccacgaacgtgccctccttgtattttagttatctttggagcgactggagatctgacggcaaggaaacttttacccgctctatatcacctcactaaagaaggacgcctttcagaccagtttgtttgcgtaggatttgcacgtcgagagaaatcgaatgaactgttccgccaagagatgaaacaagctgtcatacaattttctccttccgaattagatattaaggtatgggaagatttccaacagcgcctcttttatcatcgctcagaattcgataacaatatgggatatacatctctcaaggactccttagaagatttagataaaacgtacggaacacgtggaaatcgtcttttttatctttctactcccccccaatatttttctagaatcattgaaaatttaaataaacataagcttttctataaaaatcaagaccaagggaaaccctggtcccgtgtcattatagaaaaaccttttggaagagacttagatagtgctaagcaacttcagcaatgtatcaatgagaatcttaatgaaaattcggtctatcatatagatcactatttagggaaagaaacggttcaaaacatcttaacaacacgtttcgccaatacgattttcgaatcgtgttggaattcacaatatatcgatcatgtccaaatcagtttgagtgaaacgattggcataggatctcgcggcaatttctttgagaaatctgggatgcttcgggatatggtacagaaccatatgatgcagctactctgtttactcactatggagcctcctacaacttttgatgctgatgaaatcagaaaagaaaaaatcaaaattcttcaacgtatctcaccattttcagaaggttcttcgattgtccgaggacaatatggtccaggaacggttcaaggagtctcggtccttggctatcgtgaagaagagaatgttgacaaagattcccgagtagagacctacgtagctttaaaaacagtcattaataatccccgttggcttggagttcctttctatttacgtgcaggaaaacgactcgccaaaaaatctacagacatttctattatttttaaaaaatcaccctacaatttatttgcagccgaagaatgttcacgttgtccgatagaaaatgatttgctaatcatcagaattcaaccggacgaaggtgtcgctttgaaattcaactgtaaggttccaggaactaataatattgtccgtcctgttaagatggacttccgttacgacagctatttccaaactacaactccagaagcatacgagcgtttattatgtgattgcattataggggatcgtacgttatttactggtggagatgaagttatggcttcttggaagctttttactcctgtattagaggagtgggaccaagattcctcaccctcgtttccaaactatcctgcaggatcttcaggtcctaaagaagctgatgctctcattgaaagagacggaagaagctggagacctttatag

SEQ ID NO: 2576 - protein, 512 aa, Chlamydophila pneumoniae, Chlamydia pneumoniae
MTNVVQETIGGLNSPRTCPPCILVIFGATGDLTARKLLPALYHLTKEGRLSDQFVCVGFARREKSNELFRQEMKQAVIQFSPSELDIKVWEDFQQRLFYHRSEFDNNMGYTSLKDSLEDLDKTYGTRGNRLFYLSTPPQYFSRIIENLNKHKLFYKNQDQGKPWSRVIIEKPFGRDLDSAKQLQQCINENLNENSVYHIDHYLGKETVQNILTTRFANTIFESCWNSQYIDHVQISLSETIGIGSRGNFFEKSGMLRDMVQNHMMQLLCLLTMEPPTTFDADEIRKEKIKILQRISPFSEGSSIVRGQYGPGTVQGVSVLGYREEENVDKDSRVETYVALKTVINNPRWLGVPFYLRAGKRLAKKSTDISIIFKKSPYNLFAAEECSRCPIENDLLIIRIQPDEGVALKFNCKVPGTNNIVRPVKMDFRYDSYFQTTTPEAYERLLCDCIIGDRTLFTGGDEVMASWKLFTPVLEEWDQDSSPSFPNYPAGSSGPKEADALIERDGRSWRPL

SEQ ID NO: 2577 - DNA, 1476 bp, Escherichia coli
  CDS (1)..(1476)
atggcggtaacgcaaacagcccaggcctgtgacctggtcattttcggcgcgaaaggcgaccttgcgcgtcgtaaattgctgccttccctgtatcaactggaaaaagccggtcagctcaacccggacacccggattatcggcgtagggcgtgctgactgggataaagcggcatataccaaagttgtccgcgaggcgctcgaaactttcatgaaagaaaccattgatgaaggtttatgggacaccctgagtgcacgtctggatttttgtaatctcgatgtcaatgacactgctgcattcagccgtctcggcgcgatgctggatcaaaaaaatcgtatcaccattaactactttgccatgccgcccagcacttttggcgcaatttgcaaagggcttggcgaggcaaaactgaatgctaaaccggcacgcgtagtcatggagaaaccgctggggacgtcgctggcgacctcgcaggaaatcaatgatcaggttggcgaatacttcgaggagtgccaggtttaccgtatcgaccactatcttggtaaagaaacggtgctgaacctgttggcgctgcgttttgctaactccctgtttgtgaataactgggacaatcgcaccattgatcatgttgagattaccgtggcagaagaagtggggatcgaagggcgctggggctattttgataaagccggtcagatgcgcgacatgatccagaaccacctgctgcaaattctttgcatgattgcgatgtctccgccgtctgacctgagcgcagacagcatccgcgatgaaaaagtgaaagtactgaagtctctgcgccgcatcgaccgctccaacgtacgcgaaaaaaccgtacgcgggcaatatactgcgggcttcgcccagggcaaaaaagtgccgggatatctggaagaagagggcgcgaacaagagcagcaatacagaaactttcgtggcgatccgcgtcgacattgataactggcgctgggccggtgtgccattctacctgcgtactggtaaacgtctgccgaccaaatgttctgaagtcgtggtctatttcaaaacacctgaactgaatctgtttaaagaatcgtggcaggatctgccgcagaataaactgactatccgtctgcaacctgatgaaggcgtggatatccaggtactgaataaagttcctggccttgaccacaaacataacctgcaaatcaccaagctggatctgagctattcagaaacctttaatcagacgcatctggcggatgcctatgaacgtttgctgctggaaaccatgcgtggtattcaggcactgtttgtacgtcgcgacgaagtggaagaagcctggaaatgggtagactccattactgaggcgtgggcgatggacaatgatgcgccgaaaccgtatcaggccggaacctggggacccgttgcctcggtggcgatgattacccgtgatggtcgttcctggaatgagtttgagtaa

SEQ ID NO: 2578 - protein, 491 aa, Escherichia coli
MAVTQTAQACDLVIFGAKGDLARRKLLPSLYQLEKAGQLNPDTRIIGVGRADWDKAAYTKVVREALETFMKETIDEGLWDTLSARLDFCNLDVNDTAAFSRLGAMLDQKNRITINYFAMPPSTFGAICKGLGEAKLNAKPARVVMEKPLGTSLATSQEINDQVGEYFEECQVYRIDHYLGKETVLNLLALRFANSLFVNNWDNRTIDHVEITVAEEVGIEGRWGYFDKAGQMRDMIQNHLLQILCMIAMSPPSDLSADSIRDEKVKVLKSLRRIDRSNVREKTVRGQYTAGFAQGKKVPGYLEEEGANKSSNTETFVAIRVDIDNWRWAGVPFYLRTGKRLPTKCSEVVVYFKTPELNLFKESWQDLPQNKLTIRLQPDEGVDIQVLNKVPGLDHKHNLQITKLDLSYSETFNQTHLADAYERLLLETMRGIQALFVRRDEVEEAWKWVDSITEAWAMDNDAPKPYQAGTWGPVASVAMITRDGRSWNEFE

SEQ ID NO: 2579 - DNA, 1548 bp, Treponema pallidum subsp. pallidum (syphilis spirochete)
  CDS (1)..(1548)
atggggaaaatcagtggcagcggcacggtcgcgccgcacatcctggttatctttggcgcttcaggcgaccttgccgcgcggaagcttatcccctcgctttgggatctctttgagcaagagctcctgccccgtacattcggtatactcggcgcagggcgtacggctctgtctacagagtcttttcgcgcacggcttgcagaggcggtcacaaagcatgcagtgcgcacaccgcacgacccggcgcgcctcaccgaattcctgcagaagatccactacttctcgttcgatcccaccgactctgtcgcctttgccgactttgccacgtacgtgcgcaccctcgaccagtcgctgcacaccgagggcaactttatcttctatcttgccactccccctagcctgtacgaaactatccccacgcagcttgctatgcaccacttgaaccgggaacagggtaattttcgcagggtagttattgaaaaaccctttggctacaacctagaaaccgcgcagcaccttaatgcgagcttgcgtgcccactttcaggaaaaccaaacctatcgcatcgatcactatctgggtaaggaaacggtccaaaacatcctggtcactcgctttgccaatccccttttcgagcccacatggaaccggacccatatcgattacgttgaaattactgcaagcgaatcactaggtgtcgaaaaccgcggcggttactacgaccagtccggtgcattgcgcgatatgatccaaaaccacttgttactcctcttgggtattatcgcgatggaggcgcccgccgtcgtgagttcaagtcgtctacgggatgaaatcgtaaaggtctttgactgcctgcgccctatgggagaacgcgacgtcatgcagcatacggtgcgtgcccaatacgtcgccggcaagatacgcggtgtagccgtccccggctaccttgaggagtcaggcgttgaccctcgctcgtgcactgaaacctttgccgcactcaagtgctacatcgacaattggcggtggatggacgttcccttctacctgcggacgggtaagcgtttgcccacgggcgtcactgaggtgatcgtccattaccgaacgctccccatcgcgcttttcgagcacatcgaacgcccgtgcgcacgcgagggcaacgcgcttgtcattcgcattcaacccgacgaaggaattcagcttaaaatcgacctcaaagagcccggcgcggggttcaagactattcccgtcagtgttgattttcagtattcggctcttacctattcgcacttacccagcgcgtatgagcggctattgcttgactgcatgaatggagacaacacgctctaccatcgagatgacgcggtggagtctgcatggcgcttcatagatcctattcttgccgcatggaaatcaaacaagagtcctctacttacgtaccctgcaggaagctggggtccgaaggctgcagacgacctgatcaaagggagtgctccacggtggcatcacccctcttctacgctgctcagcgatgattttgcctgccgactctag

SEQ ID NO: 2580 - protein, 515 aa, Treponema pallidum subsp. pallidum (syphilis spirochete)
MGKISGSGTVAPHILVIFGASGDLAARKLIPSLWDLFEQELLPRTFGILGAGRTALSTESFRARLAEAVTKHAVRTPHDPARLTEFLQKIHYFSFDPTDSVAFADFATYVRTLDQSLHTEGNFIFYLATPPSLYETIPTQLAMHHLNREQGNFRRVVIEKPFGYNLETAQHLNASLRAHFQENQTYRIDHYLGKETVQNILVTRFANPLFEPTWNRTHIDYVEITASESLGVENRGGYYDQSGALRDMIQNHLLLLLGIIAMEAPAVVSSSRLRDEIVKVFDCLRPMGERDVMQHTVRAQYVAGKIRGVAVPGYLEESGVDPRSCTETFAALKCYIDNWRWMDVPFYLRTGKRLPTGVTEVIVHYRTLPIALFEHIERPCAREGNALVIRIQPDEGIQLKIDLKEPGAGFKTIPVSVDFQYSALTYSHLPSAYERLLLDCMNGDNTLYHRDDAVESAWRFIDPILAAWKSNKSPLLTYPAGSWGPKAADDLIKGSAPRWHHPSSTLLSDDFACRL

SEQ ID NO: 2581 - DNA, 1476 bp, Buchnera sp
  CDS (1)..(1476)
atgataatagaaacaaatcacgcttgcgatttagtaatttttggcgctaaaggagatctaacaaaaagaaaattattaccagctttatataaattagaaaaatctaaaaaaatacataaatatacacgcattatcgcttctggtcgtgctgattggagcacagaagactatatagaaaaaataaaaacagaagtaaaaaattttttaaatgaagaaataaatgatcttatttggaaaaatttgagttctcgtatatttttttgtaatattgatgtacatgaaccattgcatttttttagactaaaaacgatacttaaacaaaaaaaaaatatcatagtttactattgcgctgttccttctaatacgttgaattctatttttatcggtttaggaaatgcacatttaaattctgttccatcgcgtatagtattagaaaaaccattaggagtttgtttgaaaacatcaaaaaaaatcaatgatcaaatttctaaatattttctagaatcgcaaatttttcgtattgatcactatttaggaaaagaatcaatacttaatctttttgctttacgattttctaatacatgtcttttttataattggaataataaaacaattgatcatattcaaattactgtatctgaggaagttggaattgaagatagatggaattattttaatatgatgggacaaatgaaagatatggtgcaaaatcatcttttacaaatattaactattcttacgatggatcaaccaaaaaatattagttctgaaagtattcaacatgaaaaagtaaaaatactacgttctttaaaccccattaatattcataacataaataaaaaaactgttcgaggacaatattgttcaggagttatcaacgagaaaaaagtaccttcttatttagaagaaaatggtgcaaataaaaatagtttaactgaaacctttgttgctataaaagttgatctaaataataagcaatggtccggtgtcccattttaccttagaactggaaaacgtttagcacataaatattctgaaatagtcgttttttttaagaaaaaacctacaaatttgtttaaaaatttaaattcagaattattacaaaataaattaattatacgcttagaacctaatccaaatattatatttgatttttcagtaaaagcaccaggattagaacaagaatataaaatagaaaattcccagctaaaatccagtcaatttagtaagaaatattctaaaaattcaattgatgcttacgaaagattgttatttgaaattatgagaggtgtacaatctttattcgtatgccgagatgaaatagaagctgcgtggaaatggatagatcccatcatacatgcatggaaaaattctaaaaataatgcccctcaattatatatgtctggtacttgggggcctaaaaattctgatttgctacttgctcatgatggtcgtgtttggtatgaatttcattaa

SEQ ID NO: 2582 - protein, 491 aa, Buchnera sp
MIIETNHACDLVIFGAKGDLTKRKLLPALYKLEKSKKIHKYTRIIASGRADWSTEDYIEKIKTEVKNFLNEEINDLIWKNLSSRIFFCNIDVHEPLHFFRLKTILKQKKNIIVYYCAVPSNTLNSIFIGLGNAHLNSVPSRIVLEKPLGVCLKTSKKINDQISKYFLESQIFRIDHYLGKESILNLFALRFSNTCLFYNWNNKTIDHIQITVSEEVGIEDRWNYFNMMGQMKDMVQNHLLQILTILTMDQPKNISSESIQHEKVKILRSLNPINIHNINKKTVRGQYCSGVINEKKVPSYLEENGANKNSLTETFVAIKVDLNNKQWSGVPFYLRTGKRLAHKYSEIVVFFKKKPTNLFKNLNSELLQNKLIIRLEPNPNIIFDFSVKAPGLEQEYKIENSQLKSSQFSKKYSKNSIDAYERLLFEIMRGVQSLFVCRDEIEAAWKWIDPIIHAWKNSKNNAPQLYMSGTWGPKNSDLLLAHDGRVWYEFH

SEQ ID NO: 2583 - DNA, 1512 bp, Lactococcus lactis subsp. lactis
  CDS (1)..(1512)
atgaccgaacaaaaacaagcacttttcaccatcttcggagcaactggtgacctcgctaaaagaaagctctacccttcactctttcgcctcttcaaaaaaggtgaactagctgacaattttgcagtcatcggtaccgctcgccgtccatggacaaacgagtattatcgtgaagttgttttagagtctatcaaagatttaatgaactcaaaaacggaagccgaaaatttcgccagccatttttattatcaaagtcacgatgttagcgacagctcacattacgttaacttaaaagatttgggtgaaaaattgcgtaaacagtataaaactgctggcaatcaagtcttctttttagcaatggctcctcaattttttggcactatctctgaacaccttaaatcagaaaatattttgacaggtgagggttttgagagaatcgtcattgaaaaaccatttggaacaagctacgatacggcaaaatcacttaatgacagcctcgcaaaagtatttagtgaagaacaaattttccgaatcgaccactaccttggaaaagaaatgatccaggccgtttctgccgttcgttttgccaatccaatctttgaatcgctttggaataatcaacacattgataacgttcagattacttttgccgaatttatcggtgttgaagaccgtggcggttactacgaaacttctggtgctttaaaagatatgattcaaaaccatgtcttacaagtactcagcctcattgccatggaaaaacctgaaaaatttgatgaatcttatattgtaaaagaaaaagttaaagcccttaatgcaatccgtcaatattcttctgaggaagctttagaaaacttcgttcgtggtcaatatatcgcaggacgttttgacggtgaagattacctaggctatcgcgaagaagattctgttgcaacagacagtcgaactgaaactttcgccgctggaaaatttgtcattgataatgagcgttggtcaggcgtccctttctatgttcgctcaggaaaacgtatgactgaaaaaggaactcgtattaatatcgttttcaaaaaagataaagacaatctctttgcagaaaattgcgatgaccaatccgttcaaaatgttttgaccatttatattcaaccaactgaagggttttcactttcagtaaatggaaaagcggctggtcaaggcttccatttagagcctttgcggttaaatttccgacacgatagtgaatttcttggaaattctcctgaagcatatgaaaaacttttcctagatgtccttaatggagacggaacaaatttctcacattgggaagaagcggctcgcgcctgggaacttattgatgttattcgagaagcttgggataaagaaacttctgagcttccaacttatgcggctcgcacaatgggacctaaggctgcatttgacttactagaaaaaaatggtcacgaatgggcttggcaacctgatttatggtatcaagaacgtggttactacaataaataa

SEQ ID NO: 2584 - protein, 503 aa, Lactococcus lactis subsp. lactis
MTEQKQALFTIFGATGDLAKRKLYPSLFRLFKKGELADNFAVIGTARRPWTNEYYREVVLESIKDLMNSKTEAENFASHFYYQSHDVSDSSHYVNLKDLGEKLRKQYKTAGNQVFFLAMAPQFFGTISEHLKSENILTGEGFERIVIEKPFGTSYDTAKSLNDSLAKVFSEEQIFRIDHYLGKEMIQAVSAVRFANPIFESLWNNQHIDNVQITFAEFIGVEDRGGYYETSGALKDMIQNHVLQVLSLIAMEKPEKFDESYIVKEKVKALNAIRQYSSEEALENFVRGQYIAGRFDGEDYLGYREEDSVATDSRTETFAAGKFVIDNERWSGVPFYVRSGKRMTEKGTRINIVFKKDKDNLFAENCDDQSVQNVLTIYIQPTEGFSLSVNGKAAGQGFHLEPLRLNFRHDSEFLGNSPEAYEKLFLDVLNGDGTNFSHWEEAARAWELIDVIREAWDKETSELPTYAARTMGPKAAFDLLEKNGHEWAWQPDLWYQERGYYNK

SEQ ID NO: 2585 - DNA, 1572 bp, Drosophila melanogaster
  CDS (1)..(1572)
atggcaacgcaaaaggaagatcacaccgccctggatctcataatcaagtcactcaagtcgcctacaatggtctgcgagggaacccactttgacggcaagattccgcacacgttcgtcatctttggggcgtcgggcgatctggccaagaagaagatctaccccacgctctggtggctctaccgcgatgacctgctgcccaagccgaccaagttctgcggctatgcccgttccatgctgaccgtcgatagcatcaaggagcagtgtctgccgtacatgaaggtccagccgcacgagcagaagaagtacgaggagttctgggccctcaatgagtacgtgtccggcagatatgacggacgcactggcttcgagctgcttaaccagcagctggagattatggagaacaagaacaaggccaaccgcatcttctatctggccctgccgcccagcgtcttcgaggaggtgactgtcaacatcaagcagatctgcatgtcggtctgcggttggaaccgcgtgatcatcgagaagcctttcggccgggatgacgcctcctcggcaggcctgagcgaccatctggccggtctgttccaggaggatcagctgtaccgcatcgatcactacctgggcaaggagatggtgcagaagctgatgaccatacgcttcggcaacaagatcctcagctcgacgtggaaccgcgagaacatcgcctccgtgctgatcacgttcaaggagcccttcggcacgcagggtcgtggcggctacttcgacgagtttggcatcatacgcgacgttatgcagaaccatctgctgcagatcctctcgctggtggccatggagaagccggtgagctgccacccggacgacattcgtgacgagaaggtcaaggtgctgaagagcatcgaggccctgacgctggatgacatggtgctgggccagtacctgggcaatccgcagggtacaaacgatgatgcgcgcacgggctacgtggaggaccccaccgttagcaacgattcgaacacgcccacctacgccgctcggtcgctcaagatcaacaacgagcgctggcagggagtgcccttcatcctgcgctgcggcaaggcgctgaacgagcgaaaggcggaggtgcgcatccagtaccaggacgtgctcggcgacatcttcgagggcaatacgaagcgcaacgagctggtgatacgcgtccagccgggcgaggccctgtactttaagatgatgaccaagagccccggcataacgttcgacatcgaggagacggagctggacctcacctacgagcaccgctacaaggactcctacctgccggacgcgtacgagcgtctcatcctcgacgtcttctgcggctcccagatgcacttcgtccgctcggcagctgcgcaggcgtggcgcatcttcacgcccattctgcaccagatcgagaaggagcacattcgtccaatcacctaccagtacggatcgcgcggtcccaaggaggcggaccgcaagtgcgaggagaacaatttcaagtactccggctcctacaagtggcacggcggcaaggcggccacgtccaatcactga

SEQ ID NO: 2586 - protein, 523 aa, Drosophila melanogaster
MATQKEDHTALDLIIKSLKSPTMVCEGTHFDGKIPHTFVIFGASGDLAKKKIYPTLWWLYRDDLLPKPTKFCGYARSMLTVDSIKEQCLPYMKVQPHEQKKYEEFWALNEYVSGRYDGRTGFELLNQQLEIMENKNKANRIFYLALPPSVFEEVTVNIKQICMSVCGWNRVIIEKPFGRDDASSAGLSDHLAGLFQEDQLYRIDHYLGKEMVQKLMTIRFGNKILSSTWNRENIASVLITFKEPFGTQGRGGYFDEFGIIRDVMQNHLLQILSLVAMEKPVSCHPDDIRDEKVKVLKSIEALTLDDMVLGQYLGNPQGTNDDARTGYVEDPTVSNDSNTPTYAARSLKINNERWQGVPFILRCGKALNERKAEVRIQYQDVLGDIFEGNTKRNELVIRVQPGEALYFKMMTKSPGITFDIEETELDLTYEHRYKDSYLPDAYERLILDVFCGSQMHFVRSAAAQAWRIFTPILHQIEKEHIRPITYQYGSRGPKEADRKCEENNFKYSGSYKWHGGKAATSNH

SEQ ID NO: 2587 - DNA, 1575 bp, Synechococcus sp
  CDS (1)..(1575)
atgactcccaaactgcttgagaacccgcttcgcattggactccgccaagacaaagtccctgaaccgcaaatcctcgtcatctttggggccaccggcgacttaacccagcgcaaactggtgcctgccatctacgagatgcacctcgaacggcgtttgccgccagaactgacgatcgtgggggtggctcggcgcgactggagcgatgactatttccgagagcaccttcgccaaggggttgaacagtttggcggcggcattcaagcagaggaagtttggaacacctttgcacaaggcctcttctttgcgccgggcaacattgatgacccccagttttatcaaacccttcgcgatcgccttgcgaatctggatgagctgcgcggcacgcggggcaatcgcactttttacctctcggtcgcaccccgtttctttggtgaagctgcaaaacaactcggggcagccggaatgcttgccgatccagctaaaacgcggctggtcgtcgaaaaaccttttggccgcgatctcagctccgctcaggtgctgaatgccatcttgcagaacgtttgccgcgaaagccagatctatcggattgaccattacctcggcaaagaaacagttcaaaacctcttagttttccggtttgccaatgccatttttgagccgctctggaaccggcaatacattgaccatgtccaaatcacggtggctgaaactgtggggttggaagggcgagctggctactacgaaactgctggtgctctgcgggatatggtgcaaaaccacttgatgcagctcttcagcctgacggcgatggagccgccaaactctctaggtgctgacggtatccgtaacgaaaaggtcaaggtggtgcaagccacacggctggcggatatcgacgatctcagtttgtctgcggtgcgggggcagtacaaagcgggctggatgaatggccgctctgtgcccgcctatcgggatgaggagggagcggatccccagtcgtttacgcccacctatgtcgccatgaaattgctggtcgacaactggcgctggcagggagtgccgttctatctacggacgggtaaacggatgcccaaaaaggtgacggagattgccattcagttcaaaaccgtgccgcacttgatgttccagtcagccacccaaaaagtgaatagtcccaacgtcttagtgctgcggattcagcccaatgaaggcgtgtccttgcgctttgaagtgaaaacaccgggttcctcgcaacggacgcgatcggtggatatggacttccgctacgacacggcttttggctcccccacccaagaggcctatagccgcctgctggtggactgcatgctcggcgatcagacgctgttcacccgcgctgatgaggttgaagcgtcttggcgggttgtgacgccgttactcgaatcttgggatgacccgcgccaagccgctggcatttctttttacgaagctggcacttgggagccggcagaggcggagcagttgatcaaccgtgatggtgccgttggcgtcgtctctaggatccctgcaacccagctcaattcttctggagatgtttga

SEQ ID NO: 2588 - protein, 524 aa, Synechococcus sp
MTPKLLENPLRIGLRQDKVPEPQILVIFGATGDLTQRKLVPAIYEMHLERRLPPELTIVGVARRDWSDDYFREHLRQGVEQFGGGIQAEEVWNTFAQGLFFAPGNIDDPQFYQTLRDRLANLDELRGTRGNRTFYLSVAPRFFGEAAKQLGAAGMLADPAKTRLVVEKPFGRDLSSAQVLNAILQNVCRESQIYRIDHYLGKETVQNLLVFRFANAIFEPLWNRQYIDHVQITVAETVGLEGRAGYYETAGALRDMVQNHLMQLFSLTAMEPPNSLGADGIRNEKVKVVQATRLADIDDLSLSAVRGQYKAGWMNGRSVPAYRDEEGADPQSFTPTYVAMKLLVDNWRWQGVPFYLRTGKRMPKKVTEIAIQFKTVPHLMFQSATQKVNSPNVLVLRIQPNEGVSLRFEVKTPGSSQRTRSVDMDFRYDTAFGSPTQEAYSRLLVDCMLGDQTLFTRADEVEASWRVVTPLLESWDDPRQAAGISFYEAGTWEPAEAEQLINRDGAVGVVSRIPATQLNSSGDV

SEQ ID NO: 2589 - DNA, 1485 bp, Haemophilus influenzae
  CDS (1)..(1485)
atgcaaactgataataattgtatcgtcatttttggcgcgtctggtgacttaactcatcgtaaactcattccagccctttataatctctacaaaatcgggcgtttgagtgaaaacttttccgttcttggtgttgcacgttctgacttgaacgatgaaactttccgcgaaaaaatgcgtgaggcgttaattcataatgaagaaacaacaccagaaaccttagatgctttctgctctcatctttattaccaagcagtgaatacttcggatgctcaagattacggcaaacttgttccacgcttagacgatcttcacgataaatatcaaacctgtggtaacaccttttactatatgtccactccaccaagtctttatggcgtgattcctgagtgtttggctgcacatggtttaaatacggaagaatatggctggaaacgtattatcgttgaaaaaccttttggttacgatgaaaaaacagcgcaaacattagacgtacaaatccaccgtttctttgaagaacaccaaatttatcgtatcgatcattatttaggtaaagaaaccgttcaaaacttgctcgtattacgtttttcaaatggttggtttgaaccgctttggaaccgtaatttcattgattatgtagaaattactggtgcagaatctattggcgtggaagagcgcgggggctattatgatggttctggcgcaatgcgagatatgttccaaaaccatttattgcaagtgttagcgatggtggcaatggagccgccagcgattattaacgcgaattcaatgcgtgatgaagtagcaaaagtgatgcatagtttgcgtccattaacttcggaggatatggagaataaccttgttttgggtcaatacacagcggctgaaattaacggcaaaatggaaaaaggctatctagaagaaaaaggcgtaccggcaaattctcgtactgaaacctacatcgcattacgttgtgaaattgaaaactggcgttgggctggtgtgccgttctatgttcgtacgggtaaacgcttaccagctcgtgtgactgaaattgtgatccattttaaaactacgccacatcctgtattcagccaaaatgcaccagagaataaattaattattcgtattcaacctgatgaagcgatttcaatgcgttttggtttgaaaaaaccaggtgcaggttttgaggcgaaagaagtatcaatggatttccgttatgcagatttagcaggtgcgcaagtattaaccgcttatgaacgtttattgttggatgcgatgaaaggcgatgcaaccttgtttgctcgtactgatgctgtgcatgccgcatggaaatttgtgcaaccgattttagattacaaagccaatggtggtcgtattcacgaatatgaagctggcacttgggggcctgttgcagctgataaattaatcgcaaaacaaggcaaagtgtggcgtaaaccaagtggattgatgaagaaaaaagtttaa

SEQ ID NO: 2590 - protein, 494 aa, Haemophilus influenzae
MQTDNNCIVIFGASGDLTHRKLIPALYNLYKIGRLSENFSVLGVARSDLNDETFREKMREALIHNEETTPETLDAFCSHLYYQAVNTSDAQDYGKLVPRLDDLHDKYQTCGNTFYYMSTPPSLYGVIPECLAAHGLNTEEYGWKRIIVEKPFGYDEKTAQTLDVQIHRFFEEHQIYRIDHYLGKETVQNLLVLRFSNGWFEPLWNRNFIDYVEITGAESIGVEERGGYYDGSGAMRDMFQNHLLQVLAMVAMEPPAIINANSMRDEVAKVMHSLRPLTSEDMENNLVLGQYTAAEINGKMEKGYLEEKGVPANSRTETYIALRCEIENWRWAGVPFYVRTGKRLPARVTEIVIHFKTTPHPVFSQNAPENKLIIRIQPDEAISMRFGLKKPGAGFEAKEVSMDFRYADLAGAQVLTAYERLLLDAMKGDATLFARTDAVHAAWKFVQPILDYKANGGRIHEYEAGTWGPVAADKLIAKQGKVWRKPSGLMKKKV

SEQ ID NO: 2591 - DNA, 1446 bp, Neisseria meningitidis
  CDS (1)..(1446)
atgagtacacaaacaaattttgatttggtgttgttcggtgcgaccggcgatttggcaatgcgcaaacttttgccctgcctgtatcaggcgcacgtggccggtttgcttcatcccgaaggtcgtattttgggtgtgagccgcagcgaattggataccgaaggttttctggcgaaggtggaaaccagttccaaaatccatgtgaaagaaaatttttccgatgaggcttgggcatcgtttgtcgaacgtctcgcatatctcaaagtcgatgttacgcagccggacgattttgctgctttgggcgatttggtcaaagcgcgcaagaatactgaaaatgtcgtgatctacctctcaactgcgccgaaattctttgcgcaagcctgcgagaaccttgctgcgatcggtttgaatgccgacaacgtgcgcgtggttttggaaaaaccgttgggtacggacttggcttcttcccaacaaatcaatactgatgttgcgcgttatttcaaagaagggcaaatttaccgcatcgaccactaccttggcaaagaaagcctgcaaaacctgcttgcgctgcgttttgccaatgtaatgttcgagccgctgtggaacaataaatatatcgaaagcgtgcagttgaccatcgccgaacagctcggtgtggaagagcgcggtgagttttacgacattaccggcgcgttgcgcgatatggtgcaaaaccatttgatgcagatgttgtgcatgactgcgatggaagcccccgccagcttggatgccgacgcggtgcgcgatgaaaaagtcaaagtcatcaagtcattgaagccgctgaccgtcgaatctgtcaatgaaaacgtcgtgcgcggacaatataccgccgccaaaggcatgaacggctatcttgaagaaatcaacgttctgcaagacagctttaccgaaacctacgtcgccattaaagccgaaatcgaaaacgaacgctggaagggcgttcccttctacctgcgtaccggcaagcgcatggcgggcaaagtggcggaaatcgttttgaacttcaaagatttgaacagccatatttttgaaggcagccgcaccgcgcccaaccggctcgttatcgagttgcaaccatatgaatccgtgcgcctctatacgcagatgaaaaccccgggggcaggaaataaggtcgaaaccgtgccgctggcaaccgatttgggcaaggcattggaaagccgccgcgcggaagcttacgagcgcctgctgctggatgtgattaacggcaaactcgctttgtttaaccgccgcgacgaacttgaagccgcgtgggaatatgtgatgccgattttggaaaactggacaaataacaccacgccgccgcacggctacggcgcacactcgtgggggcctgaagccgcgcgcgaactattggcgcgcgacggacacaagtggcacgaagagcagtaa

SEQ ID NO: 2592 - protein, 481 aa, Neisseria meningitidis
MSTQTNFDLVLFGATGDLAMRKLLPCLYQAHVAGLLHPEGRILGVSRSELDTEGFLAKVETSSKIHVKENFSDEAWASFVERLAYLKVDVTQPDDFAALGDLVKARKNTENVVIYLSTAPKFFAQACENLAAIGLNADNVRVVLEKPLGTDLASSQQINTDVARYFKEGQIYRIDHYLGKESLQNLLALRFANVMFEPLWNNKYIESVQLTIAEQLGVEERGEFYDITGALRDMVQNHLMQMLCMTAMEAPASLDADAVRDEKVKVIKSLKPLTVESVNENVVRGQYTAAKGMNGYLEEINVLQDSFTETYVAIKAEIENERWKGVPFYLRTGKRMAGKVAEIVLNFKDLNSHIFEGSRTAPNRLVIELQPYESVRLYTQMKTPGAGNKVETVPLATDLGKALESRRAEAYERLLLDVINGKLALFNRRDELEAAWEYVMPILENWTNNTTPPHGYGAHSWGPEAARELLARDGHKWHEEQ

SEQ ID NO: 2593 - DNA, 1278 bp, Helicobacter pylori
  CDS (1)..(1278)
atgctggattttgatttggttctttttggcgcgactggggatttagccatgcgaaagctctttgtttcgctttatgaaatttatattcattatggttttaaaaacgattctaggattatcgcatcggggcgtaaggagctatccaatgaagagtttttagcgcttctttgtgaaaaaacacaactgcattcaagagaaaagggtgaggaatttttaacccatatcagttatttgcgcgtccgtttggataaccctaaagactttgaagaattgagtaaaatcgccacaaacaataagcccttgattttctacttttctatctcccctagtttttttgcaacgaccgctcaaaatttagcccaaaacgcgctcaatcacgctaacactcgtttgattctagaaaagcctttagggcatgatttaaagacttgtaaagagattttccaaagcattagcgctttttttaaagaagaacaaatttttagaatcgatcattatttagggaaaaagggcgttcaaaatatccttgaattgcgcctgaataaccctatcttaaacattttatgggatcaaatcagcgcggttgaaatctgcgtgtatgagactttaggggtggaagaaaggggcgaattttacgataaaatcggggctttaagggatatggttcaaaaccatctcttgcaagttttatcccttatcgctacagatttacccaacgatttaaaagatttgaggcaagaaaaaatcaaagttttaaagaccttacaaccccctaaagatttcacaaaacaggttattcgggcccaatatcaaggctatagagatgaaaataaggtccataaagagagccagacagagacttttgtcgctattaaagcctttttggatacgcccaaatttaaaggcgtgcctttctaccttaagcacgctaaaaaaatgccccgcaatcaagcgagtgtgaaaatccattttaatgcagtcaatacgctggaatttttcctctctcaagataaaatcaccctcaccctaaaagatcatcaaaacccccttattttagaaacccacaacaaacaagaatttttacagccctacgctaaattgctctatgatgcgataccaaataaccactataatttcgcccaccagttggaattagaagcgtcatgggtttttattgacacgctcatagagggttttatcaataacgctacgcccttatattcctatgaaagccacaatctcaacgaatcagaatttttaaaaccactctatcaataa

SEQ ID NO: 2594 - protein, 425 aa, Helicobacter pylori
MLDFDLVLFGATGDLAMRKLFVSLYEIYIHYGFKNDSRIIASGRKELSNEEFLALLCEKTQLHSREKGEEFLTHISYLRVRLDNPKDFEELSKIATNNKPLIFYFSISPSFFATTAQNLAQNALNHANTRLILEKPLGHDLKTCKEIFQSISAFFKEEQIFRIDHYLGKKGVQNILELRLNNPILNILWDQISAVEICVYETLGVEERGEFYDKIGALRDMVQNHLLQVLSLIATDLPNDLKDLRQEKIKVLKTLQPPKDFTKQVIRAQYQGYRDENKVHKESQTETFVAIKAFLDTPKFKGVPFYLKHAKKMPRNQASVKIHFNAVNTLEFFLSQDKITLTLKDHQNPLILETHNKQEFLQPYAKLLYDAIPNNHYNFAHQLELEASWVFIDTLIEGFINNATPLYSYESHNLNESEFLKPLYQ

SEQ ID NO: 2595 - DNA, 1434 bp, Xylella fastidiosa
  CDS (1)..(1434)
atgcacaacaccctcttattgtttggcgccaccggcgacctcgcccaacgctatctcttcccctccttactgcacctgtttactgatggcttattgccacaagacttccgcattcgtgctctggccttgtcgccccataacaccacacaattccgcgacatcctgcgcccgcgcttggaacaagcactacccatcgccaacactgcgcacatccaagccctactacaacgtgtcgactacctttccgtagacttgaacgacccaacatcaatcgccgaagcagtccgagatctgacggaacatccctgcatcagctacttggcaatcccaccaggcctgtacaccaacaccgccctaggattggcacagggaggggcactgcagacaccacaccgattgatgctggaaaaaccgatcggacgcgactcaataaacgcacgcgaaatcctaaacaccatcggcacactgattgacgaagatcgcatcttccgcgtagaccactatctaggcaaagcagcagtgcagaacctcgtcgcactgcgcttcggaaacaccctgctagaagcggtatggaaccgaaaccacattgagtcagtacacatcctcatcgccgaaaccgaaggcgtcgatggccgcaatgcttactacgcacgtgctggcgcactacgcgacatgatgcaaagccacatcctgcaactcctatgcctggtcgccatggaacccccggcctctctggaagccgaccgcatccgcgacgaaaaagtcaaaatcctgcgcgcactacgcccactgaacgcccaaaacgccgcaatgcacagcgtgcgtggacgctacagcgcgggcaccattaacagccaaccagtgccagcctatcaaccaccggaaggcagcaatgtagagacctttgtcggtgtcaccgcatacatcgacaactggcgctgggcgggcgtaccgttccacctatgcacaggaaaacgcttggccgaacgctcaacccagatcgtcgtcaccctcaaacccgtcacacactggctatttgaacgtccagaccggaacaatgcagcaccaaaccgcctgtgcttcaaactacagccccaggaaaatatcgaactaaacctgatgagcagcctggccggccccgaatggggaaccctggaactgcaaccgctggaattggagctatccgtcccgaccggaaaacatcgccacatcgcctatgagcgcctattcctcgacgcattcaacggcaacccggcgctatttgtacgtcacgacgaagtcacagccgcctgggattggatcgacagcgtcagcaatgcctgggaactgtccgacttaccactgcaaccctaccccgccggcagctggggcccacctcaagcccaccaatttctgccgccattggggattgatggccatggaaacgacgcatga

SEQ ID NO: 2596 - protein, 477 aa, Xylella fastidiosa
MHNTLLLFGATGDLAQRYLFPSLLHLFTDGLLPQDFRIRALALSPHNTTQFRDILRPRLEQALPIANTAHIQALLQRVDYLSVDLNDPTSIAEAVRDLTEHPCISYLAIPPGLYTNTALGLAQGGALQTPHRLMLEKPIGRDSINAREILNTIGTLIDEDRIFRVDHYLGKAAVQNLVALRFGNTLLEAVWNRNHIESVHILIAETEGVDGRNAYYARAGALRDMMQSHILQLLCLVAMEPPASLEADRIRDEKVKILRALRPLNAQNAAMHSVRGRYSAGTINSQPVPAYQPPEGSNVETFVGVTAYIDNWRWAGVPFHLCTGKRLAERSTQIVVTLKPVTHWLFERPDRNNAAPNRLCFKLQPQENIELNLMSSLAGPEWGTLELQPLELELSVPTGKHRHIAYERLFLDAFNGNPALFVRHDEVTAAWDWIDSVSNAWELSDLPLQPYPAGSWGPPQAHQFLPPLGIDGHGNDA

SEQ ID NO: 2597 - DNA, 1296 bp, Aquifex aeolicus
  CDS (1)..(1296)
atgagttcgggagacacagagttaagaaaaaggattgaatttataatcttcggcggaaccggggatctgagcagaaataaattaattcccgcaatcctgaaactgaaagacaaaatagatttaaagaagatttacattttaggcaggaataggaaaaagtttgaagaaataaaagaaaagtttaaggatttttcagagttattcgtgttcgtagaattcctcgcggagagggaagagagttataaaaatatatcaagtattttaggaaaagaatctttaaaagttttttaccttgcggtacctcccgacctattcaaggaaattctagaaaacgtaggaaaatacctgaactttccagaaaaacgtattgttattgaaaaacctttcggcctcagcttaaagcacgcaaaggacttaaacaaaataatttccgtttatttcaaagaagaagaaatcttcagaatagatcactacctcggaaagccgcaggttcaaaatatactcgcctttaagttctcaaattacgtgttttccgaagtcttaaacaagtgtcttgtagagaaggtggaggtaattgcccttgaagaggtgggagtagagggcagaaaagcttattacgagaaagtgggagtcataagggacatgctacagaatcacatgttgctcctctcctctttaatcgttatgagactccctccaagggcggaggacttccactttgagctgaagaacgccttaaagcgtgccgagtttgagtccgagagcttgatactcggaaagtacaaaagttatcaaggaaaagctcccacttttgcccttgtaaaactccactttgacgacgagcgtttcaccggagtgcctttcgtactcgccacgggaaaaaagttaaagaaaaaattgacgagggtgtgcatccactttaagaacttcccgaaggagattgaacggcttctcggctgcgttcctgagagaaatttactcgtttttgaactctatccagagcaggaagtttcctttagggtaaacgttatatctccacttggctttttgaggtgtacggaaagtattaactggagagtttccctcaaagacgttctgggagaaattcccgaagcttacgagtccctccttctggacgtcataaggggagacaagacgctctttctggacgcagaggagacggagatactctgggaaaaaacagaacctctattgaaaaaagaaaaggaagttttgacttacgatgacagagtccttattccagaatttgcagaggatttcatttcctgcctttga

SEQ ID NO: 2598 - protein, 431 aa, Aquifex aeolicus
MSSGDTELRKRIEFIIFGGTGDLSRNKLIPAILKLKDKIDLKKIYILGRNRKKFEEIKEKFKDFSELFVFVEFLAEREESYKNISSILGKESLKVFYLAVPPDLFKEILENVGKYLNFPEKRIVIEKPFGLSLKHAKDLNKIISVYFKEEEIFRIDHYLGKPQVQNILAFKFSNYVFSEVLNKCLVEKVEVIALEEVGVEGRKAYYEKVGVIRDMLQNHMLLLSSLIVMRLPPRAEDFHFELKNALKRAEFESESLILGKYKSYQGKAPTFALVKLHFDDERFTGVPFVLATGKKLKKKLTRVCIHFKNFPKEIERLLGCVPERNLLVFELYPEQEVSFRVNVISPLGFLRCTESINWRVSLKDVLGEIPEAYESLLLDVIRGDKTLFLDAEETEILWEKTEPLLKKEKEVLTYDDRVLIPEFAEDFISCL

SEQ ID NO: 2599 - DNA, 1491 bp, Thermotoga maritima
  CDS (1)..(1491)
atgaagtgcagtctgggattggagaaatgtccggatgataccctccggtgttttccaaagatcgaacaacctttcggaattgtgatcttcggtgcttctggtgacctcacaaaaagaaagctcattcccgctttgaacaggttgttcgaggcaggtattctgcccgaacgctttttcgttctcggtgcggcacgaacgaaaatggacgataagaaattcagatccagattcgatgccaaccctgattttttggaacattgcagttacatcagcgtggattatcaggatcctgagagcttcaaacagttgaaaaacaccatcgagactctcataaaaaggatcgattccagcaatctggtcttctatctcgctgttcctccggatctttacatccctattctggaaaacctctcgaaaactggattgaacgaaaaacctgcgcgcgttgtgatcgaaaaaccgttcgggaaagacctggaatcggccagaagactggaagacactcttcagaaatacttccaggaagatcagattttcagaatcgatcattaccttggaaaagaaaccgttcagaacatactggtgttcaggtttgccaacttcatattcgaggaaatctggaacaacaagttcgtggatcacgttcagatcacgatggccgaagacataggtgttgaacacagggcaggatacttcgaaaacgtgggactcctcagggatatcttccagaaccacatgcttcagatcctcgcactgatcgccatggaacctccttcttctttcaatggagagaatttcagaaacgagcgggtgaagcttctcagatcgatcagaccgttccctgtggaggaactggaaagctggatcgtcagaggccagtatggaagaggggttgtgaacggaaaagaagtgccggcttacagagaggaaccgggtgtggccaaagactccaacgtggaaaccttcgttgccatgaaactcttcatagacaactggagatggagcggtgtacccttctatctgaggtccgggaagagactccccaagaaaataaccgaggttgctgttgttttcaagaagattcctcattcgatctttgccggtgtaccttctgatgaactggagccgaacacgatagttttcaccttgcagccaaacgagggaatctctcttgagtttcaggtgaaaaggccctgtcccggcatgtttccacagcttctcagtatggacttcagatacgaggattactttggagtgaaactgcccgacgcttacgaaagactccttctggacgtgatacttggagatcctacacttttcatgagaagagacgacctcgaagtttcctgggaacttctcgatcccgttctcaaagcctgggaaaacgatcccgttcgcttttcaccttatgtgtatccggcgggaacgtggggaccgagagaagccgatctactcatagaaagggacggtagaaaatggagaaaactgtga

SEQ ID NO: 2600 - protein, 496 aa, Thermotoga maritima
MKCSLGLEKCPDDTLRCFPKIEQPFGIVIFGASGDLTKRKLIPALNRLFEAGILPERFFVLGAARTKMDDKKFRSRFDANPDFLEHCSYISVDYQDPESFKQLKNTIETLIKRIDSSNLVFYLAVPPDLYIPILENLSKTGLNEKPARVVIEKPFGKDLESARRLEDTLQKYFQEDQIFRIDHYLGKETVQNILVFRFANFIFEEIWNNKFVDHVQITMAEDIGVEHRAGYFENVGLLRDIFQNHMLQILALIAMEPPSSFNGENFRNERVKLLRSIRPFPVEELESWIVRGQYGRGVVNGKEVPAYREEPGVAKDSNVETFVAMKLFIDNWRWSGVPFYLRSGKRLPKKITEVAVVFKKIPHSIFAGVPSDELEPNTIVFTLQPNEGISLEFQVKRPCPGMFPQLLSMDFRYEDYFGVKLPDAYERLLLDVILGDPTLFMRRDDLEVSWELLDPVLKAWENDPVRFSPYVYPAGTWGPREADLLIERDGRKWRKL

SEQ ID NO: 2601 - DNA, 1494 bp, Kluyveromyces marxianus var. lactis, Candida sphaerica
  CDS (1)..(1494)
atggctactcagtttgacgagaacactgtgatcactatttttggtgcttcaggtgatttatcaaagaagaaaacgtttcctgcattattcgggttatatcgtgaaggatatttgaatccaactacaaaaattattgggtatgcgcgttccaagttgagcaacgaggatttaagagaaaaggtaaagccatttttaaagaaacctaacggagctaaggatgatgctaaagtcaatgaatttttatcgatggtttcttaccatgctggtccgtatgattctgatgaaggttacttggagttgaaaaagattatcgaagagtttgaggctgaaaaaaaggtcgatgaacctcatagactcttttacttagccttgcctcctagtattttcattgacgtgtgttcgaaactaaaggaaaacctatacacagaatctggaattcaaagggttattgtggaaaagccttttggtcacgatctacagtctgctactgaattacaggagaagttggcgccattgttttccgaggacgaattgttcagaattgatcattatttgggtaaagagatggtaaaaaatctattgttgatgagattcggtaacactttcttgaacgccgcttggaacaaagaaaatatacaatctgttcaggtggttttcaaggaaccatttggaactgaaggtcgtggtggttacttcgattcaattggtattataagagatgtgatgcagaatcatttgctacaagtgttaactctattgacgatggaaagaccagtatctttcgacccagaatctgtacgtgacgaaaaggtcaaggttttgaaagcattctctccaattgatcatgacgatatattgataggccaatacggaagatctgtggatggtagcaagcctagctacctagatgatgaaactgtcaaagaggactccaagtgtgtcacctttgcagcaatcggattcaaaattgcaaatgaacgttgggatggagttcccatcgttatgagagcaggaaaagcgttgaacgaaggtaaagtagaaatcagaatccagttcagaagagttgcatctggcatgttcactgatattcctaataatgaattggttattagaattcaaccaaatgaagccatctacttgaagtgtaatgccaaaacacctggtcttgcgaatgaaaaccaaaccacagaactagacttgacttactcagagagatacaaaaactattggattcctgaagcatatgaatctttgataagagatgcccttttaggagatcattcaaatttcgtcagagacgatgaattagacgtaagctggaagctatttactccattgcttaattacttggaaggaccagatggacctcaaccaaagatctatccatatggctgtagaagccctgacggactcgttgagtttttagcagaccatggttacaccttttccaaaccaggatcctaccaatggcctgtcaccactcctaaaatgtaa

SEQ ID NO: 2602 - protein, 497 aa, Kluyveromyces marxianus var. lactis, Candida sphaerica
MATQFDENTVITIFGASGDLSKKKTFPALFGLYREGYLNPTTKIIGYARSKLSNEDLREKVKPFLKKPNGAKDDAKVNEFLSMVSYHAGPYDSDEGYLELKKIIEEFEAEKKVDEPHRLFYLALPPSIFIDVCSKLKENLYTESGIQRVIVEKPFGHDLQSATELQEKLAPLFSEDELFRIDHYLGKEMVKNLLLMRFGNTFLNAAWNKENIQSVQVVFKEPFGTEGRGGYFDSIGIIRDVMQNHLLQVLTLLTMERPVSFDPESVRDEKVKVLKAFSPIDHDDILIGQYGRSVDGSKPSYLDDETVKEDSKCVTFAAIGFKIANERWDGVPIVMRAGKALNEGKVEIRIQFRRVASGMFTDIPNNELVIRIQPNEAIYLKCNAKTPGLANENQTTELDLTYSERYKNYWIPEAYESLIRDALLGDHSNFVRDDELDVSWKLFTPLLNYLEGPDGPQPKIYPYGCRSPDGLVEFLADHGYTFSKPGSYQWPVTTPKM

SEQ ID NO: 2603 - DNA, 2813 bp, Erwinia chrysanthemi
  CDS (322)..(1797)
atcgatgcggattttgtgaaatatactacgagcccgtaacggttggcagaggtcgacacaacaagtcatcagctttttttgtcagaatatgacgtgtgtctaacctttcaaaatagtaactggcctgtcagaaacgatgggaaatttctcttttaggcagatgccagacccgttttcttcatcggcacaataggttctgaggccttgtagtatcggaatcagccgataatgtggttttcttacgggtttactggtttgtgtcaaaaagagtacattattaatgtaataaaattacagcgtcgtgcaatgaggagattgaaaatggcggtaacgtcaacagcccaggcgtgtgacctggttattttcggtgcaaagggcgaccttgcgcgccgcaaattgctgccttcactgtatcaactggaaaaagcaggccatattcatccggaaacccgcattatcggcgtgggacgggcggagtgggaccgagacgcctatatcaaagtggtgcgcgaagcgctggaaacctttctcaaggagccgctcgacccggcattgtggacaaccctgagcaatcggctcgacttttgcaaccttgatgtggaagacaccgagggattcaaacggttgggtacgatgctcgatcagcaaaatcgcaccaccatcaattatttcgccatgccgccgagcaccttcggcgctatctgccgcggtctggggcaggccggcctgaacaaggagccggcacgcgtggtgatggaaaaaccgctgggcaccaatctggcgtcgtcacgggtgatcaacaatcaggtagcggagtttttcaacgaatgtcaggtctaccgcatcgaccactatctcggcaaggaaaccgtgctgaacctgctggcactgcgtttcgccaactccctgttcgccaacaactgggataaccgcactatcgatcacgtgcagattaccgtggcggaagaggtgggtattgaagggcgctgggggtatttcgatcaggccgggcaaatgcgcgacatgatccagaaccacctgttgcagattctgaccatgattgccatgtcgccgccggcggatctgagcaccgatcgcattcgtgatgaaaaggtgaaagtcctgcgttcgctgcgccgtatcgatcgttccaatgtgcatgaagtgacggtccgtgggcagtacaccagcggttttgtgcagggcaagaaagtgccgggctacctggaagaagaaggggccaacaagaccagtaataccgaaaccttcgtggccattcgcgtcgatatcgacgactggcgctggtccggcgtgccgttttatctgcgcaccggcaagcgtctgccgtcaaaatgttcggaagtggtggtctactttaaaaacccggcgctcaacctgttccatgattcctatcagcagttgccgcagaataagctgatcatccgcctgcagccggacgaaggggtagaaattcagattctgaacaagattccggggctggaccacaaacatcggttgcagaccaccaagctcgacctgagcttctcggaaacttttaaccagcaacatctggcggacgcctatgagcgcctgttgctggaaaccatgcgtggtattcaggcgctgttcgtgcgccgcgacgaagtggaagaagcctggaaatgggtggattccattatggatgcctgggcaatggacaatgattcccccaaaccttatcaggccgggacctgggggccggtcgcgtccgtcgccatgattacccgcgatgggcgttcctggaacgaagtggaataagcggttttgccccgtcggcaggcgggcgaagccgttagcgttttttagctgacggtgcggtcggacgtccgtgggtaaccgcggatccctgtggcaggggcgcgccagatcattaatcgatgcccgttgggcatgactggagattaccctcgatgaaaaactggaaaaccagtgcggaacagattctgacagccggtccggttgttcctgtgattgtgattaacaaactggaacacgcggtaccgatggcgaaagccctggtagcgggtggcgtgcgtgtgctggagctgacgctgcgtaccgagtgtgcggtagaggcgattcgcctgatcgcgcaggaagtgccggatgctatcgtcggcgccggtacggtcaccaacccgcaacagctggcggaagtgaccgcagccggtgcgcagtttgccatcagccccggcctgaccgagccgctgctgaaagccgcaacggaaggcactattccattgatcccagggatcagcaccgtatccgaactgatgctggggatggattacggtttgcgcgagtttaaatttttcccggcggaagctaacggcggggtaaaagcgctgcaggcgattgccggtccgttcggcaagattcgtttctgcccgaccggtgggatctcactgaagaattaccgcgactacctggcgctgaagagcgtgctgtgcgtcggcggctcctggctggtgccggccgatgcgctggaaagcggcgattacgatcgcatcacggcgttggcgcgtgaagctgttgccggcgcgacagcctgatcgacgttttaccttattctttctcaagcccgctttcgcgggcttttttgtgctcggtaggcgagccgacaaaccgcgttgtgcctgtttaagcgacatcggtcgtcacaacaaaccgctgtctggaaaccgttgtctggataccattgtctggcgtacgattctggcgttatcgggagagaattcaggctcatgccggcgcatgagcctgatatgacctca

SEQ ID NO: 2604 - protein, 491 aa, Erwinia chrysanthemi
MAVTSTAQACDLVIFGAKGDLARRKLLPSLYQLEKAGHIHPETRIIGVGRAEWDRDAYIKVVREALETFLKEPLDPALWTTLSNRLDFCNLDVEDTEGFKRLGTMLDQQNRTTINYFAMPPSTFGAICRGLGQAGLNKEPARVVMEKPLGTNLASSRVINNQVAEFFNECQVYRIDHYLGKETVLNLLALRFANSLFANNWDNRTIDHVQITVAEEVGIEGRWGYFDQAGQMRDMIQNHLLQILTMIAMSPPADLSTDRIRDEKVKVLRSLRRIDRSNVHEVTVRGQYTSGFVQGKKVPGYLEEEGANKTSNTETFVAIRVDIDDWRWSGVPFYLRTGKRLPSKCSEVVVYFKNPALNLFHDSYQQLPQNKLIIRLQPDEGVEIQILNKIPGLDHKHRLQTTKLDLSFSETFNQQHLADAYERLLLETMRGIQALFVRRDEVEEAWKWVDSIMDAWAMDNDSPKPYQAGTWGPVASVAMITRDGRSWNEVE

SEQ ID NO: 2605 - DNA, 3244 bp, Plasmodium falciparum
  CDS (184)..(2916)
tttataaattatttcataaatctaatatttatataatataggtttgtgttagtgtaattgtatgaatatataaatacattaatataatatatttaaataaaaacatataggatatatatattttatttatcacgtttattttatattacgtataaatacttgaaaggtataataaaaatcaaaatggattatgagaattttgtaaaaagtgcagaagaaataaataatttacacaatgtaaattatttggaaacaaaagacctgaatgattttaattggaaagcagcttattatatatgtaaagaaatatatgataagcaacaaattaataaagatggttatgttgtgataggtttatcgggaggtcgaactccgatagatgtttataaaaatatgtgtttaattaaagacattaagatagataaatctaaattaatattttttattattgatgaaaggtataaaagtgatgatcataaatttagtaattataataatataaaatttttatttcataatttaaatataaatgaaaaagaacaattatataaacctgacactaccaaaagtattgtagattgtatattagattataatgacaaaataaaaataatgatagagaaatataaaaaagttgatatagcaatattaggtatgggtagtgatttccatattgccagtttatttccaaatatattttataatatatatatgaataactatcaaaataattatatatataatgaaaaaacattagattttataaataatgatcaagataatgataatttaaaatatttgaaagaatatgtatattttacgacaacaaatcaatttgatgttaggaaaagaattacagtatctttaaatttattagctaatgcatcaagtaaaatatttttattaaattctaaagacaaattagatttatggaaaaatatgttgattaaatcatatattgaagtgaattataatttatatccagctacttatttaatagatacatcatgcaccaacgaaaatgttaatattaacaataacaacaataataataataagaataagaataattattgttatagtaataccactgttatatcttgtggttatgaaaattatacaaaatctattgaagaaatttatgattctaaatatgctctatctctttattctaatagtttgaataaagaagaattattaactataataatttttggctgttcaggtgatttagccaaaaaaaaaatatatccagctttatttaaattattttgtaataattccttaccaaaagatttattaatcattggatttgctagaacagttcaagatttcgatacattttttgataaaatagttatatatttaaaacgatgtttattatgttatgaagattggtctatatcaaaaaagaaggatcttttaaatggttttaaaaataggtgtcgatattttgttggtaattattcgtcttcagaaagttttgaaaattttaataaatatttaacaactattgaagaagaagaagcaaaaaaaaaatattatgcaacatgttataaaatgaatggttcagattataatatatcaaataatgttgcagaggataatattagtatagatgatgaaaataaaacaaatgaatattttcaaatgtgtactccaaaaaattgccctgataatgtattttcatcaaattataattttccatatgttataaatcgtatgttatatttagcattacctccacatatatttgttagtactttaaaaaattataaaaaaaattgtttaaatagtaaaggcactgataaaatattactagaaaaaccatttggaaatgatttagattcatttaaaatgttatcaaaacaaatattagagaattttaatgaacaacaaatatatagaatagatcattatttgggtaaggatatggtttcaggattgttgaaattaaaatttacaaatacatttttattatctttaatgaatagacattttataaaatgtattaaaattactcttaaagaaactaaaggtgtatatggtagaggacaatattttgatccctatggtattattagagatgttatgcaaaatcatatgttacaattattaacattaataactatggaagatcctatagatttaaatgatgaatctgtaaaaaatgagaaaataaaaattcttaaatcaattccttcgatcaaattagaagatactattattggacaatatgaaaaagctgaaaattttaaagaagatgaaaataatgatgatgaatcgaaaaaaaatcatagttatcatgatgatccacatatagataaaaattcgattactccaacattttgtacatgtatcttatatattaattcaattaattggtatggtgtaccaatcatttttaaatctggaaaaggtctgaataaagatatatgtgaaatacgtatacaattccataatattatggggtcgtctgatgaaaatatgaataataatgaatttgttattatattacaacctgttgaagctatatacctaaaaatgatgattaaaaaaacgggttgtgaagaaatggaagaagtacaattaaacctaacagtgaatgagaaaaataaaaaaattaatgtaccagaagcatatgaaacattactcttagaatgttttaaaggacacaaaaaaaaattcatctcagacgaggaattgtatgaatcatggagaatatttactcctttacttaaggaactccaggaaaaacaagtcaagcctcttaaatattcttttggatcatcaggccctaaagaggtatttggacttgtcaaaaaatattacaattatggtaaaaattatacgcacagacctgagtttgttagaaaatcctctttttatgaagacgatttgttagatattaattgatatatgtatatatttaaattaacaaattaacacccaatgaatatgaaaataatatatatatatatatatattatatgattgtttagtatattattatcttttataagataacataaatgtatatattatgacatatatatatatatatattatttcacttatctgcccacgaactttatttttgttttaaaattctagtataattaaataaaagaaaatatttggaacaatttgcattttttatgtataaataaaatttatataataatatactttcatacttactttttattttattttattttatttattttttaaatgtggaatt

SEQ ID NO: 2606 - protein, 910 aa, Plasmodium falciparum
MDYENFVKSAEEINNLHNVNYLETKDLNDFNWKAAYYICKEIYDKQQINKDGYVVIGLSGGRTPIDVYKNMCLIKDIKIDKSKLIFFIIDERYKSDDHKFSNYNNIKFLFHNLNINEKEQLYKPDTTKSIVDCILDYNDKIKIMIEKYKKVDIAILGMGSDFHIASLFPNIFYNIYMNNYQNNYIYNEKTLDFINNDQDNDNLKYLKEYVYFTTTNQFDVRKRITVSLNLLANASSKIFLLNSKDKLDLWKNMLIKSYIEVNYNLYPATYLIDTSCTNENVNINNNNNNNNKNKNNYCYSNTTVISCGYENYTKSIEEIYDSKYALSLYSNSLNKEELLTIIIFGCSGDLAKKKIYPALFKLFCNNSLPKDLLIIGFARTVQDFDTFFDKIVIYLKRCLLCYEDWSISKKKDLLNGFKNRCRYFVGNYSSSESFENFNKYLTTIEEEEAKKKYYATCYKMNGSDYNISNNVAEDNISIDDENKTNEYFQMCTPKNCPDNVFSSNYNFPYVINRMLYLALPPHIFVSTLKNYKKNCLNSKGTDKILLEKPFGNDLDSFKMLSKQILENFNEQQIYRIDHYLGKDMVSGLLKLKFTNTFLLSLMNRHFIKCIKITLKETKGVYGRGQYFDPYGIIRDVMQNHMLQLLTLITMEDPIDLNDESVKNEKIKILKSIPSIKLEDTIIGQYEKAENFKEDENNDDESKKNHSYHDDPHIDKNSITPTFCTCILYINSINWYGVPIIFKSGKGLNKDICEIRIQFHNIMGSSDENMNNNEFVIILQPVEAIYLKMMIKKTGCEEMEEVQLNLTVNEKNKKINVPEAYETLLLECFKGHKKKFISDEELYESWRIFTPLLKELQEKQVKPLKYSFGSSGPKEVFGLVKKYYNYGKNYTHRPEFVRKSSFYEDDLLDIN

SEQ ID NO: 2607 - DNA, 1785 bp, Medicago sativa (alfalfa)
  CDS (38)..(1585)
ccaccagatataattaagtagatcagagtagaagaagatgggaacaaatgaatggcatgtagaaagaagagatagcataggtactgaatctcctgtagcaagagaggtacttgaaactggcacactctctattgttgtgcttggtgcttctggtgatcttgccaagaagaagacttttcctgcactttttcacttatataaacaggaattgttgccacctgatgaagttcacatttttggctatgcaaggtcaaagatctccgatgatgaattgagaaacaaattgcgtagctatcttgttccagagaaaggtgcttctcctaaacagttagatgatgtatcaaagtttttacaattggttaaatatgtaagtggcccttatgattctgaagatggatttcgcttgttggataaagagatttcagagcatgaatatttgaaaaatagtaaagagggttcatctcggaggcttttctatcttgcacttcctccttcagtgtatccatccgtttgcaagatgatcaaaacttgttgcatgaataaatctgatcttggtggatggacacgcgttgttgttgagaaaccctttggtagggatctagaatctgcagaagaactcagtactcagattggagagttatttgaagaaccacagatttatcgtattgatcactatttaggaaaggaactagtgcaaaacatgttagtacttcgttttgcaaatcggttcttcttgcctctgtggaaccacaaccacattgacaatgtgcagatagtatttagagaggattttggaactgatggtcgtggtggatattttgaccaatatggaattatccgagatatcattccaaaccatctgttgcaggttctttgcttgattgctatggaaaaacccgtttctctcaagcctgagcacattcgagatgagaaagtgaaggttcttgaatcagtactccctattagagatgatgaagttgttcttggacaatatgaaggctatacagatgacccaactgtaccggacgattcaaacaccccgacttttgcaactactattctgcggatacacaatgaaagatgggaaggtgttcctttcattgtgaaagcagggaaggccctaaattctaggaaggcagagattcgggttcaattcaaggatgttcctggtgacattttcaggagtaaaaagcaagggagaaacgagtttgttatccgcctacaaccttcagaagctatttacatgaagcttacggtcaagcaacctggactggaaatgtctgcagttcaaagtgaactagacttgtcatatgggcaacgatatcaagggataaccattccagaggcttatgagcgtctaattctcgacacaattagaggtgatcaacaacattttgttcgcagagacgaattaaaggcatcatggcaaatattcacaccacttttacacaaaattgatagaggggagttgaagccggttccttacaacccgggaagtagaggtcctgcagaagcagatgagttattagaaaaagctggatatgttcaaacacccggttatatatggattcctcctaccttatagagtgaccaaatttcataataaaacaaggattaggattatcaggagcttataaataagtcttcaataagcttgtgaaattttcgttataatctctctcattttggggtgtatatcaagcatttaagcgcgtgtttgacacagtttgtgtaatagatttggctctgaatgaaaataaacgggaattgtttctttttgtttta

SEQ ID NO: 2608 - protein, 515 aa, Medicago sativa (alfalfa)
MGTNEWHVERRDSIGTESPVAREVLETGTLSIVVLGASGDLAKKKTFPALFHLYKQELLPPDEVHIFGYARSKISDDELRNKLRSYLVPEKGASPKQLDDVSKFLQLVKYVSGPYDSEDGFRLLDKEISEHEYLKNSKEGSSRRLFYLALPPSVYPSVCKMIKTCCMNKSDLGGWTRVVVEKPFGRDLESAEELSTQIGELFEEPQIYRIDHYLGKELVQNMLVLRFANRFFLPLWNHNHIDNVQIVFREDFGTDGRGGYFDQYGIIRDIIPNHLLQVLCLIAMEKPVSLKPEHIRDEKVKVLESVLPIRDDEVVLGQYEGYTDDPTVPDDSNTPTFATTILRIHNERWEGVPFIVKAGKALNSRKAEIRVQFKDVPGDIFRSKKQGRNEFVIRLQPSEAIYMKLTVKQPGLEMSAVQSELDLSYGQRYQGITIPEAYERLILDTIRGDQQHFVRRDELKASWQIFTPLLHKIDRGELKPVPYNPGSRGPAEADELLEKAGYVQTPGYIWIPPTL

SEQ ID NO: 2609 - DNA, 1689 bp, Solanum tuberosum (potato)
  CDS (46)..(1581)
gatcacaactcacaaggctgaattgagttcaagctggttgtcaagatggcggcatcatggtgtattgagaaaaggggttctattaggaatgactcttttagagacaatgataatatacctgaaactgggtgtctttctattattgttcttggtgcttctggtgatcttgccaagaagaaaacttttcctgctctcttcaacctctaccgccagggatttcttcaatccaatgaagttcacatttttggctacgcaaggacaaaaatttctgatgatgacttgagaagccgtatccgtgggtatctttctcaggggaaagaaaatgaaggagaagtatcagagtttctgcaactgattaaatacgtcagtggttcttatgattctgctgagggatttacgtcactggataaggcaatatctgagcacgaattctcaaaaaatagcacagaaggatcatccagaagactcttctattttgctcttcctccatcagtatatccctctgtttgcagaatgataaaaagttattgtatgaacaaatctgatcttggtggttggacacggactgttgttgagaagcccttcggcaaggatttagcttcatctgaacaactaagttcccagatcggagaactatttgacgaaccccaaatttatcgcattgaccattatttggggaaggagttggttcagaatttgttggtgctgcgttttgcaaatcgcttctttttgccgctctggaatcgtgacaacattgataatatacagattgtctttagagaggactttggaactgagggccgcggtggatattttgatgaatatgggattatacgtgacattattcagaaccatctattgcaggtcctttgccttgttgccatggagaagcctgtttctcagaagcccgaacacattcgggacgagaaagttaaggttcttcaatcaatgcttccaattgaagatgaagaggttgttcttggacaatatgaaggctataaggatgatccaacggttcctaacaactcaaatactcctacttttgctactatggttttacgcatacacaatgaaagatgggaaggtgtcccctttataatgaaggctggaaaagcactaaattcaagaaaggcagaaatacgagtgcagtttaaggatgttcctggtgatatatttagatgtcaaaagcaggggagaaatgagtttgtgatacgcctccaaccttcagaagccatgtacatgaagcttacggtcaagaaacctgggcttgaaatgtcaactgttcaaagtgaattagacctgtcgtatgggcagcgttaccaaggggtcgtcattccagaggcttatgaacgtctgattctcgacacaataagaggggatcagcagcattttgtgcgtagggatgagctcaaggcggcttgggagatttttacccctcttttgcatagaattgacaatggagaggtgaagccaattccatacaagccaggcagcagaggccctgctgaagcagatgagttgttgcaaaatgccggttacgttcaaactcatggctatatatggatccctcccacactataagtttggaaaagtattgcagatgagtgttaccttgtcacttttgccatgtagtaccctgcctatgtgcaaacttattgagaagtaacaaatagtccgtgtatcacaaat

SEQ ID NO: 2610 - protein, 511 aa, Solanum tuberosum (potato)
MAASWCIEKRGSIRNDSFRDNDNIPETGCLSIIVLGASGDLAKKKTFPALFNLYRQGFLQSNEVHIFGYARTKISDDDLRSRIRGYLSQGKENEGEVSEFLQLIKYVSGSYDSAEGFTSLDKAISEHEFSKNSTEGSSRRLFYFALPPSVYPSVCRMIKSYCMNKSDLGGWTRTVVEKPFGKDLASSEQLSSQIGELFDEPQIYRIDHYLGKELVQNLLVLRFANRFFLPLWNRDNIDNIQIVFREDFGTEGRGGYFDEYGIIRDIIQNHLLQVLCLVAMEKPVSQKPEHIRDEKVKVLQSMLPIEDEEVVLGQYEGYKDDPTVPNNSNTPTFATMVLRIHNERWEGVPFIMKAGKALNSRKAEIRVQFKDVPGDIFRCQKQGRNEFVIRLQPSEAMYMKLTVKKPGLEMSTVQSELDLSYGQRYQGVVIPEAYERLILDTIRGDQQHFVRRDELKAAWEIFTPLLHRIDNGEVKPIPYKPGSRGPAEADELLQNAGYVQTHGYIWIPPTL

SEQ ID NO: 2611 - DNA, 1530 bp, Synechocystis sp
  CDS (1)..(1530)
atggtaacgctactcgaaaatcccttccgcactggactccgtcaagaacgcactccagaacccctcattttgaccatttttggtgcatccggggaccttacccaacggaaattggtgccagccatctaccaaatgaaacgagagcgccgcttgcctccagagttaacggtggtcggttttgcgagaagggactggagccacgaccattttcgtgagcagatgcgtaagggcatcgaagaattttccaccggcattggcagtgaagacctgtggaatgagtttgcccagggtttattctactgctctggcaatatggatgacccagaaagctatctcaaattgaaaaacttcctgggggaattggatgaaaaacgtaacaccagaggcaatcgagtcttttatttagctgtttcccccaacttctttcccccgggtattaaacaattgggggcagcgggtatgctgagtgacccggttaaaagtcgcattgtgatcgaaaagccctttggtcgggatttgagttcagcccaaagcttgaaccgggtagtgcagagtgtctgcaaagaaaatcaggtgtatcgcatcgatcattacctgggcaaagaaacggtgcaaaatctgatggtgttccgctttgccaacgctatttttgagccactgtggaaccgtcagtttgttgatcatgtgcaaattaccgtagcagaaacggtaggggtagaagaacgagccggttattacgaatccgccggggctttacgagatatggtgcagaatcacctcatgcaactgttttgtctcaccgccatggacccccccaatgccattgacgcggacagcattcgcaacgaaaaggttaaagtgttgcaggctacccgtttagcggatattaataatttggaaaatgccggtatccggggccaatataaagctggttggatgggaggcaaaccagtgccgggttatcgagaagaaccgggggtagatccaagttccaccactcctacctttgcggccctcaaactgatggtggataactggcgttggcagggggtgcccttctatctacgcacgggtaagcgcatgcctaaaaaagtgagtgaaatcgcaattcaattccggcaagtacctctgttaatttttcaatcggtggcccaccaagctaatcccaatgtgttgagtctaagaattcagcccaacgaaggcatttccctgcgttttgaggcaaaaatgcccggttcagaactgcgtacccgcactgtagatatggattttagttatggttcatcctttggagtggccgcagcggatgcctatcaccgccttttattagattgtatgttgggagaccaaaccctgttcacaagagccgacgaggtagaagaagcttggcgagtagtaactccggtgttgtcggcttgggatgcccccagtgatcctctttccatgcccttgtacgaagctggaacctgggaaccagcggaggcagaatggttaattaataaagatggccgtcgctggcgccgactttag

SEQ ID NO: 2612 - protein, 509 aa, Synechocystis sp
MVTLLENPFRTGLRQERTPEPLILTIFGASGDLTQRKLVPAIYQMKRERRLPPELTVVGFARRDWSHDHFREQMRKGIEEFSTGIGSEDLWNEFAQGLFYCSGNMDDPESYLKLKNFLGELDEKRNTRGNRVFYLAVSPNFFPPGIKQLGAAGMLSDPVKSRIVIEKPFGRDLSSAQSLNRVVQSVCKENQVYRIDHYLGKETVQNLMVFRFANAIFEPLWNRQFVDHVQITVAETVGVEERAGYYESAGALRDMVQNHLMQLFCLTAMDPPNAIDADSIRNEKVKVLQATRLADINNLENAGIRGQYKAGWMGGKPVPGYREEPGVDPSSTTPTFAALKLMVDNWRWQGVPFYLRTGKRMPKKVSEIAIQFRQVPLLIFQSVAHQANPNVLSLRIQPNEGISLRFEAKMPGSELRTRTVDMDFSYGSSFGVAAADAYHRLLLDCMLGDQTLFTRADEVEEAWRVVTPVLSAWDAPSDPLSMPLYEAGTWEPAEAEWLINKDGRRWRRL

SEQ ID NO: 2613 - DNA, 1953 bp, Nicotiana tabacum (common tobacco)
  CDS (43)..(1824)
gtagatacagattcttcatagagaagtgaagaaatcaagaaaatggtgaccctttattcttctccttcaacccattcttctgggccagttgcttcttactctaattcctctattgggctctataattatcatcataataagcagatagcagtttcttcaattttgtcgagaaagtttggttctttgcaaattaatcagaagccattttggaatgccgttcgcatgcaagatggtgcagtagcgactccgcctagcaaaatcgaaaatgagactcctttgaagaaattaaaaaatggaattttgccagtcgcacctccaaaggagcagaaagatacaattgatttcgacagcaacaaagctaaatcaactgtcagtattactgttgttggtgcttcaggagatcttgccaagaaaaagatatttcctgcactgtttgcactttattatgagggttgcctccctgagcatttcactatctttggctatgcccggagtaagatgactgatgctgaactacggaacatggttagcaagacccttacttgcaggattgacaagagggaaaattgtggtgaaaagatggaacagtttttagaaaggtgcttctaccacagcggccaatacgattccctggaaaactttgcggagctcgataaaaagctgaaggaacatgaggctggaaggttttccaatcgtctattctacttatccattccaccaaatatttttataaatgcggttcgatgtgctagcctctctgcatcatctgctcatggctggacaagagtcattgtagagaaaccctttggtcgggattctgaatcctctgctgcattgacaagatcacttaagcagtacttgaatgaagaccaaatttttaggatcgatcactatttagggaaggagcttgtggaaaacctttctgtccttcgtttctccaacttgatatttgaacccttgtggtcaaggcagtgtataaggaatgtgcagtttattttctcagaagattttggcactgaaggacggggaggttattttgatcattatgggataatcagagacatcatgcaaaaccatctgcttcaaattctggccctctttgccatggaaacacctgtgagtttggatgcggaagatatcagaaatgaaaaggtaaaagttctgcgttccatgagacctttacaactagacgatgttatcattgggcagtacaaatgtcacacaaaaggagatgttacctatcccggttatactgacgacaagactgtaccgaaggacagtctaaccccaacttttgctgcagctgctcttttcatagataatgcacgatgggatggggtgcctttccttatgaaagctgggaaagctttacatactaggagtgcggaaataagagtacaattcaggcacgtaccaggaaatttatacaataagaactttggctcagatcttgaccaggcgaccaacgagcttgttatccgtgtccagcctaatgaagctatatacctaaagatcaataacaaagttcctggtctaggaatgagattggatcgcagtaatcttaatcttctttactcggcaagatactcgaaggagatccctgatgcatatgagcggctgcttcttgatgctatagaaggtgaaaggcggcttttcatccgcagtgatgagctggatgctgcttggtctcttttcactccagtgttaaaagaacttgaggataagaaaatagttccagaatattacccctatggaagtcgaggacctattggagcacattatctcgcagcacgatataaagtaagatggggtgatcttgtgtagacaagtgatttccagactttgctatcactgtcagaaaaccatatgtcgcctttctacttcttgagcttagtatgtcgcaaccaaatttgttgtactgcaattctagaaccaagactagcaaagcgtgaa

SEQ ID NO: 2614 - protein, 593 aa, Nicotiana tabacum (common tobacco)
MVTLYSSPSTHSSGPVASYSNSSIGLYNYHHNKQIAVSSILSRKFGSLQINQKPFWNAVRMQDGAVATPPSKIENETPLKKLKNGILPVAPPKEQKDTIDFDSNKAKSTVSITVVGASGDLAKKKIFPALFALYYEGCLPEHFTIFGYARSKMTDAELRNMVSKTLTCRIDKRENCGEKMEQFLERCFYHSGQYDSLENFAELDKKLKEHEAGRFSNRLFYLSIPPNIFINAVRCASLSASSAHGWTRVIVEKPFGRDSESSAALTRSLKQYLNEDQIFRIDHYLGKELVENLSVLRFSNLIFEPLWSRQCIRNVQFIFSEDFGTEGRGGYFDHYGIIRDIMQNHLLQILALFAMETPVSLDAEDIRNEKVKVLRSMRPLQLDDVIIGQYKCHTKGDVTYPGYTDDKTVPKDSLTPTFAAAALFIDNARWDGVPFLMKAGKALHTRSAEIRVQFRHVPGNLYNKNFGSDLDQATNELVIRVQPNEAIYLKINNKVPGLGMRLDRSNLNLLYSARYSKEIPDAYERLLLDAIEGERRLFIRSDELDAAWSLFTPVLKELEDKKIVPEYYPYGSRGPIGAHYLAARYKVRWGDLV

SEQ ID NO: 2615 - DNA, 1869 bp, Nicotiana tabacum (common tobacco)
  CDS (22)..(1788)
cggatcggccgaaaaaactgcatgggtgggcagttgcaattgaatccttgttcttcatcttcagttgctactactttccataatggggcacataagttttgcagaaattttaatattttaccatttaaagcccattcccttgaatcttcagttgctagtactttccataatggaatttattcaagaatccagccaagaaagcattttgagatcatgtcatcaaatggttttcatctgaatgctgtgtctttgctggatggttcggcgtcaaaatctatgccagaacaagtgcctttgacagagttagaaaatgcagagacaactgtcagcataactgttattggagcttcaggtgacctagccaagaagaagattttcacagctttatttgctcttttctatgaagattgtttgcctgagaattttatagtttttggttattcacgaacaaaaatgagtgatgaagagctgagaaacatgatcagcaagaccttaacttgtagaattgatcagagagagaattgcgaggctaaaatggaccactttctggaaagatgcttttaccactccggtcagtaccattctgaggatgattttgcagaactggattacaaattaaaggcaaaggaggggtctagggtttctaataggttgttttacttatcaatacctccaaatatattcgtggatgtggtgagatgtgcaagtcttaaagcttcttcaacaagtgggtggacaagagtcattgttgagaaaccgtttggtcgtgacttagaatcatctagtgagctgaccagatgcctaaagaagtatctaactgaggagcaaatattccgaattgaccattacttgggaaaggaacttgttgagaatctctcagttcttcgtttctcgaatcttgtctttgagcctctctggtccagaaactacatacgcaatgtccaattcatattttccgaggactctggtaccgagggacgaggagggtactttgacaattacgggatcatccgagatataatgcaaaatcatctccttcaaatattagcattgtttgctatggaaacacctgtcagcatggatgccgaggacatcagaaatgaaaaggttaaagttttaaggtcaatgaggccattgcagcttgaagatgtggtacttggccagtataaaggtcatagcaagggtggtaaattatatccagcttatacagacgatccaactgtgccaaacggtagtgtcactccaacgttttctgctgctgcactctttattaataatgcacgctgggacggcgttcctttcctcatgaaagctggaaaagctctccatactaggagggcggagatcagggtacagttcagacatgttcctggaaatttgtacaaaaggaactttggaactgatctagataaggccacaaatgagctagttctgcgcttacaacctgatgaagccatatatctgaagatcaacaacaaggttcctggtcttggaatgagacttgaccggagtgaccttaatcttctttacaaagcaaagtatcgaggtgaaataccagatgcatatgagcggcttctgttagatgcaatagaaggagagcgaagattgttcattagaagtgatgagctggatgctgcatgggctctatttacaccattgctgaaggagctagaagagaagaagattgcgccagagctttatccgtatggcagtaggggtccagtaggagcacattatctagctgcaaagcacaacgttcgttggggagatctgtctggtgatgattgatgtatccgacacatcttctccccaaaattggagcgcgaactttcaaaaatattgactataaatgtatgaatattgaggagg

SEQ ID NO: 2616 - protein, 588 aa, Nicotiana tabacum (common tobacco)
MGGQLQLNPCSSSSVATTFHNGAHKFCRNFNILPFKAHSLESSVASTFHNGIYSRIQPRKHFEIMSSNGFHLNAVSLLDGSASKSMPEQVPLTELENAETTVSITVIGASGDLAKKKIFTALFALFYEDCLPENFIVFGYSRTKMSDEELRNMISKTLTCRIDQRENCEAKMDHFLERCFYHSGQYHSEDDFAELDYKLKAKEGSRVSNRLFYLSIPPNIFVDVVRCASLKASSTSGWTRVIVEKPFGRDLESSSELTRCLKKYLTEEQIFRIDHYLGKELVENLSVLRFSNLVFEPLWSRNYIRNVQFIFSEDSGTEGRGGYFDNYGIIRDIMQNHLLQILALFAMETPVSMDAEDIRNEKVKVLRSMRPLQLEDVVLGQYKGHSKGGKLYPAYTDDPTVPNGSVTPTFSAAALFINNARWDGVPFLMKAGKALHTRRAEIRVQFRHVPGNLYKRNFGTDLDKATNELVLRLQPDEAIYLKINNKVPGLGMRLDRSDLNLLYKAKYRGEIPDAYERLLLDAIEGERRLFIRSDELDAAWALFTPLLKELEEKKIAPELYPYGSRGPVGAHYLAAKHNVRWGDLSGDD

SEQ ID NO: 2617 - DNA, 2058 bp, Solanum tuberosum (potato)
  CDS (41)..(1774)
aagaaaactcattcttgaaaaaaggcatttctctgtctgtatgggtgtgcaattgagattgaacccttgttcttcatcttcagctgcaacttctccttcaactttccataatgggacaccatatttctgcaaaaagtttaactttttaccatttagaacccaacccctcaattgggtatctggaatttactcaagaatccaaccaagaaagcattttgaagtcttttcctcaaatgggtttccacttaatgctgtgtctgtgcaagatgtacaagtgcctttgacagagttaggaagtggagataccactgtcagcataactgttattggagcttcaggtgacctagccaagaagaagattttaccagctttatttgctcttttctatgaagattgtctgcctgagaattttgtagtttttggctactcacgaacaaaattgagtgatgaagagctgagaaatatgatcagtacaaccttaacttgtcgaattgataagagagagaattgcgatgccaaaatggagcattttctggaaagatgcttttatcattcgggtcagtacaattctgaggatgattttgcagaactggattacaaattaaaggaaaaggagggttgtagggtttctaataggttgttttacttatcaatacctccaaatatattcgtggatgtggtgcgatgtgcaagtcttaaagcttcttcaacaagtgggtggacaagggtcattgttgagaaaccatttggtcgtgatttagaatcatctagtgagctgaccagatccctaaagaagtacctaactgaggagcaaattttccgaattgaccattacttgggaaaggaacttgttgagaatctctcagttcttcggttctcgaatcttgtctttgagcctctttggtccagaaactacatccgcaatgtccaatttatattttccgaagattttggtaccgagggacgaggagggtactttgaccactacggcatcatccgtgatattatgcaaaatcatctccttcaaatattagcattgtttgctatggaaacacctgtcagcttggatgctgaggacatcagaaatgagaaggttaaagttttaaggtcaatgaggccattgcaacttgaagatgttgttcttggacagtataagggtcatagcaatggtgctaaatcatatccagcttacacagatgatccaactgtgccaaatggcagtatcactccaacattttctgctgctgcactcttcattgataatgcacgttgggacggggttcctttcctcatgaaagcaggaaaagctctccatacgaagagggcagagatcagggtccagttcagacatgttcccggaaatttgtacaaaaggaactttggaactgacatggataaagcaaccaatgagctagttctgcgcctacaacctgatgaagccatatatctgaaaattaacaacaaggtccctggtcttgggatgagacttgaccggagtgaccttaatcttctttataaagcaaagtatcgaggtgaaataccagatgcatatgagcggcttttgttagatgcaatagaaggagagcgaagattgttcataagaagcgatgaacttgatgctgcatgggctctatttacaccgttgctgaaggagctggaagagaagaagattgcaccagagctttatccatacggaagtagggggccagtgggagcacattatctagctgcaaagcacaacgttcgttggggagatctatctggtgatgattgattgtatgtgagatcttcttgaggagtactatgaaatggaggaaatctctaatttcctcacaaagggggacaattgatattcatttagttttataggaattgatctacttgctgtttcagctcatcaagaatgcaaaaattatggacaacttggaactgctgtcagcaattgttgtatagctagcttgtctattttgttaagaaaatactcatgttttattcttcttgttgtgttacatcctgggctatattttgctaatgactaataatataccctactcttca

SEQ ID NO: 2618 - protein, 577 aa, Solanum tuberosum (potato)
MGVQLRLNPCSSSSAATSPSTFHNGTPYFCKKFNFLPFRTQPLNWVSGIYSRIQPRKHFEVFSSNGFPLNAVSVQDVQVPLTELGSGDTTVSITVIGASGDLAKKKILPALFALFYEDCLPENFVVFGYSRTKLSDEELRNMISTTLTCRIDKRENCDAKMEHFLERCFYHSGQYNSEDDFAELDYKLKEKEGCRVSNRLFYLSIPPNIFVDVVRCASLKASSTSGWTRVIVEKPFGRDLESSSELTRSLKKYLTEEQIFRIDHYLGKELVENLSVLRFSNLVFEPLWSRNYIRNVQFIFSEDFGTEGRGGYFDHYGIIRDIMQNHLLQILALFAMETPVSLDAEDIRNEKVKVLRSMRPLQLEDVVLGQYKGHSNGAKSYPAYTDDPTVPNGSITPTFSAAALFIDNARWDGVPFLMKAGKALHTKRAEIRVQFRHVPGNLYKRNFGTDMDKATNELVLRLQPDEAIYLKINNKVPGLGMRLDRSDLNLLYKAKYRGEIPDAYERLLLDAIEGERRLFIRSDELDAAWALFTPLLKELEEKKIAPELYPYGSRGPVGAHYLAAKHNVRWGDLSGDD

SEQ ID NO: 2619 - DNA, 2049 bp, Spinacia oleracea (spinach)
  CDS (147)..(1871)
taaaattctaaactaggattttttttttctttttccatttaaatttcttctgcttaaaaacttccattttcggcaacccaattacatggctaagcatttgagtttgagcgcttgttcgtcttttttagcagcagtcaaaattaaggatggaggaacttgtttcttgccaccatcttccattattatgcctccaaagctctgttcctccaaatgggtgtctcacattctttcaagattctgcctgccaaaggtgttcccattctgaattttcaaatgggcatcctttaaatgatgtctctcttcaaaatgatgtggctgtaaacccaattgttgcaaaaagtattgatccgtcagcagatcttcagttgcttcccctattggagtccgtcaaagaagagcccacactgagcataattgtagttggtgcctcaggagatcttgccaaaaagaagatatttcctgccctttttgctctcttttatgaaaactgtcttcctgagaacttcacagtctttggtttttcacgaacggaaatgaatgatgaagagctgcggactatgatcagtaaaaccttaacctgtagaatagaccagagggaaaactgtggtgaaaaaatggatcattttttgcaaagatgcttttaccattctggtcagtataattctgaggatgacttttcaggattggactgtaagcttaaagaaaaagaggctggtagactgcaaaataggctattctacctttcaataccaccaaacatttttgtggatgtggtgagatgtgttagccatcgagcttcttctgcaagtggatggacaagggttatagtagaaaagccttttggacgtgactcggattcttctcgtgagctaactagaagcttcaagcagtacttgagcgaggaccagatattcaggattgaccattacttggggaaggagttggtggagaatttatctgttctacgcttttcaaatctagtttttgaacctctatggtcaaggaactacatccgaaatgtccagctgatattctctgaagattttggtacagagggacgagggggatactttgataattatggaataatccgagatataatgcaaaaccatcttcttcaaattctagccttgtttgcaatggagacacctgttagcttagatgctgaggacattaggaatgaaaaggtgaaagtgcttaggtcaatgaaaccacttaaactgcaagatgtggtagtgggtcagtacaagggtcacagcaaagggaacaaatcatattctggttacacagatgatccaacggtgccaaacaatagtgtgactccaacatttgcagctgcagcgttgttcatcgacaatgctcgatgggatggagttcctttcctgatgaaagctggaaaagctcttcatacgaagagagctgaaatccgagtgcagtttagacatgttcctggaaacttgtacaagaaaacttttgggacggatttggacaaagctacgaatgagcttgtactacgggtacaacctgatgaagcaatatacttgaagatcaataacaaggttcctggccttgggatgagattggaccgtactgaccttaatttgtgttacagtactaggtaccggggagaaatacctgacgcgtatgagaggctacttctggacgcaatagaaggagagcgtagattgttcatcagaagtgataaactggatgcggcttggtcattgttcacgccgttgttaaaggaactagaggagaaaaaggtagcaccagagctgtacccttacggtagcaggggaccagtcggagctcattatcttgccgccaagcacaatgtccggtggggggatcttagtggtgaagactcgtgagggctttgttgatactgattcacatatacactttcaagatcacttccatgtatgatttgtattgtgaaaatccaaggtatatatatttttcatgtacaacaacctcctactaaagcaatgttgatgcttctgcaattcacactgtagatcttttttaatataaattttacagaaaatt

SEQ ID NO: 2620 - protein, 574 aa, Spinacia oleracea (spinach)
MEELVSCHHLPLLCLQSSVPPNGCLTFFQDSACQRCSHSEFSNGHPLNDVSLQNDVAVNPIVAKSIDPSADLQLLPLLESVKEEPTLSIIVVGASGDLAKKKIFPALFALFYENCLPENFTVFGFSRTEMNDEELRTMISKTLTCRIDQRENCGEKMDHFLQRCFYHSGQYNSEDDFSGLDCKLKEKEAGRLQNRLFYLSIPPNIFVDVVRCVSHRASSASGWTRVIVEKPFGRDSDSSRELTRSFKQYLSEDQIFRIDHYLGKELVENLSVLRFSNLVFEPLWSRNYIRNVQLIFSEDFGTEGRGGYFDNYGIIRDIMQNHLLQILALFAMETPVSLDAEDIRNEKVKVLRSMKPLKLQDVVVGQYKGHSKGNKSYSGYTDDPTVPNNSVTPTFAAAALFIDNARWDGVPFLMKAGKALHTKRAEIRVQFRHVPGNLYKKTFGTDLDKATNELVLRVQPDEAIYLKINNKVPGLGMRLDRTDLNLCYSTRYRGEIPDAYERLLLDAIEGERRLFIRSDKLDAAWSLFTPLLKELEEKKVAPELYPYGSRGPVGAHYLAAKHNVRWGDLSGEDS

SEQ ID NO: 2621 - DNA, 2359 bp, Petroselinum crispum (parsley)
  CDS (172)..(1986)
gaagaggaaggcagcctttcggagataccaaaggactcaaccccctcgaactctccgaagtattttagtcccccctgtgtcttctcaacccccccaatactcctctttcattttcagttttgatacaacaactaatcatttgagattggattacattgtttcacacaacaaatggccaccctttcttcagctaccaattgtcgctcctcctcctcctcctcctattcctcttcatcttctctctttccaaggattcatcatcaacaacacttcatcgtttcgttggcttctcccaaacctctattcaacaagctttctttccattccaatcaaccttctttttccttcactcctgctcctgctcctgctgctgcatcccaagatggtgcaatatccacaacggtgccacatattgaaaatgaaactccactcaagaaagtcaagaatgcaaatttatcagttccaccccctcaggagtccaaaggcattactccttttcgtctcaacaaagacaagtcctctgtcactatcactgtcgtcggagcttctggggacctggccaagaagaagatatttcctgcactttttgcactttattacgaggactgcctacctgagcacttcacaatttttggttatgcccgaagtaagatgactgatgctgaacttagggacatggtgagcaagaccctcacttgcaggattgataagagggcaaactgtggggaaaagatggaacaatttttgaaacgatgcttctatcattctggtcaatatgattctgaagccaattttgccgaacttgacaaaaaactgaaggaacacgaggctggaacaattgccaatcgtcttttctatctatcaattccaccaaacatttttataaatgctgtaaaatctgcaagcatatccgcttcttctgcaaatggctggacaagggtcatcgtagagaaaccatttggtcgggattctgaatcctctgctgcactgacaacagctctcaaacagtatctggaggaagatcaaatattcaggatagatcactatcttggaaaagagctagtggagaatctttctgtccttcgattctccaatctcatatttgaacctttatggtctagacagtttattagaaacgtgcagctgatattttctgaagattttggaaccgaaggcaggggagggtactttgataactatggaatagtcagagacataatgcaaaaccatctgctacaaattttggcactctttgccatggaaacacctgttagtttggatgcagaagatatcaggaatgaaaaagtcaaagttctccgatcaatgaggcccattcaacttgatgatgtggttatagggcagtataagagccacacaaggggaggtgtcaattaccctgcatacaccgacgacaagactgtcccccataatagtctgacaccaacatttgctgcagccgccctttttatagataatgcaagatgggatggtgtaccgtttttaatgaaagctggaaaagccctccatgataggaggactgagataagagtacagtttagacatgtacctggtaatctatacaaacggaactttggaacaaatcttgaccatgagaccaatgagcttgttattcgcgtacaacctgatgaagctatatatctgaagattaataataaggtgccaggtttaggaatgagactggatcgcagcaatctgaatctcttatattcgacaaggtactcgggggagatccccgatgcatacgaaaggcttcttcttgatgccgtcgaaggtgaaaggagactgtttatccgcagtgacgaactggatgctgcttggtcgctctttacacccgtattgaaagatctagaagacaagaaaactgttcccgaatattacccttatgggagtcgaggacccgttggtgctcactatcttgcagccaaatataaagttaggtggggagattttgcaggagatcaatgactagcaagtattttgcatcgcttccaaacagtagaatgtaggaagaacttggccctgaggttggttttctttgttttagtgcatctatcagcattgtaccgcgtgttcaaagaagtaaaatggtatgtccaaaggccttgagatctgtggatgaatgctttgagcaattgagcttataataatttacagagtagtcttagtatttgtaagatgctgtaatggttttctttatgtatctagggatagtaagatagcatctgcaagatctgttttcattttaactgcaacaaatctgagaagaataatggtacatgtttcattgaccttttatagtacaaagttattgttttcataaaaaaaaaaaaaaaaaaaa

SEQ ID NO: 2622 - protein, 604 aa, Petroselinum crispum (parsley)
MATLSSATNCRSSSSSSYSSSSSLFPRIHHQQHFIVSLASPKPLFNKLSFHSNQPSFSFTPAPAPAAASQDGAISTTVPHIENETPLKKVKNANLSVPPPQESKGITPFRLNKDKSSVTITVVGASGDLAKKKIFPALFALYYEDCLPEHFTIFGYARSKMTDAELRDMVSKTLTCRIDKRANCGEKMEQFLKRCFYHSGQYDSEANFAELDKKLKEHEAGTIANRLFYLSIPPNIFINAVKSASISASSANGWTRVIVEKPFGRDSESSAALTTALKQYLEEDQIFRIDHYLGKELVENLSVLRFSNLIFEPLWSRQFIRNVQLIFSEDFGTEGRGGYFDNYGIVRDIMQNHLLQILALFAMETPVSLDAEDIRNEKVKVLRSMRPIQLDDVVIGQYKSHTRGGVNYPAYTDDKTVPHNSLTPTFAAAALFIDNARWDGVPFLMKAGKALHDRRTEIRVQFRHVPGNLYKRNFGTNLDHETNELVIRVQPDEAIYLKINNKVPGLGMRLDRSNLNLLYSTRYSGEIPDAYERLLLDAVEGERRLFIRSDELDAAWSLFTPVLKDLEDKKTVPEYYPYGSRGPVGAHYLAAKYKVRWGDFAGDQ

SEQ ID NO: 2623 - DNA, 1848 bp, Petroselinum crispum (parsley)
  CDS (41)..(1528)
ttctcttgaagcattcttcattcttgctttcagcttgaagatgacatctgataaatggagtatagagaaaagagcacctcttagaaatgattctgttttgaaagaagaaaatgtgccagaaattggatgtctttcaattgttgttcttggtgcttctggtgatcttgccaagaaaaagacttttccagcacttttcaatctttatcgtcaggggtttttgcaatcacatgaagtctacattttcggctatgcaaggacaaagatatcggacgaagagttgagagatcgaattcgtggatatcttgttccaagcaagaatactgtggaggggcatgaagaagatttaactaactttctgcaattgatcaaatatgtttgcggatcttatgacaccgaggaggggtatcaattactggataaagaaatatctgagcacgaaatatacagaaattgcacggaaggatcatcccgtagactattttaccttgctcttcctccatcagtatatcctcctgtctgcaagatgatcaggaaatgctgcatgaataaatctgatcttggtggatggactcggattgttgttgaaaagccctttggcagggatttggagtcggctgagcaactcagtaaccagataggggagttgtttgaagagccccagatttaccgtattgatcattatctgggaaaagaattggtgcagaacttgttggtacttcgtttcgcaaatcgtttcttcatgccactttggaatcgtgacaacattgacaatattcagattgtatttagggaggattttggaactgatggccgtggtggatattttgatcagtacggaattatccgcgatatcatccaaaaccatctattgcaggtcctatgccttgttgccatggagaagcctgtctctcttaagcctgagcatattcgagatgagaaagtgaaggttcttcaatctgtagttcctataaaagatgaagaggttgtgctcggacagtacgatggctatttggaagacccgacagttcctgatggctcgtacactcccacatttgctactatggttttaagaatacacaatgagagatgggaaggtgtaccctttatactcaaggccgggaaagctttgaattctagaaaggcagaaatccgggttcagttcaaggatgttcctggtgatatattcaaaagtaagaagcaaggaaggaacgaatttgtaatacgcctgcaaccttcagaggcaatgtatatgaagcttacagtcaaacaaccaggacttaagatgtcaactgtgcaaagtgagatggacttgtcatacggacagcgttatcaggacgttaccattccagaagcttatgaacgtctgattcttgatacgataagaggtgaccaacaacattttgttcggagagatgaacttaaggcggcctgggagattttcactcctctcctgcacagaatcgacaagggagagtttaaatcacttccgtacaagccaggcagcagagggccagaggaaagcggataagctgcttgagaaggccggttatgttcagacacatggctacatttggatccctcccaccctatagaaatccttagcttataaatgcaaacatgatcagataatgtatcagtataatcacttgaggttgtgatatttgtaagttagtttactatcagcgtttgttctcattatgtaaccttgtaatctgtttattttggtttgtatacgttatatgttgaattataaaaagtaaggaatattctccttagtttatcaaaaaaaaaaaaaaaaaaaaaaaaaaaaaaaaaaaaaaaaaaaaaaaaaaaaaaaaaaaaaaaaaa

SEQ ID NO: 2624 - protein, 495 aa, Petroselinum crispum (parsley)
MTSDKWSIEKRAPLRNDSVLKEENVPEIGCLSIVVLGASGDLAKKKTFPALFNLYRQGFLQSHEVYIFGYARTKISDEELRDRIRGYLVPSKNTVEGHEEDLTNFLQLIKYVCGSYDTEEGYQLLDKEISEHEIYRNCTEGSSRRLFYLALPPSVYPPVCKMIRKCCMNKSDLGGWTRIVVEKPFGRDLESAEQLSNQIGELFEEPQIYRIDHYLGKELVQNLLVLRFANRFFMPLWNRDNIDNIQIVFREDFGTDGRGGYFDQYGIIRDIIQNHLLQVLCLVAMEKPVSLKPEHIRDEKVKVLQSVVPIKDEEVVLGQYDGYLEDPTVPDGSYTPTFATMVLRIHNERWEGVPFILKAGKALNSRKAEIRVQFKDVPGDIFKSKKQGRNEFVIRLQPSEAMYMKLTVKQPGLKMSTVQSEMDLSYGQRYQDVTIPEAYERLILDTIRGDQQHFVRRDELKAAWEIFTPLLHRIDKGEFKSLPYKPGSRGPEESG

SEQ ID NO: 2625 - DNA, 1957 bp, Petroselinum crispum (parsley)
  CDS (74)..(1678)
gttggttaaggagtcgctgcaacaaagtcaaatatattggaatcgaaaactcaatctgtgttgtatacgggttatgaaatcagcagtgtgtgacatagttcataagatgtcggataaatggtgcttagaggaaagagcccctgttgttgaggatagtgccggagatcctattgttaaagatactcaaccaccaccacccgtgtctgaagatggttgcctatcaattgttgtgcttggtgcttctggtgatcttgccaagaaaaagacttttcctgctctctttaacctttaccgccagggtttcttgcagtcacatgaagtatacatttttggctatgccaggaccaagatttctgatgatgacttgagagaccgcattcgtggatatcttactccaaacaagaacactgcagaaggacacacagaagatgtatcaaaatttctgcaactgatcaaatacgtctgtggttcttatgacgcagcggagggttttcagtgtttggataaggaaatatctgagcatgaaatatcaagaaacagtattgaaggatcgtcccggagactattttaccttgcacttcctccttcagtatatcctcctgtctgcaaaatgattaagacttactgcatgaataaatctgatcttggtggatggactcgtattgttgttgagaagccctttggtagggacttggagtcagctgagcatctcagtaaccagataggagaactgtttgaggagccacagatatatcggattgatcactatttgggaaaagagctggtgcagaatttgttggtgcttcgttttgctaatcgtttcttcctgccttcatggaatcgtgacaacatcagtagtgtgcagattgtcttccgagaggattttggaactgaaggccgtggcggatattttgatcagtatggaatcatccgggatattatccaaaatcatctcttgcaggttctttgcctcgttgctatggaaaaacctatttctcttaaacctgagcacattcgagatgagaaagtgaaggttcttcaatctgtagctccacttaatgatgaagaggttgtgcttggacaatatgatggttacttggatgatcccactgtgcccgctggctctaacactccaacttttgcaaccatggtattgcgtatacacaatgaaagatgggaaggtgttcctttcgtacttaaggctggaaaagcattggaatctagaaaggcagaaattcgtatccaattcaaggaagtcccgggtgatatatttaaatgtcaaaagcaggggagaaatgaatttgtgatacggttacaaccttcagaggccatgtatatgaaacttacagtcaagaagcctggacttgagatgtctactgctcagagtgagctcgacttgtcatatgggcagcgttatcaggatgtaaccataccggaggcttatgaacgacttattcttgacactataaggggtgatcagcagcattttgttcgcagagatgagttgaaggcagcctgggagattttcacccctcttcttcacagaatagataaaagtgaacttaaatcagtttcatacaaaccaggcagccgaggcccagaggaagcggatgagttgctgaaaaaagttggctatgttcagacacatggctatacatggattcctccaaccctataatctgaacaggctgcattgatgcttggttgacggcttatcggtaatataagatgggaagttcccaaggtcccctgtgaaataataaatacatcagtacaaatgtatctctgtgatacacgtgatgtttttacgaggatcaaccttttcaaagtaagcttgatctatttacttaaccttgttcgctaaagtgtgtctctgtaatgtgttttgacgaacatgcactatttataagttgttgaaaatgtgaagcttatatactgtaaaaaaaaaaaaaaaaaa

SEQ ID NO: 2626 - protein, 534 aa, Petroselinum crispum (parsley)
MKSAVCDIVHKMSDKWCLEERAPVVEDSAGDPIVKDTQPPPPVSEDGCLSIVVLGASGDLAKKKTFPALFNLYRQGFLQSHEVYIFGYARTKISDDDLRDRIRGYLTPNKNTAEGHTEDVSKFLQLIKYVCGSYDAAEGFQCLDKEISEHEISRNSIEGSSRRLFYLALPPSVYPPVCKMIKTYCMNKSDLGGWTRIVVEKPFGRDLESAEHLSNQIGELFEEPQIYRIDHYLGKELVQNLLVLRFANRFFLPSWNRDNISSVQIVFREDFGTEGRGGYFDQYGIIRDIIQNHLLQVLCLVAMEKPISLKPEHIRDEKVKVLQSVAPLNDEEVVLGQYDGYLDDPTVPAGSNTPTFATMVLRIHNERWEGVPFVLKAGKALESRKAEIRIQFKEVPGDIFKCQKQGRNEFVIRLQPSEAMYMKLTVKKPGLEMSTAQSELDLSYGQRYQDVTIPEAYERLILDTIRGDQQHFVRRDELKAAWEIFTPLLHRIDKSELKSVSYKPGSRGPEEADELLKKVGYVQTHGYTWIPPTL

SEQ ID NO: 2627 - DNA, 1569 bp, Caenorhabditis elegans
  CDS (1)..(1569)
atggcatgcaaacgtcattcagtgtccgatcccatttcgaaggatctcgtcgagtgtcttcgtgaatcaatgcaaagagatctcaaatttgagactccgtacgttttcgtgatatttggagcatcgggagatctcgcaaaaaagaaaatatacccaacactgtggtggttgttccgtgacaaccttttgccagtcaacatcaaatttattggatatgcccgttccgatctgacagttttcaagcttcgtgaatcttttgagaaaaactgtaaagttcgagaaaatgagaaatgtgcttttgatgacttcatcaagaagtgctcatacgttcagggccaatacgacacttctgaaggattccaacgccttcaatcttcaattgatgatttccaaaaagaaagcaataatcaagccgtcaatcgtctctactacctcgctcttcctccatcagttttcaacgtggtttctacggaattaaagaagaattgtatggatcatggtgattcatggacacgtgttatcatagaaaaaccatttggacatgatttgaaatcatcttgtgaactttcaactcatttggcgaaactttttaaagaagatcaaatctaccgtattgatcattatctcggaaaagaaatggttcagaatttgatggttatgcgatttggaaaccgaattctcgctccatcttggaaccgcgatcacattgcatcagttatgatctcatttaaagaagattttggaactggtggccgtgctggatattttgatacagctggaattatccgtgatgttatgcagaatcatttgatgcaaattctaactttagtcgccatggagaaaccagcaagtttgaatgctgaagatattcgtgatgaaaaggtcaaagtgttgaaagctgctaaagttgtagaattaaaggatgtagtagttggacaatacattgccagtcctgaatttgatcacccagaagcatcacaaggatacaaagatgacaaatcagttccagccgattcgactactccaacgtatgctcttgctgttgttcacatcaataatgaacgttgggagggtgttccattcttcttgcgttgtggaaaagctctcaacgagaagaaagcagaagttcgtatacaattcaaagaagtcagtggagatatctatccgtctggtgaattaaagcgatccgaattagtgatgagagtgcaaccaaatgaggcagtttacatgaaactgatgaccaagaaacctggaatgggattcggtgttgaagaaactgaacttgatttgacttataataatagattcaaagaagtccgtcttcctgatgcttatgaacgcctatttctcgaagtattcatgggatctcaaattaatttcgttcgaactgatgagcttgaatacgcttggcgtattttgacgccagttctcgaagagcttaaaaagaagaaagttcaaccggttcaatataaatttggaagtcgtggtccaactgaaggtgacgaattgatgaaaaagtacggtttcatcttcactggaacatacaaatgggttgctccaaagctataa

SEQ ID NO: 2628 - protein, 522 aa, Caenorhabditis elegans
MACKRHSVSDPISKDLVECLRESMQRDLKFETPYVFVIFGASGDLAKKKIYPTLWWLFRDNLLPVNIKFIGYARSDLTVFKLRESFEKNCKVRENEKCAFDDFIKKCSYVQGQYDTSEGFQRLQSSIDDFQKESNNQAVNRLYYLALPPSVFNVVSTELKKNCMDHGDSWTRVIIEKPFGHDLKSSCELSTHLAKLFKEDQIYRIDHYLGKEMVQNLMVMRFGNRILAPSWNRDHIASVMISFKEDFGTGGRAGYFDTAGIIRDVMQNHLMQILTLVAMEKPASLNAEDIRDEKVKVLKAAKVVELKDVVVGQYIASPEFDHPEASQGYKDDKSVPADSTTPTYALAVVHINNERWEGVPFFLRCGKALNEKKAEVRIQFKEVSGDIYPSGELKRSELVMRVQPNEAVYMKLMTKKPGMGFGVEETELDLTYNNRFKEVRLPDAYERLFLEVFMGSQINFVRTDELEYAWRILTPVLEELKKKKVQPVQYKFGSRGPTEGDELMKKYGFIFTGTYKWVAPKL

SEQ ID NO: 2629 - DNA, 1779 bp, Streptomyces coelicolor
  CDS (1)..(1779)
atgagcgaggagcttcccgctggggcgccccaggagaccaaggcgacgaaggaagccaaggagacccggacggcccaggaggcggcggggccgctgcacgcggaggaggccgaggaggcccgcgccgccgaggcggcgaaggcgtccggccgggcgaaggctccccgcggcgcgaagaagtccgcgacgaaccgcgccgccaaggaggcgaagggcaagggcgcggccggggagggcgtcgagccggtggcaccgctcgactggagcaacccgctgcgcgatccccaggaccgccgtctcccccgcatcgcgggcccgtccgggctggtcatcttcggcgtcaccggcgacctgtcccgcaagaagctgatgcccgccgtgtacgacctggccaaccgcggcctgctgccgcccggcttctcgctggtcggcttcgcccgccgggactgggaggaccaggacttcgccgaggtcgtgcacgacgccgtcagggagcacgcgcgcacgccgttccgcgaggaggtctggcagcagctctccgagggcatgcgcttcatccccggcgacttcgacgacgacaacgcgttcgaacagctgcgcaaggccgtcgaggagctggacgcgtcccgcggcaccagcggcaactacgccttctacctctccgtgccgccgaagttcttcccgaaggtcgtccagcagctcaagaagcacgggctgaccgacgcgcccgcgggctcctggcgccgtgcggtgatcgagaagccgttcggccacgacctggacagcgcccgcgacctgaacgcgctggtgcacgaggtgttcgacccggagcaggtcttccgcatcgaccactacctgggcaaggagacggtccagaacatcctggcgctgcgcttcgccaaccagatgtacgagccgatctggaaccggtcctacgtggaccacgtgcagatcacgatggccgaggacatcggcatcggcggccgggccggctactacgacggcatcggcgccgcccgcgacgtcatccagaaccacctgctccagctgatggcgctgaccgccatggaggagccggccgccttcgacgcgcggtcgctgctcaccgagaagctgaaggtgctgcgggcggtgcggctgcccgacgacctgggcgagcacaccgtgcgcgggcagtacgcgggcggctggcagggcggcgcgcaggtgcccggctacctggaggaggagggcatcgacccggcctccaccaccgacacctacgcggcgatcaagctcggcatcgacaaccgccgctgggccggggtgcccttctacctgcgcaccggcaagcgcctgggccgccgggtcaccgagatcgcggtcgtcttccagcgggccccgcactcccccttcgactccacggcgacggaggagctgggcgagaacgccatcgtcatccgcgtccagcccgacgagggcatgacggtgcgcttcggctccaaggtgccgggcacgtcgatggagatccgggacgtgtcgatggacttcgcgtacggcgagtccttcaccgagtccagcccggaggcgtacgaacggctgatcctggacgtccttctgggtgacgccaacctgttcccgcgccaccaggaggtggaagagtcctggcggatcctcgacccgatcgaggagtactgggcctcgcacgacaagcccgcgcagtacgcgtcgggcggctggggaccgcgggaagcggacgagatgctcgcacgagacggacggagctggcgcaggccatga

SEQ ID NO: 2630 - protein, 592 aa, Streptomyces coelicolor
MSEELPAGAPQETKATKEAKETRTAQEAAGPLHAEEAEEARAAEAAKASGRAKAPRGAKKSATNRAAKEAKGKGAAGEGVEPVAPLDWSNPLRDPQDRRLPRIAGPSGLVIFGVTGDLSRKKLMPAVYDLANRGLLPPGFSLVGFARRDWEDQDFAEVVHDAVREHARTPFREEVWQQLSEGMRFIPGDFDDDNAFEQLRKAVEELDASRGTSGNYAFYLSVPPKFFPKVVQQLKKHGLTDAPAGSWRRAVIEKPFGHDLDSARDLNALVHEVFDPEQVFRIDHYLGKETVQNILALRFANQMYEPIWNRSYVDHVQITMAEDIGIGGRAGYYDGIGAARDVIQNHLLQLMALTAMEEPAAFDARSLLTEKLKVLRAVRLPDDLGEHTVRGQYAGGWQGGAQVPGYLEEEGIDPASTTDTYAAIKLGIDNRRWAGVPFYLRTGKRLGRRVTEIAVVFQRAPHSPFDSTATEELGENAIVIRVQPDEGMTVRFGSKVPGTSMEIRDVSMDFAYGESFTESSPEAYERLILDVLLGDANLFPRHQEVEESWRILDPIEEYWASHDKPAQYASGGWGPREADEMLARDGRSWRRP

SEQ ID NO: 2631 - DNA, 1524 bp, Streptomyces coelicolor
  CDS (1)..(1524)
atgtcaagcagcaatccgctgcgtgaccccgcagaccgacggctcccgcgcatcgcggggccgtcgggtctggtcatcttcggcgtcaccggcgatctgtcccgcaagaagctcatgcccgccgtgtacgacctcgccaaccggggtctgctgccgccgggcttctcgctcgtcgggttcgcccgccgggactgggagcacgaggacttcgcccaggtcgtgcacgacgccgtcaaggagcactcccgcacgccgttccgcgaggaggtctggcagcagctcatccaggggatgcgcttcgtgcagggcaccttcgacgacgacgacgccttcgagcggctgcgcggcaccatcgaggagctggacaaggcacagggcacgggcggcaacttcgccttctacctgtcggtgccgccgaagtccttcccggtggtcatccagcagctcaagaagcacggactggccgaccagacgaacggctcctggcggcgggcggtgatcgagaagcccttcggccacgacctgaagtcggccgaggagctgaacgccatcgtccacgaggtcttcggctccgaccaggtcttccgcatcgaccactacctgggcaaggagaccgtccagaacatcctggcgctgcgcttcgccaacacgatgttcgagccgatctggaaccggtcctacgtcgaccacatccagatcaccatggccgaggacatcggcatcggcggccgggccggctactacgacgggatcggcgcggcgcgtgacgtcatccagaaccacctgctccagctgctcgcgctgaccgcgatggaggagcccgcctccttcgacgcggacgcgctggcggcggagaagaccaaggtgctcggcgcggtccgcctccccaaggacctgggccgggacaccgtgcgcggccagtacgcggcggggtggcagggcggcgccaaggccgtcggttacctcgaagaggacggcatcgaccccaagtcgaagaccgacacctacgccgcgatcaaggtgggcatcgacaaccgccgctgggcgggtgtccccttctacctgcgcaccggcaagcggctgggccgccgggtcacggagatcgcggtcgtcttccagcgggccccgcactcccccttcgacacgacggccaccgaggaactcggctcgaacgcgatcgtcatccgcgtccagcccgacgagggcgtcaccgtccgcttcggttccaaggtgccgggcacgtcgatggagatccgggacgtgtcgatggacttcgcctacggcgagtccttcaccgagtccagcccggaggcgtacgagcgcctgatcctggacgtcctgctcggcgacgccaacctcttcccgcgcaccgaggaggtcgagctgtcctggaagatcctcgacccgatcgaggagtactgggacgagcacggcaccccggcccagtacccggccggcacctgggggcccgtcgaggcggacgacatgctggaacgagacggacggagctggcgccggccatga

SEQ ID NO: 2632 - protein, 507 aa, Streptomyces coelicolor
MSSSNPLRDPADRRLPRIAGPSGLVIFGVTGDLSRKKLMPAVYDLANRGLLPPGFSLVGFARRDWEHEDFAQVVHDAVKEHSRTPFREEVWQQLIQGMRFVQGTFDDDDAFERLRGTIEELDKAQGTGGNFAFYLSVPPKSFPVVIQQLKKHGLADQTNGSWRRAVIEKPFGHDLKSAEELNAIVHEVFGSDQVFRIDHYLGKETVQNILALRFANTMFEPIWNRSYVDHIQITMAEDIGIGGRAGYYDGIGAARDVIQNHLLQLLALTAMEEPASFDADALAAEKTKVLGAVRLPKDLGRDTVRGQYAAGWQGGAKAVGYLEEDGIDPKSKTDTYAAIKVGIDNRRWAGVPFYLRTGKRLGRRVTEIAVVFQRAPHSPFDTTATEELGSNAIVIRVQPDEGVTVRFGSKVPGTSMEIRDVSMDFAYGESFTESSPEAYERLILDVLLGDANLFPRTEEVELSWKILDPIEEYWDEHGTPAQYPAGTWGPVEADDMLERDGRSWRRP

SEQ ID NO: 2633 - DNA, 1422 bp, Schizosaccharomyces pombe
  CDS (1)..(1422)
atggttacttttatggtatttggtgcatcaggcaacctcgccaacaaaaagacattccctgccctgttccatctcttcaaacgaaacctggtagatcgttcttccttttacgtacttggatatgctagaagtaagatacctatcggtgaattcagggaaagtattcgtgaatctgtgaagccagatactgaaagcaaacaggtgtttcaggacttcattgaccgagtatcttacttcagtggtcagtatgatcagagcagttcttatgtggaatttcgaaaacacctagaatcagttgaaaaaaaagcagactcttcgaaagcacttcgtatcttttatatcgccttaccaccatctgtttacgtgacagtcagttctcatatatatgagaatttatatttaccaggaaaatcgcggttagttattgaaaaaccgtttggtaaaaactatcaatcggctgttaaactcaaagaagaagttcataagcattggaaagaggaagaaatttatcggattgatcattatacagccaaagatatggttaacaattttttcacccttcgttttgcaaactcttcgtccattgacgcagttttaaatcgccattctattcaatccgtcgaaatacacatgtatgaaacgggaggctgtgaaggccgtattggttactatgatgcgaatggagtcgttcgcgacgtcgtacagaatcatttaactcaaattttttgtattgctgctatgaatgaaccgaagtctgcttctgcgagtgatgttcgtgctgaaaaggtcaatttgttgaaagctaccagaccagcatctttgaaagaaagtatgcttggtcagtatacaactagcgaagacggtaaaataccgggctacttagacttggagggagtccctaaagatagtaaagccaccacatttgctgcatccactcttcatgttgataatgatcgatggaagggcgtacccttcgtatttgtctctggtaagcggatgaaaaaaggtgaagtatatatcaagtactatttccgtctaaaagactccggaattttctccgacgtaaaacgacgtcggtacttgattcttcatgttcagccggaggagtttgtcaatttgacatgtactattaataaacccatgactactgaccttcaaccgattgacgcctatgcttcgctcaattataatgagcaatttaaagatctgatgaaggaaaaacgagatggctatgaaattttattcgaagatgcaattcgcggtgatcccactaagttcattcgttatgatgaggttgagtatgcttggaagatatgggacgaaatcctcgattctcccaaaaaacctattccctatccagctggttcagatggtcctgagggtttggaagcttatatgaaaaggcatctaggccatgaatag

SEQ ID NO: 2634 - protein, 473 aa, Schizosaccharomyces pombe
MVTFMVFGASGNLANKKTFPALFHLFKRNLVDRSSFYVLGYARSKIPIGEFRESIRESVKPDTESKQVFQDFIDRVSYFSGQYDQSSSYVEFRKHLESVEKKADSSKALRIFYIALPPSVYVTVSSHIYENLYLPGKSRLVIEKPFGKNYQSAVKLKEEVHKHWKEEEIYRIDHYTAKDMVNNFFTLRFANSSSIDAVLNRHSIQSVEIHMYETGGCEGRIGYYDANGVVRDVVQNHLTQIFCIAAMNEPKSASASDVRAEKVNLLKATRPASLKESMLGQYTTSEDGKIPGYLDLEGVPKDSKATTFAASTLHVDNDRWKGVPFVFVSGKRMKKGEVYIKYYFRLKDSGIFSDVKRRRYLILHVQPEEFVNLTCTINKPMTTDLQPIDAYASLNYNEQFKDLMKEKRDGYEILFEDAIRGDPTKFIRYDEVEYAWKIWDEILDSPKKPIPYPAGSDGPEGLEAYMKRHLGHE

SEQ ID NO: 2635 - DNA, 1503 bp, Schizosaccharomyces pombe
  CDS (1)..(1503)
atgagttctgcaaatttatctatcaaggaaaatggcgcaatggtcgttttcggcgcttccggtgatctatccaagaaaaagacgtttccagctcttttctctttgtttagcgaaggacgtctccccaaagatattagaatcgttggctatgcgcgctccaagattgaacatgaagactttttagatcgcattacccaaaacatcaaaattgatgaagaggattcccaggccaaagagaagcttgaggaatttaaaaagagatgctcttactatcgtggctcttacgacaagcctgaagatttcgagggcttgaactctcatttgtgtgagagggaaggcgaccgttctacccacaaccgcattttctatctcgcgttacctcccgacgttttcgtatctgtagctacaaaccttaaaaaaaaatgtgtgcccgaaaaaggtattgctcgtcttgtaatcgagaagccatttggcgtcgatttgaaatccgcccaggaactccaatcccaattagctcccctttttgatgagaaggaaatttatcgtattgatcactatttaggcaaggagatggttcaaaatttggttcatcttcgtttttgcaatcctgttatttctcatctttgggacaaaaacagtatttccagtgttcaaattacattcaaagagcctattggtacggaaggccgtggtgggtactttgactctagtactattgtccgtgatatcgtgcaaaaccaccttgtccaaattctgacccttttgaccatggaaaccccgaccactttctctgcagacgatcttcgtgacgagaaagtcaaggtattgcgtcgcactcgattgggagatctcaaagatattgttcttggtcaatatgtcaaaagcaaggacggtaaaaaacctggctaccttgatgacgagactgttcccaagggtagtaggtgtcccacttactcagctattccctgttttattgataccgaaagatggcgcggcgttcctttcttacttaaagctggtaaagccatggatattggcaaggtagagattcgtgttcagttcaaagctgctgcaaatggtttatttaaggacgcatatcataatgagctcgtaatccgtgttcagccagacgaagctatttacttcaagatgaacattaagcaacccggtcttagtgaggctcccctccttactgatttggacttgacttactctcgtagatttaagaacatgaagctccatgaagcatatgaagcattgtttttggacgcgtttgccggtgaccaatcccgttttgctcgtatcgacgaattagaatgtgcctggtctttagttgatcctcttttgaaatatatggaggaagagaaacctgtacccgagccttacgagtatggttccgatggtcccgaatgtttatactcttttttgaaaaagttcggatatatttatgattcccctgattactatgattatccagtcatgtccgttccttccgatcactaa

SEQ ID NO: 2636 - protein, 500 aa, Schizosaccharomyces pombe
MSSANLSIKENGAMVVFGASGDLSKKKTFPALFSLFSEGRLPKDIRIVGYARSKIEHEDFLDRITQNIKIDEEDSQAKEKLEEFKKRCSYYRGSYDKPEDFEGLNSHLCEREGDRSTHNRIFYLALPPDVFVSVATNLKKKCVPEKGIARLVIEKPFGVDLKSAQELQSQLAPLFDEKEIYRIDHYLGKEMVQNLVHLRFCNPVISHLWDKNSISSVQITFKEPIGTEGRGGYFDSSTIVRDIVQNHLVQILTLLTMETPTTFSADDLRDEKVKVLRRTRLGDLKDIVLGQYVKSKDGKKPGYLDDETVPKGSRCPTYSAIPCFIDTERWRGVPFLLKAGKAMDIGKVEIRVQFKAAANGLFKDAYHNELVIRVQPDEAIYFKMNIKQPGLSEAPLLTDLDLTYSRRFKNMKLHEAYEALFLDAFAGDQSRFARIDELECAWSLVDPLLKYMEEEKPVPEPYEYGSDGPECLYSFLKKFGYIYDSPDYYDYPVMSVPSDH

SEQ ID NO: 2637 - DNA, 1428 bp, Schizosaccharomyces pombe
  CDS (1)..(1428)
atgctatccatcattgttttcggtgcatccggcgatctcgctaccaaaatgactttcccggccttgtttgccctttacgtccgcaaaattattcccgaggactttcaaatcatcggctatgcccgttccaaattgtcccaagaggccgctaacaaaatcgtcaccgcccatattcccattgacgatactgtcggtgcttctcaaaaggccttaaacacctttgtcgagcattacaagtatgtccccggtacttatgataagcccgagtcttttgagatgctaaacagcattattgctgaaaaggagactgctcccgcctccgaatgcacacgtatcttttacttggttctgcctcctcatctctttgctcccgtttccgagctaatcaagagtaaggctcatcccaatggtatggtcactcgtcttattgttgagaagcccatcggcttcgactacaagtctgccgatgccattctcagcgatctcagcaagcactggtctgccaaggatactttcaaagtcgaccatttccttggcgaggatatgattgatggattcactgcaattcgctttgcaaactccatgttcgagcccatctggaatcgtgaacacattgaaagtgttcgtgtcgactttcgtgaagactttggttgtgagggacgtggaggttattttgagggcgctggtatccttcgcgatgtcgttcaaaatcatcttttgcaactacttaccttactttgcatcgaagagccaaagtctcaagatgccgaagatatcatcaaatgcaaggttgacttcttgaaatcccttcatcccgtttccaaggaggacatcgtctatggacagtacactaaaagtgcaaatggaaaggtccccggttatcgtgaactggatggtgttgctgatgacagtgaagtttctacattctgtgctcttcaacttcgctctgaagcacctcgttggaagggtattcccatcatcatttctgccggtaaaggtttggaccgcgattactttgaagctcgtatcacttttaagcgtagggaaggaggtatgttccctaccgttgatagcagcaatgttctagtccttcgtgtttatcccaaggaattcattgccctcaagggacacattaaacaacctggtttctctcgtcaaattgttcctgtgactttggacgttaagtatcccgaagctttccctgatacatggatccataaggcctatgaagtggttattgccgatgccattaatggaaagcatacacactttattagtgatgatgaggttcgtacctcttggaaaatctttgatgatgtccttgacactacaggcgatttgtcacctcttccttatgcttttggttcccaccatggtccagatgccacactcgaatttttcaagaagcgtaatttagagtgggattaa

SEQ ID NO: 2638 - protein, 475 aa, Schizosaccharomyces pombe
MLSIIVFGASGDLATKMTFPALFALYVRKIIPEDFQIIGYARSKLSQEAANKIVTAHIPIDDTVGASQKALNTFVEHYKYVPGTYDKPESFEMLNSIIAEKETAPASECTRIFYLVLPPHLFAPVSELIKSKAHPNGMVTRLIVEKPIGFDYKSADAILSDLSKHWSAKDTFKVDHFLGEDMIDGFTAIRFANSMFEPIWNREHIESVRVDFREDFGCEGRGGYFEGAGILRDVVQNHLLQLLTLLCIEEPKSQDAEDIIKCKVDFLKSLHPVSKEDIVYGQYTKSANGKVPGYRELDGVADDSEVSTFCALQLRSEAPRWKGIPIIISAGKGLDRDYFEARITFKRREGGMFPTVDSSNVLVLRVYPKEFIALKGHIKQPGFSRQIVPVTLDVKYPEAFPDTWIHKAYEVVIADAINGKHTHFISDDEVRTSWKIFDDVLDTTGDLSPLPYAFGSHHGPDATLEFFKKRNLEWD

SEQ ID NO: 2639 - DNA, 1461 bp, Leuconostoc mesenteroides
  CDS (1)..(1461)
atggtttcagaaatcaaaacgttggtaactttctttggcggaactggtgatttagcaaagcgtaagctttacccatcagttttcaacctctacaaaaaaggatacttacaagaacactttgccattgttgggacagcacgtcaacaattaagtgatgacgagtttaagcaattggttcgtgattcaattaaagactttactgaagatcaagcacaagccgaagcgtttattgcgcatttttcttaccgtgcgcacgatgtcacagatgccgcttcttatggtatcttgaagtcagcgatcgaagaagcagcaaccaaatttgacattgatggcaatcgtattttctatatgtcagttgcccctcgtttcttcggtacaatcgctaaatatttgaaatcagaaggtttgctagctgagactggctacaatcgtttgatgattgaaaagccttttggtacatcatacgccaccgcagaagaattgcaaagtgatttggaaaatgcatttgatgatgaccaactgttccgtattgaccactatcttggaaaagaaatggtacaaaatattgcagcattacgttttggtaacccaatctttgatgccgcttggaataaggactatatcaaaaacgtacaagtaactttggctgaagttctaggtgttgaagagcgtgctggttactacgataccactggcgcccttttggatatgattcaaaaccacacaatgcaaattgttggttggttagcaatggaaaaacctgaatcattcaatgataaggatatccgtgcagctaaaaacgccgccttcaatgcattaaagatttataacgaagaagaagtgaataagtacttcgttcgtgcacaatatggtgctggtgatacagctgattacaagccatatttggaagaagcagatgtccctgctgactcaaagaacaacacattcattgctggtgaattgcagttcgatttgccacgttgggaaggtgttcctttctatgttcgttcaggtaagcgtttggctgccaagcaaacacgtgttgatattgtatttaaggctggcacattcaactttggttcagaacaagaagcacaagaatcagtactctcaatcatcattgatccaaagggtgctattgaattgaagcttaacgctaagtcagttgaagatgccttcaacacccgcacaatcaacttggattgggcagtatctgatgaagacaagaagaacacaccagaaccatacgaacgtatgattcacgatacaatgaatggtgacggatcaaactttgctgattggaacggtgtatcaattgcttggaagtttgttgacgcaattactgccgtttacgatgcagataaagcaccattggagacatataagtcaggttcaatgggtcctgaagcatcagacaagctattagctgaaaatggcgatgcttgggtatttaaaggatag

SEQ ID NO: 2640 - protein, 486 aa, Leuconostoc mesenteroides
MVSEIKTLVTFFGGTGDLAKRKLYPSVFNLYKKGYLQEHFAIVGTARQQLSDDEFKQLVRDSIKDFTEDQAQAEAFIAHFSYRAHDVTDAASYGILKSAIEEAATKFDIDGNRIFYMSVAPRFFGTIAKYLKSEGLLAETGYNRLMIEKPFGTSYATAEELQSDLENAFDDDQLFRIDHYLGKEMVQNIAALRFGNPIFDAAWNKDYIKNVQVTLAEVLGVEERAGYYDTTGALLDMIQNHTMQIVGWLAMEKPESFNDKDIRAAKNAAFNALKIYNEEEVNKYFVRAQYGAGDTADYKPYLEEADVPADSKNNTFIAGELQFDLPRWEGVPFYVRSGKRLAAKQTRVDIVFKAGTFNFGSEQEAQESVLSIIIDPKGAIELKLNAKSVEDAFNTRTINLDWAVSDEDKKNTPEPYERMIHDTMNGDGSNFADWNGVSIAWKFVDAITAVYDADKAPLETYKSGSMGPEASDKLLAENGDAWVFKG

SEQ ID NO: 2641 - DNA, 3038 bp, Corynebacterium glutamicum
  CDS (115)..(1659)
cctgaagtagaatcagcacgctgcatcagtaacggcgacatgaaatcgaattagttcgatcttatgtggccgttacacatctttcattaaagaaaggatcgtgacactaccatcatgagcacaaacacgaccccctccagctggacaaacccactgcgcgacccgcaggataaacgactcccccgcatcgctggcccttccggcatggtgatcttcggtgtcactggcgacttggctcgaaagaagctgctccccgccatttatgatctagcaaaccgcggattgctgcccccaggattctcgttggtaggttacggccgccgcgaatggtccaaagaagactttgaaaaatacgtacgcgatgccgcaagtgctggtgctcgtacggaattccgtgaaaatgtttgggagcgcctcgccgagggtatggaatttgttcgcggcaactttgatgatgatgcagctttcgacaacctcgctgcaacactcaagcgcatcgacaaaacccgcggcaccgccggcaactgggcttactacctgtccattccaccagattccttcacagcggtctgccaccagctggagcgttccggcatggctgaatccaccgaagaagcatggcgccgcgtgatcatcgagaagcctttcggccacaacctcgaatccgcacacgagctcaaccagctggtcaacgcagtcttcccagaatcttctgtgttccgcatcgaccactatttgggcaaggaaacagttcaaaacatcctggctctgcgttttgctaaccagctgtttgagccactgtggaactccaactacgttgaccacgtccagatcaccatggctgaagatattggcttgggtggacgtgctggttactacgacggcatcggcgcaccgcgcgacgtcatccagaaccacctgatccagctcttggctctggttgccatggaagaaccaatttctttcgtgccagcggcacggcaggcagaaaagatcaaggtgctctctgcgacaaagccgtgctacccattggataaaacctccgctcgtggtcagtacgctgccggttggcagggctctgagttagtcaagggacttcgcgaagaagatggcttcaaccctgagtccaccactgagacttttgcggcttgtaccttagagatcacgtctcgtcgctgggctggtgtgccgttctacctgcgcaccggtaagcgtcttggtcgccgtgttactgagattgccgtggtgtttaaagacgcaccacaccagcctttcgacggcgacatgactgtatcccttggccaaaacgccatcgtgattcgcgtgcagcctgatgaaggtgtgctcatccgcttcggttccaaggttccaggttctgccatggaagtccgtgacgtcaacatggacttctcctactcagaatccttcactgaagaatcacctgaagcatacgagcgcctcattttggatgcgctgttagatgaatccagcctcttccctaccaacgaggaagtggaactgagctggaagattctggatccaattcttgaagcatgggatgccgatggagaaccagaggattacccagcgggtacgtggggtccaaagagcgctgatgaaatgctttcccgcaacggtcacacctggcgcaggccataatttaggggcaaaatgatctttgaacttccggataccaccacccagcaaatttccaagaccctaactcgactgcgtgaatcgggcacccaggtcaccaccggccgagtgctcaccctcatcgtggtcactgactccgaaagcgatgtcgctgcagttaccgagtccaccaatgaagcctcgcgcgagcacccatctcgcgtgatcattttggtggttggcgataaaactgcagaaaacaaagttgacgcagaagtccgtatcggtggcgacgctggtgcttccgagatgatcatcatgcatctcaacggacctgtcgctgacaagctccagtatgtcgtcacaccactgttgcttcctgacacccccatcgttgcttggtggccaggtgaatcaccaaagaatccttcccaggacccaattggacgcatcgcacaacgacgcatcactgatgctttgtacgaccgtgatgacgcactagaagatcgtgttgagaactatcacccaggtgataccgacatgacgtgggcgcgccttacccagtggcggggacttgttgcctcctcattggatcacccaccacacagcgaaatcacttccgtgaggctgaccggtgcaagcggcagtacctcggtggatttggctgcaggctggttggcgcggaggctgaaagtgcctgtgatccgcgaggtgacagatgctcccaccgtgccaaccgatgagtttggtactccactgctggctatccagcgcctggagatcgttcgcaccaccggctcgatcatcatcaccatctatgacgctcatacccttcaggtagagatgccggaatccggcaatgccccatcgctggtggctattggtcgtcgaagtgagtccgactgcttgtctgaggagcttcgccacatggatccagatttgggctaccagcacgcactatccggcttgtccagcgtcaagctggaaaccgtctaaggagaaatacaacactatggttgatgtagtacgcgcacgcatactgaagatttggttgcacaggctgcctccaaattcattgaggttgttgaagcagcaactgccaataatggcaccgcacaggtagtgctcaccggtggtggcgccggcatcaagttgctggaaaagctcagcgttgatgcggctgaccttgcctgggatcgcattcatgtgttcttcggcgatgagcgcaatgtccctgtcagtgattctgagtccaatgagggccaggctcgtgaggcactgttgtccaaggtttctatccctgaagccaacattcacggatatggtctcggcgacgtagatcttgcagaggcagcccgcgcttacgaagctgtgttggatgaattcgcaccaaacggctttga

SEQ ID NO: 2642 - protein, 514 aa, Corynebacterium glutamicum
MSTNTTPSSWTNPLRDPQDKRLPRIAGPSGMVIFGVTGDLARKKLLPAIYDLANRGLLPPGFSLVGYGRREWSKEDFEKYVRDAASAGARTEFRENVWERLAEGMEFVRGNFDDDAAFDNLAATLKRIDKTRGTAGNWAYYLSIPPDSFTAVCHQLERSGMAESTEEAWRRVIIEKPFGHNLESAHELNQLVNAVFPESSVFRIDHYLGKETVQNILALRFANQLFEPLWNSNYVDHVQITMAEDIGLGGRAGYYDGIGAPRDVIQNHLIQLLALVAMEEPISFVPAARQAEKIKVLSATKPCYPLDKTSARGQYAAGWQGSELVKGLREEDGFNPESTTETFAACTLEITSRRWAGVPFYLRTGKRLGRRVTEIAVVFKDAPHQPFDGDMTVSLGQNAIVIRVQPDEGVLIRFGSKVPGSAMEVRDVNMDFSYSESFTEESPEAYERLILDALLDESSLFPTNEEVELSWKILDPILEAWDADGEPEDYPAGTWGPKSADEMLSRNGHTWRRP

SEQ ID NO: 2643 - DNA, 1852 bp, Nicotiana tabacum
  CDS (102)..(1634)
acgttttgtctctcataatttcttcagatcagaaatcacaaggttgaagtgatcacaactacttggctgtattgagttcaagctggtcgtgggccttgaagatggcagcatcatggtgcattgaaaaaagaggttctcttcggctcgactcttttagagagaatgataatatacctgaaaccgggtgtctttccattattgttcttggcgcttctggtgatcttgccaagaagaaaacttttcctgctctcttcaacctctaccgacagggattcctgcaatccaatgaagttcacatttttggctatgcaaggacaaaaatttctgacgatgacttgagaagccgtatccgtgggtatctttctaaggggaaagaatatgaagaagtatcggagtttctgcaactgattaaatacgtcagtggctcttatgattctggggagggctttagtttactggacaaggcgatagctgagcacgaattcgcaaaaaatagcacggaaggatcatccagaagactcttctactttgctcttcctccatcagtatatccctctgtttgcaggatgataaaaaactattgtatgaacaaatctgatcttggtggttggactcgcattgttgttgagaagcccttcggcaaggatttagcttcagctgagcaactaagttcccagataggagaactatttaatgaaccccaaatttaccggattgaccattatttggggaaggagttggttcagaatgtgttggttctgcgttttgcaaaccgcttctttttgccgctctggaatcgtgacaacattgataatatacagattgtctttagggaggactttggaactgaaggccgcggtggatattttgatgaatatgggattatacgtgacattattcagaatcagctactgcaggtcctttgccttgttgctatggagaagcccgtgtctcagaagcccgagcacgtccgggatgagaaagttaaggttcttcaatcaatgcttccaatcaaagatgaagaggtcgttcttgaacaatatgaaggctataaggatgacccaacggttcctggcaactcaaatactcctacttttgcaactatggttttacgcatacacaatgaaagatgggaaggtgtgccctttataatgaaggctggaaaagcactaaattcaagaaaagcagaaatacgagtgcagtttaaggatgttcctggtgatatatttagatgtaaaaagcaggggagaaatgagtttgttatacgcctccagccttcagaagccatgtacatgaagcttacggtcaagaagcctgggcttgaaatgtcaactgttcaaagtgaattagacctgtcatatgggcagcgttatcaaggggttgtcattccagaggcttatgaacgtctgattctcgacacaataagaggggatcagcagcattttgtgcgcagagatgagctcaaggccgcttgggagatttttaccccacttttgcatagaattgacgatggagagatcaagccaattccatacaagccgggcagcagaggtcctgctgaagcagatgagttgctgcaaaatgtcggttacgttcaaactcatggctatatatggattcctcccacattataagtttgcaatgcgtgtcgcgaattacatcctactgtcccctaaatatgagtattaccttgtaacttttgccatgtatgatcctacctatgtgcaaactcgatgagaagtaagattttagtcggtataggagaaatatatctgcatgtaataatgtcatcttttttaagctaatgcatggaagtttgaatatatctcaagtttttcgcggccgcgaattc

SEQ ID NO: 2644 - protein, 510 aa, Nicotiana tabacum
MAASWCIEKRGSLRLDSFRENDNIPETGCLSIIVLGASGDLAKKKTFPALFNLYRQGFLQSNEVHIFGYARTKISDDDLRSRIRGYLSKGKEYEEVSEFLQLIKYVSGSYDSGEGFSLLDKAIAEHEFAKNSTEGSSRRLFYFALPPSVYPSVCRMIKNYCMNKSDLGGWTRIVVEKPFGKDLASAEQLSSQIGELFNEPQIYRIDHYLGKELVQNVLVLRFANRFFLPLWNRDNIDNIQIVFREDFGTEGRGGYFDEYGIIRDIIQNQLLQVLCLVAMEKPVSQKPEHVRDEKVKVLQSMLPIKDEEVVLEQYEGYKDDPTVPGNSNTPTFATMVLRIHNERWEGVPFIMKAGKALNSRKAEIRVQFKDVPGDIFRCKKQGRNEFVIRLQPSEAMYMKLTVKKPGLEMSTVQSELDLSYGQRYQGVVIPEAYERLILDTIRGDQQHFVRRDELKAAWEIFTPLLHRIDDGEIKPIPYKPGSRGPAEADELLQNVGYVQTHGYIWIPPTL

SEQ ID NO: 2645 - DNA, 1821 bp, Nicotiana tabacum
  CDS (88)..(1623)
ggcgtctcacaatttcttcagaaatcacaaggttggattgatcatacttcgctgagttgagggtgagctggttgtgaggccttgaagatggcagcatcatggtgcattgaaaaaaggggttctattcggctcgactcttttagagataatgataatatacctgaaactgggtgtctttccattattgttcttggtgcttctggtgatcttgccaagaagaaaacttttcctgcgctcttcaacctctaccggcagggatttctgcaatccaatgaggttcacatttttggctatgcaaggaccaaaatttctgacgacgacttgagaggccgtatccgtgggtatctttctcaggggaaagaaaatgaagaagaagtatcggagtttctgcagctgattaaatacgtcagtggctcttatgattctggggagggctttagtttactggacaaggctatagctgagcacgaaattgcaaaaaatagcacagaaggatcatccagaagactcttctactttgctcttcctccatcagtatatccctccgtttgcagaatgataaaaaattactgtatgaacaaatctgatcttggtggttggactcgcattgttgttgagaagcccttcggcaaggatttagcttcagctgagcaactaagttctcagataggagaactatttgatgaaccacaaatttaccggattgaccattatttgggaaaggagttggtgcagaatttgttggtgctgcgttttgcaaatcgcttctttttgccgctctggaatcgtgacaacattgataatatacagattgtctttagggaggactttggaactgaaggtcgctgtggatattttgatgaatatgggattatacgtgacattattcagaatcagctattgcaggtcctttgccttgttgccatggagaagcctgtgtcccagaagcccgaacacattcgggatgagaaagttaaggttcttcaatcaatgcttccaattaaagatgaagaggttgttcttggacaatatgaaggctataaggatgacccaacggttcctgacaactcaaatactcctacttttgcaactatggttttacgcatacacaatgaaagatgggaaggtgtgccctttataatgaaggctggaaaagcactaaattcaagaaaagcagaaatacgagtgcagtttaaggatgttcctggtgatatatttagatgtaaaaagcaggggagaaatgagtttgttatacgcctccagccttcagaagccatgtacatgaagcttacggtcaagaagcctgggcttgaaatgtcaactgttcaaagtgaattagacctgtcatataggcagcgttatcaaggggttgtcattccagaggcttatgaacgtctgattctcgacacaataagaggggatcagcagcattttgtgcgcagagatgagctcaaggccgcttgggagatttttaccccacttttgcatagaattgacgatggagaggtcaagccaattccatacaagccaggcagcagaggtcccgctgaagcagatgagttgctgcaaaatgtcggttacgttcaaactcatggctatatatgtattcctcccacattataagtttgcaatgcgtgtcgcgaattacatcctactgtcccctaaatatgagtattaccttgtaacttttgccaggtatgatcctgcctatgtgcaaactcgatagaagtaagattttcgtcggtataggagaaatatatctgcatgtaataatgtcatcttttttaagctaatgcatggaagtttggcggccgcgaattc

SEQ ID NO: 2646 - protein, 511 aa, Nicotiana tabacum
MAASWCIEKRGSIRLDSFRDNDNIPETGCLSIIVLGASGDLAKKKTFPALFNLYRQGFLQSNEVHIFGYARTKISDDDLRGRIRGYLSQGKENEEEVSEFLQLIKYVSGSYDSGEGFSLLDKAIAEHEIAKNSTEGSSRRLFYFALPPSVYPSVCRMIKNYCMNKSDLGGWTRIVVEKPFGKDLASAEQLSSQIGELFDEPQIYRIDHYLGKELVQNLLVLRFANRFFLPLWNRDNIDNIQIVFREDFGTEGRCGYFDEYGIIRDIIQNQLLQVLCLVAMEKPVSQKPEHIRDEKVKVLQSMLPIKDEEVVLGQYEGYKDDPTVPDNSNTPTFATMVLRIHNERWEGVPFIMKAGKALNSRKAEIRVQFKDVPGDIFRCKKQGRNEFVIRLQPSEAMYMKLTVKKPGLEMSTVQSELDLSYRQRYQGVVIPEAYERLILDTIRGDQQHFVRRDELKAAWEIFTPLLHRIDDGEVKPIPYKPGSRGPAEADELLQNVGYVQTHGYICIPPTL

SEQ ID NO: 2647 - DNA, 1808 bp, Chlamydia trachomatis
  CDS (105)..(1643)
taggacccctcatggcaaagccatgttttatgagagagaaatctttttaggcacatattcgtttttttggtattgtgggctctctcttaaaaaattaacactctatgctaggttgtaccttggaagaaattaaagactttggccccacattaccagcctgccctccctgtatcgtggttatttttggtgctacaggagacttgacctctaggaagctctttcctgctttatacaatttaacaaaggaaggacgtctatccgaaaactttgtttgtgttgggtttgctaggcgacctaagtctcatgagcaatttctcgaagaaatgaagcttgccgttcagcatttctctcactcatcggaaatagatattcgagtttgggaaagtctggaaaatagaatcttttaccaccaagctaatttttctgatgccgaaggctactctgctctgaaagcttatttggagcaactagatcaacaatatggaacacaagggaatcgtcttttttatttatcaacaccaccagattatttccaggaaatcatccgcaatttaaatcggcatcagctattctatcatgaacaaggagcacaacagccttggtctcggctaattatagaaaagccttttggagttaatttagaaacagctcgagagcttcaacaatgcattgatgccaatattgatgaagagtcggtttatcgaatagaccattatttaggaaaagaaacggttcaaaacattctgactattcgttttgctaatactctctttgagtcttgctggaattctcagtacatagatcatgtgcaaatcagcgttagcgaatcaattggtataggatctcgagggaatttcttcgaaaagtcgggcatgctacgagacatggtacagaatcatttgacgcagctgctatgtctactgactatggaacctccttctgaattttcttcagaagaaataaaaaaagaaaaaattaaaattctaaagaaaattcttcctatccgcgaagaagatgctgttcgtggccaatatggtgaagggattgtgcaagatgtttcagttctgggctatcgggaggaagaaaatgtcgatccgaattcttcagtagaaacctacgttgcattaaaattatttatcgacaatcctcgctggaaaggggttcccttttacttacaagcagggaaacgtcttactaaaagaacaacagatatcgctgtgatctttaaaaaatccagctacaatttattcaatgcagagaattgtcctttgtgtccgttagaaaatgatttacttattattcgtattcaaccggatgaaggtgttgcgctacaatttaactgcaaggttccaggaacaaataagctcgtacgtcctgtaaaaatggacttccgttacgacagctattttaatactgttactcccgaagcttatgaacggttactgtgcgactgtatccttggggacagaacgctattcactagcaatgaagaagtcttagcatcttgggaactattttctcctctattagaaaaatggtctcaagtacaccctatattccctaactatatggccggatctttacgtcctcaagaagctgatgaactattatctagagatggaaaagcttggcggccctattaatttgttttgcaagaggttatatacatggctacccttattagctaaatgatgcgaatagaatgcttatcgctgactctcaagaagagtttttacaaatcgcatgttatgattggatctctacagcaaataaagcgattcacaaacgcggtgcattctatgtcgctc

SEQ ID NO: 2648 - protein, 512 aa, Chlamydia trachomatis
MLGCTLEEIKDFGPTLPACPPCIVVIFGATGDLTSRKLFPALYNLTKEGRLSENFVCVGFARRPKSHEQFLEEMKLAVQHFSHSSEIDIRVWESLENRIFYHQANFSDAEGYSALKAYLEQLDQQYGTQGNRLFYLSTPPDYFQEIIRNLNRHQLFYHEQGAQQPWSRLIIEKPFGVNLETARELQQCIDANIDEESVYRIDHYLGKETVQNILTIRFANTLFESCWNSQYIDHVQISVSESIGIGSRGNFFEKSGMLRDMVQNHLTQLLCLLTMEPPSEFSSEEIKKEKIKILKKILPIREEDAVRGQYGEGIVQDVSVLGYREEENVDPNSSVETYVALKLFIDNPRWKGVPFYLQAGKRLTKRTTDIAVIFKKSSYNLFNAENCPLCPLENDLLIIRIQPDEGVALQFNCKVPGTNKLVRPVKMDFRYDSYFNTVTPEAYERLLCDCILGDRTLFTSNEEVLASWELFSPLLEKWSQVHPIFPNYMAGSLRPQEADELLSRDGKAWRPY

SEQ ID NO: 2649 - DNA, 2750 bp, Plasmodium falciparum
  CDS (48)..(2258)
atttccatattgccagtttatttccaaatatattttataatatatatatgaataactatcaaaataattatatatataatgaaaaaacattagattttataaataatgatcaagataatgataatttaaaatatttgaaagaatatgtatattttacgacaacaaatcaatttgatgttaggaaaagaattacagtatctttaaatttattagctaatgcatcaagtaaaatatttttattaaattctaaagacaaattagatttatggaaaaatatgttgattaaatcatatattgaagtgaattataatttatatccagctacttatttaatagatacatcatgcaccaacgaaaatgttaatattaacaataacaacaataataataataagaataagaataattattgttatagtaataccactgttatatcttgtggttatgaaaattatacaaaatatattgaagaaatttatgattctaaatatgctctatctctttattctaatagtttgaataaagaagaattattaactataataatttttggctgttcaggtgatttagccaaaaaaaaaatatatccagctttatttaaattattttgtaataattccttaccaaaagatttattaatcattggatttgctagaacagttcaagatttcgatacattttttgataaaatagttatatatttaaaacgatgtttattatgttatgaagattggtctatatcaaaaaagaaggatcttttaaatggttttaaaaataggtgtcgatattttgttggtaattattcgtcttcagaaagttttgaaaattttaataaatatttaacaactattgaagaagaagaagcaaaaaaaaaatattatgcaacatgttataaaatgaatggttcagattataatatatcaaataatgttgcagaggataatattagtatagatgatgaaaataagacaaatgaatattttcaaatgtgtactccaaaaaattgccctgataatgtattttcatcaaattataattttccatatgttataaatagtatattatatttagcattacctccacatatatttattagtactttaaaaaaaattataaaaaaaaattgtttaaatagtaaaggcactgataaaatattactagaaaaaccatttggaaatgatttagattcatttaaaatgttatcaaaacaaatattagagaattttaatgaacaacaaatatatagaatagatcattatttgggtaaggatatggtttcaggattgttgaaattaaaatttacaaatacatttttattatctttaatgaatagacattttataaaatgtattaaaattactcttaaagaaactaaaggtgtatatggtagaggacaatattttgatccctatggtattattagagatgttatgcaaaatcatatgttacaattattaacattaataactatggaagatcctatagatttaaatgatgaatctgtaaaaaatgagaaaataaaaattcttaaatcaattccttcgatcaaattagaagatactattattggacaatatgaaaaagctgaaaattttaaagaagatgaaaataatgatgatgaatcgaaaaaaaatcatagttatcatgatgatccacatatagataaaaattcgattactccaacattttgtacatgtatcttatatattaattcaattaattggtatggtgtaccaatcatttttaaatctggaaaaggtctgaataaagatatatgtgaaatacgtatacaattccataatattatggggtcgtctgatgaaaatatgaataataatgaatttgttattatattacaacctgttgaagctatatacctaaaaatgatgattaaaaaaacgggttgtgaagaaatggaagaagtacaattaaacctaacagtgaatgagaaaaataaaaaaattaatgtaccagaagcatatgaaacattactcttagaatgttttaaaggacataaaaaaaaattcatctcagacgaggaattgtatgaatcatggagaatatttactcctttacttaaggaactccaggaaaaacaagtcaagcctcttaaatattcttttggatcatcaggccctaaagaggtatttggacttgtcaaaaaatattacaattatggtaaaaattatacgcacagacctgagtttgttagaaaatcctctttttatgaagacgatttgttagatattaattattaattgatatatgtatatatttaaattaaccaaattaacacccaatgaatatgaaaataatatatatatatatatatatattatatgattgtttagtatattattacctatcttttataagataacataaatgtatatattatgacatatatatatatatatatatattatttcacttatctgcccacgaactttatttttgttttaaaattctagtataattaaataaaagaaaatatttggaacaatttgcattttttatgtataaataaaatttatataataatatactttcatacttactttttattttattttattttatttattttttaaatgtctattatatatacatataaatgcgttttcaaataaataataaaaacccatgtttaactaataatattacaaatagaactcaaaaaaaaaaaaaataattatacaatgaattaaagctttttaatatatttttaatggtatctccagactttagag

SEQ ID NO: 2650 - protein, 736 aa, Plasmodium falciparum
MNNYQNNYIYNEKTLDFINNDQDNDNLKYLKEYVYFTTTNQFDVRKRITVSLNLLANASSKIFLLNSKDKLDLWKNMLIKSYIEVNYNLYPATYLIDTSCTNENVNINNNNNNNNKNKNNYCYSNTTVISCGYENYTKYIEEIYDSKYALSLYSNSLNKEELLTIIIFGCSGDLAKKKIYPALFKLFCNNSLPKDLLIIGFARTVQDFDTFFDKIVIYLKRCLLCYEDWSISKKKDLLNGFKNRCRYFVGNYSSSESFENFNKYLTTIEEEEAKKKYYATCYKMNGSDYNISNNVAEDNISIDDENKTNEYFQMCTPKNCPDNVFSSNYNFPYVINSILYLALPPHIFISTLKKIIKKNCLNSKGTDKILLEKPFGNDLDSFKMLSKQILENFNEQQIYRIDHYLGKDMVSGLLKLKFTNTFLLSLMNRHFIKCIKITLKETKGVYGRGQYFDPYGIIRDVMQNHMLQLLTLITMEDPIDLNDESVKNEKIKILKSIPSIKLEDTIIGQYEKAENFKEDENNDDESKKNHSYHDDPHIDKNSITPTFCTCILYINSINWYGVPIIFKSGKGLNKDICEIRIQFHNIMGSSDENMNNNEFVIILQPVEAIYLKMMIKKTGCEEMEEVQLNLTVNEKNKKINVPEAYETLLLECFKGHKKKFISDEELYESWRIFTPLLKELQEKQVKPLKYSFGSSGPKEVFGLVKKYYNYGKNYTHRPEFVRKSSFYEDDLLDINY

SEQ ID NO: 2651 - DNA, 1509 bp, Debaryomyces hansenii
  CDS (1)..(1509)
atgtcagtagaaccatttggtaaacacgttaccattgtcgtctttggggcctctggtgatttagctaagaagaagacgttcccagcattatttggattattccgtgaaggagaattgccatcaacgatcaaggtgattgggtatgcaagatcagaattatcagatgctgactttaaggaaagaatatcagccaatttcaagggcgttaatgatagtaacaagcataaggtcgacgaattcttgaacttgtgttcttatactcaaggtcaatacgattccgcagaaggttttaaaaagttgaatgaggagatggaaaagtatgaaaaagattccggtgttgacaaacctgaaagattgttctacttggctttacctccatcggtattcgtcactgttgcaagtcatataaaggaaaatgcctacaccaaaactggtgaggttagattaattgtcgaaaagccgtttggtaatgacttggaatcttctaggaagttgcaaaagagcttggccccattgttcacagaagaagaattgtatagaattgaccactacttaggaaaggaaatggttaagaacttggtatttttaagatttagtaatgaatttcttaacgcttcatggaacaaaaaccacatcaagtcgatccagatatctttcaaggaagcttttggtactgaaggtagaggtggttatttcgatgatattggaattgttagagatgtcatgcaaaaccatttgttgcaagttttgactttgttaactatggaaagaccagtctctattgaccctgaagctatcagagatgaaaaggtcaaggtcttgaaagcatttggtgaactcgaaactgatgacatcttattgggacaatatactaagtccgaagatggaaccaaaccaggttacttagatgatgacactgttaaaggtgactccaagtgtgttacatatgctgcacttggtatgcaaatccacaatgaaagatgggaaggtgttccaattgttatgagagctggtaaggctttgaaagaatctaaggttgaaattagaattcaattcaaggaagtggctaagggtatgttcaatgacattcaaagaaatgaattagttatgagaattcaaccaaatgaagccgtctatatgaaaatcaattctaagatcccaggtatttctgctgttccttctgttaccgacttggatttaacatactcatctagatactctaaggaattttggatcccagaggcttacgaatcattaattagagactgttacttaggtaaccatgctaatttcgtcagagacgatgaattggatctttcatggaagttgttcactccattgttacagcacatcgaatcaaaggatggcccaacacctgaaccttatccttatggttctaacggtccaaagaatttgagacctttcttatctgatcacggttataacttctacgatgaaggcacttatgaatggcctttaaccaccccaaatgttaagggtaaaatgtaa

SEQ ID NO: 2652 - protein, 502 aa, Debaryomyces hansenii
MSVEPFGKHVTIVVFGASGDLAKKKTFPALFGLFREGELPSTIKVIGYARSELSDADFKERISANFKGVNDSNKHKVDEFLNLCSYTQGQYDSAEGFKKLNEEMEKYEKDSGVDKPERLFYLALPPSVFVTVASHIKENAYTKTGEVRLIVEKPFGNDLESSRKLQKSLAPLFTEEELYRIDHYLGKEMVKNLVFLRFSNEFLNASWNKNHIKSIQISFKEAFGTEGRGGYFDDIGIVRDVMQNHLLQVLTLLTMERPVSIDPEAIRDEKVKVLKAFGELETDDILLGQYTKSEDGTKPGYLDDDTVKGDSKCVTYAALGMQIHNERWEGVPIVMRAGKALKESKVEIRIQFKEVAKGMFNDIQRNELVMRIQPNEAVYMKINSKIPGISAVPSVTDLDLTYSSRYSKEFWIPEAYESLIRDCYLGNHANFVRDDELDLSWKLFTPLLQHIESKDGPTPEPYPYGSNGPKNLRPFLSDHGYNFYDEGTYEWPLTTPNVKGKM

SEQ ID NO: 2653 - DNA, 1503 bp, Candida glabrata
  CDS (1)..(1503)
atgtcagaacctgttaagtttgagaagaataccgttgttgtggtgtttggtgcttctggtgatttggccaagaagaagactttcccagctttgtttggtttgttcagagaaggatacctgcacgaatccaccaagattatcggttatgcgcgttccagtcttaccgttgaggaattgactgagcgtatcaagcctcacttgaagactccaaggggtaaggaggacgaggccaagattccacagttcttcaagctgctgacctatgtctccggtccttacgaccaggacgacggtttcatccgcttgcgtgagcagattgagaccttcgaaggtgccaagtgctccaccgtgccacacagactgttctacttcgctttgccaccaagcgtgttcttgccagtcgccaccaacattaagcgtctggtgtacgccgaaaacggtgtcactagactgatcgtggagaagccatttggtagagatctagagaccgctagaaagctacaagccgacttgagtccattgttcaaagaagaagaaatctacagaattgaccattacttgggtaaggaattggtcaagaacttgctagtcatgagattcggtaaccagttcttgaacagtgcttggaacagagacaacatccaatccattcagatctccttcaaagaacctttcggtaccgagggccgtggtggttacttcgataacatcggtatcataagagacgtcatgcaaaaccacttgttgcaagtgttgactttgttgaccatggagagacctgtctccttcgacccagaagccatccgtgacgagaaggttaaggtcctaaaagctatggctccattcgaccctaaggacatcttgatcggtcaatacggtaagtccgaagatggctctaagccagcttacttggatgacgaaaccgttaagccaggctccaagtgtgtcaccttcgccgccatcgccttccaaatcgaaaacgaacgttgggaaggtgttccaatcgttatgagagctggtaaagctcttaacgagggtaaagtagaaatcagactgcaatacaaggctgtcgcttccggtgtattcaagaacatcccacacaacgaattggttatcagaattcaaccaaatgaagccgtttacatgaaattcaacgccaagacaccaggtctgtcaaacgctactcaagtcactgacctagacttgacttactcttccagatacaaggacttctggatcccagaagcttacgaagctttgatcagagatgctctattgggtgaccactctaatttcgttagagatgatgagcttgatgtcagttggagtttattcacacctctattgaactacctagaaggaccagatgctcctcaaccagaaatatatccatacggttcaagaggtccaagcggtctaagggactacttgaagaagcacaattacatgatcgaggaaaagcacccatacacttggccagtcaccactccagatgaggattaa

SEQ ID NO: 2654 - protein, 500 aa, Candida glabrata
MSEPVKFEKNTVVVVFGASGDLAKKKTFPALFGLFREGYLHESTKIIGYARSSLTVEELTERIKPHLKTPRGKEDEAKIPQFFKLLTYVSGPYDQDDGFIRLREQIETFEGAKCSTVPHRLFYFALPPSVFLPVATNIKRLVYAENGVTRLIVEKPFGRDLETARKLQADLSPLFKEEEIYRIDHYLGKELVKNLLVMRFGNQFLNSAWNRDNIQSIQISFKEPFGTEGRGGYFDNIGIIRDVMQNHLLQVLTLLTMERPVSFDPEAIRDEKVKVLKAMAPFDPKDILIGQYGKSEDGSKPAYLDDETVKPGSKCVTFAAIAFQIENERWEGVPIVMRAGKALNEGKVEIRLQYKAVASGVFKNIPHNELVIRIQPNEAVYMKFNAKTPGLSNATQVTDLDLTYSSRYKDFWIPEAYEALIRDALLGDHSNFVRDDELDVSWSLFTPLLNYLEGPDAPQPEIYPYGSRGPSGLRDYLKKHNYMIEEKHPYTWPVTTPDED

SEQ ID NO: 2655 - DNA, 1485 bp, Bacillus thuringiensis serovar konkukian str
  CDS (1)..(1485)
atggaatcaatgacctttgttttatttggagcgacaggggacttagcgaaacgcaaaatttaccccgcactatataacttatatagagatcaaaagcttccaaagcaaatatccgttatcgggcttgggagacgtgaagtatctcatgtagatttccaaaaaagaataaaagaatcaatagagacgttttctcgtcatagagaagaaggtactccagaactcgaagattttttagataattttcgctattgtccattagatgtgagtaagccggaagactatgagagattattacaagtcgttcgtgaaagggaagaagagctacatataaaagggaatagaatgttctatctttctgttgctcctgaattttttgagacaatcgctttaaatattaaggaaagcggacttgataaaacggatggatggaaacgcctaatgattgagaaaccgttcgggcacgatcttacatctgctcgtgagctgaatgataagcttagtcgcacgtttgaagaagacgagatataccgtattgatcattatttaggtaagccgatgattcaaaaccttgaagcactagagtttgcaaatcctgttttacaatcgatttggaataaagaacatatagcgaatgtacaaatcacagcgagtgaaacagttggggttgaagaaagggcaggatattatgatcaggcaggagccattcgagatatggttcaaaatcatatgttacaaatattaatgatgactgctatgaatttgccggaaaaggttaatgcatgtgaaattcgagaggaaaagcgaaaggtaatggaggcgcttcgtaaagtgaaaaaagaagacgttcaaaaccatatcattcgcggacaatatggtgcaggtgagataaatggcgggcaagttgtagcatataaagaggagccaggagtaaatccttcttctaatatagacacatttgttgctgctcgcttgtggatcgataatccattttggactggcgttcccttttatatacgaacaggcaaacgaatgaaagaaaagtctactcgtattgtaatcgaatttaaaaatacgttaaaacagcaatatcaagatagtaatccaaatgcagcacctaacttgttaataattgaaattagcccaggtgagaacgtttcattacagttaaatagtaaaaatccattgaaaaatggagaaattgaaccgatccgtattaactttacttgtgagcaagcggatgtgggagtacctgaagcgtatgaaagactcattcatgatgctgtgagtggagacgctacattctttgcacattggagagaagttgaattgtcatgggaatgggtacaaccaattcttgaagcattcgaggaaaacttattaccacttcatgaatatgagtctggttcacatggtccagaggcatctaatgaattattgcaagaaagtggatttaaatggtggttagatcaagaaacgaaaaaataa

SEQ ID NO: 2656 - protein, 494 aa, Bacillus thuringiensis serovar konkukian str
MESMTFVLFGATGDLAKRKIYPALYNLYRDQKLPKQISVIGLGRREVSHVDFQKRIKESIETFSRHREEGTPELEDFLDNFRYCPLDVSKPEDYERLLQVVREREEELHIKGNRMFYLSVAPEFFETIALNIKESGLDKTDGWKRLMIEKPFGHDLTSARELNDKLSRTFEEDEIYRIDHYLGKPMIQNLEALEFANPVLQSIWNKEHIANVQITASETVGVEERAGYYDQAGAIRDMVQNHMLQILMMTAMNLPEKVNACEIREEKRKVMEALRKVKKEDVQNHIIRGQYGAGEINGGQVVAYKEEPGVNPSSNIDTFVAARLWIDNPFWTGVPFYIRTGKRMKEKSTRIVIEFKNTLKQQYQDSNPNAAPNLLIIEISPGENVSLQLNSKNPLKNGEIEPIRINFTCEQADVGVPEAYERLIHDAVSGDATFFAHWREVELSWEWVQPILEAFEENLLPLHEYESGSHGPEASNELLQESGFKWWLDQETKK

SEQ ID NO: 2657 - DNA, 1554 bp, Oryza sativa
  CDS (1)..(1554)
atgtcaggaggatctggtgattcttccccttcatcagggcgggctagcttcagttctttgtcaggtttgaaggacctagaactgtcttcagagtctggttgcttgtccattgtggtcctaggtgcttctggagaccttgctaagaagaaaacattcccagcgctgtttcacctctttcagcagggatttctacaatctggagaagtccatatatttgggtatgcaagatcaaatatttcggatgatggattaagagaacgcattcgtggatacctcaaaggagcttcagatgaacatatttcacaatttttgcaattaattaaatatgttagtggttcctacaatagcggggaaggatttgcatcattaaataacgccatttcagagaatgaaacttcgaagaacaacaaaccaggaagctcacgtagactattttatttggcattgcctccatcagtctacccctcagtatgcaaaatgataagatcatactgcatgaatccatcttctcattctggctggacaagggttattgttgaaaagccctttgggaaggacttggagtctgcagaggaactcagtgcccagcttggagagctgtttaatgaacaacagctgtacagaattgaccactatttaggaaaagaattggtccaaaatctgcttgtgcttcgctttgcaaaccgtttgttcctacctctttggaatcgtgataacattgctaatgtacagattgtattcagagaggactttgggactgaaggacgtggagggtactttgatcaatatggcatcattcgtgatatcattcagaaccatttgttgcaggtcttctgtttggtggctatggaaaagcctgtctctcttaagcctgagcacataagagatgaaaaagtcaaggttcttcagtcagtgacacctataaagcatgatgaggtggtccttgggcaatatgatggctacaaggatgactctacggtaccagatgactccaacacacctacttttgcatctcttgtattgagggtaaacaatgaaagatgggaaggagttcctttcattctcaaggctggcaaagcactgaacaataggaaagcagagatacgtgtgcagttcaaggatgctcctggtgacatttttaaatgcaagaagcaaggaaggaatgaattcgttatacggttgcagccatcggaagccatgtatatgaaattaactgtcaagaaacccggactagaaatggcaaccgaacaaagcgagctggatctgtcatatgggctacgctaccaagacgtgaagatcccagaagcgtatgaacgcctcatcctggatacgataagaggggatcagcagcactttgttcgccgagacgaactgaaggctgcgtgggagatcttcactccgctgctgcacgacatcgacgacggcaaggtgaaggccctgccgtacaagccgggaacccggggacccccagaggccgacgagctgagcaagaggatgggctacgtgcagacccatggctacgtttggatacctccaaccctttcaaaattctag

SEQ ID NO: 2658 - protein, 517 aa, Oryza sativa
MSGGSGDSSPSSGRASFSSLSGLKDLELSSESGCLSIVVLGASGDLAKKKTFPALFHLFQQGFLQSGEVHIFGYARSNISDDGLRERIRGYLKGASDEHISQFLQLIKYVSGSYNSGEGFASLNNAISENETSKNNKPGSSRRLFYLALPPSVYPSVCKMIRSYCMNPSSHSGWTRVIVEKPFGKDLESAEELSAQLGELFNEQQLYRIDHYLGKELVQNLLVLRFANRLFLPLWNRDNIANVQIVFREDFGTEGRGGYFDQYGIIRDIIQNHLLQVFCLVAMEKPVSLKPEHIRDEKVKVLQSVTPIKHDEVVLGQYDGYKDDSTVPDDSNTPTFASLVLRVNNERWEGVPFILKAGKALNNRKAEIRVQFKDAPGDIFKCKKQGRNEFVIRLQPSEAMYMKLTVKKPGLEMATEQSELDLSYGLRYQDVKIPEAYERLILDTIRGDQQHFVRRDELKAAWEIFTPLLHDIDDGKVKALPYKPGTRGPPEADELSKRMGYVQTHGYVWIPPTLSKF

SEQ ID NO: 2659 - DNA, 1500 bp, Photobacterium profundum
  CDS (1)..(1500)
atggttcagccagaaaataacgcgattgttatttttggtgcgtcaggcgatttgactcaccgaaaattgattccagcattttatcatctctatgctaatgggttattaccagaagattttgcaattttaggcgtaagtcgtactgaatatagtgaccaagattttcgtgaaaaactaaaaatttcactcacagaaacagaaaaggtaaacgaagaaacgctaattaaattttgtgagcatttatattaccaagcattgaatacgtcagaagtggctgaatatgcgctgttaaaacagcgtttgggtgatttgaatgataagcatcatacccaaggtaatactatttattacttggcaaccccaccaagcttgtatggtgttattcctgaatgtttgggtgcgcatggcttaaacgacgaaacgcacggttggaaaaaccttattgttgaaaagccatttggttacgatttagcatcagccaacgagcttgatgaacgtattcatgcgcatttcaaagagcaacaaatttaccgcattgaccactacttaggcaaagaaacagtacagaatctacttgtatttcgttttgctaatgggatgtttgaaccattatggaaccgtaatttcatcgaatacgttgagatcacggcagctgaatctttaggtgtcgaagagcgcggtggctattacgatggagccggtgctgtacgtgatatgttccaaaatcacttacttcaagtacttgctatggttggaatggaatcgccagcagcaatcaatgcagattctattcgtgatgaagttgtgaaggttatgcaaagctttcagcctttgtcagacaaagatttagaaaaaaatcttgtgctagggcaatacaccgattccacagtaagaggcgatcatctaccaggataccgagaagaacatggcgtagcagatgattctcgcacagaaacgtatgttggtatgaagatgtttatccagaactggcgttggaatggcgtgccattttacgttcgtactggtaagcgtttacccactcgcgtgacggaagtggtcattcactttaagaaaacaccacacccagtgttcggtaccaatgcaccagagaataagctgatcattcgtattcaacccgatgaaggtattctaatgagtttcggtttgaaaaagccaggggctggctttgaagctgaagaagtttctatggatttccattacggcgatttagaagaaacgaatatgcttaccgcttacgagcgattattgcttgactgtatgaagggtgatgccacgttgtttgcccgaactgatgcggtaaaagcgtgctggaaattcgtacaacccattcttgaatataaagaaaatcctgaccatttatttggttatgcggcaggtacttggggaccaaaagaagcggatgagttattacaaggcgacgaacgtaattggcgctttccgtgtaaaaacctgactaatactgactattgtgagttatag

SEQ ID NO: 2660 - protein, 499 aa, Photobacterium profundum
MVQPENNAIVIFGASGDLTHRKLIPAFYHLYANGLLPEDFAILGVSRTEYSDQDFREKLKISLTETEKVNEETLIKFCEHLYYQALNTSEVAEYALLKQRLGDLNDKHHTQGNTIYYLATPPSLYGVIPECLGAHGLNDETHGWKNLIVEKPFGYDLASANELDERIHAHFKEQQIYRIDHYLGKETVQNLLVFRFANGMFEPLWNRNFIEYVEITAAESLGVEERGGYYDGAGAVRDMFQNHLLQVLAMVGMESPAAINADSIRDEVVKVMQSFQPLSDKDLEKNLVLGQYTDSTVRGDHLPGYREEHGVADDSRTETYVGMKMFIQNWRWNGVPFYVRTGKRLPTRVTEVVIHFKKTPHPVFGTNAPENKLIIRIQPDEGILMSFGLKKPGAGFEAEEVSMDFHYGDLEETNMLTAYERLLLDCMKGDATLFARTDAVKACWKFVQPILEYKENPDHLFGYAAGTWGPKEADELLQGDERNWRFPCKNLTNTDYCEL

SEQ ID NO: 2661 - DNA, 1551 bp, Parachlamydia sp
  CDS (1)..(1551)
atgcataactcgcattattttgttaatcctttgaacgaaccgaatcggcccataaaaattccagaatcttgtattttagtcatttttggagcgaccggtgatttaacagctcgtaaactaattccagctttgtataacttagcgagagacggccaacttcctggtcattttgcctgtgtaggctttgctagaagggcaaaaacacatgatgagtttcgggaagaaatgttagaagcagttaacaaattttcaagatcgaaaccagttgaacaaggactctggaaacgctttcgtgaacaattgttttatcatcaatcagaatttgatgatgatgaagggtataaaagcttaaaccaatttttagaaaaactcgacacacaaatgggaactaaaggtaaccgagttttttatttatctatccagcctagctattttcctctcgttgttgaaaagcttagccaacaccaattgacatatccagttaaacaagtcaaagacaaatggagtcgtgtcattatagaaaagccttttggaagagatattgaatcagcaaaacaacttcaacaagatcttgtgcaacacctagatgaaagtcaaatttatcgaattgatcattatttgggaaaagaaactgtacaaaatttattagtttttagatttggtaatcccatctttgaatcagtttggaataaccatcatattgataatattcaaattactgttggtgaagaaattggaattggttctcgcggtcgattttgggaagaagcaggaatgttgcgagatattgtccaaaatcatgtgatgcaactcctttctcttgttgcgatggaacccccgacgagtctccaagccaactcagtccgcggcgaaaaagttaaagtcattgaagctattagacctatccccttcgattcaatggaacaatgcgttatccggggccaatatggatctggattcattaacggggaacccgttaaaggatatcgagacgaggaaaatgtagactctaaatcttttgttgaaacctacgttgccttgcaactttctatcgataactggcgttgggctggagttcccttctatttacgtgctggtaaacgcctacccaaacgagctactgaaattgcgattactttcaaaaaagcccccggatatctatttgaaggaacttcagctttgattgactcaaacgttttagtgattcgtattcaaccggatgaaggaatttcattgagaattaattgcaaagtccctgcattaaacacagtcattcaaccggtgaaaatggattttcgttacggatcttactttggtgccattcctcccgaagcttatgaaagattaatttgtgattgcatggccggggataatactttatttgctagagatgacgaagtcattatgtcttggaagttgctcacacctattttagaacattggcaagaaacatccccgacagattttccaaattatgccgcgggaacttgggggccagaccgagccgaagaaatgctaaaacgccaaggacgtcattggagacttatttaa

SEQ ID NO: 2662 - protein, 516 aa, Parachlamydia sp
MHNSHYFVNPLNEPNRPIKIPESCILVIFGATGDLTARKLIPALYNLARDGQLPGHFACVGFARRAKTHDEFREEMLEAVNKFSRSKPVEQGLWKRFREQLFYHQSEFDDDEGYKSLNQFLEKLDTQMGTKGNRVFYLSIQPSYFPLVVEKLSQHQLTYPVKQVKDKWSRVIIEKPFGRDIESAKQLQQDLVQHLDESQIYRIDHYLGKETVQNLLVFRFGNPIFESVWNNHHIDNIQITVGEEIGIGSRGRFWEEAGMLRDIVQNHVMQLLSLVAMEPPTSLQANSVRGEKVKVIEAIRPIPFDSMEQCVIRGQYGSGFINGEPVKGYRDEENVDSKSFVETYVALQLSIDNWRWAGVPFYLRAGKRLPKRATEIAITFKKAPGYLFEGTSALIDSNVLVIRIQPDEGISLRINCKVPALNTVIQPVKMDFRYGSYFGAIPPEAYERLICDCMAGDNTLFARDDEVIMSWKLLTPILEHWQETSPTDFPNYAAGTWGPDRAEEMLKRQGRHWRLI

SEQ ID NO: 2663 - DNA, 1515 bp, Rhodopseudomonas palustris
  CDS (1)..(1515)
atgaccacgcaagccaacagcaatcaggtccccgaaggctgcgcgttcgtcatcttcggcgccaccggcgacctcacccatcggctggtgattccggcgctctacaacctcgccgaagccaacctgctgcctgaaaaattctgcgtcgtcggcgtcacccgcaaggagatgtccagcgacgatctgcgcgacagcctgatgcagggcctgcgcaaatacgcgacccgcccggtcgacgacaaggtcgctgatcagcttctgtactgcgtcaccgcggtcagcgccgatcccagcgagccggcctcgttcgagcggttgcgcgagcggctggagaagctcgaggccaatcgcaacaccggcggcaaccggctgttctatctcgccacgccgcctgatgcgttcgcgccgatcgccaccgagctcggccgcgccgggctgcttaaggagaccagcggcgcctggcgccggctggtggtggagaagccgttcggcaccgacctcgcctcggccaaggcgctgaacgatcatctgctcagcatcatctccgagcacgagctgtaccggatcgatcactacctcggcaaagagacggtgcagaacatcctggtgctgcggttctccaacggcatgttcgagccgatctggaacagagagcacatcgaccacatccagatcaccgtcgaggaaaagctcggcgtcggccatcgcggcagcttctacgacaagaccggcgcgctgcgcgacatggtgccgaaccatctgtttcaactgctgtcgctggtggcgatggagccgccggcgcatttcaacgcccacgcggtgcgttcggccaaggccgacgtgctcgcggcgatccagatccaaaccgaagaggaagcgctgcgcaattcggtgcgcggccaatacacttcgggcaagatcggcgacaccgacatcccggactatcgcagcgccaaggacgtcgcggccgacagcaccaccgagaccttcgcggcgctgacactgtcgatcgacaattggcgctgggccggcgtgccgttctatctgcgcaccggcaaggcgctgtcgggcaagcgcaccgaggtggcgatcaaattcaaggaggcgccattctcgatgtttcgctgcaccccggtgcaggaactgtcgcagaactttctggtcattgggatcgaaccggtcgaaggcatctcgctgcagttcaacaccaaggtgccgggaccgatgatcgccatcgacggcgtcgagatgaccttccgctacaaggactacttcaaggtggcgccgagcaacggctacgagacgctgctgcacgactgcatgatcggcgacaacatcctgttccaacgcgccgacggtgtcgaagccggctggcgcgcggtacaacccttcctcgacgcctggaagaaggccggcgcgcacggccttcagatctatcgcgccggcagcgatggcccggaagacgccgacgaactgctggggcgcgacggtcgcaattggcggaagccgacctga

SEQ ID NO: 2664 - protein, 504 aa, Rhodopseudomonas palustris
MTTQANSNQVPEGCAFVIFGATGDLTHRLVIPALYNLAEANLLPEKFCVVGVTRKEMSSDDLRDSLMQGLRKYATRPVDDKVADQLLYCVTAVSADPSEPASFERLRERLEKLEANRNTGGNRLFYLATPPDAFAPIATELGRAGLLKETSGAWRRLVVEKPFGTDLASAKALNDHLLSIISEHELYRIDHYLGKETVQNILVLRFSNGMFEPIWNREHIDHIQITVEEKLGVGHRGSFYDKTGALRDMVPNHLFQLLSLVAMEPPAHFNAHAVRSAKADVLAAIQIQTEEEALRNSVRGQYTSGKIGDTDIPDYRSAKDVAADSTTETFAALTLSIDNWRWAGVPFYLRTGKALSGKRTEVAIKFKEAPFSMFRCTPVQELSQNFLVIGIEPVEGISLQFNTKVPGPMIAIDGVEMTFRYKDYFKVAPSNGYETLLHDCMIGDNILFQRADGVEAGWRAVQPFLDAWKKAGAHGLQIYRAGSDGPEDADELLGRDGRNWRKPT

SEQ ID NO: 2665 - DNA, 1650 bp, Corynebacterium diphtheriae
  CDS (1)..(1650)
atgcccaacgtgagtaaaccagtggctaacggaaacaccgtagaaagtaacaatgctgaacttgctttcggcggtgttgatttttcctattctgatacacatgagaattcgtgtagtagaacgtcaagcaaatgggtcaatcccctaagggatgctgaggacaagcgcctcccccgcatcgcgggcccgtgcggaatggttatttttggtgtaactggtgatctcgctcggaaaaagctcctgccagcgatctatgatcttgcacacaggggcctattgcctgcaggtttcagtcttgtcggctacggtcgacgaggctggtctaaggccgactttgaaaattacgtcaagcaagcagttgttgccggtgcccgtaccgatttccgcgaaaatgtttgggcacgacttgccgaaggtatgcacttcgttcaaggcaatttcgatgatgatgcagcatttgatagtttggcatcgcttttggcggatcttgatcagacccgtggaactgccggtaactgggccttttatctctctgttccaccagattatttttcggatgtttgccatcaacttcagcgctcaggcatggctacagccgagggcaattcatggcgtcgcgtcattgtggaaaagccttttgggcatgatcaagaatcagcacgtcagctaaacaacttgatcaattcagtattccctgaaaagtcagtatttcgtatcgaccactacttgggtaaagagacagtgcaaaatattatggcactgcgctttgcaaaccagctatttgatccgctctggaattctcactatgttgaccatgtccaaatcaccatggctgaggatatcggtctaggcggtcgcgctggttactatgatggaatcggcgccgctagagacgttatccaaaaccaccttattcagctgttggcgctggtagctatggaggaacccgtagcttttaccccacaagagcttcaggctgaaaaaatcaaggttcttcgtgccactcgcccagtagaaccttttgctaaaacaacagcccgagggcaatattcgcgcggttggcagggatctgagctcgtccaaggtctacgagaagaagacggatttgatcctaattccggaactgaaacttatgctgcctgcacactcgagataaattcgcgtcgttgggccggtgtgcccttttatcttcggactggaaagcgtttaggacgccgggtgactgagatcgcccttgtattcaaggatgcgcctcatcagccatttagcgaaggtagccgtcattcccaaggccgcaacgtcgtagtgatccgagtccagcctgatgagggtatgctgatgcgttttggttccaaggttcctggtaacacgatggaagtacgcgacgtcaacatggacttctcgtactcagaggcatttaccgaagaatcaccggaagcctacgaacgactcattctcgatgcacttctcgacgaagcaagtctcttcccaacaaatgaagaagttgagcttagctggcagatcctagatccgatattgaacttctggtctgatcgtgggcaaccggaagaataccccgctggcacctggggcccagctggtgcagacaagatgctggagcgcgaaggtcgcgcttggcgtcgaccttaa

SEQ ID NO: 2666 - protein, 549 aa, Corynebacterium diphtheriae
MPNVSKPVANGNTVESNNAELAFGGVDFSYSDTHENSCSRTSSKWVNPLRDAEDKRLPRIAGPCGMVIFGVTGDLARKKLLPAIYDLAHRGLLPAGFSLVGYGRRGWSKADFENYVKQAVVAGARTDFRENVWARLAEGMHFVQGNFDDDAAFDSLASLLADLDQTRGTAGNWAFYLSVPPDYFSDVCHQLQRSGMATAEGNSWRRVIVEKPFGHDQESARQLNNLINSVFPEKSVFRIDHYLGKETVQNIMALRFANQLFDPLWNSHYVDHVQITMAEDIGLGGRAGYYDGIGAARDVIQNHLIQLLALVAMEEPVAFTPQELQAEKIKVLRATRPVEPFAKTTARGQYSRGWQGSELVQGLREEDGFDPNSGTETYAACTLEINSRRWAGVPFYLRTGKRLGRRVTEIALVFKDAPHQPFSEGSRHSQGRNVVVIRVQPDEGMLMRFGSKVPGNTMEVRDVNMDFSYSEAFTEESPEAYERLILDALLDEASLFPTNEEVELSWQILDPILNFWSDRGQPEEYPAGTWGPAGADKMLEREGRAWRRP

SEQ ID NO: 2667 - DNA, 1446 bp, uncultured bacterium 581
  CDS (1)..(1446)
atgaccggagtcgacctaattatttttggcgcttccggagacctttcagcaagaaagctctttcccgcactgtttcaactcgaccgcgccgaattactgcccagcgacctgcgcatcacagcaattgctagagatcaggtcgacgtaaatacttttttggaaggcctaagacagcgaatgcatgcctacatgggctctgagtcgccttccgatgccgagtggcagcactactcacgacattttcaatatgtgggcgccgacttcgccaacgctgacagctattccagtatcagggcaactctagatgatacccgtatcagcttattttacttggctacaccacccagcatcttcgccctaatttgcaacaatctggccactaataattgcctcaccggcgactgccgaatcgtactcgaaaaacccattggcgaatgtctagcctcgtcaaaggaagtcaatgaaacgctggctcgctactttgacgaaggatctatttatcgcatagatcactacctgggaaaggagaccgttcagaacttactcgcgctgcgctttgcaaaccgatttattaatagtcagtgggatgccaactgtatcgaccatgttcaaatcaccgtcggcgaaatcgtcggtattgagggtcgctggtcttactatgaccgcgttggccagctccgcgacatggttcaaaaccaccttatgcagttactctgtctcgtcgctatggagccccccaatagcctagaagccgatagcatccgcgacgagaaagtcaaaatcgtcaaggccttgagacgcatcgactctgatcaggtctctgagcacgtgattaaagggcaatacagccagggttggtcttcaggtgcggccgtgcctgggtaccttgaggagcccggttgtgagcgccctgacagcgataccgagacgtttatcgcgatcaaagctcatgtagacaactggcgctgggctggcgttccattttacctgcgaacaggaaaacgcgttcctgaaaaattaactgaaatcatcattcagtacaaagaccttccccacaacatttttagcggcggcaccagcgcgaacaagttaatcattcggttacagcccagggaaggcatagagctaacaatggcatcgaaacgccagacgctgcgagaaaaactgtccttacagaaccataccttggatttagattttcgggaaaccaccggcatgaatcgaattcccgacgcctacgaacgattatttcttgatgcaattaatggcgatcagtcgctgtttgtaggtcgagaggagatcgaagaaagctggcgctggtgtgatgaactgattgacgcctgcaaccaaaagaacatagagaccaagccctatcacgctggatcttggggcccacccaaagccgagcttttaattgaaaaggatgggcgtagctggcatgtctga

SEQ ID NO: 2668 - protein, 481 aa, uncultured bacterium 581
MTGVDLIIFGASGDLSARKLFPALFQLDRAELLPSDLRITAIARDQVDVNTFLEGLRQRMHAYMGSESPSDAEWQHYSRHFQYVGADFANADSYSSIRATLDDTRISLFYLATPPSIFALICNNLATNNCLTGDCRIVLEKPIGECLASSKEVNETLARYFDEGSIYRIDHYLGKETVQNLLALRFANRFINSQWDANCIDHVQITVGEIVGIEGRWSYYDRVGQLRDMVQNHLMQLLCLVAMEPPNSLEADSIRDEKVKIVKALRRIDSDQVSEHVIKGQYSQGWSSGAAVPGYLEEPGCERPDSDTETFIAIKAHVDNWRWAGVPFYLRTGKRVPEKLTEIIIQYKDLPHNIFSGGTSANKLIIRLQPREGIELTMASKRQTLREKLSLQNHTLDLDFRETTGMNRIPDAYERLFLDAINGDQSLFVGREEIEESWRWCDELIDACNQKNIETKPYHAGSWGPPKAELLIEKDGRSWHV

SEQ ID NO: 2669 - DNA, 1602 bp, Nonomuraea sp
  CDS (1)..(1602)
atgacagacccggcagcacccgcggaggaggccgtcaccgtggcggcggccgtcgcgggcaccgccaccaccgaggctgtggcagccgccaacccgctgcgcgacccgcgtgacaagcggttgccccgggtggcgggaccgtgcgtgatggtgttgttcggcgtgacgggtgacctggccaagcgcaagctgctaccggcgatttacgacctgggcaaccgggggctgctgccgcccggcttctcgctggtcggcttcgcccggcgcgattggaaagaccaggatttcgcccagttgacgcacgacgccgtcaaggcgcatgcccggacacccttccgtgaggaggtctggaagcagatccgcgagggcatccatttcgttcccggcgagttctcggacgacggggcgttcgacgcgctggccatggcgttggcagagatcgacgagacccgcggcacgggcggaaactacgctttctacctgtcggtgccgccgaagttcttccccgtggtggtggagcagctcaagcgcaccgggctgtccgacgcgcccgacggctcgtggcggcgggtggtgatcgagaagccgttcgggcacgacctgcagtcggcccacgagctgaacgagatcaccacctcggccttcccggagagctcgatcttccggatcgaccactacctgggcaaggagaccgtccagaacatcatggcgctgaggttcgccaacaacctctacgagccgatctggaaccgcagcttcgtcgaccacgtacagatcacgatggccgaggacatcggcatcggcggccgggccggctactacgacggcatcggcgccgcccgcgacgtgatccagaaccacctgctccagctcctcgcgctcgtcgcgatggaggacccgacctccttcgaggccaactcgctgcggcgggagaaggagaaggtgctcaaggccgtgcggctgcccgcgaacctgggcctgaacaccgcgcgcggccagtactccgcgggctggcagggcggcgagaaggtcgtcggctacctccaggaggagggcatctcgcaggagtccaccaccgagacctacgccgccatcaagctggagatcgccaaccggcgctgggccggcgtgccgttctacctgcgcaccggcaagcgcctgggccgccgcgtcaccgaggtggccgtggtgttccagcgggcgccgcacctgccgttcagcaaggacgacaccgagatcctcggccagaacgcgctggtcgtccgggtccagccggacgagggcatcaccgtgcggttcggctcgaaggtgccggggacggcgatggaggtgcgtgacgtctccatggacttcgcctacggcgagtcgttcctggagtcgtcgccggaggcgtacgagcggctgctgctcgacgtgatgatcggcgatccgccgctcttcccgcaccagcgggaggtggagctgtcgtggaacatcctcgacccgatcgaggagttctgggccacgcaggggcagccggagccgtacgagtccggttcgtgggggcccgagtcggccgacgcgatgatggcccgcgacggccgcgtgtggaggaggctctag

SEQ ID NO: 2670 - protein, 533 aa, Nonomuraea sp
MTDPAAPAEEAVTVAAAVAGTATTEAVAAANPLRDPRDKRLPRVAGPCVMVLFGVTGDLAKRKLLPAIYDLGNRGLLPPGFSLVGFARRDWKDQDFAQLTHDAVKAHARTPFREEVWKQIREGIHFVPGEFSDDGAFDALAMALAEIDETRGTGGNYAFYLSVPPKFFPVVVEQLKRTGLSDAPDGSWRRVVIEKPFGHDLQSAHELNEITTSAFPESSIFRIDHYLGKETVQNIMALRFANNLYEPIWNRSFVDHVQITMAEDIGIGGRAGYYDGIGAARDVIQNHLLQLLALVAMEDPTSFEANSLRREKEKVLKAVRLPANLGLNTARGQYSAGWQGGEKVVGYLQEEGISQESTTETYAAIKLEIANRRWAGVPFYLRTGKRLGRRVTEVAVVFQRAPHLPFSKDDTEILGQNALVVRVQPDEGITVRFGSKVPGTAMEVRDVSMDFAYGESFLESSPEAYERLLLDVMIGDPPLFPHQREVELSWNILDPIEEFWATQGQPEPYESGSWGPESADAMMARDGRVWRRL

SEQ ID NO: 2671 - DNA, 1476 bp, Listeria monocytogenes
  CDS (1)..(1476)
atgacagatgagttagaacaaaaagcactgattactatttttggcggtacgggagatttggcaaatcgcaaactttacccttcgctatatcatttgtacagtaagggatctcttggcgacaattttgctgttattggaacggctcgtcgtgaatggagtaacgatttcttccgtgataaagtaaaagagtctatcaaagacattgacggttccgaaaaagacgcggatgcatttgcttctcacttctactatcaatctcatgatgtgacaaataaagaatcttatgtaactttaaaagatttgtctgatgaattagatgcaaaatacgaattaggtggcaatcgcctcttctatcttgcaatggcgccgaatttctttggaactatcgcaagtcgcattaaatctgaaggatttgtagatacagatggctttcatcgtttaattatcgaaaaaccatttggtcacgatttagctagtgcagaagaattaaataattcgcttcgtcaagcatttaaagaagatgaaatttatcgtattgaccattatttaggaaaagaaatgatccaaaatatctcggttattcgttttgcaaattctatcattgaatcgctttggaataatcgttacatcgataacatccaagttactttaactgaggtgcttggggttgaagatcgtgggcgctattacgatgaaagtggcgcgcttcgagacatggttcaaaaccatattctccaaatcgtttctctacttgcgatggagccaccaattaacttaacgacacgcgagattcgtcatgaaaaagttcgcgcgcttcgttccttacgcgtttttgaaggtaaagaagttcaccaaaactttattcgtggtcagtacggtcctggtgaagtaggtggcaaagaactcaaaggctatcgtcaagaagataatgtggatcctcattccaatacggaaacgtttgttgcagccaaactagaaatcgataacttccgctgggctggcgttccattttatattcgcacgggtaaacgtcttgcgaagaaaacgacccaaattgcgattcagttcaaagatgtaccgctgaatttatttggtcaacaacaatcgcttggtggtaatgtgcttgttattcatatccaaccggacgaaggtattacacttcatttgaacgtcaaagaacctggtcaaggtatggttacaatgccagtcaacttaaattatattcattcctctccagacggcatgaacacacctgaggcttacgaaaaattgattctagactgtcttcgcggtgatgcgacttacttctctcactgggatgaagtatcactatcatggaactttattgaccatatagcagatgtttggacaaatacgaaagatcatttcccgaactacaaatccggttcgatggggcctaaagaagcagacgacctcattcaacgcgacggattccagtggttcccaatcgattaa

SEQ ID NO: 2672 - protein, 491 aa, Listeria monocytogenes
MTDELEQKALITIFGGTGDLANRKLYPSLYHLYSKGSLGDNFAVIGTARREWSNDFFRDKVKESIKDIDGSEKDADAFASHFYYQSHDVTNKESYVTLKDLSDELDAKYELGGNRLFYLAMAPNFFGTIASRIKSEGFVDTDGFHRLIIEKPFGHDLASAEELNNSLRQAFKEDEIYRIDHYLGKEMIQNISVIRFANSIIESLWNNRYIDNIQVTLTEVLGVEDRGRYYDESGALRDMVQNHILQIVSLLAMEPPINLTTREIRHEKVRALRSLRVFEGKEVHQNFIRGQYGPGEVGGKELKGYRQEDNVDPHSNTETFVAAKLEIDNFRWAGVPFYIRTGKRLAKKTTQIAIQFKDVPLNLFGQQQSLGGNVLVIHIQPDEGITLHLNVKEPGQGMVTMPVNLNYIHSSPDGMNTPEAYEKLILDCLRGDATYFSHWDEVSLSWNFIDHIADVWTNTKDHFPNYKSGSMGPKEADDLIQRDGFQWFPID

SEQ ID NO: 2673 - DNA, 1485 bp, Bacillus cereus
  CDS (1)..(1485)
atggaatcaatgacctttgttttatttggagcgacaggggacttagcgaaacgaaaaatttaccccgcactatataacttatatagagatcaaaagcttccaaagcaaatatccgttatcgggcttggaagacgccaagtatctcatgtagattttcaaggaagaataaaagaatcaatagagacattttcccgtcatagagaagaaggtactctagaacttgaaggttttttagataattttcgctattgtccattagatgtgagtaagccggaagactatgagagattattgcaagtcgttcgtgaaagggaagaagaactacatataaaagggaatagaatgttctatctttccgttgctcctgaatttttcgagaccattgctttaaatattaaggaaagcggacttgataaaacggatggatggaaacgcctaatgattgagaaaccgtttgggcacgatcttcaatctgctcgtgagttgaatgataagcttagtcgcacgtttgaagaagatgagatataccgtattgatcattatttaggtaagccgatgattcaaaaccttgaagcactagagtttgcaaatcctgttctccaatcgatttggaataaagaacatatagcgaatgtacaaattacagcgagtgaaacagttggggttgaagaaagagcaggatattatgatcaggcaggagccattcgagatatggttcaaaatcatatgttacaaatattaatgatgactgctatgaatctgccggaaaaggttaatgcatgtgaaattcgagaggaaaagcgaaaggtaatggagacgcttcgtaaagtgaaaaaagaagacgttcaaaaccatatcattcgcggacaatacgcttcaggagagataaaaggcgagcaagttgtagcatataaagaggagccaggagtaaatccttcttctaatatagacacatttgttgctgctcgtttatggatcgataatccgttttggactgacgttcccttctatatacgaacaggcaaacgaatgaaagaaaaatctactcgtattgtaatcgaatttaaaaatacgctaaaacagcaatatcaagataataatccaaatgcagcacctaacttattaataattgaaattagcccaggtgagaatgtttcattacagttaaatagtaaaaatccattgaaaaatggagaaattgaaccgatgcgtattaactttacttgcgagcaagcagatgtgggagtgcctgaagcgtatgaaagacttattcatgatgctgtaagtggagacgctacattctttgcacattggagagaagttgaattgtcatgggaatgggtacaaccaattcttgaagcattcgaggaaaacttattaccacttcatgaatatgagtctggttcatatggtccagatgcgtctcatgaattattgcaagaaagtggatttaaatggtggttagatcaagaaacggaaaaataa

SEQ ID NO: 2674 - protein, 494 aa, Bacillus cereus
MESMTFVLFGATGDLAKRKIYPALYNLYRDQKLPKQISVIGLGRRQVSHVDFQGRIKESIETFSRHREEGTLELEGFLDNFRYCPLDVSKPEDYERLLQVVREREEELHIKGNRMFYLSVAPEFFETIALNIKESGLDKTDGWKRLMIEKPFGHDLQSARELNDKLSRTFEEDEIYRIDHYLGKPMIQNLEALEFANPVLQSIWNKEHIANVQITASETVGVEERAGYYDQAGAIRDMVQNHMLQILMMTAMNLPEKVNACEIREEKRKVMETLRKVKKEDVQNHIIRGQYASGEIKGEQVVAYKEEPGVNPSSNIDTFVAARLWIDNPFWTDVPFYIRTGKRMKEKSTRIVIEFKNTLKQQYQDNNPNAAPNLLIIEISPGENVSLQLNSKNPLKNGEIEPMRINFTCEQADVGVPEAYERLIHDAVSGDATFFAHWREVELSWEWVQPILEAFEENLLPLHEYESGSYGPDASHELLQESGFKWWLDQETEK

SEQ ID NO: 2675 - DNA, 1410 bp, Mycobacterium paratuberculosis
  CDS (1)..(1410)
atggccgacgatgacagccatccatccgacctgctggtgatcttcggaatcaccggggacttggcgcgcaagatgacgttccgcgcgctctaccggctggagcgccgcgaggagctcgagcacccgatcatcggcgtggccagcgacgacatcaccctcgaccagctgctggaccgcgcccgggaggcgatcaaggccaccggtgagacgttcgacgacgcggtgttcgaccgcttggcgggccggctgtcctacctgtcgggcgacgtcaccgacgccgggctctacagcgagctcgccaagaagatcggtggcgattcgcgtccgctgtactacctggagatgccgccgtcgttgttcgcgccgatcgtggagaacctggccaaggccgacctactggaacgcgccagggtggcggtggaaaagccgttcggccacgacctggaatctgcgcgcgacctcaacgcccggctgcgcgcggtgctcgacgaagaccaaatcctgcgcgtagaccactttttgggcaaacagccggtcgaagaactgcaatacctgcggttcgccaacaacgccctggccaagctgtgggaccgcgacagcatctccgaaatccacatcaccatggccgaggacttcggcatcgaggaccgcggcaagttctatgacgccgtgggggcggtgcgcgacgtcgtgcaaaaccatctgctgcaggtgctcgcgctggtcgccatggaacccccggtgggggcgggcgccgacgacctcaacgacaagaaggccgaggtgttccgggccatgccgtcgctggacccggagcactgcgtgcgtggccagtatcgcggctacaccgaagtccccggtgtggcaaaggattccaccaccgagacctacgtcgcgctgagggccgagatcgacaactggcgctgggccggggtgccgatcttcctgcgcgccggcaaggcgttgccgcacaaggtcaccgaggtccggatgttcctgcatcacgtgcccggcttctccttcctgcccaaccgccgcccgcccgagcccaaccagatcgtgctgcgcatcgaccccgatcccgggatgcgcctgcagctgtccgctcaggtcggcgactcgtggcacgacgtgcacctggactcctcgttcgcggtggacctcggcgaaccggtgcggccctacgaacggctgctctacgccgcgttcaacggcgaccgccagctgtttgcccgcgaggacgccatcgaagagacctggcggatcgtgcagccggtgctggacaagccgagccgcatccaccaatacgagcaaggctcctggggacccgaggccgcgcaggcgctggtgcacggtcgccacgcctggcagcaaccgtggctgccgcagagcacgtccacgaaacgataa

SEQ ID NO: 2676 - protein, 469 aa, Mycobacterium paratuberculosis
MADDDSHPSDLLVIFGITGDLARKMTFRALYRLERREELEHPIIGVASDDITLDQLLDRAREAIKATGETFDDAVFDRLAGRLSYLSGDVTDAGLYSELAKKIGGDSRPLYYLEMPPSLFAPIVENLAKADLLERARVAVEKPFGHDLESARDLNARLRAVLDEDQILRVDHFLGKQPVEELQYLRFANNALAKLWDRDSISEIHITMAEDFGIEDRGKFYDAVGAVRDVVQNHLLQVLALVAMEPPVGAGADDLNDKKAEVFRAMPSLDPEHCVRGQYRGYTEVPGVAKDSTTETYVALRAEIDNWRWAGVPIFLRAGKALPHKVTEVRMFLHHVPGFSFLPNRRPPEPNQIVLRIDPDPGMRLQLSAQVGDSWHDVHLDSSFAVDLGEPVRPYERLLYAAFNGDRQLFAREDAIEETWRIVQPVLDKPSRIHQYEQGSWGPEAAQALVHGRHAWQQPWLPQSTSTKR

SEQ ID NO: 2677 - DNA, 2454 bp, Mycobacterium paratuberculosis
  CDS (1)..(2454)
atggctacccagaaaccgcagaccatctcctacccggctcccgaggcccggccgcgtcgtcaccacaccgacccgctcgaccctcatgtgatcgtcctgttcggcgccaccggggatttggcgaaacgcaagctgatccccggtttggcgtatctggaccagtccgagctggcacccgacatccagatcgtcgccacgtcgctggaggacctgagcaacgacgaattccgcgagctggccaagaacgcgatcgactcgttcggcacgcacaagctgacgcccgaccagtggcgcaacttcgccgacatcatcacctacatcccgcagagcgccggctccgacgcgctggccgccgcggtggccgaggccgaggccaagctggggccgaacgtgcggcggctgcattacctgtcggtgccgccgaaggcggcgcgcgcggtgatcaccatgctgcgcgacgccaaactggtcgagcggtcgcgggtggtgatggagaaaccgttcggcaccgatctggccagcgcggtggcgctcaacgacttcgtgcaccaaaccttcgaggaatcccagattttccgcatcgaccacttcctgggtaaggaggccgcccagaacattctggcgttccgcttcgccaacgggttgttcgagccgatctggaaccgcaacttcatcgaccacatccaaatcgacatccccgaggccctcggcctggatcagcgggcgagtttctacgaggagaccggcgcctacaaggacatggtggtcacccatctgtttcaggtgatggccttcgtggtgatggagccgccgacggcgctcgaaccgttcgccatcagcgaagaaaagaacaaggtgttccggtcgatgcttccggtcaagccctcgaacgtggttcgcggtcagtacatcggctatcgcgaggaagacggagtggcaaaggattccgacaccgagacattcatcgccctcaaggtcggcatcgacaactggcggtgggccggggtgcccgtctaccttcgcaccggtaagaggatggccgagggcatccggcatcatctcgatcgcgttcaaggaggcaccgcggaccatgttcccgcccgggtcgggggtgggcacgcaggggcccgaccacctgacgttcgatcttgcggacaattcgcgggtgtcgctgtcgttctacggcaagcggcccggccccggcatgaaactggacaagctgtccatgcaattctccacccaggagatcgaaaccgcggtggacgtgctggaggtctacgaacggctcatcctggacgcgatgcgcggcgaccacaccctgttcaccaccgccgaaggcatcgaatcactgtgggagcgttccgaagagctgctcaacgacccgccaccggccaagctgtaccagccggggacgtggggccccaacgcaattcaccagttgatcgcgcccaacgcgtggcggctgccgttcgagcgcgagtggcgcgatccccagaccctaccccggagtgggcagctgagaagtgctgcggttcagcccaattcggcgctgagataactgatggcctggcggaattccctgaggatttcgttgtcgggcaactcgaagccgtagtcggtgtacacccgctcggtgggcaggcgggtgacgctccagccggtggcctccaggtggtcgccggccgggcggcgctcgccgagccagaccagttcggccacgtcgatgtccagtccgtgctggcgccaggtgctgcgcatcgcccgggcgcgttcgtcggtgaacacccgcatgtcggtgatgttctcggtggccagcctgctgcccggcgcgctgagcgcggtgatgttgtccagcagccggtcctgggcgtgcggcggcaggtagggcagcagcccctcggcgatccaggcggtacgggcgctgctgtcaaagccgttgtcgcgcaacgctgttggccagtcatcgcgcaaatcgacggcgacggtgcggcgctcggcggtcggttgcgcgcccagccgggccagggtgtcggtcttgaaggagatgacctcgggctggtcgacctcgaacaccacggtgcccgccggccaggacaaccggtaggcccgcgcgtcgagcccggcggccaggatgacggcctggcgaatgccggcagcggtcgcggagcggaagaaatcgtcgaaaaaccgcgtccgcaccgtgatttgctcgcgccgctgctgcagcgtcatcggcatgtcgtcggtgtcgagcgggatctggccgtccagcatccggacgaagaagggatgcccgaccgcgcgcaccaacggttcggcgaaccggtcgtcgagcagcgggtccggaccgcgagaggccagcgcccgggaggccgcgaccatggtcgcggtcgcccccacgctggaggccagatcccagctgtcgccctcggtacgtgccgaaccggtcgatga

SEQ ID NO: 2678 - protein, 817 aa, Mycobacterium paratuberculosis
MATQKPQTISYPAPEARPRRHHTDPLDPHVIVLFGATGDLAKRKLIPGLAYLDQSELAPDIQIVATSLEDLSNDEFRELAKNAIDSFGTHKLTPDQWRNFADIITYIPQSAGSDALAAAVAEAEAKLGPNVRRLHYLSVPPKAARAVITMLRDAKLVERSRVVMEKPFGTDLASAVALNDFVHQTFEESQIFRIDHFLGKEAAQNILAFRFANGLFEPIWNRNFIDHIQIDIPEALGLDQRASFYEETGAYKDMVVTHLFQVMAFVVMEPPTALEPFAISEEKNKVFRSMLPVKPSNVVRGQYIGYREEDGVAKDSDTETFIALKVGIDNWRWAGVPVYLRTGKRMAEGIRHHLDRVQGGTADHVPARVGGGHAGARPPDVRSCGQFAGVAVVLRQAARPRHETGQAVHAILHPGDRNRGGRAGGLRTAHPGRDARRPHPVHHRRRHRITVGAFRRAAQRPATGQAVPAGDVGPQRNSPVDRAQRVAAAVRARVARSPDPTPEWAAEKCCGSAQFGAEITDGLAEFPEDFVVGQLEAVVGVHPLGGQAGDAPAGGLQVVAGRAALAEPDQFGHVDVQSVLAPGAAHRPGAFVGEHPHVGDVLGGQPAARRAERGDVVQQPVLGVRRQVGQQPLGDPGGTGAAVKAVVAQRCWPVIAQIDGDGAALGGRLRAQPGQGVGLEGDDLGLVDLEHHGARRPGQPVGPRVEPGGQDDGLANAGSGRGAEEIVEKPRPHRDLLAPLLQRHRHVVGVERDLAVQHPDEEGMPDRAHQRFGEPVVEQRVRTARGQRPGGRDHGRGRPHAGGQIPAVALGTCRTGR

SEQ ID NO: 2679 - DNA, 1545 bp, Mycobacterium paratuberculosis
  CDS (1)..(1545)
atgagcccggctcgcaccgcgcagcaatggcataacccgttacgcgacaagcgcgacaagcggctcccgcgcatcgccgggccgtgcggaatggtgatcttcggcgtcaccggcgatctggcccgcaagaaggtcatgcccgccatctacgacctggccaaccgcgggctgctgccgcccagcttctcgctggtcggcttcgcccgaagggattggagcacccaggatttcggcaaggtggtatatgaggccgtcaaggagcactgccgcaccccgttccggcaggagaactgggatcggctggccgagggattccgtttcgtgccaggcgctttcgacgacgacgaggcgttcggccggctcgccgagacgctggacaaactcgacgccgagcggggcaccggcggtaatcacgccttctacctggccatcccgcccaagtccttccccgtcgtgtgcgaacaactgcacaagtccgggctggcccgcccgcagggcgaccgctggagccgagttgtcatcgagaagccgttcggccacgacctggagagcgcgcagagcctgaacaaggccgtcaacgccgtctttcccgaggagtcggtcttccgcatcgaccactacctgggcaaggagacggtccgcaacatcctggcgctgcggttcgccaaccagttgttcgacccgatctggaactcgcactacgtcgaccacgtgcagatcaccatggccgaggacatcggcctgggcgggcgggccggctactacgacggcatcggcgccgcgcgcgacgtcatccagaaccacctgatgcagctgctggcgctgaccgcgatggaagagccggtcagcttcagcccgttggcgctccaggccgagaagatcaaggtactctcggccacccacctcgcccacccgctcgacgagaccaccagccgcggccagtacaccgcgggctggcagggcggcgagaaggtggtcgggctgctcgacgaggagggcttcgccaaggactcgatcaccgagacgttcgccgccatcaccctcgaggtggacacccgccgctgggcgggggtgccgttctacctgcggaccggaaaacgcttgggccgcagggtgaccgagatagccctggtgttcaagcgcgcgccgcatctgccgttcgacgcgacgatgaccgatgagctgggcgccaacgccatggtgatccgggtgcagcccgacgagggtgtcacgctgcggttcggttccaaggtgccgggcaccgcgatggaggtccgcgacgtcaacatggacttctcctacgggtcggcgttcgccgaggaatcaccggaggcctacgagcagttgatcctcgacgtgctgctgggtgagccgtccctgttcccggtcaacgccgaagtcgaattggcttggcacatcctcgatcccgtgctcgacaactgggcgagcggcggcaggcccgagccctacgaggccggcacctggggcccggattcggcgttcgagatgctgcaccggacgggccgcgaatggcggcggccatga

SEQ ID NO: 2680 - protein, 514 aa, Mycobacterium paratuberculosis
MSPARTAQQWHNPLRDKRDKRLPRIAGPCGMVIFGVTGDLARKKVMPAIYDLANRGLLPPSFSLVGFARRDWSTQDFGKVVYEAVKEHCRTPFRQENWDRLAEGFRFVPGAFDDDEAFGRLAETLDKLDAERGTGGNHAFYLAIPPKSFPVVCEQLHKSGLARPQGDRWSRVVIEKPFGHDLESAQSLNKAVNAVFPEESVFRIDHYLGKETVRNILALRFANQLFDPIWNSHYVDHVQITMAEDIGLGGRAGYYDGIGAARDVIQNHLMQLLALTAMEEPVSFSPLALQAEKIKVLSATHLAHPLDETTSRGQYTAGWQGGEKVVGLLDEEGFAKDSITETFAAITLEVDTRRWAGVPFYLRTGKRLGRRVTEIALVFKRAPHLPFDATMTDELGANAMVIRVQPDEGVTLRFGSKVPGTAMEVRDVNMDFSYGSAFAEESPEAYEQLILDVLLGEPSLFPVNAEVELAWHILDPVLDNWASGGRPEPYEAGTWGPDSAFEMLHRTGREWRRP

SEQ ID NO: 2681 - DNA, 1449 bp, Lactobacillus johnsonii
  CDS (1)..(1449)
atgaaaaatattccagttgttatgattatttttggtggctccggagatttagctcatagaaagctttatccagccttatttaatttgtatcaaaaaggtttaattcatgatcattttgctgtaattggtacagcgagaagaccttggagccatgaatatttgcaagaacaagtagttgaagcagttaaagaaagctgtgacaactttgatgaaaaagaagcaaaagaattcgcttcacatttttattaccagtctcacgatgtaactgatattggccactacattgccttgaaggaattagcagctaaacttgatgaaaaatatcaagcagaaggaaatcgaattttctacatggctatggcaccaagattttttggtacaattgctactcacattaatgatcaaaaattgcttggtagcggctttaaccgtttagtaattgaaaagccatttggtcatgatttagcttcagcagaaaagttaaaccgagaaattggcgaaagttttgatgaagagtcggtatatcgaattgaccactatcttggaaaagaaatggttcaaaatattatgcctctaagaatgactaatccaattgttaagaatatctggaataatgactatatcgcaaatatgcaagtaactttagcagaaagtctaggagtaggaactcgtggtggttactacgaaacatctggtgctttacgtgatatggttcaaaaccatatttttcaaattattacacttttagctatgcctgagcctaaaggacttgattcagaccatattcaccaagctaaacaagaattattagatagtctagtaattccaactccagaaatggttaaaaagcatttctcacgaggacaatatttagctgatgataatgaagtagagtatttaaaggcagatcaagttgcactagactctaaagtagaaacatttgtagctggagaagttaaattcaaaaagggtccagtagctgatgtgccaatttactttagaactggtaagaaaatgaaggataaggtttctcgcattgatattgttcttcaccatatgaataatttatacggtagcgcacattcaaataatatctcaattattattgatccaattagtgaaatttatttcacaattaatggaaagaagattacagctgaaggtttaagaagagaaaaccttagttataagttttctaaggaagaaatggagcaagttccagatggctacgaacgattgcttcacgatgtgtttgtagcagatagaactaactttactcactggtcagaattgaagcaatattggaagttcgttgatgcagttgaagatgtttggcaagatgaaaataaagatgttaagcagcttgaacaatatccaagtggtaagttcggtacggaatcaagtaatcatatttttgaaaaagatagcgagcactggatttaccgttaa

SEQ ID NO: 2682 - protein, 482 aa, Lactobacillus johnsonii
MKNIPVVMIIFGGSGDLAHRKLYPALFNLYQKGLIHDHFAVIGTARRPWSHEYLQEQVVEAVKESCDNFDEKEAKEFASHFYYQSHDVTDIGHYIALKELAAKLDEKYQAEGNRIFYMAMAPRFFGTIATHINDQKLLGSGFNRLVIEKPFGHDLASAEKLNREIGESFDEESVYRIDHYLGKEMVQNIMPLRMTNPIVKNIWNNDYIANMQVTLAESLGVGTRGGYYETSGALRDMVQNHIFQIITLLAMPEPKGLDSDHIHQAKQELLDSLVIPTPEMVKKHFSRGQYLADDNEVEYLKADQVALDSKVETFVAGEVKFKKGPVADVPIYFRTGKKMKDKVSRIDIVLHHMNNLYGSAHSNNISIIIDPISEIYFTINGKKITAEGLRRENLSYKFSKEEMEQVPDGYERLLHDVFVADRTNFTHWSELKQYWKFVDAVEDVWQDENKDVKQLEQYPSGKFGTESSNHIFEKDSEHWIYR

SEQ ID NO: 2683 - DNA, 1539 bp, Ashbya gossypii
  CDS (1)..(1539)
atgatgtgtggagaagtgacgaggacagacgcttttgaaaaggatgtgataattacagtgtttggagcctcaggggatcttgccaagaagaagacgttcccagcactgtatggattgtatcgcgaggggtacctggacgacagcacgaagattattgggtatgctcggtcggagctatctgatgcggagctgcgggagcgcgtcaagccgtacttgagcaaaccagacgacgcagcgagtgaggccaagcaagccgagttcctggagaggatgagctacgtagctgggccttacgacaaggaggaggggtacgtgcagttgcgggagcagattgaggcttacgagcgcgaacggggcgttgagaaacctcacaggttgttctacttggcgcttcctcccagtgcgtttgtcagtgttgctgagaaaatcaagcagttcctctatgcggagggcggcgttacaaggttaattgtggaaaagccctttggccatgacctggagtcgtctcggaagttgcaaaagcagctggagcctctgttccgtgaggaggagatattccggattgaccactacttaggaaaggagatggtcaagaacctgctacctctgcggtttggtaatgcgttcttcaatgcctcctggaataaggaaaatatccagatgatccagatctcgttgaaggaaccatttgggacggaaggccgtggaggttactttgactccactggtattataagggacgtcatgcagaaccacttgctccaagtactaactttgctaaccatggagaggccagtatcttttgatccggagagcatacgtgacgagaaagtcaaggtgctgaaggccatcgttcctcttgaccacgaagacattttgattggacagtacggccgatctgaagatggtacaaagcctgcttacttagatgacgagactgtcagcaaggactctaagtgcgtgacatttgccgcgttgacctttaatatccagaatgagcggtgggatggagttcctattgtcatgcgtgcagggaaggcattgaacgaaggtaaggttgagatccgtattctatacaagcgcgtggcgcggggtatttttaacgatattccaaacaatgagctagttgtccgtgtccagccagatgaggccatatacttgaaattcaacgctaaaacaccggggttggattcgaattcccaaattacggagcttgatttgacttactcgaagaggtatagggactactggattccggaggcttacgaatctctgttgcgggatgctttgctgggcgatcattcgaattttgtgagagacgatgagttggatatcagctggaagctgttcacccctctcttaaattaccttgagggcccagacagccctcggcctgaaatttataagtatggttctcgtgggcctgatggtctaaccaagtacttggagaagcatcagtatgtcttcgaaaagagcgggctttaccagtggcctgtctcgtccccaaaagaaaaagcaagtttggagccacggttatga

SEQ ID NO: 2684 - protein, 512 aa, Ashbya gossypii
MMCGEVTRTDAFEKDVIITVFGASGDLAKKKTFPALYGLYREGYLDDSTKIIGYARSELSDAELRERVKPYLSKPDDAASEAKQAEFLERMSYVAGPYDKEEGYVQLREQIEAYERERGVEKPHRLFYLALPPSAFVSVAEKIKQFLYAEGGVTRLIVEKPFGHDLESSRKLQKQLEPLFREEEIFRIDHYLGKEMVKNLLPLRFGNAFFNASWNKENIQMIQISLKEPFGTEGRGGYFDSTGIIRDVMQNHLLQVLTLLTMERPVSFDPESIRDEKVKVLKAIVPLDHEDILIGQYGRSEDGTKPAYLDDETVSKDSKCVTFAALTFNIQNERWDGVPIVMRAGKALNEGKVEIRILYKRVARGIFNDIPNNELVVRVQPDEAIYLKFNAKTPGLDSNSQITELDLTYSKRYRDYWIPEAYESLLRDALLGDHSNFVRDDELDISWKLFTPLLNYLEGPDSPRPEIYKYGSRGPDGLTKYLEKHQYVFEKSGLYQWPVSSPKEKASLEPRL

SEQ ID NO: 2685 - DNA, 1734 bp, Oryza sativa
  CDS (1)..(1734)
atggccggcaccggcttacgattccggcagggcgccatcttcttctcaggagctcatgctgctgctcatccaagaacaaggactcctcaccaccattgctcacctcagaggacgcacgatgcgagaggaaggtgccgcctcacggctaagtccgcaaatggacgcccacagatcagtgcctccttcagagatgtggcgatagatggggcacagtctgaagatggggcgccagagcagggaggatccaccgtcagcatcaccgtcgtcggcgcctccggcgatctcgccaagaagaagatctttcccgcgcttttcgccctgtactacgaggactgcctcccggagcattttacagtttttggttatgctcgtagcaagatgagcgatgaagagctcaggaacatgattagcttgactctgacatgccggattgatcagagggagaactgcagtgacaagatggaacagtttctgaagagatgcttttatcaatctgggcagtacaattcagaggaagggttttctgaactggacagaaagctaaaagaaaaggaggctggcaaggtaccaaacaggctcttttacctgtcgattccaccgaacatatttgtcgatgtggtgagatctgctagtcgcacagcatcatctcaagacggatggacaaggttcatagtggagaagccattcggccgcgattccgagtcgtcaggggagctcactcgaaacttgaagaagtacttggccgaggagcagatattcaggattgaccattatttggggaaggagctggttgagaacctctcggtgctccgtttctccaatctcgtcttcgagccactgtggtcgaggaactacatcaggaatgtgcagctcatattttctgaagatttcggcacggagggtcgaggcggctacttcgacaactacgggatcatcagggacataatgcagaaccacctgctgcagatcctggccctgttcgccatggagactccggtcagcctcgacgccgaggacatccgcaacgagaaggtgaaagtgctgaggtcgatgaggcagctgaggctggaggacgtggtggtgggtcagtacaaggggcacagcaagggcgggaagacgtacccggcgtacgtggacgacccgacggtgccgagcggcagcatcacgccgacgttcgccgccgccgccctcttcatcgacaacgcccgctgggacggcgtccccttcctcatgaaggccggcaaggccctgcacacgcgacgggcggagatcagggtgcagttccggcgggtgccggggaacctgtacgggcggcggagccggagcgtgggcggcggcgggacgacagcgacgagggagctggagaaggcgacgaacgagctggtgctgcgggtgcagcccgacgaggcgatctacctcaagatcaacagcaaggtgcccgggctggggatgaggctggacagcagcgacctcaacctgctctactccgagcgctaccccgccgagatccccgacgcctacgagcgcctgctgctcgacgccatcgagggcgagcgccgcctcttcatccgcagcgacgagctcgacgccgcctgggccatcttcacccccgtcctcgccgacctcgaggccaacaaggtggcacccgagctctacccgtacggcagccggggacccgtcggagcgcactacctcgccgccaaccacaacgtccgctggggtgacattagctag

SEQ ID NO: 2686 - protein, 577 aa, Oryza sativa
MAGTGLRFRQGAIFFSGAHAAAHPRTRTPHHHCSPQRTHDARGRCRLTAKSANGRPQISASFRDVAIDGAQSEDGAPEQGGSTVSITVVGASGDLAKKKIFPALFALYYEDCLPEHFTVFGYARSKMSDEELRNMISLTLTCRIDQRENCSDKMEQFLKRCFYQSGQYNSEEGFSELDRKLKEKEAGKVPNRLFYLSIPPNIFVDVVRSASRTASSQDGWTRFIVEKPFGRDSESSGELTRNLKKYLAEEQIFRIDHYLGKELVENLSVLRFSNLVFEPLWSRNYIRNVQLIFSEDFGTEGRGGYFDNYGIIRDIMQNHLLQILALFAMETPVSLDAEDIRNEKVKVLRSMRQLRLEDVVVGQYKGHSKGGKTYPAYVDDPTVPSGSITPTFAAAALFIDNARWDGVPFLMKAGKALHTRRAEIRVQFRRVPGNLYGRRSRSVGGGGTTATRELEKATNELVLRVQPDEAIYLKINSKVPGLGMRLDSSDLNLLYSERYPAEIPDAYERLLLDAIEGERRLFIRSDELDAAWAIFTPVLADLEANKVAPELYPYGSRGPVGAHYLAANHNVRWGDIS

SEQ ID NO: 2687 - DNA, 1467 bp, Gluconobacter oxydans
  CDS (1)..(1467)
atggaacatttccagcaggtcgagcctttcgactatgtcatcttcggtgccactggcgatctcacgatgcgcaagctgctgcccgcgctctacaaccgccttcggatgggccagattccggatgatgcgtgcatcatcggagccgcccgtacggagctggaccgggaggcctatgtcgcgcgggcccgagacgcccttgagcggtttcttccctcagacatcctgggcccggggctggtcgagcgtttcctcgcccgtctcgattacgtgacgctggacagcagccgcgagggcccgcagtgggacgccctgaagtccctgctggccaaggcacagcctgaccgggtgcgcgtctatatttcgcaaccgcaccgcagcttacggcagcatctgcgagacctgaaccgctacgagctgatcacccccacgtcgcgggttgttctcgaaaagccgatcggtacgaacatggccaccgccaccgccatcaatgacggggtcggccagtattttccggaaaagcagatctaccggatcgatcattatctcgggaaagagacggtccagaacgttctcgccctgcgttttgcaaacccgctcatgaacgctgcctggtccggcgagcatatcgagagcgtgcagatcacggcggtcgagaccgtgggcgtcgaaggtcgtgcggcctattacgacacgtctggcgcgcttcgcgacatgatccagaaccacctgctccaggtactgtgtctggttgcgatggaagcccccgattcccttgaggccgatgccgtccgcaacgccaaactggccgtcctgaacgccctgcgccccatcacggatgccacagccgccaccgagacggtgcgcgcgcagtacacggcaggcgtggtcgatggcgagaatgttccgggttatcttgaagagctcggcaagcccagcgcgacggaaacctatgccgcaatccgcgcctgggtggacacgccgcgctggaagaacgtgccgttctacatccgcacggccaagcggtccggcaagaaggtcagcgagatcgtcgtgacgttccgcccggctgcgaccaccatgttcggcgccaccccggccagcaacaggctggtcctgcgcatccagcccaacgaaggcgtggacctgcgtctgaacgtcaagaaccctgcgctggatgtcttcaacctgcggacggcggatcttgatacctccatccgcatggaaggcggcctgcccttcccggattcctatgagcggcttcttctggatgccgtgcggggtgatccggtactgttcatccgccgcgacgaggtcgaggccgcatggcgctgggtcgagcccatccttgaggcctggaaacatgacaaggcgcccatgcagacctacagtgcgggttcctatgggccggaacaggcaacacaactgctcgccagccatggcgacacctggcatgaagcgtcggagtaa

SEQ ID NO: 2688 - protein, 488 aa, Gluconobacter oxydans
MEHFQQVEPFDYVIFGATGDLTMRKLLPALYNRLRMGQIPDDACIIGAARTELDREAYVARARDALERFLPSDILGPGLVERFLARLDYVTLDSSREGPQWDALKSLLAKAQPDRVRVYISQPHRSLRQHLRDLNRYELITPTSRVVLEKPIGTNMATATAINDGVGQYFPEKQIYRIDHYLGKETVQNVLALRFANPLMNAAWSGEHIESVQITAVETVGVEGRAAYYDTSGALRDMIQNHLLQVLCLVAMEAPDSLEADAVRNAKLAVLNALRPITDATAATETVRAQYTAGVVDGENVPGYLEELGKPSATETYAAIRAWVDTPRWKNVPFYIRTAKRSGKKVSEIVVTFRPAATTMFGATPASNRLVLRIQPNEGVDLRLNVKNPALDVFNLRTADLDTSIRMEGGLPFPDSYERLLLDAVRGDPVLFIRRDEVEAAWRWVEPILEAWKHDKAPMQTYSAGSYGPEQATQLLASHGDTWHEASE

SEQ ID NO: 2689 - DNA, 1581 bp, Vibrio vulnificus
  CDS (1)..(1581)
atgtcactgatagggtgggctcatcctttaagccgtatccaggcacacaacaagtacctcgtttttaagggaaagatgatggtaataccagaaaacagcagcatcgtaatttttggtgcttcaggtgatttaacatatcgcaagttgatccctgctttataccacctctacgcaagtaagcagctaccagaaaactttgctattttaggtgtcagccgcactgaatacagcgatgaatcttatcgcgaaaagttaaagcgctctcttcaggaaatggagaaaacggaaccagctattctggattcatttatcgaccatcttcactatcaagccatcaacacgtcagacacacaagactacgcgaagttggttgtacgtttagacgaattggccgctcaataccagttcgaacaacgtaatacactgttttatcttgccacaccgccaagcctttacagtgtcattccttcaagccttgctcatcacggtcttaacagtgaagaggatggttggaaacggctgatcattgaaaaaccgtttggttatgatttggcttcggcacgtcagctcgacaaagaaatacacgattgcttccaagagcatcagatctatcgcatcgaccactaccttggaaaagagaccgtgcaaaacttacttgttttccgtttctctaacgccatgtttgaacctctgtggaaccgcaacttcattgattatgtggaaatcacaggtgccgaattccttggcgtggaagagcgtggcggttattacgacggctccggcgctgtgcgcgatatgttccaaaaccatctactgcaagtattggcaatggtgggcatggaaccgcctgcacaaattaatgccgattccatgcgtgatgaagtagtgaaagttctgcagtgtttaaaaccgcttgaggaagatgatctgcgtaacaacctagttttgggtcaatacacagcatcagacgtgcgcggacaacatctgcttggctaccgtgaagaaaacggcgtagcggacgattctcgtactgagacttacattggtcttaaagcgtacatcaataactggcgttggaatggcgtgccattctacgtgcgcacgggtaagcgtcttccaactcgcgtaacagaagtggttatccacttcaaacaaacaccgcatccggtatttggccaaaacgccccagaaaacaaactgatcattcgtattcagcctgatgaaggcattcaaatgagcttcggtttgaaagaacctggtgcaggctttaaagcgaaagaagtgaagatgaacttccattatgcttcgttgcaagagacgcaaatgctgaccgcctatgagcgtctgcttcttgatgcgttaaacggcgatgcaacgctgtttgctcgcagcgatgcggtcgaagcgtgttggaaatacgttcaacctatcctcgatttcaaacaagatccacaagcactctttggttatgcctgcggcacttgggggccaaaagagtcagacgatttgctgcagcgtgacgatcgcgcgtggcgtttcccatgcaaaaacctaacagatacggactactgcgaactatga

SEQ ID NO: 2690 - protein, 526 aa, Vibrio vulnificus
MSLIGWAHPLSRIQAHNKYLVFKGKMMVIPENSSIVIFGASGDLTYRKLIPALYHLYASKQLPENFAILGVSRTEYSDESYREKLKRSLQEMEKTEPAILDSFIDHLHYQAINTSDTQDYAKLVVRLDELAAQYQFEQRNTLFYLATPPSLYSVIPSSLAHHGLNSEEDGWKRLIIEKPFGYDLASARQLDKEIHDCFQEHQIYRIDHYLGKETVQNLLVFRFSNAMFEPLWNRNFIDYVEITGAEFLGVEERGGYYDGSGAVRDMFQNHLLQVLAMVGMEPPAQINADSMRDEVVKVLQCLKPLEEDDLRNNLVLGQYTASDVRGQHLLGYREENGVADDSRTETYIGLKAYINNWRWNGVPFYVRTGKRLPTRVTEVVIHFKQTPHPVFGQNAPENKLIIRIQPDEGIQMSFGLKEPGAGFKAKEVKMNFHYASLQETQMLTAYERLLLDALNGDATLFARSDAVEACWKYVQPILDFKQDPQALFGYACGTWGPKESDDLLQRDDRAWRFPCKNLTDTDYCEL

SEQ ID NO: 2691 - DNA, 1476 bp, Photorhabdus luminescens
  CDS (1)..(1476)
atggcggttacttctacagctcaggcttgtgatttagtcatttttggcgctaaaggggatttggcacgccggaaattattgccttccctttatcagcttgagaaagcgggttatatccacccagaaacccggattatcggtgttggccgggctgattgggataaaaaagcttataccaaggttgttgaagaagctttaaatacattcttgccagaaaaattagattcagaattatggaagatattgagtgagcgtttggcgttctgcaatctggatgttaatcaaaaagaagactttgccaaattgaaggcaattcttaagcaggataatcggcctgcaatccattattttgcgatgccacccagtacttttggttcggtttgtcacggattgggccttgcagggctaaataaagagccaaatcgagttgtgatggaaaagcctttagggaccgatcttgaatcatccaaagccatcaatgatgaagtagctaaatatttcaatgagcgtcaggtttatcgcatcgatcattatctgggtaaagaaaccgtattgaatctgttggcgctgcggtttgccaattccttgtttgtgaataattgggataaccggacaattgatcatgtacaaattacagtagctgaagaagtcggtattgaaggccgttggggttattttgaccaagctgggcagatgcgcgatatgattcagaatcacctgttgcaaatattgaccatgattgctatgtctcctccggcagatctgacgacagaccgtatccgtgatgaaaaagtaaaagtattgcgttctctgcgctgtattgatcatacgaatgtgcgggagaagacggtacgaggtcaatacactgctggttttgttcaggggcataaggtaccggggtatctggaagaagagggggcaaaccagtccagccggacggaaacttttgtctctatccgtgtcgatattgatgactggcgttgggccggggttcctttctacctgagaaccggtaaacgtctgccaacgaaatgttccgaggtggtagtttatttcaaaaagcctgcactgaacttgttttctgagtcttatcaacaactaccgcagaataagctaacgattcgtttgcagccggatgaaggtattgatattgaagtgctgaacaaagctccggggctggaacacaagcatcgtctgcaaaccactaagctagatctgagtttctctgaaacgtttaaccatattccgttggcggatgcttatgagaggttactgctggaggctatgcggggtattcaggcgctatttgttcgtcgtgatgaagtggaagaagcgtggaaatgggttgattctattatgaatgcatgggcggcggataatgatgcgcctaagccttatcaggcggggacgtgggggccggtcgcttctgttgcgatgatcactcgcgatggtcgttcgtggaatgagtttgagtaa

SEQ ID NO: 2692 - protein, 491 aa, Photorhabdus luminescens
MAVTSTAQACDLVIFGAKGDLARRKLLPSLYQLEKAGYIHPETRIIGVGRADWDKKAYTKVVEEALNTFLPEKLDSELWKILSERLAFCNLDVNQKEDFAKLKAILKQDNRPAIHYFAMPPSTFGSVCHGLGLAGLNKEPNRVVMEKPLGTDLESSKAINDEVAKYFNERQVYRIDHYLGKETVLNLLALRFANSLFVNNWDNRTIDHVQITVAEEVGIEGRWGYFDQAGQMRDMIQNHLLQILTMIAMSPPADLTTDRIRDEKVKVLRSLRCIDHTNVREKTVRGQYTAGFVQGHKVPGYLEEEGANQSSRTETFVSIRVDIDDWRWAGVPFYLRTGKRLPTKCSEVVVYFKKPALNLFSESYQQLPQNKLTIRLQPDEGIDIEVLNKAPGLEHKHRLQTTKLDLSFSETFNHIPLADAYERLLLEAMRGIQALFVRRDEVEEAWKWVDSIMNAWAADNDAPKPYQAGTWGPVASVAMITRDGRSWNEFE

SEQ ID NO: 2693 - DNA, 1539 bp, Gloeobacter violaceus
  CDS (1)..(1539)
atgaccgcatcgttgactggaggattgagcgccaatccgttgcgccaggggctgcgcctggagcgcacgcccaagcctgccattttgactatcttcggggcctccggagatttgaccgtccgcaagctgatcccagccctttacgacctggcccgcgaccggcgattgccccctgaattcacggtcgtgggctatgcccgtcgcccctacagccacgaagaatttcgcgaaatgatgaaggaaggggtagccaagtattcgcgcagcaagctgggcaacctctgggaaagtttctccaagggcatctattacttccagggggacctcgacaatctccagaattttaaggacctcggcgaatttttgcagactctagatagcgagcgcggcaccctcggcaaccgggccttctacatggctaccgccccgagtttctttgcgcccatcatcgagaatctgggcggagcgggcctggcgggcgacgtgcgcaacacgcgcctggtgatcgaaaaacccttcggccacgacctggagtcggctcaaaatctcaacaaagtcgtccagcaagtctttcacgaaaagcaggtctaccgcatcgatcactacctgggcaaagagaccgttcagaatatcctggtcttccgctttgccaattcgatctgggaaccgctctggaacaaccgctacgtcgatcacgtgcagatcacggtagcagagacggtgggggtcgaaaaccgcgggccgtactacgacgaagccggcggcgcgctgcgcgacatgatccagaatcacctggtacagctgttggctctcaccgccatggagccgccctccgccttcgaggccgacaccgtgcgcgacgaaaaagtgaaagtcctgcgcgccacccaggtcggccaggggccgaacggccttgcggcagtccgcgcccagtacgccaacggctggatttcaggcgaaccggtgcacgcctaccgcgacgaaccccgggtcaaccccgacgttcagactgcgagctatattgccgccaaattcatgatcaacaattggcgctggaagggcgtgccgtttttgctgcgcaccggcaaacgcctcgccaagcgcgtcaccgaaattgccctgcaatttcgggaagtgccgcacctgctctttccgtcgagcagcgcgggccagctcagcccgaacatgctggtgctgcgcatccaaccggacgaaggcatttcgctgcgcttcgaggccaagcggccggtggccgacatcgccatgcgctcggtgaacatggactttcactacggcggcaccttcgaggtcgcctcgcccgaagcctacgagcggttgctgctcgattttctgctcggggatcagacgctgtttacccgcgcggacgaagtcgaggcggcctggaagatcgtcacaccgctcatcgagcgctgggaaatccagaaagccggcgatctcaattactacgacgccggttcctgggggccgagtgccgcgagtaagctgatggacaacggccgccgctggcggcgcctatag

SEQ ID NO: 2694 - protein, 512 aa, Gloeobacter violaceus
MTASLTGGLSANPLRQGLRLERTPKPAILTIFGASGDLTVRKLIPALYDLARDRRLPPEFTVVGYARRPYSHEEFREMMKEGVAKYSRSKLGNLWESFSKGIYYFQGDLDNLQNFKDLGEFLQTLDSERGTLGNRAFYMATAPSFFAPIIENLGGAGLAGDVRNTRLVIEKPFGHDLESAQNLNKVVQQVFHEKQVYRIDHYLGKETVQNILVFRFANSIWEPLWNNRYVDHVQITVAETVGVENRGPYYDEAGGALRDMIQNHLVQLLALTAMEPPSAFEADTVRDEKVKVLRATQVGQGPNGLAAVRAQYANGWISGEPVHAYRDEPRVNPDVQTASYIAAKFMINNWRWKGVPFLLRTGKRLAKRVTEIALQFREVPHLLFPSSSAGQLSPNMLVLRIQPDEGISLRFEAKRPVADIAMRSVNMDFHYGGTFEVASPEAYERLLLDFLLGDQTLFTRADEVEAAWKIVTPLIERWEIQKAGDLNYYDAGSWGPSAASKLMDNGRRWRRL

SEQ ID NO: 2695 - DNA, 1539 bp, Gloeobacter violaceus
  CDS (1)..(1539)
atggcaaccgattcgacgacgcccttcccaatcgccccaccggctggaccctgcgcgatggtcgtcttcggggcggctggagatcttaccggtcggctactggtgccggcgctctataacctggccgcgggcgggctattaggtgaaaaatttgtcttgatcgggctggcccgcgccccgctcaccgacacgaattttcggacacaactgggcgaggcgctgcagcgccatggcactgctgcagtcaatccggccgtctgggatgcccttgcgcagcgatttttttatctggaagccaacttcgaagctcccgatacctacgcccgcctgcggcagcggctggccgaggcggaagccgaattcaacacggacggcaacacgctattttatctggcgaccgcccctgagcacttcggcggcattgtcgagcagttgggctgggctgggctgtcccgcgaggagaccggtcactggcgacgcgtcgtcctcgaaaaacccttcggtcaggatctcgcctccgcccaagccctcaacgcccgcctccggcgcgacctctccgaaagccaggtctaccgcatcgatcactacctgggcaaagaaaccgtccagaacatcctggtcctgcgcttcgccaacggcctgttcgagcccctctggaaccgcaaccacatcgaccacgtgcagatcaccgtcgccgagagcgtcggggtcgaaaagcggggcggttactacgagcgggccggggcgctcagggacatggtgcccaaccatcttttccagttgctggccctcaccgcgatggagccgcccacctgcttcggggccgacgccgtgcgcaccgaaaagaccaagctgctggaagccgtccagaccctcaagcccgcccagatctccacccacgtcgtgcgcgctcagtacgccgcgggtacggtcggggagcgggcactgccggactaccgcgccgagccgcgggtggcgccggattcgaccaccgagacgttcgtcgccctcaaactcgccgtcgacaactggcggtgggcgggggtgcccttttatctgcgcaccggcaaggccctggccaggcgcagcaccgagatcgccatccgcttcaagcaggcgccctacgcgatgtttcgcgacacgccggtggagcgcctcacacccaactatctggtgctccacatccagccggaggagcgcatcagcctcgaattcggcgccaaagtgccgggaccggcggtgcgcatggccggcgtcggcatggacttttgctacaatcgccacttcggcggcgagcgggcgatcggctatgaaacgttgctctacgactgcatgatgggcgatgctaccctgtttcagcgctcggatacggtggaggcggcctggcaggtcgtcgaaccgatctttgctgcctggaacgattcaactgccgacctggtcacctatccggccggcagttggggtccgcagcaggcggaggagttgctcgggcgcgacggtcggcagtggcggagagcggaccatgattcttgcgggtga

SEQ ID NO: 2696 - protein, 512 aa, Gloeobacter violaceus
MATDSTTPFPIAPPAGPCAMVVFGAAGDLTGRLLVPALYNLAAGGLLGEKFVLIGLARAPLTDTNFRTQLGEALQRHGTAAVNPAVWDALAQRFFYLEANFEAPDTYARLRQRLAEAEAEFNTDGNTLFYLATAPEHFGGIVEQLGWAGLSREETGHWRRVVLEKPFGQDLASAQALNARLRRDLSESQVYRIDHYLGKETVQNILVLRFANGLFEPLWNRNHIDHVQITVAESVGVEKRGGYYERAGALRDMVPNHLFQLLALTAMEPPTCFGADAVRTEKTKLLEAVQTLKPAQISTHVVRAQYAAGTVGERALPDYRAEPRVAPDSTTETFVALKLAVDNWRWAGVPFYLRTGKALARRSTEIAIRFKQAPYAMFRDTPVERLTPNYLVLHIQPEERISLEFGAKVPGPAVRMAGVGMDFCYNRHFGGERAIGYETLLYDCMMGDATLFQRSDTVEAAWQVVEPIFAAWNDSTADLVTYPAGSWGPQQAEELLGRDGRQWRRADHDSCG

SEQ ID NO: 2697 - DNA, 1479 bp, Chromobacterium violaceum
  CDS (1)..(1479)
atggagactcgttctacccctaccccggccttcgacatggtgctgttcggcggcgccggcgacctggtgatgcgcaagctgctgccttcattgtaccaggcgcataacgccggcctgctcaacgaacagggccgcatcctggcgctgggccgcaaggacctgagccgcgacgactacctggcttccgtcgaaaagcagtcccgcatccatatcaagtcccacttcgacgatgccgcctggcagagcttctgtagccgcatcgactacctgcgcgtcgacgcctcccaggccgccgactacccggcgctggccgagaaggtcggcgacgacgccggcaaggtggtggtgtgctaccttgccaccgcgcccaatctgttcgccggcatctgcgaaaacctggccgcggtcggcctgaaccgccccaatgtgcgggtggtgctggaaaagccgctgggcaccgacctcgactcgtccaacgagatcaacgacgacgtcgcccgcttcttcaaggaagagcagctgtaccggatcgaccactacctgggcaaggagtcggtgcagaacctgatggccatccgcttcgccaacgcgctgttcgagccgctgtggcgccgcgaatggatacacgacgtgcagatcaccatttcggaagaactgggcgtcggcagccgcggcgatttctacgacggcaccggcgcgctcagggacatggtgcagaaccacctgctgcagctgctgtgcatcgtggcgatggagccgccggccaacctggaagccgacgccgtccgcgacgagaagctgaaggtgctgaaggcgctgcgcccgttcaccgagcacgatgtcgccgccaagaccgtgcgcggccagtacaaggccggcgccagcggcggccagccggtggtcggctaccaggacgaggccggcattcccgccggcagccagaccgagaccttcgtcgccatcaaggccgagatcgacaactggcgctgggccggcgtgcccttcttcctgcgcaccggcaagcggatgcaggaacgcctggccgagatcgtcatcaacttccgcgatgtgccgcaccaggtgttcaccggcccgctgggcggcagccaccacgccaaccggctggtgatccgcctgcagcccgaggaaagcatccgcctgtacttcctggccaaggagccgggcgacaccatgcgcctgcagccggcctacctggacctggacttctacaaggcgttcaaggtgcgccgcgccgacgcctacgagcgcctgctcttggacgtgatccgcggcaagctggcgctgttcatgcgccgcgacgagctgatcgaggcctggcgctgggtcgagcccatcatggacacctgggccgccagcaccaacaacccgcccaagcaatacaccgccggcagctggggcccggccgcgtccagcgcgctgctgtcgcgcgacggcatcagctggcacgaggagtgttaa

SEQ ID NO: 2698 - protein, 492 aa, Chromobacterium violaceum
METRSTPTPAFDMVLFGGAGDLVMRKLLPSLYQAHNAGLLNEQGRILALGRKDLSRDDYLASVEKQSRIHIKSHFDDAAWQSFCSRIDYLRVDASQAADYPALAEKVGDDAGKVVVCYLATAPNLFAGICENLAAVGLNRPNVRVVLEKPLGTDLDSSNEINDDVARFFKEEQLYRIDHYLGKESVQNLMAIRFANALFEPLWRREWIHDVQITISEELGVGSRGDFYDGTGALRDMVQNHLLQLLCIVAMEPPANLEADAVRDEKLKVLKALRPFTEHDVAAKTVRGQYKAGASGGQPVVGYQDEAGIPAGSQTETFVAIKAEIDNWRWAGVPFFLRTGKRMQERLAEIVINFRDVPHQVFTGPLGGSHHANRLVIRLQPEESIRLYFLAKEPGDTMRLQPAYLDLDFYKAFKVRRADAYERLLLDVIRGKLALFMRRDELIEAWRWVEPIMDTWAASTNNPPKQYTAGSWGPAASSALLSRDGISWHEEC

SEQ ID NO: 2699 - DNA, 2229 bp, Giardia lamblia ATCC 50803
  CDS (1)..(2229)
atgttcaagccttcctgcgtcttcgtcatcatgggggcatcaggggatcttacttataagaagcttatccctgccatctacagccttgcctcggacggctaccttcacaaggacacttgcatccttggcgttgcacgctcagacattaagctggacgcctttcatagtcgtattaaggacggtatagataagtattcacgccatgggacaggccctgggtctgctacaaatcgagaaccctggagcacctttgtgaagagactcaactaccatcgcataaacaacatggaggcactgagtgactataaggcgctagcggagattgtactctgtaaggagccgtataaggaccttgagcgcgttgtcatttatcttgccctcccgcctggcgctttctatgccgcagtcaccaacttgggggagtcgggtctcaataacaggaagtgtacaatagtagtggagaagcccctcgggtcagatctccacacagccatggaactcgaaaagttgctccacagccagttcaaagaagaccagatagcccgcattgaccattatctggggaagatgcaagcactcaatatgatgggcttccgattctccaacgcgtttgttgagccaatctggaatgacaagtacatagatcgcatcatcatcactgcctctgaggagatagatgttaatgggcggatcagctactacgacgccaacggcatcattattgatatggttcaatcccaccttcttcagcttcttgcccttacgaccatggaagcccccatagacatgaccgcagatggcatacgcaacgaaaaggtgaagcttctgaagtccgttgaccccattcgtgtcgagaatgtcctgacagcccagtacgacgggtacctcaaacacgagggcgttccggagggctctcttgctccaacagctgtctgtcttagggtgtccatcaacaatgcacgctggaaaaggacgcagttcatcatccagacatgcaagtgtggggctacgcgcgagacccgaattgatgctgtcatgcgtccttcggggtcgcgcattctcaatactgttagcatggttccggatcctaacattttctcgttcctcgtgcaccccaccgaagggattcagatcagtttcgaaaccatggtgccatcaatatcttcttccactcttgcgtgcgacaacagtggatgcatcgaacgggagccgggtccgtttttgaccaagcccgtgacgctggactttgactaccagaagtcgcatatcatcacccaatcagcatatgagcgtctgctacaagaggcggttgcaggggatctatccaactttacacgtactgatgaggtagttgcccagtggaagatcgtagcaaacatattggataacagcaggaacaagcccatcatatacgctaagggccttcgtcttcttcatcccatctgcctcgacacttggaactacggaaaggagtacatacgtcgcttagcatacggccattgcaggttgcgtgttgcttgggaaatcactgccacggcaatactcgcgtgcgagaccgtcagtaataaggtcattcactccgtcgcactgtgggctgagacccacacgctgaataatagctttgacataattctcgccggtggcaccacccccaagcattgctatgaacacatgagccgccatctgatcaagcacttaccactggaggtgcggaagcgcatattcatctggctttcagatgagcgtgaggatacgtgtgccaggaacaacgggaaaatgatcaaggagtgctttaaggacagcggagttgttatcaatgaaatctatgatggaagcaagagctttgagaccagcatccgagagtactcaaagaaactcgaaggagtagaggtctttagggcagcaattctggggataggcacagatggccacatatgctcactcttcccaggttgtcttcccactctcaccagcagagaagatcagtgcatcatggttgaagtccctcagctgggagagcggcgagcaaccatcactcctctggtcatacaaagaattgcagacgttatcatccttgccactggagaagataagaccacagcattgactcgacttgcctacgcgcctttccagccggccttcattcctgcacagttggccactgcacagtctagcacaactgtggtctgtgatcacaccgcgcgttcatctaggccagtgttcaattaa

SEQ ID NO: 2700 - protein, 742 aa, Giardia lamblia ATCC 50803
MFKPSCVFVIMGASGDLTYKKLIPAIYSLASDGYLHKDTCILGVARSDIKLDAFHSRIKDGIDKYSRHGTGPGSATNREPWSTFVKRLNYHRINNMEALSDYKALAEIVLCKEPYKDLERVVIYLALPPGAFYAAVTNLGESGLNNRKCTIVVEKPLGSDLHTAMELEKLLHSQFKEDQIARIDHYLGKMQALNMMGFRFSNAFVEPIWNDKYIDRIIITASEEIDVNGRISYYDANGIIIDMVQSHLLQLLALTTMEAPIDMTADGIRNEKVKLLKSVDPIRVENVLTAQYDGYLKHEGVPEGSLAPTAVCLRVSINNARWKRTQFIIQTCKCGATRETRIDAVMRPSGSRILNTVSMVPDPNIFSFLVHPTEGIQISFETMVPSISSSTLACDNSGCIEREPGPFLTKPVTLDFDYQKSHIITQSAYERLLQEAVAGDLSNFTRTDEVVAQWKIVANILDNSRNKPIIYAKGLRLLHPICLDTWNYGKEYIRRLAYGHCRLRVAWEITATAILACETVSNKVIHSVALWAETHTLNNSFDIILAGGTTPKHCYEHMSRHLIKHLPLEVRKRIFIWLSDEREDTCARNNGKMIKECFKDSGVVINEIYDGSKSFETSIREYSKKLEGVEVFRAAILGIGTDGHICSLFPGCLPTLTSREDQCIMVEVPQLGERRATITPLVIQRIADVIILATGEDKTTALTRLAYAPFQPAFIPAQLATAQSSTTVVCDHTARSSRPVFN

SEQ ID NO: 2701 - DNA, 2850 bp, Plasmodium yoelii yoelii
  CDS (1)..(2850)
atggagtacgagacatttttaaaatgcttagatgaaataaggtgtgtgaacaatgtgaaatatatggagaccgaagatttaacagactttaataaaaaatcggcatattatatttgtaaagaaatatatgagaaacaattaagtaatgaaaatgggtatgtagttataggtttatcaggtggaaaaacacctatagatgtttataaaaatatgtgtgcaataaaagatataaaaattgataaaaataagttaattttttttataattgatgaaaggtataaaaatgatgatcataaattcagtaattataataatataaaatttttatttgatgaattaaatattaataaagaaacccaattatataagcccgatacaaaaaaagatcttgttagttgtataagagattataatgaacaaattaaaagcatgctagaaaaatataaaaaaatagatattgcaatattaggtatggggagtgatttccatatagctagtttatttccaaatgtgtattataatatatacatgaataattatcaaaataattatatatatgaagacaatgaaacaataaggtcattaaatgccgacaataatgttaatttaagtttactaaatgagcatgtatattttacaacaacaaataattttgatgtgagaaaaagaattacagtatcacttaacctattgtcaaattcaacaagtaaaatatttttattaaatacagcagataaattaaatttatggaaaaatatgctcttaaatttttatgttaatcctaactataatttatatccagcatttaaggtgatcgactctagaaatacaacagtcatagcatgtggtcataaaaattattcaaaaatgttagaagatttatatgttcaaaaagattgtgcactttctccggtcagcaataataatgtagagaataaaaatgagttactaacaatagttatatttggttgctctggtgatttagcaaaaaaaaaaatatacccagccttgtttaaattattttgtaataatttattaccaaaaaatataataataatcggttttgcaagaacagaacaagattttgaatcattttttaacaaaatatctatatatttaaaaatatctttaaacagttataaaaatttatcagtttttgaaaaagccgaacgcttaaattcttttaaaagcaaatgtagatattttattggaaactatttatctacggaaagttttgaaaattttgatgtatatataactcaggaagagaggatagcattaggctgttttggtcagaaaggtaatgaaaaacataaacaagttaattccacttcacaattccctaataatcatactaacacaaatgttaccaacaatatagataacggatgtgagccaccaatgcctaatgattctcccaaaagatgcccctacagttcaagttattccaatacatctggtaacgctacatgtcctcacagttcacaccattctgttaagcctagtaatactggatgcccatacctttcgagccaagctaatacatctgataattctggctgtccatacatttcacaccatattaataaatctggtaattcgggttgtccttatactatcactagaatgctttacttagccttaccaccccatatctttgtaagtacattacaaaattataaaaagtattgcttaaataaaaacagaatcaccaagatattacttgaaaagccatttggaaaagatttggaatcatttaaaatattatcgaaacaaatattagaagcttttcctgaaaaaaacatatatagaattgatcattatttaggaaaagatatggtttcaggattattaaaactaaaatttacaaatacatttttgttatctttaatgaacagacattttataaaatgcataaaaataacattaaaagaaacaaagggagtatatggaagaggacagtatttcgatccatatggaattataagagatgttatgcaaaatcacatgctacaattactgacattaataactatggaacatccaactgatttagatgataaatccatacaaaatgaaaaaataaaaatattaaaatctatagcttcaataaaattagaagacaccgttataggacaatatattaaatcaaataatgatgatacaaataataataattcaaatatttctgaaaatgccaatatagataaatctaaaataaatcatagttatcatgatgatccacatgtagatccaaattcaataacccctacattttgtacatgtgttttatatattaattcaataaattggcatggtgtcccaataatacttaaagcaggaaagggactaaataatgatatatgtgaaattaaaattcaatttcataatattatgggctcatctgacgaaagtatgtataataatgaatttgtaattattttacaacctgtagaaggaatatatctaaaacttatgataaaaaaaatgggttctgaagaaatggaagaagtacaattgaatttaagccttaatgaaaataataataaagcatatgttccagaagcttatgaaactttattatcagaatgctataaaggatataagagaaaatttatctcagatgaagaattatatgaatcttggagaatattcacccctctattaaatgagttacaagaaaagcatgtcaagcctctatcttacccatttgggtcatcagggccccaagaagcttatgaccttgtaagaaaatattacaattatggaaaaaactatgacacaactgctaaattttgcagaaaatcttcctactatgatgatagcttgtttgataatatgagagaataa

SEQ ID NO: 2702 - protein, 949 aa, Plasmodium yoelii yoelii
MEYETFLKCLDEIRCVNNVKYMETEDLTDFNKKSAYYICKEIYEKQLSNENGYVVIGLSGGKTPIDVYKNMCAIKDIKIDKNKLIFFIIDERYKNDDHKFSNYNNIKFLFDELNINKETQLYKPDTKKDLVSCIRDYNEQIKSMLEKYKKIDIAILGMGSDFHIASLFPNVYYNIYMNNYQNNYIYEDNETIRSLNADNNVNLSLLNEHVYFTTTNNFDVRKRITVSLNLLSNSTSKIFLLNTADKLNLWKNMLLNFYVNPNYNLYPAFKVIDSRNTTVIACGHKNYSKMLEDLYVQKDCALSPVSNNNVENKNELLTIVIFGCSGDLAKKKIYPALFKLFCNNLLPKNIIIIGFARTEQDFESFFNKISIYLKISLNSYKNLSVFEKAERLNSFKSKCRYFIGNYLSTESFENFDVYITQEERIALGCFGQKGNEKHKQVNSTSQFPNNHTNTNVTNNIDNGCEPPMPNDSPKRCPYSSSYSNTSGNATCPHSSHHSVKPSNTGCPYLSSQANTSDNSGCPYISHHINKSGNSGCPYTITRMLYLALPPHIFVSTLQNYKKYCLNKNRITKILLEKPFGKDLESFKILSKQILEAFPEKNIYRIDHYLGKDMVSGLLKLKFTNTFLLSLMNRHFIKCIKITLKETKGVYGRGQYFDPYGIIRDVMQNHMLQLLTLITMEHPTDLDDKSIQNEKIKILKSIASIKLEDTVIGQYIKSNNDDTNNNNSNISENANIDKSKINHSYHDDPHVDPNSITPTFCTCVLYINSINWHGVPIILKAGKGLNNDICEIKIQFHNIMGSSDESMYNNEFVIILQPVEGIYLKLMIKKMGSEEMEEVQLNLSLNENNNKAYVPEAYETLLSECYKGYKRKFISDEELYESWRIFTPLLNELQEKHVKPLSYPFGSSGPQEAYDLVRKYYNYGKNYDTTAKFCRKSSYYDDSLFDNMRE

SEQ ID NO: 2703 - DNA, 1476 bp, Neurospora crassa
  CDS (1)..(1476)
atggagcagctcaaggacaacaccgtcatcgttgtccttggcgcctctggcgatctcgctaagaagaagacctaccgcaaccaatttttgcccaaggacatccggattgtgggctatgccagaactaaaatggaccacgacgagtacatccgccgcatcaagtcgtacatcaagactcccacgaaggagagcgagcagcagcttgaggagttctgctccatctgcacatacgtttccggccagtacgatcgcgacgactccttcctgcagctcaacaagcatttggaggaactggagcaaggaaggaaagagaacaaccgactcttctacatggctctgcctcccagcgttttcaccattgtttcacagcatctcaagaagtgttgctacccctccaggggcgttgcccgtgttattgtcgagaaaccctttggcaaggacttggcaagctctcgagaactgcagaagtctcttgagcccgactggaaggaagaggagatcttccgtatcgaccattatctaggcaaggagatggtgaagaacattctcattctgcgtttcggcaactccttccttggcgctacctggaacaggcatcacatcgacaacgtccaaattacattcaaggaacccttcggcaccgagggccgtggtggctacttcgacgagttcggcatcatccgcgatgtgatgcagaaccatctgttgcaggtccttacgttgcttgccatggaacgccccatctctttctccgctgaagatatccgtgatgagaaggtgcgggtcctccgcgccattccggcaatcgagcccaagaatgtcatcattggacagtacggcaagtcgcttgacggaagcaagcctgcttacaaggaagacgatacggtccccaaggattcccgctgccccactttctgtgcgctagttgcgtacatcaagaacgagcgttgggatggtgtacctttcatcatgaaggcaggcaaggccttgaacgagcagaagaccgagatccgcgtgcagttcaaggacgtcacatcgggcattttcaaggacattcctcgcaacgaactcgttatgcgcattcagcccaacgaaagtgtctacatcaagatgaactctaagcttcccggcctgagcatgcagactgttgtcaccgagcttgacctcacctacaggagacgcttctccgacctcaagatccccgaagcttacgagtcccttattctcgactgcttgaagggtgaccattccaactttgtccgtgacgatgagctcgatgccagctggagaatctttacccctttgctccactatctcgatgataataaggaaatcatcccgatggagtatccttatggttctcgcggcccggctgttttggatgactttacggcttcgtacgggtacaaattcagcgatgctgcgggctaccagtggcccacaacctccgccatggggtcgggcatgaagttgtag

SEQ ID NO: 2704 - protein, 491 aa, Neurospora crassa
MEQLKDNTVIVVLGASGDLAKKKTYRNQFLPKDIRIVGYARTKMDHDEYIRRIKSYIKTPTKESEQQLEEFCSICTYVSGQYDRDDSFLQLNKHLEELEQGRKENNRLFYMALPPSVFTIVSQHLKKCCYPSRGVARVIVEKPFGKDLASSRELQKSLEPDWKEEEIFRIDHYLGKEMVKNILILRFGNSFLGATWNRHHIDNVQITFKEPFGTEGRGGYFDEFGIIRDVMQNHLLQVLTLLAMERPISFSAEDIRDEKVRVLRAIPAIEPKNVIIGQYGKSLDGSKPAYKEDDTVPKDSRCPTFCALVAYIKNERWDGVPFIMKAGKALNEQKTEIRVQFKDVTSGIFKDIPRNELVMRIQPNESVYIKMNSKLPGLSMQTVVTELDLTYRRRFSDLKIPEAYESLILDCLKGDHSNFVRDDELDASWRIFTPLLHYLDDNKEIIPMEYPYGSRGPAVLDDFTASYGYKFSDAAGYQWPTTSAMGSGMKL

SEQ ID NO: 2705 - DNA, 1524 bp, Synechococcus sp
  CDS (1)..(1524)
atggtcgccaccgccaccaatcccctgcgggtcggtctccgacaggaacgggtcatcgcaccgcaatgtctggtaattttcggcgccagtggtgacctgacccaccgcaagctggtccccgcgctgttcgaactgttcaagcagaggcgacttcccagtgaattcgcccttctcggctgcgcccgccggccctggagcgacgacgagtttcgcggaaaaatggccgaggccctggccagcaagatcgccgagaaccaggaagcctgggatcagttcgtctcgaagttgttctacgaacccgtcgatctgcagcaaccggaggatgtggttcgcctggggaaacgcctggaaaccgttgatcaacagtgcgccacccgcggcaaccgcaccttctatctctcggtgtcaccgaagttctacggcagtggctgtcgcgcgctagcggatgccggtctgctgaaggatcctcaacgcagccgcgtggtgatcgagaagcctttcggtcgtgactacggcagcgctcaagccctgaaccgtgttgtaaaaagctgcgggcaagagaatcagatcttcaggatcgaccattacctaggcaaggaaacggtccagaacatcatggtgctgcgctttgccaacaccattttcgaaccgatctggaaccggaactacatctccagtgttcagatcactgccgccgagaccgttggagtcgaggagcgggccgggtattacgagacctccggtgccctgcgggacatggtgcagaaccacctgacccagatgctggccatcacagccatggaaccgccaggtcgctttgacccggaggcgatccgcaacgaaaaggccaaggtgttgcaagcggcacgactggctgacgagcaggagccatggaactgctgcatccgcggtcagtacggccccggcggcagccatgacgctcccctggccggataccgccaggaacccggcgtcgatcccaacagcaccacggagacctacgtcgccatgaagctgttcgtcgacaactggcgttggcagggggtccccttctacgtccgcacaggcaagcggctggccaaacgcctcagcgaggtggtgctcaccttccgcgaagcaccagtgcatctcttcgatgcagccaccggcggccccacggccaaccagttgattctgcgcatccagcccgacgaaggggcggaattccgcttcgaagtgaaatcccccgggtccggcatgcgcagccgtccgatcgacatggagttctcctacgacgagtccttcggggagccctccgatgagggctatgtccgcctgctggcggacgccatgctcagcgatccgaccctgttcacccgcagtgacgaggtggaagcggcctggcgtctgtacaccccgctgctggagctgatcgaagacagcccttggcagctgccgatccatccctacgaatcccgcacctggggacctgccgccgctgatgccctgctggcccgtgacggactgctctggcgtcgtccctga

SEQ ID NO: 2706 - protein, 507 aa, Synechococcus sp
MVATATNPLRVGLRQERVIAPQCLVIFGASGDLTHRKLVPALFELFKQRRLPSEFALLGCARRPWSDDEFRGKMAEALASKIAENQEAWDQFVSKLFYEPVDLQQPEDVVRLGKRLETVDQQCATRGNRTFYLSVSPKFYGSGCRALADAGLLKDPQRSRVVIEKPFGRDYGSAQALNRVVKSCGQENQIFRIDHYLGKETVQNIMVLRFANTIFEPIWNRNYISSVQITAAETVGVEERAGYYETSGALRDMVQNHLTQMLAITAMEPPGRFDPEAIRNEKAKVLQAARLADEQEPWNCCIRGQYGPGGSHDAPLAGYRQEPGVDPNSTTETYVAMKLFVDNWRWQGVPFYVRTGKRLAKRLSEVVLTFREAPVHLFDAATGGPTANQLILRIQPDEGAEFRFEVKSPGSGMRSRPIDMEFSYDESFGEPSDEGYVRLLADAMLSDPTLFTRSDEVEAAWRLYTPLLELIEDSPWQLPIHPYESRTWGPAAADALLARDGLLWRRP

SEQ ID NO: 2707 - DNA, 1455 bp, Rhodopirellula baltica
  CDS (1)..(1455)
atgtcacatacaattgtcatctttggtgccagcggcgacctgaccagccgcaaactggtcccggcactcttccgactcttctcacgcggacgcctgcccgactcgactcgcattgtcggtgtttcgcgaagtccctacgaacattccgagtggcgaaaatcgcttcgcgaaaccaccgccaaatttgtcggcaagtctttcagcgaagaagcctgggaatcattcgcaccgaacatctactaccagcccggcgacatcaaagacgcagagtcgtttcaatcgctggcgacgtttttggatgaaatcgaagaaggcaaatcgaccggtcgagtctactacctgtcgaccatgccacagttgtacgaagaagcgatccagcaactcggggccgcgggactcgcctgcgacaaaaccggaccgcgacgggtgatcatcgagaaaccgttcggcacggatctgaaaacggcccagcgtctgaacgaatcgatccacaacgtttttcgcgaagatcagatctaccggatcgatcattacctcggcaaagaaaccgtacagaacattttcgcgttgcgttttgccaacagtatcttcgaaccgctgtggaaccggaactacatcgaccacgtgcaaatcaccgtggccgaagaagtcgtcatcggccggcgagctggctactacgacaacagcggaatcctccgcgacatgttccagaatcatattctgcaactgatgatgatcacggcgatggaaccgccggcgaaatttgacgccgctttggttcgcgatgagaaagtcaaagtgttgcacagtgttcgcaagatgacgggtggcgacttcgcatctcaaaccgttcgcggccagtacgacggctacctgcaagaggaaggcgtcccggcgaacagccaaacggaaacctttgccgcgttgaaactgtactgcgacaactggcgatggcagggcgtgccgttcttcttgcgaagcggcaaaggcatgtcatgccgaacgacccagatcgtgatccagttcaaaaacgttccgcaccaattgtttggcggatcgaagaaggagaacaaacttggcaaccgattggtcattcaagtccaaccggccgaaggcatccaattgcacttcgaaaccaaggttgccgacgccggaatgaagacgcgaaccaaccacttggacttcaacttccaagattcgatcggcggccaagaaatgcccgacgcctatcagcgactgctgctggacgcggtgcaaggcgacgccagcctctttgctcgcggcgacgaagtcgaactggcctggagcatcatcgatccaatcatcgaagcgtggcgaagcccggccgctccgccactgcacacgtaccaaaccggcctttggggccccgaagaatgctcgcagtggctgttcgaccaaaaacgcgaatggttcgacgtctgcccagttatttaa

SEQ ID NO: 2708 - protein, 484 aa, Rhodopirellula baltica
MSHTIVIFGASGDLTSRKLVPALFRLFSRGRLPDSTRIVGVSRSPYEHSEWRKSLRETTAKFVGKSFSEEAWESFAPNIYYQPGDIKDAESFQSLATFLDEIEEGKSTGRVYYLSTMPQLYEEAIQQLGAAGLACDKTGPRRVIIEKPFGTDLKTAQRLNESIHNVFREDQIYRIDHYLGKETVQNIFALRFANSIFEPLWNRNYIDHVQITVAEEVVIGRRAGYYDNSGILRDMFQNHILQLMMITAMEPPAKFDAALVRDEKVKVLHSVRKMTGGDFASQTVRGQYDGYLQEEGVPANSQTETFAALKLYCDNWRWQGVPFFLRSGKGMSCRTTQIVIQFKNVPHQLFGGSKKENKLGNRLVIQVQPAEGIQLHFETKVADAGMKTRTNHLDFNFQDSIGGQEMPDAYQRLLLDAVQGDASLFARGDEVELAWSIIDPIIEAWRSPAAPPLHTYQTGLWGPEECSQWLFDQKREWFDVCPVI

SEQ ID NO: 2709 - DNA, 1524 bp, Prochlorococcus marinus subsp
  CDS (1)..(1524)
atgtcctcaaccttaagtaatcctcttagattaggtttgcgacaagaaagagtgatatctccacaatgcctaataatatttggagctagtggagatcttactcataggaaacttatacctgccttatttgaactttatctgcaaagaaggatcccaagtgaattcgccatagttggatgtgcaagaaggccttggagtgatcaagattttaaggaaaaaatgaagggtaagttagctgatcaaatatctgacaatgaaaaggaatgggaacagttttcaaattatctattctacgaaccagttgatttgcagcaaagtgatcatgtagtaagactttccaaaagattaaatgagattgataaattacaggctacacatggaaataacaccttttacttatcagtatctccaaacttttatggaagtggatgtaaggctctaaaggctgctggattactagatgatccgaagaaaagtcgaatcgttattgaaaaaccctttggaagagattattcaagtgcgaagaaattaaataagatcgttcaaagttgtgcagatgaaagtcagatatatcgaatagatcattatttggggaaagagactgttcaaaacatacttgttatgaggtttgctaatactatttttgaacctatatggaataggaattatatttcaagtgttcaaataacatcatcggaaactgttggggttgaagatagagctggttattatgaaagctctggggctttaagagatatgctccaaaatcatttaactcaaatgcttgctgtaacagcgatggagcctcctggtaaatttgaacctgaggcaataagaaatgaaaaagcaaaagttcttcaagcttcaaaacttgccgatgagaatgaaccctggaattgctgtgtcagaggtcagtatgcacaaggaggtaatagtcttaaaagacttaaaggttatagggatgaagatggagtaaatttgaacagtacaacagaaacttatattgcaacaaaagtatttattgataattggcgatggcaaggagttcctttcttcttaagaacaggtaaaagactaccgaaaagacttggggaaattgtattaacatttaaagatgtcccagtacatttatttgaatcaacaataattaatcctgcgccaaatcagcttattcttaggattcagcctaatgaaggagctacttttaaatttgaagtcaaatcacctggatctgggatgaaagcaagaccagttgaaatggaattttcttacgatgaatcttttggagagccttctgacgaaggttatgtaaggttgttggctgatgccatgctctcagatcctaccttgtttacaaggagtgatgaggtagaagctgcttggaaactttatacaccattaatagaattaatggaagacgctccttggaagttacctattcataaatacgaatcaatgacttggggacctcctgaatcagatcaattactttccaaagataatattttttggcgcagaccctaa

SEQ ID NO: 2710 - protein, 507 aa, Prochlorococcus marinus subsp
MSSTLSNPLRLGLRQERVISPQCLIIFGASGDLTHRKLIPALFELYLQRRIPSEFAIVGCARRPWSDQDFKEKMKGKLADQISDNEKEWEQFSNYLFYEPVDLQQSDHVVRLSKRLNEIDKLQATHGNNTFYLSVSPNFYGSGCKALKAAGLLDDPKKSRIVIEKPFGRDYSSAKKLNKIVQSCADESQIYRIDHYLGKETVQNILVMRFANTIFEPIWNRNYISSVQITSSETVGVEDRAGYYESSGALRDMLQNHLTQMLAVTAMEPPGKFEPEAIRNEKAKVLQASKLADENEPWNCCVRGQYAQGGNSLKRLKGYRDEDGVNLNSTTETYIATKVFIDNWRWQGVPFFLRTGKRLPKRLGEIVLTFKDVPVHLFESTIINPAPNQLILRIQPNEGATFKFEVKSPGSGMKARPVEMEFSYDESFGEPSDEGYVRLLADAMLSDPTLFTRSDEVEAAWKLYTPLIELMEDAPWKLPIHKYESMTWGPPESDQLLSKDNIFWRRP

SEQ ID NO: 2711 - DNA, 1524 bp, Prochlorococcus marinus
  CDS (1)..(1524)
atgagcaccacgatcaccaaccctttacgggttggactacgtcaagagcgggttatcgctccgcagtgcctagtcatctttggtgcaagtggcgacctgacccaccgaaaattggttccagcccttttcgagctatacaaacaacggcggctaccgagtgaattcgccctacttggctgcgcgcgacgtccttggagcaacgaaatatttcgccaaaaaatggctgaagccctcggcgagactatcaacgaaaaccatcttgcttgggatcaattcgccgctggtcttttttacgaacctgtcgatctacagaagccagaagacctcatcaaactcagccatcggctggaagagattgatcgactccgcgccacccgcagcaatcgcaccttctatctttcggtgtcaccaaagttctacggcagtggctgcaaagctcttgctaatgccggtcttctaagtgatcccaaacgcagtcgagtggttatcgaaaaaccattcgggcgtgattacgccagtgctcagtctttaaatcaaatcgtccaaagctgtggccaagagaatcaaatcttccgcatcgaccactacctcggcaaagaaacagtccagaacatccttgtgctgcgattcgcaaataccatctttgaaccaatctggaaccggaattacatctccagcgttcaaatcacagccgctgaaaccgtaggggttgaagaacgagccaactactacgaatcgtcaggggccctgcgcgacatggtgcaaaaccatctcacccagatgctggccatcaccacgatggaaccgccagggcgctttgaccctgaggcaatccgcaatgaaaaagccaaggttttgctagcggctcgcctagcggatgagttggaaccttggaactgctgcatccgtggccagtacgcacctggcggcaccaaggaagctccgatagcaggctaccgacaggagccgggtgtcgatcccagcagcaccaccgagacctatgtagcgatgaaacttttcatcgacaactggcgctggcagggagtgcccttttacgttcgcactggcaaacgactggcaaagcgtcttagtgaagtggttctcacctttcgagaagcacccgtgcatcttttcgatgccgctgggggcagccctacagcgaaccaactcatcctgcgaatccaaccggatgaaggagccgagtggcgctttgaggtgaagtcacctggttcaggcatgcgcagccgaccagtagagatggaattctcctatgacgaatccttcggtgagccatccgatgagggatacgtccgacttttagccgatgccatgctcagtgacccaactttattcacccgcagtgatgaggttgaagcagcgtggcgcctttacacccctctcctggaactgattgaagacagcccatggcaattgcccattcatccctatgaatcacgtacctgggggcccgctgctgccgataccctgcttgccaatgacggattgctctggcgccgaccctga

SEQ ID NO: 2712 - protein, 507 aa, Prochlorococcus marinus
MSTTITNPLRVGLRQERVIAPQCLVIFGASGDLTHRKLVPALFELYKQRRLPSEFALLGCARRPWSNEIFRQKMAEALGETINENHLAWDQFAAGLFYEPVDLQKPEDLIKLSHRLEEIDRLRATRSNRTFYLSVSPKFYGSGCKALANAGLLSDPKRSRVVIEKPFGRDYASAQSLNQIVQSCGQENQIFRIDHYLGKETVQNILVLRFANTIFEPIWNRNYISSVQITAAETVGVEERANYYESSGALRDMVQNHLTQMLAITTMEPPGRFDPEAIRNEKAKVLLAARLADELEPWNCCIRGQYAPGGTKEAPIAGYRQEPGVDPSSTTETYVAMKLFIDNWRWQGVPFYVRTGKRLAKRLSEVVLTFREAPVHLFDAAGGSPTANQLILRIQPDEGAEWRFEVKSPGSGMRSRPVEMEFSYDESFGEPSDEGYVRLLADAMLSDPTLFTRSDEVEAAWRLYTPLLELIEDSPWQLPIHPYESRTWGPAAADTLLANDGLLWRRP

SEQ ID NO: 2713 - DNA, 1521 bp, Prochlorococcus marinus
  CDS (1)..(1521)
atgataccgactacaaacccattgagagttggtcttagacaagagagggtaatttcacctcagtgtttaattatttttggggccagtggagatttaactcataggaaacttgtccctgcccttttcaagctattcaaacaaagacgcttgcccagtgaatttgcattactaggttgcgctagaagaccttggagtgacattgagttccgaaaaaaaatgtcagtttctcttaaagatgaaatcaaattaaatccaaatgaatgggaagaattcataactcgtcttttctatgaaccagtcaatcttgaacgaccagaagatcttgtaaaactaggtacaaggctcgaagaaatagaccggataaaagctacccatgcaaatagaaccttttatttatctgttgcaccaaaattctatgcaagtggttgcaaagctttagcagatgcaggccttctcaaagacccacgaagaagcagagtggttatcgagaaacctttcgggagggattacagaagcgctcaaagtttaaatcgtattgttcagaattgtgctcttgaaagtcaaatctttcgcatcgatcattatctagggaaagagactgttcagaacattctggttctaagatttgcaaacacaatttttgaaccaatttggaacagaaattatatatctaatgttcaaataacttcagctgaaacagtaggagtcgaagatcgagcaggctattacgaaagttcaggagcattaagggatatggtgcagaatcatttaacgcaaatgcttgcaattactgcaatggaaccacctggtcattttgatccagaagccattaggaatgaaaaagccaaagtactgcaagctgctcatttagctaatgaacttgagccttgggaatgttgtgtaagaggccaatattcaaaaggtggctctaagaaaagaccattgattggttaccgagatgaacctggtgttaatccaaatagcacaactgaaacctatgttgctatgaagcttttcattaataattggcgatggcaaggagtccctttttatattcgtactgggaaaagattggcaaaaagaactagtgaagtagttttaacctttagagaggcacctgttcaccttttcgatgcggcaggggggacaccaacatctaatcaactagtcctaagaatccaacctgatgaaggagctgagttcaagtttgatgtgaagtctccaggttctggaatgaggagcaggcctgttgaaatggaattctcttatgatgaatcatttggagaaccttcagacgaaggatatgtaaggcttttagctgatgcaatgcttggagatcctactcttttcacgagaagcgatgaggtagaagccgcttggcgtttatatactcctcttttagaaataattgaagatagtccttggcaacttccaacttatccttatgaatccagaacttggggcccttcagaagctgatgcattactagctaaagatcaattactttggagaagaccctaa

SEQ ID NO: 2714 - protein, 506 aa, Prochlorococcus marinus
MIPTTNPLRVGLRQERVISPQCLIIFGASGDLTHRKLVPALFKLFKQRRLPSEFALLGCARRPWSDIEFRKKMSVSLKDEIKLNPNEWEEFITRLFYEPVNLERPEDLVKLGTRLEEIDRIKATHANRTFYLSVAPKFYASGCKALADAGLLKDPRRSRVVIEKPFGRDYRSAQSLNRIVQNCALESQIFRIDHYLGKETVQNILVLRFANTIFEPIWNRNYISNVQITSAETVGVEDRAGYYESSGALRDMVQNHLTQMLAITAMEPPGHFDPEAIRNEKAKVLQAAHLANELEPWECCVRGQYSKGGSKKRPLIGYRDEPGVNPNSTTETYVAMKLFINNWRWQGVPFYIRTGKRLAKRTSEVVLTFREAPVHLFDAAGGTPTSNQLVLRIQPDEGAEFKFDVKSPGSGMRSRPVEMEFSYDESFGEPSDEGYVRLLADAMLGDPTLFTRSDEVEAAWRLYTPLLEIIEDSPWQLPTYPYESRTWGPSEADALLAKDQLLWRRP

SEQ ID NO: 2715 - DNA, 1488 bp, Haemophilus ducreyi
  CDS (1)..(1488)
atgaatatagaaaatagttgtatcgtaatttttggtgcatcaggggacttaacattccgtaaacttatcccagcactatataatctttttaaagtaggtcggttaggcgaacatttttctgttttaggtgtttcacgatcagacctaactcacgattcttttagacaaaaaatgcgtgaagcattaatcaaatatgagcaagcaagcgggcagtttttagatgatttttgcaatcacttgtattatcaagcaatcaacaccgctgatccggacgattatgccaaactattaccttgtttagatgaattacacaataaatacggtagctgtggtaacactttatattacctttcaacaccgcctagtttatacggcattatccctgaatgcttggcggctcacggcttaaccactgaagaatatggttggaaacggattatcatcgaaaaaccatttggttacgatattaaaacagccaaacaactcgatgagaaaatacatcattattttgaagaacatcaaatttaccggatcgatcattatcttggtaaagaaaccgtgcaaaatttattagtactccgtttctcaaacggtttatttgaaccactttggaatcgtaattttattgaatatgtagaaattaccggtgcagaatcattaggtgttgaagatcgtggtggttattatgatggatctggtgcaatgcgtgatatgttccaaaaccatttactacaagtattagcaatggttgccatggaacctccggccattattaatgctaactcaatgcgtaatgaagtagcaaaagtcttatatagcttacgtccattaagcactgaagacgtcaaaaataatgtggtacttggtcaatatacctccggtgaaattgatgacttagttgtacccggttatactgaagaaaatggcgttcccaacgattcaaatacagaaacttatttagccgtaaaatgcgaaattgataactggcgttgggccggcgtgccattttatgtgcgaacaggtaagcgtttgcctactcgggtaactgaaatcgtaatccacttcaaaacgactccacatccagtctttagccaaaatgcgcctgaaaataaattaattatccgggtacaacctgatgaaggtatttctatgcggtttggtttgaaaaaacccggtgctggttttgaggcgaaagaagtctctatggattttcgctattctgatttaagctctgcttcaagtttattaaccgcttatgaacggttactattagatgcattaaaaggagatgcgaccctatttgcccgaaccgatgccgtacatgcctgttggcatttcgtacagccgattctagactataaggcagaacgtggccgagtgtatgaatatgaagcaagcagttgggggcctaaagaagctgataaactgattgcacgcaatggcaaagtatggcgtaaaccgtctggaatgatgaagaaaaaaatatag

SEQ ID NO: 2716 - protein, 495 aa, Haemophilus ducreyi
MNIENSCIVIFGASGDLTFRKLIPALYNLFKVGRLGEHFSVLGVSRSDLTHDSFRQKMREALIKYEQASGQFLDDFCNHLYYQAINTADPDDYAKLLPCLDELHNKYGSCGNTLYYLSTPPSLYGIIPECLAAHGLTTEEYGWKRIIIEKPFGYDIKTAKQLDEKIHHYFEEHQIYRIDHYLGKETVQNLLVLRFSNGLFEPLWNRNFIEYVEITGAESLGVEDRGGYYDGSGAMRDMFQNHLLQVLAMVAMEPPAIINANSMRNEVAKVLYSLRPLSTEDVKNNVVLGQYTSGEIDDLVVPGYTEENGVPNDSNTETYLAVKCEIDNWRWAGVPFYVRTGKRLPTRVTEIVIHFKTTPHPVFSQNAPENKLIIRVQPDEGISMRFGLKKPGAGFEAKEVSMDFRYSDLSSASSLLTAYERLLLDALKGDATLFARTDAVHACWHFVQPILDYKAERGRVYEYEASSWGPKEADKLIARNGKVWRKPSGMMKKKI

SEQ ID NO: 2717 - DNA, 1497 bp, Candidatus Blochmannia floridanus
  CDS (1)..(1497)
atgcggtcaaaaacaactaccactcaagcttgtaatttcattatttttggagctaaaggagatttagctcgtaggaaattaattcctgcgctatatcaattagagaaaatcggttctatacatcctagaacttttatattaggagtaggtagagcggaatgggatttattaacatatattaaaattgtgcgttcttctttagagagatttatgaaagaatctattaatgaaaatatatggtgtcgtttttctaaaagatttgatttttgtaatttagatgttaatcaaacggaacaatttgtacatgtgctgaataaattaaaaaatttagatttattgacaataaattattttgcaatgcctcctcatacatttggatctatttgtaaaggattaagtttagtgggtttaaataaagaaagaaatagaatagtgatagaaaagccattaggaatgaactttgattctgctcgtgttattaattctcaagtatctaaatattttcatgaaactcaaatttatcgggtagatcattatttaggaaaagaagctattttaaatttgttggtattacgttttgcaaattctgtatttttttcaaattgggataacaataccattgatcatgtacaaattactgtttcagaagaggttggaattgaaggtcgttggggttattttgatgctatggggcaaatgcgtgatatggtacaaagtcatttattacaaattcttactatcattgctatgtctcctccttttgatttaagtgctgattgtattcgggacgaaaaagttaaagtgttacgttcattgcgtatgattaatactaatacgatacatgaaattgcggtacgaggtcaatatactgctggttttattaatggtcaaccagtaccaggatatttagaggaaataggttctaacaaggatagtaaaacggaaacatttgtatcgattaaagtgaatatagataattggaggtggtttggagtgcctttttatttacgtactggaaaaagattagcaatgaaatattctgaagttgttatatattttaaaaaaccaatattgaatttatttaaagattcttattcaattttacctaataataaattaattattcgattacaaccatatgaaggaatagatatgcagattctaagtaaaataccgggattaggtaataagaatcgtttaaaaattactaatttgaatttaaatttgaggaaaatattttccggagaatacatattagatgcttatgaacgattattattagaggtaatgcgtgggattcaagtattatttgtacgttatgacgaaatagaggattcatggaggtgggttgattctgttatagaggcatggtctttagttgatggtgttccaaaattatataaagctggtacatggggtccgagtgaatctacagaaatgattcgtaaaggaaatcatcattggaataaatgtacgttgaaatatacgaatatttga

SEQ ID NO: 2718 - protein, 498 aa, Candidatus Blochmannia floridanus
MRSKTTTTQACNFIIFGAKGDLARRKLIPALYQLEKIGSIHPRTFILGVGRAEWDLLTYIKIVRSSLERFMKESINENIWCRFSKRFDFCNLDVNQTEQFVHVLNKLKNLDLLTINYFAMPPHTFGSICKGLSLVGLNKERNRIVIEKPLGMNFDSARVINSQVSKYFHETQIYRVDHYLGKEAILNLLVLRFANSVFFSNWDNNTIDHVQITVSEEVGIEGRWGYFDAMGQMRDMVQSHLLQILTIIAMSPPFDLSADCIRDEKVKVLRSLRMINTNTIHEIAVRGQYTAGFINGQPVPGYLEEIGSNKDSKTETFVSIKVNIDNWRWFGVPFYLRTGKRLAMKYSEVVIYFKKPILNLFKDSYSILPNNKLIIRLQPYEGIDMQILSKIPGLGNKNRLKITNLNLNLRKIFSGEYILDAYERLLLEVMRGIQVLFVRYDEIEDSWRWVDSVIEAWSLVDGVPKLYKAGTWGPSESTEMIRKGNHHWNKCTLKYTNI

SEQ ID NO: 2719 - DNA, 1768 bp, Oryza sativa
  CDS (2)..(1768)
catggcgctctcctgcatgaggtgctccccggccgccggcgccgtacgacgaggattggcatcggcggctccgccggcggcgctctcctttgccagatgcggcctccgtagagcggccgcgctcgggtggcgcgtcgccgccgtcgccactacgggagtgcaaggtgccaaggatgctggtctggagaaagctgccagaagtgcttcccaatcaaaggtggaaaatggctcaccttcagaaatcattttagatgattttgaagacttgagccctctatcagaaaatgatgactccactgttagtatcactgtagtcggagcatctggtgaccttgccaagaagaagatatttcctgcactttttgctctatactatgaagattgtcttccaaagcatttcactatcttcggatatgcacgcagcaagatgacagatgctgaattgagaaacatggtcagcaaaacactgacatgcagaatagataaaagggaaaactgtaatgagaagatggaagagtttttaaagagatgcttctatcattcaggccaatatgattcagaggagcatttcatggaccttgacaagaagctgaaacaacatgagggttccagagtttctaaccgtcttttctacttgtcaataccaccaaatatattccttgatgttgtaaaatgtgcaagcaaatcagcatcatctgggaatggttggacaagggtaattgttgagaaaccttttggtcgtgactcagattcatcttctgcattaacaaggggtctgaagcagtacctggtagaggaccaaatcttcaggattgaccactacttgggaaaggaactagtggagaacctgtctgtccttcgcttctcaaatcttgtttttgaacctctatggtcaaggcagtatataaggaatgtgcagctgatattctcagaggatttcggcactgaaggacgaggagggtactttgataggtatggtattatccgtgacataatgcagaatcatcttcttcagatactagccctatttgcaatggaaactcctgttagcttggaggcagaggacataagaaacgaaaaggttaaagttttgcgttccatgaagcccctgcaactggaagatgtggtgataggacagtacaaaagtcatacaaagggtggtaccacataccctggatacactgaagataagacggtgcccaaggatagtgtcaccccaacatttgctgcagctgcacttttcataaataatgctagatgggatggagttccttttcttatgaaagctgggaaggctttacatacaaaaggggctgagattagagtacagttccgacatgttcctggtaatctttataagaggagttttgggactgatcttgatacagccactaatgaacttgtcatacgtgtgcaacctgatgaagctatctacttgaagattaacaacaaaattcctggtcttggtatgagactagatagaagtaatttgaatcttcactatgcagcaaggtactccaaggagataccagatgcttatgagaggctcttacttgatgccattgaaggagagcgaaggctttttatccgttctgatgagttggatgccgcatgggagctcttcactcccttactcaaggagctggaagagaagcggatagcccctgagctatacccttatggaagccgcggtcctgtaggggctcactaccttgcagcaaagtacaacgtcagatggggtgatttgaccacagaacagaaggcatga

SEQ ID NO: 2720 - protein, 588 aa, Oryza sativa
MALSCMRCSPAAGAVRRGLASAAPPAALSFARCGLRRAAALGWRVAAVATTGVQGAKDAGLEKAARSASQSKVENGSPSEIILDDFEDLSPLSENDDSTVSITVVGASGDLAKKKIFPALFALYYEDCLPKHFTIFGYARSKMTDAELRNMVSKTLTCRIDKRENCNEKMEEFLKRCFYHSGQYDSEEHFMDLDKKLKQHEGSRVSNRLFYLSIPPNIFLDVVKCASKSASSGNGWTRVIVEKPFGRDSDSSSALTRGLKQYLVEDQIFRIDHYLGKELVENLSVLRFSNLVFEPLWSRQYIRNVQLIFSEDFGTEGRGGYFDRYGIIRDIMQNHLLQILALFAMETPVSLEAEDIRNEKVKVLRSMKPLQLEDVVIGQYKSHTKGGTTYPGYTEDKTVPKDSVTPTFAAAALFINNARWDGVPFLMKAGKALHTKGAEIRVQFRHVPGNLYKRSFGTDLDTATNELVIRVQPDEAIYLKINNKIPGLGMRLDRSNLNLHYAARYSKEIPDAYERLLLDAIEGERRLFIRSDELDAAWELFTPLLKELEEKRIAPELYPYGSRGPVGAHYLAAKYNVRWGDLTTEQKA

SEQ ID NO: 2721 - DNA, 1548 bp, Bos indicus
  CDS (1)..(1548)
atggcagagcaggtggctctgagccagacacagacgtgtgggatactgtgggaagagctgtgccaaagctattctttccatcagtcggatacacacatattcatcatcatgggtgcatcgggtgacctggccaagaggaatatctaccccaccatctggtggctgttccaggatggccttctgccaaaagataccttcattgtgggctacaccgactcccacttcacagtggccaacatccgcaagcagagtgagcccttcttcaagtccaccccagaggaggagcccaagctggaggagttctttgcccacagctcctacatggccagccagtatgatgacgtggcttcctacgagcacctcaacagtggcatgaacgctctccaccagggtccgcaggccaactgcctcttctacctggccttgctccccagcggctacaggactgtcaccaagaacatctgtgacacctgcacgagccagacaggctggaaccgcatcatcgtggagaagccgtttgggagggacctgcagagctccaaccagctgtccaaccacatcgcctccctgttccacgaggaccagatctaccgcatcgaccactacctgggtaaggaggtagtccagaacctcatggtgctgaggtttgtcaacaggatcttaggccccatctggaaccgggacaacattgcttgcatgagcttcaccttcaaggagccatttggcactgagggccggtggagctacctcagtgaatctgggatcatctgggaggtgatgcaaaatcccctcctccagatcctgtgtctggtggccatggagaagcccatctccaccaactcagataacatccgtgatgataaggtcagggtgttgaaatgtatatcaaaggtgcaggtgagcaatgtggtcctgagccaatatatggagaaccccactgaagaaggtgaggccaccagagggtacccagaggaccccagggtgccccatgggtccaccactgacacctttgcagcagctgtcctctatgtggaaaatgagcgctgggacggggtgcccttcatcctgcgctgcggcaaagccctgaatgagcgcaaggccgaggtgcgcctgcagtttcgtgacgtggccggggacatcttccggcagcagtgcaagcgcaacgagctggtaatccgtgtgcagcccaacgaggccgtgtacaccaagatgatgaccaagaagcctggcatgttcttcaaccccgaggagtcggagcttgacctgacctatggcaaccgatacaagaacgtgaagttccctgacgcctacgagcgcctcatcctggacgtcttttgcgggagccagatgcacttcgtgcgtagtgatgaactgcgggaggcctggcggatcttcactccactgctccaccacattgaacgcgagaaggcccggcccatcccgtacgtgtacggcagccggggccctgtggaggcagacgagctgatgaagcgtgtgggcttccagtacgagggcacctacaagtgggtgaaccctcacaagctctga

SEQ ID NO: 2722 - protein, 515 aa, Bos indicus
MAEQVALSQTQTCGILWEELCQSYSFHQSDTHIFIIMGASGDLAKRNIYPTIWWLFQDGLLPKDTFIVGYTDSHFTVANIRKQSEPFFKSTPEEEPKLEEFFAHSSYMASQYDDVASYEHLNSGMNALHQGPQANCLFYLALLPSGYRTVTKNICDTCTSQTGWNRIIVEKPFGRDLQSSNQLSNHIASLFHEDQIYRIDHYLGKEVVQNLMVLRFVNRILGPIWNRDNIACMSFTFKEPFGTEGRWSYLSESGIIWEVMQNPLLQILCLVAMEKPISTNSDNIRDDKVRVLKCISKVQVSNVVLSQYMENPTEEGEATRGYPEDPRVPHGSTTDTFAAAVLYVENERWDGVPFILRCGKALNERKAEVRLQFRDVAGDIFRQQCKRNELVIRVQPNEAVYTKMMTKKPGMFFNPEESELDLTYGNRYKNVKFPDAYERLILDVFCGSQMHFVRSDELREAWRIFTPLLHHIEREKARPIPYVYGSRGPVEADELMKRVGFQYEGTYKWVNPHKL

SEQ ID NO: 2723 - DNA, 1536 bp, Chlamydophila caviae
  CDS (1)..(1536)
atgacaagtaatgaaaataaagatggcgggaaaaccttgctcccatgtcctccctgtgtgatggtaatcttcggagctaccggagatcttacagcgcgcaagttattcccagcattgtatcatcttattaaagagggtaggctgtctgaaaactttgtctgcgtaggttttgctagaagaaagaaaagccatgaggaatttcgtgaagaaatgaaacaggcaatacaaaacttttcacgtgctcaagagcttgatatccgcatttgggaagagtttgaatcacgtatattttatcacgaatccaacttctcttctcccgagggctacgcctcattaaaagagagacttgaggatattgataagaaatataagacacaagggaatcggctattttacttatcaacgcctccagagtatttccccgagattatcgaaaatattaataagcataagcttttttatcatgatcaaagcgaaggcaagccatggtctcgagtgattatagaaaaaccctttggtgtggatctacaaagcgctaaagaactacaaaagtacatagatgataatctagatgaagattctgtctatcgtatcgatcattatctggggaaagaaactgtacagaatattcttacgatacgttttgcaaatactctatttgagtcttgttggaattctcaatacattgatcatgtgcaaattagcgtgagtgaatctataggcataggcacacgagggaacttctttgaaaaatctggaatgcttcgtgatatggtgcaaaaccatatgatgcagcttttatgtctattaactatggaacctccttcagtattcaattctgaagaaattaaaaaagaaaagatcaatattcttaagaaaatccgtccatttgctaaagaagatattattcgtggacaatatggtccgggagaagtacaagatgtgtctgttcttggctatcgtgaagaagacaatgtagctccagattctaatgtggagacttatgtagcgttaaagatgtttattgataacccacgttggttgggagtgcctttttatcttcgagccggtaaacgtctttctaaacgctctacagatatctctatcattttcaaaaagtctttgcccagcttatttacagcggaatcttgtcccgtatgtcctttagaaaatgatctgctaattatccgtatacaaccggatgaaggcgtggccttgaaatttaactgtaaagttcctggaatgaataatatcgtacgtcctgtgaaaatggattttcgctacgatacgtatttcaagacaacggcgccggaagcttacgagagattgctttgtgactgtattctaggcgataggattctatttacctgtagtgatgaagttatggattcttgggagctctttacaccgattttaaagcgatgggagcaagattcctcagatgcgcatttccctaattatgttgctggatcttcaggtcctaaggaagcagaggaattactacaagctgatggaagaagttggcgtcccctgtaa

SEQ ID NO: 2724 - protein, 511 aa, Chlamydophila caviae
MTSNENKDGGKTLLPCPPCVMVIFGATGDLTARKLFPALYHLIKEGRLSENFVCVGFARRKKSHEEFREEMKQAIQNFSRAQELDIRIWEEFESRIFYHESNFSSPEGYASLKERLEDIDKKYKTQGNRLFYLSTPPEYFPEIIENINKHKLFYHDQSEGKPWSRVIIEKPFGVDLQSAKELQKYIDDNLDEDSVYRIDHYLGKETVQNILTIRFANTLFESCWNSQYIDHVQISVSESIGIGTRGNFFEKSGMLRDMVQNHMMQLLCLLTMEPPSVFNSEEIKKEKINILKKIRPFAKEDIIRGQYGPGEVQDVSVLGYREEDNVAPDSNVETYVALKMFIDNPRWLGVPFYLRAGKRLSKRSTDISIIFKKSLPSLFTAESCPVCPLENDLLIIRIQPDEGVALKFNCKVPGMNNIVRPVKMDFRYDTYFKTTAPEAYERLLCDCILGDRILFTCSDEVMDSWELFTPILKRWEQDSSDAHFPNYVAGSSGPKEAEELLQADGRSWRPL

SEQ ID NO: 2725 - DNA, 1524 bp, Streptomyces avermitilis
  CDS (1)..(1524)
atgtcgagcagcaacccgctgcgtgaccccgcagaccgacggctcccgcgtatcgcggggccgtcgggcctggtcatcttcggcgtcacgggcgatttgtcacgtaaaaagctgatgccagccgtgtacgatctcgccaaccgcgggctgctgccgccgggcttctcgctcgtcggcttcgcccgccgcgactgggagcacgaggacttcgcccaggtcgtccacgacgccgtcaaggaacacgcccgtacggagttccgcgaggaggtctggcagcagctcatccaggggatgcgcttcgtccagggcaccttcgacgacgacgacgccttcgagcggctgcgcgacaccatcggggaactggacaaggcacagggcacgggcggcaacttcgccttctacctgtccgtgccgccgtccgccttcccggtggtcatccagcagctcaagaagcacggcctggccgaccagtcggacggctcctggcgccgcgcggtcatcgagaagcccttcggacacgacctcaagtcggccgaggagctcaacgcgatcgtccacgaggtcttcggctcggaccaggtcttccgcatcgaccactacctgggcaaggagaccgtccagaacatcctggcgctgcgcttcgccaacacgatgttcgagccgatctggaaccggtccttcgtggaccatgtgcagatcaccatggccgaggacatcggtatcggcggccgcgccggctactacgacggcatcggcgccgcccgtgacgtcatccagaaccacctgctccagctgatggcactgaccgccatggaggagcccgcctccttcgacgcggacgcgctcgccgccgagaagaccaaggtgctcggcgccgccaagctgccgaaggacctgagcaagaacaccgtccgcggacagtacgcggccggctggcagggcggcgagaaggtcgtcggctatctccaggaagacggcatcgaccccaagtcgaagaccgacacctacgcggccgtcaagctcgaggtggacaaccgccgctgggcgggcgtccccttctatctccgtaccggcaagcgcctgggccgccgcgtcaccgagatcgcggtcgtcttccagcgcgccccgcactcccccttcgaccacacggcgacggaggagctcggccagaacgcgatcgtcatccgcgtccagcccgacgagggcatcaccgtccgcttcggctccaaggtgcccggcacctcgatggagatccgggacgtctcgatggacttcgcgtacggcgagtcgttcaccgagtccagcccggaggcgtacgagcggctgattctggacgtgctgctcggcgactcgaacctcttcccgcgcaccgaggaggtcgagctgtcctggaagatcctcgacccgatcgaggagcactgggacaagcacggcaagcccgcgcagtaccccgcgggcacgtggggtcccgtcgaggcggacgaaatgctcgaacgagacggacggagctggcgtcgcccatga

SEQ ID NO: 2726 - protein, 507 aa, Streptomyces avermitilis
MSSSNPLRDPADRRLPRIAGPSGLVIFGVTGDLSRKKLMPAVYDLANRGLLPPGFSLVGFARRDWEHEDFAQVVHDAVKEHARTEFREEVWQQLIQGMRFVQGTFDDDDAFERLRDTIGELDKAQGTGGNFAFYLSVPPSAFPVVIQQLKKHGLADQSDGSWRRAVIEKPFGHDLKSAEELNAIVHEVFGSDQVFRIDHYLGKETVQNILALRFANTMFEPIWNRSFVDHVQITMAEDIGIGGRAGYYDGIGAARDVIQNHLLQLMALTAMEEPASFDADALAAEKTKVLGAAKLPKDLSKNTVRGQYAAGWQGGEKVVGYLQEDGIDPKSKTDTYAAVKLEVDNRRWAGVPFYLRTGKRLGRRVTEIAVVFQRAPHSPFDHTATEELGQNAIVIRVQPDEGITVRFGSKVPGTSMEIRDVSMDFAYGESFTESSPEAYERLILDVLLGDSNLFPRTEEVELSWKILDPIEEHWDKHGKPAQYPAGTWGPVEADEMLERDGRSWRRP

SEQ ID NO: 2727 - DNA, 1647 bp, Streptomyces avermitilis
  CDS (1)..(1647)
atgagcaagactccttcgaccgggacgccgggcaccgagaagcctgtcaccgggacgccggccaccgagacgcctgtcacggaggctccggtcaccgaggctccggtcaccgaggcgtcggccgtcgactgggccaaccccctgcgcgacccccgggaccgccgtctcccccgtatcgcgggcccctcgggcctcgtcatcttcggggtcaccggcgacctgtcccgcaagaagctgatgccggccatctacgacctggccaaccgcggtctgctcccgccgggcttctcgctcctcgggttcgcccgccgggactgggaggaccaggacttcgcgcaggtggtgcacgactcggtgcgcgagcacgcccgcacggagttccgcgaggaggtctggcagcagctcgccgagggcatgcggttcatcccgggcgacttcgacgacgacatggcgttcaagcaactgcgcgcgtccgtcgacgagctggacgcctcccgcggcaccagcggcaactacgccttctatctctcggtaccgccgaagttcttcccgaaggtcgtccagcagctcaagaagcacgggctcgcggacgcgccggagggctcctggcggcgtgcggtcatcgagaagccgttcggccacgacctggccagcgcgcgtgagctgaacgcgatcgtgcacgaggtgttcgacccggaccaggtgttccgcatcgaccactacctgggtaaggagaccgtccagaacatcctggcgctccgcttcgccaaccagatgtacgagccggtctggaaccggtcgtacgtcgaccacgtacagatcaccatggccgaggacatcggcatcggcggccgtgcggggtactacgacggcatcggttcggcccgtgacgtcatccagaaccacctcctccagctgatggcgctgaccgccatggaggagccggccgccttcgacgccgagtcgctgctcgccgagaagctgaaggtcctcaagtccgtgaagctgccggggaacctgggcgagcacaccgtgcgcggtcagtacacggcgagctggcagggcggcgagcgggtgcgcggctacctccaggaggacggcatcgaccccaggtcgacgacggacacctacgcggccgtgaagctggaggtcgacaaccgccgctgggcgggcgtccccttctatctgcgcaccggcaagcgtctgggccgccgggtgaccgagatcgcggtggtcttccagcgcgcgccccactcccccttcgactcgaccgccaccgaggagttgggcgccaacgcgatcgtcgtccgtgtccagcccgacgagggcatgaccgtgcgcttcggttcgaaggtgccgggtacgtcgatggagatccgggacgtctcgatggacttcgcgtacggcgagtcgttcaccgagtccagcccggaggcgtacgaacggctgatcctggatgtcctgctcggcgacgccaatctcttcccccgccatcaggaggtggaagagtcctggaagatcctcgacccgatcgaggggtactgggacacgcacggcaagcccgcgcagtacccctcgggatcctggggtcccgaggaagccgacgagatgctcgcacgagacggacggagctggcgcaggccatga

SEQ ID NO: 2728 - protein, 548 aa, Streptomyces avermitilis
MSKTPSTGTPGTEKPVTGTPATETPVTEAPVTEAPVTEASAVDWANPLRDPRDRRLPRIAGPSGLVIFGVTGDLSRKKLMPAIYDLANRGLLPPGFSLLGFARRDWEDQDFAQVVHDSVREHARTEFREEVWQQLAEGMRFIPGDFDDDMAFKQLRASVDELDASRGTSGNYAFYLSVPPKFFPKVVQQLKKHGLADAPEGSWRRAVIEKPFGHDLASARELNAIVHEVFDPDQVFRIDHYLGKETVQNILALRFANQMYEPVWNRSYVDHVQITMAEDIGIGGRAGYYDGIGSARDVIQNHLLQLMALTAMEEPAAFDAESLLAEKLKVLKSVKLPGNLGEHTVRGQYTASWQGGERVRGYLQEDGIDPRSTTDTYAAVKLEVDNRRWAGVPFYLRTGKRLGRRVTEIAVVFQRAPHSPFDSTATEELGANAIVVRVQPDEGMTVRFGSKVPGTSMEIRDVSMDFAYGESFTESSPEAYERLILDVLLGDANLFPRHQEVEESWKILDPIEGYWDTHGKPAQYPSGSWGPEEADEMLARDGRSWRRP

SEQ ID NO: 2729 - DNA, 1491 bp, Nitrosomonas europaea
  CDS (1)..(1491)
atgaatgatgcaaaaatgagccagactgaaaagctgccctgcctgtttgtcatttttggtgcaactggagatctcgcctcaaacaagttgctgcccgcgttatttgagttggaaaatgctggccgcctggcagataatttttccatcgttgctttctcgcgccgcgagtggacaactgacgattggctcgaacatctgcgtgaaatactgaagaataggattgatcaatcttttccggaaggagtgctggagcgtttttttgcacgtttccgttatcagcagggagatctcaacgatatcgaatcctatcgtgtgttagctgccggtctggcgcccggatcggcttgttctcgtacggtattttatcttgcgatcaggcctgctgatttcgttgcggtgatcaggaatctcaaagctgctggcctcaatgagccgcgaggaatgaaccgtgtagtgattgaaaaaccgtttggagaggatcttgaatcggcacaggtactgaatcgcttattgcatcagcattttgatgaagagcagatttatcgtatcgatcatttccttggtaaggaaaccgtacagaatctgcttgttttccggtttgccaatacgttgatcgagccactgtggaatcgtaattttattgatcatgtacaaattacggtggcggaatcgggtggtattgaaaaacgtgcagggtattatgatcgtgctggtgcgttgcgtgatatgttgcagaatcatttgatgcaattattgaccgtagttgccatggaaccgccacctgctcttgaggcagatgctttacgtgacgaaaaggtcaaagtactacgttcgattcgtcccattgccaagcgcgcgatacatgcccatgctgtgcgcgctcaatatactcacggtaatatcgatgggcaggtggtggcaggttatcagcaggaagataatgttgaacgggattcgattaccgaaacttttgtggcagccaagttctacattgataattggcgctggcggggagtgccgttttatctgcgtacaggtaagcgtatgccgaaacagaattcgatgatcgcaattcgtttcaagcatcctccccagcaacttttccgtgaaacaccattggaatggattgcaccaaactgggtgttgctttcgattcagcctgaagaatcgatgcacatggaaattcatgttaaacaacccggtctcgatatgaatacccgggtgatgcagatgaacgcaagttttctcaaaaccgatgaacaggcgctggatgcttatgaagcgctactgctcgacgtcattgaaggcgatcgctcacttttcattcgttttgatgaagttgaatgggcgtggcaagtgattgatcctattctgaaacattgggtggtagagcgcgaatatatcccgacttaccctgctggcagttgggggccggcagaggctaatcgcttgtttgacaacgatgatcagacctggcgcaacgagctttag

SEQ ID NO: 2730 - protein, 496 aa, Nitrosomonas europaea
MNDAKMSQTEKLPCLFVIFGATGDLASNKLLPALFELENAGRLADNFSIVAFSRREWTTDDWLEHLREILKNRIDQSFPEGVLERFFARFRYQQGDLNDIESYRVLAAGLAPGSACSRTVFYLAIRPADFVAVIRNLKAAGLNEPRGMNRVVIEKPFGEDLESAQVLNRLLHQHFDEEQIYRIDHFLGKETVQNLLVFRFANTLIEPLWNRNFIDHVQITVAESGGIEKRAGYYDRAGALRDMLQNHLMQLLTVVAMEPPPALEADALRDEKVKVLRSIRPIAKRAIHAHAVRAQYTHGNIDGQVVAGYQQEDNVERDSITETFVAAKFYIDNWRWRGVPFYLRTGKRMPKQNSMIAIRFKHPPQQLFRETPLEWIAPNWVLLSIQPEESMHMEIHVKQPGLDMNTRVMQMNASFLKTDEQALDAYEALLLDVIEGDRSLFIRFDEVEWAWQVIDPILKHWVVEREYIPTYPAGSWGPAEANRLFDNDDQTWRNEL

SEQ ID NO: 2731 - DNA, 1524 bp, Enterococcus faecalis
  CDS (1)..(1524)
atgaatgaaaaagtagcattatttactattttcggggggacaggtgatcttgccaaacgtaaattgtatccttccctgttccgcttatataaaaaaggattattagctgagcgttttgcggtgattggtaccgcacgtcgggaatggacagacgaatactatcgtgaaatcgtccgtgaaaccattcaagacttaaatcccacggccgaagaggcaactgaattttctagtcatttctattaccaatcacataatgtgaatgatacggaacattataataccttaaaagaattatctgatcgcctaaatgaacaataccacttagaaggcaatcatgtttactatttagctatggcccctcaattctttggaaccattgttaatcacttgaaatcacaacatattatttcggaagaaggctttgatcgtctaattatcgaaaagccatttggttctgattatgaatctgcctacgaattaaatgaagaaattcgtgctgcatttcctgaacaagatattttccgaattgaccattacttaggcaaagaaatgatccaaaatatttcagccattcgttttgccaataatatttttgaatcacaatggaacaatcgttacattgataatgtccaaatcaccttcgctgaaagcttaggtgtcgaggatcgtggcggctattatgaccacagtggcgcactaaaagatatggttcaaaatcatattttacaagtcgttgcattgctttctatggagcctcctgttgccttttctgaaaaagaaattcggactgaaaaagtaaaagctttacgtgccatccgcctttattctgaagaagaagcccttcaaaatttcgtgcgtggacaatacggcgaaggtcagctagctgatcaaacatttgcagcctatcgtgatgaaccaaatgtggcagaaacttcatccactgaaacttttgttgctggtaaatttttaattgataatttccgttggtctggcgtccctttctatgttcgcacaggtaaacgattaactgaaaaaggcacacgcattaacatcgtctttaaacaagtacctattaatgtcttcaaagatgatacgtgtgaagaatgcgataaaaccgatttaccaccgaatgttttaactatctatatccaaccaactgaaggattttcattaaccttaaatggaaaagaaatcggtcaagggttcaatacaactccagtgaaacttgatttccgtcaaagtgctgaaatgactgaaaatagtccagaagcatacgaaaaacttctattagactgcctaaatggcgatagtacaaacttctctcattgggacgaagttgcccaatcttggcgcattgttgacattattcgacatgcttgggataaaacagacgtttctttccctaattatgccgctggcacaatgggcccgcaagctgccttcgacttattagaaaaagatggctttacttgggaatggcaaccagataactggtaccgtgaccgcggtcaacttgatcaataa

SEQ ID NO: 2732 - protein, 507 aa, Enterococcus faecalis
MNEKVALFTIFGGTGDLAKRKLYPSLFRLYKKGLLAERFAVIGTARREWTDEYYREIVRETIQDLNPTAEEATEFSSHFYYQSHNVNDTEHYNTLKELSDRLNEQYHLEGNHVYYLAMAPQFFGTIVNHLKSQHIISEEGFDRLIIEKPFGSDYESAYELNEEIRAAFPEQDIFRIDHYLGKEMIQNISAIRFANNIFESQWNNRYIDNVQITFAESLGVEDRGGYYDHSGALKDMVQNHILQVVALLSMEPPVAFSEKEIRTEKVKALRAIRLYSEEEALQNFVRGQYGEGQLADQTFAAYRDEPNVAETSSTETFVAGKFLIDNFRWSGVPFYVRTGKRLTEKGTRINIVFKQVPINVFKDDTCEECDKTDLPPNVLTIYIQPTEGFSLTLNGKEIGQGFNTTPVKLDFRQSAEMTENSPEAYEKLLLDCLNGDSTNFSHWDEVAQSWRIVDIIRHAWDKTDVSFPNYAAGTMGPQAAFDLLEKDGFTWEWQPDNWYRDRGQLDQ

SEQ ID NO: 2733 - DNA, 1464 bp, Tropheryma whipplei
  CDS (1)..(1464)
atgccaaaggtgaattgcgcaacacagcagattgccctgcctggggcgcttgctatattcggggcaacgggtgacctgagctccaaaaaactattgccagcggtgtacgacttgtttcataactctcttctatcaaatgggttcgttttaattgctctgaatagagacttctcggcgcaagattttatctgtcacttccgccattgcgttaagtctttctctaggacgggatggtcagagtctgtttttcttgatctccaaaaaagggtacatcatgtaagtggcgacttttccgaccccgagacatatattgagctctctgagaaattagaaaccaccaaagaggaaactgggggtaattgtgttttttatctctcagttccgccaaatgtatttactcccatcatgaaaaacttgtctgctagtgggctgtctagaggatgtttgcataaaattgctgttgaaaaaccctttggtaatgaccttaaaagtgcaatacagcttaattcagtgcttaggtcagctttccctgagcgtgctatctttcgggttgatcactatcttggtaaagagaccattcaaaatattcttacttttcgttttggaaaccaaatctttgaccctatttggaataggaaacatgttgatcatgtgcagattacgatgtctgaagatataggggttgagggtcgcagtaagtactatgacggaatcggtgctgcacgtgatgtattacaaaatcatcttttgcagcttatggctctaattacgatggagagaccctcgaatttgaataacgcgagtgatataaggcacgagaagcagagagttttggaatgtgtgagtcttccgaaaaatatagctcaaaatgctgttcgtggccaatactcatccggctatctacgggatgagagggttgtatcttttttgcaagaagatggggttaatccatcttcaagaactgaaacattcgcggcgataaagctaaatgccgataatgaacgttggtatggtgtacctttctacgttagaactgggaaacggatggcaaaacgtagtgcatatataagtcttgtattcaagccaactgatatgagtattttgcaaaatgtgattgttataaggttgcaaccagacgagggtgtgtctatttggtttgcgtcgaaagtgcccggttatcgttctgatattcgacaggtgaattttgatttttcgtataaaagctcatttactgaatcaagtccagaggcttatgaacgcttaattctggatgcaatgaggggtgaggcctccttgtttccgcagcaaagagaagtggagttgtgttggggcataatagacccccttgaggaggtttgggaaaacgacaataccctgataccccaatacactccaggaagttgggggccagatacttcaaacgaccttttgctcagaacgtccaggcactggagaaattactga

SEQ ID NO: 2734 - protein, 487 aa, Tropheryma whipplei
MPKVNCATQQIALPGALAIFGATGDLSSKKLLPAVYDLFHNSLLSNGFVLIALNRDFSAQDFICHFRHCVKSFSRTGWSESVFLDLQKRVHHVSGDFSDPETYIELSEKLETTKEETGGNCVFYLSVPPNVFTPIMKNLSASGLSRGCLHKIAVEKPFGNDLKSAIQLNSVLRSAFPERAIFRVDHYLGKETIQNILTFRFGNQIFDPIWNRKHVDHVQITMSEDIGVEGRSKYYDGIGAARDVLQNHLLQLMALITMERPSNLNNASDIRHEKQRVLECVSLPKNIAQNAVRGQYSSGYLRDERVVSFLQEDGVNPSSRTETFAAIKLNADNERWYGVPFYVRTGKRMAKRSAYISLVFKPTDMSILQNVIVIRLQPDEGVSIWFASKVPGYRSDIRQVNFDFSYKSSFTESSPEAYERLILDAMRGEASLFPQQREVELCWGIIDPLEEVWENDNTLIPQYTPGSWGPDTSNDLLLRTSRHWRNY

SEQ ID NO: 2735 - DNA, 2145 bp, Leishmania mexicana
  CDS (298)..(1986)
aggcggagcgcgagcgcggcatcacgatcgacattgcgctgtggaagttcgagtcgcccaagtcggtgttcacgatcatcgatgcgcccggccaccgcgacttcatcaagaacatgatctaaaataaagcgaagaacaccaaggagaaatcgaaaaggacaggcgactcgtcgagaaagagaatttggtgtccttattgaacccccttcctattacttgtttagagctctcgatcgcattttattttgcctttggctaccatatagtgatcagtggcaggtacatcaattaagcaccatgtcggaagagcagtttgctgcttctcaagaggcctatgtggccgacgtcgacagcattctggacgtgctccgcgcgcaagtgctggagcggaagccggataacgttctccagtttatctccaagtcggcgcttagtctacagaaggacagcagctcggaatcctgcgatctcatcagctgtaaggtgaaggatgagcagaagagtcgttcgttgaccatcatcgtgttcggtgccagcggagatctggccaagaagaagacatttcctgccctcttcagcctgtactgcggtggccttctccccccggatgtcaatattatcggctatgcgcgcaccaaggtggacgatgccgagaagtggaagcatgagacgctcatgaagcatttttcgaacttgtcggagcgtgaatgccacgccgaggatttcttgaaacatatcagctatttttgtggatcatacgacaaggtggaagacttcaagcgtcttgacattatgattcgcgaaaaggagaatgcttttaagggccctgaaaagggtggaaaccgtctcttctacctcgctcttccgccatccgttttcgcgactgtctgtgaaagcatttacaagggcgtgatgccgcaagaagtagggggatgggttcgggtgatcatcgagaagccctttggccgcgatactgagagctccgcggagctgtcacgagcgctggagccgttcttcaacgagtcacagatctaccgcattgatcactacctcgggaaggagatggtgcagaacatcattacaacacgcttcgccaaccgtattttcagcgctgtgtggaactcgagcaacatcgcgtgcgtgcagatcaccttcaaggagaccataggcactgagggccgtggtggctacttcgacagcatcggcattattcgcgacgtcatgcaaaaccatctcacacaaattcttgcattgctggcgatggagaagccgcggacgcttgacgccgagtgtatccgtgacgagaaagtgtcagtactgaaacacattgaaccagtaaccaaggagaattgtgttctggggcagtacactgcctccgccgatggctccattcctggctacctggaagacgagaccgtacccaagggcagcacttgccctacatttgctgtgatgcggcttaacatcaacaacgaccgctgggccggcgttccttttattctcaaggccggcaaggctgtggagcagaagtacgtagcaattcgcattcagttcaaggacgaggtacacccctacggtgaggcgacacagcgcaacgagctcgtcatccgtgcccagccgtccgaggccatgtatgtcaagatcaccacaaaggttcctggcctgagcggtgacttgcgacaaacgcaccagacagagctggacctcacatatcacacccggtacgatgtgcgccttccagatgcctacgaaagccttctcaatgacgcacttctggggagctcgacaaattttgtgcgcaaggacgagcttgacgtggcatggcgcatcttcacaccgcttctgcaccagatcgaccgtggagagatcaaacccattcagtaccaggccggtacgcgtgggcccaaggaagcggatgagttcatcatcagcaacggctttaagcaccagaaaggctatcactggcttcccttcaacaaactgtgaaaggaggcgaatcagtctgttttacagtcgcctgctgatgacagcgagagacgcagagcgtctcacgctgatgagtgtcatatgcggtcaggaatcactgatggcgctctgccatatgcacacacgggcaacacacgagagtgaagacagacatcacgc

SEQ ID NO: 2736 - protein, 562 aa, Leishmania mexicana
MSEEQFAASQEAYVADVDSILDVLRAQVLERKPDNVLQFISKSALSLQKDSSSESCDLISCKVKDEQKSRSLTIIVFGASGDLAKKKTFPALFSLYCGGLLPPDVNIIGYARTKVDDAEKWKHETLMKHFSNLSERECHAEDFLKHISYFCGSYDKVEDFKRLDIMIREKENAFKGPEKGGNRLFYLALPPSVFATVCESIYKGVMPQEVGGWVRVIIEKPFGRDTESSAELSRALEPFFNESQIYRIDHYLGKEMVQNIITTRFANRIFSAVWNSSNIACVQITFKETIGTEGRGGYFDSIGIIRDVMQNHLTQILALLAMEKPRTLDAECIRDEKVSVLKHIEPVTKENCVLGQYTASADGSIPGYLEDETVPKGSTCPTFAVMRLNINNDRWAGVPFILKAGKAVEQKYVAIRIQFKDEVHPYGEATQRNELVIRAQPSEAMYVKITTKVPGLSGDLRQTHQTELDLTYHTRYDVRLPDAYESLLNDALLGSSTNFVRKDELDVAWRIFTPLLHQIDRGEIKPIQYQAGTRGPKEADEFIISNGFKHQKGYHWLPFNKL

SEQ ID NO: 2737 - DNA, 1494 bp, Dictyostelium discoideum
  CDS (1)..(1494)
atgacatcaacaccagactctcgttcagttttaacagtaattattttaggtgcatcaggtgatcttgcaaagaaaaagacctatccagcactctttggtttatatcttagagatttgttaccaagcaacacaatcatttatggttatgctagatcacatattgaaattggtgatttcaaagctagaatctcaaaaggattaaaaggtgatgaagaaaagaaaaaacaatttttaaatttattacattatcattcaggtaaatatgatgaaaaagcatcctatgatgaatttgaaaaattaattttagcagaagaaaagaaacaacaaggtgttgataaattcaatcgtttattctatatggcaattccaccatcaattttcattgaagttagtattggtattcatggttcattgatctcaaagaatggttggtcaagagttatcgttgagaaaccatttggacgtgatttagcatcctcaagagagttggttagtgaattgggtaaacttttcaaagagaaagatttattccgtatcgatcattatttgggtaaagagatggtacaaaatttaatggtattaagattcgccaatgcagtattcgagccattatggtcaaaatcacatatctcttcaatcaccatcacattcaaagaagacattggtaccgagggtagaggtggttatttcgatcaatttggtatcattagagatgtaatgcaaaatcatttgcttcaagtactctctttggttgcaatggagccaccagtgtcattgaatgccgatgatatcaccaatgaaaaggttaaattacttcgttgtattcaaccaattaaaatgagtgaagttgtactcggtcaatatacttccgatcctgaaggtaaaattccagcctatttagatgatgaaggtgttccaaaggattcaaccactccaacctatgctgccgctgttttccatatcaataatccaagatggagaggtatgccattcatcttaaaatgtggtaaagctttagatgaaagaaaaactgaagttagaattcaattcaaacgtccagataactttttattctctgatgatgatatctcaagaaatgaattagttatgagaattcaaccaggtgaagctgtttacttaaaattattatcaaagaaaccaggtttagaaaataaaattgaacaaactgaattagatttatcatatcgtcatagatttgaaaatcttgatttaccagatgcatatgaacgtttaattcttgattcaattaaaggtgatcataaccttttcgtcagagatgatgaattagatgttgcatggcaaatatttacaccattactcgatcaaattgaaaaagaaaagattaaacctgaaccatattcctttggttcacgtggtccaaaatctgctgatgaattatcaaagaaatttggtttcattagatccttaggttataattggccaggtaattctccacaaggtagtaaaaaataa

SEQ ID NO: 2738 - protein, 497 aa, Dictyostelium discoideum
MTSTPDSRSVLTVIILGASGDLAKKKTYPALFGLYLRDLLPSNTIIYGYARSHIEIGDFKARISKGLKGDEEKKKQFLNLLHYHSGKYDEKASYDEFEKLILAEEKKQQGVDKFNRLFYMAIPPSIFIEVSIGIHGSLISKNGWSRVIVEKPFGRDLASSRELVSELGKLFKEKDLFRIDHYLGKEMVQNLMVLRFANAVFEPLWSKSHISSITITFKEDIGTEGRGGYFDQFGIIRDVMQNHLLQVLSLVAMEPPVSLNADDITNEKVKLLRCIQPIKMSEVVLGQYTSDPEGKIPAYLDDEGVPKDSTTPTYAAAVFHINNPRWRGMPFILKCGKALDERKTEVRIQFKRPDNFLFSDDDISRNELVMRIQPGEAVYLKLLSKKPGLENKIEQTELDLSYRHRFENLDLPDAYERLILDSIKGDHNLFVRDDELDVAWQIFTPLLDQIEKEKIKPEPYSFGSRGPKSADELSKKFGFIRSLGYNWPGNSPQGSKK

SEQ ID NO: 2739 - DNA, 1503 bp, Xylella fastidiosa
  CDS (1)..(1503)
atgctgctcacgcaaacaaaaacacccccacaccaacaaacgttaacatccaaatccgagaccaggtccatgcacaacaccctcttattgtttggcgccaccggcgacctcgcccaacgctatctcttcccctccttactgcaactgtttactgatggcttattgccacaagacttccgcattcgtgctctggccttgtcaccccataacaccacacaattccgcgacatcctgcgcacgcgcttggaacaagcactacccatcgccaacaccgcgcacatccaagccctactacaacgtgtcgactacctttccgtagacttgaacgacccaacatcaatcgccgaagcagtccgagatctgacggaacatccctgcatcagctacttggcaatcccaccaggcctgtataccaacaccgccctaggattggcacaaggaggggcactgcagacaccacaccgattgatgctggaaaaaccgatcggacgcgactcaataaacgcacgcgaaatcctaaacaccatcggcacactgattgacgaagatcgcatcttccgcgtagaccactatctaggcaaagcagcagtgcagaacctcgtcgcactgcggttcggaaacaccctgctagaagcggtatggaaccgaaaccacattgagtccgtacacatcctcatcgccgaaaccgaaggcgtcgatggccgcaatgcttactacgcacgtgctggcgcactacgtgacatgatgcaaagccacatcctgcaactcctatgcctggtcgctatggaacccccggtctctatggaagccgaccgcatacgcgacgaaaaagtcaaagtcctgcgcgcactacgcccactgaacgcccaaaacgccgcaatgcacagcgtgcgcggacgctacagcgcgggcaccattaacagccaaccagtgccagcctatcaaccaccagaaggcagcaatgtagagacctttgtcggtgtcaccgcatacatcgacaactggcgctgggcgggcgtaccgttccatctatgcacaggaaaacgcttggccgaacgctcaacccaaatcgtcgtcaccctcaaacccgtcacacactggctatttgaacgtccaaaccggaacaatgcagcaccaaaccgcctgtgcttcaaactacagccccaggaaaatatcgaactaaacctgatgagcagcctggccggccccgaatggggaaccctagaactgcaaccgctggaattggagttatccgtcccaaccgggaaacatcgccacatcgcctatgagcgccttttcctcgacgcattcaacggcaaccctgcgctatttgtacgtcacgacgaagtcacagaagcctgggcttggatcgacagcatcagcaatgcctgggaactgtccgacttaccactgcaaccctaccccgccggcggctggggcccacctcaagcccaccaatttctgccgccattggggattgatggccatggaaacaacgcatga

SEQ ID NO: 2740 - protein, 500 aa, Xylella fastidiosa
MLLTQTKTPPHQQTLTSKSETRSMHNTLLLFGATGDLAQRYLFPSLLQLFTDGLLPQDFRIRALALSPHNTTQFRDILRTRLEQALPIANTAHIQALLQRVDYLSVDLNDPTSIAEAVRDLTEHPCISYLAIPPGLYTNTALGLAQGGALQTPHRLMLEKPIGRDSINAREILNTIGTLIDEDRIFRVDHYLGKAAVQNLVALRFGNTLLEAVWNRNHIESVHILIAETEGVDGRNAYYARAGALRDMMQSHILQLLCLVAMEPPVSMEADRIRDEKVKVLRALRPLNAQNAAMHSVRGRYSAGTINSQPVPAYQPPEGSNVETFVGVTAYIDNWRWAGVPFHLCTGKRLAERSTQIVVTLKPVTHWLFERPNRNNAAPNRLCFKLQPQENIELNLMSSLAGPEWGTLELQPLELELSVPTGKHRHIAYERLFLDAFNGNPALFVRHDEVTEAWAWIDSISNAWELSDLPLQPYPAGGWGPPQAHQFLPPLGIDGHGNNA

SEQ ID NO: 2741 - DNA, 1506 bp, Vibrio parahaemolyticus
  CDS (1)..(1506)
atgatggtaataccagaaaacagcagcatcgttatttttggtgcttcaggtgaccttacatatcgtaagctcattcctgctttataccacctttatgcgaacaagcagcttccagagagttttgccattcttggcgtaagtcgtactgaatacagtgacgagtcctaccgcgagaagctgaaaaaatcgcttcaagaaatggaaaaaaccgagccagaaacgcttgatgcatttatcaaccatctgcattaccaagcaattaacacttctgacacgcaagattacagcaagctggcaacacgtttagaccaacttgccgacgaatatcaattcgaacaacgtaatacgcttttctacctagctacacctccaagcctatacagtgtgatccctgcaagccttgcagcacatggtttgaacaatgaggaagatggctggaaacgtctgatcatcgagaaaccgttcggttacgaccttgagtcagcacgcacgttggataaagaaattcacgagcacttccaagaacatcaaatctaccgtatagaccattatttaggtaaagagacggttcaaaacctgcttgttttccgtttctctaacgcgatgtttgaaccgctttggaaccgtaacttcattgattacgtggaaatcacaggcgctgaattccttggcgtagaagagcgtggtggttactacgacaactctggcgctgtgcgcgatatgttccaaaaccacttgctacaagtattggcaatggtcggtatggaaccaccagcacaaatcaacgcagattcaatgcgtgatgaagtggtgaaagtgcttcaatgcctaaaaccactggatgaaacagcattacgtaacgatcttgtccttggtcagtacactgcatcagacgtacgcggccaacaccttccgggttaccgtgaagaaaacggcgtagcggacgattctcgtactgagacgtacattggtctaaaagcttacatcaacaactggcgttggaatggtgtacctttctatgtacgtacaggtaagcgtcttccgactcgcgttactgaagtggttattcactttaaacaaacaccgcacccagtgtttggccaaaatgcgccagaaaacaaactgatcattcgtattcagccagacgaaggcattcagatgagctttggtttgaaagaaccaggtgcaggctttaatgcgaaggaagtgaaaatgaacttccactacgcagacctgcaagagactcaaatgctaactgcgtacgagcgtcttctacttgatgctctaaatggcgatgcgacgctatttgcacgtagcgatgcagttgaagcatgttggcagtacgttcagccaattttagacttcaaacaagatcctcaatcactcttcggatacgcatgtggtacatggggtcctaaagagtctgatgacttgcttcagcgtgacaaccgcgcttggcgtttcccatgtaaaaacctaacagatacggactactgtgaactatga

SEQ ID NO: 2742 - protein, 501 aa, Vibrio parahaemolyticus
MMVIPENSSIVIFGASGDLTYRKLIPALYHLYANKQLPESFAILGVSRTEYSDESYREKLKKSLQEMEKTEPETLDAFINHLHYQAINTSDTQDYSKLATRLDQLADEYQFEQRNTLFYLATPPSLYSVIPASLAAHGLNNEEDGWKRLIIEKPFGYDLESARTLDKEIHEHFQEHQIYRIDHYLGKETVQNLLVFRFSNAMFEPLWNRNFIDYVEITGAEFLGVEERGGYYDNSGAVRDMFQNHLLQVLAMVGMEPPAQINADSMRDEVVKVLQCLKPLDETALRNDLVLGQYTASDVRGQHLPGYREENGVADDSRTETYIGLKAYINNWRWNGVPFYVRTGKRLPTRVTEVVIHFKQTPHPVFGQNAPENKLIIRIQPDEGIQMSFGLKEPGAGFNAKEVKMNFHYADLQETQMLTAYERLLLDALNGDATLFARSDAVEACWQYVQPILDFKQDPQSLFGYACGTWGPKESDDLLQRDNRAWRFPCKNLTDTDYCEL

SEQ ID NO: 2743 - DNA, 1533 bp, Pseudomonas syringae
  CDS (1)..(1533)
atgggtctgtcgcgcggcagtgccgagcaaaaagccgaagttgcgcccccaaccaccctgtttctgttcggtgcacatggtgacctggtcaagcgtctgctgatgccggcgctttacaacctgtcgcgcgacggtctggtggatgaagggctgcacatcgtcggcgtcgatcacaacgcgatcagcgatgcggacttcgccaaaaaactcgaaaatttcattcgcgacgaggccgccggcaaaattgccggcggtggcaaggaccctctcgatcctgcgttgtggggcacgctggccgagcgtatcagctatgtgcagggtgactttctggatgattcgacctatcaggacatcgccagcaagattgagagcaccggtgcgaaaaacgcggtgttttatctggccaccgcgccgcggttcttcagcgaagtggcccagcgcctggggtcgtccggtttgctgcaggaaaccgatgacgggttccgccgggtaatcatcgaaaagccgttcggctccgatctggccagtgcagtggcgctcaatggctgcctgctcaaggtcatgagcgaaaaacagatctaccggatcgaccattacctgggcaaggagacggtgcagaacattctggtcagccgtttctccaatggcctgttcgagtcgttctggaacaaccactacatcgaccacgtgcagatcaccgccgcggaaaccgtgggtgtcgagacccgtggcagtttttacgagcacaccggtgcactgcgcgacatggtgcccaatcacctgttccagttgctggcgatggtcgcgatggagccccccgcggccttcggtgccgacgcggtccgtggcgaaaaagccaaggtggtgggcgcgatcaggccgtggaacaaagaggaagcactggccaattcggtacgcggtcagtatgcgcagggcacgatgggcgacaaggaggttgtcggttatcgccaggaagatcgggtcgagcctgacagtacgacggaaacctatgtggcgctcaaggtcatggtcgacaactggcgctgggtgggcgtgcctttttatctgcgcacaggcaagcgcatgagtgcccgcagcactgaaatcgccatctgcttcaaacctgcgccctatgcgcaatttcgtgacaccgaagtcgatcgtttgaagcccaactacctgcgcatccagattcagcccaacgaaggcatgtggttcgatctgttcgccaaacggcccggcccgacgctggacatggaggacatcgcgctgggttttgcctataaggacttcttcgagatgcagccttcgaccggctacgaaacccttatatacgactgtctgaccggcgaccagaccctgtttcagcgtgccgacaacatcgaaaacggctggcgtgctctgcagccgtttcttgatgcctgggccagccagcctgaagttcagccgtatgaggctggcaagaacggacctgatgcgggtgacgagttgctgagccgtgatggtcgcgagtggagagatctgaatgtctga

SEQ ID NO: 2744 - protein, 510 aa, Pseudomonas syringae
MGLSRGSAEQKAEVAPPTTLFLFGAHGDLVKRLLMPALYNLSRDGLVDEGLHIVGVDHNAISDADFAKKLENFIRDEAAGKIAGGGKDPLDPALWGTLAERISYVQGDFLDDSTYQDIASKIESTGAKNAVFYLATAPRFFSEVAQRLGSSGLLQETDDGFRRVIIEKPFGSDLASAVALNGCLLKVMSEKQIYRIDHYLGKETVQNILVSRFSNGLFESFWNNHYIDHVQITAAETVGVETRGSFYEHTGALRDMVPNHLFQLLAMVAMEPPAAFGADAVRGEKAKVVGAIRPWNKEEALANSVRGQYAQGTMGDKEVVGYRQEDRVEPDSTTETYVALKVMVDNWRWVGVPFYLRTGKRMSARSTEIAICFKPAPYAQFRDTEVDRLKPNYLRIQIQPNEGMWFDLFAKRPGPTLDMEDIALGFAYKDFFEMQPSTGYETLIYDCLTGDQTLFQRADNIENGWRALQPFLDAWASQPEVQPYEAGKNGPDAGDELLSRDGREWRDLNV

SEQ ID NO: 2745 - DNA, 1470 bp, Pseudomonas syringae
  CDS (1)..(1470)
atgcccttgattacggttgaaccgtgcacatttgccctgtttggtgccctgggggacctggcggtacgcaagctgttcccggctctttatcagcttgatcgcgctggactgctgcatgaagacacaaaaattcttgccctggcgcgtgaaccaggcgacgaacagtcgcatctggcctacatcgaaaaatccatgcgccgcttcattcccgaggcggagcttgaggccgacaacgcagcgcgcttcctggcgcgcctcagctacctgcatgtcgattttctcaaggccgaggactatgttgcgctggccgagcgcgttggcaatgccgagacgctgatagcctacttcgccacgccggcctcggtgtacggcgcgatctgcgagaacctcgcgtcggtgaacctggccgagcgcacacgcgccgtcctggaaaagcccatcggccatgacctggcctcgtcgcgacgggtcaacgacgccgttgcgcagttcttcccggaaaaccgcgtctaccgaatcgaccattacctgggcaaggacacggtccagaacctcattgccctgcggttcgccaacagcctgttcgagacccagtggaaccagaaccatatttcccacgtggaaatcacggttgccgagaaagtcggcattgagggccgctggggctacttcgatcaggccggccagctgcgcgacatgattcagaaccacctgctgcagttgctctgcctgatcgccatggacccgcccagcgacctgtcggccgacagtattcgtgacgagaaggtaaaagtgctcaaggcactggccccgttcacccccgagcgtctggccacccaggtggtgcgcggtcagtacaccgctggctacagcgaaggcaaggcagtgccgggttatctggaagaagagaactcaaacacccagagcgacaccgaaacctttgttgcgttgcgtgccgatatccgcaactggcgctggtcgggtacgccgttttatctgcgtaccggcaagcgcatgccgcagaaaatgtcgcagatcgtgatccacttcaaagagccgccgcactacatctttgcccctgagcagcgtttgcagatcagcaaccgcctgatcattcgtctgcagcctgacgaaggtatttccctgcaggtgatgaccaaggatcaggggctggacaaaggcatgcagctgcgcagcggccccttgcaactgaatttttccgacacctaccgcagcgctcgtgtccccgacgcttatgagcggttgttgctggaagtcatgcgtggcaatcagaacctgtttgtccgcaaagatgaaatcgagtacgcctggcaatggtgcgatcagctgattgccggctggaagaaggcgggcgatgcgcccaagccttacccggccggaacctgggggccaatgagctccattgccctgattactcgcgacgggagatcctggtatggcgatatgtga

SEQ ID NO: 2746 - protein, 489 aa, Pseudomonas syringae
MPLITVEPCTFALFGALGDLAVRKLFPALYQLDRAGLLHEDTKILALAREPGDEQSHLAYIEKSMRRFIPEAELEADNAARFLARLSYLHVDFLKAEDYVALAERVGNAETLIAYFATPASVYGAICENLASVNLAERTRAVLEKPIGHDLASSRRVNDAVAQFFPENRVYRIDHYLGKDTVQNLIALRFANSLFETQWNQNHISHVEITVAEKVGIEGRWGYFDQAGQLRDMIQNHLLQLLCLIAMDPPSDLSADSIRDEKVKVLKALAPFTPERLATQVVRGQYTAGYSEGKAVPGYLEEENSNTQSDTETFVALRADIRNWRWSGTPFYLRTGKRMPQKMSQIVIHFKEPPHYIFAPEQRLQISNRLIIRLQPDEGISLQVMTKDQGLDKGMQLRSGPLQLNFSDTYRSARVPDAYERLLLEVMRGNQNLFVRKDEIEYAWQWCDQLIAGWKKAGDAPKPYPAGTWGPMSSIALITRDGRSWYGDM

SEQ ID NO: 2747 - DNA, 1458 bp, Pseudomonas putida
  CDS (1)..(1458)
atggagagtggtggtttgactattccttgcgacattctggtcttcggcggcaccggtgatctggccctgcacaaattgcttccggcgctctaccacctgtttcgcgaggcccgtctgaaccctgccgtgcgggtcatcgcactggccaggcgcaacctgccacgcatcgactatctgaagctcgccgaacgccattgtcgggcgcagattgcccgcagcgacttcgacgaagaggtgtggcagcggttttccgcacgggtcgactacttcccgatggatgcttcacagagcgccgacttcggccgcctggcacgctacctgggcgaacccggtggactgacacgcatcttctacctggccaccgctcccaacctgttcgtgccgattgccaaccacctgcgcattgccggactggccgacaccgaagcgcgcatcgtgctggaaaaaccgatcggccattcgctggaatcggccactgccatcaatgaagcgattggcacggtgttcgaagaaagacaggtgttccgcatcgaccactacctgggcaaggaaaccgtgcagaacctgatggccctgcgttttgccaatgccctgctggagccggtgtggcgcaacaaccaggtcgaccatgtccagatcagcgtttgcgagacactgggcgtagaaaaccgcggtgcctactacgatcgcgccggggctattcgcgacatgctgcagaaccacctgctgcagctgctgtgcctggtggccatggagccacccgcgcaattcgaggcagaggcggtacgcgacgaaaaggtgaaaatcctgcgcgccctcaagccgatcaccggccaggatgtgcaggacaagacggtacgcggccaatatggggccgggcgtatcggcggccaggaagtgccggcctactactttgaaaaggacgtcgacaacgacagcgataccgaaactttcgtggccatcgaggcgcatatcgacaactggcgctgggcgggcgtgcctttctatctgcgcaccggcaaacgcatggcgcggcgcgcttcgcagatcgtcatccagttcaagccagtgcctcacgaactgttcagcggcggccaggtcaaccagttgctgatacagctgcaaccggacgaacgcatcagcctgcgcatgatgaccaagagcccaggcaagggcatgcgcctggaacccgtggacctggaccttaatctggcccaggtgttcagccagactcgccgctgggaagcctacgagcgtctgctgctggatgtgctcgaaggtgattcgacactgttcatgcgccgcgatgaagtggaagcagcctgggcttgggtagatccaatcatcaagggctgtgaagagcacttccaggcgccccgcccctacccggctggcagtttcgggcccgaacaagccaacagcctgctcgccaggcatggcaggcactggcatggctga

SEQ ID NO: 2748 - protein, 485 aa, Pseudomonas putida
MESGGLTIPCDILVFGGTGDLALHKLLPALYHLFREARLNPAVRVIALARRNLPRIDYLKLAERHCRAQIARSDFDEEVWQRFSARVDYFPMDASQSADFGRLARYLGEPGGLTRIFYLATAPNLFVPIANHLRIAGLADTEARIVLEKPIGHSLESATAINEAIGTVFEERQVFRIDHYLGKETVQNLMALRFANALLEPVWRNNQVDHVQISVCETLGVENRGAYYDRAGAIRDMLQNHLLQLLCLVAMEPPAQFEAEAVRDEKVKILRALKPITGQDVQDKTVRGQYGAGRIGGQEVPAYYFEKDVDNDSDTETFVAIEAHIDNWRWAGVPFYLRTGKRMARRASQIVIQFKPVPHELFSGGQVNQLLIQLQPDERISLRMMTKSPGKGMRLEPVDLDLNLAQVFSQTRRWEAYERLLLDVLEGDSTLFMRRDEVEAAWAWVDPIIKGCEEHFQAPRPYPAGSFGPEQANSLLARHGRHWHG

SEQ ID NO: 2749 - DNA, 1506 bp, Pseudomonas putida
  CDS (1)..(1506)
atgactaaacagacccttgcggccgcccccccttgtaccctgttcctgttcggcgccaatggcgacctggtcaagcgcctgctgatgcccgcgctgtacaacctcagccgtgacggtttgctggaccgtaacctgcgcatcgtcggcgttgaccataacccggccagcgccgaggatttcgccgcgcgcctgcacgcgttcatggtcgagcgtgacaaaggcggcgagggcagcgccaagtgcctggacgagaagctatgggcccgcctggccaagcgcctcgattaccagacgggcgactttctcgatccggccacctaccaggccctggccaggcgcatcgacaagacccgccacggcaatgccattttctatctggccacgtcgccgcgcttcttccccgaggtggcgcagcgcctggggcaggccggcttgctggacgagtctgccggcggctttcgccgggtggtggttgaaaaaccgttcggcaccgacctggccagcgccgaggcgctcaacgcctgcctgctgaaggtgatgggcgagcggcagatctaccgcatcgaccattacctgggcaaagagacggttcagaatattctggtcagccgcttttccaacggcttgttcgaatcgttctggaacaatcactacatcgaccacgtgcagatcaccgcagcggaaaccgtcggtgtcgagacccgtggtgcgttctatgacagcaccggcgccctgcgcgacatggtgcccaaccacctgttccagttgctggcgatggtggccatggagccgccggccgcgttcggcgccgatgcggtgcgcggtgaaaaggccaaggtggtcggcgctattcgcccatggtcggcaaaaatggcccagaagaattccgtacgaggccagtacagagccggcaagcaggggcgcaagccgttgccaggctaccggcaggagcccaacgtcgcgccggatagccagaccgagacctacgtggcgctgaaggtgatgatcgacaactggcgctgggccggcgtgccgttctacctgcgcaccggcaagcgcatgagcgtgcgtgacaccgagattgccatctgcttcaagcccgcaccgtatgcgcagtttcgcgagtcggagctggaacggcccaaacccaactacctgaaaatccagatccagcccaatgaaggcatgtggttcgacctgcaagccaaacggcccgggccagagctggtgatggagaatgtcgagttgggttttgcctacaaggacttcttcaagatgaccccggccactggctacgagacgctgatctatgactgcctgaccggtgaccagaccctgttccagcgggctgacaacatcgaaaacggttggcgagcggtgcagccgtttctcgatgcctgggcccagggcggcgaagtgcatgagtactcggctggcgaagatgggcctgaggccggcaatgaattgctgacccgcgacaagcgggagtggcaccggttggggtga

SEQ ID NO: 2750 - protein, 501 aa, Pseudomonas putida
MTKQTLAAAPPCTLFLFGANGDLVKRLLMPALYNLSRDGLLDRNLRIVGVDHNPASAEDFAARLHAFMVERDKGGEGSAKCLDEKLWARLAKRLDYQTGDFLDPATYQALARRIDKTRHGNAIFYLATSPRFFPEVAQRLGQAGLLDESAGGFRRVVVEKPFGTDLASAEALNACLLKVMGERQIYRIDHYLGKETVQNILVSRFSNGLFESFWNNHYIDHVQITAAETVGVETRGAFYDSTGALRDMVPNHLFQLLAMVAMEPPAAFGADAVRGEKAKVVGAIRPWSAKMAQKNSVRGQYRAGKQGRKPLPGYRQEPNVAPDSQTETYVALKVMIDNWRWAGVPFYLRTGKRMSVRDTEIAICFKPAPYAQFRESELERPKPNYLKIQIQPNEGMWFDLQAKRPGPELVMENVELGFAYKDFFKMTPATGYETLIYDCLTGDQTLFQRADNIENGWRAVQPFLDAWAQGGEVHEYSAGEDGPEAGNELLTRDKREWHRLG

SEQ ID NO: 2751 - DNA, 1470 bp, Pseudomonas putida
  CDS (1)..(1470)
atggccgcaatcagtgtcgaaccttgcacctttgccctgtttggcgccctcggcgacctggcattgcgcaagctgtttcctgcgctctaccagctcgaccgggccaacctgttgcacccggacacccgcctgctggccctcgcccgtgaggtcggcagtgcgcaggagcacctggacagcatcgaagcccacctgcgccggcacgtgcccgaggcagatatcgagcctgctgcgctggggcgcttccttgcccgcctgaattaccagcacctggacttccttcagcccgagggctatcaggccctggccgagcagctgccgggcgagctgccgctgatcgcctacttcgccacggcggcggcggtgtatggggccatctgcgaaaacctcgacaaggtcgggctggctgcgcgcacccgggtagtgctcgagaaacctattggccacgacctggagtcgtcgcgccgggtcaacgacgccgtggcgcggttcttccctgaaagccgggtttaccgcattgaccattacctgggcaaagagacggtgcagaacctgattgccctgcgcttcgccaatagcctgttcgaaacccagtggaaccagaattccatctcccatgtggagattaccgtcgcggaaaaggtcggtatcgagggccgttggggttatttcgacaaggccggccaactgcgcgacatgatccagaatcacctgctgcagttgctgtgcctgatcgccatggacccgcccagcgaactgtccgccgatgccatccgcgacgagaaggtgaaagtgctcaaagccctggcaccgatcactggcgacggcctgagcaccagcgtggtgcgcggccagtacattgccggctacagcgaaggcaagccggtgccgggttacctggaagaagacaacgccaacgcccagagcgacaccgaaaccttcgtcgccctgcgcgccgacatccgtaactggcgctggtcgggcgtgccgttctacctgcgaaccggcaagcgcatgccgcaaaaactgtcgcagatcgtcattcacttcaaggaaacgccgcactacatcttcgccccggaacagcgtttgcagatcggtaacaagctgatcatccgcctgcaaccggacgaaggcatttctttacgggtgatgaccaaggagcagggcctggacaagggcatgcaactgcgcagtggcccattgcagctgaatttttccgatgcctggcgcagtgcacgaattccggatgcctacgagcggctgttgctcgaagtgatgcgcggcaaccagaacctgttcgtgcgcaaggacgaaatcgagtatgcctggaagtggtgcgaccagttgatcgccggctggcgtaatgcgggcgatgcgcccaagccatacgcggcgggctcctgggggccgatgagctcgattgcactgatcacacgcgatgggagggcgtggtatggggatatctga

SEQ ID NO: 2752 - protein, 489 aa, Pseudomonas putida
MAAISVEPCTFALFGALGDLALRKLFPALYQLDRANLLHPDTRLLALAREVGSAQEHLDSIEAHLRRHVPEADIEPAALGRFLARLNYQHLDFLQPEGYQALAEQLPGELPLIAYFATAAAVYGAICENLDKVGLAARTRVVLEKPIGHDLESSRRVNDAVARFFPESRVYRIDHYLGKETVQNLIALRFANSLFETQWNQNSISHVEITVAEKVGIEGRWGYFDKAGQLRDMIQNHLLQLLCLIAMDPPSELSADAIRDEKVKVLKALAPITGDGLSTSVVRGQYIAGYSEGKPVPGYLEEDNANAQSDTETFVALRADIRNWRWSGVPFYLRTGKRMPQKLSQIVIHFKETPHYIFAPEQRLQIGNKLIIRLQPDEGISLRVMTKEQGLDKGMQLRSGPLQLNFSDAWRSARIPDAYERLLLEVMRGNQNLFVRKDEIEYAWKWCDQLIAGWRNAGDAPKPYAAGSWGPMSSIALITRDGRAWYGDI

SEQ ID NO: 2753 - DNA, 1485 bp, Lactobacillus plantarum
  CDS (1)..(1485)
atgagtaacgaaaaaattgccttattcaccatctttggcggtactggtgacctcgcacagcgtaaactgtacccgtcactatttaagctctatcaaaagggctatctcaaggaccactttgccgttattgggacggctcggcgtccttggactgatgatcactatcatgaagttattagtgactccctagctgatctgaatgctgatcaggaaacggtgacgcaatttgcgagccatttttattatcaatcgcatgacgttactgatgctgaacattaccgaactttgaaaaaattatcagaaaagctggacgcccaatatggtttacaaggcaaccggatcttctacttagcaatggcaccaaacttcttcggtacgattgcccaacacttacgttccgaaaatattctgacagataacggttttaaccgcgtcattatcgaaaagccttttggtcatgattatgaaagtgccaaggaacttaacgaccaattaacggctacttttaacgaaaatcagatttatcgaattgaccactaccttggtaaagaaatgattcaaaatatcacggccattcgttttggcaataatatttgggaatcattatggaacaaccgttacatcgacaatgtccaaattacgttaagtgaaaaactgggtgtcgaagaacgggccgtttactatgataacagcggtgccttgcgggatatggtccaaaatcacattttgcaaattttgagtctgttaacaatggatcaaccagttgaattcactgaaaatgatatcgacgtggaaaaggtcaaggctttacggagcttacgaccacttaaaccagaagaagtcgcaaccaactttgtccgtggtcaatacggtgccggcgatgatgctaaagcttaccgcgacgaagataagatttcatcagattctaacaccgatactttcgtcgctggtaaagtcatgatcgataattatcggtggtccggagtgccgttttacatccggactgggaaacgcttagccgataagttcacgcgaatcgacgtggtgttcaaacggccagtcgtcaatatcttcaatcatgaagacgtccgagctaatgacgacgcagcaaccagtctcgatccaaacatcttgacaatcaacgttgaaccgactgaaggcttcgagctccgcatgaatgctaaagcaatcggccaaggcttcgcaaccaccccggtcaagttgaattattctcacgatgctgaagccacggctggtagcccagaagcttacgaacgtttgcttcacgatgccttaaatggcgacgcaaccaactttacccactggcaagaggttgccgattcgtggaaattcgttgacgtcattcaaaaatactgggatgaacatcaacccgaatttccaaactaccgccctggtacaatgggaccagatgcggccgatgaattattacgtcaagatggtcaccgctgggtctaccgcaactag

SEQ ID NO: 2754 - protein, 494 aa, Lactobacillus plantarum
MSNEKIALFTIFGGTGDLAQRKLYPSLFKLYQKGYLKDHFAVIGTARRPWTDDHYHEVISDSLADLNADQETVTQFASHFYYQSHDVTDAEHYRTLKKLSEKLDAQYGLQGNRIFYLAMAPNFFGTIAQHLRSENILTDNGFNRVIIEKPFGHDYESAKELNDQLTATFNENQIYRIDHYLGKEMIQNITAIRFGNNIWESLWNNRYIDNVQITLSEKLGVEERAVYYDNSGALRDMVQNHILQILSLLTMDQPVEFTENDIDVEKVKALRSLRPLKPEEVATNFVRGQYGAGDDAKAYRDEDKISSDSNTDTFVAGKVMIDNYRWSGVPFYIRTGKRLADKFTRIDVVFKRPVVNIFNHEDVRANDDAATSLDPNILTINVEPTEGFELRMNAKAIGQGFATTPVKLNYSHDAEATAGSPEAYERLLHDALNGDATNFTHWQEVADSWKFVDVIQKYWDEHQPEFPNYRPGTMGPDAADELLRQDGHRWVYRN

SEQ ID NO: 2755 - DNA, 1440 bp, Clostridium tetani
  CDS (1)..(1440)
atgaaaaataaagccattaccatatttgggggaacaggagatttagcctatcgaaaattattcccttctctatataatttatatatgttagggagtattaatgatgaatattctattataggaattggtaggagagattatacaaaagaggattatttaacttatattcaagcaggagttaaaaagtttgccagaataaattatagtgatgataagtttgataagttttctaaaattataacctattataaaatggatattcaaaaggaagaagaatataagggtttaattaaatattataaagataaagatattattaaaaatcatatttactattatgcagttgcaccaagattttttattccaataactaaaggattaaaaaataataaatgttaccttaaagatgcaaaagttattattgaaaagccttttggagaagatttagaatcagctacttacctaaatgaacagctttcttttgtatttaaggacaagaatatttatcatattgatcattatttaggcaaagaaatgatacaaaatattataaatataagatttgccaacgcaatatttaaaggaatttggaacaaagattttattgagaatatacaaattaatgcttttgaaagcataggtgttaacaatagaggtggctattatgaccaaagtggtgcattaaaagatatggttcaaaatcatctatttcaattattgtccatagtagctatggaagaacccaaagaatttaatagtgattttattcatgaagctcaactcaaggtattaactgaaatgaagccaatagaggatagggatattgataattacttagttatgggtcaatatgaaggatatagggaagaaaaagatgttaatctaaaatcaaaaacagaaacttatgttgctatgaaaataataattgataatgaaagatggcaaggtgtacctttctatattcgtacaggtaaaaagctaaataagagagaaacggaaattataattaaatttaaatcaacaaataaaaatatagaaggaaatttattaattataaaaattcaaccagatgagggaatttatttaaaatttaatataaagaaacctggtactgtggatgagattcaaaaagtaagtatggatttttgtcaaagctgtattttagagaatagaattaatacgccagaagcctatgaaagattattaaaagcatgtatggattcagatagaagtttattttcaaaatgggagcaaattgtagtaagttggaaatatatcaacaaagttttagaaagttatagatcttattcaaataaactttataggtataagccggagacaattggaccaaaggaggcagaagagttagttaaaaaggataatcattattggataaatgatgaaagtaatagttgcttaaaacaaggagaggatagttaa

SEQ ID NO: 2756 - protein, 479 aa, Clostridium tetani
MKNKAITIFGGTGDLAYRKLFPSLYNLYMLGSINDEYSIIGIGRRDYTKEDYLTYIQAGVKKFARINYSDDKFDKFSKIITYYKMDIQKEEEYKGLIKYYKDKDIIKNHIYYYAVAPRFFIPITKGLKNNKCYLKDAKVIIEKPFGEDLESATYLNEQLSFVFKDKNIYHIDHYLGKEMIQNIINIRFANAIFKGIWNKDFIENIQINAFESIGVNNRGGYYDQSGALKDMVQNHLFQLLSIVAMEEPKEFNSDFIHEAQLKVLTEMKPIEDRDIDNYLVMGQYEGYREEKDVNLKSKTETYVAMKIIIDNERWQGVPFYIRTGKKLNKRETEIIIKFKSTNKNIEGNLLIIKIQPDEGIYLKFNIKKPGTVDEIQKVSMDFCQSCILENRINTPEAYERLLKACMDSDRSLFSKWEQIVVSWKYINKVLESYRSYSNKLYRYKPETIGPKEAEELVKKDNHYWINDESNSCLKQGEDS

SEQ ID NO: 2757 - DNA, 1512 bp, Bradyrhizobium japonicum
  CDS (1)..(1512)
atgacaaaagacccgcaagccaagcgcaagccggaaaattgcgccttcgtcatctttggcgtgaccggagaccttactcatcgccttgtgatgccctcgctctacaatctcgcggccgagcacctgttaccggaaaagttctgtgtcgtcggcgtggcccgcaagggccaatcggatgacgagctgcgcagcagcctgttgaagggcctgcgccagttcgcgacgcgacccgtggacgacgatatcgcccagaagctgctgcaatgcctgaccttcgtcgaggccgacccgaaggactcgccgtccttcgaccgcttgcgcgagcatctggattcgctggaatgcgcgcaggacaccggcggcaaccggctgttctatctggcaacgccgcccgccgcgttcgcgccgaccgcgcgcgagctcggccgcaccggcatgatggaggagaacggcgcctggcgacgcctcgtgatcgaaaagccgttcggcaccgatctcgcctcggcacgcgcgctgaacgccgagctcctgaagatcatggacgagcaccagatctaccggatcgatcactatctcggcaaggagacggtgcagaacattttggtgctgcgctttgccaacggcatgttcgagccgatctggaatcgcaaccacatcgaccacatccagatcacggtggaagagaagctcggcgtcggccatcgcggcggcttctacgacgccaccggcgcgctgcgcgacatggtaccgaaccatctgttccagctgatgtcgctggtcgcgatggagccccccgcccgcttcgacgcgcattccgtgcgctccgagaaggccgacgtgctcacctcgatccagcagcccagccgggaagaggcgctgaagaattcagtgcgcgcgcaatatctcgccggccgcatcggcgacgaggagatcacggactatcgcaagaccgaggacgtcaagcccggcagcaccaccgagacctttgtcgcgctcaagctgatgatcgacaattggcgctgggccggcgtccccttctacttgcgcaccggcaaggcgctgggtcacaagcgcaccgaagtcgcgatcaagttcaagcaggcgccgctgtcgatgttttcgggcacggacgtcgaccgcctgtcgcagaacttccttaccatcggcatcgcgccgaccgagaccatcgagcttcagttcaacgccaagattccgggcccgagcatcaccatcgacggcgtcgagatgaagttccgctatggcgactatttccgcgtcgatccctcgaccggctacgagacgctgatctacgactgcatgatcggcgacaacatactgttccagcgcgccgacggcatcgaggccggatggcaggcggtgcagccgttcctggacgcctggaagagcgagggcaccaacggcatcgagacctatgaagccggcagcgacggccccgcctgcgcggacgagctgctccggcgcgacggacgaagctggcggaagttttcgtga

SEQ ID NO: 2758 - protein, 503 aa, Bradyrhizobium japonicum
MTKDPQAKRKPENCAFVIFGVTGDLTHRLVMPSLYNLAAEHLLPEKFCVVGVARKGQSDDELRSSLLKGLRQFATRPVDDDIAQKLLQCLTFVEADPKDSPSFDRLREHLDSLECAQDTGGNRLFYLATPPAAFAPTARELGRTGMMEENGAWRRLVIEKPFGTDLASARALNAELLKIMDEHQIYRIDHYLGKETVQNILVLRFANGMFEPIWNRNHIDHIQITVEEKLGVGHRGGFYDATGALRDMVPNHLFQLMSLVAMEPPARFDAHSVRSEKADVLTSIQQPSREEALKNSVRAQYLAGRIGDEEITDYRKTEDVKPGSTTETFVALKLMIDNWRWAGVPFYLRTGKALGHKRTEVAIKFKQAPLSMFSGTDVDRLSQNFLTIGIAPTETIELQFNAKIPGPSITIDGVEMKFRYGDYFRVDPSTGYETLIYDCMIGDNILFQRADGIEAGWQAVQPFLDAWKSEGTNGIETYEAGSDGPACADELLRRDGRSWRKFS

SEQ ID NO: 2759 - DNA, 1497 bp, Bacteroides thetaiotaomicron
  CDS (1)..(1497)
atggataaatttgcaatgattatttttggtgcttcgggcgacttgactaaacgcaagttgatgcccgcattgtactctctgtatcgggataaacggctgacggggagttttactgttctgggaattgggcgtactgtctattctgatgaagattaccgttcatatatacttggggagttgcagcagtttgtaaaggctgaagagcagaatttggagctgatgtcttcttttgtgtctcatttgtattatttgccgatggatcctgcgaaagtggagggatattcgcagttgcgggagcgtttggtagagcttacgaaggaggtcgatccggataatttgttgttctatctggctactccgccttcgctgtatggggtggtgcctttgcatttgaaggcggccgggctgaatactcctcattctcgtattattgttgagaagccgttcgggtatgatctggagtcggcgcttgagttgaataagatttactcttctgtgtttgatgagcatcagatttatcgtatcgatcattttctgggcaaggagacggcgcagaatgtgcttgctttccgtttcgccaatggtatttttgagccgttatggaatcgtaattatattgattatgtggagattactgctgtagagaatctgggtattgagcagcgcggaggtttttacgagacggcgggggctttgcgggatatggtgcagaatcacctgattcagctcgtagctcttacggctatggagccgccggcggtattcaatgcggataatttccggaatgaggtagtgaaggtttatgagtcgctgactccgcttacggagacggacttgaatgaacatatcgttcgcggacaatatacggcttcgggcaataagaaggggtatcgtgaggaaaagggagtggctcccgactcgcgtacggagacttatattgcgatgaagctgggcatcagtaactggcgttggagcggggtaccgttctacatccgcaccggtaagcagatgccgacgaaggtgacggaaattgtcgttcacttccgcgagacgccccatcagatgttccgctgttccggcggtaactgtccgagggctaataagttgatccttcgtttgcaaccaaacgagggtattgtgttgaagatcggaatgaaggttccgggtgcaggtttcgaagtccgtcaggtgacgatggatttcagttacgcacagttgggcggcgtgccgagcggtgacgcttatgcccgtctgattgacgactgcattcagggagatccgaccttatttactcgaagtgatgctgtagaggcttcctggaacttctttgatccggtcttacgttattggaaagataatccggacgcacctttgtacggctatccggcaggtacgtggggacctctcgaaagtgaagctatgatgcacgagcatggggcagactggaccaatccgtgtaagaatttaacaaatacagaccaatattgcgaactatga

SEQ ID NO: 2760 - protein, 498 aa, Bacteroides thetaiotaomicron
MDKFAMIIFGASGDLTKRKLMPALYSLYRDKRLTGSFTVLGIGRTVYSDEDYRSYILGELQQFVKAEEQNLELMSSFVSHLYYLPMDPAKVEGYSQLRERLVELTKEVDPDNLLFYLATPPSLYGVVPLHLKAAGLNTPHSRIIVEKPFGYDLESALELNKIYSSVFDEHQIYRIDHFLGKETAQNVLAFRFANGIFEPLWNRNYIDYVEITAVENLGIEQRGGFYETAGALRDMVQNHLIQLVALTAMEPPAVFNADNFRNEVVKVYESLTPLTETDLNEHIVRGQYTASGNKKGYREEKGVAPDSRTETYIAMKLGISNWRWSGVPFYIRTGKQMPTKVTEIVVHFRETPHQMFRCSGGNCPRANKLILRLQPNEGIVLKIGMKVPGAGFEVRQVTMDFSYAQLGGVPSGDAYARLIDDCIQGDPTLFTRSDAVEASWNFFDPVLRYWKDNPDAPLYGYPAGTWGPLESEAMMHEHGADWTNPCKNLTNTDQYCEL

SEQ ID NO: 2761 - DNA, 4583 bp, Mus musculus
  CDS (119)..(2488)
agagcttcatctggaagtgctggtccccagattggccatgaggggaccaaatgcagaccagggttgactgacaccaggttgtgttctttgcctgcactggcacacaggcatttggaagatgctcctagcggcaatgtgcttggcccttctgggctgcctacaggcgcaggaactcaagggtcatgtttccataatcctgctgggagcaaccggggacctagctaaaaagtacctgtggcagggactgtttcagctatacctggatgaggctgggaagggccacagtttcagcttccacggtgctgccctgacagccccccagcaaggccagaagctcatggacaaggccttggaatccctctcctgtcccaaggacttggtacccagtcgctgtgatgaactcaagggtcagtttctacagctgagccaataccaccagctgaagacagtggaggactatcagaccctcaacaaggatattgagacccaggtccagcaggatgggctctgggaggcaggcaggatcttctacttcagtgtgccgccctttgcctacgcagacattgcccgtaacatcaacagcagctgccgaccacacccaggtgcctggctacgggttgtttttgaaaaaccctttggccatgaccacctctcagcccagcagctggcttcagaacttggaagctttttccaggaggaggagatgtaccgtgtggatcattacctcggcaagcaggcggtggctcagatcctgcccttccgagatcagaaccgcaaggccttggatggcctctggaacaggcaccatgtggagcgggtggagatcattttgaaggagaccatagatgcggaaggtcgggccagtttctatgaggagtatggcgtcatccgtgacacgctgcagaaccacctgactgagatcctcacgctggtggccatggaactgcctctcaacatcagcagctcagccaccgtgctccagcataagctctgggccttccaggccctgcgggggctgcagaagagcagtgccatcctgggccagtaccaggcctacagcggacaggtgcgccgagagctgcagaagccagacggcttccagagcctgacaccaaccttcgcaggtgtccttgtccacatcgacaacctgcgttgggagggtgtccctttcatcctgatgtctggcaaggccttggatgagagagtgggctatgttcggattgtgtttaagaatcgggcgtactgcacccagagcgagagacactgggtgccggagcagagccggtgcctgccccagcagattatcttctacattggacacggtgagctgggccaccctgccattctggtcagccggaacctgttcaaaccctcactacccactcagaagtggaaggaggtgcaggaccagcctgggctccgcctgttcggccgtcctctgtctgattactacgcctacaggcctgtgcgggagcaagacgcctactccaccctcctgtcgcacatcttccactgccgaaaggagtccttcatcaccaccgagaacctcttggcctcctgggtcttctggaccccgttactggacagcctggcctttgaagttccacgcccgtacccagggggagccgagaatggccagctgctggacttcgagtttagcggtggtcagctgaccttctcccagcagcagctggaggtgctgataccagatctaggctcagtcccaaagcccagtgacttccaggtcctcggggcccggtatagacagagcccactgattaccgcctggccagaggagctgatctctaagctggccagtgacattgaagccgccgcggtgcaggcggtacggcacttcggcaagttccacctggcactgtcaggtggttcgagccccatagctctcttccagcagctggccacagggcattacagcttcccctgggcccacacacacctctggctggttgatgagcgctgtgtccctctctcagatccagactccaacttccagggcctgcaggctcacctgctacagcacgtcagggtaccctactacaacatccacccaatgccagtgcacctgcaccagcggctctgtgccgaggaggaccagggagctcagacctatgccagtgagatctcagccctggtggccaacagcagcttcgacctggtgctcctgggcatgggcaccgacgggcacacggcttctctgttcccacagtcccccacaggcctggatggtgatcagctggtggtgctgacggagagcccgttcaggccacaccaacgcatgagcctcagcctgcccctcatcaaccgagccaagaaggtagctgtcctggtcatgggcaggacaaaacgtgagatcacaacgttggtgagccgcgtgggccatgaacccaagaagtggcccatctcaggtgtggtgcctctttctgggcagctggtttggtacatggattacgaggcctttctgggatgacagtaccatcctggtcttagtcactctcagccttcctctttagctgcccactgtgcctcagctgtgtggagcctggtaccagagtcaggccccagagaagggaggacaaaactctgtgccgacttcctggacccactggttctcgggaatttcggtgcctgcacatggaaacaaggtagagctctggcctcaaaacccaggtaggagagggactaaggcctccagcagttacacaccagtagctacaacacacagtaagactgggcgaaggctccacgctaaagaaccaaagtggcctgccaagactggcctgcaatcttcaaactggtttctgtggaaagaggggccagtgttgatggggagcagggtgcagagactcctggtgaatgtcttgctctgagccaggccagcagagtagacacaatcctgagcctgcaccgggcgccttgcctcttctggtatcccatcatccctctgtgcacctagctgagatccagcgctcctccgggcagcttctgtctactctgggaggacacccactgtcctcagtattccccattacccctcagcctctccctctctacagacacagacactgccacgtcagaagttcccccagatctagagaccggggctccctttcccactaagaactgttatgctgtcattgggctgtcgggcatctctgatctaactagacgggagggctctgtctgctcctgggtcgggggtgactccagatcacagcctctttctagggcttatgtggccaattgccagcatcagggcagactgcagctagccctcctcacactacctctctctggcttcaagtctggcagcagcccctcctctgccgggcatctccaccattcttactgacgaacctggtaccactgggaacactacaggcagctcctaacttcagtcccctccagggccaacaacataaacatttcagggcacatacagttttcatttaggcctcctgctgagtcatgtgaacaagggaaggcccagaagggttaggatggcccgtcctcacagttacctatgtgtcagtcacagagtctccgtgtctttcagaattttcccatagagaggtttcctgtgatgaggagcgtcaggaaatctgtttctctccttttatttgattgtactttctcccagacagcacatggaaaagaattcttgctttcactagagatgtgtgcatagagtgtagcctgagctgagggctctgtatgaaaggcactcttgttgaaattctgcttactctgacctccagtgacccagactgacagaacacctctattccttggcagaaaagaggaacgccctggggtcctttcctggcctgctttgctcaggcttggatgcaggtagtcgcaggtgaagttccacctttagccatgtgggggagcccacgtgccaccactcacattccacccaggaggcgggttttagtgccaaacgtcttttcttcgcttttcttgctcactgcctctcaggcgtcttagcccagtgcgttttcatcagttcttagggactcggccttctgcagttgcaacatcagagagcaaggggccttgcatgcctcaggagagagggtgcccaggctctgtgtcaccattctgaataacggtgagtcactgcccagcctgagcctagaatgtcccgttcttatccagatgaatgactcgcctctgtctgtggggagtctctgcacaggggaggccagtgtgggggaaataccaaagatctcctttccggaagcaagcacaaataaaatttcattggaaaggttggtgggggacattgtctgtgttctctggcatgcacctgtgcgtgccctttccctttctgccccgggttaggaaggagtgatgttcagagccaggaccacggaagatgctgctcttcagactttctgaaccatcatccacagccagcagggctttaccaatcagtcacatctgtgtacgaatctgtctcaggaaggagctctcagccttaagacctgggataccctctattttttaaaaattttcattaaaaaattgttgcttgcaaaccacttaaaaaaaaaaaaaaa

SEQ ID NO: 2762 - protein, 789 aa, Mus musculus
MLLAAMCLALLGCLQAQELKGHVSIILLGATGDLAKKYLWQGLFQLYLDEAGKGHSFSFHGAALTAPQQGQKLMDKALESLSCPKDLVPSRCDELKGQFLQLSQYHQLKTVEDYQTLNKDIETQVQQDGLWEAGRIFYFSVPPFAYADIARNINSSCRPHPGAWLRVVFEKPFGHDHLSAQQLASELGSFFQEEEMYRVDHYLGKQAVAQILPFRDQNRKALDGLWNRHHVERVEIILKETIDAEGRASFYEEYGVIRDTLQNHLTEILTLVAMELPLNISSSATVLQHKLWAFQALRGLQKSSAILGQYQAYSGQVRRELQKPDGFQSLTPTFAGVLVHIDNLRWEGVPFILMSGKALDERVGYVRIVFKNRAYCTQSERHWVPEQSRCLPQQIIFYIGHGELGHPAILVSRNLFKPSLPTQKWKEVQDQPGLRLFGRPLSDYYAYRPVREQDAYSTLLSHIFHCRKESFITTENLLASWVFWTPLLDSLAFEVPRPYPGGAENGQLLDFEFSGGQLTFSQQQLEVLIPDLGSVPKPSDFQVLGARYRQSPLITAWPEELISKLASDIEAAAVQAVRHFGKFHLALSGGSSPIALFQQLATGHYSFPWAHTHLWLVDERCVPLSDPDSNFQGLQAHLLQHVRVPYYNIHPMPVHLHQRLCAEEDQGAQTYASEISALVANSSFDLVLLGMGTDGHTASLFPQSPTGLDGDQLVVLTESPFRPHQRMSLSLPLINRAKKVAVLVMGRTKREITTLVSRVGHEPKKWPISGVVPLSGQLVWYMDYEAFLG

SEQ ID NO: 2763 - DNA, 1485 bp, Staphylococcus epidermidis
  CDS (1)..(1485)
atgagtactaaacaaaaacacattccctgtttgattacaatattcggtgccacaggagatttgagtcatagaaagctatttccttctatattccatttatatcaacaagacaatttagatgaacatattgctattattggtataggacgtcgcgattataataacgaacaatttcgcgaccaagttaaaacgtcaattcaaacttatgttaaagatacagatagaattgatgagtttatgacgcatgttttttatcataaaactgacgtgagtgataaagaaagttatcagtcattacttcaatttagtgagcgactagattcagaatttgctttaggtgggaatcgtctgttttacttagcgatggcaccacaattttttggagtgatctcagattaccttaaatcttctggtcttactcaaactacaggatttaaacgcttagttatagagaaaccatttggcagtgatcttaaatctgctgaatcattaaataatcaaataagacgttcgtttaaagaagaagaaatttatcggatagatcactatcttggcaaagatatggtgcaaaatatagaagttttgcgattcgcaaacgcgatgtttgaacctttatggaataataaatacatttcaaatattcaagttacatcatcagaagtattaggtgtcgaagatcgtggtggctactatgaatctagtggtgcacttaaagacatggtacaaaatcacatgctacagatggttgctttacttgcaatggaagcaccgataagtttgaatagtgaagatatacgtgcagaaaaagtcaaagtacttaaatctcttagacaattaaaaccagaagaagttaaaaagaatttcgtgcgtggtcaatatgatcaaggcaatatagatggtaaacaggttaagtcatatcgagaagaagatcgcgtagcaaaggattcggttacaccgacatttgtatcgggtaaattaacaattgataactttagatgggctggagttcctttctacattagaacgggtaaacgtatgaaatcaaaaacgatacaagtcgtagtagaatttaaagaagtacctatgaatttatattatgaaactgacaatttactagattctaatttgctagtcattaatattcaaccaaatgaaggaatttcattgcatttaaatgctaaaaagaacattcaaggaattgatactgagccagtgcaattatcatacgcaatgagtgctcaagataaaatgaatacagttgatgcatatgaaaacttattgtttgattgtcttaaaggtgatgcgactaattttacacattgggaagaattaaaatctacttggaaatttgtagatgcaatccaagatcaatggacaatggttgaaccatgtttccctaactatgaagcgggtacaaatggacctcttgaaagtgatcttttattaagtcgtgatggaaatcattggtgggatgatatccactaa

SEQ ID NO: 2764 - protein, 494 aa, Staphylococcus epidermidis
MSTKQKHIPCLITIFGATGDLSHRKLFPSIFHLYQQDNLDEHIAIIGIGRRDYNNEQFRDQVKTSIQTYVKDTDRIDEFMTHVFYHKTDVSDKESYQSLLQFSERLDSEFALGGNRLFYLAMAPQFFGVISDYLKSSGLTQTTGFKRLVIEKPFGSDLKSAESLNNQIRRSFKEEEIYRIDHYLGKDMVQNIEVLRFANAMFEPLWNNKYISNIQVTSSEVLGVEDRGGYYESSGALKDMVQNHMLQMVALLAMEAPISLNSEDIRAEKVKVLKSLRQLKPEEVKKNFVRGQYDQGNIDGKQVKSYREEDRVAKDSVTPTFVSGKLTIDNFRWAGVPFYIRTGKRMKSKTIQVVVEFKEVPMNLYYETDNLLDSNLLVINIQPNEGISLHLNAKKNIQGIDTEPVQLSYAMSAQDKMNTVDAYENLLFDCLKGDATNFTHWEELKSTWKFVDAIQDQWTMVEPCFPNYEAGTNGPLESDLLLSRDGNHWWDDIH

SEQ ID NO: 2765 - DNA, 1590 bp, Yersinia pestis
  CDS (1)..(1590)
atgaccttttttgacgcatttttatctgggtttactggctatagtcaaagagagtacattagtaatgtaagaaaattacaaatatcctgcaacgaggagaatagcatggcagtaatgaatacagtccaggtagcccaggcgtgtgacctggtgattttcggcgctaaaggtgatttggctcgccggaaactgctgccttctctttaccaattagaaaaagcgggtcatatccacccagatactcggataatcggtgttggccgtgctgagtgggataaagatgcgtacaccgctgtggtaaaggaagccctcgatacctttatgaaagagccgctggatgacgagctatggcaaaaactcagctcgcgcctcgacttctgcaatctggatgtgaatgacagtaagcatttcaccaaattaggtaaaatgctcgatcaaaaacatcgcaccacgattaactactttgctatgccgccgagtacatttggtgcgatttgtaaaggcctgggagaagccgggttaaacaaagagcctagccgagtggtaatggaaaaaccattgggaaccgatttagcgccctcaagggtaattaacgatcaggtagccgagtatttcaacgaatgtcaggtttaccgtattgaccactatttagggaaagaaacggtattaaacctgttggcgcttcgcttcgctaactcgttgttcgcctcaaactgggacaaccgcactatcgatcatgtgcaaattaccgtcgcagaagaggtcggaattgaagggcgttggggctattttgatcaggccggtcagatgcgtgacatgatccaaaaccatctgttgcaaatcctgacgatgatcgccatgtcaccccccgcagatctcagtacggatcgcatccgtgatgaaaaagtaaaagtactgcgttcgctgcgccgtattgatcacaccaatgtgcgcgaaactacagttcgtgggcaatatactgccggctttgtacagggcaataaagtgccgggttatctggaagaggaaggcgcgaataagaatagcaataccgaaacatttgtgtctattcgggtggatatcgatgactggcgttgggctggggtacctttctacctgagaaccggtaagcgcctacccagcaaatgctctgaagttgtggtttactttaagaaccccgcactgaatctcttccgcgaatcttatcaacaactgccacaaaacaaactgacaattcgtttgcaaccggacgaagggatcgaaattgaagtgctgaataaagtccccggattggaacataagcatcgtttacaaaccactaagcttgatctcagtttctccaaaaccttcaatgagcagcatattgctgatgcctatgaacgtctgctactggagaccatgcggggtattcaagcgctgtttgtgcgccgtgatgaggtcgaagaggcgtggaaatgggtcgattctattatgaatgcgtgggcggcagataatgaagcaccaaaaccataccagtccggtacatgggggcctgtggcatccgttgctatgatcacccgtgatggccggtcatggaatgagttcgagtaa

SEQ ID NO: 2766 - protein, 529 aa, Yersinia pestis
MTFFDAFLSGFTGYSQREYISNVRKLQISCNEENSMAVMNTVQVAQACDLVIFGAKGDLARRKLLPSLYQLEKAGHIHPDTRIIGVGRAEWDKDAYTAVVKEALDTFMKEPLDDELWQKLSSRLDFCNLDVNDSKHFTKLGKMLDQKHRTTINYFAMPPSTFGAICKGLGEAGLNKEPSRVVMEKPLGTDLAPSRVINDQVAEYFNECQVYRIDHYLGKETVLNLLALRFANSLFASNWDNRTIDHVQITVAEEVGIEGRWGYFDQAGQMRDMIQNHLLQILTMIAMSPPADLSTDRIRDEKVKVLRSLRRIDHTNVRETTVRGQYTAGFVQGNKVPGYLEEEGANKNSNTETFVSIRVDIDDWRWAGVPFYLRTGKRLPSKCSEVVVYFKNPALNLFRESYQQLPQNKLTIRLQPDEGIEIEVLNKVPGLEHKHRLQTTKLDLSFSKTFNEQHIADAYERLLLETMRGIQALFVRRDEVEEAWKWVDSIMNAWAADNEAPKPYQSGTWGPVASVAMITRDGRSWNEFE

SEQ ID NO: 2767 - DNA, 1530 bp, Synechococcus elongatus
  CDS (1)..(1530)
atggtaaccctatttgaaaatcccctgcgggttggactacgccaagagcgaaccccagagccgctgattttagtcatttttggtgccagtggcgaccttactcagcgcaagctgattccctcgatttatcaactgagactcgaacgccgtctgccccccgaactgaccattgttggcgtggcgcggcgcaactggagtcatgactattttcgcaagcacctccgtcaaggggtcgaggagtttggtggcggcattcaggcggaacccctgtggcaggaatttgcccaaggtttgttttattgctctggcaatatcgatgatcccgccgcctacacccagctgaaaacactgctagctgagctagatgaaaaacgccaaactcgcagcaatcgcgtcttttaccttgcggtctcaccgagctttttcgttgaggccattcagcaactgggggcagcggggctattgagtgatccccaaaaacatcgtcttgtgattgaaaagccctttggccgtgatctcacctctgcccaagccctcaatgaggtggtgcagtcggtgtgcaaggaggagcaagtttaccgcattgaccactacctcggtaaagagacggtgcaaaacctgatggtgtttcgctttgccaatgccatttttgaacccctctggaaccgccagtacgtggatcatgtgcagattactgttgctgaaaccgtcggggtggaagatcgcgcgggctactatgaaactgcgggtgccctgcgggacatggtgcaaaaccacattctccagttgctggctctgaccgcgatggaaccccccaatgccctcgatgccgatagtctgcgtagcgaaaaggtgaaagtcctccaagctacccgtttagcggatcttgataatctcgatgcctgtgctgtccgcggccaataccgagccggctggatgaagggcaaacctgttgtgggctatcgtcaggagccgggggtgagtcctacctccaccactcccacctatgcggccctaaaactagggattgataactggcggtggcagggggtgcccttctatgtgcgcacgggtaaacgcttggcaaaaaaggtcacagaaatctcaattcagtttcgtggggtgcctttactgattttccagtcggccgcccgccaaaccaatcccaatatcctgacgatgcgcattcaacccaatgaagggattgctctgcgctttgaggcaaaaatgccgggtgcagatctgcgcacacgcacggtggaaatggactttagctacggctcctcctttggaatggccacagcggatgcctatgcgcggttattactggactgcatgttgggggaccaaaccctgtttacgcgcgcagatgaggtagaggcggcttggcgggtggtgatgccggttttaacggcttgggacgcccccacagatccagaggccatacccacctatgacgcggggacttgggggcccgatgcggcagaagtgatgattaatgccgatggccggcgctggcggcgactttga

SEQ ID NO: 2768 - protein, 509 aa, Synechococcus elongatus
MVTLFENPLRVGLRQERTPEPLILVIFGASGDLTQRKLIPSIYQLRLERRLPPELTIVGVARRNWSHDYFRKHLRQGVEEFGGGIQAEPLWQEFAQGLFYCSGNIDDPAAYTQLKTLLAELDEKRQTRSNRVFYLAVSPSFFVEAIQQLGAAGLLSDPQKHRLVIEKPFGRDLTSAQALNEVVQSVCKEEQVYRIDHYLGKETVQNLMVFRFANAIFEPLWNRQYVDHVQITVAETVGVEDRAGYYETAGALRDMVQNHILQLLALTAMEPPNALDADSLRSEKVKVLQATRLADLDNLDACAVRGQYRAGWMKGKPVVGYRQEPGVSPTSTTPTYAALKLGIDNWRWQGVPFYVRTGKRLAKKVTEISIQFRGVPLLIFQSAARQTNPNILTMRIQPNEGIALRFEAKMPGADLRTRTVEMDFSYGSSFGMATADAYARLLLDCMLGDQTLFTRADEVEAAWRVVMPVLTAWDAPTDPEAIPTYDAGTWGPDAAEVMINADGRRWRRL

SEQ ID NO: 2769 - DNA, 1473 bp, Shewanella oneidensis
  CDS (1)..(1473)
atgggcaaaacaacatcaggcgccaaagcttgtgacttcgtactctttggtactaaaggtgacttagcaagacgtaagttattaccttctttataccagttagataaggctgagcttctcgataaagatactaaggtgataggtgtcgcaaaagatgaattcagtcaggatgaatacagagacttagtcatccttgcgttaaaaaccttcgtcaaagaacccctctgcgaagacactctcaaccgattcgtgtcccgttgttattatgtaggcactaattttaccgaatcagcaggctacggtgccttccatgaattgctcaaaccagaagagcgtgtcatggtcagttactttgccacccctccatcgatttttggtgatatctgccgctgtttacatgaacaaaacctgatccacagtgactctcgcgtagtactcgaaaaacccattggctctgatctcgcatcttcccgtattattaacgatcaagtgtctgcctactttaaagaaagccaagtctaccgtatcgaccattatcttggtaaagagaccgttcaaaacttgattgcgctgcgttttgctaactccttatttgcctctaaatgggataaccggaccattgaccatgtccagatcacggttgcggaagaagtcggtattgaaggccgttggggttacttcgataaagccggtcaaatgcgcgatatgatccaaaaccacttgctacaggtgctgacgctcgtcgcaatggatccgccagtgaacttagatgctgatagtattcgcgatgaaaaggtgaaagtgcttaagtcgctgcggccgattaatgctgacaatgtgtatgaaaacactgtccgtggtcagtacagtgcgggcttcctgaaaggtagtccggtgccaggctatttagaggaagagggcgcgaacgtacagtcacacaccgaaacttttgtggcgttgcgggtcgatatcgataactggcgttgggctggggtgccgttttatctgcgcagcggtaagcgcatgccgtttaagagttctgaaattgtggtgtattttaaaaatcctccgcacaacctttaccgctctagctaccgtaacttgccacctaacaagttaaccatccgtctgcaaccacacgaaggggttgagatccagatgatgaacaaggtgccaggattagagcaaaaacaacgtttgcaaaccactaagctcgacttgagtttctcggatacctttaaaaacgagcgcattgccgatgcctacgagcgtttgttgcttgaagccatgctcggtaatcaagctttgttcgtgcgccgagatgaagtggagcaagcctggacatgggtggatggcatcatccaagcatgggaacagagcaatgagaaaccgaaaccttatcctgcgggcacttggggccctgtggcttcggtcgcgctgatcaccaaagatggtcgctcgtgggatgaatag

SEQ ID NO: 2770 - protein, 490 aa, Shewanella oneidensis
MGKTTSGAKACDFVLFGTKGDLARRKLLPSLYQLDKAELLDKDTKVIGVAKDEFSQDEYRDLVILALKTFVKEPLCEDTLNRFVSRCYYVGTNFTESAGYGAFHELLKPEERVMVSYFATPPSIFGDICRCLHEQNLIHSDSRVVLEKPIGSDLASSRIINDQVSAYFKESQVYRIDHYLGKETVQNLIALRFANSLFASKWDNRTIDHVQITVAEEVGIEGRWGYFDKAGQMRDMIQNHLLQVLTLVAMDPPVNLDADSIRDEKVKVLKSLRPINADNVYENTVRGQYSAGFLKGSPVPGYLEEEGANVQSHTETFVALRVDIDNWRWAGVPFYLRSGKRMPFKSSEIVVYFKNPPHNLYRSSYRNLPPNKLTIRLQPHEGVEIQMMNKVPGLEQKQRLQTTKLDLSFSDTFKNERIADAYERLLLEAMLGNQALFVRRDEVEQAWTWVDGIIQAWEQSNEKPKPYPAGTWGPVASVALITKDGRSWDE

SEQ ID NO: 2771 - DNA, 1476 bp, Oceanobacillus iheyensis
  CDS (1)..(1476)
atggaacaaactatacagccaagagccgttattgtaatcttcggagcaactggagatttagcaaagcgtaaattattcccttccatttatcgtttgtaccgaagcggaaaattagatgagcattttgcagtaattggtttagcacgtcgtccttggacagatgaagtacttagagaaaatgtggaaaattccatacaagatgctctttctccggatgaggatttatccgaatttatttcccatttctattataaatcttttgatgtgacggaaaaagaatcgtatcaaggacttaatgaaatcattcaaaaccttgaaggtcaataccaaacagaaggaaatagactattttatctggcaatggctccagatttctttggtgctattgcaaatcaactcaatgattatggattaaagaacacgagtggttggactagacttgtgatcgaaaaaccatttggacatgatttaccttctgctaaaaagttaaaccatgaattacaagccgcatttcgtgaagatcaaatttatcgtatcgaccactatctaggtaaagagatggtgcaaaatattgaagtaatccgttttgccaacggtatttttgaacatttgtggaataatcgctttatctcaaacatccaaattacgagtagcgaaacgcttggagtagaggaacgagcacgttattatgacacttctggtgctacgcgggatatggttcaaaatcatatgttacaaatggttgctctactggcgatggaacctccgattagtttaacaacagaggaagtacgctctgaaaaaattaaagtattgcgtgccttaagaatgatggagacaaatgaaatagatgattatttcattcgcggtcaatacggtgctggtacagttaaaggtaattctgttattggttatcaagacgaagatgaacaactagaaaattctcgtactgaaacatttgtagctggaaaacttctcattgacaattaccgatgggcaggcgttcctttctatattcgtacaggaaagcgcatgacagaaaaatccacaaaaattgtaattgagttcaaagacattccaatgaatctttattaccaaaaagatgatcaaaggaatccaaatttattggttattaatattcaaccaaatgaaggaattacgctttgcttgaatgcacgtaaatcaggtgaaggtgcactagcagagccaattcaattagcataccaccaaaatgctgtatctggaatcaatacaccagaagcatatgaaaaactaatttacgatagtatgcttggtgatgcgactaactttacccattgggatgaagttgctttatcttggcaatttgtcgataagattttggaaaactggtcagaaaatcaaccagcattccctaattatcgttctggatcgatgggaccagaagcatctgatgaactgttgaaaaaagatggtttccattggtggccaatctaa

SEQ ID NO: 2772 - protein, 491 aa, Oceanobacillus iheyensis
MEQTIQPRAVIVIFGATGDLAKRKLFPSIYRLYRSGKLDEHFAVIGLARRPWTDEVLRENVENSIQDALSPDEDLSEFISHFYYKSFDVTEKESYQGLNEIIQNLEGQYQTEGNRLFYLAMAPDFFGAIANQLNDYGLKNTSGWTRLVIEKPFGHDLPSAKKLNHELQAAFREDQIYRIDHYLGKEMVQNIEVIRFANGIFEHLWNNRFISNIQITSSETLGVEERARYYDTSGATRDMVQNHMLQMVALLAMEPPISLTTEEVRSEKIKVLRALRMMETNEIDDYFIRGQYGAGTVKGNSVIGYQDEDEQLENSRTETFVAGKLLIDNYRWAGVPFYIRTGKRMTEKSTKIVIEFKDIPMNLYYQKDDQRNPNLLVINIQPNEGITLCLNARKSGEGALAEPIQLAYHQNAVSGINTPEAYEKLIYDSMLGDATNFTHWDEVALSWQFVDKILENWSENQPAFPNYRSGSMGPEASDELLKKDGFHWWPI

SEQ ID NO: 2773 - DNA, 1344 bp, Corynebacterium efficiens
  CDS (1)..(1344)
atgactcccacaggacacgaccaccggcagaccgtgacgttctacatcctcggcggcgcgggagatctcgtgcgtcgtctgctcatccccggtatggcggggtacctccgggagtatgagggcacccggatcaacatcgtcgccacggggcgttcggagatcgacgactacccgcagctggtgcgcgattccctcgccgcagccggcacagacatcgatgaccgggtggtcgacagcctggccgggcatgcctctttcctggcgtcggatgccactgatccggccgagctgcaggagctgctcgattcccgggaacccggtgaccgcccggtgctctacttcgcgctctcgccttccgtgaccgcgcaggccgtcgatgccctggcgggggtcaccctgcccgagggcatcgtgcttgccctggaaaaacccttcggcgaggacgcggacaccgcccgcgagctcaacgagaaattgtggaaaatcaccgatgaggagcacatcttccgcgtcgaccacttcaactgcgagaccgccctgtcgaacctggtcggactgatgggcgcgaatgcgatcctctccgccgggtggaataacagggcagtcgagagcattgagatcgtctatgacgaatccctcggcctggagggacgcgccgagttctacgacagcaatggggctgtgcgcgacatgctccaatcccacctgctgcaggtcatggcacacgccctggctgccgacaccgatgacacggtcaccgacattctcgccgccacggacatcgatccgggttccgtccgtcgcgcccggtacaccgcaggcgaggcgggtggcgaacagctgccggactacgcacaggaggagggcgtggatccggagcgggggaccgagacgctcttccagctcaccgcgcacgtggacaccgaccgctggcgtggcgtgcccatcaccctgcgttccggcaaggcactggggaaaccgcgcagggagatcgccatctcctaccggcgcgagggctaccccgaggaggtcgagctgcagccgggcagccgtctggtcttccccttcaccgatgaggtggtgctcgaggcgaatgtctccgaccatggttacagccacaacctgcagcgcgttgaactgcgcaccgaactggtgccctcgaagctgtcggcctacggccgggtggtgcgtgccatcctcgacatgagcgacaccgccgaggtgcccgccgacgccccggcccgggcctgggagatcgtggagcccgtgctcaccgcgttcgccaacgacgaggtcccgctggaggagtacccggcggggtcagcgggacctgcgggctggtag

SEQ ID NO: 2774 - protein, 447 aa, Corynebacterium efficiens
MTPTGHDHRQTVTFYILGGAGDLVRRLLIPGMAGYLREYEGTRINIVATGRSEIDDYPQLVRDSLAAAGTDIDDRVVDSLAGHASFLASDATDPAELQELLDSREPGDRPVLYFALSPSVTAQAVDALAGVTLPEGIVLALEKPFGEDADTARELNEKLWKITDEEHIFRVDHFNCETALSNLVGLMGANAILSAGWNNRAVESIEIVYDESLGLEGRAEFYDSNGAVRDMLQSHLLQVMAHALAADTDDTVTDILAATDIDPGSVRRARYTAGEAGGEQLPDYAQEEGVDPERGTETLFQLTAHVDTDRWRGVPITLRSGKALGKPRREIAISYRREGYPEEVELQPGSRLVFPFTDEVVLEANVSDHGYSHNLQRVELRTELVPSKLSAYGRVVRAILDMSDTAEVPADAPARAWEIVEPVLTAFANDEVPLEEYPAGSAGPAGW

SEQ ID NO: 2775 - DNA, 1545 bp, Corynebacterium efficiens
  CDS (1)..(1545)
atgagctcccacacgaatcccaccacctggattaatcccctgcgtgatccccaggacaaacgactgccccgcatcgcgggaccgtccggcctggtcatcttcggtgtcaccggtgacctcgcccgcaagaagctcctccccgcgatctatgatctggccaaccgtggtctgctccccccgggtttcgccctggtgggttacggacgccgtgactggagcaaggaggacttcgagaactacgtgcgcgaggccgtggaggccggcgcccgtaccgaattccgcggaaacgtgtgggaacgcctcgccgagggcatggaatttgtcaagggcaacttcgacgacgattccgccttcgacaatctcgcggacacgcttaagcgtctcgacgagaccaggggcaccgccggcaactgggccttctacctatccatcccgccggattccttcgcggcggtctgccaccagttggagcgctcaggtatggcggcatccacagacgaatcctggcgacgggtgatcatcgagaagcccttcggcaatgatctcaagaccgcgcatgaactcaatgagacggtcaacgctgtcttccccgaggaatcggtcttccgcatcgaccattacctgggcaaggaaaccgtccagaacattctggccctgcgtttcgccaaccagctgttcgagccgttgtggaactccaattatgtcgatcatgtgcagatcaccatggcggaggacatcggattggggggacgcgccggttattatgacggcatcggtgccgcccgtgatgtcatccagaaccacctgatccagctgctggccctggtggccatggaggagcccatctccttcacccccacccagctgcaggcagagaagatcaaggtgcttcgtgccaccaagccgagcctgccgatcgcggagaactccgcgcgtggccagtattccgccggctggcaggggtctgaatatgtcaagggtctgcgggaggaggatggtttcgatccggaatccaccaccgagacctatgccgcctgcaccctggagatcacctcccgcaggtgggcgggtgtgccgttctacctgcgcaccggcaaacgcctgggtcgtcgtgtcaccgagatcgccgtggtgttcaaggatgccccccaccagcccttcgatcccggcatgaccgcggcactcggtaacaacgccatcgtgatccgtgtgcagcccgacgagggtgtgctcatccgtttcggatccaaggtgcccggatctgccatggaggtccgtgatgtgaatatggacttctcctattccgagtccttcaccgaggaatcccccgaggcgtatgagcgtctcatcctggatgcgcttctcgatgagtccagcctcttccccaccaatgaggaagtggaactgagctggaagatcctggatccgatcctggagatctgggaggagaatggccaaccggaggagtatcccgccggcacatggggaccgaagagcgccgatgagatgctggcacgcaacggccaccagtggcgcaggccgtag

SEQ ID NO: 2776 - protein, 514 aa, Corynebacterium efficiens
MSSHTNPTTWINPLRDPQDKRLPRIAGPSGLVIFGVTGDLARKKLLPAIYDLANRGLLPPGFALVGYGRRDWSKEDFENYVREAVEAGARTEFRGNVWERLAEGMEFVKGNFDDDSAFDNLADTLKRLDETRGTAGNWAFYLSIPPDSFAAVCHQLERSGMAASTDESWRRVIIEKPFGNDLKTAHELNETVNAVFPEESVFRIDHYLGKETVQNILALRFANQLFEPLWNSNYVDHVQITMAEDIGLGGRAGYYDGIGAARDVIQNHLIQLLALVAMEEPISFTPTQLQAEKIKVLRATKPSLPIAENSARGQYSAGWQGSEYVKGLREEDGFDPESTTETYAACTLEITSRRWAGVPFYLRTGKRLGRRVTEIAVVFKDAPHQPFDPGMTAALGNNAIVIRVQPDEGVLIRFGSKVPGSAMEVRDVNMDFSYSESFTEESPEAYERLILDALLDESSLFPTNEEVELSWKILDPILEIWEENGQPEEYPAGTWGPKSADEMLARNGHQWRRP

SEQ ID NO: 2777 - DNA, 1668 bp, Bifidobacterium longum
  CDS (1)..(1668)
atgcgtacacgtttgcgtacgcgattggcccaacgcacggcacagcacacgcaatgtggcccaaatcgcagcccaaatcgcatatcgcctctagcgatagatagccgccggcgactacccttgtacattatgagtgaatcccccaattggagcaatcccctgcgcgactcgcgcgacctcagactgccccgtatcgccggcccatgcagcctcgtcattttcggtgtcacgggcgatctggcacaaaagaaactgctgccagccgtctacgacctggcgaaccgtggcctactgccgccgagcttcggtctgaccggcttcgcccgccgcgactggacacaggaacggttcatcgaattcgtcaaggccgccgtccaggcgcattgccgtacgccgttcaaggagtcgacttggcgcaatctggccgccggcatccgcttcgtgcagggtacgttcgacgacccggaggccttcgagcgcctgagcgccaccgtgcaggagcttgaccgcgaccgcggcacgcagggtaaccatgccttctacatgtcggtgccgccgcgcgcattcccacaggtcgccaagcagctggccgcctccggcctgtcgcgctcgtccgagggcgcatggcgccgcgtgatcatcgagaagccgttcggccatgatctggccagcgccaaggaactcgacagcgtggtatccgaagtgttcgacccgagctccgtgttccgcatcgaccactacctcggcaaggaaaccgtgcagaacctgctggccctgcgtttcgccaacgccatgtacgagccgatctggaacgccaactatgtggaccacgtgcagatcacgatggccgaggacatcggcatcggcggccgcgccggctattacgacggcatcggcgccgcacgcgacgtcatccagaaccacctgcttcagctcatggctctgaccgccatggaggagccggtgagcttcaccgccaaggacctgaccgccgaaaagaccaaggtgctttccgccgtgcgcctgcccaaggacctcgccgccaacaccgcgcgcggccagtacgccaagggctggcagggctcgcacgaagtggtcggctacttggaggaaaaaggcatcgaccccaagagcaccactgaaacgtacgccgccatccgcctcgatatcgacacccgccgctgggctggcgtgccgttctacctgcgttgcggcaagcgcctcggcaagcgtgtaaccgaaatcgccgtggtgttcaagcgcgccccgcatctgccgttcgagcagaccgccgtgcgcgaactcggcaagaacgccatcgtgattcgcgtgcagcccgacgagggcgtcaccatgcgcttcggagccaaggtgccgggcggctccaccatggaggtccgtgacgtgaacatggacttcagctacggccgctccttcaccgagaactcgccggaagcctatgagcgactgattctggacgtgctgctcggtgatccgccgttgttcccgaccaccgaagaggtgaacctcagctgggagatcctcgatccgattgaacaattctggtccacgcttggccagccgcaggcctaccgcgccggtacgtggggtccggcacaggccgacgaaatgctggcgcgcgacggccgccactggaggatgccatga

SEQ ID NO: 2778 - protein, 555 aa, Bifidobacterium longum
MRTRLRTRLAQRTAQHTQCGPNRSPNRISPLAIDSRRRLPLYIMSESPNWSNPLRDSRDLRLPRIAGPCSLVIFGVTGDLAQKKLLPAVYDLANRGLLPPSFGLTGFARRDWTQERFIEFVKAAVQAHCRTPFKESTWRNLAAGIRFVQGTFDDPEAFERLSATVQELDRDRGTQGNHAFYMSVPPRAFPQVAKQLAASGLSRSSEGAWRRVIIEKPFGHDLASAKELDSVVSEVFDPSSVFRIDHYLGKETVQNLLALRFANAMYEPIWNANYVDHVQITMAEDIGIGGRAGYYDGIGAARDVIQNHLLQLMALTAMEEPVSFTAKDLTAEKTKVLSAVRLPKDLAANTARGQYAKGWQGSHEVVGYLEEKGIDPKSTTETYAAIRLDIDTRRWAGVPFYLRCGKRLGKRVTEIAVVFKRAPHLPFEQTAVRELGKNAIVIRVQPDEGVTMRFGAKVPGGSTMEVRDVNMDFSYGRSFTENSPEAYERLILDVLLGDPPLFPTTEEVNLSWEILDPIEQFWSTLGQPQAYRAGTWGPAQADEMLARDGRHWRMP

SEQ ID NO: 2779 - DNA, 1284 bp, Rhodococcus opacus
  CDS (1)..(1284)
atgattgccggcgcacgcacttccttccggatcgacacatggaaccagctggcacgcaacttccgctatatacgaggcacatttgacgaccaatcggcctttgaggacctgaaacgcgtactagcacaattggatacgattcactccgccataggtcacgccttctacatgtcgatctccccggcgcacttttccctggtgtgcgctcagctgaactccgtgggtctcaaccaggatcgccacggataccggcgcatcgtgctggagaagccattcggcaacgacctggccagttcacgggagttgggcgccacggtggacgaggtgttcggggccggatcggtgttccgggtcgaccactatctcggcaaagagacggtccagaacatcctggcgctgcgattcgccaacgggctgttcgagccgctgtggaaccaccgccacatcgacaacatacagatcaccatggccgaggacatcggcgtcgaggggcgagccggctactacgacggtgtcggcgctgcccgagacgtcatacagaatcatttgctgcagttgttggccctcattgccatggaggagccagttggtgtcgacgcagcaagtctgtcggcggagaaggtgaaagttctctctgccacatcagcagtgagtccgctggccgacaccaccgcgcgtggtcagtactcggctaccgtccggggtgagacctacctgccggggctgctcgaggaggacggattcgatccttgctcgaccaccgagacgtacgcggccatcaccgtgcagatagcgaatcgccgctgggccggggttccgttctatctccgcgcgggtaagcgtctggccagaaggaccacggaagttgctgtgactttctcctcgccgcaccatttgaccggttccgccgaggccggcccacctccccagaatgtcttggtggtgcgagtgcagcccgacgacggaatctcgttgaggatcggagcgaagacacccggggaggggatgcgaatccaggatgtggatctgaacatgtcgttcgctgactcgttcggcgggtcctcacccgaggcctacgagcgcctgatcctcgatgtccttcgcggcgacgcctcactgttcccatcgcaggccgaggtcgacgcgtcgtgggcgattgtcgatccggtcatcgctttctgggccgagcagggccgccccgacacataccaatccggcagcgccggaccgagttcggccattcccgtcgtcactcgtacaggacgggcatggcggccgttgtga

SEQ ID NO: 2780 - protein, 427 aa, Rhodococcus opacus
MIAGARTSFRIDTWNQLARNFRYIRGTFDDQSAFEDLKRVLAQLDTIHSAIGHAFYMSISPAHFSLVCAQLNSVGLNQDRHGYRRIVLEKPFGNDLASSRELGATVDEVFGAGSVFRVDHYLGKETVQNILALRFANGLFEPLWNHRHIDNIQITMAEDIGVEGRAGYYDGVGAARDVIQNHLLQLLALIAMEEPVGVDAASLSAEKVKVLSATSAVSPLADTTARGQYSATVRGETYLPGLLEEDGFDPCSTTETYAAITVQIANRRWAGVPFYLRAGKRLARRTTEVAVTFSSPHHLTGSAEAGPPPQNVLVVRVQPDDGISLRIGAKTPGEGMRIQDVDLNMSFADSFGGSSPEAYERLILDVLRGDASLFPSQAEVDASWAIVDPVIAFWAEQGRPDTYQSGSAGPSSAIPVVTRTGRAWRPL

SEQ ID NO: 2781 - DNA, 2879 bp, Leishmania guyanensis
  misc_feature (1992)..(2321): n is a, c, g, or t
  misc_feature (2700)..(2700): n is a, c, g, or t
  misc_feature (2840)..(2840): n is a, c, g, or t
  CDS (205)..(1893)
cgctatataagtatcagtttctgtactttattgcaacgcagcagaaagcgaataacaacagcaagaacacacaaaaacgcacgacttgagagataaaagtcggttatcctattcgggtcctcctatacaaccgtcttaatggtgttttaggtttgactctgggcaccctacattgatcactggtacatgcattaagtactcgccatgtcgtcggagcattccagtgctgatcagaattcctatgaggctgacgtgtgctgcattctggacgagctccgcgcacaggtgctggcgcagaagccggacaacgtgttgcagttcatctccaagtcagcgcttaatcttcagaaacagcgccagatggaagcgtgtgatcaaatcaccttcaaggtgaaggatgagcagaagaaccgtgcgttgaccatcattgtgatcggcgccagcggcgatctggccaagaagaagacattcccggccctctttcagctctactgcgacggattcctccccccggaagtcaacattgtcggctatgctcgcaccaaggtggatgatgtcgagaagtggaagcgtgagacgctcatgaagtactttttgaacctgtcggcgcttcgatgtcacgccgaagacttcttgaaacacattagctacttctcgggagcgtacgacaacgtggacgacttcaagcgtctcgacaagatgatccgcgagaaggaggatgctttcaagggccctgagaagggtggcgaccgtctcttttaccttgctctccccccatcagtgtttgcatgcgtctgtgggagcattcgcaagggtgccatgccgcaggaggtaggaggatgggtgcggctgatcatagagaagccctttggccacgacaccaacagttccgccgagctgtcccacgcgctggagccgttcttcgacgagtcgcagctgtaccgcattgaccactatctcgggaaggagatggtacagaacatcatcacgacacgcttcgccaaccgcatcttcagctctttgtggaactcgagcaatatcgcttgcgtgcagatcacgttcaaggagacgatcggcaccgagggccgtggcggctacttcgatagcattggcattattcgtgacgtcatgcaaaaccatctcacccagattcttgccctgctagccatggagaagccraagtcactcgaagccgagtgcatccgcgacgagaaggtgtcgttgctgaagtgtgttgagcccgtcaccaaggagaattgcgtgctgggccagtacactgcctccgccgacggttccatcccaggttacctggaggacgagaccgtacccaagggcagtacttgccccacgtttgccgtggtgcggctcaacatcaacaacgaccgctggtcgggagtcccttttattctcaaggctggcaaggccgtggagcagaagtacgtggcgattcgcgttcagttccacgatgaggttcacccgtacggcgatgcaacaaagcgtaacgagcttgtcattcgtgcccagccgtccgaggccatgtatgtcaagattaccacaaaagttcccggtcatagtgaggacttgcggcacacgcaccagacagaattggatctcacctaccactcccggtacagtgtgcgtctcccagacgcttacgagagcctcatcaacgacgcactgctgggcaactccacaaactttgtgcgaagggacgaactcgatgtggcgtggcgcatcttcacaccgctcttgcaccagatcgatcgtggcgaagtcgctccgattccgtaccaagccggcactcgcggacccaaggaagcggatgactttatcatcaacaacggcttcaagaaggaagaggactatcactgggctccctcgaacaagctgtaagaaaggtcaacattgcagtttgtttcacaagccccctttcgacgacagcgaagagaggcaagtggcttatatactgggaagcttgcctatccttccttnnnnnnnnnnnnnnnnnnnnnnnnnnnnnnnnnnnnnnnnnnnnnnnnnnnnnnnnnnnnnnnnnnnnnnnnnnnnnnnnnnnnnnnnnnnnnnnnnnnnnnnnnnnnnnnnnnnnnnnnnnnnnnnnnnnnnnnnnnnnnnnnnnnnnnnnnnnnnnnnnnnnnnnnnnnnnnnnnnnnnnnnnnnnnnnnnnnnnnnnnnnnnnnnnnnnnnnnnnnnnnnnnnnnnnnnnnnnnnnnnnnnnnnnnnnnnnnnnnnnnnnnnnnnnnnnnnnnnnnnnnnnnnnnnnnnnnnnnnnnnnnnnnnnnnnnnnnnnnnnnnnnnnnnnncatggatgagagagtttgctgtaggcagagtgcgcggatcctcaacacgaaggcacgcgcatagagtcgatacgttaccgaattttctttcgtttcttccactccccctttgctgtttgctatgatcagcctggctttcttctctcttgcgtccgcatttgtgtgccgcttttgctgttttttcgtttcggagtctcttcttgccgccgcaccccacacgcgccactgtggcgttccgctccttcctcctccaccttcccagatgactctccctctatctctccgtctataaaccagacctttttcctcttcccttttttctattattgccacttggatatatacacttacacgtaccgtgcgcgcgatgtagcgatgngttcagtcgtctgacagcgatcgagaccagaatacatgaaacacgagatagataggcttccttttaagcagcagggatacatacgctgatcggagttacatgcaagccccgacgacaattcgaaaatgatgtgctcttgnaacagaaagaaaccaaaaaaaaaaaaaaaaaaaaaaaaa

SEQ ID NO: 2782 - protein, 562 aa, Leishmania guyanensis
MSSEHSSADQNSYEADVCCILDELRAQVLAQKPDNVLQFISKSALNLQKQRQMEACDQITFKVKDEQKNRALTIIVIGASGDLAKKKTFPALFQLYCDGFLPPEVNIVGYARTKVDDVEKWKRETLMKYFLNLSALRCHAEDFLKHISYFSGAYDNVDDFKRLDKMIREKEDAFKGPEKGGDRLFYLALPPSVFACVCGSIRKGAMPQEVGGWVRLIIEKPFGHDTNSSAELSHALEPFFDESQLYRIDHYLGKEMVQNIITTRFANRIFSSLWNSSNIACVQITFKETIGTEGRGGYFDSIGIIRDVMQNHLTQILALLAMEKPKSLEAECIRDEKVSLLKCVEPVTKENCVLGQYTASADGSIPGYLEDETVPKGSTCPTFAVVRLNINNDRWSGVPFILKAGKAVEQKYVAIRVQFHDEVHPYGDATKRNELVIRAQPSEAMYVKITTKVPGHSEDLRHTHQTELDLTYHSRYSVRLPDAYESLINDALLGNSTNFVRRDELDVAWRIFTPLLHQIDRGEVAPIPYQAGTRGPKEADDFIINNGFKKEEDYHWAPSNKL

SEQ ID NO: 2783 - DNA, 1689 bp, Leishmania mexicana
  misc_feature (227)..(444): n is a, c, g, or t
  misc_feature (1475)..(1528): n is a, c, g, or t
  CDS (1)..(1689)
atgtcggaagcgcaggctcgtgctgatgaggatgcttacatggccgacgtcgacagcattctggacgtgctccggacgcatgtgctggaacggaagccagatgacgttttccagttcctctccaagtcggcgctacgtctgcagaaggacagcggcgccgaattgtgcgatcgcatcaactgtaaggtaaaggatgaacagaagagccgtgcattgtctatcatcgnnnnnnnnnnnnnnnnnnnnnnnnnnnnnnnnnnnnnnnnnnnnnnnnnnnnnnnnnnnnnnnnnnnnnnnnnnnnnnnnnnnnnnnnnnnnnnnnnnnnnnnnnnnnnnnnnnnnnnnnnnnnnnnnnnnnnnnnnnnnnnnnnnnnnnnnnnnnnnnnnnnnnnnnnnnnnnnnnnnnnnnnnnnnnnnnnnnnnnnnnnnnnnnnnnnnnnnnnntacttttgtggagcgtacgacaaggtggacgacttcaagcgtcttgacgcggtgattcgagagaaggagaatgcctttaagggccctgagaagggtggaaaccgtctcttctatcytgctcttccgccctcagtgttcgcaattrtctgcgagcacattcacaagggggcgatgccgcaggaagtggggggatgggtgcgggtgatcatcgagaagccctttggcygcgataccaagagctccgccgagctttcccaagcgctggagccgttcttcgacgagtygcagctgtaccggattgacyactacctcgggaaggagatggtgcagaacatcatcacgacacgcttcgccaaccgtatcttcagcgctgtgtggaactcgagcaacattgcgtgcgtgcagatcacgttcaaggagaccatcggtaccgagggccgcggcggctacttcgacaacattggcattattcgcgatgtcatgcaaaatcacctcacccagattcttgccctgctggccatggagaagccgcggtcgctggacgctgagtgcatccgcgacgagaaggtgtcggtgctgaagtgcattgagccagtaactaaggagaattgtgttctgggccagtacactgcctccgccgatggctccatgcctggttacctacaggatgagaccgtaccccggggcagcacttgccccacatttgccgtgatgcggctcaacatcaacaacgaccgctgggccggcgtcccttttattctcaaggctggcaaggctgtggagcagaagtacgtggcgattcgcattcagttcaaggacgaggtccacccctacggcgatgcgacacagcgcaacgagctcgtcatccgcgctcagccgtccgaggccatgtatgtcaagatcaccacaaaagttcctggccttagtggggacttacggcagacgcaccagacagagctggaccttacctaccacacccggtacgatgtgcgccttccagacgcctacgagagcctcatcaacgacgcacnnnnnnnnnnnnnnnnnnnnnnnnnnnnnnnnnnnnnnnnnnnnnnnnnnnnnngcatcttcacaccgctcctgcaccagatcgacaatggagaaatccaaccgattccgtaccaggctggcacgcgcgggcccaaggaagcggatgaattcatcatcaacaacggcttcaagcaccagaaagactaccagtggactccctcgaacaagctgtga

SEQ ID NO: 2784 - protein, 562 aa, Leishmania mexicana
  misc_feature (76)..(148): Xaa can be any naturally occuring amino acid
  misc_feature (187)..(187): Xaa can be any naturally occuring amino acid
  misc_feature (197)..(197): Xaa can be any naturally occuring amino acid
  misc_feature (224)..(224): Xaa can be any naturally occuring amino acid
  misc_feature (243)..(243): Xaa can be any naturally occuring amino acid
  misc_feature (250)..(250): Xaa can be any naturally occuring amino acid
  misc_feature (492)..(510): Xaa can be any naturally occuring amino acid
MSEAQARADEDAYMADVDSILDVLRTHVLERKPDDVFQFLSKSALRLQKDSGAELCDRINCKVKDEQKSRALSIIXXXXXXXXXXXXXXXXXXXXXXXXXXXXXXXXXXXXXXXXXXXXXXXXXXXXXXXXXXXXXXXXXXXXXXXXXYFCGAYDKVDDFKRLDAVIREKENAFKGPEKGGNRLFYXALPPSVFAIXCEHIHKGAMPQEVGGWVRVIIEKPFGXDTKSSAELSQALEPFFDEXQLYRIDXYLGKEMVQNIITTRFANRIFSAVWNSSNIACVQITFKETIGTEGRGGYFDNIGIIRDVMQNHLTQILALLAMEKPRSLDAECIRDEKVSVLKCIEPVTKENCVLGQYTASADGSMPGYLQDETVPRGSTCPTFAVMRLNINNDRWAGVPFILKAGKAVEQKYVAIRIQFKDEVHPYGDATQRNELVIRAQPSEAMYVKITTKVPGLSGDLRQTHQTELDLTYHTRYDVRLPDAYESLINDAXXXXXXXXXXXXXXXXXXXIFTPLLHQIDNGEIQPIPYQAGTRGPKEADEFIINNGFKHQKDYQWTPSNKL

SEQ ID NO: 2785 - DNA, 2916 bp, Leishmania amazonensis
  misc_feature (2191)..(2311): n is a, c, g, or t
  CDS (207)..(1895)
cgctatataagtatcagtttctgtactttattgcgacgtaggataaagcgaagagcagcaaaacgtactgaaaagagcggaggactctccgagcaatagaatttgctcatcttattcacccacccttatacaaccgttttgatcttatttcttgttgcctccggctaccatatattgatcggtgttatacaaattaagtaagcaccatgtcggaagcgcaggctcgtgctgatgaggatgcttacatggccgacgtcgacagcattctggacgtgctccggacgcatgtgctggaacggaagccagatgacgttttccagttcctttccaagtcggcgctaagtctgcagaaggacagcggcgccgaattgtgcgatcgcatcaactgtaaggtaaaggatgaacagaagagccgtgcattgtctatcatcgtattcggtgccagcggggatctggctaagaagaagacatttcctgccctcttcgatctgtactgtggcgggctccttcccccggaggtcaacattatcggctatgctcgcaccaaggtggacgatgtcgagaagtggaagcatgagacgctcatgaagtatttttcgaaagtgtcggagcgggaatgccacgccgaggacttcttgaaacacatcagctacttttgtggagcgtacgacaaggtggacgacttcaagcgtcttgacgcggtgattcgagagaaggaaaatgcctttaagggccctgaggagggtggaaaccgtctcttctatcttgctcttccgccctcagtgttcgcaattgtctgcgagcacattcacaagggggcgatgccgcaggaagtggggggatgggtgcgggtgatcatcgagaagccctttggccgcgataccaagagctccgccgagctgtcccaagcgctggagccgttcttcgacgagtcgcagctgtaccgcattgaccaytacctcgggaaggagatggtgcagaacatcatcacgacacgcttcgccaaccgtatcttcagcgctgtgtggaactcgagcaacattgcgtgcgtgcaaatcacgttcaaggagaccatcggyaccgagggccgcggcggctacttcgacaacattggcattattcgcgacgtcatgcaaaaccacctcacccagattcttgccctgctggccatggagaagccgcggtcgctggacgctgagtgcatccgcgacgagaaggtgtcggtgctgaagtgcattgagccagtaactaaggagaattgtgttctgggccagtacactgcctccgccgatggctccatgcctggttacctacaggatgagaccgtaccccggggcagcacttgccccacatttgccgtgatgcggctcaacatcaacaacgaccgctgggccggcgtcccttttattctcaaggctggcaaggctgtggagcagaagtacgtggcgattcgcattcagttcaaggacgaggtccacccctacggcgatgcgacacagcgcaacgagctcgtcatccgcgctcagccgtccgaggccatgtatgtcaagatcaccacaaaagttcctggccttagyggagacttacggcagaygcaccagacagagctggaccttacctaccacacccggtacgatgtgcgccttycagacgcctacgagagcctcatcaacgacgcactgctgggtaactcgacaaactttgtgcgtaaggacgagctcgatgtggcatggcgcatcttcacaccgctcctgcaccagatcgacaatggagagatccaaccgattccgtaccaggcaggcacgcgcgggcccaaggaagcggatgaattcatcatcaacaacggcttcaagcaccagaaagactaccagtggactccctcgaacaagctgtgatgaaggcagacattgcaatctatttcacagctccctgtcgacggcagcgagagaggcagggtattatacactggatgcgtgcctatccgcccctaagaaagcacgtggtcgcgctctgcggtacccaccgaccaacgctgcagatacaacacgtgccaattggcatcccgtacctctactgtctacaatccttttttttcgttctcccttgctatcgccattccccatgcgtgtgcactgcggcccagacagctagaggatgtgtgagcccgtgccgccgtacagacagtgccttnnnnnnnnnnnnnnnnnnnnnnnnnnnnnnnnnnnnnnnnnnnnnnnnnnnnnnnnnnnnnnnnnnnnnnnnnnnnnnnnnnnnnnnnnnnnnnnnnnnnnnnnnnnnnnnnnnnnnnnnnatgagggatagatctctggaatcttaggagaacgcgcggcacccaacacggaggcgcgcacttgatgcaaatgctgctctcgcgtttgttttccctttgccttatttttgttgtttgctttggtcggcctgttgttttcctctctcgcgcagctacctttgtatgcagatttttcattgcttgtgtcgttgctggagttgccttttgccgccgttcccccaccaccttttcagaacacacacacacacaccgcccctcgggcatttcgctcccttttcctacccccttttggccgttttcctttccaatttccgggcataaattacattcttgggttccttttttgttgtcatagtcccttgagggtgcattcccatgttccgcgagcgtggggcaacgacgtgccccagcgtccggaaaggatcgagaaaaggcccccgaaagggtcaaaaacgaagggtggccttcattcaagcagcagcgattcagatgtgtgtgggagtggcagccctttccgagtggcttcccaaacatggcatgtgctcgaaagggagccaacgagaaaaaaaaaaaaaaaaaaaaaaaaaaaaaaaaaaaaaaaaaaa

SEQ ID NO: 2786 - protein, 562 aa, Leishmania amazonensis
  misc_feature (463)..(463): Xaa can be any naturally occuring amino acid
  misc_feature (481)..(481): Xaa can be any naturally occuring amino acid
MSEAQARADEDAYMADVDSILDVLRTHVLERKPDDVFQFLSKSALSLQKDSGAELCDRINCKVKDEQKSRALSIIVFGASGDLAKKKTFPALFDLYCGGLLPPEVNIIGYARTKVDDVEKWKHETLMKYFSKVSERECHAEDFLKHISYFCGAYDKVDDFKRLDAVIREKENAFKGPEEGGNRLFYLALPPSVFAIVCEHIHKGAMPQEVGGWVRVIIEKPFGRDTKSSAELSQALEPFFDESQLYRIDHYLGKEMVQNIITTRFANRIFSAVWNSSNIACVQITFKETIGTEGRGGYFDNIGIIRDVMQNHLTQILALLAMEKPRSLDAECIRDEKVSVLKCIEPVTKENCVLGQYTASADGSMPGYLQDETVPRGSTCPTFAVMRLNINNDRWAGVPFILKAGKAVEQKYVAIRIQFKDEVHPYGDATQRNELVIRAQPSEAMYVKITTKVPGLSGDLRQXHQTELDLTYHTRYDVRLXDAYESLINDALLGNSTNFVRKDELDVAWRIFTPLLHQIDNGEIQPIPYQAGTRGPKEADEFIINNGFKHQKDYQWTPSNKL

SEQ ID NO: 2787 - DNA, 1440 bp, Chlorobium tepidum
  CDS (1)..(1440)
atgagcggcactctcgacaacttcaccatcgtcatcttcggcgcgagcagcgacctggcttcgcgcaagctttttccgtcgattttccagctcgcgcggtgggggcacatgcctgagagcttccggctgattggcgtcgggcggcaggagcaaagccacgaggagttccgcgcgttcgtccgcagtcgcctgctggagcactcgcccgaagccgccggtgacgccgcgcggctcgacgccttctgcctccgcctcttttatgcccgcgtcgatctggacgatccggcgagctacgaagtgctgcgcgacgagatcatgcgcgaggaaaaagtgggagggagcacttgccgcaacctgatgttctatctgtcgataccgccgagccttgcgcctgccgtggtgcgcaatctcggcaaggccgggctgggtggacgtgaacagtcgtgcaccgggtggcgcaagctcatcgccgaaaagccctacggccacgatctcgaaagcgcccgcgagctgaaccgcgttatcaacgaggtgttcgaggagaaccaggtctatcgcatcgaccactacctcggcaaggagccggtgcagaacatcatggtgttccgcttctcgaacggtattttcgagccgctctggaaccggcagtatatcgcgcaggtgcagatcaccatcgccgaggatttcggcatccgggatcgcggcgcgtactacgaggagtcgggacttttgcgtgacatcatccagaaccacggcttgcagttgctcacggccatcgcgatggagccgccggtcgatctcagcgccgattcgatccgcgacgagaaagcgaaagttctgcgttcggtgcggcacttcactcctgattcggttcgggagtcggtggtgatcggccaatacgaggggtaccgcaacgagaaaaatgtcgcgccggactcgaaagtcgagaccttcgctgccgtgaagtttcacgtggataactggcgttggtcgggtgtgccgttctacatgaaagcgggcaagaatctcgccaagcgcgtgaccgaaatcgtcatcaccttccgctgcccgccgcagaattattacggcccatccggcggggcggcgtgctgtacgccgaaccaggtggtactcggcatccagcccgacgaaacggttgccatccgctttggcgccaagcgccccggcgagcagatgattaccgatccggtgttcatgaagttcgactaccgcgatacttttcagggcgaaggtcttacgccgtaccaccgcctcctgctcgatgccatcgagggcaaccagatgaacttcatccgcaaagacagcgtggagtactcgtgggaaattatcgacagcctgaaaaattcaatcgacggccaggttccggagcaatatccagttcatagctgggggccggaatcgtcgaggatttacgggtga

SEQ ID NO: 2788 - protein, 479 aa, Chlorobium tepidum
MSGTLDNFTIVIFGASSDLASRKLFPSIFQLARWGHMPESFRLIGVGRQEQSHEEFRAFVRSRLLEHSPEAAGDAARLDAFCLRLFYARVDLDDPASYEVLRDEIMREEKVGGSTCRNLMFYLSIPPSLAPAVVRNLGKAGLGGREQSCTGWRKLIAEKPYGHDLESARELNRVINEVFEENQVYRIDHYLGKEPVQNIMVFRFSNGIFEPLWNRQYIAQVQITIAEDFGIRDRGAYYEESGLLRDIIQNHGLQLLTAIAMEPPVDLSADSIRDEKAKVLRSVRHFTPDSVRESVVIGQYEGYRNEKNVAPDSKVETFAAVKFHVDNWRWSGVPFYMKAGKNLAKRVTEIVITFRCPPQNYYGPSGGAACCTPNQVVLGIQPDETVAIRFGAKRPGEQMITDPVFMKFDYRDTFQGEGLTPYHRLLLDAIEGNQMNFIRKDSVEYSWEIIDSLKNSIDGQVPEQYPVHSWGPESSRIYG

SEQ ID NO: 2789 - DNA, 2187 bp, Methylobacterium extorquens
  CDS (640)..(2187)
gtgggggctggagcgcggctactgcatgatgatcggcggcgagaaggccgtggtggatcgcctcgatcccatcttcgcggccctcgcgccgggccgcggcgagattccccccacccccggccgagcggggcgggacccgcgggccgagcagggctatatccacgccggcccgagcggggcgggccacttcgtcaagatggtccacaacggcatcgagtacggcctcatgcaggcctacgccgaaggtttcgagatcctgaagcacgcggactcggccgagctgccgcaggagcagcggttcgacctcgacctcgcggacgtggccgaggtctggcggcggggcagcgtcgtgtcgtcctggctcctcgacctcaccgcgatggcgctggccaacgatccgaagctcgactcgttcgcaggctacgtcgaggattcgggcgagggccgctggaccatcaatgcggccgtcgaggaggcggtgccggcgatcgttctctcggcggcgctctacgcccggttccgctcgcgccaggaggcgagcttcgccgacaagatgctgtcagcgatgcgcaagggcttcggcggccaccaggagcccaagaagagctgaacgtgacgttcgccacgcgggagccgcgcatgatccacccgaacaccgcccccaaggcgggcgccgcgaaaccggcgccggactgcacgcttgtcatcttcggcgtcaccggcgacctgacgcaccggctcttgatgccggcgctctacaacctcgcgcggtggaagctcctgcccgaacggttcgccatcgtcggcgttggccgcagcgagatgggcaccgacgggctgcgccacgacctcaccaggaccatgcagggcttcgtcgccgagaggggcggcgagttctcagccgacagcctcgaccgggaggcctggaaccgggtcgtcggccggctggactatctcgccggcgatgtcgaagacccggcgacttacgaagagctgtcgcggcgcatcggggtctcgcgagatgcccaggccgccggcggcaacgtgctgttctaccttgcggtcgcggcccgcctcttcggtccggtggtgacgcgactcggcgaagcggggctcacccgagaaggggagggcgcctggcggcgggtgatcatcgaaaaacccttcggccacgatctcgcctcggccaaggcgctcaaccgggaggtcctcgcggccctaagcgaggaccagatcttccggatcgaccacttcctcggcaaggagaccgtccagaacatcatggtcttccggttcggcaacggcctgttcgagccgttgtggaaccgcgaccgcatcgaccacgtccagatcacggtcgctgagacggttggggtcgagaagcgcggctcgttctacgacgcgaccggcgccctccgcgacatggtgccgaaccacctcttccagctcttcaccatgacggccatggagccgccgatctccttcgacgcccacgccgtgcgcgacaagaaggaggaggtgctcatggccgtgcaccagctctccgaggacgcggccgtgcgcgaggcggtgcgcgggcgatacacggcaggcgcggtgcgcggccagcccgtccgcagctaccgcgacgagccggacgtggacccggcctcgcagaccgagacctacgtcgcgctgcgcctcatggtcgacaactggcgctgggccggcgtgccgttctacctccgcacgggcaaggcgatgacgaggcgcgacacggagatcgccatccagttcaagcaggcgccgctggcgctgttccgcggcaccgccgtcgaggcctgcatcccgaactggctcgtgctgcagatccagccggacgagggcatctccctgcagttcggcgccaaggtgccgggcaccgaggtgcggctcggcgccgtcaacatggacttcctctacaaggactacttccagacccagccgagcaccggctacgagacgctcatctacgacgccatgatcggcgacgcgacgctgttccagcgcgccgacaatatcgaggccggctggcgggccgtgcagcccgtgctcgacgcctggtcgagcgggcgcgccccgatggccgcctacccggccggcagcgcaggcccgaaggaggcggacgacctcctcgcccgcgacggtcgcgcctggcgccctctgtga

SEQ ID NO: 2790 - protein, 515 aa, Methylobacterium extorquens
MIHPNTAPKAGAAKPAPDCTLVIFGVTGDLTHRLLMPALYNLARWKLLPERFAIVGVGRSEMGTDGLRHDLTRTMQGFVAERGGEFSADSLDREAWNRVVGRLDYLAGDVEDPATYEELSRRIGVSRDAQAAGGNVLFYLAVAARLFGPVVTRLGEAGLTREGEGAWRRVIIEKPFGHDLASAKALNREVLAALSEDQIFRIDHFLGKETVQNIMVFRFGNGLFEPLWNRDRIDHVQITVAETVGVEKRGSFYDATGALRDMVPNHLFQLFTMTAMEPPISFDAHAVRDKKEEVLMAVHQLSEDAAVREAVRGRYTAGAVRGQPVRSYRDEPDVDPASQTETYVALRLMVDNWRWAGVPFYLRTGKAMTRRDTEIAIQFKQAPLALFRGTAVEACIPNWLVLQIQPDEGISLQFGAKVPGTEVRLGAVNMDFLYKDYFQTQPSTGYETLIYDAMIGDATLFQRADNIEAGWRAVQPVLDAWSSGRAPMAAYPAGSAGPKEADDLLARDGRAWRPL

SEQ ID NO: 2791 - DNA, 1476 bp, Bartonella henselae
  CDS (1)..(1476)
atggtgagtaaaattattccagtctctccctttgactgtattgtgtttggtggcaatggtgatttagcagcacgcaaacttatacctgctttataccattgtcagtgtgttgggcaattgagcgagccaacacgtattattggagtttcgcgctcttctttgagtggtgaagagtatcaaaattttgttcgtgcttctttagaaaaatatgttcatccaaaagatctcaatcgaattgaactcaatcgttttcttgcgcgtttaacctatatttctgttgatattacatcaaatcgagggtggagagatctcgctttaccgctctcagaagatccatctgatattcgagttttttatttagcagttggttcatccctttttggtgatattgcgatgagattgggacaaaatggtttagtaacgcaaaaaacacgaattattattgaaaaacctattggttgtaatgtaaaaacagcggttcagctcaatgatacatttgcaagcgtatttgatgaagatcagatttttcgcattgaccattatctgggcaaggagaccgttcaaaatttgatggcattgcggtttgttaatacactttatgagccgttatggaactccaattatattgatcatgtacagataacggtggctgaatctttaggattggaagggcgtatagaatattatgagagtgcaggtgcactgcgtgatatggtacaaaatcatatgctgcaattgctctgtttggttgctatggaagtaccatttaccaatagtgcgaatgctgtgcgtgatgaaaaactgaaagttttgcattctttaatgcctctcgatgttcgtaatgtagagcaatatactgtacgtgggcagtatctttctggtatattggatgatgtttgtgtaaaatcttatcttgatgatttggggaaagaagttagtaggagcgaaacatttgtggcgcttaaaattaaggttgataattggcggtgggcagatacgcctttttatttgcgaacaggtaaacgcatgtccacgcggatgtctgaaattgttatcgttttcaaacccattccccataatatttttgagacggattcaaatgaaattttttctaatcggctcgtcattcgtctccagcctgatgaaggcgtaaaacaatggttgatgattaaggatccaggtcctggtggtatacgatttcgtcatattccattggatatgagttttgcgtctacattttctcagcgtaatcctgatgcttatgaacgcttattaatggatgttattcgcggagatcaaacactctttatgcgtcgtgatgaagttgaagctgcttggcgttggattgatccaattctagagggatgggaagccataaagcagcctgttcatggttatagcgctggctcatggggaccatctgcttcgaaacttttgatggaacgtgatgggcgtatatggaacaatttggtttag

SEQ ID NO: 2792 - protein, 491 aa, Bartonella henselae
MVSKIIPVSPFDCIVFGGNGDLAARKLIPALYHCQCVGQLSEPTRIIGVSRSSLSGEEYQNFVRASLEKYVHPKDLNRIELNRFLARLTYISVDITSNRGWRDLALPLSEDPSDIRVFYLAVGSSLFGDIAMRLGQNGLVTQKTRIIIEKPIGCNVKTAVQLNDTFASVFDEDQIFRIDHYLGKETVQNLMALRFVNTLYEPLWNSNYIDHVQITVAESLGLEGRIEYYESAGALRDMVQNHMLQLLCLVAMEVPFTNSANAVRDEKLKVLHSLMPLDVRNVEQYTVRGQYLSGILDDVCVKSYLDDLGKEVSRSETFVALKIKVDNWRWADTPFYLRTGKRMSTRMSEIVIVFKPIPHNIFETDSNEIFSNRLVIRLQPDEGVKQWLMIKDPGPGGIRFRHIPLDMSFASTFSQRNPDAYERLLMDVIRGDQTLFMRRDEVEAAWRWIDPILEGWEAIKQPVHGYSAGSWGPSASKLLMERDGRIWNNLV

SEQ ID NO: 2793 - DNA, 2266 bp, Toxoplasma gondii
  CDS (169)..(1851)
ccccctcctggcatcttgcgtcgcatagcagacatacatcgtggggttttggcccgctaggttaccatcacgctcaacggcttccagttgaggaaccgtgttttccccacattttcatgattttgtccaaaagttgcagagtcgacttccatctctggataaggcaacatggcaccggaaaatggtagaagcagttattctgcatatatcagactgttgtggcttctgacggcggtaactgctgcgtcggccctcgtcacgaacgtctcgggggggacggcaggcgaagatcaaacttatggatatgtgaatgtcggaaacaactctgatggtgtcacgttcattttttacggcgcaaccggagatctctgcaggaggaaaatttacccgacggtcttccaactatatttggagaaaaagctgccggagtcgtttctcattgtaggcatgagcaatcaagccatgagcttggtcgacttccgtaagatgcatcgtcctcagctcgagaatgtcttgcgttcttataagcggctacgtgatcctgcgaggctactgaatcagtttgagcagcggatgagctacaccacgggatcgatcgacgatgataatattttaagtcatttctgccacaatatatcgagaatggaacaggcacaatcccctaacgcttcttggggccgagtactgtacttggcgctgcctcctcatattttcgctccggcggcggccggcttcaagcggaattgctcgacacataacgggtggacgcgagtagtagttgaaaaaccatttggacgtgattatgagagctcagagcttctttcggagcagctgaggagcgtgctgcttgaagaggaaacataccgaatagatcactatctcggcaaggagatgttacaggcactgccaccgctgcgattcacgaacttcttcctcgagccgctcatgaaccgaaatttcgtgaaagcactcacgatttctttcaacgaggatattggtatcagcggccgcggcgagttctttaatgcatacgggatcattcgggacgtcatgcagaatcacctcctccaacttctaactctcgtggtgatggaaagaccagccactttgagtgatgaggatatcagagacgagaaggttaaggttctgaaacagatcgctcccattaaactagaggagaccattgtcggtcagtactcaaagtcggaggatggaagcgctggatcgtatctggagaccgatggagtgccctcgcactctcgaacgcccacttacgccgcggtatgtatgcacatacgaagtcctcggtgggaaggagttcccatttacatggaggctggtaaaggcatgggcaagaggatcgtctacgtccgcatagactttgctggcgtcccgggattcagagagagtaactatgacttcccaggaaatagtttgattttagaagtccagccgcacccgtctgtgcgctttgaagtcaatgccagggcacctggactcggagcgactttgggaaggaacgtcttgaaaatggatgtcaatccggacggcgtgcggatccccgatgcatacgaaaatcttctcctcaacgtgctcagcggcgacaaaagccattttgttagaacggatgagctccgcgaatcatggagaattttcacgccgatgttacatgcattagaagatttacaggtccagccacgactgtatcctttcgggacacctggtcctagtggcgctgttgatgagctgcgcgcagctgtcgctgcctcagtgaacggtacgcaaggcaaatctacgatagatagcagagtctctctgcgtttttctgccagcacagggaaacagaggtaatgctcgtcgtattcgcttaagcacaaagcaggcgccaggggatcacttgtgctatagcgtgaggagtttctgttttggtagggcgtgtgattttggtaaattatagtaacgttggtaactagtggagctatcagtgaaagcgtagacttgcatctcttgacgcttcatgcatgtgttgtaagaagtcgacgtccgaaatagccgcaggtttccctttgtcagacagcgacggttaggccgtaactgcggctgaagatgctctttaattcagtaatgcagacagggacagtaacatacacattcgtttcacccgtggaggcggaaagctcctggcacgtgtttcgtaactggatgaacgttttttataccacagcagtcataagacattggccgctaaaaaaaaaaaaaaaaaaaa

SEQ ID NO: 2794 - protein, 560 aa, Toxoplasma gondii
MAPENGRSSYSAYIRLLWLLTAVTAASALVTNVSGGTAGEDQTYGYVNVGNNSDGVTFIFYGATGDLCRRKIYPTVFQLYLEKKLPESFLIVGMSNQAMSLVDFRKMHRPQLENVLRSYKRLRDPARLLNQFEQRMSYTTGSIDDDNILSHFCHNISRMEQAQSPNASWGRVLYLALPPHIFAPAAAGFKRNCSTHNGWTRVVVEKPFGRDYESSELLSEQLRSVLLEEETYRIDHYLGKEMLQALPPLRFTNFFLEPLMNRNFVKALTISFNEDIGISGRGEFFNAYGIIRDVMQNHLLQLLTLVVMERPATLSDEDIRDEKVKVLKQIAPIKLEETIVGQYSKSEDGSAGSYLETDGVPSHSRTPTYAAVCMHIRSPRWEGVPIYMEAGKGMGKRIVYVRIDFAGVPGFRESNYDFPGNSLILEVQPHPSVRFEVNARAPGLGATLGRNVLKMDVNPDGVRIPDAYENLLLNVLSGDKSHFVRTDELRESWRIFTPMLHALEDLQVQPRLYPFGTPGPSGAVDELRAAVAASVNGTQGKSTIDSRVSLRFSASTGKQR

SEQ ID NO: 2795 - DNA, 1923 bp, Xanthomonas campestris
  CDS (1)..(1923)
atgcaacgacgtgggcctgctcgccgaagagtacgacccgcgcagcaaacgcatgcttggcaacttcccgcaagggtattcccacgtggccctggtcaatgcggcattgcgcctgcatggacgcatgggcgagaaggagacgcatccatgagtgagcaagtgaccaccccgccgtgcatcatcgtggtgttcggtgcgcgcggtgacctgacccggcgcctggtgatgccggcgctgtacaacctgcgccgcgccggtgcacttggcgaggaattcgccattgtcggcatggaccacggcgacatcaccgagcgtgcctggcgcaccaacatgggcaaggcgatgaccgagctgctgagcagccgcgatgccgagttccaggccgatggattcgataccgacacctgggactggttgcgcgagcgcatgcattacgtgcgcggcgacttcaccgacctgcgtgcctatcagtcgctggacggcgtgctggaaaaactgcacaagcgctatggcacccgcggtaatgtgctgttctatctggccaccgccgcgcgcttcttcgagccggtgctgctgaatctgggcgaggccgggctggtcaagcagcgcgagggcgccggctggcgccgggtgatcgtggaaaagccgttcggccacgacctgcccagcgccaagcatctcaatgccacggttgcgcgcgtgctgcacgaagaccaggtgttccgcatcgaccatttcctgggcaaggaaaccgtgcagaacatcctggcgttccgcttcgccaatggcctgttcgagccggtgtggaaccgcgaccggatcgaccacgtgcagatcactgccgccgaaaccatcggtgtggaagggcgcgggcgtttctacgatcccaccggctgcctgcgcgacatggtgcccaaccatctgttccagctgctggcgatgattgcgatggagccgccggccgcgttcaccaccgaggcgatgcatcgccgccgcgccgaagtgatcgaagcggtgcgcccgatcaaacctgaagacgtggtgcgtgggcagtacgcgtccggtgcggtcaatcgcagcgccgtgccgggataccgcgaagaagacacggtaccggacgagtcggaaaccgaaaccttcgtggcgatgaagttgcaggtcgacacctggcgctgggccggcgtgccgttctatctgcgcaccggcaagcgcctgcgcgaacgcaccaccgagattgcgatccgcttcaagcctgcaccgttggcgccattccgcagcaccgaagtgggcggctacggccccgactggctggtgctgcatatccagcccgacgaaggcatctcgctgcagttcgacgtcaagcgcccgggcgcgcaagtggcgttggcgccggtgcggatggacttccgctaccgcgactggttcccgaaggaatacaccgttggctacgagcgcttgctgcaggactgcatgaatggcgaggccggtctgttccaggatgcagcgatggtggaaggcgcgtggcgcatcgtgcagccgatcctggatgcgtggaagcaaccgcccagtgactttcccaattacgcggctggcagtgccggcccgtcggcggccgatgcgttgctggcgatgaacggcgggcacgcctggcgtgcgctcactccgggccgcaaaccgccgccgcgtcgcccgcctgaagcgcgtgcgggtgcggcggcaccggcgaagaagagcgccaagaaggcggtcaaaaaggctgcgaaaaaagtcgccaaggcgcctgccaagcgcagcgctgcggttgccgggaaatctgcagcggcggcgtcgccgagcaaggcggcaagcaaggcggtcaccaagcgcgccaccaaaaaggcgacgaagccggcaaccaaagtcgtcaagaagagcgcttcgtag

SEQ ID NO: 2796 - protein, 640 aa, Xanthomonas campestris
MQRRGPARRRVRPAQQTHAWQLPARVFPRGPGQCGIAPAWTHGREGDASMSEQVTTPPCIIVVFGARGDLTRRLVMPALYNLRRAGALGEEFAIVGMDHGDITERAWRTNMGKAMTELLSSRDAEFQADGFDTDTWDWLRERMHYVRGDFTDLRAYQSLDGVLEKLHKRYGTRGNVLFYLATAARFFEPVLLNLGEAGLVKQREGAGWRRVIVEKPFGHDLPSAKHLNATVARVLHEDQVFRIDHFLGKETVQNILAFRFANGLFEPVWNRDRIDHVQITAAETIGVEGRGRFYDPTGCLRDMVPNHLFQLLAMIAMEPPAAFTTEAMHRRRAEVIEAVRPIKPEDVVRGQYASGAVNRSAVPGYREEDTVPDESETETFVAMKLQVDTWRWAGVPFYLRTGKRLRERTTEIAIRFKPAPLAPFRSTEVGGYGPDWLVLHIQPDEGISLQFDVKRPGAQVALAPVRMDFRYRDWFPKEYTVGYERLLQDCMNGEAGLFQDAAMVEGAWRIVQPILDAWKQPPSDFPNYAAGSAGPSAADALLAMNGGHAWRALTPGRKPPPRRPPEARAGAAAPAKKSAKKAVKKAAKKVAKAPAKRSAAVAGKSAAAASPSKAASKAVTKRATKKATKPATKVVKKSAS

SEQ ID NO: 2797 - DNA, 1431 bp, Xanthomonas campestris
  CDS (1)..(1431)
atgcacaacaccctgatcctgttcggcgccaccggcgatctcgcccagcgctatctctttccatccctgctgcgcctgtttgtcgacggcctgttgccggaggacttccgcatccgtgcgttggccctgtcgcagcacgacaccgacgccttccgcgaggtactgcgcccgcgcctggcccaggcgctgccgattgccaccgccgcgcagatcgatgcgctgctgcagcgcatcgactaccgctcggcggacctgcgcaatgccgaatcggtggccgaggccgtgcgcgaactggccagccgccagtgcgtaagctatctggcgattccaccgggcctgtacatcagtacctgccagggcctggccctgggcggcgcgctggctgcaccgcaccggttgatgctggaaaaaccgatcggccacgattcggacagcgcccgcgagatcctgcagtcgatcggcgcactgatcgacgaagaccgcgtgttccgtctcgaccactacctgggcaaggccgcggtgcagaacctggtggcgctgcgcttcggcaacaccttgctggaagcggtgtggaaccggacctacatcgaatcggtacagatcctggtggccgagagcgaaggcgtggacggccgcgatgcctactacgcccgctccggcgcgctgcgcgacatggtgcagagccatatcctgcagttgctgtgcctggtggccatggagccgccggcctcgctggaagccgaccgcatccgcgacgagaaggtcaaggtgctgcgcgccttgcgcccgatgaccgccgagcacgccgcgcaagacagcgtgcgtggccgctacaccgccggcagcatcaacggcgagccggcgcaggcctaccacccgccggaaggcagcgatgtggaaaccttcgtcgcggtcaccgcgcacatcgacaactggcgctgggctggcgtgccgttccacctgtgcaccggcaagcgcctggctgagcgctccacgcgcatcgtggtcacgctcaagccggtgacgcattggttgttcgagcgtccggaccgccagaacgcggtgcccaaccgcctgaccttccagctgcagccgctggaaaacatcgagctgggcctgatgagcagcctggccggcccggaatggggtgcgatcgaactgcagccgctggaactggagctgtccgtgcccaccggcctgcaccgccgtatcgcgtatgaacgcttgttcgtggatgccttcaacggcaacccggcgctgttcgtgcgcgatgacgaggtcaaggccgcctgggcctggatcgacagcgtcagcgatgcctggtcggacgcacagctgccgctgcagccgtatccggccggtagctggggccccgagaccgccgcaccgttcctgcccccggccaccgacgcacagggaaacaacgcatga

SEQ ID NO: 2798 - protein, 476 aa, Xanthomonas campestris
MHNTLILFGATGDLAQRYLFPSLLRLFVDGLLPEDFRIRALALSQHDTDAFREVLRPRLAQALPIATAAQIDALLQRIDYRSADLRNAESVAEAVRELASRQCVSYLAIPPGLYISTCQGLALGGALAAPHRLMLEKPIGHDSDSAREILQSIGALIDEDRVFRLDHYLGKAAVQNLVALRFGNTLLEAVWNRTYIESVQILVAESEGVDGRDAYYARSGALRDMVQSHILQLLCLVAMEPPASLEADRIRDEKVKVLRALRPMTAEHAAQDSVRGRYTAGSINGEPAQAYHPPEGSDVETFVAVTAHIDNWRWAGVPFHLCTGKRLAERSTRIVVTLKPVTHWLFERPDRQNAVPNRLTFQLQPLENIELGLMSSLAGPEWGAIELQPLELELSVPTGLHRRIAYERLFVDAFNGNPALFVRDDEVKAAWAWIDSVSDAWSDAQLPLQPYPAGSWGPETAAPFLPPATDAQGNNA

SEQ ID NO: 2799 - DNA, 1839 bp, Xanthomonas axonopodis
  CDS (1)..(1839)
atgagtgagcaagcaaccacaccgccgtgcatcatcgtggtgttcggcgcacgcggcgatctgaccaagcgcctggtcatgccggcgctgtacaacctgcgccgttccggtgcgctgggcgatgatttcgccattgtcggcatggaccatggcgacatcagcgagcgcgcctggcggaccaacatggggcagtcgatgacgcagctgctcagcagccgcgatgccgaattccagaccgacgaattcgacaccgccacctgggactggctgcgcgaacgcatgcattacctgcgcggcgacttcaccgatcagggagcctatcgatcgctgggcggcgtgctggacaagctgcacaagcgctacggcacgcagggcaatgtgctgttctatctggccaccgccgcgcgcttcttcgagccggtattgctcaacctgggcgaggctggcctggtcaagcagcgcgaaggcgaaggctggcgccgggtcatcgtggaaaaacccttcggctacgatctgcccagcgcccagcacctcaatgccacggtcgccaaggtgctgcacgaggatcaggtgttccgcatcgatcatttcctgggcaaggaaaccgtgcagaacattctcgcgttccgcttcgccaatggcttgttcgaaccggtgtggaaccgcgaccgcatcgaccatgtgcagatcaccgcggccgaaaccatcggagtggaagggcgcggacggttctacgaccccaccggctgcctgcgcgacatggtgccgaaccatctgttccagctgctggcgatgattgcgatggagccgccagcggccttcaccaccgaggcgatgcatcgccgtcgcgccgaagtgatcgaagcggtgcgcccgatcaaacccgaagacgtggtgcgcgggcaatacgcctccggtgcggtcaatcgcaatgcggtgccgggttatcgcgaagaagacaccgtgcccgacgattcggacaccgaaacctatgtggcgatgaagctacaggtggacacctggcgctgggccggcgtgccgttctacctgcgcaccggtaagcgcctgcgcgaacgcacgaccgagatcgccattcgcttcaagccggcaccgctggcgcccttccgcagtaccgaggtgggcggctacggccccgactggctggtgctgcatatccagccggacgagggcatctcgctgcagttcgacgtcaagcgtccgggcgcgcaggtggcactggcaccggtgcgcatggacttccgttaccgcgactggttccccaaggaatacacggtgggctacgagcgcctgctgcaggactgcatgaacggcgaagccggcttgttccaggatgcggccatggtggaaggcgcatggcgcatcgtgcaaccgatcctggatgcatggaaacaacccccaagcgacttccccaattacgccgccggcagcgccggcccttcggctgccgatgcactactggcaatgaatggcggacacgcctggcgcgcactcaccccagggcgcaagccgccaccgcgccggccgccggaagcgcgtgctggcgctgccgcgccgattaagaaaaccaccggcaaatctgccaagaaggccgccaaggcgccggccgagaaggtcaccaaggcgccagccagacgcgcatctgcggcttcagcaagaccatcgcaggatgcggctacgtcgcctagcagcgcggccaggaaggccgtgagcaaacgcgtaaccggcaaggtcgcaaaggccgccggcaaaaccgcggcaggcaagggcgcagcgaagaagtcggccagcaagaccgtggcgcgcacgccacgccgctga

SEQ ID NO: 2800 - protein, 612 aa, Xanthomonas axonopodis
MSEQATTPPCIIVVFGARGDLTKRLVMPALYNLRRSGALGDDFAIVGMDHGDISERAWRTNMGQSMTQLLSSRDAEFQTDEFDTATWDWLRERMHYLRGDFTDQGAYRSLGGVLDKLHKRYGTQGNVLFYLATAARFFEPVLLNLGEAGLVKQREGEGWRRVIVEKPFGYDLPSAQHLNATVAKVLHEDQVFRIDHFLGKETVQNILAFRFANGLFEPVWNRDRIDHVQITAAETIGVEGRGRFYDPTGCLRDMVPNHLFQLLAMIAMEPPAAFTTEAMHRRRAEVIEAVRPIKPEDVVRGQYASGAVNRNAVPGYREEDTVPDDSDTETYVAMKLQVDTWRWAGVPFYLRTGKRLRERTTEIAIRFKPAPLAPFRSTEVGGYGPDWLVLHIQPDEGISLQFDVKRPGAQVALAPVRMDFRYRDWFPKEYTVGYERLLQDCMNGEAGLFQDAAMVEGAWRIVQPILDAWKQPPSDFPNYAAGSAGPSAADALLAMNGGHAWRALTPGRKPPPRRPPEARAGAAAPIKKTTGKSAKKAAKAPAEKVTKAPARRASAASARPSQDAATSPSSAARKAVSKRVTGKVAKAAGKTAAGKGAAKKSASKTVARTPRR

SEQ ID NO: 2801 - DNA, 1431 bp, Xanthomonas axonopodis
  CDS (1)..(1431)
atgcacaacaccctgatcctgttcggcgccaccggcgatcttgcccagcgctatctctttccttccctgctgcgtctgttcatcgacggtctgttgccggaggacttccgcatccgtgcgctggcgctgtcgccgcacgacaccgatgcatttcgcgacgtgctgcggccgcgcctgaccgaagcgctgccgatcgcgaccgccgaacagatcgacacgctgctacaacgggtcgactatcgctcggtggatctgcgcaatgccgattcggtggccgacgcggtccgcgaactggccagccgtcggtgtgtgagctatctggcgatcccgccgggcctgtacatcagcacctgccagggcctggcgctgggtggcgccctggcggcaccgcatcgcttgatgctggaaaaaccgatcggccacgactcggacagcgcccgcgacatcctgcagtcgatcggcgcgctgatcgacgaagaccgcgtgttccgcctggaccattacttgggcaaggcagcggtgcagaacctgatcgcgctgcgcttcggcaacacgctgctggaggcggtctggaaccggacctacatcgagtcggtgcagatcctggtcgccgaaagcgaaggcgtcgacgggcgcgatgcctactacgcccgctccggcgccctgcgcgacatggtgcagagccatatcctgcagctgttgtgcctggtggcaatggagccgccggcctcgctggaagccgaccgcatccgcgatgagaaggtcaaggtgctgcgcgccctgcgcccgatgaccgccgagcacgccgcgcacgactgcgtgcgcggccgctacaccgccggcagcatcaacggccagccggcgcaggcctaccacccgccggaaggcagcgacgtggaaacctttgtcgccgtcaccgcgcatatcgataactggcgctgggccggcgtgccgttccacctgtgcaccggcaagcgtctggccgagcgctccacccgcatcgtggtgacgctcaagccggtgacgcactggctgttcgaacgccccgaccgccagaacgcggtgccgaaccgcctgaccttccagttgcagccgcaggaaaacatcgagctcggcctgatgagcagcctggctggcccggaatggggtgcgatcgaactgcagccgctggaactggaactgtcggtgccgaccggcctgcaccgtcgtatcgcctacgaacgtctgttcgtcgacgccttcaacggtaaccccgcgctgttcgtgcgcgacgacgaggtcaaggcggcgtggtcgtggatcgacagcgtgagcgacgcctggaaagacgccgcgctgccgctgcagccctacccggccggcagctggggtcccgaatcggccgcccacttcctgcccccggccaccgacgcacagggaaacaacgcatga

SEQ ID NO: 2802 - protein, 476 aa, Xanthomonas axonopodis
MHNTLILFGATGDLAQRYLFPSLLRLFIDGLLPEDFRIRALALSPHDTDAFRDVLRPRLTEALPIATAEQIDTLLQRVDYRSVDLRNADSVADAVRELASRRCVSYLAIPPGLYISTCQGLALGGALAAPHRLMLEKPIGHDSDSARDILQSIGALIDEDRVFRLDHYLGKAAVQNLIALRFGNTLLEAVWNRTYIESVQILVAESEGVDGRDAYYARSGALRDMVQSHILQLLCLVAMEPPASLEADRIRDEKVKVLRALRPMTAEHAAHDCVRGRYTAGSINGQPAQAYHPPEGSDVETFVAVTAHIDNWRWAGVPFHLCTGKRLAERSTRIVVTLKPVTHWLFERPDRQNAVPNRLTFQLQPQENIELGLMSSLAGPEWGAIELQPLELELSVPTGLHRRIAYERLFVDAFNGNPALFVRDDEVKAAWSWIDSVSDAWKDAALPLQPYPAGSWGPESAAHFLPPATDAQGNNA

SEQ ID NO: 2803 - DNA, 1458 bp, Thermoanaerobacter tengcongensis
  CDS (1)..(1458)
atgaaagataaagacctttcaaacgtgatggtcatattcggtggaacaggagatttaacccataaaaaattgatgccggccctttacaacttaagatatcaaaatatcctgcctgaaaattttgctgtagttgctatagggagaagagacaagactgaagaggaatatagaaatgagatgctggagtctgttaaaacttattctagatttgacattgacgaaaaaatctggcaagatttaagtagcaggatattctacaaaagatttgattttaactatgacaacggatatatggaacttagttactttttagatgaactggataggaaatacaatacacagggcaacagggtatattatcttgcagttgcaccggaatattttggcatcattgtggaaaagttatacagacacggaatggtaagtaatgaaacttcatggcagagagtagttatagaaaagccttttggagaaaatttagaatctgcccggaaactaaataaaatgataacagatgtctttacagaaagaaatacttatagaattgatcactatttaggaaaagagatgctacagaatataatggtcatcagatttgccaatgtgttttttgagccagtttggaacagaagatatatagacaatgtgcaaatttcttctaatgagacggtagggatagaaaatagaggaggatactacgagaaagcaggagctttgagggacatggttcaaaaccacatgatgcagcttctgaccttgacggcgatggaaccacctgtaaatttggatacagaatctataagggatgagaaggtgaaggttttaaaatccttagagattatgactcctgagcttgtagagaaaaatgtggtgagagggcagtatgtgggatataggcaggaggaaaaagtatctccaacttccaatacagagacttttgtggcattaaaagtgcacatagaaaatttcagatgggcaggagttcctttttacatcaggactggaaaaaggatgccggaaaaatccacacagattgtcatccaatttaagcctctgccaggtattttgtatttcaaagagtataaaaatttgcttcccaatttgcttgtaataaaaattcagccggaggaaggagtaaaacttcagtttaatgccaaagtgccgggagcaggagatataactatagagcctgtaaatatggatttttgtcagaactgccagatatccaataattctccagaggcatatgaaagacttctttttgatgtgatgagaggagattctactttatttactcgctgggatgaggtagaatattcttggaggtttgtagatgctattgctaaagcatgggcagaaaaaacacccgattttcctaattactatccagggacctggggtcctagtgaggcagaagagcttttgagaagagatggaagaatgtggtggaatgtatag

SEQ ID NO: 2804 - protein, 485 aa, Thermoanaerobacter tengcongensis
MKDKDLSNVMVIFGGTGDLTHKKLMPALYNLRYQNILPENFAVVAIGRRDKTEEEYRNEMLESVKTYSRFDIDEKIWQDLSSRIFYKRFDFNYDNGYMELSYFLDELDRKYNTQGNRVYYLAVAPEYFGIIVEKLYRHGMVSNETSWQRVVIEKPFGENLESARKLNKMITDVFTERNTYRIDHYLGKEMLQNIMVIRFANVFFEPVWNRRYIDNVQISSNETVGIENRGGYYEKAGALRDMVQNHMMQLLTLTAMEPPVNLDTESIRDEKVKVLKSLEIMTPELVEKNVVRGQYVGYRQEEKVSPTSNTETFVALKVHIENFRWAGVPFYIRTGKRMPEKSTQIVIQFKPLPGILYFKEYKNLLPNLLVIKIQPEEGVKLQFNAKVPGAGDITIEPVNMDFCQNCQISNNSPEAYERLLFDVMRGDSTLFTRWDEVEYSWRFVDAIAKAWAEKTPDFPNYYPGTWGPSEAEELLRRDGRMWWNV

SEQ ID NO: 2805 - DNA, 1762 bp, Oryza sativa
  CDS (41)..(1558)
ggtatattgctgaaggaagaagagcaccaacctatttatcatgtcaggaggatcttcaccaaggtcaagacgaagcagctttaattctttatcaagagatctcgaactcccttcagagcaaggttgtctctctgttattgtcctcggggcttctggagacctagccaagaagaaaactttcccggcactcttccatctttttgcacagggatttatacaatcaggtgaagtgcatatatttgggtatgcgagatcaaacctttctgatgatgggttaagggaacgcattcgtggatacctcaaaggagcctcagaagaacatctctcagactttttgcaacatataaaatatgtcagtggttcctatgacagcggagaaggatttgagaaattgaacaaggaaatttcagagtatgagaagtcaaacaaatcagaaagccctcgcaggctcttctatttggcattgcctccatctgtctacccttcagtctgcaaaatgatcagaacatattgcatgaatccatctggatggactagagtcattgttgagaagccatttggaaaggacttggactcttcagaagaattaagtgcccaacttggggagctatttgacgaaaaccaactctacagaattgatcactacttgggaaaagagttggtccaaaacctgcttgtgcttcgttttgccaaccgcttgttcttgcctctttggaaccgcgacaatattgataatatacagattgtattcagggaggactttgggactgacgggcgtggtggatattttgatcaatatggaatcattcgtgacatcatccagaaccatttgttacaggttttctgtttggttgcaatggaaaagcctgtctctcttaagcctgagcacattagagatgagaaagtcaaggttctgcagtccgtgaaccctataaagcatgatgaggttgtccttggacaatacgaggggtacaaggatgaccctacagtgccagatgactcaaacaccccaacttttgcatctgtcgtgtttcgggtacacaatgaaagatgggagggtgttcctttcattcttaaagctggtaaagcactaagctcaaggaaagcagaagtccgtgtgcagttcaaagatgttcctggtgacatctttaaatgtaaaaggcaaggaagaaatgagtttgtcatacgccttcagccatcagaagccatgtacatgaaacttactgtcaaaaaacctggattggagatggccaccgagcagagtgaacttgatctgtcatacgggatgcggtaccaaaacgtcaaaattccagaggcatgcgagcgtctcatattggatacgatacgaggagaccaacagcacttcgttcgccgagatgagctgaaggctgcttggcagatcttcactcccctgctgcacgacatcgacgaaggcaaggtgaagtctattccataccagcctggcagccgaggccccaaggaagccgatgaactgagcgagagggttgggtatatgcagacccacggttacatatggataccacccacccttgcatagacagacagacagacagacagtagtattgtttagctaggaagagtgcctctaaactgttattattgcggatatattcgtttcatattttcacgataacgcctgactagtgactacctggcgttgtaataatgtgttgcttcgtaagtataactgctattgtgaaataaaagtgcatgtttcgatcaaaaaaaaaaaaaaaaaaaa

SEQ ID NO: 2806 - protein, 505 aa, Oryza sativa
MSGGSSPRSRRSSFNSLSRDLELPSEQGCLSVIVLGASGDLAKKKTFPALFHLFAQGFIQSGEVHIFGYARSNLSDDGLRERIRGYLKGASEEHLSDFLQHIKYVSGSYDSGEGFEKLNKEISEYEKSNKSESPRRLFYLALPPSVYPSVCKMIRTYCMNPSGWTRVIVEKPFGKDLDSSEELSAQLGELFDENQLYRIDHYLGKELVQNLLVLRFANRLFLPLWNRDNIDNIQIVFREDFGTDGRGGYFDQYGIIRDIIQNHLLQVFCLVAMEKPVSLKPEHIRDEKVKVLQSVNPIKHDEVVLGQYEGYKDDPTVPDDSNTPTFASVVFRVHNERWEGVPFILKAGKALSSRKAEVRVQFKDVPGDIFKCKRQGRNEFVIRLQPSEAMYMKLTVKKPGLEMATEQSELDLSYGMRYQNVKIPEACERLILDTIRGDQQHFVRRDELKAAWQIFTPLLHDIDEGKVKSIPYQPGSRGPKEADELSERVGYMQTHGYIWIPPTLA

SEQ ID NO: 2807 - DNA, 1305 bp, Encephalitozoon cuniculi
  CDS (1)..(1305)
atgaaggtcgttatcttcgggtccagtggcgatcttgcaaaaagaaagctttttcctgcactctctcggattgacttggagggtgtcggggtggttggctatgcaaggaccaagtacaacatcgagttttcggaagttcttcaggaggtcgggaactactcgccggaatttctttcgaaggtcacctacattccagggccctacgatgacctttcgaagcttaaagaggtctcagactcggagactgtgctgtacttttcagttccatcctctgtgtacacttgtttattcagagagatatcgaagcttgactacaaggtgattggagtcgagaagccatatggagatagcattgagtcgtttatggagataaaggggtttgatctggggaagaccaggtttattgaccactatcttctgaagccgcttgtggtggctatgcctgggattataagggagacgggggcgattcgagaggtgatgagcaacagatatgtgaagagtgttgagatagtctcgaaggaagttcttgggggagagggaagacactacttcgataagaacggaattataagggacatggtcctgagccacatgggcgagcttcttggggttgttgcgtctgacgtaacaaagccatcgaggattatggaagcattggcgagaatggaggttttcaaggcatgcaccgtcgacaccgagagatgcatttatgggcagtatgacgactatattaaggagattcacaaggactcgagtacggagacgttctgcatggttcccataagcatagggactccccgctggtctaaggttcccttcatcattgttgcagggaaggggatgaacgaaaagagaacagagataatacttgagtttcgaagagatgtatttgcgaagtgcattgagctgttttctatgccgaggcaatcttcgtgcaggattgttcacaccaacgaaatagaaacggttcgactggtctttaatatatatcctgaatgcgaagtatttctggaagttctcgtgggaggggagcctgtccggtatgttctgcatgacaagaaagagattgatggcctgatgcatgacagttatggaggataccatgactatgagatcatctttgacagtcttgtaagaggcaaggactttagcagcgtgagctctcaggaggcagagcttctgtggaaggtgtttaaccccatactatctattagcaaagaggacatgctgttctactattctaagggaattgacatgcctaaggaagctgaagaaatgatcagggaaattaaagaccattag

SEQ ID NO: 2808 - protein, 434 aa, Encephalitozoon cuniculi
MKVVIFGSSGDLAKRKLFPALSRIDLEGVGVVGYARTKYNIEFSEVLQEVGNYSPEFLSKVTYIPGPYDDLSKLKEVSDSETVLYFSVPSSVYTCLFREISKLDYKVIGVEKPYGDSIESFMEIKGFDLGKTRFIDHYLLKPLVVAMPGIIRETGAIREVMSNRYVKSVEIVSKEVLGGEGRHYFDKNGIIRDMVLSHMGELLGVVASDVTKPSRIMEALARMEVFKACTVDTERCIYGQYDDYIKEIHKDSSTETFCMVPISIGTPRWSKVPFIIVAGKGMNEKRTEIILEFRRDVFAKCIELFSMPRQSSCRIVHTNEIETVRLVFNIYPECEVFLEVLVGGEPVRYVLHDKKEIDGLMHDSYGGYHDYEIIFDSLVRGKDFSSVSSQEAELLWKVFNPILSISKEDMLFYYSKGIDMPKEAEEMIREIKDH

SEQ ID NO: 2809 - DNA, 2125 bp, Drosophila melanogaster
  CDS (158)..(1738)
gcgatttttgcctcagtctatacctccaggcaatatctatcactaatcttttttaaattacaactatttattcttggccaaaatttgacgttaccttgctttcttttattctctcaaaattatactttacccgaaatgatttccatggacccccacaatgaggaggcgtattccatcgtggtcttcggagcctcaggcggattggccaaaaagaaggtgtttccggcgctttgggctctcttccgggagaatcggctgccccagggcaccaaaatatttactttcacccggtccccgctgcagacgaagacgtaccggttgcagattcttccctatatggagctggacaagcatcgggaccccaagaagtacaacctctctttggacgaccgtgcactgtgtgcagggcgagtacgacaagccggagaactacgtggcactcacggaggcgatggtacaccaggagacaaagcacaatcaggtgcgcgcgaatcgaatcttctacctggcgctgccaccgatcgttttcgatcaggtgaccctcaatgtcagtcgaaaatgcagctcgaccacgggatggaaccgcataatagtggagaagcccttcgcgcgggacgacatctcctacaaggcctttcaaacctcgctgtgcaactgcttccgggagtcgcagatttacctgatggaccacctcctcagccggcaggtgatgcagaacttctttgcgctgcgctattcaaaccacttgtgggccgagaccctgaaccaccgccacgtggcggcggtgatgatatccataaagtgtgagctgccggtgtcggtgaatcgggcagactactttaatcagtttggcattattcgcgacctgatgaccaaccacatgatccagatgctggccatgctggctatggatcagccgtacgccaacactgctgacgacctgcgtgccgaacggctgaaggttcttcgccaggtgctaactcccaacataggcgacgtcgtcttggctcaataccgcaacaaccggcgggagactgaccccgcgaagtgcggctacacggagcacacctacatcccgaaggactcctttacgcccacattcgctctggtggtgctgcacatcaacaaccgccgttggaccggggtacccttcattctcagagcgggaaaggccttgaacgacaccaagtcggaggtgcgtatccagtacaagccggtggactgcgacaccttccacagcgacagtactgacattcgtaacgagctagtcctgagatccttccccacggaagaggtctttatgcgcatgcgcctcaagcggcagggcgaggatatctgccttcgggagagcgagatcaacctgcgagtggatgatcggggaccgaagggactccaaggactgcccggctacctgctcaacgtgtttcaaggcgaccagacgctcttcatgcgctccgatgagcagtgcgagatttggcgcatattctcccccgttctcgccaccatcgattcggatcgtccccgcccgttgcactatgactttggatcacggggtcctttgctggcctatcgcaaggccgagcgcgctggcttcgtattcttcgccacggacgagtggcatcagagcgaagagacgttagaatacacggtcaagaagagcaagcagctaatcggaccccataccgccctcaagccagtaagagatcctcggtccaagaggtcgaattccaatccttaggcgtagggagatagttaaagcttatacgaaagttttttaattaagcaagtgcagcctgctgtgttacaccagttggccaccacttcaccttggctgcccagtctaacccttcaccgctgtccgttccattcggttctaatccgttccgtgccattgttgcccatgttgccggtgaggatttcgccaagaggggcgtaaacaacacgcaagtcttggccattgtcctttgcagataggggtgagatgcactatagtgtatgggaactacgtaattctctataaatttatatctacttatatttgtacatacaaaattgttttcagtttaataaaaattttatttaaattacaaaaaaaaaaaaaaaaaaaaaaaaaaaaaaaaaaaaa

SEQ ID NO: 2810 - protein, 526 aa, Drosophila melanogaster
MRRRIPSWSSEPQADWPKRRCFRRFGLSSGRIGCPRAPKYLLSPGPRCRRRRTGCRFFPIWSWTSIGTPRSTTSLWTTVHCVQGEYDKPENYVALTEAMVHQETKHNQVRANRIFYLALPPIVFDQVTLNVSRKCSSTTGWNRIIVEKPFARDDISYKAFQTSLCNCFRESQIYLMDHLLSRQVMQNFFALRYSNHLWAETLNHRHVAAVMISIKCELPVSVNRADYFNQFGIIRDLMTNHMIQMLAMLAMDQPYANTADDLRAERLKVLRQVLTPNIGDVVLAQYRNNRRETDPAKCGYTEHTYIPKDSFTPTFALVVLHINNRRWTGVPFILRAGKALNDTKSEVRIQYKPVDCDTFHSDSTDIRNELVLRSFPTEEVFMRMRLKRQGEDICLRESEINLRVDDRGPKGLQGLPGYLLNVFQGDQTLFMRSDEQCEIWRIFSPVLATIDSDRPRPLHYDFGSRGPLLAYRKAERAGFVFFATDEWHQSEETLEYTVKKSKQLIGPHTALKPVRDPRSKRSNSNP

SEQ ID NO: 2811 - DNA, 1470 bp, Ralstonia solanacearum
  CDS (1)..(1470)
atgtcggtgcccgcattcgacatggtgttgtttggcggtacgggtgatctggcccgccgcaagctgattccggccttgttcgatgcgcaccaggggggcgagctccattcgcgcgggcggatctttgccatcggcacccagccgctggagaccgccggttacctggccctgctcgagcgggaggtgcgccccaccatgcgcctgtattccggcgcgcccgtgtcggacgatgcctgggcctctttcgtcgcccgcatcgtctaccagcaggtcgatgcccgcaagccggaacagttcgatgccctggccgccgcgctgggcgagaaccgcgccccggtcaccgtgtgctacctggccaccgcgcccggcattttcgtcgacatctgcgcgcagcttgcccgcgtcggcctgaacacgcccaacgtgcggttggtgctcgagaagccgctgggcaccgacctggcctccaacgagcgcatcaattcggccgtggccgagttctttgccgaagaccagatctaccggatcgaccactacctcggcaaggagtcggtgcagaacctgatggcgatccgcttcggcaacgcgctgttcgagccgctgtggcgccgcgagtggatcaaggacgtgcagatcaccatcgccgagcagctcggcgtggagaagcgcggcgacttctacgacggcgtcggcgccctgcgcgatatggtgcagaaccacctgctgcagctggtgtgcatcgtcgccatggagccgcccgccagcctgtcgcaggacgccatccgtgacgagaagctgaagatcctcaaggcgctcaagccgatcccgctgcaggaggtgcccgagaagaccgtgcgcggccagtatctggagggcgccatcgccgggcagccggtgcagggctacctggacgagcacggcattccgcatgacagccgcaccgagaccttcgtcgccatcaaggccgagatcgccaactggcgctgggccggcgtgccgttctacctgcgcaccggcaagcgcatgccgcagcggctggcggagatcgtggtgcgttttcatgacgtgccgcacgcgctgtttcccaagccgctggtccagttccccgagaaccgcctggtgatccgcctgcagccggaggaaagcatccgcctgcagttcctgaccaaaacgccgggcgcggcactgggcctgcagccgtccacgctggacctggatttcaccaaccacggcggcgtgcgccacgccggcgcctacgagcgcctgctgatggacgccgtcaacggccagcttggcctgttcgtgcgccgcgacgagcaggccgaggcctggcgctgggtcgagcccatcatcgaggcatggaaccaggcccgcacgccgcccaagggctacacggcgggcagctgggggccggccgcttccagcgcgctgctctcacgcgatgccgctgcctggcacgaggagatgtga

SEQ ID NO: 2812 - protein, 489 aa, Ralstonia solanacearum
MSVPAFDMVLFGGTGDLARRKLIPALFDAHQGGELHSRGRIFAIGTQPLETAGYLALLEREVRPTMRLYSGAPVSDDAWASFVARIVYQQVDARKPEQFDALAAALGENRAPVTVCYLATAPGIFVDICAQLARVGLNTPNVRLVLEKPLGTDLASNERINSAVAEFFAEDQIYRIDHYLGKESVQNLMAIRFGNALFEPLWRREWIKDVQITIAEQLGVEKRGDFYDGVGALRDMVQNHLLQLVCIVAMEPPASLSQDAIRDEKLKILKALKPIPLQEVPEKTVRGQYLEGAIAGQPVQGYLDEHGIPHDSRTETFVAIKAEIANWRWAGVPFYLRTGKRMPQRLAEIVVRFHDVPHALFPKPLVQFPENRLVIRLQPEESIRLQFLTKTPGAALGLQPSTLDLDFTNHGGVRHAGAYERLLMDAVNGQLGLFVRRDEQAEAWRWVEPIIEAWNQARTPPKGYTAGSWGPAASSALLSRDAAAWHEEM

SEQ ID NO: 2813 - DNA, 1521 bp, Enterococcus mundtii
  CDS (1)..(1521)
atgaatgaaaaaaacgtattatttactatatttggcggtacaggagatttagcacaacgtaaattgtatccttccctttttcgtttatacaaaaagggcaacttgagcgaacattttgctgtgatcggtacagcacgtcgtccttggagcgatgaacactatcgtgaagtggttaaaggaacaatcaaaacattgaatccttctgccgaagaagccgaacgatttgccagccatttttattatcaatcccatgatgtcaatgattcttctcattaccaaacattaaaagaattatctgatcgtttagatgaaaaataccacttgaatggtaatcgaatgtactatttagccatggctccacaatttttcggtacgatcgtttcacatttgaaatctcagaaaatcatcactgaagctggcttcaaccgattgattatcgaaaaaccttttggttctgatttccattctgcctttgaattgaatgaaaaaattcgacaagtctttccagaagatgatattttccgtattgaccattatttaggtaaagaaatgatccaaaatatctctgcgattcgctttgccaataatatttttgagtctcaatggaacaatcgttacatcgacaacatccaaatcacttttggtgagagtttaggtgttgaagatcgtggcggctattatgaccacagtggtgcgttaaaagatatggtccaaaatcatatccttcaagtattagctttacttgcgatggaaccaccagttgccttttccgaaaaagaaatccgatcagaaaaaatcaaagcgttaaaagctattcgtatttatgaaaaaaaagaagtcttagaaaattttgtacgtgggcaatatgctgcaggtcaattagatgatcagacattcaaaggctatcgtgaagaagacaacgttgatccagaatcaacaactgaaacatttgttgctggaaaattcacgatcgataacttccgttggtctggcgtaccgttttatgtacggactgggaaacgtcttactgaaaaaggtacacgaatcaatatcgtctttaaacaagtacctgtcaatgtatttaaaacatcgatcgacgaaccttgtaatgatccaacgttaccaccaaatgttttgactatctatattcaaccaacagaaggtttttcatttacattaaatggaaaaaaagttggtcaaggcttcgccaccgatccaatcaaactggaatatcgcaatagtgctgaaatggtcgaaaatagtcctgaagcgtatgaaaagcttatgttagatgcattgaacggtgatagtacaaacttctctcattgggaagaagtcgcacaatcttggcatatcgttgacgtgatccgccaagtttgggatcaagtacaaccggatttcccgaattataaagctggttctatgggtcctgaagcagcattcgagcttttagaaaaagacgggttcgaatggatctggcaaccagatcattggtaccgtgaacgtggtaaattggattag

SEQ ID NO: 2814 - protein, 506 aa, Enterococcus mundtii
MNEKNVLFTIFGGTGDLAQRKLYPSLFRLYKKGNLSEHFAVIGTARRPWSDEHYREVVKGTIKTLNPSAEEAERFASHFYYQSHDVNDSSHYQTLKELSDRLDEKYHLNGNRMYYLAMAPQFFGTIVSHLKSQKIITEAGFNRLIIEKPFGSDFHSAFELNEKIRQVFPEDDIFRIDHYLGKEMIQNISAIRFANNIFESQWNNRYIDNIQITFGESLGVEDRGGYYDHSGALKDMVQNHILQVLALLAMEPPVAFSEKEIRSEKIKALKAIRIYEKKEVLENFVRGQYAAGQLDDQTFKGYREEDNVDPESTTETFVAGKFTIDNFRWSGVPFYVRTGKRLTEKGTRINIVFKQVPVNVFKTSIDEPCNDPTLPPNVLTIYIQPTEGFSFTLNGKKVGQGFATDPIKLEYRNSAEMVENSPEAYEKLMLDALNGDSTNFSHWEEVAQSWHIVDVIRQVWDQVQPDFPNYKAGSMGPEAAFELLEKDGFEWIWQPDHWYRERGKLD

SEQ ID NO: 2815 - DNA, 2230 bp, Homo sapiens
  CDS (54)..(1601)
cacttcggggctgcgagcgcggagggcgacgacgacgaagcgcagacagcgtcatggcagagcaggtggccctgagccggacccaggtgtgcgggatcctgcgggaagagcttttccagggcgatgccttccatcagtcggatacacacatattcatcatcatgggtgcatcgggtgacctggccaagaagaagatctaccccaccatctggtggctgttccgggatggccttctgcccgaaaacaccttcatcgtgggctatgcccgttcccgcctcacagtggctgacatccgcaaacagagtgagcccttcttcaaggccaccccagaggagaagctcaagctggaggacttctttgcccgcaactcctatgtggctggccagtacgatgatgcagcctcctaccagcgcctcaacagccacatgaatgccctccacctggggtcacaggccaaccgcctcttctacctggccttgcccccgaccgtctacgaggccgtcaccaagaacattcacgagtcctgcatgagccagataggctggaaccgcatcatcgtggagaagcccttcgggagggacctgcagagctctgaccggctgtccaaccacatctcctccctgttccgtgaggaccagatctaccgcatcgaccactacctgggcaaggagatggtgcagaacctcatggtgctgagatttgccaacaggatcttcggccccatctggaaccgggacaacatcgcctgcgttatcctcaccttcaaggagccctttggcactgagggtcgcgggggctatttcgatgaatttgggatcatccgggacgtgatgcagaaccacctactgcagatgctgtgtctggtggccatggagaagcccgcctccaccaactcagatgacgtccgtgatgagaaggtcaaggtgttgaaatgcatctcagaggtgcaggccaacaatgtggtcctgggccagtacgtggggaaccccgatggagagggcgaggccaccaaagggtacctggacgaccccacggtgccccgcgggtccaccaccgccacttttgcagccgtcgtcctctatgtggagaatgagaggtgggatggggtgcccttcatcctgcgctgcggcaaggccctgaacgagcgcaaggccgaggtgaggctgcagttccatgatgtggccggcgacatcttccaccagcagtgcaagcgcaacgagctggtgatccgcgtgcagcccaacgaggccgtgtacaccaagatgatgaccaagaagccgggcatgttcttcaaccccgaggagtcggagctggacctgacctacggcaacagatacaagaacgtgaagctccctgacgcctatgagcgcctcatcctggacgtcttctgcgggagccagatgcacttcgtgcgcagcgacgagctccgtgaggcctggcgtattttcaccccactgctgcaccagattgagctggagaagcccaagcccatcccctatatttatggcagccgaggccccacggaggcagacgagctgatgaagagagtgggtttccagtatgagggcacctacaagtgggtgaacccccacaagctctgagccctgggcacccacctccacccccgccacggccaccctccttcccgccgcccgaccccgagtcgggaggactccgggaccattgacctcagctgcacattcctggccccgggctctggccaccctggcccgcccctcgctgctgctactacccgagcccagctacattcctcagctgccaagcactcgagaccatcctggcccctccagaccctgcctgagcccaggagctgagtcacctcctccactcactccagcccaacagaaggaaggaggagggcgcccattcgtctgtcccagagcttattggccactgggtctcactcctgagtggggccagggtgggagggagggacgagggggaggaaaggggcgagcacccacgtgagagaatctgcctgtggccttgcccgccagcctcagtgccacttgacattccttgtcaccagcaacatctcgagccccctggatgtcccctgtcccaccaactctgcactccatggccaccccgtgccacccgtaggcagcctctctgctataagaaaagcagacgcagcagctgggacccctcccaacctcaatgccctgccattaaatccgcaaacagccaaaaaaaaaaaaaaaaaaaa

SEQ ID NO: 2816 - protein, 515 aa, Homo sapiens [sequence omitted]

SEQ ID NO: 2817 - DNA, 1470 bp, Rhizobium loti
  CDS (1)..(1470)
atgaccagccagatcattcccgtcgatcctttcgacttcatcattttcggcggcaccggcgacctgtcggaacgcaagcttctgccgtcgctctattatcgccagcgcgaccatcaattctccgagccgacgcgcatcatcggcacatcgcgctcgaaaatgagcgacgaggaattccgggccttcgccagccaggcgatctccgatcacgtcaagccggccgatatcgacgccaaggaattgaagaccttcctggcgcggctctcctatatctcggccgatgcgacgagcggcgctggcttcgacaagcttaagaaggcgatcggcgagagcgagagcatccgcgccttctatctggcggtggcgccggcgctgttcggcgatatctcgcacaagctgaaagagaacaagctgatcacgccgaactcgcgcatcgtgctggagaagccgatcggccgcgaccttgcctcggcgcgggcactcaacgatttggtcggcgacgacttccacgaaagccagattttccgcatcgaccactatctcggcaaggagacggtgcagaacctgatggcgctgcgctttgccaacgcgctctatgagccgctgtggaactccgcccatatcgaccacgtacagatcacggtggccgagaccgtcggcttggaagaccgcgtcacctactacgacaaggccggcgcgctgcgcgacatggtgcagaaccacatgctgcagttgctctgcctcgtggccatggaggcgccgtcgtcgatggacgccgacgccgtgcgcgacgagaagctcaaggtgctgcgggcgctgaagcgcatcaacggcaacgaggcgccgaagcacacggtgcgcggccagtatcgcgccggtgcatcggccggcgggccggtgaagggctatgtcgaggagctcggcaaggacagcaacaccgagaccttcgtcgccatcaaggccgagatcggcacctggcgctgggccggcgttccgttctacctcaggaccggcaagcgcttggcgacccgggtttcggaaatcgtcatcgagttcaagccgatcccgcattcgatcttcggcgacagcgccgggccgatcttcgccaaccagctggtcatccggctgcagccggacgagggcgtcaagcagttcatcatgatcaaggatccgggcccgggcggcatgcggctgcgccagatctcgctcgacatgagcttcgcgcaatccttcgacggccgcgcgcccgatgcctatgaacggctgatcatggacgtcatccgtggcaaccagacgctgttcatgcgccgtgacgaggtcgaggcggcgtggaaatggatcgacccgatccagaatgcctgggaaggcgccaagcaggaagcgcagggctatacggcaggcacatgggggccatctgcctcgatagcgctgatcgaacgtgacgggcggacatggcacgagagcaattga

SEQ ID NO: 2818 - protein, 489 aa, Rhizobium loti
MTSQIIPVDPFDFIIFGGTGDLSERKLLPSLYYRQRDHQFSEPTRIIGTSRSKMSDEEFRAFASQAISDHVKPADIDAKELKTFLARLSYISADATSGAGFDKLKKAIGESESIRAFYLAVAPALFGDISHKLKENKLITPNSRIVLEKPIGRDLASARALNDLVGDDFHESQIFRIDHYLGKETVQNLMALRFANALYEPLWNSAHIDHVQITVAETVGLEDRVTYYDKAGALRDMVQNHMLQLLCLVAMEAPSSMDADAVRDEKLKVLRALKRINGNEAPKHTVRGQYRAGASAGGPVKGYVEELGKDSNTETFVAIKAEIGTWRWAGVPFYLRTGKRLATRVSEIVIEFKPIPHSIFGDSAGPIFANQLVIRLQPDEGVKQFIMIKDPGPGGMRLRQISLDMSFAQSFDGRAPDAYERLIMDVIRGNQTLFMRRDEVEAAWKWIDPIQNAWEGAKQEAQGYTAGTWGPSASIALIERDGRTWHESN

SEQ ID NO: 2819 - DNA, 1428 bp, Rhizobium loti
  CDS (1)..(1428)
atgtcgaaaagccgaaggccggcaagtgacgccacagcgggagacgcacgcatgagccaggaacggtccgacacgctggtgctcttcggcgccaccggcgacctcgcccacaagaagatatttccggcgctttaccagatggtcgccaagggcacgctcaccgaaccggtgatcggcgtcgccttcgacgcctgggacatcaagcagttgcaggcccgcgcccgcgacggcatcgtcaacgcgctgggcaagatcgacgagaaggtgttcgccaaattcgcttcgttgctgcgctatgtcagcggcgactaccgcgatccggccaccttcgagaaactgaagaccgcgcttggcaccgcccagcggccgctgcactacatggcggtgccgccgaccatgttcgagactgtcgttcaagggttggagcagtcgggaaccgcgcgtggcgcacggctgatggtggaaaagccgttcggccatgatctgcagtcggcgcgctggctgaaccgggtgctgcatctggtgttcgacgaacagtcgatcttccgcatcgaccactatctcggcaaggaagcgatccagaacctgctttatttccgcttcgccaattccttcctcgagccgatctggaaccgcaatttcgtcgagagcgtgcagatcaccatggccgaggatttcggagtcgaggggcgcggccgcttctatgacgatgtcggctgcataagggatgtcatcgagaaccatctgctcaacatcctcctgctgctggccatggagccgccggtcggccgctccgccgacgacctgatcgacgagaaggtccaggtgctccgggcgatccggacgctgacgaaagacgatgtcgtgcgcggccagttcaccggctatctcgccgagcccggcgtggcgccgaattcgccggtcgaaaccttcgctgcggtgcggttcttcgtcgacacatggcgctggcaggacgtgccgttcttcattcgcgccggcaagaacatgccggtgcatgttacggaagtggtggtgcggctgaagcgcccgccgctcgacgtcttcgacccgatcaagcccgccgaccagaattacgtgcgcttccgcatcgacccgcaggtggtgatcgccataggcgcgcagcgcaaggcgcccggcgacgacatggtcggcgagcaggtggaactgacggcgctcgacgacagcaaggccgacatgccgccttacgagcgcctgatcggcgacgccatgaacggcaatggccagctcttcacccgccaggacgcggccgagctcgcctggcgcatcgtcgggccggtgcttggcgacaccacgccgccgcatctctacgagccgaaaacatggggaccggcgcacgccatggccggcttcgggccgcccaatggctggatcgacccggtggcatga

SEQ ID NO: 2820 - protein, 475 aa, Rhizobium loti
MSKSRRPASDATAGDARMSQERSDTLVLFGATGDLAHKKIFPALYQMVAKGTLTEPVIGVAFDAWDIKQLQARARDGIVNALGKIDEKVFAKFASLLRYVSGDYRDPATFEKLKTALGTAQRPLHYMAVPPTMFETVVQGLEQSGTARGARLMVEKPFGHDLQSARWLNRVLHLVFDEQSIFRIDHYLGKEAIQNLLYFRFANSFLEPIWNRNFVESVQITMAEDFGVEGRGRFYDDVGCIRDVIENHLLNILLLLAMEPPVGRSADDLIDEKVQVLRAIRTLTKDDVVRGQFTGYLAEPGVAPNSPVETFAAVRFFVDTWRWQDVPFFIRAGKNMPVHVTEVVVRLKRPPLDVFDPIKPADQNYVRFRIDPQVVIAIGAQRKAPGDDMVGEQVELTALDDSKADMPPYERLIGDAMNGNGQLFTRQDAAELAWRIVGPVLGDTTPPHLYEPKTWGPAHAMAGFGPPNGWIDPVA

SEQ ID NO: 2821 - DNA, 3584 bp, Plasmodium berghei
  CDS (370)..(3222)
ggaaaaactttaaaacttatatggcaggcaccaaaactaacaataaattgtattttttattcattaaaattaagggatatggaattgaaacacattataattccattaaataaaatgcaaatagttataaattcggataatataagggaaaggaaagaataaaaaaagtataattttatctatttaatagcaaaaattcaactgcttattaaatcatgctatttattttcaataaattgggggatagctaatacggaatgcacacatgcattatttatccatttcatctatttaataacgtatatatatattctatatattcattaatcccacctctgtatcaacatataaaataaagaatatataaatatggagtacgagacatctttaaaatgcttagatgaaataaggtgtgtgaacaatgtgaaatatatggaaaccgaagatttaacagactttaataaaaaatcggcatattatatttgtaaagaaatatatgagaaacaattaagtaatgaaaatgggtatgtagttataggtttatcaggtggaaaaacacctatagatgtttataaaaacatgtgtgcaataaaagatataaaaattgataaaaataagttaattttttttataattgatgaaaggtataaaaatgatgatcataaattcagtaattataataatataaaatttttatttgatgaattaaatattaataaagaaacccaattatataagcccgatacaaaaaaagatcttgttagttgcataagagattataatgaacaaattaaaagcatgatagaaaaatataaaaaaatagatattgtaatattaggtatggggagtgatttccatatagctagtttatttccaaatgtgtattataatatatacatgaataattatcaaaataattatatatatgaagacaatgaaacaataaggtcattaaatgccgacaataatgttaatttaagtttactaaatgagcaagtgtattttacaacaacaaataattttgatgtgagaaaaagaattacagtatcacttaacctattgtcaaattcaacaagtaaaatatttttattaaatacagcagataaattaaatttatggaaaaatatgctcttaaatttttatgttaatcctaactataatttatatccagcatttaaaatgatcgactctagcaatacaacggtcatagcatgtggccataaaaattattcaaaaatgttagaagatttatatgttcaaaaagatgaggcactttctccgatcagcaataataatgtagagaataaaaatgagttgctaacaatagttatatttggttgctctggtgatttagcaaaaaaaaaaatatatccagccttgtttaaattattttgtaataatttattaccaaaaaatataataataatcggttttgcaagaacaggacaagattttgaatccttttttaacaaaatagctatatatttaaaaatatctttaaacagttataaaaatttatcagtttttgaaaaagccgaacgcttaaattcttttaaaagcaaatgtagatattttattggaaactatttatctccggaaagttttgaaaattttgatgtatatataacccaggaagagaggatagcattaggctgttgtggtcagaaaggtaatgaaaaacacaaacaagtgaatgtcacatcacaattccctaataatcatactagcataaatattatcaacaatatagataacggatgtgaatctccaatgctcactgattctcccaaaagatacccctgcagttcaagttattccagtacatctggtaccgctgtatgcccttacagttcacaacatgatgttaagcctagtaataatggttgtccatacctttcaagccaagccaatacatctgatagttctggttgtccatacatttcataccatactaataaatctggtcatttgggttgtccttatactatcactagaatgctatacttagccttaccaccccatgtctttgtgagtacattacaaaattataaaaagtattgcttaaataaaaacagaatcaacaaaatattacttgaaaagccatttggaaaggatttggaatcatttaaaatattatcgaaacaaatattagaaacttttcctgaaaaaaacatatatagaattgatcattatttaggaaaagatatggtttcaggattattaaaactaaaatttacaaatatatttttgttatctttaatgaacagacattttataaaatgtataaaaataacattaaaagaaacaaagggagtatatggaagaggacagtatttcgatccatatggaattataagagatgttatgcaaaatcacatgctacaattactggcattaataactatggaacatccaacagatttaaatgataaatcgatacaaaatgagaaaataaaaatattaaaatctatagcttcaatcaaattagaagataccgttataggacaatatgttaaatcaaataatgatgatacaaataataatattaattcaaatatttctgaaaatgctagtatagataaatctaaaataaatcatagttatcatgatgatccacatgtagatccaaattcaataacccctacattttgtgcatgtgttttatatattaattcaataaattggcatggtgttccaataatacttaaagcaggaaagggactaaataatgatatatgtgaaattaaaattcaattccataatattatgggctcatctgacgaaagtatgtataataatgaatttgtaattattttacaacctgtagaaggaatatatctaaaacttatgataaaaaaaatgggttctgaagaaatggaagaagtgcaattgaatttaagccttaatgaaaataataataaagcatatgttccagaagcttatgaaactttattatcagaatgctataaaggatataaaaggaaatttatctcagatgaagaattatatgaatcttggagaatattcacccctttattaaatgagttacaagaaaagcatatcaagccgctatcttacccatttgggtcatcaggaccccaagaagcttatgacctcgtaagaaaatattacaattatggaaaaaactatgccacaactgctaaattttgcagaaaatcttcctactatgatgatagcttgtttgataatatgagagaataaaataattttcttttatattttttaattgtgcaatgtcattcattagctcaataaattggatacataaaacagtaattcttattgcaaaacgtggaatatctatcattcttatcgtttgatttcgacctctcaaaatagtaggaatggaatatattcaaaaaatttattatttttagcctatggctataaacagtggagaagaaatgccaaacttgccggcgtcatcactagtttatctatctggtccttgagggaggagaatcctatgcgtatattattatatatacttattaattggattcaatttatgaatcatatcatatttgcatggggtcatatttaatcttaatatatctaggtct

SEQ ID NO: 2822 - protein, 950 aa, Plasmodium berghei
MEYETSLKCLDEIRCVNNVKYMETEDLTDFNKKSAYYICKEIYEKQLSNENGYVVIGLSGGKTPIDVYKNMCAIKDIKIDKNKLIFFIIDERYKNDDHKFSNYNNIKFLFDELNINKETQLYKPDTKKDLVSCIRDYNEQIKSMIEKYKKIDIVILGMGSDFHIASLFPNVYYNIYMNNYQNNYIYEDNETIRSLNADNNVNLSLLNEQVYFTTTNNFDVRKRITVSLNLLSNSTSKIFLLNTADKLNLWKNMLLNFYVNPNYNLYPAFKMIDSSNTTVIACGHKNYSKMLEDLYVQKDEALSPISNNNVENKNELLTIVIFGCSGDLAKKKIYPALFKLFCNNLLPKNIIIIGFARTGQDFESFFNKIAIYLKISLNSYKNLSVFEKAERLNSFKSKCRYFIGNYLSPESFENFDVYITQEERIALGCCGQKGNEKHKQVNVTSQFPNNHTSINIINNIDNGCESPMLTDSPKRYPCSSSYSSTSGTAVCPYSSQHDVKPSNNGCPYLSSQANTSDSSGCPYISYHTNKSGHLGCPYTITRMLYLALPPHVFVSTLQNYKKYCLNKNRINKILLEKPFGKDLESFKILSKQILETFPEKNIYRIDHYLGKDMVSGLLKLKFTNIFLLSLMNRHFIKCIKITLKETKGVYGRGQYFDPYGIIRDVMQNHMLQLLALITMEHPTDLNDKSIQNEKIKILKSIASIKLEDTVIGQYVKSNNDDTNNNINSNISENASIDKSKINHSYHDDPHVDPNSITPTFCACVLYINSINWHGVPIILKAGKGLNNDICEIKIQFHNIMGSSDESMYNNEFVIILQPVEGIYLKLMIKKMGSEEMEEVQLNLSLNENNNKAYVPEAYETLLSECYKGYKRKFISDEELYESWRIFTPLLNELQEKHIKPLSYPFGSSGPQEAYDLVRKYYNYGKNYATTAKFCRKSSYYDDSLFDNMRE

SEQ ID NO: 2823 - DNA, 1491 bp, Pasteurella multocida
  CDS (1)..(1491)
atgaaaattgaagcagacaacaattgtattgtaatttttggtgcatcaggtgatttaacttatcgtaaattgattcctgcactgtataacttatataaaatcggtcgtttgactgagcatttctccgtgttaggtgtggcaagaacggaattaagtgatgagggtttccgtgaaaaaatgcgccaagcgttgatcaaaagtgaaaaagcgaatggcgaaacactcgatcaattttgtagccacctttattatcaggcattaaataccgcggatgctgccgattatggcaagttaattcctcgtcttgatgatttacatgataaatatcaaacctgtggtaacacactttactatttatccacgccgccaagtctttatggtgtgattccagaatgtcttgcggcacatgggttaaatactgaagagtttggctggaagcggttaattgtggaaaaaccgtttggttatgatatccgcacggcaaaagaactcgatattcaaattcaccgtttctttgatgaacaccaaatttatcgtattgaccactatcttggtaaagaaacggttcaaaatctgctcgtgctgcgtttttctaatggatggtttgaaccactctggaaccgtaattttattgattatattgaaatcacgggcgcagaatctatcggtgtagaagagcgtggtggttattacgatgattctggcgcaatgcgtgatatgttccaaaaccatttgttgcaagtgttagccatggttgcgatggagccaccggcaattattaatgctgactcaatgcgtgatgaagtggcaaaagtcttgtattgtttacatccattaagtgaggatgacttagaaaatcatttagtcttagggcaatatacggcaggcacagttgaaggtgaagcagttaagggctacttacaggaaaaaggtgtaccggcagagtctaatacggaaacttacatggcattacgctgtgaaattgacaactggcgttgggcgggtgtgccattttatgtgcgtactgggaaacggttaccaagtcgagtgaccgaaattgtgattcatttcaaaaccacaccacatccggtatttagccaaaaagcaccagaaaacaaattaattatccgtattcaacccgatgaagcgatttcgatgcgttttggtttgaaaaaaccgggagcaggttttgaagcaaaagaagtgtcgatggatttccgttatgcggatcttgcctcaccaagcttactgaccgcttatgagcgtttattattggattctatgaaaggcgatgccactttgtttgcgcgtactgatgcggtacatgcctgttggcagtttgtggagccgattttacaatataaagcacaaaatgggcgtgtttatgagtatgaagccggtacttggggaccgacagaagccgacaaactgatcgcgaaaacgggtcgtgtttggcgtaaaccaagtggattaatgaaaaagaaagtgtaa

SEQ ID NO: 2824 - protein, 496 aa, Pasteurella multocida
MKIEADNNCIVIFGASGDLTYRKLIPALYNLYKIGRLTEHFSVLGVARTELSDEGFREKMRQALIKSEKANGETLDQFCSHLYYQALNTADAADYGKLIPRLDDLHDKYQTCGNTLYYLSTPPSLYGVIPECLAAHGLNTEEFGWKRLIVEKPFGYDIRTAKELDIQIHRFFDEHQIYRIDHYLGKETVQNLLVLRFSNGWFEPLWNRNFIDYIEITGAESIGVEERGGYYDDSGAMRDMFQNHLLQVLAMVAMEPPAIINADSMRDEVAKVLYCLHPLSEDDLENHLVLGQYTAGTVEGEAVKGYLQEKGVPAESNTETYMALRCEIDNWRWAGVPFYVRTGKRLPSRVTEIVIHFKTTPHPVFSQKAPENKLIIRIQPDEAISMRFGLKKPGAGFEAKEVSMDFRYADLASPSLLTAYERLLLDSMKGDATLFARTDAVHACWQFVEPILQYKAQNGRVYEYEAGTWGPTEADKLIAKTGRVWRKPSGLMKKKV

SEQ ID NO: 2825 - DNA, 1470 bp, Pseudomonas putida
  CDS (1)..(1470)
atggctgcgatcagtgtcgatccttgcacgtttgccctgtttggcgcccttggcgacctggcgttgcgcaagctgtttcctgcgctctaccagctcgaccgggccaacctgctgcacccggacacccgcctgctggcgctggcccgcgaggcaggcagcgcgcaggagcacctgaacagcatcgaagcccacctgcgccggcatgtgcccgaggccgatatcgagcctgctgcattgggccgcttcctggcccggttgagctaccagcacctggacttcctgcaacctgagggttaccgggccctggccgagcagttgccgggcgacctgccgctgatcgcctacttcgccacggcggcagcggtgtacggggccatctgcgaaaacctcgacaacgccgggctggccccgcgtacccgggtggtgctggagaagcccatcggccacgacctggagtcgtcgcgacgggtcaacgatgccgtggcgcggttcttccccgaaaaccgggtgtaccgtatcgaccactatctgggcaaggagacggtgcagaacctgattgccctgcgcttcgccaatagcctgttcgaaacccagtggaaccagaattccatctcccacgtggagatcaccgttgccgagaaagtcggtatcgaaggccgctggggctacttcgacaaggccggccaactgcgcgacatgatccagaaccatctgctgcagttgctgtgcctgatcgccatggacccgcccagcgagctgtccgccgatgccattcgtgacgagaaggtgaaggtgctaaaggccctggcgccgatcacgggcgagggtttgagcacccaagtggtgcgtggtcagtatattgccggctacagcgagggcaagccggtacctggctacctggaagaggacaacgccaacgcccgcagcgacaccgaaaccttcgtcgccctgcgtgccgatatccgcaactggcgctggtcgggcgtgccgttctacctgcgtactggcaagcgcatgccgcagaagctgtcgcagatcgtcatccacttcaaggaaacgccgcactacattttcgccccggaacagcgtttgcaaatcggtaacaagctgatcattcgcctgcaaccggacgaaggcatttctttacgggtgatgaccaaggagcagggcctggacaaaggcatgcaactgcgcagcggtccgttgcagcttaatttttctgacacctggcgcagtacgcggattccggatgcctacgagcgcctgttgctcgaagtgatgcgtggcaaccagaacctgttcgtgcgcaaggacgaaatcgaatatgcctggaagtggtgcgaccagttgatcgccggctggcgtaatgcgggcgatgcgcccaagccttacgcggcgggctcctgggggccgatgagctcgattgcattgattacacgcgatgggagggcgtggtatggggatatctga

SEQ ID NO: 2826 - protein, 489 aa, Pseudomonas putida
MAAISVDPCTFALFGALGDLALRKLFPALYQLDRANLLHPDTRLLALAREAGSAQEHLNSIEAHLRRHVPEADIEPAALGRFLARLSYQHLDFLQPEGYRALAEQLPGDLPLIAYFATAAAVYGAICENLDNAGLAPRTRVVLEKPIGHDLESSRRVNDAVARFFPENRVYRIDHYLGKETVQNLIALRFANSLFETQWNQNSISHVEITVAEKVGIEGRWGYFDKAGQLRDMIQNHLLQLLCLIAMDPPSELSADAIRDEKVKVLKALAPITGEGLSTQVVRGQYIAGYSEGKPVPGYLEEDNANARSDTETFVALRADIRNWRWSGVPFYLRTGKRMPQKLSQIVIHFKETPHYIFAPEQRLQIGNKLIIRLQPDEGISLRVMTKEQGLDKGMQLRSGPLQLNFSDTWRSTRIPDAYERLLLEVMRGNQNLFVRKDEIEYAWKWCDQLIAGWRNAGDAPKPYAAGSWGPMSSIALITRDGRAWYGDI

SEQ ID NO: 2827 - DNA, 1566 bp, Trypanosoma brucei
  CDS (1)..(1566)
atgcagaattgtagaaaggttgcagacactctcaggaaggattcatgcgacatcatcccggatgctgctgcacctgaattgaaggaaagagcacttactattgtcgtgcttggggcaagcggtgacttggcgaggaataaaacgttcccggcgctgtttcaactattctgtaacggattaattccgcgaacgattaacattgtcggctacgctcgcaccaaaatgcctgacgtggagcaatggaaaaaagagagcctagctaagcattttcctcgggctaaggatcgctgcccccatattgaggctttcttgaagacaatcacctatatctcgggctcgtatgacggtgcggatgatttttttcgtcttaacgacgtgataacaaaatttgaggagtcgtttccaggaaaacagaaaggaggcaacaggttgttctaccttgcgttaccaccttctgtatttatgcatgcgtgcacggggattcgcactcatgtgatgcagaaaccgggcctggggtgggttcgaataattattgaaaagccattcgggcacgacacggaaagttctaatgaactttcgaggcagttggagcctcttttcgaagaatcccaaatttttcgaatcgatcattatcttgggaaggaaatggtgcaaaatattgttgtcacccgcttcgccaaccgtgttttcagtgcactatggaacaataataacatcgcgtgcgtccggatcacttttaaggagtctatcgggacggagggccgcggtggttactttgacaaggcgggtattatccgcgacgtggtgcaaaaccaccttacccagatcctttcactgttagcaatggagaaaccacgctcactaagcccagaggatatacgtgatgaaaaggtaattgtactaaggcatgtgaatcccgtgactcccgccgactgcgtgttgggacagtacacgaggtctgaagacggttctattcctggttacctggaggatccaacggtgccgaggggaagtaaatgcgcgacattcgtggtacttcgactgttcattaacaacgaccgctgggacggtgtgccattcatcatagaggcggggaaagcggtggagcggcgctatctcggcatacgcatccagtttaaggatgaaatccgcccctttggagttgccgcacagcgcaacgaactgatcatacgagcgcagccctcggaggcaatgtatttgagacttaccgcaaaaacacccggcgttctctcagacactcaccagaccgaacttgacctctcctacgaacatcgttacaacataactctgccagatgcctatgagagcctcattcacgaagcacttctggggaggtccaccaatttcgttcgaaaggatgaactcgatgccgcgtggaggatctacacaccactcttggaggctattgaacgtggagaaaccacaacgtacccctactccgctgggtcaaaggggccggcggaagcacaaaagtttgttgatgacactgggtttaaacctctcacaggggatatttaccagcagcggaagcttcatcatttgtaa

SEQ ID NO: 2828 - protein, 521 aa, Trypanosoma brucei
MQNCRKVADTLRKDSCDIIPDAAAPELKERALTIVVLGASGDLARNKTFPALFQLFCNGLIPRTINIVGYARTKMPDVEQWKKESLAKHFPRAKDRCPHIEAFLKTITYISGSYDGADDFFRLNDVITKFEESFPGKQKGGNRLFYLALPPSVFMHACTGIRTHVMQKPGLGWVRIIIEKPFGHDTESSNELSRQLEPLFEESQIFRIDHYLGKEMVQNIVVTRFANRVFSALWNNNNIACVRITFKESIGTEGRGGYFDKAGIIRDVVQNHLTQILSLLAMEKPRSLSPEDIRDEKVIVLRHVNPVTPADCVLGQYTRSEDGSIPGYLEDPTVPRGSKCATFVVLRLFINNDRWDGVPFIIEAGKAVERRYLGIRIQFKDEIRPFGVAAQRNELIIRAQPSEAMYLRLTAKTPGVLSDTHQTELDLSYEHRYNITLPDAYESLIHEALLGRSTNFVRKDELDAAWRIYTPLLEAIERGETTTYPYSAGSKGPAEAQKFVDDTGFKPLTGDIYQQRKLHHL

SEQ ID NO: 2829 - DNA, 1904 bp, Triticum aestivum
  CDS (153)..(1682)
aattcgattgccacccccctccccattcctacccacccagcatctcggcagtaactctcctccctcccacgcggcgcgcccgctcgccgcgcgcgcgaatctcggtcgcaactggtgtactgttgaaggaaggaaaaatcatcctatttgtcatggcgggaactgactcctcggcgtcatcgagacaaagcagtttcaactcattagcaaaggacctagaacttcctttggagaaagggtgcctcaccatcgttgtacttggggcttctggagatcttgccaagaagaaaacgttcccggcactctaccacctttttgagcaggggttcttacaatctggtgaagtgcatatagtggggtatgcgagaacaaatctttctgatgatgggttgagagggcgcatccgtgcataccttaaaggagcctcagaggaacatgtttcagaattcttgcaattgataaaatatgtcagtggttcctatgacagtggagaaggttttgaaaaactgaacaaggaaatatcagattatgagatgtcaaacaactcaggaagctcccgtaggctcttttatttggcattgcctccatctgtctacccttcagtgtgcaaaatgatccgaacatattgcatgagtccaacttctcgcgctggatggactagagtaattgttgagaagccctttggaaggggcctggactctgcagaagaattgagttcccaacttggggagctattcgaggaagatcaactctacaggattgaccactacttgggaaaagagttggtccaaaacttgcttgtgcttcgttttgcgaaccgtttgttcttaccactttggaaccgtgacaatgttgataatatacagattgtattcagggaggacttcggaactgatggacgtggaggatattttgatcaatatggaatcatccgtggtatcattcagaaccatttgttgcaggttttctgtttggttgcaatggaaaagcctgtatctcttaagcctgagcacatcagagatgagaaagtcaaggttctgcaatccgtgaacccgataaaggacgaagaggtagtccttggacaatatcagggctacaaggaggaccctacagtgccagatgactctaacaccccaacgtttgcatctattgtacttagggtacacaatgaaagatgggaaggtgttcctttcattcttaaagctggtaaagcattaaactcaagaaaagcagaaattcgtgtgcagttcaaggatgttcccggtgacatttttaaatgtaagaagcagggaagaaatgagtttgtcatacgcctccagccatcagaagccatgtacatgaaactaactgtgaagaaacctggattggaaatggctactgaacagagtgaacttgatctgtcatatgggatgcgttaccaagatgtcaaaattccagaggcatacgagcgcctcattttggatacaataagaggagaccagcaacactttgtgcgccgagatgagctgaaggctgcctggcagatcttcactcccttgttgcacgacatcgacgctggcaagctgaaggctgtttcatacaagcctggcagccgaggccccaaggaagctgatgaactgagtgagaaggttgggtacatgcagacccacggttacatctggataccacccacccttgcatagagtgcctccctcgatccttgtaggtttgtttagctaggaagagtgaaagtatcacggataaaaatcttacgaattttagctgtactgcggtttacctggcgttgtaataacggatctgttcgacggagtatacctcaccacggtgtgaaataaaaaatggagtgtttcaatcaaaaaaaaaaaaaaaaaaaagagtcgcgcgatcgatgccaatcactagtg

SEQ ID NO: 2830 - protein, 509 aa, Triticum aestivum
MAGTDSSASSRQSSFNSLAKDLELPLEKGCLTIVVLGASGDLAKKKTFPALYHLFEQGFLQSGEVHIVGYARTNLSDDGLRGRIRAYLKGASEEHVSEFLQLIKYVSGSYDSGEGFEKLNKEISDYEMSNNSGSSRRLFYLALPPSVYPSVCKMIRTYCMSPTSRAGWTRVIVEKPFGRGLDSAEELSSQLGELFEEDQLYRIDHYLGKELVQNLLVLRFANRLFLPLWNRDNVDNIQIVFREDFGTDGRGGYFDQYGIIRGIIQNHLLQVFCLVAMEKPVSLKPEHIRDEKVKVLQSVNPIKDEEVVLGQYQGYKEDPTVPDDSNTPTFASIVLRVHNERWEGVPFILKAGKALNSRKAEIRVQFKDVPGDIFKCKKQGRNEFVIRLQPSEAMYMKLTVKKPGLEMATEQSELDLSYGMRYQDVKIPEAYERLILDTIRGDQQHFVRRDELKAAWQIFTPLLHDIDAGKLKAVSYKPGSRGPKEADELSEKVGYMQTHGYIWIPPTLA

SEQ ID NO: 2831 - DNA, 2098 bp, Solanum tuberosum
  CDS (27)..(1775)
cacgagcttctctgatttctcaagatatggtaaccctttattcttccccttccactaactgttctggggccttttcatcatactccaattcttctattgggttctacaattatcattacaacttccctatttcatccagaaagtttggttctcacaagatttctttgcaaattaatgccgttcgcatgcaagatggtgctgtagtggctcaacctagcaaaacccaagatgaaactcctttgaagaaattaaaagatggaattttgtcaaaggagcagaaacatacatttgattttgattgcaacaaagataaatcaactgtcagtattactgttgttggtgcttcaggagatcttgccaaaaaaaagatatttcctgcactttttgcactttattatgagggttgcttaccggagcatttcactatttttggctatgcccggagtaagatgtctgatgacgaactcaggaacatggtcagcaagacacttacttgcaggattgataagagggaaaattgtggtgaaaagatggaacagtttctagaaaggtgtttctaccatagtggacaatatgattcccaggaacactttgcagagcttgataaaaagctgaaagaacatgaggctggaaggttttccaatcgtctgttctacttgtccattccaccaaatatttttataaatgctgtacgatgtgcaagcctctctgcatcatctgctcatggatggactagagtcattgtagagaaaccctttggtcgggattctgaatcctctgctgcattaacaggagcacttaagcagtacttgaaggaagatcaaattttcaggattgatcactatttagggaaggagcttgtggaaaacctttctgtccttcgtttcttcaacttgatatttgaacccttatggtcaaggcagtatataaggaacgtgcagtttattttctctgaagattttggcactgaaggaaggggaggttattttgatcattatgggataattagagacattatgcaaaaccatttgcttcaaattcttgccctctttgccatggaaacacctgtcagtttggatgcagaagatatcaggaatgaaaaggtaaaagttctgcgttctatgagacctttacaactagatgatgttatcgtcgggcagtacaaaagtcacacaaaagggggtgttaactatcctggttataccgacgacaagactgtacccaaggacagtctaaccccaacttttgctgcagctgctcttttcatagataatgcaagatgggatggggtgcctttccttatgaaggctggaaaagctttacataccaggagtgcggaaataagagtacaattcaggcacgtgccgggaaatttatacaataagaactttggctcagatctagatcaggcaacaaacgagcttgttatccgtgttcaacctgatgaagctatatacctaaagatcaataacaaagttcctggtctaggaatgagactggatcgcagtaatcttaatctgctttactcagcaagatacgcgaaggagatccctgatgcatatgagcggctacttcttgatgccatagaaggtgaacgtaggctttttattcgcagtgatgaactggatgctgcgtggtctcttttcacaccagtgttgaaagaacttgagcataagaaaatagtaccggaaagctacccctatggaagtcgaggacctattggagcacattaccttgcagcacgatataaagtaagatggggtgatcttgcttagacaaagtaatttgccattgctatgagaaaccatatgtagccttacaacttcttctgcttagtatgttgcaaccaaatttgttagtgggattccagtatccagactaacaaagcttgaagttgcttactgtcaaggcatatgacaatagagaacacacagttggtaaaacaaaagaagaggagaatctgggttcattttgttatttcaaataaatcttttctattgcaccaacgcatatccattggtagcagcttttttcatgtagcatttagtataccttgttagaatctaataattcgaaaagtaaaaaaaaaaaaaaaaaa

SEQ ID NO: 2832 - protein, 582 aa, Solanum tuberosum
MVTLYSSPSTNCSGAFSSYSNSSIGFYNYHYNFPISSRKFGSHKISLQINAVRMQDGAVVAQPSKTQDETPLKKLKDGILSKEQKHTFDFDCNKDKSTVSITVVGASGDLAKKKIFPALFALYYEGCLPEHFTIFGYARSKMSDDELRNMVSKTLTCRIDKRENCGEKMEQFLERCFYHSGQYDSQEHFAELDKKLKEHEAGRFSNRLFYLSIPPNIFINAVRCASLSASSAHGWTRVIVEKPFGRDSESSAALTGALKQYLKEDQIFRIDHYLGKELVENLSVLRFFNLIFEPLWSRQYIRNVQFIFSEDFGTEGRGGYFDHYGIIRDIMQNHLLQILALFAMETPVSLDAEDIRNEKVKVLRSMRPLQLDDVIVGQYKSHTKGGVNYPGYTDDKTVPKDSLTPTFAAAALFIDNARWDGVPFLMKAGKALHTRSAEIRVQFRHVPGNLYNKNFGSDLDQATNELVIRVQPDEAIYLKINNKVPGLGMRLDRSNLNLLYSARYAKEIPDAYERLLLDAIEGERRLFIRSDELDAAWSLFTPVLKELEHKKIVPESYPYGSRGPIGAHYLAARYKVRWGDLA

SEQ ID NO: 2833 - DNA, 1924 bp, Dunaliella bioculata
  CDS (68)..(1840)
gaattcggcacgaggtgttcagcatcatcaacccttagctcgtgccctccaggcgttcgtttttctcatgttgggtggaaggcagttgggtatggacaagctgtcccggaagctgtccggtgctcaacctgttgcgaactactcgcgtcgcccgatttcgcgcccatttcgcgcagcgcctgttcctcgagtcgcgcagaattcccaagatgctgtgacccagaatggcagcgggacaagcgaggcacccacctcctggcagaacccagcactcaagaaggccatccccactgtggtttctctctcagatgaggctgcagccatggcagctgatgactggagccaatctagcttgtcggttgttgtggtgggcgccagcggcgacctggccaagaagaaaatttttcctgcactttttgcccttttctatgagggcctgctgccaccggacttccagctctttggatatgcacgcagcaagatgactgatgaggagttccgagacctcatcggcaacaccctgacgtgccgcattgatgccaggtcccgctgcgaagactcccaggccgccttcttgtcgcgctgcttctactgcccaggccagtatgatgcccctgagggctatgccaacttggacaagaagtgcaaggagcaggaggccctgactggcaagatggtagccaaccgcatgttcttcctgtccatccctcccaacgtgtttgtgcaagcagcaggcggcgcagccgacaactgctcttctcccaccggctggacgcgcgtcattgtggagaagccctttggcagggacagcgccagcagtgctgagcttggcaggggtctggccaggcatttgacagaggaccagatctaccgtattgaccactacctggggaaggagctgattgagaacctgacagtgctgcgcttttcaaaccttgtgtttgagcccttgtggagcaggcagtacatccgcaatgtgcaggtgatcttctcagaagactttggcactgaaggccgcggaggctacttcgaccggtacggcatcatccgcgatgtcatgcagaaccacttgctccagattgtggcattgttcgccatggagccaccggtgtccctggatggagaggccatccgtaatgagaaggtcaaggtcctgcagtctatgtctcaagtggcgctggaggatgtcacactgggccaataccgcggcaggtctggcgctggccgttccggtggtgctgatttgcctggctacctggatgatgcaacagtgcccaagggctccctgtgccccacctttgctgccattgcgctgcacatcaacaatgcacgctgggatggtgtgccattcctgctcaaggctggcaaggcgctgcacacgcgcggcgctgagatccgtgtgcagttcaggcatgtgcccggcaacattttcaagcacaaagtgggccccaacatcgacatgaccaccaacgagcttgtgatccgcattcagccgcgggagtccatctacctcaagatcaacaacaaggtccctggcttgggcatgcgcctggataccaccaagctggacctggtgtacaacgacgcatactccaaggagttgccagatgcgtatgagcgcctcctgttggatgtggtgaacggcgataagcgcttgttcatccgcgatgatgagctggagcaggcctggaacatctttaccccagtgctgcatgagatcgagcgcagaaaggtggcacctgagctgtacccctacggcagcagaggccctgtgggggcacactacttggctgccaagtacaacgtgcgctggggagacttgacggaggatgagatctgaggtgtgaggccctggaccgacctcatccctggtgttcaatggttacatcagacatgagggcacctcaacacaggggcattccga

SEQ ID NO: 2834 - protein, 590 aa, Dunaliella bioculata
MLGGRQLGMDKLSRKLSGAQPVANYSRRPISRPFRAAPVPRVAQNSQDAVTQNGSGTSEAPTSWQNPALKKAIPTVVSLSDEAAAMAADDWSQSSLSVVVVGASGDLAKKKIFPALFALFYEGLLPPDFQLFGYARSKMTDEEFRDLIGNTLTCRIDARSRCEDSQAAFLSRCFYCPGQYDAPEGYANLDKKCKEQEALTGKMVANRMFFLSIPPNVFVQAAGGAADNCSSPTGWTRVIVEKPFGRDSASSAELGRGLARHLTEDQIYRIDHYLGKELIENLTVLRFSNLVFEPLWSRQYIRNVQVIFSEDFGTEGRGGYFDRYGIIRDVMQNHLLQIVALFAMEPPVSLDGEAIRNEKVKVLQSMSQVALEDVTLGQYRGRSGAGRSGGADLPGYLDDATVPKGSLCPTFAAIALHINNARWDGVPFLLKAGKALHTRGAEIRVQFRHVPGNIFKHKVGPNIDMTTNELVIRIQPRESIYLKINNKVPGLGMRLDTTKLDLVYNDAYSKELPDAYERLLLDVVNGDKRLFIRDDELEQAWNIFTPVLHEIERRKVAPELYPYGSRGPVGAHYLAAKYNVRWGDLTEDEI

SEQ ID NO: 2835 - DNA, 1976 bp, Cyanidium caldarium
  CDS (46)..(1848)
cacgagcaccattttattttcttcttctcaacgtgtaagagcaatatgtggatacctctattcataactggtttttggaataccaatacatcttcatctcacttatggaaaacaaaatatacaaagggatggacaactcctttgtatttctctaaagtggacaagtcgttctttgctcctcgtttagcttctattcaagctgttcaaggagatttggataatatcgcccctcaatggaacgactcttcattagaaacaactcttcctataactaccaatgaacgtccagctattccaagacaacacttcagccacctcggagacactttagatcctagtttgatggactccgtcaagaaacgaaaacagagagcaaaagaagagcctttatgtattgttgttattggtgctagtggagacttggcaaagaagaaaacttttcctgctttgttttccttgtattatcacgatttgttaccaaaggactttctcattgtaggttatgctagaagacaaatgactcaagaagagtttagaaactctattatggaatcattgacttgtagagttatcgatggcccacagtgtcaacgaaagatggatgagtttctacccaaatgtcactatatgtcaggtatgtatgatagaactgaagattttgttcgattggatcaatttttgaacaactttgaacaatcatttcccaatactcgagtggatagactatattatttagctgttccttctcaagtatttgaaaatgtggtacatcatgttcatgaaagcggaagaacgcaacgaggttggaatcgcatcgtcatggaaaaaccatttggaaaagacattacttcttatctacagcttcgaaatagtcttcgcaattgtatttctgaagatgaaatataccgaattgatcactatttgggaaaggagttggtacaaaatttgatggttttacggtttgccaattatctatttgagcctttatggaatcgagaccatatagcttccattcaaattgtgtttaaagagaattttggtgtggaaggaagagctggatatttcgatgaatatggaattattagagatattatgcagaatcatttattacaagtgatggcattgttgggtatggaacaaccagtaactttacatgcggaagatattcgagatgaaaaggtaaaatttctacgctctatacgtcctttaaaagcatcagactttgtacttggtcaatatagagaccgtcagaatcctcaacgttcttatttatcggaacctggagtaatgaatgatagtcatactcctacttttgctgcttgtgtatttcaagtggataatagaagatggtcaggtgtaccatttcttatgaaggctggtaaggcattggatgaacgcaaggcagaaatacgtattcagtttcaatctgttcctggtggactattttctcaagtagtttcgtcacatcttccacataatgaattggtgattatagtacaaccagatgaagccatttatatgcgtattcttagcaaggcaccgggttttacttcgcgtttggaagaggcacgtttgaatctcttctatcgtacggcttgggaagatagtaaagatatacctgatgcctatgagagacttattctggatgtcatacatggtgagaaaagtttgtttattcgtgatgatgaattggaagtggcttggaatatatttactccttcattgaaggaaatggaaatggctcaagattcgtggaaacctattttgtacgattacggtggaagaggtccaatcgaaagtgattatttggctgccaaatatgcagtgcaatggagtgaaggtgattgatgttcatgtaaggataatatagaaagaactggaatccattcagttgcaatggcattcatggattcttcatgtttctatataaaatagttgttcgtctaaaaaaaaaaaaaaaaaaaaaaaaaaaaaaa

SEQ ID NO: 2836 - protein, 600 aa, Cyanidium caldarium
MWIPLFITGFWNTNTSSSHLWKTKYTKGWTTPLYFSKVDKSFFAPRLASIQAVQGDLDNIAPQWNDSSLETTLPITTNERPAIPRQHFSHLGDTLDPSLMDSVKKRKQRAKEEPLCIVVIGASGDLAKKKTFPALFSLYYHDLLPKDFLIVGYARRQMTQEEFRNSIMESLTCRVIDGPQCQRKMDEFLPKCHYMSGMYDRTEDFVRLDQFLNNFEQSFPNTRVDRLYYLAVPSQVFENVVHHVHESGRTQRGWNRIVMEKPFGKDITSYLQLRNSLRNCISEDEIYRIDHYLGKELVQNLMVLRFANYLFEPLWNRDHIASIQIVFKENFGVEGRAGYFDEYGIIRDIMQNHLLQVMALLGMEQPVTLHAEDIRDEKVKFLRSIRPLKASDFVLGQYRDRQNPQRSYLSEPGVMNDSHTPTFAACVFQVDNRRWSGVPFLMKAGKALDERKAEIRIQFQSVPGGLFSQVVSSHLPHNELVIIVQPDEAIYMRILSKAPGFTSRLEEARLNLFYRTAWEDSKDIPDAYERLILDVIHGEKSLFIRDDELEVAWNIFTPSLKEMEMAQDSWKPILYDYGGRGPIESDYLAAKYAVQWSEGD

SEQ ID NO: 2837 - DNA, 2106 bp, Drosophila melanogaster
  CDS (28)..(1746)
gcgatttttgcctcagtctatacctccatgcaatatctatcactaatcttttttaaattacaactatttattcttggccaaaatttgacgttaccttgctttcttttattctctcaaaattatacttcaattaaattacccgaaatgatttccatggacccccacaatgaggaggcgtattccatcgtggtcttcggagcctcaggcggattggccaaaaagaaggtgtttccggcgctttgggctctcttccgggagaatcggctgccccagggcaccaaaatatttactttcacccggtccccgctgcagacgaagacgtaccggttgcagattcttccctatatggagctggacaagcatcgggaccccaagaagtacaacctcttttggacgaccgtgcactgtgtgcagggcgagtacgacaagccggagaactacgtggcactcacggaggcgatggtacaccaggagacaaagcacaatcaggtgcgcgcgaatcgaatcttctacctggcgctgccaccgatcgttttcgatcaggtgaccctcaatgtcagtcgaaaatgcagctcgaccacgggatggaaccgcataatagtggagaagcccttcgcgcgggacgacatctcctacaaggcctttcaaacctcgctgtgcaactgcttccgggagtcgcagatttacctgatggaccacctcctcagccggcaggtgatgcagaacttctttgcgctgcgctactcaaaccacttgtgggccgagaccctgaaccaccgccacgtggcggcggtgatgatatccataaagtgtgagctgccggtgtcggtgaatcgggcagactactttaatcagtttggcattattcgcgacctgatgaccaaccacatgatccagatgctggccatgctggctatggatcagccgtacgccaacactgctgacgacctgcgtgccgaacggctgaaggttcttcgccaggtgctaactcccaacataggcgacgtcgtcttggctcaataccgcaacaaccggcgggagactgaccccgcgaagtgcggctacacggagcacacctacatcccgaaggactcctttacgcccacattcgctctggtggtgctgcacatcaacaaccgccgttggaccggggtacccttcattctcagagcgggaaaagccttgaacgacaccaagtcggaggtgcgtatccagtacaagccggtggactgcgacaccttccacagcgacagtactgacattcgtaacgagctagtcctgagatccttccccacggaagaggtctttatgcgcatgcgcctcaagcggcagggcgaggatatctgccttcgggagagcgagatcaacctgcgagtggatgatcggggaccgaagggactccaaggactgcccggctacctgctcaacgtgtttcaaggcgaccagacgctcttcatgcgctccgatgagcagtgcgagatttggcgcatattctcccccgttctcgccaccatcgattcggatcgtccccgcccgttgcactatgactttggatcacggggtcctttgctggcctatcgcaaggccgagcgcgctggcttcgtattcttcgccacggacgagtggcatcagagcgaagagacgttagaatacacggtcaagaatagcaagcagctaatcggaccccataccgccctcaagccagtaagagatcctcggtccaagaggtcgaattccaatccttaggcgtagggagatagttaaagcttatacgaaagttttttaattaagcaagtgcagcctgctgtgttgcaccagttggccaccacttcaccttggctgcccagtctaacccttcaccgctgtccgttccattcggttctaatccgttccgtgccattgttgcccatgttgccggtgaggatttcgccaagaggggcgtaaacaacacgcaagtcttggccattgtcctttgcagataggggtgagatgcactatagtgtatgggaactacgtaattctctataaatttatatctacttatatttgtacatacaaaattgttttcagtttaataaaaattttatttaaattacatttaatttt

SEQ ID NO: 2838 - protein, 572 aa, Drosophila melanogaster
MQYLSLIFFKLQLFILGQNLTLPCFLLFSQNYTSIKLPEMISMDPHNEEAYSIVVFGASGGLAKKKVFPALWALFRENRLPQGTKIFTFTRSPLQTKTYRLQILPYMELDKHRDPKKYNLFWTTVHCVQGEYDKPENYVALTEAMVHQETKHNQVRANRIFYLALPPIVFDQVTLNVSRKCSSTTGWNRIIVEKPFARDDISYKAFQTSLCNCFRESQIYLMDHLLSRQVMQNFFALRYSNHLWAETLNHRHVAAVMISIKCELPVSVNRADYFNQFGIIRDLMTNHMIQMLAMLAMDQPYANTADDLRAERLKVLRQVLTPNIGDVVLAQYRNNRRETDPAKCGYTEHTYIPKDSFTPTFALVVLHINNRRWTGVPFILRAGKALNDTKSEVRIQYKPVDCDTFHSDSTDIRNELVLRSFPTEEVFMRMRLKRQGEDICLRESEINLRVDDRGPKGLQGLPGYLLNVFQGDQTLFMRSDEQCEIWRIFSPVLATIDSDRPRPLHYDFGSRGPLLAYRKAERAGFVFFATDEWHQSEETLEYTVKNSKQLIGPHTALKPVRDPRSKRSNSNP

SEQ ID NO: 2839 - DNA, 1777 bp, Mesembryanthemum crystallinum
  CDS (39)..(1589)
ccactacgaaatttctccgaactcaaattcttccaagaatggggtcaggcgagtggcacgtggaaaaaagatcgagcttgaagagtgaattatctaaagacataggagagtctgaaagttcacaagaatgtggctctctttctatcattgttctaggtgcctctggtgatcttgccaagaagaagaccttccctgctctgtttaatctttaccgccagggatttcttcctcccagtgaggttcacatatttggttatgcaaggtcaaagatgacagatgatgacttgagagatcgcatacgtggacatctgattcccaggaatgtaacagcggagatatctgaggatgttttgaactttctgcatctgattaaatatgttagtgggtcttatgacactgaggacggttttcacttgttagatgatgaaatatcaaagtatgagtgtcaaaagaacagccaggaacattctaagagactcttttatcttgctcttcctccatcagtatatccatcagtctgcagaatgataaagctttgctgtatgaataaatctgatcttgggtggactcggattgttgttgagaagccttttggaagagacttagaatcagcagaacaacttagtgctcagattggagagttgtttgatgagtcacagatttaccgaattgatcactatttggggaaggagttggtgcagaacttgctggtgatgcgcttcgcgaatcgtctttttctacctctctggaatcgggacaatattgcgaatgtgcagattgtcttcagggaagattttggaacacaaggtcgtggtgggtactttgatcaatatggaataatccgtgacattattcaaaaccaccttttgcaggttctttgtttagttgccatggagaagcctgtctcaatcaaaccagagcacattcgtgatgagaaagtgaaggttctccaagctgttaatctaataaaagatgaagaggttgttcttgggcaatatgaaggctacaaggatgatccaactgttcccgaagactcaaacactccgacatttgcgactatggttttgcggatacacaatgaaagatgggaaggtgttccatttatactaaaggcagggaaagcattgaattcacgaaaagcagaaatacgtgttcagttcaaagatgttcctggtgacatattcaaatgtaacaagcaggggagaaatgagtttgtaatacggctacagccttcagaagcactctatatgaagcttacggtgaagcagcctgggcttgaaatgtcaactatacaaagtgagctggatttgtcgtatgggcagcggtatcagggagtcgttattccagaggcctatgagcgtctgattctggacacgataaaaggcgatcaacaacattttgtccgtagagatgagttgaaggctgcgtgggagatctttactcctcttctacacagaattgataagggagaattcaagccaatttcatacaagcctggaactcgaggcccagcagaagcagatgagctactggcaaaggctggatacgttcaaactcatgggtacatctggattccacccaccttatagtcactcggaaaagctacacggattgaatcggccatcaaaatttgtgtttggatatagtttgagaaaagctcttcgtggtgctggtagctcttattgaaccttgacagtaatttgtcttgggtacactaaagctactacagttgtatgtaattcattttgctggtgtaataaaagtcatttccggtttt

SEQ ID NO: 2840 - protein, 516 aa, Mesembryanthemum crystallinum
MGSGEWHVEKRSSLKSELSKDIGESESSQECGSLSIIVLGASGDLAKKKTFPALFNLYRQGFLPPSEVHIFGYARSKMTDDDLRDRIRGHLIPRNVTAEISEDVLNFLHLIKYVSGSYDTEDGFHLLDDEISKYECQKNSQEHSKRLFYLALPPSVYPSVCRMIKLCCMNKSDLGWTRIVVEKPFGRDLESAEQLSAQIGELFDESQIYRIDHYLGKELVQNLLVMRFANRLFLPLWNRDNIANVQIVFREDFGTQGRGGYFDQYGIIRDIIQNHLLQVLCLVAMEKPVSIKPEHIRDEKVKVLQAVNLIKDEEVVLGQYEGYKDDPTVPEDSNTPTFATMVLRIHNERWEGVPFILKAGKALNSRKAEIRVQFKDVPGDIFKCNKQGRNEFVIRLQPSEALYMKLTVKQPGLEMSTIQSELDLSYGQRYQGVVIPEAYERLILDTIKGDQQHFVRRDELKAAWEIFTPLLHRIDKGEFKPISYKPGTRGPAEADELLAKAGYVQTHGYIWIPPTL

SEQ ID NO: 2841 - DNA, 1542 bp, Mus musculus
  CDS (1)..(1542)
atggcagagcaggtgaccctaagccggacccaagtgtgtgggatcctgagggaagagttgtaccaaaatgatgccttccaccaagctgatacacacatatttatcatcatgggtgcatcgggtgacctggccaagaagaagatctatcccaccatctggtggctgttccgggatggtcttctacccaaagaaaccttcattgtgggctatgcccgctcacaactcacagtggatgacatccaaaagcagagtgagcccttctttaaggccactccagaagaaagacccaagctggaggagttcttcacgcgtaactcctatgtagttggccagtatgatgatccagcctcctataagcacctcaacagctacattaatgccctgcaccaggggatgcaggccaaccatctattctacctggccttgccccccacagtctatgaagcagtcaccaagaacattcaagagacctgcatgagtcagacaggctttaaccgcatcatagtggagaaacccttcgggagagacctgcagagctccaatcaattgtctaaccacatctcctctcttttccgtgaagaccagatctaccgcattgaccactacctggacaaagagatggtccagaacctcatggtgctgaggtttgctaacaggatctttggccctatctggaatggagacaacattgtttgtgtgatcctcacatttaaagagccctttggtactgagggtcgtgggggctattttgatgaatttgggatcatcagggatgttatgcagagccacctcctgcagatgttgtgtctggtggccatggaaaagcctgctaccacagattcagatgatgtccgtaatgagaaggtcaaagtgttgaaatgtatctcagaggtggaaactgacaatgtgatccttggccagtatgtggggaaccccaatggagaaggagaagctgccaatggatacttagatgaccccacagtaccccgtgggtccacaactgccacctttgctgcagctgtcctctatgtgaagaatgaacggtgggatggggtacccttcatactgcgctgtggcaaagccctgaatgaacgcaaagctgaagtgagactgcaattccgagatataccaggcgacatcttccaccagaagtgcaagcgtaatgagctggtcatccgtatgcagcccaatgaggcagtatacaccacgatgatgaccaagaagcctggcatgttctttaaccctgaggagtcggagctggacctaacttatggcaacaaatacaagaatgtgaagctccctggtgcctatgaacgcctcatcctggatgtcttctgtgggtgccagatgcactttgtccgtactgatgaactcagggaaggctggcgtatcttcacaccactgctgcacaagattgaacgagaaaagccccagcccttcccctatgtatatggcagccgtggccccacagaggcagatgagctgatgaggagagtgggcttccagtacaagggtacctacaagggtactcacaagcactga

SEQ ID NO: 2842 - protein, 513 aa, Mus musculus
MAEQVTLSRTQVCGILREELYQNDAFHQADTHIFIIMGASGDLAKKKIYPTIWWLFRDGLLPKETFIVGYARSQLTVDDIQKQSEPFFKATPEERPKLEEFFTRNSYVVGQYDDPASYKHLNSYINALHQGMQANHLFYLALPPTVYEAVTKNIQETCMSQTGFNRIIVEKPFGRDLQSSNQLSNHISSLFREDQIYRIDHYLDKEMVQNLMVLRFANRIFGPIWNGDNIVCVILTFKEPFGTEGRGGYFDEFGIIRDVMQSHLLQMLCLVAMEKPATTDSDDVRNEKVKVLKCISEVETDNVILGQYVGNPNGEGEAANGYLDDPTVPRGSTTATFAAAVLYVKNERWDGVPFILRCGKALNERKAEVRLQFRDIPGDIFHQKCKRNELVIRMQPNEAVYTTMMTKKPGMFFNPEESELDLTYGNKYKNVKLPGAYERLILDVFCGCQMHFVRTDELREGWRIFTPLLHKIEREKPQPFPYVYGSRGPTEADELMRRVGFQYKGTYKGTHKH

SEQ ID NO: 2843 - DNA, 1485 bp, Actinobacillus actinomycetemcomitans
  CDS (1)..(1485)
atgaaagcagaaaactgttgtattgtaattttcggcgcctccggcgatctcacttatcgtaaacttattccggctttatataacctctataaaattgatcgactgggtgaagatttctccgttctcggcgtggcacgtaccgaactgaatgacaaatcattccgtgagaaaatgcgccaaacgctgatcaaaaatgaaggcgcgaaaggcgagtgcttggagcaattttgcagccacctgtattatcaggcggtcaatacggcggacaaagcggattacgccaaactggttccgcgtcttgacgaactgcacgacacctatcgcaccgaaggcaacaccttgtattatctttccacgccgccgagcctatatggcgtgattccggaatgtttgggcgaacatggcttaaataaagaagatcgcggctggaagcgtcttattgtggaaaaaccgttcggttatgaccgtgaaaccgccgaagcgctggatattcaaattcaccgtttctttgaagaacatcaaatttaccgtatcgaccattatcttggtaaagaaaccgtccaaaacctgcttgtgttgcgcttttccaacggttggtttgagccgttgtggaaccgtaatttcattgattacattgaaatcaccggcgcggaatctatcggtgtagaagagcgtggcggctattatgacggttccggcgcgatgcgcgatatgttccaaaaccatttattacaagtgctggcaatggtggcgatggagccgccggtgattatcaacgccaattccatgcgtgacgaagtggcgaaagtgctgcattgtttgcgcccgttgacccaggaagacgtggagcataatctggtgttgggacaatatgtcgcaggcgaagtggacggcgaatgggtgaaaggctatttagaggaaaaaggcgtgccgccgtattccaccaccgaaacctacatggcgctacgctgtgaaatcgaaaactggcgttgggcgggcgtgcctttctacgtgcgcaccggtaaacgtctgccggcacgcgtcacggaaatcgtgattcacttcaaaaccaccccgcacccggtattcagccaaaatgcgccggaaaataaactgattatccgtattcaaccggacgaaggcatttctatgcgttttggcttgaaaaaaccgggcgccggctttgaagccaaagaagtgtcgatggatttccgctatgccgatcttgcgggtgccaccgtcatgaccgcttatgagcgtttattgcttgatgccatgaaaggcgacgcgaccctatttgcgcgtaccgatgccgtacacgccgcctggaaattcgttcaaccgattttgaactataaagcccaaggcggcagactttatgattacgaggccggcacctggggaccgacggcagccgataaactcatcgccaaaagcggtcgtgtatggcgccgcccaagcgggttgatgaagaaaaaagtgtaa

SEQ ID NO: 2844 - protein, 494 aa, Actinobacillus actinomycetemcomitans
MKAENCCIVIFGASGDLTYRKLIPALYNLYKIDRLGEDFSVLGVARTELNDKSFREKMRQTLIKNEGAKGECLEQFCSHLYYQAVNTADKADYAKLVPRLDELHDTYRTEGNTLYYLSTPPSLYGVIPECLGEHGLNKEDRGWKRLIVEKPFGYDRETAEALDIQIHRFFEEHQIYRIDHYLGKETVQNLLVLRFSNGWFEPLWNRNFIDYIEITGAESIGVEERGGYYDGSGAMRDMFQNHLLQVLAMVAMEPPVIINANSMRDEVAKVLHCLRPLTQEDVEHNLVLGQYVAGEVDGEWVKGYLEEKGVPPYSTTETYMALRCEIENWRWAGVPFYVRTGKRLPARVTEIVIHFKTTPHPVFSQNAPENKLIIRIQPDEGISMRFGLKKPGAGFEAKEVSMDFRYADLAGATVMTAYERLLLDAMKGDATLFARTDAVHAAWKFVQPILNYKAQGGRLYDYEAGTWGPTAADKLIAKSGRVWRRPSGLMKKKV

SEQ ID NO: 2845 - DNA, 1473 bp, Buchnera aphidicola
  CDS (1)..(1473)
atgattatagaaactaatcaagcttgcgatctagtgatttttggaacaaaaggagatttagcaagaagaaaattgttaccagctttatataaattagaaaaatctcaaaaaatacatccagatacacgtataattggtacaggtcgtgctgattggaatacagaagattatataaagatagtaaaaaaagcaataaaaatgtttttaaatgaaaaaattgatgaaaaaatttggaaaaaattacgttcacgtttaaattttttttatattgatgtatttcaagatcttcactttttagaattaaaaaatatattaaatcaaaaaaaaaacattattatttattattgtgcagttccttcaaatacatttaatgctatttttacaggattaggaaaagttaatttaaattcttttccatcaagaatcataatcgaaaaaccactcggtgtatctttagaaacatcaaaaaaaatcaataatcaaattgctaaatattttttagaatcgcaaatctttcgtattgatcactatcttggaaaagaatcaatattaaatcttttagcattacgtttctcaaattcatttttttttcatagttggaataataaaattattgatcatattcaaattactgtatctgaagaagttggtattgaaaatagatggaattattttgatcaaatgggacaaacacgagatatggtacaaaatcatctcctgcaaattcttacaatcgtttctatggataaaccaaaaaatattacacctgaaggcataagagatgaaaaattaaaaatattgcgttctcttaaaaaaattgacttaaatgaaattcatattaagacagcacgaggtcaatatgcatctggaattataaatggtaaaaaggtaccttcttacatagaagaaaatggtgcaaacaaacatagtaaaacagaaacatttgtttcaattaaagttgatattaataatgatcgatggtttggagttccattttatttaagaacgggtaaacgtttagcatataaatactctgaaatagttattgtctttaaaaaaatatctaagaacttgtttcaagaattcaataaaaatttatcacctaacaaattgattatacgtctagaacctaatgaaagtattaaaatatattttttaaataaagtaccaggactcagtaaggaatataaattaaaaagtgataaaatggaatttaattttaatataaataatactaaaaattttgtcgacgcttatgaaaggctattatttgaaagtatgagaggaatacaatcattatttgtatgtcgagaagaagtagaagaagcgtggaaatggattgatccaataataaacggttggaaaaaaacaaatataaatactgtacagttatataaatctggtacatgggggccaaaaagttcggacgaaatcattatgcgagatggtcgattttgggaaacatttaattaa

SEQ ID NO: 2846 - protein, 490 aa, Buchnera aphidicola
MIIETNQACDLVIFGTKGDLARRKLLPALYKLEKSQKIHPDTRIIGTGRADWNTEDYIKIVKKAIKMFLNEKIDEKIWKKLRSRLNFFYIDVFQDLHFLELKNILNQKKNIIIYYCAVPSNTFNAIFTGLGKVNLNSFPSRIIIEKPLGVSLETSKKINNQIAKYFLESQIFRIDHYLGKESILNLLALRFSNSFFFHSWNNKIIDHIQITVSEEVGIENRWNYFDQMGQTRDMVQNHLLQILTIVSMDKPKNITPEGIRDEKLKILRSLKKIDLNEIHIKTARGQYASGIINGKKVPSYIEENGANKHSKTETFVSIKVDINNDRWFGVPFYLRTGKRLAYKYSEIVIVFKKISKNLFQEFNKNLSPNKLIIRLEPNESIKIYFLNKVPGLSKEYKLKSDKMEFNFNINNTKNFVDAYERLLFESMRGIQSLFVCREEVEEAWKWIDPIINGWKKTNINTVQLYKSGTWGPKSSDEIIMRDGRFWETFN

SEQ ID NO: 2847 - DNA, 1473 bp, Buchnera aphidicola
  CDS (1)..(1473)
atgaaaaataaaaattcaggatatgatttagttatttttggagcaaaaggagatctatcttgtagaaaactactaccttcattatatcaattagaaaaaaaaaataaattatgtactcacactagaataataggcgtaggtcgcgctaattgggataaaattatttatactaatgtagtatataaatcattaattaaatttttaaatgaaacaataatcgaatctatttggaaaaaattttcgtctcggttagaattttgtaatttagatattaattgcttgcacaattttaaaaaattaaaacaaataattcaacaaaataataacattataattaattatctagctatgccacctcacacatttggaaatatttgtttaggattagaatcaataaatttaaatttagaacctacgcgtattataattgaaaaaccattaggttcttctttaaaaacatctataaatattaataacaaaattggaaaattttttaaagaaaaacaaatttttcgaatagatcattatcttggaaaagaaactatacaaaatttgttagcattcagattttcaaattcacttttttactataattggaataataaatttattgatcatgttcaaattactgtatcagaaacaattggagttgaaggaagatttaattatttcgatacagttggacaaattaaagatatggttcaaaaccatttattacaaatattgacgattactactatgtcgacaccaattgattgccatgaaaatagcataagggatgaaaaagtaaaaattttaaaatcattacgaccatttaacattaataatattcataaaaatgtaatattaggtcaatatacttcaggaataataaatcaaaaaaaagttaaatcttatttagatgaaactaataatcaagaatatcaaatgaataaatataccgaaacatttgtatctatgaaaatatatatcgataatgatcaatggtctggagtcccattttatttgcgtactggaaaacgacttccaaaaaaatgttcagaaatcgttattttttttaaaacacctcctttaaatatttttagtaaaaattacaatacgttatctaaaaataagttaatattatcgttacagcctaacgaagcgattaagatatatattttaaataaaaaaccaaaactaacttctcaatacaaattagatttaattactttagattttaattattcaaaattttataaaaaaatacagttatctgatgcatatgaaaaattgttattagaaagcatgaaaggaattcagtctctatttgttagacgagatgaagttgaattagcatggaaatggattgactctactttgcaatgtttacatctaaaacctagattaccagatctatatccagctggaacttggggacctgcacgttcgaaaactatgataaataatgatggttacgaatggaatgaataa

SEQ ID NO: 2848 - protein, 490 aa, Buchnera aphidicola
MKNKNSGYDLVIFGAKGDLSCRKLLPSLYQLEKKNKLCTHTRIIGVGRANWDKIIYTNVVYKSLIKFLNETIIESIWKKFSSRLEFCNLDINCLHNFKKLKQIIQQNNNIIINYLAMPPHTFGNICLGLESINLNLEPTRIIIEKPLGSSLKTSININNKIGKFFKEKQIFRIDHYLGKETIQNLLAFRFSNSLFYYNWNNKFIDHVQITVSETIGVEGRFNYFDTVGQIKDMVQNHLLQILTITTMSTPIDCHENSIRDEKVKILKSLRPFNINNIHKNVILGQYTSGIINQKKVKSYLDETNNQEYQMNKYTETFVSMKIYIDNDQWSGVPFYLRTGKRLPKKCSEIVIFFKTPPLNIFSKNYNTLSKNKLILSLQPNEAIKIYILNKKPKLTSQYKLDLITLDFNYSKFYKKIQLSDAYEKLLLESMKGIQSLFVRRDEVELAWKWIDSTLQCLHLKPRLPDLYPAGTWGPARSKTMINNDGYEWNE

SEQ ID NO: 2849 - DNA, 2049 bp, Ceratitis capitata
  CDS (60)..(1640)
ttaaagtgtaaactaaaacatttttaagttttaaacaaattatttgatttgctttaaatatggccactcagcatttcaccaatggcagcgccaccgacgatggggagaccgcactcgaacatatcatcaaatcattggagactccaacaatgaagtgcgagggtacacatttcgattcccatgtgccgcacacgtttgtcatctttggtgcttcgggtgatttggccaaaaagaaaatctatccaaccttgtggtggctttaccgtgataatttactgccgaaatcaactaaattctgcggttatgcacgttcgaagttaacgattgaggagttgcgggcgaagtgtcatcaatacatgaaggtgcaaccggacgagcaggcaaaatatgaggaattctggcagaatcatgactacgctgcgggtagctatgatcagcgcagtgattttgtggctttaaaagaacgtttgagcagtttggagagctgcaattgtagttgtaatcgcatattttatttggccttaccgccgtccgtctttgagcgagttactgtgaacattaaggacatttgtttggctgaacgcggctggaatcgcgttattatcgaaaaaccttttggtcgcgacgatgtcacttcaaagaaactaagcgatcatcttgcatcactcttccacgaggaccaactctatcgtatcgatcattatctgggcaaggaaatggtgcaaaatctaatgaccattcgctttgccaataaaattctcaactccacatggaatcgggaaaatatcgcctcagtgctgatcacattcaaggaacccttcggcacacaaggacgcggcggctactttgacgagtttggcattatacgcgatgtcatgcaaaatcacctgctgcaaatattgtctttggtcgccatggagaaacccacctcctgccagccggatgatatacgcgatgaaaaagttaaagtattgaaaagcattccagcacttacattggacgatatggttttgggtcaatatgtgggcaatccaaatggcgttggtgagcaacgcgaggggtatctcgacgatccgacagtgtcgaacgactccaacacacccacttacgcgcagggtgtattgcgtatcaataatgaacgttgggacggcgtacccttcatcttacgttgcggtaaagcgctggacgaacggaaagccgtggtgcgtatacaatatcgtgatgtgcctggcgatattttcgagggcaatagcaaacgtaatgagttagttatacgtgtgcaacccggcgaggcgttgtatttcaaaatgatgaccaaaagtccgggtataactttcgatatagaggagaccgagttggacttaacctatgagcatcgctacaaaaactcctacctgccagatgcctacgaacgtctcattttggatgtattctgtggttcgcaaatgcatttcgtgcgttccgatgagctgagcgaggcgtggcgcatcttcacgccggtcttgaatgaaatcgaaaacaacaaggttaaacccataccttatgtatttggttcacgtggtcccaaggaggcggatcagaagacgtcggagaataacttcaaatattacggttcctacaagtggattggaaagaaatagagtttggtgtggctaaacctatggcagcagtgtgcacctacgtacatacatatgtttgtatgtatgtagggggaccaatgaataagataaacgcgtagaaaagacaaatacttaagcgattgtataagcaatttgaagaaaatgattgtgtacatatgtacatacatatttgtatatttgtatatttgtatatttgtaaatgtactcgtagcttgtagttaatgatgtaatgaatggattgtgcgagcgacctctgagctttgtaccagagcatcgggtatacaataatactttttgttaaatggaataatggatttataaataagttttttaagccaattttttttttgctcaaaatgaaatacaaaataaaacctaaaggacaagtgtaaaaaaaaaaaaaaaaaaa

SEQ ID NO: 2850 - protein, 526 aa, Ceratitis capitata
MATQHFTNGSATDDGETALEHIIKSLETPTMKCEGTHFDSHVPHTFVIFGASGDLAKKKIYPTLWWLYRDNLLPKSTKFCGYARSKLTIEELRAKCHQYMKVQPDEQAKYEEFWQNHDYAAGSYDQRSDFVALKERLSSLESCNCSCNRIFYLALPPSVFERVTVNIKDICLAERGWNRVIIEKPFGRDDVTSKKLSDHLASLFHEDQLYRIDHYLGKEMVQNLMTIRFANKILNSTWNRENIASVLITFKEPFGTQGRGGYFDEFGIIRDVMQNHLLQILSLVAMEKPTSCQPDDIRDEKVKVLKSIPALTLDDMVLGQYVGNPNGVGEQREGYLDDPTVSNDSNTPTYAQGVLRINNERWDGVPFILRCGKALDERKAVVRIQYRDVPGDIFEGNSKRNELVIRVQPGEALYFKMMTKSPGITFDIEETELDLTYEHRYKNSYLPDAYERLILDVFCGSQMHFVRSDELSEAWRIFTPVLNEIENNKVKPIPYVFGSRGPKEADQKTSENNFKYYGSYKWIGKK

SEQ ID NO: 2851 - DNA, 1524 bp, Chlamydia muridarum
  CDS (1)..(1524)
atggaagaaataaaagaaatggggcccacattaccagcctgccctccttgtgtcatggttatttttggggctacaggagacttgactgcaaggaagctttttcccgctttatacaatttaacaaaagagggacggttatctgaaaactttgtttgcgtgggatttgccagaagacccaaatctcatgagcaatttcgtgaagaaatgagacaagctattcaaaatttctctcattcatcagaaattgatattcgtgtttgggagagccttgaacacagaattttctatcatcaggcgaatttttccgaagcagaagggtattcttctttaagatctttcttagagagcgtggatcaaaaatatgggacaaaaggaaatcgtcttttctacctctccactcctccagattatttccaagaaataatccggaacttgaacagacaccaactattttatcatgagcaaggagcccaacagccctggtctaggctaattatagaaaagccttttggagttgatttacaaactgctcaagagcttcagcaatgcattgatgctaatatcaatgaagaatctgtttatcgaatagatcattatcttgggaaagaaactgttcaaaatattctgaccatacgttttgctaatacgctattcgaatcttgttggaactctcaatatatagatcatgtacagattagtgttagtgaatcgattggtataggctctcgagggaacttttttgaaaagtctggcatgctaagggatatggtgcaaaatcacctgatgcaattactgtgtctacttactatggagcccccttctgaattttcttctgcagagatcaaaaaagaaaaaattaagattctaaaaaaaatccttcctattcgagaagaagacgtaattcgtggtcaatatggtgaaggagttgtgcaaggcgtttctgtttctggctacagagaagaagaaaatgttgatccaaattctttggtagaaacttacgtagccttgaaattattcattgataatcctcgctggaaaggggttcctttttatttacaagcagggaaacgtcttcctaaaaggacaacggatattgccgttatctttaaaaaatctagttacgacttgtttaattcagaaaattgccctctgtgccctttagagaatgatttgctcatcatccgcattcaaccagatgaaggagttgctctacaatttaactgcaaagttccagggacaaataaactcgttcgtcctgtgaaaatggatttccgttacgatagttattttaatacagttactccagaagcttatgaacgattgttgtgtgattgtatccttggcgataggacccttttcactagcaatgaagaagtcttagcatcttgggaactattttctcccttattggagcaatggtctaagatccgtcccattttccctaattatattgcaggatctttgcgcccgcaaggagctgatgagctattatctagagatggaagagcatggcgttcttactaa

SEQ ID NO: 2852 - protein, 507 aa, Chlamydia muridarum
MEEIKEMGPTLPACPPCVMVIFGATGDLTARKLFPALYNLTKEGRLSENFVCVGFARRPKSHEQFREEMRQAIQNFSHSSEIDIRVWESLEHRIFYHQANFSEAEGYSSLRSFLESVDQKYGTKGNRLFYLSTPPDYFQEIIRNLNRHQLFYHEQGAQQPWSRLIIEKPFGVDLQTAQELQQCIDANINEESVYRIDHYLGKETVQNILTIRFANTLFESCWNSQYIDHVQISVSESIGIGSRGNFFEKSGMLRDMVQNHLMQLLCLLTMEPPSEFSSAEIKKEKIKILKKILPIREEDVIRGQYGEGVVQGVSVSGYREEENVDPNSLVETYVALKLFIDNPRWKGVPFYLQAGKRLPKRTTDIAVIFKKSSYDLFNSENCPLCPLENDLLIIRIQPDEGVALQFNCKVPGTNKLVRPVKMDFRYDSYFNTVTPEAYERLLCDCILGDRTLFTSNEEVLASWELFSPLLEQWSKIRPIFPNYIAGSLRPQGADELLSRDGRAWRSY

SEQ ID NO: 2853 - DNA, 2062 bp, Drosophila melanogaster
  CDS (303)..(1877)
aacgatcgtgcttatcttcattactactaccgcttccaccgaggcttcgcgactccgtacccgtactcgctttgttttacgtttgcgctactagttagtgaatccgacgacgacgacctgcgcgtgcgattaaagcgccgcaactctttgtaattacacagccagagccgcagaggttgctcaaaatccagcgactggagaaatcgtatatcgagttggaaatccgaatcgaaaggcttgcgtatacatagttgtcacacttttgcttttaaacagaaaaatccattcacattcgggtcaagatggcaacgcaaaaggaagatcacaccgccctggatctcataatcaagtcactcaagtcgcctacaatggtctgcgagggaacccactttgacggcaagattccgcacacgttcgtcatctttggggcgtcgggcgatctggccaagaagaagatctaccccacgctctggtggctctaccgcgatgacctgctgcccaagccgaccaagttctgcggctatgcccgttccatgctgaccgtcgatagcatcaaggagcagtgtctgccgtacatgaaggtccagccgcacgagcagaagaagtacgaggagttctgggccctcaatgagtacgtgtccggcagatatgacggacgcactggcttcgagctgcttaaccagcagctggagattatggagaacaagaacaaggccaaccgcatcttctatctggccctgccgcccagcgtcttcgaggaggtgactgtcaacatcaagcagatctgcatgtcggtctgcggttggaaccgcgtgatcatcgagaagcctttcggccgggatgacgcctcctcgcaggcgctgagcgaccatctggccggtctgttccaggaggatcagctgtaccgcatcgatcactacctgggcaaggagatggtgcagaacctgatgaccatacgcttcggcaacaagatcctcagctcgacgtggaaccgcgagaacatcgcctccgtgctgatcacgttcaaggagcccttcggcacgcagggtcgtggcggctacttcgacgagttcggcatcatacgcgacgtgatgcagaaccatctgctgcagatcctctcgctggtggccatggagaagccggtgagctgccacccggacgacattcgtgacgagaaggtcaaggtgctgaagagcatcgaggccctgacgctggatgacatggtgctgggccagtacctgggcaatccgcagggtacaaacgatgatgcgcgcacgggctacgtggaggaccccaccgttagcaacgattcgaacacgcccacctacgccctcggcgtgctcaagatcaacaacgagcgctggcagggagtgcccttcatcctgcgctgcggcaaggcgctgaacgagcgcaaggcggaggtgcgcatccagtaccaggacgtgctcggcgacatcttcgagggcaatacgaagcgcaacgagctggtcatacgcgtccagccgggcgaggccctgtactttaagatgatgaccaagagccccggcatcacgttcgacatcgaggagacggagctggacctcacctacgagcaccgctacaaggactcctacctgccggacgcgtacgagcgtctcatcctcgacgtcttctgcggctcccagatgcacttcgtccgctcggacgagctgcgcgaggcgtggcgcatcttcacgcccattctgcaccagatcgagaaggagcacattcgtccaatcacctaccagtacggatcgcgcggtcccaaggaggcggaccgcaagtgcgaggagaacaatttcaagtactccggctcctacaagtggcacggcggcaaggcggccacgtccaatcactgagcgtttggagcacaccaatccccgggctgggttcgcaggatactcctctttgtccgcacgtacatgtacatacatacatatatatgtatatatacatatatgcattctttggttatttgtaattcggtctgtacaagatttttttttattaaatatacaaaatagtgaaaaaaaaaaaaaaaaaa

SEQ ID NO: 2854 - protein, 524 aa, Drosophila melanogaster
MATQKEDHTALDLIIKSLKSPTMVCEGTHFDGKIPHTFVIFGASGDLAKKKIYPTLWWLYRDDLLPKPTKFCGYARSMLTVDSIKEQCLPYMKVQPHEQKKYEEFWALNEYVSGRYDGRTGFELLNQQLEIMENKNKANRIFYLALPPSVFEEVTVNIKQICMSVCGWNRVIIEKPFGRDDASSQALSDHLAGLFQEDQLYRIDHYLGKEMVQNLMTIRFGNKILSSTWNRENIASVLITFKEPFGTQGRGGYFDEFGIIRDVMQNHLLQILSLVAMEKPVSCHPDDIRDEKVKVLKSIEALTLDDMVLGQYLGNPQGTNDDARTGYVEDPTVSNDSNTPTYALGVLKINNERWQGVPFILRCGKALNERKAEVRIQYQDVLGDIFEGNTKRNELVIRVQPGEALYFKMMTKSPGITFDIEETELDLTYEHRYKDSYLPDAYERLILDVFCGSQMHFVRSDELREAWRIFTPILHQIEKEHIRPITYQYGSRGPKEADRKCEENNFKYSGSYKWHGGKAATSNH

SEQ ID NO: 2855 - DNA, 1536 bp, Emericella nidulans
  CDS (1)..(1536)
atgtccgccacgatagcccgcgccgaggagcagcagaatgggagcactgtcgaactcaaagatgacaccgtcattgtcgtactaggtgcctccggggatcttgcaaagaagaagactttcccagctctttttggcctttttcgcaacaagttccttcccaagggtatcaagatcgtcggatatgcccggacacagatggaccacaatgaataccttaagcgagtgcgctcatacattaagaccccgacaaaggagatcgaagagcaattgaacagcttttgcgagctttgcacatacatcagcggccaatacgaccaggatgactcattcaagaacctcgccaagcaccttgaggagattgagaaaaaccaaaaggaacagaacagagtcttttacatggcgttgccccccagcgttttcatcacagtctcagagcaactaaaacgcaactgctaccccaaaaatggtgtcgctcgtattattgtcgagaaacctttcggcaaggacctccagagctctcgtgatctccagaaggcccttgagcccaactggaaagaagaagagatcttccgtattgaccactacctcggcaaggagatggttaagaacatccttatcatgcgctttggcaacgagttcttcaatgccacctggaaccgccatcacatcgacaacgttcagatcacgttcaaggaaccattcggtacggagggccgtggaggttactttgatgaattcggcatcatccgtgacgttatgcagaaccaccttctgcaagttctcacactgcttgctatggagcgacccatctctttctccgccgaagacatccgtgacgagaaggttcgcgtcttgcgcgccatggaccccattcaacccaaggatgtcatcatcggccagtacggcagatcactagatggtagcaaacccgcatataaggaggatgatacagtgccacaggactctcgctgccccaccttctgtgcgctggtcgctcacatcaagaacgagagatgggatggtgttcctttcatcatgaaggcgggtaaagccctcaacgaacagaagaccgaaatccgtattcagttcaaggacgtcacttctggcatcttcaaggatatcccccgcaacgagcttgtcatccgtgtccaacccaacgaatctgtctacatcaagatgaactcgaaacttcctggactttccatgcagaccgtggttactgagctggatctcacctaccgtcgtcgattctccgacctcaagattcctgaagcctacgaatctttgatcttggatgctctcaaaggagaccactccaactttgtccgtgacgacgagctcgatgctagctggaggatgttcactcctctgctccactacctcgatgacaacaaggagatcatccctatggaatacccctacggttcccgcgggccctccgttcttgacgacttcaccgcttcctatggctacaagttcagtgatgctgcgggataccagtggccgttgacgcacactacgcctaacaggctgtag

SEQ ID NO: 2856 - protein, 511 aa, Emericella nidulans
MSATIARAEEQQNGSTVELKDDTVIVVLGASGDLAKKKTFPALFGLFRNKFLPKGIKIVGYARTQMDHNEYLKRVRSYIKTPTKEIEEQLNSFCELCTYISGQYDQDDSFKNLAKHLEEIEKNQKEQNRVFYMALPPSVFITVSEQLKRNCYPKNGVARIIVEKPFGKDLQSSRDLQKALEPNWKEEEIFRIDHYLGKEMVKNILIMRFGNEFFNATWNRHHIDNVQITFKEPFGTEGRGGYFDEFGIIRDVMQNHLLQVLTLLAMERPISFSAEDIRDEKVRVLRAMDPIQPKDVIIGQYGRSLDGSKPAYKEDDTVPQDSRCPTFCALVAHIKNERWDGVPFIMKAGKALNEQKTEIRIQFKDVTSGIFKDIPRNELVIRVQPNESVYIKMNSKLPGLSMQTVVTELDLTYRRRFSDLKIPEAYESLILDALKGDHSNFVRDDELDASWRMFTPLLHYLDDNKEIIPMEYPYGSRGPSVLDDFTASYGYKFSDAAGYQWPLTHTTPNRL

SEQ ID NO: 2857 - DNA, 1957 bp, Leuconostoc mesenteroides
  CDS (206)..(1666)
tatctaaaagctacttcatttgttgtactcctcatttgcttttttattattgtgtaacgaacaggtgataaggtcaagtgcaaaatttcacgacagatatccaattttagatgataaacgtttaaaaaacgctgaaaacggttactttttccgctattttgcgctataatgaaaagtgaatttaactaaaaataaggggtacatcatggtttcagaaatcaagacgttagtaactttctttggtggcactggtgacttggccaagcgtaagctttacccatcagttttcaatctttataaaaaaggctacttgcaaaagcattttgccattgttggaacggcccgtcaagccctcaatgatgacgaattcaaacaattggttcgtgattcaattaaagatttcactgacgatcaagcacaagctgaggcgttcatcgaacatttctcataccgtgcacacgacgtaacagatgctgcttcatacgctgttttaaaagaggcgattgaagaagctgccgacaaatttgatatcgatggcaaccgcattttctatatgtcagttgcgccacgtttctttggtacaattgccaaatatcttaagtcagaaggcctactagctgacactggttacaaccgtttgatgattgaaaagcctttcggtacatcatatgacacagctgccgaactccaaaatgacttggaaaacgcatttgatgataaccaactattccgtattgaccactaccttggtaaggaaatggttcaaaacattgctgcccttcgctttggtaacccaattttcgatgctgcttggaacaaggattacatcaagaacgttcaagtaacattgtcagaagtcttgggtgtcgaagaacgtgccggctactatgacacagccggtgcattgcttgacatgattcaaaaccacaccatgcaaattgttggttggttagccatggaaaaaccagaatcattcactgacaaagacattcgtgccgctaaaaacgcagcctttaatgctttgaagatctatgatgaagcagaagttaacaaatactttgttcgtgcacaatatggtgccggtgattcagctgacttcaagccataccttgaagaattagacgtacctgctgattctaaaaacaataccttcatcgccggcgaattgcaatttgatttgccacgttgggagggtgtcccattctatgtccgttcaggtaagcgcttagctgctaaacagacacgggttgatatcgtctttaaggctggcacgtttaactttggttcagaacaagaagcacaagaagctgtcttgtcaattatcattgatccaaagggtgctatcgaattgaagttgaacgccaagtcagttgaagatgctttcaacacacgtacaattgacttaggttggactgtatctgacgaagataagaagaacacgccagaaccatacgaacgtatgattcacgacactatgaatggtgatggctctaacttcgctgactggaatggcgtttcaatcgcttggaagttcgttgatgctatttcagccgtttataccgcagataaagcaccacttgaaacttacaagtcgggctcaatgggtcctgaagcatccgataaattattggctgccaatggtgatgcttgggtgtttaaaggttaattaaagccccaaaaaaacgatcgattgtgatcgtttttttattgcccaatttacacagtttcatcaagaatccgttttgtttcacgaaaaacagccgctaagtttttgtactgatccgcatgcagcacaacagtaacaaagtgatgctttttgtacgtaaagaacccaacaaatgacacaccagatttaacagaaacacctaatttaccacccgtgacctgatattttgtctgactaaaatagttattcattagtgaaaaaatttgacgcttgagttgtgccattgaaagt

SEQ ID NO: 2858 - protein, 486 aa, Leuconostoc mesenteroides
MVSEIKTLVTFFGGTGDLAKRKLYPSVFNLYKKGYLQKHFAIVGTARQALNDDEFKQLVRDSIKDFTDDQAQAEAFIEHFSYRAHDVTDAASYAVLKEAIEEAADKFDIDGNRIFYMSVAPRFFGTIAKYLKSEGLLADTGYNRLMIEKPFGTSYDTAAELQNDLENAFDDNQLFRIDHYLGKEMVQNIAALRFGNPIFDAAWNKDYIKNVQVTLSEVLGVEERAGYYDTAGALLDMIQNHTMQIVGWLAMEKPESFTDKDIRAAKNAAFNALKIYDEAEVNKYFVRAQYGAGDSADFKPYLEELDVPADSKNNTFIAGELQFDLPRWEGVPFYVRSGKRLAAKQTRVDIVFKAGTFNFGSEQEAQEAVLSIIIDPKGAIELKLNAKSVEDAFNTRTIDLGWTVSDEDKKNTPEPYERMIHDTMNGDGSNFADWNGVSIAWKFVDAISAVYTADKAPLETYKSGSMGPEASDKLLAANGDAWVFKG

SEQ ID NO: 2859 - DNA, 2055 bp, Macropus robustus
  CDS (94)..(1641)
attaacccgagcgcagcagcgggccctgtcgtctcccttcctctgccggatcagcaagtgacccaggatccggaggcgaagactgaaaacaacatggcagagcaggtggcactgagccggacccaagtgtgtggaattctccgggaagaattgtaccagggtgatgccttccaccagtcagacacacacatattcatcatcatgggagcctcgggtgacttagcaaagaagaaaatctaccctacaatctggtggctgttccgtgatgggcttctccccgaagacaccttcattgtgggctatgctcgctcaaacctcactgtggatgacatccgaaagcaaagcgagccctattttaaggccaccccggaagagaacctgaagctggaggagttcttctctcgaaattcctacgtggcaggccaatacgatgagccagcttcctttcagcgtctcaatgcccacatgaactccctgcatcatgggtcacaggccaaccgcctcttctacctggccttgccacccaccgtctatgaagctgtcactaagaacatcaaagagacttgcatgagccagataggttggaaccgggtcattgtggagaagccttttggaaaagatcttcagagctctgacaaactgtcaaaccacatttcctcactcttccatgaggaccagatctaccggatcgatcactacctgggcaaggaaatggtacagaacctcatggtgctaagatttggtaacaggatctttggaccgatctggaaccgagacaacattgcctgtgtcatcttcaccttcaaggagccctttggcactcttggccgagggggctattttgatgagtttgggatcattcgagacgtgatgcagaaccacctcttgcagatgctttgcctagtggccatggaaaaacctgcctccaccaactctgatgatgtccgggatgaaaaggtgaaggtcctgaagtgtatctcagaggtgagagcaactgatgtggtcttgggccagtatgtggggaacccagatggagaaggggaagccaccaaaggctatttggatgatcccacagtgccccggggctccaccactgccacctttgctgctgtggtcctctatgtggaaaatgaaagatgggacggagtcccctttatcctccgctgtggaaaggccctgaatgaacgcaaagcagaagtgaggttacagttccgggatgtggctggtgatatcttccagcgccagtgtaagcggaatgagctggtgatccgcgtgcagcccaacgaggctgtctacaccaagatgatgaccaagaagccagggatgttcttcaaccccgaagagtcagagctggacctgacctatggcaacagatacaaagatgtgaagctgcccgatgcttatgagcgccttatcctggatgtcttctgtggaagccagatgcactttgtgcgcagtgatgagcttcgggaagcctggaggatctttacgcccctgctgcaccacattgagaaggagaagacccagcccattgcctacgtctatggcagccgaggccctcctgaagcagacgaactgatgaagagagtgggcttccagtatgagggcacctacaagtgggtaaacccccacaagctctgaggcagcctggcagcccactagcttcctcccccttgtttcccatccccagcctccatgctcatccttttagccctttggcctcacttagggtctgtctctctgcccatcccctgttcatgttctactcaggcagaaactcttgggaccacaagaccaggagcccgtccctgggggagatggagggccccattgagagattccctgggccctttccactcccagaaggcccggggacccggccaccaacttctcagccctgtttacagctgcattaggtctgccattcagcagctaccagatacttcctcctgctttgagctcccagagccagctacattccaatagcagtcgctggaggtgtcctctgtttcccttcaggacagcagctttataaatacagagaattaccagtca

SEQ ID NO: 2860 - protein, 515 aa, Macropus robustus
MAEQVALSRTQVCGILREELYQGDAFHQSDTHIFIIMGASGDLAKKKIYPTIWWLFRDGLLPEDTFIVGYARSNLTVDDIRKQSEPYFKATPEENLKLEEFFSRNSYVAGQYDEPASFQRLNAHMNSLHHGSQANRLFYLALPPTVYEAVTKNIKETCMSQIGWNRVIVEKPFGKDLQSSDKLSNHISSLFHEDQIYRIDHYLGKEMVQNLMVLRFGNRIFGPIWNRDNIACVIFTFKEPFGTLGRGGYFDEFGIIRDVMQNHLLQMLCLVAMEKPASTNSDDVRDEKVKVLKCISEVRATDVVLGQYVGNPDGEGEATKGYLDDPTVPRGSTTATFAAVVLYVENERWDGVPFILRCGKALNERKAEVRLQFRDVAGDIFQRQCKRNELVIRVQPNEAVYTKMMTKKPGMFFNPEESELDLTYGNRYKDVKLPDAYERLILDVFCGSQMHFVRSDELREAWRIFTPLLHHIEKEKTQPIAYVYGSRGPPEADELMKRVGFQYEGTYKWVNPHKL

SEQ ID NO: 2861 - DNA, 1530 bp, Nostoc punctiforme
  CDS (1)..(1530)
atggttagtctgctagaaaatcccttgcgcgttggtctgcaacaacaagggatgcctgaaccccagattatagttatctttggcgcttctggtgatctcacctggcgcaaactagtgccagcactttacaaattgcggcgagaacggcgcattccaccagaaactactattgttggcgtagcacgtcgagaatggagccatgaatacttccgcgaacaaatgcagaagggcatggaagaggcacatcctgatgtcgatttaggggaactctggcaagacttctctcaaggtctcttctacagtcctggagatatagacaaccctgaaagctaccagaaactaaaaaccttactgagtgaattagacgaaaaacggggcacgcgaggcaatcgcatgttctacctatcggttgccccttcattctttcccgaagcaattaagcagctaggaagcggcgggatgctagaagatccctacaaacatcgtctagtaattgaaaaaccctttggtcgggacttggcttctgcccaaagccttaaccaagtggtacagaaatattgcaaagagcatcaagtatatcgtattgaccactacttgggtaaagaaacagtccagaatttgctggtgttccgctttgccaatgcgatttttgaacccttgtggaatcgtcaattcgttgaccacgtgcaaattaccgtagcagaaaccgtgggcgtagaagaccgggctggctactatgaaagcgccggcgcactgcgggatatgttgcaaaatcacctcatgcaactttactgcttaacggcgatggaagcacccaacgcaatggatgccgacagcatccgcacagaaaaagtgaaggtactccaagctactcgtttagctgatgttcacaatctgtcgcggtcagcagtccgtgggcaatacagtgctggctggatgaaaggtcaagcagtgccaggatatcgcacagaaccaggcgttgaccccaactccaccacacccacttatgtagcgatgaagtttttggtggataactggcgctggaaaggtgttcctttctacttgcggactggaaagcggatgccgaaaaaagtgagtgaaattgcaattcacttccgcgaagttccatctcggatgttccaatctgccgctcaacagacaaacgccaatattttgacgatgcggattcagccaaatgaaggtatttccctgcgttttgatgtcaaaatgccgggggcagaattccgcacccgttccgttgatatggactttagttatggttcctttggcatccaagcaacatccgatgcctacgatcgcttattccttgattgtatgatgggcgatcaaacattgttcacacgtgcagatgaagtagaagcagcttggcaagtagtgacaccagccctttccgtttgggatgcacccgccgatcctactactattccccagtacgaagccgggacttgggagccagaacaagcagaactcttaattaaccaggatggccgtcgctggcgcagactctaa

SEQ ID NO: 2862 - protein, 509 aa, Nostoc punctiforme
MVSLLENPLRVGLQQQGMPEPQIIVIFGASGDLTWRKLVPALYKLRRERRIPPETTIVGVARREWSHEYFREQMQKGMEEAHPDVDLGELWQDFSQGLFYSPGDIDNPESYQKLKTLLSELDEKRGTRGNRMFYLSVAPSFFPEAIKQLGSGGMLEDPYKHRLVIEKPFGRDLASAQSLNQVVQKYCKEHQVYRIDHYLGKETVQNLLVFRFANAIFEPLWNRQFVDHVQITVAETVGVEDRAGYYESAGALRDMLQNHLMQLYCLTAMEAPNAMDADSIRTEKVKVLQATRLADVHNLSRSAVRGQYSAGWMKGQAVPGYRTEPGVDPNSTTPTYVAMKFLVDNWRWKGVPFYLRTGKRMPKKVSEIAIHFREVPSRMFQSAAQQTNANILTMRIQPNEGISLRFDVKMPGAEFRTRSVDMDFSYGSFGIQATSDAYDRLFLDCMMGDQTLFTRADEVEAAWQVVTPALSVWDAPADPTTIPQYEAGTWEPEQAELLINQDGRRWRRL

SEQ ID NO: 2863 - DNA, 1476 bp, Rhizobium meliloti
  CDS (1)..(1476)
atgagcagccagatcattcccgtcgaaccgtttgactatgtggtgttcgggggcaccggcgatcttgcggagcgcaagctgctgccggcactttatcaccgtcagatggaaggtcagttcacggaaccgacgcggatcatcggcgcatcgcgcgcgagcctttcccatgacgaataccgcaggttcgcgagcgacgccctgaaagaacacctgaagtccggggagttcaacgaggcggaagtcgagaaattcacctcgcgtctctattacgtctccgtcgacgccaagtccgagcagggctgggacgatctgaagaagctcctggaagagggcaaggatcgtacccgtgccttctatctcgccgtcgggccggcgattttcagcgacatttccgaaaagatccgcgatcacaagcttatcacgaggaacacccgcatcgtcgtcgagaagccgatcggccgcgacctcgcttccgcgacggagctcaacgacacgatcggcaaggtcttccgcgaagagcagattttccgcatcgaccactatctcggcaaggaaacggtgcagaatctgatggcactgcgcttcgccaacgcactttacgagccattgtggaattccgcccacatcgaccacgtgcagatcaccgtttccgaagccgtcgggctcgagaatcgcgcaggctactacgacaaggcgggcgcgctgcgcgacatggtgcagaaccatatcctccagcttctctgtttcgtcgcaatggaggcgccgacgtcgatggacgcggaggccgtgcgcgacgagaagctcaaggtgcttcgcgcgctgaagccgatcaccgcctccaatgtcgagcaggtgacggtccggggccaataccgcgcgggcgcatcgtccggaggcccggtcaagggctatctcgaagagctcgaaggaggcgtttccaacacggaaaccttcgtcgcgatcaaggccgagatcagcaattggcgctgggcaggcgtgcccttctatctgcgtaccggaaagcgcatggcgggccgcatgtcggagatcgtcatcaccttcaagcagatcccgcactcgatcttcgatcagagtgccggccggatttcggccaaccagctgatgatccgcctgcagccgaatgaaggcgtcaagcagtcgctgatgatcaaggatcccggaccgggcggcatgcggctgaggaacgtgcccctcgacatgagcttcgccgaggccttcgcggtccgcaatgccgatgcctatgaacgcctgttgctggacgtcatccgcaacaaccagaccctgttcgtgcgccgcgacgaagtggaagcggcctggcaatggatcgacccgatcctcaaggcctgggaagcaaccggacagcaggtgcaaggatataccgccggaacctggggcccgagccagtcgatcgcgctgatcgagcgcgacggccgcacttggaacgatgcgatctag

SEQ ID NO: 2864 - protein, 491 aa, Rhizobium meliloti
MSSQIIPVEPFDYVVFGGTGDLAERKLLPALYHRQMEGQFTEPTRIIGASRASLSHDEYRRFASDALKEHLKSGEFNEAEVEKFTSRLYYVSVDAKSEQGWDDLKKLLEEGKDRTRAFYLAVGPAIFSDISEKIRDHKLITRNTRIVVEKPIGRDLASATELNDTIGKVFREEQIFRIDHYLGKETVQNLMALRFANALYEPLWNSAHIDHVQITVSEAVGLENRAGYYDKAGALRDMVQNHILQLLCFVAMEAPTSMDAEAVRDEKLKVLRALKPITASNVEQVTVRGQYRAGASSGGPVKGYLEELEGGVSNTETFVAIKAEISNWRWAGVPFYLRTGKRMAGRMSEIVITFKQIPHSIFDQSAGRISANQLMIRLQPNEGVKQSLMIKDPGPGGMRLRNVPLDMSFAEAFAVRNADAYERLLLDVIRNNQTLFVRRDEVEAAWQWIDPILKAWEATGQQVQGYTAGTWGPSQSIALIERDGRTWNDAI

SEQ ID NO: 2865 - DNA, 2853 bp, Homo sapiens
  CDS (273)..(2648)
tgaggcctgaggcctggggcgggtggcggccgggctggccttggcctcgcgccttcccctgcggccgccgcgggctccgcgggcggtatcggagtgtcgtgcggcgcgtggccgcgtgacacgcgcacttgtcggagtgacgggccctgcggaagaggaggtgcggcccagggcgcaggggagccctcgggagcgggcccggccctcagcgccgccccggccgtgtcccggaggagcggcctgcgccgccgcgcgagaggaagcacccaggcatgtggaatatgctcatagtggcgatgtgcttggcccttctgggctgcctgcaagcccaggagctccagggacatgtctccataatcctgctgggagcaactggggacctggctaagaagtacttatggcagggactgttccagctgtacctggatgaagcggggaggggtcacagttttagcttccatggagctgctctgacagcccccaagcagggtcaagagctcatggccaaggccctggaatccctctcctgccccaaggacatggcacccagtcactgtgcagagcacaaggatcagttcctgcagctgagccagtaccgccaactgaagacggccgaggactatcaggccctgaacaaggacatcgaggcacagctccagcacgcaggcctccgggaggctggcaggatcttctacttctcagtgccacccttcgcctatgaagacattgcccgcaacatcaacagtagctgccggccaggcccgggcgcctggctgcgggttgtccttgagaaaccctttggccatgaccacttctcagcccagcagctggccacagaactcgggacctttttccaggaggaggagatgtaccgggtggaccattacttaggcaagcaggctgtggcgcagatcctgcctttccgagaccagaaccgcaaggctttggacggcctctggaaccggcaccatgtggagcgggtggagatcatcatgaaagagaccgtggatgctgaaggccgcaccagcttctatgaggagtacggtgtcattcgcgacgtcctccagaaccatctgacggaggtcctcaccctcgtggccatggagctgccccacaatgtcagcagtgcggaggctgtgctgcggcacaagcttcaggtcttccaggcgctgcggggcctgcagaggggcagtgccgtcgtgggccagtaccagtcttacagtgagcaggtgcgcagagagctgcagaagccagacagcttccacagcctgacgccgaccttcgcaggtgtcctagtgcacattgacaaccttcgctgggagggcgtgcctttcatcctgatgtctggcaaagccttggacgagagagtgggctacgctcggatcttgttcaagaaccaggcctgctgtgtgcagagcgaaaagcactgggccgcggcgcagagccagtgcctgccccggcagctcgtcttccacatcggccatggcgacctgggcagccctgccgtgctggtcagcaggaacctgttcaggccctccctgccctccagctggaaggaaatggagggaccacctgggctccgccttttcggcagccctctgtccgattactacgcctacagccctgtgcgggagcgggacgcccactccgtcctcttatcccatatcttccatggccggaagaatttcttcatcaccacagagaacttgctggcctcctggaacttctggacccctctgctggagagcctggcccataaggccccacgcctctaccctggaggagctgagaatggccgtctgttggactttgagttcagtagcggccggttgttcttttcccagcagcagccggagcagctggtgccagggccagggccggccccaatgcccagtgacttccaggtcctcagggccaagtaccgagagagcccgctggtctccgcctggtccgaggagctgatctctaagctggctaatgacatcgaggccaccgctgtgcgagccgtgcggcgctttggccagttccacctggcactgtcggggggctcgagccccgtggccctgttccagcagctggccacggcgcactatggcttcccctgggcccacacgcacctgtggctggttgacgagcgctgcgtcccactctcagacccggagtccaacttccagggcctgcaggcccacctgctgcagcacgtccggatcccctactacaacatccaccccatgcctgtgcacctgcagcagcggctctgcgccgaggaggaccagggcgcccagatctatgccagggagatctcagccctggtggccaacagcagcttcgacctggtgctgctgggcatgggtgccgacgggcacacagcctccctcttcccacagtcacccactggcctggatggcgagcagctggtcgtgctgaccacgagcccctcccagccacaccgccgcatgagccttagcctgcctctcatcaaccgcgccaagaaggtggcagtcctggtcatgggcaggatgaagcgtgagatcaccacgctggtgagccgggtgggccatgagcccaagaagtggcccatctcgggtgtcctgccgcactccggccagctggtgtggtacatggactacgacgccttcctgggatgagggcgcctgtgccccttgcccgcttcgctcctgtgctttccttcgcccgtgtcttccctcccttctcggccccgccacctgcccagcgtgccctggctctccagaaccttctatcccacagtcaggccccagagagggcaggacaagccttgtcccgatgcctttgaccggcagctctgtgtattggtggatagatgcagaaaca

SEQ ID NO: 2866 - protein, 791 aa, Homo sapiens
MWNMLIVAMCLALLGCLQAQELQGHVSIILLGATGDLAKKYLWQGLFQLYLDEAGRGHSFSFHGAALTAPKQGQELMAKALESLSCPKDMAPSHCAEHKDQFLQLSQYRQLKTAEDYQALNKDIEAQLQHAGLREAGRIFYFSVPPFAYEDIARNINSSCRPGPGAWLRVVLEKPFGHDHFSAQQLATELGTFFQEEEMYRVDHYLGKQAVAQILPFRDQNRKALDGLWNRHHVERVEIIMKETVDAEGRTSFYEEYGVIRDVLQNHLTEVLTLVAMELPHNVSSAEAVLRHKLQVFQALRGLQRGSAVVGQYQSYSEQVRRELQKPDSFHSLTPTFAGVLVHIDNLRWEGVPFILMSGKALDERVGYARILFKNQACCVQSEKHWAAAQSQCLPRQLVFHIGHGDLGSPAVLVSRNLFRPSLPSSWKEMEGPPGLRLFGSPLSDYYAYSPVRERDAHSVLLSHIFHGRKNFFITTENLLASWNFWTPLLESLAHKAPRLYPGGAENGRLLDFEFSSGRLFFSQQQPEQLVPGPGPAPMPSDFQVLRAKYRESPLVSAWSEELISKLANDIEATAVRAVRRFGQFHLALSGGSSPVALFQQLATAHYGFPWAHTHLWLVDERCVPLSDPESNFQGLQAHLLQHVRIPYYNIHPMPVHLQQRLCAEEDQGAQIYAREISALVANSSFDLVLLGMGADGHTASLFPQSPTGLDGEQLVVLTTSPSQPHRRMSLSLPLINRAKKVAVLVMGRMKREITTLVSRVGHEPKKWPISGVLPHSGQLVWYMDYDAFLG

SEQ ID NO: 2867 - DNA, 1970 bp, Arabidopsis thaliana
  CDS (60)..(1790)
aaaaaacaatggcatcatcatcatcatcacatttgttttgacgctccaagaaaatttgcatggcgacacattctatgatcattccttctccttcttcttcttcctcgtctctcgctactgctgcgtctccgtttaaagagactctaccactctttagtagatctctcacattcccgagaaaatccttgttttctcaggttcgcttgagattcttcgccgagaaacattctcagcttgatacttcaaatgggtgtgccactaatttcgcttctttacaagattctggagatcaacttacagaggaacatgttacaaaaggagagtctactcttagtattacagttgttggagcgtcaggggacttagccaagaagaagatatttcctgcattgtttgctctcttttatgagggttgtcttcctcaggacttttctgtttttggttatgctcggactaaactcactcatgaagagcttcgtgacatgattagtagtactttaacttgccggattgatcagagggaaaaatgtggggataagatggagcagttcttgaaaagatgcttttaccattcgggtcagtataactcggaagaggattttgcggaactaaacaagaagctcaaagagaaagaggcaggaaagatatcaaacaggctgtactatttgtcgatacccccaaacatattcgttgatgtggttaggtgtgcaagtcttagagcctcctcagagaatggctggacaagggtcattgtggaaaagccatttggtcgtgactctgaatcatccggagagttaactagatgtctgaaacagtatcttacagaggagcaaatcttcaggattgatcactatttgggaaaggagcttgttgagaacctttcagtgctccgattctcaaatcttgttttcgagcctctgtggtcaagaaattacatacgcaacgttcagctgattttttctgaggatttcggaacagaagggcgtggaggttactttgatcaatatggaatcatacgagacatcatgcaaaaccatctcttgcaaatacttgcactttttgcaatggagacgccagtgagcttagatgctgaggacataagaagtgaaaaggtgaaagttttgagatcaatgaaaccgttgcggcttgaagatgtggttgttggtcaatacaaaggccataacaagggaggaaaaacttatccaggttatacagacgatccaacggttccaaatcacagtctcactcctacatttgctgcagcagccatgttcatcaacaatgcgagatgggacggtgttccttttcttatgaaagctggaaaagctctccataccagaggagcagagatcagagttcagttcagacatgtcccaggaaacttgtacaagaaaagttttgctactaatttagacaatgcaacaaatgaactagtgattagagttcagcctgatgaagggatatacctgaggatcaacaacaaagttcctggtcttggaatgagactagatcgcagcgaccttaaccttctatatcgatccaggtatccaagagagataccagatgcatatgaaagactgcttctcgatgcaatcgaaggagagaggaggttgtttatcagaagtgatgagctagatgcagcatgggatctattcacaccggctttgaaggaactagaggagaagaaaatcattcctgagctctatccatatggaagcagaggtcctgttggtgcacattaccttgcatctaagtacaatgtgagatggggagatcttggagaagcttaagctttcgacagaaacaatatgatttggtgttaatatgagtaaactaacttgtcgatattatcaatgcgtagataaatccttgttaccaaaacttgctttttctctgacattttttgattgtttttggttctaaatcgagcatttcggaggaatgtaccaaaactcttgcaggaatagacc

SEQ ID NO: 2868 - protein, 576 aa, Arabidopsis thaliana
MATHSMIIPSPSSSSSSLATAASPFKETLPLFSRSLTFPRKSLFSQVRLRFFAEKHSQLDTSNGCATNFASLQDSGDQLTEEHVTKGESTLSITVVGASGDLAKKKIFPALFALFYEGCLPQDFSVFGYARTKLTHEELRDMISSTLTCRIDQREKCGDKMEQFLKRCFYHSGQYNSEEDFAELNKKLKEKEAGKISNRLYYLSIPPNIFVDVVRCASLRASSENGWTRVIVEKPFGRDSESSGELTRCLKQYLTEEQIFRIDHYLGKELVENLSVLRFSNLVFEPLWSRNYIRNVQLIFSEDFGTEGRGGYFDQYGIIRDIMQNHLLQILALFAMETPVSLDAEDIRSEKVKVLRSMKPLRLEDVVVGQYKGHNKGGKTYPGYTDDPTVPNHSLTPTFAAAAMFINNARWDGVPFLMKAGKALHTRGAEIRVQFRHVPGNLYKKSFATNLDNATNELVIRVQPDEGIYLRINNKVPGLGMRLDRSDLNLLYRSRYPREIPDAYERLLLDAIEGERRLFIRSDELDAAWDLFTPALKELEEKKIIPELYPYGSRGPVGAHYLASKYNVRWGDLGEA

SEQ ID NO: 2869 - DNA, 2112 bp, Arabidopsis thaliana
  CDS (142)..(1932)
gatctcaaaaggttctcttatttgcagtatcgccccttaaatcctttttcgatgtttcttatgttcatcattattttttaactaaaaatctcatctttagacaacaattcaatttgccatctctctgttgtatctttgacgatggcggctttgtcttcctccgtcaccacccgatcatatcattccggttatttggcttctttctcaccggttaacggtgaccgacatcgatcactctcgttcctgtctgcttctcctcaaggattgaatcctcttgacctctgtgttagattccagaggaagtctggtcgtgcttctgtctttatgcaagatggtgcaatagtcactaattcaaattcatcagagagtaaaacttctcttaagggattgaaagatgaggtgctatcagctttatctcaagaagcagccaaggttggagtagaatctgatggtcaaagccagtcaacagttagtattacggtggttggagcctctggtgatcttgctaagaagaagattttcccggctcttttcgccctttactatgaaggttgtctccctgagcattttacaatatttggatattctaggagtaagatgacagatgttgaacttagaaacatggtcagcaaaaccctcacttgcagaattgataagagggcaaactgtggtgaaaagatggaagaatttctcaagagatgtttttaccattctggtcagtatgattctcaggaacattttactgaattggataagaagctcaaggaacatgaggctggaagaatctcaaaccgcctcttttatttgtctatccctccaaatatatttgtagatgctgtgaaatgtgcaagcacttctgcttcatctgtcaatggatggactagggttatcgtcgagaaaccttttggtcgagattctgaaacctcggctgctttaacgaaatccctcaagcagtatttggaggaagatcaaatttttaggatagaccattacctaggaaaggagctagtcgagaacttatctgttcttcgattctcaaaccttatatttgagccgctatggtcaaggcagtacataaggaacgtgcaatttatattttctgaggatttcggcactgaaggacgtggagggtactttgacaattacggaataataagagatataatgcagaatcatctgcttcaaatcttagccctctttgccatggaaacgcctgttagtttggatgcagaggatatcagaaatgaaaaggttaaggtgttacgttcaatgaggccaattcgagttgaagatgtggtaataggacaatacaagagccacacaaagggaggagtcacatatcctgcctacaccgatgataaaactgtaccaaaaggtagtctgactccaacatttgcagctgctgctcttttcatcgacaatgcaagatgggacggtgtgccctttttaatgaaagcgggcaaagcactacacaccaggagtgcagagataagggtgcagttcaggcatgttccggggaatttgtataaccggaatactggttctgatcttgatcaagctacaaatgagcttgtgatccgtgtccaaccagatgaagcaatctatttgaaaatcaacaacaaggtccctggtttaggaatgagattagatcgcagtaacttgaatcttctatactcagcaaggtattcaaaggagataccagatgcatatgagaggcttctgttagatgcaatagaaggagaaagaagattgttcataagaagtgacgagcttgatgcagcttggtcgctattcactccattgcttaaagagattgaagagaagaagagaatccctgagtactatccttatggtagccgtggtcctgttggtgctcattatctagctgctaaacacaaggtgcaatggggtgacgtcagtattgaccagtaaaacattttcttgtttgtattctcttttttttacattgataatagatttatctaggattcaagctttttctacgcctctttttacagctttaatttgtgcaatttggttatgtaccatttaataaataaataaaccaaaggggtttctcttattctctacaaggaaaatgtcttcttttta

SEQ ID NO: 2870 - protein, 596 aa, Arabidopsis thaliana
MAALSSSVTTRSYHSGYLASFSPVNGDRHRSLSFLSASPQGLNPLDLCVRFQRKSGRASVFMQDGAIVTNSNSSESKTSLKGLKDEVLSALSQEAAKVGVESDGQSQSTVSITVVGASGDLAKKKIFPALFALYYEGCLPEHFTIFGYSRSKMTDVELRNMVSKTLTCRIDKRANCGEKMEEFLKRCFYHSGQYDSQEHFTELDKKLKEHEAGRISNRLFYLSIPPNIFVDAVKCASTSASSVNGWTRVIVEKPFGRDSETSAALTKSLKQYLEEDQIFRIDHYLGKELVENLSVLRFSNLIFEPLWSRQYIRNVQFIFSEDFGTEGRGGYFDNYGIIRDIMQNHLLQILALFAMETPVSLDAEDIRNEKVKVLRSMRPIRVEDVVIGQYKSHTKGGVTYPAYTDDKTVPKGSLTPTFAAAALFIDNARWDGVPFLMKAGKALHTRSAEIRVQFRHVPGNLYNRNTGSDLDQATNELVIRVQPDEAIYLKINNKVPGLGMRLDRSNLNLLYSARYSKEIPDAYERLLLDAIEGERRLFIRSDELDAAWSLFTPLLKEIEEKKRIPEYYPYGSRGPVGAHYLAAKHKVQWGDVSIDQ

SEQ ID NO: 2871 - DNA, 2161 bp, Arabidopsis thaliana
  CDS (90)..(1967)
aaacttgcactcgtcttccactttgatccacttaaagcagctttaaagctttgaacatgtttagctataatccctgaggaactatcctcatgtctctctccagttgcttgcttcccttttctcaatcagcgacggctccgtcttcctccgtctgctcttgccatctcgccgcctctttttctaattttccggtttcgtcaagagactatagtttctccagaagtggaagccttgttctcaacggaggaggctcgaatctctgccggagattctgtggtttgaaactgtggatacttaagagcttgaatcgtagacaaggcaacaacagaaaacatcagcctgtaaacgagcttacaacacactcaaagcacactttcctcagcgatgatgaacgaggttttgctgaagaaactagagctgaagatttacgaccagaagagaatattctgggaacggatttgaatgatgggtttcacaatgttggagacttaccacctgtgtcaaaacaactctcggatgatctttcagatgttcgaagaagggcctcactttgcattgctgttgtaggagccactggtgagctagcaagagggaagattttcccggcattgtttgcgttgtattatagcggctaccttcctgaggatgttgctatatttggggtttcaagaaagaatctgacagatgaagacctcagatccatcattgcatcaacgctgacttgccgtgttgatcatcaggagaattgtgggggcaagatggatgcatttcagagtagaacatactatatcaatggaggttataataacagggatgggatgtcccgacttgccgagagaatgaaacagattgagggagaatcagaagcaaatagaatcttttacctctcagtacctcaagaagctctggtggatgtggcatgcaccattggagataacgctcaggcaccacgaggctggactcgaataatagttgagaaaccttttggttttaactcacattcgtctcatcagttaacaaagtcacttctctctaagtttgaagagaagcaaatctacaggatagatcacatgttaggaagaaacctcattgaaaatctgacagtgttaaggttttcaaatctagtttttgaaccactatggaacagaacatacatacgcaatatacaggttattatatcagaatcaattgcgcaaacagaaaagttttctgatggatatggaataatacgggacatagtgcacagccatatacttcagacaatcgcattacttgccatggaacctccgataagtctcgatggtgaagatatccgaaatgaaaaggtgaaggttttaagatcaattcgcaagatagacccgcgtgatgtcatccttggccagtataaatccagttcccgagacaagaacggtgtgatcttgaacggtgtagaccctacatattgtgcagcagccttgtatattgataatgcacgttgggatggtgtacctttccttgtaagagttggcactggcctcattaaacacagagtggagattcatgtgcaattccggcatgttcctggaaacctataccgagaaaatattggaataaacatagatttggggacaaatgagcttattctacgtgacgaacctgatgaggccatcctggtgaaaatcaacaacaaggttcctggtttaggtcttcagctagacgcttctgaacttaacttgctctataaagacaggtataaaaccgaagtaccagactcatatgaacacctaattcatgatgtaattgacggagacaatcatctgttcatgagaagcgatgaggttgcagcagcatggaacattcttagtccggttctagaagagatagacaagcatcacacagctccggagttgtatgaatttggtggacgaggaccagttgcggcatactatctttgggccaagcacggtgtcccatgggcagatgactgaagaagaaacatagatgcagcaacaaacaaatgagagtgattctgaatggttattgtgaagtgtgtttgtttagcttgaagctgtgccattccctgtagactgtacatatgtacacatgtatgtcatgttgctatatgaatgtccatcatggtggggtccataatagtgttgaaaagccaaaaaaaaaaaaaaaa

SEQ ID NO: 2872 - protein, 625 aa, Arabidopsis thaliana
MSLSSCLLPFSQSATAPSSSVCSCHLAASFSNFPVSSRDYSFSRSGSLVLNGGGSNLCRRFCGLKLWILKSLNRRQGNNRKHQPVNELTTHSKHTFLSDDERGFAEETRAEDLRPEENILGTDLNDGFHNVGDLPPVSKQLSDDLSDVRRRASLCIAVVGATGELARGKIFPALFALYYSGYLPEDVAIFGVSRKNLTDEDLRSIIASTLTCRVDHQENCGGKMDAFQSRTYYINGGYNNRDGMSRLAERMKQIEGESEANRIFYLSVPQEALVDVACTIGDNAQAPRGWTRIIVEKPFGFNSHSSHQLTKSLLSKFEEKQIYRIDHMLGRNLIENLTVLRFSNLVFEPLWNRTYIRNIQVIISESIAQTEKFSDGYGIIRDIVHSHILQTIALLAMEPPISLDGEDIRNEKVKVLRSIRKIDPRDVILGQYKSSSRDKNGVILNGVDPTYCAAALYIDNARWDGVPFLVRVGTGLIKHRVEIHVQFRHVPGNLYRENIGINIDLGTNELILRDEPDEAILVKINNKVPGLGLQLDASELNLLYKDRYKTEVPDSYEHLIHDVIDGDNHLFMRSDEVAAAWNILSPVLEEIDKHHTAPELYEFGGRGPVAAYYLWAKHGVPWADD

SEQ ID NO: 2873 - DNA, 1936 bp, Arabidopsis thaliana
  CDS (136)..(1686)
ctaatttatctatataaaaattcgaactatcaaactccaccccataacaaaattctccaaactagtgaaaattttgtcgccaccgtcgcaggtttgttctgtattttggttagagtgttaaaaaactattggaagatgggttctggtcaatggcatatggagaagaggtctactttaaagaatgattcgtttgtaaaagaatacaatccagtcacggaaactgggagtctctctatcattgttcttggtgcttctggtgatcttgctaagaagaagacttttcctgcacttttcaatctatttcatcagggatttcttaatccagatgaagttcatatatttggatatgcaaggagtaagattactgatgaggagcttagagataaaatccgcggatatcttgttgatgagaagaatgcatctaagaaaacagaagctttgtccaagtttctaaagctgattaagtatgtgagtggaccttatgattctgaggaagggtttaagagattagacaaggcgattttggagcacgagatatctaaaaagactgctgaaggatcttcgaggagattgttttatcttgcacttcctccgtctgtataccctcctgtaagcaagatgatcaaggcatggtgcactaacaaatctgatcttggtggatggactaggattgttgttgagaaaccatttggaaaggatttggaatctgcagagcagctgagttctcagattggagccttgtttgaagaaccacagatttatcgtattgatcactatctgggaaaagagttagttcaaaacatgttggttcttcggtttgccaatcgcttgtttttgccactatggaaccgcgacaatattgcaaacgtacagatcgttttcagagaagattttggaactgaaggtcgcggtggatattttgatgaatacggaatcattcgtgatattattcaaaaccacttgctccaggttctttgccttgtcgccatggagaaaccaatctctcttaaacccgagcacatccgggatgagaaagtgaaggttcttcaatctgtgattcccataaaagatgaagaggtggttcttggacaatatgaaggatatagagatgatccaactgttccaaatgactcaaacactccaacgtttgccacaacaattcttcgcattaacaatgaaagatgggaaggtgttccttttatactgaaggccggaaaggcaatgagttcaaagaaggcagatattcgcattcagtttaaagatgttcctggcgacatattcaaatgtcaaaaccaagggaggaacgagtttgttatacgcttgcagccttcagaggccatgtacatgaagctaactgtgaagcaaccgggtctggagatgcaaaccgtgcagagtgaactagacctatcgtacaagcagcgttaccaagatgtctcaattccagaggcttacgaacgccttattcttgacacaatcagaggcgaccaacaacactttgttcgcagagacgaattaaaggcagcttgggaaatcttcactccactgcttcacaggatcgacaagggagaagtgaaatcggtcccatacaaacaaggtagccgtggcccagcggaagcagatcagctacttaagaaagctggttatatgcagactcatggctacatttggatccctcctacattgtaaatggtataatcatagagatgatgatgatgagtacacacaaaataagagggttttttttcttttttttccttgcttgctgaataaaaactcttcaccagtttggagtttgtttaagtgaatcttatgtatactagtgatcttcactaggacattgtttgtttatgccttgtagtttttgttgtactagtcccttgttttctttttttacataatgcaaaacagctttgtggaaaagctaattaaattaaga

SEQ ID NO: 2874 - protein, 516 aa, Arabidopsis thaliana
MGSGQWHMEKRSTLKNDSFVKEYNPVTETGSLSIIVLGASGDLAKKKTFPALFNLFHQGFLNPDEVHIFGYARSKITDEELRDKIRGYLVDEKNASKKTEALSKFLKLIKYVSGPYDSEEGFKRLDKAILEHEISKKTAEGSSRRLFYLALPPSVYPPVSKMIKAWCTNKSDLGGWTRIVVEKPFGKDLESAEQLSSQIGALFEEPQIYRIDHYLGKELVQNMLVLRFANRLFLPLWNRDNIANVQIVFREDFGTEGRGGYFDEYGIIRDIIQNHLLQVLCLVAMEKPISLKPEHIRDEKVKVLQSVIPIKDEEVVLGQYEGYRDDPTVPNDSNTPTFATTILRINNERWEGVPFILKAGKAMSSKKADIRIQFKDVPGDIFKCQNQGRNEFVIRLQPSEAMYMKLTVKQPGLEMQTVQSELDLSYKQRYQDVSIPEAYERLILDTIRGDQQHFVRRDELKAAWEIFTPLLHRIDKGEVKSVPYKQGSRGPAEADQLLKKAGYMQTHGYIWIPPTL

SEQ ID NO: 2875 - DNA, 1959 bp, Arabidopsis thaliana
  CDS (194)..(1741)
aacaaaaatctgaaaaaaattgtcgacaaaaaaaagtgggagaaaatgacggaagctaaaaccacaccaaccccttcctcctccattttgtactagtagttgaagcttccttcttcttcttcttcttcacctaatacttcttctctatctctctcgccaaagaatcgtacttcttctctcaggttttaaggagatgggatctggtcaatggcacgttgagaaaaggtctacgtttaggaatgattcgtttgtgagagaatatggtatagttccagaaactggttgtctttcaatcatagttcttggtgcttctggtgatcttgctaagaagaagacttttcctgctctttttaacttataccgtcagggatttctcaatccagatgaagttcatattttcgggtatgcgaggactaagatttctgatgaagagctgagagataggattcgtggatatcttgttgatgagaagaatgctgagcaagctgaagctttgtcaaagtttctgcagctgattaagtatgtgagtggcccttatgatgctgaggaggggttccagagattagacaaggcaatttcagagcacgaaatctccaaaaatagtactgaagggtcttctagaagactgttttatcttgcacttccaccgtctgtttatccttctgtatgcaagatgatcaagacgtgctgcatgaacaaatctgatcttggtggatggacacggattgttgtggagaagccatttggcaaggaccttgaatctgcagagcaactgagttctcagattggagagttatttgatgaatcacagatctatcgtatagaccattatcttgggaaggaattagttcaaaacatgttggtcctccggtttgcaaatcgctttttcttgccactttggaaccgtgacaatatcgagaacgtgcagattgttttcagggaagattttggaactgaagggcgtggcggatattttgacgaatatggaataatccgtgatattattcaaaaccatctgctacaggttctttgccttgttgccatggagaaaccaatatctcttaaacctgagcatatccgggatgagaaagtgaaggtgcttcaatctgtggttccgataagcgatgacgaggtagttcttggacaatacgaaggatatagggatgatgatactgttccaaacgactcaaacactccaacatttgccacaacaatccttcgcatacacaacgaaagatgggaaggtgttccatttatattaaaggccggaaaagcgttgaattcaaggaaggcagaaattcgcattcaattcaaggatgtcccaggcgacatattcagatgtcaaaagcaaggaaggaacgagtttgtgatacgcttgcaaccttcagaggcaatgtacatgaaactaactgttaagcaaccaggtctagatatgaatactgtgcaaagtgaactagacttgtcgtatgggcaacggtatcaaggtgtcgctatccctgaggcatacgagcgcttaattcttgacacaatcaaaggcgatcaacaacatttcgttcgtagagacgaattaaaggttgcgtgggagatcttcacgccgctactccacaggatcgacaaaggagaagtaaagtcaatcccatacaaaccaggaagccgaggaccgaaagaagctgatcagctactagagaaagctggttatcttcagactcacggctatatctggatccctcctacactataaaaccctacatatatataaatacacaatacatgtatctacatgtatatgtataaattatgctgaatagtccctcctcgagtttggtgtttgtacgtgaaacttgctacttcagctgttcactttgacacttcctttggtcttgtatttgcggctttgtagaaataaaaataaaaatcttaccaataccataaatgaatttagcttttgttgtgctcgtt

SEQ ID NO: 2876 - protein, 515 aa, Arabidopsis thaliana [sequence omitted]

SEQ ID NO: 2877 - DNA, 1503 bp, Xenopus laevis
  CDS (1)..(1503)
atgagggaagaacttttaagcgaacaagagttccaccagtctgagacgcacatattcattgtcgttggagcttcgggagatctggccaaaaagaagatctaccccactctgtggtggctttacaacgatggtttgctcccagaagacacctacatagtaggctttgcacgttcaaagctgacagtgcaggatatcaaaaagcagagcgagccgtacttcaaggtatctgcagaggatgctttgaaacttgacacatttttcaagcgcaactcatatatttctggacaatactcagatgcagcctccttccaaaaccttaaccagcacctgaattcattacccaatggggcaaaagccaaccgcctcttctacctagcactaccacccagtgtgtatcatgatgttacccgcaacatcaaagagacctgcatgagctctgtaggatggaaccgtgttattgtggagaaaccttttggcaaagatctggaaagttccaatcgtttgtcggaacacatctcctccttatacaaggaaaaccagatctatcgtatcgaccattacctgggcaaagagatggtacagaacctcatgatcttaagatttggtaacaggatattcagccccctctggtccagggatcacataagtgcagtggttctgacatttaaagagcctttcggaacacaggggcgtggaggatactttgacgaatttggcatcatccgggatgtcatgcaaaatcacttgctccaaatgatgtgtttgatggctatggagaagccggtctccaccaactcggatgatgttagagatgaaaaggtgaaagtgttgaaatcagtggctcccctcaatcttgataatctggtaatagggcagtatattgggaatccggacggacaaggcgaggcacaagaaggctatttggatgaccgcactgttccaaaaggatctttgacccccacatttgccactgcagtcctatatgtgcagaatgagcgttgggatggtgtcccctttatcatgcgctgtggcaaggccttgaacgagaggaaggcagaggcacgactgcagtttcgtgatgtgcctggagatatattccaaggccaatgcaaaaggaatgaactggtgatcagagtgcagccaaatgaagctgtgtacaccaagatgatgaccaagaagccaggaatgttctttaaccctgaggagtcagagctagacttaacatatggcagcagatacaaggatgtgaagttgccagacgcatatgagcggcttattttggatgtgttctgtggaaatcagatgcactttgtacgcagtgatgaactgagagaagcttggaggatcttcacccctgttctccatcagctggagagagaaaaaatcaaaccccatccttataaatatggaagccgtgggcccgcagaaagtgacgagctaatgcagaaggttggcttccattatgcaggaacctacaaatgggtgaacccaaacaagctctga

SEQ ID NO: 2878 - protein, 500 aa, Xenopus laevis
MREELLSEQEFHQSETHIFIVVGASGDLAKKKIYPTLWWLYNDGLLPEDTYIVGFARSKLTVQDIKKQSEPYFKVSAEDALKLDTFFKRNSYISGQYSDAASFQNLNQHLNSLPNGAKANRLFYLALPPSVYHDVTRNIKETCMSSVGWNRVIVEKPFGKDLESSNRLSEHISSLYKENQIYRIDHYLGKEMVQNLMILRFGNRIFSPLWSRDHISAVVLTFKEPFGTQGRGGYFDEFGIIRDVMQNHLLQMMCLMAMEKPVSTNSDDVRDEKVKVLKSVAPLNLDNLVIGQYIGNPDGQGEAQEGYLDDRTVPKGSLTPTFATAVLYVQNERWDGVPFIMRCGKALNERKAEARLQFRDVPGDIFQGQCKRNELVIRVQPNEAVYTKMMTKKPGMFFNPEESELDLTYGSRYKDVKLPDAYERLILDVFCGNQMHFVRSDELREAWRIFTPVLHQLEREKIKPHPYKYGSRGPAESDELMQKVGFHYAGTYKWVNPNKL

SEQ ID NO: 2879 - DNA, 2004 bp, Arabidopsis thaliana
  CDS (51)..(1850)
gtttgcatccaaatccaattcataactcacactcgtctcaaattcgaaaaatgtcgtctctctcctgccctacctaccgctcccgcacttcgtcttcgtctcctttcttgtcgaatcatcatcattcttcgctgatcaatgttgttgacccacgccgctcactctccttccactacgcttctcctcaggggcttaatctagctgagctctgtgttgttagatcgcagaggaggtccgttcagagttctgttgtcgtgcaagatggatcagtagccaccgagtcaaactcgtccgaggaggcgaaagatgtaggggtgttaacgattccttcacttgaagctgacaaggttgtagcagagtctgatggcggtgaacaactttcaacagttagtatcacggtggtgggagcttctggtgatcttgccaagaagaaaatattcccagctcttttcgcactttactatgaaggctgtcttcctgagcattttaccatttttggctatgcaaggagtaagatgacagatgctgaacttagagttatggtcagcaaaacattgacatgtagaattgataagagggcaaactgcggtgaaaagatggaagagtttctcaagagatgtttttaccattcgggtcagtatgattctcaggaacattttgttgcattggacgagaagctcaaggagcatgagggtggaagactttcgaaccgtcttttctatctttcaatccctccaaatatctttgttgacgcggtgaaatgtgcaagctcatctgcttcatctgtcaatggatggactagggtcattgtcgagaaaccttttggccgggactccaaaacctcggctgcattaacaaagtctcttaagcagtacctggaggaagaccaaatatttaggatagaccattacttagggaaggagctggttgagaacttgtcggttcttcgattctcaaatcttatatttgaaccgctatggtcaaggcagtatataaggaacgtgcaattcattttttctgaggatttcggcactgaaggacgcggagggtacttcgacaattacggaataataagagatataatgcagaatcatctgcttcagatattagctcttttcgccatggaaacacctgtgagtttggatgcagaggatatcagaaatgaaaaggtaaaggtactacgttcaatgagaccaataaaacttgaagatgtggtgataggacagtacaagagccacagcataggaggagtcacttatccaagctatactgatgataaaactgtgccaaaaggtagtctgaccccgacatttgcagctgctgcactcttcatcgacaatgcaagatgggatggtgtaccttttctaatgaaagctgggaaagcactaaacacccgaagtgcggagataagagtccagttcaggcatgtgcctggaaatttatataaccggaattctggtactgatcgtgatcagaccacaaatgagcttgtcatccgcgtccaacctgatgaagctatctatttgaaaatcaacaacaaggtccctggtttaggaatgagattagatcagagtaacttaaatcttctctattcagcaaggtattcaaaggagattccagatgcatatgagaggcttttgttagatgcgatcgaaggtgaacgcagattgttcataagaagcgatgaacttgacgctgcttgggcgcttttcactccattgctcaaagagatagaagaaaagaagacaaccccagaattctatccttacggcagtcgtggtccagtcggtgcccattatctagccgcaaaacacaaggtccaatggggagacctaagtcttgatcagtgaaagagtggaagaacattttttgttcatagattcacgtcttagaattttcattatttgtgtggtttatggaaactttctttcgctttcagagataggagtgagttttgttcgattttgtatctggaataataagtaagaactaccctattcttgc

SEQ ID NO: 2880 - protein, 599 aa, Arabidopsis thaliana
MSSLSCPTYRSRTSSSSPFLSNHHHSSLINVVDPRRSLSFHYASPQGLNLAELCVVRSQRRSVQSSVVVQDGSVATESNSSEEAKDVGVLTIPSLEADKVVAESDGGEQLSTVSITVVGASGDLAKKKIFPALFALYYEGCLPEHFTIFGYARSKMTDAELRVMVSKTLTCRIDKRANCGEKMEEFLKRCFYHSGQYDSQEHFVALDEKLKEHEGGRLSNRLFYLSIPPNIFVDAVKCASSSASSVNGWTRVIVEKPFGRDSKTSAALTKSLKQYLEEDQIFRIDHYLGKELVENLSVLRFSNLIFEPLWSRQYIRNVQFIFSEDFGTEGRGGYFDNYGIIRDIMQNHLLQILALFAMETPVSLDAEDIRNEKVKVLRSMRPIKLEDVVIGQYKSHSIGGVTYPSYTDDKTVPKGSLTPTFAAAALFIDNARWDGVPFLMKAGKALNTRSAEIRVQFRHVPGNLYNRNSGTDRDQTTNELVIRVQPDEAIYLKINNKVPGLGMRLDQSNLNLLYSARYSKEIPDAYERLLLDAIEGERRLFIRSDELDAAWALFTPLLKEIEEKKTTPEFYPYGSRGPVGAHYLAAKHKVQWGDLSLDQ

SEQ ID NO: 2881 - DNA, 23 bp, Artificial sequence
  Primer sequence
atgagtgaaggccccgtcaaatt

SEQ ID NO: 2882 - DNA, 25 bp, Artificial sequence
  Primer sequence
ctaattatccttcgtatcttctggc

SEQ ID NO: 2883 - protein, 24 aa, Artificial sequence
  Consensus
  Variant (2)..(2): Xaa in position 2 is any amino acid
  Variant (3)..(3): Xaa in position 3 is Leu, Val, Phe, Ile, Ala or Met
  Variant (4)..(4): Xaa in position 4 is Val, Ile, Leu or Ala
  Variant (5)..(5): Xaa in position 5 is Val or Ile
  Variant (6)..(6): Xaa in position 6 is Val, Ile, Cys or Thr
  Variant (11)..(11): Xaa in position 11 is Ile, Val, Ser or Leu
  Variant (12)..(12): Xaa in position 12 is His or Asp
  Variant (13)..(13): Xaa in position 13 is Asp or Asn
  Variant (14)..(15): Xaa in position 14 to 15 is any amino acid
  Variant (16)..(16): Xaa in position 16 is Ala, Ser, Gln or Thr
  Variant (17)..(17): Xaa in position 17 is Ala, Val or Gly
  Variant (18)..(18): Xaa in position 18 is any amino acid
  Variant (19)..(19): Xaa in position 19 is Glu, Asp, Ala or Gln
  Variant (21)..(21): Xaa in position 21 is Ala, Gly, Cys or Ser
  Variant (22)..(22): Xaa in position 22 is any amino acid
  Variant (23)..(23): Xaa in position 23 is Arg, Lys, Gln, His or Leu
  Variant (24)..(24): Xaa in position 24 is Leu, Ile or Phe
RXXXXXGPCSXXXXXXXXXYXXXX

SEQ ID NO: 2884 - protein, 42 aa, Artificial sequence
  Consensus
  Variant (1)..(1): Xaa in position 1 is Leu, Ile, Phe or Met
  Variant (2)..(2): Xaa in position 2 is any amino acid
  Variant (3)..(3): Xaa in position 3 is Ile, Val, Leu or Met
  Variant (4)..(4): Xaa in position 4 is Val, Ile or Leu
  Variant (7)..(7): Xaa in position 7 is Val, Ala or Thr
  Variant (9)..(9): Xaa in position 9 is Phe, Leu, Thr or Val
  Variant (10)..(10): Xaa in position 10 is Glu or Ala
  Variant (15)..(15): Xaa in position 15 is any or no amino acid
  Variant (16)..(17): Xaa in position 16 to 17 is any amino acid
  Variant (19)..(19): Xaa in position 19 is Trp or Tyr
  Variant (20)..(20): Xaa in position 20 is Lys or Arg
  Variant (22)..(22): Xaa in position 22 is Leu, Phe, Met or Tyr
  Variant (23)..(23): Xaa in position 23 is Ile, Val, Ala or Leu
  Variant (24)..(24): Xaa in position 24 is any amino acid
  Variant (25)..(25): Xaa in position 25 is Asp, Glu or Gln
  Variant (27)..(27): Xaa in position 27 is any amino acid
  Variant (28)..(28): Xaa in position 28 is Leu, Met, Ile, Val, Ala or Thr
  Variant (29)..(29): Xaa in position 29 is Asp, Asn or Ser
  Variant (30)..(33): Xaa in position 30 to 33 is any amino acid
  Variant (34)..(34): Xaa in position 34 is Ile, Val, Leu or Met
  Variant (35)..(36): Xaa in position 35 to 36 is any amino acid
  Variant (38)..(38): Xaa in position 38 is Leu, Ile, Met or Val
  Variant (39)..(40): Xaa in position 39 to 40 is any amino acid
  Variant (41)..(41): Xaa in position 41 is Ala, Ser, Gly, Val or Thr
XXXXMRXYXXKPRTXXXGXXGXXXXPXXXXXXXXXXGXXXXR

SEQ ID NO: 2885 - protein, 65 aa, Artificial sequence
  Consensus
  Variant (2)..(2): Xaa in position 2 is any amino acid
  Variant (4)..(4): Xaa in position 4 is Asp, Tyr, Gln, Asn or Glu
  Variant (5)..(9): Xaa in position 5 to 9 is any amino acid
  Variant (10)..(10): Xaa in position 10 is Tyr, Phe or Leu
  Variant (11)..(12): Xaa in position 11 to 12 is any amino acid
  Variant (13)..(13): Xaa in position 13 is Asp or Glu
  Variant (14)..(15): Xaa in position 14 to 15 is any amino acid
  Variant (16)..(16): Xaa in position 16 is Ser, Ala, Thr or Cys
  Variant (17)..(17): Xaa in position 17 is Trp, Phe, Tyr, Leu or Val
  Variant (18)..(18): Xaa in position 18 is any amino acid
  Variant (19)..(19): Xaa in position 19 is Ala or Ser
  Variant (20)..(20): Xaa in position 20 is Ile or Val
  Variant (24)..(24): Xaa in position 24 is Thr, Ser or Asn
  Variant (25)..(25): Xaa in position 25 is Thr, Val, Ala, Ser or Ile
  Variant (26)..(26): Xaa in position 26 is Glu or Ala
  Variant (27)..(27): Xaa in position 27 is Ser, Asp or Asn
  Variant (29)..(29): Xaa in position 29 is any amino acid
  Variant (32)..(32): Xaa in position 32 is Glu, Gln, Phe or Met
  Variant (33)..(33): Xaa in position 33 is Leu, Met, Val, Ile or Phe
  Variant (34)..(34): Xaa in position 34 is Ala, Ser, Thr, Cys or Val
  Variant (36)..(36): Xaa in position 36 is Gly, Ala or Asn
  Variant (37)..(39): Xaa in position 37 to 39 is any amino acid
  Variant (40)..(40): Xaa in position 40 is Pro or Ala
  Variant (41)..(41): Xaa in position 41 is Val, Ile, Thr or Leu
  Variant (43)..(43): Xaa in position 43 is Phe, Met, Tyr or Ile
  Variant (46)..(46): Xaa in position 46 is any amino acid
  Variant (47)..(47): Xaa in position 47 is Thr, Ser or Arg
  Variant (48)..(48): Xaa in position 48 is any amino acid
  Variant (50)..(53): Xaa in position 50 to 53 is any amino acid
  Variant (54)..(54): Xaa in position 54 is Ala or Met
  Variant (55)..(55): Xaa in position 55 is any amino acid
  Variant (56)..(56): Xaa in position 56 is Asp, Asn or Glu
  Variant (57)..(57): Xaa in position 57 is Ala or Gly
  Variant (58)..(59): Xaa in position 58 to 59 is any amino acid
  Variant (60)..(60): Xaa in position 60 is Ala or Ser
  Variant (61)..(61): Xaa in position 61 is Ala, Ser, Val or Thr
  Variant (62)..(64): Xaa in position 62 to 64 is any amino acid
  Variant (65)..(65): Xaa in position 65 is His or Gln
EXLXXXXXXXXXXXXXXXXXGARXXXXQXHRXXXSXXXXXXGXKNXXXGXXXXXXXXXXXXXXXX

SEQ ID NO: 2886 - protein, 71 aa, Artificial sequence
  Consensus
  Variant (1)..(1): Xaa in position 1 is Thr or Ser
  Variant (2)..(2): Xaa in position 2 is any amino acid
  Variant (5)..(7): Xaa in position 5 to 7 is any amino acid
  Variant (8)..(8): Xaa in position 8 is His or Phe
  Variant (9)..(9): Xaa in position 9 is Val, Ile, Leu or Ala
  Variant (10)..(10): Xaa in position 10 is Ile or Val
  Variant (11)..(11): Xaa in position 11 is Leu or Met
  Variant (14)..(14): Xaa in position 14 is Gly, Ser or Ala
  Variant (15)..(20): Xaa in position 15 to 20 is any or no amino acid
  Variant (21)..(22): Xaa in position 21 to 22 is any amino acid
  Variant (23)..(23): Xaa in position 23 is Pro, Thr or Ser
  Variant (25)..(25): Xaa in position 25 is Tyr, Phe or His
  Variant (26)..(29): Xaa in position 26 to 29 is any amino acid
  Variant (30)..(30): Xaa in position 30 is Val, Ile or Leu
  Variant (31)..(36): Xaa in position 31 to 36 is any amino acid
  Variant (37)..(37): Xaa in position 37 is Leu, Met, Ile, Tyr or His
  Variant (38)..(48): Xaa in position 38 to 48 is any or no amino acid
  Variant (49)..(51): Xaa in position 49 to 51 is any amino acid
  Variant (52)..(52): Xaa in position 52 is Leu, Ile or Val
  Variant (53)..(53): Xaa in position 53 is Met, Val, Ile or Leu
  Variant (54)..(54): Xaa in position 54 is Ile or Val
  Variant (56)..(56): Xaa in position 56 is Cys, Phe, Ala, Thr, Tyr or Val
  Variant (57)..(57): Xaa in position 57 is Ser, Asn or Ala
  Variant (59)..(59): Xaa in position 59 is Gly, Ala or Asp
  Variant (61)..(61): Xaa in position 61 is Ser or Cys
  Variant (62)..(62): Xaa in position 62 is any amino acid
  Variant (64)..(66): Xaa in position 64 to 66 is any amino acid
  Variant (67)..(67): Xaa in position 67 is Arg, Asn, Lys, Leu or Glu
  Variant (69)..(70): Xaa in position 69 to 70 is any amino acid
  Variant (71)..(71): Xaa in position 71 is Val or Ile
XXGNXXXXXXXRGXXXXXXXXXXNXXXXXXXXXXXXXXXXXXXXXXXXXXXXXXDXXHXNXXKXXXXQXXX

SEQ ID NO: 2887 - protein, 41 aa, Artificial sequence
  Consensus
  Variant (2)..(2): Xaa in position 2 is any amino acid
  Variant (4)..(4): Xaa in position 4 is Ile, Leu, Val, Ala or Met
  Variant (7)..(7): Xaa in position 7 is His, Asn, Phe or Tyr
  Variant (8)..(8): Xaa in position 8 is Leu or Ile
  Variant (9)..(10): Xaa in position 9 to 10 is any amino acid
  Variant (12)..(12): Xaa in position 12 is any amino acid
  Variant (14)..(24): Xaa in position 14 to 24 is any or no amino acid
  Variant (25)..(30): Xaa in position 25 to 30 is any amino acid
  Variant (32)..(32): Xaa in position 32 is any amino acid
  Variant (34)..(34): Xaa in position 34 is Ile or Val
  Variant (37)..(37): Xaa in position 37 is Ala, Pro, Gly, Lys, Ser or Glu
  Variant (39)..(39): Xaa in position 39 is Ile, Leu or Val
  Variant (40)..(40): Xaa in position 40 is any amino acid
  Variant (41)..(41): Xaa in position 41 is Trp, Ile, Leu or Phe
GXMXESXXXXGXQXXXXXXXXXXXXXXXXXGXSXTDXCXXX

SEQ ID NO: 2888 - protein, 455 aa, Artificial sequence
  Consensus
  Variant (1)..(455): Xaa in all positions is any amino acid
XXXXXXXXXXXXXXXXXXXXXXXXXXXXXXXXXXXXXXXXXXXXXXXXXXXXXXXXXXXXXXXXXXXXLXXPXXXXXXXPXXXXXXXXXXXXRXXXXXIXXGXDXXXXRXXVXXGPCSXHDXXAAXXYAXXLXXXXXXXXXXXXLXXXMRXYXEKPRTXXXGWKGLIXDPXXXXXXXXXXGLXXXRXLXXXXXXXXGXPXAXEXLDXXXXQXXXDXXXXXAIGARTTESQXHRXXASXLSXPXGFKNXTXGXXXXAXXAXXXAXXXHXFXXXXXXGXXXXXXTXGNXXXHXXLRGGXXXXXXXXXNYXXXXXXXXXXXXXXXXXXXXXXXXXXXXXDXSHXNSXKXXXXQXXVXXXXXXQXXXGXXXXXXXXGXMXESXXXXGXQXXXXXXXXXXXXXXXXYGXSXTDXCXXWXXTXXXLXXXXXXXXXXXXXXXXXXXXXXXXXXXXXXXXXXX

SEQ ID NO: 2889 - protein, 26 aa, Artificial sequence
  Consensus
  Variant (1)..(1): Xaa in position 1 is Asp or Asn
  Variant (2)..(2): Xaa in position 2 is any amino acid
  Variant (4)..(4): Xaa in position 4 is any amino acid
  Variant (5)..(5): Xaa in position 5 is Leu, Val, Ile, Phe, Ala or Met
  Variant (6)..(6): Xaa in position 6 is Val, Ile, Leu or Ala
  Variant (7)..(7): Xaa in position 7 is Val or Ile
  Variant (8)..(8): Xaa in position 8 is Val, Ile, Cys or Thr
  Variant (13)..(13): Xaa in position 13 is Ile, Val, Ser or Leu
  Variant (14)..(14): Xaa in position 14 is His or Asp
  Variant (15)..(15): Xaa in position 15 is Asp or Asn
  Variant (16)..(18): Xaa in position 16 to 18 is any amino acid
  Variant (19)..(19): Xaa in position 19 is Ala, Val or Gly
  Variant (20)..(20): Xaa in position 20 is any amino acid
  Variant (21)..(21): Xaa in position 21 is Glu, Asp, Ala or Gln
  Variant (23)..(23): Xaa in position 23 is Ala, Gly, Ser or Cys
  Variant (24)..(25): Xaa in position 24 to 25 is any amino acid
  Variant (26)..(26): Xaa in position 26 is Leu, Ile or Phe
XXRXXXXXGPCSXXXXXXXXXYXXXX

SEQ ID NO: 2890 - protein, 40 aa, Artificial sequence
  Consensus
  Variant (1)..(1): Xaa in position 1 is Ile, Val, Leu or Met
  Variant (2)..(2): Xaa in position 2 is Val, Ile or Leu
  Variant (5)..(5): Xaa in position 5 is Val, Ala or Thr
  Variant (7)..(7): Xaa in position 7 is Phe, Leu, Thr or Val
  Variant (8)..(8): Xaa in position 8 is Glu, Ala or Gln
  Variant (13)..(13): Xaa in position 13 is any or no amino acid
  Variant (14)..(15): Xaa in position 14 to 15 is any amino acid
  Variant (17)..(17): Xaa in position 17 is Trp or Tyr
  Variant (18)..(18): Xaa in position 18 is Lys or Arg
  Variant (20)..(20): Xaa in position 20 is Leu, Phe, Tyr or Met
  Variant (21)..(21): Xaa in position 21 is Ile, Val, Ala or Leu
  Variant (22)..(22): Xaa in position 22 is any amino acid
  Variant (23)..(23): Xaa in position 23 is Asp, Glu or Gln
  Variant (25)..(25): Xaa in position 25 is any amino acid
  Variant (26)..(26): Xaa in position 26 is Leu, Met, Ile, Val, Ala or Thr
  Variant (27)..(27): Xaa in position 27 is Asp, Asn or Ser
  Variant (28)..(31): Xaa in position 28 to 31 is any amino acid
  Variant (32)..(32): Xaa in position 32 is Ile, Val, Leu or Met
  Variant (33)..(34): Xaa in position 33 to 34 is any amino acid
  Variant (36)..(36): Xaa in position 36 is Leu, Ile, Met or Val
  Variant (37)..(38): Xaa in position 37 to 38 is any amino acid
  Variant (39)..(39): Xaa in position 39 is Ala, Ser, Gly, Val or Thr
XXMRXYXXKPRTXXXGXXGXXXXPXXXXXXXXXXGXXXXR

SEQ ID NO: 2891 - protein, 58 aa, Artificial sequence
  Consensus
  Variant (1)..(1): Xaa in position 1 is Tyr, Phe or Leu
  Variant (2)..(3): Xaa in position 2 to 3 is any amino acid
  Variant (4)..(4): Xaa in position 4 is Asp or Glu
  Variant (5)..(6): Xaa in position 5 to 6 is any amino acid
  Variant (7)..(7): Xaa in position 7 is Ser, Ala, Thr or Cys
  Variant (8)..(8): Xaa in position 8 is Trp, Leu, Phe, Tyr or Val
  Variant (9)..(9): Xaa in position 9 is any amino acid
  Variant (10)..(10): Xaa in position 10 is Ala or Ser
  Variant (11)..(11): Xaa in position 11 is Ile or Val
  Variant (15)..(15): Xaa in position 15 is Thr, Ser or Asn
  Variant (16)..(16): Xaa in position 16 is Thr, Val, Ala or Ser
  Variant (17)..(17): Xaa in position 17 is Glu or Ala
  Variant (18)..(18): Xaa in position 18 is Ser, Asp or Asn
  Variant (20)..(20): Xaa in position 20 is any amino acid
  Variant (23)..(23): Xaa in position 23 is Glu, Gln, Phe or Met
  Variant (24)..(24): Xaa in position 24 is Leu, Met, Val or Ile
  Variant (25)..(25): Xaa in position 25 is Ala, Ser, Thr, Cys or Val
  Variant (27)..(27): Xaa in position 27 is Gly or Ala
  Variant (28)..(28): Xaa in position 28 is Leu, Ile, Met or Val
  Variant (29)..(30): Xaa in position 29 to 30 is any amino acid
  Variant (31)..(31): Xaa in position 31 is Pro or Ala
  Variant (32)..(32): Xaa in position 32 is Val, Ile or Thr
  Variant (34)..(34): Xaa in position 34 is Phe, Met, Tyr or Ile
  Variant (37)..(37): Xaa in position 37 is any amino acid
  Variant (38)..(38): Xaa in position 38 is Thr or Arg
  Variant (39)..(39): Xaa in position 39 is any amino acid
  Variant (41)..(41): Xaa in position 41 is any amino acid
  Variant (42)..(42): Xaa in position 42 is Leu, Ile, Val, Ala, Thr or Phe
  Variant (43)..(44): Xaa in position 43 to 44 is any amino acid
  Variant (45)..(45): Xaa in position 45 is Ala or Met
  Variant (46)..(46): Xaa in position 46 is any amino acid
  Variant (47)..(47): Xaa in position 47 is Asp, Asn or Glu
  Variant (48)..(48): Xaa in position 48 is Ala or Gly
  Variant (49)..(50): Xaa in position 49 to 50 is any amino acid
  Variant (51)..(51): Xaa in position 51 is Ala or Ser
  Variant (52)..(52): Xaa in position 52 is Ala, Ser, Val or Thr
  Variant (53)..(55): Xaa in position 53 to 55 is any amino acid
  Variant (56)..(56): Xaa in position 56 is His or Gln
  Variant (57)..(57): Xaa in position 57 is any amino acid
  Variant (58)..(58): Xaa in position 58 is Phe, Tyr, His or Val
XXXXXXXXXXXGARXXXXQXHRXXXSXXXXXXGXKNXXXGXXXXXXXXXXXXXXXXXX

SEQ ID NO: 2892 - protein, 25 aa, Artificial sequence
  Consensus
  Variant (1)..(1): Xaa in position 1 is Thr or Ser
  Variant (2)..(2): Xaa in position 2 is any amino acid
  Variant (5)..(7): Xaa in position 5 to 7 is any amino acid
  Variant (8)..(8): Xaa in position 8 is His or Phe
  Variant (9)..(9): Xaa in position 9 is Val, Ile, Leu or Ala
  Variant (10)..(10): Xaa in position 10 is Ile or Val
  Variant (11)..(11): Xaa in position 11 is Leu or Met
  Variant (14)..(14): Xaa in position 14 is Gly, Ser or Ala
  Variant (15)..(15): Xaa in position 15 is any or no amino acid
  Variant (16)..(16): Xaa in position 16 is any or no amino acid
  Variant (17)..(17): Xaa in position 17 is any or no amino acid
  Variant (18)..(18): Xaa in position 18 is any or no amino acid
  Variant (19)..(19): Xaa in position 19 is any or no amino acid
  Variant (20)..(20): Xaa in position 20 is any or no amino acid
  Variant (21)..(22): Xaa in position 21 to 22 is any amino acid
  Variant (23)..(23): Xaa in position 23 is Pro, Thr or Ser
  Variant (25)..(25): Xaa in position 25 is Tyr, Phe or His
XXGNXXXXXXXRGXXXXXXXXXXNX

SEQ ID NO: 2893 - protein, 52 aa, Artificial sequence
  Consensus
  Variant (1)..(1): Xaa in position 1 is Leu, Ile or Val
  Variant (2)..(2): Xaa in position 2 is Met, Val, Ile or Leu
  Variant (3)..(3): Xaa in position 3 is Ile or Val
  Variant (5)..(5): Xaa in position 5 is any amino acid
  Variant (6)..(6): Xaa in position 6 is Ser, Asn or Ala
  Variant (8)..(8): Xaa in position 8 is Ala, Gly or Asp
  Variant (10)..(10): Xaa in position 10 is Ser or Cys
  Variant (11)..(11): Xaa in position 11 is any amino acid
  Variant (13)..(15): Xaa in position 13 to 15 is any amino acid
  Variant (16)..(16): Xaa in position 16 is Arg, Asn, Lys, Leu or Glu
  Variant (18)..(19): Xaa in position 18 to 19 is any amino acid
  Variant (20)..(20): Xaa in position 20 is Val or Ile
  Variant (21)..(23): Xaa in position 21 to 23 is any amino acid
  Variant (24)..(24): Xaa in position 24 is Val, Ile, Leu, Thr or Ala
  Variant (25)..(26): Xaa in position 25 to 26 is any amino acid
  Variant (27)..(27): Xaa in position 27 is Gln, Asn or Arg
  Variant (28)..(28): Xaa in position 28 is Ile, Leu, Val, Arg or Met
  Variant (29)..(30): Xaa in position 29 to 30 is any amino acid
  Variant (31)..(31): Xaa in position 31 is Gly, Asn or Asp
  Variant (32)..(34): Xaa in position 32 to 34 is any or no amino acid
  Variant (35)..(37): Xaa in position 35 to 37 is any amino acid
  Variant (38)..(38): Xaa in position 38 is Ile, Val or Leu
  Variant (39)..(39): Xaa in position 39 is any amino acid
  Variant (41)..(41): Xaa in position 41 is any amino acid
  Variant (43)..(43): Xaa in position 43 is Ile, Leu, Val, Ala or Met
  Variant (46)..(46): Xaa in position 46 is His, Phe, Asn or Tyr
  Variant (47)..(47): Xaa in position 47 is Leu or Ile
  Variant (48)..(49): Xaa in position 48 to 49 is any amino acid
  Variant (51)..(51): Xaa in position 51 is any amino acid
XXXDXXHXNXXKXXXXQXXXXXXXXXXXXXXXXXXXXXXGXMXESXXXXGXQ

SEQ ID NO: 2894 - protein, 19 aa, Artificial sequence
  Consensus
  Variant (1)..(1): Xaa in position 1 is Tyr, Phe, Lys or Arg
  Variant (3)..(3): Xaa in position 3 is any amino acid
  Variant (5)..(5): Xaa in position 5 is Ile or Val
  Variant (8)..(8): Xaa in position 8 is any amino acid
  Variant (10)..(10): Xaa in position 10 is Ile, Leu or Val
  Variant (11)..(11): Xaa in position 11 is any amino acid
  Variant (12)..(12): Xaa in position 12 is Trp, Ile, Phe or Leu
  Variant (13)..(14): Xaa in position 13 to 14 is any amino acid
  Variant (15)..(15): Xaa in position 15 is Thr or Ser
  Variant (16)..(18): Xaa in position 16 to 18 is any amino acid
  Variant (19)..(19): Xaa in position 19 is Leu, Ile, Val or Phe
XGXSXTDXCXXXXXXXXXX

SEQ ID NO: 2895 - protein, 352 aa, Artificial sequence
  Consensus
  Variant (1)..(352): Xaa in all positions is any amino acid
LXXPXXXXXXXPXXXXXXXXXXXXRXXXXXIXXGXDXXXXRLXVXXGPCSXHDXXAAXXYAXXLXXXXXXXXXXXXLXXXMRXYXEKPRTXXXGWKGLIXDPXXXXXXXXXXGLXXXRXLXXXXXXXXXXPXAXEXLDXXXXQXXXDXXXWXAIGARTTESQXHREXASXLSXPXGFKNGTXGXXXXAXXAXXXAXXXHXFXXXXXXGXXXXXXTXGNXXXHXXLRGGXXXXXXXXXNYXXXXXXXXXXXXXXXXXXXXXXXXXXXXXDXSHXNSXKXXXXQXXVXXXXXXQXXXGXXXXXXXXGXMXESXXXXGXQXXXXXXXXXXXXXXXXYGXSXTDXCXXWXXTXXXL

SEQ ID NO: 2896 - protein, 296 aa, Artificial sequence
  Consensus
  Variant (1)..(296): Xaa in all positions is any amino acid
GPCSXXXXXXXXXXXXXXXXXXXXXXXXXXXXXXXRXYXXKXRTXXXGXXGXXXXPXXXXXXXXXXGXXXXRXXXXXXXXXXXXXXXXXXXXXXXXXXXXXXXXXXXXGARXXXXXXHRXXXSXXXXXXXXKNXXXGXXXXXXXXXXXXXXXXXXXXXXXXXXXXXXXXXGNXXXXXXXRGXXXXXXXXXXNXXXXXXXXXXXXXXXXXXXXXXXXXXXXXXDXXHXNXXXXXXXXXXXXXXXXXXXXXXXXXXXXXXXXMXEXXXXXGXXXXXXXXXXXXXXXXXXXGXSXTDXC

SEQ ID NO: 2897 - protein, 76 aa, Artificial sequence
  Consensus
  Variant (1)..(1): Xaa in position 1 is Leu, Met or Val
  Variant (2)..(2): Xaa in position 2 is Gly or Asp
  Variant (3)..(3): Xaa in position 3 is Asp, Ser, Asn, Gln or Gly
  Variant (4)..(4): Xaa in position 4 is Leu or Arg
  Variant (5)..(6): Xaa in position 5 to 6 is any amino acid
  Variant (7)..(7): Xaa in position 7 is His or Pro
  Variant (8)..(8): Xaa in position 8 is any amino acid
  Variant (9)..(9): Xaa in position 9 is Gly, Ser, Glu or Asp
  Variant (10)..(13): Xaa in position 10 to 13 is any amino acid
  Variant (14)..(14): Xaa in position 14 is Ala or Ser
  Variant (15)..(15): Xaa in position 15 is Gln, Glu or Met
  Variant (16)..(18): Xaa in position 16 to 18 is any amino acid
  Variant (19)..(19): Xaa in position 19 is Ala or Ser
  Variant (20)..(21): Xaa in position 20 to 21 is any amino acid
  Variant (22)..(22): Xaa in position 22 is Phe, Tyr, Trp or Val
  Variant (23)..(23): Xaa in position 23 is any amino acid
  Variant (24)..(24): Xaa in position 24 is Ala, Ser or Val
  Variant (25)..(27): Xaa in position 25 to 27 is any amino acid
  Variant (28)..(28): Xaa in position 28 is Tyr, Phe or Trp
  Variant (29)..(30): Xaa in position 29 to 30 is any amino acid
  Variant (31)..(31): Xaa in position 31 is Val, Thr, Leu or Ile
  Variant (32)..(32): Xaa in position 32 is any amino acid
  Variant (34)..(34): Xaa in position 34 is Thr or Ser
  Variant (35)..(35): Xaa in position 35 is Ser or Thr
  Variant (36)..(36): Xaa in position 36 is any amino acid
  Variant (37)..(37): Xaa in position 37 is Ser, Ala or Gly
  Variant (38)..(38): Xaa in position 38 is Asn, Ile, Val or Ser
  Variant (39)..(51): Xaa in position 39 to 51 is any amino acid
  Variant (52)..(52): Xaa in position 52 is Val, Ile, Leu or Ala
  Variant (53)..(53): Xaa in position 53 is Leu, Ile, Val or Met
  Variant (54)..(55): Xaa in position 54 to 55 is any amino acid
  Variant (57)..(57): Xaa in position 57 is Asn or Asp
  Variant (58)..(58): Xaa in position 58 is any amino acid
  Variant (60)..(60): Xaa in position 60 is Lys, Gln or Arg
  Variant (61)..(61): Xaa in position 61 is Ser or Ala
  Variant (62)..(65): Xaa in position 62 to 65 is any amino acid
  Variant (66)..(66): Xaa in position 66 is any or no amino acid
  Variant (67)..(67): Xaa in position 67 is Leu, Ile, Met or Val
  Variant (68)..(73): Xaa in position 68 to 73 is any amino acid
  Variant (74)..(74): Xaa in position 74 is Pro or Ala
  Variant (75)..(75): Xaa in position 75 is any amino acid
  Variant (76)..(76): Xaa in position 76 is Tyr, Phe or Trp
XXXXXXXXXXXXXXXXXXXXXXXXXXXXXXXXGXXXXXXXXXXXXXXXXXXXXXXRXXHXXXXXXXXXXXXXXXXX

SEQ ID NO: 2898 - protein, 39 aa, Artificial sequence
  Consensus
  Variant (1)..(1): Xaa in position 1 is Val, Ile, Leu, Phe or Thr
  Variant (2)..(2): Xaa in position 2 is Ile, Val, Leu, Phe or Ala
  Variant (3)..(5): Xaa in position 3 to 5 is any amino acid
  Variant (6)..(6): Xaa in position 6 is Thr, Asn or Ser
  Variant (7)..(7): Xaa in position 7 is Tyr, Phe or Pro
  Variant (8)..(8): Xaa in position 8 is Asp, Tyr, Phe or His
  Variant (10)..(12): Xaa in position 10 to 12 is any amino acid
  Variant (13)..(13): Xaa in position 13 is Asn, Asp or Ser
  Variant (14)..(17): Xaa in position 14 to 17 is any or no amino acid
  Variant (18)..(29): Xaa in position 18 to 29 is any amino acid
  Variant (30)..(30): Xaa in position 30 is Ile, Val, Leu or Phe
  Variant (31)..(31): Xaa in position 31 is any amino acid
  Variant (32)..(32): Xaa in position 32 is Phe, Val, Trp or Ile
  Variant (34)..(34): Xaa in position 34 is Glu, Ser or Cys
  Variant (36)..(36): Xaa in position 36 is Trp or His
  Variant (37)..(37): Xaa in position 37 is any amino acid
  Variant (38)..(38): Xaa in position 38 is Ala, Gly, Pro or Val
  Variant (39)..(39): Xaa in position 39 is Tyr, His or Phe
XXXXXXXXGXXXXXXXXXXXXXXXXXXXXXXXDXAXXXX

SEQ ID NO: 2899 - protein, 84 aa, Artificial sequence
  Consensus
  Variant (1)..(1): Xaa in position 1 is Ser or Leu
  Variant (2)..(2): Xaa in position 2 is any amino acid
  Variant (5)..(7): Xaa in position 5 to 7 is any amino acid
  Variant (8)..(8): Xaa in position 8 is Ala, Gly or Ser
  Variant (9)..(9): Xaa in position 9 is Leu, Phe, Met or Ile
  Variant (10)..(10): Xaa in position 10 is Ser, Thr, Arg or Glu
  Variant (11)..(11): Xaa in position 11 is Gln or Met
  Variant (12)..(12): Xaa in position 12 is any amino acid
  Variant (13)..(13): Xaa in position 13 is Ser or Ala
  Variant (14)..(14): Xaa in position 14 is any amino acid
  Variant (15)..(15): Xaa in position 15 is Ile, Leu, Met, Val or Phe
  Variant (16)..(16): Xaa in position 16 is His, Asn, Leu or Ile
  Variant (17)..(24): Xaa in position 17 to 24 is any or no amino acid
  Variant (25)..(33): Xaa in position 25 to 33 is any amino acid
  Variant (34)..(34): Xaa in position 34 is Phe, Val, Leu, Met or Ile
  Variant (35)..(42): Xaa in position 35 to 42 is any amino acid
  Variant (43)..(43): Xaa in position 43 is Ser or Thr
  Variant (44)..(44): Xaa in position 44 is Thr or Ser
  Variant (46)..(47): Xaa in position 46 to 47 is any amino acid
  Variant (48)..(48): Xaa in position 48 is Tyr, Gln or Val
  Variant (49)..(49): Xaa in position 49 is any amino acid
  Variant (50)..(50): Xaa in position 50 is Leu, Ile, Phe or Met
  Variant (51)..(51): Xaa in position 51 is any amino acid
  Variant (52)..(52): Xaa in position 52 is Ala or Ser
  Variant (53)..(53): Xaa in position 53 is Ser, Ala or Thr
  Variant (54)..(54): Xaa in position 54 is any amino acid
  Variant (55)..(55): Xaa in position 55 is Asp or Glu
  Variant (56)..(57): Xaa in position 56 to 57 is any or no amino acid
  Variant (58)..(65): Xaa in position 58 to 65 is any amino acid
  Variant (66)..(66): Xaa in position 66 is Gly, Ala, Lys or Asn
  Variant (67)..(73): Xaa in position 67 to 73 is any amino acid
  Variant (74)..(74): Xaa in position 74 is Ile, Val, Leu, Tyr or Phe
  Variant (75)..(80): Xaa in position 75 to 80 is any amino acid
  Variant (81)..(81): Xaa in position 81 is Arg or Lys
  Variant (82)..(83): Xaa in position 82 to 83 is any amino acid
  Variant (84)..(84): Xaa in position 84 is Ile, Leu, Val, Met, Phe, Ala or Thr
XXHKXXXXXXXXXXXXXXXXXXXXXXXXXXXXXXXXXXXXXXXXSXXXXXXXXXXXXXXXXXXXXXXXXXXXXXXXXXXXXXXX

SEQ ID NO: 2900 - protein, 31 aa, Artificial sequence
  Consensus
  Variant (1)..(1): Xaa in position 1 is Val, Ile, Leu, Cys or Arg
  Variant (2)..(5): Xaa in position 2 to 5 is any or no amino acid
  Variant (6)..(9): Xaa in position 6 to 9 is any amino acid
  Variant (10)..(10): Xaa in position 10 is Gly, Thr, Asp or Asn
  Variant (11)..(11): Xaa in position 11 is any amino acid
  Variant (12)..(12): Xaa in position 12 is Ile, Val or Thr
  Variant (13)..(13): Xaa in position 13 is any amino acid
  Variant (14)..(14): Xaa in position 14 is Ala, Gly, Thr or Leu
  Variant (15)..(16): Xaa in position 15 to 16 is any amino acid
  Variant (17)..(17): Xaa in position 17 is Val, Ile, Ala, Leu or Phe
  Variant (18)..(19): Xaa in position 18 to 19 is any amino acid
  Variant (24)..(24): Xaa in position 24 is Ile, Val or Phe
  Variant (25)..(26): Xaa in position 25 to 26 is any amino acid
  Variant (27)..(27): Xaa in position 27 is Val, Leu, Ile, Phe or Met
  Variant (28)..(29): Xaa in position 28 to 29 is any amino acid
  Variant (31)..(31): Xaa in position 31 is Glu or Gln
XXXXXXXXXXXXXXXXXXXYPPGXXXXXXGX

SEQ ID NO: 2901 - protein, 101 aa, Artificial sequence; identical to SEQ ID NO: 1322
  Consensus
  Variant (2)..(23): Xaa in Position 2 to 23 is any amino acid
  Variant (24)..(30): Xaa in Position 24 to 30 is no amino acid or any amino acid
  Variant (32)..(32): Xaa in Position 32 is any amino acid
  Variant (37)..(39): Xaa in Position 37 to 39 is any amino acid
  Variant (41)..(55): Xaa in Position 41 to 55 is any amino acid
  Variant (56)..(56): Xaa in Position 56 is no amino acid or any amino acid
  Variant (57)..(57): Xaa in Position 57 is no amino acid or any amino acid
  Variant (59)..(62): Xaa in Position 59 to 62 is any amino acid
  Variant (64)..(64): Xaa in Position 64 is any amino acid
  Variant (67)..(70): Xaa in Position 67 to 70 is any amino acid
  Variant (72)..(72): Xaa in Position 72 is any amino acid
  Variant (75)..(77): Xaa in Position 75 to 77 is any amino acid
  Variant (79)..(85): Xaa in Position 79 to 85 is any amino acid
  Variant (87)..(90): Xaa in Position 87 to 90 is any amino acid
  Variant (92)..(93): Xaa in Position 92 to 93 is any amino acid
  Variant (97)..(97): Xaa in Position 97 is any amino acid
  Variant (100)..(100): Xaa in Position 100 is any amino acid

SEQ ID NO: 2902 - protein, 642 aa, Artificial sequence
  Consensus
  Variant (1)..(642): Xaa in all positions is any amino acid
PXXXXLXXXXXXXXXXXXXXXXXXXXXXXXXXXXXXXXXXXXXXXXXXXXXXXXXXXXLXXLXXXXGXXXXAXXXXAXXXXXXXXXXXXXGXSXXXXXXXXXXXXXXXXXXXXRNXHKSXXXXXXXXXXXXPXXXXXXXXXXXXXXXXXXXXXXXXXXXXXXXXXXXXXXXXXXXXXXXXXXXXXXXXTYXGXXXXXXXXXXXXXXXXXXXXXXXDXAXXXXXXFXXXXXXXXXXXXXXXXXXXXXXXXXXXXXXXXXXXXXXXXXXXXXXXXXXXXXXXXXXXXXXXXXSXHKXXXXXXQXSXXHXXXXXXXXXXXXXXXXXXXXXXXXXXXTSPXYXXXAXXXXXXXXXXXXXGXXXXXXXXXXXXXXRXXXXXXXXXXXXXXXXXXXXXXXXXXXXXXXXXXXXXXXXXXXXXXXXXXXXXXXXXXXXXXXXXXXXXXXXXXXXXXXXXXXXXXDPXKXXXXXXXXXXXXXXXXXXXXXXXXXXXXXXXXXIXXEXXXXXXXLXXXXXXXXXXXXXXLXXXLXXXXXXXXXXXXXXXXXXXXXXXXXXXXXXXXXXXXXXXXXXXXXXXXXXXXXXXXXXXXXXXXXXXXXXXXXXXXXXXXXXXXXXXXXXXXXXXGXXXAXXXXXYPPGXXXXXXGE

SEQ ID NO: 2903 - protein, 26 aa, Artificial sequence
  Consensus
  Variant (2)..(2): Xaa in position 2 is any amino acid
  Variant (3)..(3): Xaa in position 3 is Met, Arg, Pro or Ala
  Variant (4)..(4): Xaa in position 4 is Gly or Ala
  Variant (5)..(5): Xaa in position 5 is Ala, Ser, Val, Cys or Thr
  Variant (8)..(8): Xaa in position 8 is Ser or Thr
  Variant (9)..(9): Xaa in position 9 is any amino acid
  Variant (10)..(10): Xaa in position 10 is Ile, Val, Leu or Thr
  Variant (11)..(11): Xaa in position 11 is Gly, Ala or Ser
  Variant (12)..(13): Xaa in position 12 to 13 is any amino acid
  Variant (14)..(14): Xaa in position 14 is Leu, Val, Ile or Met
  Variant (15)..(15): Xaa in position 15 is Ala, Ser or Asp
  Variant (16)..(19): Xaa in position 16 to 19 is any or no amino acid
  Variant (20)..(23): Xaa in position 20 to 23 is any amino acid
  Variant (24)..(24): Xaa in position 24 is Asp or Glu
  Variant (25)..(25): Xaa in position 25 is any amino acid
  Variant (26)..(26): Xaa in position 26 is Asp or Asn
GXXXXGKXXXXXXXXXXXXXXXXXXX

SEQ ID NO: 2904 - protein, 75 aa, Artificial sequence
  Consensus
  Variant (1)..(1): Xaa in position 1 is Glu, Trp, Gln or Asp
  Variant (2)..(3): Xaa in position 2 to 3 is any amino acid
  Variant (4)..(4): Xaa in position 4 is Phe, Leu or Tyr
  Variant (5)..(5): Xaa in position 5 is Arg or Leu
  Variant (6)..(7): Xaa in position 6 to 7 is any amino acid
  Variant (9)..(11): Xaa in position 9 to 11 is any amino acid
  Variant (12)..(12): Xaa in position 12 is Leu, Ile, Val, Ala, Phe or Thr
  Variant (13)..(15): Xaa in position 13 to 15 is any or no amino acid
  Variant (16)..(23): Xaa in position 16 to 23 is any amino acid
  Variant (24)..(24): Xaa in position 24 is Val, Ile, Leu or Thr
  Variant (25)..(25): Xaa in position 25 is Leu, Ile or Val
  Variant (26)..(26): Xaa in position 26 is Ala, Ser or Thr
  Variant (27)..(27): Xaa in position 27 is Thr, Leu, Ala, Ser or Pro
  Variant (30)..(30): Xaa in position 30 is Gly or Ser
  Variant (31)..(31): Xaa in position 31 is any amino acid
  Variant (32)..(32): Xaa in position 32 is Val, Ile, Phe, Pro, Tyr or Leu
  Variant (33)..(45): Xaa in position 33 to 45 is any amino acid
  Variant (46)..(53): Xaa in position 46 to 53 is any or no amino acid
  Variant (54)..(54): Xaa in position 54 is Leu, Ile or Val
  Variant (55)..(63): Xaa in position 55 to 63 is any amino acid
  Variant (64)..(64): Xaa in position 64 is Arg, Asn or Asp
  Variant (65)..(69): Xaa in position 65 to 69 is any amino acid
  Variant (70)..(73): Xaa in position 70 to 73 is any or no amino acid
  Variant (74)..(74): Xaa in position 74 is Arg, Lys or Leu
  Variant (75)..(75): Xaa in position 75 is Pro or Gly
XXXXXXXEXXXXXXXXXXXXXXXXXXXGGXXXXXXXXXXXXXXXXXXXXXXXXXXXXXXXXXXXXXXXXXXXXXX

SEQ ID NO: 2905 - protein, 160 aa, Artificial sequence
  Consensus
  Variant (1)..(160): Xaa in all positions is any amino acid
LXGXXGXGKXXXGXXXAXXXXXXXXDXDXXIXXXXXXXXXXXXXXXFXXXGEXXFRXXEXXXXXXXXXXXXXXXXXXXGGGXXXXXXXXXXXXXXXXXXXXXXXLXXXXXXXXXRXXXXXXXXXRPXXXXXXXXXXXXXXXXXXXXXXXXXXXXXRXXXY

SEQ ID NO: 2906 - protein, 72 aa, Artificial sequence
  Consensus
  Variant (5)..(5): Xaa in position 5 is Ile, Val, Ser or Leu
  Variant (6)..(6): Xaa in position 6 is His or Asp
  Variant (7)..(7): Xaa in position 7 is Asp or Asn
  Variant (8)..(10): Xaa in position 8 to 10 is any amino acid
  Variant (11)..(11): Xaa in position 11 is Ala, Val or Gly
  Variant (12)..(12): Xaa in position 12 is any amino acid
  Variant (13)..(13): Xaa in position 13 is Glu, Asp, Ala or Gln
  Variant (15)..(15): Xaa in position 15 is Ala, Gly or Cys
  Variant (16)..(17): Xaa in position 16 to 17 is any amino acid
  Variant (18)..(18): Xaa in position 18 is Leu, Ile or Phe
  Variant (19)..(20): Xaa in position 19 to 20 is any or no amino acid
  Variant (21)..(30): Xaa in position 21 to 30 is any amino acid
  Variant (31)..(31): Xaa in position 31 is Leu, Ile, Phe or Met
  Variant (32)..(32): Xaa in position 32 is any amino acid
  Variant (33)..(33): Xaa in position 33 is Ile, Val, Leu or Met
  Variant (34)..(34): Xaa in position 34 is Val, Ile or Leu
  Variant (37)..(37): Xaa in position 37 is Val, Ala or Thr
  Variant (39)..(39): Xaa in position 39 is Phe, Leu, Thr or Val
  Variant (40)..(40): Xaa in position 40 is Glu or Ala
  Variant (45)..(45): Xaa in position 45 is any or no amino acid
  Variant (46)..(47): Xaa in position 46 to 47 is any amino acid
  Variant (49)..(49): Xaa in position 49 is Trp or Tyr
  Variant (50)..(50): Xaa in position 50 is Lys or Arg
  Variant (52)..(52): Xaa in position 52 is Leu, Phe, Met or Tyr
  Variant (53)..(53): Xaa in position 53 is Ile, Val, Ala or Leu
  Variant (54)..(54): Xaa in position 54 is any amino acid
  Variant (55)..(55): Xaa in position 55 is Asp, Glu or Gln
  Variant (57)..(57): Xaa in position 57 is any amino acid
  Variant (58)..(58): Xaa in position 58 is Leu, Met, Ile, Val, Ala or Thr
  Variant (59)..(59): Xaa in position 59 is Asp, Asn or Ser
  Variant (60)..(63): Xaa in position 60 to 63 is any amino acid
  Variant (64)..(64): Xaa in position 64 is Ile, Val, Leu or Met
  Variant (65)..(66): Xaa in position 65 to 66 is any amino acid
  Variant (68)..(68): Xaa in position 68 is Leu, Ile, Met or Val
  Variant (69)..(70): Xaa in position 69 to 70 is any amino acid
  Variant (71)..(71): Xaa in position 71 is Ala, Ser, Gly, Val or Thr
GPCSXXXXXXXXXYXXXXXXXXXXXXXXXXXXXXMRXYXXKPRTXXXGXXGXXXXPXXXXXXXXXXGXXXXR

SEQ ID NO: 2907 - protein, 76 aa, Artificial sequence
  Consensus
  Variant (1)..(1): Xaa in position 1 is Ala or Ser
  Variant (2)..(2): Xaa in position 2 is Ile or Val
  Variant (6)..(6): Xaa in position 6 is Thr, Ser or Asn
  Variant (7)..(7): Xaa in position 7 is Thr, Val, Ala, Ser or Ile
  Variant (8)..(8): Xaa in position 8 is Glu or Ala
  Variant (9)..(9): Xaa in position 9 is Ser, Asp or Asn
  Variant (11)..(11): Xaa in position 11 is any amino acid
  Variant (14)..(14): Xaa in position 14 is Glu, Gln, Phe or Met
  Variant (15)..(15): Xaa in position 15 is Leu, Met, Val, Phe or Ile
  Variant (16)..(16): Xaa in position 16 is Ala, Ser, Thr, Cys or Val
  Variant (18)..(18): Xaa in position 18 is Gly, Ala or Asn
  Variant (19)..(21): Xaa in position 19 to 21 is any amino acid
  Variant (22)..(22): Xaa in position 22 is Pro or Ala
  Variant (23)..(23): Xaa in position 23 is Val, Ile, Thr or Leu
  Variant (25)..(25): Xaa in position 25 is Phe, Met, Tyr or Ile
  Variant (28)..(28): Xaa in position 28 is any amino acid
  Variant (29)..(29): Xaa in position 29 is Thr, Ser or Arg
  Variant (30)..(30): Xaa in position 30 is any amino acid
  Variant (32)..(35): Xaa in position 32 to 35 is any amino acid
  Variant (36)..(36): Xaa in position 36 is Ala or Met
  Variant (37)..(37): Xaa in position 37 is any amino acid
  Variant (38)..(38): Xaa in position 38 is Asp, Asn or Glu
  Variant (39)..(39): Xaa in position 39 is Ala or Gly
  Variant (40)..(41): Xaa in position 40 to 41 is any amino acid
  Variant (42)..(42): Xaa in position 42 is Ala or Ser
  Variant (43)..(43): Xaa in position 43 is Ala, Ser, Val or Thr
  Variant (44)..(46): Xaa in position 44 to 46 is any amino acid
  Variant (47)..(47): Xaa in position 47 is His or Gln
  Variant (48)..(48): Xaa in position 48 is any amino acid
  Variant (49)..(49): Xaa in position 49 is Phe, Tyr, His or Val
  Variant (50)..(51): Xaa in position 50 to 51 is any amino acid
  Variant (52)..(55): Xaa in position 52 to 55 is any or no amino acid
  Variant (57)..(60): Xaa in position 57 to 60 is any amino acid
  Variant (61)..(62): Xaa in position 61 to 62 is any or no amino acid
  Variant (63)..(63): Xaa in position 63 is Thr or Ser
  Variant (64)..(64): Xaa in position 64 is any amino acid
  Variant (67)..(69): Xaa in position 67 to 69 is any amino acid
  Variant (70)..(70): Xaa in position 70 is His or Phe
  Variant (71)..(71): Xaa in position 71 is Val, Ile, Leu or Ala
  Variant (72)..(72): Xaa in position 72 is Ile or Val
  Variant (73)..(73): Xaa in position 73 is Leu or Met
  Variant (76)..(76): Xaa in position 76 is Gly, Ala or Ser
XXGARXXXXQXHRXXXSXXXXXXGXKNXXXGXXXXXXXXXXXXXXXXXXXXXXXXGXXXXXXXXGNXXXXXXXRGX

SEQ ID NO: 2908 - protein, 83 aa, Artificial sequence
  Consensus
  Variant (1)..(1): Xaa in position 1 is Leu, Ile or Val
  Variant (2)..(2): Xaa in position 2 is Met, Val, Ile or Leu
  Variant (3)..(3): Xaa in position 3 is Ile or Val
  Variant (5)..(5): Xaa in position 5 is Cys, Phe, Ala, Thr or Tyr
  Variant (6)..(6): Xaa in position 6 is Ser, Asn or Ala
  Variant (8)..(8): Xaa in position 8 is Gly, Ala or Asp
  Variant (10)..(10): Xaa in position 10 is Ser or Cys
  Variant (11)..(11): Xaa in position 11 is any amino acid
  Variant (13)..(15): Xaa in position 13 to 15 is any amino acid
  Variant (16)..(16): Xaa in position 16 is Arg, Asn, Lys, Leu or Glu
  Variant (18)..(19): Xaa in position 18 to 19 is any amino acid
  Variant (20)..(20): Xaa in position 20 is Val or Ile
  Variant (21)..(26): Xaa in position 21 to 26 is any amino acid
  Variant (27)..(27): Xaa in position 27 is Gln, Asn or Arg
  Variant (28)..(28): Xaa in position 28 is Ile, Leu, Val, Arg or Met
  Variant (29)..(30): Xaa in position 29 to 30 is any amino acid
  Variant (31)..(31): Xaa in position 31 is Gly, Asn or Asp
  Variant (32)..(32): Xaa in position 32 is any amino acid
  Variant (33)..(33): Xaa in position 33 is any or no amino acid
  Variant (34)..(34): Xaa in position 34 is any or no amino acid
  Variant (35)..(35): Xaa in position 35 is any or no amino acid
  Variant (36)..(36): Xaa in position 36 is any or no amino acid
  Variant (37)..(37): Xaa in position 37 is any or no amino acid
  Variant (38)..(38): Xaa in position 38 is Ile, Val or Leu
  Variant (39)..(39): Xaa in position 39 is any or no amino acid
  Variant (41)..(41): Xaa in position 41 is any amino acid
  Variant (43)..(43): Xaa in position 43 is Ile, Leu, Val, Ala or Met
  Variant (46)..(46): Xaa in position 46 is His, Phe, Asn or Tyr
  Variant (47)..(47): Xaa in position 47 is Leu or Ile
  Variant (48)..(49): Xaa in position 48 to 49 is any amino acid
  Variant (51)..(51): Xaa in position 51 is any amino acid
  Variant (53)..(57): Xaa in position 53 to 57 is any amino acid
  Variant (58)..(69): Xaa in position 58 to 69 is any or no amino acid
  Variant (71)..(71): Xaa in position 71 is any amino acid
  Variant (73)..(73): Xaa in position 73 is Ile or Val
  Variant (76)..(76): Xaa in position 76 is any amino acid
  Variant (78)..(78): Xaa in position 78 is Ile, Leu or Val
  Variant (79)..(79): Xaa in position 79 is any amino acid
  Variant (80)..(80): Xaa in position 80 is Trp, Ile, Leu or Phe
  Variant (81)..(82): Xaa in position 81 to 82 is any amino acid
  Variant (83)..(83): Xaa in position 83 is Thr or Ser
XXXDXXHXNXXKXXXXQXXXXXXXXXXXXXXXXXXXXXXGXMXESXXXXGXQXXXXXXXXXXXXXXXXXGXSXTDXCXXXXXX

SEQ ID NO: 2909 - protein, 456 aa, Artificial sequence
  Consensus
  Variant (1)..(456): Xaa in all positions is any amino acid
XXXXXXXXXXXXXXXXXXXXXXXXXXXXXXXXXXXXXXXXXXXXXXXXXXXXXXXXXXXXXXXXXXXXLXXPXXXXXXXPXXXXXXXXXXXXRXXXXXIXXGXDXRXXXXXXXXGPCSXHDXXXAXXYAXXLXXXXXXXXXXXXLXXXMRXYXEKPRTXXXGWKGLIXDPXXXXXXXXXXGLXXXRXLXXXXXXXXXXPXAXEXLDXXXXQXXXDXXXXXAIGARTTESQXHRXXXASXLSXPXGFKNXTXGXXXXAXXAXXXAXXXHXFXXXXXXGXXXXXXTXGNXXXHXXLRGGXXXXXXXXXNYXXXXXXXXXXXXXXXXXXXXXXXXXXXXXDXSHXNSXKXXXXQXXVXXXXXXQXXXGXXXXXXXXGXMXESXXXXGXQXXXXXXXXXXXXXXXXYGXSXTDXCXXWXXTXXXLXXXXXXXXXXXXXXXXXXXXXXXXXXXXXXXXXXX

SEQ ID NO: 2910 - protein, 23 aa, Artificial sequence
  Consensus
  Variant (1)..(1): Xaa in position 1 is Leu or Met
  Variant (2)..(2): Xaa in position 2 is any amino acid
  Variant (3)..(3): Xaa in position 3 is Arg, Lys or Ser
  Variant (6)..(6): Xaa in position 6 is Ile, Val or Leu
  Variant (8)..(8): Xaa in position 8 is any amino acid
  Variant (9)..(9): Xaa in position 9 is Leu or Val
  Variant (10)..(11): Xaa in position 10 to 11 is any amino acid
  Variant (12)..(12): Xaa in position 12 is Thr or Ser
  Variant (13)..(15): Xaa in position 13 to 15 is any amino acid
  Variant (16)..(16): Xaa in position 16 is Tyr, Leu, Phe or Met
  Variant (17)..(21): Xaa in position 17 to 21 is any amino acid
  Variant (22)..(22): Xaa in position 22 is Pro or Ala
  Variant (23)..(23): Xaa in position 23 is Leu, Phe or Val
XXXLPXPXXXXXXXXXXXXXXXX

SEQ ID NO: 2911 - protein, 27 aa, Artificial sequence
  Consensus
  Variant (1)..(1): Xaa in position 1 is Gln, Pro or Met
  Variant (2)..(3): Xaa in position 2 to 3 is any amino acid
  Variant (4)..(4): Xaa in position 4 is Arg or Lys
  Variant (5)..(5): Xaa in position 5 is Ala, Ser or Thr
  Variant (6)..(6): Xaa in position 6 is Ala, Thr, Ser or Gly
  Variant (7)..(7): Xaa in position 7 is any amino acid
  Variant (8)..(8): Xaa in position 8 is Leu, Ile, Met or Val
  Variant (9)..(10): Xaa in position 9 to 10 is any amino acid
  Variant (11)..(11): Xaa in position 11 is Ser, Ala, Thr or Tyr
  Variant (12)..(12): Xaa in position 12 is any amino acid
  Variant (13)..(13): Xaa in position 13 is Leu, Val, Ile, Met or Ala
  Variant (14)..(14): Xaa in position 14 is any amino acid
  Variant (15)..(15): Xaa in position 15 is Phe, Ile or Tyr
  Variant (16)..(18): Xaa in position 16 to 18 is any amino acid
  Variant (19)..(19): Xaa in position 19 is Leu, Ile, Val or Met
  Variant (20)..(20): Xaa in position 20 is Arg, Lys, Gln or Asp
  Variant (21)..(23): Xaa in position 21 to 23 is any amino acid
  Variant (25)..(25): Xaa in position 25 is any amino acid
  Variant (26)..(26): Xaa in position 26 is Pro, Thr, Val or Ala
  Variant (27)..(27): Xaa in position 27 is Asp or Glu
XXXXXXXXXXXXXXXXXXXXXXXLXXX

SEQ ID NO: 2912 - protein, 16 aa, Artificial sequence
  Consensus
  Variant (1)..(1): Xaa in position 1 is Leu, Phe, Met or Ile
  Variant (2)..(2): Xaa in position 2 is Cys, Ser, Asp or Thr
  Variant (3)..(3): Xaa in position 3 is Met or Ser
  Variant (4)..(5): Xaa in position 4 to 5 is any amino acid
  Variant (6)..(6): Xaa in position 6 is Tyr, Phe or Trp
  Variant (7)..(8): Xaa in position 7 to 8 is any amino acid
  Variant (9)..(9): Xaa in position 9 is Leu or Met
  Variant (11)..(11): Xaa in position 11 is Gly, Asn, Ala or Cys
  Variant (12)..(12): Xaa in position 12 is any amino acid
  Variant (13)..(13): Xaa in position 13 is Ser, Thr or Ala
  Variant (15)..(15): Xaa in position 15 is any amino acid
  Variant (16)..(16): Xaa in position 16 is Pro or Ala
XXXXXXXXXFXXXRXX

SEQ ID NO: 2913 - protein, 45 aa, Artificial sequence
  Consensus
  Variant (1)..(1): Xaa in position 1 is Leu, Ile, Val, Met or Phe
  Variant (2)..(2): Xaa in position 2 is Gly or Ala
  Variant (3)..(3): Xaa in position 3 is any amino acid
  Variant (4)..(4): Xaa in position 4 is Leu or Phe
  Variant (5)..(5): Xaa in position 5 is Thr or Ser
  Variant (6)..(6): Xaa in position 6 is Ser, Thr or Ala
  Variant (7)..(8): Xaa in position 7 to 8 is any amino acid
  Variant (9)..(9): Xaa in position 9 is Arg, Phe or Thr
  Variant (10)..(11): Xaa in position 10 to 11 is any amino acid
  Variant (13)..(15): Xaa in position 13 to 15 is any amino acid
  Variant (16)..(16): Xaa in position 16 is Arg, Tyr or His
  Variant (17)..(26): Xaa in position 17 to 26 is any amino acid
  Variant (27)..(30): Xaa in position 27 to 30 is any or no amino acid
  Variant (31)..(31): Xaa in position 31 is Leu or Glu
  Variant (32)..(33): Xaa in position 32 to 33 is any amino acid
  Variant (34)..(34): Xaa in position 34 is any or no amino acid
  Variant (35)..(35): Xaa in position 35 is Ile or Val
  Variant (36)..(36): Xaa in position 36 is Asp, His or Glu
  Variant (37)..(37): Xaa in position 37 is any amino acid
  Variant (38)..(38): Xaa in position 38 is Ala, Ser or Gly
  Variant (39)..(39): Xaa in position 39 is Leu, Ser, Val or Ala
  Variant (41)..(41): Xaa in position 41 is any amino acid
  Variant (42)..(42): Xaa in position 42 is Leu, Val or Ile
  Variant (43)..(43): Xaa in position 43 is Cys, Val or Thr
  Variant (44)..(44): Xaa in position 44 is Leu, Phe or Met
XXXXXXXXXXXWXXXXXXXXXXXXXXXXXXXXXXXXXXXFXXXXD

SEQ ID NO: 2914 - protein, 31 aa, Artificial sequence
  Consensus
  Variant (2)..(2): Xaa in position 2 is Trp or Phe
  Variant (3)..(3): Xaa in position 3 is Tyr or Phe
  Variant (4)..(4): Xaa in position 4 is Asp or Cys
  Variant (6)..(6): Xaa in position 6 is any or no amino acid
  Variant (7)..(7): Xaa in position 7 is Leu, Phe or Ile
  Variant (8)..(8): Xaa in position 8 is any amino acid
  Variant (9)..(9): Xaa in position 9 is Leu, Ile, Phe or Thr
  Variant (10)..(10): Xaa in position 10 is Ile, Val, Phe or Leu
  Variant (11)..(11): Xaa in position 11 is Val, Ile or Met
  Variant (12)..(13): Xaa in position 12 to 13 is any amino acid
  Variant (14)..(14): Xaa in position 14 is Asn, Asp, Cys or Gly
  Variant (15)..(15): Xaa in position 15 is Gly, Ala, Ser or Val
  Variant (16)..(16): Xaa in position 16 is any amino acid
  Variant (17)..(17): Xaa in position 17 is Ala, Ser or Thr
  Variant (18)..(18): Xaa in position 18 is Gly, Ala, Thr or Cys
  Variant (19)..(19): Xaa in position 19 is Ile, Val or Phe
  Variant (20)..(20): Xaa in position 20 is any amino acid
  Variant (21)..(21): Xaa in position 21 is Phe, Trp, Ala or Gly
  Variant (22)..(22): Xaa in position 22 is Glu or Asp
  Variant (23)..(23): Xaa in position 23 is His or Ser
  Variant (24)..(24): Xaa in position 24 is Ser, Thr, Phe or Ala
  Variant (25)..(26): Xaa in position 25 to 26 is any amino acid
  Variant (27)..(27): Xaa in position 27 is Asp or Glu
  Variant (28)..(28): Xaa in position 28 is Gly or Ala
  Variant (29)..(30): Xaa in position 29 to 30 is any amino acid
  Variant (31)..(31): Xaa in position 31 is Val, Thr or Ile
RXXXKXXXXXXXXXXXXXXXXXXXXXXXXXX

SEQ ID NO: 2915 - protein, 43 aa, Artificial sequence
  Consensus
  Variant (2)..(2): Xaa in position 2 is Ala or Ser
  Variant (3)..(4): Xaa in position 3 to 4 is any amino acid
  Variant (6)..(6): Xaa in position 6 is Met, Leu, Gln, Val or Ile
  Variant (7)..(7): Xaa in position 7 is any amino acid
  Variant (8)..(8): Xaa in position 8 is Phe, Leu, Ile or Met
  Variant (10)..(10): Xaa in position 10 is any amino acid
  Variant (11)..(11): Xaa in position 11 is Ala or Thr
  Variant (12)..(12): Xaa in position 12 is Tyr, Phe, His, Val or Asn
  Variant (13)..(13): Xaa in position 13 is Tyr, Phe, Leu or Arg
  Variant (14)..(15): Xaa in position 14 to 15 is any amino acid
  Variant (16)..(16): Xaa in position 16 is Tyr, Leu, Thr or Met
  Variant (17)..(17): Xaa in position 17 is Gly, Lys or Ser
  Variant (18)..(22): Xaa in position 18 to 22 is any amino acid
  Variant (23)..(23): Xaa in position 23 is Tyr, Leu or Phe
  Variant (25)..(25): Xaa in position 25 is Pro, Ser or Ala
  Variant (26)..(26): Xaa in position 26 is Ala, Cys, Val, Ile or Ser
  Variant (27)..(27): Xaa in position 27 is Ser, Met, Ala or Thr
  Variant (28)..(28): Xaa in position 28 is Thr or Val
  Variant (29)..(29): Xaa in position 29 is Lys, Arg, Ala or Ser
  Variant (30)..(30): Xaa in position 30 is any amino acid
  Variant (31)..(31): Xaa in position 31 is Phe or Tyr
  Variant (32)..(33): Xaa in position 32 to 33 is any amino acid
  Variant (34)..(34): Xaa in position 34 is Gly or Ser
  Variant (35)..(35): Xaa in position 35 is Arg or Met
  Variant (36)..(36): Xaa in position 36 is Thr or Ser
  Variant (37)..(37): Xaa in position 37 is Glu, Ser, Ala or Thr
  Variant (38)..(38): Xaa in position 38 is any amino acid
  Variant (39)..(39): Xaa in position 39 is Ile, Gly, Val, Met or Cys
  Variant (40)..(40): Xaa in position 40 is Arg, Pro, Asn or Cys
  Variant (41)..(41): Xaa in position 41 is Ser, Pro, Thr, Ile or Val
  Variant (42)..(42): Xaa in position 42 is Val, Ala, Gln or Cys
  Variant (43)..(43): Xaa in position 43 is Ser, Thr or Asn
DXXXQXXXQXXXXXXXXXXXXXXEXXXXXXXXXXXXXXXXXXX

SEQ ID NO: 2916 - protein, 24 aa, Artificial sequence
  Consensus
  Variant (2)..(5): Xaa in position 2 to 5 is any amino acid
  Variant (6)..(6): Xaa in position 6 is Lys or Arg
  Variant (7)..(7): Xaa in position 7 is any amino acid
  Variant (8)..(8): Xaa in position 8 is Ala, Cys, Ser or Thr
  Variant (9)..(10): Xaa in position 9 to 10 is any amino acid
  Variant (11)..(11): Xaa in position 11 is Gly or Ala
  Variant (12)..(12): Xaa in position 12 is any amino acid
  Variant (13)..(13): Xaa in position 13 is Gly or Ala
  Variant (14)..(14): Xaa in position 14 is any amino acid
  Variant (15)..(15): Xaa in position 15 is Asp or Glu
  Variant (16)..(16): Xaa in position 16 is Arg or Lys
  Variant (17)..(17): Xaa in position 17 is His or Tyr
  Variant (18)..(18): Xaa in position 18 is Leu or Phe
  Variant (19)..(19): Xaa in position 19 is Tyr, Phe, Asn or Leu
  Variant (20)..(20): Xaa in position 20 is Ala or Gly
  Variant (21)..(21): Xaa in position 21 is Leu, Met or Ile
  Variant (22)..(23): Xaa in position 22 to 23 is any amino acid
  Variant (24)..(24): Xaa in position 24 is Leu, Met, Ile, Val or Thr
HXXXXXXXXXXXXXXXXXXXXXXX

SEQ ID NO: 2917 - protein, 150 aa, Artificial sequence
  Consensus
  Variant (1)..(1): Xaa in Position 1 is Arg or Lys
  Variant (2)..(2): Xaa in Position 2 is Val, Ile, Leu or Ala
  Variant (3)..(3): Xaa in Position 3 is Ile, Val, Met or Ala
  Variant (4)..(4): Xaa in Position 4 is Ile, Val, Leu, Met or Ala
  Variant (8)..(8): Xaa in Position 8 is Phe, Ile, Leu or Tyr
  Variant (9)..(9): Xaa in Position 9 is Gly or Ala
  Variant (10)..(10): Xaa in Position 10 is any amino acid
  Variant (11)..(11): Xaa in Position 11 is Asp, Ser or Asn
  Variant (12)..(13): Xaa in Position 12 to 13 is any amino acid
  Variant (14)..(14): Xaa in Position 14 is Ser, Thr or Asn
  Variant (15)..(15): Xaa in Position 15 is Ala, Ser, Phe or Tyr
  Variant (16)..(17): Xaa in Position 16 to 17 is any amino acid
  Variant (18)..(18): Xaa in Position 18 is Leu, Ile, Val or Phe
  Variant (19)..(21): Xaa in Position 19 to 21 is any amino acid
  Variant (22)..(22): Xaa in Position 22 is Leu, Ile or Val
  Variant (23)..(27): Xaa in Position 23 to 27 is any amino acid
  Variant (28)..(28): Xaa in Position 28 is Glu, Asp, Pro or Ser
  Variant (29)..(30): Xaa in Position 29 to 30 is any amino acid
  Variant (31)..(31): Xaa in Position 31 is Ile, Val, Leu, Thr or Met
  Variant (32)..(32): Xaa in Position 32 is Tyr, Phe or Leu
  Variant (33)..(33): Xaa in Position 33 is Arg, His or Leu
  Variant (34)..(34): Xaa in Position 34 is Ile, Val, Met or Leu
  Variant (37)..(37): Xaa in Position 37 is Tyr or Phe
  Variant (39)..(39): Xaa in Position 39 is Gly, Ser or Ala
  Variant (40)..(40): Xaa in Position 40 is Lys, Arg or Glu
  Variant (41)..(42): Xaa in Position 41 to 42 is any amino acid
  Variant (43)..(43): Xaa in Position 43 is Val, Ile, Leu, Ala or Met
  Variant (44)..(44): Xaa in Position 44 is any amino acid
  Variant (45)..(45): Xaa in Position 45 is Asn, Gly, Gln or Ala
  Variant (46)..(46): Xaa in Position 46 is Leu, Ile, Met, Phe or Val
  Variant (47)..(49): Xaa in Position 47 to 49 is any amino acid
  Variant (50)..(50): Xaa in Position 50 is Arg, Lys or Glu
  Variant (51)..(51): Xaa in Position 51 is Phe or Tyr
  Variant (52)..(52): Xaa in Position 52 is any amino acid
  Variant (54)..(59): Xaa in Position 54 to 59 is any amino acid
  Variant (60)..(60): Xaa in Position 60 is no amino acid or any amino acid
  Variant (61)..(61): Xaa in Position 61 is Trp, Met, Asn or Leu
  Variant (62)..(63): Xaa in Position 62 to 63 is any amino acid
  Variant (64)..(64): Xaa in Position 64 is no amino acid or any amino acid
  Variant (65)..(65): Xaa in Position 65 is no amino acid or any amino acid
  Variant (66)..(66): Xaa in Position 66 is Ile, Val or Ala
  Variant (67)..(68): Xaa in Position 67 to 68 is any amino acid
  Variant (69)..(69): Xaa in Position 69 is Val, Ile, Met or Leu
  Variant (70)..(70): Xaa in Position 70 is any amino acid
  Variant (71)..(71): Xaa in Position 71 is Ile, Leu, Val, Phe or Ser
  Variant (72)..(74): Xaa in Position 72 to 74 is any amino acid
  Variant (76)..(77): Xaa in Position 76 to 77 is any amino acid
  Variant (78)..(78): Xaa in Position 78 is Gly, Asp, Val or Ala
  Variant (79)..(81): Xaa in Position 79 to 81 is any amino acid
  Variant (82)..(82): Xaa in Position 82 is Arg or Lys
  Variant (83)..(83): Xaa in Position 83 is no amino acid or any amino acid
  Variant (84)..(84): Xaa in Position 84 is no amino acid or any amino acid
  Variant (85)..(85): Xaa in Position 85 is Tyr or Phe
  Variant (86)..(86): Xaa in Position 86 is Tyr, Phe or Trp
  Variant (87)..(87): Xaa in Position 87 is Asp, Glu, Ala or Asn
  Variant (88)..(89): Xaa in Position 88 to 89 is any amino acid
  Variant (91)..(91): Xaa in Position 91 is no amino acid or any amino acid
  Variant (92)..(92): Xaa in Position 92 is any amino acid
  Variant (93)..(93): Xaa in Position 93 is Leu, Ile, Val, Met or Ala
  Variant (94)..(94): Xaa in Position 94 is Arg, Lys or Leu
  Variant (96)..(96): Xaa in Position 96 is Met, Val, Ile or Leu
  Variant (97)..(97): Xaa in Position 97 is Val, Met, Ile, Leu or Phe
  Variant (98)..(98): Xaa in Position 98 is Gln, Pro or Thr
  Variant (99)..(99): Xaa in Position 99 is Asn or Ser
  Variant (100)..(100): Xaa in Position 100 is His, Gln or Pro
  Variant (101)..(102): Xaa in Position 101 to 102 is any amino acid
  Variant (103)..(103): Xaa in Position 103 is Gln, Glu, Asn or Leu
  Variant (104)..(104): Xaa in Position 104 is Leu, Ile, Val, Met or Thr
  Variant (105)..(105): Xaa in Position 105 is Leu, Met, Val, Ile, Phe or Tyr
  Variant (106)..(106): Xaa in Position 106 is any amino acid
  Variant (107)..(107): Xaa in Position 107 is Leu, Met, Ile, Val, Trp or Phe
  Variant (108)..(109): Xaa in Position 108 to 109 is any amino acid
  Variant (111)..(111): Xaa in Position 111 is Glu, Asp, Ser or Asn
  Variant (112)..(112): Xaa in Position 112 is any amino acid
  Variant (114)..(118): Xaa in Position 114 to 118 is any amino acid
  Variant (119)..(121): Xaa in Position 119 to 121 is no amino acid or any amino acid
  Variant (122)..(122): Xaa in Position 122 is Ile, Val, Leu, Phe or Met
  Variant (123)..(124): Xaa in Position 123 to 124 is any amino acid
  Variant (125)..(125): Xaa in Position 125 is Glu, Lys, Ala, Arg or His
  Variant (126)..(126): Xaa in Position 126 is Lys or Val
  Variant (127)..(128): Xaa in Position 127 to 128 is any amino acid
  Variant (129)..(129): Xaa in Position 129 is Val, Ile, Ala, Leu or Phe
  Variant (130)..(130): Xaa in Position 130 is Leu, Ile, Val, Phe or Met
  Variant (131)..(140): Xaa in Position 131 to 140 is any amino acid
  Variant (141)..(145): Xaa in Position 141 to 145 is no amino acid or any amino acid
  Variant (146)..(146): Xaa in Position 146 is Val, Leu, Ile, Ala or Ser
  Variant (147)..(147): Xaa in Position 147 is any amino acid
  Variant (148)..(148): Xaa in Position 148 is Gly or Ala
  Variant (149)..(149): Xaa in Position 149 is Gln or Arg
  Variant (150)..(150): Xaa in Position 150 is Tyr or Phe
XXXXEKPXXXXXXXXXXXXXXXXXXXXXXXXXXXDHXLXXXXXXXXXXXXXXNXXXXXXXXXXXXXXXXXXXXXEXXXXXXXXXXXXXXGXXXXDXXXXXXXXXXXXXXMXXPXXXXXXXXXXXXXXXXXXXXXXXXXXXXXXXXXXXXX

SEQ ID NO: 2918 - protein, 44 aa, Artificial sequence
  Consensus
  Variant (1)..(1): Xaa in Position 1 is Tyr or Leu
  Variant (2)..(2): Xaa in Position 2 is any amino acid
  Variant (3)..(13): Xaa in Position 3 to 13 is no amino acid or any amino acid
  Variant (15)..(17): Xaa in Position 15 to 17 is any amino acid
  Variant (19)..(19): Xaa in Position 19 is Phe or Tyr
  Variant (20)..(25): Xaa in Position 20 to 25 is any amino acid
  Variant (26)..(26): Xaa in Position 26 is Ile, Val, Leu or Phe
  Variant (27)..(29): Xaa in Position 27 to 29 is any amino acid
  Variant (30)..(30): Xaa in Position 30 is Arg, Asn, Phe or Gln
  Variant (31)..(31): Xaa in Position 31 is Trp or Phe
  Variant (32)..(32): Xaa in Position 32 is any amino acid
  Variant (33)..(33): Xaa in Position 33 is Gly or Asp
  Variant (34)..(34): Xaa in Position 34 is Val or Thr
  Variant (36)..(36): Xaa in Position 36 is Phe or Ile
  Variant (37)..(37): Xaa in Position 37 is any amino acid
  Variant (38)..(38): Xaa in Position 38 is Leu, Met, Ile, Val or Phe
  Variant (39)..(40): Xaa in Position 39 to 40 is any amino acid
  Variant (41)..(41): Xaa in Position 41 is Gly or Ala
  Variant (43)..(43): Xaa in Position 43 is any amino acid
  Variant (44)..(44): Xaa in Position 44 is Leu, Met or Val
XXXXXXXXXXXXXSXXXTXXXXXXXXXXXXXXXXPXXXXXXKXX

SEQ ID NO: 2919 - protein, 97 aa, Artificial sequence
  Consensus
  Variant (1)..(1): Xaa in Position 1 is Asn, Asp, Gln, Arg or Lys
  Variant (2)..(4): Xaa in Position 2 to 4 is any amino acid
  Variant (5)..(5): Xaa in Position 5 is Ile, Leu, Met, Phe or Val
  Variant (6)..(6): Xaa in Position 6 is any amino acid
  Variant (7)..(7): Xaa in Position 7 is Ile, Leu, Val, Ala or Ser
  Variant (8)..(8): Xaa in Position 8 is any amino acid
  Variant (9)..(9): Xaa in Position 9 is Pro or His
  Variant (10)..(12): Xaa in Position 10 to 12 is any amino acid
  Variant (13)..(13): Xaa in Position 13 is Ile, Val, Met, Leu, Phe or Ala
  Variant (14)..(19): Xaa in Position 14 to 19 is any amino acid
  Variant (20)..(20): Xaa in Position 20 is Lys, Ser or Arg
  Variant (21)..(29): Xaa in Position 21 to 29 is any amino acid
  Variant (30)..(35): Xaa in Position 30 to 35 is no amino acid or no amino acid
  Variant (36)..(36): Xaa in Position 36 is Leu, Ile, Met or Val
  Variant (37)..(44): Xaa in Position 37 to 44 is any amino acid
  Variant (45)..(64): Xaa in Position 45 to 64 is no amino acid or any amino acid
  Variant (65)..(65): Xaa in Position 65 is Ala, Gly, Pro or Ser
  Variant (66)..(66): Xaa in Position 66 is Tyr or Leu
  Variant (67)..(68): Xaa in Position 67 to 68 is any amino acid
  Variant (69)..(69): Xaa in Position 69 is Leu, Met or Tyr
  Variant (70)..(70): Xaa in Position 70 is Leu, Ile, Phe or Met
  Variant (71)..(71): Xaa in Position 71 is any amino acid
  Variant (72)..(72): Xaa in Position 72 is Asp, Glu, Ala, Asn or His
  Variant (73)..(75): Xaa in Position 73 to 75 is any amino acid
  Variant (76)..(76): Xaa in Position 76 is Gly, Ser or Asp
  Variant (77)..(80): Xaa in Position 77 to 80 is any amino acid
  Variant (81)..(81): Xaa in Position 81 is Phe or Tyr
  Variant (82)..(85): Xaa in Position 82 to 85 is any amino acid
  Variant (86)..(86): Xaa in Position 86 is no amino acid or any amino acid
  Variant (87)..(87): Xaa in Position 87 is Val, Ile, Leu, Ala or Gln
  Variant (88)..(90): Xaa in Position 88 to 90 is any amino acid
  Variant (92)..(96): Xaa in Position 92 to 96 is any amino acid
  Variant (97)..(97): Xaa in Position 97 is Ile, Val, Leu, Phe or Ala
XXXXXXXXXXXXXXXXXXXXXXXXXXXXXXXXXXXXXXXXXXXXXXXXXXXXXXXXXXXXXXXXXXXXXXXXXXXXXXXXXXXXXXXXXXWXXXXXX

SEQ ID NO: 2920 - protein, 1277 aa, Artificial sequence
  Consensus
  Variant (1)..(1277): Xaa in all Positions is any amino acid
XXXXXXXXXXXXXXXXXXXXXXXXXXXXXXXXXXXXXXXXXXXXXXXXXXXXXXXXXXXXXXXXXXXXXXXXXXXXXXXXXXXXXXXXXXXXXXXXXXXXXXXXXXXXXXXXXXXXXXXXXXXXXXXXXXXXXXXXXXXXXXXXXXXXXXXXXXXXXXXXXXXXXXXXXXXXXXXXXXXXXXXXXXXXXXXXXXXXXXXXXXXXXXXXXXXXXXXXXXXXXXXXXXXXXXXXXXXXXXXXXXXXXXXXXXXXXXXXXXXXXXXXXXXXXXXXXXXXXXXXXXXXXXXXXXXXXXXXXXXXXXXXXXXXXXXXXXXXXXXXXXXXXXXXXXXXXXXXXXXXXXXXGXXGDLXXXKXXPXXXXLXXXXXLXXXXXXXXGXXRXXXXXXXXXXXXXXXXXXXXXXXXXXXXXXXXXXXXXXXXXXXXXYXXXXXXXXXXXXXLXXXXXXXXXXXXXXXXXXXXXXXXXXXXXXXXXXXXXXXXXXXXXXXXXXXXXXXXXXXXXXXXXXXXXXXXXXXXXXXXXXXXXXXXXXXXXXXXXXXXXXXXXXXXXXXXXXXXXXXXXXXXXXXXXYXXXXPXXXXXXXXXXXXXXXXXXXXXXXXXXXRXXXEKPXGXDXXSXXXLXXXXXXXXXEXXXXRIDHYLGKEXVXNXXXXRFXNXXXXXXXWNXXXIXXXXIXXXEXXGXXXRXXYXXXXGXXXRDXXQNHXXQXXXXXAMEXPXXXXXXXXXXXEKXKXLXXXXXXXXXXXXXXXXXGQYXXXXXXXXXXXXXXXXXXXXXXXXXXXXXXYXXXXXXXXXXXXSXXXTXXXXXXXXXNXRWXGVPFXXXXGKXXXXXXXXXXXXXFXXXXXXXXXXXXXXXXXXXXXXXXXXXXXXNXXXXXXQPXEXXXXXXXXKXPGXXXXXXXXXXXXXXXXXXXXXXXXXXXXXXXXXXXXXXXXXAYEXLXXDXXXGXXXXFXXXXEXXXXWXXXXXXXXXXXXXXXXXXXXXXXXXXXXXXXXXXXXXXXXXXXXXXXXXXXXXXXXXXXXXXXXXXXXXXXXXXXXXXXXXXXXXXXXXXXXXXXXXXXXXXXXXXXXXXXXXXXXXXXXXXXXXXXXXXXXXXXXXXXXXXXXXXXXXXXXXXXXXXXXXXXXXXXXXXXXXXXXXXXXXXYXXGXXXXPXXXXXXXXXXXXXXXXXXXXXXXXXXXXXXXXXXXXXXXXXXXXXXXXXXXXXXXXXXXXXXXXXXXXXXXXXXXXXXXXXXXXXXXXXXXXXXXXXXXXXXXXXXXXXXXXXXXXXXXXXXXXXXX

SEQ ID NO: 2921 - DNA, 1371 bp, Escherichia coli K12
  CDS (1)..(1371)
atggaattatcctcactgaccgccgtttcccctgtcgatggacgctacggcgataaagtcagcgcgctgcgcgggattttcagcgaatatggtttgctgaaattccgtgtacaagttgaagtacgttggctgcaaaaactggccgcgcacgcagcgatcaaggaagttcctgcttttgctgccgacgcaatcggttaccttgatgcaatcgtcgccagtttcagcgaagaagatgcggcgcgcatcaaaactatcgagcgtaccactaaccacgacgttaaagcggttgagtatttcctgaaagaaaaagtggcggagatcccggaactgcacgcggtttctgaattcatccactttgcctgtacttcggaagatatcaataacctctcccacgcattaatgctgaaaaccgcgcgtgatgaagtgatcctgccatactggcgtcaactgattgatggcattaaagatctcgccgttcagtatcgcgatatcccgctgctgtctcgtacccacggtcagccagccacgccgtcaaccatcggtaaagagatggcaaacgtcgcctaccgtatggagcgccagtaccgccagcttaaccaggtggagatcctcggcaaaatcaacggcgcggtcggtaactataacgcccacatcgccgcttacccggaagttgactggcatcagttcagcgaagagttcgtcacctcgctgggtattcagtggaacccgtacaccacccagatcgaaccgcacgactacattgccgaactgtttgattgcgttgcgcgcttcaacactattctgatcgactttgaccgtgacgtctggggttatatcgcccttaaccacttcaaacagaaaaccattgctggtgagattggttcttccaccatgccgcataaagttaacccgatcgacttcgaaaactccgaagggaatctgggcctttccaacgcggtattgcagcatctggcaagcaaactgccggtttcccgctggcagcgtgacctgaccgactctaccgtgctgcgtaacctcggcgtgggtatcggttatgccttgattgcatatcaatccaccctgaaaggcgtgagcaaactggaagtgaaccgtgaccatctgctggatgaactggatcacaactgggaagtgctggctgaaccaatccagacagttatgcgtcgctatggcatcgaaaaaccgtacgagaagctgaaagagctgactcgcggtaagcgcgttgacgccgaaggcatgaagcagtttatcgatggtctggcgttgccagaagaagagaaagcccgcctgaaagcgatgacgccggctaactatattggtcgagctatcacgatggttgatgagctgaaataa

SEQ ID NO: 2922 - protein, 456 aa, Escherichia coli K12
MELSSLTAVSPVDGRYGDKVSALRGIFSEYGLLKFRVQVEVRWLQKLAAHAAIKEVPAFAADAIGYLDAIVASFSEEDAARIKTIERTTNHDVKAVEYFLKEKVAEIPELHAVSEFIHFACTSEDINNLSHALMLKTARDEVILPYWRQLIDGIKDLAVQYRDIPLLSRTHGQPATPSTIGKEMANVAYRMERQYRQLNQVEILGKINGAVGNYNAHIAAYPEVDWHQFSEEFVTSLGIQWNPYTTQIEPHDYIAELFDCVARFNTILIDFDRDVWGYIALNHFKQKTIAGEIGSSTMPHKVNPIDFENSEGNLGLSNAVLQHLASKLPVSRWQRDLTDSTVLRNLGVGIGYALIAYQSTLKGVSKLEVNRDHLLDELDHNWEVLAEPIQTVMRRYGIEKPYEKLKELTRGKRVDAEGMKQFIDGLALPEEEKARLKAMTPANYIGRAITMVDELK

SEQ ID NO: 2923 - DNA, 1343 bp, Pseudomonas putida
  CDS (75)..(1298)
cgattgccttcctgttcagcctgcgcctgccgaagcaggccgcgtacctgcaccacgatgactaaggacgtggcatgaccaaccaactgttcgacgcctacttcaccgcgccggccatgcgcgagattttctccgaccgtggccgcttgcagggcatgctcgatttcgaagccgcgctggcccgtgccgaagctgctgcggggctggtcccgcacagcgccgtggccgccatcgaggcggcatgcaaggccgagcgctatgacgtgggggcgctggccaatgccatcgcaaccgctggcaactcggcaatcccgctggtgaaggcgttgggcaaggtgattgccagtggcgtgcccgaggccgagcgctatgtgcacttgggcgccaccagccaggacgcgatggacaccggtctggtgttgcagttgcgcgatgccctcgacctgatcgaagcggacctgggcaaactggccgataccctgtcgcagcaggcattgaagcacgccgatacgccaatggtgggccgcacctggctgcaacacgctaccccggtgaccctgggcatgaaactggctggcgtgctgggggcattgacccgccaccgtcagcgcctgcaagagctcggcccgccctgttggtgctgcagttccggcggcgcctcgggcagcctggccgctctgggcagcaaggcgatgccggtggccgaggccctggccgagcaactgaagctgagcctgcccgagcaaccctggcacacccagcgtgatcgcctggtggagtttgcctcggtgctgggccttgtggccggcagcctgggcaagttcggccgcgatgtcagcctgctgatgcaaaccgaggcgggggaggtgttcgagccttctgcaccaggcaagggcggctcctcgaccatgccacacaagcgcaacccggtgggcgctgcggtgctgatcggtgccgcgactcgcgtgccggggctggtatcgacgctgttcgccgccatgccccaggagcacgagcgcagcctgggcctgtggcatgccgaatgggaaaccctcccggacatctgctgcctggtctccggcgcgctgcgccaggcccaggtcattgccgagggcattgaagtagacgcagcgcgcatgcgccgtaacctcgacctgacccaagggctggtgctggcagaagcggtgagtatcgtcctggcccgaacgcctgggccgcgaccgtgcccaccacttgctggagcaatgctgccagcgagccgtggccgaacagcggcacctgcgtgcggtgctgggtgatgacccgcaggtcagtgccgagctgtctgccgaagaacttgatcg

SEQ ID NO: 2924 - protein, 407 aa, Pseudomonas putida
MTNQLFDAYFTAPAMREIFSDRGRLQGMLDFEAALARAEAAAGLVPHSAVAAIEAACKAERYDVGALANAIATAGNSAIPLVKALGKVIASGVPEAERYVHLGATSQDAMDTGLVLQLRDALDLIEADLGKLADTLSQQALKHADTPMVGRTWLQHATPVTLGMKLAGVLGALTRHRQRLQELGPPCWCCSSGGASGSLAALGSKAMPVAEALAEQLKLSLPEQPWHTQRDRLVEFASVLGLVAGSLGKFGRDVSLLMQTEAGEVFEPSAPGKGGSSTMPHKRNPVGAAVLIGAATRVPGLVSTLFAAMPQEHERSLGLWHAEWETLPDICCLVSGALRQAQVIAEGIEVDAARMRRNLDLTQGLVLAEAVSIVLARTPGPRPCPPLAGAMLPASRGRTAAPACGAG

SEQ ID NO: 2925 - DNA, 1389 bp, Methanococcus jannaschii
  CDS (1)..(1389)
atggaacttaatcaaataataaagtcaggtgaaaaaatggctgtgcatccaattgattatagatatggaacaccagagatgagaaaagtttgggaagaagaaaataaattggaaaaaatgttaaaggtagaggctgcattagctaaagctcaggcagaactcggcttaattccaaaagaagccgctgaagagataaacaaaaaagcatcaacaaaatatgtaaaattggagagagttaaagaaattgagaaacaaacaaaacatgatgttgttgcaatgattagagctttagctgaagtatgtgaaggaaatgctggagaatacatacacttcggagctacatcaaacgatattgttgatactgccaactccctactaataaaagaatccattgaaattatagaagataagttaaagcagttaagagatatattattagacaaagcagaagagcataaatacactgtctgtgtaggaagaacacatggacagcatgcaattccaacaacctatgggatgagatttgctctatgggcggctgagattgacagacacttagagagattaaaagaagcaaaaaagagaatatgcgtctctatgattactggagctgttggaacaatggcggctatgggagagaagggtttggaagtgcataaaagagttgctgaaatcttaggcttagaaccagttttaatctcaaaccaagttattcagagagacagacatgctgaattcgtctttttattagctttaattgctcagacattaaacaagattggagttactgttagaagtatgcagagaactgaaattggagagctagaagaagagttcgaccctacaaagcaaactggttcatcaacaatgcctcacaagagaaatccaataacctttgagcaaatctgcggtttatcaagggttataaaatcactatgtatagctgaaatggacaatatcccattatgggaagagagggatttaacaaactcatcagctgagagatgtatatttgcagaggtttgcgttttaacagaccacatcttaacattagcaattaaaggagttaaaaagctaaaagtaaataaagaaaatgttgagagaaacttagaattaacaaaaggactgataatggctgagagaataatgattgaattggctaagagaggtatgggcagacaaacagctcatgaaatagtaaggcagtgtgcaatgaaagcctatgaagagaaaaggcatttaaaagatattttattagaaaatgaggaagttatgaagtatataacaaaagaagagttagaggaattgatgaatcctaaaacttacataggtttagctccacagatagttgatgaagttattaaaactctaaagaataaaaagtactaa

SEQ ID NO: 2926 - protein, 462 aa, Methanococcus jannaschii
MELNQIIKSGEKMAVHPIDYRYGTPEMRKVWEEENKLEKMLKVEAALAKAQAELGLIPKEAAEEINKKASTKYVKLERVKEIEKQTKHDVVAMIRALAEVCEGNAGEYIHFGATSNDIVDTANSLLIKESIEIIEDKLKQLRDILLDKAEEHKYTVCVGRTHGQHAIPTTYGMRFALWAAEIDRHLERLKEAKKRICVSMITGAVGTMAAMGEKGLEVHKRVAEILGLEPVLISNQVIQRDRHAEFVFLLALIAQTLNKIGVTVRSMQRTEIGELEEEFDPTKQTGSSTMPHKRNPITFEQICGLSRVIKSLCIAEMDNIPLWEERDLTNSSAERCIFAEVCVLTDHILTLAIKGVKKLKVNKENVERNLELTKGLIMAERIMIELAKRGMGRQTAHEIVRQCAMKAYEEKRHLKDILLENEEVMKYITKEELEELMNPKTYIGLAPQIVDEVIKTLKNKKY

SEQ ID NO: 2927 - DNA, 1350 bp, Methanobacterium thermoautotrophicum
  CDS (1)..(1350)
atggccattcatccagttgaattcaggtacgggacacctgaaatgagggttatctgggaggctgaaaataagctccagaagatgcttgacgttgaggcggcccttgcacaggcagagggcgaacttggaatcatacctgctgaagcggcctctgagatagtcaggaaggccagcacagaatttgtaacccttgaaagggttaatgagattgagagggacacaaagcatgatattgcatcccttgtaaaggcccttgcagagcagtgtgagggtgacgcaggggaatatgtgcacttcggtgcaacatccaatgacattgttgacacatccaattccctgcttctcagggactcaatctcggttctcagggataaactcaccagggtacttgaggttctccttgctctggcggatgaaaacagggacagggtctgcatcggaaggacccatggacagcacgccctcccaaccacctatggcatgaaattcgccatctgggcagatgagatccaccggcagctggagcgccttgatgcgtgcagtgaaaggctctgtgtcgggatgatgacaggagccgtcggaaccacagcggccctgggggaggagggcctggaggtccatgagagggtctcagagatactgggactcagaccggtcctgatatccaaccaggtcgtccagagggataaccatgcagagttcataatggtccttgccaacatagccacaacccttgataagatagccctcgagatcaggaaccttcagaggacagagataatggaggttggagagaaatttgaccctgagaaacaggtgggcagcagtaccatgcctcataagatgaacccaataactgcagagaggatatgtggtattgcgcgtgttataaggtcctatgttgtcgcggccctggagaacaacccattatggcatgagagggacctcacaaattcatcatccgaacgcataatccttcctgaggcatgcatcctcacggactacatacttaaactgacactggatgtcctctgcaacctcgtcttctaccctgagaatattaagaggaaccttgaattcacaggaggcctgataatggcggagaggctcatggctgagctaacaaggaggggcatgggtcggcagacagcatatgcagctgtgcgccagtgtgccattgaggccagcaggacaggaagaagcctaagggatgtggtccttgagaggtccgagatcatggattaccttacagtggaggaccttgaggagataatgaaccctgagacctacatcggatcagccaggaggatggttgagagggtccttgaggaatcacaaaaatggctctga

SEQ ID NO: 2928 - protein, 449 aa, Methanobacterium thermoautotrophicum
MAIHPVEFRYGTPEMRVIWEAENKLQKMLDVEAALAQAEGELGIIPAEAASEIVRKASTEFVTLERVNEIERDTKHDIASLVKALAEQCEGDAGEYVHFGATSNDIVDTSNSLLLRDSISVLRDKLTRVLEVLLALADENRDRVCIGRTHGQHALPTTYGMKFAIWADEIHRQLERLDACSERLCVGMMTGAVGTTAALGEEGLEVHERVSEILGLRPVLISNQVVQRDNHAEFIMVLANIATTLDKIALEIRNLQRTEIMEVGEKFDPEKQVGSSTMPHKMNPITAERICGIARVIRSYVVAALENNPLWHERDLTNSSSERIILPEACILTDYILKLTLDVLCNLVFYPENIKRNLEFTGGLIMAERLMAELTRRGMGRQTAYAAVRQCAIEASRTGRSLRDVVLERSEIMDYLTVEDLEEIMNPETYIGSARRMVERVLEESQKWL

SEQ ID NO: 2929 - DNA, 1296 bp, Thermotoga maritima
  CDS (1)..(1296)
atggtagaaaggtattcgctgtcaccgatgaaggatctctggacggaggaagcgaagtacagaagatggctggaagtggaactggcagtgacgagggcgtacgaagaactgggaatgattccgaagggagtcacagagaggataagaaacaacgctaagatagatgtggaactgttcaaaaagatagaagagaaaacaaaccacgatgtggtggcgttcgtcgaaggaatcggctcgatgataggagaagactcgagattcttccactacggtctcacctcgtcagatgttctcgacaccgcaaattccctcgctctcgtggaagcggggaaaatcctgttagagtctctaaaagagttctgcgacgtgctctgggaagtcgcgaatcggtacaaacacactcccaccatcggaagaacacacggagtccacgcggaacccacctcctttggcttgaaggtccttggatggtactccgaaatgaaaaggaacgttcagcgccttgagagggcgatagaggaagtttcttacggtaagatcagtggagctgttggaaactacgcaaacgtaccaccggaggtggaggaaaaagcgctttcgtacctgggcttgaaacctgaacccgtctccacacaggttgtaccgagggatcgtcacgctttctatctgtccacgctcgcgatcgtggcagcggggatagaaaggatcgctgtcgagatcagacatcttcagagaacggaagtgctcgaggtggaagaaccgttcaggaaaggtcagaggggctcgagtgccatgccccacaagaagaatcccatcacctgcgagcggctcacgggactttccagaatgatgagggcgtacgtcgatccttcccttgaaaacatcgcgctctggcatgagagggacatttcgcactcttccgtcgaaagatacgtttttcctgacgccacgcagactctttactacatgatcgtcacggccacaaacgtggtgaggaacatgaaagtgaacgaagaaagaatgaagaagaacatagatctcacgaaaggtctcgtgttctcccagagagtcctgctgaaactcatagagaaaggactcacgaggaaagaggcttacgatatcgtccagaggaacgctctgaaaacctggaattccgaaaaacacttcctcgagtacctcctcgaggatgaagaggttaagaaactggttaccaaagaagagctcgaagaactcttcgatatctcttactacttgaaacacgtagaccacatcttcgaacgctttgaaaaggagtga

SEQ ID NO: 2930 - protein, 431 aa, Thermotoga maritima
MVERYSLSPMKDLWTEEAKYRRWLEVELAVTRAYEELGMIPKGVTERIRNNAKIDVELFKKIEEKTNHDVVAFVEGIGSMIGEDSRFFHYGLTSSDVLDTANSLALVEAGKILLESLKEFCDVLWEVANRYKHTPTIGRTHGVHAEPTSFGLKVLGWYSEMKRNVQRLERAIEEVSYGKISGAVGNYANVPPEVEEKALSYLGLKPEPVSTQVVPRDRHAFYLSTLAIVAAGIERIAVEIRHLQRTEVLEVEEPFRKGQRGSSAMPHKKNPITCERLTGLSRMMRAYVDPSLENIALWHERDISHSSVERYVFPDATQTLYYMIVTATNVVRNMKVNEERMKKNIDLTKGLVFSQRVLLKLIEKGLTRKEAYDIVQRNALKTWNSEKHFLEYLLEDEEVKKLVTKEELEELFDISYYLKHVDHIFERFEKE

SEQ ID NO: 2931 - DNA, 1308 bp, Deinococcus radiodurans
  CDS (1)..(1308)
atgattgaccgctacctgacccccgaaatgaaggttctctggagcgaggcgaacaagtaccgcgcctggctgaaggtcgagctgagtgccctgcaggcgcaggcccggcacggcgaggtgcccgccgaagcgcatgccgcgctggtacaaaagagtgaagccgaccccctcgacgacgccttcgcgcagcaggtggccgaaatcgaggccgtgacccggcacgacatcgtggcctttacccgcgccctgaccgagcgttacggcgaggaggcccgctttatccaccacggcctgacgagcaccgacgtggtggacaccgcgcaaaacctgctgcttgacgaggccatggggctcatcatcaccgacgtgcagacgctgcgcgaggtgtgccgcatgcaggccgccgcgcacaagcacacgccggtcgtgggccgcacccacggcatccacgccgagccgatgaccttcggcctcaagttcctgaactggatggcgacgctcgaccgcgatctggaacggttgcaggccgcgcggggccgcgtgcaggtggtcatgctctcaggctcggtgggcacctacgcgcacgtctcacccaaaatcgaggaagaagtcgccgagagctggggctggcacgccgcgcccgtcaccaaccagacgcttgcccgtgaccgccacgccgaggtgctcgccgcgctcgccatcctgggcaccacgctggagaaaatcgccgtggaaatccgccacctgcaacgcagcgaggtgcgcgaggcgatggaacccttcggcaaggggcagaccggcagcagttcgatgccccacaagaaaaaccccatcctgaccgagaacgtgaccggctttgcccgtttgctgcgcggctttctggcgacgggcctggagaacgtggcactgtggcacgagcgcgacatcagccactccagcgccgagcgcgtcatcttgcccgacgccaccgccagcgcgagctacgcgacccgccgcctgaccggggtgctgcgcgacctggtggtcttccccgagcggatgctcaaaaatctggacgacctcggcggtctggtgttcagccagcgcgtgctgcacgccctgatcgacgataagggaatgatgcgcgaggcggcttacggcatcgtgcagcgcaacgccctgaagtcctgggaaaccggcgagggcctgcgcgacctgctgaaggccgacccagaaaacccgctgagtgacgcggaactcgacgccgccttcgacttgcagtggtacctgcggcacgtggacgacatctacgcccggtttgggatgtaa

SEQ ID NO: 2932 - protein, 435 aa, Deinococcus radiodurans
MIDRYLTPEMKVLWSEANKYRAWLKVELSALQAQARHGEVPAEAHAALVQKSEADPLDDAFAQQVAEIEAVTRHDIVAFTRALTERYGEEARFIHHGLTSTDVVDTAQNLLLDEAMGLIITDVQTLREVCRMQAAAHKHTPVVGRTHGIHAEPMTFGLKFLNWMATLDRDLERLQAARGRVQVVMLSGSVGTYAHVSPKIEEEVAESWGWHAAPVTNQTLARDRHAEVLAALAILGTTLEKIAVEIRHLQRSEVREAMEPFGKGQTGSSSMPHKKNPILTENVTGFARLLRGFLATGLENVALWHERDISHSSAERVILPDATASASYATRRLTGVLRDLVVFPERMLKNLDDLGGLVFSQRVLHALIDDKGMMREAAYGIVQRNALKSWETGEGLRDLLKADPENPLSDAELDAAFDLQWYLRHVDDIYARFGM

SEQ ID NO: 2933 - DNA, 1371 bp, Vibrio cholerae
  CDS (1)..(1371)
atggaactgtcagcattgactgctgtttcaccggtagatggccgctacggaagtaaaacgattgcgttacgcagtatcttcagtgagtttggtctcctaaagtaccgcactatcgttgaaattcgctggctacaaaagctagccgccactgctgagatcgcagaagtgcctgcattcagtgccgaagcgaatcaattccttgatgcgattgccgccaacttcaatgaggcggatgcactccgtatcaaagagattgaacgcaccaccaaccacgatgtaaaagccgtggaatacttcctgaaagagaaagtagcggccatgcctgagctgcatgccgtcaacgagttcattcactttgcttgtacttccgaagacatcaacaacacttcacatgcgttgatgctcaaagaagcgcgtgacacggtgatcctgcctgaaattcgcaacgtgattgacgcaattcgcaaactggccgaagagtaccgcgatattccgctgctttctcgtactcacggtcagccagcctctccatcgaccatgggtaaagagatggcgaacgtggcctaccgcatggagcgccaatacaagcagatcgctaacgtagaaatcctagccaaaatcaacggtgcggtgggtaactacaacgcgcacctttctgcttacccaacggtagattggcataaattcagcgaagagttcatcactgaatctttgggcgtagattggaacccgtacaccacgcaaatcgagccgcatgattacattgctgagctgtttgaagcggtggcacgttttaacaccatcttgatcgattttgatcgtgatgtttggggttacattgccctgggccacttcaaacaaagaaccatcgcgggtgaaattggttcttctaccatgccacacaaagtcaacccaatcgactttgaaaactcagaaggtaacttgggtctggcgaatgcggtatttacccatttagcgcaaaagctgcctatctctcgttggcaacgtgacctaacggattctaccgtgctgcgtaacctcggtgtgggtgtcggctatgccatcatcgcttatacctcaactttgaaaggcatcagcaagctggaagtgaaccgtgacgcactacttgcagaactggatcacaactgggaagttctggcagagccaatccaaactgtgatgcgccgctacggcattgaaaagccatatgagaagctcaaagaactgactcgtggtaagcgagtagatggcgaagcgatgcgtcaattcattgatggtttagcactgccagcggaagagaaaactcgcttgaaagccatgacaccagccagctatattggctacgcgattgagctgacggacaagctgtaa

SEQ ID NO: 2934 - protein, 456 aa, Vibrio cholerae
MELSALTAVSPVDGRYGSKTIALRSIFSEFGLLKYRTIVEIRWLQKLAATAEIAEVPAFSAEANQFLDAIAANFNEADALRIKEIERTTNHDVKAVEYFLKEKVAAMPELHAVNEFIHFACTSEDINNTSHALMLKEARDTVILPEIRNVIDAIRKLAEEYRDIPLLSRTHGQPASPSTMGKEMANVAYRMERQYKQIANVEILAKINGAVGNYNAHLSAYPTVDWHKFSEEFITESLGVDWNPYTTQIEPHDYIAELFEAVARFNTILIDFDRDVWGYIALGHFKQRTIAGEIGSSTMPHKVNPIDFENSEGNLGLANAVFTHLAQKLPISRWQRDLTDSTVLRNLGVGVGYAIIAYTSTLKGISKLEVNRDALLAELDHNWEVLAEPIQTVMRRYGIEKPYEKLKELTRGKRVDGEAMRQFIDGLALPAEEKTRLKAMTPASYIGYAIELTDKL

SEQ ID NO: 2935 - DNA, 1302 bp, Bacillus halodurans
  CDS (1)..(1302)
atgattgaacggtatactcgtcctgagatgggagcaatttggacagaagaaaatcgctatcaggcatggctagaagtagagattgttgcctgtgaagcatgggcggagcttggagagattccgaaagaggacgtaaagaaaatccgcgaacatgccagctttgatgtggagcgaattttggaaattgagcaggaaactcgccacgatgtggtggcgtttacccgtgcagtatccgaaacgctaggagaagagagaaaatgggttcattatgggttaacgtcaacagatgtcgtagatacagcgctatcctacttgctgaagcaagcaaatgaaattattgaggccgatcttgtcagatttcttgacatcttaaaagagaaggcattagagcacaagtatacggtaatgatgggacggacacatggcgttcacgcagagcctactacgttcgggttaaagctcgctctctggtatgaagaaatgaagcgcaaccttgagcgttttcgtcttgcagcagaaggcgttcgtgttggtaagctttcaggagcggtcggaacgtacgcaaacattgatccatttgtagagcagtatgtttgcgaaaagctaggtcttgagcgggctccaatttcaacgcaaacacttcaacgggatcgccatgcagaatatatggcgacgttggcccttatcgccacttcgattgagaagttcgctgttgaaattcgcgggttgcaaaaatctgaaacgagagaagtagaggaatattttgcgaagggacaaaaagggtcatcggctatgccacacaagcgcaatccgattggatctgaaaatatgacagggatcgcccgtgtcgtccgcggccatatgcttgcggcctatgaaaatgttcccctttggcatgagcgggacatttcccattcctctgctgaacggatcattttaccagatgcgacgattgctattaattacatgttaaaccgattcggaaacatcgtgaaaaacttaaccgtattccctgaaaacatgaagcgtaatatgacacgtacgtatggtcttatctactcgcaaagagtgttgctttctttgatcgacaaagggatggtacgggaagaagcatacgatcttgtccaaccgaaggcaatggaagcgtgggaaaaaggcgttcagttccgtgaattggttgagcaagaggaacggattacgtctgttttatcacctgaagaaatagaagcatgctttgactacaaccaccatttaaaacatgtggacacgatctttgagcgtctcggcttaacaaacgaataa

SEQ ID NO: 2936 - protein, 433 aa, Bacillus halodurans
MIERYTRPEMGAIWTEENRYQAWLEVEIVACEAWAELGEIPKEDVKKIREHASFDVERILEIEQETRHDVVAFTRAVSETLGEERKWVHYGLTSTDVVDTALSYLLKQANEIIEADLVRFLDILKEKALEHKYTVMMGRTHGVHAEPTTFGLKLALWYEEMKRNLERFRLAAEGVRVGKLSGAVGTYANIDPFVEQYVCEKLGLERAPISTQTLQRDRHAEYMATLALIATSIEKFAVEIRGLQKSETREVEEYFAKGQKGSSAMPHKRNPIGSENMTGIARVVRGHMLAAYENVPLWHERDISHSSAERIILPDATIAINYMLNRFGNIVKNLTVFPENMKRNMTRTYGLIYSQRVLLSLIDKGMVREEAYDLVQPKAMEAWEKGVQFRELVEQEERITSVLSPEEIEACFDYNHHLKHVDTIFERLGLTNE

SEQ ID NO: 2937 - DNA, 1296 bp, Lactococcus lactis subsp. lactis
  CDS (1)..(1296)
atggttattagccgttattcacgtccagaaatggcagagatttggtcagaagaaaacaagtataaagcatggcttgaagtcgaaattcttgcagatgaagcatgggcagagcttggggaaatcccagcagcagatgtgaaaaaaattcgcgaaaatgcaacttttaatgttgaacgtattcttgaaattgaaaaagaaacacgtcatgatgtggtagctttcacacgttctgtcagtgaatcattgggtgaagaacgcaaatgggttcattatggtctgacatcaacagatgtcgttgatacagcttatggttatctttataaacaagctaatgatattttgcgcaatgatctaaaaaactttgcagaaattgttaaaaataaagctttagagcataaatacacagtaatgatgggtcgaactcacggcgttcacgctgaaccaacaacttttggcttgaaattagcgacttggtacagcgaaatgaaacgaaatattgaacgttttgaacgtgctgcaaaagctgttgaagctgggaaaatttctggtgctgttggaacttttgctaatattcctccatttgtagaagcctatgtttgtgaaaaattagggactcgtccgcaagagatttcaacacaagtcttaccacgtgatttacatgcagaatacttccaaacgttggcgctcattgcgacatcaattgaacgcatggccacagaaatccgtggattacaaaaatctgaacaacgtgaagttgaagaattctttgctaaaggtcaaaaaggctcgtcagcaatgccacacaaacgtaacccaattggttctgaaaatatgacaggtttagcccgcgtcattcgtggacatgcaattacagctcttgaagatgttagtctttggcatgaacgtgacatttcacacagttctgctgaacgtatcattgcacctgatacaacagaattattggattatatgttgaatcgttttgggaatatcgttaaaaatttgactgttttcccagaaaatatgaagcgaaatatggatgcgacttttggcttgatttacagccaacatgtcatgttaatgttgattgaaaagggaatgacgcgtgaagcagcttacgatttagttcaacctttgactgcaaaatcttgggatgaacaagtgatgtttagaccattgcttgaagaaaatgaacaaattcgtcagtatttgaatgatgaagatattgataaagcttttgattacaattatcatttaacaagagtcgatgaaatttttgagcgtgtctttgattaa

SEQ ID NO: 2938 - protein, 431 aa, Lactococcus lactis subsp. lactis
MVISRYSRPEMAEIWSEENKYKAWLEVEILADEAWAELGEIPAADVKKIRENATFNVERILEIEKETRHDVVAFTRSVSESLGEERKWVHYGLTSTDVVDTAYGYLYKQANDILRNDLKNFAEIVKNKALEHKYTVMMGRTHGVHAEPTTFGLKLATWYSEMKRNIERFERAAKAVEAGKISGAVGTFANIPPFVEAYVCEKLGTRPQEISTQVLPRDLHAEYFQTLALIATSIERMATEIRGLQKSEQREVEEFFAKGQKGSSAMPHKRNPIGSENMTGLARVIRGHAITALEDVSLWHERDISHSSAERIIAPDTTELLDYMLNRFGNIVKNLTVFPENMKRNMDATFGLIYSQHVMLMLIEKGMTREAAYDLVQPLTAKSWDEQVMFRPLLEENEQIRQYLNDEDIDKAFDYNYHLTRVDEIFERVFD

SEQ ID NO: 2939 - DNA, 1293 bp, Listeria innocua
  CDS (1)..(1293)
atgttagaacgttatactcgtaaagaaatgggcaatatttggacagaacaaaatcgttatcaagcttggttagaagtagaaattttggcttgtgaagcgtgggcagagcttggtgatattccaaaagaagatgtaaagaaaattcgcgcgaatgctaagtttgatgtcgaccgtattcatgaaatcgaattagaaactagacatgatgtagtagcatttactcgttcggtatctgagtctcttggtgaggaacgtaaatgggtgcattatggcttaacttcaacagatgtagtagatacagcgaattcttacttactaaaacaagcaaatgaaattttaagaaaagacttggagaatttcattgcgattattggcgaaaaagcgaaagaacataaatatacagtaacgatgggtcgtacgcacggtgttcacgcggagccaacaacttttggtttaaaacttgctctatggtacgaggaaatgaaacgtaatttagaacgttttaactttgctgctgatggtgtagagttcggaaaaatttctggagctgttgggacttatgctaacattgatccttttgtggaagcatatgtttgtgaaaaattaggaactactccagcgccgatttcaacgcaaacattgcaacgtgatcgtcacgcagaatatcttgcaacgcttgctttaattgccacttctgtcgaaaaatttgctgttgaagtacgtgcactacaaaaaagtgaagtacgcgaagtagaagaattctttgcaaaagggcaaaaaggttcatccgcaatgccgcataaacgtaatccaattggttctgaaaatgtaacagggttagctcgcgttattcgtggacatatggttactgcttatgaaaatgtaccactttggcatgaacgtgatatttctcatagttcagcggaacgaattattttaccagattctactattttattagattatattttaaatcgttttggtaatattgtgaaaaacttgacggtattcccagaaaatatgaaacgtaatatggatagaactctaggattaatttattcgcaacgtgttttacttgcgctgattgataaaggcttagctcgagaagcagcttatgatgtcgtacaaccaagagcaatggaagcttgggaaaaacaagtaccattccgtgaattagtagaacaagatgcaaccattactgaaaatctatctgcagaagaaattgcagactgctttgattacaactatcacctgaagaatgtcgacttaatttttgatcgcttaggattataa

SEQ ID NO: 2940 - protein, 430 aa, Listeria innocua
MLERYTRKEMGNIWTEQNRYQAWLEVEILACEAWAELGDIPKEDVKKIRANAKFDVDRIHEIELETRHDVVAFTRSVSESLGEERKWVHYGLTSTDVVDTANSYLLKQANEILRKDLENFIAIIGEKAKEHKYTVTMGRTHGVHAEPTTFGLKLALWYEEMKRNLERFNFAADGVEFGKISGAVGTYANIDPFVEAYVCEKLGTTPAPISTQTLQRDRHAEYLATLALIATSVEKFAVEVRALQKSEVREVEEFFAKGQKGSSAMPHKRNPIGSENVTGLARVIRGHMVTAYENVPLWHERDISHSSAERIILPDSTILLDYILNRFGNIVKNLTVFPENMKRNMDRTLGLIYSQRVLLALIDKGLAREAAYDVVQPRAMEAWEKQVPFRELVEQDATITENLSAEEIADCFDYNYHLKNVDLIFDRLGL

SEQ ID NO: 2941 - DNA, 1296 bp, Nostoc sp. PCC 7120
  CDS (1)..(1296)
atgatagagcgttatactctgcccgaaatgggcaacctgtggactgacttttataaactaaaaacctggcttcaggtggaaattgcagtctgtgaagcccaagcggaattgggttatattccatctgctgctgttgaggaaatcaaggctaaggcaaattttgatccgcaacgggtgttggaaatagaggcggaagtccgtcacgatgtcatcgcctttttgactaatgtcaatgagtatgtgggtgatgctggacgttacattcacttgggcttaactagctctgatgtactagatacagctttagctttacaactggttgctagtttggatgtgttggcgcaacgtctggaagatttgattcaggtgattcgccaaaaggcacgggaacaccggtatacggtaatggctggccgatcgcatggtattcacgctgaaccaatcacttttgggtttaaactggctggttggttggcggaagtgttacgccaccaacaacggctgacaattttgcgggaaacgatcgccgtgggtaagatttctggcgcggtgggtacctatgccaatattgaaccacgggtggaggcgatcgcttgtcaaaaactcggactcaaacccgatacagcttctacacaagtcatttcccgcgatattcatgctgattttgtgcagcaattagccctcatcgctgcttctattgaacgctttgctgtagaaattcgcaatctacaaaaaacagacgttctggaagtagaggaatttttctcgaagggacagaaaggctctagtgcaatgccacacaaacgcaatcccatccgttcggaacggctgacggggatggcgcggttagtgaggagtcatgccggcgcagctttagaagatgtcgctttgtggcacgaacgggacatttcccatagttctgtggaacgagtggttctgccagatgcctgcattttgacccatttcatgctgatagaaatcactaatttggtggaaaatctgttagtttacccagaaaacatgacgcggaatctcaactgctatggtggcgttgtattcagccaaaaagttttactggcattggtagataagggactcagccgggaagaagcctatgcgatcgtgcagcaaaatgctcatacggcatggaataagccggaaggcaatttccacgacttgatcattaacgatcctcgtgtcactcaacatttgtcgcccgtagaaattgccgtgtgttttgacccacagcaacatctcaagcatttggatgaggtttatcataggttggatatttag

SEQ ID NO: 2942 - protein, 431 aa, Nostoc sp. PCC 7120
MIERYTLPEMGNLWTDFYKLKTWLQVEIAVCEAQAELGYIPSAAVEEIKAKANFDPQRVLEIEAEVRHDVIAFLTNVNEYVGDAGRYIHLGLTSSDVLDTALALQLVASLDVLAQRLEDLIQVIRQKAREHRYTVMAGRSHGIHAEPITFGFKLAGWLAEVLRHQQRLTILRETIAVGKISGAVGTYANIEPRVEAIACQKLGLKPDTASTQVISRDIHADFVQQLALIAASIERFAVEIRNLQKTDVLEVEEFFSKGQKGSSAMPHKRNPIRSERLTGMARLVRSHAGAALEDVALWHERDISHSSVERVVLPDACILTHFMLIEITNLVENLLVYPENMTRNLNCYGGVVFSQKVLLALVDKGLSREEAYAIVQQNAHTAWNKPEGNFHDLIINDPRVTQHLSPVEIAVCFDPQQHLKHLDEVYHRLDI

SEQ ID NO: 2943 - DNA, 1371 bp, Yersinia pestis
  CDS (1)..(1371)
atggaattatcctcactgaccgccgtttcaccaattgatggacgttacggcgacaaagtcagcgcactgcgccccatctttagcgaattcggtttgctaaaattccgtgtgcaggtcgaagtgcgttggctgcaaaaactggcagcctgcgcagaaattaaagaggttcctgcttttgatgccaacgcaaacgcttaccttgataaaattgtgcaagagttcaatgaacaagatgcacaacgcattaagaccatcgaacgcacaaccaatcatgatgtgaaggctgtcgagtattttctgaaagaaaaagtggaaaatctccctgcgttacatgccgtgtctgagttcattcactttgcttgtacttcagaagatatcaataacctgtcccacgcattgatgctgcaaactgctcgccaggatgtcctgctgcccgcatggcggcagattattgactcaataaaagcactggcccaccaatatcgcgatttacccttactgtcccgcacccacggccagcccgcgacaccctcaaccatcggtaaagagctggcgaatgtggcgtaccgcatggaacgtcagttccgccaactaacacaagtggaaattctgggtaaaatcaacggtgcagtaggcaactataacgcccacatcgtggcctaccctgaggttgattggcatcagtttagtgaaagttttgtgacatcgctgggaatcaactggaacccatacaccacgcaaatcgagcctcatgattatattgctgagttatttgactgtgtggcccgtttcaatactattttgatcgattttgaccgtgatatctggggttatattgctctgaatcacttcaagcaaaaaaccatcgcgggcgaaatcggttcaagcaccatgccgcataaagttaatccaattgatttcgaaaactcggaaggcaatttgggtctatcgaatgccgtgctaggtcacatggccagcaaactaccggtttctcgctggcaacgtgatctgaccgactcgaccgtgctacgtaatctgggtgtgggtctgggttatgccctgattgcctatcaggcaaccatgaaaggcatcagcaaactggaagttaacgaagcacatctgttgcaagagcttgatcataattgggaagttctggctgaacctattcaaacgatcatgcgccgttacggtattgaaaaaccgtatgaaaaactgaaagaattgacccgtggcaaacgtgtcgatgccgcaggtatgcaagcatttatcgatgggctggatctaccagaagaagaaaaaaaccggttgaaggccatgacgccagcgaattacattggccgcgccaccaccatggttgatgaattaaagtaa

SEQ ID NO: 2944 - protein, 456 aa, Yersinia pestis
MELSSLTAVSPIDGRYGDKVSALRPIFSEFGLLKFRVQVEVRWLQKLAACAEIKEVPAFDANANAYLDKIVQEFNEQDAQRIKTIERTTNHDVKAVEYFLKEKVENLPALHAVSEFIHFACTSEDINNLSHALMLQTARQDVLLPAWRQIIDSIKALAHQYRDLPLLSRTHGQPATPSTIGKELANVAYRMERQFRQLTQVEILGKINGAVGNYNAHIVAYPEVDWHQFSESFVTSLGINWNPYTTQIEPHDYIAELFDCVARFNTILIDFDRDIWGYIALNHFKQKTIAGEIGSSTMPHKVNPIDFENSEGNLGLSNAVLGHMASKLPVSRWQRDLTDSTVLRNLGVGLGYALIAYQATMKGISKLEVNEAHLLQELDHNWEVLAEPIQTIMRRYGIEKPYEKLKELTRGKRVDAAGMQAFIDGLDLPEEEKNRLKAMTPANYIGRATTMVDELK

SEQ ID NO: 2945 - DNA, 1353 bp, Agrobacterium tumefaciens
  CDS (1)..(1353)
atgctaaacgggcagcaaaattcctccactaagaaagtcattgccatgatccctcgttactcccggccggaaatggtcgccatctggtcgccggaaacaaaattccgcatctggttcgagatcgaggcccatgcctgtgacgcgctggccgagcttggtgtcatcccgaagtcagcagcccagaccatctgggaaaagggcggcagcgccacgtttgacgtcgcccgcatcgatgagatcgaggccgtgaccaagcacgacgtcatcgccttcctcacccatctcgccgaatttgtcggccccgacagccgttttgtgcatcagggcatgacctcttccgacgttctcgacaccaccctcaacatccagctcgtgcgcgccgccgatctgctgctcgccgacatcgaccgggtgctcgcggctctcaagacccgcgccttcgaacacaagaacacggtgcgcatcggccgcagccacggcatccatgccgagccgaccacgatgggcctgacctttgcccgcttctatgccgagatgcaccgtaaccgcgagcgcctcgttaatgcccgtgcggaaatcgccaccggcgcgatctccggcgccgtcggcaccttcgccaatatcgacccgcgcgtcgaggaacatgtctgcgaaaagcttggtctcatccccgagccggtctccacgcaggtcattccgcgcgatcgccacgccatgttcttcgccgttctcggcgtcatcgcctcgtcgatcgaaaacgtcgccatcgaaatccgccacatgcagcgcaccgaggttctggaagcggaagagttcttctctcccggccagaagggctcgtccgccatgccgcacaaacgcaacccggtcctgaccgaaaacctcaccggtcttgcgcgtctggtgcgcatgtccgtcgtgccggccatggagaacgtggcgctctggcacgagcgcgatatcagccactcctccgtggagcgcgccatcggccccgacaccacggttacgctggatttcgcgctgaaccgcctggccggcgtcatcgagaagctggtgatctatcccgacaacatgttgaagaacatgaacaagttccgcggcctcgtacattcgcagcgcgttctgctggcgctgacacaggccggtgtttcgcgtgaagacgcttaccgtctggtacagcgcaacgccatgcgggtctgggaacagggtgccgatttcctggaagaactgctgggcgacgaggaagtgcgcgcagcgctgcctgaagacgtgatccgtgaaaagttcgacctcggttatcataccaagcacgtcgacacgatcttcacccgtgtcttcggcaaggcctga

SEQ ID NO: 2946 - protein, 450 aa, Agrobacterium tumefaciens
MLNGQQNSSTKKVIAMIPRYSRPEMVAIWSPETKFRIWFEIEAHACDALAELGVIPKSAAQTIWEKGGSATFDVARIDEIEAVTKHDVIAFLTHLAEFVGPDSRFVHQGMTSSDVLDTTLNIQLVRAADLLLADIDRVLAALKTRAFEHKNTVRIGRSHGIHAEPTTMGLTFARFYAEMHRNRERLVNARAEIATGAISGAVGTFANIDPRVEEHVCEKLGLIPEPVSTQVIPRDRHAMFFAVLGVIASSIENVAIEIRHMQRTEVLEAEEFFSPGQKGSSAMPHKRNPVLTENLTGLARLVRMSVVPAMENVALWHERDISHSSVERAIGPDTTVTLDFALNRLAGVIEKLVIYPDNMLKNMNKFRGLVHSQRVLLALTQAGVSREDAYRLVQRNAMRVWEQGADFLEELLGDEEVRAALPEDVIREKFDLGYHTKHVDTIFTRVFGKA

SEQ ID NO: 2947 - DNA, 1371 bp, Salmonella enterica subsp. enterica serovar Typhi
  CDS (1)..(1371)
atggaattatcctcactgaccgccgtttcccctgtcgatggacgctacggcgataaagtcagcgcgctgcgcggaatttttagcgaatacggtttgctgaaatttcgtgtacaagtcgaagtacgttggctgcagaaattagccgcgcacgcagcgatcaaggaagttcctgcttttgctgccgacgcaaacggttacctggatacgcttgtggcaaacttcaatgaagaagatgccgcgcgcattaaaaccattgagcgcaccacgaatcacgatgtgaaagcggttgagtattttctgaaagaaaaagccgccgcgatcccggcgctacatgacgtttccgaatttatccactttgcctgcacctctgaggatattaacaacctgtcgcacgcgttaatgctcaaaactgcgcgcgatgaagtgatcctgccttactggcgtcaggtgattaacgcggttaaagatctcgccacgcagtatcgcgatattcctctgctctcccgcacccacggccagccggcaacaccttccactctgggtaaagagatggcgaacgtggcgtatcggatggagcgtcagttccgccagctcaatcaggtggagatcctcggtaaaattaacggcgccgtaggcaactataacgcgcatatcgccgcctatccggaagttgactggcatcagttcagcgaagagttcgtcacctcgctgggcatccagtggaacccttacaccacccagattgaaccgcatgattatattgcggaactgtttgactgtatcgcgcgctttaacaccatcctgatcgatttcgatcgcgatgtctggggctatattgcgttgaaccatttcaaacagaaaaccatcgccggagagatcggttcttctaccatgccgcataaagttaaccccattgactttgaaaactcagaaggcaacctcggtctgtctaatgcagtgttgcaccatctggcaaacaaactgccggtttcccgctggcagcgcgatctgaccgactcaaccgtcctgcgtaacctgggtgtcggcatcggctatgcgcttatcgcttatcagtcgaccctgaagggcgtcagcaagctggaagtgaaccgcgatcatctgcttgacgaactggatcacaactgggaagtattagccgaaccgatccagaccgtcatgcgccgctatggcattgaaaaaccatatgaaaaactgaaagagttgacccgtggcaagcgtgtcgatgccgaaggaatgaaacagcttattgatagtctggccctgccggaagcagaaaaaacgcgccttaaagccatgacgccggcaaattatatcggtcgcgctgtgaatctggtcgacgaacttaaataa

SEQ ID NO: 2948 - protein, 456 aa, Salmonella enterica subsp. enterica serovar Typhi
MELSSLTAVSPVDGRYGDKVSALRGIFSEYGLLKFRVQVEVRWLQKLAAHAAIKEVPAFAADANGYLDTLVANFNEEDAARIKTIERTTNHDVKAVEYFLKEKAAAIPALHDVSEFIHFACTSEDINNLSHALMLKTARDEVILPYWRQVINAVKDLATQYRDIPLLSRTHGQPATPSTLGKEMANVAYRMERQFRQLNQVEILGKINGAVGNYNAHIAAYPEVDWHQFSEEFVTSLGIQWNPYTTQIEPHDYIAELFDCIARFNTILIDFDRDVWGYIALNHFKQKTIAGEIGSSTMPHKVNPIDFENSEGNLGLSNAVLHHLANKLPVSRWQRDLTDSTVLRNLGVGIGYALIAYQSTLKGVSKLEVNRDHLLDELDHNWEVLAEPIQTVMRRYGIEKPYEKLKELTRGKRVDAEGMKQLIDSLALPEAEKTRLKAMTPANYIGRAVNLVDELK

SEQ ID NO: 2949 - DNA, 1335 bp, Archaeoglobus fulgidus
  CDS (1)..(1335)
atgatagttcaccccatcgattaccgctacggcacccccgaaatgaagaggatttggagcgaggatagcaagatcaagaggatggtaagggttgaaatggctcttctacgcgctcttgcaaaaaaaggatacctcagcgaagaggaggccaaagaggccaaaaagaaggcttacagcgtaacaccagagagagtgaaggaaattgaggcagagataaagcacgacataatggcgctggtaaaggccattaccgaggccaccggatgcaggtgggttcacttcggagccacatcaaacgacataatcgacacagcaacggctttgcagctaagggacagtttgaaaatcctcgaggttaaaataaagcgccttgcgaaggttcttgcggacaaagccttagaatataaggacgtggtctgcctcggcagaactcacggtcaggcggctttgcccacaacctacggcttcagattcgccctgtgggcggctgaggttgcaaggcactacatcaggctgcagcagatgaaggacaggcttctcgtagggcagatgagcggggcagtgggaacacaggccgccttcggcaaagacggcttcgagatagaggaggaggttatgaggctgctgaaccttaaaccggctctgatttcaagccagataatacccagggactcctactgcgagtacctcgagtttctcgcaaatcttgctgcaacactcgaaaagattgctctgaacttcagactccttcaaagagctgaagttggagagttgatggaaaaattcgaggccaagcaggtcggaagctccacgatgccccacaaaaggaacccaatagactgcgagaatgtttgcggcttggcgagggtcgtgagggggttcgtggagcctcagcaccagtcggcaattctgtgggaggagagagaccttacaaactcctcggcggagaggataacccttgttgagtcaacggttctggcggaccacattctaacgaagatgataaaggttgtttccagcgttagtctcaacctcgagaacatcaggaggaatcttgagatgcagagggggctcaacctgagcgaggcggtgatgatagagatgacgaaaagaggggtggggaggcaggaggcgcacgagattctcaggcaggcggcgatgagggcttacgagaacaattcatcgcttcttgacgagcttttgaaagacgagagagttatgaagtacttcaaagaggatgagcttagggagattctgaaacctgaaaattatctggggactgcaagggaaagggtcgagagggttgtgagatgggtgaacgaggtgttgaaatga

SEQ ID NO: 2950 - protein, 444 aa, Archaeoglobus fulgidus
MIVHPIDYRYGTPEMKRIWSEDSKIKRMVRVEMALLRALAKKGYLSEEEAKEAKKKAYSVTPERVKEIEAEIKHDIMALVKAITEATGCRWVHFGATSNDIIDTATALQLRDSLKILEVKIKRLAKVLADKALEYKDVVCLGRTHGQAALPTTYGFRFALWAAEVARHYIRLQQMKDRLLVGQMSGAVGTQAAFGKDGFEIEEEVMRLLNLKPALISSQIIPRDSYCEYLEFLANLAATLEKIALNFRLLQRAEVGELMEKFEAKQVGSSTMPHKRNPIDCENVCGLARVVRGFVEPQHQSAILWEERDLTNSSAERITLVESTVLADHILTKMIKVVSSVSLNLENIRRNLEMQRGLNLSEAVMIEMTKRGVGRQEAHEILRQAAMRAYENNSSLLDELLKDERVMKYFKEDELREILKPENYLGTARERVERVVRWVNEVLK

SEQ ID NO: 2951 - DNA, 1323 bp, Helicobacter pylori
  CDS (1)..(1323)
atgttagaacgctatgcgaatgaagaaatgaaagccctatggaatgagcaaaccaaatttgaaacttatttggaagtggaaaaagctgtcgttagggcgtggaataagcttgggcaaatccaagatagcgattgtgaaaaaatctgcttaaaagcggcattcaatcttgaacgcatcaaagaaattgaaaaaaccactaagcatgatttaatcgctttcactacttgcgtggctgaaagcttgggcgaagaatcccgcttctttcattatgggatcacttctagcgattgcattgatacggctatggcgttattgatgaccaaaagcttaaaactcattcaaaaaggcgttaaaaacctctatgaaacccttaaaaatagggctttagagcatcaagacacgctaatggtgggcagaagccatggggtgtttggcgaacccatcacctttggtctagttttagctctttttgctgatgaaatcaaacggcatttaaaagccctggatttaacgatggaatttatcagcgtaggggcgatcagtggggctatggggaatttcgcgcacgcccctttagaattagaagaattagcgtgcggatttttaggcttaaaaaccgctaatatcagcaatcaagtcattcaaagagaccgctacgctaggcttgcatgcgatctggctcttttagcgagcagttgtgaaaaaatcgctgtcaatatccgccatttgcaacgcagtgaagtctatgaagtggaagaagctttttcagcagggcaaaagggaagctctgcgatgcctcataaaagaaaccccatcttgagcgagaatatcaccgggctttgcagggtgattcgctcttttactacccccatgctagaaaatgtcgccttatggcatgaaagggacatgagccatagctctgtggagcgttttgcgctgcctgatctgtttatcaccagcgatttcatgctcagccgtttgaatagcgtgattgaaaatctggtggtttatcctaaaaacatgcttaaaaatttagctttgagtggggggctagtcttttcgcaacgggtgttattggaattgcctaaaaaaggtttgagcagagaagaaagctattctatcgtgcaagaaaatgcgatgaaaatatgggaggttttgcaacaaggcgcttttaaaaacgctgatgaaaatttatttttaaacgccctacttaacgatgaacgcttgaaaaaatatttgaatgagagcgaaatcagagcatgttttgattacagctattacactaaaaatgtgggggcgatttttaaaagggtgtttggataa

SEQ ID NO: 2952 - protein, 440 aa, Helicobacter pylori
MLERYANEEMKALWNEQTKFETYLEVEKAVVRAWNKLGQIQDSDCEKICLKAAFNLERIKEIEKTTKHDLIAFTTCVAESLGEESRFFHYGITSSDCIDTAMALLMTKSLKLIQKGVKNLYETLKNRALEHQDTLMVGRSHGVFGEPITFGLVLALFADEIKRHLKALDLTMEFISVGAISGAMGNFAHAPLELEELACGFLGLKTANISNQVIQRDRYARLACDLALLASSCEKIAVNIRHLQRSEVYEVEEAFSAGQKGSSAMPHKRNPILSENITGLCRVIRSFTTPMLENVALWHERDMSHSSVERFALPDLFITSDFMLSRLNSVIENLVVYPKNMLKNLALSGGLVFSQRVLLELPKKGLSREESYSIVQENAMKIWEVLQQGAFKNADENLFLNALLNDERLKKYLNESEIRACFDYSYYTKNVGAIFKRVFG

SEQ ID NO: 2953 - DNA, 1329 bp, Campylobacter jejuni
  CDS (1)..(1329)
atggttgaaagatatagcagagaaatcatggctaaaaaatgggacatgcaagcaaaatacgatgcgtggttaaaagtagaattagccgctgtaaaagcttggaacaaactcggtctcattgatgacacagactgcgaaaaaattcttaaaaatgcaaaatttgatattgcaagaatagacgaaatagaaaaaaccacaaaacatgatgttatagcttttcttacaagtgtaagtgaaagtttgggagaagagagtcgttttgtgcattatgcaatgacaagttctgattgtatagatacagctgttgctttacagataaaagagagtttggagcttattttagaagatgtttctttgcttttagaagcgatcaaaaagcgtgctttggagcataaaaacaccttaatggtaggaagaagtcatggaattcatggagaacctattacttttggtttggtgttagctatttggtatgatgaaatttcgcatgcaaaagagcttttagaacatgcaaaagaagtgataagctatggaaaaatcagcggtgcaatgggaaattttgctcatgctcctttagaatttgaagaagaagtttgtaaaaatttaggtcttaaggccgctcctgtttcaaatcaagtgatccaaagagatcgttatgctcaggttatttctgctattgcgattttagcttcaagttgtgagcaaatcgctgtagccataagacattttcaaagaactgaagtttatgaggctgaggagtattttagtgtaggacaaaaaggaagttcagctatgccacataaaagaaatcctgttttaagtgaaaatatcacaggactttgtcgtgtgcttagatcttttgtaactccagctttggaaaatgttgcactttggcatgaaagagatatatctcattctagtgttgaaagatttattttgcctgatgcttttatcacggctgattttatgcttatgcgtcttacaaatttgattgataagcttttggtttatcctgaaaatatgatgaaaaatttaaatcttacaggcgggcttgtattttcagggagggtgcttttagaacttccatttaaaggcattagccgtgaagaagcttataaaatagttcaaagaaacgctatgaaagtttgggcagatttgcaaaatggcaaggctgctatcaatgaaaaaaatgaaagtttgtttttgttagcgcttttaagcgatgaagatttaagaaaaagtttgagcgaagaggatgtaagaaaatgtttcgattataactactatacaaaaaatgttgatgcaatttttaaaagaacatttaaataa

SEQ ID NO: 2954 - protein, 442 aa, Campylobacter jejuni
MVERYSREIMAKKWDMQAKYDAWLKVELAAVKAWNKLGLIDDTDCEKILKNAKFDIARIDEIEKTTKHDVIAFLTSVSESLGEESRFVHYAMTSSDCIDTAVALQIKESLELILEDVSLLLEAIKKRALEHKNTLMVGRSHGIHGEPITFGLVLAIWYDEISHAKELLEHAKEVISYGKISGAMGNFAHAPLEFEEEVCKNLGLKAAPVSNQVIQRDRYAQVISAIAILASSCEQIAVAIRHFQRTEVYEAEEYFSVGQKGSSAMPHKRNPVLSENITGLCRVLRSFVTPALENVALWHERDISHSSVERFILPDAFITADFMLMRLTNLIDKLLVYPENMMKNLNLTGGLVFSGRVLLELPFKGISREEAYKIVQRNAMKVWADLQNGKAAINEKNESLFLLALLSDEDLRKSLSEEDVRKCFDYNYYTKNVDAIFKRTFK

SEQ ID NO: 2955 - DNA, 1380 bp, Pseudomonas aeruginosa
  CDS (1)..(1380)
atgagcgacgtacccgccaaccagttgttcgatgcctatttcatggcggcgccgatgcgcgcggtgttctccgaccgcggccgcctgcaaggcatgctcgacttcgaggccgccctggcccgcgccgaggcgcgcaccggggtggttcccgcgacggcggtggcgccgatcgaggcggcctgccgcgccgaactgtacgacccgctggcgctggccgaggcggtcgccactgccggcaactcggcgatcccgctggtcaaggcgctgggccgccaggtggcggctggcgacgccgaggccgagcgctacgtgcatctcggcgccaccagccaggacgccatggacagcggcctggtgctgcaactgcgccgtgcgctggccttgctcgagcaggatctgcaacgtcttgccgaggtcctggcggaccaggccgaacggcatgccgacacgccgctggccgggcgcacctggttgcagcacgccaccccggtgaccctgggcatgaagctcgccggcctgctcggtgccttgacccggcaccgccagcgcctgcgcgagttgcgcccgcgcctgctggtgctgcaattcggcggcgcctcggggacgctcgccgcgctcggcgaacaggccctgccggtggccgcggcgctggccgaggagctgggcctggctttgcccgaacaaccctggcacacccagcgcgaccgcctggtggaattcgccagcgtgctcggcctggtggccggtagcctcggcaagttcggtcgcgatgtcagcctgctgatgcagaccgaggccggcgaggtcttcgagccggccggcgccgggcgcggcggttcctcgaccatgccgcacaagcgcaacccggtgagcagcgcggtgctgatcgccgccgccacccgtgcgccggggctggtctcgaccctgttcgcggcgatgccgcaggaacacgagcgcagcctcggtctctggcacgccgagtgggaaaccctgccggaactctgttgcctggttgccggcgcgctgcaacaggcgatcggcctgctcgaaggcctggaggtggacgcccagcggatgcgccgcaaccttggcctgacccacggcctggtgctcgccgaggcggtgagcatcgccctggcccgccgtatcggccgcgaagccgcgcaccatctggtggaacagtgctgccgccgcgccgtcgagcagcgccgcgagttgcgcgcggtgctcggcgaagaggcgcgggtgagcgccgagttgtccggcgacgaactggaccgcctgctcgatcccgcccattacctcggccaggcccgcgcctgggtcgagcgcgcgctcgccgaacaccatgccctgggcttcgaaccccatcccgcctga

SEQ ID NO: 2956 - protein, 459 aa, Pseudomonas aeruginosa
MSDVPANQLFDAYFMAAPMRAVFSDRGRLQGMLDFEAALARAEARTGVVPATAVAPIEAACRAELYDPLALAEAVATAGNSAIPLVKALGRQVAAGDAEAERYVHLGATSQDAMDSGLVLQLRRALALLEQDLQRLAEVLADQAERHADTPLAGRTWLQHATPVTLGMKLAGLLGALTRHRQRLRELRPRLLVLQFGGASGTLAALGEQALPVAAALAEELGLALPEQPWHTQRDRLVEFASVLGLVAGSLGKFGRDVSLLMQTEAGEVFEPAGAGRGGSSTMPHKRNPVSSAVLIAAATRAPGLVSTLFAAMPQEHERSLGLWHAEWETLPELCCLVAGALQQAIGLLEGLEVDAQRMRRNLGLTHGLVLAEAVSIALARRIGREAAHHLVEQCCRRAVEQRRELRAVLGEEARVSAELSGDELDRLLDPAHYLGQARAWVERALAEHHALGFEPHPA

SEQ ID NO: 2957 - DNA, 1488 bp, Halobacterium sp. NRC-1
  CDS (1)..(1488)
atgaattcgcatactaacggcgtgtttcgggcgtccgttgccgggaaatgtacatcctcgtgcgtcggcgggatcggtaggcttttgcggcgagcaccgccagtcggtggcatgaccgacgaccacgccctgtacgcggtgtcgccactcgacggccggtacagcggccgcaccgacgcgctcgcgccgtacgtcagcgaggcggcgctcatgcgggcgcgcgtcgaagtcgaagccgagtacgtgctcgcgctcgcggacctcgacgccgtcccgctcgaactcgttggcgacgaacgcaccgcgctccgggacgcctacaagaccttcgacgcagccgacgccgacctcgtcaagcgcatcgagaccgagggcgcgctcggccacgccgccaccaaccacgacgtgaaagccgtcgagtacttcctgcgcgagcacgccccggcgcgcgcccactcctggatccacttcgggctcaccagcgaggacgtcaacaacctcgcgtaccgactgctcgtcgacggcgcgatcaccgccgtcctcacgcccgagttgcgcggcctccgcgacgacctcgtgtcgttcgcacacgactacgccgacctcccgatgctcgcgcgcacccacggccagcccgccaccccgacgacgttcggcaaggagatggccgtctacgccgcccgactcgggcgcgcgctcgcccgcatcaccgacgccgtcgacggactcacgggcaagctcgccggtgcctccggcacctgggcggcccacaccgcggcgttcccggacgtggactggcggtcgttcgctgcgcggttcgtggactccctggggctggcgtacgccgaaccaaccacgcaggtcaacccctgcgacgacctcacggcggtgttcgacgcggtcgcgggcgcgaacggcgtcctcgaagacctcgcggtcgacgcgtggctgtacgtctcccagcgctacctcggccaggacgccgccgacggcgaaaccggctcctcgacgatgccacacaaggtcaaccccatcgacttcgagaacgccgaaggcaacctcgcgaaagccaacagcgacctcgggttcctcggtgactcgctcaccaccagtcgcctccagcgggacctctcggattcgacggtgaaacgcaacatcggcgcggcgttcgcgcactgcctgctcgcctaccgcaagctcggggacggcctcgacgcagtcacccccaacgaggcggtgctccgggaggacctgcgcgccaaccccgaagtcatcggggaggccgtccagacgatcctccggcgggaaggccacgacgacgcctacgagcgcgtgaaagcactcacgcggggcgaacgcgtctccctggacgacttcaaggagctgtttgccagcctcgacatcgacgccgacacccgtgacgaactgctcgcgttgacccccgagcgctacgtcggcgtcgccgccgacatcgcgcgcgacgcctga

SEQ ID NO: 2958 - protein, 495 aa, Halobacterium sp. NRC-1
MNSHTNGVFRASVAGKCTSSCVGGIGRLLRRAPPVGGMTDDHALYAVSPLDGRYSGRTDALAPYVSEAALMRARVEVEAEYVLALADLDAVPLELVGDERTALRDAYKTFDAADADLVKRIETEGALGHAATNHDVKAVEYFLREHAPARAHSWIHFGLTSEDVNNLAYRLLVDGAITAVLTPELRGLRDDLVSFAHDYADLPMLARTHGQPATPTTFGKEMAVYAARLGRALARITDAVDGLTGKLAGASGTWAAHTAAFPDVDWRSFAARFVDSLGLAYAEPTTQVNPCDDLTAVFDAVAGANGVLEDLAVDAWLYVSQRYLGQDAADGETGSSTMPHKVNPIDFENAEGNLAKANSDLGFLGDSLTTSRLQRDLSDSTVKRNIGAAFAHCLLAYRKLGDGLDAVTPNEAVLREDLRANPEVIGEAVQTILRREGHDDAYERVKALTRGERVSLDDFKELFASLDIDADTRDELLALTPERYVGVAADIARDA

SEQ ID NO: 2959 - DNA, 1557 bp, Arabidopsis thaliana (mouse-ear cress)
  CDS (1)..(1557)
atggccaccaaaatcccttgttccggccttatacccataagaagtcttttaaacccatcaaaatctctgtctcatcttccaagagtttcattctctgtttcttctcctcattctctcaagctaatgacttcaacaaagttgatagcaatggctagtgcaagttccagagactttgagatgtcgaatttaacagcattatcgcctttggatggacgttattggggaaaagttaaggacttggcttcttctatgagcgagtttggattgatctatttccgagtacttgtcgagatcaaatggcttattaagctttcaaatatacctcaagtcactgaagttccaagctttagcaaagaagctcataagtacttgcaaggtataatcgatggatttagtatggatgatgcattgcaagttaagaagattgagagagtgacaaatcacgatgtgaaagcagtggagtattttttgaaacaaaagtgtgaatcacatccagagattgctaaggttctagagtttttccatttcgcttgtacgtctgaggacatcaacaatctttcccatgctttgatgcttcaagaagcacttagttcggttatacttcctaccatggatgagttgatcaagtctatctctctgatggctaagagctttgcatatgtacctatgctttcacgaactcatgggcagccagcttcacctacaacattggggaaggaaatggcgatttttgctgtgaggttaagtgtagaaaggagatatctttcagaaactaagattaaggggaaatttgcgggtgctgttggaaactacaacgcgcatatttccgcgtattctaatattgactggcctcatgttgcagaggagtttgttacttctcttggattaacatttaacccatacgtgactcagattgaaccacatgactatatggctagactttttaatacaattagccaattcaacaatgtcttgattgattttgacagagatatatggagctacatatctctaggttactttaagcaggcaacgggtgaaatcggatcatcgacaatgcctcacaaagtgaatcctattgactttgagaacagcgaagggaatctaggtaaagcaaatgcagagcttgcttttctcagcatgaagcttcccatttcacgaatgcagcgtgatttaacagattcaactgtcttgagaaacatgggtggagctttaggacactctcttctggcttacaagagcgcgatacagggaattgggaagcttcaggttaatgaagctcggttaaaagacgatttggatcatacttgggaagtcctcgctgaaccgatacaaactgtgatgaggagatatggtgttccagagccgtatgagaagctgaaggagctaacaagaggaagagctgtgaatgaagaaagcattagaaagtttattaaaagtttggaattgcctgaagaagcaaaagaccaacttttgaagctaactccacacacatatgttggcgctgctgctgcattggcactagccgtggatgatgctgtgcacttgggacattaa

SEQ ID NO: 2960 - protein, 518 aa, Arabidopsis thaliana (mouse-ear cress)
MATKIPCSGLIPIRSLLNPSKSLSHLPRVSFSVSSPHSLKLMTSTKLIAMASASSRDFEMSNLTALSPLDGRYWGKVKDLASSMSEFGLIYFRVLVEIKWLIKLSNIPQVTEVPSFSKEAHKYLQGIIDGFSMDDALQVKKIERVTNHDVKAVEYFLKQKCESHPEIAKVLEFFHFACTSEDINNLSHALMLQEALSSVILPTMDELIKSISLMAKSFAYVPMLSRTHGQPASPTTLGKEMAIFAVRLSVERRYLSETKIKGKFAGAVGNYNAHISAYSNIDWPHVAEEFVTSLGLTFNPYVTQIEPHDYMARLFNTISQFNNVLIDFDRDIWSYISLGYFKQATGEIGSSTMPHKVNPIDFENSEGNLGKANAELAFLSMKLPISRMQRDLTDSTVLRNMGGALGHSLLAYKSAIQGIGKLQVNEARLKDDLDHTWEVLAEPIQTVMRRYGVPEPYEKLKELTRGRAVNEESIRKFIKSLELPEEAKDQLLKLTPHTYVGAAAALALAVDDAVHLGH

SEQ ID NO: 2961 - DNA, 1353 bp, Pyrococcus abyssi
  CDS (1)..(1353)
atggcggttcaccctatagattatcgctacggtagcgaggaaatgaggagggtctgggaagaggaaaacaaactgcagaaactcctcgatgttgaagcggctttggctagggcccatgcaaaactcggaaacattccggaggaaagcgctagggtgatatcggaaagggcaaacacgaaatgggttaagcttgagagggtcaaggagatagaggctgaaattcaccacgatataatggccgtagtaaaagccttaagtgaggtctgcggggagcatggaaagtacgtccaccttggcgctacgtcaaatgacataatagacacggccaacgcacttctcataaaggagagtcttgccatagttgagaaggatttaaaggagctcagatctatattgaaggaactcgccaagaagcatatagataccgtatgcatagggagaacacatggacaacatgctgttccaacgacgtatggaatgaagttcgcactatggttggacgagatacagagacatatagagagacttcagcaacttaaggatagggttcttgtgggaaaaatgagaggtgcagtaggaacggcggcatcctttggagacaaggccttcgagatagagaaactcgtcatggaagatctaggcttaaagccagctaggataactaaccagataattcaaagagacgtgtacgctgaactgatgttcttcctagcattggtggcctcaaccctcgacaagatggctttggagataaggaacttgcagagaactgagatattggaggtaagcgagcccttcggggagaagcaagttggctcatcaaccatgccccacaagaggaacccgataagaactgagaaagtgtgcgggctcgccagggttctttactctaacgttattcctgccttacttaacaatcccctctggcacgaaagggatttaactaactcctcagtagagagggtaattctcccagaaagctttgttttgctcgatgaaatgctcaaggtcatgaagaaggttctcaaaggactagagttcttcccggagaacattaagaggaacctctatttaaccaagaacctgattatggccgagcctttgatgcttaagcttgccgagaaaggaatgggaagacaggaggctcacgaattggttagacagcttgctatgaaagcgtttaaagagggaagggatttgctcgaggttgttaggaaaaacgaggaagcgatgaaatatctcacagaaaacgatctagaaggcctaaaacctgaaaattacataggaaaagcaagagaaatcgtcgaaaacgttgttaattacgttgaagaaatggaaaggagaggtttatag

SEQ ID NO: 2962 - protein, 450 aa, Pyrococcus abyssi
MAVHPIDYRYGSEEMRRVWEEENKLQKLLDVEAALARAHAKLGNIPEESARVISERANTKWVKLERVKEIEAEIHHDIMAVVKALSEVCGEHGKYVHLGATSNDIIDTANALLIKESLAIVEKDLKELRSILKELAKKHIDTVCIGRTHGQHAVPTTYGMKFALWLDEIQRHIERLQQLKDRVLVGKMRGAVGTAASFGDKAFEIEKLVMEDLGLKPARITNQIIQRDVYAELMFFLALVASTLDKMALEIRNLQRTEILEVSEPFGEKQVGSSTMPHKRNPIRTEKVCGLARVLYSNVIPALLNNPLWHERDLTNSSVERVILPESFVLLDEMLKVMKKVLKGLEFFPENIKRNLYLTKNLIMAEPLMLKLAEKGMGRQEAHELVRQLAMKAFKEGRDLLEVVRKNEEAMKYLTENDLEGLKPENYIGKAREIVENVVNYVEEMERRGL

SEQ ID NO: 2963 - DNA, 1365 bp, Staphylococcus aureus
  CDS (70)..(1365)
ttgtttatttttattaaaaaatgttctgtttttgaaaattcgagtatacatacgataggagttaaaaaaatgattgaacgctattctagagaagaaatgtctaatatttggactgatcaaaatcgctatgaagcatggttagaagtggaaattttagcatgtgaagcatggagtgaattaggacatataccgaaagctgacgtacaaaaaattcgtcaaaacgcaaaggtaaatgtcgaacgtgcacaagaaattgaacaagaaacgcgccatgatgttgtagcctttactagacaagtttctgaaacgctaggtgaagaacgtaagtgggtacattatggtttaacttctactgatgttgtagatacagctttaagtttcgttattaaacaagcaaatgacattattgaaaaagatttagaaagatttatcgacgttttagctgaaaaagcaaaaaattataaatatacattgatgatgggacgtacacatggagtgcatgcagaaccaactacatttggtgtcaaaatggcattgtggtacacggaaatgcaacgtaacttacaacgtttcaaacaagtaagagaagaaattgaagtagggaaaatgagtggtgcagtaggtacttttgctaacattcctcctgaaatagaaagttatgtgtgtaaacatttaggtattggcacagcgcctgtatcaacgcaaacattgcaacgcgatcgacatgcatactatattgcgacattagcattaatcgcgacatcactagaaaaatttgccgttgaaatacgtaaccttcaaaaaaccgaaacgagagaagttgaagaagcatttgcaaaaggccaaaaaggttcatctgcaatgcctcataaacgaaatccaattggttctgaaaatatcacaggtatttcaagagtcattcgtggttatattactacagcttatgagaatgtgccattatggcatgaaagagatatttctcattcttctgctgagcgtattatgttaccagatgttacaatagcactagattatgcattgaatcgtttcacaaatattgtggaccgtttaactgtatttgaagataatatgcgtaataacatagataaaacatttggtctgattttctcacaacgtgtcttattagcattaattaataaaggtatggttcgtgaagaagcatacgacaaagtacaaccaaaagcgatgatatcttgggaaacgaaaacaccgttccgtgaattaatcgaacaagatgagtctattacaagtgttttaacaaaagaagaattggatgaatgtttcgatcctaaacatcatttgaatcaagttgacactattttcgaacgcgctggattagcatag

SEQ ID NO: 2964 - protein, 431 aa, Staphylococcus aureus
MIERYSREEMSNIWTDQNRYEAWLEVEILACEAWSELGHIPKADVQKIRQNAKVNVERAQEIEQETRHDVVAFTRQVSETLGEERKWVHYGLTSTDVVDTALSFVIKQANDIIEKDLERFIDVLAEKAKNYKYTLMMGRTHGVHAEPTTFGVKMALWYTEMQRNLQRFKQVREEIEVGKMSGAVGTFANIPPEIESYVCKHLGIGTAPVSTQTLQRDRHAYYIATLALIATSLEKFAVEIRNLQKTETREVEEAFAKGQKGSSAMPHKRNPIGSENITGISRVIRGYITTAYENVPLWHERDISHSSAERIMLPDVTIALDYALNRFTNIVDRLTVFEDNMRNNIDKTFGLIFSQRVLLALINKGMVREEAYDKVQPKAMISWETKTPFRELIEQDESITSVLTKEELDECFDPKHHLNQVDTIFERAGLA

SEQ ID NO: 2965 - DNA, 1314 bp, Aquifex aeolicus
  CDS (1)..(1314)
atgatagagcgctacaccagaaaggaaatgggcgatgtctggagtgaggttaataagtttaaaaagtggttggacgttgagatagcggtatgcagggcttgggcaaaactcggtaagatcccccgagatgccttaaaaaagatagaagaaaaaacttacgttgacaaaaaggttgttgagaaaattaaggaaaaggaaaaggtttttaaacacgacgttctggcgttcgtttctgtaatcgccgagcaggtaggagaagagggaaggtacatacacatgggtcttacctcttctgacgttgttgacacagccctcgcactcctcataagagaggcgattgacataatcctgaaggatatagacaaggtaatggaagagataaagagacttgcctttgaacacaaggataccctaatgatgggaagaactcacggagttcacgcagagccctacactttcggtctcaagatgtgcgtgtggtacgacgaaatgaggaggcaaaaggagagacttctctttgcaagggaaaatgtcctttacgggaaaatttcaggagctgttggcacttactccaacatcccacctgaggttgaaaagttagcccttgaagaactcggtcttaaaatagaacctgcatctactcaaatagtccacagagacaggcacgcccagctcctaacaaccctcggactaatagcgagttccttagaaaagtttgcaacggaaataagacacctccagaggacagaagttttggaagttttagaaccctttacgaaaggtcaaagaggctcttcggccatgccccacaagaagaacccaatacactcggaaagaatatgcggactcgcaagggttataagagccaactcaatacccgctatggaggacgtagttctgtggcacgagagggacatttcccactcttccgttgaaagggtaatacttccggactccttcatagcccttgactacatcctgaacctcttttacgaaatactgaaaggacttgtggtgaacaaggagagaatgagaaaaaatatggaactctcaaaagggctctacgcctcttcaaagatactcgtcctcctgacccaaaaagggctttcaagagattacgcctacgatatagttcagagatgtgcaatgaaggcttgggaaagcgataaaacttttaaagaaacactcttagaggaccccgaagttacgaaataccttacagaggaggaaatagagaaggctctggacccatgggagtttctgaagaacagggattacgtttatgaaaaggtttttggggatgaaatgggatag

SEQ ID NO: 2966 - protein, 437 aa, Aquifex aeolicus
MIERYTRKEMGDVWSEVNKFKKWLDVEIAVCRAWAKLGKIPRDALKKIEEKTYVDKKVVEKIKEKEKVFKHDVLAFVSVIAEQVGEEGRYIHMGLTSSDVVDTALALLIREAIDIILKDIDKVMEEIKRLAFEHKDTLMMGRTHGVHAEPYTFGLKMCVWYDEMRRQKERLLFARENVLYGKISGAVGTYSNIPPEVEKLALEELGLKIEPASTQIVHRDRHAQLLTTLGLIASSLEKFATEIRHLQRTEVLEVLEPFTKGQRGSSAMPHKKNPIHSERICGLARVIRANSIPAMEDVVLWHERDISHSSVERVILPDSFIALDYILNLFYEILKGLVVNKERMRKNMELSKGLYASSKILVLLTQKGLSRDYAYDIVQRCAMKAWESDKTFKETLLEDPEVTKYLTEEEIEKALDPWEFLKNRDYVYEKVFGDEMG

SEQ ID NO: 2967 - DNA, 1368 bp, Campylobacter jejuni
  CDS (1)..(1368)
atgacaggaattagcgtatttgatcatagattactagcagactcatggagcacgcaggaaatgcgtgctattttttgcgaacaaaaccgcatacaaaaatggctcgatgttgaagcagctttagcaaaagcacaagcaaaacttaaaattatccctaaaaaagcagctgatgagatcgcaaaaaaagctcattataaatttatggatatggactttatctttgctgaatttaaaaagaccaaacaccctttagttcctactgtaagaggattagaaaaagcttgcgataataatttaggcgaatatgtacattttagagtaaccactcaagatatcatcgatacaggactggttttacaatttaaagaagcaatgactcttgtaaaaagcgaattaaaagctatcgcaaaagccttagcgaaactagctaaaacccataaaaacactgctatgatgggaagaactcttgctttacaagctttaccgatcacctttgggcataaggtagccatctggcttagcgagcttgatcgtcattttgaaagaatacttgaacttgaaaaaagactttatgtaggcagcatagtaggagctgttggaaccaaggcgagtttaagcgatgaatgcaacgaagtagaaaagctaactttagagaatttaggacttgaagtgcctaatatctcttggcagagcacacgtgatcgctttatagagcttggttttgtactaggcaatatcaatgcaacttttaacaaaatcgctcatcaattactcatactctcacacaatgaaatcgatgaagtagcagaaccttttggcaaaggacaagtaggatctagcactatgccacacaaaagaaatcctgcagtaagcgaaaatgcagttacagtaagcaatgcctttaaggcaaatttagccattttaagcgatattgaaagacacgagcatgaaagagatgggcaagtttggaaaatggaatggaaacttttacctgaaatgtttttaatgctttctgtggttttagcaaatatgaaatttgctcttagtgacctagaagttaaaaaagataaaatgcttaaaaatcttgacactcttaaaggctttgtactggcagaacgcgttatgtttgcactaagcgatcattacggcaaacaacacgctcatgaaatcgtttatgaaaacgctatgctaggtatcgaacaacaaaaaactttcaaagaagtattgcttgcagatacaagagtatctcaagtcttaaaagaaaaagatatcgatgctttacttgatgcaacaagttatgtaggatatgcaccaaaacttgtagatgaatttttggcaaaaatcaaaaatagcgctatcttaaaatag

SEQ ID NO: 2968 - protein, 455 aa, Campylobacter jejuni
MTGISVFDHRLLADSWSTQEMRAIFCEQNRIQKWLDVEAALAKAQAKLKIIPKKAADEIAKKAHYKFMDMDFIFAEFKKTKHPLVPTVRGLEKACDNNLGEYVHFRVTTQDIIDTGLVLQFKEAMTLVKSELKAIAKALAKLAKTHKNTAMMGRTLALQALPITFGHKVAIWLSELDRHFERILELEKRLYVGSIVGAVGTKASLSDECNEVEKLTLENLGLEVPNISWQSTRDRFIELGFVLGNINATFNKIAHQLLILSHNEIDEVAEPFGKGQVGSSTMPHKRNPAVSENAVTVSNAFKANLAILSDIERHEHERDGQVWKMEWKLLPEMFLMLSVVLANMKFALSDLEVKKDKMLKNLDTLKGFVLAERVMFALSDHYGKQHAHEIVYENAMLGIEQQKTFKEVLLADTRVSQVLKEKDIDALLDATSYVGYAPKLVDEFLAKIKNSAILK

SEQ ID NO: 2969 - DNA, 1599 bp, Xylella fastidiosa
  CDS (1)..(1599)
atgcagccactgccaaagccgtgcctaagcaggatcacaggatcacaggatcacaggatcacaggatcacaggatcacaggatcacaggatcacaggatcacaggatcacaggatcacaggatcacaggatcacaggatcacaggatcaggaatggaccatattccaacccagaaagggcagacaggtgcagcgtagaatagcggtgctcccgcttccctcaattacggccatgtcacatttacccctacttgctttgtcgccactggatgggcgctatctgtctaaagtcgatacattgcggccaattttttccgaatacggcttgatcaaagcccgggtgaaagtcgagattgcatggttactggcgttggccgcagaaccaaacattgtcgagttggcaccgttctccgttgccgcgcaaacacgcctgcgtgcgttagcagacggtttgacgatcgagcacgccgcacgtgtgaaagagattgagcacaccaccaatcacgacgtaaaagcagtggaatatttcatcaaagagcagcttaaggacgatacagagctgcgccccggactggagtttgtccatttcgcctgcaccagcgaggacatcaacaacctgtcctatagcttgatgttgcaacaagccagaaatgacgtactgctcccgacactggacggtatcgctacacatctgcgcaccctggcccatactcaggccgcacaaccgatgctctcacgcacccacgggcaaaccgcctcacctaccacgctgggcaaggaaatcgccaatgtggtagcccgtttggaacgccagcgccatcaaatcgccacgattgcactgagcggaaagatcaacggtgctgtgggcaattacaacgcacataccatcagctatccggagatcaattggcctgcattcgcacaacgttttgttgagagcctgggcttggtcttcaacccatacaccacacaaattgagccgcacgacaccatcgccgagatcagcgacgcaacccgccgcgccaacaccattctgatcgacctggcacgcgatctttggggctatatctcgttgggttacttcaaacaaaagctcaaggaaggtgaagtcggctcctcaacgatgccgcacaaagtcaacccgattgacttcgaaaatgccgaaggcaatttcggcgtggccaacgcattatttgagcatttttcgaccaagctgccgatcagtcgttggcaacgtgacctcaccgattccaccgtactacgcgcactcggcaccgcgtttggccatactcaggtggctttagattctttaaacaaagggctacacaagctcagcccaaatccagaacgtattgacgctgacctggacgcggcatgggaagtgctggccgaagcagtacagacaatcatgcgccgccacaacctacccaacccctacgagcaactgaaagcgctgacccgtggtcagggcatcaccgccgattcgatgcgcgctttcatcgaaacgctggatctgccaaccgaagccaaacagcggctgcacgatttaactccaagggcttataccggcctggcgaagcagttggcactgaacatctaa

SEQ ID NO: 2970 - protein, 532 aa, Xylella fastidiosa
MQPLPKPCLSRITGSQDHRITGSQDHRITGSQDHRITGSQDHRITGSQDQEWTIFQPRKGRQVQRRIAVLPLPSITAMSHLPLLALSPLDGRYLSKVDTLRPIFSEYGLIKARVKVEIAWLLALAAEPNIVELAPFSVAAQTRLRALADGLTIEHAARVKEIEHTTNHDVKAVEYFIKEQLKDDTELRPGLEFVHFACTSEDINNLSYSLMLQQARNDVLLPTLDGIATHLRTLAHTQAAQPMLSRTHGQTASPTTLGKEIANVVARLERQRHQIATIALSGKINGAVGNYNAHTISYPEINWPAFAQRFVESLGLVFNPYTTQIEPHDTIAEISDATRRANTILIDLARDLWGYISLGYFKQKLKEGEVGSSTMPHKVNPIDFENAEGNFGVANALFEHFSTKLPISRWQRDLTDSTVLRALGTAFGHTQVALDSLNKGLHKLSPNPERIDADLDAAWEVLAEAVQTIMRRHNLPNPYEQLKALTRGQGITADSMRAFIETLDLPTEAKQRLHDLTPRAYTGLAKQLALNI

SEQ ID NO: 2971 - DNA, 1371 bp, Buchnera sp
  CDS (1)..(1371)
atggaattaacctctttaacagccatctctcctgttgatggtcgatacagcaatttaacaatattattaagaaatatttttagtgaatttggttttttaaaatatcgtttgaacattgaagttcagtggctaaaaaaaatcattagtatgtctcaaatattagatattaataatattgaatataaagaaatattatttcttgatagtattgttgaagaatttaatgaaaaagatgcaattcttattaagaatatagaaaaagaaaccaatcatgacattaaggctttagagtattttttaaaaaacaagatcgctcaatctaaaaatcttttaactatttcagagttcgtacattttggatgtacttcggaagacattaacaatatagcatactcattaatgattaaagatgctcgtgataaaataattttaccattatggtataaaattataagtactttaaaaaaaatggtttttaaatatcaacactatcctttattatctttaactcatggacaacccgctactccatcaactatgggaaaagagattgctaatttttattaccgaatgaaacggcagtatatcatactcaaaaaaatagaaatattaggaaaaattaatggaagtactggtaattataatgcacatttagcagcatatcctgatattaactggcataagataagtaaagatttcatcacgtcatttggtattaattggaacccatatactactcagatcgaacctcatgattatattgcagaattttttagttgcatgtctctatttaatacaatattaattaattttaatcgcgacatgtggggttatatttcacttaattattttaaacaaagaacaatagattatgaaataggttcttcaataatgccccacaaagtcaatcctattgattttgaaaattctgaaggtaatttaggactttctaatgctcttatgaatcatatgattacaaaattacctatttctagatggcagcgtgatttaagtgattctacggtattaagaaatataggtgtggctatttcttatgcaataattgcatataattctgtattatcaggaattaataaattagaaattaatgaatctgaattattaaaaaatttggataaaaattggtctattttatcggaacctattcagactattatgcgtcgttatggaattaaaaacgcatatgaaaaattaaaaaaattgactcgaggaaaagaaataaatagaaatgtcatacatacatttatttctagtttaaatattcctgaagaagaaaaaaaacgtttaaaaaatatgactcctttcaactatattggagcagcgagtcaaattatcaatgaaatagaataa

SEQ ID NO: 2972 - protein, 456 aa, Buchnera sp
MELTSLTAISPVDGRYSNLTILLRNIFSEFGFLKYRLNIEVQWLKKIISMSQILDINNIEYKEILFLDSIVEEFNEKDAILIKNIEKETNHDIKALEYFLKNKIAQSKNLLTISEFVHFGCTSEDINNIAYSLMIKDARDKIILPLWYKIISTLKKMVFKYQHYPLLSLTHGQPATPSTMGKEIANFYYRMKRQYIILKKIEILGKINGSTGNYNAHLAAYPDINWHKISKDFITSFGINWNPYTTQIEPHDYIAEFFSCMSLFNTILINFNRDMWGYISLNYFKQRTIDYEIGSSIMPHKVNPIDFENSEGNLGLSNALMNHMITKLPISRWQRDLSDSTVLRNIGVAISYAIIAYNSVLSGINKLEINESELLKNLDKNWSILSEPIQTIMRRYGIKNAYEKLKKLTRGKEINRNVIHTFISSLNIPEEEKKRLKNMTPFNYIGAASQIINEIE

SEQ ID NO: 2973 - DNA, 1425 bp, Sulfolobus solfataricus
  CDS (1)..(1425)
atgagattacagtataagttaataaatgttgaacatactttacaattagccatggaggatagtatatgtcctttagaatggagatacggtagtaatgagatgagaaagtttttcagtagagaagaaatcttgaaaaggagaattcaagtagaaatagcgttattaaaagcattaaccaaatatggtttagtaaaagaggaagacgttcaaaaagttgagaaagcttcattaacaataagaccagaggaagtagatgaacttgaatcaaaaattggtcatgatgtaatggctatggtagtcttaatggcagaaagaagtggagattctggaagatacgttcattttggggcaacaagttatgatattgtagatacagcttatgcgttagtatttagagacgcaataagattagtaaagacaaaagtagtagaaatattggaaatgatggttagtttagcaattaagtataaagatttagcaatggtaggaagaactcatgggcagcatgcattgcctataacattaggctttaaaattgcaaattatatctatgaattttctagatcactagagaggttaaatgaggttgagaaaagaatagtaaaaggtaaaatggcaggtgcagttggcacgatggcagcttggggcaatatagggttagaaatagaagagaatgttatgaaatttttaggattaagacctcatgagatttcaactcaagttgctccacgagacgcatttgcagaattaacttctgatcttgcaattttggcatctcaatgtgatcgattcgcattagaagttagggaactaatgagaccggaaataaatgaaataagtgaaggcgtagaaggtcgtgtaggaagtagtactatgcctcagaaggaaaatccagtcacgtcagaaaagattgggggtttagcaaaagttttacgctctcttgtcgtagcgtcactagaaaatattccattatggcacgaaagagatctgactaacagttcgtcagagaggataataatatcacatgaatttctagttattgacgaaatattagatagtatgataagtcttttgaggaatttaagggttaacttcgagaatattgaaaagaatttgaacttaactaaaggacaaataatggcagaaagtctgatgataaacttaaccttaaagggcatgaaaaggcatgaagctcatcaatacgttaacaaactgacgtcaaaagtaagacaaactggaaaaacgttattagaggtttgcctagaggatagtttaattttaagttatttctctaagcaagaacttgagaacgtacttaatcctaaaaactacttgggttcctatgataaattaatagagagagctattagctatgcaaaaggcgtaatcaaaggttcagaaatacgagaagctcaagatagatga

SEQ ID NO: 2974 - protein, 474 aa, Sulfolobus solfataricus
MRLQYKLINVEHTLQLAMEDSICPLEWRYGSNEMRKFFSREEILKRRIQVEIALLKALTKYGLVKEEDVQKVEKASLTIRPEEVDELESKIGHDVMAMVVLMAERSGDSGRYVHFGATSYDIVDTAYALVFRDAIRLVKTKVVEILEMMVSLAIKYKDLAMVGRTHGQHALPITLGFKIANYIYEFSRSLERLNEVEKRIVKGKMAGAVGTMAAWGNIGLEIEENVMKFLGLRPHEISTQVAPRDAFAELTSDLAILASQCDRFALEVRELMRPEINEISEGVEGRVGSSTMPQKENPVTSEKIGGLAKVLRSLVVASLENIPLWHERDLTNSSSERIIISHEFLVIDEILDSMISLLRNLRVNFENIEKNLNLTKGQIMAESLMINLTLKGMKRHEAHQYVNKLTSKVRQTGKTLLEVCLEDSLILSYFSKQELENVLNPKNYLGSYDKLIERAISYAKGVIKGSEIREAQDR

SEQ ID NO: 2975 - DNA, 1416 bp, Plasmodium falciparum
  CDS (1)..(1416)
atggatgtacatgtgaaccaactgaaaaacatatcgcccatcgacgggagatacaaaagatcgtgccaggaagtaagcgaatatttttcagagtacgctttaataaaatatcgaataatagttgaaataaaatggttattatttttaaatgacaaagaatatttctttccaaaagttagtgagaagagtttgagtaatatcacatcgattatggaattaataaatgataatgatatattacgtgtaaaaaagatagaagaagaaacgaatcatgatgttaaggcggttgaatattttataagagagaaattagaaagtttaaaaaatgaagaaataacaaaagtaataccatatgtacattatttatgtaccagtgaagatattaataatatagcatatggtttatgcttatataattgtatacataatataataataccaaatatacaaaacattatagacaaattaaaagaattctcttttaattattctgatgtatctttattatcaaaaacacatggacaacctgcatcaccaactacctttggtaaagaaatgtccaactattattatcgtttatataagcatataaataaattaaaaaatattgagatatatgtaaaatttaatggagctgtaggaaattttaatgcgcataaagtctgtgatcctaatattgattggatcgataatattaaatattttatagaaacatattttaatttacatttttcattatattgtactcaaatacaagatcatgattatatatgtgagatttcagatacattggctcgtttaaattatacattgatcgatttatctgttgatatgtggttatatatctcatcaaatgttttaaaacttaaagttatacaaaaagaaattggaagtagtaccatgccacataaagtaaatcctatagattttgaaaatgctgaaggtaatttacatttagctaattctttattcaagttatttagttccaaattaccaataagtagattgcaaagagatctatctgattcaactgttcttagaaatttaggctcatcatttgcgtattccctaatatcatataaatcattattaagaggattaaataaaattgatgtagatcaaaatgttatgaatgaacaactcaatcaaaattggtgcacattagcagaacccatacaaattattatgaaaaaatataatattgctgattcgtatgaacaacttaaaaacttcactagagggaaatccatagacaaacaatgcatgtatcaatttattcaacaaaactgtagtcatctaccaaaaaatgcaatcgatgaattgatgaatttaacaccgcacaattatcttggctacgcaagctatttgtcaaaaaatgtggagcacttctcacaggaatatataaaaaaaaattaa

SEQ ID NO: 2976 - protein, 471 aa, Plasmodium falciparum
MDVHVNQLKNISPIDGRYKRSCQEVSEYFSEYALIKYRIIVEIKWLLFLNDKEYFFPKVSEKSLSNITSIMELINDNDILRVKKIEEETNHDVKAVEYFIREKLESLKNEEITKVIPYVHYLCTSEDINNIAYGLCLYNCIHNIIIPNIQNIIDKLKEFSFNYSDVSLLSKTHGQPASPTTFGKEMSNYYYRLYKHINKLKNIEIYVKFNGAVGNFNAHKVCDPNIDWIDNIKYFIETYFNLHFSLYCTQIQDHDYICEISDTLARLNYTLIDLSVDMWLYISSNVLKLKVIQKEIGSSTMPHKVNPIDFENAEGNLHLANSLFKLFSSKLPISRLQRDLSDSTVLRNLGSSFAYSLISYKSLLRGLNKIDVDQNVMNEQLNQNWCTLAEPIQIIMKKYNIADSYEQLKNFTRGKSIDKQCMYQFIQQNCSHLPKNAIDELMNLTPHNYLGYASYLSKNVEHFSQEYIKKN

SEQ ID NO: 2977 - DNA, 1371 bp, Neisseria meningitidis
  CDS (1)..(1371)
atgatcaaccccatcgcctcgctttcccctttagacggccgttatgcccaatccgttgaagcattgcgcccgattttctcagagtacggcctgatgaaagcgcgcgtcaaagtcgaattaaactggctcaaagccctcgccgccgagccgaagattgccgaagtgccgcccttcagtgccgaaacgcttgccgaaatcgacacggtgattgaaaacttttcattggaagacgcggccgccgtcaaagccatcgaagccacgaccaatcatgatgtcaaagccattgaatattggctgaaaaaacgttttgccgaagtgccggaagtcgccgccgtgagtgagttcatccacttcgcctgcaccagcgaagacatcaacaacctgtcccacgctttaatgctgcaagaagcgcgtgaggctgttttgctgcccaaactggcagaaatcatcgaaaaactgaccgctatggcgcacgaccttgccgccgtcccgatgatgagccgcacccacggccagcccgccacgccgaccactttgggcaaagaaaccgccaatgtcgtgtaccgcctgcaacgccagtttaaaagccttcaggcgcaagagttcctcggcaaaatcaacggcgcggtcggcaactacaacgcccacatggtcgcctatcccgacgtcgattgggaaacccactgccgcaacttcgtcgaaatcagccttggcctgaccttcaacccctacaccatccaaatcgagccgcacgactacatggctgaattcttccaaaccctcagccgcatcaacaccatcctgatcgactttaaccgcgacgtttggggctacatttctttggggtacttcaaacaaaaagtcaaagcgggcgaagttggttcttccaccatgccgcacaaagtcaaccccatcgactttgaaaactccgagggcaaccttggtatggcaaacgccgtattgggttttttggcggaaaaactgccgatttcccgttggcagcgcgacctgaccgacagcaccgtcttacgcaatatgggcgtgggcgtgggctatgccgtgttgggtttcgccgcccacctgcgcggtctgaacaagctcgaacctaaccccgccgcgcttgccgccgatttggatgccacttgggagctgctcgccgagccgattcaaaccgtaatgcgccgttacggcgtggccaatccttacgagaagctgaaagacctgacgcgcggcaaaggcggcatcacgcccgaagtgctgaaaggctttatcggattgctggaaatccccgccgaagccaaagccaaattgcttgagctgacccccgcgctgtatgtgggcaaggctgaagcgttggcgaaacggatttga

SEQ ID NO: 2978 - protein, 456 aa, Neisseria meningitidis
MINPIASLSPLDGRYAQSVEALRPIFSEYGLMKARVKVELNWLKALAAEPKIAEVPPFSAETLAEIDTVIENFSLEDAAAVKAIEATTNHDVKAIEYWLKKRFAEVPEVAAVSEFIHFACTSEDINNLSHALMLQEAREAVLLPKLAEIIEKLTAMAHDLAAVPMMSRTHGQPATPTTLGKETANVVYRLQRQFKSLQAQEFLGKINGAVGNYNAHMVAYPDVDWETHCRNFVEISLGLTFNPYTIQIEPHDYMAEFFQTLSRINTILIDFNRDVWGYISLGYFKQKVKAGEVGSSTMPHKVNPIDFENSEGNLGMANAVLGFLAEKLPISRWQRDLTDSTVLRNMGVGVGYAVLGFAAHLRGLNKLEPNPAALAADLDATWELLAEPIQTVMRRYGVANPYEKLKDLTRGKGGITPEVLKGFIGLLEIPAEAKAKLLELTPALYVGKAEALAKRI

SEQ ID NO: 2979 - DNA, 1452 bp, Pseudomonas aeruginosa
  CDS (1)..(1452)
atggatgctgaatcgctggaaatgcttgcccgttcctcgtgcaccgcgcatccgcagagcttcggcggcgcaccggccgagtcgtcctgcaagcacgaacacagtcacatcgttgactctaaaacccatggcggcggctacgccggtccggtgagccgacggatcttctgtagccactgccgcctgcaacgctggctcgacgtggaggcggcgctggcgctggcgcaggccgatgtcggcgtcattccgcccgaggccgcgctggagatcgcgaaggccgccaggctttcggccgttgacctgcagcagatcgccgacggcgtggccagcaccgggcactcgctgatgcccctgctgggtgcgctgcaacggaactgcagccccagcgcgcgcgagtacgtgcatttcggcgcgaccacgcaggatatccaggacaccgcgcagtccctggaaatgcgcgatgtgctggatgaaacggagcgggcgctggacatcctcctggaccggctctcggtgctggcgagcgggacccgcaatgcgctgatggtcgccaggacccactcgatcccggcgttgccgaccaccttcgggctgaaggtggccggctggatcgacgagttgctgcgtcaccgcgaacgcctgggcgaggcgcgcaagcggatcctggtggtgcaactgttcggcggcgtgggcacgatggccgccttcggcgacgaggccatgctcctgctcgaaagcttcgcgcggcggctgtcgctggacgtgccgctggcgggttggcacgtgtcccgcgaccgggttaccgagttcgtcagcaccctggccatggtcaccgcgtccctggcgcggatcgccgacgagatccgcaccctgaaccgctgggagatcggcgagctggaggtgggctggacgcagcagcagatcggtagcagcaccatgccccacaagcgcaatccggaaggctgcgagcaggtcgtggtgctggcccggctggccaaggcccaggtcctgctcgcgttggacgccatgatcctcgagcacgagcgggactaccgcggcacgcgcctggaatggtgtgcggtggcggacgtttcccactatgcgctgatggcgctgtcgctgctgaccgacaccatcgacgggctcacggtccacgacgagaccatggcgcggacggcgaatgcatacagcgatgcgatctgtaccgaggcgttcgtcttcgagatggccaagcaactgggcaagagcagcgcttacgaaatcatcttcgagatcacccaggcctgccagcgcaagcggattccgatgcgccaggcgctcgagtcggatccgcgggtgggcgccgtcatgccgaaggaaaccctggccaggctgttcgagccgcggacccatctcggcatggccgggaccatcgtcgacaaggtgctggacaaggtcgccagccaccactga

SEQ ID NO: 2980 - protein, 483 aa, Pseudomonas aeruginosa
MDAESLEMLARSSCTAHPQSFGGAPAESSCKHEHSHIVDSKTHGGGYAGPVSRRIFCSHCRLQRWLDVEAALALAQADVGVIPPEAALEIAKAARLSAVDLQQIADGVASTGHSLMPLLGALQRNCSPSAREYVHFGATTQDIQDTAQSLEMRDVLDETERALDILLDRLSVLASGTRNALMVARTHSIPALPTTFGLKVAGWIDELLRHRERLGEARKRILVVQLFGGVGTMAAFGDEAMLLLESFARRLSLDVPLAGWHVSRDRVTEFVSTLAMVTASLARIADEIRTLNRWEIGELEVGWTQQQIGSSTMPHKRNPEGCEQVVVLARLAKAQVLLALDAMILEHERDYRGTRLEWCAVADVSHYALMALSLLTDTIDGLTVHDETMARTANAYSDAICTEAFVFEMAKQLGKSSAYEIIFEITQACQRKRIPMRQALESDPRVGAVMPKETLARLFEPRTHLGMAGTIVDKVLDKVASHH

SEQ ID NO: 2981 - DNA, 1371 bp, Pseudomonas aeruginosa
  CDS (1)..(1371)
atgcagctttcctcgctcaccgcggtatcccccgtcgatggccgctatgccggcaaaaccagcagcctgcgtccgatcttcagcgaatacggcctgatccgtttccgcgtcatggtggaagtccgctggctgcagcgcctcgccgcccacgccgggattcccgaggtcgcgccgttctccgccgaagccaacgccctgctcgacagcctggccagcgacttccagctggaacacgccgaacgcatcaaggaaatcgagcgcaccaccaaccacgacgtgaaagccgtggagtacctgctcaaggaacaggccgccaagcttccggagctggccgcggtcagcgagttcatccacttcgcctgcacctccgaggacatcaacaacctgtcccacgccctgatgctccgcgagggtcgcgacagcgtgctgctgccgctgatgcgccagatcgccgaggccatccgcgaactggcggtgaaactcgccgacgtgccgatgctctcccgcacccacggccagcctgcctcgccgaccaccctgggcaaggaactggccaacgtcgtctaccgcctggagcggcagatcaagcaggtcgccggcatcgagttgctgggcaagatcaacggtgccgtgggcaactacaacgcccacctgtccgcctatcccgaagtcgactgggaagccaacgcgcgccagttcatcgaaggcgacctcggcctgaccttcaacccctacaccactcagatcgagccgcacgactacatcgccgagctgttcgatgcgatcgcccgcttcaacaccatcctcatcgacttcgaccgcgacgtctggggctacatctccctcggctatttcaagcagaagaccgtggccggcgagatcggctcctcgaccatgccgcacaaggtcaacccgatcgacttcgagaactccgagggcaacctcggcatcgccaacgcgctgttccagcacctggccagcaagctgccgatctcgcgctggcagcgcgacctgaccgactccaccgtgctgcgcaacctcggcgtcggcatcgcccacagcatcatcgcctacgaggccagcctgaagggcatcggcaagctggagctgaacgcccagcgcatcgccgaggacctggacgcctgctgggaagtcctcgccgagccggtgcagaccgtgatgcgtcgctatggcgtggaaaacccctacgagaagctgaaggaactgacccgcggcaaaggcatcagcgccgaagccttgcagactttcatcgaagagctggcgattcccgccgaggccaaggtcgagctgaagaagctgaccccggccggctacgtcggcaatgccgccgcccaggccaagcgcatctga

SEQ ID NO: 2982 - protein, 456 aa, Pseudomonas aeruginosa
MQLSSLTAVSPVDGRYAGKTSSLRPIFSEYGLIRFRVMVEVRWLQRLAAHAGIPEVAPFSAEANALLDSLASDFQLEHAERIKEIERTTNHDVKAVEYLLKEQAAKLPELAAVSEFIHFACTSEDINNLSHALMLREGRDSVLLPLMRQIAEAIRELAVKLADVPMLSRTHGQPASPTTLGKELANVVYRLERQIKQVAGIELLGKINGAVGNYNAHLSAYPEVDWEANARQFIEGDLGLTFNPYTTQIEPHDYIAELFDAIARFNTILIDFDRDVWGYISLGYFKQKTVAGEIGSSTMPHKVNPIDFENSEGNLGIANALFQHLASKLPISRWQRDLTDSTVLRNLGVGIAHSIIAYEASLKGIGKLELNAQRIAEDLDACWEVLAEPVQTVMRRYGVENPYEKLKELTRGKGISAEALQTFIEELAIPAEAKVELKKLTPAGYVGNAAAQAKRI

SEQ ID NO: 2983 - DNA, 1311 bp, Caulobacter crescentus
  CDS (1)..(1311)
atgatcagccgctacgcccgccccgaagccgccgccatctggtccagccagaccaagtacaagatctggttcgagatcgaggcccacgccgccgacgccatggccgagctgggagtcatccccaagctcgccgccgagacgatctgggaaaagggccgcgacgcggtctgggacagcgaccgcatcgatgagatcgagcgcgtcactaagcacgacgtcatcgccttcctgacccacgtctccgagatcgtcggtcccgaagcccgcttcctgcaccagggcatgaccagcagcgacgtgctggacacctgcttcgccgtgcagctgtcgcgcgccaccgacctgctgctggaagacgtcgatctggtgctggccgcgctgaagcgccgggccctggaacacaagatgaccgtctgcgtcggccgcagccacggcatccacgctgagccgatcacctttggcctgaagctcgcaggctactacgccgagttccagcgcgccaaggagcgcctggcgatggccaagttcgagatcgccacctgcgcgatctcgggcgcggtgggcaccttcgccaatgtcgatccgcgcgtcgaacagcacgtggccgacaagatgggcctggctgtcgagccggtctcgacccaggtgatcccgcgcgaccgccacgcggcctatttcgcggccctgggcgtggtggcctcgtcggtcgagcgcctggccaccgagatccgccacctgcagcgcaccgaggtgctggaagccgaagagccgttcgatccgggccagaagggctcgtcggccatgccgcacaagcgcaacccgatcctgaccgaaaacctcaccggcctggcgcgcttggtccgttcggccgtggtgccggcgatggagaacgtcgccctctggcacgagcgcgacatcagccactcgtcggtcgagcgcggcatcggccccgacgccaccatccacctcgacttcgccctgcgccgtctggccggcgtgatcgagcgcttcaacatctatcccgacaacatggccaagaacctggacaagttggggggtctcgttttctcccagcgcgtcatgctggccctgacccacaaggacgtctcccgcgaggacgcctatgcggccgtgcagggcaacgccatgaaggtctggcgcggcgaaggccggttcctcgacttcctgaaggccgatccggtcgtgtccaaggccctgaccgagaccgaactcgaagagctgttcgaccttggctaccacaccaagaatgtcgacgtgatctttcagcgcgtcttcggcgaacagggctga

SEQ ID NO: 2984 - protein, 436 aa, Caulobacter crescentus
MISRYARPEAAAIWSSQTKYKIWFEIEAHAADAMAELGVIPKLAAETIWEKGRDAVWDSDRIDEIERVTKHDVIAFLTHVSEIVGPEARFLHQGMTSSDVLDTCFAVQLSRATDLLLEDVDLVLAALKRRALEHKMTVCVGRSHGIHAEPITFGLKLAGYYAEFQRAKERLAMAKFEIATCAISGAVGTFANVDPRVEQHVADKMGLAVEPVSTQVIPRDRHAAYFAALGVVASSVERLATEIRHLQRTEVLEAEEPFDPGQKGSSAMPHKRNPILTENLTGLARLVRSAVVPAMENVALWHERDISHSSVERGIGPDATIHLDFALRRLAGVIERFNIYPDNMAKNLDKLGGLVFSQRVMLALTHKDVSREDAYAAVQGNAMKVWRGEGRFLDFLKADPVVSKALTETELEELFDLGYHTKNVDVIFQRVFGEQG

SEQ ID NO: 2985 - DNA, 1434 bp, Pseudomonas aeruginosa
  CDS (1)..(1434)
atgccaagtcacattacggaatcccgtatacacgggggcgcctactcgtccccggcattcgccgcgatcttttccgataccaaccaggtgcggaggtggctggatgtcgagcgagccttggcggcgacccaggccgagatgggcatcatcccccacgaggcggcgcgggagatcgaccgcgccgcccaggtggagcgcttcgacctcacccaactgggccgcgaaagcctggagacagggcacctgctggtgcctaccatccgcgccctggcgaggtcgtgcgagggtagctggggggagtacgtgcactatggcgtgaccacccaggacatcctcgacaccgggctgatgctgcaggtcaaggaagcctggggccatgcgctcgggctcctgcactcgatccgtggccatctgctggcgcttgccctgcgccaccagcacacgccgatggttgcacgcacccacgggcagcaggcgctgcccacgaccttcggctacaaggtcgccgtctgggtggatgaaatcgaccgtcacctggcgcgcttcgacgaagcgcgcgaacgcgtcctggtcggcaacctgaccggtgccgtgggaaccctggcgtcgttcggcgcccagggcttcgagctacagcggcgaaccctggccaggcttggcctcggcgcgccgtcgaccagttggcacagcgcccgggaccgggtgctggaggttgccgggttgctggtccaggtgtcggtgacgctgggccgggtggcgaacgagatctaccacctgcagcgcagcgaaatcgacgaggtacgcgagggcagccggccgggacaggtgggcagcagcaccatgccgcacaagcggaacccgtcgtcggtcgacctggtcagcgcgctgtcgcggctggtgcgggcacagatggtggcgctcaccgatgccgcgttccagttgcacgagcgcgacggcaccgcctggcgcatcgagtgggcggcgttgccggagctgttcgtctacgccggcgccttgctgacccgcatggaggcggtgctggccgaggggctcgaggtgcgcgaggaacgcatgcgcgccaacctcgacctgctgggtgggctgatcctgtcggagcgggtcatgctcgcgctggcggggcagttcggcaagcagaccgcccacgaactgctccatgagataacccaggcctcccagcggcagggcgttccgttccgcgaggcgctgctcgggcagccaaggttgcgcggctgtttcagcgccgaggcgctcgaagaactgctcgaccccgtcggctacgtcggcctcgccgcggagatggtcgacctggtcgccgacaaaccacgaaccggcgcgtcgggcgacaggcccgaaggcgccgcctcttcccaaggaaatcccggtcagtcccagtacgtgatggaggataggtga

SEQ ID NO: 2986 - protein, 477 aa, Pseudomonas aeruginosa
MPSHITESRIHGGAYSSPAFAAIFSDTNQVRRWLDVERALAATQAEMGIIPHEAAREIDRAAQVERFDLTQLGRESLETGHLLVPTIRALARSCEGSWGEYVHYGVTTQDILDTGLMLQVKEAWGHALGLLHSIRGHLLALALRHQHTPMVARTHGQQALPTTFGYKVAVWVDEIDRHLARFDEARERVLVGNLTGAVGTLASFGAQGFELQRRTLARLGLGAPSTSWHSARDRVLEVAGLLVQVSVTLGRVANEIYHLQRSEIDEVREGSRPGQVGSSTMPHKRNPSSVDLVSALSRLVRAQMVALTDAAFQLHERDGTAWRIEWAALPELFVYAGALLTRMEAVLAEGLEVREERMRANLDLLGGLILSERVMLALAGQFGKQTAHELLHEITQASQRQGVPFREALLGQPRLRGCFSAEALEELLDPVGYVGLAAEMVDLVADKPRTGASGDRPEGAASSQGNPGQSQYVMEDR

SEQ ID NO: 2987 - DNA, 1323 bp, Helicobacter pylori
  CDS (1)..(1323)
atgttagaacgctatgcgaatgaagaaatgaaagccctatggaatgagcaaaccaagtttgaaacctatttagaagtggaaaaagctgtcgttagggcgtggaacaagcttgggcaaatccaagatagcgattgtgaaaaaatctgtgcgaaagcggcattcaatcttgaacgcatcaaagaaattgaaaaaaccactaagcatgatttaatcgctttcactacttgcgtggctgaaagcttgggcgaagaatcccgctttttccattatgggatcacttctagcgattgcattgatacggctatggcgttattgatgacaaaaagcttaaaactcattcaaaaaggcgttaaaaacctttatgaaacccttaaaaacagggctttagagcataaagacacgctgatggtgggcagaagccatggggtgtttggcgaacccattacttttggcttagtgttagccctttttgctgacgaaatcaaacggcatttaaaagccttggatttaacgatggaatttatcagcgtgggagcgatcagtggggctatggggaatttcgcacacgcccctttagaattagaagaattagcgtgcgaatttttaggcttaaaaaccgccaatatcagcaatcaagtcattcaaagggaccgctacgctaggcttgcatgcgatctggctcttttggcgagcagttgtgaaaaaatcgctgtcaatatccgccatttgcaacgcagtgaagtctatgaagtggaagaagctttttcaacagggcaaaaagggagctctgcgatgcctcacaaaagaaaccccatattgagcgagaatatcaccgggctttgcagggtgattcgctcttttacgacccctatgctagaaaatgtcgccttatggcatgaaagagacatgagccatagctctgtggagcgttttgccttgcccgatctgtttatcactagcgattttatgctcagccgcctgaatagcgtgattaaaaatttggtggtttatcctaaaaacatgcttaaaaatttagctttgagtggagggttagttttttcgcaacgggtgttattggaattgcccaaaaaaggtttgagccgagaagaaagctattctatcgtgcaagaaaatgcgatgaaaatatgggaggttttgcaacaaggcgcttttaaaaacactgatgaaaatttgtttttaaacgccctactcaacgatgaacgcttgaaaaaatatttgagcgaagatgaaatcaaagcatgttttgattacaattattacactaaaaatgtgggggcgatttttaaaagggtgtttgaataa

SEQ ID NO: 2988 - protein, 440 aa, Helicobacter pylori
MLERYANEEMKALWNEQTKFETYLEVEKAVVRAWNKLGQIQDSDCEKICAKAAFNLERIKEIEKTTKHDLIAFTTCVAESLGEESRFFHYGITSSDCIDTAMALLMTKSLKLIQKGVKNLYETLKNRALEHKDTLMVGRSHGVFGEPITFGLVLALFADEIKRHLKALDLTMEFISVGAISGAMGNFAHAPLELEELACEFLGLKTANISNQVIQRDRYARLACDLALLASSCEKIAVNIRHLQRSEVYEVEEAFSTGQKGSSAMPHKRNPILSENITGLCRVIRSFTTPMLENVALWHERDMSHSSVERFALPDLFITSDFMLSRLNSVIKNLVVYPKNMLKNLALSGGLVFSQRVLLELPKKGLSREESYSIVQENAMKIWEVLQQGAFKNTDENLFLNALLNDERLKKYLSEDEIKACFDYNYYTKNVGAIFKRVFE

SEQ ID NO: 2989 - DNA, 1353 bp, Pyrococcus horikoshii
  CDS (1)..(1353)
atggcggttcacccaatagattaccgctacggtagtgaggagatgaggaagatatgggatgaaaagaacaagttgcaaaagctacttgacgttgaagctgccctagcaagggctcatgctaaggtaggaaacattccggaagagagcgctaaggttatttcggaaagggctaatacaaagtgggttaagcttgagagggttaaggagatagaggccgagatccatcatgatataatggccgtcgttaaagcgttaagcgaggtttgcggagaacatggaaagtacgttcatcttggggcaacttctaatgatataatagatacggccaatgcattgttaatcaaggaaagccttgagatagttgaaagggatcttaaagagcttagatccattttgaagcagcttgcggaaaagcatataggtacggtatgcatagggaggacccatggccaacatgcagttccgacgacttatggaatgaagttcgccctgtggcttgatgagatccagaggcatatagagaggttataccagcttaaggagagggttctcgttggtaagatgagaggggccgtgggaactgcggcctcatttggagaaaaagcctttgaaattgagagattggtgatggaagatcttggtctcaagcctgcaaggataacgaatcaaatagtgcaaagggatgtctacgctgaactacttttcttcctggctttagtggcttcaactctggataagatggggttggagataaggaacctgcagaggactgaaatacttgaggtaagcgaacccttcggggagaagcaagtaggttcatctacgatgccccacaagaggaaccccataagaactgaaaaggtctgtggacttgcgagggttttgtactccaacgttattccggcgttgctaaataacccactctggcatgagagggatttgacgaattcttccgttgagagggttatccttccagagagctttgtattgcttgatgagatgctcaagaccatgaagaaggttttaactggactggagttcttccccgagaacataaggaggaacttgtatttaacaaagaacttgatcatggccgagccccttatgttaaagcttgccgagaaaggaatgggaagacaggaagctcatgaagtagtaaggcaacttgcaatgaaagctttccgtgaaaacagagacctcctggaagttgcaaaggaaagtagagaaataactaagtatctaaccgagagagatcttgaggagctaaaaccagaaaattacattggcaaagcaagggaaatagtcaaaaaagtcattgaatatgttgaggagatggaaagaaggggattataa

SEQ ID NO: 2990 - protein, 450 aa, Pyrococcus horikoshii
MAVHPIDYRYGSEEMRKIWDEKNKLQKLLDVEAALARAHAKVGNIPEESAKVISERANTKWVKLERVKEIEAEIHHDIMAVVKALSEVCGEHGKYVHLGATSNDIIDTANALLIKESLEIVERDLKELRSILKQLAEKHIGTVCIGRTHGQHAVPTTYGMKFALWLDEIQRHIERLYQLKERVLVGKMRGAVGTAASFGEKAFEIERLVMEDLGLKPARITNQIVQRDVYAELLFFLALVASTLDKMGLEIRNLQRTEILEVSEPFGEKQVGSSTMPHKRNPIRTEKVCGLARVLYSNVIPALLNNPLWHERDLTNSSVERVILPESFVLLDEMLKTMKKVLTGLEFFPENIRRNLYLTKNLIMAEPLMLKLAEKGMGRQEAHEVVRQLAMKAFRENRDLLEVAKESREITKYLTERDLEELKPENYIGKAREIVKKVIEYVEEMERRGL

SEQ ID NO: 2991 - DNA, 1299 bp, Streptococcus pneumoniae
  CDS (1)..(1299)
atgatcaaccgttactctcgccctgagatggcgaatatttggagtgaagaaaataaataccgtgcttggcttgaggtggaaatcctctctgacgaggcatgggctgagttgggggaaatccctaaggaagatgtggctttgattcgcaagaaggcggactttgacatcgaccgtattttggaaattgagcaggagacgcgccacgatgtggtggctttcacgcgtgcggtttctgagactcttggtgaagagcgcaagtgggttcactatgggttaacttctaccgacgtggtggatactgcttatggttacctctacaagcaggccaacgacatcatccgtcgtgaccttgaaaacttcactaatatcatcgctgacaaggccaaggagcacaagttcaccatcatgatggggcgtactcatggtgtgcacgctgagccgacaacttttggtcttaaattggcaacttggtatagcgaaatgaaacgcaatatcgagcgtttcgagcatgcggctgctggtgtagaagctggtaagatttctggtgcggttgggaactttgccaatatcccaccatttgtagaggagtatgtctgcaacaagcttggtatccgtgctcaagaaatctctacacaagtccttcctcgtgaccttcacgctgagtactttgcagttcttgccagcattgcgacttcaatcgaacgtatggcgactgagattcgtggtctacaaaaatctgagcaacgcgaagtagaagagttctttgctaaagggcaaaaagggtcttcagcaatgcctcacaaacgcaacccaatcggttctgaaaatatgactggtctggcgcgtgtcattcgtggtcacatgattacggcttatgaaaacgtcgctctctggcacgaacgcgatatttcccactcatcagctgagcgtatcatcacaccagatacgaccattttgattgactacatgctcaaccgttttggaaatatcgtcaagaacttgacagtcttcccagaaaatatgatccgaaacatgaactcgacttttggtcttatctttagccaacgggctatgttgacattgattgaaaaaggcatgacccgtgagcaagcctatgacttggtgcaaccaaaaacagcctactcttgggacaaccaagtagactttaaaccacttcttgaggcagattcagaagtaacatcacgtctcactcaagaagaaatcgatgaaatcttcaacccagtttattacaccaaacgagtggatgatatctttgaacgtcttggactaggtgattaa

SEQ ID NO: 2992 - protein, 432 aa, Streptococcus pneumoniae
MINRYSRPEMANIWSEENKYRAWLEVEILSDEAWAELGEIPKEDVALIRKKADFDIDRILEIEQETRHDVVAFTRAVSETLGEERKWVHYGLTSTDVVDTAYGYLYKQANDIIRRDLENFTNIIADKAKEHKFTIMMGRTHGVHAEPTTFGLKLATWYSEMKRNIERFEHAAAGVEAGKISGAVGNFANIPPFVEEYVCNKLGIRAQEISTQVLPRDLHAEYFAVLASIATSIERMATEIRGLQKSEQREVEEFFAKGQKGSSAMPHKRNPIGSENMTGLARVIRGHMITAYENVALWHERDISHSSAERIITPDTTILIDYMLNRFGNIVKNLTVFPENMIRNMNSTFGLIFSQRAMLTLIEKGMTREQAYDLVQPKTAYSWDNQVDFKPLLEADSEVTSRLTQEEIDEIFNPVYYTKRVDDIFERLGLGD

SEQ ID NO: 2993 - DNA, 1449 bp, Saccharomyces cerevisiae
  CDS (1)..(1449)
atgcctgactatgacaattacactacgccattgtcttctagatatgcctccaaggaaatgtcagcaacgttttctttgagaaacagattttccacatggagaaaactatggttaaatttggctattgctgagaaggaattgggcttaactgttgttacagatgaagcaattgagcaaatgcgcaaacacgtcgaaatcactgatgatgaaatcgcaaaagcttctgctcaagaagccattgtaagacatgatgttatggcacatgttcatacatttggtgaaacttgtccggctgctgcgggtatcattcacttaggtgctacttcctgtttcgttacagacaatgctgatctaatctttattagggacgcctacgatattattattccaaaacttgttaacgtcatcaacagattggctaagtttgctatggaatacaaggatttgcctgtattgggttggactcactttcaaccagcacaattaacgaccttgggtaagagagctactttatggatacaagagctattgtgggatttgagaaactttgaaagagctagaaacgatatcggtctacgtggtgttaagggtactactggtactcaggcatcattcttggccttattccatggtaatcatgataaagttgaagcccttgacgaaagagtaactgaattattaggtttcgataaggtatatccagtcactggtcaaacctactcaagaaaaattgacattgacgtgttggctcctttgtcttcttttgctgctactgcacacaaaatggctactgacataagattattagccaacctgaaggaagttgaggaaccttttgagaaatcacaaatcggatcctctgctatggcttacaagagaaacccaatgcgttgtgagagagtgtgctccttggctagacacttaggttccttgtttagtgacgccgttcaaactgcatccgttcaatggttcgaaagaactctggatgattctgctattagaagaatttctttaccaagtgcatttttaaccgcagatattctattatctactttgttgaacatctcatccggtttagttgtgtatccaaaggttatcgaaaggagaattaagggtgaactaccttttatggctactgaaaatatcatcatggctatggtagaaaagaatgcctccagacaagaagtacatgagcgtattagagtgctctctcatcaagccgcagcagtagtcaaggaagaaggtggggaaaatgatttaattgaacgagtaaagagggatgaatttttcaagcctatctgggaagaattagattctttactggaaccatccacttttgttggtagagctccacaacaagttgagaaatttgttcaaaaagacgttaacaatgctttacaacctttccaaaagtacctaaacgatgaacaagtcaagttaaatgtttag

SEQ ID NO: 2994 - protein, 482 aa, Saccharomyces cerevisiae
MPDYDNYTTPLSSRYASKEMSATFSLRNRFSTWRKLWLNLAIAEKELGLTVVTDEAIEQMRKHVEITDDEIAKASAQEAIVRHDVMAHVHTFGETCPAAAGIIHLGATSCFVTDNADLIFIRDAYDIIIPKLVNVINRLAKFAMEYKDLPVLGWTHFQPAQLTTLGKRATLWIQELLWDLRNFERARNDIGLRGVKGTTGTQASFLALFHGNHDKVEALDERVTELLGFDKVYPVTGQTYSRKIDIDVLAPLSSFAATAHKMATDIRLLANLKEVEEPFEKSQIGSSAMAYKRNPMRCERVCSLARHLGSLFSDAVQTASVQWFERTLDDSAIRRISLPSAFLTADILLSTLLNISSGLVVYPKVIERRIKGELPFMATENIIMAMVEKNASRQEVHERIRVLSHQAAAVVKEEGGENDLIERVKRDEFFKPIWEELDSLLEPSTFVGRAPQQVEKFVQKDVNNALQPFQKYLNDEQVKLNV

SEQ ID NO: 2995 - DNA, 1296 bp, Synechocystis sp
  CDS (1)..(1296)
atgatcgaacgttataccctgcctgaaatgggcaaaatttggacggatacctacaagctacaaacctggctagacgtggaaatcgccgtttgtgaagcccaggcggagttgggttatattccccaggcagcggtggacgaaatcaaggccaaagctaagttcgatccccaacgagtgctggaaattgaggcggaagtgcgtcacgatgtcatcgcctttttaaccaacgttaatgaatatgtgggggatgcggggcgttatattcacctgggactaacaagctccgacgtactggacaccgctctggcgttgcaattggtggcgagcctagacctgattttggagcagttggaaaaactaattcaggccatccgttaccaagctcagcagcatcgttacaccgtcatggtgggccgttcccatggtatccatgccgaacccatcacattcggatttaaactcgctggttggttagcggaagtattgagaaaccgcgatcgcctggtgcgggtagcccaatccattgccgtgggtaaaatttccggcgccgtgggcacctatgccaacattgaccccaaagtggaggcgatcgcctgtcagaaattaggcttagaaccagatacggcttccacccaggtcatttcccgagatcgccatgcggaatacgtgcaacagttggctttgctggccgcctctttggaacggtttgcagtggaaattcgcaacctgcaacgcaccgatgttttggaagtggaggaatatttttccaagggccaaaagggttcttccgctatgccccataaacgtaaccccatccgctcagaacgattaacgggaatggcccggctggttcggggtcatgcagtggcggcgttggaaaatgtagctctctggcatgaacgggatatttcccacagttctgtggagcgggttgcttttcccgactgctgtattctcacccattttatgttgaaggaaaccacggatttggtgaaaaatctgttggtctatcccgaaaatatgaaacgcaatatgaacgtttacggcggggtaattttcagccaaaaagttctgcttgccctagtggaaaaaggcatgaatcgagaagatgcctaccgagtggtgcagggttccgcccaccaagcctggaacacggaagggggcaattttgaagagctagtccgagctgatgcccaggtaacggccctactttctgccgaagaaattgaccagtgctttgacccccaacaacatttgactaacctggcggaaatttacagccgtttggatatttag

SEQ ID NO: 2996 - protein, 431 aa, Synechocystis sp
MIERYTLPEMGKIWTDTYKLQTWLDVEIAVCEAQAELGYIPQAAVDEIKAKAKFDPQRVLEIEAEVRHDVIAFLTNVNEYVGDAGRYIHLGLTSSDVLDTALALQLVASLDLILEQLEKLIQAIRYQAQQHRYTVMVGRSHGIHAEPITFGFKLAGWLAEVLRNRDRLVRVAQSIAVGKISGAVGTYANIDPKVEAIACQKLGLEPDTASTQVISRDRHAEYVQQLALLAASLERFAVEIRNLQRTDVLEVEEYFSKGQKGSSAMPHKRNPIRSERLTGMARLVRGHAVAALENVALWHERDISHSSVERVAFPDCCILTHFMLKETTDLVKNLLVYPENMKRNMNVYGGVIFSQKVLLALVEKGMNREDAYRVVQGSAHQAWNTEGGNFEELVRADAQVTALLSAEEIDQCFDPQQHLTNLAEIYSRLDI

SEQ ID NO: 2997 - DNA, 1404 bp, Arabidopsis thaliana (mouse-ear cress)
  CDS (1)..(1404)
atggctataacacaccccaaaatcccttctttcggttttacacccaccggaatattcctaaacccatcaaaatcagtgtgtttggcttcacatcatcggcttccgagagtttcatgctctgtttctactactactgattctcccaagctagtgacttcaacaaaggtgacggcaatggatggagtgagctctagagacttggagatgtcgaatttaacggcgttatcgcctttggatggacgttattggagtaaagttaaggacttggcttcttctttgagcgagtttggattgatctatttccgagtttttgtcgagatcaaatggcttcttaagctttcgaatattcctgaagtcactgaagttccaagctttagcaaagaagctcagagtttcttgcaaggcataatcgatggatttagcatagacgatgcattggaaattaagaagattgagagagtaacaaatcatgatgtgaaagcagtggagtatttcttgaaacaaaagtgtgaatcacaaccagagattgctaaggttcttgagtttttccatttcgcttgcacgtctgaggacatcaacaatctttcccatgctttgatgcttcaagaagcacttagttcggttatacttcctaccatggatgagctgatcaagtcaatctctctgatagctaagaactttgcttatgtccccatgctttcacgaactcatgggcagccagctacgccaacaactttggggaaagaaatggcgaattttgctgtgaggttaagcgaagaaaggagatatctttcagaaactaagattaaggggaaatttgcaggtgctgttgggaactacaacgcccatatttccgcatattcgaatattgactggcctcatgtttccgaggagtttgttacttctcttggattaacattcaacccatacgtgactcagacaactaaagcgggtgaaattggatcgtcgacaatgcctcacaaagtgaatcctattgactttgagaacagcgaagggaatctagggaaagcaaacgcagagcttacttttctcagcatgaagcttcccatttcacgcatgcagcgtgatttaactgattcaactgtcttgagaaacatgggtggagctttaggacactctcttctcgcttacaagagtgcgatacagggaatcgggaagcttcaggtgatgaggagatacggtgtccctgagccgtatgagaagctgaaggagctaacaagaggaaaagctgtgaatgaagaaaccataagaacgtttatcaaaggtttggaattgccttcagaagcaaaagaccaacttctggagctaactccacacacatatgttggtgctgctgctgcattggcactggccgtggatgaagctctgcacttgggacattga

SEQ ID NO: 2998 - protein, 467 aa, Arabidopsis thaliana (mouse-ear cress)
MAITHPKIPSFGFTPTGIFLNPSKSVCLASHHRLPRVSCSVSTTTDSPKLVTSTKVTAMDGVSSRDLEMSNLTALSPLDGRYWSKVKDLASSLSEFGLIYFRVFVEIKWLLKLSNIPEVTEVPSFSKEAQSFLQGIIDGFSIDDALEIKKIERVTNHDVKAVEYFLKQKCESQPEIAKVLEFFHFACTSEDINNLSHALMLQEALSSVILPTMDELIKSISLIAKNFAYVPMLSRTHGQPATPTTLGKEMANFAVRLSEERRYLSETKIKGKFAGAVGNYNAHISAYSNIDWPHVSEEFVTSLGLTFNPYVTQTTKAGEIGSSTMPHKVNPIDFENSEGNLGKANAELTFLSMKLPISRMQRDLTDSTVLRNMGGALGHSLLAYKSAIQGIGKLQVMRRYGVPEPYEKLKELTRGKAVNEETIRTFIKGLELPSEAKDQLLELTPHTYVGAAAALALAVDEALHLGH

SEQ ID NO: 2999 - DNA, 1365 bp, Streptomyces coelicolor
  CDS (1)..(1365)
atgacatcacctgccgtccccgaccccgccgggagcgaacccgacgccgacacgggcctgctcgcccccgggtggacgggctcgccggccgcctccgcgaccggtgaccgcgcgtatctgcgggccctgctcgacgcggaggcggcgctgacccgcgcccaggccgcgctggggctcgccccggccgaggcggcggacgcggtgggcgcggtcgccgccgacccggccgccttcgacgcgcgctcgctcgccgagcgcgcccgggacggcgggaacccggtcatccccctggtggccgacctgacgaaggcggtcggcgagccgtacgggccgtacgtgcaccggggcgcgaccagccaggacatcctggacacggcgacgatgctggtcgccgcccgcaccctggacctgctgctgcccgatctcgcccgcacggaacgggcgctggcccggctggccgccgagcaccgggacacgccgatgccgggccggaccctgacccagcacgccgtgccgaccgtcttcgggctcaaggcggccggatggcgcgcgctggtgctggacgcgcgggaccggatcacggcggtgcgggacgccctgcccgcccagctcggcggcgcggcgggcaccctggccgccttcgaggcgtacggcgcgacggacccgaccgcgctgcccgccgcctacgccggtgaactggggctgcgggcacccgtactgccctggcacacgctgcgcactccgatcgccgacctggccgggaccctcgccttcaccgccggggcgctcgggaagatcgccgtggacgtgctgacgctgtcgcgcaccgagaccggcgaggtcgccgagggcggcgggggcggttcctcggcgatgccgcacaaggccaacccggtccggtccacgctgatcgcggcggcggcccggcgcgcaccgcagctcgcggccacgctgtacggctcgctggccgccgaggacgagcggccggccggggcctggcacgcggagtgggagccgctgcgggacctgctgcggctgaccgggggtgccgcccgcgatgccgcggagctggccgaggggctgcgggtgcgcccggacgcgatgcgggcgcacctcgggcgcacccacgggctgatcgtctcggagcggctctcggccgagctggcgccggtgctcggccgggcccgtgcccgggaactgctcaccgaactggcggcgcgcgcctacgccgaggaccggaaccttggtgaactcctggccgaggtgccggagttgcggggtctcgacctggccggcccgaccgaccccgctcgctacacgggcgccgccgccaccctcaccgaccgtgctctggagcgacgttga

SEQ ID NO: 3000 - protein, 454 aa, Streptomyces coelicolor
MTSPAVPDPAGSEPDADTGLLAPGWTGSPAASATGDRAYLRALLDAEAALTRAQAALGLAPAEAADAVGAVAADPAAFDARSLAERARDGGNPVIPLVADLTKAVGEPYGPYVHRGATSQDILDTATMLVAARTLDLLLPDLARTERALARLAAEHRDTPMPGRTLTQHAVPTVFGLKAAGWRALVLDARDRITAVRDALPAQLGGAAGTLAAFEAYGATDPTALPAAYAGELGLRAPVLPWHTLRTPIADLAGTLAFTAGALGKIAVDVLTLSRTETGEVAEGGGGGSSAMPHKANPVRSTLIAAAARRAPQLAATLYGSLAAEDERPAGAWHAEWEPLRDLLRLTGGAARDAAELAEGLRVRPDAMRAHLGRTHGLIVSERLSAELAPVLGRARARELLTELAARAYAEDRNLGELLAEVPELRGLDLAGPTDPARYTGAAATLTDRALERR

SEQ ID NO: 3001 - DNA, 1803 bp, Schizosaccharomyces pombe
  CDS (190)..(1638)
catggaggcacaataaattatcgtttgatttttcatgcgcgttaactaattaatatggaaattacaaaataataaatctgatggtcttctcaaggtggagcatttgtagagcactacttagtgttggttcctcactgtccattcaccacaacaggtagaaattttttggcgagcttaagattatcgaatatggaggattatggttcatatagtacaccattgacagcaagatatgcttctgctgaaatgtctcatctcttttcaagagaaatgcgtattaatacttggagacaattgtggttgaatctcgccattgctgaaaagcaactcggtttaactcaaattactgatgaagctattgagcaacttaaagcgcatgtcaaaattacagctccagaatttgaaatcgctgctaaggaagagaagcgtcagagacacgatgttatggctcacatctatacatatggtcttgctgctcctgctgcttctggtattattcatttgggtgctactagctgttttgtaaccgataatgctgacttgattttcttacgcagcgccatggatcttttgatccctaagttagtcaacgttatcaatcgtcttagccagtggtctttgcgatacaaagacattcctactcttgggtttacacattatcaaccagctcaattaactaccgttggtaagcgtgccactctttggattcaagagcttttatgggatttgagaaattttgtaagagctagaaatgacattggtttccgtggtgtcaagggtaccaccggcactcaggcttccttcttagccctttttgagggcgatcatgccaaggttgaggaattggataaattggttgccaagctttccggttttgataacgtttatcctgtaaccggccaaacctatgatcgtaagatcgatattgacgttttgcaaccattagcttctttcggtgctactgctcataagattgcaactgatatccgtctccttgctaatttgaaagaagtagaagagccatttgaggctggtcaaattggcagttctgctatggcttacaagcgtaatccaatgcgttgtgaacgtatttgttctcaagctcgttatattatgaacttgattcctaatgctcttaatactgcttctgttcaatggtttgagcgtactttggatgatagctctaaccgtcgttctctgttacctgaagccttcttgtttacagatagcgttcttaagattctattgaacgttatttctggtatggtcatttatcctaaggttattcaaaaacacattcgtgctgaattgcccttcatggccactgaaaacattatcatggctatgactaagcacggtgctagtcgtcatgagtgtcacgagcagattcgtgtcttgtctcatcaagctggccgagtagtcaaggaagagggaggggataacgacttaattgagcgtattaagaatactccttattttgctcctatttatgatgagctagattctttgttggatgcatccacttttgttggacgtgctcccgagcagactgaatcctttgtaaataaggacgtctctcaagcgcttgcgcctttcaagagcatgatcactgaggaaaaggttgatcttgccgtttaaatagtttaaattttggtttgcttcgtagtggatacgaacttttttgatttgtttaaaatagaaagaatacatttttttcatcgttagtatgaatttttgtttgtaaaacaaatattaaaagcagaggaaatagcaaaataactctactagataaaccggtttatt

SEQ ID NO: 3002 - protein, 482 aa, Schizosaccharomyces pombe
MEDYGSYSTPLTARYASAEMSHLFSREMRINTWRQLWLNLAIAEKQLGLTQITDEAIEQLKAHVKITAPEFEIAAKEEKRQRHDVMAHIYTYGLAAPAASGIIHLGATSCFVTDNADLIFLRSAMDLLIPKLVNVINRLSQWSLRYKDIPTLGFTHYQPAQLTTVGKRATLWIQELLWDLRNFVRARNDIGFRGVKGTTGTQASFLALFEGDHAKVEELDKLVAKLSGFDNVYPVTGQTYDRKIDIDVLQPLASFGATAHKIATDIRLLANLKEVEEPFEAGQIGSSAMAYKRNPMRCERICSQARYIMNLIPNALNTASVQWFERTLDDSSNRRSLLPEAFLFTDSVLKILLNVISGMVIYPKVIQKHIRAELPFMATENIIMAMTKHGASRHECHEQIRVLSHQAGRVVKEEGGDNDLIERIKNTPYFAPIYDELDSLLDASTFVGRAPEQTESFVNKDVSQALAPFKSMITEEKVDLAV

SEQ ID NO: 3003 - DNA, 1296 bp, Bacillus subtilis
  CDS (1)..(1296)
atgatcgaacgttattcaagacctgaaatgtccgcgatttggacggatgaaaacagatttcaagcatggttagaggttgaaattcttgcctgtgaagcgtgggcggagcttggcgtcattccgaaagaagatgtaaaggttatgcgcgaaaacgcgtcatttgacatcaaccgcattttagaaatcgaaaaggacacgcgccatgacgttgtcgcttttacgcgcgctgtatccgaatcactgggcgaagaaagaaaatgggtgcattacggcttaacgtcaactgacgttgttgatacggctctttcctacttattaaaacaggcaaacgatattttgctcaaggatcttgagagatttgttgacattataaaagaaaaagcgaaagaacataaatacacagtcatgatggggcgcacacacggcgtacacgctgagcctacaacattcggcttaaaacttgcgctttggcatgaagaaatgaaacgtaatcttgagcgcttcaaacaagcgaaagcaggcatcgaggttggaaagatttccggtgctgtcggcacatatgcgaacattgatccatttgttgaacaatatgtctgtgagaagctcggattgaaagcagcaccgatttccactcaaacccttcagcgtgaccgccatgctgactatatggcaacacttgctttgatcgcgacaagcatcgagaaattcgctgtggaaatccgcggactgcaaaagagtgaaacacgtgaagtagaggaatttttcgcgaaagggcaaaagggttcatctgcaatgccgcataaacgaaatccgattggctctgaaaacatgacaggcatggcgcgcgtgatccgcggctacatgatgacagcttacgaaaatgttccattatggcatgagcgcgatatttctcattcttcagcagaacgaattattcttccggatgcgacaattgcgctgaactacatgctgaaccgcttctccaacatcgtgaagaacttaacggtcttcccggaaaacatgaagcgcaacatggaccgcactctcggccttatctattctcagcgtgtgctccttgctttgattgacacaggcctgactcgtgaagaagcctatgatacagttcagccgaaagcaatggaagcgtgggaaaaacaagtgccgttccgcgagcttgtggaagcggaagagaaaatcacgtcacgtctttctccagaaaaaattgctgactgctttgattacaattaccatctgaaaaatgttgatctgatctttgaacgtttaggtttagcatag

SEQ ID NO: 3004 - protein, 431 aa, Bacillus subtilis
MIERYSRPEMSAIWTDENRFQAWLEVEILACEAWAELGVIPKEDVKVMRENASFDINRILEIEKDTRHDVVAFTRAVSESLGEERKWVHYGLTSTDVVDTALSYLLKQANDILLKDLERFVDIIKEKAKEHKYTVMMGRTHGVHAEPTTFGLKLALWHEEMKRNLERFKQAKAGIEVGKISGAVGTYANIDPFVEQYVCEKLGLKAAPISTQTLQRDRHADYMATLALIATSIEKFAVEIRGLQKSETREVEEFFAKGQKGSSAMPHKRNPIGSENMTGMARVIRGYMMTAYENVPLWHERDISHSSAERIILPDATIALNYMLNRFSNIVKNLTVFPENMKRNMDRTLGLIYSQRVLLALIDTGLTREEAYDTVQPKAMEAWEKQVPFRELVEAEEKITSRLSPEKIADCFDYNYHLKNVDLIFERLGLA

SEQ ID NO: 3005 - DNA, 1464 bp, Mycobacterium leprae
  CDS (1)..(1464)
atgttcccgttttgcagtgcgaacccgaccgtaagctgtgcttctgtgagcattccgaatgttctagccgcccgatacgccagcgctgaattggtcgcgatatggtctccggaagccagggttatcgcggagcggcagttgtggctggccgtgctacgagcacaggcggaactgagtgttccgatgcctgttaaagcgatcgccgactacgagcgggtgcttggcgaggtcgatttggcttcgatcgccgcccgcgaacgtgtgttgcgtcacgacgtcaaggcgcgcatcgaggaattcaacgcgctggccggccatgagcaggtacataaggggatgaccagccgcgacttgaccgagaacgtggagcaactgcagatccggcggtcgttggaattggttttctgccatggtgtggccgtagtagcacggctggccgaatgcgcggtgtcctatcgcgacctggtgatggccggacgcagccataacgttgccgcgcaggccacgacattgggcaaacgcttcgcgtccgcgacgcaggaaacactgatagcgttgactaggctgcgcgagttgatcgaccgctacccactgcgcggtatcaagggcccgatgggtaccgggcaggacatgctcgacctgcttggcggtgacgctgcggcgctagcagaacttgagcaaagaatagctgaattcctaggattcacaaaggttttagccagtgtcgggcaggtatatccgcgttcactagaccacgatgtgatttcagcgttggtgcagctcggtgccggctcttcctcgttagcgcacaccatacggttgatggcaggtcacgagctcgttaccgaaggctttgcaccggggcaggttggctcgtcagcgatgccacacaagatgaacagccgcagctgtgaacgggtcaacggtctgcaggtggtgttgcgcggttacgccgcaatggcagccgaactagctggcgcgcagtggaacgagggcgacgttttctgctcagtagtacgtcgagttgctttgccagacagcttctttgccatcgacggccagatcgagacgtttttgacggtgctcgacgagtttggtgcttacccggcagtgatccgccgcgagctggaccgctatttgccattcctggccaccaccaaggtgctgattgcggctgtgcgtgctggtatgggtcgcgaggccgctcaccacgtgattcgcgaacacgcggtggcgacggcgctggccatgcgggagtgcggtgccgagcctgacctgctggaccggttggctgccgatgggcggttgccgctggaccgagcggcgctagacgccgcgctggccgacaagaaggcgttcaccggcgccgcggcagaccaggtagacgaggttgtcgcgatggtcgacaagctagtgggccgctacccggaagcagccaagtacacgccgggtgctatcctgtga

SEQ ID NO: 3006 - protein, 487 aa, Mycobacterium leprae
MFPFCSANPTVSCASVSIPNVLAARYASAELVAIWSPEARVIAERQLWLAVLRAQAELSVPMPVKAIADYERVLGEVDLASIAARERVLRHDVKARIEEFNALAGHEQVHKGMTSRDLTENVEQLQIRRSLELVFCHGVAVVARLAECAVSYRDLVMAGRSHNVAAQATTLGKRFASATQETLIALTRLRELIDRYPLRGIKGPMGTGQDMLDLLGGDAAALAELEQRIAEFLGFTKVLASVGQVYPRSLDHDVISALVQLGAGSSSLAHTIRLMAGHELVTEGFAPGQVGSSAMPHKMNSRSCERVNGLQVVLRGYAAMAAELAGAQWNEGDVFCSVVRRVALPDSFFAIDGQIETFLTVLDEFGAYPAVIRRELDRYLPFLATTKVLIAAVRAGMGREAAHHVIREHAVATALAMRECGAEPDLLDRLAADGRLPLDRAALDAALADKKAFTGAAADQVDEVVAMVDKLVGRYPEAAKYTPGAIL

SEQ ID NO: 3007 - DNA, 1314 bp, Symbiobacterium thermophilum
  CDS (1)..(1314)
atgattgaacgctacacccggccgcgcatggccgagctgtggtcggcggcgaatcgctttcagaagtggctggaggtggagctcctcgcctgcgaggcctgggcgaagctgggggtcatcccggccgaggcggtggccgagctccgggcccgggcgttcaccgtggacgaggcctttgtccgccgggtggcggagatcgagcagaccacccggcacgacgtgatcgccttcaccaccgcggtggccgagcgcatcgaccacccggcggcccggtacatccactacggcctcacctccaccgacgtggtggacacggccctgtcggccgtgctcaacgaggccgtccgagagatccagaaggggctggacgggctgatcgccgcgctgggccgccaggcggtgcggtacaaggatacccccatcatggggcggacccacggcgtgcatgccgagccgacatccttcgggctgaagctggccgtcttctacgcccagttccggcgggacgccgaccggctggagcaggcgcgccggtccatcgccgtcggtaagctctccggggctgtgggcaactatggtaacatcgatccgttcgtggagcagtacgtctgcgagaggctggggctcggggtcgccgacatctccacgcaggtgctccagcgggaccggcacgcgcacctgctcaccaccctcgcgatcctcggctcctcgctggacagcctggccaccgagctccggctgctgcagaagaccgagacccgcgaggtggaggagcccttctccaagggccagaaaggctccagcgccatgccccacaagcgcaaccccgtcaccctggagcagatctccggcctcagccgcatcctgcgcgccaacgccatcgcggccttggagaacgtgccgctctggcacgagcgggatatctcccactcgtcggtggagcgggtcatcctgcccgactccaccatcctggccgactacctgctggacaagatgacgtggatcatcgagaacctgcacgtctaccccgagaacatgcggcggtccatgcaggcctcctacggcctcacctcctcgggctccgtgctgctgtccctggtggagaaagggctgtcgcgtgagcaggcctacgccgtcgtgcaggagaaggccatgcgggcctgggcggaggggatccacctgcgccggctgctggaggaggatccgacggtgcaggcgctgctcacgcctgcggagttggacgccgccttcgacctgaagcaccacctgcgtcatgtggataccatcatgaagcgactggggttgatcgaatga

SEQ ID NO: 3008 - protein, 437 aa, Symbiobacterium thermophilum
MIERYTRPRMAELWSAANRFQKWLEVELLACEAWAKLGVIPAEAVAELRARAFTVDEAFVRRVAEIEQTTRHDVIAFTTAVAERIDHPAARYIHYGLTSTDVVDTALSAVLNEAVREIQKGLDGLIAALGRQAVRYKDTPIMGRTHGVHAEPTSFGLKLAVFYAQFRRDADRLEQARRSIAVGKLSGAVGNYGNIDPFVEQYVCERLGLGVADISTQVLQRDRHAHLLTTLAILGSSLDSLATELRLLQKTETREVEEPFSKGQKGSSAMPHKRNPVTLEQISGLSRILRANAIAALENVPLWHERDISHSSVERVILPDSTILADYLLDKMTWIIENLHVYPENMRRSMQASYGLTSSGSVLLSLVEKGLSREQAYAVVQEKAMRAWAEGIHLRRLLEEDPTVQALLTPAELDAAFDLKHHLRHVDTIMKRLGLIE

SEQ ID NO: 3009 - DNA, 1380 bp, Leifsonia xyli
  CDS (1)..(1380)
atgaccgccctgcctccccagccgttgagccccctagacggacgctaccgcccggcggtgctcggcctcggcgaccacctctccgaggcgggcctcaaccgtgctcgcgttcaggtggaggtcgaatggctcctgtacctcacaaaccaccggatgttcggatcgagtccgctgagcgccgagcaggccggacagctgcgggccctggccgacggcttcggacaggccgagatcgaccggctggccgagctggaggcgaccaccaagcacgatgtcaaagccgtcgagtacctcgttcgtgagcgcctccacacgctcggactggaccacatcgccgaactcacgcacttcgcggcgaccagcgaagacatcaataacctctcctacgcgctcacggtcagcgccgccgtcaacgaggtctggctacccaattaccgcgccgtgatcgccgaattgcgggcgcaggccgctcagcaccgcgacgccgcgatgctcgcgcggacccacggccagcccgcgacgcccaccacgatgggcaaggagctcgcggttttcgcacaccgtctcgaacgcatccgcaagcaggtcgagcagaccgaataccttggcaagttctccggcgcgaccggcaccttcgcagcgcacctcatcgccgatccctccgccgactggctcgcgatctccgaagagttcgtccgcagcctcgggctcgactggaaccccctcaccacccagatcgaatcccacgactggcaggcggagctttacgggcgtatctcacacgccaaccgcgtcctgcacaacctctgcaccgatatctggacgtacatctcgctcggctacttccgccagacgcccgaacccggcgccaccggatcttcgaccatgccgcacaaggtcaacccgatccacttcgagaacgccgaggcgaacctcgaactctccagtgccatcctggactcgctcgcggccaacctggtcacaagccggctccagcgtgacctcaccgactccagcgcgcagcgcaacatcggcgtcgggatcggccactccgtgctcgcgctcgacaacatccagcgcggactcggccagatctcgctcgatgcggacgccctggatgcggacctcgacaccaactgggaggtgctggccgaagccatccagaccgtcatccgcgcggatgtcacagcgggccgctcgaccatcgaagacccgtacgcactgctcaagagcctgacccgcggcaagcgcgtcgaccacgccgcgctgaccgagttcgtcaccggcctcgacatcggcccggcagccaagaaccgtctgctggaactcacaccggcgggctacatcggcctcgcctcgcagctggtcggccgcctctga

SEQ ID NO: 3010 - protein, 459 aa, Leifsonia xyli
MTALPPQPLSPLDGRYRPAVLGLGDHLSEAGLNRARVQVEVEWLLYLTNHRMFGSSPLSAEQAGQLRALADGFGQAEIDRLAELEATTKHDVKAVEYLVRERLHTLGLDHIAELTHFAATSEDINNLSYALTVSAAVNEVWLPNYRAVIAELRAQAAQHRDAAMLARTHGQPATPTTMGKELAVFAHRLERIRKQVEQTEYLGKFSGATGTFAAHLIADPSADWLAISEEFVRSLGLDWNPLTTQIESHDWQAELYGRISHANRVLHNLCTDIWTYISLGYFRQTPEPGATGSSTMPHKVNPIHFENAEANLELSSAILDSLAANLVTSRLQRDLTDSSAQRNIGVGIGHSVLALDNIQRGLGQISLDADALDADLDTNWEVLAEAIQTVIRADVTAGRSTIEDPYALLKSLTRGKRVDHAALTEFVTGLDIGPAAKNRLLELTPAGYIGLASQLVGRL

SEQ ID NO: 3011 - DNA, 1449 bp, Debaryomyces hansenii CBS767
  CDS (1)..(1449)
atgtcagctaacgataaatactccactccattatcttcaagatatgcgtcggatgagatgtccaaaatcttttcgttgaggaacagattctcaacctggagaaagttatggctcaatttagctatcgctgagaaggaagtcggattagacatgatttcagacaaggctattgagcaaatgaaggcacacttggaaatcactgatgaagaaattgaagctgcttccaaggaagacgcaatcgttagacacgacgttatggcccacgttcacgtctttggtaaaacttgtccagatgctgctgggattatccatctaggtgctacctcatgtctcgtcacagacaatgccgatctcaccctcttgagggatgcctacgacgttttgattccaaaattggtcaatgtcattaacagattatctgaatttgcattaaagtataaggatttgccagttttaggatggactcacttccagcctgctcaattgacaactgttggtaagagagctacattgtggattcaagagttgttatgggatttgagaaacatggaaagagctagaaatgatctcgggttgagaggagttaaaggtaccacaggtacacaagcttcattcttgtctttgttccacggtaaccacgaccaagttgaacaattagatgaaagagttgttgaattattaggattcgaccatgtttatccagttactggtcaaacttattctagaaaaattgatattgatgttttatccccattagcgtccttgggtgctactgcgcacaaatttgctactgatatcagattattagctaacttgaaggaagttgaagaaccatttgagaagtcccaaattgggtcttctgctatggcttacaagagaaacccaatgagatgtgaaagagtctgctctttagcaagacacatgggtggtttattaaatgatgccattcagaccgcctccgttcaatggtttgaaagaacattagatgattcagccattagaagaatctcccttccatcagcgtttttaactgctgacattttattatccaccatgaataacatttcctctggattagtcgtctatccaaaggtcattgaaagaaggatcaattccgaattaccattcatggctactgaaaatatcattatggccatggttgaaaagggtgaatctagacaagaatgtcacgaagaaatcagagtcttgtcccaccaagccagtgctgtcgttaagcaagaaggtggtgataatgacttaatccaaagggtcagagccactgaatatttcaagcctatctggaacgagttagatactttgttagacccttccactttcgttggtagagctcctcaacagactgaaaagtttattaataaggacgttgcgaatgctttaaaaaattacaagcatttggttaacgatgaatcagtttccttgaacgtttaa

SEQ ID NO: 3012 - protein, 482 aa, Debaryomyces hansenii CBS767
MSANDKYSTPLSSRYASDEMSKIFSLRNRFSTWRKLWLNLAIAEKEVGLDMISDKAIEQMKAHLEITDEEIEAASKEDAIVRHDVMAHVHVFGKTCPDAAGIIHLGATSCLVTDNADLTLLRDAYDVLIPKLVNVINRLSEFALKYKDLPVLGWTHFQPAQLTTVGKRATLWIQELLWDLRNMERARNDLGLRGVKGTTGTQASFLSLFHGNHDQVEQLDERVVELLGFDHVYPVTGQTYSRKIDIDVLSPLASLGATAHKFATDIRLLANLKEVEEPFEKSQIGSSAMAYKRNPMRCERVCSLARHMGGLLNDAIQTASVQWFERTLDDSAIRRISLPSAFLTADILLSTMNNISSGLVVYPKVIERRINSELPFMATENIIMAMVEKGESRQECHEEIRVLSHQASAVVKQEGGDNDLIQRVRATEYFKPIWNELDTLLDPSTFVGRAPQQTEKFINKDVANALKNYKHLVNDESVSLNV

SEQ ID NO: 3013 - DNA, 1449 bp, Yarrowia lipolytica CLIB99
  CDS (1)..(1449)
atgtccaacaacgactcgtaccagactcccctgtcctcgcgatacgccagcaaggagatgtcgtcgctcttctctatgaagaaccgatactccacctggcgaaagctgtggtacaacctggctgtggccgagaaggagcttggaatcacccagatcaccgacgaggcccttgagcagctcaaggcccaccaggagatcaccgacgacgagatcgccgaggccaccaagcaggaagccattgtgcgtcacgacgtcatgtcccacgtccatgtgtacggactcactgcccccgctgccgctggcatcatccatctgggagccacctcctgctttgtcaccgacaacgccgatcttatcttcctgcgagacggtctggacattctgatccccaagctcgttaacgtcattgaccgactctctcagtttgccctcaagtacaaggatctgcccgttctgggatggacccacttccagcccgcccaactgaccaccgttggtaagcgagccacactctggatccaggagcttctgtgggatctgcgaaacctgcagcgagcccgagacgaccttggtctccgaggtgtcaagggtaccaccggtactcaggcctctttcctgtctctgtttgagggtaaccacgacaaggtcgagcagcttgacgagcgagtcgttgagctccttggcttcgactacgcctacccctgcactggacagacctactctcgaaagattgatgtcgacgtccttgcccctctcgcctctctcggctgcactgcccacaagttcgccaccgacgtgcgtctccttgccaacctcaaggagatggaggagcctttcgagaagtcccagatcggatcatctgccatggcctacaagcgaaaccccatgcgatccgagcgaatctgctctctgtctcgacacctgcagtcttgtttccaggacgcaactcagaccgcttctgtccagtggttcgagcgaactctcgatgactctgctattcgacgagtctctcttcccggcgccttcctcaccgccgacattgttctgtccactcttctgaacgttgtctctggtctggtcgtctaccccaaggtcattgagcgacgaattgccgccgagcttcctttcatggccactgagaacatcatcatggcaatggtccagcgaggaggagaccgacagcagtgccacgaggagatccgagttctttctcaccaggccgcccaggttgtcaaggagcagggaggagataacgatcttattgagcgaatcaagaacaccccctacttcaagcccgttcacgacgaccttgacaagctgctcgatccctctactttcgtcggccgagcacccgagcagaccgaaaagtttgtcaacaagactgttgccaaggctctagagccttacaagaagatgatcaaccaggagggcttccagcttgctgtctaa

SEQ ID NO: 3014 - protein, 482 aa, Yarrowia lipolytica CLIB99
MSNNDSYQTPLSSRYASKEMSSLFSMKNRYSTWRKLWYNLAVAEKELGITQITDEALEQLKAHQEITDDEIAEATKQEAIVRHDVMSHVHVYGLTAPAAAGIIHLGATSCFVTDNADLIFLRDGLDILIPKLVNVIDRLSQFALKYKDLPVLGWTHFQPAQLTTVGKRATLWIQELLWDLRNLQRARDDLGLRGVKGTTGTQASFLSLFEGNHDKVEQLDERVVELLGFDYAYPCTGQTYSRKIDVDVLAPLASLGCTAHKFATDVRLLANLKEMEEPFEKSQIGSSAMAYKRNPMRSERICSLSRHLQSCFQDATQTASVQWFERTLDDSAIRRVSLPGAFLTADIVLSTLLNVVSGLVVYPKVIERRIAAELPFMATENIIMAMVQRGGDRQQCHEEIRVLSHQAAQVVKEQGGDNDLIERIKNTPYFKPVHDDLDKLLDPSTFVGRAPEQTEKFVNKTVAKALEPYKKMINQEGFQLAV

SEQ ID NO: 3015 - DNA, 1449 bp, Kluyveromyces lactis NRRL Y
  CDS (1)..(1449)
atgtctgattacgataagtacaccacaccactatcttctcgttatgcttctgaggagatgtcttccatattctctttgagaaacagattctctacctggagaaagctttggttgaatttggctattgctgaaaaggaattaggtcttgatgtcattagtgaagaagccattgagcaaatgaaggctcatttgaccatcaacgatgaagaaatcgctgctgcttccaagcaagaggccattgtcagacacgatgttatggctcacgttcacacttttggtgaaacttgtcctaaagccgctggtatcatccatctaggtgctacctcatgttttgtcaccgataatgctgacttgatcttcttgagagatgcttacgatatcttgattcctaagttggtcaatgttatcaacagattgtccaagtttgctttggagtacaaggatctaccagtattgggctggactcatttccaaccagctcaattgactaccttgggtaaaagagtcacattgtggatccaagaactattgtgggatctaagaaactttgtcagagctagaaacgatatcggtctacgtggtgtcaagggtaccaccggtacccaagcttctttcttaactttgttccatggtgatcacgacaaagtggaagctttggacaagagagttgctgaactattgggattctctactgtctacccagttaccggtcaaacttattctagaaagattgatatcgacgtgttggctccattatcctcatttgcagctactgctcacaagatggcgactgatatcagattattggctaacttgaaggaattggaagaaccgttcgaaaaatctcaaattggttcctctgccatggcttacaagagaaacccaatgcgttgcgaacgtgtgtgttctcttgccagacatttgggttctttgttcaacgatgccgtacaaaccgcgtcagtgcaatggtttgaaagaactttggatgactctgccatcagaagaatctctttgccaagtgctttcttgaccgcagacattctactatccactttgctaaacatctcttccggtttagtcgtttatccaaaggtcatcgaaagaagaattatgggtgaattgccattcatggccactgaaaatattatcatggccatggtcgagcacggtgcatccagacaagaagttcatgaagctatcagagtgctatctcaccaagctgccgctgtcgtcaaggaacaaggtggtgacaacgacttgatcgaacgtgtgagacaggacaagttcttcgaacctatctggaatgaattggactcattgttggagccatccacctttgtcggtagagctcctcaacaagttgagaagttcgttgccaacgatgtcaaacaagcgttggctgctttccaaaatgatatcactgatgtcgaagttaagctaaacgtttaa

SEQ ID NO: 3016 - protein, 482 aa, Kluyveromyces lactis NRRL Y
MSDYDKYTTPLSSRYASEEMSSIFSLRNRFSTWRKLWLNLAIAEKELGLDVISEEAIEQMKAHLTINDEEIAAASKQEAIVRHDVMAHVHTFGETCPKAAGIIHLGATSCFVTDNADLIFLRDAYDILIPKLVNVINRLSKFALEYKDLPVLGWTHFQPAQLTTLGKRVTLWIQELLWDLRNFVRARNDIGLRGVKGTTGTQASFLTLFHGDHDKVEALDKRVAELLGFSTVYPVTGQTYSRKIDIDVLAPLSSFAATAHKMATDIRLLANLKELEEPFEKSQIGSSAMAYKRNPMRCERVCSLARHLGSLFNDAVQTASVQWFERTLDDSAIRRISLPSAFLTADILLSTLLNISSGLVVYPKVIERRIMGELPFMATENIIMAMVEHGASRQEVHEAIRVLSHQAAAVVKEQGGDNDLIERVRQDKFFEPIWNELDSLLEPSTFVGRAPQQVEKFVANDVKQALAAFQNDITDVEVKLNV

SEQ ID NO: 3017 - DNA, 1365 bp, Erwinia carotovora
  CDS (1)..(1365)
atggcatcacatcttattgattttcttcttatagggaataattttggcacgcctgaaatgcgcggcgtctggtccgagcataaccgtctgactaagcaggtcgaggtagaagttgccttggcgcttgccgagggtgaactgggtgtcattccgctggatgcggcaaaaaccattgcagaaaacgctgacgcaagcgcgcttaacgttgaagagattgcaaaagatgcggcacgcatgaagcactccctgatgccgacgattgcagcgattcagagacaatgtggcgcggcgggtgaatttattcattacggcgtgaccacgcaggacatcgttgataccgcgacagtgttacaactgaaacaatcttttgatattgtcgtcagagatacacaactgctggccgttgaactgaaacgtttggcgaagaaacatcaacacacgctgatggctggccgtacccacggcatgcaagcgctgcccaccacgtttggcttcaaactggctgtctggctggatgaatttatccgtcacctcgaacgcctgggtgaaatcaaagagcgtgttttggtcggcaacatcaatggtgccatttgtacctatgcctcttttggcgagaaagggccagaaattgagcgcctgacgctggataaactggggctgaatacaccgaatatcggctggcagtctgcccgcgatcgcttctccgaatatgcctccgttacggttctgatcagcggtacgctgggcaagattggcaacgagctgtacaacctgatgcgcaccgagattaatgaaatcgaagagccgttctctgaagggaaaatcggttctaccacgatgccgcacaaacgtaaccctgccgcgttggaagggctggcgagcttgactgcaccgctgtttaagagcgccgcgctgattcacgaatccatgaaagttgagcatgaacgtgatgcgatgagctggcgtgcagagtggatcgcgctgccagaaatcaacatctatctgtctgctcagcttcagaatgcgcttggcatcctgcgtggaatgtccgtcaacgagaagcaaatgctggcgaacctcgatctgcaaaatggcctgttgttatccgagaaagtgatgtttgagattggcaaacgtctcggtaagcagaccgcccaccatctggtttacgaatgctctatgcaggcattcgagcagaatcagccttttaaatcggtactgttggcgcatccagtcctttccgagcaggtgactgccgccgatctggacgaatggctgaacccagccaactacgtcggcagtgcaccgcagaaagtcgatgaggtgattcgctatgcggataactccggtctgctgccagcataa

SEQ ID NO: 3018 - protein, 454 aa, Erwinia carotovora
MASHLIDFLLIGNNFGTPEMRGVWSEHNRLTKQVEVEVALALAEGELGVIPLDAAKTIAENADASALNVEEIAKDAARMKHSLMPTIAAIQRQCGAAGEFIHYGVTTQDIVDTATVLQLKQSFDIVVRDTQLLAVELKRLAKKHQHTLMAGRTHGMQALPTTFGFKLAVWLDEFIRHLERLGEIKERVLVGNINGAICTYASFGEKGPEIERLTLDKLGLNTPNIGWQSARDRFSEYASVTVLISGTLGKIGNELYNLMRTEINEIEEPFSEGKIGSTTMPHKRNPAALEGLASLTAPLFKSAALIHESMKVEHERDAMSWRAEWIALPEINIYLSAQLQNALGILRGMSVNEKQMLANLDLQNGLLLSEKVMFEIGKRLGKQTAHHLVYECSMQAFEQNQPFKSVLLAHPVLSEQVTAADLDEWLNPANYVGSAPQKVDEVIRYADNSGLLPA

SEQ ID NO: 3019 - DNA, 1350 bp, Erwinia carotovora
  CDS (1)..(1350)
atggcttcgaatgtgcttgattcagttctattccgtgattcatttggtaccccagcaatgcgggcaatcttcgatgaccgagaactcgtccgtaagtatgtggaagtagagatcgcactggccaatgcgcaagcacgttgtggcgtgattccagaagaagctgccgcagaaatcacagccagctgtaacgccgacacgctcgattttgagctgctgcgccacgaaacagaaattgtgggctaccctatcctgccgctagtacaccagatttccaagcaggccggccaatctggcggctatgtacactggggcgcaacgacacaggacattatggatacggccgtggtgctacaaatccgtgatgcattcgcgttaattgaagcagatatcgacgcactacgttctattttagccagactggccgtgcgttaccgcaatacgccaatggctgggcgtacccatttacaacaggcgctaccgattacattcggctacaaagcggccatctggctagatatgttcgatcgccatgccgagcgcctcgcacagctacgtcctcgcgtgctggtgggagagttcgcgggtgcagcagggacactcgcctcattgggtgacaaagggctcgcggtgcaaaaagcactgatggcagagcttggactgggtgtaccgacctcaacctggcatgtggctcgtgatgggtttgccgaagccgtcaacctgctagcggtaatcaccggttcattagggaaaattggctatgacgtcatgctgatggcctccaacgaattcggcgaactgtatgaaccgtttgtcaaaggccgtggagccagcagcaccatgccgcaaaagcgtaaccctatttccagcgaactgatgctggcctgttccaaaggcgttcgtcaacaggctgggttaatgctggatgcgatggtgcaagatctggaacgcgccacaggcccctggcatgcggagtggatcgccatcccggaaagtttcattctctccgcaggcgcacttcatcaagccaagttcatgctagacggcctcattgttgatgagaagatgatgctgaaaaacctcaatatgaccaacggcctgattgtggcagaagccgttatgatggggctggcaccgtatattggtcgtcaggaagcgcatgacatcgtctacgatgcctgccgtatcgtaaatgagaaaggtggcacgctggccgatgttctcaatgctatgccaagcgtcgcaagccgcctcgatcccaaattaatcgaagacctgaccaaccccgtcaactatttggggagcgcgcctgaaatggttgaccaggtagtaaataaaatggaaagaaaatag

SEQ ID NO: 3020 - protein, 449 aa, Erwinia carotovora
MASNVLDSVLFRDSFGTPAMRAIFDDRELVRKYVEVEIALANAQARCGVIPEEAAAEITASCNADTLDFELLRHETEIVGYPILPLVHQISKQAGQSGGYVHWGATTQDIMDTAVVLQIRDAFALIEADIDALRSILARLAVRYRNTPMAGRTHLQQALPITFGYKAAIWLDMFDRHAERLAQLRPRVLVGEFAGAAGTLASLGDKGLAVQKALMAELGLGVPTSTWHVARDGFAEAVNLLAVITGSLGKIGYDVMLMASNEFGELYEPFVKGRGASSTMPQKRNPISSELMLACSKGVRQQAGLMLDAMVQDLERATGPWHAEWIAIPESFILSAGALHQAKFMLDGLIVDEKMMLKNLNMTNGLIVAEAVMMGLAPYIGRQEAHDIVYDACRIVNEKGGTLADVLNAMPSVASRLDPKLIEDLTNPVNYLGSAPEMVDQVVNKMERK

SEQ ID NO: 3021 - DNA, 1371 bp, Erwinia carotovora
  CDS (1)..(1371)
atggaattatcctcactgaccgccgtttcccctattgatggacgctacggcgataaagtcagcacattgcgcaccattttcagcgaattcggtttgctgaaattccgtgtgcaggttgaagtacgttggttgcaaaaactggcagcctgtgcagagatccaggaagttcctgcatttgacgctgacgcaaacgctttccttgataaaattgtcgccgaatttagcgaagaagatgcggcccgcattaaaacgatcgagcatacgaccaaccacgatgtgaaagccgttgagtattttctgaaagagaaagtcgctgctattccagcactgcatgccgttaacgaattcatccacttcgcctgtacctcagaagacatcaacaacctgtctcacgcactgatgctggataccgctcgccgcgacgtcatcctgccgcactggcgtcaaattattgatgcgctgaaaacgctggcacaggaataccgcgatatcccgctgctttcccgtacacacggtcagccagccacgccatccaccatcggtaaagagttcgctaacgtggcttaccgtatggagcgccaatatcgtcagctacaacaggttgagattctgggcaaaattaatggtgctgtcggcaactataatgcccatctggcagcctacccggaagtggactggcaccagttcagcgaaagctttgtcacgtcactgggtatcaactggaacccgtacaccacacagatcgaaccgcacgattacatcgccgagctgttcgactgcatcgcacgtttcaacaccattttgatcgactttgaccgtgatatctggggctacatcgcactgaatcacttcaaacaaaaaaccattgcgggcgaaatcggttcctctaccatgccacataaggttaacccgattgacttcgaaaactcggaaggcaatctggggctgtcgaacgccgtactggcgcacctggctagcaaattgccggtttctcgctggcagcgcgaccttaccgactctaccgtgctgcgaaacttaggcgtgggtgtgggctatgcactgattgcgtatcaggccacgatgaaaggcatcagcaaactggaagtgaaccgcgatcgtctggctgacgaactggatcacaactgggaagtgttggcagagccgattcaaaccgtgatgcgccgctacgggattgaaaaaccgtacgagaaactgaaagaactgacacgcggcaaacgtattgatgcgacgggtattcaggcatttatcgatggtctggaattacctgaagcggaaaaaacgcgtctgaaagcgatgacgccagccaactatattggccgcgctatcgccatggtcgatgacctgaaataa

SEQ ID NO: 3022 - protein, 456 aa, Erwinia carotovora
MELSSLTAVSPIDGRYGDKVSTLRTIFSEFGLLKFRVQVEVRWLQKLAACAEIQEVPAFDADANAFLDKIVAEFSEEDAARIKTIEHTTNHDVKAVEYFLKEKVAAIPALHAVNEFIHFACTSEDINNLSHALMLDTARRDVILPHWRQIIDALKTLAQEYRDIPLLSRTHGQPATPSTIGKEFANVAYRMERQYRQLQQVEILGKINGAVGNYNAHLAAYPEVDWHQFSESFVTSLGINWNPYTTQIEPHDYIAELFDCIARFNTILIDFDRDIWGYIALNHFKQKTIAGEIGSSTMPHKVNPIDFENSEGNLGLSNAVLAHLASKLPVSRWQRDLTDSTVLRNLGVGVGYALIAYQATMKGISKLEVNRDRLADELDHNWEVLAEPIQTVMRRYGIEKPYEKLKELTRGKRIDATGIQAFIDGLELPEAEKTRLKAMTPANYIGRAIAMVDDLK

SEQ ID NO: 3023 - DNA, 1299 bp, Mesoplasma florum
  CDS (1)..(1299): transl_table=4
atgataaaaagatattctgtaaataagatagaaaagatttgagacgaaaacaataaattaaatgtttgacttgatgtagagaaaaaagtaacttttgcatgaatgaaattaaatgttatttcaaaagaagaatatttgctaattgataaaaatgcaaaaataaacattggtagaatgctagaaatagaaaatgaaacacgtcatgatgttgttgcgtttactagagctatttctgaaacactaggtaatgaaaaaaaatgaattcatcttggtctgacttcaactgatgttgttgatacagcacaaaacaaattaatacaagaatctaatgaagttgttttagagtcattaataaacttaaaaaatacattaaaagagaaagcattaatctataaaaaaactttaacaatgggaagatctcatggtatttatggtgaaccaacttctttaggacttaaatttttattatgatttgatgaaatagacagacaaattgaaagattttcattagccagaaaacaaattgaagtagcgaaaatatctggctcaatgggaaactacgctaatttagaatttgaaatagaagaaattgttgcagaacaaatgggtttagggattgataatatatcaactcaagtaactcaacgtgatagacatgcatttttgataagtgtatttgccaacattgcatctactcttgaaaaaattgctactgaaataagattatttcaaagaagtgaagttaaagaatggcatgaaggttttaaagcaaatcaaaaaggatcaagctcaatgcctcataaaaaaaatccaataagttctgaaaatataactggtctttcaagatacttaagatcatttactaatacagcttttgaaaataatgtgttatgacatgaaagagatatttcacatagttctaatgaaagaattatttttagtgatgtattcaatgttttagtttacacattagatagattaaaaaatacattagacgatttagtaatagatgaaaataaaatgttagaacacattaattctcagtttaatgttttttacagtcaaccaatattaaattaccttcttattaattgcgataaatcaagagaagaaatatatgattttattcagaaatgtacttttgaaacaatgaataataaagtagactttaaacaatctttaattaataacggtatagaaaaatatattgataatatagaagtattaaataaactttttaatattgattacttcataagaaatgttgagaagatatataacagaacattaaataaataa

SEQ ID NO: 3024 - protein, 432 aa, Mesoplasma florum
MIKRYSVNKIEKIWDENNKLNVWLDVEKKVTFAWMKLNVISKEEYLLIDKNAKINIGRMLEIENETRHDVVAFTRAISETLGNEKKWIHLGLTSTDVVDTAQNKLIQESNEVVLESLINLKNTLKEKALIYKKTLTMGRSHGIYGEPTSLGLKFLLWFDEIDRQIERFSLARKQIEVAKISGSMGNYANLEFEIEEIVAEQMGLGIDNISTQVTQRDRHAFLISVFANIASTLEKIATEIRLFQRSEVKEWHEGFKANQKGSSSMPHKKNPISSENITGLSRYLRSFTNTAFENNVLWHERDISHSSNERIIFSDVFNVLVYTLDRLKNTLDDLVIDENKMLEHINSQFNVFYSQPILNYLLINCDKSREEIYDFIQKCTFETMNNKVDFKQSLINNGIEKYIDNIEVLNKLFNIDYFIRNVEKIYNRTLNK

SEQ ID NO: 3025 - DNA, 1389 bp, Acinetobacter sp
  CDS (1)..(1389)
atgaacgctttaactgccctctctccattagatggacgttatgccagcaaatgtgatgctttacgcccttttctttctgagtttggtttaatccatgctcgtgtgactgttgaagtacgctggttacaagcgctctctaaccatgcagggatcattgaagtcgctcctttttctacagaaaccaatgctgctttagattcaattgtggcaaatttttctgaagatgatgcaaatcgtattaaagaaatcgaacgcaccaccaatcatgatgtaaaagccgttgagtattttcttaaagagaaaatcgcaggtctggatgaattaaaaaatgcaggtgaattcattcactttgcatgtacctctgaagacatcaataacttgtctcatgctttgatgcttaaaaatggtcgtgaagttctggtttcaagcatgaaacagattctaaatgcaattgcagccttagccactacacatgctgaacaaccaatgttgtcacgtacacatggtcaaactgcaagcccgacaacactgggcaaagaaatggcaaacgtcgcctatcgtttggcacgtcagattaaacaatttgaaaatgtcgaattgcttggcaaaatcaatggtgctgtcggtaactacaatgcgcacctttctgcttatccagatattgattgggctgcgcattcacaagcatttgtggaatctttaggtttaacctttaacccatataccactcaaattgaaccacacgactatatggcggaattgttcgatgcattgcgtcgttacaacacaattctgatcgattttaaccgcgatgtatggggttatatttctttaggttacttcaaacaaaaactgaaagatggtgaagtgggttcttcaacgatgccacataaagttaacccgattgattttgaaaactctgaaggtaacttaggcattgcaaatgctgtattaggccatttgggtgaaaaacttccagtttctcgctggcagcgcgatttaacagactcgactgtactgcgtaatatgggtgttggctttgcacaaagcctgattgcttttgatgcttgcctaaaaggaattggtaaactagagctcaatgcagctcgtcttgcagaagatctcaatcaagcacaagaagtcttggctgaaccaattcaaactgttatgcgtcgttacaatgttgaaaaaccttatgaaaagttaaaagcattaacacgtggtcaagcaatgacgcgcgacatgatggttaactttgtaaacggtgatgaacttagtcaggtacctgccgaagaacgtgcacgcttagcagaaatgacaccagccagctatacaggtaacgctgcagatcaagcaaaacagatcaatgatttgatcaataaaatttaa

SEQ ID NO: 3026 - protein, 462 aa, Acinetobacter sp
MNALTALSPLDGRYASKCDALRPFLSEFGLIHARVTVEVRWLQALSNHAGIIEVAPFSTETNAALDSIVANFSEDDANRIKEIERTTNHDVKAVEYFLKEKIAGLDELKNAGEFIHFACTSEDINNLSHALMLKNGREVLVSSMKQILNAIAALATTHAEQPMLSRTHGQTASPTTLGKEMANVAYRLARQIKQFENVELLGKINGAVGNYNAHLSAYPDIDWAAHSQAFVESLGLTFNPYTTQIEPHDYMAELFDALRRYNTILIDFNRDVWGYISLGYFKQKLKDGEVGSSTMPHKVNPIDFENSEGNLGIANAVLGHLGEKLPVSRWQRDLTDSTVLRNMGVGFAQSLIAFDACLKGIGKLELNAARLAEDLNQAQEVLAEPIQTVMRRYNVEKPYEKLKALTRGQAMTRDMMVNFVNGDELSQVPAEERARLAEMTPASYTGNAADQAKQINDLINKI

SEQ ID NO: 3027 - DNA, 1449 bp, Candida glabrata CBS138
  CDS (1)..(1449)
atgtctgagtttgataagtacgctaccccactatcgtccagatatgcttctaaggagatgtctgctgttttctctttgagaaacaggttctctacatggagaaagttatggttgaatctagccattgctgaaaaggaattaggtcttgatgtcattacagatgaggccattgaacaaatgaaggcccacttggaaattacagatgaagaaattgccaaggctagtgaacaagaagctattgtcaggcatgatgttatggcccatgttcatacatttggtgaaacatgtcctgctgcggctggtatcatccacttgggtgccacttcttgttttgtcacagacaatgccgatttaatcttcctaagagatgcatacgatattgttattccaaaactcgtcaatgttatcaaccgtttagctaaatttgctctagagtacaaggacttaccagttctgggttggactcacttccaaccagctcaattaactactttgggtaagagagcaactctatggatccaagaactactatgggatttgagaaactttgaaagagctagaaatgatattggtttgcgtggtgttaaaggtaccactggtacacaagcgtcattcttggccctatttcacggtaatcatgacaaagttgaagaacttgatgaaagagttactgaacttctaggctttgacactgtttatccagtcactggtcaaacttactccagaaagatcgacattgatgttcttgcaccattatcatcatttgctgccagtgcccacaagatggctaccgatatcagactgctagccaacttgaaggaagttgaagagccatttgaaaaatcccaaattggttcttcagcaatggcttataagagaaacccaatgcgttgtgaacgtgtttgttctttggctagacatttgggctctctattcagtgatgctgtccaaactgcttccgtccaatggttcgagagaacattagatgactcagctataagaagaatctctttaccaagtgctttcctaacaacagatatcttgttgactacaattctaaatatctcttcaggtttagttgtatatccaaaggtaattgaaagaagaattaagagtgagttgccattcatggctactgagaatatcattatggctatggtcgaaaagggtgcttctaggcaagaagtgcatgaagaaatcagagtcctgtctcaccaagctgctgctgtggtaaaagaacaaggtggtgacaatgacctgatcgaacgtgtcaaggccaatgagtttttcaagcctatctggaatgaattggatcaattgctagatccatctacatttgttggtagagctcctcaacaaacagaaaaatttgttggtaaggatgttaagaacgccttgcagccattccaaaaatacatcaacgatgctgaagttaaactaaatgtttga

SEQ ID NO: 3028 - protein, 482 aa, Candida glabrata CBS138
MSEFDKYATPLSSRYASKEMSAVFSLRNRFSTWRKLWLNLAIAEKELGLDVITDEAIEQMKAHLEITDEEIAKASEQEAIVRHDVMAHVHTFGETCPAAAGIIHLGATSCFVTDNADLIFLRDAYDIVIPKLVNVINRLAKFALEYKDLPVLGWTHFQPAQLTTLGKRATLWIQELLWDLRNFERARNDIGLRGVKGTTGTQASFLALFHGNHDKVEELDERVTELLGFDTVYPVTGQTYSRKIDIDVLAPLSSFAASAHKMATDIRLLANLKEVEEPFEKSQIGSSAMAYKRNPMRCERVCSLARHLGSLFSDAVQTASVQWFERTLDDSAIRRISLPSAFLTTDILLTTILNISSGLVVYPKVIERRIKSELPFMATENIIMAMVEKGASRQEVHEEIRVLSHQAAAVVKEQGGDNDLIERVKANEFFKPIWNELDQLLDPSTFVGRAPQQTEKFVGKDVKNALQPFQKYINDAEVKLNV

SEQ ID NO: 3029 - DNA, 1320 bp, Bartonella quintana
  CDS (1)..(1320)
atgatagaacgttattctcgccctgaaatggtaacaatttggtcacctaaaacgaaatatcgcatttggttcgaaattgaagcacatgcctgtgatgccctcgctcaactgggtattattccaaaagaagcagcaaaggtgatttgggaaaaaggagcagcagccgaatttgatgttaatcgcattaatgaaattgaggcgatcaccaaacatgatgttatagcatttttaacgcacttaggtgaatttattggcccagaagctcgctttatccaccaaggcatgacatcatcagatgtcctagatacaacacttaatattcaattgatgcgtgcgagtgatattttgctaaaagacatagatcagcttcttgaagcattgaaaaaacgtgcttttcaacataaagaaacaatcactattgggcgtagtcacggtattcatgctgaaccgacaacatttggagtcaaatttgctcttgcatatgctgaattttctcgttgtcacaaccgtcttcttgctgcacgagaagaaatttctacttgtgctatctcaggagctgtaggaacttttgctaatattgatccatatattgaagaacatgtagcaaaagcgttagggttacgcattgaacctgtttccacccaagttataccacgtgatcgtcacgccatgttctttgcaacgcttggtgttattgcttcatccattgaaagattagccatagaaatacgccatttgcaacgaacagaagttcttgaagcagaagaacatttttcacctggacaaaagggatcatccgccatgccccataaacgtaatccagttttaacagaaaatttaactgggttagcacgcatggtgcgtgcctttgcaatacctgccatggaaaatgtagcactttggcatgaacgtgatatttctcattcatccgttgaacgttatattggccctgatgctaccattactcttgattttgctcttgctcgactgacctacgtaattgaaaatttaattgtctatccagaaaatatgcaaaaaaatctcaataaatttcgtggtcttgttcattcacaacgggtgcttttagcacttacacaagctggaatcagtcgtgaagattcttatcggattgtacaacgaaatgcgatgaaagtttgggaacaaggaaaagactttttagaagaattgctcaacgacaaagatgtaacaaaagcattaagtaaagcagaaatttgcgaaaaatttgacctttcttaccatacaaaacatatcgacacgatttttaaacgcgtctttgagagtgacaaaaattgtatataa

SEQ ID NO: 3030 - protein, 439 aa, Bartonella quintana
MIERYSRPEMVTIWSPKTKYRIWFEIEAHACDALAQLGIIPKEAAKVIWEKGAAAEFDVNRINEIEAITKHDVIAFLTHLGEFIGPEARFIHQGMTSSDVLDTTLNIQLMRASDILLKDIDQLLEALKKRAFQHKETITIGRSHGIHAEPTTFGVKFALAYAEFSRCHNRLLAAREEISTCAISGAVGTFANIDPYIEEHVAKALGLRIEPVSTQVIPRDRHAMFFATLGVIASSIERLAIEIRHLQRTEVLEAEEHFSPGQKGSSAMPHKRNPVLTENLTGLARMVRAFAIPAMENVALWHERDISHSSVERYIGPDATITLDFALARLTYVIENLIVYPENMQKNLNKFRGLVHSQRVLLALTQAGISREDSYRIVQRNAMKVWEQGKDFLEELLNDKDVTKALSKAEICEKFDLSYHTKHIDTIFKRVFESDKNCI

SEQ ID NO: 3031 - DNA, 1305 bp, Bartonella henselae
  CDS (1)..(1305)
atgatagcacgttattcccgccctgaaatgataacaatttggtcacccgaaacgaaatatcgtatttggtttgaaatcgaagcacatgcctgtgatgccctagctcaactgggtattattcccaaagaagcagcaaaggtaatttgggaaaaaggaaaagcagccaaatttgatattaatcgcattaatgaaattgaggcaatcaccaagcatgatgttatagcatttctgacccacttagctgaatttattggaccagaagcacgttttgttcaccaaggcatgacatcatcggatgttctagataccacgcttaatattcagttgatgcgtgccagcgatattctgctaaaagacatagatcaacttctagaagcattaaaaaaacgtgcttttgaacataaagagacaatcaccattgggcggagtcatggcattcatgctgaaccaataacatttggagtcaagttcgctcttgcatatgctgaattttcaagatgtcgcaaacgtcttcttgctgcacaggaagaaatttctacttgtgctatttcaggagctgtaggaacttttgcaaatattgatccacgcgttgaagagcatgtagcaaaagcattgggattgcgtgctgaacctgtttccacccaagtgataccacgcgatcgtcacgccatgttctttgcaacgcttggtgttattgcttcatctattgaaagattagctatagaaatacgccatctacaaagaacagaagttttggaagcagaagagtatttttcaccagggcaaaaaggttcatcggctatgcctcataaacgtaatcctgttttaacagaaaatttaacgggattagcgcgtatggtgcgtgcatttgcaatacctgccatggaaaatgtagcactttggcatgaacgtgatatttctcattcctctgttgagcgttatattggccctgatgcgactattacacttgactttgctctcgctcgactcacatctgtcattgaaaatttaattgtctatccagaaaatatgcaaaaaaatctcaataaatttcgaggacttgttcattcacaacgggtgcttttagccctcacacaagctggaataagccgcgaagattcttatcggatcgtacaacgaaacgcgatgaaagtttgggaacaagaaaaagattttttagaagaattgcttcacgacaaagatgttacagaagctttaagtgaaacagaacttcgtgaaaaatttgacctttcttaccacaccaaacatatcaacacgatttttaaacgcgtttttggggaataa

SEQ ID NO: 3032 - protein, 434 aa, Bartonella henselae
MIARYSRPEMITIWSPETKYRIWFEIEAHACDALAQLGIIPKEAAKVIWEKGKAAKFDINRINEIEAITKHDVIAFLTHLAEFIGPEARFVHQGMTSSDVLDTTLNIQLMRASDILLKDIDQLLEALKKRAFEHKETITIGRSHGIHAEPITFGVKFALAYAEFSRCRKRLLAAQEEISTCAISGAVGTFANIDPRVEEHVAKALGLRAEPVSTQVIPRDRHAMFFATLGVIASSIERLAIEIRHLQRTEVLEAEEYFSPGQKGSSAMPHKRNPVLTENLTGLARMVRAFAIPAMENVALWHERDISHSSVERYIGPDATITLDFALARLTSVIENLIVYPENMQKNLNKFRGLVHSQRVLLALTQAGISREDSYRIVQRNAMKVWEQEKDFLEELLHDKDVTEALSETELREKFDLSYHTKHINTIFKRVFGE

SEQ ID NO: 3033 - DNA, 1356 bp, Picrophilus torridus
  CDS (1)..(1356)
atgattatttctccaatagattatagatacggcagggataatgtaaaatacatattttctgaggagaacaggatgagacttatgttaagggttgaggctgcacttgcacaggccgagtatgaatataatataattagcagggatgcctttcttgacattaaaaatgcggtcgattcaaattccgtgagaattgaaagggttcatgaaatagagtcaagaatacatcatgatacaatggcacttgttgaggcactcacagagcagtgcagcgcaggaaaaaattttgttcattttggtgtaacatcaaatgatattattgatactgcaacagcaatgcagataaaatcagcagtaaaaataataaaagacgatataaaaaatcttatgaaaacattgataaaactaatagatgagaacaaggactcggtcatggttggaagaacgcatgggcagcacgcaagcccaataaccttcggccttaaattatctgtataccttgatgaaatgtccaggcatttaaaacgtttaacagaggccggggatagaatagtggccggaaagatatcaggacctgttggcaccggtgcatcccttggaaaggattcaatagagatacagaacagggtatgcgagatacttggaataaaaagcgagattgcatcctcgcagatcgtctgcagggacaggtacatagagtatttatcaattataaataatattgcaacatcacttgaaaagttcgcaaccgagataagaaaccttcaaaggcctgagataaatgaggtctctgaatacttcgatgagcgatcacaggttggttcaagctcaatgccaagcaagaggaatccaatagtttctgagaatatatcaagcctgtgcagattcataaggtcattaataataccagaatatgaggctgcggttatatggcacgaacgtgatcttgcaaacagtgctcttgaaagattcacgataccatacgcctctgtgcttattgattacgttttatataacatgaacgatgtgttctcacatctatatataaacaaagaggagatgcttagaaaggcaagatccgatgagtttataatgtccgaaagtatagtgagggcattaacgttgagtggcatgccaaggcaggaggcgcatgaatttgtaagaaaagcttctatggaggcctataaaaataataaatctttaaaatcatctctaatttcagcaggtgtattgaaatacattgatgaaaaaacacttgaggctgccatggatcctgttaaattcacagggcaggccgttagtatatgtaataacgtaataaataatgcggaaagggtgatgaaagacgcagatgaataa

SEQ ID NO: 3034 - protein, 451 aa, Picrophilus torridus
MIISPIDYRYGRDNVKYIFSEENRMRLMLRVEAALAQAEYEYNIISRDAFLDIKNAVDSNSVRIERVHEIESRIHHDTMALVEALTEQCSAGKNFVHFGVTSNDIIDTATAMQIKSAVKIIKDDIKNLMKTLIKLIDENKDSVMVGRTHGQHASPITFGLKLSVYLDEMSRHLKRLTEAGDRIVAGKISGPVGTGASLGKDSIEIQNRVCEILGIKSEIASSQIVCRDRYIEYLSIINNIATSLEKFATEIRNLQRPEINEVSEYFDERSQVGSSSMPSKRNPIVSENISSLCRFIRSLIIPEYEAAVIWHERDLANSALERFTIPYASVLIDYVLYNMNDVFSHLYINKEEMLRKARSDEFIMSESIVRALTLSGMPRQEAHEFVRKASMEAYKNNKSLKSSLISAGVLKYIDEKTLEAAMDPVKFTGQAVSICNNVINNAERVMKDADE

SEQ ID NO: 3035 - DNA, 1368 bp, Photobacterium profundum
  CDS (1)..(1368)
atggaactgtcagctctgactgctgtttccccggtcgacggccgttacggaagtaaaacaagtgtacttcgcagcattttcagcgaatttggtctgttaaaataccgcactatcgttgaaatccgttggctacaaaagctggctgcaactgatgctatcgtagaagttcctgcatttagtgacgaagcaaatcaatttttagatcgtgttgctgctgagtttagtgaagaagatgcactgcgcattaaagctattgagcgcacaactaaccacgacgttaaagcggttgaatacttcctaaaagagaaagtagcagagcttcctgaactacacgctgtgaatgaattcattcactttgcatgtacatcagaagacatcaacaacctttctcacgctcttatgctgactgaagcgcgtgaaaaagtaatgttacctgaagtacgtaacgttattgattctattaaaacgcttgcaaatgagtaccgcgaaattccattgctttcacgtacacacggtcagcctgcttctccatctacgatgggtaaagaaatggctaacgttgcgtaccgtatggaacgtcaattcaagcaaatcgaaaacgttgaaattcttggtaaaattaacggcgcagtaggtaactacaacgcacacgttattgcttaccctgaagttgactggcaccagtacagcgaagagtttgtaacgtcgctaggtattacttggaacccatacacaactcaaattgaaccgcatgactacatcgcagagttgttcgatggttttgctcgtttcaacacaattcttttagactttgaccgtgacgtatggggctacattgctctaggtcacttcaagcaaagaacaattgcaggtgaaattggctcttcaacaatgccgcataaagttaaccctatcgacttcgaaaactctgaaggcaatctaggcttagcgaatgcaatcttctcgcacctatcacagaaactaccggtttctcgctggcagcgtgaccttactgactcaacagtgcttcgtaacctaggtgttggttgtggttatgcaatcattgcttatacttcgacgctaaaaggtattagcaagcttgaagttaaccgagcagcgctagaagctgaactagacaaaaactgggaagtattggctgaaccagtacaaacagtaatgcgtcgctacgctatcgaaaagccatatgagaagctaaaagagctaactcgtggcaaacgtgttgatggcgaaggtatgcgtaactttattgacagccttgagcttcctgagcacgagaaaacgcgtcttaaagaaatgacaccggctaactacatcggtgatgcagtgaagctaacagaccaactataa

SEQ ID NO: 3036 - protein, 455 aa, Photobacterium profundum
MELSALTAVSPVDGRYGSKTSVLRSIFSEFGLLKYRTIVEIRWLQKLAATDAIVEVPAFSDEANQFLDRVAAEFSEEDALRIKAIERTTNHDVKAVEYFLKEKVAELPELHAVNEFIHFACTSEDINNLSHALMLTEAREKVMLPEVRNVIDSIKTLANEYREIPLLSRTHGQPASPSTMGKEMANVAYRMERQFKQIENVEILGKINGAVGNYNAHVIAYPEVDWHQYSEEFVTSLGITWNPYTTQIEPHDYIAELFDGFARFNTILLDFDRDVWGYIALGHFKQRTIAGEIGSSTMPHKVNPIDFENSEGNLGLANAIFSHLSQKLPVSRWQRDLTDSTVLRNLGVGCGYAIIAYTSTLKGISKLEVNRAALEAELDKNWEVLAEPVQTVMRRYAIEKPYEKLKELTRGKRVDGEGMRNFIDSLELPEHEKTRLKEMTPANYIGDAVKLTDQL

SEQ ID NO: 3037 - DNA, 1350 bp, Methanococcus maripaludis
  CDS (1)..(1350)
atggcaattcaccctatcgactttagatacggaactcctgaaatgaaaaaagtatggggagaagaaacaaaacttcaaaaaatgttagaagttgaagcggcccttgctttagcagaatctgaacttggaatgattccaaaagaagctgcagaagaaataaacagaaaaaaatcaactgaatttgtaaaacttgaaagagtaaaagaaattgaaatggcgacaagacatgatgttgtttcagttgtaaaagcttttgcagaacagtgcgaaggaactgctggagaatacatccactttggttccacttcaaatgatattatcgatactgcacagtccctccaatttaaagatgcttttgaagttttggaaagtaaattaaaaattttaagaggggaactcttaaaaaaagcagaagagcacaaaaatacagtttgtattggaagaacacacggacagcatgcagttccaaccacctacggaatgaaatttgcattatgggctacagaaattcaaagacatattgaaagacttgaaagctctaaaaaaaggctctgtgtttcaatgattactggtgcagttggtacaatggctgcaatcggtgaaaatggaattttagtccacaaaagagttggagaaattttaagccttgatccagttttaatttcaaaccaggttgttcaaagagacagacacggagaattcatggctactttagcattaattgcacagactttgaataaaataggagttactgtaagaagcatgcagagaagtgaaattaaagaattagaagaagaatttgacgcgtcaaaacagactggttcatccacaatgccgcacaaaagaaatccaattacatttgagcagatttgcggactttcaagaattgtaaaagcaaatgcacttgcagaatttgataacattccgctttgggaagaaagagatttaacaaactcatcttctgaaagatgcttgttcccagagtcatgcgtacttttggaccacataataaacctttcgataaaaggaatgagaaaattaagtgtaaatcttgaaaatgttaataaaaaccttgaaatgacaaaaggactcatcatggcagaaagagttatgatgtttttagcaaatagtggaatgggaagacagacaggtcacgaaactgttagaaaatgtgcaatgaaggcccacgatgaaggaagacacttaaaagaagtacttttggaagagcctgaagttatgaaatacgtttcacttgatgaaattgaaaaaatgtttgattataaaacatatatcggattagctcctgaaattgtagaaaatgtactcaatgaagctaaaaattgggaataa

SEQ ID NO: 3038 - protein, 449 aa, Methanococcus maripaludis
MAIHPIDFRYGTPEMKKVWGEETKLQKMLEVEAALALAESELGMIPKEAAEEINRKKSTEFVKLERVKEIEMATRHDVVSVVKAFAEQCEGTAGEYIHFGSTSNDIIDTAQSLQFKDAFEVLESKLKILRGELLKKAEEHKNTVCIGRTHGQHAVPTTYGMKFALWATEIQRHIERLESSKKRLCVSMITGAVGTMAAIGENGILVHKRVGEILSLDPVLISNQVVQRDRHGEFMATLALIAQTLNKIGVTVRSMQRSEIKELEEEFDASKQTGSSTMPHKRNPITFEQICGLSRIVKANALAEFDNIPLWEERDLTNSSSERCLFPESCVLLDHIINLSIKGMRKLSVNLENVNKNLEMTKGLIMAERVMMFLANSGMGRQTGHETVRKCAMKAHDEGRHLKEVLLEEPEVMKYVSLDEIEKMFDYKTYIGLAPEIVENVLNEAKNWE

SEQ ID NO: 3039 - DNA, 1257 bp, Bdellovibrio bacteriovorus
  CDS (1)..(1257)
atgggccttctttgggacgccgaccacaagttcggaaaaatgatggaagttgaaattgcggtggcgcaggttcaatcccagcttggcatcatccccaagaacgcagccaagatcatcgctcaaaaagctcgcttcaacgtaaaaagaatctctgaaatcgaacgcgaaaccaaacatgacgtgatcgcctttgtttcaaatctggcagaaaacgtcggcccgcagggaaaattcatccactacggcatgacgtcttcggatgttctggatacggccttcagcttgcaggtgcgcgaagccggagtcgttctgatgaaatccatcgtcgctctggaaaaatccctgaaaaccctggtgaccaagcatgcggaaaccctgtgtgccggacgcacccacggcatgtttgccgagccgaccactttcggattcaagatggcgggcttcctggctgaagcccagcgcaataaaaaacgtgtgaaagccgctcttgataatatgatgatttgcaaactcagcggtgcggtggggacttattcttctcaagctccaaaaattgagtctttggtggctaaaaagctgaaattgaaaactgaaaccatcgcaactcaagtgatcccgcgcgaccgtcatgccgagatgctttcagccctggctttgttcggaacaggccttgaacgcctggccgtagagcttcgtcatctgcagcgcagtgatgtggccgaagtgactgaaggctttaccaagggccaaaagggctcttcagcgatgcctcacaagaaaaacccaatcagtgcggaaaacataaccggcctttcccgtttgctgcgtggttatgccattgccggatttgaaaacgtggcactttggcacgaacgcgacatcagtcattcctcagtggagcgcgtggtgttcccggatgccttcatcgtggcggactatgcctgtaatcgtatgagcattctgttggatggtctggatgtgaacaagaagcgcatgatggacaatatcgaaagttcgcaaggacagatttttagctcccatgtgttgctggcgctgattcaaaaaggaatgattcgtgaggaagcgtatgctttggtgcagcgtctttgtcattctctgtcttacggagaacatctgaaagacaaacttttggtggacgatcagatccagaagcttttgaagcccaaagagatcgacgagatctttaccggcaaaaaacacaaaaaagccatcaaagacatcatcaagagagtatag

SEQ ID NO: 3040 - protein, 418 aa, Bdellovibrio bacteriovorus
MGLLWDADHKFGKMMEVEIAVAQVQSQLGIIPKNAAKIIAQKARFNVKRISEIERETKHDVIAFVSNLAENVGPQGKFIHYGMTSSDVLDTAFSLQVREAGVVLMKSIVALEKSLKTLVTKHAETLCAGRTHGMFAEPTTFGFKMAGFLAEAQRNKKRVKAALDNMMICKLSGAVGTYSSQAPKIESLVAKKLKLKTETIATQVIPRDRHAEMLSALALFGTGLERLAVELRHLQRSDVAEVTEGFTKGQKGSSAMPHKKNPISAENITGLSRLLRGYAIAGFENVALWHERDISHSSVERVVFPDAFIVADYACNRMSILLDGLDVNKKRMMDNIESSQGQIFSSHVLLALIQKGMIREEAYALVQRLCHSLSYGEHLKDKLLVDDQIQKLLKPKEIDEIFTGKKHKKAIKDIIKRV

SEQ ID NO: 3041 - DNA, 1308 bp, Mycoplasma mycoides
  CDS (1)..(1308): transl_table=4
atgaatttgatgattagtagatatcaagttaaagaaatcacagatatttgaagtgatcaaaataaatacaacacttggttaaaaattgaacaattagtaactaatggttgagctaaaattataaaaatcaataaagatgatctttttaaaattaataatgatttaaaagttgatttaaatagaatgttagaaattgaacaagagacaaaacatgatgttgttgcttttactagaatgttatcagaacaattagataatgaaagtaaatgaattcatttaggaattacttcaactgacattgttgacactgctcaaaattatttaattaaacaatctaatcaaattgtttttaatgaattagaaaatattttaaagactttaaaaacactagctatagaacataaaaatacattaattatgggaagaactcatggaatgtatggtgaacctactagtttagggttaaagttttgtttatgatatgatgaatttttaagacatattaaacgttttgaattagctagaaatgatatagaagttgttaaaatatcaggatcaatgggaaattatgctaacttagatccgcaaatcgaattatatgtagctaataaattaaatatgaacattgatagtttatcaactcaagtaagccaaagagatagacatatttttttagttgaagttttagcaaatattgcttcaactttagaaaaaatttcaactgaaattagattatttcaaagaagtgatgttaatgaacttgctgaaggttttttaaaaaaccaaaaaggtagttcttcaatgcctcataaaaaaaacccaatttctagtgaaaatgtagctggattaagtagatatattaaatcaattgttcatattgttttagaaaataataatttatgacatgaaagagatatttctcattcttcaaatgaaagaatttatttaccagatatttttaatttaattgtttatatattaaaaagaatgaatgaaacattaactaatttagttattaataaaactcaaatgttagaacacattaaacaagctaaaaatatttacttttctcaaagagttttaacatttattttattagaacaaccaaatgttactagagatcaagtttatgatttaattcaacaaatcacttttaaatgctctaaaaataatttagattttaaaactgaagttttaaatagtaaattaactgaatttgttttaattgataaattagaacaactttttgatgatcaattctttttaagacatgttgattatatttttaatagagtgtttaataaataa

SEQ ID NO: 3042 - protein, 435 aa, Mycoplasma mycoides
MNLMISRYQVKEITDIWSDQNKYNTWLKIEQLVTNGWAKIIKINKDDLFKINNDLKVDLNRMLEIEQETKHDVVAFTRMLSEQLDNESKWIHLGITSTDIVDTAQNYLIKQSNQIVFNELENILKTLKTLAIEHKNTLIMGRTHGMYGEPTSLGLKFCLWYDEFLRHIKRFELARNDIEVVKISGSMGNYANLDPQIELYVANKLNMNIDSLSTQVSQRDRHIFLVEVLANIASTLEKISTEIRLFQRSDVNELAEGFLKNQKGSSSMPHKKNPISSENVAGLSRYIKSIVHIVLENNNLWHERDISHSSNERIYLPDIFNLIVYILKRMNETLTNLVINKTQMLEHIKQAKNIYFSQRVLTFILLEQPNVTRDQVYDLIQQITFKCSKNNLDFKTEVLNSKLTEFVLIDKLEQLFDDQFFLRHVDYIFNRVFNK

SEQ ID NO: 3043 - DNA, 1308 bp, Rhodopseudomonas palustris
  CDS (1)..(1308)
atgatcccgcgttatacccgtccggaaatggctgccatttgggagccgctgacccgcttcaagatctggttcgagatcgaggcccatgcctccgacgcgcaggctgcgctcggggtgatcccgaaggaggccgccgaggcgatctggaagggaggcaaggacgccgcgttcgacgtggcgcggatcgacgagatcgagcgcgaggtcaagcacgatgtcatcgccttcctgacccatctggccgagttcgttgggccgatgtcgcggttcgtgcaccagggcatgacctcgtcggacgtgctcgacacctgcttcaacgttcagctcacccgcgccgccgacatcctgctggccgacctcgaccgcgtgctggcggcgctgaaggcccgcgccttcgaacaccggatgacgccgtcgatcggccgctcacacggcatccacgccgagccggtgacgttcggcctgaagatggcctacgcctatgccgaattcagccgcgcccgcgaccgcctggtggcggcccgtaaggaagtcgcgacctgcgcgatctccggctcggtcggcaccttcgcccacatcgatccgcgggtcgaagagcacgtcgccaaagcgatgggcctcgcggtcgagccggtgtcgacgcaggtcatcccgcgcgaccgccacgcgatgttcttcgccgtgctcggcgtgatcgcctcgtcgatggagcggctcgccaccgagatccgccatctgcagcgcaccgaagtgctcgaggccgaggagtatttctccgagggccagaagggttcctcgtcgatgccgcacaagcgcaacccggtgctgaccgagaacctgaccggcctcgcccgcatggtgcgcgcctatgtgatgccggcgatggagaacgtggtgttgtggcacgagcgcgacatctcgcactcctcggccgagcggatgttggcgcccgacgccaccgtgacgctcgacttcgcgctgaaccgcctcgccggcgtgatcgagaagctggtggtgtatccggagaacatgaccaagaacctcgaccgcctcggcggcctggtgcattcgcagcggctgctcaccgcgctgacccagaagggctgctcgcgcgaggagagctacaagctggtccagcgcaacgcgatgccggtgtggcgcggcgaaggcgacttcctgtcgctgctgaagaaggacccggacgtcaggaagtacatgaccgacgacgagatcgaagagcagttcgacctcggctatcaccacaagcacgtcgacaccatcttcaagcgggtgttcggcgagagctga

SEQ ID NO: 3044 - protein, 435 aa, Rhodopseudomonas palustris
MIPRYTRPEMAAIWEPLTRFKIWFEIEAHASDAQAALGVIPKEAAEAIWKGGKDAAFDVARIDEIEREVKHDVIAFLTHLAEFVGPMSRFVHQGMTSSDVLDTCFNVQLTRAADILLADLDRVLAALKARAFEHRMTPSIGRSHGIHAEPVTFGLKMAYAYAEFSRARDRLVAARKEVATCAISGSVGTFAHIDPRVEEHVAKAMGLAVEPVSTQVIPRDRHAMFFAVLGVIASSMERLATEIRHLQRTEVLEAEEYFSEGQKGSSSMPHKRNPVLTENLTGLARMVRAYVMPAMENVVLWHERDISHSSAERMLAPDATVTLDFALNRLAGVIEKLVVYPENMTKNLDRLGGLVHSQRLLTALTQKGCSREESYKLVQRNAMPVWRGEGDFLSLLKKDPDVRKYMTDDEIEEQFDLGYHHKHVDTIFKRVFGES

SEQ ID NO: 3045 - DNA, 1440 bp, Corynebacterium diphtheriae
  CDS (1)..(1440)
atgagctacgtggctgagaagaagaagatcgcaaacgtcctgtccaaccgctacgcctctgctgagctcaccgaactgtggagcccagaggcaaagatcctcctagaacgccagttgtggatcgcagtaatgaaggcccagaaaaatctgggtgttgatattccaacagaagcaatttctgcttatgaagcagtgatcgaccgcatcgatcttgacagcatcgcacagcgtgagaagatcacccgccatgatgtgaaagctcgtatcgaggagttcaatgctctcgcaggctacgagcatattcataagggcatgacctcccgcgacctcaccgagaacgtggaacagctgcagatctaccgttcgcttgagatgatgcgtaacaagtcggtgtctgttgccgctgctatcgcacagcacgcagcacagtaccagtccttggtcatggctggccgctcccacaacgtggctgctcaggctaccactttgggtaagcgttttgcctctgctgccgaggaaattttggttgctattgaccgcgttgaggatcttctgagccgctatccactgcgcggtattaagggccctatgggcaccgcccaagacatgcttgatctcgttggtggcgatgagtccaagcttgccgcattggaaactcaaatcgcagatcacctaggtattgcccgcgtgttcgattcagtgggacaggtttacccccgctccttggacttcgatgcggtgtctgctctggttcagttgggtgctggtccatcctcgttggctcacaccatccgtttgatggctggcaatgagacggtgactgagggctttaaggaaggccaggtcggttcctcggctatgccgcacaagatgaatgcgcgttcgtgtgagcgtgttggcggcctgcaggtgatcttgcgtggttacctcaccatggtggcggatctttctggtcagcagtggaatgagggcgacgtgttctgctcggttattcgtcgtgtggctcttccggatgcgttcttcgcgctggatggcatgtacgagacattcctcacagtgttggctgagttcggtgctttcccagcgatgattgatcgtgagcttgagcgctacctgccattccttgctaccactcgtattctgatggctgctgttcgcgtgggtgttggccgtgaaactgcccatgaggtgattaaggagaacgctgtggcggttgccttgaacatgcgtgaaaacggtggtgagcaagacctcattgatcgccttgcggcggatgagcggttgccgatgactcgtgaacagttggatgaggcgttggctgatcgacatgcctttattggtgctgcagaatcgcaggttgctcgcgttgttgaccgcgtgaatgatctggttcgtcgttatccagcggctgcccagtacacccccggtgacattctctag

SEQ ID NO: 3046 - protein, 479 aa, Corynebacterium diphtheriae
MSYVAEKKKIANVLSNRYASAELTELWSPEAKILLERQLWIAVMKAQKNLGVDIPTEAISAYEAVIDRIDLDSIAQREKITRHDVKARIEEFNALAGYEHIHKGMTSRDLTENVEQLQIYRSLEMMRNKSVSVAAAIAQHAAQYQSLVMAGRSHNVAAQATTLGKRFASAAEEILVAIDRVEDLLSRYPLRGIKGPMGTAQDMLDLVGGDESKLAALETQIADHLGIARVFDSVGQVYPRSLDFDAVSALVQLGAGPSSLAHTIRLMAGNETVTEGFKEGQVGSSAMPHKMNARSCERVGGLQVILRGYLTMVADLSGQQWNEGDVFCSVIRRVALPDAFFALDGMYETFLTVLAEFGAFPAMIDRELERYLPFLATTRILMAAVRVGVGRETAHEVIKENAVAVALNMRENGGEQDLIDRLAADERLPMTREQLDEALADRHAFIGAAESQVARVVDRVNDLVRRYPAAAQYTPGDIL

SEQ ID NO: 3047 - DNA, 1404 bp, Borrelia miyamotoi
  CDS (1)..(1404)
atggatgaatatataaatcccctaaaatcaagatatgcaagtaaaaaaatgctttacattttttcaccaaaatttaaatatactacatggagaaaattgtggtacaacttagctttagtccaaaaagaattaggaatagatattagcaaaaaacaacttgataaattatctaaacatattgaaaacattgattttgagattgtaaaaaaatatgaggaaaaatttcaacatgaaatcatggcacatccttatgcttatgctgacttagttggcgacgatgctagaaaaattttacaccttggcgttacaagtgcatatttaacagataacacagacttaatccaaatcaaagaagctctattgatcatcaagaataatctaataaaattcattaaatctttaaaagaattctcaacaaagcataaaaacctgacaactcttgcatatacacatctacaaaaagcacaattgacaactcttgggaaaagaagtagcttatggcttcaaagtctaatttttgactttgaagaactcaatttcattctatccaatatgtgtcttagaggagtcaagggaacagttggaaatcaaaacagctttaatgaattgttttcgtctaactttgaaaaggtaaaaaatctagacattagtctagcaaaaaaaatgggatttaacaaagtttataaagtaactagtcaaatctacgaccgtaaatttgatgcatcaatattaaattttttaagcaacctatctcaaagtgcacacaaaatcactaatgacattagattcatgcaacatcttgaagagattgaagaacattttgaaaaaaaccaaataggttcatcagcaatgccttataaaagaaaccctatttatagtgaaagagtagcttcccttgctaagtttatcatgagtctacaatcaagtggtggatttatagcggcaacgcaatggcttgagagaactctagacgattcagcttgcaagaggatcaatattcctcaagcattcctagccgctgatgctattttaatattattaaataaaatatttaataatattagagtaaacaaaacaataattgaaaaacatgtcaaaaaagaaataccatttatattaacagaagacatattgatgaaagcaacaaaaaatggtggtgatagacaaatattacatgaaaagataagaatttattcaatgcaagtaagagaaaatcttacttcaaaaacaactgaaaacgacttaattaaactaatcctcaatgatgaaagctttaaattaacacctaaagatatagatgaagttttaaatccaaatgaaaatataggttttgcatcattgcaagtcgaagactttattaaagagacagttgatcctattcttgaaaaaaataagaaatactag

SEQ ID NO: 3048 - protein, 467 aa, Borrelia miyamotoi
MDEYINPLKSRYASKKMLYIFSPKFKYTTWRKLWYNLALVQKELGIDISKKQLDKLSKHIENIDFEIVKKYEEKFQHEIMAHPYAYADLVGDDARKILHLGVTSAYLTDNTDLIQIKEALLIIKNNLIKFIKSLKEFSTKHKNLTTLAYTHLQKAQLTTLGKRSSLWLQSLIFDFEELNFILSNMCLRGVKGTVGNQNSFNELFSSNFEKVKNLDISLAKKMGFNKVYKVTSQIYDRKFDASILNFLSNLSQSAHKITNDIRFMQHLEEIEEHFEKNQIGSSAMPYKRNPIYSERVASLAKFIMSLQSSGGFIAATQWLERTLDDSACKRINIPQAFLAADAILILLNKIFNNIRVNKTIIEKHVKKEIPFILTEDILMKATKNGGDRQILHEKIRIYSMQVRENLTSKTTENDLIKLILNDESFKLTPKDIDEVLNPNENIGFASLQVEDFIKETVDPILEKNKKY

SEQ ID NO: 3049 - DNA, 1365 bp, uncultured bacterium 578
  CDS (1)..(1365)
atgacatttgataaccttacatctatttcacccatcgatggtcgttacagcgctaagacaggtccacttaaaaggatttttagtgagtatggtttaattaagtacaggctcttgatagaggttcgatggctagaagcaatgtcaaagaattctcaaatccctgaagttcctgaattcagcttaaaatctaaaaacgttttgtcaaatattgttgataatttctccttagaggatgctaaggtaattaaagaaattgaaaagacaactaatcatgacgtaaaggcagttgaatactaccttaaagaaaaagtttcttctactcctgagcttcaaaatgtaaatgagtttattcattttgcttgtacttcagaagacattaataatctatctcatgcactaatgcttgaggatggaaggcaagttctacttgatgagatgagaaaaactttgaatctaattacagatttagctaaagataatgtagatgttgcaatgctttctagaacgcatggtcaaacagcttcaccgacaactcttggaaaggaaatggctaatttttcttaccgattgatgagacaaattgaacagcttgaagaagtcaaaataatgggcaagtttaatggcgcagtaggtaattttaatgcccatataagtgcttaccctaatcttgattggcctaatacttcgaagaactttatcgaaagtctcggtataaattatgccccctatagttcgcaaatagagacacatgattatattgcagagtattttcatgcactaaatcgttttaatacaattctgattgatttttgtcgtgacgtttggggctatatttcgttaggttatttcacacaaaaaactattgaaggcgaggttggatcatcaactatgcctcataaggttaatccaattgactttgaaaatgcagaaggaaatctagggttagctattgcaataggtgaacacttcgcaacaaaacttcctatatctagatggcaaagagatttaacagattcaacggtattaagaaatctaggagttagctgtgcacattgcctaatttcatatgcctctataagtaaagggatttcaaaacttgaagttaatcaagataagttaattgatgatttgaatgaagcatgggaagttcttgctgaaccaattcaaactgttatgcgtcgatacggagtcaaaaacccttacgaaaaactcaagtctcttactcgcggtaagaaaattgatgccaaaatattggcagactttataggctctttagatatacctgaagatgcgaaagaagaacttcgaaaactaacccctaagaactatatcggtgatgcgattaaattagcacgcgacatttaa

SEQ ID NO: 3050 - protein, 454 aa, uncultured bacterium 578
MTFDNLTSISPIDGRYSAKTGPLKRIFSEYGLIKYRLLIEVRWLEAMSKNSQIPEVPEFSLKSKNVLSNIVDNFSLEDAKVIKEIEKTTNHDVKAVEYYLKEKVSSTPELQNVNEFIHFACTSEDINNLSHALMLEDGRQVLLDEMRKTLNLITDLAKDNVDVAMLSRTHGQTASPTTLGKEMANFSYRLMRQIEQLEEVKIMGKFNGAVGNFNAHISAYPNLDWPNTSKNFIESLGINYAPYSSQIETHDYIAEYFHALNRFNTILIDFCRDVWGYISLGYFTQKTIEGEVGSSTMPHKVNPIDFENAEGNLGLAIAIGEHFATKLPISRWQRDLTDSTVLRNLGVSCAHCLISYASISKGISKLEVNQDKLIDDLNEAWEVLAEPIQTVMRRYGVKNPYEKLKSLTRGKKIDAKILADFIGSLDIPEDAKEELRKLTPKNYIGDAIKLARDI

SEQ ID NO: 3051 - DNA, 2330 bp, Nicotiana tabacum
  CDS (37)..(1665)
taactccagctatggagttatagctttaacaaaaaaatggaactaagaacttgtttcaattcttcaaatatcaatcaaacaatgtttttatcagtccccattacccaaaaatccaatttacttccaaattctttgctcaatccctttaacttttctttcccaactataaaaaactgttcttgcagagcaattgctaaagggtccatcgttagctccttgaaaactcaagaaaaggtcaaagggatgtcttctgatcattctcaagatctagaactctcaagtttatcagctctatgcccattggatggacgttattggggtaaagtcaaagaattggctccttttatgagcgagtttggcttaattcgtttacgcgttttggttgagattaaatggttgttaaaaatgtctcaaatacatgaaatctctgaagttccaaacttctctgaaggagctcagacatttttgcaaaacttgatcgatgaatttagtatgaatgacgccttggaagttaagaagattgagagagtcacgaaccatgatgtgaaagcagttgaatacttcttgaaacaaagatgtcaatcacatccagagatagttaaggtgctcgagttttttcactttgcttgtacatctgaggacatcaacaatcttgcccatgcattgatgctaaaaggagctttgaacacggtcattttgccagtcatggatgaattgactagagcgatctgtgacatggccacaaaatattcttctgttcccatgctttctcgcacccacgggcagccagcttcaccaacaacccttggaaaggaaatggcaatttttgcttatcgattaagcagggaaagaagggaaatttctcaaattgagatgctcgggaaatttgctggtgctgtaggaaattacaatgcgcatgtagctgcatatcctgaagtaaactggccacaaattgccgaggagtttgtaatgtcacttggattaaaattcaatccatatgttcctcagatcgaaactcatgactatatggccaagctttttcactcgattgtccagtttaacaacattttggttgattttgatagagacgtttgggggtatatttctctgggttactttaagcagacaactaaagctggtgaaattgggtcctcgacgatgcctcacaaagtaaatccaatcgactttgaaaatagtgaaggcaatcttggagtagctaatggaaatctatcccatttgagcactaaactacctatttcgcgttggcagcgggatttgacagattcaactgttctgagaaacatgggagtaggactaggacattctcttcttgcttacagaagtgcactacagggaattcataagcttcaggtgaatgaagctgctctgagtgaagatttagataaatgttgggaggttcttgctgaaccaatacaaacggtgatgcgaaggtatggtgtgccagagccgtatgagaaactgaaggcgttaacccgaggaagaacagtgaccaaagaaatttgtagagattttatacaaaaattggacataccggctgatgcgaagacagctctcttgaacttaacacctcatacttatattggaacagctgcagatttggctaagaacataaatgaggccataaatctagagaatggagcttaacacctcatacttatattggaacagctgcagatttggctaagaacataaatgaggccataaatctagagaatggagctcaaatcttttgaaatgagagccgagaacgttcacagccctttgcatcggtggcggatggagcatacaatcaacagggaatataagatgcgaggaagcaacatgaagtgtttagaggcaataacgtgaagaaaacacccactcaagaagtacccaaacacaaaagagcaaaaagagaaggaacgcggagacaaaaaggccgagcatactcaccgcagtccgcgccgcgattggagtcagtgttctccgcggtcgacgcggcggccgcggcggcaggttcacagtccagaaagttaaggggccaaagtgtcaattcgggaaaacttttgtaaaacccttataagatgtaggaaactcgcccaagagaggagagagtttattttgagattattttggcaagaagaacaagtgtgagagatcacccaaaacatcatagttcttattctcttctattttttttttgcgattttccattatgaatattttcgtagtttattcttacgttgtcatgagtagctaaatgctttaatctaaagttttggtgaaacccgttggggatgacttggttgttatattaatatagtttgaat

SEQ ID NO: 3052 - protein, 542 aa, Nicotiana tabacum
MELRTCFNSSNINQTMFLSVPITQKSNLLPNSLLNPFNFSFPTIKNCSCRAIAKGSIVSSLKTQEKVKGMSSDHSQDLELSSLSALCPLDGRYWGKVKELAPFMSEFGLIRLRVLVEIKWLLKMSQIHEISEVPNFSEGAQTFLQNLIDEFSMNDALEVKKIERVTNHDVKAVEYFLKQRCQSHPEIVKVLEFFHFACTSEDINNLAHALMLKGALNTVILPVMDELTRAICDMATKYSSVPMLSRTHGQPASPTTLGKEMAIFAYRLSRERREISQIEMLGKFAGAVGNYNAHVAAYPEVNWPQIAEEFVMSLGLKFNPYVPQIETHDYMAKLFHSIVQFNNILVDFDRDVWGYISLGYFKQTTKAGEIGSSTMPHKVNPIDFENSEGNLGVANGNLSHLSTKLPISRWQRDLTDSTVLRNMGVGLGHSLLAYRSALQGIHKLQVNEAALSEDLDKCWEVLAEPIQTVMRRYGVPEPYEKLKALTRGRTVTKEICRDFIQKLDIPADAKTALLNLTPHTYIGTAADLAKNINEAINLENGA

SEQ ID NO: 3053 - DNA, 1699 bp, Brachydanio rerio
  CDS (169)..(1617)
aaaatgtgaaaggagagtttttcaaatgaaccgaggagggcagcaataggcattagatgggacttgtctgccgcaaataacagaagaagaagaacaaaacctaatgcagacttgcggttcccgtgcagtccgtgtgcgagctagacgctccgtttaaccgctgcaggcatggagggatccggagaagagttcctgaaataccgctcaccgctggtgtcccggtacgccagcaaagagatggcctacaacttcagtgacaggaaaaaatttaccacatggagaaagctgtggatttatctcgcgaaggccgaaaagtctttgggcctccccataagcgatgctcaggtaagcgagatggagtctcactcggaggacattgatttcgttatggctgcggaggaggagaggaagctcaggcatgatgtcatggctcatgtgcacacattcgctcaatgctgtcccaccgctgctcccatcatccacttgggtgctacttcttgttatgtgggtgacaacacggatctgattatgctacgtgatggatttgatatcctgctgcccaagttggctcgtgtcattgacagactggcgaattttgcagagaagtacgctgacctgccgacattaggcttcacccactatcaacctgctcagctgacgacggtggggaagcgatcttgtttgtggctgcaggatctgctcatggacatgagaaaccttcagcgggccagagacgacctgcgcttcaggggtgttaaaggaaccactggcactcaggccagcttcctgcagctcttccagggggatcatgacaaggtggaggagttggataatatggtcactgagatggctggatttaaaaaatcatatctggtgaccggtcagacgtacagtcggaaggtggacattgactcgctctgtgtgctgtccagcctagcagccacaatacacaagatttgcactgatatccgtctgctggctaatctaaaagagattgaggagccgtttgagaaagagcaaattggttccagtgccatgccatacaagaggaaccccatgcgtgcggagcgctgctgcagtctggcccgccacctgatggcgctggtgtccaatccattgcagacggcagcagtgcagtggctggaaagaacgctggacgacagcgctaacaggaggatctccttgcctgaggcctttcttacagctgatatcatcctcagcacactgcagaacatcactgaaggcctggtggtctatcctaaggtgattgagaggcacatccgtcacgagctgcccttcatggctactgaaaacattatcatggccatggtgaaggctggaggaaacagacaggactgccatgagaagatccgtgtgctgtcccagcaagctgcagccgtagtcaaacaggaagggggagataatgacctcttggctcgggttcaagctgatccatatttcgcccctatattaggagagctggatgccttactggaccccaaaaccttcatcggccgagctccacaacaggttactaggtttttgtctgaggaggtcaggcctgttctagagccatacaaaagtaaaatggatgtgaagattgaactggagctctgaagcgcacatgactgtatgactgacacatcagaactgtatgacaatgaataaatgtcaatctgcaaaaaaaaaaaaaaaaaaa

SEQ ID NO: 3054 - protein, 482 aa, Brachydanio rerio
MEGSGEEFLKYRSPLVSRYASKEMAYNFSDRKKFTTWRKLWIYLAKAEKSLGLPISDAQVSEMESHSEDIDFVMAAEEERKLRHDVMAHVHTFAQCCPTAAPIIHLGATSCYVGDNTDLIMLRDGFDILLPKLARVIDRLANFAEKYADLPTLGFTHYQPAQLTTVGKRSCLWLQDLLMDMRNLQRARDDLRFRGVKGTTGTQASFLQLFQGDHDKVEELDNMVTEMAGFKKSYLVTGQTYSRKVDIDSLCVLSSLAATIHKICTDIRLLANLKEIEEPFEKEQIGSSAMPYKRNPMRAERCCSLARHLMALVSNPLQTAAVQWLERTLDDSANRRISLPEAFLTADIILSTLQNITEGLVVYPKVIERHIRHELPFMATENIIMAMVKAGGNRQDCHEKIRVLSQQAAAVVKQEGGDNDLLARVQADPYFAPILGELDALLDPKTFIGRAPQQVTRFLSEEVRPVLEPYKSKMDVKIELEL

SEQ ID NO: 3055 - DNA, 1293 bp, uncultured marine alpha proteobacterium HOT2C01
  CDS (1)..(1293)
atgatccctcgttattctagagccgagatgactaacgtttggagctctaactctaaatttaaaatatggctcgatattgaactctatgcttgcgaagccatggagaaattaggaactgttcctaagggaacaagtaaaaaaattagatcaaaagcaaagattaatgaaaagagaattgatcaaattgaaaaaaaagtgaaacacgatgtaattgcttttttaacaacaatttctgaatacgcgggtccacctgcaagatttcttcaccaaggcctaacttcttcagatattttagatactgcttttaatgttcaactaaaacagtcctcagtcataattgagaaggaaatattaaatttactaaaatcattaaaaaagattgcattaaaacataagaacacgccttgcattggaagaagtcatgggattcatgcggaacccacaacttttggcgttaaaatggcatctttttatgcagaatttcagaggaatcataagcgttttctaaaagcaatcgaagaaataaatatatgcgcgatttcaggcgcagtcggcaattatgcaaatattgatccacgtgttgaacagtacgtggcaaaaaagttaggcatgaaagcagaaacgatttcaactcaaataattccaagagatcgtcacgcagtatattttaatactcttgcggtaattgcaagttcaattgaacgtttagccaccgagataagacatttacaaagaactgaagttctagaagttgaagaatttttttcaaaaggacaaaaagggtcatcagcaatgcctcacaaaagaaatccagttatgactgagaatttaaccggactggcaagactgattagaggttatacggttcctgctttagaaaatatcactctttggcatgaaagagacatatcacattcaagtgtagagagaataatagcgccagatgcaaatattataatcgactttgcactttcacgaatgaataatgtgatatcaaatcttgttgtatatccaaaaaaaatgaaaactaatttagatagattaaaaaaattgccaatgtctgagggtttgatgctggcaatgacacaaaaaggtttatcgcgagaaaatgcgtacaagatagttcaacgaaatgcaatggaagtatggaaaacgaatacagattttgaggaaatacttaacaaagatgaagaattaaaaaaatacctaagcaaaaaagagatatcaaaaattttagatttgaaacacgccgctcgcagaactgactatattttcaaaaaagtttttaagtga

SEQ ID NO: 3056 - protein, 430 aa, uncultured marine alpha proteobacterium HOT2C01
MIPRYSRAEMTNVWSSNSKFKIWLDIELYACEAMEKLGTVPKGTSKKIRSKAKINEKRIDQIEKKVKHDVIAFLTTISEYAGPPARFLHQGLTSSDILDTAFNVQLKQSSVIIEKEILNLLKSLKKIALKHKNTPCIGRSHGIHAEPTTFGVKMASFYAEFQRNHKRFLKAIEEINICAISGAVGNYANIDPRVEQYVAKKLGMKAETISTQIIPRDRHAVYFNTLAVIASSIERLATEIRHLQRTEVLEVEEFFSKGQKGSSAMPHKRNPVMTENLTGLARLIRGYTVPALENITLWHERDISHSSVERIIAPDANIIIDFALSRMNNVISNLVVYPKKMKTNLDRLKKLPMSEGLMLAMTQKGLSRENAYKIVQRNAMEVWKTNTDFEEILNKDEELKKYLSKKEISKILDLKHAARRTDYIFKKVFK

SEQ ID NO: 3057 - DNA, 1368 bp, uncultured crenarchaeote
  CDS (1)..(1368)
atgccaatattacctattgactctggaagatacggtagcaatgaaataaggaaaatttttgaagaagaaaatcgactcagatatcagcttaattttgaagcacaagttgcattatctcaaggcaaacttagaatgattcctctaaaagcctcaagagaaatagcacgaatagcaagatcaaataagatcacaacagcaaagatcaaggaacttgaatcaataagtgagcatgacacagcttcgttagtacaggcaattagcgaatattgttcacccacaacaagaccatggatacattacggattaaccagtaatgatgttgtagatacatctacgtcaatgcaattaaaagatgcgtttaaagtaattgaaccaaaaatattcaagctaatttcgttattgataaatagggtaagaaaatatgacttgttaccttctgtaggaagaactcatggacagcacgcaagcataatttcctttggattaaaatttgcgatttgggcaaacgagctttcatatcacatagaaagaatcgaagagggtaagaagagatttcttttatgtaaaacattgggagtggttgggacaggttccttgatgggatcaaaggccctggatgtacaggacaaggtagccaaaacgcttggtctttattctatagaggcagctacacaagtaatacccagagaaagactagcagaagttcaattcataatttcgttaataggaagttctttggataaaatggcaacagaaattagaaatttacaaagaactgagattggagaggtagaagaaccatttaaaaaagggcaattgggaagcagtgcagttccagtaaagaggaatcccataaagagtgaaagaatatcttcacttgcaagaatacttcgttccttttcaaatatcgctcaagagaatatttcactctggcatgagagagatctctcaaattccgcaaatgaaagatttactattccgatgggcatcattcttttggacgaaatgataaataatatgattagggtaattgaaggattaacagtaagtagtcaaagaattatagataatataaataaaacaaagggaagaatttttgcagagtttattcttgaagccctagtaaagaaggggattcctcgaatgaaagcctatgagagcatacaacgtgttgcttttgaaactctagtggatgatagagactttagagatgcgataatgaaggatccttctattggagaacatttaaacaagaatgaattgaaaacaatatttgatcctaacactcatctggctgcatcgtcaagaataataaagaatgtcataaaaaggaccgagcaaatacgtaaaaactacaaaccacattaa

SEQ ID NO: 3058 - protein, 455 aa, uncultured crenarchaeote
MPILPIDSGRYGSNEIRKIFEEENRLRYQLNFEAQVALSQGKLRMIPLKASREIARIARSNKITTAKIKELESISEHDTASLVQAISEYCSPTTRPWIHYGLTSNDVVDTSTSMQLKDAFKVIEPKIFKLISLLINRVRKYDLLPSVGRTHGQHASIISFGLKFAIWANELSYHIERIEEGKKRFLLCKTLGVVGTGSLMGSKALDVQDKVAKTLGLYSIEAATQVIPRERLAEVQFIISLIGSSLDKMATEIRNLQRTEIGEVEEPFKKGQLGSSAVPVKRNPIKSERISSLARILRSFSNIAQENISLWHERDLSNSANERFTIPMGIILLDEMINNMIRVIEGLTVSSQRIIDNINKTKGRIFAEFILEALVKKGIPRMKAYESIQRVAFETLVDDRDFRDAIMKDPSIGEHLNKNELKTIFDPNTHLAASSRIIKNVIKRTEQIRKNYKPH

SEQ ID NO: 3059 - DNA, 1293 bp, Desulfovibrio vulgaris
  CDS (1)..(1293)
atgatcgaccgctatacccgccccgagatgggcaacatctggacactggacaaccggttccgcgcctggctcgaggtggagatcgccgtctgtgaggcgtggcatcgcctcggcgtcatcgatgcagagagcatgcagaccatccgcgacaaggccgacttcgagaccgaccgtatccttgagattgagcaggtcacgcgacacgacgtcatcgccttcctgaccgccgtcgaagagaaggtcggccccgccgcccgcttcatccacctcggctgcacgtcatcggacatcgtcgacaccgccaacggcctgctcctcgtcagggccggcgagctcatcgtcaagggcttcgagcggctgctcgacgtcatcggcaaggtcgcccacgccaacaagggccgcctgtgcatgggccgcacccacggcatccacgccgaacccacgagcttcggcctcaagatggcctgcttccatgccgagttccagcgccacctcgcccgcttcaaggacgccctcgaaggcatccgcgttggcaagatatccggcgcggtgggcacctatgccttcctttcccccgagatggaagccatcgccctcgacctcatcggcctcaaggtcgaccccgtctcgacgcagatcatccagcgcgaccgccacgcccactacttcacctcgctggcgctggccgcaggcggcgtcgaaaggctgtgcgtcgaactgcgccacctgcaacgcaccgaagtgcttgaagccgaagaagggttcgccaaggggcagaagggttcgtccgccatgccccacaagaagaaccccatctccgccgagaacatgacgggccttgcgcggctcatccgcaccaacgccctcgcgtccatggagaacatggcgctgtggcacgaacgcgacatcagccattcgtccgtcgagcgcgtcatcatgcccgactcgaccatcctcatggactacgtgctgcatcgcctcgccaacctcgtcgagaacctgcgcatcatccccgagaacatggaccgcaacctcgccatgtcgtacgggctgttctactcgcagcgcgtgctgctgaccctcgtggaaagcggcatggcacggcaggaggcctatgtcatggtgcagcgctgcgccatgcaaagctgggagacgcaccgccccttccccgacatcgtgcgggcagacgcggacatctcgtcgcgcatcgacgccgcgaccctcgatgccctgttcgacccctcgtactatctgcgccacgaagacaccatcttccgtcgcgtcttcgcctaa

SEQ ID NO: 3060 - protein, 430 aa, Desulfovibrio vulgaris
MIDRYTRPEMGNIWTLDNRFRAWLEVEIAVCEAWHRLGVIDAESMQTIRDKADFETDRILEIEQVTRHDVIAFLTAVEEKVGPAARFIHLGCTSSDIVDTANGLLLVRAGELIVKGFERLLDVIGKVAHANKGRLCMGRTHGIHAEPTSFGLKMACFHAEFQRHLARFKDALEGIRVGKISGAVGTYAFLSPEMEAIALDLIGLKVDPVSTQIIQRDRHAHYFTSLALAAGGVERLCVELRHLQRTEVLEAEEGFAKGQKGSSAMPHKKNPISAENMTGLARLIRTNALASMENMALWHERDISHSSVERVIMPDSTILMDYVLHRLANLVENLRIIPENMDRNLAMSYGLFYSQRVLLTLVESGMARQEAYVMVQRCAMQSWETHRPFPDIVRADADISSRIDAATLDALFDPSYYLRHEDTIFRRVFA

SEQ ID NO: 3061 - DNA, 1311 bp, Thermus thermophilus
  CDS (1)..(1311)
atgatcgcccgctaccagacgccggagatggcccgcctctggtcggaggaaagccgctaccggatgtgggcccgggtggaggcctacgccctcgaggcctgggaggccttaggggaggtgcccaagggcctttcggcgaggcttctcgccaagctggaggaaaagcccctggacggggccttcgcccggagggtagcggagctggaggcggtaacccgccacgacctcgtggccttcacccgggccctcgccgagtggacgggggacgaggaggtggggcgctacctccacctgggccttaccagctccgacatcgtggacacggcgcaaaacgccctcctggtggaggccctaggcctcgtcctggaggagcttaagggggtggaggaggccttaaaggccctcgccctccgccacaagcacacccccgccatcgcccgcacccacggggtccacgccgagcccacgagcttcggcctccgcttcctctccttcctcgccgccttccaaagggacgaggaaaggcttaagcgggcgagggagaccatcggggtcgccatgctctcgggctccgtgggcaactacgcccacgtcccccccgaggtggaggcccacgtggcccggcgcctgggcctccgccccgagcccatttccacccaggtcgtcccccgggaccggcacgccgaggtcatggcggccctcgccatcctgggggggaacatagagcgggtggccgtggagctacgccacctccagcgcacggaggtcctcgaggcccaggagcccttccacgaagggcagacggggagctcctccatgccccacaagaagaaccccgtgggcctggagaacctcaccggggtggcgaggctccttaggggttacctccagcccgccctggaggacatcgccctctggcacgagcgggacatctcccactcctccgtggaaagggtcatcctccccgacgccaccaccctggcccactacgccctgaggcgcctcaaggggatcctcgagggcctcgaggtctttgaagagaacctggccaggaacctggacctcacccggggcctcgtctactcccagcaggtcctcaacgccctcatcgcccggggcctctcccgggacaaggcctacgccctcgtccagcggaacgccttgaggagctggaaagaggggaagagcttcctggagctcttggaggccgaccccgaaaaccccctcaagggaaaggagctaagggccctctttgatcccaagcccttcctccggcacgtggacgccatctacgcccggttcgggctctga

SEQ ID NO: 3062 - protein, 436 aa, Thermus thermophilus
MIARYQTPEMARLWSEESRYRMWARVEAYALEAWEALGEVPKGLSARLLAKLEEKPLDGAFARRVAELEAVTRHDLVAFTRALAEWTGDEEVGRYLHLGLTSSDIVDTAQNALLVEALGLVLEELKGVEEALKALALRHKHTPAIARTHGVHAEPTSFGLRFLSFLAAFQRDEERLKRARETIGVAMLSGSVGNYAHVPPEVEAHVARRLGLRPEPISTQVVPRDRHAEVMAALAILGGNIERVAVELRHLQRTEVLEAQEPFHEGQTGSSSMPHKKNPVGLENLTGVARLLRGYLQPALEDIALWHERDISHSSVERVILPDATTLAHYALRRLKGILEGLEVFEENLARNLDLTRGLVYSQQVLNALIARGLSRDKAYALVQRNALRSWKEGKSFLELLEADPENPLKGKELRALFDPKPFLRHVDAIYARFGL

SEQ ID NO: 3063 - DNA, 1302 bp, Leptospira interrogans
  CDS (1)..(1302)
atgatcgatcgatattccaatcctgaaatttccaaaatctgggaattagaaaacaagttcgaaatttggaaagaaatagaaatacttgcctgcgaaatcagaatgaaacgaggcgaagttccacaagaagattttcaagaaatcaaatcgaaagctaagtttaatgtggatgaaatccttgaaattgaaagcaaggttcatcacgacgtgatcgcgtttttgacaaatatgaattcctacatcgggcctgcgggaaggcacgttcattacggtttgacttcttcggatattggggacacggctctttgtgtgcaaatggttcaggcaatggatttgattctaaaaaaaacggactcgctgatcgaagtggttcgggaaaaggcgatccagtataagaatcttccctgtatcggacgttctcatgggatccacgccgaacctatgactctgggacttaagttcgcattattttttgaagaattaaaccgaaatagaaaaagaatggccgaagcaagaaacgaaattgctgttggaaaactttccggagccgtcggaacttattctaacatcgatcctgaaatcgaaacctacgtatgtgagaagatgggtttgagggtggatccaattgcaactcaggttgtttctagggatcgtcatgctttttatctttctgtattgggagttaccgcttcttctttggatcgtatggcgaccgagatccgacttttacaaaagacagaaggaagagaagtagaggagcctttttctgcgggtcaaaaagggtcatccgcaatgccccacaaaagaaatcctgtgatctgcgaaagaatctccgggctttccagagtgattcgcgcaaatgtaaacgtgggtttacaagacgtggctctttggcacgaaagggatatttctcattcttctgcggaaagggttgtacttccagattctactattgctttagaatatatcttggataagatgttgttcgtgatcaaaaatcttcacgtttatccagatgcgatcgaaagaacgttaggcgtcactcgtggacttgtattttcgcaaaaggttttactcgctctgatcgaaaaaggtaaaattataagagaagaagcgtatttgatcgttcaagaacacgctatggcggtttgggctagccagtcagaaactttgaaatctagattggaaaaagacgatcgggtcagtaaagttttgactcaaaaagacttagacgacatttttaaaatagaaccttatttggaaaaagtaggattgatctataaaagattgggtcttgaataa

SEQ ID NO: 3064 - protein, 433 aa, Leptospira interrogans
MIDRYSNPEISKIWELENKFEIWKEIEILACEIRMKRGEVPQEDFQEIKSKAKFNVDEILEIESKVHHDVIAFLTNMNSYIGPAGRHVHYGLTSSDIGDTALCVQMVQAMDLILKKTDSLIEVVREKAIQYKNLPCIGRSHGIHAEPMTLGLKFALFFEELNRNRKRMAEARNEIAVGKLSGAVGTYSNIDPEIETYVCEKMGLRVDPIATQVVSRDRHAFYLSVLGVTASSLDRMATEIRLLQKTEGREVEEPFSAGQKGSSAMPHKRNPVICERISGLSRVIRANVNVGLQDVALWHERDISHSSAERVVLPDSTIALEYILDKMLFVIKNLHVYPDAIERTLGVTRGLVFSQKVLLALIEKGKIIREEAYLIVQEHAMAVWASQSETLKSRLEKDDRVSKVLTQKDLDDIFKIEPYLEKVGLIYKRLGLE

SEQ ID NO: 3065 - DNA, 1308 bp, Bacillus cereus
  CDS (1)..(1308)
atgattagtcgttatacacgcccagaaatgggtgcaatttggacggaagagaacaaatttaaagcgtggttagaagttgagattttagcttgtgaagcatgggctgagcttggcgatattccgaaagaagatgttaaaaaaattcgtgagcatgcatcatttgatattgatcgtatttatgaaattgaaaaagagacacgtcatgacgtagttgcattcactcgtgctgtatcagaaacaccagcattaggcgaggaacgtaaatggattcattacggtttaacatctacagacgtagtagatacagcgttatcttacattttaaaacaagcgaatgaaatcatattaaaagacttagaaaactttgtaagtattttagctaacaaagcgaaagagcataaatacacgatcatgatgggaagaacacacggtgttcatgcagaaccaacaacattcggtttaaaacttggtctttggtatgaagaaatgaaacgtaacgtagagcgtttcaaacaagctgctaatacagttcgtgttggtaaattatctggtgcggttggtacatatgcaaatatcgatccattcgtagaaaagtatgtttgtgaaaacttaggattagaagcagcaccaatttcaacacaaacattgcaacgtgatcgccatgcacattacatgtcaacacttgcattaatcgcaacgtctatcgaaaagatggcagttgagattcgtggtttacaaaagagtgaaacacgtgaagttgaagaagctttcgcaaaaggtcaaaagggttcttctgcaatgccgcataagcgtaatccaattggatctgaaaatatgactggtttagctcgtgttatccgcggttatatgatgacagcttatgagaatgttccattatggcatgagcgtgatatttctcactcttcagcagaacgcgtaattttaccagatgctacaatcgcgttaaattacatgctaaaccgctttggtaatattgttaaaaacttaactgtatacccagagaatatgaaacgtaatatgacaagaacatacggcttaatttattctcagcgcgtaatgcttacattaatcgataaaggtatggtacgtgaggaagcttacgatatcgtacaacctaaagcgatggaagcttgggaaacacaagtacaatttaaagagcttgtagaagctgatgagcgtattacgagcaagttaacacaagaagaaattaatgaatgcttcaactatgagcatcatatgcaacacgttgatacaatctttgaacgccttggattaaacgaagcgtaa

SEQ ID NO: 3066 - protein, 435 aa, Bacillus cereus
MISRYTRPEMGAIWTEENKFKAWLEVEILACEAWAELGDIPKEDVKKIREHASFDIDRIYEIEKETRHDVVAFTRAVSETPALGEERKWIHYGLTSTDVVDTALSYILKQANEIILKDLENFVSILANKAKEHKYTIMMGRTHGVHAEPTTFGLKLGLWYEEMKRNVERFKQAANTVRVGKLSGAVGTYANIDPFVEKYVCENLGLEAAPISTQTLQRDRHAHYMSTLALIATSIEKMAVEIRGLQKSETREVEEAFAKGQKGSSAMPHKRNPIGSENMTGLARVIRGYMMTAYENVPLWHERDISHSSAERVILPDATIALNYMLNRFGNIVKNLTVYPENMKRNMTRTYGLIYSQRVMLTLIDKGMVREEAYDIVQPKAMEAWETQVQFKELVEADERITSKLTQEEINECFNYEHHMQHVDTIFERLGLNEA

SEQ ID NO: 3067 - DNA, 1293 bp, Wolbachia pipientis wMel
  CDS (1)..(1293)
atgattccccgctatagcagaaaagaaatgtcttccatttgggaggaaaataataaatttaatatatggcttaaaatagaaaaattagcgtgtgaagctcaagcaaagttaggagtgattccgaataatattgctgagaacctctctggtgctattgaatttgatgttgaatgtatcaacgaaattgaatccattgtaaaacatgatgttatagcttttctgacatatattgctaaaaaagcgggagttgatgttcgttatcttcattatggaatgacaagttctgatgttttggatacatgccttgcggtgcaactgaaagagtcctgtgatattttgctcgagaatctaaaaaatttacttgcagcattgaaaaaaaaagctgaggactataaagatattgtttgtgttggacgcagtcacggaatgcatgcagaaccaacaactcttggaataaaatttgccagattttatgctgaatttaaacgcaattatcagagattaattagcgcgcaaaaagagatctcaatttgtaaaatatcaggtgcagtaggcaattttgcaaatgttgatccgtttgttgaagaatatgtagcgaaagaaatgggactcatacctgaaaccatatcatctcaaatcattcctcgtgatagacatgccatgttcttttcagttttgggagtaattgcaagttcaatagaaaatgttgctgttgaaattcgtcatttgcaaagaactgaaatcggcgaaatttctgagcatttttccactgggcagaagggaagctctgctatgccacacaaatgtaatcctattttaagtgaaaatctgactggactctcacgtttaatacgcagttatgtttttcctgcgttagaaaatgttgcattgtggcacgaacgtgatatatcacactcgtctgtggaaagatgcattgctcctgatgcttgtataacaatggattttgctttagtgcgattaacagatttgatagataaattggtgatcaataaggaaaacattgaaaagaacttaaattcttcaaaaggtttagttttctcacagcgtgtattgcttgagttagtaaatagtggtttggcgagggaagaggcgtataaaattgttcagagcaatgcaatgaaagtgaaacaaaacaacagtgattttctggccgaattgaaacaagataaacccttacttaaggttattaactcggaaaaacttgaatctttgtttgatttgaagtattatacgaaacatatagatcgtgtgtataataaggtttttaattag

SEQ ID NO: 3068 - protein, 430 aa, Wolbachia pipientis wMel
MIPRYSRKEMSSIWEENNKFNIWLKIEKLACEAQAKLGVIPNNIAENLSGAIEFDVECINEIESIVKHDVIAFLTYIAKKAGVDVRYLHYGMTSSDVLDTCLAVQLKESCDILLENLKNLLAALKKKAEDYKDIVCVGRSHGMHAEPTTLGIKFARFYAEFKRNYQRLISAQKEISICKISGAVGNFANVDPFVEEYVAKEMGLIPETISSQIIPRDRHAMFFSVLGVIASSIENVAVEIRHLQRTEIGEISEHFSTGQKGSSAMPHKCNPILSENLTGLSRLIRSYVFPALENVALWHERDISHSSVERCIAPDACITMDFALVRLTDLIDKLVINKENIEKNLNSSKGLVFSQRVLLELVNSGLAREEAYKIVQSNAMKVKQNNSDFLAELKQDKPLLKVINSEKLESLFDLKYYTKHIDRVYNKVFN

SEQ ID NO: 3069 - DNA, 1443 bp, Treponema denticola
  CDS (1)..(1443)
atggaaactagaagtatttttaaaaatatatcgccgatagatcatcgttattccctcccgcaaggaggtctttatgatgaactgtcggtttttttatcggaagaagcaggcatcgtttattgtgccatggccgaaatggccattgtaaaggctcatcttaaaattgcagaagaaaaaaaaggctctttacttccaaaactaagcggcgagcttgaaaaaacattggacgatattgccttaaatattgatccttccgaagtttatgaagaagaacataagacccagcacaatataagagccttggtaaatgtcttaaagaaaaaagtccccgaaaatacggctcccttggttcaccttggagctaccagtgccgacatcctcgacacggccttttctatgaggataagggacgctgtcataaaggtaataattcctcttttaaagaaaaccgaacttttactttgcgatatagctgaaagagaggctgaaacacctcaggtagggagaactcacggtcagcatgcggttccgattaccttcggttatgccgtttccgaatatgtagcccgtttgggtaagtcgattttaaaaatggaagatcttgtaaaagatttgcgcggaaaatttgccggagccgtcggggcttataatgcggcatctttaatagtttccgatccgatgagatttgaaaaaatctaccttgattatctcggcttaaagccttcagaatattctcatcagcttgtggagcccgaatacatgctccgcctccttcttgaagcaaatattgccttcggcataattgcaaaccttgcagacgatttacgcaatttgcaaagaaccgagataggggaggtttttgaatattttagtgcaacacaggtaggctcttctactatgcctcaaaagcgtaacccatggaattccgagcatgtaaaaagcttgtggaaggctttttctccccgcataatgagtttttatatggaccaaatctcggagcaccaaagagatttatccaactctgcaagccaaaggtttatagccgattatctgacaggccttgccttggcctttaaccgtatgaattcaattttaaagggcttacaggccgatagggaaaatatgctcaaaaaccttttacagggcggtggaaaggttaggggaggcgttatggccgagcccgcttatatccttttggcggaatgcggcgtttccgatgcccacgaggtaatacgcaagattacccttgctgccgaaaatcaaaagataagtttttatgaggccttaaaggccgaagaaaaggtctttgctcttgttacggaaagattaaaagagcttaactttgataagccggaagaattttttgcaaaccccgaacgctaccgaggtcttgcaaatgtaaaggcaaaagccttggccgaaaaatataaggctttaatgtaa

SEQ ID NO: 3070 - protein, 480 aa, Treponema denticola
METRSIFKNISPIDHRYSLPQGGLYDELSVFLSEEAGIVYCAMAEMAIVKAHLKIAEEKKGSLLPKLSGELEKTLDDIALNIDPSEVYEEEHKTQHNIRALVNVLKKKVPENTAPLVHLGATSADILDTAFSMRIRDAVIKVIIPLLKKTELLLCDIAEREAETPQVGRTHGQHAVPITFGYAVSEYVARLGKSILKMEDLVKDLRGKFAGAVGAYNAASLIVSDPMRFEKIYLDYLGLKPSEYSHQLVEPEYMLRLLLEANIAFGIIANLADDLRNLQRTEIGEVFEYFSATQVGSSTMPQKRNPWNSEHVKSLWKAFSPRIMSFYMDQISEHQRDLSNSASQRFIADYLTGLALAFNRMNSILKGLQADRENMLKNLLQGGGKVRGGVMAEPAYILLAECGVSDAHEVIRKITLAAENQKISFYEALKAEEKVFALVTERLKELNFDKPEEFFANPERYRGLANVKAKALAEKYKALM

SEQ ID NO: 3071 - DNA, 1419 bp, Mycobacterium paratuberculosis
  CDS (1)..(1419)
atgagcattccgaatgtgctggctgcccggtacgccagtgccgagatggttgcgatctggtcgccggaagccaaagtggtcgccgagcggcggctgtggctcgcggtgctgcgcgcgcagcaacagttgggtgtcgcggttcccgccgaggcgatcgcggactacgagcgggtactcgaggacgtcgatctggcctcgatcgcggaccgcgaacgcctgctgcgccacgacgtcaaggcccgcatcgaggaattcaacgcgctggccggccacgagcacgtgcacaagggcatgaccagccgggatctgaccgagaacgtcgagcagctgcagatccggcgctccctggaactggtcttcgcccacggcgtcgcggtcgccgctcggctggccgaacgggcggtggcctaccgcgatctggtgatggccgggcgcagccacaacgtcgccgcccaggccaccaccttgggcaagcgattcgcctcggccgcccaggagacgctgatcgcgttggcccggctgcgcgagttgatcgaccgttacccgttgcgcggcatcaagggcccgatgggcacgtcgcaggacatgctcgacctgatcggcggcgacccggccaagctcgccgaactcgagcggcgggtcgccgaattcctgggtttctcaatggttttgaccagcgtcgggcaggtgtacccgcggtcgctggaccacgacgtggtctccgcgctggtgcagctgggcgccggcccctcgtcgatggcgcacaccatccggctgatggccgggcacgaactggtcaccgagggattcgcgccgggtcaggtcgggtcgtcggcgatgccgcacaagatgaacacccgcagctgcgaacgggtcaacggcctacaggtggtgctgcgcggctacgcctcgatggccgccgaactggccggcgcgcagtggaacgagggcgacgtgttctgctcggtggtgcgccgagttgcattgccggacagcttctttgccatcgacgggcagatcgagacgtttctgacggtgctcgacgagttcggcgcctacccggcggtgatcggtcgcgagctggaccgctacctgccgttcttggccaccaccaaggtgttgatcgccgcggtgcgcgccgggatgggccgcgaggccgcgcatcacgtgatccgcgagcacgcggtggccacggcattggcgatgcgggaacacggcgccgagcccgacctgttggagcggctggccgccgacgagcggctgccgctggaccgggcggccctggacgccgcgctggccgacaggcgggcgttcaccggcgccgccgccgaccaggtggacgaggtggccgcccaggtggacgccctggtgagccgctacccggacgcggccaagtacaccccgggggccatcctgtga

SEQ ID NO: 3072 - protein, 472 aa, Mycobacterium paratuberculosis
MSIPNVLAARYASAEMVAIWSPEAKVVAERRLWLAVLRAQQQLGVAVPAEAIADYERVLEDVDLASIADRERLLRHDVKARIEEFNALAGHEHVHKGMTSRDLTENVEQLQIRRSLELVFAHGVAVAARLAERAVAYRDLVMAGRSHNVAAQATTLGKRFASAAQETLIALARLRELIDRYPLRGIKGPMGTSQDMLDLIGGDPAKLAELERRVAEFLGFSMVLTSVGQVYPRSLDHDVVSALVQLGAGPSSMAHTIRLMAGHELVTEGFAPGQVGSSAMPHKMNTRSCERVNGLQVVLRGYASMAAELAGAQWNEGDVFCSVVRRVALPDSFFAIDGQIETFLTVLDEFGAYPAVIGRELDRYLPFLATTKVLIAAVRAGMGREAAHHVIREHAVATALAMREHGAEPDLLERLAADERLPLDRAALDAALADRRAFTGAAADQVDEVAAQVDALVSRYPDAAKYTPGAIL

SEQ ID NO: 3073 - DNA, 1296 bp, Geobacter sulfurreducens
  CDS (1)..(1296)
atgatcgaacgttacagccgtcccgaaatggcccgtatctgggaaccgcgcaatcgctaccagaagtggctcgacatcgagatttacgcctgcgaggcccacgctgacctgggcaacgtgccccgcgacgcggtagagcgcatcaaggcaaaggctgacttcgacgtagaccgcattgatgagatcgagcggacggtgaagcacgacgtcatcgcctttctcacctccgttgccgactacatcggagatgattcacgctttgtccacttgggactcacctcgtcggacgtgctcgatacctcgttcgccatgctgctggccgaggcctccgatctcatcatcgatgacatcaagcggctcatggaggtcattaagcgccgcgcctacgaacacaaggatacgccgatgatggggcgttcccacggcatccatgccgaaccggtcaccttcggcatcaagatggctctctggtacgacgagatgaagcgcaatctccgccggatggaggctgcccgggaaaccattgcctacggcaagatatccggggcggtcggcacctttgccaacattgatccgatggtagaggaggctgtttgcgccaaggcagggctcaagccggctccctgttcgacccaggtgatccagcgggaccgccacgcggagttcttctccaccctggcgatcatcgccacctccatcgagaagtttgccgtggagattcgtcatctccagcggaccgaagtgctcgaggccgaagagtttttcagcaaggggcaaaaggggtcgtcagccatgccccacaaacgcaatcccgtcctctccgagaacctgaccggtcttgcacggctcatgcggggctattcggtatccgccctcgaaaacgtacccctctggcacgagcgggacatctctcactcgtccgtcgagcgagtcatcggcccggatgctaccatctgtctcgatttcatgctcaaccggaccatcggcctcatcgacaatctcgtggtttaccccgagaacatgatgcggaacctgaatctcatgcgcggactcattttctctcagcgggtgctccttaagttggccactgccggtgcgtcccgcgagaaggcctatgaactggtccagcgcaatgctatgaaggtgtgggagcagggcaaggatttccaggaagaacttctggccgacggtgaagtgcgcggtttcctcccggaggatgaaatccgtgaggcttttgacctcaactaccacctgaagcatgtgaacaccatcttcacgagggtcttcggtggctga

SEQ ID NO: 3074 - protein, 431 aa, Geobacter sulfurreducens
MIERYSRPEMARIWEPRNRYQKWLDIEIYACEAHADLGNVPRDAVERIKAKADFDVDRIDEIERTVKHDVIAFLTSVADYIGDDSRFVHLGLTSSDVLDTSFAMLLAEASDLIIDDIKRLMEVIKRRAYEHKDTPMMGRSHGIHAEPVTFGIKMALWYDEMKRNLRRMEAARETIAYGKISGAVGTFANIDPMVEEAVCAKAGLKPAPCSTQVIQRDRHAEFFSTLAIIATSIEKFAVEIRHLQRTEVLEAEEFFSKGQKGSSAMPHKRNPVLSENLTGLARLMRGYSVSALENVPLWHERDISHSSVERVIGPDATICLDFMLNRTIGLIDNLVVYPENMMRNLNLMRGLIFSQRVLLKLATAGASREKAYELVQRNAMKVWEQGKDFQEELLADGEVRGFLPEDEIREAFDLNYHLKHVNTIFTRVFGG

SEQ ID NO: 3075 - DNA, 1296 bp, Lactobacillus johnsonii
  CDS (1)..(1296)
atgttagaacgttatactcgtccagaaatgggcaaaatttggtccttagaaaataaatacgctgcttggttaaaggtagaaatcgctgcaactaacacatgggcagaacttggtgaagtgccagaagcagatgctaagaagattgcagacaatgcttcttttactgttgagcgtgtttcagaacttgaagccattacccaccatgatgtggttgcttttacgagaacagtttctgaaagtttaggtgaagagaagaagtgggttcacttcggcttaacttcaactgatgttgtggatactgcacaaggttatatcttaaagcaagctaatgagatcattttgaaagacttagaggctttaaaagaaactattgccgaaaaagctaagaagtacaaatacactgttgaaatgggccgtactcacggtgttcaagcagaaccaactacttttggtttgaagcttgctcgctggtatgctgagattaaccgtgatattgaacgctttaaagcagcagctaaagatgtagaatctggtaagatttctggtgccgttggtacttttgcaaatgtgccaccagcagttgaaactagcgttttaaagcagttaggtttaactcagcaacctgtaactagtcaagttttaccaagagatttacatgcgtactacattgctacaattgccttaattgcaaccagtattgaaaattgggctactgaaattcgtggtttgcaaagaagtgaaattcatgaagttgaagaacactttagagctggccaaaagggctcttctgcaatgcctcataagcataatccaattggttctgaaaacttatgcgggatggcgagagtaatgcgtggctacatggtaccagcttatgaagatgtagctttatggcatgaaagagatatttctcattcaagtgctgaacgtgtaattttacctgatgcaaccattggaattgactacatgttgaaccgtttcaaccgcatcttaaccaacttagatgttttcccagaaacaatgctcaagaatatggatcgtacttatggcttgatctattcacaacgtgtgcttttgaagttaattgatgaagcaggtttatcacgtgaaaaggcttatgatatggtgcaaaagctagctaataagtcttggcaagaacaaacttcatttagaaagttaattgaagacagtgaagttatgaattacttgtctgaagaagatctagacgatgcttttgattatcattatcacttgaagcatgttgatgaaatttttgaaaagtgcggcttagattaa

SEQ ID NO: 3076 - protein, 431 aa, Lactobacillus johnsonii
MLERYTRPEMGKIWSLENKYAAWLKVEIAATNTWAELGEVPEADAKKIADNASFTVERVSELEAITHHDVVAFTRTVSESLGEEKKWVHFGLTSTDVVDTAQGYILKQANEIILKDLEALKETIAEKAKKYKYTVEMGRTHGVQAEPTTFGLKLARWYAEINRDIERFKAAAKDVESGKISGAVGTFANVPPAVETSVLKQLGLTQQPVTSQVLPRDLHAYYIATIALIATSIENWATEIRGLQRSEIHEVEEHFRAGQKGSSAMPHKHNPIGSENLCGMARVMRGYMVPAYEDVALWHERDISHSSAERVILPDATIGIDYMLNRFNRILTNLDVFPETMLKNMDRTYGLIYSQRVLLKLIDEAGLSREKAYDMVQKLANKSWQEQTSFRKLIEDSEVMNYLSEEDLDDAFDYHYHLKHVDEIFEKCGLD

SEQ ID NO: 3077 - DNA, 1449 bp, Ashbya gossypii
  CDS (1)..(1449)
atgtctgagtttgataagtacgctacacccctctcctcgcgttatgcgtctgaggagatgtcatcgctcttctccttgagacacaggttttctacttggagaaagctctggctaaacctggccattgccgagaaggaactcgggctgtctgtcatcacagatgaggccattgcacagatgagggagcatctcacgatcaccgatgaggagattgctcaggccgctaagcaagaggcgattgtgagacatgacgttatggcgcaggtccatacctttggtgaaacctgccctgcagcagcaggtatcatacatttgggcgctacctcttgttttgttaccgataacgcggacctgatcttcatgcgcgatgcttatgacattattattccgaaattggtgaacgtcatcaacaggctctcaaagtttgcttgcgaatataaggatttaccagttcttggatggactcatttccagccggcacagctcacgacccttgggaagagagccaccctgtggatccaggaacttctctgggacctgcggaactttgtaagagcgagaaacgatatcgggctaagaggtgtcaagggtactaccggtactcaagcgtccttcctggcgttatttcatggcgaccacgacagggtcgaagcgttggacaagagagttacagagctactggggttcgacattgtctacccggtgactggccagacatattccagaaagatagatattgacattctggggagcggatcatcttttgaagccactgcgcacaagatggccaccgacatcaggttgttggcaaacctgaaggaagtggaggaaccctttgagaagacccagattgggtcttcagcgatggcatacaagagaaaccccatgagatgcgagcgcgtctgctctctggcccgccatctgggctctctatttaacgacgctgttcagacagcctcggtccaatggtttgagaggaccttggacgactcggccattagaagaatctcgctccctagtgcatttttgactgccgacattcttttgagtactttgttgaacatttcatccggtatggtggtctatccaaaggtcatcgaaagaagaatcaagagcgagctgccgttcatggccaccgagaacgtgatcatggccatggtcgagaagggcgcctcgagacaggaggtgcacgaggccatcagggtcctgtcccaccaggcggccgctgtcgtcaaggaagagggcggtgacaacgacctgatcgagcggatcaaggccgacgcattgttccagcccatctggaacgagctggattccctgctggacccctccacgtttgtgggcagggccccacagcaggtggagaagttcatcaacaacgacgttaaatctgcattggcccccttcagcgaacacatcaccgatgccgcgttcaaccttaacgtctga

SEQ ID NO: 3078 - protein, 482 aa, Ashbya gossypii
MSEFDKYATPLSSRYASEEMSSLFSLRHRFSTWRKLWLNLAIAEKELGLSVITDEAIAQMREHLTITDEEIAQAAKQEAIVRHDVMAQVHTFGETCPAAAGIIHLGATSCFVTDNADLIFMRDAYDIIIPKLVNVINRLSKFACEYKDLPVLGWTHFQPAQLTTLGKRATLWIQELLWDLRNFVRARNDIGLRGVKGTTGTQASFLALFHGDHDRVEALDKRVTELLGFDIVYPVTGQTYSRKIDIDILGSGSSFEATAHKMATDIRLLANLKEVEEPFEKTQIGSSAMAYKRNPMRCERVCSLARHLGSLFNDAVQTASVQWFERTLDDSAIRRISLPSAFLTADILLSTLLNISSGMVVYPKVIERRIKSELPFMATENVIMAMVEKGASRQEVHEAIRVLSHQAAAVVKEEGGDNDLIERIKADALFQPIWNELDSLLDPSTFVGRAPQQVEKFINNDVKSALAPFSEHITDAAFNLNV

SEQ ID NO: 3079 - DNA, 1377 bp, Plasmodium chabaudi chabaudi
  CDS (1)..(1377)
atggaaaacctaaaaaacatttccccaatcgatgggaggtacaaaaagtcttgtaaagagatttccgaatatttctctgagtatgctttgataaaatataggatatatgtagaaatacaatggcttatttttttaagtgaaaaggaatttttttataaaaaactaagtgtaaaagcaattgatgagttacaaaaaatagcagatataaatgatgaggatgtattgagattgaaaaaaattgaagaagaaacaaatcatgatgttaaggcagttgaatattttattaaagaaaaaataaatcaaaataatggtgagcttgttaatataaaagagtatgtacattatttatgtactagtgaagatataaataatatagcatatgctatatgtataaaatcctgtttaaataatataataatacctcatatagagaaaataatgaatcgattaaaagagttagcatctgagtatagtcaggtttctatattatctagaacccatggccaacctgcatctgcaacaacctttggaaaagaaatggcgaactattttgatagattaaagagacatatatctacattaaaaaacataaaaatatatggaaaatttaatggagcagttggtaattttaatgctcataaaatagctaatagtaatattgattgggtaaataatataaaatactttgtagaaaaatattttgatattaattatagtttatattgtacacaaatacaagatcatgattatatatgtgaaatttcagatgcattaggaagaattaattccacacttttagatttatctatagatatatggttatatatatcaaataatttattaaaattaaaacacgtaaaaaatgaaataggtagtagtactatgccacataaaataaacccaattgattttgaaaatgctgaaggaaatttacatctagctaatgcactttttaaagccttcagtgcaaaactttctataagtaggttacaaagagatttatcggattcaacagttttacgaaatattggtagttcatatgcttattctcttattgcttataaatcaattttaagaggtttaacaaaaattgatatcaatgagcaatcagcatctcaagagttaaataataattggagtaccctagctgagcccgttcaaattgttttaaaaaattttaattttccaaatgcttatgaagaattaaaaaattttacacgtggaaagactattgataaagaactaatgcaagaatatattaaaaccaaatcagaattcataccaccaaatgctatgaaccaattgttggaacttactcccaacacttatataggatatgctgattatttagctaacaatgttgataaaacggaataa

SEQ ID NO: 3080 - protein, 458 aa, Plasmodium chabaudi chabaudi
MENLKNISPIDGRYKKSCKEISEYFSEYALIKYRIYVEIQWLIFLSEKEFFYKKLSVKAIDELQKIADINDEDVLRLKKIEEETNHDVKAVEYFIKEKINQNNGELVNIKEYVHYLCTSEDINNIAYAICIKSCLNNIIIPHIEKIMNRLKELASEYSQVSILSRTHGQPASATTFGKEMANYFDRLKRHISTLKNIKIYGKFNGAVGNFNAHKIANSNIDWVNNIKYFVEKYFDINYSLYCTQIQDHDYICEISDALGRINSTLLDLSIDIWLYISNNLLKLKHVKNEIGSSTMPHKINPIDFENAEGNLHLANALFKAFSAKLSISRLQRDLSDSTVLRNIGSSYAYSLIAYKSILRGLTKIDINEQSASQELNNNWSTLAEPVQIVLKNFNFPNAYEELKNFTRGKTIDKELMQEYIKTKSEFIPPNAMNQLLELTPNTYIGYADYLANNVDKTE

SEQ ID NO: 3081 - DNA, 1329 bp, Wolinella succinogenes
  CDS (1)..(1329)
atggttgagcgctacgctagggaagagatgaagaatctatggacacaagaggccaaatatgatgcatggctcaaggttgaaaaagccgcagtcaaagcatggaatcgcttgggtctcatccccgatgaggcgtgtgaaaaaatctgtgccaatgcctcttttagcgtagcaagaatcgatgagatcgaagcgaccaccaagcatgatgtgatcgctttcctcacctcagtctctgagagcctcggcgaggaatcgcgctttgtccactatggcatgaccagctctgattgtatcgataccgctgttgccctccagatgcgcgatagtctaagccttatcctccaagatgtgaacgaattgatggaggcgctcaaaaaacgcgcacttgagcatcaacacactctcatggtcggacgaagccacggaatccatggcgaacccatcacttttggattggtgttagcgatttggtatgatgagatccatcgccacctcaaagccctccaagagacgatgaaggtgatctctgcgggcaaaataagcggtgcgatgggtaacttcgcccacgcccccttagagcttgaggagtatgtctgcgaagagcttgggctcactccagcgcctgcaagcaaccaagtgattcagcgcgatcgctacgctaggcttatgagcgaccttgcgctcctagcgagcagttgcgaaaagatcgccattgctatacggcactatcagcgcaccgaggtttacgaggcggaggagtatttctcccccggtcaaaagggaagctccgccatgccccacaagcgtaatcctgtcctcaccgaaaacatcacagggctttgccgcatgattcgaagctatgcgattcccgccatggagaatgtcgccctttggcatgagcgtgacatctctcacagttccgtggagcgattcatcctgcctgatggctttatcaccaccgatttcatgctcaagcgcctcactggagtgatcgaaaagctagtggtctatccagaaaacatgatgaaaaacctcaacctcacgggcggtcttgtcttctctcaaagaatccttctagagcttcctttgcagggggtgagtcgtgaggatgcctacaagatcgttcagcgcaatgcgatgaaggtttgggccgatctccagcaagggaaaagcgcgctcaatgagaaaggtgagagcctctacctccagcacctcttaggggatgaagagcttcgcgaaaagctctccgaagaggccatcagagcctgctttgactatggttattacaccaaaaatgtggggggaatcttctcccgcgtctttggataa

SEQ ID NO: 3082 - protein, 442 aa, Wolinella succinogenes
MVERYAREEMKNLWTQEAKYDAWLKVEKAAVKAWNRLGLIPDEACEKICANASFSVARIDEIEATTKHDVIAFLTSVSESLGEESRFVHYGMTSSDCIDTAVALQMRDSLSLILQDVNELMEALKKRALEHQHTLMVGRSHGIHGEPITFGLVLAIWYDEIHRHLKALQETMKVISAGKISGAMGNFAHAPLELEEYVCEELGLTPAPASNQVIQRDRYARLMSDLALLASSCEKIAIAIRHYQRTEVYEAEEYFSPGQKGSSAMPHKRNPVLTENITGLCRMIRSYAIPAMENVALWHERDISHSSVERFILPDGFITTDFMLKRLTGVIEKLVVYPENMMKNLNLTGGLVFSQRILLELPLQGVSREDAYKIVQRNAMKVWADLQQGKSALNEKGESLYLQHLLGDEELREKLSEEAIRACFDYGYYTKNVGGIFSRVFG

SEQ ID NO: 3083 - DNA, 1380 bp, Vibrio vulnificus
  CDS (1)..(1380)
atggagcttaggacaccatttatgcaaggttcaaacgtatccgtatttgattcaagcctttattctccgctgtttactcaaaagcagatgaagcaggtttggtcggatgaaaatttaatccgcacttggctgacttttgaaaccaagattgcagaggcacaagcagagttggggttaattccccactctgcagcaagcgctatcaaacaagtgtgcgatattcgccatttagattgggcgcgcttagcacaagacacacaaaccgtcggtatggccatcaaacctctggttgatcagctctcggagcaaggcaatgatgaagtaaaacaatatctgcactggggttgcaccacccaagacttgctcgataccagtcttgcgatgcgcttaaagcagacgttgcacatcgttcgtcaacagttggttgcgttaggcgatcagcttgcgtcaatggcattacaccataagcgcacggtgatggttgcaagaaccaacgcaatggacgctttgccgaccacctgggggcttcaagtcagtggttatcttcaagagatcactcggcatctcacacgccttgatgagctctatcctcgtgtgacgaccggtctctatggtggtgccgttggtaatttgtcttcaatcggctcccacgggttagcggttcggcagcgactatttgctaagctcgaattgactgaaccgaaaggattgggcaatgccagcttagataatattgttgagttaattcagttctttgccttaatccacggtaccttatgccgcatcgcgaatgatacggaactcatggggcgagcagctcttggtgaggtgtgcgaaggtgagtcgggtggggggtcaagcaccatgccccataaagccaaccccagagccgccaatatgatccagaccttatctcgaatggggtggatgtatgccagtggcgcgcccaatctgatggatcaacaagatgttcgtgccgcttcaatgcgcgtgctgaattggagcttagtgcctgaggcgtcgttggccgtttccaccgctctggagcgtggggagcgactcgttgcgaacctcatcgtcaatcaagacaaaatgcgcagtaatttttcagcgtctcggaatttcattatgtcagaggcggtaatgatgaaagcggccgaaaaagtgggacgcagcatggggtacagctgcgtcaaaatggccattgctcaagcgccagaacaaggcgatttagcgcaaatattgaaacaaaacccagaggtatccgcgatattaacggaccaagaaatcgacgccgcttgcgatcctcaacactatcttggctgtaatgatgcgttgattgatgaaacggtagagctctatcgaaaggtgattcgctaa

SEQ ID NO: 3084 - protein, 459 aa, Vibrio vulnificus
MELRTPFMQGSNVSVFDSSLYSPLFTQKQMKQVWSDENLIRTWLTFETKIAEAQAELGLIPHSAASAIKQVCDIRHLDWARLAQDTQTVGMAIKPLVDQLSEQGNDEVKQYLHWGCTTQDLLDTSLAMRLKQTLHIVRQQLVALGDQLASMALHHKRTVMVARTNAMDALPTTWGLQVSGYLQEITRHLTRLDELYPRVTTGLYGGAVGNLSSIGSHGLAVRQRLFAKLELTEPKGLGNASLDNIVELIQFFALIHGTLCRIANDTELMGRAALGEVCEGESGGGSSTMPHKANPRAANMIQTLSRMGWMYASGAPNLMDQQDVRAASMRVLNWSLVPEASLAVSTALERGERLVANLIVNQDKMRSNFSASRNFIMSEAVMMKAAEKVGRSMGYSCVKMAIAQAPEQGDLAQILKQNPEVSAILTDQEIDAACDPQHYLGCNDALIDETVELYRKVIR

SEQ ID NO: 3085 - DNA, 1344 bp, Porphyromonas gingivalis
  CDS (1)..(1344)
atgattgctttccaagccctgcaagccatctctccgatagatggccggtatcgcaacaaagtagaagtacttagtcgctatttttcagaaggatctctaattcgctatcgtgtaaaagtggaggtggagtatttcatcgctctttgcaatgaattgccttcgctgaaagatgtgtgccctccatctttagaggaagagttgcgccgtatataccaagactttagcgagaaggatgccgtacgtgtaaaggaaatagaggcggtaacgaatcatgacgtcaaggctgtggagtatttcctcaaagagcggttcgaggccatggggatacgagatgccaaagaatttatccatttcggtctgacctcgcaggatgtaaacaatacggctttcccgatgatgatacgcgaggcaatgaccgaggtttacttgcccgctttacaggagctggtggagcagcttcatgcttatgcccttcagtggaaagatgtcccgatgctggccaaaacgcatggacagccggcgtcgcccactcgcttaggaaaggaaatagaagtattcgtctatcgcttgcgcaagcagatcgacttgctgctggaagtacctcattcagccaaattcggtggtgctacgggcaatttcaatgcgcatcatgtggcttatcctgatcatgactggagcgatttcggccgtcggtttgtaacttctctcgggcttgaacgggaagaactcactacacaaatatccaactacgacaacatggcagccttatttgatgcctgctgtcgcatcaatgtgatactgatcgacctctgccgtgatttctggcagtacatttcgatggagtacttcaaacagaagatcaaggccggcgaggtcggttcttctgccatgccacataaagtgaatccgatcgactatgaaaatgccgaaggcaatctgggtattgcgaatgccatatttgagcatttgtcgcgcaaattgcctatttcccgcttgcagcgagatctgacggattccactgtacttcgtaacgtgggaactcctttggcgcattctctcatagcagtcacgagcatagccaaagggcttggcaaactgcttctcaacgaagctgctctcgatcgggatttgcagaacaactatgctgtggtggctgaggctatacaaactattcttcgtagagaagggtatcccaatccatacgaaacgttgaaggctctgacgcgtacgaatgagacggtgacagccgaatccattgcaagttttatcgaagcattggatattgatgaaaccgtgaaggaggaaatgcgccgcatatcaccttctaattacgtgggaatctga

SEQ ID NO: 3086 - protein, 447 aa, Porphyromonas gingivalis
MIAFQALQAISPIDGRYRNKVEVLSRYFSEGSLIRYRVKVEVEYFIALCNELPSLKDVCPPSLEEELRRIYQDFSEKDAVRVKEIEAVTNHDVKAVEYFLKERFEAMGIRDAKEFIHFGLTSQDVNNTAFPMMIREAMTEVYLPALQELVEQLHAYALQWKDVPMLAKTHGQPASPTRLGKEIEVFVYRLRKQIDLLLEVPHSAKFGGATGNFNAHHVAYPDHDWSDFGRRFVTSLGLEREELTTQISNYDNMAALFDACCRINVILIDLCRDFWQYISMEYFKQKIKAGEVGSSAMPHKVNPIDYENAEGNLGIANAIFEHLSRKLPISRLQRDLTDSTVLRNVGTPLAHSLIAVTSIAKGLGKLLLNEAALDRDLQNNYAVVAEAIQTILRREGYPNPYETLKALTRTNETVTAESIASFIEALDIDETVKEEMRRISPSNYVGI

SEQ ID NO: 3087 - DNA, 1371 bp, Photorhabdus luminescens
  CDS (1)..(1371)
atggaattatcctcactgactgctgtttctccgatcgatggccgttacggcgataaagtcagcgtattacgtaccatttttagtgagtttggcttactgaaattccgcgtacaggttgaagtacgttggctgcaaaaactggcagaatgtgctgaaattaaagaagttcccgcgtttgatacagacgcaaacgcttacctgaatgaaattatcgcaaatttcaatgaacaggatgcaatgcgtattaaaactatcgaacgcaccactaaccacgatgtcaaagcagtggaatattttctgaaagagaaagttgcacatattcctgcactacatcaagtttctgagtttattcactttgcctgtacttctgaagatattaacaatctagcttatgcgctgatgctacaaaccgcccgagaagaagtacttttaccccaatggcgtcagatgattgataccatcaaaaaaatggcgagtgaatatcgagacttaccactgttatctcgcactcacggccaaccagccacaccttccacggttggtaaagagtttgccaatgttgctcaccggatggaacgccagtatcgccaactggaacaagtcgaaatactcggtaaaattaatggtgccgtaggtaactataatgcccatatagccgcttacccacaggttgattggcatcagtttagtgaaacttttgtgacttcactcggcatcaaatggaatccatacacgacccaaatcgaaccccatgattatattgctgaattgttcgatactatcgcccgtttcaacacgattctgatcgattttgaccgtgacatttggggttacatcgcacttaaccatttcaaacagaaaacggttgccggtgaaatcggttcttccactatgccacacaaagtcaatccaattgattttgaaaactcggaaggcaatttggggctggcaaatgcggtatttggtcatctggcaagcaagttaccgatttcccgttggcaacgagatctgactgattcaactgtattgcgtaaccttggagttggcctgggatatgctctgatcgcttatcaatctacgatgaaaggcttaaataagttagaagtcaatgagcagcacctgctggatgagctagataaaaactgggaagtgctggctgaacctatccagacagtgatgcgtcgctatggtatcgaaaagccttatgaaaaactcaaagaacttacccgcggtaaacgcgtcaacggtgaaggaatgaaaacctttatcgatggactggatttaccggaagaagagaaaatacgattgaaagccatgacgccagcaaattatattggccgtgcaatcacactggttgatgaattgaagtag

SEQ ID NO: 3088 - protein, 456 aa, Photorhabdus luminescens
MELSSLTAVSPIDGRYGDKVSVLRTIFSEFGLLKFRVQVEVRWLQKLAECAEIKEVPAFDTDANAYLNEIIANFNEQDAMRIKTIERTTNHDVKAVEYFLKEKVAHIPALHQVSEFIHFACTSEDINNLAYALMLQTAREEVLLPQWRQMIDTIKKMASEYRDLPLLSRTHGQPATPSTVGKEFANVAHRMERQYRQLEQVEILGKINGAVGNYNAHIAAYPQVDWHQFSETFVTSLGIKWNPYTTQIEPHDYIAELFDTIARFNTILIDFDRDIWGYIALNHFKQKTVAGEIGSSTMPHKVNPIDFENSEGNLGLANAVFGHLASKLPISRWQRDLTDSTVLRNLGVGLGYALIAYQSTMKGLNKLEVNEQHLLDELDKNWEVLAEPIQTVMRRYGIEKPYEKLKELTRGKRVNGEGMKTFIDGLDLPEEEKIRLKAMTPANYIGRAITLVDELK

SEQ ID NO: 3089 - DNA, 1296 bp, Gloeobacter violaceus
  CDS (1)..(1296)
atgatcgagcgctataccctgcccgagatgggcgctctgtggactgaggagcagaagtatcgcaactggttaaaggtagaactggccgcctgcgaggcaatggtggagttgggtgagattccgcagggggcgtggcaggagatccgcaccaaggccggcttcgacgtcgggcgcatcgctgaattggaagccgaagtgcgccacgatgtgatcgcgtttttgacgagtgtcaacgagcatgtcggcccggcaggaagattcatccacctggggctcaccagttcggacgtactcgatacggccctggcgctgcagctggtgcagacgctcgatgtccttgctctaagactggaggaactgatcgccgccacgcgcgcaaaggcgcgcgagcaccgagacaccgtgatgatcggccgcacccacggcatccacgccgagcccatcaccttcggcttcaagctcgcgggttggcttgcagaactcgcccgccacgccgagcgcctgcgcgccctcagaccgcgtctggcagcgggcaagctctccggagcggtgggcacctatgccaatctcgatccgcgcgtcgaagcgcgcgcctgcgagctattgggtttggttcccgacaccgcctccacccaggtgatcagccgcgaccgccacgccgaatttgtgcaggccctggcgctgacggccgggtcgatcgaacgctttgccgtcgagatccgcaacttgcagcgcaccgacgtgctcgaagtggaggaatacttcgccgcgggccagaaaggttcctcggccatgccccacaagcgcaatccgatcgcctccgagcaactgaccgggctggcgcgcatcgtgcgctccaacgccacggcggccctggagaatatggccctctggcacgagcgcgacatctcccactcgtctgtggaacgggtgattctaccggacagtgcgatcctcgtgcactacatgctcgtcaaattcaccgctctggtcgaaaagcttgcggtctaccccgagaacatggcacgcaacctgcatcgctatggcggcgtcgtcttcagccaacgggtgctcctggcactggtagcaaaaggtctcacccgcgaggaagcctaccgcatcgtacagaccaacgctcacaaagcctggaaccgcgagggaggcgattttcgagccctgatcgaggccgatcctgaggtgcagatcctcctggccccggccgaattggcagcctgcttcgagccgaggcaccacctgaagcacttggataccatctttgcccggctggaaatctag

SEQ ID NO: 3090 - protein, 431 aa, Gloeobacter violaceus
MIERYTLPEMGALWTEEQKYRNWLKVELAACEAMVELGEIPQGAWQEIRTKAGFDVGRIAELEAEVRHDVIAFLTSVNEHVGPAGRFIHLGLTSSDVLDTALALQLVQTLDVLALRLEELIAATRAKAREHRDTVMIGRTHGIHAEPITFGFKLAGWLAELARHAERLRALRPRLAAGKLSGAVGTYANLDPRVEARACELLGLVPDTASTQVISRDRHAEFVQALALTAGSIERFAVEIRNLQRTDVLEVEEYFAAGQKGSSAMPHKRNPIASEQLTGLARIVRSNATAALENMALWHERDISHSSVERVILPDSAILVHYMLVKFTALVEKLAVYPENMARNLHRYGGVVFSQRVLLALVAKGLTREEAYRIVQTNAHKAWNREGGDFRALIEADPEVQILLAPAELAACFEPRHHLKHLDTIFARLEI

SEQ ID NO: 3091 - DNA, 1371 bp, Chromobacterium violaceum
  CDS (1)..(1371)
atgaatctgactacgttgaccgccctctctccgctggatggccgctacgccggccaggtggaaggcctgcgcaacctgttctccgaattcggcctgatgaagtgccgcgtcaaggtggagctggaatggctgaaaatgctggccgccgagccgggcatcgaagaagtcaagccgttctccgacgccaccatccgcgagatcgacgacgtgatcgccaatttcagcgtcgagcacggcgaagaggtgaaggcgatcgaagtccgcaccaaccacgacgtcaaggcgatcgagtactggctgaaggagcgcctgtcgggcaatccggaagtgatggccgccagcgagttcatccacttcgcctgcacctccgaggacatcaacaacctcagccacgcgctgatgctgaagaccgcgcgcaacaccgtgctgctgccggcgctggacgaagtgatccacaagctgcagaagctggcgcacgagttggccgacacgccgatgatgtgccgcacccacggccagccggccacgccgtcgacgatgggcaaggagctggccaacgccgtctaccgcctgaagcgccagcgcgagcagctggtgcaccaggaaatcctgggcaagattaacggcgcggtcggcaactacaacgcccacctgtccgcctacccggacatcgactgggaaagcctgtgcggccgcttcgtcaccggtctgggcatcaccttcaatccgtacaccatccagatcgagccgcacgactacatggccgagctgtaccaggtggcgatgcgcgtcaacaccatcctgatcgacctgaaccgcgacatctggggctacatctcgctgggctacttcaagcagaaggtgaagaaggacgaagtgggcagctccaccatgccgcacaaggtcaacccgatcgacttcgaaaactcagaaggcaacctgggcatggccaacgccatcatgggccacctggcggaaaaactgccgatctcccgctggcagcgcgatctgaccgactccaccgtgctgcgcaatatgggggtcggcttcggctacaccatcctgggcctgaagtcctgcctgaaaggcctgaacaagctggagatcaatccggccctgatcgcggccgagctggacgccgcctgggagctgctggccgagccggtgcagaccgtgatgcgccgctacggcatcgccaacccgtacgagcagctgaaggagctgacccgcggcaagggcggcatcacccgcgagacgctgcacgccttcatccgcggcctggagctgccggacgcggtcaaggccagcctgctggaactgaccccgtccaactacttgggcaaggccgaggaactggcgcgccgcatctga

SEQ ID NO: 3092 - protein, 456 aa, Chromobacterium violaceum
MNLTTLTALSPLDGRYAGQVEGLRNLFSEFGLMKCRVKVELEWLKMLAAEPGIEEVKPFSDATIREIDDVIANFSVEHGEEVKAIEVRTNHDVKAIEYWLKERLSGNPEVMAASEFIHFACTSEDINNLSHALMLKTARNTVLLPALDEVIHKLQKLAHELADTPMMCRTHGQPATPSTMGKELANAVYRLKRQREQLVHQEILGKINGAVGNYNAHLSAYPDIDWESLCGRFVTGLGITFNPYTIQIEPHDYMAELYQVAMRVNTILIDLNRDIWGYISLGYFKQKVKKDEVGSSTMPHKVNPIDFENSEGNLGMANAIMGHLAEKLPISRWQRDLTDSTVLRNMGVGFGYTILGLKSCLKGLNKLEINPALIAAELDAAWELLAEPVQTVMRRYGIANPYEQLKELTRGKGGITRETLHAFIRGLELPDAVKASLLELTPSNYLGKAEELARRI

SEQ ID NO: 3093 - DNA, 1422 bp, Plasmodium yoelii yoelii
  CDS (1)..(1422)
atggaaaacttaaaaaacatttctccaattgatgggagatacaaaaatagttgtaaagagatttccgaatatttctcagaatatgcattaataaaatataggatatatgttgaaatacaatggcttatttttttgaatgataaagaatttttttttaaaaagttaagtgcagaatcaattgacaaattacacaaaatagcagatataaatgatgaagatgcattaagattaaaagaaattgaaaaagaaacaaatcatgatgttaaggcagtagaatattttattaaagaaaaaataagtcaaagtaataatgaacttgataatataaaagaatatgtacattatttatgtactagtgaggatataaataatatagcatatggtatatgtataaaattatgtttacataatataataatacctcatatagaacaaataatgaatcgattaaaagagttagcatctgaatatagtcatgttgctatattatctagaacccatggtcaacctgcatctgcaacaacctttggaaaagaaatggctaactattttgatagattaaaaagacatatatctacattaaaaaatataaaaatatatggaaaatttaatggtgcagttggaaatttcaatgctcataaaatagctaataataatattgattggattagtaatataaaatattttgtagaaaaatattttaacattaattatagtttatattgtacacaaatacaagatcatgattatatttgtgaaatttcagatgcattaggaagaattaattcgacacttttagatttatcaatagatatatggttatatatatcaaataatttattaaaattaaaaaatataaaaaatgaaattggaagtagtactatgcctcataaaataaatccaattgattttgaaaatgctgaaggaaatttacatctagctaatgcactttttaaagcattcagtgcaaaattatctataagtagattacaaagagatttatctgattcaacagttttacgaaatattggaacttcatatgcatattctcttatttcatacaaatctattttaaaaggtttaggaaaaattgatataaatgaaaaagcagcatatcaagaattaaacaataattggagtactttagctgaacccgttcaaattgtcttaaaaaattataattttccaaatgcttatgaagaattaaaaaactttacacgtggaaaaaatgttgataaagaactaatgcaacaatatattaaaacaaaatcagaatttatacctccaaattctataagtcaattattaaatcttagtcctaatacatatataggatatgccgattatttggctactaatgttgataaaatagaattggataagaaacatgaaatgagcgatacctccaaaaaaacaccataa

SEQ ID NO: 3094 - protein, 473 aa, Plasmodium yoelii yoelii
MENLKNISPIDGRYKNSCKEISEYFSEYALIKYRIYVEIQWLIFLNDKEFFFKKLSAESIDKLHKIADINDEDALRLKEIEKETNHDVKAVEYFIKEKISQSNNELDNIKEYVHYLCTSEDINNIAYGICIKLCLHNIIIPHIEQIMNRLKELASEYSHVAILSRTHGQPASATTFGKEMANYFDRLKRHISTLKNIKIYGKFNGAVGNFNAHKIANNNIDWISNIKYFVEKYFNINYSLYCTQIQDHDYICEISDALGRINSTLLDLSIDIWLYISNNLLKLKNIKNEIGSSTMPHKINPIDFENAEGNLHLANALFKAFSAKLSISRLQRDLSDSTVLRNIGTSYAYSLISYKSILKGLGKIDINEKAAYQELNNNWSTLAEPVQIVLKNYNFPNAYEELKNFTRGKNVDKELMQQYIKTKSEFIPPNSISQLLNLSPNTYIGYADYLATNVDKIELDKKHEMSDTSKKTP

SEQ ID NO: 3095 - DNA, 1449 bp, Neurospora crassa
  CDS (1)..(1449)
atgtccagctacgacaagtaccagacccccctcgccacgaggtatgcgtcccaggagatgatgtccatcttctcggctcgcacccgtgcctccacctggcgtcaactctgggtctggctggccgaggccgagaaggagttgggtctcaacattcccgatgaggccattcaacagatgcgcgagcacgttactgtgagcgacaaggccttcgacgtcgcccgtgagtacgagaacaagttccgtcacgatgtcatggctcacgtccacgcctatggcgaggatgctcccgctgctgccggccacattcacttgggtgccaccagctgctacgtcaccgacaacgccgacttgatcttcatccagaaggctcttgacctcatcctccctaagctggccaaggtcatccagaacctcaaggagttcgccctcaagtacaaggacacccccaccctgggcttcacccactaccagcccgcccagctcatcaccatcggcaagcgcgcctgccagtggatccaggagctcgttatggacctcgaggacatcgagaccgtccgcgagcgcctccagttccgcggcgctcagggcaccaccggctcgcaggctaccttcctcgagctctttgagggtgacgccgacaagatcgtcgagctcaacaagatcctctgcaagaaggccggcttcccctccacctaccccatctccacgcagacctacacccgcaaggtcgacctccgcgtcgccaacgccgtgtgcgccatcggcgccaccgccgagcgcatcgcctcggacatccgccacctggccaacctcaaggagatggaggaaccctttgagaagtcgcagatcggcagctcggccatggcgtacaagcgcaaccccatgcgctccgagcgtatcgccgccctctcccgcaagctggccaacctgcccgtcaacttcagcaacaccttcaaggcgcagtggttcgagcgcacgctcgacgactcggccatccgccgcatggacatccccgagatgtttttgctggccgactcgatcctgctcgcgctcgacaacgtcaccaacggcctggtcgtctacccctccgtcgtccgcgcccacattgaccaggagctgcccttcatggccaccgagtccatcctcatgaagctcgcccagcacggcgtctcccgccaggacgcccacgaggagatccgggtcttgtcccaccaggctagcgccgtggtcaagcaggagggtggcaagaatgacttgctggagcgcatcaagaagtccgagttcttcaagcctgtttggggcgagattgacgggcttgttgaccctgccttgttcattggcaactgccccaggattgtggaggattactgcaatggtcaggttgctgagaagttgagcaggtaccaggagactttgtccaaggcggagactgctcagctttctatctag

SEQ ID NO: 3096 - protein, 482 aa, Neurospora crassa
MSSYDKYQTPLATRYASQEMMSIFSARTRASTWRQLWVWLAEAEKELGLNIPDEAIQQMREHVTVSDKAFDVAREYENKFRHDVMAHVHAYGEDAPAAAGHIHLGATSCYVTDNADLIFIQKALDLILPKLAKVIQNLKEFALKYKDTPTLGFTHYQPAQLITIGKRACQWIQELVMDLEDIETVRERLQFRGAQGTTGSQATFLELFEGDADKIVELNKILCKKAGFPSTYPISTQTYTRKVDLRVANAVCAIGATAERIASDIRHLANLKEMEEPFEKSQIGSSAMAYKRNPMRSERIAALSRKLANLPVNFSNTFKAQWFERTLDDSAIRRMDIPEMFLLADSILLALDNVTNGLVVYPSVVRAHIDQELPFMATESILMKLAQHGVSRQDAHEEIRVLSHQASAVVKQEGGKNDLLERIKKSEFFKPVWGEIDGLVDPALFIGNCPRIVEDYCNGQVAEKLSRYQETLSKAETAQLSI

SEQ ID NO: 3097 - DNA, 1296 bp, Synechococcus sp
  CDS (1)..(1296)
atgatcgagcgttacaccctgcctgaaatgggagccgtctggagtgagcaggcgaaattccagagctggctggatgtggagatcgccgccacggaagccaactgccgcctcggccgtgttccccaagacgccctggacacaatcaaagccaaggcccacttctccgtggagcggatcctcgagatcgaagcggaagtgcgccacgacgtgatcgccttcctcaccaacgtgaacgaacacgtcggtgatgccggccgtcacatccatgtgggcttgaccagcagcgatgtgttggacaccggcctggcgctgcagctgaaacagtccgtggccctgctccgcctggagttggatgccttggccgacgccctacgggcgttggcccgcgagcacaaagccaccgaaatgatcggccgttcccatgccattcatggggagccgattacctttggcttcaagatcgccggctggctggcggaaaccgaacgcaaccgcagccgcctggcgcggctggaagaagaggtggccattgggcagatcagtggggccatgggcacctacgccaacaccgacccccaggtggaagccatcacctgtgaaatcctcggactgacgccggataccgccagcagccaggtgatttcccgcgatcgccatgccgactatgtgcagaccctggccctggtgggcgcctccctcgaccgcttcgcgacggagatccgcaacttgcagcgcaccgatgtgctcgaggtggaggagaacttcgccaagggccagaagggcagctccgccatgccccacaagcgcaacccgatccgcagcgaacggatcagcggcctggcacgggtgctgcgcagctatgtagtggcagccctggaaaacgttgccctctggcacgagcgcgacatcagccacagctccaccgaacggatgatgctgccggactgttccgtcacccttcatttcatgctgcgggagatgaccagcgtggtgaagggtcttggcgtctatcccgacaacatgcgccgcaacatgaacgtctacggcggcgtggtatttagccagcgggtgctgctggccctggtgggcaccggcatgagccgagaagaggcctatcggatcgtgcagcgcaacgcccacaccgcctggaaccatgaaggcggtgatttccgcgccaacctggaagccgacgcggatgtcaccagtcggctgtcagccgatcagctggcggactgcttcagtaccgaactgcatcaggccaatctcggcgtgatctgggagcgactggggatctga

SEQ ID NO: 3098 - protein, 431 aa, Synechococcus sp
MIERYTLPEMGAVWSEQAKFQSWLDVEIAATEANCRLGRVPQDALDTIKAKAHFSVERILEIEAEVRHDVIAFLTNVNEHVGDAGRHIHVGLTSSDVLDTGLALQLKQSVALLRLELDALADALRALAREHKATEMIGRSHAIHGEPITFGFKIAGWLAETERNRSRLARLEEEVAIGQISGAMGTYANTDPQVEAITCEILGLTPDTASSQVISRDRHADYVQTLALVGASLDRFATEIRNLQRTDVLEVEENFAKGQKGSSAMPHKRNPIRSERISGLARVLRSYVVAALENVALWHERDISHSSTERMMLPDCSVTLHFMLREMTSVVKGLGVYPDNMRRNMNVYGGVVFSQRVLLALVGTGMSREEAYRIVQRNAHTAWNHEGGDFRANLEADADVTSRLSADQLADCFSTELHQANLGVIWERLGI

SEQ ID NO: 3099 - DNA, 1296 bp, Prochlorococcus marinus subsp
  CDS (1)..(1296)
atgattgaacgttacacattacccgaaatgggaagaatctggactgaaaatgcaaaattccagagttggcttaaagttgaaattgcagcatgcgaggcaaattgtactcttggaaaaatgcctgaagctgcgttaaaagaaattcgtttaaatgcaaaatttgaagaatcaagaattaaagaaatcgagaaagaagtaaaacatgatgtaattgcatttctaacaaatatcaatgaatatgttggagattccggaagatacattcatgttggaatgactagcagcgatatccttgatacaggcctctcattacagctaaaagattcctgcgaattgttattagaggaaattgaaaaactagaaaatgaggtcagatcattagcaagaaagcataaaaatactttaatgattggcagatcccatgcaattcacggagagcctatttcatttggatttaaattggcaggatggttagcagaaatattaagagataaaaaaagattattaatccttaaagaatctatttccattggacaaataagtggagcaatgggaacttacgctaatacaaacccagaaatagaaaaaattacttgcgagttgctgggtttaaaaccagatacagcaagtactcaggttatatcaagagatagacatgctgaatatgttcaaacaatagcgttaataggagcttcacttgataggtttgctactgagataaggaaccttcagagaacagatgttttagaagtcgaagaaggattttcaaaagggcaaaaaggaagctcagctatgcctcataaaagaaaccctattcgtagtgaaagggttagcggtttatctagaattttgaggagttatgttgtaacagctcttgagaatgttccgctttggcacgagagagatattagccatagttctaatgagcgtatcatgttacccgatgtatctatatgcctacattttatgcttagagaaatgaaagaaattataaataatttaaaagtttatccggacaatatgctcaaaaatttaaatatatatgggggagtaatttttagtcagaaagttttacttttacttgttgaaaagggtatgtctagggaaaaggcttatagcttggtacaaaaaagtgctcatcaagcttggaataatgagaatggtaatttcaaggaaaatattgagggggaccaagagataatgacattagtttctgagaatgatttaaaggtatgctttgacccctcaatccacctcaacaatttaaatgtaatatgggataagttaagtatttaa

SEQ ID NO: 3100 - protein, 431 aa, Prochlorococcus marinus subsp
MIERYTLPEMGRIWTENAKFQSWLKVEIAACEANCTLGKMPEAALKEIRLNAKFEESRIKEIEKEVKHDVIAFLTNINEYVGDSGRYIHVGMTSSDILDTGLSLQLKDSCELLLEEIEKLENEVRSLARKHKNTLMIGRSHAIHGEPISFGFKLAGWLAEILRDKKRLLILKESISIGQISGAMGTYANTNPEIEKITCELLGLKPDTASTQVISRDRHAEYVQTIALIGASLDRFATEIRNLQRTDVLEVEEGFSKGQKGSSAMPHKRNPIRSERVSGLSRILRSYVVTALENVPLWHERDISHSSNERIMLPDVSICLHFMLREMKEIINNLKVYPDNMLKNLNIYGGVIFSQKVLLLLVEKGMSREKAYSLVQKSAHQAWNNENGNFKENIEGDQEIMTLVSENDLKVCFDPSIHLNNLNVIWDKLSI

SEQ ID NO: 3101 - DNA, 1296 bp, Prochlorococcus marinus
  CDS (1)..(1296)
atgatcgagcgctacacactgcccgaaatgggcgagatttggaccgacagggccaagtatcaaagctggctagatgtagagatcgccgcttgtgaggccaactgtcaactggggaagatcccagcggctgaaatgcagcagattcgtgaacgcgcaaccttcgagccacagcgcatcttggagattgaggcagaggttcgccacgacgtcatcgccttcctgaccaacgttaatgaacacgtaggggatgccggccgctacatccacgtcggcatgaccagcagcgatgtgctggatacgggtctggccctgcagttaaaaaactctgtggcattgctaaaacaagaactgggcagccttcaagaagcgatccgcagcttggcagtggagcacaagggcacagtcatgatcggccgctcccatgccatccatggcgaacccatcaccttcggtttcaaactggccggttggctagcagaaacaatgcgcaatgccgagcgactggaaaggctggagagggatgtggctgtaggccagatcagtggcgccatgggcacctacgccaataccgatccaaaggttgagcagctcacatgcgagcgcctttgcctcatcccagacaccgctagtacccaggtcatctctcgcgatcgtcatgcggactatgtacagaccctggcattagtgggggcgtctctagatcgattcgcgacagagatccgcaacttgcagcgaaccgatgtactggaagtggaggagagctttgctaaaggacaaaagggaagttcggcgatgccacataaacgcaacccgattcgggctgagcggattagtggtcttgcaagggtcctacgcagctatgtcgtcgcagcactcgaaaacgtggccctctggcatgagcgtgatatcagtcacagctccactgagcgaatgatgctgccggattgctccgtcacactccacttcatgttgcgagagatgacccaagtcgtgcagggccttggtatctacccagcaaacatgcgtcgcaacatgaatatctatggcggcgtggtgttcagtcagcgggtgctattggcgcttgttgagaacggcatgagcagagaagatgcctacagtgttgtccagcgcaacgcccatgctgcgtggaataccgaagggggtaacttccgcgccaatcttgaggccgatcctgaagtatcgacccttctcaatgccaaggcgctagccgaatgcttcagcacagagctacaccaagccaacctggacgtgatctggcaacggctcggactctga

SEQ ID NO: 3102 - protein, 431 aa, Prochlorococcus marinus
MIERYTLPEMGEIWTDRAKYQSWLDVEIAACEANCQLGKIPAAEMQQIRERATFEPQRILEIEAEVRHDVIAFLTNVNEHVGDAGRYIHVGMTSSDVLDTGLALQLKNSVALLKQELGSLQEAIRSLAVEHKGTVMIGRSHAIHGEPITFGFKLAGWLAETMRNAERLERLERDVAVGQISGAMGTYANTDPKVEQLTCERLCLIPDTASTQVISRDRHADYVQTLALVGASLDRFATEIRNLQRTDVLEVEESFAKGQKGSSAMPHKRNPIRAERISGLARVLRSYVVAALENVALWHERDISHSSTERMMLPDCSVTLHFMLREMTQVVQGLGIYPANMRRNMNIYGGVVFSQRVLLALVENGMSREDAYSVVQRNAHAAWNTEGGNFRANLEADPEVSTLLNAKALAECFSTELHQANLDVIWQRLGL

SEQ ID NO: 3103 - DNA, 1419 bp, Mycobacterium bovis
  CDS (1)..(1419)
atgagcattcccaacgtgctggccacccgatacgccagcgccgagatggtcgcgatctggtcgccggaggccaaggtggtctcggagcggcggttatggctggccgtattgcgggcacaggcagagctgggggtagcggttgccgattcggtgctcgccgactacgaacgtgtggtcgacgatgtggacttggcctcgatctcagcccgggagcgggtgctgcgccacgatgtcaaggcccgcatcgaggaattcaacgcattggccggtcatgagcacgtgcacaaggggatgaccagccgcgacctgaccgagaacgtggagcaactgcagattcggcggtcgctggaagtgattttcgcccatggggtggcggcggtggcgcggctggccgagcgggcggtgagctaccgtgacctgatcatggccgggcgcagccacaacgtggccgctcaggccaccaccttgggcaagcggttcgcctcggcggcccaagagatgatgatcgcgttgaggcggttgagggagttgatcgaccgctaccccctgcgtggcatcaagggcccgatgggcaccggtcaggacatgctcgatctgctgggcggtgaccgtgcggcgctggccgatctcgagcggcgcgtcgccgacttcttgggctttgcaactgttttcaacagcgtggggcaggtgtatccgcgttcattggaccacgacgtggtttcggctctggtgcagctcggcgcggggccgtcatcactggcacacacgattcgattgatggccggccacgagctcgccaccgagggtttcgcgccgggtcaggtcggttcgtcggcgatgccgcacaagatgaacacccgcagctgcgaacgggtcaacgggctgcaggttgtgctacgcggctatgcatccatggtggccgagttagccggtgcacagtggaacgagggtgatgtgttttgctccgtggtgcgccgggttgcgttgccggacagcttctttgccgtcgacgggcagatcgagacgtttttgacggtgctggacgagttcggcgcctacccggcggtgatcggccgcgagttggatcgttatctgccgttcctggccaccactaaggtgctaatggcggccgtgcgcgcggggatgggtcgcgagtccgcgcaccggttgatctccgagcacgcggtggcgacggcgctggccatgcgagaacacggcgcggagcccgacctgctggaccggttggccgccgatccgcggctgccgctgggacgagacgctttggaggccgcgctggccgacaagaaggcatttgccggtgccgcgggtgaccaggtcgatgatgtggtcgcgatggtggacgcgctggtgagccgttacccggacgcggctaaatacacgccgggtgcaattctttag

SEQ ID NO: 3104 - protein, 472 aa, Mycobacterium bovis
MSIPNVLATRYASAEMVAIWSPEAKVVSERRLWLAVLRAQAELGVAVADSVLADYERVVDDVDLASISARERVLRHDVKARIEEFNALAGHEHVHKGMTSRDLTENVEQLQIRRSLEVIFAHGVAAVARLAERAVSYRDLIMAGRSHNVAAQATTLGKRFASAAQEMMIALRRLRELIDRYPLRGIKGPMGTGQDMLDLLGGDRAALADLERRVADFLGFATVFNSVGQVYPRSLDHDVVSALVQLGAGPSSLAHTIRLMAGHELATEGFAPGQVGSSAMPHKMNTRSCERVNGLQVVLRGYASMVAELAGAQWNEGDVFCSVVRRVALPDSFFAVDGQIETFLTVLDEFGAYPAVIGRELDRYLPFLATTKVLMAAVRAGMGRESAHRLISEHAVATALAMREHGAEPDLLDRLAADPRLPLGRDALEAALADKKAFAGAAGDQVDDVVAMVDALVSRYPDAAKYTPGAIL

SEQ ID NO: 3105 - DNA, 1296 bp, Prochlorococcus marinus
  CDS (1)..(1296)
atgatcgaacgttacacactccccgaaatgggtgcaatctggacagaacatgccaagttccaaagctggcttgaagtagagattgctgcatgccaagccaatttggaacttggcaagatccccgaaagtgcaatgaaagaaataagagataaagcccagttcagtccggaaaggattcttgaaatcgagtcagaagtccgacatgatgtcattgcttttcttacaaatttaaatgaaaacatcggagatgctggacgttttattcacattgggatgacaagtagtgatgttttagatactggcttagctttgcaattaaaatcatcagtcaagctactaaaaaaagaactaaagatacttaaggatgtaattcgctcaaaagcaaaggagcataaaaatacaatcatgattggaagatcacatgcaattcatggagaaccaataacttttggtttcaaacttgctggatggctagcagaaaccatcaggaatgaagaaaggcttgagcaattagaaaaagatatttctgttgggcaaatcagtggcgcaatgggaacctatgccaatacagacccagagatagagagaattgcttgtgctcatcttgggttgacaccagacacagcaagcacacaagttatttcaagagatagacatgcaaattatgttcaaacacttgcactaataggttcctccttagaccgatttgctactgagataagaaatcttcaaaggactgatgtccttgaagtagaagaagggttcttcaaaggacaaaaaggtagttctgctatgcctcacaaacgcaaccccatcagaagtgagcgcattagtggtctagcaagagttcttcgtagttatgtaattgctgctctagaaaatgttgccttatggcacgaaagagacataagtcatagttctacagaaagaatgatgttgcctgacacctcaatcacacttcattttatgttgagagaaatgagtgaagtcataaatgaacttgggatctacacaaaaaacatggtgaaaaatatgaatatttatggaggagttgtttttagtcaaagggttcttctagctcttgttcaaagtggcatgcaacgagaaacggcctataggctagtacaaaaacatgctcatgcggcgtggaatacagagtcaggtgactttcgaactaatcttagtttagacaagtcaatcactgatgtaatttcggcagagcaactaaacgattgctttagtacagaactacatcaattaaatctcgatgttatatgggaacgtctcgagatttag

SEQ ID NO: 3106 - protein, 431 aa, Prochlorococcus marinus
MIERYTLPEMGAIWTEHAKFQSWLEVEIAACQANLELGKIPESAMKEIRDKAQFSPERILEIESEVRHDVIAFLTNLNENIGDAGRFIHIGMTSSDVLDTGLALQLKSSVKLLKKELKILKDVIRSKAKEHKNTIMIGRSHAIHGEPITFGFKLAGWLAETIRNEERLEQLEKDISVGQISGAMGTYANTDPEIERIACAHLGLTPDTASTQVISRDRHANYVQTLALIGSSLDRFATEIRNLQRTDVLEVEEGFFKGQKGSSAMPHKRNPIRSERISGLARVLRSYVIAALENVALWHERDISHSSTERMMLPDTSITLHFMLREMSEVINELGIYTKNMVKNMNIYGGVVFSQRVLLALVQSGMQRETAYRLVQKHAHAAWNTESGDFRTNLSLDKSITDVISAEQLNDCFSTELHQLNLDVIWERLEI

SEQ ID NO: 3107 - DNA, 1332 bp, Helicobacter hepaticus
  CDS (1)..(1332)
atgatagagcgatatgcacgcgaggaaatgaaaaaactatgggatttaaatgctaaatattctgcgtggctagaggtggaaaaggcattagtgcgcgggtggaataagctagggcttatccctgatgatgattgtgacaaaatatgcaagaatgcaaagtttgatattgcgcgcattgatgaaatagaggcagttacaaagcacgatttaattgcttttactacaagtgtggctgaaagcttaggtgaggaatcgcgctgggtgcattatgggattacttcaagtgattgtattgatacggctgtggcgctgcaaatgcgagattctctaaagattattttagaggatattaagcaggtgcgtgaagtgattaaaaaaagggcgatggaacacaaaggcacacttatggtaggacgctctcacggaatccacggcgaacccattacttttgggctcgttttggcaatttggtatgatgagctaggaaggcatttaaaggctttggaatctactttggaagtcatctctgtggggcagttaagcggagcaatgggaaatctcgcacatacacctattgagctagaagaaattgtatgtaaagatttggggttaaaacccgctcctgtgagcaatcaagtcattcagcgtgatagatatgcacgattaatgagtgatttggcacttctagctagtagttgtgaaaaaattgctgttgaggtgcggcatttgcagcgcacagaagtgtatgaagcggaggaatattttgaaaaagggcaaaaaggcagtagtgcaatgccacacaagcgcaatccagtgctaagtgagaatatcaccggactttgtagaatgattcgctcttttgctctgccagcaatggaaaatgtcgccctttggcacgagcgagacattagccactcaagcgtagagcgttttatcctgcctgatagttttatcactactgattttatgcttgtgcgacttaagggattgcttgataagcttgtggtgtatcctaaaaatatgatgaaaaatcttaatttaaccggtgggcttgtgttttcacaaagaatcttattagagttgcctaaaaagggcgttagtcgtgaagatgcgtataaaatcgtgcaacgcaatgcgatgaaagtatggcaggatttacaagagggtaaagcagtggtgaatgaaaaaggagagagcttgtatttgcagtatttattagcagattctgaactagtggggtttattggtgaggcggctatcaaggaatgctttgcttatgagtattatacaaaaaatattgatgcgatttttaagagagtgtttgatgagtaa

SEQ ID NO: 3108 - protein, 443 aa, Helicobacter hepaticus
MIERYAREEMKKLWDLNAKYSAWLEVEKALVRGWNKLGLIPDDDCDKICKNAKFDIARIDEIEAVTKHDLIAFTTSVAESLGEESRWVHYGITSSDCIDTAVALQMRDSLKIILEDIKQVREVIKKRAMEHKGTLMVGRSHGIHGEPITFGLVLAIWYDELGRHLKALESTLEVISVGQLSGAMGNLAHTPIELEEIVCKDLGLKPAPVSNQVIQRDRYARLMSDLALLASSCEKIAVEVRHLQRTEVYEAEEYFEKGQKGSSAMPHKRNPVLSENITGLCRMIRSFALPAMENVALWHERDISHSSVERFILPDSFITTDFMLVRLKGLLDKLVVYPKNMMKNLNLTGGLVFSQRILLELPKKGVSREDAYKIVQRNAMKVWQDLQEGKAVVNEKGESLYLQYLLADSELVGFIGEAAIKECFAYEYYTKNIDAIFKRVFDE

SEQ ID NO: 3109 - DNA, 1368 bp, Haemophilus ducreyi
  CDS (1)..(1368)
atggaagttactgctttaacagcattatcgccgattgatggtcgttaccaagataaaacaaatgcacttcgcacaatttttagtgaatttggcttactcaaatttcgagtaactgtggaagtgcgttggttacaaaaattggcatcacatccacaaattagcgaagtttcagctttgtcgcaaaaggcaaacgattacttagatcaaattgtggcaaacttttccattgatgatgctaagcgcataaaaatgattgagcgtgaaactaatcacgatgtaaaagcagttgaatattttttgaaagaaaaatgtaatgcattagctgaattacaagcgattaatgaatttattcattttgcttgtacctcagaagatattaataacacttctcacgcattaatgttaaaaatggcacgtgaagaagtattattaccagaatggcaaaaattgattgatgcaattgttgagcttgctaaacgttatcaacatattccactactgtctcgtacacacggtcaacctgcgagcccgaccactattggtaaagaaatggcgaatgtggcttatcgtttgcgccgtcaatataaacaattacaaaatttagatattttagctaaaattaatggcgccgttggaaactataatgcacatttatcagcttatccagaaattgattggcatacctttggtcaacaatttgttgaatctttaggagttaattggaatccatataccacacaaattgaaccacacgattatattgcagagttttttgattgtgtagcacgttttaatacgattatgattgattttgatcgtgatatgtggggctatattgcgttaaatcattttaaacagcgtactgttgctggagagattggatcatcaacaatgcctcataaagtgaatccgattgactttgaaaattcagaaggtaacttgggtttagctaatgccgtgatggcgcatttaggacaaaaattgccagtttcacgttggcaacgtgatttaactgattctacagtattacgtaatcttggtgttggtttaggctattgcttaattgcctattcagccactttaaaaggcatcagcaaattagaagtgaatgaacagcatttacaagatgaattaaatcaaaattgggaagtgttagctgaacccattcagactgtgatgcgtcgctatggtattgaaaaaccatatgaaaaacttaaagaattaacacgtggtaaatgtgtaaatgaagccgttatacggcagtttattgatacgctcgccattccagaaagtgaaaaagcacgtttaaaagaaatgagcccggctacttatattggatatgcgattgagcttgtagataagttataa

SEQ ID NO: 3110 - protein, 455 aa, Haemophilus ducreyi
MEVTALTALSPIDGRYQDKTNALRTIFSEFGLLKFRVTVEVRWLQKLASHPQISEVSALSQKANDYLDQIVANFSIDDAKRIKMIERETNHDVKAVEYFLKEKCNALAELQAINEFIHFACTSEDINNTSHALMLKMAREEVLLPEWQKLIDAIVELAKRYQHIPLLSRTHGQPASPTTIGKEMANVAYRLRRQYKQLQNLDILAKINGAVGNYNAHLSAYPEIDWHTFGQQFVESLGVNWNPYTTQIEPHDYIAEFFDCVARFNTIMIDFDRDMWGYIALNHFKQRTVAGEIGSSTMPHKVNPIDFENSEGNLGLANAVMAHLGQKLPVSRWQRDLTDSTVLRNLGVGLGYCLIAYSATLKGISKLEVNEQHLQDELNQNWEVLAEPIQTVMRRYGIEKPYEKLKELTRGKCVNEAVIRQFIDTLAIPESEKARLKEMSPATYIGYAIELVDKL

SEQ ID NO: 3111 - DNA, 1386 bp, Candidatus Blochmannia floridanus
  CDS (1)..(1386)
atgaacaaattttctccattaaccgctatttctccaatcgatggacgttattatcatcaaactcatccactaagaaatatttttagtgaatttgggttattaaaatttcgcattcaaattgaaattcattggatacaaaaattatctcatacaatagaaatcacagaaatacctgtatttactgaaattgaactaaatttcttaaataacttaattacaaattttaatatcacagacgcaaaacatattaaaaaaatagaaaaaatcactaaacatgatgtaaaagcaatagaatattttttaaaagaaaaaataagtgttttacctgatttaaaaaagaaaatcaatgaatttatccattttgcatgtacttcagaagatattaataatcttgcttacggtttaatgatttctcataccaaaaatactatcatattacctatatggaaaaaaattattgatattattaaaaaaataagcatcaaatataaaaatactcctattctttccagaacacatggacaaccagctagtccttctactcttggcaaagaaacggctaatatcgcatatcgattaatacgacaatatcattacttaaaatcaatcaaaattttaggaaaaatgaatggagcagttggtaactataacgctcacattatagcgtatccaaaaataaattggagaaaatttgacgaagagtttgttacatcattaggaatttcatggaacccatatactacgcaaatagaaccacatgattacatagttgaaatctctaatcgcattattcattttaatactattttaattaaatttaatcaagatatctggggatatctttctttaaattattttcaacaagcatatagtcaatttgaaattggttcatctactatgccccataaaattaatccaataaattttgaaaattctgaaggtaatttgggtttatctaatgctatttttaatcatttttctaaaaaattaccaatatcacgttggcaacgtgatttaagtgactccaccgtactaagaaatttaggagtagctattggacattctttaattgcttatcacaatttattaaaaggtatagacaaattaatcattaatgaaaaatatttgttacaagatttaaataaaaattggataatattaagtgaagctattcaaacagtaatgaaaaaatacaacattcataattcttatgaacgtacgaaagattttatattcaacgaaaaagttaatcccgatactataaaaaaatttattgaatctctacctttaccaacatcagaaaaaacccgattgcaacatattactccatctgaatatattggattagctccggatattgccaatgatataataaaatttgaataa

SEQ ID NO: 3112 - protein, 461 aa, Candidatus Blochmannia floridanus
MNKFSPLTAISPIDGRYYHQTHPLRNIFSEFGLLKFRIQIEIHWIQKLSHTIEITEIPVFTEIELNFLNNLITNFNITDAKHIKKIEKITKHDVKAIEYFLKEKISVLPDLKKKINEFIHFACTSEDINNLAYGLMISHTKNTIILPIWKKIIDIIKKISIKYKNTPILSRTHGQPASPSTLGKETANIAYRLIRQYHYLKSIKILGKMNGAVGNYNAHIIAYPKINWRKFDEEFVTSLGISWNPYTTQIEPHDYIVEISNRIIHFNTILIKFNQDIWGYLSLNYFQQAYSQFEIGSSTMPHKINPINFENSEGNLGLSNAIFNHFSKKLPISRWQRDLSDSTVLRNLGVAIGHSLIAYHNLLKGIDKLIINEKYLLQDLNKNWIILSEAIQTVMKKYNIHNSYERTKDFIFNEKVNPDTIKKFIESLPLPTSEKTRLQHITPSEYIGLAPDIANDIIKFE

SEQ ID NO: 3113 - DNA, 1449 bp, Bordetella parapertussis
  CDS (1)..(1449)
atgccacatatgttacagagagggcgaatggtaaaatcgcccggcttacaaccgcttccttcttacaccgacatgcagattgccgaccagcttacccaacttaatgctctttcgccactggatggacgctatgcgtcgcgcgccggggcgctgcgggggctgctgtccgaggccgggttcatggcgcatcgcgtcgaggtcgaggtggcctggctcgttgcgttgtccgatgcgggcctgcccgagctgccggcgttcccggccgccgcgcgcgagcgcctggccgcgctggtgcgcaatttttccgaggccgacgccgcccgcatcaaggacatcgagcgcgtgaccaatcacgatgtcaaggcggtcgagtactggctgaaagaacaggtggccgacgatgccgaattggcgcgtgccgccgagttcatccatttcgcgtgcacctccgaagacatcaacaatacttcgcatgcgctcatgctcacgcgtgcgcgcgccgaagtcgtcgtgccgcagctcaaccaggtgctggccaagctgaacgaactggcccggacgcatgccgaccagcccatgctgtcgcgcacgcacggccagcccgccagtccgaccacgctgggcaaggagttcgccaacgtggcggcgcgcctgcagcgcgccgtggccgccatcgaggcggtcgagccgctggccaagctcaatggcgccacgggcaactacaacgcgcatctgtcggcgtacccggaaatcgactggcccgccttcagccgcaatgtgctggccggcctgggcctgacccagaaccgccataccatccagatcgaaccgcacgactggatggcggcgctgtccgacgccgtggcgcgcgccaacgtcatcgtgctggacctggaccgcgacatctggggctacgtggccctgggctacttcaagcagcgcctgaaggagggcgaggtcggctcctcgaccatgccgcacaaggtcaacccgatcgatttcgagaactccgagggcaacctgggtctggccaatgccgtgctgcgccatctgtccgagaagctgccggtttcgcgctggcagcgcgacctgaccgattcgacggtgttgcgcaacctgggcgtgggcctgggctatgcgctggtcgcctgggatgcctgcctgcgcgggctgaacaagctggaagtcaacgccgcggcgatcgacgccgacatcgatgcgtgctgggaagtgctggccgagccggtgcagacggtcatgcgccgctacggcctgccgcagccgtacgagcagctcaaggcgctcacgcgcggcaagggcattaccgaagaggccttgcgcgaattcatcggcggcctggcgctgcccgacgagcccaaggcccgcctgctggcgatgacgccgcgctcgtatatcggcctggccgcgcaactggcgcgggcggtatag

SEQ ID NO: 3114 - protein, 482 aa, Bordetella parapertussis
MPHMLQRGRMVKSPGLQPLPSYTDMQIADQLTQLNALSPLDGRYASRAGALRGLLSEAGFMAHRVEVEVAWLVALSDAGLPELPAFPAAARERLAALVRNFSEADAARIKDIERVTNHDVKAVEYWLKEQVADDAELARAAEFIHFACTSEDINNTSHALMLTRARAEVVVPQLNQVLAKLNELARTHADQPMLSRTHGQPASPTTLGKEFANVAARLQRAVAAIEAVEPLAKLNGATGNYNAHLSAYPEIDWPAFSRNVLAGLGLTQNRHTIQIEPHDWMAALSDAVARANVIVLDLDRDIWGYVALGYFKQRLKEGEVGSSTMPHKVNPIDFENSEGNLGLANAVLRHLSEKLPVSRWQRDLTDSTVLRNLGVGLGYALVAWDACLRGLNKLEVNAAAIDADIDACWEVLAEPVQTVMRRYGLPQPYEQLKALTRGKGITEEALREFIGGLALPDEPKARLLAMTPRSYIGLAAQLARAV

SEQ ID NO: 3115 - DNA, 1320 bp, uncultured Acidobacteria bacterium
  CDS (1)..(1320)
atgatcggccggtacacccaccctgacatgggtcgcatctggagcgaccagcgcaagtacgaaacctggctgcgagtagagatcgcggcatgcgacgcgatggcccgagcgggcatcgtgccgccggaggctgcccgcgacattgccgagcggggcgccttcgacatcgtccggatcgaggagatcgagcagaccacgcagcacgaagtgattgcattcaccaccgccgttggcgagcacgtcgggccgtcggcccggtggctccatttcggcctcacctcgtccgacgtcatcgacaccgcgcaggcgctgcagatgcgggacgcctgcgacctcatcctccgggggctgcaagggttgatggcggcggtcagggggcgcgccgaggagcatcgccacaccccgatgatcgggcgcacgcacggcgtgcacgccgagccgatgacgtttgggctcaagctcgccctctggttcgccgagctcgggcgcgacgtcgagcgcgtccggagggctcgcgacaccatctcggtagggaagctctccggggcggtgggcacgttcgcgcacctgccgccgtcggtggaggccgacgtctgcgcctcgctcgggttggtgccggcgccggtcgcttcgcaggtaatccagcgcgatcggcatgcggagctgctcgcaacgctcgccatcaccgcctccacgctcgagaagctggcgctcgaaatccgcgggttgcagaagacggaaatcggcgaggtcgaggagccgtttgccaagggacagaagggctcgtcggcgatgccgcacaagcgcaacccgatcgcctgcgagcagctcgtcggcctggcccgactggtgcgcgccaacgcaggcgcggcgctcgagaacaacgcgctctggcacgagcgcgacatctcgcactcgtcggtcgagcgggtgatcctgcccgacagcttcatcgcgctcgaccacatgctcagacgggcgacgcggatcgtgacgggcctcgaggtctatcccgggcgcatgaaggcgaacctcgagcgctcgcgcggggtggtcttctcgggcaccgtgctgctcgagctcgcccggcagggcgtgtcgcgggaggaggcctatctctgggtgcagcgtaacgcgatgcgctcgttcgaccaggcgttggatttcaagaccttgttgctggaagacgccgacgtgatgcgcgtcttgacccgtgagcatgtcgaacgtgcgttcgacctcacccaacagcttcgccacgtcgatcacgtgtttgaccgcgtattcgacgcggcgtcgtcagtggcacggagggaatag

SEQ ID NO: 3116 - protein, 439 aa, uncultured Acidobacteria bacterium
MIGRYTHPDMGRIWSDQRKYETWLRVEIAACDAMARAGIVPPEAARDIAERGAFDIVRIEEIEQTTQHEVIAFTTAVGEHVGPSARWLHFGLTSSDVIDTAQALQMRDACDLILRGLQGLMAAVRGRAEEHRHTPMIGRTHGVHAEPMTFGLKLALWFAELGRDVERVRRARDTISVGKLSGAVGTFAHLPPSVEADVCASLGLVPAPVASQVIQRDRHAELLATLAITASTLEKLALEIRGLQKTEIGEVEEPFAKGQKGSSAMPHKRNPIACEQLVGLARLVRANAGAALENNALWHERDISHSSVERVILPDSFIALDHMLRRATRIVTGLEVYPGRMKANLERSRGVVFSGTVLLELARQGVSREEAYLWVQRNAMRSFDQALDFKTLLLEDADVMRVLTREHVERAFDLTQQLRHVDHVFDRVFDAASSVARRE

SEQ ID NO: 3117 - DNA, 1218 bp, uncultured Acidobacteria bacterium
  CDS (1)..(1218)
atggcggatgcggggatcgtgcccgcggaggccgcgcgcgagcttcgcgccagggccgccttcgacctcgcgcgcatcgaggcgatcgaacaaaccacgcagcacgacgtgatcgcgtttacgacggccgtggccgagcacgtcggcccggcagcgcgctggctccacttcggtctcacctcgtccgacgtcgtcgacacggcccaggccatccagatgcgggaggcctgcgatctgatcgtcaaagggatcgcgggcctgatggaggccgcgcggggccgcgccgaggagcaccggcgcaccccgatgatcgggcgtacgcacggcgtacacgcggagccgatgacgttcgggctgaagctcgcgctctggtacgcggagctgcagcgtgatctcgatcgcgtcctccgcgcacgagagaccatcgcggtgggcaagatctcgggcgccgtgggcaccttcgcgcatctcgatccggcgatcgaagcgagcgtctgcgaacggctgggcctgcagccggcgccggtgtcgtcccagattattcagcgcgaccggcacgccgagctgatgtgtgcgctggcgatcgttgcggcctcgctcgagaagttcgcgctggagatccgggggctgcagaagaccgaaatcggcgaggtcgaagagccgttcggcaaagggcagaagggctcgtcggcgatgccgcacaagcgcaacccggtcggctgcgagcagatcaccggactcgcgcggctcgttcgcgccaacgccgtggcggcgctcgagaacgtcgccctgtggcacgagcgcgacatctctcattcgtcggtcgagcgcgtcatcctgcccgacagcttcatcgcgctcgatcacatgctccggcgcttcacgcgcatcgtgcgcggtatggttgtgtacccggagcggatgcaggagaacctgaatcgctcgcgcggcgtcgtcttttcggggaccgtcctgctcgagctggcgcggcggggcctctcgcgcgaggaggcatacgagtgggtccagcgcaatgccatgcggtcgttccacgagcggcaggacttcaaagcgctgctgctcgccgatccggacctgatgaaggtgctcacgcccgccgaggtggagcgggcgttcgatctcgacgatcacctgcggaacgtcgacgtgattttcgaccgggtgtttcacgccgcgcccgtgatggtcacgtcctag

SEQ ID NO: 3118 - protein, 405 aa, uncultured Acidobacteria bacterium
MADAGIVPAEAARELRARAAFDLARIEAIEQTTQHDVIAFTTAVAEHVGPAARWLHFGLTSSDVVDTAQAIQMREACDLIVKGIAGLMEAARGRAEEHRRTPMIGRTHGVHAEPMTFGLKLALWYAELQRDLDRVLRARETIAVGKISGAVGTFAHLDPAIEASVCERLGLQPAPVSSQIIQRDRHAELMCALAIVAASLEKFALEIRGLQKTEIGEVEEPFGKGQKGSSAMPHKRNPVGCEQITGLARLVRANAVAALENVALWHERDISHSSVERVILPDSFIALDHMLRRFTRIVRGMVVYPERMQENLNRSRGVVFSGTVLLELARRGLSREEAYEWVQRNAMRSFHERQDFKALLLADPDLMKVLTPAEVERAFDLDDHLRNVDVIFDRVFHAAPVMVTS

SEQ ID NO: 3119 - DNA, 1377 bp, Nitrosomonas europaea
  CDS (1)..(1377)
atggaaatctcgacacttcttgcactttctccgctggatgggcggtatcagcagaaggtggcagccttgcgaccctttttcagtgaatatgcattgattcgcaaccggattcatgtggaaattgaatggttcaaggcattgggcaatactccggccttgacaggggcgtcctctttatctaccggcgctgtcgtgcaactggatcagctcgtggagaatttttccgtaacggatgcagaagccgtcaaatcgatcgagacgcgaaccaatcatgacgtgaaggctgtggaatactggttgaaggaaaaactgaccggagatcaggagacggcggcaatttctgaattcgtgcattttgcctgtacatccgaggatatcaataatctttcacatggcctgatgctcaaacacagtcgggaccaggtcatgctccccgcgctcgatgaagtcatcaaaaggcttgctgtcctggccagagatctggcggatctcccgatgcttgctcgtacccatgggcaggcagccacccccacgaccatgggtaaggaaatggccaattttgtttatcggttacgcggggcgcgcgagcggcttgcagccgtggtcattaccggaaaaatcaatggagcagtgggtaactacaatgcgcacatgattgcttttcctgatttcgactgggaatcttttgcgcgatctttcgtcgagaagctcggcctgagtttcaatccatataccacccagatcgaaccgcatgacaccatggcagagctgttcgatgcccatgtccgtatcaatacgattcttctcgacctgaaccgcgatatctggggctatgtttcgctcggttacttcaggcagaaaaccagagctgatgaagtcggttcttccaccatgccacataaagtgaatccaatcgattttgaaaattcggaagggaatctcggtattgccaatgcgctgctcaaacatttgagtgaaaaacttcctgtctcacgctggcagcgcgatctcaccgattcgaccgtgttgcgcaatatgggtgtggcgcttggtcatactctgctggcttatgattcatgtctcaaagggctcggaaagctgcaggcggatccggcacgtctgtcggaggatttgcagaatgcctgggaagtcctggccgaaccgattcagacagtaatgcgccgttatggggtagccaatccctacgaacagctcaaggcattgacgcgcggaaaaacaggaatcgaccgtacgacacttcaacaattcatcgagcaactcgatattcctgctgccgagagagatcgcctgctgcaacttacaccctggggttatatcggcctggcagcgcacctggcaagggatatcggagactga

SEQ ID NO: 3120 - protein, 458 aa, Nitrosomonas europaea
MEISTLLALSPLDGRYQQKVAALRPFFSEYALIRNRIHVEIEWFKALGNTPALTGASSLSTGAVVQLDQLVENFSVTDAEAVKSIETRTNHDVKAVEYWLKEKLTGDQETAAISEFVHFACTSEDINNLSHGLMLKHSRDQVMLPALDEVIKRLAVLARDLADLPMLARTHGQAATPTTMGKEMANFVYRLRGARERLAAVVITGKINGAVGNYNAHMIAFPDFDWESFARSFVEKLGLSFNPYTTQIEPHDTMAELFDAHVRINTILLDLNRDIWGYVSLGYFRQKTRADEVGSSTMPHKVNPIDFENSEGNLGIANALLKHLSEKLPVSRWQRDLTDSTVLRNMGVALGHTLLAYDSCLKGLGKLQADPARLSEDLQNAWEVLAEPIQTVMRRYGVANPYEQLKALTRGKTGIDRTTLQQFIEQLDIPAAERDRLLQLTPWGYIGLAAHLARDIGD

SEQ ID NO: 3121 - DNA, 1440 bp, Streptomyces avermitilis
  CDS (1)..(1440)
atgactgcgcctgccaagccccgtatccccaacgtcctcgccggacgctacgcctccgccgagctcgccacgctatggtcccccgagcagaaggtgaagctggagcgacagctctggctcgccgtactgcgggcccagaaggacctggggatcgaggtgccggacgcggcgatcgccgactacgagcgcgtcctcgaccaggtcgacctcgcctcgatcgcggagcgcgagaaggtcacccggcatgacgtcaaggcgcggatcgaggagttcaacgacctcgccgggcacgagcacgtgcacaagggcatgacgtcccgtgacctcaccgagaacgtggagcagctgcagatccggctctcgctggagctgatgcgcgaccgcacggtgtccgtcctcgcccggctcggcaagctctcgggcgagtacgccgagctggtcatggccggccggtcgcacaatgtcgccgcgcaggccaccaccctcggcaagcgtttcgcgaccgctgccgacgagctgctcgtcgcgtacggccgcgtcgaggagctcctcggccgctacccgctgcgcggcatcaagggcccggtcggcaccgctcaggacatgctcgacctgctcggcggcgacgcggccaagctcgcggagctggagcagcggatcgcccgccacctgggcttctcccaggcgttcacctcggtcggccaggtctacccgcgctcgctcgactacgaggtcgtgaccgcgctggtgcagctggccgcggcgccttcgtcgctggcgaagacgatccggctgatggccgggcacgagctggtgaccgagggcttcaagccgggccaggtcggttcctccgcgatgccgcacaagatgaacacccgctcctgcgagcgcgtcaacggcctcatggtcatcctgcgcggctacgcctcgatgacgggcgagctggcgggcgaccagtggaacgagggcgacgtgtcctgctcggtggtgcgccgggtcgcgctgcccgacgcgttcttcgcgctcgacggtctgctggagacgttcttgacggtgctcgacgagttcggcgcgttcccggcggtcgtcgcccgtgagctggaccgctacctgccgttcctcgcgaccaccaaggtgctgatgggcgcggtgcgtgcgggtgtcggccgtgaggtcgcgcacgaggccatcaaggagaacgccgtggcctccgccctcgccatgcgcgagcagggcgccgagcgcaacgagctgctggacaagctcgccgccgacgggcgcatcccgctggaccgtgcccagctcgacgagctgatggcggacaagctgtccttcacgggcgccgccgccgaccaggtcgccgtggtcgtcggccgcatcgaggagatcgtgaagcagcaccccgaggcggcggcctacaccccgggggcgatcctctga

SEQ ID NO: 3122 - protein, 479 aa, Streptomyces avermitilis
MTAPAKPRIPNVLAGRYASAELATLWSPEQKVKLERQLWLAVLRAQKDLGIEVPDAAIADYERVLDQVDLASIAEREKVTRHDVKARIEEFNDLAGHEHVHKGMTSRDLTENVEQLQIRLSLELMRDRTVSVLARLGKLSGEYAELVMAGRSHNVAAQATTLGKRFATAADELLVAYGRVEELLGRYPLRGIKGPVGTAQDMLDLLGGDAAKLAELEQRIARHLGFSQAFTSVGQVYPRSLDYEVVTALVQLAAAPSSLAKTIRLMAGHELVTEGFKPGQVGSSAMPHKMNTRSCERVNGLMVILRGYASMTGELAGDQWNEGDVSCSVVRRVALPDAFFALDGLLETFLTVLDEFGAFPAVVARELDRYLPFLATTKVLMGAVRAGVGREVAHEAIKENAVASALAMREQGAERNELLDKLAADGRIPLDRAQLDELMADKLSFTGAAADQVAVVVGRIEEIVKQHPEAAAYTPGAIL

SEQ ID NO: 3123 - DNA, 1296 bp, Enterococcus faecalis
  CDS (1)..(1296)
atgattgatcgttatacaagacccgaaatgggcgcaatttggacagataagaaccgctacaaggcatggctagaagttgaaattttggcggatgaagcttgggcagaacttggcgaaattcctaaagaagatgtacaaaaaatccgagaaaatgcatcatttgatgttgcacgtattttagaaattgaagcagaaacacgtcatgatgttgtcgcttttactcgtgcggtttcagaaacgcttggtgaagagcgaaaatgggtacactatgggttaaccagcacagatgttgtggatactgcctatggttatctattgaaacaggcgaatgatattttacggaaagatttacaaacatttacggagattgtcggagccaaagccaaagagtataaacatacggtcatgatgggaagaacgcatggcgttcatgcagaaccgactacatttggtttgaaattagcgttgtggtattctgaaatgaaacgcaacattgaacgttttgaacatgcagccaaaggtgtcgaagcgggtaaaatcagtggagccgtaggtacctttgccaatatttcaccatttgttgaagaatatgtttgcgaacatttggggatccgtgctcaagagatttcgacacaagttttaccacgtgatttacatgcagaatatgtttctgccatggcattaattgcgacaagtattgaaaaatttgcaacagaaattcgtggtctacaaaaatcagaaacacgtgaagtagaagaattttttgcaaaaggacaaaaaggatcttcggcaatgccgcataaacggaatccaattggttctgaaaatatgactggtttggcacgtgtgattcgtggtcatgtcattactgcctttgaaaatgtgagtttatggcatgaacgagatatttctcactcgtctgctgaacggattattattccagatacgacgattttactaaattacatgttgaatcgttttggtaatattgtcaaaaacttaacggtcttcccagaaaatatgaaacgtaacatggatgcgacctatggtctaatttacagccaacgtgtcttgttaaaattgattgatcatggcatgacacgtgaagaagcgtatgatctggtccaaccaaaaacagcttacgcatgggatcatcaaacggcgttccgtccgttgctagatgcggatgaaaaaattacatctgtcttatcaaaagaagagctagatgatgcctttgattaccattatcatttaaaaaatgttgacacgatttttgaacgtgttggtttagggtag

SEQ ID NO: 3124 - protein, 431 aa, Enterococcus faecalis
MIDRYTRPEMGAIWTDKNRYKAWLEVEILADEAWAELGEIPKEDVQKIRENASFDVARILEIEAETRHDVVAFTRAVSETLGEERKWVHYGLTSTDVVDTAYGYLLKQANDILRKDLQTFTEIVGAKAKEYKHTVMMGRTHGVHAEPTTFGLKLALWYSEMKRNIERFEHAAKGVEAGKISGAVGTFANISPFVEEYVCEHLGIRAQEISTQVLPRDLHAEYVSAMALIATSIEKFATEIRGLQKSETREVEEFFAKGQKGSSAMPHKRNPIGSENMTGLARVIRGHVITAFENVSLWHERDISHSSAERIIIPDTTILLNYMLNRFGNIVKNLTVFPENMKRNMDATYGLIYSQRVLLKLIDHGMTREEAYDLVQPKTAYAWDHQTAFRPLLDADEKITSVLSKEELDDAFDYHYHLKNVDTIFERVGLG

SEQ ID NO: 3125 - DNA, 1386 bp, Coxiella burnetii
  CDS (1)..(1386)
atgaaactatcgccactaactgcattatcgccgctcgacggtcgctatcaaaacaaggtagaagcgttgcgccccattctcagcgaatatggcctaattcgctatcgggtgatagtcgagatcaaatggctgctttttttatcacaagaaaaaacgctaaccgagatcccttctttaaatgactcggatattaaaaagttagaagagattattgatcactttgatttacaagccgccgaggcggtcaaaacaattgaagcaaccaccaaccacgacgttaaagccgtcgaatattatttacaacgtcaattggaaaaagaaaaaaacctcgcgcctctcatcggttttattcatttcggatgtacttctgaagatattaataatctttcctattcgcttatgattaacgaagcccgtgaaatcgcgcttattcccatcataaaaaatatcggaatgcgatttcaaacgttagcggaaaaatatgctgaacttcctttattaagtcgcactcacggccaaccagcaacgccaacaaccctaggaaaagaattagcaaatattgttgcacgtattcatgctcaatatcatagtctcgcccaccttaaattattaggcaaaatgaacggtgccgtcggcaattttaatgcgcaccaagcagcgtatccaacttttgattggccgacgttcaacaaacgttttattcaatcgctcgggctagaagccaacgaatacacaacgcaaatcgaacctcatgatcgacttagtgaatttttacaatcgctggtccgtttaaatacgatccttatcgattgctgccgggatatttggagttatattagtctcggttatttttttcaaaaatcgaaaaaaaatgaagtgggttcttctaccatgccgcacaaagtaaacccgatcgatttcgaaaatgcggaagggaatttaggacttgctaacgccttagcgaatcacctcatcaacaaactacccatttctcgatggcaacgcgatttaaccgattccaccgtaatgcgaaacttaggttgtatattcggttatgcgcttatcgcttatgaatcacttctcaaagggttagataaaataagtgcgaacgaacaacgcattcgggaggatctcgaagcacattcggaagtgctagcagaagctttacaaacagtaatgcgtcgatacggcgtccccagggcttatgaacaactgaaagagctgacccgggataaaacgattgataaaaatcggctaaccaagtttatcgaacaattatcgcttcccaccgaagctaaaaaccatttaaaatcactgacccccagcaattacactggttttgcagcagaattagcaaaaaaaattagtacttttaaatgggattaa

SEQ ID NO: 3126 - protein, 461 aa, Coxiella burnetii
MKLSPLTALSPLDGRYQNKVEALRPILSEYGLIRYRVIVEIKWLLFLSQEKTLTEIPSLNDSDIKKLEEIIDHFDLQAAEAVKTIEATTNHDVKAVEYYLQRQLEKEKNLAPLIGFIHFGCTSEDINNLSYSLMINEAREIALIPIIKNIGMRFQTLAEKYAELPLLSRTHGQPATPTTLGKELANIVARIHAQYHSLAHLKLLGKMNGAVGNFNAHQAAYPTFDWPTFNKRFIQSLGLEANEYTTQIEPHDRLSEFLQSLVRLNTILIDCCRDIWSYISLGYFFQKSKKNEVGSSTMPHKVNPIDFENAEGNLGLANALANHLINKLPISRWQRDLTDSTVMRNLGCIFGYALIAYESLLKGLDKISANEQRIREDLEAHSEVLAEALQTVMRRYGVPRAYEQLKELTRDKTIDKNRLTKFIEQLSLPTEAKNHLKSLTPSNYTGFAAELAKKISTFKWD

SEQ ID NO: 3127 - DNA, 1446 bp, Tropheryma whipplei
  CDS (1)..(1446)
atgtcagaggatgaatatgattcactgtctcccttagatggcaggtatggcccagctgtgcgagcattgcgcggttttctgtctgagagtgcgcttattcgcgagcgtattagggttgaaatcggctgggtattttttttgtggaggaaagcggtttttggacttgcagaacccacaaaggaagatgagaggtttctttcatcgatagtgcatgatgcgcataaaaacataccgcgggtcaagaagattgaagagcggatacagcacgatgtgaaagccgtcgagatcttcctgcgagagagatttacgcagcagggtctgggcaatatagtcgagctactacatttcgcgtgcacaagtgaagacataaacaacctggcgtacgcactgaacatgaaggcagctctctcagaagtcatcctgccctcgattgatgaacttataggacacctagaaaagatgtctcagaaatatgcgggagatgcaatgctcgcgcgcacacacggacaacccgcaacaccaacaactcttggaaaggagctattggtgtttgtctaccgcctgaaaaggcaacggaaaaatctagaagatgtgcaatttcttgggaaattctctggtgcgaccgggacattttcagctcattgcgtagccgccccaaattacccgtggcaagagtgggcaaaagaatttgtgaacagttttggcctcatttataaccccattaccactcaaattgagccacatgactggcaatgcgagctgcttgagagagtggggcatatctgtcgaatcctccacaatctggcaaccgatatgtggagctatatctcattcggatattttcagcaaggctttatatcagaatctgttggctcctcaactatgccacacaaggtcaatcccatccgctttgaaaatgccgaggcaaatctggaaatggcttgcggaataatctcatgcattgttgcaagtctgtctacaagcaggcttcagcgggacttgagcgactccagtgtccagagaaatataggtgtcgccctggggcattcacttgtagcgatcgataacttgaaaagaggtcttgctggtattcgcctgaataaaaatcgcctaactgaagacctcaataacaactgggaagtaattgcggaggcggtacaaacaaccatccgcgccgaaatactggcatgtaaaagcaatgaggctaacccttatgaaaggctcaaagatttcacacgaaacaagaaaattacgaaacacactctcgatgaatttataactaacttggacctaagcgagcatgcaaaaaaacgacttttagaattaacaccaagcaaatatactggcttggcagagcgcatggtgcaggcacatagctcaggcactgggggcaccaaaaatagcattggcactgggggcaccaaaaatagctcaggtgctgggtga

SEQ ID NO: 3128 - protein, 481 aa, Tropheryma whipplei
MSEDEYDSLSPLDGRYGPAVRALRGFLSESALIRERIRVEIGWVFFLWRKAVFGLAEPTKEDERFLSSIVHDAHKNIPRVKKIEERIQHDVKAVEIFLRERFTQQGLGNIVELLHFACTSEDINNLAYALNMKAALSEVILPSIDELIGHLEKMSQKYAGDAMLARTHGQPATPTTLGKELLVFVYRLKRQRKNLEDVQFLGKFSGATGTFSAHCVAAPNYPWQEWAKEFVNSFGLIYNPITTQIEPHDWQCELLERVGHICRILHNLATDMWSYISFGYFQQGFISESVGSSTMPHKVNPIRFENAEANLEMACGIISCIVASLSTSRLQRDLSDSSVQRNIGVALGHSLVAIDNLKRGLAGIRLNKNRLTEDLNNNWEVIAEAVQTTIRAEILACKSNEANPYERLKDFTRNKKITKHTLDEFITNLDLSEHAKKRLLELTPSKYTGLAERMVQAHSSGTGGTKNSIGTGGTKNSSGAG

SEQ ID NO: 3129 - DNA, 1368 bp, Xylella fastidiosa
  CDS (1)..(1368)
atgtcacatttacccctacttgctttgtcgccactggatgggcgctatttgtctaaagtcgatacattgcggccaattttttcagaatacggcttgatcaaatccagggtgaaagtcgagattgcatggttactggcgttggccgcagaaccaaacattgtcgagttggcgccgttctccgttgccgcgcaaacacgtctgcgtgtgttagcagacggtttgaccattgagcacgccgcacgtgtgaaagagattgagcacaccaccaatcacgacgtaaaagcagtggaatatttcatcaaagagcagcttaaggacgatatagagctgcgccgcggactggagtttgtccatttcgcttgcaccagcgaggacatcaacaacctgtcctatagcttgatgttgcaacaagccagagatgacgtactgctcccgacactggacggtatcgctacacatctgcgcaccttggcccatgctcaggccgcacaaccgatgctctcacgcacccacgggcaaaccgcctcccctaccacgctgggcaaggaaatcgccaatgtggtagcccgtttggaacgccagcgccatcagatcgccacgattgcactgagcggaaagatcaacggtgctgtaggcaattacaacgcacataccatcagctatccggaggtcaattggcctgcattggcacaacgttttgttgagagcctgggcttggtcttcaacccatacaccacacaaattgagccgcacgacaccatcgccgagatcagcgacgcaatccgccgcgccaacaccattctgatcgacttggcacgcgatctttggggctatatctcgttgggttacttcaaacaaaagctcaaggaaggtgaaatcggctcctcaaccatgccgcataaagtcaatccgattgacttcgaaaatgctgaaggcaatttcggcgtggccaacgcattatttgagcatttttcgaccaagctgccgatcagtcgctggcaacgtgacctcaccgattccaccgtactacgcgcactcggcaccgcgtttggccatactcaggtggctttagattctttaaacaaagggctacacaagctcagcccaaatccagaacgcattgacgctgacctggacgcggcatgggaagtgctggccgaagcagtacagacaatcatgcgccgccacaatctacccaacccctacgagcaactgaaagcgctgacccgtggtcagggcatcaccgccgattcgatgcgcgctttcatcgaaaccctggatctaccaactgaagccaaacagcggctgcacgatttaactccaagggcttataccggtctggcgaagcagttggcactgaacatctaa

SEQ ID NO: 3130 - protein, 455 aa, Xylella fastidiosa
MSHLPLLALSPLDGRYLSKVDTLRPIFSEYGLIKSRVKVEIAWLLALAAEPNIVELAPFSVAAQTRLRVLADGLTIEHAARVKEIEHTTNHDVKAVEYFIKEQLKDDIELRRGLEFVHFACTSEDINNLSYSLMLQQARDDVLLPTLDGIATHLRTLAHAQAAQPMLSRTHGQTASPTTLGKEIANVVARLERQRHQIATIALSGKINGAVGNYNAHTISYPEVNWPALAQRFVESLGLVFNPYTTQIEPHDTIAEISDAIRRANTILIDLARDLWGYISLGYFKQKLKEGEIGSSTMPHKVNPIDFENAEGNFGVANALFEHFSTKLPISRWQRDLTDSTVLRALGTAFGHTQVALDSLNKGLHKLSPNPERIDADLDAAWEVLAEAVQTIMRRHNLPNPYEQLKALTRGQGITADSMRAFIETLDLPTEAKQRLHDLTPRAYTGLAKQLALNI

SEQ ID NO: 3131 - DNA, 1371 bp, Vibrio parahaemolyticus
  CDS (1)..(1371)
atggaactgtcagcattgactgctgtttcaccagtagacggccgctacggaagcaagacaattgcgttacgcgaaatcttcagtgaatacggtcttttaaaataccgtactatcgttgaaatccgctggctacaaaagcttgctgctactgctgaaattgcagaagtgccagcgtttagcgcagaagcaaaccaattcctagacgaccttgctgcaaacttctctgaagcagacgcactacgtatcaaagagatcgagcgcacaactaaccacgacgtaaaagcggttgagtacttcctaaaagagaaagtcgcagacgttcctgaactgcacgcagtaaacgagttcttccactttgcatgtacttctgaagacatcaacaacacatcacacgctctaatgctaaaagaagcgcgtgaaaccgttattcttccagaaatccgcaaccttattgacgctatcaaagcacttgctgttgagtaccgcgacatccctcttctatctcgtacacacggtcagccagcttctccatcaacaatgggtaaagaaatggcaaacgtggcgtaccgtatggagcgtcaatacaagcaaatcgaaaacgttgaaatcctagcgaaaatcaacggcgcggtaggtaactacaacgcgcacctatctgcttacccggaactagattggcacaagttctctgaagaattcatcactgaatctctaggcgtaacttggaacccttacacaacacaaatcgaaccacacgattacatcgctgagctattcgatgctgtggcacgtttcaacactattctgatcgatttcgaccgtgacgtttggggttacattgcactaggccacttcaagcaaaaaaccattgctggcgagatcggttcttcgacaatgccacacaaagttaacccaatcgactttgaaaactctgaaggtaacctaggtcttgcgaacgccgtgttcggtcacctagcacagaaactgcctatctctcgttggcaacgtgacctaactgactcaacggttctacgtaacctaggtgttggtgttggctacgcaatcatcgcctacacttctacgctaaaaggcatcagcaaactggaagtgaaccgtgacgcgcttcttgctgaactagacaaaaactgggaagttctagcagagccagtacaaacggtaatgcgtcgctacggtatcgagaagccatacgagaagttgaaagagttaactcgcggtaagcgcgtagacggtgaagcaatgcgtaacttcattgacggccttgagcttcctgaacacgaaaaagcacgtctaaaagagatgacgccagcgaactatatcggtcaagcaatcgagctaactgacaagctgtaa

SEQ ID NO: 3132 - protein, 456 aa, Vibrio parahaemolyticus
MELSALTAVSPVDGRYGSKTIALREIFSEYGLLKYRTIVEIRWLQKLAATAEIAEVPAFSAEANQFLDDLAANFSEADALRIKEIERTTNHDVKAVEYFLKEKVADVPELHAVNEFFHFACTSEDINNTSHALMLKEARETVILPEIRNLIDAIKALAVEYRDIPLLSRTHGQPASPSTMGKEMANVAYRMERQYKQIENVEILAKINGAVGNYNAHLSAYPELDWHKFSEEFITESLGVTWNPYTTQIEPHDYIAELFDAVARFNTILIDFDRDVWGYIALGHFKQKTIAGEIGSSTMPHKVNPIDFENSEGNLGLANAVFGHLAQKLPISRWQRDLTDSTVLRNLGVGVGYAIIAYTSTLKGISKLEVNRDALLAELDKNWEVLAEPVQTVMRRYGIEKPYEKLKELTRGKRVDGEAMRNFIDGLELPEHEKARLKEMTPANYIGQAIELTDKL

SEQ ID NO: 3133 - DNA, 1419 bp, Pseudomonas syringae
  CDS (49)..(1419)
atgtatgatgtgcgcccttttcgttgccagactgtccgagagcatcccatgcagctttcttcgctcactgcggtttcccctgttgacggccgctacgccggcaaaacccaagccttgcgccctattttcagcgaatacggcctgatccgtttccgcgtgatggttgaagtccgctggctccagcgcctggcggctcacccacagatcaccgaagttccggccttctccgcgcaagccaatgccattctcaatactctggctgaagacttttcggtggagcacgccgagcgcgtcaaggaaatcgagcgcaccaccaaccacgacgtcaaggccgtggaatacctgctcaaggaacaggctgccaagctgccggaactggagaacgtcagcgagttcattcactttgcctgcaccagcgaggacatcaacaacctgtcccatgctctgatgctacgcgaaggccgcgacaccgtgatgctgccgctgatgcgccagattgccgacgctatccgcgaactggcaatccgcttcgccgacgtgccgatgctttcgcgcacccacggccagccagcctccccaaccacgctgggcaaggaactggccaacgtggtttaccgcctggaacgccagatcacccagatcgccgcagtgcctttgctgggcaagatcaacggcgcggtcggcaactacaacgcccacctttctgcctatgccgatatcgactgggaagccaatgcacgcgccttcatcgaagacgaactgggcctgggcttcaacccctacaccacgcagattgagccgcacgactacattgccgagctgttcgacgccgttgcgcgcttcaataccatcctgatcgacttcgaccgcgatatctggggttacatctccctgggctatttcaagcagcgcaccatcgctggcgaaatcggttcgtcgaccatgccgcacaaggtcaacccgatcgacttcgaaaactccgaaggcaacctgggtatcgccaatgcgctgttccagcacctggcgagcaagctgcctgtctcccgctggcagcgcgacctgaccgactccaccgtgttgcgtaatctgggcgttggttttgcacacagcgtgattgcctacgaagccagcctcaaaggcatcagcaagctggaattgaacgagcaacgcattgctgccgatctggacgcctgctgggaagtcctggccgaaccgatccagaccgtaatgcgtcgttacaacatcgaaaacccgtatgaaaaattgaaagaactgacacgcggcaagggcatcggccctgaagcactgcaaactttcattgacggtctggatatgcctgcccaagcaaaggcagagctgaagaagctcacgccagccaattacatcggcaatgcggcagcccaggccaagcgcatctag

SEQ ID NO: 3134 - protein, 456 aa, Pseudomonas syringae
MQLSSLTAVSPVDGRYAGKTQALRPIFSEYGLIRFRVMVEVRWLQRLAAHPQITEVPAFSAQANAILNTLAEDFSVEHAERVKEIERTTNHDVKAVEYLLKEQAAKLPELENVSEFIHFACTSEDINNLSHALMLREGRDTVMLPLMRQIADAIRELAIRFADVPMLSRTHGQPASPTTLGKELANVVYRLERQITQIAAVPLLGKINGAVGNYNAHLSAYADIDWEANARAFIEDELGLGFNPYTTQIEPHDYIAELFDAVARFNTILIDFDRDIWGYISLGYFKQRTIAGEIGSSTMPHKVNPIDFENSEGNLGIANALFQHLASKLPVSRWQRDLTDSTVLRNLGVGFAHSVIAYEASLKGISKLELNEQRIAADLDACWEVLAEPIQTVMRRYNIENPYEKLKELTRGKGIGPEALQTFIDGLDMPAQAKAELKKLTPANYIGNAAAQAKRI

SEQ ID NO: 3135 - DNA, 1362 bp, Pseudomonas syringae
  CDS (1)..(1362)
atgaacagaccgagcaatcaactgtttgatgcctatttcacgcagtccgatatgcgcgacattttctcggacgaaggccgggtgcagggcatgctcgatttcgaggctgcgctggctcgggcgcaggcgcgagtcggcctgatcccgcaacaggtcgtggctgatatcgagcagagctgccgcgccgagctgttcgatttcgacgaactggccattgccataggcagcgccggcaattcggcgatcccgttggtcaaggcgctcggcaggcagattgctgcgcgcaacccgcaagccgagcgttacgtgcacatgggcgcgaccagtcaggacgtgatggacagcgggctggtgctgcaaatacgccgggcgatcgtcttgctggagcgtgaccttgcgcaactggccaaggcactggctgaacaggcgcagcgccatgctgctacgccgctggccgggcgcacctggttgcagcaggccacgccggtcacgctggggatgaaaatcgccggttggctgggcgccatcactcgccatcgccagcgcctgaacgagatcaaaccgcgcctgctgtgcctgcaattcggcggcgcgtccggcagccttgcggcgctgggcgaccgggccttcccggtggcgcaagcactggcgggtgaattacagctggaactgcccgagcagccctggcacacccagcgtgatcgtctggtggagtttgccagcgtcctgggcctgatcgccggcagcctcggcaagcttgggcgtgacgtcagcctgttgatgcagaccgaagtgggcgaggtattcgagccttccgcaccgggcaaaggtggctcttcgaccatgccgcacaagcgcaacccggtgggtgcagcggtgatgatcggcgcagccactcgggcaccggggctggttgcgacgatgctgtcggccatgccacaggagcacgagcgcagcctgggcctgtggcacgccgagtgggaaaccctgcctgagctgtgctgcctggtgtccggttcgctgcaacaggcattgcaggtgatacccggtctgcaagtagacgccgagcgcatgcgggtcaatctggaatctacccaaggcctggtgctggccgaagctgtgagtattgcgctggcccagcgtatcggccgtgacgcggcccatcatctgatcgaacaatgctgtcggcgtgcggtggagcagggcgcgcatctgcgtcaggtgctcggcgacaacccgcaggtcagcgagcaacttacttgcgccgagctggatcgcctgctcgatccggcccattaccttggccaggcccgcctgtgggtcgaacgtgccgtggctgaacacacaaggatttcccgatga

SEQ ID NO: 3136 - protein, 453 aa, Pseudomonas syringae
MNRPSNQLFDAYFTQSDMRDIFSDEGRVQGMLDFEAALARAQARVGLIPQQVVADIEQSCRAELFDFDELAIAIGSAGNSAIPLVKALGRQIAARNPQAERYVHMGATSQDVMDSGLVLQIRRAIVLLERDLAQLAKALAEQAQRHAATPLAGRTWLQQATPVTLGMKIAGWLGAITRHRQRLNEIKPRLLCLQFGGASGSLAALGDRAFPVAQALAGELQLELPEQPWHTQRDRLVEFASVLGLIAGSLGKLGRDVSLLMQTEVGEVFEPSAPGKGGSSTMPHKRNPVGAAVMIGAATRAPGLVATMLSAMPQEHERSLGLWHAEWETLPELCCLVSGSLQQALQVIPGLQVDAERMRVNLESTQGLVLAEAVSIALAQRIGRDAAHHLIEQCCRRAVEQGAHLRQVLGDNPQVSEQLTCAELDRLLDPAHYLGQARLWVERAVAEHTRISR

SEQ ID NO: 3137 - DNA, 1371 bp, Pseudomonas putida
  CDS (1)..(1371)
atgcagctttcttcgctcactgcggtttcccctgtagacggccgttatgccggcaaaacccaggccttgcgccccattttcagcgaattcggcctgatccgtttccgcgccctggtcgaagtgcgctggctgcagcgcctggccgcccacccgcaaatcggcgaagtgccggcgttctccgccgaagccaacgccctgctggacagcctggccaccgatttcaagctggagcacgccgagcgcgtcaaggaaatcgagcgcaccaccaaccacgacgtcaaggccattgaatacctcctcaaggagcaggccgccaagctgcctgagctggccaaggtcagcgagttcatccacttcgcctgcaccagcgaggacatcaacaacctgtcccacgccctgatgctgcgcgccggccgtgacgaagtgctgctgccgctgatgcgccaggtcgccgacgccatccgcgccctggcccacgcccacgccgaagtgccaatgctgtcgcgcacccacggccagccggcttcgccgaccaccctgggtaaagagctggccaacgtcgtgtaccgcctggagcgccagatcgcccaggttgccgccgtgccgctgctgggcaagatcaacggcgccgtgggcaactacaacgcccacctgtcggcctactcgcagatcgactgggaagagaacgcccgcgccttcatcgaagacgagctgggcctgcagttcaacccgtacaccacccagatcgagccgcacgactacatcgccgagctgttcgacgccatcgcccgcttcaacaccatcctgatcgacttcgaccgtgatgtgtggggctacatttcgctgggttacttcaagcagaagaccgtcgccggcgaaatcggttcgtcgaccatgccgcacaaggtcaacccgatcgacttcgaaaactccgaaggcaacctgggtatcgccaacgcgctgttccagcacctggccagcaagctgccgatctcgcgctggcagcgtgacctgaccgactccaccgtgctgcgcaacctgggcgtgggctttgcccacagcgtcatcgccttcgaggccagcctgaaaggcatcggcaagctggaagtcaacgaagctcgcatcgccgccgacctggacgcctgctgggaagtgctggccgagccgatccagaccgtgatgcgccgcttcaacatcgaaaacccctacgagaagctcaaagagctgacccgtggcaagggcatcaccccagaagcgctgctgaccttcatcgacggcctggacatgccagccgaagccaaggccgagctcaagcagctgacccccgctacctacatcggtaacgcggcagcccaggccaaacgcatctaa

SEQ ID NO: 3138 - protein, 456 aa, Pseudomonas putida
MQLSSLTAVSPVDGRYAGKTQALRPIFSEFGLIRFRALVEVRWLQRLAAHPQIGEVPAFSAEANALLDSLATDFKLEHAERVKEIERTTNHDVKAIEYLLKEQAAKLPELAKVSEFIHFACTSEDINNLSHALMLRAGRDEVLLPLMRQVADAIRALAHAHAEVPMLSRTHGQPASPTTLGKELANVVYRLERQIAQVAAVPLLGKINGAVGNYNAHLSAYSQIDWEENARAFIEDELGLQFNPYTTQIEPHDYIAELFDAIARFNTILIDFDRDVWGYISLGYFKQKTVAGEIGSSTMPHKVNPIDFENSEGNLGIANALFQHLASKLPISRWQRDLTDSTVLRNLGVGFAHSVIAFEASLKGIGKLEVNEARIAADLDACWEVLAEPIQTVMRRFNIENPYEKLKELTRGKGITPEALLTFIDGLDMPAEAKAELKQLTPATYIGNAAAQAKRI

SEQ ID NO: 3139 - DNA, 1353 bp, Pseudomonas putida
  CDS (1)..(1353)
atgagcaaccaactgttcgacgcctatttcaccgcgccggccatgcgcgagattttctccgaccgaggccgcctgcagggcatgctggatttcgaagccgcgcttgcccgagccgaagcctctgccggtttggtcccgcacagcgcggtagcggccatcgaggcggcatgccaggccgagcgctatgacgttggcgcgctggccaatgccatcgccaccgcgggcaactcggccattccgctggtgaaagcgttgggcaaggtgatcgccaccggcgtgccagaggctgagcgctatgtgcaccttggggccaccagccaggatgcgatggataccggtctggttctgcagctgcgcgatgccctcgatttgatcgaggccgacctcggcaagctggccgataccctgtcgcagcaggccttgaagcacgccgatacgcccttggtgggtcgtacctggttgcaacacgccaccccggtgaccctgggcatgaaactggccggtgtactgggtgctttgacccgccaccgtcagcgcctgcaggaactgcgcccgcgccttctggtcctgcagttcggcggtgcctcgggcagcctggcggcgctgggcagcaaggcgatgccggtggccgaagcgctggccgaacagctcaagctgaccctgcccgagcagccctggcacacccagcgcgaccgcctggtggagtttgcctcggtattgggcctggttgccggcagcctgggcaagttcggccgtgatatcagcttgctgatgcaaaccgaggcgggggaggtgtttgagccttctgcgccgggcaagggtggttcttcgaccatgccacacaagcgcaacccggtgggtgccgccgtgttgatcggtgccgcgacccgcgtgccgggcctgctgtcgacgctgttcgcagccatgcctcaggagcacgaacgcagcctgggcctatggcatgccgagtgggaaaccctgccggatatctgctgcctggtctctggcgccctgcgccaggctcaagtgattgccgagggcatggaggtggatgccgcgcgcatgcgccgtaacctcgacctgacccaaggcctggtgctggccgaagcggtgagcatcgtcctcgcccagcgtctgggtcgcgaccgtgcccaccacctgctggaacaatgctgccaacgcgcggtggccgaacagcggcacctgcgtgccgtgctgggtgacgagccgcaggtcagcgccgagctgtctggcgaagaactcgatcgcctgctcgaccctgcccattacctgggccaggcccgcgtctgggtggcgcgcgccgtgtccgaacatcaacgtttcactgcctag

SEQ ID NO: 3140 - protein, 450 aa, Pseudomonas putida
MSNQLFDAYFTAPAMREIFSDRGRLQGMLDFEAALARAEASAGLVPHSAVAAIEAACQAERYDVGALANAIATAGNSAIPLVKALGKVIATGVPEAERYVHLGATSQDAMDTGLVLQLRDALDLIEADLGKLADTLSQQALKHADTPLVGRTWLQHATPVTLGMKLAGVLGALTRHRQRLQELRPRLLVLQFGGASGSLAALGSKAMPVAEALAEQLKLTLPEQPWHTQRDRLVEFASVLGLVAGSLGKFGRDISLLMQTEAGEVFEPSAPGKGGSSTMPHKRNPVGAAVLIGAATRVPGLLSTLFAAMPQEHERSLGLWHAEWETLPDICCLVSGALRQAQVIAEGMEVDAARMRRNLDLTQGLVLAEAVSIVLAQRLGRDRAHHLLEQCCQRAVAEQRHLRAVLGDEPQVSAELSGEELDRLLDPAHYLGQARVWVARAVSEHQRFTA

SEQ ID NO: 3141 - DNA, 1299 bp, Lactobacillus plantarum
  CDS (1)..(1299)
atgattgatcgttatacgcgtcccgcgatgggcaaagtatggtcgttagaaaatcagtaccaagcatggttggaggtagagattgctgccgacgaggcctgggctgaattagggaagattccagcaagtgatgttgctaaaattcgagagaatgccaagtttgatgttgaccggatcgcggagattgaagccgtaacgcatcatgatgtggttgcttttacgcgcgatgtttccgagtcgttgggtgcagaacgtaagtgggttcactatgggctgaccagtactgacgttgtcgacacggcgcaaggttaccggttgaagcaggctaacgcgattattcgccaagacttacaagatttacgggcgacactagcacaacaagcgaaaaaatataaatatacggttgaaatggggcggacacacggcgtccacgctgaaccaaccacatttggattgaagattgcccggtggtattctgaaattaatcgggatatcgagcgttttgaacacgcggccgcaggcgttgaagcgggtaaaatcagtggggccgttgggacttttgcgaacattccaccatttgttgaagaatttgtctgcaaacaacttggattgcgcgcacaagaaatttcgacgcaagttttaccacgggacttacatgccgaatacattgctagtttggccttgattgcaacaagcgttgaagtgtttgcaaccgaaattcgtggtttgcaaaaatctgaaactcatgaagttgaagaattctttaataaaggtcagaaaggctcatcagcaatgcctcacaagcgtaatcccatcggttctgagaacgtgacggggttggcacgggttattcgcggccacatgatgaccgcctatgaagatgtgccgttgtggcatgaacgggatatttcccactcttctgcggagcggatcatcttaccagataccacgattttagtggattatatcttaactcgaatcaataagattattaggacgctgacggtgttcccagaacggatgaagcaaaacatggatgcgacttacgggttgatctacagtcaacgtgtcttgctcaagttgattgatacggggatgtctcgtgaaagtgcttatgacctcgttcaaccactgacggctaagtcatgggatgaacagttacaattcaagccacttgttgaaggtaacgccgagattcgtgaacatttggaccaggctgcgattgatgatgcgtttgactatcattaccatcttcgccacgttgatgatattttcaaacgattgggattagacgattaa

SEQ ID NO: 3142 - protein, 432 aa, Lactobacillus plantarum
MIDRYTRPAMGKVWSLENQYQAWLEVEIAADEAWAELGKIPASDVAKIRENAKFDVDRIAEIEAVTHHDVVAFTRDVSESLGAERKWVHYGLTSTDVVDTAQGYRLKQANAIIRQDLQDLRATLAQQAKKYKYTVEMGRTHGVHAEPTTFGLKIARWYSEINRDIERFEHAAAGVEAGKISGAVGTFANIPPFVEEFVCKQLGLRAQEISTQVLPRDLHAEYIASLALIATSVEVFATEIRGLQKSETHEVEEFFNKGQKGSSAMPHKRNPIGSENVTGLARVIRGHMMTAYEDVPLWHERDISHSSAERIILPDTTILVDYILTRINKIIRTLTVFPERMKQNMDATYGLIYSQRVLLKLIDTGMSRESAYDLVQPLTAKSWDEQLQFKPLVEGNAEIREHLDQAAIDDAFDYHYHLRHVDDIFKRLGLDD

SEQ ID NO: 3143 - DNA, 1362 bp, Bradyrhizobium japonicum
  CDS (1)..(1362)
atgcccgctctccacgcctcgaccaccgtgctcgactccatgctgttccgcgacgccttcggcacgcctgagatgcgcgaggtgttttccgatgtcgcgctggttgcgcgctatgccgaggtcgaggtggcgctggcgaaggcggaggccaaatgcggcgtgatcccgcaggatgccgccgaccagatcgcggcgcggaccgacgttgccgcgctcgatttcgacctgctcaggcaggagactgacatcgtcggctatccgatcctgcccttggtgcaccagatggtgaagcaatgcggcgatgccggccgttacgtgcattggggcgcgaccacgcaggacatcatggataccgccgtagtgctgcaattgcgtgccgcgctcgagatcgtcgagcgcgacatcgcggagctgcgaaagattctcgccgacctctccaggcgccatcgcgatacgccgatggcggggcgcactcatctccagcaggcgctgccggtgaccttcggctacaagaccgcgatttggctagcgatgttcgatcgccacgccgagcgtctggcgcaattgaagccgcgggtcctggtgggcgagttcgccggcgccgccggcacgctggcctcgctcggcgacaagggctttgaggtgcaggaggcgctgtgcgacgagctgaagctcggcgttcccgcctcgacctggcacgtcgcgcgcgacggctttgccgaggccgtgaacttcctcgcgctcgtcaccggctcgctcggcaagatcgcgctcgacatcatgatcatggcctcgaccgagttcgccgaggtctacgagcccttcgtcaagggccgtggcgcctcctcgaccatgccgcagaagcgcaacccgatctcctcggaactgatgctggcggcgtccaaggcggtgcgccagcacgcgggcctgatgctggatgcgatggtgcaggatttcgagcgcgccaccggcccctggcacgccgagtggatggcaatccccgaaagcttcgtgctggccgcgggggcgctgcaccaggcgaggttcgcgctcgcgggcctcatcgtcgacgaggcgaagatgaacgacaatctcgccatcagccggggcctgattgtggccgaagcggtcatgatggggctcgcgccccagatcgggcggcaggaggcgcatgacgtggtctatgacgcctgccggctcgccaacgagaaaggtttgacgctggcggacgcgctctcgtccgactcgcgcgtctctgccagaatcgaccgcgccacgatcgatgcgctcacttcaccgaaaaattacctcggccttgctcccgccatggtcgaccgggtgctgaaatcggcaacgcgttga

SEQ ID NO: 3144 - protein, 453 aa, Bradyrhizobium japonicum
MPALHASTTVLDSMLFRDAFGTPEMREVFSDVALVARYAEVEVALAKAEAKCGVIPQDAADQIAARTDVAALDFDLLRQETDIVGYPILPLVHQMVKQCGDAGRYVHWGATTQDIMDTAVVLQLRAALEIVERDIAELRKILADLSRRHRDTPMAGRTHLQQALPVTFGYKTAIWLAMFDRHAERLAQLKPRVLVGEFAGAAGTLASLGDKGFEVQEALCDELKLGVPASTWHVARDGFAEAVNFLALVTGSLGKIALDIMIMASTEFAEVYEPFVKGRGASSTMPQKRNPISSELMLAASKAVRQHAGLMLDAMVQDFERATGPWHAEWMAIPESFVLAAGALHQARFALAGLIVDEAKMNDNLAISRGLIVAEAVMMGLAPQIGRQEAHDVVYDACRLANEKGLTLADALSSDSRVSARIDRATIDALTSPKNYLGLAPAMVDRVLKSATR

SEQ ID NO: 3145 - DNA, 1308 bp, Bradyrhizobium japonicum
  CDS (1)..(1308)
atgatcccccgctatacccgtccggaaatggcctcgatctgggagccgcagacccggttcaagatctggttcgagatcgaggcgcatgcggcggacgccctggccgagctcggcaccatccccaaggaggccgccaggacggtctgggcgaaggccaagaacgccaccttcgacgtcgcccgcatcgacgagatcgagcgcgaaaccaagcacgacgtcatcgccttcctcacccacctcgccgagatcgtcggccccgaggcgcgcttcgtgcaccagggcatgacctcttccgacgtgctcgacacctgcctcaacgtccagctcacccgcgccgccgacctgctgctcgccgatctcgacaaggtgctggcggcgctgaagaagcgcgccttcgagcacaagatgacgacgaccatcggccgcagccatggcatccacgccgagcccgtgaccttcggcctcaagctcgcctatgcctacgccgaattctcgcgcgccaaggaacgcctgatcgcggcgcggaaggaggtcgcgacctgcgctatctccggtgccgtcggcaccttcgcgcagatcgatccgcgggtcgaagagcacgttgcaaaagccatgggtctcgtgcccgagccgatctcgacccaggtgatcccgcgcgaccgccacgcgatgtatttctcgacccttggcgtgatcgcctcctcggtcgagcgcatcgcggtcgagatccgccacatgcagcgcaccgaggtgctggaggccgaagagttcttctccgagggacagaagggctcttccgccatgccgcacaagcgcaacccggtgctgtccgaaaacctcaccggcctctcccgcatggtgcgcgcctatgtgacgccggccttggaaaacgtcgtgctctggcacgagcgcgacatctcgcactcctccgccgagcgcatgatgggtccggacgcgaccgtgacgctcgacttcgcgctggtgcgccttgccggcctgatcgacaagctgctggtctatcccgccaacatgcagaagaatctcgaccgcctcggcggcctcgtgcattcgcagcgcgtgctcctggcgctgacgcagaagggcgcgagccgcgaggacgcctacaagctggtgcagcgcaacgccatgccggtctggcgcggcgaaggcgacttcctccagctcctgaagcaggacgccgaggtgaagaaatatctcaccgacgccgagatcgaggagcagttcgacctcgcctatcacctcaagcacgtcgacacgatcttcaagcgcgtgttcggcgagagctga

SEQ ID NO: 3146 - protein, 435 aa, Bradyrhizobium japonicum
MIPRYTRPEMASIWEPQTRFKIWFEIEAHAADALAELGTIPKEAARTVWAKAKNATFDVARIDEIERETKHDVIAFLTHLAEIVGPEARFVHQGMTSSDVLDTCLNVQLTRAADLLLADLDKVLAALKKRAFEHKMTTTIGRSHGIHAEPVTFGLKLAYAYAEFSRAKERLIAARKEVATCAISGAVGTFAQIDPRVEEHVAKAMGLVPEPISTQVIPRDRHAMYFSTLGVIASSVERIAVEIRHMQRTEVLEAEEFFSEGQKGSSAMPHKRNPVLSENLTGLSRMVRAYVTPALENVVLWHERDISHSSAERMMGPDATVTLDFALVRLAGLIDKLLVYPANMQKNLDRLGGLVHSQRVLLALTQKGASREDAYKLVQRNAMPVWRGEGDFLQLLKQDAEVKKYLTDAEIEEQFDLAYHLKHVDTIFKRVFGES

SEQ ID NO: 3147 - DNA, 1347 bp, Bacteroides thetaiotaomicron
  CDS (1)..(1347)
atggaacttgatgtattaacggccatatctccgattgatggtcgatatagaggcaaaactaaagctttggcagcttatttctctgaatttgcactgattaaataccgtgtacaggtagaggtggaatactttatcaccttgtgcgaacttcctttgccgcagttgaaaggaatcgatagcagcgtgtttgaaactttacggaatatctaccgtaacttctcggaagcagatgcgcaacgcattaaagatatcgaaagtgtaaccaaccatgatgtaaaagccgtagaatatttcctgaaagaagaattcgataagctgggtggaatggatgactataaagaattcattcacttcggattgacttctcaagacattaataatacgtctgtgcctctttctatcaaggaagctttggataaagtctattatccgctgatcgaagaactgattgcacaactgaaaacgtatgcaacagaatgggctgaaatcccgatgcttgccaaaactcatgggcaaccggcttctccgactcgtttgggtaaggaagtgatggtattcgtttaccgcctggaacgtcagctggctatgctgaaagcatgtccgatcactgcaaaattcggtggcgctaccggaaattacaatgctcatcatgtagcatatcctcaatatgactggaaacaattcggtaatcggtttgttgcagagaaactgggactggagcgcgaagaatataccactcagatttcgaactacgataacttgtctgctgtctttgacgcgatgaaacgtatcaacaccataatggtggatatgaaccgtgacttctggcagtatatttctatggaatacttcaagcagaagatcaaagccggtgaggtaggatcaagcgcgatgccgcataaagtgaatccgatcgactttgaaaatgcggaaggtaatttgggtatcgcaacttctattctggaacacctggctgtgaaactgcctgtttcccgtttgcagcgtgacctgacagactctacggtgctccgtaatgtaggcgtgcctttcggtcatatcgtgattgctattcagagttcactgaaaggacttcgcaaactgttgctgaacgaaccggctatttaccgtgatctggacaactgctggagcgtagtggctgaggcaatccagacgattttacgccgcgaggcttacccgcatccgtatgaagcattgaaagctttgacccggaccaaccaggctattacagaaagttctattaaagagtttatcgaaggcttgaacgtaagcgaagatattaaaaaagagttaagagcaattactccgcatacatatacgggactttaa

SEQ ID NO: 3148 - protein, 448 aa, Bacteroides thetaiotaomicron
MELDVLTAISPIDGRYRGKTKALAAYFSEFALIKYRVQVEVEYFITLCELPLPQLKGIDSSVFETLRNIYRNFSEADAQRIKDIESVTNHDVKAVEYFLKEEFDKLGGMDDYKEFIHFGLTSQDINNTSVPLSIKEALDKVYYPLIEELIAQLKTYATEWAEIPMLAKTHGQPASPTRLGKEVMVFVYRLERQLAMLKACPITAKFGGATGNYNAHHVAYPQYDWKQFGNRFVAEKLGLEREEYTTQISNYDNLSAVFDAMKRINTIMVDMNRDFWQYISMEYFKQKIKAGEVGSSAMPHKVNPIDFENAEGNLGIATSILEHLAVKLPVSRLQRDLTDSTVLRNVGVPFGHIVIAIQSSLKGLRKLLLNEPAIYRDLDNCWSVVAEAIQTILRREAYPHPYEALKALTRTNQAITESSIKEFIEGLNVSEDIKKELRAITPHTYTGL

SEQ ID NO: 3149 - DNA, 1443 bp, Streptomyces coelicolor
  CDS (1)..(1443)
atgacttccgctcccgccaagccccgcatcccgaacgtcctcgccggacgctacgcctccgccgagctcgccaccctctggtcgcccgagcacaaggtgaagctcgagcggcagctctggctcgccgtgctgcgggcccagaaggacctgggcatcgaggtgcccgacgccgcgatcgccgactacgagcgcgtcctcaaccaggtcgacctggcctcgatcgccgagcgcgagaaggtcacgcggcacgacgtgaaggcgcggatcgaggagttcaacgacctcgccgggcacgagcacgtccacaagggcatgacctcccgcgacctgacggagaacgtcgagcagctccagatccggctctcgctggagctggtccgggaccgttccgtggccgtcctggcccgcctcggcaagctggccggcgagtacggcgagctggtcatggccggccgctcgcacaacgtggcggcgcaggcgacgacgctgggcaagcggttcgccagcgccgccgacgagctgctcgtggcgtacggccgggtggaggagctgctcggccgctacccgctgcgcggcatcaagggcccggtcggcaccgcccaggacatgctggacctgctcggcggtgacgcgggcaagctggcggacctggagcagcggatcgccgggcacctcggcttctcgcaggcgttcacctcggtcggccaggtgtacccgcgctccctggactacgaggtcgtcaccgcgctggtgcagctcgccgccgcgccgtcctcgctggccaagacgatccgcctgatggccgggcacgagctggtcaccgagggcttcaagcccggccaggtcggctcgtccgcgatgccgcacaagatgaacacccgttcctgcgagcgcgtcaacggcctgacggtgatcctgcgcggctacgcctcgatgaccggtgagctggcgggcgaccagtggaacgagggcgacgtgtcctgctcggtggtgcgccgggtggcgctccccgacgccttcttcgcgctggacgggctgctggagacgttcctgaccgtgctcgacgagttcggcgccttcccggccgtcgtggcccgggagctggaccgctacctgccgttcctggccaccaccaaggtgctgatgggcgcggtgcgcggcggtgtgggccgcgaggtcgcgcacgaggcgatcaaggagaacgcggtcgcctccgcgctggccatgcgcgagcagggcgccgagcgcaacgagctgctcgacaagctggccgccgacgaccgcatcccgctggaccgtgccgccctggacgcgctgatggccgacaagctctccttcaccggcgccgcggccgaccaggtcggtgtggtcgtcggccggatcgaggacatcgtcaagcggcacccgcaggccgccggttacacccccggagcgatcctctga

SEQ ID NO: 3150 - protein, 480 aa, Streptomyces coelicolor
MTSAPAKPRIPNVLAGRYASAELATLWSPEHKVKLERQLWLAVLRAQKDLGIEVPDAAIADYERVLNQVDLASIAEREKVTRHDVKARIEEFNDLAGHEHVHKGMTSRDLTENVEQLQIRLSLELVRDRSVAVLARLGKLAGEYGELVMAGRSHNVAAQATTLGKRFASAADELLVAYGRVEELLGRYPLRGIKGPVGTAQDMLDLLGGDAGKLADLEQRIAGHLGFSQAFTSVGQVYPRSLDYEVVTALVQLAAAPSSLAKTIRLMAGHELVTEGFKPGQVGSSAMPHKMNTRSCERVNGLTVILRGYASMTGELAGDQWNEGDVSCSVVRRVALPDAFFALDGLLETFLTVLDEFGAFPAVVARELDRYLPFLATTKVLMGAVRGGVGREVAHEAIKENAVASALAMREQGAERNELLDKLAADDRIPLDRAALDALMADKLSFTGAAADQVGVVVGRIEDIVKRHPQAAGYTPGAIL

SEQ ID NO: 3151 - DNA, 1296 bp, Staphylococcus epidermidis
  CDS (1)..(1296)
atgatagaacgttattcaagagatgaaatgtctagtatttggacggatcaaaatcgctatgaagcatggttagaagtagagattctagcgtgtgaagcatggagtgagttaggttatattcctaaagaagatgtaaaaaaaattcgtgaaaatgccaaagtaaatgttgaacgcgctaaagaaattgaacaagaaacacgacacgatgtagttgcatttacacgccaagtttctgaaactttaggtgatgaacgtaagtgggtacattatggattaacttccactgatgtagttgacactgccttaagttatgtaattaaacaggcaaacgaaatccttgaaaaagatttagaaagatttatagatgtattagctgccaaagctaaaaaatatcaatatacattgatgatggggcgtacacatggagttcatgctgagcctacaacttttggcgtaaaaatggctctttggtatactgaaatgaaacgtaatcttaagcgttttaaagaagtgcgtaaagaaatagaagtagggaaaatgagtggagcagtaggaacatttgccaatattccacccgaaattgaggcttacgtatgtgaacatttaggaatagacactgcagctgtttctactcaaacattacaaagagatcgtcatgcttattacattgctacattagcactaattgctacatcaatggaaaaatttgcagtagaaattcgtaatttacaaaaaactgaaactagagaagtcgaagaggcatttgcaaaaggacaaaaaggatcatcagcaatgccacataaaagaaatccaatcggttctgaaaatattacaggtatatctcgtgtgattcgaggatatattactactgcatacgagaatatacctttatggcatgaaagagatatctctcattcttctgcagaacgtatcatgttaccagatgttacaattgctctagattatgcacttaatcgatttacgaatattgttgatcgactaacagtttatgaagataatatgagaaataatattgataaaacgtatggtttaatcttctcacaacgcgtactactagcattaattaataaaggcatggtacgtgaagaagcttatgataaagttcaacctaaagcaatggaatcttgggaaacaaaaacaccatttagagagctaattgaacaagattcatctataactgacgttctatcaagtgaagaattagatgattgcttcgatcctaagcatcatcttaatcaggtcgacactatattcgcgcgtgctggtttatcttag

SEQ ID NO: 3152 - protein, 431 aa, Staphylococcus epidermidis
MIERYSRDEMSSIWTDQNRYEAWLEVEILACEAWSELGYIPKEDVKKIRENAKVNVERAKEIEQETRHDVVAFTRQVSETLGDERKWVHYGLTSTDVVDTALSYVIKQANEILEKDLERFIDVLAAKAKKYQYTLMMGRTHGVHAEPTTFGVKMALWYTEMKRNLKRFKEVRKEIEVGKMSGAVGTFANIPPEIEAYVCEHLGIDTAAVSTQTLQRDRHAYYIATLALIATSMEKFAVEIRNLQKTETREVEEAFAKGQKGSSAMPHKRNPIGSENITGISRVIRGYITTAYENIPLWHERDISHSSAERIMLPDVTIALDYALNRFTNIVDRLTVYEDNMRNNIDKTYGLIFSQRVLLALINKGMVREEAYDKVQPKAMESWETKTPFRELIEQDSSITDVLSSEELDDCFDPKHHLNQVDTIFARAGLS

SEQ ID NO: 3153 - DNA, 1395 bp, Wigglesworthia glossinidia brevipalpis
  CDS (1)..(1395)
atgaaattatctcatttaactgcaatttctcctgtagatggtagatattttgaatatgttaaatcacttagaaatatttttagcgaatttagtttgttaaaatatagattaattattgaaatagaatggtttaaaaaaatctctgaatgtgaaaaaattaatgatattgaacctctaatttctgaagaaaaaatttttttaaataacattttaaataattttagcttgaaagatgctatagaaataaaaaatattgagcgtaaaactaatcatgatattaaagcagtagagtattttttaaagaaaaaattttctttaatgaaaagtttagatgaaaaaaaagaatttatacattttgcatgtacatctgaagatataaataatctttcatatgctttgatgataatcaaaacaagaaatgaaataataattccaatttggtataaaataattaaaaatattgtttctttttctaaaaaatataaaaattttccaataatatctagaactcacggtcagcctgcaactccatctacattaggaaaagaattttgtaacttttcttatagattgataagacaatttaatcaattaaaaaaaattaaaattcttggtaaaataaatggaactgttggaaattataatgctcattttatttcttaccctaatgttgattggattaattttagcaaagaatttgtaaatagtcttggaatagaactaaatttgtttactactcagattgagcctcatgattatatatcagaaatattgcattgtttttctagatttaataatattttaataaattttaacagagacatatgggggtatttatctattaatttttttaagaacaaatataataaaggtaaaattggatcttctgttatgcctcacaaaataaatccaatagattttgaaaattctgaaggaaatttagaattatctaatgctattttaaatcatttatctaataaattatcaatatctagatggcaaagagatttgactgattctacttctttaagaaatataggattagcgataagctattcttttattgcatataaaaaatttttaaatggaatttcaaatttagaaattaataaatttaatataaaatctgatttaagatctcattgggaagttctttcagaacctatccaaactttgatgcgcaggaataaaattaaaaattcttatgagttagtaaaagattttttaatcaaaaaagatctagatcctgaaactttgaaaagttttgtagaaaatttgaaaattaaaaatagtgataaaaatattttaaaaaatattacacctgaaaaatatattggtttatcaactttgttagttgattgtatagaaaaatattttaataatatcgataaataa

SEQ ID NO: 3154 - protein, 464 aa, Wigglesworthia glossinidia brevipalpis
MKLSHLTAISPVDGRYFEYVKSLRNIFSEFSLLKYRLIIEIEWFKKISECEKINDIEPLISEEKIFLNNILNNFSLKDAIEIKNIERKTNHDIKAVEYFLKKKFSLMKSLDEKKEFIHFACTSEDINNLSYALMIIKTRNEIIIPIWYKIIKNIVSFSKKYKNFPIISRTHGQPATPSTLGKEFCNFSYRLIRQFNQLKKIKILGKINGTVGNYNAHFISYPNVDWINFSKEFVNSLGIELNLFTTQIEPHDYISEILHCFSRFNNILINFNRDIWGYLSINFFKNKYNKGKIGSSVMPHKINPIDFENSEGNLELSNAILNHLSNKLSISRWQRDLTDSTSLRNIGLAISYSFIAYKKFLNGISNLEINKFNIKSDLRSHWEVLSEPIQTLMRRNKIKNSYELVKDFLIKKDLDPETLKSFVENLKIKNSDKNILKNITPEKYIGLSTLLVDCIEKYFNNIDK

SEQ ID NO: 3155 - DNA, 1296 bp, Synechococcus elongatus
  CDS (1)..(1296)
atgatcgaacgctatacccttgccccaatggggaatctctggacagatgcctacaaattcaaaacatggctcgatgttgagattgcggtctgcgaagcccaagccgaactggggtatattccggccgcggccgttgccgagatcaaagccaaggccaagtttgacccccaacgggtacaggaaattgaagcggaggtgaagcacgacgtcattgctttcctcaccaacgttaacgagtatgtcggcgatgcggggcgctatattcaccttggcttgacgagctccgatgttctcgacaccggtttagcgctgcaattggtggccagtctagggctgattcaacagcagttggagcatctcatgcaggcggtccgccaccgtgcccaagaacatcgctataccgtgatggtgggacgcagccatggcattcacgctgaacccattacctttggcttcaaactggcgggttggttagcggaactgctgcgccatcgcgatcgcctgtgccagttacagcgtacagtggcagtgggcaaaatctccggggcagtgggcacctatgccaatgtggatccgcgcgtagaggcgatcgcctgtcaaaaactgggactgcaacccgataccgcttccacccaggtcatttcccgcgatcgccatgcagattatgtgcagacccttgccctcctaggggccagtctggagcgctttgccgttgaaattcgcaatctgcagcgcaccgatgtcctggaagtcgaggaatttttctcgaagggtcaaaaaggctcctccgctatgccccacaaacgcaatcccattcgttccgagcggctgacgggtctggcgcgggtgctgcgggccaatgccttggctgccctagaaaatgttgccctttggcatgagcgggatatttcccacagtgcagtggaacgggtcattttgcccgacagctcgattctcacccactttatgctggtggaaatgactgacttggtgcaaacgctgcaggtttatcccgagaatatgcgccgcaatatgaattgctacggcggtgtcatctttagtcagcgggtgctgttggccttggtggaaaaaggcctcagccgcgaagcggcctatgcccttgtgcagaaacatgcccatgccgcttggaatcaaccccagggggactttgccgccaacctcaaggcagaccctgaaattcagcggtatctcagccctgaggaattagaggcctgctttaacccagagcaccacctgcggcatttggaggaaatttaccagcgcttgggcatctag

SEQ ID NO: 3156 - protein, 431 aa, Synechococcus elongatus
MIERYTLAPMGNLWTDAYKFKTWLDVEIAVCEAQAELGYIPAAAVAEIKAKAKFDPQRVQEIEAEVKHDVIAFLTNVNEYVGDAGRYIHLGLTSSDVLDTGLALQLVASLGLIQQQLEHLMQAVRHRAQEHRYTVMVGRSHGIHAEPITFGFKLAGWLAELLRHRDRLCQLQRTVAVGKISGAVGTYANVDPRVEAIACQKLGLQPDTASTQVISRDRHADYVQTLALLGASLERFAVEIRNLQRTDVLEVEEFFSKGQKGSSAMPHKRNPIRSERLTGLARVLRANALAALENVALWHERDISHSAVERVILPDSSILTHFMLVEMTDLVQTLQVYPENMRRNMNCYGGVIFSQRVLLALVEKGLSREAAYALVQKHAHAAWNQPQGDFAANLKADPEIQRYLSPEELEACFNPEHHLRHLEEIYQRLGI

SEQ ID NO: 3157 - DNA, 1299 bp, Streptococcus agalactiae
  CDS (1)..(1299)
atgatcgaacgttattcacgccctgagatggcggcaatttggacagaggaaaataaataccgtgcttggttggaggtcgagattttggctgacgaggcatgggctgagttgggtgagattcctaaggaggatgtggctaagattcgtgagaaggcggattttgacattgaccgcattcttgagattgagcaggacacgcgtcacgatgtggtggctttcactcgtgcggtttctgagacgcttggtgaggagcgcaagtgggtgcactacggtttgacgtcgactgacgtggtggacactgcctacggttacctctacaagcaggctaacgatattatccgtcgtgaccttgagaatttcacaaatattgtggctgataaggctaaggagcacaagttcaccatcatgatgggtcgtacccacggtgttcacgctgagccaacgactttcggtcttaagttggcgacctggtacagcgagatgaaacgtaatattgagcgttttgaacatgctgccgcaggtgtggaagctggtaagatttcaggtgccgttggtaactttgctaacattcctccatttgtggaacaatatgtttgtgacaaattgggcatccgtccgcaagagatttcaacacaggttcttccacgtgacctccacgcagaatattttgcagtgcttgcaagcattgcaacttctatcgaacgtatggcgacagagattcgtggtctgcaaaaatcagaacaacgtgaagttgaagaattctttgccaaaggtcagaaaggtagctctgctatgcctcacaaacgcaacccaatcggttcagagaacatgactgggctagcgcgcgtgattcgtggtcacatggtgacggcttatgagaacgtggcactttggcacgagcgtgatatttcgcactcatctgctgagcgtatcatcacacctgacacaacgatcttgattgactacatgctcaaccgttttggcaatatcgttaagaacttgactgtcttcccggaaaatatgatgcgcaatatggaatcaacttttggtttgatttatagtcaacgtgttatgctcaaattgattgaaaaaggaatgacacgagaagaagcttatgacttagttcaacctaagacagcttattcctgggacaatcaagtggatttcaaaccacttttagaagaagacaccaaagttacctcttgtcttacacaggaagaaattgatgaactatttaatccgatttattacacaaaacgtgttgatgatatttttgaaagactaggattagaaaaatag

SEQ ID NO: 3158 - protein, 432 aa, Streptococcus agalactiae
MIERYSRPEMAAIWTEENKYRAWLEVEILADEAWAELGEIPKEDVAKIREKADFDIDRILEIEQDTRHDVVAFTRAVSETLGEERKWVHYGLTSTDVVDTAYGYLYKQANDIIRRDLENFTNIVADKAKEHKFTIMMGRTHGVHAEPTTFGLKLATWYSEMKRNIERFEHAAAGVEAGKISGAVGNFANIPPFVEQYVCDKLGIRPQEISTQVLPRDLHAEYFAVLASIATSIERMATEIRGLQKSEQREVEEFFAKGQKGSSAMPHKRNPIGSENMTGLARVIRGHMVTAYENVALWHERDISHSSAERIITPDTTILIDYMLNRFGNIVKNLTVFPENMMRNMESTFGLIYSQRVMLKLIEKGMTREEAYDLVQPKTAYSWDNQVDFKPLLEEDTKVTSCLTQEEIDELFNPIYYTKRVDDIFERLGLEK

SEQ ID NO: 3159 - DNA, 1299 bp, Streptococcus agalactiae
  CDS (1)..(1299)
atgttagaacgttattcacgccctgagatggcggcaatttggacagaagaaaataaatatcgtgcttggttggaggttgagattttggctgacgaggcatgggctgagttgggtgaaattcctaaggaggatgtgactaagattcgtgagaaggcggattttgacattgaccgcattcttgagattgagcaggacacgcgtcacgatgtggtggctttcactcgtgcggtttctgagacgcttggtgaggagcgcaagtgggtgcactacggtttgacgtcgactgacgtggtggacactgcctacggttacctctacaagcaggctaacgacattatccgtcgtgaccttgagaatttcacaaatatcgtggctgagaaagctaaggagcacaagttcaccatcatgatgggtcgtacccacggtgttcacgctgagccaacgactttcggtcttaagttggcaacttggtacagtgagatgaaacgtaatattgagcgttttgaacatgctgccgcaggagtggaagctggtaagatttcaggtgctgttggtaactttgccaacatcccaccttttgtggaagaatatgtctgtgacaaattaggcatccatccgcaagaaatttcaacacaggttcttccacgtgatctccacgcagaatattttgcagtgcttgcaagtattgcaacatctatcgaacgtatggcgacagagattcgtggtctgcaaaaatcagaacaacgtgaagttgaagagttctttgccaaaggtcagaaaggtagctctgctatgcctcacaaacgcaacccaatcggttcagagaacatgacagggctagcgcgcgtaattcgtggtcacatggtgacggcttatgagaacgtggcactttggcacgagcgtgatatttcgcactcatcagctgagcgtatcatcacaccagacacaactatcttgattgactacatgctcaaccgttttggcaatatcgttaagaacttgactgtcttcccagaaaatatgatgcgcaatatggaatcaacttttggtttgatttatagtcaacgtgttatgctcaaattgattgaaaaaggaatgacacgagaagaagcttatgacttagttcaacctaagacagcttattcctgggacaatcaagtggatttcaaaccacttttagaagaagacaccaaagttacctcttgtcttacacaggaagaacttgatgaactatttaatccgatttattacacaaaacgtgttgatgatatttttgaaaggttaggattagaaaaataa

SEQ ID NO: 3160 - protein, 432 aa, Streptococcus agalactiae
MLERYSRPEMAAIWTEENKYRAWLEVEILADEAWAELGEIPKEDVTKIREKADFDIDRILEIEQDTRHDVVAFTRAVSETLGEERKWVHYGLTSTDVVDTAYGYLYKQANDIIRRDLENFTNIVAEKAKEHKFTIMMGRTHGVHAEPTTFGLKLATWYSEMKRNIERFEHAAAGVEAGKISGAVGNFANIPPFVEEYVCDKLGIHPQEISTQVLPRDLHAEYFAVLASIATSIERMATEIRGLQKSEQREVEEFFAKGQKGSSAMPHKRNPIGSENMTGLARVIRGHMVTAYENVALWHERDISHSSAERIITPDTTILIDYMLNRFGNIVKNLTVFPENMMRNMESTFGLIYSQRVMLKLIEKGMTREEAYDLVQPKTAYSWDNQVDFKPLLEEDTKVTSCLTQEELDELFNPIYYTKRVDDIFERLGLEK

SEQ ID NO: 3161 - DNA, 1371 bp, Shewanella oneidensis
  CDS (1)..(1371)
atggatctttccgcactaactgctatctctccggtagacggccgttacggtagtaaaacagcgtcattgcgagggattttcagcgagttcggtcttactaagtaccgtgttcaagttgaaatcaactggttaaagttactcgccgattgccctgaaatcactgaagtgccgccattaagcgagtcagcgatcgcgcttctcgatgccattaaagacaatttcagtgagcaagatgcgctgcgtgtgaaagccattgaaagcaccaccaaccacgacgtgaaagcggttgaatatttcatcaaagaaaaaatcgctgctaatgtagaattagccgctgtaggtgaatttgttcactttgcctgtacttctgaagatatcaacaacttaagccatggcttaatgttaactgaagctcgcgagcaagtggttctgccttattgcaatgaactgctcagcgcaatcaaaaaactggccgttgaataccgctcagtacctttgatgtcacgtacccacggtcagccagcctcgccttctacgcttggtaaagaaatggcgaacgtggcggtgcgtttggagcgtcaaatcaagcaaatcgcagctgttgaaatcatggggaaaattaacggcgccgtgggtaactacaacgcgcacatatcagcatacccagaagtgaactggcatgcactgtctgaacgatttgtgacaagccttggcctgcactggaacgcatatactactcaaatcgaaccgcatgattacattgcagagctcttcgatgcgattgcgcgtttcaacactattctgctcgatttcgaccgtgacgtttggggctatattgccttaggtcactttaagcaacgtaccattgccggtgaaattggctcctcaaccatgccgcacaaggtcaaccctatcgactttgaaaactcagagggtaacttaggtattgccaatgcgctgatgcaacatttagccgctaaactgcccgtttcaagatggcaacgcgacttaaccgattctactgtactgcgtaacttaggcgtgggtattgcccactcgctgatcgcctaccaagccaccttgaaaggtattagtaagttacaagtgaatgaagagcatttacgtgccgagcttgatcaaaactgggaagtattggccgagccagtacaaacagtaatgcgccgctatggcattgaaaagccatacgagaagttaaaagaattgacacgcggtaaacgcattgatgctaagcaacttgccgagtttatcgacggtttagccctgccagaagacgtgaaggctgagctaaagaagatgacgccagccaactatattggccgtgctgaagccttcgtcgacgagcttaactaa

SEQ ID NO: 3162 - protein, 456 aa, Shewanella oneidensis
MDLSALTAISPVDGRYGSKTASLRGIFSEFGLTKYRVQVEINWLKLLADCPEITEVPPLSESAIALLDAIKDNFSEQDALRVKAIESTTNHDVKAVEYFIKEKIAANVELAAVGEFVHFACTSEDINNLSHGLMLTEAREQVVLPYCNELLSAIKKLAVEYRSVPLMSRTHGQPASPSTLGKEMANVAVRLERQIKQIAAVEIMGKINGAVGNYNAHISAYPEVNWHALSERFVTSLGLHWNAYTTQIEPHDYIAELFDAIARFNTILLDFDRDVWGYIALGHFKQRTIAGEIGSSTMPHKVNPIDFENSEGNLGIANALMQHLAAKLPVSRWQRDLTDSTVLRNLGVGIAHSLIAYQATLKGISKLQVNEEHLRAELDQNWEVLAEPVQTVMRRYGIEKPYEKLKELTRGKRIDAKQLAEFIDGLALPEDVKAELKKMTPANYIGRAEAFVDELN

SEQ ID NO: 3163 - DNA, 1296 bp, Oceanobacillus iheyensis
  CDS (1)..(1296)
atgattgaacgttatacaagagaagaaatgggtagtatttggacggaagagaataaattcaaagcgtggttagaggttgaaatactagcttgcgaagcatggagcgagttaggtgttatcccgaaagaagatgtaaagaaattaagagaaaatgcttcttttgatatgaaccgcatttatgaaattgaagaagaaacacgacatgatgtagtggcatttacacgtgctgtatccgagacattaggggaagagcgtaaatgggtacattatggtttaacatcgactgacgttgtagatacagcattatcttatattttaaaacaagcaaacgatattctacgtaaagacttaaatcaatttgttgaaattctgaaagaaaaagcaatagagcataaacatacggtaatgatgggacgcacacatggtgttcatgcagaaccaacaacattcggattgaaaatggcattatggtatgaagaaatgaaacgaaatgtagagcgttttgaactggctgcgaagaacatcgaatttggtaagatttctggtgcagtgggtacttatgcaaatatcgatccatttgtggaacagtatgtgtgtgaaaaattaggtacttctccagctcctgtgtccacacaaacattacaacgtgatcgtcatgctgcatatttatcggctcttgcattaattgcaacgtcgatcgaaaagttcgcaacagaaattcgtggattgcagaaaacagaaacacgtgaagtagaagagcgatttgcgaaaggtcagaaaggctcgtctgcaatgccgcataaacgtaatccaatcggatcagaaaatatgactggtatggctcgtgtgattcgaggatatatggtaacagcctatgaaaatgtggctttatggcatgaacgtgatatttctcattcatcagcagagagagtaatcttaccagacgcgactattgctttaaattatatgttaaatcgttttggtaatatcgtaaaaaacttaacggtgttcccagagaatatgaagcgtaatattgatcgcacacatggggttattttctcccaaagagtgttgctttcattaattgataaaggcatggctcgtgaggaagcatatgacattgtacaaccaaaagcaatggatgcttgggaaacagagacacatttcaaacagttggtagaaagtgatgaccgaattactggaaagctaacgcaagcagagattgatgattgttttgattatacgtatcacttgaagaatgtcgatcaaatctttacaaaaatcggtatttcctag

SEQ ID NO: 3164 - protein, 431 aa, Oceanobacillus iheyensis
MIERYTREEMGSIWTEENKFKAWLEVEILACEAWSELGVIPKEDVKKLRENASFDMNRIYEIEEETRHDVVAFTRAVSETLGEERKWVHYGLTSTDVVDTALSYILKQANDILRKDLNQFVEILKEKAIEHKHTVMMGRTHGVHAEPTTFGLKMALWYEEMKRNVERFELAAKNIEFGKISGAVGTYANIDPFVEQYVCEKLGTSPAPVSTQTLQRDRHAAYLSALALIATSIEKFATEIRGLQKTETREVEERFAKGQKGSSAMPHKRNPIGSENMTGMARVIRGYMVTAYENVALWHERDISHSSAERVILPDATIALNYMLNRFGNIVKNLTVFPENMKRNIDRTHGVIFSQRVLLSLIDKGMAREEAYDIVQPKAMDAWETETHFKQLVESDDRITGKLTQAEIDDCFDYTYHLKNVDQIFTKIGIS

SEQ ID NO: 3165 - DNA, 1299 bp, Mycoplasma penetrans
  CDS (1)..(1299): transl_table=4
atgattaaaagatatgaagttcctataatttctaaaatttgatcagatgaaaataaatttaacacttgattgaaaattgaaaagtgtgtaattaactatttttatgtgagtaaaaaaattgatgaacaaacatttaatttattaaatgaaaaaatgtcttttgatttaaatgaaatttatgaaattgaaaaaaacactaaacatgatgttattgcttttttaagagcaatatctttaaacataaaagaagacagtgttaagaagtgaattcattatggtttaacttcaacagatgttgtagatactgcaaatgcagtgatgcttaaagaaacaaatttgttaattattgaagcaattaaaaacttaatgaaggaactaaaaaagaaagcttttaaatataaagatttagttcaaataggtagaactcatgggatccatggagaacctactagttttggttataaatttgcaatttgatatgatgaattaaatagaaacttagaaagattaaatcttgctagaaaagaagttgaggttggaaagattagtggtgctgttggtacatttgcaaacactggattaaaacttcaagattatgtttgtaagaaactaaagattaattcatcgaatgcttctactcaaattattcaaagagataatcatgcattttattttgcaactcttgcagtgattgcaagtacagttgaaaaaattgcaactgaattaagacacttatcaagaactgaagtttctgaagttagtgaattttttgatattaatcaaaaaggtagctctgcaatgccacataagaaaaatcctattagtttagaaaatatctgtgggctttctagaatgattaaagcatatagtaatgttgcattagaaaataatgacctttgacatgagcgtgatatttctcattcttcaaatgaaagaattatgtttttagatgctacaacacttacttattatgtaattgaaagattaactaaagtaattgcaaatcttaatgtatatgtaaaaaatattcaaaagaatttgaaactaactaatggtttaatttactctcaagcattgttattaaagttattggaaaatgaaaatctttctagagaatttgtatatgatgaaattcaaaaaatagcattgttgtgttttaacaataatttagattttaaaagtgaaattttaaaatctaaattggctgatggattaactgaaaaagatattaattttatttttgatgaaaaacatcatttaaaatatatcaatgatatttataaaaggatttttagataa

SEQ ID NO: 3166 - protein, 432 aa, Mycoplasma penetrans
MIKRYEVPIISKIWSDENKFNTWLKIEKCVINYFYVSKKIDEQTFNLLNEKMSFDLNEIYEIEKNTKHDVIAFLRAISLNIKEDSVKKWIHYGLTSTDVVDTANAVMLKETNLLIIEAIKNLMKELKKKAFKYKDLVQIGRTHGIHGEPTSFGYKFAIWYDELNRNLERLNLARKEVEVGKISGAVGTFANTGLKLQDYVCKKLKINSSNASTQIIQRDNHAFYFATLAVIASTVEKIATELRHLSRTEVSEVSEFFDINQKGSSAMPHKKNPISLENICGLSRMIKAYSNVALENNDLWHERDISHSSNERIMFLDATTLTYYVIERLTKVIANLNVYVKNIQKNLKLTNGLIYSQALLLKLLENENLSREFVYDEIQKIALLCFNNNLDFKSEILKSKLADGLTEKDINFIFDEKHHLKYINDIYKRIFR

SEQ ID NO: 3167 - DNA, 1431 bp, Corynebacterium efficiens
  CDS (1)..(1431)
atggctgataagaagaagattgcaaacgtcctgtccaaccgttacgcctccgcggagctgtccaacctctggagcgccgaagagaagatcatcatggagcgccagctgtggatcgccgtgatgaaagcccagcaggatctgggtgtggagatccccgccgaggcgatcaccgcctacgaagcagtgatcgaccaggttgacctggcctccatcgccgaccgtgaacgcgtcacccgccatgatgtcaaggcccgcatcgaggagttcaacgccctcgccggccatgagcacatccacaagggcatgacctcccgtgacctcaccgagaacgtcgagcagctccagatccaccgctcgctggaactggtgcgcaacaaggccatcgccgtggtcgccgcgatcggcaaccgtgccgcccagtaccagagcctggtcatggccggtcgctcccacaacgtcgccgcgcaggctaccaccctgggtaagcgtttcgccaccgccgccgatgagatgctggtggccatcgagcgcaccgatgacctgctcggacgctacccactgcgtggcatcaagggccccatgggcaccgcacaggacatgctggatctcatggacggcgatgagtcccgcctgtccgaactggagaaccgcatcgcctcccacctcggttttgaccgcgtcttcgactccgtcggccaggtctacccgcgttccctcgacttcgatgccgtctcggcgctggtgcagctgggtgcgggcccgtcatcgctgtcccacaccatccgcctcatggccggcaccgagaccgtcacggagggcttcaaggaggggcaggtcggttcctccgccatgccacacaagatgaacgcccgttcctgcgagcgcgtcggtggcctccaggtgatcctgcgcggttacctgaccatggttgccgacctgtccggccagcagtggaacgagggggatgtgttctgctccgtcatccgccgcgtggcgctgccggatgccttcttcgccctggacggcatgttcgaaaccttcctcaccgtcctcgacgagttcggtgccttccccgccatgatcgagcgtgagctcgagcgttacctgccgttcctggccaccacccgcatcctcatggccgctgtccgcgcgggcgtgggccgtgagaccgcccatgaggtgatcaaggaaaacgcggttgccgttgcgctgaacatgcgtgaaaacggtggcgggcaggatctgatccagcgcctggccgccgatgagcgcctgccgatggatgaggctgccctcaccgaggcgctcgcggatcgccacgccttcatcggggctgccgagtctcaggttgcgcgcgtcctggatcgcatccaggtgcttgtcgacgcccaccccgacgccgctgcctaccgtccgggtgagatcctctag

SEQ ID NO: 3168 - protein, 476 aa, Corynebacterium efficiens
MADKKKIANVLSNRYASAELSNLWSAEEKIIMERQLWIAVMKAQQDLGVEIPAEAITAYEAVIDQVDLASIADRERVTRHDVKARIEEFNALAGHEHIHKGMTSRDLTENVEQLQIHRSLELVRNKAIAVVAAIGNRAAQYQSLVMAGRSHNVAAQATTLGKRFATAADEMLVAIERTDDLLGRYPLRGIKGPMGTAQDMLDLMDGDESRLSELENRIASHLGFDRVFDSVGQVYPRSLDFDAVSALVQLGAGPSSLSHTIRLMAGTETVTEGFKEGQVGSSAMPHKMNARSCERVGGLQVILRGYLTMVADLSGQQWNEGDVFCSVIRRVALPDAFFALDGMFETFLTVLDEFGAFPAMIERELERYLPFLATTRILMAAVRAGVGRETAHEVIKENAVAVALNMRENGGGQDLIQRLAADERLPMDEAALTEALADRHAFIGAAESQVARVLDRIQVLVDAHPDAAAYRPGEIL

SEQ ID NO: 3169 - DNA, 1302 bp, Brucella suis
  CDS (1)..(1302)
atgatcccgcgctattcccggccagaaatggtcgccatctggtcgcccgaaacgaagttccgcatctggttcgagatcgaagcctatgcctgcgaggcgctggctgaactgggcgtcatcccgaaggaagcggccaggaccatctgggaaaagggcagcgtggcgaaattcgacgtcgcccgcatcgacgaaatcgaagccgtcaccaagcatgacgtgatcgcattcctcacgcatctggccgaatttatcggccctgacagccgtttcgtccatcagggcatgacgtcatcggacgtgctcgacaccacgctcaatgtccagcttgtgcgcgctgccgacctgctgctcgctgatctggaccgcgtgctggaagccctgaagaaacgtgctttcgagcacaaggacacggtgcgcatcggccgcagccacggcattcatgccgaaccgaccacgatgggcctcactttcgcgcgtttctatgccgaaatgtcgcgcaatcgcgctcgtctcgttgccgcgcgcgcggaaatcgccacgggcgcaatctcgggtgccgtcggcactttcgccaatatcgacccgcgcgtggaagaatatgtctgcgccaagctcggccttgaagcagagcccgtttcgacacaggtgatcccgcgcgaccgccacgccatgtttttcgcaacgctcggcgtcattgcatcctcgatggaaaacatcgccatcgaaattcgccatatgcagcgcacggaagttctggaagcggaagaattcttctcgccgggccagaagggttcgtcggccatgccgcacaagcgcaatccggtgctgaccgaaaacctgaccggccttgcccgtctggtgcgcatgtcggtcacgcctgcgatggaaaatgtcgctctgtggcacgaacgcgatatttcgcattcgagcgttgagcgcgctattggaccggacacgaccatcacgctcgatttcgcgctcaaccgtctggccggcgtgatcgagaagctggtgatctatccggacaacatgctcaaaaacatgaacaagttccgcggtctggtgcattcgcagcgcgtattgttggccctaacgcaggccggtgtgtcgcgtgaagacgcctatcgtctcgtgcagcgcaacgccatgaaggtctgggaacagggcgctgatttcctcgaagaattgctggccgacacggaagtgcgcgctgcactttccgaagagcagatccgcgagaagttcgatctcggctaccacaccaagcatgtggatacgattttcaagcgcgtcttcggctga

SEQ ID NO: 3170 - protein, 433 aa, Brucella suis
MIPRYSRPEMVAIWSPETKFRIWFEIEAYACEALAELGVIPKEAARTIWEKGSVAKFDVARIDEIEAVTKHDVIAFLTHLAEFIGPDSRFVHQGMTSSDVLDTTLNVQLVRAADLLLADLDRVLEALKKRAFEHKDTVRIGRSHGIHAEPTTMGLTFARFYAEMSRNRARLVAARAEIATGAISGAVGTFANIDPRVEEYVCAKLGLEAEPVSTQVIPRDRHAMFFATLGVIASSMENIAIEIRHMQRTEVLEAEEFFSPGQKGSSAMPHKRNPVLTENLTGLARLVRMSVTPAMENVALWHERDISHSSVERAIGPDTTITLDFALNRLAGVIEKLVIYPDNMLKNMNKFRGLVHSQRVLLALTQAGVSREDAYRLVQRNAMKVWEQGADFLEELLADTEVRAALSEEQIREKFDLGYHTKHVDTIFKRVFG

SEQ ID NO: 3171 - DNA, 1446 bp, Bifidobacterium longum
  CDS (1)..(1446)
atggaggttatgaagcttaccgatatttcccccgcaatcgcattgaccccgctcgacggccgttatcacaaggccaccgccccgctcgtcgaatacatgagcgaacctgccctgaaccgcgaacgcatgcgtgtcgaagtcgaatggatgattcttctggccaacggctttgagggcaacggcaaccagccgatcgttgacggcgtcaagccgttcactgccgaagagcaggccttcctgcgcgccattcccgaggacttcggcgccgaaggcatcaagcagcacgccgctcatgaggccatcacccaccacgatgtgaaggccgtggagtactacatcgatgatcagatcgacaaggctccggccgagctgaccaacatcaacgacgagctgaagaccctcgtacacttcgcctgcacgtccgaagacatcaacaacctctccatcgcccgttgcgtcaagaacgcgatggaaaacgtgtggaccccggagttcaagcgcatcatcgaccacctcgccggcaaggccgaggaattcaaggatatgccgctgctctctctcacccacggccagccggccacgccgaccacgctcggcaaggagctcgccgtctacgtctaccgtctgaaccgtcagctcaagcacatcgaaaaccaggagtacctgggcaagatcaacggcgcgaccggcacgttcggtgcccacttggccgcatgcccggatgtcgactggatcgctgtctcccgcgaattcgtcaccaaccgcatgggcctgacctggaacccgctgaccacgcagatcgaaagccacgactggcaggccgagctgtactccaccgtctcccacgccaaccgcatcatgcacaacctgtgtgtggacgtgtggatgtacatctcccgtggagtgttcgcccaggtgccggtcaagggtgccactggttcctccaccatgccgcacaaggtcaacccgattcgtttcgagaacgccgaagccaacttcgaaatcagctgctcgctgcttgacaccctctccgccacgctggtggaatcccgttggcagcgcgatctgaccgattcgaccacccagcgcaacatcggttccgcgctcggctactccttgctcgccctgaccaacctcatgggcggccttgagtccatccacccgaacacccacgtcatcgagcgtgagcttgatgagaactgggaggtgcttggcgagccgatccaaaccgccatgcgcgcctgcgagctcaagggcctgccgggcatggacaagccgtacgagaaggtcaaggggcttatgcgcggccgcaccatcaacaaggaacaggtcgagcagttcatcgaccagcagtccttcgacccggaaaccgccgctcgcttgaaggctctgacccccgccacctacaccggtgtggccagccagctcgtcgctttcggccgctga

SEQ ID NO: 3172 - protein, 481 aa, Bifidobacterium longum
MEVMKLTDISPAIALTPLDGRYHKATAPLVEYMSEPALNRERMRVEVEWMILLANGFEGNGNQPIVDGVKPFTAEEQAFLRAIPEDFGAEGIKQHAAHEAITHHDVKAVEYYIDDQIDKAPAELTNINDELKTLVHFACTSEDINNLSIARCVKNAMENVWTPEFKRIIDHLAGKAEEFKDMPLLSLTHGQPATPTTLGKELAVYVYRLNRQLKHIENQEYLGKINGATGTFGAHLAACPDVDWIAVSREFVTNRMGLTWNPLTTQIESHDWQAELYSTVSHANRIMHNLCVDVWMYISRGVFAQVPVKGATGSSTMPHKVNPIRFENAEANFEISCSLLDTLSATLVESRWQRDLTDSTTQRNIGSALGYSLLALTNLMGGLESIHPNTHVIERELDENWEVLGEPIQTAMRACELKGLPGMDKPYEKVKGLMRGRTINKEQVEQFIDQQSFDPETAARLKALTPATYTGVASQLVAFGR

SEQ ID NO: 3173 - DNA, 1305 bp, Chlorobium tepidum
  CDS (1)..(1305)
atgataccacgttactcgccgaaagacatctcggcaatctggagcgatgaagccaaattcgaacgctggctgcaactcgaaatcgctgccgtcgaggcacgcatggaagccggcatcgttccggcggacgcccttgcgaccattaaagaaaaagccaggttcaacgtcgaagagattcttatcattgaaaacgagacgaagcacgacgtcattgcctttctaaccaacgtcgccggctacgtcggccccgaatcacgttacatccacgagggtctcacctcttcggacgtggtcgatacctgcctggcgatgcagatgcgcgatgcgggcaagatcatcgtggctgacatcgagtcgcttatcgaggtgctcggcaaaaaggccgtcgaacacaaatacacccttcagatgggccgcacgcacggcattcacgccgagccgaccacgttcggcctgaagctgttgctctggtacgaggagatgaagcgcaacctcgaacgcatgaagcgcgcgctcgaaaccgtctcggtcggtaaaatttccggcgcggtcggcacctaccagcatctgtcaccggacatcgaggccgccgtctgccagaagcttggcctgaagccctcgtcgatctcgacgcagattctccagcgcgaccgacacgccgaatacgccacgacgctcgccatcgtcgcctcgtccatcgagaagttctcgaccgaactgcgccacctgcaacgcaccgaggttcgcgaaaccgaggagtttttcagcaagggccagaaaggcagctccgccatgccgcacaagcgcaacccgatcacctttgagcgcctcaccggcttggctcgcgtggtgcgctccaactccatcgccgccatggagaacgtcgccctctggcacgaacgcgacatttcgcactcctcggtcgagcgcgtcatcatgcccgactcgaccatcgcgctggtttatatgctgcgcaccttccgtgattcgatcgagaccttgctcgtctatccggagcgcatgaagcaaaacttcgacacctcctacggcctgaccctctcgcagacgctgctgctcgccctcaccggcaagggactcacccgtgaagacgcctaccgcctcgtgcagcgcaacgccatgaaaagctgggaggagaaaatccagctcaaggagctggtgattcacgacccggaaatcctcgaacacatcagcgcagaagagatcaaccagctcttcagcccggagacaattcaggacaagctcaaaaacagcgtggatattattttcaagcgcaacgggctgtga

SEQ ID NO: 3174 - protein, 434 aa, Chlorobium tepidum
MIPRYSPKDISAIWSDEAKFERWLQLEIAAVEARMEAGIVPADALATIKEKARFNVEEILIIENETKHDVIAFLTNVAGYVGPESRYIHEGLTSSDVVDTCLAMQMRDAGKIIVADIESLIEVLGKKAVEHKYTLQMGRTHGIHAEPTTFGLKLLLWYEEMKRNLERMKRALETVSVGKISGAVGTYQHLSPDIEAAVCQKLGLKPSSISTQILQRDRHAEYATTLAIVASSIEKFSTELRHLQRTEVRETEEFFSKGQKGSSAMPHKRNPITFERLTGLARVVRSNSIAAMENVALWHERDISHSSVERVIMPDSTIALVYMLRTFRDSIETLLVYPERMKQNFDTSYGLTLSQTLLLALTGKGLTREDAYRLVQRNAMKSWEEKIQLKELVIHDPEILEHISAEEINQLFSPETIQDKLKNSVDIIFKRNGL

SEQ ID NO: 3175 - DNA, 1431 bp, Corynebacterium glutamicum
  CDS (1)..(1431)
atggctgataaaaagaagatcgcaaacgtcctgtcgaaccgttacgcctccgcggaactttctaacctgtggagtgccgaagagaagatcatcatggagcgccagctctggatcgccgtgatgaaagcccagaaagatttgggagttgagatccctgccgaggcaattgaatcctatgaagcagtgatcgaccaggttgatttggcaagcatcgccgatcgtgagcgcgtcacccgccacgatgtgaaggcccgcatcgaagaattcaatgcactggctggccatgagcacatccacaagggcatgacctcccgcgacctcaccgaaaatgttgaacagctgcagatccaccgctcccttgagctggtccgcaacaagggcattgcagttgttgcagctatcggatcccgcgcagcgcagtaccaaagcctggtcatggctggccgttcccacaacgtggcagcgcaggcaactaccttgggcaagcgtttcgcaaccgcagctgatgaaatgctcgtggcacttgagcgcgtcaccgaactgctcaaccgctacccacttcgcggaatcaagggcccaatgggaaccgcccaagacatgcttgacctcatggaaggcgacgaggctcgtctctccgatctggaaacccgcatcgcagcacacctcggctttgatcgcgtcttcgactccgtcggccaggtctacccacgttcccttgacttcgatgcagtatctgctctggttcagcttggctccggcccatcatcgctgtcccacaccattcgtctcatggccggcaccgaaactgttaccgaaggttttaaggaaggccaggtcggttcctctgcaatgcctcacaagatgaacgctcgctcctgtgagcgcgtgggcggcctgcaggttattcttcgcggatacctcaccatggttgctgatctttccggccagcagtggaacgaaggcgatgtcttctgctccgtgatccgccgcgttgcactgccagacgcattcttcgcgattgacggaatgtttgaaactttcctgacagtcctggatgaattcggtgcattccctgccatgatcgagcgcgaacttgagcgttacctgccattcctggcaactacccgtatcctcatggccgctgtccgcgcaggcgttggccgcgaaaccgcacacgaagtaatcaaggaaaacgctgtcgcggttgccctcaacatgcgcgaaaatggcggtgaccaggaccttatccagcgcctcgctgctgatgagcgcctcccaatgagcgaagctgaccttgaggcagcgctggctgaccgccacgccttcatcggtgccgctgagtcccaggtctcccgtgtgctcgaccgcattcaggtgcttgtcgacgcccaccccggcgccgcagactaccgaccaggtgagattctttag

SEQ ID NO: 3176 - protein, 476 aa, Corynebacterium glutamicum
MADKKKIANVLSNRYASAELSNLWSAEEKIIMERQLWIAVMKAQKDLGVEIPAEAIESYEAVIDQVDLASIADRERVTRHDVKARIEEFNALAGHEHIHKGMTSRDLTENVEQLQIHRSLELVRNKGIAVVAAIGSRAAQYQSLVMAGRSHNVAAQATTLGKRFATAADEMLVALERVTELLNRYPLRGIKGPMGTAQDMLDLMEGDEARLSDLETRIAAHLGFDRVFDSVGQVYPRSLDFDAVSALVQLGSGPSSLSHTIRLMAGTETVTEGFKEGQVGSSAMPHKMNARSCERVGGLQVILRGYLTMVADLSGQQWNEGDVFCSVIRRVALPDAFFAIDGMFETFLTVLDEFGAFPAMIERELERYLPFLATTRILMAAVRAGVGRETAHEVIKENAVAVALNMRENGGDQDLIQRLAADERLPMSEADLEAALADRHAFIGAAESQVSRVLDRIQVLVDAHPGAADYRPGEIL

SEQ ID NO: 3177 - DNA, 1119 bp, Corynebacterium glutamicum
  CDS (1)..(1119)
atgaaaccccattttttggactctaaattgacccgatctttatactccgaccttgctggtagtggagaacacctcagcagcctttccgacgagactttcctaaagaatcttcttgtcgtggaggccgctttggcggttgcagctgcccccgagcacgcagcaatggcgaaggccaccattgattcttatcagttggatgtggaggagctttcccgtcgcgcagccgagggcggtaatccgctcattccgctggtcactgacctcaaggccatcaatccggcaggcatccacattggcgcaacgagccaggacatcattgattctgcgttaatgctgtgcatgaaggaaggggtgggggaggtcgtcgacaagcttaaaaagcttgcgcgagatttggccgagctcaccgcggagcataaagcaaccccgatcatggggcgcacgttggggcagatcgcgacgccgacgacgttcggcgcgctgaccggcggctggctggttgcggtggacaatgcggcacgcgccctggaggcgctggagtttccggtgtcgtatggcggtgccagcggaaatatgacggcggtgcacccgcgtggcttcgagattcaggcgaagctggccgaggagttgggcctttttgatccgcagtgggtgtggcattccgatcgcacgccgatcactgcgatcgcgtcggcgctggcaacggccgctggtgtggtacgcaaaattgctggtgacgtggtgttttactcacaaaccgaggtcggcgagttgcgggagaaatcccccggcggcagctccgcgatgccccacaaagccaatccggccgctgcgattgcgtgcgacggttacgcgcgccgggcacctggccttcttgcaacgcttttcgacgccctcgactgccgtttgcagcgcggcaccggcagctggcacgcggagtgggcaacgctgcgcgagttggctgctgtcactcactcagcagtgagcagggctgcaaccagcatcgatggcatcaccgtcaacgttgatgtgatggcaagtcgcgtcaatggaccaaccgggcacgccgaagatttggcggagcgggcactagaaatttatggaaaaggacgcagttag

SEQ ID NO: 3178 - protein, 372 aa, Corynebacterium glutamicum
MKPHFLDSKLTRSLYSDLAGSGEHLSSLSDETFLKNLLVVEAALAVAAAPEHAAMAKATIDSYQLDVEELSRRAAEGGNPLIPLVTDLKAINPAGIHIGATSQDIIDSALMLCMKEGVGEVVDKLKKLARDLAELTAEHKATPIMGRTLGQIATPTTFGALTGGWLVAVDNAARALEALEFPVSYGGASGNMTAVHPRGFEIQAKLAEELGLFDPQWVWHSDRTPITAIASALATAAGVVRKIAGDVVFYSQTEVGELREKSPGGSSAMPHKANPAAAIACDGYARRAPGLLATLFDALDCRLQRGTGSWHAEWATLRELAAVTHSAVSRAATSIDGITVNVDVMASRVNGPTGHAEDLAERALEIYGKGRS

SEQ ID NO: 3179 - DNA, 1254 bp, Corynebacterium glutamicum
  CDS (1)..(1254)
atggctgcggagagagcactctcaactgctcaagcccgccatggtgtgatcactgaagacgatgctgcacagatcaaccaggcggcagtcctttccaacattgaccgcgagaagctgtgggaagatgccaaaaatgtcggctaccccatccttggcttggtaagacaaatcgccagtcaccttccagaaggccccaacgggcgagtccactacggcgccacgacccaagtcatcatggacactggactggtgttgcaaatgactgcctctttgaacgcccttgataaacagatcgtgcgtctggggaatgcactggcagcacgggctgaagagcacaaagacaccgtgatgccgggacgcacccatgctcagcaggcaattcccactacatttggagcaaccctcgctacctttttggatcaaatccgcaggcagagggaacgacttgaggaagcactcgagcgcgtgcgagtcatttcgctgtttggtgctggtggaaacaacgcagcacaaggcgaacaagcggcaacggttcgtgcagagatggcccgcctgttggatctgaaggacccggtggtgtcatggcatgtggaacgcgatgtgcttggggacttcggatgggtgtgctcaacgctgtgtggatcgatggcaaaatttggccgaaacatcgtggatctttcccgaactgaaatcggagaagtttttgagccttacaactcccatcggggtgcatcttccatgatgcctcagaaagtcaacccgatttcttccgagctcatgattggtatttcagtggtggcgggtgccttgacctcgactttgccacggcttcaggaatcgggacatgaacgagcagcaggagagtggcagggagaatggcttgtcattccaacgttggccaatctagctggcgctgcactcgatgaagccattgtggtggctgaaggaatgcgagtggatacagatcgtatgtcctcgaacttggcttttgctggtggattgatcatggcggaagctcagatgattcaactagctccagctctggggcgtgagaaagctcatgacttggtttatgaagcatccacaaagactcgtgaagagcacaccacgctggcagaagaactgccgataattgcagttcaacatggggtcgaagacctgttgcctaagaattttgcgcagcctgcagactacgtcggcgaagcacaatccatggtgaatgcagctgtcgccgcctggaatgcccaactttag

SEQ ID NO: 3180 - protein, 417 aa, Corynebacterium glutamicum
MAAERALSTAQARHGVITEDDAAQINQAAVLSNIDREKLWEDAKNVGYPILGLVRQIASHLPEGPNGRVHYGATTQVIMDTGLVLQMTASLNALDKQIVRLGNALAARAEEHKDTVMPGRTHAQQAIPTTFGATLATFLDQIRRQRERLEEALERVRVISLFGAGGNNAAQGEQAATVRAEMARLLDLKDPVVSWHVERDVLGDFGWVCSTLCGSMAKFGRNIVDLSRTEIGEVFEPYNSHRGASSMMPQKVNPISSELMIGISVVAGALTSTLPRLQESGHERAAGEWQGEWLVIPTLANLAGAALDEAIVVAEGMRVDTDRMSSNLAFAGGLIMAEAQMIQLAPALGREKAHDLVYEASTKTREEHTTLAEELPIIAVQHGVEDLLPKNFAQPADYVGEAQSMVNAAVAAWNAQL

SEQ ID NO: 3181 - DNA, 1293 bp, Streptococcus pyogenes
  CDS (1)..(1293)
atgatcgaacgttattcacgccctgagatggcggcaatttggacagaggaaaataaataccgtgcttggttggaggttgagattttggctgacgaggcatgggctgagttgggtgagattcctaaggaggatgtggctaagattcgtgagaaggcggattttgacattgaccgcattcttgagattgagcaggacacacgtcacgatgtggtggctttcactcgtgcggtttctgaaacgcttggtgaggagcgcaagtgggtgcactacggtttgacgtcaactgacgtggtggacactgcctacggttacctctacaagcaagctaacgacattatccgtcgcgatcttgagaagttcaccaatatcgtggcagacaaggcgcgtgagcacaaaatgaccatcatgatgggtcgtacccacggtgttcacgccgagccaacgactttcggtcttaagttggcgacttggtacagcgagatgaaacgtaatattgagcgttttgaacatgctgccgcaggtgtggaagctggtaagatttcaggtgccgttggtaactttgctaatatccctccatttgtggaacaatatgtctgttacaaattaggcattcgtccacaagagatttcaacacaagttcttccacgtgacctccacgcagaatattttgcagtgcttgcaagtattgcaacttctatcgaacgtatggcgacagagattcgaggtctgcaaaagtcagaacaacgggaagttgaagaattctttgccaaaggtcagaaaggtagctctgctatgcctcacaaacgcaacccaatcggttcagagaacatgacagggctagcgcgcgtgattcgtggtcacatggtgacagcttatgagaacgtgtcactttggcatgagcgtgatatttcacactcatcagctgagcgtatcatcacacctgacacaactatcttgattgactacatgctcaaccgctttggcaatatcgttaagaacttgactgtcttcccggaaaatatgatgcgcaatatggaatcaacttttggtttgatttatagtcaacgtgttatgctcaaattgattgaaaaaggaatgacacgagaagaagcttatgacttagttcaacctaagacagcttattcctgggacaatcaagtggatttcaaaccacttttagaagaagacaccaaagttacctcttgtcttacacaagaagaaattgatgaactatttaatccgatttattacacaaaacgtgttgatgatatttttaagcgtttagggatttaa

SEQ ID NO: 3182 - protein, 430 aa, Streptococcus pyogenes
MIERYSRPEMAAIWTEENKYRAWLEVEILADEAWAELGEIPKEDVAKIREKADFDIDRILEIEQDTRHDVVAFTRAVSETLGEERKWVHYGLTSTDVVDTAYGYLYKQANDIIRRDLEKFTNIVADKAREHKMTIMMGRTHGVHAEPTTFGLKLATWYSEMKRNIERFEHAAAGVEAGKISGAVGNFANIPPFVEQYVCYKLGIRPQEISTQVLPRDLHAEYFAVLASIATSIERMATEIRGLQKSEQREVEEFFAKGQKGSSAMPHKRNPIGSENMTGLARVIRGHMVTAYENVSLWHERDISHSSAERIITPDTTILIDYMLNRFGNIVKNLTVFPENMMRNMESTFGLIYSQRVMLKLIEKGMTREEAYDLVQPKTAYSWDNQVDFKPLLEEDTKVTSCLTQEEIDELFNPIYYTKRVDDIFKRLGI

SEQ ID NO: 3183 - DNA, 1368 bp, Xanthomonas campestris
  CDS (1)..(1368)
atgtcggattccgccctgctcgccctgtccccactcgatggccgctacgcctccaaggtggacgcgctgcgcccgatcttttccgaatacggcctgatcaaggcgcgggtgaaagtggagatcgagtggctgctggcactggccgccgagccgggcatcgccgaactgccggccttctcggccgccgccacgcagcgcttgcgcgccctggccgagcagttcagcgtgacgcacgccgcacgcgtcaaggagatcgaacgcaccaccaaccatgacgtcaaggcggtggagtacttcatcaaggaacagctcaaggacgacgccgagctgggcccggcgctggaattcgtgcatttcgcatgcaccagcgaagacatcaacaacctcagttacggcctgatgctggagcaggcacgccgcgaggtgctgctgcccaccctggacggcgtcgccgcctcgctgcgcacgcttgcgcacgctcaggccgcgcagccgatgctctcgcgcacgcatggccagaccgcctcgcccaccacgctcggcaaggagatcgccaacgtggtggcgcggctggagcgccagcgcaagcagatcgccgcggtcgagctgaccggcaagatcaatggcgcggtgggcaactacaacgcacacgtggcgtcctacccgtcggtggactggccgcagttcgcgcaacgctttgtcgaaggcttggggctggtcttcaacccctacaccacgcagatcgagccgcacgacaacgtggccgaaatcggcgatgccacccgccgcgccaacaccatcctcatcgacctggcacgtgacatctggggctacatttcgctcggctatttcaagcaaaaattgaaagaaggcgaagtcggttcctcgaccatgccgcacaaggtcaacccgatcgacttcgagaacgccgaaggcaatttcggcgtcgccaatgcgctgttcgagcatttcagcgccaagttgccgatcagccgctggcagcgcgacctcaccgactccaccgtgctgcgcgccctcggcaccgcgttcggccatacgcaagtagcgctcgactcgctggccaagggcctgggcaagctgaccgtcaattccgagcgcctggatgccgatctggacgccgcctgggaagtactggccgaggccgtgcagacggtgatgcgccgccatggcctgcccaatccctacgagcaactcaaggcactgacccgcggccagggcatcaccgccgcctcgatgcaggcgtttgtggaaagcctgcaactgcccgaaaaggacaagcagcgcttgcgtgcgttgacgcccggtgcttataccggtctggccgagcaattggcgcgcgccatctga

SEQ ID NO: 3184 - protein, 455 aa, Xanthomonas campestris
MSDSALLALSPLDGRYASKVDALRPIFSEYGLIKARVKVEIEWLLALAAEPGIAELPAFSAAATQRLRALAEQFSVTHAARVKEIERTTNHDVKAVEYFIKEQLKDDAELGPALEFVHFACTSEDINNLSYGLMLEQARREVLLPTLDGVAASLRTLAHAQAAQPMLSRTHGQTASPTTLGKEIANVVARLERQRKQIAAVELTGKINGAVGNYNAHVASYPSVDWPQFAQRFVEGLGLVFNPYTTQIEPHDNVAEIGDATRRANTILIDLARDIWGYISLGYFKQKLKEGEVGSSTMPHKVNPIDFENAEGNFGVANALFEHFSAKLPISRWQRDLTDSTVLRALGTAFGHTQVALDSLAKGLGKLTVNSERLDADLDAAWEVLAEAVQTVMRRHGLPNPYEQLKALTRGQGITAASMQAFVESLQLPEKDKQRLRALTPGAYTGLAEQLARAI

SEQ ID NO: 3185 - DNA, 1368 bp, Xanthomonas axonopodis
  CDS (1)..(1368)
atgtcggattccgctctgctcgccctgtccccgctcgacggccgctacgcctccaaagtggatgcgctgcgcccgatcttctccgaatacggcctgatcaaggcgcgggtcaaggtcgaaatcgaatggctgctggcactggccgccgagccgggcatcgccgaactggcgccgttctcgccggctgccacgcagcggctgcgcgccctggccgacgatttcggcgtggcccatgccgcgcgggtcaaggaaatcgagcgcaccaccaaccatgacgtcaaggcggtggagtacttcatcaaggagcagctcaaggacgatgccgaactcggcccggcgctggaattcgtgcactttgcctgcaccagcgaagacatcaacaacctgagctacgggctgatgctggagcaggcacgccgtcaggtgttgctgcccagcctggatggtattaccgccgcgctgcgcaccctcgcccacgcccaggccgcccagccgatgctctcgcgcacccacggccagaccgcctcgcccaccacgctgggcaaggaaatcgccaacgtggtcgcgcgcctggagcgccagcgcaagcagatcgccgcggtcgaactgaccggcaagatcaacggcgcggtcggtaattacaacgcgcacctggtgtcgtacccggacctggactggtcggcgttcgcacagcgtttcgtggaaagcctgggcctggtgttcaacccctacaccacccagatcgagccgcacgacaatgtggccgaaatcggcgatgccagccgccgcgccaacaccatcctgatcgacctggcgcgcgacatctggggctatatctcgctgggctatttcaagcagaagctgaaagagggcgaagttggctcctcgaccatgccgcataaggtcaaccccatcgacttcgaaaatgccgagggcaatttcggcatcgccaacgcgctgttcgaacatttctccgccaagttgccgatcagccgctggcagcgcgacctcaccgattccaccgtgctgcgcgcactcggcaccgcgttcggccatacccaggtcgcgctggattcgctggccaagggcctgggcaagctcaccgtcaaccccgagcggctggatgccgacctggatgcggcctgggaagtgctggccgaagccgtgcagacggtcatgcgccgccacggcctgccgaacccctacgaacaactcaaggcgctgacccgcggccagggcatcaccgccgcctcgatgcaggccttcgtggaaagtctgcaactgccggaacaagacaagcagcgcctgcgcgcgctcaccccgggcgcctacaccgggctggccgagcagctggcgcgcgcgatctga

SEQ ID NO: 3186 - protein, 455 aa, Xanthomonas axonopodis
MSDSALLALSPLDGRYASKVDALRPIFSEYGLIKARVKVEIEWLLALAAEPGIAELAPFSPAATQRLRALADDFGVAHAARVKEIERTTNHDVKAVEYFIKEQLKDDAELGPALEFVHFACTSEDINNLSYGLMLEQARRQVLLPSLDGITAALRTLAHAQAAQPMLSRTHGQTASPTTLGKEIANVVARLERQRKQIAAVELTGKINGAVGNYNAHLVSYPDLDWSAFAQRFVESLGLVFNPYTTQIEPHDNVAEIGDASRRANTILIDLARDIWGYISLGYFKQKLKEGEVGSSTMPHKVNPIDFENAEGNFGIANALFEHFSAKLPISRWQRDLTDSTVLRALGTAFGHTQVALDSLAKGLGKLTVNPERLDADLDAAWEVLAEAVQTVMRRHGLPNPYEQLKALTRGQGITAASMQAFVESLQLPEQDKQRLRALTPGAYTGLAEQLARAI

SEQ ID NO: 3187 - DNA, 1359 bp, Methanosarcina mazei
  CDS (1)..(1359)
atggtgattgatatggctattcatcctatagaataccggtacggtacagcagaaatgaaatatgtgtggagtcaggaaaacagacttgctaagatcttgcagaccgaggcagctcttgcccgggcagaagcggatatggggcttattcccgcagaagcggctgaaattatattcgaaagcattgcctctgtaaaagccgagagagtcgatgaaatagaatccgagatccaccatgacatgatggctgtcgttgttgcaatttcagagatgtgcagggatgacgcaggaaaatgggttcacttcggagccacttcaaacgatattcttgataccgcaacagctctccagattaaagacgcaattgatattctggaagacaaactcaaaacccttctaaaagttctggtaaaccaggctgaagcccacaaaaatactgtctgctgcggaaggactcacgggcagataggtgttccaaccacttacggtcttcgttttgcaatctgggcttctgaaatctcaaggcatcttgaccgcctgtacgaactgactccaagagctactgtggggcagatgaccggcgctgtaggcactcaggcagcttttggaaaatcgggaatccttattcagaaacttacaatgcaacacctcggaatcggggctgttgatgtctcaaaccagattatccagagggacagacatgccgagtttgttatgtggatggcaaatgtagttacaacactggacaagatcgggatcgaaatcaggactcttcaacgcagtgagatcgccgagatagaggaaagtttcgggaaaaagcaggtaggttcatccaccatgcctcacaagcgtaatcctatcaagtccgaacagatctgcgggctcgcccgaatagtaagggcaatggttgagcctgaactccttaacaacacactatgggacgagagggacctcacgaattcttcaagtgaacggattgtcttccctgaagcctgtatacttaccgatcatatcattaaactcgggatcagcgttcttgaaaacctcaggttctatcctgaaaatatccgcaggaaccttgattccttaaatggtctgaatatgggcgaggctgttatgatagaacttgcaaaaagaggtgtcggcaggcaggaagcccacgaacttgtccggactgcagctatgagagctcatgatacagggcagcatttcaaacaggttcttctggatactccttccgtttcaaaatatctgagtgcaggagatattgagaaccttgtaaaccctgacaaatatatagggacagcagtggaacaggtagaagggctcgttataaagcttcgagaagcctattcactctga

SEQ ID NO: 3188 - protein, 452 aa, Methanosarcina mazei
MVIDMAIHPIEYRYGTAEMKYVWSQENRLAKILQTEAALARAEADMGLIPAEAAEIIFESIASVKAERVDEIESEIHHDMMAVVVAISEMCRDDAGKWVHFGATSNDILDTATALQIKDAIDILEDKLKTLLKVLVNQAEAHKNTVCCGRTHGQIGVPTTYGLRFAIWASEISRHLDRLYELTPRATVGQMTGAVGTQAAFGKSGILIQKLTMQHLGIGAVDVSNQIIQRDRHAEFVMWMANVVTTLDKIGIEIRTLQRSEIAEIEESFGKKQVGSSTMPHKRNPIKSEQICGLARIVRAMVEPELLNNTLWDERDLTNSSSERIVFPEACILTDHIIKLGISVLENLRFYPENIRRNLDSLNGLNMGEAVMIELAKRGVGRQEAHELVRTAAMRAHDTGQHFKQVLLDTPSVSKYLSAGDIENLVNPDKYIGTAVEQVEGLVIKLREAYSL

SEQ ID NO: 3189 - DNA, 1356 bp, Methanosarcina acetivorans
  CDS (1)..(1356)
atgatcgatgtggcaattcatccgatagaataccggtacggtacagcagaaatgaaatacgtatggagtcaggaaaacagactagctaagatcttgcagaccgaggcagcccttgctctggcagaagcggatatgggacttatcccggcagaagcggctgagattatctccgaatgcgttccctccgtaaaggcggaaagagttgacgaaatcgaagccgagatccaccacgacatgatggctgttgttgttgcgatttctgagaagtgcagggaagatgcgggaaagtgggtccatttcggcgccacttcaaacgacatccttgacacagcaaccgcgctccagataaaggacgcaatcgaccttctggaagataaactcaaaatcctgctcagggtgctggtaaaccaggcagaagcccataagaacactgtttgctgtgggaggacacacgggcagataggcgttcccacaacatacgggctccgttttgcaatctgggcttccgagatttcaagacaccttgaccgcctttacgagctgactccgagagctaccgtggggcagatgaccggggctgtcggaactcaggcagcttttgggaagtccggaatcctgatccagaaacttacgatgcagcacctcggaatcggggctgtggatgtctcaaaccagataatccagagagacaggcatgccgaatttgtgatgtggatggcaaatactgttacgaccctggacaagatcggcatcgaaatcaggaatctgcagcgcagtgaaatcgccgagattgaggaaagtttcgggaaaaagcaggtgggttcgtctaccatgccccacaagcggaacccgatcaagtccgagcagatctgcgggcttgcgaggatcgtaagggcaatggttgaacctgaactccttaacaacaccctctgggacgaacgggaccttacaaattcttcctgcgagagagtcgtcttcccggaagcctgtgtgcttacggaccatatccttaaacttgggatccgtgtgcttgagaatctcaggttctatcccgaaaatatccgcaggaacctggacctgctaagaggcctgaacatgggcgaagctgtaatgatcgaacttgcaaaaaggggtgtaggcaggcaggaagcccatgagcttgtcaggacttcggctatggaagcccatgagacggggcagcacttcaaacaggtacttctggatactccttccgtttcaaggtacttgagtgtagaagatatcgaaaaactcgtaaatcccgataagtatataggaacagctgtagaacaggtcgaagcgctcgttgtaagacttcgtgaagcttattccctctga

SEQ ID NO: 3190 - protein, 451 aa, Methanosarcina acetivorans
MIDVAIHPIEYRYGTAEMKYVWSQENRLAKILQTEAALALAEADMGLIPAEAAEIISECVPSVKAERVDEIEAEIHHDMMAVVVAISEKCREDAGKWVHFGATSNDILDTATALQIKDAIDLLEDKLKILLRVLVNQAEAHKNTVCCGRTHGQIGVPTTYGLRFAIWASEISRHLDRLYELTPRATVGQMTGAVGTQAAFGKSGILIQKLTMQHLGIGAVDVSNQIIQRDRHAEFVMWMANTVTTLDKIGIEIRNLQRSEIAEIEESFGKKQVGSSTMPHKRNPIKSEQICGLARIVRAMVEPELLNNTLWDERDLTNSSCERVVFPEACVLTDHILKLGIRVLENLRFYPENIRRNLDLLRGLNMGEAVMIELAKRGVGRQEAHELVRTSAMEAHETGQHFKQVLLDTPSVSRYLSVEDIEKLVNPDKYIGTAVEQVEALVVRLREAYSL

SEQ ID NO: 3191 - DNA, 1419 bp, Methanopyrus kandleri
  CDS (1)..(1419)
atgcccgttcatccgatcgagtcacggtacggatcggacgagctccgccgggtgttctcggaagagaacaaagtggcgaagatgctcgaggttgaggcggccctggtacgggcgctctccgaggtgttcgacttcgtaccggaggaggccgcggacgaggtggaacgcgtcgtcgaggagatcaccggcgacgaggaagagctacgacggttcgtggaacgcgtcaaggagatcgaggcggagatcaaacacgacgtgatggccctggtgaaggcgctatcggagcggtgcgaggttggcggggactacgtgcacctgggcgctaccagcaacgacgtgatagacaccgcgcacgcgttggtactgcgggaagcactgtcgataatctaccgcaggctgcaccgtctagcggaagtgctggcggagaaggccgaggagtacgccgacctcccgatggtgggtcgcacgcacggtcagcacgcggttcccacgacgctcggtatgaagttcgcgatctgggcacgcgaggtcgtgaggcacctgaagcgactccgggagtgcgcgaaccgggtactggtggggcagctgtccggtgccgtcggaacgatggcggcgctgggcgagaagggtcctgaggtgcagcgtcgggtgatggaactgctgaacctcaggccggtgaccgtgtccaaccaggtcattcagcgggaccgctacgcggagttgatcgcactgctcgcgctgatcggctcgacgctggataagatcggccgcgagatcaggaacctccagcggacggagatccgggaggtcgaggaaccgttcgaccccgagaagcaggtcggatcctcgacgatgccacacaagcggaatccgatccgttccgagcgggtgtgtagcctggcgagggtactgcggtcaaacgtgcagatagcgctcgagaacgtgccgctcgaacacgagcgggacctcacgaactccgcgagcgagcgggtgatcctccccgaacagttcctgctgctggacgaaatgctgcggctgacgatccacaacttggagggattacgcgtttacgaggagaacatacgggagaacctgcggctgacgaaggggcttaatatggcggaggcactgatggtcgaactggtcaagcgaggaatagggcgacaggaggcgcacgagctcgtgagacggctcgcgatgagggcttgggaggaaggacgtgacttcgcggaagtagttaaggaggaagagcgcgtccgtgagctgttcggagaagaagagttagatgaggtgttggaccccgagaagtacttgggcgtggctcccgacctggcgcgtgaggccgccgagaagacccgacgcgacctggaggagatcgatcgcgagatgaaggaggtgttgggtgtcggtgcgggataa

SEQ ID NO: 3192 - protein, 472 aa, Methanopyrus kandleri
MPVHPIESRYGSDELRRVFSEENKVAKMLEVEAALVRALSEVFDFVPEEAADEVERVVEEITGDEEELRRFVERVKEIEAEIKHDVMALVKALSERCEVGGDYVHLGATSNDVIDTAHALVLREALSIIYRRLHRLAEVLAEKAEEYADLPMVGRTHGQHAVPTTLGMKFAIWAREVVRHLKRLRECANRVLVGQLSGAVGTMAALGEKGPEVQRRVMELLNLRPVTVSNQVIQRDRYAELIALLALIGSTLDKIGREIRNLQRTEIREVEEPFDPEKQVGSSTMPHKRNPIRSERVCSLARVLRSNVQIALENVPLEHERDLTNSASERVILPEQFLLLDEMLRLTIHNLEGLRVYEENIRENLRLTKGLNMAEALMVELVKRGIGRQEAHELVRRLAMRAWEEGRDFAEVVKEEERVRELFGEEELDEVLDPEKYLGVAPDLAREAAEKTRRDLEEIDREMKEVLGVGAG

SEQ ID NO: 3193 - DNA, 1353 bp, Pyrococcus furiosus
  CDS (1)..(1353)
atggcgattcacccaattgattatcgctatggtagcgaggagatgaagaggatatgggatgaggagaataagttgcaaaagctacttgacgtggaggccgcacttgctagggctcatgctaaggtaggaaatatcccagaggaaagtgcaagggtgatttcagagagggccaacaccaagtgggtaaagcttgagagggttaaagagatagaggccgagattcatcacgacataatggccgtggttaaggccttaagcgaagtttgcggtgagcatgggaagtacgttcacctgggagcgacttccaacgacatcatcgatactgcaaacgcccttctaataaaggaaagccttgagatcgtggagagagacctaaaggaactcaggtcaatattgaaaaagttagctaaggagcatatagatacagtttgcattggaagaactcatggacagcatgcaatcccaacaacatacggaatgaaatttgccttgtggttggacgagattcagaggcacatcgagaggttgtaccaattaaaggagagagttttagttggaaagatgagaggagctgtgggaactgcagcctcatttggagaaaaggcctttgaaatagagaggctagttatggaagacttgggattaaagccggcaagaataacaaatcaaataatccagagagatgtttatgccgagcttatgttcttcttggcattggtagcttcaactttggacaagatgggattagagataagaaaccttcagagaacggaaattcttgaggttagtgagccctttggagagaagcaggttggttcttcaacaatgccacacaagaggaatccaataaggactgagaaagtctgtggattggccagggttctttactcaaacgttattccagccctcttaaacaatccattgtggcatgagagagatttgacgaactcttcagttgagagggtaatcctcccagagagctttatattgcttgacgaaatgttgaaaacaatgaaaaaggttctttcgggattggagttcttccccgagaatattaagagaaacctatatctaacgaagaatttgataatggctgaaccattaatgctcaagcttgcggagaaaggaatgggaaggcaggaggcacatgagctagttaggcaaatatccatgaaggcctttaaggagaacagagatctcttggaagtggcaaaggagaatgaggaagttagaaaatatttaacagagaaagattttgaatctttgaagccagaaaactacataggaaaggccagagaaatagtagagaatgttatagcttatgttgaagaaatggaggctaaaggtctttaa

SEQ ID NO: 3194 - protein, 450 aa, Pyrococcus furiosus
MAIHPIDYRYGSEEMKRIWDEENKLQKLLDVEAALARAHAKVGNIPEESARVISERANTKWVKLERVKEIEAEIHHDIMAVVKALSEVCGEHGKYVHLGATSNDIIDTANALLIKESLEIVERDLKELRSILKKLAKEHIDTVCIGRTHGQHAIPTTYGMKFALWLDEIQRHIERLYQLKERVLVGKMRGAVGTAASFGEKAFEIERLVMEDLGLKPARITNQIIQRDVYAELMFFLALVASTLDKMGLEIRNLQRTEILEVSEPFGEKQVGSSTMPHKRNPIRTEKVCGLARVLYSNVIPALLNNPLWHERDLTNSSVERVILPESFILLDEMLKTMKKVLSGLEFFPENIKRNLYLTKNLIMAEPLMLKLAEKGMGRQEAHELVRQISMKAFKENRDLLEVAKENEEVRKYLTEKDFESLKPENYIGKAREIVENVIAYVEEMEAKGL

SEQ ID NO: 3195 - DNA, 1778 bp, Vigna unguiculata
  CDS (6)..(1619)
ctttcatggagttcgcggcactctctagcgctgcccaacttgggagcttcaaccctcttagaaccaaacttcaaagttcagcacaacacaaccctcttcaattttcctatgcttctttcccttcttcctttcccagagtttgctcctgcaaagccatcctcagcacccacacacccacctccacccacaaaatgtttggactccaatcagatgattttgaactctctgctttgacggcgttgtccccattggatggtcgttattggggcaaagtcaaggaactgtctccttatttgagtgaatctgccttaatctactttcgggttcttgttgagataaaatggttgctgcagctgtctgtgattcctgaaattgttgaggttcccagtttcagtgagagtgccaagactttcctacaaagcctgattgatgactttagtattgatgatgccttggaggttaaaaacattgagagggtcacaaatcatgatgtcaaagcggtggagtacttcttgaaacagaaatgtcaatccaatgctgaagtggctaaggtgcttgagtttttccactttgcttgcacatctgaggatataaataatcttgcccatgccttgatgctgaaggaatcaatcaattctgtaatgtttcctgtcatggataaaataatcaaagctttgtgtgacatggctaaagataatgcacatgttccaatgctttctaggactcatgggcagccagcttcaccaactactttgggcaaggaactggctatctttgctgtaagattaagcagagaaaggaaggatctatctcagattgagatattggggaaatttgctggtgcagttggaaattacaacgcacatgttgttgcatatcccaatgttaactggcctcaggttgccgaacagtttgtacattctcttggattaagttttaatccttacgttgctcagattgaaacccatgactacatggcaaagctttttcagtcgctcattcggttcaataatatattaattgactttgatagagatgtatggggctatatatctttgagctactttaagcagattactaaggctggggaaattgggtcatcaactatgcctcacaaagttaatcctattgattttgagaacagtgaaggtaatctaggtgtagctaatggagttctgtctcatctgagcatgaagttgccgatttcacgttggcagagggacttgactgattcaactgtcataaggaacatccctataggtatcggtcattctcttcttgcctacaaaagcacacttcaaggaatggggaagcttcaggttaatgaagctcgcttgagggaagacttgaaccagtgctgggaggtgcttgctgaaccaatacagactgttatgcgaagatatggtgttcccgagccttatgagaagctaaaagaactaaccagagggagagccgttaacaaagagagcataagagacttcattgaaggcttagatattccagaagaagcaaagacgaatctgttgaagttaacacctgacacttatgttggagcagctgttgaattggccagaacagtagaaaatgtggtgaacattgtgaatggatcgaatatttagtaaacaagtgatcgaagcagttttctgatttgtcaattagtttatgagactcttgggaagacaattttgcatcctcgccgtccattcacaccatgtggttattattagttgatatatgaagtctaaaataagatgttccatttgaaaaaaaaaaaaaaa

SEQ ID NO: 3196 - protein, 537 aa, Vigna unguiculata
MEFAALSSAAQLGSFNPLRTKLQSSAQHNPLQFSYASFPSSFPRVCSCKAILSTHTPTSTHKMFGLQSDDFELSALTALSPLDGRYWGKVKELSPYLSESALIYFRVLVEIKWLLQLSVIPEIVEVPSFSESAKTFLQSLIDDFSIDDALEVKNIERVTNHDVKAVEYFLKQKCQSNAEVAKVLEFFHFACTSEDINNLAHALMLKESINSVMFPVMDKIIKALCDMAKDNAHVPMLSRTHGQPASPTTLGKELAIFAVRLSRERKDLSQIEILGKFAGAVGNYNAHVVAYPNVNWPQVAEQFVHSLGLSFNPYVAQIETHDYMAKLFQSLIRFNNILIDFDRDVWGYISLSYFKQITKAGEIGSSTMPHKVNPIDFENSEGNLGVANGVLSHLSMKLPISRWQRDLTDSTVIRNIPIGIGHSLLAYKSTLQGMGKLQVNEARLREDLNQCWEVLAEPIQTVMRRYGVPEPYEKLKELTRGRAVNKESIRDFIEGLDIPEEAKTNLLKLTPDTYVGAAVELARTVENVVNIVNGSNI

SEQ ID NO: 3197 - DNA, 1678 bp, Schistosoma mansoni
  CDS (22)..(1464)
agaatctgttttatactccaaatggatgaattcgaggaatacagaaatccacttactaagcgatatgcaagccgtgaaatggtgtgcaatttcggtgaaaaacgaaaagtaatcctctggcgccaactgtggatatggctagcagaaacacaaaaagagcttggattcgatatcacagacgaacagattaatgaaatgaaaagtcaaagagattcagtggatttcgggactgccgcagctgaagaaaaggctcgacgacatgacgttatggcgcatgtatatacttttgctttagcttgtccaaaagctgcaccaatcattcacctcggtgcaacatcttgttttgttggtgataatgccgatttaattatgcttaaggatggtttaaatatacttttaccgaaggttgctaggtgtattgaccggttagctaaaaaagctatgttgcacaaaagtttaatatgtctcgctcgcacccatttgcaacccgctcaacctactacaatgggccgtagaatatgtatgtggatacaagatttgttattagatttagaaaatctagaaaggttgaagaaccacacaatccgttttcgtggtgctaagggtgcagtgggaactcaagcatcttttatggatttattccaaggtgatcatcaaaaggttatcaagttggacgaaatcttaaccaaaaagtctggattccaacgttcttggtgtgtaactggtcaaacttatccaagaaaagtggacattgaaatcactaacgcattgtcgaatataggtgcaactgtccataaaatatgcaccgacatacgactactgagtacttttcacgaagttgaggaaccttttgaaaccaaacagatcggttcaagtgcaatgccatataaacgtaatcctattcgatcagaaagagcatgttctttagcacgttatctaatgcatatatcgacttccatggtttctacagtatctgttcagtggctcgaacgttcactagatgactcagctattcgtataattgtcctcccagaagcttttcttgcagccgatgcatgtcttactttactacaaaatatagctgaaggattaatagtatacccgatggtaatggaagctaatttaaattctgaacttcctttcctcgttgttgaacgtattttagtcaaaatggtgtctgaaggcgcagccaaccgtcaagaatgccatgaacgccttcgtaagcatagtcatgaagctgctgcagaaattaaactaaagggtttaaaaaatagtctcatggataagttgctcaacgattattattttgccccgatacattcgttacttccaaccgtattagatccatcttatatgatcggtcgtgctgttgaacaggtggaagtattcctaaacactgaagttgatccagcaattcactcatacaaagattgtttagcattgaacagcaatataacaatttgacatgacaactttatagatcatcaaatcgtagttaacttttacttcagtcgatttctcttgatatgtttgaatagttaacttttgttatggggttgtactgcaatttttcagttcttttaattttaatattgctctgattttcccttttttctataatatcctttaatttgatctaatgtttatgtgatatctataaaattaatttttaatgttc

SEQ ID NO: 3198 - protein, 480 aa, Schistosoma mansoni
MDEFEEYRNPLTKRYASREMVCNFGEKRKVILWRQLWIWLAETQKELGFDITDEQINEMKSQRDSVDFGTAAAEEKARRHDVMAHVYTFALACPKAAPIIHLGATSCFVGDNADLIMLKDGLNILLPKVARCIDRLAKKAMLHKSLICLARTHLQPAQPTTMGRRICMWIQDLLLDLENLERLKNHTIRFRGAKGAVGTQASFMDLFQGDHQKVIKLDEILTKKSGFQRSWCVTGQTYPRKVDIEITNALSNIGATVHKICTDIRLLSTFHEVEEPFETKQIGSSAMPYKRNPIRSERACSLARYLMHISTSMVSTVSVQWLERSLDDSAIRIIVLPEAFLAADACLTLLQNIAEGLIVYPMVMEANLNSELPFLVVERILVKMVSEGAANRQECHERLRKHSHEAAAEIKLKGLKNSLMDKLLNDYYFAPIHSLLPTVLDPSYMIGRAVEQVEVFLNTEVDPAIHSYKDCLALNSNITI

SEQ ID NO: 3199 - DNA, 1395 bp, Plasmodium vivax
  CDS (1)..(1395)
atggagcacctgaagaacatctcgcccatcgacgggcggtacaaaaaggcgtgcggcgaactgtcggcgttcttctccgagcacgcgttgataaagcaccggatcatcgtcgaggtgcggtggcttctcttcctcaacgaggaggagctcttcttcgaaaaggtgaccgaccactcggtggaggtgctgaaccagattgccacaaacataacggacagcgacattgcaagagtgaaagcgatagaggaggaaaccaaccacgacgtaaaggcagtagaatattttgtgaaggaaaaattgaaaaactcaaaaagggaagacctcctaaagataaaagaatacgtacactacctctgcacaagtgaagatattaacaatgtagcttatgccacctgtctgaaggcatgcctaaacgatgtagtaatcccctgcttggaaaaaataatgctcaagctgaaggacctagctgtggagtactcccatgtgccgctactctcaaggacacatggccaacctgcatcttccaccacattcggaaaagaaatggctaatttctacgcgaggatacaccaccatgtgggggtcattagaagagtgaaggtatgtgcaaagtttaacggagctgtggggaatttcaatgcgcataaagtggccagcaaagacaccgactgggtgaataccattggattatttttaaaaaagcatttcaacttaacatacagcatatattgcacgcagatacaagaccatgattacatatgcgagctgtgtgatggtctggctagagcaaacggtactctgattgacctctgcgtagatatctggttatacatttctaataatttactaaagctcaaggtgaaggagaaggaagtcgggagcagcaccatgccacataaggtcaacccaattgactttgaaaatgcagaggggaacttacacatcgccaatgctttcttcaaactgtttagctctaaattgcctaccagcaggttgcagagggatctctcggactctactgtgttgcgcaatattggaagctcccttgcctattgcctcatcgcctacaaatcggtgctaaagggacttaacataattgatattgacaggaggaacctagaggaggaacttaaccaaaactggtccactttagcagaacccattcagattgtgatgaagcggcacaactatgtagatgcgtatgaggagcttaagcaattcactagggggaaagttatcgaccagaaaattatgcaagaatttattaaaacaaaatgtgccttcctcccccaggatgtcgtggaccagctgttggagttaactcccgcgacgtatactgggtatgccgactacttggccaagaatgtggagcggctatctggggagcgagactga

SEQ ID NO: 3200 - protein, 464 aa, Plasmodium vivax
MEHLKNISPIDGRYKKACGELSAFFSEHALIKHRIIVEVRWLLFLNEEELFFEKVTDHSVEVLNQIATNITDSDIARVKAIEEETNHDVKAVEYFVKEKLKNSKREDLLKIKEYVHYLCTSEDINNVAYATCLKACLNDVVIPCLEKIMLKLKDLAVEYSHVPLLSRTHGQPASSTTFGKEMANFYARIHHHVGVIRRVKVCAKFNGAVGNFNAHKVASKDTDWVNTIGLFLKKHFNLTYSIYCTQIQDHDYICELCDGLARANGTLIDLCVDIWLYISNNLLKLKVKEKEVGSSTMPHKVNPIDFENAEGNLHIANAFFKLFSSKLPTSRLQRDLSDSTVLRNIGSSLAYCLIAYKSVLKGLNIIDIDRRNLEEELNQNWSTLAEPIQIVMKRHNYVDAYEELKQFTRGKVIDQKIMQEFIKTKCAFLPQDVVDQLLELTPATYTGYADYLAKNVERLSGERD

SEQ ID NO: 3201 - DNA, 1374 bp, Plasmodium berghei
  CDS (1)..(1374)
atggaaaacttaaaaaacatttctccaattgatgggagatataaacatagttgtaaagaaattgccgaatatttctcagaatatgctttaataaaatataggatatatgcagaaatacaatggcttgtttttttgaatgaaaaaggttttttttttaaacagttaagtgtacaagcaattgacgagttacaaaaaatagcaaatataaatgacgaagatgcattaagattaaaacaaattgaaaaagaaacaaatcatgatgttaaagcagtagaatattttattaaagaaaaaataagtcaaaataatggtgaacttgttaatataaaagagtatgtacattatttatgtactagtgaagatataaataatatagcatatggtatatgcataaaatcgtgtttaaataatataataatacctcatatagaacaaataatgaatcgattaaaagagttagcatctgaatacagtcatgttgctatattatcgagaacccatggtcaacctgcatctgcaacaacctttggaaaagaaatggctaactattttgatagattaaaaagacatgtatctacattaaaaaacataaaaatatatggaaaatttaatggtgcagttggcaattttaatgctcataaaatagctaataataatattgattgggttaataatataaaatattttgtagaaaaatattttcatattaattatagtttatattgtacacaaatacaagaccatgattatatatgtgaaatttcagatgcattaggaagaattaattccacacttttagatttatcaatagatatatggttatatatatcaaataatttattaaaattaaaacatataaaaaatgaaataggaagcagtactatgcctcataaaataaacccaattgattttgaaaacgctgaaggaaatttacatctagctaatgcactttttaaagcattcagtgcaaaacttcctataagtagattacaaagagatttatccgattcaacagttttacgaaatattgggacttcatatgcatattcccttatttcttataaatcgattttaaaaggtttaggaaaaattgatattaatgaaaaagcagcatatcaagagttaaataataattggagtactttagctgagcctgttcaaattgttttaaaaaactataattttccaaatgcttatgaagaattaaaaaactttacacgtggaaagactattgataaagaactaatgcagcaatatattaaaacaaaatctcaattcatacccccaaattctatgaatcaattgttagatcttagccctaatacatatataggatatgctgattatttagctagtaatgttgataaaatataa

SEQ ID NO: 3202 - protein, 457 aa, Plasmodium berghei
MENLKNISPIDGRYKHSCKEIAEYFSEYALIKYRIYAEIQWLVFLNEKGFFFKQLSVQAIDELQKIANINDEDALRLKQIEKETNHDVKAVEYFIKEKISQNNGELVNIKEYVHYLCTSEDINNIAYGICIKSCLNNIIIPHIEQIMNRLKELASEYSHVAILSRTHGQPASATTFGKEMANYFDRLKRHVSTLKNIKIYGKFNGAVGNFNAHKIANNNIDWVNNIKYFVEKYFHINYSLYCTQIQDHDYICEISDALGRINSTLLDLSIDIWLYISNNLLKLKHIKNEIGSSTMPHKINPIDFENAEGNLHLANALFKAFSAKLPISRLQRDLSDSTVLRNIGTSYAYSLISYKSILKGLGKIDINEKAAYQELNNNWSTLAEPVQIVLKNYNFPNAYEELKNFTRGKTIDKELMQQYIKTKSQFIPPNSMNQLLDLSPNTYIGYADYLASNVDKI

SEQ ID NO: 3203 - DNA, 1374 bp, Ralstonia solanacearum
  CDS (1)..(1374)
atgtcgtcgctttccgccctgaccgccctgtctcccatcgatggccgctatgccgccaaggccgatccgctgcgcgagtggctgtccgaagccgccttcatgcgccaccgcgtcaaggtggaggtgcactggctgatcgcgctgtcgcaggcgggcctggcggagattccgcgcttttcggccgatgccgagcgcgcgctgctggccctggtcgaccactttgccgaggccgatgccgcccgcatcaaggaaatcgaagccgtcaccaaccacgacgtgaaggcggtcgagtactggctcaaggagcgtgtcaagggcaacgccgagctggaagccgccagcgagttcatccacttcgcctgcacgtcggaagacatcaacaacacctcgcacggcatgatgctcaagggcgcgcgcgacaccgtgatcgtgccgacgctgcgccgcgtgcaggcccgcctggtcgagctcgcccacgccaatgccgatgtgccgatgctctcgcgcacccacggccagccggccagcccgaccacgctgggcaaggaaatggccaacgtcgccgcgcgcctggaccgcgccatccgccgcatcgaagctgtcgagctgctgggcaagatgaacggcgcggtgggcaactacaacgcgcacctgtcggcctacccggatgcggactgggaagccttctccaagagcgtgatcgagacccgcctgggcctgacgttcaatccgtacaccatccagatcgagccgcacgactacatggccgagctgttcgatgccgtggcgcgcgccaacaccatcatcctggacctggaccgcgacgtctggggctacatctcgcagggctacttcaagcagaagaccaaggccggcgagatcggctcgtcgaccatgccgcacaaggtcaacccgatcgatttcgagaactccgaaggcaacgtcggcctggccaacgcggtgctgcgccacctgtcggaaaagctgccggtctcccgctggcagcgcgacctgaccgattcgaccgtgctgcgcaatatcggtgtggcgttcggctacagcctgctggcctacgacgcctgcctgcgcggcctgggcaagctggaaaccaacccggcccgcctggccgaagacctggatgcctgctgggaagtgctggccgagccggtgcagaccgtgatgcgccgctacggtatcgccaacccgtacgagcagctcaaggaactgacgcgcggcaagggcatttcgcgcgaggcgctgcgcgaattcatcgggaccctggcgattcccgaggctgcccgccagcagctgctggacatgacgccgggcagctatgtcggcaaggcggtggagctggcccgccggatcgcctga

SEQ ID NO: 3204 - protein, 457 aa, Ralstonia solanacearum
MSSLSALTALSPIDGRYAAKADPLREWLSEAAFMRHRVKVEVHWLIALSQAGLAEIPRFSADAERALLALVDHFAEADAARIKEIEAVTNHDVKAVEYWLKERVKGNAELEAASEFIHFACTSEDINNTSHGMMLKGARDTVIVPTLRRVQARLVELAHANADVPMLSRTHGQPASPTTLGKEMANVAARLDRAIRRIEAVELLGKMNGAVGNYNAHLSAYPDADWEAFSKSVIETRLGLTFNPYTIQIEPHDYMAELFDAVARANTIILDLDRDVWGYISQGYFKQKTKAGEIGSSTMPHKVNPIDFENSEGNVGLANAVLRHLSEKLPVSRWQRDLTDSTVLRNIGVAFGYSLLAYDACLRGLGKLETNPARLAEDLDACWEVLAEPVQTVMRRYGIANPYEQLKELTRGKGISREALREFIGTLAIPEAARQQLLDMTPGSYVGKAVELARRIA

SEQ ID NO: 3205 - DNA, 1362 bp, Ralstonia solanacearum
  CDS (1)..(1362)
atgattaccgcactgctcgatcgtaccttctccacaccggccatgctggcggtgtggtccgacgcggccaccgtgcgcgcgatgctcgacgtggaggccgcgctggcgcaggccgagggcgaggtcggcgtgatcccggcgcaagccgtggcgcccatccgcgcggtgtgcgccagggcgacgctggacctggaggcgctcggcgcggccgcggccggcgcgggcaacctcgcgattccgctggtcaaacagctgaccgccgccgtcgcgcagcacgacgaactcgccgcgcgctatgtgcactggggcgcgaccagtcaggacatcatcgataccggcctgatgctgcaatggcggcaggcggccgcgctgctcgacgccgatctgcggcaactggccgacgcgctggccgcgctggctcgcgtgcatcgcgatacgccgatggtcgcgcgcacctggctgcagcaggcgctgccgaccaccttcggccgcaaggtggccggctggctggaggcggtgcatcgcgcgcaggaccgcctggccgcgctgcgcgcgcatgtgcccgcgctgcagttcggcggcgcggccggcacgctggcgagcctcggcacgcaaggccgggccgtggcgcaggctttggcgcaggcgctcgatctgccgctgcccgcggcgtcgtggcatggcgagcaggaccgcatcgccgacatcggcgccgcgctggctttgctgaccggcacgcttggccacatggcgcgcgacctgtcgctgatgatgcagaccgaggtgggcgaggtggccgagccggcgggtgcaggcaagggcggctcatccaccatgccgcacaagcgcaacccggtcggctgtgccaccgtgctggcggcggccacgcgcatgccggggctggcggcgaccctgctggccgcgctgccgcaggagcacgagcgcgcgctcggcggctggcaggcgcaatgggccacgctgcgcgagatggcgtgcctcgccgccggcgcgctggaccgcatgcgcgagctcatcgccgggctgaacgtcgacgccgcgcggatgcgcgccaacctcgacctgacgcgcggcctgatcctggccgaagcggtgatgctcgccctgggcgccgacctgggccgcctgcaggcgcaccacgtggtggaggccgccagccgcctggctgtccggcagcaccggacgctgcgcgacgtgctggccgaagacgccgacgtgctgcgcgcctggggcgatgcggcgccgcagcggctggacgcgctgctcgatcccgcccactacctcggcgacgcggcggccgccgtcgaccgcgtgctggcggaacacgaccgtcgccgcgcctga

SEQ ID NO: 3206 - protein, 453 aa, Ralstonia solanacearum
MITALLDRTFSTPAMLAVWSDAATVRAMLDVEAALAQAEGEVGVIPAQAVAPIRAVCARATLDLEALGAAAAGAGNLAIPLVKQLTAAVAQHDELAARYVHWGATSQDIIDTGLMLQWRQAAALLDADLRQLADALAALARVHRDTPMVARTWLQQALPTTFGRKVAGWLEAVHRAQDRLAALRAHVPALQFGGAAGTLASLGTQGRAVAQALAQALDLPLPAASWHGEQDRIADIGAALALLTGTLGHMARDLSLMMQTEVGEVAEPAGAGKGGSSTMPHKRNPVGCATVLAAATRMPGLAATLLAALPQEHERALGGWQAQWATLREMACLAAGALDRMRELIAGLNVDAARMRANLDLTRGLILAEAVMLALGADLGRLQAHHVVEAASRLAVRQHRTLRDVLAEDADVLRAWGDAAPQRLDALLDPAHYLGDAAAAVDRVLAEHDRRRA

SEQ ID NO: 3207 - DNA, 1212 bp, Pyrobaculum aerophilum
  CDS (1)..(1212)
atgcacgtatcgccttttgactggcgctacggctctgaggaaatacggcgcttgttcactaacgaggctattataaacgcctatttagaggttgaaagggcgctcgtctgcgccttagaggagctgggcgttgcggagcggggctgttgtgaaaaggtaaacaaggcgtctgtaagcgccgatgaggtgtatagactagaaagagagacagggcatgatattttaagcctcgtgcttttgctagagcagaaaagcggctgtaggtatgtacactacggcgcaacgtctaacgacattattgacacggcgtgggccctcctcatacggagggctttggcggcggtgaaagaaaaggcacgcgccgtcggcgaccagctggccagcatggccaggaaatataaaacgctggaaatggtggggagaacccacggccagtgggctgagccaattacactgggctttaaatttgccaattactactacgagttatatattgcctgcaggcagttggcgctggcggaggagttcatcagggcgaaaataggaggggcagtgggcacaatggcctcgtggggggagcttgggctggaggtcaggaggagagttgcggagaggctgggcctcccccatcacgtaattactacccaagtggccccgcgcgagagcttcgccgtcttggcctcggcgctggccctaatggccgccgtttttgagcgcctcgccgtggagataagagagctgtcccggcctgaaataggcgaggtagtagagaggggcggggggtcctccgccatgccccacaaagcaaaccctaccgcgtctgagcgcatcgtcagcctggctagatacgtgagggcgttgacgcacgtcgcgtttgaaaacgtggctctgtggcacgaacgagatctcacgaattccgccaacgagagagtctggatacccgaagccctcctcgccctagatgaaatactcactagcgccctgagagttttgaaaaacgtgtacatagacgaggagaggattacggagaacctccaaaaggcgctcccctacatcctcactgagttccatatgaacagaatgattaaagagggggccagccgcgcggaggcctacaaaaaggccaaagaggtaaaggcgttaacatttgagtaccaaaagtggcccgtggagaggctaatagaggatgcgttgtcacttaaattatgctga

SEQ ID NO: 3208 - protein, 403 aa, Pyrobaculum aerophilum
MHVSPFDWRYGSEEIRRLFTNEAIINAYLEVERALVCALEELGVAERGCCEKVNKASVSADEVYRLERETGHDILSLVLLLEQKSGCRYVHYGATSNDIIDTAWALLIRRALAAVKEKARAVGDQLASMARKYKTLEMVGRTHGQWAEPITLGFKFANYYYELYIACRQLALAEEFIRAKIGGAVGTMASWGELGLEVRRRVAERLGLPHHVITTQVAPRESFAVLASALALMAAVFERLAVEIRELSRPEIGEVVERGGGSSAMPHKANPTASERIVSLARYVRALTHVAFENVALWHERDLTNSANERVWIPEALLALDEILTSALRVLKNVYIDEERITENLQKALPYILTEFHMNRMIKEGASRAEAYKKAKEVKALTFEYQKWPVERLIEDALSLKLC

SEQ ID NO: 3209 - DNA, 1308 bp, Rhizobium meliloti
  CDS (1)..(1308)
atgatctcccgttactcccggccggaaatggtggccatctggtcgccggaaaccaagttccgcatctggttcgagatcgaggcgcatgcctgcgacgccttggccgaaatcggcgtgatccccaaggaagctgcaaagaccatatgggaaaagggcggcgcggcaaccttcgacgtcgcccgcatcgatgagatcgaagccgtcaccaagcacgatgtcatcgccttcctcacccatcttgcggaattcgtcggccccgacagccgcttcatccatcagggcatgacctcttccgacgtgctggacacctgcttcaacattcagctcgtccgcgccaccgatctcctgcttgccgatctcgataagctgctcgaagcgctgaagcggcgtgccttcgagcacaaggacacggtgaccatcggtcgttcgcacggcatccacgccgagccgacgaccttcggcgtcaagctcgcgctcgcctatgcggagttcgaccgctgcaagcaacgccttctcgctgcccgcgaggagattgcgacctgtgccatttccggagcggtcggcaccttcgccaacatcgatccgcgcgtcgaggaacacgtggcagaggcgctcggcctcaagcctgaacccgtctcgacccaggtgatcccgcgcgatcgccacgcgatgtatttcgccacactcggcgtcgtcgcctcctcgatcgagcgccttgcgaccgagatccggcatttgcagcgcaccgaggttctggaagcggaggaatatttctctccgggccagaagggctcttccgccatgccgcacaagcgcaatccggtcctgacggaaaacctgaccggcctctcccgaatggtccgcgccttcgtcgttccggccatggaaaacgtcgcgctgtggcacgaacgcgatatctcgcactcgtcggtcgagcggatgatcggtccggatgcgacggttacgctcgatttcgcgctcgcccgcctgaccggcgtcatcgacaagcttctcgtctacccggacaacatgctgaagaatatgaacaagttccgcgggcttgttcattcgcagcgtgtccttctcgccctcacccaggccggagtgtcgcgcgaggacgcctaccgcctcgtacaacgcaacgccatgaaggtctgggaacagggcaaggacttcctcgaagaactgctcgccgacacggaagtccgtgcggctctttccgaagaggacattcgggagaaattcgacctcggctaccataccaagcatgtcgacacgatcttccggcgggttttcggttccgtctag

SEQ ID NO: 3210 - protein, 435 aa, Rhizobium meliloti
MISRYSRPEMVAIWSPETKFRIWFEIEAHACDALAEIGVIPKEAAKTIWEKGGAATFDVARIDEIEAVTKHDVIAFLTHLAEFVGPDSRFIHQGMTSSDVLDTCFNIQLVRATDLLLADLDKLLEALKRRAFEHKDTVTIGRSHGIHAEPTTFGVKLALAYAEFDRCKQRLLAAREEIATCAISGAVGTFANIDPRVEEHVAEALGLKPEPVSTQVIPRDRHAMYFATLGVVASSIERLATEIRHLQRTEVLEAEEYFSPGQKGSSAMPHKRNPVLTENLTGLSRMVRAFVVPAMENVALWHERDISHSSVERMIGPDATVTLDFALARLTGVIDKLLVYPDNMLKNMNKFRGLVHSQRVLLALTQAGVSREDAYRLVQRNAMKVWEQGKDFLEELLADTEVRAALSEEDIREKFDLGYHTKHVDTIFRRVFGSV

SEQ ID NO: 3211 - DNA, 2264 bp, Synechococcus sp
  CDS (647)..(1915)
catgccagcggcgtgcaattggcccgactgagcagaagcggttgagtagtagacagcggaccagagaccagtaaggcgatcgccaacagcgctgacatgagaccgttcctcaagttcgacaagctaactgctctcactgtagaggccgatcgccggcgcggcagcgggtagggaaatccaccctagttgctgttgagaacagccctcgacgaaatgagaagattacgaaatgcaaggaacaagcttagaaaattctgggagagatcaggccgtaatgctctcgctggcaaaatacgaagcaagtttcttgtggccagagaaaatttcagttctggctctgtcccggtcctagcttcagtgaggaggatcccatggagcaagcgttcggtaacctctacgaaatctttgggcgccagttggtgcgcctcaaggatcagcccgaagacatgcccgactttgtcttggaatattgccacggcgatcgctgctgggtgcgacagaggcctggggtagaaccatcaatctcgggattcagcgatcgcagatcatcggtttggattagatctcggcgctcggccaaagccgtaagataggaaggctgtatccgtcgacaccggctttgatcgagcgttatacgctgcctgccatgggcggcctttggactgacacctacaaactcaaaacctggctgcaggttgaaattgccgtttgcgaggctcaggcagagctcggctatatccccgccgatgccgtggaaacgatcaaggcgaaggccaatttcgatccggcgcgggtgctggagattgagcaagaagttcgccacgacgtcatcgcctttttgaccaacgtcaacgaatatgttggcgatgccggtcgctacattcaccttggcatgaccagctcggatgtgctggacactggtctggcgctgcagatggtggccagtgtcgatctgctcttggctgaaaccgagaatttaattcaggcgattcgctggcaggcgcagcaacaccgcgaaacggtgatgattggccgctcccacggcattcatgctgagccgatcacctttggcttcaagctcgccggttggctggcagagatgctgcgcaaccgcgatcgcttggtgcaggtccgtcagtcagtggcagtcggcaagatttccggtgcggtcggtacctacgccaacatcgagccgcgcgtcgaagctctgacctgtcaaaaactaggtctggagccggatacggcttcgacccaagtggtcagccgcgatcgccatgcggagtatgtccaggtccttgccttagtcgccgcttctttagagcgcttctccgtcgagatccgcaacctgcagcgatcggatgtgctggaggttgaagaattttttgccaagggtcaaaaaggctcctcagccatgccccacaagcgcaacccgattcgctccgagcgaatcagcggtctagcgcgggtgattcggggctatgccgtggcagcgctggaaaacgtggcactctggcacgagcgggatatctcccacagctccgtggagcggatgatgctacccgactgctcagcgacgctgcacttcatgctggtggaaatgaccgagctggtgaaaaccctgcaggtctatcccgagaacatgacccgcaacctcaaccgctacggcggcgtggttttcagtcagcgcgtactgttggccttggttgacaagggactcagccgcgaggaagcctaccgaattgtccaaagcaatgcccacagcgcttggaatcatgaaggcggcaacttccgcgccctgattgaagccgatccgactgttcaggctcacctcagcgccgccgagattgaagactgctttgctgctcaacatcatctgcgtcatttggatgatgtctatcagcgcctcaacatctaacgcgagttaaggctgcaatttccacaaggcacagggccaccgtcagatgttctccaacatggttttaaagttggcagcagcactgagtggtcttgtgctgattttatttgtgggctttcatctcaccacaaatctgttgctatggcggggagcagaggctctcgatcgcgcggcgatcgcactccataatcaggtctggctccccgctgctgaagcgatcgttctgacagcgatcgcggttcattttctgaccgtcttgatcctggcttggcgtaaccgtcaggctcgcgggcctcaagcctacgcccaatggcaaagcaagcaaaccagttggttgcgctgggcagcg

SEQ ID NO: 3212 - protein, 422 aa, Synechococcus sp
MGGLWTDTYKLKTWLQVEIAVCEAQAELGYIPADAVETIKAKANFDPARVLEIEQEVRHDVIAFLTNVNEYVGDAGRYIHLGMTSSDVLDTGLALQMVASVDLLLAETENLIQAIRWQAQQHRETVMIGRSHGIHAEPITFGFKLAGWLAEMLRNRDRLVQVRQSVAVGKISGAVGTYANIEPRVEALTCQKLGLEPDTASTQVVSRDRHAEYVQVLALVAASLERFSVEIRNLQRSDVLEVEEFFAKGQKGSSAMPHKRNPIRSERISGLARVIRGYAVAALENVALWHERDISHSSVERMMLPDCSATLHFMLVEMTELVKTLQVYPENMTRNLNRYGGVVFSQRVLLALVDKGLSREEAYRIVQSNAHSAWNHEGGNFRALIEADPTVQAHLSAAEIEDCFAAQHHLRHLDDVYQRLNI

SEQ ID NO: 3213 - DNA, 2314 bp, Drosophila melanogaster
  CDS (82)..(1527)
ctcttcccttgtgattacgcactattggcccagtgtttttgtgatttatagtccataatctcctacatagtatacccaaaaatggctagcaactacgagggctacaagtcgccgctgagcacccggtacgccagcaaagagatgcagttcctcttcagtgaccagaacaagttctccacctggcgccggttgtgggtgtggctggcgaaggcggagagcaggctgggactagagatcagcgatgcccagattgccgagatggagctccagatcagcaacatcgactttgaggcggccgccgccgaggagcgacttacgcgccacgacgtaatggcccacgtccatgtctttgccaaacagtgtccctctgctgcgccggtgatccatttgggagcaacctcgtgctatgtgggcgacaacactgatctgattgtactgagggacgctcttaaactgctccttccacgagtcgccagcgtgatagctcgtctaagccagtttgcccagagctacaaggatcagcccacgttgggattcacccatctccagcctgcgcagttgaccacggttggcaagcgggcgtgcctgtggatccaggatctgatcatggacgaacgcgcgctgtcccgctgtttagaggacctgcgcttccgtggagtcaagggaattactggtacccaggcctcgttcctgcaacttttcaatggggatggcgagaaggtgaagcagctggatcagttggtcaccgaactggctggcttcaagaaggcctatgcggtaaccggtcaaacatactcccgaaaggtggatgtggagatcgtggccgcgcttgccagtctcggcaccaccatccacaagatgtgctccgatctgcgcatcctcgcttctcgcaaagagctggaggagcccttcgagagcactcagattggctcctcggccatgccgtacaagaggaaccctatgcgctcggagcgttgttgcgccctggcccgtcacctcatcaccttgttcagcagtgctgctaatacacatgccactcagtggctggaacgcactctggatgactctgccaacaggaggttgaccctatccgaggccttcctggctgcagatgccgccctgcttactctgctgaacatctcgcagggactggtcgtttacccaaaggtgattgaacggcacatttcccaagagctgccgttcatgtccacagagaacataatcatggccatggtgaaggcgggaggagatcgccaggtgtgccacgagaagattcgcgtgctgtcccaggaggccggagcccaggtgaagcagcatggcaaggacaacgacctcgtggttcgagtgcgaaaggatccctacttttcgcccatcctggagcaactggacaccatactggatgccaaaacctttactggacgtgccagcgaccaagtgggcgagttcgtcaaggaggaagtggaacccgtgctggcacgctactccgaagccctgaagaacgttcaagacgtcaaactgaacatctagatctagcccattatgttgccctgttttaatcactgaatttgattttgtaaaatacacacacacacacattcgcacccaatcaactgcgtcagccactggatgcagtcgacgttatcaccttttagactcattgggtcgatggcaagcagacccccggcgtgatttgtctttctgtttttgtatttttgccagcttatttacaattaaaggctaaaatcgaaaaacaaaaccacaagcctcgaatcgaactcgagtcgacgttcttgatccgagtaaacatatacacatatttgccgcctgtgcctttcccgttcgccactcgggctgacatatcacgactccaatgctgccacggcacagtgggtcttcgggtctcatgccgcttgctttacttttaattatattatactacatataaaacataacagtgctgagaattttcttagcgagcgcatttcttaaacagttgctactggctttaagcagccgaatatcttatgcttttgatcttgtttccataattaagattgtttttaatgaaaaatgaaatatcatatcacaataaaagtatacgagcccataaaagtaagtgtacgaagtgtactggtttgctaaccagcaatgtctcgctgttgctaaatggattatcacatttaattgactgcattcagatcagatcagattgcaatgggtttattaactcaacggttgaactatgtaaatgaatatgaaatataatataaatattaagtcgtataggtcaaaaactaaaaaaaaaaaaaaaaaa

SEQ ID NO: 3214 - protein, 481 aa, Drosophila melanogaster
MASNYEGYKSPLSTRYASKEMQFLFSDQNKFSTWRRLWVWLAKAESRLGLEISDAQIAEMELQISNIDFEAAAAEERLTRHDVMAHVHVFAKQCPSAAPVIHLGATSCYVGDNTDLIVLRDALKLLLPRVASVIARLSQFAQSYKDQPTLGFTHLQPAQLTTVGKRACLWIQDLIMDERALSRCLEDLRFRGVKGITGTQASFLQLFNGDGEKVKQLDQLVTELAGFKKAYAVTGQTYSRKVDVEIVAALASLGTTIHKMCSDLRILASRKELEEPFESTQIGSSAMPYKRNPMRSERCCALARHLITLFSSAANTHATQWLERTLDDSANRRLTLSEAFLAADAALLTLLNISQGLVVYPKVIERHISQELPFMSTENIIMAMVKAGGDRQVCHEKIRVLSQEAGAQVKQHGKDNDLVVRVRKDPYFSPILEQLDTILDAKTFTGRASDQVGEFVKEEVEPVLARYSEALKNVQDVKLNI

SEQ ID NO: 3215 - DNA, 2203 bp, Pichia angusta
  CDS (716)..(2203)
aggatctgtcccgacgatgtttatggctccttggaagcagattttgtttcggctatgcagcagaaaagtatctctttacacaagggcagagttgtcaagctagagccacgaagcagtgaggatggacgactgggcagggcaattcttgacgacggcaccgcgatcgagctcgatgtgctctacacgattccaccttcaaccatcaacaataaggagattattaccaagctgggcgttgaattggacgagatgggacttattaaagtctctccccagcagaagacgaacgtggagggcgtttttgcaatcggtgacaacactacccgcatgagagcactggcctttgtagttggccagggtatgcttgcagcatcctccatttgtcatgaaatcctacacgagcgctggaacgcgtaagttagtggtccctttaagatatcggagtgagatttttcagtgtctagtctaactttaatttttcttgttatttgattgtcgttcatcgagttgaagagattttaaggaaatgaaaatgtccctccatataaaatgatccttccagcatccaaagcgtagacgaagctatcagccctgtggactgatttgtaagagaaatggcacccccttgtcctatatctcgcacctatagtgccccctcgtagcacccccaccttgtgccccacagttaccttttggaccggaatacatttccaatatgcagagtcaaattaatttaattaatttttatttttctaccatgtccaacgacacctatgccaccccgctgtcgtcgcggtacgcgtccaaggagatgtcgcagatcttctctctgcggaacaggttctccacgtggagaaagctgtggtacaacttggcaattgccgagaaatcgctggggctttctgtcgtcaccgatgaagctatcgagcagatgtccaagcacctcgaaatcacggacgaggaaatcgaggccgccaaaaaggaggaggccattgtcagacacgacgtgatggcccacgtccacgttttcggcgaaacctgtcctgctgctgccggaatcatccatttgggagccacctcgtgctacgttacagataacgcggatctgatttttctcagggacgcgtacgacgttttgatccccaaacttgtgaatgttatcaacagactggccaaatttgctctggaccacaaagacctgccagtgcttggctggactcatttccagcccgcccagctgacgactgtcgggaaaagagcaactctgtggctccaagagctgctctgggacctcagaaacatgcagcgtgccagaaatgacatcggactgcgcggagtcaagggaactaccggtacccaggcctctttcctgtctcttttccacggagaccatgacaaggtcgaggccttggacgaaaaggtggtggagctactaggattcgagtacgcgtacccttgcacggggcagacctactcacgtaaaatcgacatcgacgccctgcacccactatcgtctttgggcgcctcgtgtcacaagatggccaccgatataagattgctggccaacctaaaagaaatggaagagccgtttgaaaaaagccagatcgggtcgtctgccatggcctacaaaaggaacccgatgaggtgcgagcgtgtgtgttcgctgtcgcgtcacttgggttcgttgtaccaggacgcattccagacggcgtccgtgcagtggtttgagagaacgctggacgactctgccatcagaagaatctcaattccagaggcttttctgacggcagacattttgctttcgacgctgctgaatattacttccggcctcgtggtgtacccgaaagtgattgagcgccgtattaaggcagaactgcccttcatggcgaccgagaacatcatcatggcgatggtggagcagggtgcttcgcggcaggagtgccacgaggagatccgcgtgctctcgcaccaggcatcggcagtggtcaagcaggaaggcggcgacaacgacttgattgagagaattaagagcacagactacttcaagcctatttggtcgcaattggacaaattactcgacccgtccacttttgttggtcgtgccccacaacaaactgaaaaattcgtaaacgtcactgttgcaaacgcactggaaccataccggtcgcttatcaacgaggagcacgttcaattggccgtctag

SEQ ID NO: 3216 - protein, 495 aa, Pichia angusta
MQSQINLINFYFSTMSNDTYATPLSSRYASKEMSQIFSLRNRFSTWRKLWYNLAIAEKSLGLSVVTDEAIEQMSKHLEITDEEIEAAKKEEAIVRHDVMAHVHVFGETCPAAAGIIHLGATSCYVTDNADLIFLRDAYDVLIPKLVNVINRLAKFALDHKDLPVLGWTHFQPAQLTTVGKRATLWLQELLWDLRNMQRARNDIGLRGVKGTTGTQASFLSLFHGDHDKVEALDEKVVELLGFEYAYPCTGQTYSRKIDIDALHPLSSLGASCHKMATDIRLLANLKEMEEPFEKSQIGSSAMAYKRNPMRCERVCSLSRHLGSLYQDAFQTASVQWFERTLDDSAIRRISIPEAFLTADILLSTLLNITSGLVVYPKVIERRIKAELPFMATENIIMAMVEQGASRQECHEEIRVLSHQASAVVKQEGGDNDLIERIKSTDYFKPIWSQLDKLLDPSTFVGRAPQQTEKFVNVTVANALEPYRSLINEEHVQLAV

SEQ ID NO: 3217 - DNA, 1353 bp, Sulfolobus tokodaii
  CDS (1)..(1353)
atggaaaattcagtttgtgtattagactggagatacggaagcaaagagatgagagaattattccaaagagctacaattcttaaaagaatggctacagtagaagtagcgttactttatgctttatcaaagataggtttagtaagagaagaggatgtactggttgtgcaaaaaaacatagacaaaataaatataagcagagtagaagaattagagaagaaattaggacatgatgttatggcattaactgtgcatttagctgaattatctggcgaatctggtaaatttattcattttggtgctacaagttatgacatagtagatacagctaatgtattaatttttagggatgccataaatataataaagaaaaaattaaaaaatataataataatattaatggaatatgctgaaaaataccaagaacttgtaatggtaggtagaacacatgggcaacacgcgttaccaataacgctgggttttaaatttgcaaattacgtttatgagtttactcgttcgttagagaggcttaacgatacaagcaaaagattacttaaaataaaaatggctggggcagtaggcacaatggcaggttggaaagataaaggtttagagatagaaaaatatgtttcagaatacttaggattacctcctcatgaaatctctactcagatagctcctcgtgacggatatactgagttagtctcagatcttgcaattttagcgtctcagcttgacagatttgccttagaaataagggagctaatgagacctgaaattttagagttagctgaaggttctgcagaatcaagagtaggaagtagtactatgcctcataaggagaatccagtaactgcggaaaaaatcagtggattagccaaggtattgaggggctttgtaatatctgagctagaaaatatacctttatggcatgaaagagatctaactaacagctcatctgaaaggataattctttctcactcttttcttataatggatgagatgttagagagtatggaagctcttttaagaaatctaagagtttacccagaaaatatgagaaagaacctagaactcactaaaggtcttattatggctgaaagcttaatgattaatcttacattagcaaatgttccaaggcatatagctcatgaacttgttatgaaagtatctagagaagcagaaagagaagggaaatcattgcttgaagctgctttagacaatgaggaaatagttaaaatactaggtaaggagaaaataatagaagcattaaatccgtatagctatttaggagaatacaagaaattaataagtagagcattatcatatgcaaagaatgttattgaacagacgtaa

SEQ ID NO: 3218 - protein, 450 aa, Sulfolobus tokodaii
MENSVCVLDWRYGSKEMRELFQRATILKRMATVEVALLYALSKIGLVREEDVLVVQKNIDKINISRVEELEKKLGHDVMALTVHLAELSGESGKFIHFGATSYDIVDTANVLIFRDAINIIKKKLKNIIIILMEYAEKYQELVMVGRTHGQHALPITLGFKFANYVYEFTRSLERLNDTSKRLLKIKMAGAVGTMAGWKDKGLEIEKYVSEYLGLPPHEISTQIAPRDGYTELVSDLAILASQLDRFALEIRELMRPEILELAEGSAESRVGSSTMPHKENPVTAEKISGLAKVLRGFVISELENIPLWHERDLTNSSSERIILSHSFLIMDEMLESMEALLRNLRVYPENMRKNLELTKGLIMAESLMINLTLANVPRHIAHELVMKVSREAEREGKSLLEAALDNEEIVKILGKEKIIEALNPYSYLGEYKKLISRALSYAKNVIEQT

SEQ ID NO: 3219 - DNA, 1347 bp, Thermoplasma volcanium
  CDS (1)..(1347)
atggtagtctccccattagagtatagatacggcagggaacagataaagagaatatttgacgatgaaaaccgcctctactatatgcttaaagtagaggcagcaatatcaaaggcagaagcggaatatggtattataccgcccgaggccgccgaagatattgggaaagtagtcgcagaccgcatagtacagctgcagagagtaagagaaatagaagcagagataaagcacgatgtaatggctatggtgaaagcgttatcagaaaaatgcaaagttggcgccagttacgtacattacggcgtcacatctaacgacgtaaacgatacggcaacagcactgcaaatgcatgatttcttttctttcctgaagcaggatatagaagatattatggagacactcatcgaattgacgttaagatataaatcgagcccaatgatgggtaggacgcatggccagcacgcttcaccaatcactatcggcctaaaatttgccgtttacctttcagagttttcaaggcactatgatcgtatgattgaaatgtcaaaaagagctttcgctggcaaagtgctcgggccggtaggaacaggtgctgccctaggccccaaagcccttgatatacagaatagagttatggagatactgggtatatacgcagaagagggcccaacacagatagtaaatagagaccgatacatagaatatctatccgtaataaacgggatctctgtaacattagaaaagataggtacagagataaggaacctgcagaggccagagatagatgagatgtccgaatattttgatgtggagaggcaggtcggttctagttcaatgcccagcaaggtgaacccaataaattctgaaaatgtagttagtttatcgaggcttataagatccatgataataccggaatacgaggctggcgttacatggcacgaaagggatctgacgaacagcgctctggaaaggtttacgataccatattcttcgatacttgtggattatatccttgttaagatgaactcaatcctatctagccttattattaaggaggataagattaggaaaaatcttgaaatggatgacagcatattttctgagagcttggtagctgctcttactcaggccggcatgccaaggcaggacgcacacgaattcataaggagatgttcaatgaaagcaagatctgaaggcaagacactgaaacatgtagtcgtagaagagggcataaccaattatataagaagagatgagctagatcgcctgatggatcctgcaaacttcattggttccgcaccagaaatatgtgatatagtggtaaataatgcaaggaggaggctgatcaactga

SEQ ID NO: 3220 - protein, 448 aa, Thermoplasma volcanium
MVVSPLEYRYGREQIKRIFDDENRLYYMLKVEAAISKAEAEYGIIPPEAAEDIGKVVADRIVQLQRVREIEAEIKHDVMAMVKALSEKCKVGASYVHYGVTSNDVNDTATALQMHDFFSFLKQDIEDIMETLIELTLRYKSSPMMGRTHGQHASPITIGLKFAVYLSEFSRHYDRMIEMSKRAFAGKVLGPVGTGAALGPKALDIQNRVMEILGIYAEEGPTQIVNRDRYIEYLSVINGISVTLEKIGTEIRNLQRPEIDEMSEYFDVERQVGSSSMPSKVNPINSENVVSLSRLIRSMIIPEYEAGVTWHERDLTNSALERFTIPYSSILVDYILVKMNSILSSLIIKEDKIRKNLEMDDSIFSESLVAALTQAGMPRQDAHEFIRRCSMKARSEGKTLKHVVVEEGITNYIRRDELDRLMDPANFIGSAPEICDIVVNNARRRLIN

SEQ ID NO: 3221 - DNA, 1308 bp, Rhizobium loti
  CDS (1)..(1308)
atgatccctcgctattcccggccggaaatggtcgccatctggtcgcccgaaacccggtttcgcatctggttcgaaatcgaggcccatgcctgcgacgcgctggccgaactcggcgtcatcccgaaggaagcggcaaagaccatctgggaaaagggcggggccgcgaaattcgacgtcgagaagatcgacgagatcgaacgcgtcaccaagcatgacgtcatcgcgttcctcacacatcttgccgaattcgtcggaccggatgcgcgtttcatccaccagggcatgacgtcttcggatgtgctggacacctgctttgccgtccagcttacccgcgccagcgacattctgctcgcagacattgacggcctgcttgccgcgctcaagcgccgcgccttcgaacacaaggacaccgttaccatcggccgcagccacggcatccatgccgagccgacaaccttcggcatcaagctggcgcaggcctatgccgaattctcgcgctgccgcgagcggctggtgcacgcacgcgaagacatcgccacctgcgccatatcaggggcggtcggcaccttcgccaacatcgaaccctatgtcgaggagcatgtcgcggcaaagctcgggctgaagccggagccggtgtcgacgcaagtgatcccgcgcgaccgccacgccatgttctttgccacgctcggcgtcatcgcctcgtcgatggagcggctggcgaccgagatccggcacctgcagcgcaccgaggtgctggaagcggaagagtatttttcgccgggccagaaaggctcgtcggcaatgccgcacaagcgcaatccggtgctgacggaaaacctcaccggccttgcccgcatggtgcgctccatggcgctgccggcgatggaggatgtggcgctctggcacgagcgcgacatctcgcactcctccgtcgagcgcatgattggtccggacgccacggtgacgctggatttcgcgctgtcacgcctgaccggcgtcgtcgacaagctggtcgtctatcccgagaacatgctgaggaacatgaacaagttccgcggcctggtgcattcgcagcgcgtcatgctggcgctgacgcaggccggcctgtcgcgcgaggactcctaccggctggtgcagcgcaacgccatgaaggtgtgggaacaaggcgctgattttcttgaggaacttttggcggacaaggaagtcaccgccgccttgccggaggcggaaatccgtgagaaattcgacctgggctaccacaccaagcatgtcgacacgatcttcaggcgggtgttcggggaggcttga

SEQ ID NO: 3222 - protein, 435 aa, Rhizobium loti
MIPRYSRPEMVAIWSPETRFRIWFEIEAHACDALAELGVIPKEAAKTIWEKGGAAKFDVEKIDEIERVTKHDVIAFLTHLAEFVGPDARFIHQGMTSSDVLDTCFAVQLTRASDILLADIDGLLAALKRRAFEHKDTVTIGRSHGIHAEPTTFGIKLAQAYAEFSRCRERLVHAREDIATCAISGAVGTFANIEPYVEEHVAAKLGLKPEPVSTQVIPRDRHAMFFATLGVIASSMERLATEIRHLQRTEVLEAEEYFSPGQKGSSAMPHKRNPVLTENLTGLARMVRSMALPAMEDVALWHERDISHSSVERMIGPDATVTLDFALSRLTGVVDKLVVYPENMLRNMNKFRGLVHSQRVMLALTQAGLSREDSYRLVQRNAMKVWEQGADFLEELLADKEVTAALPEAEIREKFDLGYHTKHVDTIFRRVFGEA

SEQ ID NO: 3223 - DNA, 1293 bp, Streptococcus pyogenes
  CDS (1)..(1293)
atgctagaacgttattcacgccctgagatggcggcaatttggacagaggaaaataaataccatgcttggttggaggtcgagattttggctgacgaggcatgggctgagttgggtgagattcctaaggaggatgtggctaagattcgtgagaaggcggattttgacattgaccgcattcttgaaattgagcaggacacgcgtcacgatgtggtggctttcacgcgtgcggtttctgaaacgcttggtgaggagcgcaagtgggtgcactacggtttgacctcgactgacgtggtggacactgcctatggttacctctacaagcaagctaacgacattatccgtcgcgatcttgagaatttcaccaatatcgtggcagacaaggcgcgtgagcacaaaatgaccatcatgatgggtcgtacccacggtgttcacgccgagccaacgactttcggtcttaagttggcgacttggtacagcgagatgaaacgtaatattgagcgttttgaacatgctgccgcaggtgtggaagctggtaagatttcaggtgccgttggtaactttgccaacatcccaccttttgtggaagaatatgtctgtgacaaattaggcattcgtccgcaagaaatttcaacacaagttcttccacgtgaccttcacgcagaatattttgcagtgcttgcaagtattgcaacttctatcgaacgtatggcgacagagattcgaggtctgcaaaagtcagaacaacgtgaagttgaagaattctttgccaaaggtcagaaaggtagctctgctatgcctcacaaacgcaacccaatcggttcagagaacatgacagggctagcgcgcgtgattcgtggtcacatggtgacagcttatgagaacgtgtcactttggcatgagcgtgacatttcgcactcatcagctgagcgtatcatcacacctgacacaactatcttgattgactacatgctcaaccgctttggtaatatcgttaagaacttgactgtcttcccggaaaatatgatgcgcaatatggaatcaacttttggtttgatttatagtcaacgtgttatgctcaaattgattgaaaaaggaatgacacgagaagaagcttatgacttagttcaacctaagacagcttattcctgggacaatcaagtggatttcaaaccacttttagaagaagacaccaaagttacctcttgtcttacacaagaagaaattgatgaactatttaatccgatttattacacaaaacgtgttgatgatatttttaagcgtttagggatttag

SEQ ID NO: 3224 - protein, 430 aa, Streptococcus pyogenes
MLERYSRPEMAAIWTEENKYHAWLEVEILADEAWAELGEIPKEDVAKIREKADFDIDRILEIEQDTRHDVVAFTRAVSETLGEERKWVHYGLTSTDVVDTAYGYLYKQANDIIRRDLENFTNIVADKAREHKMTIMMGRTHGVHAEPTTFGLKLATWYSEMKRNIERFEHAAAGVEAGKISGAVGNFANIPPFVEEYVCDKLGIRPQEISTQVLPRDLHAEYFAVLASIATSIERMATEIRGLQKSEQREVEEFFAKGQKGSSAMPHKRNPIGSENMTGLARVIRGHMVTAYENVSLWHERDISHSSAERIITPDTTILIDYMLNRFGNIVKNLTVFPENMMRNMESTFGLIYSQRVMLKLIEKGMTREEAYDLVQPKTAYSWDNQVDFKPLLEEDTKVTSCLTQEEIDELFNPIYYTKRVDDIFKRLGI

SEQ ID NO: 3225 - DNA, 1368 bp, Pasteurella multocida
  CDS (1)..(1368)
atgcaacttaatgcattaactgcactttccccgattgatggtcgttatcaagacaaagtgagttcactacgttcaatttttagtgaatttggcttgttaaaatttcgtgtgacagtggaagtgcgctggttacaaaaattagctgccaccgatcaaattcaagaagtttctttattatctcaagaggcaaacgattacttgaatcacatcgttgaaaatttcagtgtgcaagatgccgaacgtattaaagaaattgaacgcacgacgaaccacgatgtgaaagcagtggaatatttcttaaaagaaaaaagtgaagctttaccagaattagccaaaatcagtgaatttattcacttcgcttgtacctcagaagacattaacaatctttcgcatgcattaatgctaaaaacggcacgtgaagaggtgattcttccagaatggcaaaacttaattgcggatatcagcgcacttgctaatgaatataaaactattccgttactgtctcgtacacatggtcaacctgcatcaccttctactattgggaaagaaatggcaaacgtggtgtatcgcttacaacgccagtttaaacaattacagcagattgacattttaggtaaaatcaatggtgcggtaggtaactataatgcccatttatcagcgtatcctgatattgattggcatcaattcagtgaagagtttgtgacgtcattaggtttaacttggaacccatataccacacaaattgaaccacatgactacattgctgaatttttcgataatgtggcgcgctttaatactattattatcgattttgaccgtgacttatggggatatattgcgttaaatcatttcaaacaacgtaccattgccggtgaaattggatcttcaaccatgccacataaagtcaatccaatcgactttgaaaattcagagggaaatcttggtttagccaatgcagtcatggcacatttaggcgcaaaattaccggtttctcgctggcaacgtgatttaacggattccaccgtattacgtaacttaggtgtgggattaggctattgtttaattgcgtacgcggcgacacgtaaaggtatcagtaaattagaagtgaacgagcagcatttacgtgatgagttggatcaaaactgggaagtccttgccgaacctatccaaacagtgatgcgtcgttatggtattgaaaagccgtatgagaaattaaaagcgttaacccgtggtaagcgtgtggatgcagaagcgatgcgtgaatttatcgaaacattagatattccagcgcaagaaaaaatccgtttacaacaaatgacgcctgcaacctatattggtgccgcggtggaattagtggaaaaactgtaa

SEQ ID NO: 3226 - protein, 455 aa, Pasteurella multocida
MQLNALTALSPIDGRYQDKVSSLRSIFSEFGLLKFRVTVEVRWLQKLAATDQIQEVSLLSQEANDYLNHIVENFSVQDAERIKEIERTTNHDVKAVEYFLKEKSEALPELAKISEFIHFACTSEDINNLSHALMLKTAREEVILPEWQNLIADISALANEYKTIPLLSRTHGQPASPSTIGKEMANVVYRLQRQFKQLQQIDILGKINGAVGNYNAHLSAYPDIDWHQFSEEFVTSLGLTWNPYTTQIEPHDYIAEFFDNVARFNTIIIDFDRDLWGYIALNHFKQRTIAGEIGSSTMPHKVNPIDFENSEGNLGLANAVMAHLGAKLPVSRWQRDLTDSTVLRNLGVGLGYCLIAYAATRKGISKLEVNEQHLRDELDQNWEVLAEPIQTVMRRYGIEKPYEKLKALTRGKRVDAEAMREFIETLDIPAQEKIRLQQMTPATYIGAAVELVEKL

SEQ ID NO: 3227 - DNA, 1368 bp, Thermoplasma acidophilum
  CDS (1)..(1368)
atggtagtctcgcccatagaatacaggtatggcagaagacaagtcaagaaaatattcgatgatgaaacacgcctaaattacatgcttaaggttgaagccgcaatagcgaaggcagaatccgagcttggtataataccgcaagatgcctacaatgagatccagagagcggtagattccggatcaataactctggacgaggtcaggcaggttgaggatgagataaaacatgacgttatggccgttgtccgggttctttcaaaatattccggatcagggtctaagtatgtacacttcggtgtcacatcaaacgatataaacgataccgcaactgcacttcagctgcatgatttctcttctatctacagatcgaaccttgtatcattcatggaaacacttgtaggcctcgcatctaaatatcgcgatcttccaatgatgggtaggactcatggccagcatgcctcgccgataacccttggcctgaagtttgcggtctatcttgcggagatgataaggcatctcgaccggtgggatgagatggctggcagagcatttgccgggaaggtgctgggtcctgtcggtactggagcagctctgggagaaatggcactggatgttcagaagagggtcatggacatactgggtatatatccggaggacggcgcaacgcagatcgtcaacagggatcgttacatagagtatctctccgtcataaatggtatatcggtgacgctggaaaagatagctaccgagataaggaatcttcaaagaccagagatagatgaactctccgaatactttgactttgaaaagcaggtcggctcaagctccatgccaagcaaggtaaatccaataaattccgaaaacgtggtgagcctctcacgcttcataagatccttgataatatctgagtacgaggccggtgttacatggcatgaacgggatctcaccaatagtgcatctgaacgctttgttataccgtacgcgagcatactgatagattatgctactgatcgattaaacggtgttctgaaaaccctcatcgtcaaggaggacaatatacgcaggaatctggaaaacgatgacagcatctactctgaaagtatagtaacgatactgactgagcgcggtatggcaaggcaggacgcacatgaatttgtccgaagatcggccatgaatgcaaggagcaagggtatgagcttcaggcagggcctgctagagaatggcattgaaagatatctcagcaaagccgatcttgacagggcgatggatccggccaacttcataggattggcaccgatcatatgtgatacgatagtaaagaaggcgaaagagaggatcgggatgaaagatggagagcaagcttcctga

SEQ ID NO: 3228 - protein, 455 aa, Thermoplasma acidophilum
MVVSPIEYRYGRRQVKKIFDDETRLNYMLKVEAAIAKAESELGIIPQDAYNEIQRAVDSGSITLDEVRQVEDEIKHDVMAVVRVLSKYSGSGSKYVHFGVTSNDINDTATALQLHDFSSIYRSNLVSFMETLVGLASKYRDLPMMGRTHGQHASPITLGLKFAVYLAEMIRHLDRWDEMAGRAFAGKVLGPVGTGAALGEMALDVQKRVMDILGIYPEDGATQIVNRDRYIEYLSVINGISVTLEKIATEIRNLQRPEIDELSEYFDFEKQVGSSSMPSKVNPINSENVVSLSRFIRSLIISEYEAGVTWHERDLTNSASERFVIPYASILIDYATDRLNGVLKTLIVKEDNIRRNLENDDSIYSESIVTILTERGMARQDAHEFVRRSAMNARSKGMSFRQGLLENGIERYLSKADLDRAMDPANFIGLAPIICDTIVKKAKERIGMKDGEQAS

SEQ ID NO: 3229 - DNA, 1440 bp, Leishmania major
  CDS (1)..(1440)
atgtcactgccttcggcacaagaagcggcggcgccatctgtgaccacgacggcacacaaggcccctgcggagatcagtcaagacaaccccctctactcgctctctcctctcgatggtcgctacaagcgtgacacggccgcgctgcgcgcctacttctccgaatacgcgttattcaagtatcgcgtgcaggtggaggtgctgtacttccaagcgctgtgcaaggaggtgccggtgatcacgcagcttcgcggcgtcacagatgcgcagctggagaagctgcgggcaaccaccttcgagaacttcacagtggacgatgcccggatgataaaggacattgaggcggtcacgaaccacgatatcaaggcagtggagtactacctgaaggacaagatgtctgcctgcggcctcgaggccgaaaaggagttcatccactttgggctaacgtcgcaggacatcaacaacacctcgattccgatgctcctgcgcgacgctctgcaccaccactacatcccaacgctggatcagctgatcgcgcacctcaagagcaagctgcctgagtgggatgtcccgatgctggcccggacgcacggccaaccggcgagcccgacgaacttggcgaaggaattcatggtgtggattgagcggctggaagagcagcggacgatgctgctgagcatcccaaacacaggcaagttcggcggcgctaccggcaacttcaacgcgcacctctgtgcgtaccctggcgtaaactggctggagtttggggagctcttcctgagcaagtaccttggccttcgccgccagcgctacacaactcagatcgagcactacgacaacctcgccgccatctgcgatgcgtgcgcgcggctgcacacaatcttgatggacctggccaaggacgtgtggcagtacatttcactcggctactttgatcagaaggtgaaggcgggcgaagtcggcagcagcgcgatgccgcataaggtgaacccgatcgacttcgagaacgctgagggcaacctgggcatgagcaacgccgtcctcggttttctttcagcgaagttgcccatctcccgtctgcagcgcgacctcacagacagcacggtgctgcgcaacctcggcgttccgcttagccacgccctcatcgcgtttgcctccctgcaacgcggcatcggcaagctccttctcaacaaggacgtcatcgccgcggacctagagggcaattgggctgtcgtggcggagggcatccagaccgtgctgcgccgggagggctacccgaagccgtacgaggcgctcaaggacctgacgcgcggcaacgcgcatgttacggaggagacggtgcaccgcttcatccagcagctcgagggcatcacagaggaggtgcggcaggagctgctcgccattacgcccttcacgtacgtgggctacacggcgcgtccctga

SEQ ID NO: 3230 - protein, 479 aa, Leishmania major
MSLPSAQEAAAPSVTTTAHKAPAEISQDNPLYSLSPLDGRYKRDTAALRAYFSEYALFKYRVQVEVLYFQALCKEVPVITQLRGVTDAQLEKLRATTFENFTVDDARMIKDIEAVTNHDIKAVEYYLKDKMSACGLEAEKEFIHFGLTSQDINNTSIPMLLRDALHHHYIPTLDQLIAHLKSKLPEWDVPMLARTHGQPASPTNLAKEFMVWIERLEEQRTMLLSIPNTGKFGGATGNFNAHLCAYPGVNWLEFGELFLSKYLGLRRQRYTTQIEHYDNLAAICDACARLHTILMDLAKDVWQYISLGYFDQKVKAGEVGSSAMPHKVNPIDFENAEGNLGMSNAVLGFLSAKLPISRLQRDLTDSTVLRNLGVPLSHALIAFASLQRGIGKLLLNKDVIAADLEGNWAVVAEGIQTVLRREGYPKPYEALKDLTRGNAHVTEETVHRFIQQLEGITEEVRQELLAITPFTYVGYTARP

SEQ ID NO: 3231 - DNA, 1356 bp, Bradyrhizobium japonicum
  CDS (1)..(1356)
atgagcacagccctctcccccctgcttgcgccgatgctgtcgagcgccgccatgcgcgccgcctgcgacgaccggtcaacgctccagaacatgctcgattttgaggcagccttggcgcgcgccgaagccgccaccggcgtgattcccgcggccgccgtgggcccgatcgaaaccgcctgcaaggcggctacctttgacatcgccgcgctggccgaggccgcgacacggtccggcaatctcgcgattcccctggtcaaggcgctgaccgccaacgtcgcgaaggccgatgcggaggccgcacgctacgtgcattggggcgcgaccagccaggacgtcatcgacaccgcgaccatgctcacgctgcgcgccgccatcgacgcgctggatgccgacctcagccgcgccatcaagggttttgccgcactggcgcgcaatcatcgcaacaccgcaatggtggcgcggacctggctccagcacgcgctgccgatgccgttcggactcaaggccgccgaatatgccgcaagtcttgcccgcgcccgctgccgcctcaggcggctctcccgcgacggcctcgcgctgcaattcggcggcgcggccggcacgctcgcggccctcggcgacaaggggctcgtcgtcgcggagcgactggcgcaagagctcaacctgccgctgccggaagcaccctggcacacccatcgcgaccgcatcgcggaagccgcatcggcccttgcgattctcgccggaagctgcggcaagatcgcgcgcgacgtctcgctgatgatgcagaccgatgtcgccgaggcgttcgagccggccggcgaaggccgcggcggctcctcgaccatgccgcacaagcgcaaccctgtcgcagccgcaagcgcgctgggatgtgccaccatggccccgcagctcgccgcgacgatttttgccgcgcaggtacaggaccacgagcgcagcgccggcccctggcatgcggaatggccgacgctgcctcaactgatgctggtcacttcgggcgcgctcgccgccatcgtcgacatcgccgagggcctggacgtcgatgccgcgcgcatgcgcagcaatctcgatgcgacgcacgggctgatcatggccgaggcggtcacctttgcgctggccgagaggatcggcaagagcgatgcgcatcatctcatcgaggccgcgagcaagcgcgcggtcgccgagaagaagcatctgcgcgaggttctcgcggccgattcgcaggtcacagcgcatctttcgccggaaaaaattgcggcattgttcgagccgatggcctatcaaggggcttcccaagccatgatcgaccggctgctcgacagcctcgagcgagattga

SEQ ID NO: 3232 - protein, 451 aa, Bradyrhizobium japonicum
MSTALSPLLAPMLSSAAMRAACDDRSTLQNMLDFEAALARAEAATGVIPAAAVGPIETACKAATFDIAALAEAATRSGNLAIPLVKALTANVAKADAEAARYVHWGATSQDVIDTATMLTLRAAIDALDADLSRAIKGFAALARNHRNTAMVARTWLQHALPMPFGLKAAEYAASLARARCRLRRLSRDGLALQFGGAAGTLAALGDKGLVVAERLAQELNLPLPEAPWHTHRDRIAEAASALAILAGSCGKIARDVSLMMQTDVAEAFEPAGEGRGGSSTMPHKRNPVAAASALGCATMAPQLAATIFAAQVQDHERSAGPWHAEWPTLPQLMLVTSGALAAIVDIAEGLDVDAARMRSNLDATHGLIMAEAVTFALAERIGKSDAHHLIEAASKRAVAEKKHLREVLAADSQVTAHLSPEKIAALFEPMAYQGASQAMIDRLLDSLERD

SEQ ID NO: 3233 - DNA, 1383 bp, Buchnera aphidicola
  CDS (1)..(1383)
atgattgcatctccattatttgccatttctccaatagatgggcgctatagtagtaaagtaattaaattgcgtaatatttttagcgaatatgcttttttaaagtttagagtaacaattgaattactttggttaaaaaaaatatctttattacaggaatttaaaatagtttataataaagatgttttaaattgtttagatagaattattgataattttagtaaaaaagatgcgttagaaataaaaattttagaaaaaaaaactaatcatgacgttaaatcaatagaatattttttgcaaaaaaaaatttttaaatgtttaggcaatcatgatattttaggactagtacattttggttgtacttcagaagatattaacaatttggcttatgctctaatgctaaaagtgtctcgacgagatataattctacctttatggaataaaattatatttgaaataaaaaaaatagcattattacatcataatgtacctatgttatctcggactcatggtcaaccggccactccttcaactattggaaaagaattaattaattttgcctatagattagaacgtcagttaaagcagtttaagaatatagaaattttaggaaaaataaatggttcaactggaaattacaatgcacttcatttttctcattctagtgtggattggcataaaattagtcaagaatttgtgacttcacttggattgttttggaacccatatactactcaaatagaacctcatgattttatttcagaattttttagttgtttagcacgagttaatactattttaattaatttcaatagagatatttggggatatatttcattacaatattttaatcaaacacccaaattagacgagattggatcttctgtcatgccacataaaattaatccaattgattttgaaaactctgaaggtaatttagggttgtcaaatgcgataattagtcatttaatagaaaaattgccaatttctcgttggcaaagagacttaagtgattctacagttcttaggaatgttggtacggtaatagcttactctataattgcttatgattcaattattttaggattaaaaaaattaaaagtaaacacttctagattgttgcaagacttaaatcatcattgggaaatactagcagaacctattcaaaccgtaatgagaaaatatggaattaatgatacttataatgaattaaaaaacataactagaggaaaacgagtaacttctgatattattttaaaatatgtcaatagtttgaaaattcctaggaatgaaaaggaaaaattacttcaattaactccagaaaactatttaggtttatcctctaaattagttaaaatttttaataattcttcagaacttaaataa

SEQ ID NO: 3234 - protein, 460 aa, Buchnera aphidicola
MIASPLFAISPIDGRYSSKVIKLRNIFSEYAFLKFRVTIELLWLKKISLLQEFKIVYNKDVLNCLDRIIDNFSKKDALEIKILEKKTNHDVKSIEYFLQKKIFKCLGNHDILGLVHFGCTSEDINNLAYALMLKVSRRDIILPLWNKIIFEIKKIALLHHNVPMLSRTHGQPATPSTIGKELINFAYRLERQLKQFKNIEILGKINGSTGNYNALHFSHSSVDWHKISQEFVTSLGLFWNPYTTQIEPHDFISEFFSCLARVNTILINFNRDIWGYISLQYFNQTPKLDEIGSSVMPHKINPIDFENSEGNLGLSNAIISHLIEKLPISRWQRDLSDSTVLRNVGTVIAYSIIAYDSIILGLKKLKVNTSRLLQDLNHHWEILAEPIQTVMRKYGINDTYNELKNITRGKRVTSDIILKYVNSLKIPRNEKEKLLQLTPENYLGLSSKLVKIFNNSSELK

SEQ ID NO: 3235 - DNA, 1371 bp, Haemophilus influenzae
  CDS (1)..(1371)
atgcaactctctacactgaccgcactttcccctcttgatggtcgttatcaagataaagtaacgccattacgtgctatttttagcgaattcgggttaatgaaattccgtgtagctgtggaagttcgttggttacaaaaattagcttcaacggcagacattaccgaagtaccgccattttctacgcaagcaaatgcttttttagatggaattgtggctaattttaatgaggccgatgctgcgcgtattaaagaaattgaacgcacaactaatcacgatgtgaaagccgttgagtattttctgaaagagaaaattcaaaacgaagtggaactagtgaaggtttctgaatttattcacttcgcttgcacctcagaagatattaacaatctctctcacgcattaatgttaagcaccgctcgtgacgaagtgattttaccagaatggcaaaaactgattgatgaaattactcgtcttgcagaagaatataaaacgattccattactttctcgcacacatggccagccagcttcaccaagcaccgtgggcaaagaaatggcgaatgtcgtttaccgcctaaaacgtcaatttaaacaactccaaaatgcggaaatcttaggtaaaatcaatggtgcagtaggtaactacaatgcgcatttatcggcatatcctaatattgattggcataaattcagcgaagaatttgtcacttcattaggtattcaatggaatccttataccacacaaattgagccgcacgattacatcactgaattttttgatgctgtagttcgctttaataccattatcattgattttgatcgtgatttatggggatacattgcattaaatcactttaaacaacgaacgattgcaggcgaaattggttcttctaccatgccacacaaagtcaatccaattgattttgaaaactcagaaggcaatctaggattagccaatgcagtgatgacccatttaggtcaaaaattaccaatttctcgctggcagcgtgacttaacagattcaactgtattacgtaatttaggcgtaggattaggttattgtttgatcgcttatgcttcaacacgcaaaggcatcagtaaacttgaagtaaatcaaccgcacttattagaagaactcaatcaaaactgggaagttttggctgaaccaattcaaaccgtaatgcgccgctatggaatagaaaaaccttacgaaaaattaaaagaattaacgcgaggtaaacgagtgacagaacaggctatgcgtgaatttattgataagttggatattccacaagaagaaaaattacgtttacaaaaattaacacctgctacttatattggggctgcagtggaattagtagaaaaactatcatag

SEQ ID NO: 3236 - protein, 456 aa, Haemophilus influenzae
MQLSTLTALSPLDGRYQDKVTPLRAIFSEFGLMKFRVAVEVRWLQKLASTADITEVPPFSTQANAFLDGIVANFNEADAARIKEIERTTNHDVKAVEYFLKEKIQNEVELVKVSEFIHFACTSEDINNLSHALMLSTARDEVILPEWQKLIDEITRLAEEYKTIPLLSRTHGQPASPSTVGKEMANVVYRLKRQFKQLQNAEILGKINGAVGNYNAHLSAYPNIDWHKFSEEFVTSLGIQWNPYTTQIEPHDYITEFFDAVVRFNTIIIDFDRDLWGYIALNHFKQRTIAGEIGSSTMPHKVNPIDFENSEGNLGLANAVMTHLGQKLPISRWQRDLTDSTVLRNLGVGLGYCLIAYASTRKGISKLEVNQPHLLEELNQNWEVLAEPIQTVMRRYGIEKPYEKLKELTRGKRVTEQAMREFIDKLDIPQEEKLRLQKLTPATYIGAAVELVEKLS

SEQ ID NO: 3237 - DNA, 1299 bp, Streptococcus mutans
  CDS (1)..(1299)
atgatcaaccgttattcacgccctgagatggcgaacatttggagtgaagaaaacaagtaccgtgcttggttggaagtggaaattttggctgacgaggcttgggctgagttgggtgagattcctaaggaagatgtggccaagattcgcgagaaggcggattttgatattgaccgcattttggagattgagcagcaaacgcgtcacgatgtggtagcctttacccgtgcggtttctgagacgttgggtgaggagcgcaagtgggtacactttgggctgacctcaacagacgtggtggacacggcctacggctacctatacaagcaggctaacgccatcattcgtaaggacttggataatttcctcagtatcatcgctgataaggccaaagaacacaagtttaccatcatgatggggcgcacgcacggtgtccatgcggagccaacaacttttggtctcaagctggcgacttggtacagtgaaatgaagcgtaatattgagcgttttgaacatgctgccgctggtgtggaagctgggaaaatctctggtgctgttgggaactttgccaacattccgccctttgtggaaaaatatgtctgtgacaaattaggcattcgtgctcaggaaatttcaactcaagtcttaccgcgtgatttgcatgctgaatattttgccgtgctagccagcattgccacatcaatcgagcgcatggcgactgaaatccgtggtctgcaaaaatccgaacagcgtgaagtagaagagttctttgccaaggggcaaaaaggcagctctgctatgccccataaacgcaaccctatcggctctgaaaatatgacggggcttgcgcgtgtgattcgcggacacatggtgacggcctatgaaaatgtgtccctctggcacgaacgcgatatttcccactcatcagctgagcgcattatcgcgcctgatacgaccattctcattgactacatgctcaatcgctttggcaatatcgtgaaaaacttgaccgtcttcccagaaaatatgaagcgcaacatgggctctacctttggtctcattttcagccagcgtgctatgctgaccttaattgaaaaaggcatgacccgcgagcaggcttacgaccttgttcagcctaagactgcgcagtcttgggacaaccaagtggacttcaaaccgttgctggaagcagatccagagatcacgtctcgcttgagccaagaagaaatcgacgaaatctttaatccagtctactacaccaagcgtgtggatgaaatctttgaccggattggattgggagactag

SEQ ID NO: 3238 - protein, 432 aa, Streptococcus mutans
MINRYSRPEMANIWSEENKYRAWLEVEILADEAWAELGEIPKEDVAKIREKADFDIDRILEIEQQTRHDVVAFTRAVSETLGEERKWVHFGLTSTDVVDTAYGYLYKQANAIIRKDLDNFLSIIADKAKEHKFTIMMGRTHGVHAEPTTFGLKLATWYSEMKRNIERFEHAAAGVEAGKISGAVGNFANIPPFVEKYVCDKLGIRAQEISTQVLPRDLHAEYFAVLASIATSIERMATEIRGLQKSEQREVEEFFAKGQKGSSAMPHKRNPIGSENMTGLARVIRGHMVTAYENVSLWHERDISHSSAERIIAPDTTILIDYMLNRFGNIVKNLTVFPENMKRNMGSTFGLIFSQRAMLTLIEKGMTREQAYDLVQPKTAQSWDNQVDFKPLLEADPEITSRLSQEEIDEIFNPVYYTKRVDEIFDRIGLGD

SEQ ID NO: 3239 - DNA, 23 bp, Artificial sequence
  Primer sequence
atggaattatcctcactgaccgc

SEQ ID NO: 3240 - DNA, 25 bp, Artificial sequence
  Primer sequence
ttatttcagctcatcaaccatcgtg

SEQ ID NO: 3241 - DNA, 1563 bp, Escherichia coli K12
  CDS (1)..(1563)
atgcaaacacaaaaaccgactctcgaactgctaacctgcgaaggcgcttatcgcgacaatcccaccgcgctttttcaccagttgtgtggggatcgtccggcaacgctgctgctggaatccgcagatatcgacagcaaagatgatttaaaaagcctgctgctggtagacagtgcgctgcgcattacagctttaggtgacactgtcacaatccaggcactttccggcaacggcgaagccctcctggcactactggataacgccctgcctgcgggtgtggaaagtgaacaatcaccaaactgccgtgtgctgcgcttcccccctgtcagtccactgctggatgaagacgcccgcttatgctccctttcggtttttgacgctttccgtttattgcagaatctgttgaatgtaccgaaggaagaacgagaagccatgttcttcggcggcctgttctcttatgaccttgtggcgggatttgaagatttaccgcaactgtcagcggaaaataactgccctgatttctgtttttatctcgctgaaacgctgatggtgattgaccatcagaaaaaaagcacccgtattcaggccagcctgtttgctccgaatgaagaagaaaaacaacgtctcactgctcgcctgaacgaactacgtcagcaactgaccgaagccgcgccgccgctgccagtggtttccgtgccgcatatgcgttgtgaatgtaatcagagcgatgaagagttcggtggcgtagtgcgtttgttgcaaaaagcgattcgcgctggagaaattttccaggtggtgccatctcgccgtttctctctgccctgcccgtcaccgctggcggcctattacgtgctgaaaaagagtaatcccagcccgtacatgttttttatgcaggataatgatttcaccctatttggcgcgtcgccggaaagctcgctcaagtatgatgccaccagccgccagattgagatctacccgattgccggaacacgcccacgcggtcgtcgcgccgatggttcactggacagagatctcgacagccgtattgaactggaaatgcgtaccgatcataaagagctgtctgaacatctgatgctggttgatctcgcccgtaatgatctggcacgcatttgcacccccggcagccgctacgtcgccgatctcaccaaagttgaccgttattcctatgtgatgcacctcgtctctcgcgtagtcggcgaactgcgtcacgatcttgacgccctgcacgcttatcgcgcctgtatgaatatggggacgttaagcggtgcgccgaaagtacgcgctatgcagttaattgccgaggcggaaggtcgtcgccgcggcagctacggcggcgcggtaggttatttcaccgcgcatggcgatctcgacacctgcattgtgatccgctcggcgctggtggaaaacggtatcgccaccgtgcaagcgggtgctggtgtagtccttgattctgttccgcagtcggaagccgacgaaacccgtaacaaagcccgcgctgtactgcgcgctattgccaccgcgcatcatgcacaggagactttctga

SEQ ID NO: 3242 - protein, 520 aa, Escherichia coli K12
MQTQKPTLELLTCEGAYRDNPTALFHQLCGDRPATLLLESADIDSKDDLKSLLLVDSALRITALGDTVTIQALSGNGEALLALLDNALPAGVESEQSPNCRVLRFPPVSPLLDEDARLCSLSVFDAFRLLQNLLNVPKEEREAMFFGGLFSYDLVAGFEDLPQLSAENNCPDFCFYLAETLMVIDHQKKSTRIQASLFAPNEEEKQRLTARLNELRQQLTEAAPPLPVVSVPHMRCECNQSDEEFGGVVRLLQKAIRAGEIFQVVPSRRFSLPCPSPLAAYYVLKKSNPSPYMFFMQDNDFTLFGASPESSLKYDATSRQIEIYPIAGTRPRGRRADGSLDRDLDSRIELEMRTDHKELSEHLMLVDLARNDLARICTPGSRYVADLTKVDRYSYVMHLVSRVVGELRHDLDALHAYRACMNMGTLSGAPKVRAMQLIAEAEGRRRGSYGGAVGYFTAHGDLDTCIVIRSALVENGIATVQAGAGVVLDSVPQSEADETRNKARAVLRAIATAHHAQETF

SEQ ID NO: 3243 - DNA, 2984 bp, Rhizobium meliloti
  CDS (638)..(2827)
aacgaggacgagggcacgcggctgcgaacggtcgcgccattcaaggcgatcatcggcggcggctacagccaggaaaccttcggtgtcgatgtctcgacgacggtccgcagccatgccggacgataacgacagcgaaaccttcgatgcccccggctacggtctcgtggatatgaccgggtggtggacgcccgaaagcttcaagggattgagggtagaggccggggtctataacatcttcgacaagaagtatttcaacgcgctcggcgtacgtggcgtcgacctcgcctcatcgtccgctcagccgcgcgacttcgattccgaaccgggacgcacgttcaaagtctcgttgacgcaacgcttctgatcattcagcaagttccgacggtgtaaaggcggctcgtgttagccgccttttctcactctcttcctcttttttcccgcttgcgcgccagcgcaagccgcgctaacacttccgcccatggcaaacacgcagaacatttcgatctggtggtgggctcgctgaggcggccttgaccagtcatgcgtgattgagagatggagccgcccggagatttcgaggcggcttttttcgtattcgggccgcgtggaaagaccgggcttttacggagcgagacgaatggcagcggtaattctggaagacggcgcggagagttataccacgaagggtggcatcgtcgtcacccgcaggcggcgtgaggcatcctacagcgacgcgatcgccggttatgtcgaccggctggacgaacgccgcggcgcggtcttttcctcgaactacgaatatcccggccgctatacccgctgggacactgcggtggtcgacccgccgcttgccatctcctccttcggtcgctcgctctggatcgaagcctataacgaacgcggcgaagtgctgctggcgctgatcgccgaggatctgaagtccgttgccgacatcacgctcggctcacttgccgcccgccgcctcgacctcaccatcaacgagcccgatcgtgtcttcaccgaggaagagcggtcgaagatgccgacggtctttacggttcttcgcgcggtgacgaacctcttccactcggaggaggactcgaacctcggcctctatggcgccttcggctacgacctcgccttccagttcgatgcgatcgaactgaagctttcgcgtccggacgaccagcgcgacatggttctctttctgccggacgagatccttgtggtcgatcactatgcggccaaggcctggatcgaccgctacgatttcgccagggagaacctttcgaccgagggcaaggcagcggacattgctcccgagccgttccgcagcgtcgacagcatcccgccgcacggggatcaccgcccgggcgaatatgccgagctcgtcgtcaaggcgaaggaaagcttccgtcgcggcgatcttttcgaagtggtgccggggcagaaattctacgagcgctgcgaaagccgcccgtccgagatttccaaccggctgaaggcgatcaatccgtcgccctattccttcttcatcaatctcggcaaccaggaatatctcgtcggtgcttcgccggagatgttcgtgcgcgtttccggccggcgcatcgagacctgcccgatctccggtacgatcaagcgcggcgacgatccgatcgccgacagcgagcagatcctgaagctcttgaactcgaagaaggacgagtccgagctcaccatgtgctcggacgtcgaccgcaacgacaagagccgggtctgcgtgccgggctcggtcaaggtgatcggccggcgtcagatcgagatgtattcgcggctgatccacacggtcgatcacatcgaggggcgcctgcgcgacgatatggacgccttcgacgggttcctcagccacgcctgggcggtgaccgttaccggcgcgccaaagctctgggccatgcgcttcatcgagagccacgagaagagcccgcgtgcctggtatggcggcgcgatcggcatggtcggcttcaacggcgacatgaataccgggctgaccttgcgtaccatccgcatcaaggacgggatcgccgaggtgagggcgggtgcgacgctcctctatgattccaatccggaagaagaagaagccgaaaccgaactgaaggcctctgccatgattgcagccatccgcgacgcgaaatccgcaaacagcgccaaatccgcgcgcgatgtcgccgccgtcggcgccggagtcagcatcctgctcgtcgatcacgaggacagcttcgtccataccctcgcgaactacttccgccagaccggcgcgtccgtcaccaccgtgcgcacgccggtggccgaggaaatcttcgaccgggtcaagccggacctcgtcgtgctttcgcccggtcccggcaccccgaaggacttcgactgcaaggcgacgatcaagaaggcgcgggcgcgggacctgccgatcttcggcgtctgcctggggctgcaggcgctcgcggaggcctatggcggcgaccttcgtcaactggcgatcccgatgcatgggaagccctcgcgcatccgcgtgctcgaacccggcatcgtcttctccggcctcggcaaggaggtgacggtcgggcgctatcattcgattttcgccgatccgtccaacctgccgcgcgaattcgtgatcacggccgaaagcgaagatggtacgatcatgggcatcgaacacagcaaggagccggtggcggccgtgcagttccatccggaatcgatcatgacgctgggcggcgacgccggcatgcggatgatcgagaacgtggttgcccatctcgccaagcgggcgaagaccaaggcagcctgacctcctgcgcgtcggctggaccggctcgaggcattcgaccgtttgacaagcggcccgtgatcgcccatatggcgcccatgatccgcctgcgcgaaaacccgcgcgggcggttttgcatttgaatggccttgcatctgcaactcgtttgcatctgcag

SEQ ID NO: 3244 - protein, 729 aa, Rhizobium meliloti
MAAVILEDGAESYTTKGGIVVTRRRREASYSDAIAGYVDRLDERRGAVFSSNYEYPGRYTRWDTAVVDPPLAISSFGRSLWIEAYNERGEVLLALIAEDLKSVADITLGSLAARRLDLTINEPDRVFTEEERSKMPTVFTVLRAVTNLFHSEEDSNLGLYGAFGYDLAFQFDAIELKLSRPDDQRDMVLFLPDEILVVDHYAAKAWIDRYDFARENLSTEGKAADIAPEPFRSVDSIPPHGDHRPGEYAELVVKAKESFRRGDLFEVVPGQKFYERCESRPSEISNRLKAINPSPYSFFINLGNQEYLVGASPEMFVRVSGRRIETCPISGTIKRGDDPIADSEQILKLLNSKKDESELTMCSDVDRNDKSRVCVPGSVKVIGRRQIEMYSRLIHTVDHIEGRLRDDMDAFDGFLSHAWAVTVTGAPKLWAMRFIESHEKSPRAWYGGAIGMVGFNGDMNTGLTLRTIRIKDGIAEVRAGATLLYDSNPEEEEAETELKASAMIAAIRDAKSANSAKSARDVAAVGAGVSILLVDHEDSFVHTLANYFRQTGASVTTVRTPVAEEIFDRVKPDLVVLSPGPGTPKDFDCKATIKKARARDLPIFGVCLGLQALAEAYGGDLRQLAIPMHGKPSRIRVLEPGIVFSGLGKEVTVGRYHSIFADPSNLPREFVITAESEDGTIMGIEHSKEPVAAVQFHPESIMTLGGDAGMRMIENVVAHLAKRAKTKAA

SEQ ID NO: 3245 - DNA, 1365 bp, Salmonella typhimurium
  CDS (1)..(1365)
atgatgaagacgttatctcccactgttatcaccttaccctggcgtccggacgccgctgaacactattttgcgcccgtaaaccatttgccctgggcgatgctgctgcattcaggtgatgctattcatccctataaccgttttgatattctggtcgccgatcctgtcaccacactgaccacgcgcgcgcaggaaaccacggtatgtactgcgcgcacgactaccgtcactctcgacgatccgttacacgttttgcagactcaactggaggcgctgccttttcatcctcagcctgaccctgacttaccctttcagggcggcgcgctgggtctgtttggttatgatttagggcggcgtttcgaaattttgcccgatactgccgcgcgcgatatcgctttacccgatatggcgattggcctttacgactgggcgctgattgtcgatcaccaaaaacaggtggtgtcgctgataagctatcacgatgcagacgcccgatatcgctggctcaccagccagcgcgcgccgacccgcacgcccttcaggcttacctcagcctggcaatccaatatgacgcgttgcgagtatggcgagaagtttcgtcaggtgcaggcctggctgcacagcggggactgctatcaggtcaatctttcccagcgttttcaggcgagctacgagggtgatgaatggcaggctttcgaacgccttaaccgcgccaatcgcgccccgttcagcgcctttcttcgtttacatgacggcgccatattgagcctttctcccgagcgttttatccaactggagaatggtcatatccagacgcgcccgatcaaaggtacgcttccacggcttaacgatccgcaggcggatcgtcagcaggcgcagaaactggctaattcaatgaaagatcgcgctgaaaatttgatgattgtcgatttgatgcgtaacgatattggccgggtcgccgtaccaggttcggtgaaagtgccggaactgttcgtcgtcgaaccatttcctgccgttcaccatctggttagcaccattaccgcccgtttaccggactcgcttcatgctaccgacctgctgcgcgcggctttccccggcggctccattaccggcgcgcctaaagtgcgggcaatggaaattatcgacgaactggagccgcagcgacgcaacgcctggtgcggtagcatcggttatctgagtttctgcggcaagatggataccagtattactatccgcaccgtcacggcaacgcagggccaactctattgctcagccggcggcggtatcgtggccgatagcaacgaagaagcggaatatcaggaaacttttgataaagttaatcgtatcctgcacccactggagaactaa

SEQ ID NO: 3246 - protein, 454 aa, Salmonella typhimurium
MMKTLSPTVITLPWRPDAAEHYFAPVNHLPWAMLLHSGDAIHPYNRFDILVADPVTTLTTRAQETTVCTARTTTVTLDDPLHVLQTQLEALPFHPQPDPDLPFQGGALGLFGYDLGRRFEILPDTAARDIALPDMAIGLYDWALIVDHQKQVVSLISYHDADARYRWLTSQRAPTRTPFRLTSAWQSNMTRCEYGEKFRQVQAWLHSGDCYQVNLSQRFQASYEGDEWQAFERLNRANRAPFSAFLRLHDGAILSLSPERFIQLENGHIQTRPIKGTLPRLNDPQADRQQAQKLANSMKDRAENLMIVDLMRNDIGRVAVPGSVKVPELFVVEPFPAVHHLVSTITARLPDSLHATDLLRAAFPGGSITGAPKVRAMEIIDELEPQRRNAWCGSIGYLSFCGKMDTSITIRTVTATQGQLYCSAGGGIVADSNEEAEYQETFDKVNRILHPLEN

SEQ ID NO: 3247 - DNA, 1413 bp, Bacillus subtilis
  CDS (1)..(1413)
atggcacaacgcagaccggcaggcaaaaaaataccttttcaaaaagactcattcttacaacaatttgagaaacttgcgcaatcccggaaacatcatgtacttctcgaaagtgcaagaggcggcagatatagtatagccggtcttgatccaattgcgactgtgaaaggaaaagacggaataactacaattaagcatggtgatgagatgctgtttaaagaaggtgatccattacgggccttccacagctggtttaaaacactggaaacagaaacgaatcatgagttccctgactttcaaggcggggcaatcgggtttctcagctatgattacgcacggtacattgaaaattttaaaatgctctcattagatgatttagaaacaccagatatttattttcttgtttttgatgatatagcagtttatgaccatcaagaagagtctctatggctgattactcatgttaatggttctgatcaggaaacagcggatgtgaagctatctgagttagagcagatgtggttgactgagcttcccgctgtcacttcgcgagagatgaagcctgaaacagctggttctttcgcggcgccatttaccgaggatgggttctcacaagctgtagagaaaatcaaacaatacattgccagcggagatgtgtttcaagtcaatctatcaataaggcagtcacagtcactgtctgtccacccatatcaaatttacaaaaccttgagagaagtaaatccttctccttatatggcgtatttagaaacacctgatttccaaatcatttgcggatcgcctgaactgcttgtcagcaaaaagggcaagctattagagacgagaccgattgcgggcacccgttccagagggaaaacaaatgaagaagacgaggcgcttgcaaacgaattgatacacaatgaaaaagaacgcgcggaacatgtcatgctggttgatcttgagcgaaatgatctgggaagagtatcacgttacgggtctgtgcgcgtaaatgaattcatggcaattgaaaaatactcgcatgtgatgcacattgtgtctaatgtccaaggtgaactgcaggatgggtatgatgctgtagatattattcatgctgtgtttcccggaggaaccattactggtgcaccgaaagtaagaacgatggaaattatagaagaacttgagccgacacgccgagggctttatactggatctataggatggtttggatataatcacgatctgcagtttaatatcgtcattcgaaccatttatgcaaccggagggcaggcatttatgcagtccggtgcaggagttgtgattgattctgttccgaagcacgaatacaaggaatcattcaaaaaagcttttgcgatgcaaagagcattagagctgagcgaagaagagacaaaaattagatga

SEQ ID NO: 3248 - protein, 470 aa, Bacillus subtilis
MAQRRPAGKKIPFQKDSFLQQFEKLAQSRKHHVLLESARGGRYSIAGLDPIATVKGKDGITTIKHGDEMLFKEGDPLRAFHSWFKTLETETNHEFPDFQGGAIGFLSYDYARYIENFKMLSLDDLETPDIYFLVFDDIAVYDHQEESLWLITHVNGSDQETADVKLSELEQMWLTELPAVTSREMKPETAGSFAAPFTEDGFSQAVEKIKQYIASGDVFQVNLSIRQSQSLSVHPYQIYKTLREVNPSPYMAYLETPDFQIICGSPELLVSKKGKLLETRPIAGTRSRGKTNEEDEALANELIHNEKERAEHVMLVDLERNDLGRVSRYGSVRVNEFMAIEKYSHVMHIVSNVQGELQDGYDAVDIIHAVFPGGTITGAPKVRTMEIIEELEPTRRGLYTGSIGWFGYNHDLQFNIVIRTIYATGGQAFMQSGAGVVIDSVPKHEYKESFKKAFAMQRALELSEEETKIR

SEQ ID NO: 3249 - DNA, 1449 bp, Spirochaeta aurantia
  CDS (1)..(1449)
atgtttctatttgtagaaacaatccgaccccagcaacgaggagagtctcttttggaaaccgtcatcaaggtcgtccccggcgaacgcttcactccctacggcctggccctcaaactcggcgcccgggtggtgctcgagtcgtcgtcctcgaagaagggacgagaccggtactcgctcctgctcctccaggaagcctttcgggtggcccaggagggcaccgaggtctacttcgtgaaagacggccgtcggtcgaaggtgaaggccaaccacagggacatcctcgacgtgctcatgtacttcgcccgccaacactccgacccgggccaggacttcccgtttcccgccggtggagtggggtacctgagcttcgagttctgccggtactgcgacaccatccacctgaatcccgccaagcccgaccccctcgagttgcccgacgccctgttcctgtttggccacgtgttcctcatctacgaccattacaccgacctgatctacctcgtcggcctcaactacaaagaagcctccatcgacctcgaggccgccctggccgcggtcgaggcgagggtgaacgacggcgactggtcggccctggggtcggtgggtgccccctacgacgccgaggttctgccccaggactacgaccccgacgagacctacaaggccaacgtcggcgccatgcgccaagaggtcatcgccggaaacctcctccagggcgtgcccagccggcggctcctcgtgaagaccgaaatgcccgccatcgaggcctaccggaggctgcggtcgtccaacccctcgccgtacatgttctacctcgactttggagactaccagctctttcgcgccagccccgaactgcacgtgaaggtgaagggcggcaccgccgagatccgccccatcgccggcacccgacgccggggggccaccgacgccgaagaccgggccctcgaggccgaactcttggccgacgtgaaggagagggccgagcacctcatgctcgtcgacctcgcgcgcaacgacctgggacgcatctgccaacccggcaccgtccaggtgaaggacagctacttcatcgagcgctacagccacgtcatgcacatcgtcagctcggtggaaggccgactcaaggacgacaagaccggcatcgacgccctcagggcctcgttccccgccggaaccgtttcgggggcccccaagatccgggccatcgaagtcatcgaccgactcgaacccgtccagaggcgcttctactcgggcgtcgtcggccacctcagccccgacggcagcctcgacacctgcatcgccatccggtcggccctcaagaagggcgacaccatggtgctccaggccgggggcggcatcgtcttcgactccaaccccgaccgcgagctcgaagagacctacgaaaagatgagggccacggcccgaagcctgggactggagatctag

SEQ ID NO: 3250 - protein, 482 aa, Spirochaeta aurantia
MFLFVETIRPQQRGESLLETVIKVVPGERFTPYGLALKLGARVVLESSSSKKGRDRYSLLLLQEAFRVAQEGTEVYFVKDGRRSKVKANHRDILDVLMYFARQHSDPGQDFPFPAGGVGYLSFEFCRYCDTIHLNPAKPDPLELPDALFLFGHVFLIYDHYTDLIYLVGLNYKEASIDLEAALAAVEARVNDGDWSALGSVGAPYDAEVLPQDYDPDETYKANVGAMRQEVIAGNLLQGVPSRRLLVKTEMPAIEAYRRLRSSNPSPYMFYLDFGDYQLFRASPELHVKVKGGTAEIRPIAGTRRRGATDAEDRALEAELLADVKERAEHLMLVDLARNDLGRICQPGTVQVKDSYFIERYSHVMHIVSSVEGRLKDDKTGIDALRASFPAGTVSGAPKIRAIEVIDRLEPVQRRFYSGVVGHLSPDGSLDTCIAIRSALKKGDTMVLQAGGGIVFDSNPDRELEETYEKMRATARSLGLEI

SEQ ID NO: 3251 - DNA, 1389 bp, Methanobacterium thermoautotrophicum
  CDS (1)..(1389)
atgggagtgaatgtttttaaaattataaacctggaaaaacccagaaaagaaaaactggaattccgagaaccctttgaagtattcaaaagtatctattctgaatatgagtcttcattccttcttgagtccatggaaagtgacactggacttgcaaggtactccttcattggatttgaacctgagatgataataagggcccgtgaaggggtcattgagattgatgatggcgattccagggaggagtttgattcaaaaaacccattcgaggacctcaggggattcctgaagatggaaaaaaactccggaggattctgcgggggactcgtgggttacatatcctatcaggccgcaaggttctttgacacaatcaggctcagtgaaggtgatttccccgacttcgaatttggactcttccttgatggtatcatgttcaaccacctgacaggggaatgcagctacatcagccgccacggcaacagactacctgatatatcccctctccttggggatgaggtccccacagggaccctgggatacaggagggaaagaacactcctctcaaagaggaggtacatggacatggtccttgaggccaaggagagaataagggagggtgaaatatttcaggcagtgctctccagtgccacagattacaggctgaggggagacaggctcgcattctatgaatccctcaggaggataaacccctcaccatacatgtaccaccttaaactgggtgaacgggagataaccggctcaagccccgagatgcttgtcagggttgaagatagaaggattgaaacatttcccattgcaggaacacgccctcgtggaaggacagaagaggaggacggggtgatagcatctgatcttttatctgatgaaaaggaacaacttgcagagcacctcatgctggttgacctggcccggaacgatatagggcgggtatcggagttcggatcggtggaggtacctgaatacatgaccataaagaggttctcccatgtgcagcacatactctcccatgtaacaggtaaactgagggatggaatggacgcagttgatgcactgggagctgtttttcctgcaggcacagtgagcggcgcaccaaagataagggcaatggagataatagagtcccttgaaggtgttccaagaaatgcctatgcaggcgcactaggctacctctcactcaatggaaacgcggacttcgcaataaccataaggtcaatggtatgccaggggaaaacagggagaatccaggcgggagcaggaatagtgcatgactccatccctgagatggaatatctggagtgccagaataaggcgagggcccttctaaaatcaatggagatggcaggtgaacaagttgatccttataatcgataa

SEQ ID NO: 3252 - protein, 462 aa, Methanobacterium thermoautotrophicum
MGVNVFKIINLEKPRKEKLEFREPFEVFKSIYSEYESSFLLESMESDTGLARYSFIGFEPEMIIRAREGVIEIDDGDSREEFDSKNPFEDLRGFLKMEKNSGGFCGGLVGYISYQAARFFDTIRLSEGDFPDFEFGLFLDGIMFNHLTGECSYISRHGNRLPDISPLLGDEVPTGTLGYRRERTLLSKRRYMDMVLEAKERIREGEIFQAVLSSATDYRLRGDRLAFYESLRRINPSPYMYHLKLGEREITGSSPEMLVRVEDRRIETFPIAGTRPRGRTEEEDGVIASDLLSDEKEQLAEHLMLVDLARNDIGRVSEFGSVEVPEYMTIKRFSHVQHILSHVTGKLRDGMDAVDALGAVFPAGTVSGAPKIRAMEIIESLEGVPRNAYAGALGYLSLNGNADFAITIRSMVCQGKTGRIQAGAGIVHDSIPEMEYLECQNKARALLKSMEMAGEQVDPYNR

SEQ ID NO: 3253 - DNA, 1572 bp, Haloferax volcanii
  CDS (1)..(1572)
atgacggcccccgacaccgaccgcgaggagttcgtctccctcgccggcgacgcggacggaccggtcgtgacccacctcgtggccgacctcgacgtgtccgtggacccgctggccgcgtacacgacgctcgcggaccgcagcgactacggcttcctcctggagagcgccgagaaggtctcctcgagcaacccgcaggcgcgttctccgcgcccgcgcacggccgccgactcccacgcgcgcttctcgttcgtcggctacgaccccgaagcggtcgtgacggtcggtcccgacggcgtcgacgtgaccgacctcggcggccccgccgcggagttcgtcggcgcgggcgacggcgacgtgctcgattccctgcgcggcgcgctccccgacctcccgcgcgtcaacttccccgagacggacgcagacgtcaccggcgggctggtcggcttcctcgcctacgaggccgtctacgacctctggctcgacgaggtcggccgcgagcgccccgacacggacgacccggacgccgagttcgtcctcacgacccggaccctctcgttcgaccaccgcgaggacgccgtccgcctcgtctgtacccccgtcgtctcgcccgacgacgaccccggcgaggtgtacgacggcgtcgtcgccgaggccgagcgcgtcgcggaaaagctccgcgcggcggacgaccccgcccccggcggcttcgagcggaccggcgaggacgccggctcccgcgaggagtacgaggccgcggtcaggaagacgaaagaacacgtccgcgacggcgacatctatcagggcgtcatctcgcgcacccggaagctccgcgggcaggtcgacccggtcggtctgtacgcctcgctgcgcgaggtgaacccctcgccgtacatgttcctgctccggcacggcgaccggcgcgtcgtcggcgcgagccccgaaacgctcgtctccgtcaggggcgaccgcgtcgtcgtcaaccccatcgcggggacgtgccagcgcgggtccggcccggttgaggaccgccgcctcgccggcgaactcctcgcggacgcgaaagagcgcgccgagcacacgatgctcgtcgacctcggccgcaacgacgtgcgccgggtctcgacgcccgggagcgtccgcgtcgaggacttcatgagcatcatcaagtacagccacgtccagcacatcgaatcgaccgtctcggggacgctcgacgccgacgccgacgccttcgacgccacgcgagcgacgttccccgcggggacgctcaccggcgcgccgaaggtccgcgcgatggagattatcgacgacctcgaagccgagccccgtggcgtctacggcggcggcgtcggctactactcgtggaccggcgacgccgacgtggcaatcgtcatccgaaccgcgacggtcgactccggcggcgcggacgacgccatcaccgtccgcgcgggtgccggcatcgtcgccgactccgacccgaccgcggagtacgaggagacggaacagaagatgggcggggtgctcgacgccgtccgccgcatcgagtacgggaccgaggaggcgtcgcaatga

SEQ ID NO: 3254 - protein, 523 aa, Haloferax volcanii
MTAPDTDREEFVSLAGDADGPVVTHLVADLDVSVDPLAAYTTLADRSDYGFLLESAEKVSSSNPQARSPRPRTAADSHARFSFVGYDPEAVVTVGPDGVDVTDLGGPAAEFVGAGDGDVLDSLRGALPDLPRVNFPETDADVTGGLVGFLAYEAVYDLWLDEVGRERPDTDDPDAEFVLTTRTLSFDHREDAVRLVCTPVVSPDDDPGEVYDGVVAEAERVAEKLRAADDPAPGGFERTGEDAGSREEYEAAVRKTKEHVRDGDIYQGVISRTRKLRGQVDPVGLYASLREVNPSPYMFLLRHGDRRVVGASPETLVSVRGDRVVVNPIAGTCQRGSGPVEDRRLAGELLADAKERAEHTMLVDLGRNDVRRVSTPGSVRVEDFMSIIKYSHVQHIESTVSGTLDADADAFDATRATFPAGTLTGAPKVRAMEIIDDLEAEPRGVYGGGVGYYSWTGDADVAIVIRTATVDSGGADDAITVRAGAGIVADSDPTAEYEETEQKMGGVLDAVRRIEYGTEEASQ

SEQ ID NO: 3255 - DNA, 1305 bp, Pyrococcus abyssi
  CDS (1)..(1305)
atgcacgtcaagaagctagagcgcgttgaaccgataaagctgtacagcgtaataagagaattcgaaaacccctttatattcacgataatagggaaagatagtaaagaggctaagctaacctacatctcagcatcaccagaatttaccgttgagatatctggaaagggaacattcctcgacggtaagaaagtatcaaatgaaacgaatccctttctatctttaaaatccttcaacatggactccgcaagtggaagtggatttcttggaggattcatggggtacatagcatacgatgcagttcacaattatatcgaggggagcatagaggaaccatcagttttcgggtactatccatgggtttttatttacaatcacgggaagggagaattacgcttttactacttaagggatccatcctttgatccagagacgatagttgaaagggcgaaaagagaagaactcaagttcgagaatggtggtgccgagataataaggaccgatgccaacagggaagagttcatggagatggttgagaagggaaaagagtacatctttgcaggagatgtattccaagttgtgctttcaagggagtacgtgcttaggagtgacgtcgatccagtggagctatatcgaaagctcatctcgataaacccatctccttacaccttcatcctagaattcaagaagatattagttggagcatcaccagaaactatgggatcagttgaggggaggacagttaggataaatcccatagctggcaccgctccaagggggaaaactccagaggaagatgaggagataagaaggagactcctaagcgacgagaaggagagggccgaacatgttatgctagtggatttagctaggaatgacgtaaggaaggtttcaaagcccggaagcgtgaagctcgttagatttttcgatgtaataaagtacagccacgtccagcatattgagagtgaggttataggagagctagctgacgataaagatatgttcgatgcaatagaagcatcatttccagccggaaccctaactggagcccccaagataagggccatggaaataatagacgagcttgagaagagcaggaggagagtttacggtggagccataggatacttctcaataacagggtacgccgactttgcgatagcgataaggatggcagaaatagagggtagaaaagcccatgttagggctggggctggcattgtagctgattcaatccccgagaaggaattttacgaaacggagaataagatgaaggctgttctcaaggcattcggggtgattcaatga

SEQ ID NO: 3256 - protein, 434 aa, Pyrococcus abyssi
MHVKKLERVEPIKLYSVIREFENPFIFTIIGKDSKEAKLTYISASPEFTVEISGKGTFLDGKKVSNETNPFLSLKSFNMDSASGSGFLGGFMGYIAYDAVHNYIEGSIEEPSVFGYYPWVFIYNHGKGELRFYYLRDPSFDPETIVERAKREELKFENGGAEIIRTDANREEFMEMVEKGKEYIFAGDVFQVVLSREYVLRSDVDPVELYRKLISINPSPYTFILEFKKILVGASPETMGSVEGRTVRINPIAGTAPRGKTPEEDEEIRRRLLSDEKERAEHVMLVDLARNDVRKVSKPGSVKLVRFFDVIKYSHVQHIESEVIGELADDKDMFDAIEASFPAGTLTGAPKIRAMEIIDELEKSRRRVYGGAIGYFSITGYADFAIAIRMAEIEGRKAHVRAGAGIVADSIPEKEFYETENKMKAVLKAFGVIQ

SEQ ID NO: 3257 - DNA, 1572 bp, Vibrio cholerae
  CDS (1)..(1572)
atgaataaggccatcaacataaagaaaaccgcgccgcttgaggtgctacacagtgaattgccttatacgcaagatcctacggctttatttcatgctctttgcgctgggcgcagcgactgcctactactggaatctgcagaaatcgactccaagcaaaatttgaagagccttctgttagtggatgctgccgtgcgcattgtgtgtgaaggccatcaagtgacctatcatgcgctcagtgcaaacggccaagcgctgctcaacatcattcatagcaacctcactgatcggattccttgcaaagtagagaaagcgaaacttaccctcaccttctctacaccctgtgatacgttggatgaagactcacgattgcgcgaagcgtcttctttcgatgcgctacgtttagtgcagcacagttttgatctcactgaccacggtaaatttgcgctgtttttaggtggcttatttgcctacgatttagtggctaactttgaaccgctcggtgaagcacctgccgacaatcaatgccctgattacgtattttatgtagcagaaactctgatggtgattgatcatcagcgtgaaacttgccaactgcaagccacccaattccaaccgggcgatgcgctgcacagccaactcaaaagccggatgcgtgaaattcgtgcgcaagtgaatcaaaaattgcctttgccgagtgcgcaatctttatctgatgtggaagtgaccaccaatattagcgatgcagcattttgcgatatcgtgcgtgacctcaagcagtacgtggtcaaaggcgatgtgttccaagttgtgccttcgcgccgttttcgcttaccttgcccttcaccactcgcagcttatcaacggctgaaacagagtaacccaagcccttacatgttctacatgcaagatgaacgctttaccctgtttggcgcatcccccgaaagcgcactcaagtatgaaatgcacaccaaccaagtggaaatctacccgattgcagggactcgccgccgcggtaagcgcgccgatggcagcatcgattttgacctcgatagccgcattgagcttgaactgcgcaccgataaaaaagagaacgccgaacacatgatgctggttgacttagcacgcaacgatgtcgcgcgcattagccaagccggtactcgccatgtcgctgacttgctgcaagtagatcgctacagccatgtgatgcacttggtgtcgcgcgtggtgggtcagttacgtgaagatctggatgcgctgcatgcttatcaagcttgcatgaacatgggcacgctgactggcgcaccgaaaattcgcgcgatgcagttaatccgcgatgtggaacaagcgcgtcgcggcagctacggcggcgcggtgggttatctcacgggtgaaggcgatttggatacctgtatcgtgatccgttctgcttatgtggaaaacggcatcgcccaagtccaagctggcgcgggtgtcgtttacgactccgacccacaagccgaagccgatgaaacgcgcggcaaggcgcaagcggtaatctccgctattttatatgctcatcaagggaaggaatga

SEQ ID NO: 3258 - protein, 523 aa, Vibrio cholerae
MNKAINIKKTAPLEVLHSELPYTQDPTALFHALCAGRSDCLLLESAEIDSKQNLKSLLLVDAAVRIVCEGHQVTYHALSANGQALLNIIHSNLTDRIPCKVEKAKLTLTFSTPCDTLDEDSRLREASSFDALRLVQHSFDLTDHGKFALFLGGLFAYDLVANFEPLGEAPADNQCPDYVFYVAETLMVIDHQRETCQLQATQFQPGDALHSQLKSRMREIRAQVNQKLPLPSAQSLSDVEVTTNISDAAFCDIVRDLKQYVVKGDVFQVVPSRRFRLPCPSPLAAYQRLKQSNPSPYMFYMQDERFTLFGASPESALKYEMHTNQVEIYPIAGTRRRGKRADGSIDFDLDSRIELELRTDKKENAEHMMLVDLARNDVARISQAGTRHVADLLQVDRYSHVMHLVSRVVGQLREDLDALHAYQACMNMGTLTGAPKIRAMQLIRDVEQARRGSYGGAVGYLTGEGDLDTCIVIRSAYVENGIAQVQAGAGVVYDSDPQAEADETRGKAQAVISAILYAHQGKE

SEQ ID NO: 3259 - DNA, 1359 bp, Xylella fastidiosa
  CDS (1)..(1359)
atgacactcattcgatttctgcgtatggatcccgatttattgtccatgcacaggttggcaccggagcgttatccggcgctttttgaatctactgcttctggtactcagcagagtcgctgggatgtgttgttgcatacagatggtcgtttcttccgtttggattccgatggtgtaacacgcgatgctcagggcagggcgctgtccggagactttttgcaggtattggatgcagtgtggagcactgagtacgtgctgcgtgatacgtgtgaggatgctcctccattccgtggtggttgggctttacttcttgactatgaactagctgggcaggttgagccagtgttgaaattgccggtgcgtactgatggtttgcctatggcgttagcgttgcgttgtccggcagcggtattacgtgaccgccacagtggtgtttttttgattgtcgctgagctggggaatgagcatttactggacgtgattgaggcggatttggctgctcttgccttgttgccgccattgccggtttggcgatcgccagtggccgtcactgaggatgagccgtcgcagtttattgccaatgcagagcgtgtgctggattaccttcgtgagggagacgtgttccaggcaaatatctcacgcctttgggaagctcgctttaccactgcacttgatccagcagcgttatacatgcgtttgcgtgtagccaatcctgcgcctttctcgggattgtttgtggctcatggccgagctgtggtgagctcctcaccagagcggttgatttcggtgcaaggagcgcgcattcagacgcgtccgattgctggtacccggccacgttttgtcggtgacgatgacgcagcacgcatccgcgaactggtgaatcaccctaaggagcgtgctgagcatgtgatgttgattgacttagagcgtaacgatttagggagagtgtgtgtgcctgggaccgttgaggtcgatgagttgatgacggtggaaagctatgcgcatgtccatcatatcgtcagtaatgtgcgtggctggttgcctacgggcaggaccccaggggagatcattcgtgccgtgtttccgggggggaccattactggttgtccgaaggtgcgttgcatgcagatcattgcccagctcgaacaggtggcacgcggtgcctacactggtgcctttggatggctcaattgtgatggtgatttggacctgaacattttaatccgcactgctgagattgacggtgtgactgtacgtttccgtaacggtgccggcatcgtgatcaattcactgcctgagcgtgagctggatgagacccgtgccaaggccactggcgtactgcgcgccctgcatgtcatctga

SEQ ID NO: 3260 - protein, 452 aa, Xylella fastidiosa
MTLIRFLRMDPDLLSMHRLAPERYPALFESTASGTQQSRWDVLLHTDGRFFRLDSDGVTRDAQGRALSGDFLQVLDAVWSTEYVLRDTCEDAPPFRGGWALLLDYELAGQVEPVLKLPVRTDGLPMALALRCPAAVLRDRHSGVFLIVAELGNEHLLDVIEADLAALALLPPLPVWRSPVAVTEDEPSQFIANAERVLDYLREGDVFQANISRLWEARFTTALDPAALYMRLRVANPAPFSGLFVAHGRAVVSSSPERLISVQGARIQTRPIAGTRPRFVGDDDAARIRELVNHPKERAEHVMLIDLERNDLGRVCVPGTVEVDELMTVESYAHVHHIVSNVRGWLPTGRTPGEIIRAVFPGGTITGCPKVRCMQIIAQLEQVARGAYTGAFGWLNCDGDLDLNILIRTAEIDGVTVRFRNGAGIVINSLPERELDETRAKATGVLRALHVI

SEQ ID NO: 3261 - DNA, 1464 bp, Xylella fastidiosa
  CDS (1)..(1464)
atgcagtttcagcgtcaagttgccgaagggtgtacccgcattccagtggtgcgtgaagtccagtctgatttggatactccgctttcggtctatctaaaatttgccgatgctccatatacctatttgtttgagtcggtggaaggtggggagcattttgcgaggtattcgatcattgggttgccggcacgccgtgtctatacctttcatgggcataccctggtggtgagtgagttcggtaaggtgttggaaacgcgtcaagtcgccgatccgcttgccgaagttgagctgttgcgtgcgcagtatgtagtgccgcaattagaagggttgccaggttttacaggcggcttagtggggtggttcggctttgaatgtatccagtacatcgaacctcgcttcatggaaggtaaaaaacgtgatgaacttggtacgccagatattctgctgatgctttcggaagaattggcggtgttcgacagcctcaagggccgattatatttgatcgttcatgcggatcctgcgcaaccacacgcttacgctcgtgcagtggaacgtttggatgtgttgatctaccgtctgcggcaaggtggggtggattatccgcattcacatatttcggaagtgattaacgaggaagattttcactcttctttgacccgtgagcagtatcacgctgtggtgcgtcaggcgcaggagtatgtgcgttcgggtgatatttttcaggttgtaccaagtcagcgcctgtgtacgcagtttcatgcacgtccgattgatgtatatcgggcgttgcgcacgctgaatccgtcgccttatatgtatttcattgatattggtgctactcaggtggttggttcatcaccggagatattggcgcgattgcagggggatgtggtcacggtgcgtccgattgccggcacacgcccgcgaggtgcgactccggagcatgacaaacggttggaaatggagttgttagccgatccaaaagagcgtgctgaacacgtgatgctgattgatttgggtcgcaatgatatcggacgtgttgtcgaggcggggagtgtacaagtcaaggagtcgtttgtaatcgagcgttatagtcatgtcatgcatattgtcagtgaggtcaccggtatcttgaagccgggtttgaactacgttgatgtgttacgtgcaacgttccctgcgggtactgtgtccggcgcgccaaagatccgtgcattggagattatccgtgagttggaaccagtgtgtcgcaacgtatattccggtgcagtgggttacattggctggcatggagatgctgatactgcaatcgcgattcgtactgcggtgattcaaaacggttgcctgtacgtgcaggctggtggtggtgtggtgtatgactcggatccagatttggagtggcaggaaaccatgaacaaggcgcgtgcattatttagggctgtggcgcaggcggccagagggttgtga

SEQ ID NO: 3262 - protein, 487 aa, Xylella fastidiosa
MQFQRQVAEGCTRIPVVREVQSDLDTPLSVYLKFADAPYTYLFESVEGGEHFARYSIIGLPARRVYTFHGHTLVVSEFGKVLETRQVADPLAEVELLRAQYVVPQLEGLPGFTGGLVGWFGFECIQYIEPRFMEGKKRDELGTPDILLMLSEELAVFDSLKGRLYLIVHADPAQPHAYARAVERLDVLIYRLRQGGVDYPHSHISEVINEEDFHSSLTREQYHAVVRQAQEYVRSGDIFQVVPSQRLCTQFHARPIDVYRALRTLNPSPYMYFIDIGATQVVGSSPEILARLQGDVVTVRPIAGTRPRGATPEHDKRLEMELLADPKERAEHVMLIDLGRNDIGRVVEAGSVQVKESFVIERYSHVMHIVSEVTGILKPGLNYVDVLRATFPAGTVSGAPKIRALEIIRELEPVCRNVYSGAVGYIGWHGDADTAIAIRTAVIQNGCLYVQAGGGVVYDSDPDLEWQETMNKARALFRAVAQAARGL

SEQ ID NO: 3263 - DNA, 2760 bp, Arabidopsis thaliana (mouse-ear cress)
  CDS (7)..(2760)
atgaacatgaatttttcgttttgttcaacatcttctgagttatcatatccaagtgagaatgttctgagattttctgttgcaagtcggctgttttctcctaaatggaagaaaagtttcattagtttaccttgtcgtagtaaaactacgaggaaggttttggcgtcaagccgttatgtgccagggaaattggaagatttgtcggttgttaagaagagtttaccgagaagagaacctgtggagaagcttggttttgtgaggactttgttgattgataattatgatagttatacattcaatatatatcaggctctgagtactattaatggagtgcctcctgtcgttattcggaatgatgagtggacgtgggaagaagcttaccattacttatatgaagatgttgcttttgataatattgttatatcgcctggacctggttcgcctatgtgtccagctgatataggaatatgtcttcgtcttttgcttgaatgccgtgatatcccaattctaggcgtctgccttggccaccaggcactaggttatgtccatggagctcatgtggtgcatgccccggaaccagtccatggacggttgagtgggattgaacatgatgggaacatattgttttctgatattccatccgggagaaactctgattttaaggttgttagataccattcactgatcatagataaggaatcactaccaaaggaacttgtaccaatagcgtggacgatttatgatgacactggctctttctctgagaagaattcctgtgttcctgtgaataacactgggagcccacttgggaacggatctgtcattcctgtttcagaaaagttagaaaatcgaagtcattggccttcgtcccatgttaatgggaaacaagatagacacattctcatgggcatcatgcattcttcttttccccattatggtttacagtttcatccagaaagtattgctactacctatggtagtcagttatttaaaaatttcaaggacataactgtgaattattggagtcggtgcaaatctacatccctgcgtcgaagaaacataaatgacactgcaaacatgcaggtgcctgatgctactcaattgctgaaagaactttctagaactagatgtacaggaaatggttctagctattttgggaaccctaagtctctgttttctgccaagacaaatggtgtagacgtctttgatatggtggattcatcatatccaaaaccacatacaaaattgctgaggttgaaatggaagaagcatgaacgtcttgcgcataaagttggtggagtaagaaatatatttatggaactctttggcaagaatagaggaaatgatactttttggctggatacttcttctagtgacaaggctagaggacgattttctttcatgggcggtaaaggtggatctctctggaagcaattgacatttagtttatctgatcaaagtgaggttacatcaaaacatgcgggacatcttctgattgaagattctcagagttctactgagaaacaattcttggaagaaggctttcttgattttctccgtaaggagctttcatctatctcttatgatgagaaggacttcgaagagttgccttttgatttttgcggtggatacgtaggttgtattgggtatgatattaaagtggaatgtggaatgccaattaatcgtcacaaatccaacgctccagatgcatgtttcttctttgcggataatgttgtcgccattgatcatcaactcgatgacgtttatatattatcgctttacgaagagggaactgcagaaacctctttcctgaatgatactgaagagaagctcattagcttgatgggtttgtccacaagaaagttggaggatcaaactcttccagttatagattcatctcaatccaaaacaagttttgttcctgacaaatcccgagagcagtatatcaacgatgttcagagctgtatgaagtatatcaaagacggggagagctacgagctttgtctcactactcaaaacagaaggaaaataggaaatgctgatcctttgggactttatctccacctgagagagaggaatccagcaccatatgcagcatttctcaacttctcaaatgcaaatctgtctttatgctcttcgtcccctgaaaggtttcttaagctggacagaaatggaatgcttgaagcaaagccgattaagggtactatagctcgtggctccacgcctgaagaagatgaatttcttaaattgcaattgaaactcagtgagaagaatcaagccgagaatctgatgattgttgaccttctaaggaatgatctcggtcgtgtctgtgagcctggctcagtccatgtacctaacctcatggatgtagaatcatacacaacagtacatacaatggtgagcacgatccgtggactgaaaaaaacagatattagtccagtggaatgtgtaagagctgctttccctggcggttcaatgactggtgccccaaaactaagatctgttgagattctcgattctctagagaactgttcgagaggcctttactctggctcaatcgggtatttctcgtataatggtacgtttgatctgaatattgtgataagaacagtaataatacatgaagatgaagcttccattggagcaggaggagctattgttgcattatcaagtccagaagatgagtttgaggaaatgattcttaagactagagctcctgctaatgcagtcatggagttttgtagtgatcagaggagacaatag

SEQ ID NO: 3264 - protein, 917 aa, Arabidopsis thaliana (mouse-ear cress)
MNFSFCSTSSELSYPSENVLRFSVASRLFSPKWKKSFISLPCRSKTTRKVLASSRYVPGKLEDLSVVKKSLPRREPVEKLGFVRTLLIDNYDSYTFNIYQALSTINGVPPVVIRNDEWTWEEAYHYLYEDVAFDNIVISPGPGSPMCPADIGICLRLLLECRDIPILGVCLGHQALGYVHGAHVVHAPEPVHGRLSGIEHDGNILFSDIPSGRNSDFKVVRYHSLIIDKESLPKELVPIAWTIYDDTGSFSEKNSCVPVNNTGSPLGNGSVIPVSEKLENRSHWPSSHVNGKQDRHILMGIMHSSFPHYGLQFHPESIATTYGSQLFKNFKDITVNYWSRCKSTSLRRRNINDTANMQVPDATQLLKELSRTRCTGNGSSYFGNPKSLFSAKTNGVDVFDMVDSSYPKPHTKLLRLKWKKHERLAHKVGGVRNIFMELFGKNRGNDTFWLDTSSSDKARGRFSFMGGKGGSLWKQLTFSLSDQSEVTSKHAGHLLIEDSQSSTEKQFLEEGFLDFLRKELSSISYDEKDFEELPFDFCGGYVGCIGYDIKVECGMPINRHKSNAPDACFFFADNVVAIDHQLDDVYILSLYEEGTAETSFLNDTEEKLISLMGLSTRKLEDQTLPVIDSSQSKTSFVPDKSREQYINDVQSCMKYIKDGESYELCLTTQNRRKIGNADPLGLYLHLRERNPAPYAAFLNFSNANLSLCSSSPERFLKLDRNGMLEAKPIKGTIARGSTPEEDEFLKLQLKLSEKNQAENLMIVDLLRNDLGRVCEPGSVHVPNLMDVESYTTVHTMVSTIRGLKKTDISPVECVRAAFPGGSMTGAPKLRSVEILDSLENCSRGLYSGSIGYFSYNGTFDLNIVIRTVIIHEDEASIGAGGAIVALSSPEDEFEEMILKTRAPANAVMEFCSDQRRQ

SEQ ID NO: 3265 - DNA, 1722 bp, Streptococcus pneumoniae
  CDS (1)..(1722)
atgcatagaaaaacagtgattgattttaggactttgggggagagatatacctttacccagcctattaaagagttgaaaacgagaaatgtagaagaagtggcagatttgctggcacaagtggaaagctaccaagagcaaggttattatgtggtggggtatgtcagctacgaggctgcacctgcttttgaggaaaaattagcagttcacaaggatcccctactgggagagtacctgctttactttactgttcatgatatcgtagaaacttcccctattcctctgacttatgaggatattgatttgccctcaaattggcaggaagtaacgtctgcagcagactatgaaaaggccattgcccaaattcaccatcatttacggcagggagatacctatcaggtcaactacaccgtccaacttaagcaaaagttaaatgccaatccttttgccatctacaatcgtatggtggtagagcaggaggcgggctacaatgcctatgtggaacatgacgagatgacagtgatttccatgagcccagagctcttttttgagcaaaatgatcgcgagttgacaacacgaccaatgaaggggacgactcagcgtggggtaactgaccaagaagatcttgaacaggccagttggttggaacaggatcccaaaaatcgctctgaaaatatgatgattgtggacctcttgcgcaatgatatgaaccgtatttctgaagttgggagcgagcacgtggagcgtctgtgtcaggtagagcagtattcaactgtttggcagatgacttcgaccatcaagagtcagttgcgagaggatgtggaccttgttgaaatcttccgctcactctttccttgtggttccataacgggtgcaccgaaaattgcgacaatggagattatcaaggacttggagcctcaaccgcgtggagtctactgtggaacgattggtctcttgcttccaaatggacgacggatttttaatgtggccattcgtaccattcaacttcacaaaggtcaagccatttatggagttggcggagggattacttgggatagcacatgggaatctgaataccgagaggttcatcaaaaggcagcagttctctatcgtaaacaagctcgcttccaattaattacaactggaaaaatcagccaaaaacaactgatgtttgaagaacaacatctggaaaggctgagaaaagctagtcgttattttgcttttccttttgatgcagaagacttgggacacaagattgaggaagagtgtcaggattgtgaagctaatcgagattaccgcttgcgaatcagccttagcaaatctggagagatagaagtcaatcgtcaagtattaacccctctcagtacaagcttttgtcaggcccaagtctgtcttcaggaagctgctttgaatcaatcctttacctactttaaaaccactcaccgaccgcatttgagcctaggagaacaagagaagatttaccacaataagtcaggagaactgcttgaaacctctataggaaatttggttctgaaaatcgctggaaaactctacacaccgcctatccgacttggaatcttgccaggaatttaccgtcagcatttgctagaaacaggacaggtagaagagaaagtcttgaccttggcagatttaacccaagcagaagctatttacggctgtaatgcagtgagaggcttgtatgaattaagccttgaggagaactag

SEQ ID NO: 3266 - protein, 573 aa, Streptococcus pneumoniae
MHRKTVIDFRTLGERYTFTQPIKELKTRNVEEVADLLAQVESYQEQGYYVVGYVSYEAAPAFEEKLAVHKDPLLGEYLLYFTVHDIVETSPIPLTYEDIDLPSNWQEVTSAADYEKAIAQIHHHLRQGDTYQVNYTVQLKQKLNANPFAIYNRMVVEQEAGYNAYVEHDEMTVISMSPELFFEQNDRELTTRPMKGTTQRGVTDQEDLEQASWLEQDPKNRSENMMIVDLLRNDMNRISEVGSEHVERLCQVEQYSTVWQMTSTIKSQLREDVDLVEIFRSLFPCGSITGAPKIATMEIIKDLEPQPRGVYCGTIGLLLPNGRRIFNVAIRTIQLHKGQAIYGVGGGITWDSTWESEYREVHQKAAVLYRKQARFQLITTGKISQKQLMFEEQHLERLRKASRYFAFPFDAEDLGHKIEEECQDCEANRDYRLRISLSKSGEIEVNRQVLTPLSTSFCQAQVCLQEAALNQSFTYFKTTHRPHLSLGEQEKIYHNKSGELLETSIGNLVLKIAGKLYTPPIRLGILPGIYRQHLLETGQVEEKVLTLADLTQAEAIYGCNAVRGLYELSLEEN

SEQ ID NO: 3267 - DNA, 1362 bp, Streptococcus pneumoniae
  CDS (1)..(1362)
atggaacgaatcattcatggagatgtcttatcaccaatcttggcttatatgcgcttaaaggggcaacataaggttattttagagagtattccgagagacaaggaaacagctcgtttttctatcctagcctataatccagtttttgagattaagtttgaaaatggggttctctatcaaaatggtcaagtgattgatcgggatcccttggatttcctttatgaagtgattcataagagtcagcaccactcagagctaccttttggtggtggagccattggttttgtgggttacgatatgatttcgctttatgaagaaattggtcaaatccctgaggatacaattgggacgccagacatgcatttctttgtctatgagagctatatggtctttgaccacaagaaggagaagatacatgtcatagaggatgcactttatagtgagcgcagtcaagaggccttggaaaaatccttgaaccaagtgcttgaggaattacgcattcctgctccaaatgaatttgaagatttggatctatctccgttagacttcaaaccgcatatcgctccacataagtttgagggaatggtagaaacagctcgtgacttgattcgtaacggagatatgttccaatgtgtactcagccagcgtttttcagcagaagttactggaaatccatttgacttctacagaaatctccgcgtgactaatccttctaattacctttatttctatgattttggggattatcaaatcatcggagctagtccagaaagtttggtttctgtcaaaaatggcatcgtgacaaccaatccgattgcagggacgcgaccaagaggggctacggatgaagaagacaaggccttggcgactgacctcctctctgatgagaaggaaacagcagaacatcgaatgttggtagacttggggcgtaacgatattggccgcatctctgaaacgaccagtgtccaagtcactaagtatatggaagtggagctcttccgctacgtcatgcatttgaccagcgtagtcaaggggcgtttgcttccagaactcactgccatggatgccttgaaagcaacgcttcctgctggaaccgtttctggagcaccaaagattcgagcgatgagacgtatctatgaactggaaacggaaaaacggggagtatacgctggggcaatcggctacttgtctgcgacgggtgatatggatttggccatcgccatccgaaccatgattctcaaaaatcaaagagcctatgtgcaggctggggcagggattgtctacgactctatcgcccaaaacgaataccaagaaaccattaacaaagcaaaatctatgactagaattggagaactaagaccatag

SEQ ID NO: 3268 - protein, 453 aa, Streptococcus pneumoniae
MERIIHGDVLSPILAYMRLKGQHKVILESIPRDKETARFSILAYNPVFEIKFENGVLYQNGQVIDRDPLDFLYEVIHKSQHHSELPFGGGAIGFVGYDMISLYEEIGQIPEDTIGTPDMHFFVYESYMVFDHKKEKIHVIEDALYSERSQEALEKSLNQVLEELRIPAPNEFEDLDLSPLDFKPHIAPHKFEGMVETARDLIRNGDMFQCVLSQRFSAEVTGNPFDFYRNLRVTNPSNYLYFYDFGDYQIIGASPESLVSVKNGIVTTNPIAGTRPRGATDEEDKALATDLLSDEKETAEHRMLVDLGRNDIGRISETTSVQVTKYMEVELFRYVMHLTSVVKGRLLPELTAMDALKATLPAGTVSGAPKIRAMRRIYELETEKRGVYAGAIGYLSATGDMDLAIAIRTMILKNQRAYVQAGAGIVYDSIAQNEYQETINKAKSMTRIGELRP

SEQ ID NO: 3269 - DNA, 1428 bp, Clostridium acetobutylicum
  CDS (1)..(1428)
atgtacaatatttcagaagaacagtttaatgataacaaaaagttaaaaaaagcatttcaagttatttacgaggaaaatggagatgagataactccaatatcattattttataatctagaagggaaaaacaagttcttgcttgagagtaacttattttcggaatctaaaggaagatattctttcataggagctaatccttatgcaataataaaaggatttagtaacaatactgaaattattaggaatggctatgtaaaaaaagtagaagataaattccttaaggttgcaagaaagcttactgaggaaggaaagattgaaaagagtaaatatcctttttgtggtggaggagtagggtatgtaggctacgacataataaagcaatacgaaaaaatacccagcttaaatgaagatgatttaaaaataccagatgctattctcatgttttataaaaaaattatctgctatgaccatgtgaaaaacagtattgtatacatctataatgtgtttagagaagatgataaatcctacaaagaaatcaaacaagaactttttgaattgagtgaaatttcaaaaaaaactagagaaatgcacaagcttccggaaagtcataatccagctaatataagttctaattttacaaaggatgaattttgcaaaatggtaaaaaaagctcaggaatatatagttaagggtgatatttttcaaatggttccttctcaaaggtttgtaatggatatagatgaaagaccgtttaatgtgtacagaaggcttagaggcaaaaatccatccccatatcttttctatatagactttaatgattttcaggttacaggttcatcgcccgagagtttggtatgtgtgtttaaggatagggtaataacaaatccaatagcgggaacaagacctagaggaaaaaatgaacaagaggatattaagcttaagagcgagcttataaatgatgagaaggaaatagcggaacattcaatgcttttagacctggctagaaacgatatagggaaaataagtgagtttggcacagttactgtggataagtttatggaagtggaattgtattcacatgttatgcacatagtgtctaaggtttctggaaggcttaaaaaagaatacgattgctttgaagctttaaaatcatgtcttccagctggtacagtgtcaggagcgcctaaaataagagctatggagataatagacgaattagagaacacaaagagaggctgttatgcaggtgcagtcgggtatttttcttatgacggaaacatggatacatgtattgctataagaactcttgtcataaaagaaggtaaagcatatgcacaggcaggcggtggagttgtgtatgattccatccctgaaaatgagtacgaagagagtatgaataaatcccaaattcttaaggaagtgatataa

SEQ ID NO: 3270 - protein, 475 aa, Clostridium acetobutylicum
MYNISEEQFNDNKKLKKAFQVIYEENGDEITPISLFYNLEGKNKFLLESNLFSESKGRYSFIGANPYAIIKGFSNNTEIIRNGYVKKVEDKFLKVARKLTEEGKIEKSKYPFCGGGVGYVGYDIIKQYEKIPSLNEDDLKIPDAILMFYKKIICYDHVKNSIVYIYNVFREDDKSYKEIKQELFELSEISKKTREMHKLPESHNPANISSNFTKDEFCKMVKKAQEYIVKGDIFQMVPSQRFVMDIDERPFNVYRRLRGKNPSPYLFYIDFNDFQVTGSSPESLVCVFKDRVITNPIAGTRPRGKNEQEDIKLKSELINDEKEIAEHSMLLDLARNDIGKISEFGTVTVDKFMEVELYSHVMHIVSKVSGRLKKEYDCFEALKSCLPAGTVSGAPKIRAMEIIDELENTKRGCYAGAVGYFSYDGNMDTCIAIRTLVIKEGKAYAQAGGGVVYDSIPENEYEESMNKSQILKEVI

SEQ ID NO: 3271 - DNA, 1566 bp, Yersinia pestis
  CDS (1)..(1566)
atgatgcaaacatcacgtcctactttacagttactcaccgctagcgcctgttaccgcgatgacccgacagcgctgtttcatcaattatgtggtgcccgccccgcgaccctgttgcttgagtctgcagaagttgacaacaaacagaatctgaaaagcctgttggtcatcgacagtgccttgcgtatcacggcattagggcaaaccgtcactctcgaagcattgacccgtaatggggcttctttattaccactgctggatgccagtctgcccactgaagtcgatattcaggttcgtccgaatggccgagagttaactttcccgttaataaatgaagtccaggatgaggattcacgcttacagtccttatctgtttttgatgctttacgtcaattattaacactggttaataccccacttgccgagcgtgaggccctgtttttgggcggtttgttcgcttacgatttagtcgctggttttgaaaatttgcctccgttgcgtcaggatcaacgctgccctgacttctgtttctatttagccgagacattgctggttttggatcatcagcatcgttcaactcgcttgcaggccagcctgttcacgccagacagttcagagtatcagcgcctggcgacccgtttagagcaactcagccaccagttacaacaagcgccacaccccattcctgccacctccgtgccagagatggcgttacagtgtaaccaatcagatgaagagtattgcaacgttgtcagtgaattgcaggtagcaatccgtgaaggtgagattttccaggtggtcccatcccgccgttttacgctgccctgcccatcaccgctggcggcctatcagacactgaaagaccataatcccagcccctacatgtttttcatgcaagacaatgatttttctctgtttggtgcatcacctgagagcgcactgaaatacgatgccagcaaccgtcaaattgagatttacccgattgcgggtactcgtccacgcggtcgtcgtcctaatggagaactcgatcgtgatttagacagccgtatcgagttggaaatgcgtactgaccataaagagatggcagaacatttaatgttggtggatctggctcgtaacgatctagcgcgtatttgcgaacccggtagccgctatgttgcagatttaaccaaagttgaccgttactcctttgtcatgcatctggtgtcccgcgtgattggcactctgcgtcaagatttagatgtgctgcatgcttatcaagcgtgtatgaacatgggtacgctaagcggtgcgcccaaagtacgggccatgcaattgattgccagtaatgaaggctcacgccgtggcagctacggcggtgcagtgggctacttcactgctcacggtgatttggatacctgcattgtgattcgttctgcctacgtagaggacggcatcgccaccgtacaagcgggtgcaggggtggttttggactcagttccacaagcagaagctgatgaaactcggaataaagccagagccgtactgcgcgccattgccactgcccatcatgccaaggagattttctaa

SEQ ID NO: 3272 - protein, 521 aa, Yersinia pestis
MMQTSRPTLQLLTASACYRDDPTALFHQLCGARPATLLLESAEVDNKQNLKSLLVIDSALRITALGQTVTLEALTRNGASLLPLLDASLPTEVDIQVRPNGRELTFPLINEVQDEDSRLQSLSVFDALRQLLTLVNTPLAEREALFLGGLFAYDLVAGFENLPPLRQDQRCPDFCFYLAETLLVLDHQHRSTRLQASLFTPDSSEYQRLATRLEQLSHQLQQAPHPIPATSVPEMALQCNQSDEEYCNVVSELQVAIREGEIFQVVPSRRFTLPCPSPLAAYQTLKDHNPSPYMFFMQDNDFSLFGASPESALKYDASNRQIEIYPIAGTRPRGRRPNGELDRDLDSRIELEMRTDHKEMAEHLMLVDLARNDLARICEPGSRYVADLTKVDRYSFVMHLVSRVIGTLRQDLDVLHAYQACMNMGTLSGAPKVRAMQLIASNEGSRRGSYGGAVGYFTAHGDLDTCIVIRSAYVEDGIATVQAGAGVVLDSVPQAEADETRNKARAVLRAIATAHHAKEIF

SEQ ID NO: 3273 - DNA, 2148 bp, Nostoc sp. PCC 7120
  CDS (1)..(2148)
atgcgcgtatctcgtagcacaaccgaggtgaagatggacactgcactagatgaaattctctttcacctaaatcaagtacgtggaggtttgttaaccagtagttacgaatatccagggcgatacaaaagatgggcgattggattcattaatcccccattacaactgacaacaagagagaacgcatttaccatctcttcactcaatcctcgcggacaggtgctactaccaaccttgttccagcatctatcagcccagtcgcaactacaacaaatcagcctcaatcatgactacatcacaggtgaaattcgacccacaaaacagttattcacagaagaacaacggagtaaacaaccgtcagcctttacagtcatccgcgaaattctccagatttttgcgagtgatgaagacgagcatttagggttatatggtgcatttggttacgacttagtatttcaatttgaaccaattccccaaaaaattgctcgtcccgcagaccaacgggatttagtcctgtatctacccgatgaactcatagttgtagattactatctacaaaaagcatatcgtcaccagtatgaatttgccacagaacatggcaacaccgagcatcttccacggacaggccagtccatcgactaccagggtaaacatcttctaccaaaccaaactgctgaccatcaaccaggagaatatgccaacctagttgagcaagcactcgactacttccgccggggtgacttatttgaagtagttcctagtcaaaacttttttacagcctgtgaacaatcacccagtcaactattccagaccttaaggcaaattaatcctagtccttatggatttctgttgaatttgggtggtgaatatctcataggtgcatcaccagaaatgtttgtgcgagttgatggtaggcgagtggaaacctgtcccattagtggcactattagacggggagaagatgctttaggcgacgctgtacaaattcgtcagttgcttaactcccataaagatgaagccgagttaacaatgtgtactgacgtagaccgcaacgataaatcgcggatttgtgaacccggttcagtcagggtgattggtcgtcgccagattgaactgtacagccacctcattcatacagtagaccatgtagaagggatactgaggccggaatttgacgctttagatgccttcttgagtcatacttgggcagttacagtcacaggcgcacccaaacgagccgccatgcagttcatcgaacagcatgaacgcagcgcccgtcgttggtatgggggagcagttggttatttaggctttaatggtaacttgaataccggattaaccttgcggacaattcgtttacaagactccatcgccgaagtgcgagttggtgcaacagtcctttacgactccattccgtcagccgaagaagaggaaacaattactaaagcgactgcattatttgagaccattcgccgtcataccactgccaataaaactcaaggaaacgatagtcatcgccctggggatatcgcccacaataagcgtatcctcctcatcgactacgaagattcatttgttcacacattagccaattacatccgcaccaccggcgcaaccgtcaccaccctacgtcatggttttgctgaatcatattttgatgcagaacgcccagacttagtggtattgtctcccggccctggtagacccagtgacttccgagttccccaaacggttgcagccttggtaggtcgagaaatccccatttttggcgtttgtctgggattacaaggcatagtggaagcttttggcggagaattaggcgtgcttgattatccccaacacggtaaacccgcacggatttcagtgactgcacctgattctgtgctgtttcaaaatttaccagcatccttcatcgtgggtagataccattccttatttgcccaaccccaaactatacccggtgaactcaaagtcacagcgatttctgaggacaatgtaattatggcaattgaacaccaaacactacctatagccgccgtccaatttcatccagagtcaatcatgaccctagcaggagaagttggtcagacaatcattaaaaatgtggtgcagacatatacccaaactttagaaacatcaatttactcttag

SEQ ID NO: 3274 - protein, 715 aa, Nostoc sp. PCC 7120
MRVSRSTTEVKMDTALDEILFHLNQVRGGLLTSSYEYPGRYKRWAIGFINPPLQLTTRENAFTISSLNPRGQVLLPTLFQHLSAQSQLQQISLNHDYITGEIRPTKQLFTEEQRSKQPSAFTVIREILQIFASDEDEHLGLYGAFGYDLVFQFEPIPQKIARPADQRDLVLYLPDELIVVDYYLQKAYRHQYEFATEHGNTEHLPRTGQSIDYQGKHLLPNQTADHQPGEYANLVEQALDYFRRGDLFEVVPSQNFFTACEQSPSQLFQTLRQINPSPYGFLLNLGGEYLIGASPEMFVRVDGRRVETCPISGTIRRGEDALGDAVQIRQLLNSHKDEAELTMCTDVDRNDKSRICEPGSVRVIGRRQIELYSHLIHTVDHVEGILRPEFDALDAFLSHTWAVTVTGAPKRAAMQFIEQHERSARRWYGGAVGYLGFNGNLNTGLTLRTIRLQDSIAEVRVGATVLYDSIPSAEEEETITKATALFETIRRHTTANKTQGNDSHRPGDIAHNKRILLIDYEDSFVHTLANYIRTTGATVTTLRHGFAESYFDAERPDLVVLSPGPGRPSDFRVPQTVAALVGREIPIFGVCLGLQGIVEAFGGELGVLDYPQHGKPARISVTAPDSVLFQNLPASFIVGRYHSLFAQPQTIPGELKVTAISEDNVIMAIEHQTLPIAAVQFHPESIMTLAGEVGQTIIKNVVQTYTQTLETSIYS

SEQ ID NO: 3275 - DNA, 1377 bp, Yersinia pestis
  CDS (1)..(1377)
atgtgtgagaaatttttaaccgtcaaagagttaccttatcaccctgatgccctgcttcaacaattcaccccacttgccaaccaagcttgggcgatgttgttgcactcaggatttgctcaacacccccatagtcgctttgatatcttggtcgctgatccaaaaataacgctgacaactcatggggataaaacggttattgtcagtgatcaggggcaggaaacctccctcgcggatcccttctctttgctgcagcagcaactggataaattcgccccagcgatgcctgctcaccctgatctgccgtttcagggcggagcgttagggctatttggttacgacttaggccgccgagttgaaaaattgcctgaactggcggcgcacgatatcgccttgccggatatggccattggcctgtatgactgggcgctcattgctgaccactctcggcagaagctcacgctggtatcccttggcgatgccgaacagcgcttgcattggctgcatcagcaaacaaccgatgagaacctcgtccccttcaaactcacggttccatggcaggcagatatgtcacgggagcagtacggcgaaaaattccgccaaattcaagcgtatctgcgtagcggtgactgttaccaaatcaatctggcacaaagattcagcgcagagtatcagggggatgaatggcaagcatttctgtcactgagtcgtagcaatcaagcccccttttcagcttttattcgcttacccgacaacgccatattgagtgtttcaccagaacgtttcttgtggttggagaatcatcaggttcaaacccggccgattaaaggtacgctaccccgtttggccgatcctgagcaggatcgccagcaagctgagcgattggcgaattcagccaaagatcaggctgaaaatctcatgattgtggacttactgcgtaacgatattggccgtgtcgcacgtccgggtagcgtccgcgtaccagagctgtttgtggtggagccttttcctgcggtgcaccacttagtcagtacaattaccgcaatacttcccccagaatgttcgccgaccgaattactgcgcgcctgtttccccggcgggtcaattactggtgcccccaaggtccgagcaatggaaattattgaacaactcgaaccctatcgacgcaatgcttattgcggtaacattggctacataagttgctgcggcaccatggataccaatattactatccgtaccctgatgacagagaacggtaagatatattgttctgccggaggggggattgtcgccgacagccaagagcaagctgaatatcaagaaacgttcgataaggtcgcccgtattttaccgcaactgggggagtgtgttatttcgtga

SEQ ID NO: 3276 - protein, 458 aa, Yersinia pestis
MCEKFLTVKELPYHPDALLQQFTPLANQAWAMLLHSGFAQHPHSRFDILVADPKITLTTHGDKTVIVSDQGQETSLADPFSLLQQQLDKFAPAMPAHPDLPFQGGALGLFGYDLGRRVEKLPELAAHDIALPDMAIGLYDWALIADHSRQKLTLVSLGDAEQRLHWLHQQTTDENLVPFKLTVPWQADMSREQYGEKFRQIQAYLRSGDCYQINLAQRFSAEYQGDEWQAFLSLSRSNQAPFSAFIRLPDNAILSVSPERFLWLENHQVQTRPIKGTLPRLADPEQDRQQAERLANSAKDQAENLMIVDLLRNDIGRVARPGSVRVPELFVVEPFPAVHHLVSTITAILPPECSPTELLRACFPGGSITGAPKVRAMEIIEQLEPYRRNAYCGNIGYISCCGTMDTNITIRTLMTENGKIYCSAGGGIVADSQEQAEYQETFDKVARILPQLGECVIS

SEQ ID NO: 3277 - DNA, 2145 bp, Nostoc sp. PCC 7120
  CDS (1)..(2145)
atggccgatatcaaaacattaattattgacaactacgactcttatacttttaatctctaccagatgattgctgaagtcaacggagagttgccccttgttattcataatgacaaattagattggtatgaattaaaacaacttgtttttgataatatagtcatttctcctgggcctggtcgtcctgaaaaccctaaagatttcggtatttgtcaacagatactacaaaactatttagatgttcccttgcttggtgtttgtcttggtcaccaaggaattggtcattattatggtggtaaggtcatccacgcaccagaacctaaacatggtcgattgagtcatgtttatcataatggtggtgatttattccaagaaattcctacaccttttcaagttgtccgctatcattctttgctggttgcggaagaattgcccagttgtttagaaaaagtagcctggactgaagacgggttggtaatggggttgcgtcatcgtcatttgccattgtggggggtgcagtttcacccagaatctatctgtagtgagtatggatataaattgctggaaaacttccaagccattacggaaggattcatccgccaaaatggtagacatcgccccaaattagaaagcaaaagtttctctatttctcctaactcacctattccagcgccatcccaagaatttactgtttgtagccaaaaactagattattaccttgatacagaacagacatttgttcatctttttggtgaagatcctcatgctttttggcttgatagtagccttgtagaaccaggattatcccgtttctcttttatgggaggaagcggggggataaacagtttactcgtttcttactgcacccaatctcaagaattgacgattacacaatcgggtaaggtgacacgcactcaagagagtatttttgactatctcaaacgcgaaattaatcgtcgccgttgcccatctgatgagctaccttttgattttaactgtggttttgtgggctactttggttatgaactgaaggcaaaatccgggtctgggttagagcatccctcattatttcccgatgctatcttgattttaagcgatcgcctgattgcttttgaccaccaagagcaaaccacttacttagtttacctcgcccctgtgggtgaaacagcaccagcccaagcctggtttgaactaactgaaaaacgtctgcggacactcccgcctcttcctcccctcgttcctagtactacatctcaccccgttactttccgtttaagtcggtcataccagacatataaagatgatatttctagatgtctcaaagaaattcgtgagggggaaacttaccaagtttgcctgactaatcgattatgcacagacacaattgctgatccattggaattttatcgccgattacgccaagttaatccggctccctactctgcttttctacggtttggtgagatggcgatcgcctgttcttccccggagcgatttctgcaaattgaccgtcaaggctgggtagaaaccaagccgatcaagggaactgtacgccggggagagactcccgaagaagattttttactccgggaaagtttgcgtagcagcgaaaaagagcgatccgaaaacttaatgattgttgatttattacgcaacgatttagggcgagtttgccaagtcgggagtatccatgttcccaaattaatggatgtagaaagttatgcaacggtgcatcaacttgtcagcactatccgtggtttattatcccccgacatggacgcaaccgactgcattcgtctggcatttccgggcggctcgatgacaggtgcgcctaaactgagaacgatggagattattgatcaacttgagcaagaggcgcggggagtttattcaggggcgatcggttttttgggtgtaaacggtacagccgacttgaatattgtcatccgtaccgccgtactgacaccaaatcaaacttctattggtatagggggtgggattgtcgcactctctgatgtggaaatggaatttcaagaaactatcctcaaagctaatgcgctaattcaggcgatgctcttgactgttcacggagaatatcatcctagtctttaccgtattttaggaatgcccacagaggttttctgttga

SEQ ID NO: 3278 - protein, 714 aa, Nostoc sp. PCC 7120
MADIKTLIIDNYDSYTFNLYQMIAEVNGELPLVIHNDKLDWYELKQLVFDNIVISPGPGRPENPKDFGICQQILQNYLDVPLLGVCLGHQGIGHYYGGKVIHAPEPKHGRLSHVYHNGGDLFQEIPTPFQVVRYHSLLVAEELPSCLEKVAWTEDGLVMGLRHRHLPLWGVQFHPESICSEYGYKLLENFQAITEGFIRQNGRHRPKLESKSFSISPNSPIPAPSQEFTVCSQKLDYYLDTEQTFVHLFGEDPHAFWLDSSLVEPGLSRFSFMGGSGGINSLLVSYCTQSQELTITQSGKVTRTQESIFDYLKREINRRRCPSDELPFDFNCGFVGYFGYELKAKSGSGLEHPSLFPDAILILSDRLIAFDHQEQTTYLVYLAPVGETAPAQAWFELTEKRLRTLPPLPPLVPSTTSHPVTFRLSRSYQTYKDDISRCLKEIREGETYQVCLTNRLCTDTIADPLEFYRRLRQVNPAPYSAFLRFGEMAIACSSPERFLQIDRQGWVETKPIKGTVRRGETPEEDFLLRESLRSSEKERSENLMIVDLLRNDLGRVCQVGSIHVPKLMDVESYATVHQLVSTIRGLLSPDMDATDCIRLAFPGGSMTGAPKLRTMEIIDQLEQEARGVYSGAIGFLGVNGTADLNIVIRTAVLTPNQTSIGIGGGIVALSDVEMEFQETILKANALIQAMLLTVHGEYHPSLYRILGMPTEVFC

SEQ ID NO: 3279 - DNA, 2208 bp, Nostoc sp. PCC 7120
  CDS (1)..(2208)
atgattgccgattcccacagctacagaactaatggtaacgtgcgtgtctctcgctccatcacacaagttaaaatggagacagctttagaagagattcttttctacttaaactctcagcgtggtggattgctgactagtagctatgaatatccaggaagatataaaagatgggcaattggttttgttaatccacctgtagaattatccacaagcggaaatacttttactctcacagcattaaatgagcgtggctatgtacttttaccagtgatctttgagtgtttatcaaaatcagaacaactccagaaactcactgaacatcatcataaaattactggattagttaaatctacaccagaattttttgccgaagaagaacgtagtaaacaaccttctacatttacggttattcgggaaatactacatatcttctctagtcaagaagacgaacatttaggattatatggtgcgtttggttatgacttagttttccaatttgagcaaataacccaatgcttagaacgtccacaagaccaacgagatttagttctatatttacccgacgaattgatagttgtagactactatcaacaacaagcatttcggctagagtatgacttcatcacagcgcatggtagtacttatgatttgccccgcacgggagaatctgttgattatcgaggtcaatgtttaacacctcctcaaaatgctgaccataaaataggtgagtatgccaaactagtagaatttgcccttgattatttccgtcggggtgacttatttgaagtggttcccagtcagaattttttcacagcttgcgaagcaccaccaagccaactatttgaaactttaaaacaaataaatcctagtccctatggatttatttttaatcttggtggagaatacatcattggcgcttcaccagaaatgtttgtacgggtggaaggtaggcgtgtagaaacttgtcctattagtggcactattactagagggcatgatgctatagatgatgctgtgcagattcgtcagttactcaactcccacaaagacgaagcagagttgactatgtgtactgacgtagaccgtaacgataagtctcgcatctgtgaacccggttcagtcaaggtgattggtcgccggcaaattgaattatatagccacttaattcatacggtagaccatgtagaaggcattctccgaccagagtttgatgctttagatgctttcctcagtcacacttgggctgttacagtcacaggcgcaccgaaaagggctgctattcaattcatcgaaaagaacgaacgcagcgtcagacgttggtatggtggcgcggttgggtatttgaattttaacgggaatttaaatactgggttaattttaaggacaatcagattgcaagactcaattgctgaagtgcgagttggtgctactctactgtatgactccataccccaagcagaagaacaagaaaccatcactaaagctgcggctgcttttgaaacgattcggcgtgctaaacaaatagacccacagattgaagaatctagtactagaaagttaagcaaatatcttcccgatggacaatcaggtaaacacatcttactaattgaccatgaagactcatttgttcataccctagctaactacatccgttccactggtgcaactgtcaccacactgcgtcacggcttctcagaatccctatttgatacagaacgcccagacttagtagtattatctcctggccccggtagaccgagtgaatttaaagtacaggaaaccgtcgccgcctgcgtccgtcgccaaatacctctgtttggtgtctgtttaggactgcaaggtattgtggaagctttcggtggagaattgggagtattgaattatccccaacatggtaaatcttcgcggatttttgttacagcacccgattctgtgatgtttcaagatttgcccgaatcttttacagtcgggagatatcattcattatttgcactatcacaacgcttaccaaaagaactgaaggtgacagcgatttctgatgatgaggtgattatggcgattgaacatcagacactacctatcgccgccgtccagtttcatccagaatcaatcatgactctagctggagaagttggtttaatgatgatcaaaaatgtggtgcaaaaatatacacaaagtcaacagtcaacagttcccatctatgactaa

SEQ ID NO: 3280 - protein, 735 aa, Nostoc sp. PCC 7120
MIADSHSYRTNGNVRVSRSITQVKMETALEEILFYLNSQRGGLLTSSYEYPGRYKRWAIGFVNPPVELSTSGNTFTLTALNERGYVLLPVIFECLSKSEQLQKLTEHHHKITGLVKSTPEFFAEEERSKQPSTFTVIREILHIFSSQEDEHLGLYGAFGYDLVFQFEQITQCLERPQDQRDLVLYLPDELIVVDYYQQQAFRLEYDFITAHGSTYDLPRTGESVDYRGQCLTPPQNADHKIGEYAKLVEFALDYFRRGDLFEVVPSQNFFTACEAPPSQLFETLKQINPSPYGFIFNLGGEYIIGASPEMFVRVEGRRVETCPISGTITRGHDAIDDAVQIRQLLNSHKDEAELTMCTDVDRNDKSRICEPGSVKVIGRRQIELYSHLIHTVDHVEGILRPEFDALDAFLSHTWAVTVTGAPKRAAIQFIEKNERSVRRWYGGAVGYLNFNGNLNTGLILRTIRLQDSIAEVRVGATLLYDSIPQAEEQETITKAAAAFETIRRAKQIDPQIEESSTRKLSKYLPDGQSGKHILLIDHEDSFVHTLANYIRSTGATVTTLRHGFSESLFDTERPDLVVLSPGPGRPSEFKVQETVAACVRRQIPLFGVCLGLQGIVEAFGGELGVLNYPQHGKSSRIFVTAPDSVMFQDLPESFTVGRYHSLFALSQRLPKELKVTAISDDEVIMAIEHQTLPIAAVQFHPESIMTLAGEVGLMMIKNVVQKYTQSQQSTVPIYD

SEQ ID NO: 3281 - DNA, 1515 bp, Nostoc sp. PCC 7120
  CDS (1)..(1515)
atgattttccccaatttctccgaattttctcagctagctttgcaaggtaattttgtgccggtgtatcaggaatgggtggcagacctagatacacctgtttccgcttggtacaaagtttgcgctggagagccttatagctttttgctggaatcggtagaaggtggggaaaagattgggcgttatagtttactggggtgtgatcctttatgggttttggaagctaggggtgagacgaccactcagacaaaccgtgatggctcccaagttgtatttacaggcgatccatttacagctctagccgattgcctagcaccgtataaaccagtcaagttaccccaactaccaccaggaattggcggtttgtttggtttttggggttatgaattaattcgctggattgaaccgcgtgtaccagtgcatccccaagatgagcgcaacattcctgatggattgtggatgcaggtagaccatttgttaatatttgaccaggtaaagcggaaaatatgggcgatcgcctatgctgatttacgtgatccaaatgtagatttaaaagcggcgtatcagcaagcgtgcgatcgcgtcacccaaatggtgagcaaactatccttgcccctatcgccccaaaaaaccatattagaatggacacccccaggcagccaaaaagtgggggaaatacaagaatataccagcaacttcactcgaccggaattttgcgccagtgtccaaaaagccaaagagtacatcaaagcgggtgatatctttcaagtagttatttctcaacgcctttctacccaatacaccggcgatcccttctccctgtaccgttccctgcgtcagataaatccctcgccttacatggcgtactttaacttccaagactggcaaatcatcggttctagtcctgaagtgatggtgaaagcggaactggatgcagatggtgaagcaatagccacagttcgtcctattgccgggactcgtccacggggtaagacaaccaaagaagatgcagaattagccgcagatttactccaagaccccaaagaaatcgctgaacacgtcatgctggtggatttaggacgcaacgatttaggccgtgtttgtgccagtgggactgtaaaagttgatgaattaatggtggtggaacgctactctcatgtaatgcacattgtgagtaatgttgtggggaaattagccgcaaataaaaacgcctgggatttattaaaagcctgttttcccgccggcacagttagcggcgcaccgaaaattagggcgatggaaattattaatgagttagaacccagccgccggggtgtgtattctggggtgtatggatattatgattttgaaggacaattaaatagtgcgatcgctattcggacgatggtagtcagagatcaaaccgtaacagtgcaagctggtgcgggtttggtggctgattctgagccagagaaagaatatgaggaaactttaaataaagctagaggacttctcttggcgattcgctgtttacggtag

SEQ ID NO: 3282 - protein, 504 aa, Nostoc sp. PCC 7120
MIFPNFSEFSQLALQGNFVPVYQEWVADLDTPVSAWYKVCAGEPYSFLLESVEGGEKIGRYSLLGCDPLWVLEARGETTTQTNRDGSQVVFTGDPFTALADCLAPYKPVKLPQLPPGIGGLFGFWGYELIRWIEPRVPVHPQDERNIPDGLWMQVDHLLIFDQVKRKIWAIAYADLRDPNVDLKAAYQQACDRVTQMVSKLSLPLSPQKTILEWTPPGSQKVGEIQEYTSNFTRPEFCASVQKAKEYIKAGDIFQVVISQRLSTQYTGDPFSLYRSLRQINPSPYMAYFNFQDWQIIGSSPEVMVKAELDADGEAIATVRPIAGTRPRGKTTKEDAELAADLLQDPKEIAEHVMLVDLGRNDLGRVCASGTVKVDELMVVERYSHVMHIVSNVVGKLAANKNAWDLLKACFPAGTVSGAPKIRAMEIINELEPSRRGVYSGVYGYYDFEGQLNSAIAIRTMVVRDQTVTVQAGAGLVADSEPEKEYEETLNKARGLLLAIRCLR

SEQ ID NO: 3283 - DNA, 1362 bp, Escherichia coli
  CDS (1)..(1362)
atgaagacgttatctcccgctgtgattactttactctggcgtcaggacgccgctgaattttatttctcccgcttaagccacctgccgtgggcgatgcttttacactccggctatgccgatcatccgtatagccgctttgatattgtggtcgccgagccgatttgcactttaaccactttcggtaaagaaaccgttgttagtgaaagcgaaaaacgcacaacgaccactgatgacccgctacaggtgctccagcaggtgctggatcgcgcagacattcgcccaacgcataacgaagatttgccatttcagggcggcgcactggggttgtttggctacgatctgggccgccgttttgagtcactgccagaaattgcggaacaagatatcgttctgccggatatggcagtgggtatctacgattgggcgctcattgtcgaccaccagcgtcatacagtttctttgctgagtcataatgatgtcaatgcccgtcgggcctggctggaaagccagcaattctcgccgcaggaagatttcacgctcacttccgactggcaatccaatatgacccgcgagcagtacggcgaaaaatttcgccaggtacaggaatatctgcacagcggtgattgctatcaggtgaatctcgcccaacgttttcatgcgacctattctggcgatgaatggcaggcattccttcagcttaatcaggccaaccgcgcgccatttagcgcttttttacgtcttgaacagggtgcaattttaagcctttcgccagagcggtttattctttgtgataatagtgaaatccagacccgcccgattaaaggcacgctaccacgcctgcccgatcctcaggaagatagcaaacaagcagtaaaactggcgaactcagcgaaagatcgtgccgaaaatctgatgattgtcgatttaatgcgtaatgatatcggtcgtgttgccgtagcaggttcggtaaaagtaccagagctgttcgtggtggaacccttccctgccgtgcatcatctggtcagcaccataacggcgcaactaccagaacagttacacgccagcgatctgctgcgcgcagcttttcctggtggctcaataaccggggctccgaaagtacgggctatggaaattatcgacgaactggaaccgcagcgacgcaatgcctggtgcggcagcattggctatttgagcttttgcggcaacatggataccagtattactatccgcacgctgactgccattaacggacaaattttctgctctgcgggcggtggaattgtcgccgatagccaggaagaagcggaatatcaggaaacttttgataaagttaatcgtatcctgaagcaactggagaagtaa

SEQ ID NO: 3284 - protein, 453 aa, Escherichia coli
MKTLSPAVITLLWRQDAAEFYFSRLSHLPWAMLLHSGYADHPYSRFDIVVAEPICTLTTFGKETVVSESEKRTTTTDDPLQVLQQVLDRADIRPTHNEDLPFQGGALGLFGYDLGRRFESLPEIAEQDIVLPDMAVGIYDWALIVDHQRHTVSLLSHNDVNARRAWLESQQFSPQEDFTLTSDWQSNMTREQYGEKFRQVQEYLHSGDCYQVNLAQRFHATYSGDEWQAFLQLNQANRAPFSAFLRLEQGAILSLSPERFILCDNSEIQTRPIKGTLPRLPDPQEDSKQAVKLANSAKDRAENLMIVDLMRNDIGRVAVAGSVKVPELFVVEPFPAVHHLVSTITAQLPEQLHASDLLRAAFPGGSITGAPKVRAMEIIDELEPQRRNAWCGSIGYLSFCGNMDTSITIRTLTAINGQIFCSAGGGIVADSQEEAEYQETFDKVNRILKQLEK

SEQ ID NO: 3285 - DNA, 2190 bp, Agrobacterium tumefaciens
  CDS (1)..(2190)
atggtaacgatcattcaggatgacggagcggagacctacgagacgaaaggcggcatccaggtcagccgaaagcgccggcccaccgattatgccaacgccatcgataattacatcgaaaagcttgattcccatcgcggcgcggttttttcgtccaactatgaatatccgggccgttacacccgctgggatacggccatcgtcgatccgccgctcggcatttcctgttttggccgcaagatgtggatcgaagcctataatggccgcggcgaagtgctgctcgatttcattacggaaaagctgaaggcgacacccgatctcaccctcggcgcttcctcgacccgccggctcgatcttaccgtcaacgaaccggaccgtgtcttcaccgaagaagaacgctcgaaaatcccgacggtcttcaccgctctcagagccatcgtcgacctcttctattcgagcgcggattcggccatcggcctgttcggtgccttcggttacgatctcgccttccagttcgacgcgatcaagctttcgctggcgcgtccggaagaccagcgtgacatggtgctgtttctgcccgatgaaatcctcgtcgttgatcactattccgccaaggcctggatcgaccgttacgatttcgagaaggacggcatgacgacggacggcaaatcctccgacattacccccgatcccttcaagaccaccgataccatcccgcccaagggcgatcaccgtcccggcgaatattccgagcttgtggtgaaggccaaggaaagcttccgccgcggcgacctgttcgaggtcgttcccggccagaaattcatggagcgttgcgaaagcaatccgtcggcgatttcccgccgcctgaaggcgatcaacccgtcgccctattccttcttcatcaatctcggcgatcaggaatatctggtcggcgcctcgccggaaatgttcgtgcgcgtctccggccgtcgcatcgagacctgcccgatatcaggcaccatcaagcgcggcgacgatccgattgccgacagcgagcagattttgaaactgctcaactcgaaaaaggacgaatccgaactgaccatgtgctcggacgtggaccgcaacgacaagagccgcgtctgcgagccgggttcggtgaaggtcattggccgccgccagatcgagatgtattcacgcctcatccacaccgtcgatcacatcgaaggccgcctgcgcgacgatatggacgcctttgacggtttcctcagccacgcctgggccgtcaccgtcaccggtgcaccaaagctgtgggccatgcgcttcatcgaaggtcatgaaaagagcccgcgcgcctggtatggcggtgcgatcggcatggtcggcttcaacggcgacatgaataccggcctgacgctgcgcaccatccggatcaaggacggtattgccgaagtgcgcgccggcgcgaccctgctcaatgattccaacccgcaggaagaagaagccgaaaccgaactgaaggcctccgccatgatatcagccattcgtgacgcaaaaggcaccaactctgccgccaccaagcgtgatgccgccaaagtcggcaccggcgtcaagatcctgctcgtcgaccacgaagacagcttcgtgcacacgctggcgaattatttccgccagacgggcgcgacggtctcgaccgtcagatcaccggtcgcagccgacgtgttcgatcgcttccagccggacctcgttgtcctgtcgcccggacccggcagcccgacggatttcgactgcaaggcaacgatcaaggccgcccgcgcccgcgatctgccgatcttcggcgtttgcctcggtctgcaggcattggcagaagcctatggcggcgagctgcgccagcttgctgtgcccatgcacggcaagccttcgcgcatccgcgtgctggaacccggcctcgtcttctccggtctcggcaaggaagtcacggtcggtcgttaccattcgatcttcgccgatcccgccaccctgccgcgtgatttcatcatcaccgcagaaagcgaggacggcacgatcatgggcatcgaacacgccaaggaaccggtggccgccgttcagttccacccggaatcgatcatgacgctcggacaggacgcgggcatgcggatgatcgagaatgtcgtggtgcatctgacccgcaaggcgaagaccaaggccgcgtga

SEQ ID NO: 3286 - protein, 729 aa, Agrobacterium tumefaciens
MVTIIQDDGAETYETKGGIQVSRKRRPTDYANAIDNYIEKLDSHRGAVFSSNYEYPGRYTRWDTAIVDPPLGISCFGRKMWIEAYNGRGEVLLDFITEKLKATPDLTLGASSTRRLDLTVNEPDRVFTEEERSKIPTVFTALRAIVDLFYSSADSAIGLFGAFGYDLAFQFDAIKLSLARPEDQRDMVLFLPDEILVVDHYSAKAWIDRYDFEKDGMTTDGKSSDITPDPFKTTDTIPPKGDHRPGEYSELVVKAKESFRRGDLFEVVPGQKFMERCESNPSAISRRLKAINPSPYSFFINLGDQEYLVGASPEMFVRVSGRRIETCPISGTIKRGDDPIADSEQILKLLNSKKDESELTMCSDVDRNDKSRVCEPGSVKVIGRRQIEMYSRLIHTVDHIEGRLRDDMDAFDGFLSHAWAVTVTGAPKLWAMRFIEGHEKSPRAWYGGAIGMVGFNGDMNTGLTLRTIRIKDGIAEVRAGATLLNDSNPQEEEAETELKASAMISAIRDAKGTNSAATKRDAAKVGTGVKILLVDHEDSFVHTLANYFRQTGATVSTVRSPVAADVFDRFQPDLVVLSPGPGSPTDFDCKATIKAARARDLPIFGVCLGLQALAEAYGGELRQLAVPMHGKPSRIRVLEPGLVFSGLGKEVTVGRYHSIFADPATLPRDFIITAESEDGTIMGIEHAKEPVAAVQFHPESIMTLGQDAGMRMIENVVVHLTRKAKTKAA

SEQ ID NO: 3287 - DNA, 1365 bp, Listeria monocytogenes
  CDS (1)..(1365)
atgaggaaaatgaaaaaaatggatgcagatacattaaccgcaattttggcgtttcaaagactttctggtacaggtaaaagcttacttgaaggtgcggcgaaagatgcggaggctggacgttattcgatcattgccattaatcctgtacatgaaattaaagtatatcaacatgattattatatagacggaacacatcaagttgtagcagatcccttaaaagaaattgaattatttattgaaaaagcaagagaagatgaacttgaattgccacttgattcaggtgcaattggctatgttggatatgacgttattgcgctttatgaagatttaggcgaaattccagtagaaactagggatataccagatattcgtttttatgtatatgaaagttttgtcattatggaccatcaagcggaagaacttattttagtgcaagataattgttactcaggcagaagtgaagcagacttggataaggcgcttgagtcgatgcttaccgaacttactacaccgaaaaaagacgagcataaggctgttcatgttccaaaaatgtcatataagagcaactatacgaaagatgaatacatggggctagtgaaaaaagcaaaaacatatatccaagagggcgacttctttcaaatagttctctctcaacgattagaagcagattttactgtgaagccatttgattactatcggaaattacgattgttaaatccttctccgtatctatatttcattgattttggtgatacggtgctaattggctcttctccagaaagtttaattaaaacgaaagggcggacggtgattacaaatcctatcgcaggaactagacggcgcggggcaacgaaacaagaagatgaactacttgcttcggaattgttatcggatgaaaaagaattggcagagcaccggatgttggttgacttagggcgaaatgatattgggaaaattgcagaaactggatcagttcatgttcctgtttaccttactattgaaagataccgtttcttaatgcatttagtttcagtagtagaaggaaccttaaaaactggacttactgcaatcgatgctctccgctcgacgctacctgccgggactgttagtggagcaccgaaaataagagccatggagcgaatctatgaatgggaaaatgtaaaacgtggtccatatgctggtgcggttggttatttaactaaaaatggtgattcggatttcgcactttcgattagaacgatggtacttcataacggaaaagcttatgttcaagccggtgcgggaattgtctatgattccgatccagaaagcgaatacttagaaacattacaaaaagcgaaggcacttttggaggtgggagaatga

SEQ ID NO: 3288 - protein, 454 aa, Listeria monocytogenes
MRKMKKMDADTLTAILAFQRLSGTGKSLLEGAAKDAEAGRYSIIAINPVHEIKVYQHDYYIDGTHQVVADPLKEIELFIEKAREDELELPLDSGAIGYVGYDVIALYEDLGEIPVETRDIPDIRFYVYESFVIMDHQAEELILVQDNCYSGRSEADLDKALESMLTELTTPKKDEHKAVHVPKMSYKSNYTKDEYMGLVKKAKTYIQEGDFFQIVLSQRLEADFTVKPFDYYRKLRLLNPSPYLYFIDFGDTVLIGSSPESLIKTKGRTVITNPIAGTRRRGATKQEDELLASELLSDEKELAEHRMLVDLGRNDIGKIAETGSVHVPVYLTIERYRFLMHLVSVVEGTLKTGLTAIDALRSTLPAGTVSGAPKIRAMERIYEWENVKRGPYAGAVGYLTKNGDSDFALSIRTMVLHNGKAYVQAGAGIVYDSDPESEYLETLQKAKALLEVGE

SEQ ID NO: 3289 - DNA, 1365 bp, Listeria innocua
  CDS (1)..(1365)
atgagaaaaatgaaaagaatggatgcagatacattaaccgcgattttagcctttcaacgtctttccggaacaggcaaaagcttacttgaaggagctgcaaaagatgcagaggcagggagatattctattattgctatcaatcctgtacatgaaattaaagtatatcaacatgaatattatatagacggggcacttcaaatagtgacagaccctttaaaagaaattgaactatttattgaaaaagcaaaggcggaggaagaaagcttgcctttagattcaggggcaattggttatgttggttatgacgttattgcactttatgaaaatttaggtgacattccagtcgaaacgcgggacatgccagatattcgtttttatatatatgaaagttttatcatcatggatcatcaagcggaagaacttattttagtgcaagataattgctactctgggagaagtgaagcagagctggatgaggcacttgaagcgatgtttttagaacttacaacaccaaaaaaagatgaacacaaagcagttcaagttccgaaaatgacttacaaaagtaattatacaaaagaggagtatatgaacttagtcaaaaaagcgaaaacctatattcaagatggcgatttctttcaaatagtactttctcagcggttagaggcagattttacagtggagccgtttgattattaccgaaaattacgattgttaaatccttcgccttatctctttttcattgattttggcgatacggtcttaattggttcttcaccagagagtttaattaaaacgaaagggcggactgttacgacaaatccaattgctggtacaaggcgtcgcggggcaacaaaacaagaagatgaaatgctggcagcggaattattatccgatgaaaaagaacttgcagagcacagaatgttagtggatttaggacgtaatgatattggaaaaattgcagaaacgggttcggttcatgtaccagtatatctaacaatcgaacgttaccgattcttgatgcatttagtttccgttgtcgaaggtacattaaaaccaggattaagtgcgatggatgctcttcggtcgacgctgccggctggtacagttagcggagcaccaaaaataagagccatggagcgaatctatgaatgggaaaatgtaaaacgtggaccatatgctggtgcggtaggttacttaacgaaaaatggtgattctgattttgctctttcgattagaacgatggtactccatgatggaaaagcttatgtgcaagctggtgcgggaattgtttatgattcagaacctgagagtgaatacttggaaacaatacaaaaagcgaaagcccttttggaggtgggagaatga

SEQ ID NO: 3290 - protein, 454 aa, Listeria innocua
MRKMKRMDADTLTAILAFQRLSGTGKSLLEGAAKDAEAGRYSIIAINPVHEIKVYQHEYYIDGALQIVTDPLKEIELFIEKAKAEEESLPLDSGAIGYVGYDVIALYENLGDIPVETRDMPDIRFYIYESFIIMDHQAEELILVQDNCYSGRSEAELDEALEAMFLELTTPKKDEHKAVQVPKMTYKSNYTKEEYMNLVKKAKTYIQDGDFFQIVLSQRLEADFTVEPFDYYRKLRLLNPSPYLFFIDFGDTVLIGSSPESLIKTKGRTVTTNPIAGTRRRGATKQEDEMLAAELLSDEKELAEHRMLVDLGRNDIGKIAETGSVHVPVYLTIERYRFLMHLVSVVEGTLKPGLSAMDALRSTLPAGTVSGAPKIRAMERIYEWENVKRGPYAGAVGYLTKNGDSDFALSIRTMVLHDGKAYVQAGAGIVYDSEPESEYLETIQKAKALLEVGE

SEQ ID NO: 3291 - DNA, 1869 bp, Klebsiella pneumoniae
  CDS (151)..(1506)
gaattcgttccactgctttttgctgctgctcgtggctcagcgaaggtaaacctgcaaacatgactgactcctgctacattgtggggcgtaattatttcacgccgtccgcgcgtataccagcggacgtaacgatcaggattgaagaagacgatgttgtcccccgcaatgatttccctgccctggcgcccggatgccgctgaatactattttagcccgttaagttcccagccctgggcgatgctgctgcattccggttttgccgaacatgcgcataaccgttttgacatcattgtcgcccagccgcgcgccacgctggtgactcacggtcaactaaccaccctacgcgaaggggaaaccgtctcaacctccgccgccgatccgcttacgctggtgcatcagcagctggcgcactgtaacctgcagccgcagcctcatccgcatctgccgtttctcggcggcgcgctgggactgttcggctacgatttgggtcgtcgttttgaacatctgccggcgcgggccgacgcggatatcgaactgccggatatggcggtaggtatttatgactgggcgttaatcgtcgatcatcagcgccgggaggtatcgttattcagctatgacgatccgcaggcgcgcctggcgtggctggaagcacagactgcgcctgtcgctgcaacctttaccctgacctcagcgtggcgcgctaatatgagccgcgaggagtatggcgagaagttccgccagattcaggcttatctgcacagcggcgactgctatcaggtcaacctggcgcagcggtttacggcgacgtatcgcggggatgagtggcaggccttccgtcagcttaaccgcgccaatcgcgcgccgttcagcgcctttattcgcctggatgaaggggccgtattaagcctgtcgcccgagcgttttattcagctccggcaaggcgacattcagacccggcccatcaaggggacattacccaggctggccgaccctgagcaggacgcgctgcagcagcaaaagctggcgaactcgccaaaagaccgcgccgaaaatctgatgatcgtcgatttaatgcgtaacgatattggccgggttgcggaacccggtagcgttcgcgttcctgagctgtttgtggtggagcccttccccgccgtgcatcatctggtgagcaccgtcaccgccaggctgcccgctcatctgcacgccgccgacctgctgcgcgcggcctttcccggcggctcaatcaccggcgcgccgaaggtcagagcgatggagatcatcgatgaactggaaccgcagcggcgcaacgcgtggtgcggcagcatcggctatctcagcttctgcggcaacatggatagcagtatcactatccgtacgctgacggcctggcagggacacctctactgctccgccggcggcggaattgtggccgatagcgaagaggcagcggaatatcaggaaacttttgataaagttaatcgtatcctgcatcaactggagagctagaacatggcggacagcgccctcgaacttgacgatttcctctcgcgttttcagcttctgcgtccgcagccccacgcgccaccgctcaaccagcgccaggccgcggtgctggtaccgatagttcgccgcccgcagccggggctgctgctgacccagcgttcgccgctgatgcgcaagcatgcgggtcaggtggccttccccggcggcgcggtagataacagcgatgcaacgctaatcgccgccgcgctgcgtgaagcgcaggaagaggtggcgatcccgccggagtcggttgaggtgattggcgttctgccgccggtcgatagcgtgaccggctttcaggttactccggtggtagggattatccca

SEQ ID NO: 3292 - protein, 451 aa, Klebsiella pneumoniae
MLSPAMISLPWRPDAAEYYFSPLSSQPWAMLLHSGFAEHAHNRFDIIVAQPRATLVTHGQLTTLREGETVSTSAADPLTLVHQQLAHCNLQPQPHPHLPFLGGALGLFGYDLGRRFEHLPARADADIELPDMAVGIYDWALIVDHQRREVSLFSYDDPQARLAWLEAQTAPVAATFTLTSAWRANMSREEYGEKFRQIQAYLHSGDCYQVNLAQRFTATYRGDEWQAFRQLNRANRAPFSAFIRLDEGAVLSLSPERFIQLRQGDIQTRPIKGTLPRLADPEQDALQQQKLANSPKDRAENLMIVDLMRNDIGRVAEPGSVRVPELFVVEPFPAVHHLVSTVTARLPAHLHAADLLRAAFPGGSITGAPKVRAMEIIDELEPQRRNAWCGSIGYLSFCGNMDSSITIRTLTAWQGHLYCSAGGGIVADSEEAAEYQETFDKVNRILHQLES

SEQ ID NO: 3293 - DNA, 1389 bp, Leptospira biflexa
  CDS (1)..(1389)
atgagccaaacacttccgaaaatcaaaatccccaaaaaacccaattacaattctttagctttggcggaaggaatcgaattttgggaactctttcgggtcattgaggcgaaatacgaaaattgttttttgttagaatcagcaggagacaatcaatacgattctcgttactctgtgattggattccaaccatctcatctcattctcggagaacctggtattttggaaattgatgggaaaaaataccctgttgaaaatccttattttgctttaagagaacttactgattataattcgcttagtattagttatgcgggtggttttgttggttatcttggttatcaaagtatgcaattctttgagccaaaactccaactaaaaccacatcctgattttccagcgatgattttcggattgtatttggatggacttatttatgataaatttactggggaactcatttattttgataatggaactaatcgtatccatgaagtgaaccaaatcttagaacagctaaaaaaagaaaattcacaaaaaccaaaagcaacggtctccttagtaaaggctggattatctaaggaagttcataaacaaatggtggaagaagctttagaagaagtaaaagcaggaaacacctttcaatgccaaattggatttgaagaaatttaccaagtggatggaaatccattggctatttatgaaacattacgagaaatcaatccatctcctcatatgtattacgtaaatttggaactcgtaaccattttaggtgcaagtccgagttcgttgtttaggttgcgacaaggggaaatggaatcgtttcctttagctggaaccaccaaacgaggagttgatgcaaaagaagacactctccttgctcgtaaactattaacggatcctaaagaaatcgcagagcataatatgttaattgatcttcaccgaaatgatgtagggcgagtggcaaagtttggtacagtaaaagtgcgtaggcgttttgatgtaaaaagattttcccatgtacaacatatttctagtgaagtggtcgggattctttcttcaaaagaagatatgttttctgggcttgcttcttcgtttccacgaggaaccttatcaggtgctcccaaaattgaatccgattcgaaaatcatagagcgaattgaaaaatcgccaagaggtccctatgggggagctgttggaagttttggtttaaatggagattgtacttttgccattccaattcgtagtttttttgtgaatggaaagaaaggatttgtacgcgcttcgggtgggattgtttttggattcatagaaccagaggatgaataccaagaaattatcaataaaatggcctccgttcgaaaagccttagatttgcataaaggtccttag

SEQ ID NO: 3294 - protein, 462 aa, Leptospira biflexa
MSQTLPKIKIPKKPNYNSLALAEGIEFWELFRVIEAKYENCFLLESAGDNQYDSRYSVIGFQPSHLILGEPGILEIDGKKYPVENPYFALRELTDYNSLSISYAGGFVGYLGYQSMQFFEPKLQLKPHPDFPAMIFGLYLDGLIYDKFTGELIYFDNGTNRIHEVNQILEQLKKENSQKPKATVSLVKAGLSKEVHKQMVEEALEEVKAGNTFQCQIGFEEIYQVDGNPLAIYETLREINPSPHMYYVNLELVTILGASPSSLFRLRQGEMESFPLAGTTKRGVDAKEDTLLARKLLTDPKEIAEHNMLIDLHRNDVGRVAKFGTVKVRRRFDVKRFSHVQHISSEVVGILSSKEDMFSGLASSFPRGTLSGAPKIESDSKIIERIEKSPRGPYGGAVGSFGLNGDCTFAIPIRSFFVNGKKGFVRASGGIVFGFIEPEDEYQEIINKMASVRKALDLHKGP

SEQ ID NO: 3295 - DNA, 1425 bp, Methanococcus jannaschii
  CDS (1)..(1425)
atgataattaaaaaaataaaaatggatgtttgtccattagatgtttatgagcaaattaggggagagaatacatttttgttagaatcagctgaaggagttccaaaggtggcaagatactcaatcttaggaaaagctgaaggaaaagtaatatttaaaaatggaaagctgaaagttgaaagctttacagaatttggagataaagctaaagatttagaagggaaatacgaatgtcccttagacgctttaagagaggttagaaatgaatatcttaaatacattgatatatctaacattgagccaataccaagatttaaggggggtttagttgggtatttaagctatgatattatcagatactggatagatttatcaaatatcaacccaaagccaataaatgatttaaaatttccagatgcagagttctttattgttaaggactttatttcatttgatttaaaagagaaagtaattaatttaatagcagaggatgatgaaggtattagagaacttgaaagaattataaaaaatgcaaaaattggaaataatgacaataaagaagaaaaaactacagaaaataaggacttaaaaataaaatctaacatgagcaaagaggaatttattgaggcggttaaaaaagctaaggaatacatttttgctggagatatcttccaagtggttttatcaagaaggatagagatagatttagataacttagaccacttgaaaatttacaaaaaagttagagagataaatccttccccatacatgtattacttagattttggagacagaaagattataggttcatcaccagagattttggtaaggacagattataaagataataaaaggctggttataacaagacctatagctggaacaattaggaggggtaagacagaagaagaagataaagagttagagaaaaagctgttaagtgatgagaaagagagggcagagcatgttatgcttgtagatttagcaaggaatgatattggaaaaatatcaaaatttggaactgttgaagttactgatttcatgattattgagaaatactcccatgttcagcatatagtaagtaatgttgttggggagttaaaagacaattatgattcattcttagctgtaaaagctaccttcccagcgggaactttaagtggagcaccaaaggtcagagcgatggagattattgaagagcttgaaaaaacttggagaggaccttatggtgggggagttggctatttcggatgggatgatttaatggatttggctataacaatcagaacctttgtaatctcgaaaaataagggatatattcaagttggtgctggaattgtagctgattcaatcccagaaaatgaatgggaagagacagagagaaagggaatggctaacgttaagacgattgagagtttattgaaatga

SEQ ID NO: 3296 - protein, 474 aa, Methanococcus jannaschii
MIIKKIKMDVCPLDVYEQIRGENTFLLESAEGVPKVARYSILGKAEGKVIFKNGKLKVESFTEFGDKAKDLEGKYECPLDALREVRNEYLKYIDISNIEPIPRFKGGLVGYLSYDIIRYWIDLSNINPKPINDLKFPDAEFFIVKDFISFDLKEKVINLIAEDDEGIRELERIIKNAKIGNNDNKEEKTTENKDLKIKSNMSKEEFIEAVKKAKEYIFAGDIFQVVLSRRIEIDLDNLDHLKIYKKVREINPSPYMYYLDFGDRKIIGSSPEILVRTDYKDNKRLVITRPIAGTIRRGKTEEEDKELEKKLLSDEKERAEHVMLVDLARNDIGKISKFGTVEVTDFMIIEKYSHVQHIVSNVVGELKDNYDSFLAVKATFPAGTLSGAPKVRAMEIIEELEKTWRGPYGGGVGYFGWDDLMDLAITIRTFVISKNKGYIQVGAGIVADSIPENEWEETERKGMANVKTIESLLK

SEQ ID NO: 3297 - DNA, 1503 bp, Helicobacter pylori
  CDS (1)..(1503)
atgatcagtctcatagaaaaagccccttacattccctaccccctagctctttatgaaaaattagagcaaccacacaccttgctttttgaaagcgctgagattgagagcaaagcacacaccaaatcccttttaatggctaaagcctgtttgaagctcatttgcaaccacaacatcgtaactatcactagcctgacgcctaatggcggggcatttttgcaaaaattgagcgcgttttttaaaacgcccatacaagacaatgccctaattttaacctacaccaaaaataaaaaaacgcaagatgagtttttaaaactctttgagcctagcccttttgacgctttaagggggctttttaaaagcgttaaaacaaaacccaaacacccctttacgcttttaagcgcgggtgttttttcttttgaaatgctcaatttttttgaagatttgcctcacttaaaagcgaaagacaacacagtgcatgactttattttttatctcgcgcaaaatttgatcatcatagaccataaagaaaaaagcgttgaaatcttgggggcgtgttttgatgagcgctttaaaacagagatagcccaagaattacaagacttaaaagagttggctaaaagcatcaaaagcgactttgtccctaaaaaatccaagcaaagtagagaagttagcgctaattgtagcgatagcgagtttgaaaaaagagtgctatccttacaagaagaaatcaaaaaaggcgagatttttcaagcggtgttgtcgcgcagcttttatatggagtgcttggagggtttgagcgcgtattaccatttaaagctaactaatcctagcccctatatgttctatatcaaagacagcgatttcattctttttggggcaagccctgagagcgctttaaagtacaacgctttaaccaacacggctgaaatttatcccattgctggcacccgtttaaggggtaaggacaaacaggggaatattgattacgatttggatagtaaaatggaatttgatttgcaacacgactataaagaaagggctgaacacatcatgctagtggatttagccagaaacgacatggccagagtttcaaaaaaacgctattgcgacaagcttttaaaagtggataagtattccaatgtcatgcatttagtctcaagggttgtgggggaattgaaaaaagggtgcgatagtttgcatgcctacaggagctttatgaacgccggcacgcttagcggggcgcctaaaatctctgcgatcaggctcatttaccaattagaaaaccaaaggagaggctcttatggggggagcgtggggtatttaaatagcgagggttctatggattcttgcatcaccatccgttcatgttttgtcaaaaacaatagggccgtgatccaagcaggagccggtattgtgctagacagcgtgccacaaaacgaagcgaatgaaacaagagccaaagcgcaagcccttattgatgcgatcaggaaaacaagcttatga

SEQ ID NO: 3298 - protein, 500 aa, Helicobacter pylori
MISLIEKAPYIPYPLALYEKLEQPHTLLFESAEIESKAHTKSLLMAKACLKLICNHNIVTITSLTPNGGAFLQKLSAFFKTPIQDNALILTYTKNKKTQDEFLKLFEPSPFDALRGLFKSVKTKPKHPFTLLSAGVFSFEMLNFFEDLPHLKAKDNTVHDFIFYLAQNLIIIDHKEKSVEILGACFDERFKTEIAQELQDLKELAKSIKSDFVPKKSKQSREVSANCSDSEFEKRVLSLQEEIKKGEIFQAVLSRSFYMECLEGLSAYYHLKLTNPSPYMFYIKDSDFILFGASPESALKYNALTNTAEIYPIAGTRLRGKDKQGNIDYDLDSKMEFDLQHDYKERAEHIMLVDLARNDMARVSKKRYCDKLLKVDKYSNVMHLVSRVVGELKKGCDSLHAYRSFMNAGTLSGAPKISAIRLIYQLENQRRGSYGGSVGYLNSEGSMDSCITIRSCFVKNNRAVIQAGAGIVLDSVPQNEANETRAKAQALIDAIRKTSL

SEQ ID NO: 3299 - DNA, 1236 bp, Archaeoglobus fulgidus
  CDS (1)..(1236)
atgcaaaagcacgagtatgtaaacccggtgaagctctactcagccataagagacgagaaatttccgttcattctcgaatccgcggagaagagcggcagggcgagatacacatacatatccttcaaccccctctacacggtaagggtcggcagcagaaccagggttgatggggaggttatttcaaaaatctcggaccccttcgatgcgctgaatgagattcacgttaagggattgcttgtcggctacgttgcctacgaggcggtgaagaactatattggcaagaagccccaaaccccgtcggtttttggctgctacgatggttacttcgtttacgaccactacctgagaaagctcttcagcgtaaacgttgagaacgcggataagattgtcgagagggcgaagagggtagaggttgagcaagtgagggggaattcggaggtcctgagggccggaagcagggagaagtttgagaagatggtggagagagggaaggagcagattttcgagggcgaggtttaccagattgtgctttcaagggagtatgttgttgatacggatttgagccctttccagatgtatctgaatttgagggagacgaatccgagcccctacatgttcctgcttgagttcgacagggccctgatcggctcaagcccggagacgatgggaagggttgagggaaacagcttcataatcaacccgattgccggaaccgccaggagggaggcgggaagggagaaagagattgctgaaaagctcctcagcgatgagaaggagagggctgagcacgtcatgcttgttgacctagccagaaacgacgtgaggaaggtttgcagagcagggagcgttagagtttcgaggttcatggaggttgtggagtatccgagcgttctgcacatcgaaagcgaggttgttggagagctgaaggcgggagtgacgcacttcgacgctatgaaagccacctttcccgcaggaaccgttaccggagcgccgaaactgagggcgattgagctcatagacgaaattgagggggattgcagaggggtttacgctggtgctgttggctacttcagcgagaatgtttctgatctggccattgcaatcaggatgattgagttcgacggaaaggcgaggataagggcaggtgcggggatagttgcggactccgttcctgaaagggagtttttcgagacggaaaacaagatagcgagggttttgagggcggttgggctatga

SEQ ID NO: 3300 - protein, 411 aa, Archaeoglobus fulgidus
MQKHEYVNPVKLYSAIRDEKFPFILESAEKSGRARYTYISFNPLYTVRVGSRTRVDGEVISKISDPFDALNEIHVKGLLVGYVAYEAVKNYIGKKPQTPSVFGCYDGYFVYDHYLRKLFSVNVENADKIVERAKRVEVEQVRGNSEVLRAGSREKFEKMVERGKEQIFEGEVYQIVLSREYVVDTDLSPFQMYLNLRETNPSPYMFLLEFDRALIGSSPETMGRVEGNSFIINPIAGTARREAGREKEIAEKLLSDEKERAEHVMLVDLARNDVRKVCRAGSVRVSRFMEVVEYPSVLHIESEVVGELKAGVTHFDAMKATFPAGTVTGAPKLRAIELIDEIEGDCRGVYAGAVGYFSENVSDLAIAIRMIEFDGKARIRAGAGIVADSVPEREFFETENKIARVLRAVGL

SEQ ID NO: 3301 - DNA, 954 bp, Aeropyrum pernix
  CDS (1)..(954)
atgacagccttctcccctgaatatgttgtagtctacgatcacgcagggggaagggtgtcggtttgcccaggtgacaccccccttccggcgccggcgagtaggaaagagagtttctcggcggaaggccctacctatgagacctccaggaaagggttcgaagctatggtcgctgacgcgttggagaggatcagggctggagaggctttccaggtagtgttatccagggttgagaggtatagggtctgggggagcctgtttagcgcgtatgagaggctcgccgatgccaaccctagtccctacctatactacgctaggctgggcggcagggttatcatagggagtagcccggagctcctggtcaagctggaggcgggcagagttgagactcacccgatagctggtaccaggcctcgcggctcaacgcccattgaggacatcgagttagaagtagagttgttgaacgacgagaaggagagggcagagcatgtgatgcttgttgacctggctaggaacgatataacccgtgtatcgatccctggaaccgtacaggtaacaagcttcatggatatcgagagatacgagactgtaatgcatatagtaagcagggttgaaggagtgacaaggcccagcaccacattcgtcgaagcccttaaagccctccaccctgcaggcacggttagcggagcgccaaagcctagggccatggaaattatagccgaactagaggaagaggccaggggcccctacgcaggagccataggagtagcgggttctagcgcgggcgaggcggccatagtgctgaggagcgcctggctcctagatgacggggagaccttggaagctagagctggcgccgggatagtctatgatagcaagcccgagagagagtacatggagactgtccagaaactcggaagcctaaagagggctctgggggtggatatgtgtggctga

SEQ ID NO: 3302 - protein, 317 aa, Aeropyrum pernix
MTAFSPEYVVVYDHAGGRVSVCPGDTPLPAPASRKESFSAEGPTYETSRKGFEAMVADALERIRAGEAFQVVLSRVERYRVWGSLFSAYERLADANPSPYLYYARLGGRVIIGSSPELLVKLEAGRVETHPIAGTRPRGSTPIEDIELEVELLNDEKERAEHVMLVDLARNDITRVSIPGTVQVTSFMDIERYETVMHIVSRVEGVTRPSTTFVEALKALHPAGTVSGAPKPRAMEIIAELEEEARGPYAGAIGVAGSSAGEAAIVLRSAWLLDDGETLEARAGAGIVYDSKPEREYMETVQKLGSLKRALGVDMCG

SEQ ID NO: 3303 - DNA, 1377 bp, Vibrio cholerae
  CDS (1)..(1377)
atgaataacaaccaaactttgtcaattgaacacaaaaaattaacttatcaccctgatattgctaaacaatttttcacatccattgagcagcaaccttgggcaatgctgctgcgctctgcgtctaccacccatatggatagccgctttgatattctggtcgccaatcctttcgccactttagtgacttttggtgatgaaactgaaattcacgcccagaacggcgtgacattgtcacgagaagatccttttgcgcttcttgctgacatccaagagcagtatcttcctcaagtgactgatgagtcggagttaccttttgttggcggtgctctggggtatttttcctatgatttaggacgccgagtcgaagtcctccctagcttagcagaacaagatattgctatgcccgatatggccgtgggcatctattcttgggcgctcgtggtcgatcaccaacagcacaccgcgcaattggtcggacaaaatgttgaagacgcttggggttggttaaaccaacaagaggcgataaagccaagcgaagtaactgactttgctctcacatcgccttggcgatccaatatgagctataccgcctatcaagataaatttgctcgtgtacaggactatttacgctcgggagactgttaccagatcaacctcgcgcagcgttttcaggctcactacactggtagtgaatggcaagcgtatttgaagctggaaaaaggtaatcaagcgcccttctccgcctttttgcgtttgccacaaggcgcaattttgagtgtttctccagaacgttttctgcaagtttgtgatcgagtgattgaaaccaaaccgatcaaaggcacacgtccacgccatgccgacaagcaacaagatgccctactcaagcaagatttagtcagcgcagaaaaagatcaggccgagaatttaatgattgtcgatctgctgcgtaatgatattggtcgtgtggcaaagccgggtagcgtgcatgtacctaagttgtttgatgtcgaaagctttcccgccgtgcaccatctggtgagcacgattcgcgcaacactggatgagcaataccaagccgccgatctgttacgcgcctgttttcccggcggttcgattacgggagcgcccaaagtgcgggcaatggaaatcattgaggagctcgagccgcatcgccgtagcgcttattgtggctcaattggctatctcagccgtcatggaaaaatggataccagcatcacgatccgcactttagtggcctatcagcagcagctttacgcttgggcgggtggcggcttggtggctgacagcgaaggcgctgcggagtatcaagaaacgctagataagttaagccgaattcttccaaccctagaatcctaa

SEQ ID NO: 3304 - protein, 458 aa, Vibrio cholerae
MNNNQTLSIEHKKLTYHPDIAKQFFTSIEQQPWAMLLRSASTTHMDSRFDILVANPFATLVTFGDETEIHAQNGVTLSREDPFALLADIQEQYLPQVTDESELPFVGGALGYFSYDLGRRVEVLPSLAEQDIAMPDMAVGIYSWALVVDHQQHTAQLVGQNVEDAWGWLNQQEAIKPSEVTDFALTSPWRSNMSYTAYQDKFARVQDYLRSGDCYQINLAQRFQAHYTGSEWQAYLKLEKGNQAPFSAFLRLPQGAILSVSPERFLQVCDRVIETKPIKGTRPRHADKQQDALLKQDLVSAEKDQAENLMIVDLLRNDIGRVAKPGSVHVPKLFDVESFPAVHHLVSTIRATLDEQYQAADLLRACFPGGSITGAPKVRAMEIIEELEPHRRSAYCGSIGYLSRHGKMDTSITIRTLVAYQQQLYAWAGGGLVADSEGAAEYQETLDKLSRILPTLES

SEQ ID NO: 3305 - DNA, 1497 bp, Xylella fastidiosa
  CDS (1)..(1497)
atgattaaaatactaacaactactacagatgtacctctagatggaagtgatctaagagaaaatgcctttttaatctatcgaaaactgttaaaaaattttgatagcgatcaattgatgcttttagagtctttggggataaattcggttgactctcgagtttcgatggtaggcataaacccgatcattactgttaatgtaaaaaataagacgatatcaatacacagcaatcctatcttactaaaagaattaaatatagctgacagtatcgcttcacttcagacaacaacattatcactgtccgtctatcaactcgtcgataaaaagatggtatggcaattcctaaaggaatttgagaaaaacttttctcaagtaccgacgcatcaatgcggaattatggctttctcctgcttttcttatgaaaccatccattacatagagacaattccagaaactgaactcaacgatcaagatgaccatgatataactttaatactttaccaatcacaattagtaattgaacaaaacaaggctgaacttatcacctattctttccctggtgttgaggatttttacgttgcgaatattattgatgcaatcacatgcatgactgatgttgaacaagtacaagataaaaatattgattttgaagtaatacaagaaacaacacgtcatgactaccttgataaagtaagaaaagcattacaccatgttactgtcggagatatttaccaagtacaaataggacagaagatccaagtaaaagcagagaccacaccgcttgatgtctatcggcgattacggatattaaatccttcaccctacatgtatttatttagtataaacggtcagacagtcattggcgccagccctgagttatttttgcgcatcagtacggatgaagaaattctcatgcgtccgattgctggcacattaggaaaaagagagggacgcactcttcatcatgcaacacaacatttgcaagctgacaacaaggaagttgctgagcacatgatgttagttgatttatgtcgtaatgatatatatcgcgtctgtactccagaatcactcaaagtttcaggcgtattggagattgaagaatactcgcatgtatatcatatggtttcgacaaccaaagcaatgttaaaacaaggactcgacaaatacgatgtgatgatcgcatcgtttccagcgggaaccatgactggagcaccgaaggttcgggccatggaaatcatctcagagcttgaggatagccagcgcggtaaatatgccggtgcgctcggcatcctaggcattggatccaactatatcaatactgcactttgtatccgctctactgtcttaaaaaaccaagtctataccttgcgcgcatctgcagggattgtttccgactctcaagaacagtctgagtacttagaaacacttcacaaaatgggatctatatttaaagcaattactggggaagaaatttcatgccatatcgagtcatcgtcgtag

SEQ ID NO: 3306 - protein, 498 aa, Xylella fastidiosa
MIKILTTTTDVPLDGSDLRENAFLIYRKLLKNFDSDQLMLLESLGINSVDSRVSMVGINPIITVNVKNKTISIHSNPILLKELNIADSIASLQTTTLSLSVYQLVDKKMVWQFLKEFEKNFSQVPTHQCGIMAFSCFSYETIHYIETIPETELNDQDDHDITLILYQSQLVIEQNKAELITYSFPGVEDFYVANIIDAITCMTDVEQVQDKNIDFEVIQETTRHDYLDKVRKALHHVTVGDIYQVQIGQKIQVKAETTPLDVYRRLRILNPSPYMYLFSINGQTVIGASPELFLRISTDEEILMRPIAGTLGKREGRTLHHATQHLQADNKEVAEHMMLVDLCRNDIYRVCTPESLKVSGVLEIEEYSHVYHMVSTTKAMLKQGLDKYDVMIASFPAGTMTGAPKVRAMEIISELEDSQRGKYAGALGILGIGSNYINTALCIRSTVLKNQVYTLRASAGIVSDSQEQSEYLETLHKMGSIFKAITGEEISCHIESSS

SEQ ID NO: 3307 - DNA, 1362 bp, Pseudomonas aeruginosa
  CDS (1)..(1362)
atgcccagttgtcatgttcaccccctgccctaccatagcgacccaagctgtctctttgccatcatccatgaggcgcccggtgcggtgatgctcgattcgggtcgccccatcgctacccgtggacgctatgaccttatgagcgcctggccattggcagaactggcgccgctgcccgacgaatcggccaaccgcttcttcgcccgcctacgcgaagcggccggaagcctgggccccgcgcagctgccagcgccgtacgaactgcccttcgccggcggtctgctgggctatttatcctacgacctgggtcggcgcatcgagcgcatcggcgaacacgcccgcgatgacctgggcctgccgctggcctccgtcggcctgtatgcctgggcgctgatcagcgaccaccaggccggcaccagccaactggtattccacccgcgattggacgagcgcgaacgccagcgcctgatcgccctgttcagcgaggaagcgcaaggcacggccggcaacttcaagcttctgggaaaattccgacggagcatcagcgcatccgactatcggcaggcgatccgccgcatccaggactacatccaggcaggcgactgctaccaggtgaactatagccagcgcttccaggccgcttgcagcggctcgccgtggccggcctatcgcgccctgcgcgaggcctgcccgacgccgttctccggctacctgcgactggccgacggcgcgatcctcagcctgtcgccggagcgcttcctcaagctcggcaagggcaaggtggaaacccggccgatcaagggcacccgcccgcgcggcaagacccccgaggaggacatggcgctggcggcgtcgctgctggccagccccaaggaccgcgcggaaaacctgatgatcgtcgacctgctgcgcaacgacatcggacgcagttgccaacctggcagcgtacgggtaccggagctgtttgccctggaaagctatcccaacgtgcatcacctggtgagcagcgtcaccggcgaactggcgccgggcaaggacgccctcgacctgctggaaggcagcttccccggcggctcgatcaccggcgcgccgaagattcgcgccatgcagatcatcgacgagctggaaccgagccgacgcggcatctactgcggcagcctgttctacctcgacgtgcgcggcgagatggacagctcgatcgccatccgcaccctgctggtcagggacggccaggtcagttgctggggcggcggcggcatcgtcgccgactcgcactgggaggacgagtaccaggaaaccctggacaaggtccgggtgctgctggaaaccctggaaggaatggccgggacagcgtccccggaatag

SEQ ID NO: 3308 - protein, 453 aa, Pseudomonas aeruginosa
MPSCHVHPLPYHSDPSCLFAIIHEAPGAVMLDSGRPIATRGRYDLMSAWPLAELAPLPDESANRFFARLREAAGSLGPAQLPAPYELPFAGGLLGYLSYDLGRRIERIGEHARDDLGLPLASVGLYAWALISDHQAGTSQLVFHPRLDERERQRLIALFSEEAQGTAGNFKLLGKFRRSISASDYRQAIRRIQDYIQAGDCYQVNYSQRFQAACSGSPWPAYRALREACPTPFSGYLRLADGAILSLSPERFLKLGKGKVETRPIKGTRPRGKTPEEDMALAASLLASPKDRAENLMIVDLLRNDIGRSCQPGSVRVPELFALESYPNVHHLVSSVTGELAPGKDALDLLEGSFPGGSITGAPKIRAMQIIDELEPSRRGIYCGSLFYLDVRGEMDSSIAIRTLLVRDGQVSCWGGGGIVADSHWEDEYQETLDKVRVLLETLEGMAGTASPE

SEQ ID NO: 3309 - DNA, 1461 bp, Bacillus halodurans
  CDS (1)..(1461)
atggcaggagtgaggttgttgcagcaaggaaagcaagagacgaaacgaacggtttgcgccacttcctttccgatggaggagagccagttttttcgccgctataaaaagcaatcaagggatcgggagcggcacgtattgttggagagcggtaggggtggacgatacagcatggtcggacttgagccggtcatggttcttgaaggcaagaaagatacattaatcgttacgacagaaaatgaagtcgtgaaacggcaaggagctttattagatttaatgcgcgacgcacttgcctcgtatcaagcggaaacgttaccaggtgctcccccatttcagggaggtgcgattggctttttcagttatgaccttgtccgtgaaattgagcggttgccaactatcgctcaagatgacttgaatcttccggacttatattttcttatttttgatgatgtgtttatttatgatcatgaaaaaaaggttgcgtggatctttgttcatggggacgccagtgaacaagacttatcggagcaaaagctaagacattacgaagcgacatggaagcagccggtcagcttggacgaagaagttgcaacctcttatttggaaacagaaggggagaaggtccattcatttagcgaagagacgttcgcaaaagctgtagagagagtgcgagagtacattgcggcaggggatgtgttccaagtgaacttatccgttcgcgaaggacgccctttaaggacaactccattatcgatttatgaggcgttacgtcagatcaatccttcgccctatatgagttatttgcacaccccagatttccagcttgttagcggttctccagagttgttaatcaaaaaagatagccggaagttaagcactcgtccgattgccggtacccgttctcgcggggcaacggctgatgaggatgaagctctcgttcagacattattgtcaaatgaaaaagagcgggccgaacatgtgatgctcgtcgatttagagcgaaacgacctcgggcgtgtaagtgaatacggttcggttgaagtgaacgagcttatggttgtggaaaaatactcccatgtcatgcacattgtttccaacgtacgaggggtgttaaaagaggggcttgatgcatttgatgcgatccgcgctacgttcccaggcgggacgataacgggtgcgcctaaagtacgaacgatggaaatcattgaagagctagagccggttcgtagaggaatttatacgggttcaattggctggattggttataatggtgatatggaactgaacattgtcattcgcacaatgttgtgtaaagatgagatggcgtatgttcaagcgggagcgggtgtggtcattgactccaatcctcgctatgaatataaggaatcattgaagaaagcaaaagcattatggcgggcgtacgaccagagtatagacgagcaaaagcaaagaatagaaaagtag

SEQ ID NO: 3310 - protein, 486 aa, Bacillus halodurans
MAGVRLLQQGKQETKRTVCATSFPMEESQFFRRYKKQSRDRERHVLLESGRGGRYSMVGLEPVMVLEGKKDTLIVTTENEVVKRQGALLDLMRDALASYQAETLPGAPPFQGGAIGFFSYDLVREIERLPTIAQDDLNLPDLYFLIFDDVFIYDHEKKVAWIFVHGDASEQDLSEQKLRHYEATWKQPVSLDEEVATSYLETEGEKVHSFSEETFAKAVERVREYIAAGDVFQVNLSVREGRPLRTTPLSIYEALRQINPSPYMSYLHTPDFQLVSGSPELLIKKDSRKLSTRPIAGTRSRGATADEDEALVQTLLSNEKERAEHVMLVDLERNDLGRVSEYGSVEVNELMVVEKYSHVMHIVSNVRGVLKEGLDAFDAIRATFPGGTITGAPKVRTMEIIEELEPVRRGIYTGSIGWIGYNGDMELNIVIRTMLCKDEMAYVQAGAGVVIDSNPRYEYKESLKKAKALWRAYDQSIDEQKQRIEK

SEQ ID NO: 3311 - DNA, 1467 bp, Halobacterium sp. NRC-1
  CDS (1)..(1467)
atgcctgactcggcggcgcttgcgaccgaccccgcggcgttccgcgacgccgccggcgacgccacagcaccgacgcgtgccgtagtcgaggcgcgcctgccggtcaccgacccgttcgcggcgtaccggcgcgcccgcggcgacgccccgtcgttccactacgagaccaccggcggcagcgacggctggggctacttcggcgtcgatccggcgtcgatgctgcgggccgacggcgcgggcgcgctcgacaccgtccaggccgccgtcggcgcgcgcctcgctcgggtcggctgcgacgtcccacaccccggcggcctgttcggctggctcagctacgacatcgcccgcgaactcgaagcgatccctgacaccaccaccgacgcgcgcgggctgccccgcctccaactcggcgtctaccccacgatcgcggcgtggcgcgagccgttcacgcctggggacgacctccgcctgatcgccgccgtcccggtcgacgagtacacccccgacggcgcgttcgaggccggccgcgaccgcgtgcagtcgcttgcggcagccatccgggacggcgaccccgcggtcggcccgccacccgccgactcccccgcgccgttcgagagcgtcgccggccgcgcggcgttcgagtcgcgggtccgtcgcatccaggacgccatccgggacggcgacaccttccaggcgaacgtcagccaccgcctcgacgccccggcggccgtccacccggtggcggtgttcgaggcgctccgggacaccaaccccgcgccctactcggggatcgtcgagttcccgggcgtcgatctggtgtcggccagcccggagctgctgctcgcgcggcgcggccgcgagctcaccaccgagccgattgcgggcacacgcccccgcggggccacccccgccgaggacgacgccgcccgggcggcgctccgcgccgacgacaaggagcgcgccgagcacgcgatgctggtcgatctggagcgcaacgacctcgggaaggtcagcgagtacggctccgtggcggtccccgactaccggcgcgtggacgcgtacagcgaggtgttgcacctcgtcagcgaagtcacgggccggctccgcgactcgtgttcgctccgtgacgcgatcgccgcggtctttcccggcggaactattaccggcgcgcccaagccccgtacaatggcgctcatcgacaccgtcgaagccacccgccgcggtccctacacgggcagcctcgccgccatcgggttcgacggtgacgccacgctcagcatcaccatccgaacgctcgtcagacgcgccgccacctaccacctgcgcgtcggcgccggcatcgtccacgactccacgcccgcagccgaatacgacgaaaccctcgcgaaagcccgcgcgctcgtcaccgcgctgggggacgccggcggcatcgggcgcgtcgccgacacgacgcccgacaactcgtga

SEQ ID NO: 3312 - protein, 488 aa, Halobacterium sp. NRC-1
MPDSAALATDPAAFRDAAGDATAPTRAVVEARLPVTDPFAAYRRARGDAPSFHYETTGGSDGWGYFGVDPASMLRADGAGALDTVQAAVGARLARVGCDVPHPGGLFGWLSYDIARELEAIPDTTTDARGLPRLQLGVYPTIAAWREPFTPGDDLRLIAAVPVDEYTPDGAFEAGRDRVQSLAAAIRDGDPAVGPPPADSPAPFESVAGRAAFESRVRRIQDAIRDGDTFQANVSHRLDAPAAVHPVAVFEALRDTNPAPYSGIVEFPGVDLVSASPELLLARRGRELTTEPIAGTRPRGATPAEDDAARAALRADDKERAEHAMLVDLERNDLGKVSEYGSVAVPDYRRVDAYSEVLHLVSEVTGRLRDSCSLRDAIAAVFPGGTITGAPKPRTMALIDTVEATRRGPYTGSLAAIGFDGDATLSITIRTLVRRAATYHLRVGAGIVHDSTPAAEYDETLAKARALVTALGDAGGIGRVADTTPDNS

SEQ ID NO: 3313 - DNA, 1584 bp, Halobacterium sp. NRC-1
  CDS (1)..(1584)
atgatcgaaaccgaccgcgagacgttcaccgcactcgccgacgatggccccgcgatcgtgcgcgtcgccgccgacctcgatatcgacgtggcaccgctgacggcgtacgacgcgctcgttgccgacgccgacgaccacgccttcctgcttgagagcgccgaaaagacccccgccagcgaccccgacggggcgtttacccccgacacgaccaccgaagagacccgccacgcccgctactcgttcgtgggctacgaccccgcggccgtcgtcaccgtcgaccccgacgacacgacgatcacgcggctgcgcgacgaccccatcaccgacctgctggacgcccccgaccacgccaccggagatgtgcttgaccgcctccggtcggtgatgcccgcggtcccgcgccgcaacatccccaccgaggaccgccagctgctcgatggcggcctggtcgggttcctcgcctacgacgccgtctacgacctctggctcgacgaggtcggcgtcgagcgtccgccgacgccgctgccggacgcggagttcgccgtgaccacgcgcacgctcgtgttcgaccgcgccaccgactccgtctcgctcgtgtgcacgccggtcgccgacgcggacaccgccacggacgtctacgacgccctcgaagccgaagccaagcgcgtgcaggccgtgcttcgggacgcgaccgcgcccgccaccgccggcatcgaggtgaccaccgagcgcgccggcgaccgcgacgcctacaccgacgccgtcgagaccgccgcgaccgcggtccgggacggcgaagtgtatcaggcggtggtttcacgcacgcgcgagcttgacggtgacatcgacccgcgggcgctctacgacgcgctgcgcgcggtcaacccctcgccgtacatgttcctgctcgcgcacggggaccacacggtcgtgggtgccagcccggagacgctggtcgcggtccacgacgacaccgtcgtcacgaacccgatcgcgggcacctgccagcgcggcgccagcccggtggcggaccgccgcctcgccggggagatgctcgccgacgagaaggaacgcgccgaacacacgatgctcgtggatctcgcgcgcaacgacgtgcgccgcgtgagcgcgcccggcaccgtctcggtgcccgagttcatgcgcgtgctgaagtacagccacgtccagcacatcgaatccacggtcaccgggacgctggccgccgacgccgacgccttcgacgcgacccgcgcggcgttcccggcgggcaccctctcgggcgcgccgaaggtccgcgccatggagcacatcgacgccatcgaagccacaccgcggggcatctacggcggcggcgtggggtatttctcctggaccggtgacgcggagctcgcgatcaccatccgatccgggacgatcacccacaccggcgacgaggacacgctcaccgtccgggccggtgcgggcgtcgtcgccgacagcgacccggacgccgagtacgaggagaccgaggcgaaaatggacggcgtgctcgcggccgtggaccgactccggacgaccgacgacggggaggcggtgcaccgatga

SEQ ID NO: 3314 - protein, 527 aa, Halobacterium sp. NRC-1
MIETDRETFTALADDGPAIVRVAADLDIDVAPLTAYDALVADADDHAFLLESAEKTPASDPDGAFTPDTTTEETRHARYSFVGYDPAAVVTVDPDDTTITRLRDDPITDLLDAPDHATGDVLDRLRSVMPAVPRRNIPTEDRQLLDGGLVGFLAYDAVYDLWLDEVGVERPPTPLPDAEFAVTTRTLVFDRATDSVSLVCTPVADADTATDVYDALEAEAKRVQAVLRDATAPATAGIEVTTERAGDRDAYTDAVETAATAVRDGEVYQAVVSRTRELDGDIDPRALYDALRAVNPSPYMFLLAHGDHTVVGASPETLVAVHDDTVVTNPIAGTCQRGASPVADRRLAGEMLADEKERAEHTMLVDLARNDVRRVSAPGTVSVPEFMRVLKYSHVQHIESTVTGTLAADADAFDATRAAFPAGTLSGAPKVRAMEHIDAIEATPRGIYGGGVGYFSWTGDAELAITIRSGTITHTGDEDTLTVRAGAGVVADSDPDAEYEETEAKMDGVLAAVDRLRTTDDGEAVHR

SEQ ID NO: 3315 - DNA, 1542 bp, Caulobacter crescentus
  CDS (1)..(1542)
atgagtttggagcccgcgttcgacgccttctcggaagcctatgactccgggcggcagcaagtcgtttggacccgcctgatcgacgatctggagacgccggtttcggcctatctgaagatcgcccaggcgcggccctacagcttcctgttcgaaagcgtcgagggcggagcgtggcgcggtcgttattcgatcgtcacgatgaatccggatctcgtctggcgctgtcgcggcgaccaggccgagatcgccgagggcgacgacatcgccgccggccggtttacgccgcagcccggcggcgcgctggacagtctgcgcgatctggtggcgcgctcgcgcatggacctgcccaagggcttaccgccgatggccgccggcgtgttcggcgccttgggctacgacctggtgcgcctggtcgagcgccttccggacgtcaatccggacgccttgaacctgcctgacggcatcatgacccgcccgtcgatcgtggcggtgttcgacgccatcgcgcaggagatcatcctgacgacgaccgtacgcccccaggccggcgtatcggccaaggcggcccacgacgccgcccgcgcgcggatcgaggcggtgatggccgacctgcaccgtccgctcgcccacgacgcgccccgcccgccgcgcgggccgatggacttcaccaccccggtcagccgcgcggactacgcagaggtcgtggccaaggccaaggactacatcgccgccggcgacatcttccaggtggtggccagccaccgcttccgcgcgcccttcgacctcccgccgttcgccctctatcggtcgctgcgccgaaccaatccctcgcccttcctgttcttcctgaacctggacggcttcaatctggtcggctccagccccgagattctggttcgcctgcgcgacggcaagatcaccatccggccgatcgccggcacccgtccgcgcggcgcgacgcccgaggaagacgccgcgctggaagccgagctgctggccgatcccaaggagcgcgccgagcatctgatgctgctggatctgggccgcaatgacgtcggccgcgtggcgatgctgaaccatcacggccgcaacgcaccgccggaacaggcccgcccgaagggcccgaacgtgcgcgtgaccgagagcttcacgatcgagcgctacagccacgtgatgcacatcgtctcgaacgtcgaaggaaccgcgcctgaaggcgttgatcccgtcgacgtcctgatggccgccctgcccgccggcacgctgtcgggcgcgcccaaggttcgcgccatggagatcatcgacgagctcgaggtcgagaagcgcggcattagctatgctggcgcggtcggctatttcggcgccgacggcgcagtcgacacctgcatcgtgctgcggaccgctctggtgaaggacggcatgatgtacgtccaggccggcggcggcatcgtcgccgacagcgatccggacgccgagtacgacgagaccctgcacaagtcccgcgctctgaagcgcgcggccgaagaggcctggcgattcagctga

SEQ ID NO: 3316 - protein, 513 aa, Caulobacter crescentus
MSLEPAFDAFSEAYDSGRQQVVWTRLIDDLETPVSAYLKIAQARPYSFLFESVEGGAWRGRYSIVTMNPDLVWRCRGDQAEIAEGDDIAAGRFTPQPGGALDSLRDLVARSRMDLPKGLPPMAAGVFGALGYDLVRLVERLPDVNPDALNLPDGIMTRPSIVAVFDAIAQEIILTTTVRPQAGVSAKAAHDAARARIEAVMADLHRPLAHDAPRPPRGPMDFTTPVSRADYAEVVAKAKDYIAAGDIFQVVASHRFRAPFDLPPFALYRSLRRTNPSPFLFFLNLDGFNLVGSSPEILVRLRDGKITIRPIAGTRPRGATPEEDAALEAELLADPKERAEHLMLLDLGRNDVGRVAMLNHHGRNAPPEQARPKGPNVRVTESFTIERYSHVMHIVSNVEGTAPEGVDPVDVLMAALPAGTLSGAPKVRAMEIIDELEVEKRGISYAGAVGYFGADGAVDTCIVLRTALVKDGMMYVQAGGGIVADSDPDAEYDETLHKSRALKRAAEEAWRFS

SEQ ID NO: 3317 - DNA, 1557 bp, Haemophilus influenzae
  CDS (1)..(1557)
atgaacattcaaactcaagcctttattgcggtgacagctcaacccattccctattatgctgacaccaccgctatttttaatacactttgtcaatccaattcaaattctcttctactcgactctgccgaaatcggtagtaaaaacagtttacaaagccttatcttagtcaatgctgcggttaaaataacgtgcttaggtcacaacgtcacatttaaagctttaaataataatggaaaacaagttttaaaagaaattcatccaaaattaaccgcacttggaaaagtaagtgcggtcaattttgaagacgaattttctgtacaatttttgccacttgataatcaacttgatgaagatagtaaattacagtctgccactatttttgatgggttgcgtgttatttctagtctttatcaacatagccaaacgcctattttcttaggcggattatttgcttacgatctcgtcgcaaattttattccaatggatggcattacattaaaaaatgatggtatcaactgccctgattacagtttctatcttgccgaacacctcattactatcgaccatcaaaatcaacaagcaacactgaaaagtttctgttttgctcaagaagaacaagttaatattgcgaaaacctccctttccatcgcacaaaaactaaaaaatattgatcacgttctttctattaaagcggcaagtgatgaagttaaaacaaactttgacgatcctgaatttactggtatcgtaaaagccttaaaacaccatattaatattggagatgttttccaaattgtgccttctcgccgtttctcccttgcttgcccgaatacattagccagttacgctcaactcaaacaaaataatccaagcccttatatgttctatatgaacgatgaagactttattttgtttggtgcatcgccagaaagtgcgctgaaatacgcgccagaaaatcgtcagctagaaatttaccctatcgcaggttcacgccctcgtggttttgatgctcacggcaacattgatcctgaattggatgcgcgtttagaactagaacttcgccttgatcataaagaacaagcagaacatttaatgttagttgatttagcgcgtaacgacattgctcgagtttgccaaagtggcacccgtaaagtggcagaattaatgcaagtggatcgctattctcacatcatgcatttagtgtctcgtgtggtgggtaaattacgccctgaattagatgcacttcacgcctatcaagcctgtatgaatatgggcacattaactggtgcgcctaaaattaaagcgatgcagcttatttatcaatttgagcagcaaaaacgccatagttacggtggtgcagtgggttatctcacgtccgatggacattttgatacctgtatcgtgatccgttctgcttttgtacaaaatggaatggcccatgtacaagcaggttgcggcgaagtgttggattctgatccacaaatggaagctgatgaaacacgccacaaagccgcggctgtcttaaaagcaattcgtcaagttaatacacaagcaaaataa

SEQ ID NO: 3318 - protein, 518 aa, Haemophilus influenzae
MNIQTQAFIAVTAQPIPYYADTTAIFNTLCQSNSNSLLLDSAEIGSKNSLQSLILVNAAVKITCLGHNVTFKALNNNGKQVLKEIHPKLTALGKVSAVNFEDEFSVQFLPLDNQLDEDSKLQSATIFDGLRVISSLYQHSQTPIFLGGLFAYDLVANFIPMDGITLKNDGINCPDYSFYLAEHLITIDHQNQQATLKSFCFAQEEQVNIAKTSLSIAQKLKNIDHVLSIKAASDEVKTNFDDPEFTGIVKALKHHINIGDVFQIVPSRRFSLACPNTLASYAQLKQNNPSPYMFYMNDEDFILFGASPESALKYAPENRQLEIYPIAGSRPRGFDAHGNIDPELDARLELELRLDHKEQAEHLMLVDLARNDIARVCQSGTRKVAELMQVDRYSHIMHLVSRVVGKLRPELDALHAYQACMNMGTLTGAPKIKAMQLIYQFEQQKRHSYGGAVGYLTSDGHFDTCIVIRSAFVQNGMAHVQAGCGEVLDSDPQMEADETRHKAAAVLKAIRQVNTQAK

SEQ ID NO: 3319 - DNA, 1395 bp, Methanobacterium thermoautotrophicum
  CDS (1)..(1395)
atgaatgtttttggcattacagaactgaaaaacccggtaaaggaaaagatagaatttaaagaaccctttgaactattcaaaagtatttattctgaatacgactcatcattccttctggagtcaatggaaagcgacacgggtcttgcaagatactcattcatgggattcgagccacagatgataataagggcccgttcaggttttatagaagttgaatacgagggatcaagggaggagtttgatacagaaaacccctttgaattcctgaggcagttcacaagacccgctggaaaatccaggggcttctgtgggggccttgttggctacatatcctatcaggctgcaaggttctttgacagtatcaacctcagccccggaaacttcccggactttgaattcggactcttccttgacggtatcatgttcaaccacctcacaggagaatgcagttacatcagcctcaaggagaacagactcccggaaatatcagaactgctgcgcgaggaaaccccaacagggcaccttaaatacaggagcatggggaccctgttctcaaggaggagataccttggaatggtggaggaggcaagggagaggatagctgagggcgaaatattccaggcagtcctctcaaatgccactgactacaggctccgtggtgacaggcttgccctctacgaagccctcaggagggttaacccctccccctacatgtaccacctgaaacttggcagcagggagataacaggttcaagtcctgaaatgcttgtccgtgtggaggataaacagattgaaaccttcccaatcgcaggaaccaggccaagggggaaaacaccccatgaggatgagagaatagcggcggaactgctgtcagatgagaaggaacttgcagagcacctcatgctcgttgaccttgcaaggaacgacctcgggagaatatctgagtttggcacggtccaggtaccggagtacatgaccataaggaggttctcccatgttcagcacatcctctcccatgtaaccggcagactcaggaagggcatggatgcccttgatgcccttggcgcggtcttcccggcaggtacagtgagcggggcgcccaaaataagggctatggaaataatagagtcacttgagggggtgccgaggaatgcctacgccggtgccctgggctatctctcactgaacggtaacgcagacttcgcaataaccataagatccatggtcgctgagggagcgtatggaagaatacaggcaggggcaggtatagtacatgactccgtacctgagagggaatacgtggagtgccagaacaaggccatggcggtccttaaatcaatggaactggcaggtgatggctttgattctgatgaaccatttatcgccaggaggtaa

SEQ ID NO: 3320 - protein, 464 aa, Methanobacterium thermoautotrophicum
MNVFGITELKNPVKEKIEFKEPFELFKSIYSEYDSSFLLESMESDTGLARYSFMGFEPQMIIRARSGFIEVEYEGSREEFDTENPFEFLRQFTRPAGKSRGFCGGLVGYISYQAARFFDSINLSPGNFPDFEFGLFLDGIMFNHLTGECSYISLKENRLPEISELLREETPTGHLKYRSMGTLFSRRRYLGMVEEARERIAEGEIFQAVLSNATDYRLRGDRLALYEALRRVNPSPYMYHLKLGSREITGSSPEMLVRVEDKQIETFPIAGTRPRGKTPHEDERIAAELLSDEKELAEHLMLVDLARNDLGRISEFGTVQVPEYMTIRRFSHVQHILSHVTGRLRKGMDALDALGAVFPAGTVSGAPKIRAMEIIESLEGVPRNAYAGALGYLSLNGNADFAITIRSMVAEGAYGRIQAGAGIVHDSVPEREYVECQNKAMAVLKSMELAGDGFDSDEPFIARR

SEQ ID NO: 3321 - DNA, 1509 bp, Bacillus halodurans
  CDS (1)..(1509)
atgaacgtaacccctttttcggctgttaaagcagccaaccagcagtttcgcacaattcccgtaatcggtgaatgctttgccgatgctgttaccccgattcatattgtccagcaacttggagacgaagtggcgtttattttagaaagtaaggacgacgaatccccatgggcaagattttcatttattggtctgaacccgtttgtggagttaatagaacaaaatggtgtctatcaatcaatcagccgaagcggctcgattctcgtggagacggaagactttaaatcgtgtctacaacagacgattgacgttttggatgtacagccattggagcgggaactaccgttttacggcggggctgttggctatatggcgtatgatgcgattgaaacaattgagaaaacgttggcaaatgcaagagagagtgaggcgcctctctatcattttcttttttgtgagacgctgattgtctatgatcatacagaaaaaaagctagcggtcatctacttaagtactgaggatggaggatcccttgatacacggtataaatgtgcggtcaataccatcgaaacagtggttgaaacgattcataaacggcgggacggcgatcggctgttacgtcctgcaccggtccaagatgaagtctcgtttcaagaggtatcctctaactatgaaaaagaagtatttctacgcgacgtagaacgaattaaggaatatattcgcgcaggtgatgtttttcaagcggttttatcacagcgctttgaacgtgaactatcggtccgtgcccttgacgtctatcgcgtcctgagaatgattaacccatctccttatttgttttacattaagtttcatgacgtagaggttgtcggcagttctcctgagcggctcgttcaagtccaagatggacatgtggaaatccacccgattgctggaacgagaaaaagaggggcaacacgggaggaggatgaggcattagccaaggaactgctagctgacgaaaaagagcgcgccgagcattatatgcttgttgaccttgcacgtaacgacattggtcggattgcagaatatgggacggtcaagacgccaaccttgctagaaatcggtaaattttcacacgtgatgcacatcatttcaaaggtgacaggagagttgaagcaaacgctccatccgctagatgcgcttcgctatgggtttccagcaggaactgtttctggtgcaccgaaaattcgggcaatggaaattttaaatgaattggagccgacaaagcgagggatttatgcaggagcgatcgcgtacttagggtttgacggaaacatcgattcttgcattgccattcgcacgatgatcgtcaaagacggccgtgcttatatccaagcaggtgctggaattgtcgccgattcagtacccgaaaatgagtacgaagagacgagaaacaaagcaaaggcgttgctaaaggcggtagaaatggctgaagccatgtttgcgaaaaaggaggcgaccccgcgtgtttaa

SEQ ID NO: 3322 - protein, 502 aa, Bacillus halodurans
MNVTPFSAVKAANQQFRTIPVIGECFADAVTPIHIVQQLGDEVAFILESKDDESPWARFSFIGLNPFVELIEQNGVYQSISRSGSILVETEDFKSCLQQTIDVLDVQPLERELPFYGGAVGYMAYDAIETIEKTLANARESEAPLYHFLFCETLIVYDHTEKKLAVIYLSTEDGGSLDTRYKCAVNTIETVVETIHKRRDGDRLLRPAPVQDEVSFQEVSSNYEKEVFLRDVERIKEYIRAGDVFQAVLSQRFERELSVRALDVYRVLRMINPSPYLFYIKFHDVEVVGSSPERLVQVQDGHVEIHPIAGTRKRGATREEDEALAKELLADEKERAEHYMLVDLARNDIGRIAEYGTVKTPTLLEIGKFSHVMHIISKVTGELKQTLHPLDALRYGFPAGTVSGAPKIRAMEILNELEPTKRGIYAGAIAYLGFDGNIDSCIAIRTMIVKDGRAYIQAGAGIVADSVPENEYEETRNKAKALLKAVEMAEAMFAKKEATPRV

SEQ ID NO: 3323 - DNA, 1464 bp, Streptococcus pneumoniae
  CDS (1)..(1464)
atgaggtggcaccgcgaatttcgtcctcacgcaagttattttgcgtggggatttttcatacagtcgctacgaactagaattagaactgaaagggaaattacaatggaacgaatcattcatggagatgtcttatcaccaatcttggcttatatgcgcttaaaggggcaacacaaggttatcttagagagtattccgagagacaaggaaacagctcgtttttctatcctagcctataatcctgtttttgagattaagtttgaaaatggagttctttatcaaaatggtcaagtgattgatcgggatcccttggatttcctttatgaagtgattcataagagtcagcaccattcagagctaccttttggtggtggagccattggttttgtgggttacgatatgatttcgctttatgaagaaattggtcaaatccctgaggatacaattgggacgccagacatgcatttctttgtctatgagagctatatagtctttgaccacaagaaggagaagatacatgtcatagaggatgcattttatagtgagcgcagtcaagaggccttggaaaaatccttgaaccaagtgcttgaggaattacgcattcctgctccaaatgaatttgaagacttggatttatcaccacttgacttcaaaccgcatatcgctccacataagtttgagggaatggtagaaacagctcgtgacttgattcgtaacggagatatgttccaatgtgtactcagccagcgtttctcagcagaagttactggaaatccatttgacttctacagaaatctccgcgtaactaatccttctaattacctttatttctatgattttggggattatcaaatcatcggagctagtccagaaagtttggtttctgtcaaaaatggcatcgtgacaaccaatccgattgcagggacgcgaccaagaggggctacggatgaagaagacaaggccttggcgactgacctcctctctgatgagaaggaaacagcagaacatcgaatgttggtagacttggggcgtaacgatattggccgcatctctgaaacgaccagtgtccaagtcactaagtatatggaagtggagctcttccgctacgtcatgcatttgaccagcgtagtcaaggggcgtttgcttgcagaactcactgccatggatgccttgaaagcaacgcttcctgctggaaccgtttctggagcaccaaagattcgagcgatgagacgtatctatgaactggaaacggaaaaacggggagtatacgctggggcaatcggctacttgtctgcgacgggtgatatggatttggccatcgccatccgaaccatgattctcaaaaatcaaagagcctatgtgcaggctggggcagggattgtctacgactctatcgcccaaaacgaataccaagaaaccattaacaaagcaaaatctatgactagaattggagaactaagaccatga

SEQ ID NO: 3324 - protein, 487 aa, Streptococcus pneumoniae
MRWHREFRPHASYFAWGFFIQSLRTRIRTEREITMERIIHGDVLSPILAYMRLKGQHKVILESIPRDKETARFSILAYNPVFEIKFENGVLYQNGQVIDRDPLDFLYEVIHKSQHHSELPFGGGAIGFVGYDMISLYEEIGQIPEDTIGTPDMHFFVYESYIVFDHKKEKIHVIEDAFYSERSQEALEKSLNQVLEELRIPAPNEFEDLDLSPLDFKPHIAPHKFEGMVETARDLIRNGDMFQCVLSQRFSAEVTGNPFDFYRNLRVTNPSNYLYFYDFGDYQIIGASPESLVSVKNGIVTTNPIAGTRPRGATDEEDKALATDLLSDEKETAEHRMLVDLGRNDIGRISETTSVQVTKYMEVELFRYVMHLTSVVKGRLLAELTAMDALKATLPAGTVSGAPKIRAMRRIYELETEKRGVYAGAIGYLSATGDMDLAIAIRTMILKNQRAYVQAGAGIVYDSIAQNEYQETINKAKSMTRIGELRP

SEQ ID NO: 3325 - DNA, 1479 bp, Pseudomonas aeruginosa
  CDS (1)..(1479)
atgaatcgcgaagaattcctgcggctggccgccgatggctacaaccgcatcccgctgtccttcgagacccttgccgacttcgacacgccgctgtcgatctacctgaagctggccgacgcgccgaactcctacctgctggagtcggtgcagggcggcgagaaatgggggcgctattcgatcatcggcctgccgtgccgcacggtgctgcgggtctacgaccatcaagtgcggatcagcatcgatggcgtggaaaccgagcgcttcgattgcgccgacccgttggctttcgtcgaggagttcaaggcgcgctaccaggtgcccaccgtgcccggcttgccacgtttcgatggcggcctggtcggctacttcggttacgactgcgtgcgctacgtggaaaaacgcctggccacctgtccgaacccggacccgctgggcaacccggatatcctgttgatggtgtccgatgccgtagtggtattcgacaacctggccgggaagatccacgccatcgtcctcgccgatccctccgaggaaaatgcctacgagcgcggccaggcacgtctggaggagctgctggagcgtctacgccagccgatcaccccgcgtcgcggcctcgacctcgaggcggcccagggtcgtgagccggcgtttcgtgccagcttcacccgcgaggactatgaaaacgcggtaggaaggatcaaggactacatcctggccggcgactgcatgcaggtggtgccgtcgcagcgcatgtccatcgaattcaaggcggcgcccatcgacctgtaccgcgcgctgcgctgtttcaatccgacgccctacatgtacttcttcaacttcggcgacttccatgtcgtgggcagctcgccggaggtgctggtacgggtcgaggatggcctggtgacggtgcgcccgatcgccggtacccgtccgcgcgggatcaacgaagaggccgacctggcactggagcaggatctgctgtcggacgccaaggagatcgccgagcacctgatgctgatcgacctggggcgcaacgacgtggggcgggtgtccgatatcggcgcggtgaaggtcaccgaaaaaatggtgatcgaacgttactccaacgtcatgcacatcgtgtccaacgtcaccgggcaattgcgcgaggggctcagcgcgatggacgcgctgcgggcgattctgccggcgggcactctatccggcgcgccgaagatccgcgccatggagatcatcgacgagctggagccggtcaagcgtggagtctacggcggcgcggtcggctacctggcatggaacggcaacatggacaccgccattgccatccgcaccgcggtgatcaagaacggtgaactccacgtgcaggccggcggcggtatcgttgccgactcggtgcccgcgctggagtgggaagaaaccatcaacaagcgccgggcgatgttccgcgccgtggcgctggccgagcagagcgtcgaataa

SEQ ID NO: 3326 - protein, 492 aa, Pseudomonas aeruginosa
MNREEFLRLAADGYNRIPLSFETLADFDTPLSIYLKLADAPNSYLLESVQGGEKWGRYSIIGLPCRTVLRVYDHQVRISIDGVETERFDCADPLAFVEEFKARYQVPTVPGLPRFDGGLVGYFGYDCVRYVEKRLATCPNPDPLGNPDILLMVSDAVVVFDNLAGKIHAIVLADPSEENAYERGQARLEELLERLRQPITPRRGLDLEAAQGREPAFRASFTREDYENAVGRIKDYILAGDCMQVVPSQRMSIEFKAAPIDLYRALRCFNPTPYMYFFNFGDFHVVGSSPEVLVRVEDGLVTVRPIAGTRPRGINEEADLALEQDLLSDAKEIAEHLMLIDLGRNDVGRVSDIGAVKVTEKMVIERYSNVMHIVSNVTGQLREGLSAMDALRAILPAGTLSGAPKIRAMEIIDELEPVKRGVYGGAVGYLAWNGNMDTAIAIRTAVIKNGELHVQAGGGIVADSVPALEWEETINKRRAMFRAVALAEQSVE

SEQ ID NO: 3327 - DNA, 1386 bp, Thermotoga maritima
  CDS (1)..(1386)
atgggtgatagcatgcacgtgctgaagctcgtttcggatctggaaacaccggtttccaccttcatgaaggtttccagaggggaagaattcgctttcctgctcgaaagcgtggagctcggttccgctttcggaaggcattccttcataggtataggtaaaaaagacgtgctcgttttcgaaaagggaatcttgagaacttcgaatcagcagctcgattacacttcctctcctctcaaggcgataaaagattggcttgaggtctatagatacagcgtcaaacacgacgaactcccttcgttcaggggaggagccgttggcttcgtcagttatgactacatttcttacatagagaaagtcaaagtcaaagcctctgtgtttcccacgttttatttcgtggtacccgagcatctcataatattcgatcacctgaagaacaacgtcttcatcatcagcgatagccctgaggaactcacatcgaaggtcttgagtccttttgaggagaaaccagagaagaacgtttttgtgacagaaccggaatcgaacttcgaaagagagcagttctacaaagtggttgaaaaggccaaaaagtacattgtagaaggtgacatattccaggtggttctctcccaggctttcacattcaaaacgacgctggatccgttctacatctacagggcgctcagaatgatcaatccttctccctacatgttttatctgaagttcggagacacggtcgttttgggatcttctcccgaaaccatggcgaaggtggaaggagacaaggccactgtgaagccaattgccggcaccagaccgcggggaagaactgttgaagaagatctgaagctggagagagaacttttgaacgacgaaaaagagatagcagaacacgttatgctcgtggaccttggaagaaacgatcttggaagagtctgtaaagaaggaaccgtgcgagtggagaagaagatggttatcgagaggtactcccacgttatgcacatagtctcgcaggtgagcggtgaactgaaggacgataaagatgctgtggatgtgttcgaagcgactttccctgcggggacagtctctggcgcacccaaagtgagggcaatggagatcatagaagaactcgaacccaccccgcgagggccatacgctggagccgttgggtatttctctttccccgatgataagggaaggatgaacatggattctgctatcaccatcaggtcctttttcttcaaaggtaaacagggatggctccaggcaggagcgggtatcgtttacgattccgttccggagcgcgaatatcaggagactctgaacaaactcagggctttgttcaggagcctggaagttgcgcagaagatccaggggggattgttttga

SEQ ID NO: 3328 - protein, 461 aa, Thermotoga maritima
MGDSMHVLKLVSDLETPVSTFMKVSRGEEFAFLLESVELGSAFGRHSFIGIGKKDVLVFEKGILRTSNQQLDYTSSPLKAIKDWLEVYRYSVKHDELPSFRGGAVGFVSYDYISYIEKVKVKASVFPTFYFVVPEHLIIFDHLKNNVFIISDSPEELTSKVLSPFEEKPEKNVFVTEPESNFEREQFYKVVEKAKKYIVEGDIFQVVLSQAFTFKTTLDPFYIYRALRMINPSPYMFYLKFGDTVVLGSSPETMAKVEGDKATVKPIAGTRPRGRTVEEDLKLERELLNDEKEIAEHVMLVDLGRNDLGRVCKEGTVRVEKKMVIERYSHVMHIVSQVSGELKDDKDAVDVFEATFPAGTVSGAPKVRAMEIIEELEPTPRGPYAGAVGYFSFPDDKGRMNMDSAITIRSFFFKGKQGWLQAGAGIVYDSVPEREYQETLNKLRALFRSLEVAQKIQGGLF

SEQ ID NO: 3329 - DNA, 1482 bp, Pseudomonas putida
  CDS (1)..(1482)
atgaaccgcgaagaattcctgcgcctggccgctgtcggctacaaccgcatccccctggcctgcgaaaccctggccgacttcgacacgccgctgtcgatctacctgaaactggccgaccaacccaactcgtacctgctcgagtcggtgcagggcggcgagaagtggggccgttactcgatgatcggcctgccgtcgcgcaccgtgatgcgcgttcacggctaccacgtcagcatcttgcatgatggcgtcgaggtggaaagccacgatgtcgaagacccgctggcgttcgtcgaaagcttcaaggaccgttacaaggtcgccgacatccccggcctgccgcgcttcaacggcggcctggtcggctacttcggctacgactgcgtgcgttatgtggaaaagcgcctgggcgtcagccccaacccggacccgctgggtgtgccggatattctgctgatggtgtccgatgccgtagtggtgttcgacaacctggcaggcaagatgcacgcgatcgtgctggtcgacccggctgaagagcaagccttcgaacagggccaggcacggctgcaaggcctgctggaaaccctgcgtcagccgatcaccccgcgccgtggcttggacttgagcggcccgcaggccgccgagccggaattccgctccagctacacgcgtgaggactacgagaacgccgtcggccgtatcaaggaatacatcctggccggtgactgcatgcaagtggtgccgtcgcagcgcatgtccatcgacttcaaggcagcgcctatcgacctgtaccgcgcgctgcgctgcttcaacccgacgccctacatgtacttcttcaacttcggtgacttccatgtggttggcagttcgcccgaggtgctggtgcgtgtcgaggacaacctggttaccgtgcgcccgattgccggtacgcgcccgcgtggagcgaccgaagaggccgaccgtgcgttggaagacgacctgctgtcggacgacaaggaaatcgccgagcacctgatgctgatcgacctgggccgtaacgacgtgggccgtgtgtcctcgaccggcagcgtgcggctgaccgagaagatggtgatcgagcgttattccaatgttatgcacattgtctccaacgtcgccggccagctgcgtgaagggctgacggcgatggatgcgctgcgggcgattttgccggctggcaccttgtcgggcgcaccgaagattcgtgcgatggagatcatcgacgaactggagccggtcaagcgtggggtttacggtggtgccgtggggtattttgcctggaatggcaacatggacaccgcgattgccatccgtactgccgtgatcaacgacggcgaactgcatgtgcaggccggtggcggcatcgttgccgactcggtgccggcgctcgagtgggaagaaaccatcaacaagcgccgcgcgatgttccgtgcggtcgccttggctgagcagacttccgccaagtaa

SEQ ID NO: 3330 - protein, 493 aa, Pseudomonas putida
MNREEFLRLAAVGYNRIPLACETLADFDTPLSIYLKLADQPNSYLLESVQGGEKWGRYSMIGLPSRTVMRVHGYHVSILHDGVEVESHDVEDPLAFVESFKDRYKVADIPGLPRFNGGLVGYFGYDCVRYVEKRLGVSPNPDPLGVPDILLMVSDAVVVFDNLAGKMHAIVLVDPAEEQAFEQGQARLQGLLETLRQPITPRRGLDLSGPQAAEPEFRSSYTREDYENAVGRIKEYILAGDCMQVVPSQRMSIDFKAAPIDLYRALRCFNPTPYMYFFNFGDFHVVGSSPEVLVRVEDNLVTVRPIAGTRPRGATEEADRALEDDLLSDDKEIAEHLMLIDLGRNDVGRVSSTGSVRLTEKMVIERYSNVMHIVSNVAGQLREGLTAMDALRAILPAGTLSGAPKIRAMEIIDELEPVKRGVYGGAVGYFAWNGNMDTAIAIRTAVINDGELHVQAGGGIVADSVPALEWEETINKRRAMFRAVALAEQTSAK

SEQ ID NO: 3331 - DNA, 3065 bp, Pseudomonas aeruginosa
  CDS (401)..(1993)
ctgcagcgtctgccgaccctgctgcaactgatcccgggacacggcggcctgctgcgggggcggctggccgcggatggggccgagtcggcctataccgagtgtctgcgcctgtgccgacggttgctctggcgccagtccatgggcgagtccctcgacgaactgagcgaggagctgcaccgcgcctggggagggcagagcgtcgacttcctgcccggcgaactgcacctggggagcatgcgccggatgctggagattctctcccgccaggcgctgcctctggactgaggcggaacatccattgcggcgatcgcgcccgacggctgcggtcgcaattgggggaaatgggggtatcgatgatgaatatgccgttgcgcgctagcgtcgcgcaggccagtcgcccatgggcgcggggaggtggctcgtgagtggggttggctatcgactggaagaaagtctggagtaccgcacgctggtgccggaggcgctgtcgatctggcgcatggctggcgccaaccggatgctgttcgactgcttcgacgtggacagcaaggctgcgcggcgtagcgtggcgatcctttccagctgcctgcgcatcgagtgctgggggcgcgatgtggtgctgcgggcgttgaactccaacggacgcgccttgctggcgccgttgagcgaggcctgtccggcccaggtcacctgcttgcgtgacggcgacaccctgcactggcgcttccccccggaagagccgcatgcggacgagtggcgacgcctgcatggcctgtccagcctggaggcgctgcgccgcgtgctcggaacgctgggcgacgcggaggggcctgcgctgctgggcggcctgttcagtttcgacctggccgagcagttcgaacccttgccggcgccggccgaacctgcgcggcattgcccggactacctgttcctggtgccggagttgctgctggatatcgatcacctggcgcgccggacttcgctgcaagcgttcgtccacgatccggccgggcacgaccggttggccgccagcctgcgccaatgtgccgacgaattccatggcgccgtggaggaggcttccgagtcgccggtggcaggcgtacgggccggcaactaccaggtcgacctggacgatgcgagctttgcccgccaggtagaacgcctgcaggcccacgtgagggccggcgacgtgttccagatcgtaccttcgcgcagcttcagcatgccgtgcgcggacccctggcgggcctatcgccagttgtgcctgcgcaaccccagcccgtaccgcttcttcctcgatgcgggggacttctgcctgttcggcgcttcgccggagtcggcattgaagtacgacgcggagagtcgcgaggtggaactctatcccattgccggcacccgcccgcgcggatgcgatgcccggggcgccatcgatgcggaactggacaatcgcctggaagcggagttgcgcctggatgccaaggagatcgccgagcacatgatgctggtcgacctggcgcgcaacgatctggcgcgcgtctgccgcagcggtacccggcaggtgcgcgacatgctcaaggtcgatcgctacagccacgtgatgcacctggtctcgcgcgtggctggcgaactgcacggcgaactggatgcgctgcatgcctaccgtgcctgcctgaacatgggcaccctggtcggcgcgccgaaggtccgtgccatgcagttgctgcggcagtacgaggatggctatcgcggcagctacggtggtgcgatcggcattctcgacagcgccggcaacctcgataccagcattgtcatccgctccgccgaggtccgcgaaggtatcgcgcgggttcgggcaggcgccggcgtggtgctggattcggatccacggctggaggccgaggaaacccgcaacaaggcgctggcggtgctgaccgccgtggccgctgccgaacgcgaaaggggagagcgcgatgcgcatcacgctgttggataacttcgattccttcacctacaacctggtcgagcagttctgcctgctcggcgcggaggtccgggtgatgcgcaacgatacgccgttgccgacgatccaggcggcattgctggccgacggttgcgaactgctggtgctgtcgccggggcccggtcggccggaagacgccggctgtatgctggaattgctcgcctgggcccgcgggcgcttgccggtgctcggcgtctgcctcggccaccaggcgctggcgctggccgccggtggcgcggtgggcgaggcgaggaagccgctgcatggcaagagcacgtccctgcgtttcgatcagcgtcacccgctgttcgacggcatcgctgacctgcgcgtcgcgcgctaccactcgctggtggtcagtcgcctgccggaaggtttcgactgcctggccgatgccgatggcgagatcatggcgatggccgatccgcgcaatcgacagctgggcttgcaattccatcccgagtcgattctcaccacccacggccagcgtctgctggagaacgctctactctggtgcggcgcgttggcggtcgcggagcgccttcgggcctgagcggcgctgcgcagtttcgaccgaggctcggttgccaggccggcgcatcgtcgaaacgctggcggcccagttcgcgcaggcgctggcgggcgctttcgagaaagcgacggaagctgcgctcggattccagcgcggtgttgtagtagcaatacaccttggtgtcgatgccgcccggttcgtacagttcgctgaggactgccagggtaccgttgcgcaggcgttcctcgacgaaataatgcggcgcgatgccccatccgacgccggcttccaccagacgcagcatgtcgtcgaagttttccacgaagagtaccttgtcgctgaccggccgcagcaggttcgaatgctgcccggagcggctaccgaggctgatctgccggtaattggccaggctcgcgatgctgtgcagggaggcattgcacaacgggtgctgcggatgggcgacgacgaacgccttggtgtagccgagcacgcactggttgaagcgggagatct

SEQ ID NO: 3332 - protein, 530 aa, Pseudomonas aeruginosa
MGAGRWLVSGVGYRLEESLEYRTLVPEALSIWRMAGANRMLFDCFDVDSKAARRSVAILSSCLRIECWGRDVVLRALNSNGRALLAPLSEACPAQVTCLRDGDTLHWRFPPEEPHADEWRRLHGLSSLEALRRVLGTLGDAEGPALLGGLFSFDLAEQFEPLPAPAEPARHCPDYLFLVPELLLDIDHLARRTSLQAFVHDPAGHDRLAASLRQCADEFHGAVEEASESPVAGVRAGNYQVDLDDASFARQVERLQAHVRAGDVFQIVPSRSFSMPCADPWRAYRQLCLRNPSPYRFFLDAGDFCLFGASPESALKYDAESREVELYPIAGTRPRGCDARGAIDAELDNRLEAELRLDAKEIAEHMMLVDLARNDLARVCRSGTRQVRDMLKVDRYSHVMHLVSRVAGELHGELDALHAYRACLNMGTLVGAPKVRAMQLLRQYEDGYRGSYGGAIGILDSAGNLDTSIVIRSAEVREGIARVRAGAGVVLDSDPRLEAEETRNKALAVLTAVAAAERERGERDAHHAVG

SEQ ID NO: 3333 - DNA, 1485 bp, Aquifex aeolicus
  CDS (1)..(1485)
atgaatttaaacctcagccttgaggaagtaagaaaactatcagagaattacaacgttattcccttatatacggaacttctggtggatactgaaactcctctttctattttcctcaagttaaaggaaaaaggacagttcaacatcttactggaaagtgcggagggcggtgagaagtggggaaggtactcctttataatcacgggatcttccttttacctgagaacgagaaaagatatcggagagatttacgaaaggggaaaggtcaatttctttgaaacgaaggatcctctttcaaagattaaggaagttgtaaagaagttcataccttatcatgatgaaagattgcctaggttctggggagggttagttggttactttgcctacgacgtggtgaagttctacgaacctgtggaagacaaaaatcccgatccgattcacacttacgatatatacctcgtgcttacggacgttgtggttatccacgacaaccttacgggaaaaataaaggtcgttgttcccatcttcgcacaaaacggaattgaggaagagtacgaaagggctaaaaacttaataagggataccgtgaaaaaactaaaggaaaggggaactacttttttaaacgttgtagagaaagaaccggatttcaaaaactggcgttctaacttcacaaaagaggaatttgaggatatagtcaaaaaggcaaaggagtacatagcgcagggggatgtgatacaggtagttctttctcaaagattcagaaagaggtttaagggtaatcccgacaacatttacagagttctcaggttcttaaatccttctccctatatgtactacctcgattttgatcagttaaaagtcataggctcttctcccgaaatcctcgtgagactggaagagggaaggattgaaacgagacctatagcggggacgagaaagaggggaagaacggaagaagaagataaaagactggaagaggatctactttcggacgagaaggagagggcggaacacttaatgcttgttgaccttgcgagaaacgacatagggagggttgcaaaaaccggaagtgtgagagttgaaaactttatgcggatagaacgctactcccatgttatgcacatagtgagcgacgttgtgggagagttaagagaaggctacgacgctctagacgtcttgaaggctacctttcctgcgggaactgtttctggagctcccaaggtaagggctatgcagataatagaggaacttgaaaacgaaaggagaggaatatacgcgggcagtgtaggttatatatcctttcaggggaacatggacatggcgatagccataaggactgcagtttacagggacagggatatattcgtccaagctggagcgggaatagtggcggactccgttcctgaaaaggagtgggaagagaccgtaaacaaggcaaaagcgctcatgaaggcaatagaaattgcagaggaaagccaagaagagtaa

SEQ ID NO: 3334 - protein, 494 aa, Aquifex aeolicus
MNLNLSLEEVRKLSENYNVIPLYTELLVDTETPLSIFLKLKEKGQFNILLESAEGGEKWGRYSFIITGSSFYLRTRKDIGEIYERGKVNFFETKDPLSKIKEVVKKFIPYHDERLPRFWGGLVGYFAYDVVKFYEPVEDKNPDPIHTYDIYLVLTDVVVIHDNLTGKIKVVVPIFAQNGIEEEYERAKNLIRDTVKKLKERGTTFLNVVEKEPDFKNWRSNFTKEEFEDIVKKAKEYIAQGDVIQVVLSQRFRKRFKGNPDNIYRVLRFLNPSPYMYYLDFDQLKVIGSSPEILVRLEEGRIETRPIAGTRKRGRTEEEDKRLEEDLLSDEKERAEHLMLVDLARNDIGRVAKTGSVRVENFMRIERYSHVMHIVSDVVGELREGYDALDVLKATFPAGTVSGAPKVRAMQIIEELENERRGIYAGSVGYISFQGNMDMAIAIRTAVYRDRDIFVQAGAGIVADSVPEKEWEETVNKAKALMKAIEIAEESQEE

SEQ ID NO: 3335 - DNA, 1422 bp, Deinococcus radiodurans
  CDS (1)..(1422)
atgtcccagacctctgcccacccgacctgtctcgccgtccatgaactcaatgccgacctcgacacgcccgtcaccgcttacctcaaggccgcacagggagaaacggtgtcgttcttgctcgaaagcgtggaagcgggcgaaaagctggggcgctactcgtttatcggcgtgggcgagcagggcacgtttcgcgcctgcgccggacgggtgcagagcagcgggcaattcggtgacttcgacggcgaggaagccgacccgctcgcccggctctaccgcgtcacgacccgcccgctggacgtgcccgccggattgcctgcgctggtaggcggcgcagtggggtacgcggcctacgacatcatccgcgcctacgaaaagctgcccgacgccaaccccgatgaactgaagctgcccgacgcgctgttcgtggcgccgcgtgggctggtgattttcgaccacctcaagcaccggctggtggtggtggcggctgcggaggagcaggcgcaggccgacgccgaggtggagcgcctgctcacccggctgcgcggcccgctgccggaggtgccggggcaaacgcccaccgccgcgcccgagttccgcagcaacttcacgccggcggagtacatggaggcggtgcgccggggcaaggagtatgtccacgcgggcgacattttccagttcgtgccctcgcagcgtttcagcgccgagctgggcgacctgcaccccttcgcgctctaccgcgccctgcggcgggtgaaccccagcccctacctcggctatctggcgctgggcgaggtgacactggtggcgagcagccccgagagcctgctgcgcagcgacggcgtgagcgtggtcacccgtccgattgccggcacccgcaagcgcggggcgactgaggccgaggacgacgcgctcgccgccgaactgctcgccgacgaaaaggagcgcgccgaacacttaatgctggtggacctcgggcgcaacgacatcggcaaggtgagcgcttacggcaccgtcaaggtcgaaaacgccttttccatcgagcgctacagccacgtcatgcacatcgtctcgggcgtgcgcggcgaactgcgggaggggcagacgccactgcacgcgctcgcctcggtgctaccgatgggcacggtcagcggcgcacccaaaatccgggcgatggaaatcatcgacgaactcgaacccgtgcgccgggggccgtatggcggctgcttcggctacgtcgctttcgatggcagcctcgacatggcgctcaccctgcggacgatggtgattgcgaacggcaaggtccacatccaggccggggcgggtgtggtcgccgacagcgtgcccgagctggaggagcaggaaacgcgcaacaaggcggcggccctgatgcgggcggtggagctggcggcgggggggctgtga

SEQ ID NO: 3336 - protein, 473 aa, Deinococcus radiodurans
MSQTSAHPTCLAVHELNADLDTPVTAYLKAAQGETVSFLLESVEAGEKLGRYSFIGVGEQGTFRACAGRVQSSGQFGDFDGEEADPLARLYRVTTRPLDVPAGLPALVGGAVGYAAYDIIRAYEKLPDANPDELKLPDALFVAPRGLVIFDHLKHRLVVVAAAEEQAQADAEVERLLTRLRGPLPEVPGQTPTAAPEFRSNFTPAEYMEAVRRGKEYVHAGDIFQFVPSQRFSAELGDLHPFALYRALRRVNPSPYLGYLALGEVTLVASSPESLLRSDGVSVVTRPIAGTRKRGATEAEDDALAAELLADEKERAEHLMLVDLGRNDIGKVSAYGTVKVENAFSIERYSHVMHIVSGVRGELREGQTPLHALASVLPMGTVSGAPKIRAMEIIDELEPVRRGPYGGCFGYVAFDGSLDMALTLRTMVIANGKVHIQAGAGVVADSVPELEEQETRNKAAALMRAVELAAGGL

SEQ ID NO: 3337 - DNA, 1917 bp, Deinococcus radiodurans
  CDS (1)..(1917)
atgctctcccccgccgacgccctcctccgcctccgcgccgctggcctgcccggcatcgccctgctcgaatcgctggggccggtgctgccctacgcccgtttcaccttcctgagcgccgcgccgacctgcgtgcagcacaccctccccgaacttcctgcccccgacgccttttttcccgcctggctcggcggcctgaagtatgaggcggcccgcgagttcggtctggcggcgcacccggcgagcggcccggcgcagtggtggggtttttacccgtccgggctggtgtgggaccgggaggccggcaccctgagcgtcgtgggcgagccgcatctggactgggcggcgctgctggcgagcgaccccgcgcccctgccgagcttgacggtgggcgacttcggcgcggacgacgtggactatccggcgggcgtacgggccgtgcaggagctgattcgggcgggcgaggtgtatcaggtcaacctgtcgcgcggcgtgtcggccccggcgcagggcgacccgctggcggcgtacctgcggctgcgcgaggtgaatccgagtccgttcatggcctttctggacatgggcaacgaagtcgtcgtgtcgtgcagccccgagcggctggtggactgggccgtgtcggaaggcggcggcatcagcgcccgcccgattgccggcacgcggcggcgcggcgacacgccggaggaagacgccgccttcgaagccgagctgcgcgccagccccaaagaagtggccgagcacaccatgctggtggacctcgtgcgccacgacctgggcgcggtagcagcccccggcacagtgagcgtgcccgacctgatgctggtggagcgctacagccacgtcatgcacctcgtttcggaggtcacggccaccgcccgcgcgggcctgacgctgccagacctgctcgccgccactttccccggcggcacgattaccggcgcccccaaagcccgcgtgatggacgcgattgccgcgctggaaccggggccgcgcggctggtacaccggcggcgcagggctggtgagcgggcgacgggtggacgtaaatattctgattcggacggcggaatttgtgctggatacggcggcaggttcgccagcaacgcctccccgctggaccgtcaccgtccgtgcgggcggcggcaccgtcatcgacgccgacccggcccgcgaggcccgcgaaacggtccacaaggcgcaggccctcctcagcgtgctggcgggggtgcccggcagaccggcgcaggcggggcagcccccggtgccgggtcggccttggacgccaccacccgtgcccaagcaggcacagacgccgctgcgggtgctggtgctcgacaaccgcgactcgtttacctggaacctcgcccacgacttgctcgcgctgggggcgatggtggatgtgcggagccaggacgaggacgcagaaacgctgctggcgagccgccccgacgccgtgctcgtcggtcccggccccggcactccgcagacgagcggctgcacactcgccttgacccggcggtgcctggagcgcggcgtgccgctgctgggcgtgtgcctggggcatcaagcgctgggggaagtgctgggtggccgcgttgaacgcgccgagccggtgcatgggcggcccgagcgcgtgcagcacggcggcgcggggctgtttgccgggattgaaaacggcgcggccttcgggcgctaccactcgctcgtcgtgcgcgggctacccgacgaactggtgacggcccgcagtgaagggggcgagattatggcgctggcggtgcctggaaaacccgcctggggcgtgcagtttcatcccgaaagcgtgctgagcccggcgggacgggtgctgctcggcaactggctgcgggctgttgctgggtccgctgcgctgaggggtgaggggtga

SEQ ID NO: 3338 - protein, 638 aa, Deinococcus radiodurans
MLSPADALLRLRAAGLPGIALLESLGPVLPYARFTFLSAAPTCVQHTLPELPAPDAFFPAWLGGLKYEAAREFGLAAHPASGPAQWWGFYPSGLVWDREAGTLSVVGEPHLDWAALLASDPAPLPSLTVGDFGADDVDYPAGVRAVQELIRAGEVYQVNLSRGVSAPAQGDPLAAYLRLREVNPSPFMAFLDMGNEVVVSCSPERLVDWAVSEGGGISARPIAGTRRRGDTPEEDAAFEAELRASPKEVAEHTMLVDLVRHDLGAVAAPGTVSVPDLMLVERYSHVMHLVSEVTATARAGLTLPDLLAATFPGGTITGAPKARVMDAIAALEPGPRGWYTGGAGLVSGRRVDVNILIRTAEFVLDTAAGSPATPPRWTVTVRAGGGTVIDADPAREARETVHKAQALLSVLAGVPGRPAQAGQPPVPGRPWTPPPVPKQAQTPLRVLVLDNRDSFTWNLAHDLLALGAMVDVRSQDEDAETLLASRPDAVLVGPGPGTPQTSGCTLALTRRCLERGVPLLGVCLGHQALGEVLGGRVERAEPVHGRPERVQHGGAGLFAGIENGAAFGRYHSLVVRGLPDELVTARSEGGEIMALAVPGKPAWGVQFHPESVLSPAGRVLLGNWLRAVAGSAALRGEG

SEQ ID NO: 3339 - DNA, 1551 bp, Mycobacterium tuberculosis
  CDS (1)..(1551)
atgcacgccgacctcgcagccaccacctcgcgtgaggatttccgcctcctggcggccgagcaccgggtggttccggtgactcgcaaggtcttggccgacagcgagacgccgctgtcggcctaccgcaagctcgccgccaatcgcccgggtacgttcctgctggagtcggccgagaacggccggtcgtggtcgcgatggtcgtttatcggtgcgggggcgccaacggcgttgaccgtgcgtgaggggcaagcggtatggctgggtgccgtgcccaaggacgctcccactggcggagacccgctgcgggcgctgcaggtgaccttggagctgctggctacggcggatcgtcagtccgagccgggtcttccgccgctgtcgggtggcatggtcggtttcttcgcctatgacatggtgcgacggctggaacgattgccggaacgggccgtcgatgacctctgcctgccggacatgctgctgttgctggccaccgatgtggcggcggtcgatcaccacgagggcaccatcacgttgatcgccaacgccgtgaactggaacggcaccgacgagcgggtcgactgggcctacgacgacgcggtcgctcggctggacgtgatgaccgcagcgctcggccaaccactaccgtcaaccgtggccaccttcagccgacccgagccgcgccaccgtgcgcaacgcaccgtcgaagaatatggtgcgatcgtcgaatacttggtggatcagattgcagccggtgaagcgttccaggtggtgccctcgcagcgcttcgagatggacaccgatgtcgatcccatcgacgtgtaccgaattctgcgggtaaccaacccaagtccctacatgtatctactgcaggtgccgaatagtgatggtgcagtggacttttcgattgttggatccagtccggaggcgctggtaacggtccacgaaggctgggcgacgacgcatccgatcgccggaacccggtggcgcggaaggacagacgacgaggacgtgcttctggaaaaagagctgctggcggacgacaaagaacgtgccgagcatctgatgctggtcgacctcggccgaaacgacctgggtcgggtctgcacgccgggcactgttcgggtcgaggattacagccacatcgagcggtacagccacgtgatgcacctggtgtccacggtgaccgggaagctcggcgaagggcgcaccgcgctggacgcggtgaccgcctgctttccggccggcacgctgtcgggcgcgccgaaggtgcgggcgatggagctgatcgaagaggtggagaagacacgccgcggcctttacggcggtgtcgtcggttaccttgacttcgccggcaacgctgacttcgccatcgccatccgcaccgcgctgatgcgtaacggcacggcttatgtccaggcaggcggtggtgtggtggccgactccaacggatcctacgaatacaacgaggcgaggaacaaggctcgggctgtgctcaacgcgatcgctgccgccgagacgctggccgctccgggcgcgaaccgcagtggctgctaa

SEQ ID NO: 3340 - protein, 516 aa, Mycobacterium tuberculosis
MHADLAATTSREDFRLLAAEHRVVPVTRKVLADSETPLSAYRKLAANRPGTFLLESAENGRSWSRWSFIGAGAPTALTVREGQAVWLGAVPKDAPTGGDPLRALQVTLELLATADRQSEPGLPPLSGGMVGFFAYDMVRRLERLPERAVDDLCLPDMLLLLATDVAAVDHHEGTITLIANAVNWNGTDERVDWAYDDAVARLDVMTAALGQPLPSTVATFSRPEPRHRAQRTVEEYGAIVEYLVDQIAAGEAFQVVPSQRFEMDTDVDPIDVYRILRVTNPSPYMYLLQVPNSDGAVDFSIVGSSPEALVTVHEGWATTHPIAGTRWRGRTDDEDVLLEKELLADDKERAEHLMLVDLGRNDLGRVCTPGTVRVEDYSHIERYSHVMHLVSTVTGKLGEGRTALDAVTACFPAGTLSGAPKVRAMELIEEVEKTRRGLYGGVVGYLDFAGNADFAIAIRTALMRNGTAYVQAGGGVVADSNGSYEYNEARNKARAVLNAIAAAETLAAPGANRSGC

SEQ ID NO: 3341 - DNA, 1503 bp, Helicobacter pylori
  CDS (1)..(1503)
atgattagcctgatagaaaaagccccttatattccttaccccctagctctttatgaaaagttagagcaacggcacaccttgctttttgaaagcgctgagattgagagcaaagcgcacaccaaatcccttttaatggctaaggcttgtttgaagctagtttgcaaccacaatatcgtaaccatcactagcctaacgcctaatggcggggcgtttttacaaacattgagcgcgtttttcaaaacgcctatacaagacaatgccctaaccttaacctacaccaaagataaaaaaatccaagatgagtttttaaaactctttgagcctagcccttttgacgctttaagggggctttttaaaagcgttaaaacaagacccaaacacccctttacgctctttagcgcgggcgttttttcttttgaaatgctcaatttttttgaagatttgccccacttaaaagcaaacgacaacaccgcaaatgactttattttttatgtcgcgcaaaatttgatcatcatagatcataaagaaaaaagcgctgaaatcttgggggcatgttttgatgaacgctttaaaacagagatagctaaagaattacaggatttaaaagaattggttaaaaacattaaaagcgattttatccctaaaaaagctaagcaaagcatagaagttagcgttagttgtgatgatagcgagtttgaaaaaaaggtgttattcttacaagaagaaatcaaaaagggcgaaatctttcaagcggtgttgtcgcgcagtttttatatggagtgcttggagggtttgagcgcgtattatcacttaaaactctctaaccctagcccctatatgttctatatcaaagacagcgattttatcctttttggggcaagccctgagagcgctttaaaatacaacgccctaacgaatacggctgaaatttatcccattgctggcactcgtttaaggggtaaggacaagcaagggaatattgattacgatttagatagtaaaatggaatttgatttgcaacacgactataaagaaagggctgaacacatcatgttagtggatttagccagaaacgacatggccagggtttcaaaaaaacgctattgcgacaagcttttaaaagtggataagtattccaatgtcatgcatttagtctcaagggttgtgggggaattgaaaaaagggtgcgatagtttgcatgcttacaggagttttatgaacgccggcacgctcagcggagcgcctaaaatctccgcgatcaaattgatttaccaattagaaaaccaaaggagaggttcttatggggggagcgtggggtatttaaacagcgagggctctatggattcttgcatcactatccgttcatgttttgtcaaaaacaatagagcagtgatccaagcaggagccggtattgtgttagacagcgtgccacaaaatgaagcgaatgaaacaagagccaaagtgcaagcccttattgatgcgatcaggaaaaccatctcatga

SEQ ID NO: 3342 - protein, 500 aa, Helicobacter pylori
MISLIEKAPYIPYPLALYEKLEQRHTLLFESAEIESKAHTKSLLMAKACLKLVCNHNIVTITSLTPNGGAFLQTLSAFFKTPIQDNALTLTYTKDKKIQDEFLKLFEPSPFDALRGLFKSVKTRPKHPFTLFSAGVFSFEMLNFFEDLPHLKANDNTANDFIFYVAQNLIIIDHKEKSAEILGACFDERFKTEIAKELQDLKELVKNIKSDFIPKKAKQSIEVSVSCDDSEFEKKVLFLQEEIKKGEIFQAVLSRSFYMECLEGLSAYYHLKLSNPSPYMFYIKDSDFILFGASPESALKYNALTNTAEIYPIAGTRLRGKDKQGNIDYDLDSKMEFDLQHDYKERAEHIMLVDLARNDMARVSKKRYCDKLLKVDKYSNVMHLVSRVVGELKKGCDSLHAYRSFMNAGTLSGAPKISAIKLIYQLENQRRGSYGGSVGYLNSEGSMDSCITIRSCFVKNNRAVIQAGAGIVLDSVPQNEANETRAKVQALIDAIRKTIS

SEQ ID NO: 3343 - DNA, 1476 bp, Neisseria meningitidis
  CDS (1)..(1476)
atgatcagcaaacaagaataccaagcccaagccgcccaaggctacaaccgcatcccgctcgtgcaagaactccttgccgatttggatacgccgctttccctctatctcaaactcgccaaccgcccctatacctacctgctcgaatccgttgtcggtggcgaacgtttcggccgctattcttttatcggcctgccttgcagccactatctcaaagccagcggcaaacacgtcgatgtttatcaaaacggcgaaattgtcgagcaacacgacggcaaccccctgccctttatcgaagccttccacaaccgcttcaaaacacccgaaatcccaagcctgccgcgctttaccggcggactggtcggctacttcggttacgaaaccatctacaattttgaacacttcgcccaccgcctgaaaaacaccaccaaagccgacccgctcggcacgcccgacatcttgctgatgctgtcgcaagaattggcggtgatcgacaatttgagcggcaaaatccatctcgtcgtttacgccgatccgtcgcagcccgacggctacgaacgcgcccgcgaacgcctcgaagacatccgcacccagttgcgccaaagctgcgccatcccgctctcgctcggcagcaaacacaccgaagccgtcagcgaattcggcgaagagccgttcaaagcctgcgttaacaaaatcaaagactacatcttcgcaggcgactgcatgcaggttgtccccagccagcgcatgagcatggaattcaccgacagcccgctcgccctctaccgcgccctgcgtacgctcaacccttcgccttatctcttttactacgatttcggcgatttccacatcgtcggctcctcgcccgaaatcctcgtccgccgcgaacgcgacgatgtcatcgtccgccccatcgccggcacgcgcctgcgcggcaaaacccccgccgaagaccttgccaacgaacaagatttgttaagcgatgccaaagaaatcgccgaacacgtcatgttgattgacttaggacgcaacgacgtcggccgcatcagtaaaaccggcgaagtcaaagttaccgacaaaatggtgattgaaaaatactcccatgtaatgcacatcgtttccaacgtcgaaggccgtctgaaagacggcatgaccaacatggacatcctcgccgctaccttccctgccggcacactctccggcgcacccaaagtccgcgccatggaaatcatcgaagaagtcgaaccgagcaaacgcggcatctacggcggtgccgtcggcgtatggggtttcaacaacgacatggatttggcaatcgccatccgcaccgccgtagtaaaaaacaacacgctatacgtccaaagcggcgcgggcgtggttgccgactccgatccggcctccgaatggcaggaaacacaaaacaaagcccgagccgttatacgcgccgcgcagatggtgcaggaagggttggataaatga

SEQ ID NO: 3344 - protein, 491 aa, Neisseria meningitidis
MISKQEYQAQAAQGYNRIPLVQELLADLDTPLSLYLKLANRPYTYLLESVVGGERFGRYSFIGLPCSHYLKASGKHVDVYQNGEIVEQHDGNPLPFIEAFHNRFKTPEIPSLPRFTGGLVGYFGYETIYNFEHFAHRLKNTTKADPLGTPDILLMLSQELAVIDNLSGKIHLVVYADPSQPDGYERARERLEDIRTQLRQSCAIPLSLGSKHTEAVSEFGEEPFKACVNKIKDYIFAGDCMQVVPSQRMSMEFTDSPLALYRALRTLNPSPYLFYYDFGDFHIVGSSPEILVRRERDDVIVRPIAGTRLRGKTPAEDLANEQDLLSDAKEIAEHVMLIDLGRNDVGRISKTGEVKVTDKMVIEKYSHVMHIVSNVEGRLKDGMTNMDILAATFPAGTLSGAPKVRAMEIIEEVEPSKRGIYGGAVGVWGFNNDMDLAIAIRTAVVKNNTLYVQSGAGVVADSDPASEWQETQNKARAVIRAAQMVQEGLDK

SEQ ID NO: 3345 - DNA, 1575 bp, Caulobacter crescentus
  CDS (1)..(1575)
atggttacaaggtcggccataggccctccaacaatccagccgtctttcgtcattgccctgtccggagggagcgtacccactcaccctcccaccgcttcgcggtgggcccctccctctctccgtgagagaggggttccgtgtggcgtcccctcagggtcgggaaccgtaagcgctcgccacccacccccaaaccgcccgaggggcctcgcactggtctccgtccgtcgagcccgctatcaccacgccatgcggcatgtcgctctcctcaccgccccgtggcgcgagccggtctgggcgttggcgcccttccgggacgagccttacgcctgcgcgctggtcaccggcggggcggggcggtggtcgtatctgttgcgcgcgcccgacgcgacgatgagcctgtcggacaaggacccagccgatcccttcgcggccctcgccgcgctggtcggcccgcgcctgcccagccatcccgaaggcccgccgttccagggcggggtggtgggcctgggcgcctatgagctgggcgaccgggtcgaggacctggggctttcgcgcaccgactggccggacctgacctgcgcccgctaccccgccctgctggccttcgaccatcacgcgcgtcaggtgatcgcggtggggcgcggcgaggctgaggccgaggcgaacgcgcgcgccgccgacgccctggcctggctggaggtcgccgcgcctgagcgcgccgaacccgccggcccgctctgcgccgatctcgtcgccagcgaccccgccacctatgaaaccgccgtggcgcaggtggtcgcgcggatcgtcgggggcgagatcttccaggccaatatcgcccgcgcctggacggggcggctggcggcgggcgttgacccgttcgacctgttcgtgcgcctgcgcgcgcagagccccgcgccgttctcggcctattggcgcctgcccggccgggcgctggtctccaactcgcccgagcggttcctgaagctggatgcggcgggggcgatccagacccagccgatcaagggcacccgcccccggggccgcgatcctgtcgaggaccgcgccctggccgccgagctgctggccagcgacaaggaccgggccgagaacctgatgatcgtggatctgatgcgcaatgacctggcgcgggtgtcgccggccggcagcgtccgcgcgccggaactgttcaaggtcgagagcttcgccaacgtccatcacctggtctcgaccgtcaccgcgcgtctggcgccgggacgcggcgtcgccgacctgctgcgggccagcttcccgccgggctcgatcaccggcgcgccgaaggtccaggccatgaaggtgatcgccgagcttgagccgccgcgcgggccctattgcggcagcctgttctgggccggggtcgacggagcgttcgactccagcgtcctgatccgcaccgtcggccttgtgcaggacggcgcgggctggcgactggaggcccgggcgggggcggggatcgtcgccgacagcgatccgcgcggcgagcgcctggagaccgaggccaagatcgcggccctgaagacggcgctgacccaatga

SEQ ID NO: 3346 - protein, 524 aa, Caulobacter crescentus
MVTRSAIGPPTIQPSFVIALSGGSVPTHPPTASRWAPPSLRERGVPCGVPSGSGTVSARHPPPNRPRGLALVSVRRARYHHAMRHVALLTAPWREPVWALAPFRDEPYACALVTGGAGRWSYLLRAPDATMSLSDKDPADPFAALAALVGPRLPSHPEGPPFQGGVVGLGAYELGDRVEDLGLSRTDWPDLTCARYPALLAFDHHARQVIAVGRGEAEAEANARAADALAWLEVAAPERAEPAGPLCADLVASDPATYETAVAQVVARIVGGEIFQANIARAWTGRLAAGVDPFDLFVRLRAQSPAPFSAYWRLPGRALVSNSPERFLKLDAAGAIQTQPIKGTRPRGRDPVEDRALAAELLASDKDRAENLMIVDLMRNDLARVSPAGSVRAPELFKVESFANVHHLVSTVTARLAPGRGVADLLRASFPPGSITGAPKVQAMKVIAELEPPRGPYCGSLFWAGVDGAFDSSVLIRTVGLVQDGAGWRLEARAGAGIVADSDPRGERLETEAKIAALKTALTQ

SEQ ID NO: 3347 - DNA, 1251 bp, Campylobacter jejuni
  CDS (1)..(1251)
atgtttgttaaaaatgtaaatttttattacagacaaatccttgaaaaatttgaaaattcttattttgcagaggatttgactaaggtaattatagggattgattgtgattatttagatgctaatgaattatcctttagcgagtttaaggcaaaatattatgaagctttaagcaagaataaaatttgcgactttgctggattttttggagtttttagtgcaaattttgtatctttgtttgaaaaaattccactttcttctaagaaaaattatgattttcctttatttttatttgccaatgctaaggcttatttgatttatgagaaaaatagcaagatgttttttaaatttggtgcttcaaaatattttgaatatttaaaagatgatattgaaccaatgaaaaagaaacaaaaaaatgattttgaaattttaaattctttagaagatgaaaaaaatgattttttaaaaatgtgcgaaaaagccaaagaatatcttttaagtggagatatttttcaagtggtcttaagtaagcaactttgtatcaaacatcaagtaaatgcttttgattattatgagagtttaagtgctttaaatccaagcgcttatatgttttattttccaagtaaatatggtgttgttttgggttcttctccagagtttttattgaaaattaaaaaaagagagatttatttagcccctattgctggaactagaaatttggaaaataactgtgatcttttagctttagaaaaagatcttttaagcgatgaaaaagaacttagtgaacataagatgcttgtagatttagcaagaaatgatgcttctaaatttggcactcaaacaagagtggaaaatcttttttctattattaaaaataaatttgtaatgcacatagtgagtgaagtgtatgccaatatgaaagaagatgcgagtatttttgatgtgattgaagcagtttttccagcgggaactttaagcggagctcctaaaataagagctttagagatcactagcgagcttgaagattgcgatcgtggaatttatggtggtgcggtaggatttttaaattttaacgaagacataactttagcgattttaatccgttgcgctttttttactcaagataaggcttatttggcaagtggggcgggtattgttttgcaaagtgagagtcaaaaagaatatgcagaaatttgtgctaaacgcaaggcgcttttggtagcttttgaaaatttaaaaaaggaaaatcaatga

SEQ ID NO: 3348 - protein, 416 aa, Campylobacter jejuni
MFVKNVNFYYRQILEKFENSYFAEDLTKVIIGIDCDYLDANELSFSEFKAKYYEALSKNKICDFAGFFGVFSANFVSLFEKIPLSSKKNYDFPLFLFANAKAYLIYEKNSKMFFKFGASKYFEYLKDDIEPMKKKQKNDFEILNSLEDEKNDFLKMCEKAKEYLLSGDIFQVVLSKQLCIKHQVNAFDYYESLSALNPSAYMFYFPSKYGVVLGSSPEFLLKIKKREIYLAPIAGTRNLENNCDLLALEKDLLSDEKELSEHKMLVDLARNDASKFGTQTRVENLFSIIKNKFVMHIVSEVYANMKEDASIFDVIEAVFPAGTLSGAPKIRALEITSELEDCDRGIYGGAVGFLNFNEDITLAILIRCAFFTQDKAYLASGAGIVLQSESQKEYAEICAKRKALLVAFENLKKENQ

SEQ ID NO: 3349 - DNA, 1266 bp, Sulfolobus solfataricus
  CDS (1)..(1266)
atggaagttcatccaataagtgaatttgcctcaccattcgaagtatttaagtgtatagagagagactttaaagtagctggattactagagagcataggtggccctcaatataaggcgagatatagtgtgatagcttggtcaactaatgggtatctgaaaattcatgacgaccctgtaaatattcttaatggttatttgaaagatttgaaattagcagatataccggggttattcaaaggaggtatgataggatacataagttacgatgcagtaagattttgggagaaaataagagacttaaagccagcagctgaagattggccttatgcggaattctttactccagataacatcataatctatgatcataatgagggcaaagtatacgttaatgctgatttaagctctgtagggggatgtggtgatataggggagtttaaagtaagcttttacgatgagtctcttaataagaacagttatgagaggattgtttccgaatcattagagtatataagatctggttacatatttcaagttgtattgtctagattttacagatatatatttagtggagatccattaagaatatattataatctaaggagaataaatccatccccttacatgttttatctcaaatttgatgaaaaatacttaataggatctagtccggaattactgttcagagttcaagataatatagttgaaacctatcccatagctggcactagacctaggggcgctgatcaagaggaagatcttaaattggaattggaattaatgaactcagaaaaggataaagctgagcacttaatgctggttgatttggctagaaatgatctaggtaaagtatgcgttccagggactgtaaaagtaccagaattaatgtatgtcgagaagtatagccatgtccaacacatagtatcaaaagtgattgggaccttaaagaagaagtataacgcgttaaacgttttatcggctacattcccagcaggtacagtaagcggagcacctaaaccaatggcaatgaatataattgaaacgttagaggagtataaaaggggtccttatgcaggtgctgtaggttttatctcagctgatggtaacgcagagttcgcaatagcgataagaactgcatttctaaacaaagagttattacgaatacatgccggtgctggtatagtatatgactctaatccagaatctgaatatttcgaaactgaacataaactaaaagcactaaaaacagcaataggggtgaggtaa

SEQ ID NO: 3350 - protein, 421 aa, Sulfolobus solfataricus
MEVHPISEFASPFEVFKCIERDFKVAGLLESIGGPQYKARYSVIAWSTNGYLKIHDDPVNILNGYLKDLKLADIPGLFKGGMIGYISYDAVRFWEKIRDLKPAAEDWPYAEFFTPDNIIIYDHNEGKVYVNADLSSVGGCGDIGEFKVSFYDESLNKNSYERIVSESLEYIRSGYIFQVVLSRFYRYIFSGDPLRIYYNLRRINPSPYMFYLKFDEKYLIGSSPELLFRVQDNIVETYPIAGTRPRGADQEEDLKLELELMNSEKDKAEHLMLVDLARNDLGKVCVPGTVKVPELMYVEKYSHVQHIVSKVIGTLKKKYNALNVLSATFPAGTVSGAPKPMAMNIIETLEEYKRGPYAGAVGFISADGNAEFAIAIRTAFLNKELLRIHAGAGIVYDSNPESEYFETEHKLKALKTAIGVR

SEQ ID NO: 3351 - DNA, 1548 bp, Buchnera aphidicola
  CDS (1)..(1548)
atgtcaaaaaatccatatgaaattgaaataattcaaaaaacagctccttatcatcccgatcctactatgatatttaatcatctttgcgcatcccgaccaggaacattgttactagaaacagctgaggtaaacaaaaaaagagatctagaaagcataatgattattgatagtgcaatgcgtatttcttcagaggacaattcagttaaattaacacccttatctataaatgggacagacattttatcaactttaaaaaaaacgatacctaaaaaaatagaaatatacgaaaaaaataacagtacaatccttgtttttccgaaaattaaaaaaaatattgacgaagataaaaaacttttttccctgtcagtttttgatgcttttagattgatgattagaatatttgaaaatcgagaaaaaaaatcaaaagcgatgttttttggtggattattttcttatgatttaatttcagtttttgaatcattacctaagttaaagggcaatcaaaaatgttcaaatttttgtttttacttagcagaaacattactggttttagatcaccaaaaaaaaacgtgtttaattcaaaatagtttattcagtaaaaatttgaaagaaagaaaaagaattaaaaaaagatcagtagaaatagagagaaaactcaatgaaaagttaaagttaataccaaaaacaaaaattaaagatatcaatttaacttcgaatatgaataattttgaatatggtactataataaaaaaattacaaaaattaattcaaaaaggtgaaatttttcaagttgtaccatcccgaaaattctatctaccatgtccgaacccgttatctgcttatcaaaaactaaaaaaaagcaatccgagcccctatatgttttttatgcaagatcaagattttacattatttggagcatcgccagaaagttcattaaaatacgatgaaaaaacaagaaaaattgaactttatcccattgcaggaaccagacctagggggaaaactgaagacggcaatttagatttagatttagacagcagaatagaacttgagatgagaactaaccataaagaattagcagaacatttaatgcttgttgatctagcacgcaatgatcttgcgcgtatctgcaaaccgggttcgagatatgtttcagatttagtaagggtagatagatattctcacgtaatgcaccttgtatcaagggtgataggtgaacttagagagggattagatgcattgcatgcatacgcttcgtgcatgaacatggggacgttaacaggtgcacccaaggtacgagcaatgcaattgattgctgaacatgagggtgaaaaaagagggagttatggtggcgctataggctattttaccgatttaggtaatttggatacctgtatcacaatacgttcagcgtatgtggaaaaacaagttgccacaattcaagcaggtgctggtattgtttacaattcgataccagaaaatgaagtaaatgaaagtttaaataaagcccaagcagtaattaacgctattaaaaacgcacattattaa

SEQ ID NO: 3352 - protein, 515 aa, Buchnera aphidicola
MSKNPYEIEIIQKTAPYHPDPTMIFNHLCASRPGTLLLETAEVNKKRDLESIMIIDSAMRISSEDNSVKLTPLSINGTDILSTLKKTIPKKIEIYEKNNSTILVFPKIKKNIDEDKKLFSLSVFDAFRLMIRIFENREKKSKAMFFGGLFSYDLISVFESLPKLKGNQKCSNFCFYLAETLLVLDHQKKTCLIQNSLFSKNLKERKRIKKRSVEIERKLNEKLKLIPKTKIKDINLTSNMNNFEYGTIIKKLQKLIQKGEIFQVVPSRKFYLPCPNPLSAYQKLKKSNPSPYMFFMQDQDFTLFGASPESSLKYDEKTRKIELYPIAGTRPRGKTEDGNLDLDLDSRIELEMRTNHKELAEHLMLVDLARNDLARICKPGSRYVSDLVRVDRYSHVMHLVSRVIGELREGLDALHAYASCMNMGTLTGAPKVRAMQLIAEHEGEKRGSYGGAIGYFTDLGNLDTCITIRSAYVEKQVATIQAGAGIVYNSIPENEVNESLNKAQAVINAIKNAHY

SEQ ID NO: 3353 - DNA, 2172 bp, Streptomyces griseus
  CDS (1)..(2172)
atgcgcacccttctcgtcgacaactacgactcgttcacctacaacctcttccactacctctcccgggccaacggccgggaacccgaggtcatccgcaacgacgacccggcctggcggccgggtctgctcgacgcgttcgacaacgtggtgctctccccggggccgggcaccccgcaccgcccggccgacttcggcctgtgcgcccggatcgccgaggagggccggctgccggtgctcggcgtctgcctgggccaccagggcatggccctcgcccacggcgcccgggtgggccgggcccccgagccccgtcacggccgcacctcggcggtacggcacgacggcaccgggctcttcgaggggctgccgcagccgctggaggtggtgcggtaccactccctcgcggtgacggaactgccgccggagctggaggccaccgcctggtcggaggacggggtcctgatggcgctgcgccaccgcacgctgccgctgtggggagtgcagttccaccccgagtcgatcggcacccaggacggccaccggctgctggccaacttccgcgacctcaccgagcgccacggccgaacgcgccacggcggccgggcgggacacggcacgctcccgccccccgcgcccgcccgggagacgaaggccaccaccggcaccccacggcggctccgggtcatcgcaaagtcgctgcccacgcgctgggacgccgaggtcgccttcgactcgctgttccgcaccggcgaccaccccttctggctcgacagcagccgtcccgggggcgagctgggccagctctccatgatgggcgacgcctcaggtcccctcgcccggaccgccaaggccgacgtgcacgccggaaccgtcacggtgagagccgacggcgccagcagcacggtcgagagcgccttcctgacctggctggagaacgacctggcggggctgcgcaccgaggtgcccgaacttcccttcgcgttcgcgctcggctgggtcggctgcctgggctacgagttgaaggccgagtgcgacggcgacgccgcgcaccgctcgcccgatcccgacgccgtgctggtcttcgccgaccgggccctggtgctggaccaccgcacccgcaccacctacctgctggcgctggtggaggacgacgccgaggccgaggcgcgcgcctggctcgcggcggcctccgccaccctggacgccgtcgccgggcgggagcccgagccgtgccccgaggcgcccgtgtgcacgacgggtccggtggagctgcgccacgaccgggacggctacctgaagctgatcgacgtctgccagcaggagatagccgccggggagacctacgaggtctgcctgaccaacatggccgaggcggacaccgacctcaccccgtgggcggcctaccgcgcgctgcgccgggtgagccccgccccgttcgccgcgttcctggacttcggtcccatggccgtgctcagcagctctccggagcggttcctgcgcatcgaccggcacgggcggatggagtccaagccgatcaagggcacgcggccacgcggcgccaccccgcaggaggacgccgcgctcgtacgtgccctggccacctgcgagaaggaccgcgccgagaacctgatgatcgtcgacctggtccgccacgacctggggcggtgcgccgaggtcggctcggtcgtcgccgacccggtgttccaggtcgagacgtacgcgaccgtgcaccagctggtcagtaccgtcacggcgcggctgcgcgaggacagcagcccggtggcggcggtccgggcggccttccccggcgggtcgatgaccggggcgccgaagatccgcaccatgcagatcatcgaccggctggaaggcgggccgcgcggtgtctactcgggcgccatcggctacttctccctcaccggcgcggtagacctgtccatcgtgatccgcacggtggtgctcagcggcggcaggctgcgctacggcgtcggcggcgccgtcatcgcgctctccgacccggccgacgagttcgaggagacggcggtcaaggccgccccgctgctgcgtctcctcgacaccgccttcccgggccgtgagcgtcccggcaaggacctcgacggtgaacccgacgacggcacggacgcgggtgctccgaaggacctcgtcctgcccgggtga

SEQ ID NO: 3354 - protein, 723 aa, Streptomyces griseus
MRTLLVDNYDSFTYNLFHYLSRANGREPEVIRNDDPAWRPGLLDAFDNVVLSPGPGTPHRPADFGLCARIAEEGRLPVLGVCLGHQGMALAHGARVGRAPEPRHGRTSAVRHDGTGLFEGLPQPLEVVRYHSLAVTELPPELEATAWSEDGVLMALRHRTLPLWGVQFHPESIGTQDGHRLLANFRDLTERHGRTRHGGRAGHGTLPPPAPARETKATTGTPRRLRVIAKSLPTRWDAEVAFDSLFRTGDHPFWLDSSRPGGELGQLSMMGDASGPLARTAKADVHAGTVTVRADGASSTVESAFLTWLENDLAGLRTEVPELPFAFALGWVGCLGYELKAECDGDAAHRSPDPDAVLVFADRALVLDHRTRTTYLLALVEDDAEAEARAWLAAASATLDAVAGREPEPCPEAPVCTTGPVELRHDRDGYLKLIDVCQQEIAAGETYEVCLTNMAEADTDLTPWAAYRALRRVSPAPFAAFLDFGPMAVLSSSPERFLRIDRHGRMESKPIKGTRPRGATPQEDAALVRALATCEKDRAENLMIVDLVRHDLGRCAEVGSVVADPVFQVETYATVHQLVSTVTARLREDSSPVAAVRAAFPGGSMTGAPKIRTMQIIDRLEGGPRGVYSGAIGYFSLTGAVDLSIVIRTVVLSGGRLRYGVGGAVIALSDPADEFEETAVKAAPLLRLLDTAFPGRERPGKDLDGEPDDGTDAGAPKDLVLPG

SEQ ID NO: 3355 - DNA, 2712 bp, Streptomyces lividans
  CDS (119)..(1546)
gagctccgcaatcggtgccttgacccgctaggctccgctactagctccgcgcttgcacttgacggcaatcgtggactgcgtagagtggcatcgtggaccgtggcgagtacgggaggaaatggcgagctgccggatgggcgcgcggtcggcgctggagccgtgccaggtggactgcctagacgaggcggcggacgagcggtgcgctgagacgccgaggtgccacgcagagctgctggagagcgtgacgggcgcgtcgcggatgtcgcggtactcgatcatcgtgctggacccgatcggcacgatccgggcggcagaggcgctgacggcgctggtggacgcggacgacgtgatcttcaaggacgaggacccgctgaagggcatccggtcggtgttcgagctgggcgacctggacccgacgaaccacgaggaaatcgagttccagggcggcgcgctgggccggttcgcgtacgacatcgcgcggcgactggaggcgatccgggacctgggcgaccgggagctggcaggcccggacgcgggcacggcgctgtacgacctgatcctgtacgaccaccaggacgacgtgatctggattctggtacccaacgaggcgggcgagcaggacccaagcgaggacttccgggacctggtgaacgcgtggtcgtacgacgacgagttcgacatcggcgcggagttcggcgcgaactacacggacgatgcgtacgcggacggcgtggaccggctgaaggactacctgggctcgggcgacatgtaccaggtgaacctggcgcagcggcgggtgggcatgatcagcgcggaggactaccagctgtacatccgactgcgggacgcgaacccggcgccgtacatggcgtacctggacatcgacgagggactgctggtggcgagcccggagcggatcatcctggacgaggcgtcggacctggacacgcggccgatcgcgggcacgctgcgaggccggccgcgggcgggcggagacgacgaggacgacggacgggcgatcgacctgctgcgggtggacaaggaccgggcggagcggatcatgatcgtggacctggaccggaacgacatcgcgcgggtgggcgtgggcggaagcgtgaaggtgcgggagatcatgggcctggagcggtacagcggcgtgatgcacctggtgagccaggtgacgggcgacctgcaggaagcgatcgaggcggtggacctgatccgggcgggcttcccgggaggcacgctgacgggcgcgccgaaggtgcggacgatggagatcatagacgagctggagccgcagcggcgagcggcctactgcggcagcatcggctacatcgcgtacaagggcaacatcgacttcaagatcgcgatcccgacgctgtacgcactggcgggccagctgttctgccaggcgggcggaggcgtggtgggagacagtgtgccggacggcgagtaccgggagagcttcgagaagggaaacgcgctgatccggggcctggagatccggcatggcgcggtggtggcgcagtcggaggacaagtgaggtaaatgacgagcgtcctgatgatcgacaactgcgacagctttacgtacaacctggtggaccagttcagcccgcacggcacgatcgtcatcgtgaagcggaaccacccgttctacgacggcgagatcgaagcaatcatggcgctgacgagcatctgcatcacgccgggaccgtgctacccggcagaggcggcactgaactcgtgcagcatcatcggacacctcgcgggccgcatcccgatcctgggcatctgccttggacagcaggcgttgggacaggcgcgcggcggcttggtcatcttcgcgcacggaaagttgtccaacatcgagcacaacggaatcttcgcgccactgttcaacccgccgcgggcgctgccggcgggccgataccactcgctggtcgtcgagccggcgcgcatcgaggtcacgggccagtgcaaccagctggaggtcgtcccgcaggagatcatggcgatccggcaccgggacctgccggtggagggcgtgcagttccacccggagtcgatcctgtcgtcgaacggcgcggcgatcctggcgaacttgatccaccggccgtgccactgaccgtgcaagctgacttagccgtagcctagcgatgccatatggcacggacgtagcagggcatgccaggactgcacctgaacgcgtcgatccatggccagcatcagccgtgcggacgcctgcatcagcggcggatggcggtagcgctcggcacctcgaagcattccgcggttggcacagccaagggcggaatgcttccggtacgcaccgctgcggagctagctcgtagcgctccgaggtcgcctggacgtcgagttgctcaggcggacctgtcgtgccgatgcaggcgtgcggcaccgtgccgtgcgtaccagaccgtgacgggcagcgcagccgatgcacggcgtgcgatgcatgcagcgctgccggtgccatgcggtctgcgatgctgacggcggtggcggtgacggtggcgtcgtggtcggtccgacatgcggtgcagtcgtatgcgtgacgtgcacgtgcaccggtgcggcgacccgtgactgcatgcgtgctacgtgacgggctgtgcgtggacgtcccgtgacgtgacgtggcgagcggtgcgacgcgacccgcgtgcacgaccggcactgcggatcc

SEQ ID NO: 3356 - protein, 475 aa, Streptomyces lividans
MASCRMGARSALEPCQVDCLDEAADERCAETPRCHAELLESVTGASRMSRYSIIVLDPIGTIRAAEALTALVDADDVIFKDEDPLKGIRSVFELGDLDPTNHEEIEFQGGALGRFAYDIARRLEAIRDLGDRELAGPDAGTALYDLILYDHQDDVIWILVPNEAGEQDPSEDFRDLVNAWSYDDEFDIGAEFGANYTDDAYADGVDRLKDYLGSGDMYQVNLAQRRVGMISAEDYQLYIRLRDANPAPYMAYLDIDEGLLVASPERIILDEASDLDTRPIAGTLRGRPRAGGDDEDDGRAIDLLRVDKDRAERIMIVDLDRNDIARVGVGGSVKVREIMGLERYSGVMHLVSQVTGDLQEAIEAVDLIRAGFPGGTLTGAPKVRTMEIIDELEPQRRAAYCGSIGYIAYKGNIDFKIAIPTLYALAGQLFCQAGGGVVGDSVPDGEYRESFEKGNALIRGLEIRHGAVVAQSEDK

SEQ ID NO: 3357 - DNA, 2115 bp, Clostridium thermocellum
  CDS (361)..(1845)
gttcaatgtcaaggattattgcgaaacagctcattaaaaagattattgttacggtgtcagtgaaagctgtatatttggcacaaaacatcatttattatatatcatttgaaaaagtttcaaataaaatttataacatttatgaaatttaacttgcatttttcgtattttccatgctacaataatcttaaagataagaataagttaagaattggatgagatgagtttgagtttgaagagaagagatgagaagagacgagcgtgaataaatgtatttgcgccatatcgccggattcttccatccggcgtttttagtatggtcatctctcatgtcttccttcttagaaataaggaggagtcggaatgttttatccaaccctggacgaagtcaaaataatggcaaaagattataatatcatacctgtcacaatggaagtatatgccgacatggaaacccctataagcctttttaaaaggtttgaggaaagcagttgctgtttccttttggagagcgttgagggcggtgaaaaatgggcccggtactccatcatcggaaaaaatccgtttcttgttgtggaaagctacaaaaacaaaaccattataagggagaggaacggttctcaaagggaagttgaaggaaatcctgttgaaataataaagggcattatggggaagtttaaaggtgccaaccttccgaatcttccgagattcaacgggggagcggtgggatattttgggtatgacctcatacgacactatgaaaatcttcccaatgtccccgaagatgacatgggtcttccggaatgccatttcatgtttaccgacgaagtgctggtgtatgaccatctaaagcagaaaattcatataattgttaatttgcatgtcaacggcaacattgaacgggcctatataagcgcggttgaccggataaaaaccatacacagggagattcttgacaccaggtggaaaaccgctgacaactctgttctaagttacaataaaaagaaaaatgaacttgcggtaaccagcaatatttcaaaagaggatttctgccggaatgtgttgaaggcaaagcagtatataagggacggagacatattccaggtggttttgtcgcaacgcttgtgtgttgagacaaatgaaaatccttttaacatataccgcgccttaagggttataaatccttctccatatatgtattatcttaaatttggcggctacagaataataggttcttcccccgagatgctggtcagggttgaaaatggaattgtggaaacctgtccgattgcaggaacgcgaaagagaggcaggacaaaagaagaggatgaggctttggaaaaagagcttctttccgatgagaaagaaatagccgagcatgtgatgctggtggacctgggcagaaacgatatcggaagagtatcgaaatttggtaccgtagcggtaaagaaccttatgcacattgagagatattcccatgtaatgcatgtggtaacaaacgtacagggagagattcgggaggataagactccttttgacgcccttatgtccattcttcctgccggtaccctttccggagcgccaaaggtcagggctatggagataatagacgagcttgagaccgtaaaaagaggtccctacggcggtgcgatcgggtatcttagctttaacggcaatctcgacagctgcataaccataaggacaattatattaaaggacggaaaggcttatgttcaggccggagcgggcatagtcgcggattcggtcccggaaagggagtatgaagagtgctacaacaaagcaatggcacttcttaaagccatagaagaggcaggtgaaataagatgatagaaaacatattgattattgataattatgattcttttacctacaatttgtaccagtatgtcggggaaatcagtcccaatattgaggtctacagaaatgacaaaataactttggaaaagatagaagaaatgaatcccacgcatataataatttctcccggccccggttttccgaaagatgcaggaatatgcatagaagctataagaaagttcggcaggtatatacccattctgggggtatgccttggacatcaggcaattggagaagctt

SEQ ID NO: 3358 - protein, 494 aa, Clostridium thermocellum
MFYPTLDEVKIMAKDYNIIPVTMEVYADMETPISLFKRFEESSCCFLLESVEGGEKWARYSIIGKNPFLVVESYKNKTIIRERNGSQREVEGNPVEIIKGIMGKFKGANLPNLPRFNGGAVGYFGYDLIRHYENLPNVPEDDMGLPECHFMFTDEVLVYDHLKQKIHIIVNLHVNGNIERAYISAVDRIKTIHREILDTRWKTADNSVLSYNKKKNELAVTSNISKEDFCRNVLKAKQYIRDGDIFQVVLSQRLCVETNENPFNIYRALRVINPSPYMYYLKFGGYRIIGSSPEMLVRVENGIVETCPIAGTRKRGRTKEEDEALEKELLSDEKEIAEHVMLVDLGRNDIGRVSKFGTVAVKNLMHIERYSHVMHVVTNVQGEIREDKTPFDALMSILPAGTLSGAPKVRAMEIIDELETVKRGPYGGAIGYLSFNGNLDSCITIRTIILKDGKAYVQAGAGIVADSVPEREYEECYNKAMALLKAIEEAGEIR

SEQ ID NO: 3359 - DNA, 1548 bp, Bacillus subtilis
  CDS (1)..(1548)
atgaatttccaatcaaacatttccgcatttttagaggacagcttgtcccaccacacgataccgattgtggagaccttcacagtcgatacactgacacccattcaaatgatagagaagcttgacagggagattacgtatcttcttgaaagcaaggacgatacatccacttggtccagatattcgtttatcggcctgaatccatttctcacaattaaagaagagcagggccgtttttcggccgctgatcaggacagcaaatctctttacacaggaaatgaactaaaagaagtgctgaactggatgaataccacatacaaaatcaaaacacctgagcttggcattccttttgtcggcggagctgtcgggtacttaagctatgatatgatcccgctgattgagccttctgttccttcgcataccaaagaaacagacatggaaaagtgtatgctgtttgtttgccggacattaattgcgtatgatcatgaaaccaaaaacgtccactttatccaatatgcaaggctcactggagaggaaacaaaaaacgaaaaaatggatgtattccatcaaaatcatctggagcttcaaaatctcattgaaaaaatgatggaccaaaaaaacataaaagagctgtttctttctgctgattcatacaagacacccagctttgagacagtatcttctaattatgaaaaatcggcttttatggctgatgtagaaaaaatcaaaagctatataaaagcaggcgatatcttccagggtgttttatcacaaaaatttgaggtgccgataaaagcagatgcttttgagttataccgagtgcttaggatcgtcaatccttcgccgtatatgtattatatgaaactgctagacagagaaatagtcggcagctctccggaacggttaatacacgttcaagacgggcacttagaaatccatccgattgccggtacgagaaaacgcggtgcagacaaagctgaagatgagagactgaaggttgagctcatgaaggatgaaaaagaaaaagcggagcattacatgctcgttgatcttgcccgaaacgatatcggcagagtagcagagtatggttctgtttctgtgccggagttcacaaaaattgtttccttttcacatgtcatgcacattatctcggtggttacaggccgattgaaaaaaggggttcatcctgtcgatgcactgatgtctgctttcccggcggggactttaacaggcgcacccaaaatccgtgccatgcagcttttgcaagaactcgagccaacaccgagagagacatacggagggtgtattgcctacattgggtttgacgggaatatcgactcttgtattacgattcgcacgatgagtgtaaagaacggtgttgcatcgatacaggcaggtgctggcattgttgctgattctgttccggaagccgaatacgaagaaagctgtaataaagccggtgcgctgctgaaaacgattcatattgcagaagacatgtttcatagcaaggaggataaagctgatgaacagatttctacaattgtgcgttga

SEQ ID NO: 3360 - protein, 515 aa, Bacillus subtilis
MNFQSNISAFLEDSLSHHTIPIVETFTVDTLTPIQMIEKLDREITYLLESKDDTSTWSRYSFIGLNPFLTIKEEQGRFSAADQDSKSLYTGNELKEVLNWMNTTYKIKTPELGIPFVGGAVGYLSYDMIPLIEPSVPSHTKETDMEKCMLFVCRTLIAYDHETKNVHFIQYARLTGEETKNEKMDVFHQNHLELQNLIEKMMDQKNIKELFLSADSYKTPSFETVSSNYEKSAFMADVEKIKSYIKAGDIFQGVLSQKFEVPIKADAFELYRVLRIVNPSPYMYYMKLLDREIVGSSPERLIHVQDGHLEIHPIAGTRKRGADKAEDERLKVELMKDEKEKAEHYMLVDLARNDIGRVAEYGSVSVPEFTKIVSFSHVMHIISVVTGRLKKGVHPVDALMSAFPAGTLTGAPKIRAMQLLQELEPTPRETYGGCIAYIGFDGNIDSCITIRTMSVKNGVASIQAGAGIVADSVPEAEYEESCNKAGALLKTIHIAEDMFHSKEDKADEQISTIVR

SEQ ID NO: 3361 - DNA, 1524 bp, Saccharomyces cerevisiae
  CDS (1)..(1524)
atgaccgcttccatcaaaattcaaccggatattgactctctaaagcaattacagcagcaaaatgacgatagttccataaatatgtatcccgtgtatgcgtatttgccatcattggatctgactcctcacgtggcatatctaaaattggcacaattgaacaaccctgatagaaaggaatcatttctgttggaaagtgctaagacaaataatgaattagatcgttattcattcataggtatctcgccacgcaagaccatcaaaaccggtcctactgaaggcattgaaacagatcctttggaaattttggaaaaggagatgtctacctttaaagtagccgaaaatgttcctggtttaccgaaattaagtggtggtgctattggttatatttcttatgactgtgttcgttatttcgagccaaaaacaagaaggcctttgaaagatgtcctaagacttccagaggcatatttaatgctttgtgataccattattgcctttgataatgtttttcagagatttcaaatcattcataacattaataccaatgaaacttcgttggaggaaggttaccaagctgcagcacaaataatcactgatatcgtatcaaagctaaccgacgattcctcgccaataccatatccagaacaacctcctattaaattgaatcaaacttttgaatcgaatgtgggcaaggaaggttacgaaaatcacgtctccactttgaagaagcatattaagaaaggtgatattattcaaggtgtgccatcgcaaagagtggcaaggccaacttcgttacatcctttcaatatttacagacatttacgtacagtgaacccatctccttacctgttttatattgattgtttggatttccaaatcattggtgcatctccagaattgttgtgcaaatcggattccaaaaatagagtcattacccatccaattgctggtactgtcaaacgtggggctactactgaagaggatgatgctttagcggaccaattacgtggctcgttaaaagaccgtgcagaacatgttatgctggtagatttagcaagaaacgatattaacagaatttgtgacccattaacaacaagtgtcgataaactgttaactattcaaaaattttctcatgtccaacatctggtttctcaagtcagcggtgttctccgcccagaaaagacaagatttgatgcattcagatcgattttccctgcaggtactgtcagtggtgctccaaaggttagagccatggaattgattgccgaactagaaggagaaaggcgtggggtttatgcaggcgccgtaggtcattggtcatacgacggtaaaacaatggacaattgtatcgctttaaggactatggtctataaagatggcattgcttacttgcaagctggcggtggtattgtttacgattcagatgagtacgatgaatatgtcgaaaccatgaataaaatgatggccaatcacagtactattgtgcaagcagaagaattgtgggccgatatcgtaggatcagcttaa

SEQ ID NO: 3362 - protein, 507 aa, Saccharomyces cerevisiae
MTASIKIQPDIDSLKQLQQQNDDSSINMYPVYAYLPSLDLTPHVAYLKLAQLNNPDRKESFLLESAKTNNELDRYSFIGISPRKTIKTGPTEGIETDPLEILEKEMSTFKVAENVPGLPKLSGGAIGYISYDCVRYFEPKTRRPLKDVLRLPEAYLMLCDTIIAFDNVFQRFQIIHNINTNETSLEEGYQAAAQIITDIVSKLTDDSSPIPYPEQPPIKLNQTFESNVGKEGYENHVSTLKKHIKKGDIIQGVPSQRVARPTSLHPFNIYRHLRTVNPSPYLFYIDCLDFQIIGASPELLCKSDSKNRVITHPIAGTVKRGATTEEDDALADQLRGSLKDRAEHVMLVDLARNDINRICDPLTTSVDKLLTIQKFSHVQHLVSQVSGVLRPEKTRFDAFRSIFPAGTVSGAPKVRAMELIAELEGERRGVYAGAVGHWSYDGKTMDNCIALRTMVYKDGIAYLQAGGGIVYDSDEYDEYVETMNKMMANHSTIVQAEELWADIVGSA

SEQ ID NO: 3363 - DNA, 2340 bp, Thermus aquaticus
  CDS (169)..(1557)
ggatccgggccctggaggggcggcccctttagcccctggacagggcccccgtgtcccgctatcctgaggccatggcccttccctccgccctctggtggcccggctaggccccggggcgggaggcctttccccggggcacaccccggggctttgtttttgggggacggcatggagcggatccgaccttaccgcaaaaccttcctcgcggacctggagaccccggtgaccgcctacctgaagcttgccgagaaggctccggtgagcttccttttggagtcggtggagcgggggcgccaaagccgcttctccatcgtgggggtgggggcgcggcgcaccttccgcctgaaggacggggtcttcacggtgaacggggagcgggtggaaacccgtgatcccttgcgcgccctctacgagagggtctacgcccccttggagcgccaccccgacctcccccccttcttcggcggggtggtgggctacgccgcctacgacctcgtccgctactacgaaaggcttccgagcctcaagcccgacgacctcggcctccccgacctcctcttcgtggagcccgaggtggtggccgtctttgaccacctgaagaacctcctccacctcgtggccccagggagggaccccgaggaggcggaggcccgcctcttttgggcggagaggcggctcaagggccccttgcccggggtgccgggggagagggcgggggggagggcccgcttccaggcggacttttcccgggaggcctacctggaggcggtgaggagggccctggactacatccgggcgggggacatcttccaggtggtcctctccttgaggctctcctcccccctcaccgtccaccccttcgccctctaccgggcgctgaggagcgtgaacccgagcccctacatgggctacctggacctgggggaggtggtcttggtctcggcgagcccggaaagcctcctccgctcggacggccgaagggtggtcacccggcccatcgcgggcacgaggccgagggggaaggacgaggaggaggacaaaaggcttgccgaggagctccttagggacgagaaggaggtcgcggagcacgtgatgcttctggacctctcccgcaacgacatcggccgggtcgccgccttcggcacggtgcgggtcctcgagcccctccacgtggagcactactcccacgtgatgcacctggtctccacggtggagggcatcttggccgaggggaagacccccctggacgccctggccagcgtgctgcccatggggacggtctccggggccccgaagatccgggccatggagatcattgaagaactggagccccaccgccgggggccctacgggggaagcttcggctacctcgcctacgacggggccatggacatggccctcaccctgcgcaccttcgtggtggcgaaggggtggatgcacgtccaggcgggggcggggatcgtggcggactcggtgccggagagggagtacgaggagtgctggaacaaggcgcgggcgctcctcaaggcggtggagatggcggaggcggggctgtgatcccaccccatgccggcaggggcccggtaaggaggcctggtaggcatggctgctaacggagcgaaggggagaaaggttatgagggtcttggtggtggacaactacgacagcttcacctacaacctggtgcagtacctgggggagctcggggcggagcccatcgtgtggcggaacgaccgcttccggctggaggaggtggaggccctggacccggaccggatcctcatcagcccggggccttgcaccccctttgaggcggggctttccgtccccttggtccagcgctacgccccccgctaccccatcctgggggtctgcctcggacaccaggccatcggggcggccttcggggggaaggtggtccccgcccccgtcctcatgcacggcaaggtgagccccatccaccacgacggcaccggggtcttccgggggctagatagccccttccccgccacccgctaccactccctggcggtggtggaggtgccggaggccctcgtggtgaacgcctgggcggaggaggcgggggggcggacggtgatgggcttccgccaccgggactaccccacccacggggtgcagttccacccggaaagctaccttacggaggcgggtaaactcatcctcaagaacttcctggaggacccatggacgcggtgaagaaggccattctgggcgaggttttggaggaagaggaggcctacgaggtcatgcgggccctgatggcgggggaggtctccccggtgcgggcggcggggcttttggtggccttgagcctgaggg

SEQ ID NO: 3364 - protein, 462 aa, Thermus aquaticus
MERIRPYRKTFLADLETPVTAYLKLAEKAPVSFLLESVERGRQSRFSIVGVGARRTFRLKDGVFTVNGERVETRDPLRALYERVYAPLERHPDLPPFFGGVVGYAAYDLVRYYERLPSLKPDDLGLPDLLFVEPEVVAVFDHLKNLLHLVAPGRDPEEAEARLFWAERRLKGPLPGVPGERAGGRARFQADFSREAYLEAVRRALDYIRAGDIFQVVLSLRLSSPLTVHPFALYRALRSVNPSPYMGYLDLGEVVLVSASPESLLRSDGRRVVTRPIAGTRPRGKDEEEDKRLAEELLRDEKEVAEHVMLLDLSRNDIGRVAAFGTVRVLEPLHVEHYSHVMHLVSTVEGILAEGKTPLDALASVLPMGTVSGAPKIRAMEIIEELEPHRRGPYGGSFGYLAYDGAMDMALTLRTFVVAKGWMHVQAGAGIVADSVPEREYEECWNKARALLKAVEMAEAGL

SEQ ID NO: 3365 - DNA, 2558 bp, Bacillus caldotenax
  CDS (312)..(1838)
agatctgccacgtgtatttaaaaggggcggtcgtgctgcgcccggatttgtcgttgacaaaaaaaacagaaatgtaatatagttaaaataacctctttgccccctgagacatcgggggcgttagaagctgagcgagagcagagagcgagcgtagggtagatgagaatgagcgagtttagctgaggtgagcgttttttcattcgccgacatctgcccaaagacggtcgtctttgggcgttttattttccctctcttttttcgcctcataaaccctcattctccgcccgctgatcatgaagggaggagaagtgatgtctgctgatgggctggccgcttttttggcggaagcgaacgaatttcgaaccatcccgattgtgcgcaaatttgtagccgatgtcattgagccgctcggcgtgtttgccaatttgcgcgaggaagccgtgtttttgcttgaaagcaaggatgacgaatcgccgtgggcgcgctattcgttcatcggtgtggcgccgtttttgacgctggagagcgaaaccggcgaaacgttttcggtgaaagacgaaaacgggaacgaacaaatcaccgcaccgacgctgaaagaagcgtttcaatgggtcgagcggacgcttgccgtcaagccgcttgccgagacggtgccgtttacaggcggtgcagttgggtttttaggctacgatttcatttccgccatcgaaaaagtgccgcgccacaaaaaccgcgatgtgcctatgaagacggcctatttcgtgttttgtgaatcgctgtttgcgtttgaccaaaaaaagcgtgagttgctcgtcattcactatattcggttgagcggcaacgaaacggaggaagagaaaatcgaagcgtaccgcgcggccgaacggcgcatggccgatctcgcggcgaaagcggcccgccctcaagccgagcaaccgctcttgccggcggaaagcgaatcggggcggaccgcctcgtttgccaaagcggtgtccaactatgacaaaaaacagtttttgcgcgatgtggaggccgtgaaacggtacatcgcggccggcgatgtgtttcaagcggttctgtcgcagcgcttctgcgtgccggttcaagccggaggctttgccatttatcggctgctccgatacatcaacccgtcgccgtacatgttttatttccagcttgacggtgtggaaattgtcggcagttcgccggaaaaactgattcaagtgcaccgtcggcgcgttgaaatcgatccgattgccggcacacggcggcgcggccgatcgccggaggaagacgagaggctggctgatgagctgtaccacgacccgaaagaacgggctgagcattatatgcttgtcgatttggcgcgcaacgacatcggccgggtcgccaagtacggaacggtcgaggtgccggtgttgcttcagatcggcaagttttcacacgtgatgcacttaatttccaaggtcgtcggtgaactggacgacaacgtccacccgatcgatgcactccttgccgcctttccggctggaacggtgagcggggcgccgaaagtgcgggcgatgcaaattttgcaggaactcgagccgacagcgagggggctgtatgccggagcgattgcctatatcgggtttgatggcaacatcgattcgtgcatcgccatccggacagcggtcgtgaaagacggctatgcctatgtgcaagccggcgccggcattgtcgccgactccgttccggaactggagtggaaagagacgcgcaataaggcgagcgccttgatgaatgcgattgaacaagcggaacgactatttgctaaaggggagagggccgtatgttgaagcagctgctttcgaaatgtgcggaagggaaagcgttgacggaagacgaagcgtatgcggcgatgaatatcatcatgtccggcgaggcgacagacagtcaaatcgcaagtctgttgtccatgctccgcctgcgcggagagacagtcgatgagctcgtcggatttgtgcgggcgatgcgcgaccggatgactgccattgaggctagtgatgatgtcatcgatacgtgcggtacgggcggcgatggggcggcgacattcaacgtttccaccgccgcggcgatcgtcatttcatcgcttggcgtcaaagtcgccaagcacggcaaccgcgctgtttcgtcaaaaagcggcagcgctgatgtgctcgagcggctcggcatcgacattcacacgtcgccgtcggccgccaaacaggcgttggaaacgaaagggctggcgtttttgttcgccccgctctatcacgcggcgatgaaacacgccgccgggccgcggaaggaaatcggtttccgcaccgttttcaacttgatcggcccgctcgccaatccggcgcgctgcaagcggcaagtcgtcggcgtctattcgacctgctacgctgagaaattggcggaggcgatgcgccgcctcggctcggaacatgtgttgtttgtcaccgggcgcgatgggcttgatgaatgcagcatcgctgcagaaacggatgtcgtggagttgaaagacggtgcgatcc

SEQ ID NO: 3366 - protein, 508 aa, Bacillus caldotenax
MSADGLAAFLAEANEFRTIPIVRKFVADVIEPLGVFANLREEAVFLLESKDDESPWARYSFIGVAPFLTLESETGETFSVKDENGNEQITAPTLKEAFQWVERTLAVKPLAETVPFTGGAVGFLGYDFISAIEKVPRHKNRDVPMKTAYFVFCESLFAFDQKKRELLVIHYIRLSGNETEEEKIEAYRAAERRMADLAAKAARPQAEQPLLPAESESGRTASFAKAVSNYDKKQFLRDVEAVKRYIAAGDVFQAVLSQRFCVPVQAGGFAIYRLLRYINPSPYMFYFQLDGVEIVGSSPEKLIQVHRRRVEIDPIAGTRRRGRSPEEDERLADELYHDPKERAEHYMLVDLARNDIGRVAKYGTVEVPVLLQIGKFSHVMHLISKVVGELDDNVHPIDALLAAFPAGTVSGAPKVRAMQILQELEPTARGLYAGAIAYIGFDGNIDSCIAIRTAVVKDGYAYVQAGAGIVADSVPELEWKETRNKASALMNAIEQAERLFAKGERAVC

SEQ ID NO: 3367 - DNA, 2068 bp, Arabidopsis thaliana (mouse-ear cress)
  CDS (29)..(1894)
aagacttaaaatcaacgagctcacggggatgtcggccgtttcaatctccgccgtcaaatctgattttttcaccgtcgaagccatagccgttacacaccatcggacgccgcatccaccacatttcccttcgctccggtttccactatcgctcaagtccccgccggctacttctcttaaccttgtggctggatcaaaactcctccacttctcgcgtcgtcttccttctatcaaatgctcatatactccgtcgttagatttatcggaggaacagttcacaaaatttaaaaaagcatcggaaaagggaaacttagttcctctattccgatgtgtattctcggatcatttgactccgatacttgcttaccgatgtttggtgaaagaagatgatagagatgctcctagcttcttgttcgagtctgtggagcctggttcgcaatcgtccaacatcggtaggtatagtgtagttggagctcagcctacaatagaaatcgttgcaaagggaaatgtagttactgtgatggaccatggagctagtcttaggacagaggaggaagtggatgatccaatgatggttcctcagaaaatcatggaggaatggaatccacaaggcattgatgaattgcctgaagctttctgcggtggttgggttggatacttttcatatgacactgtacgttatgttgagaagaagaagctgcctttttctaatgctccagaggatgataggagtcttcctgatgttaatttgggtctttatgatgatgtgatcgtgtttgatcatgttgagaagaaagcatatgtgatccactgggtgcggatagataaggatcgttctgttgaagaaaatttccgtgaaggaatgaatcggttggaatctctaacctctagaattcaagaccaaaaaccccccaagatgcctactggtttcataaaactacgcactcagctcttcggtccgaaattggagaaatcaactatgacgagtgaggcatacaaggaggcagtggtggaagccaaagaacatatcttggctggggacatctttcagatagttcttagtcagagatttgaaaggcggacatttgcggacccatttgagatatatagagctcttaggattgtaaatccaagtccctacatggcctatttgcaggttagaggatgcatattagttgcatcaagtccagagatattgttacgttcaaaaaataggaaaattaccaatcgcccccttgctggaactgtcagaagagggaagacacccaaagaagatctaatgctggaaaaagagctcttaagcgatgaaaaacaatgcgcagaacatattatgcttgttgatttgggaaggaacgatgttggcaaggtttcaaagcctggttctgtggaggtcaagaagctcaaggatatagaatggttttcacatgtcatgcacattagctccacggtagtaggtgaattgctcgatcatctaacaagctgggacgctcttagagctgtacttcccgttggaaccgtgagcggagccccaaaggtaaaagccatggagctgatagatgaacttgaagtaacaaggcgtggtccttacagtggaggctttggaggcatttcgtttaatggagacatggacattgccttagctctcagaacaatggtcttcccaacaaatacccgttatgacacattgtactcatacaagcatcctcagagacgtagagaatggattgctcatattcaagctggagctgggattgttgcagacagtaaccctgatgatgaacatagagagtgtgagaacaaagcagcggctttagcccgagccatcgatcttgctgagtcctcctttcttgaggcacctgagtttactactatcacacctcacatcaacaatatctgagcataagcattctttatttctttacttttgctttcagcattactcactccacatagctgtttgatttgcgagattggctcttttaagttttagaatttaggacttctgtccgaggtttgaggtctgtcggaccaaaatttggtagcaaatatttacaaataatatcatatgatc

SEQ ID NO: 3368 - protein, 621 aa, Arabidopsis thaliana (mouse-ear cress)
MSAVSISAVKSDFFTVEAIAVTHHRTPHPPHFPSLRFPLSLKSPPATSLNLVAGSKLLHFSRRLPSIKCSYTPSLDLSEEQFTKFKKASEKGNLVPLFRCVFSDHLTPILAYRCLVKEDDRDAPSFLFESVEPGSQSSNIGRYSVVGAQPTIEIVAKGNVVTVMDHGASLRTEEEVDDPMMVPQKIMEEWNPQGIDELPEAFCGGWVGYFSYDTVRYVEKKKLPFSNAPEDDRSLPDVNLGLYDDVIVFDHVEKKAYVIHWVRIDKDRSVEENFREGMNRLESLTSRIQDQKPPKMPTGFIKLRTQLFGPKLEKSTMTSEAYKEAVVEAKEHILAGDIFQIVLSQRFERRTFADPFEIYRALRIVNPSPYMAYLQVRGCILVASSPEILLRSKNRKITNRPLAGTVRRGKTPKEDLMLEKELLSDEKQCAEHIMLVDLGRNDVGKVSKPGSVEVKKLKDIEWFSHVMHISSTVVGELLDHLTSWDALRAVLPVGTVSGAPKVKAMELIDELEVTRRGPYSGGFGGISFNGDMDIALALRTMVFPTNTRYDTLYSYKHPQRRREWIAHIQAGAGIVADSNPDDEHRECENKAAALARAIDLAESSFLEAPEFTTITPHINNI

SEQ ID NO: 3369 - DNA, 1371 bp, Lactococcus lactis subsp. lactis
  CDS (1)..(1371)
atgagaaaaattaaagaaatttcagcagacaccatgaccccgatttcggtttatcttcgcctgaaagggaaaaataaagtgattttagaatccattcccagagaaaatgaccaatcacgtttttcaattattgcgttgaatcctgtgaagcacatcaaatttactgacggaattttaagcgtaaatgacgaaatcattagcgatgaaaatccaatggaatttctggaaaaattagtttgtcagccagaaagtactgacgaaaatttagacttgccttttacaagtggagcgattggatatgctggatttgatacctatggtatttttgaaggcattcaacctgaactgaaagattcgattggaacaccagatatgtattttatgttatacgaatcagctctaatttttgaccacaaacgagaaaaactgatttttattgaagacaatacttacagtcagcgttcagaaaaagagttacaaaacgcgctgtacagaaatattgagtcattatctttactgacagaagcagaaaatgaactgacagaattaagtaaactgaatttcgtcagcaatatgtctcaagaactttttgaagaaaaagttgctaaagcaaaggaacttatcagaaatggtgacatgttccaagttgttttatcacaacgtttaacagccgattttactgacaacccttttaattattacagaaagcttcgggttgaaaatccgtcatcgtatatgtactttatggaattcgataattttcatgtcattggcagctcaccagagcgtttggttgcagttcatggaaatcaagtttcaaccaatccaattgccggaacaaggaaacgcgggcaaactgaatttgaagaccaagctcttattgaggatttagaaagtgatcccaaagaagtcgctgaacacaaaatgcttgttgatttaggacgaaatgatattggtaaaatttccaaatatggttcaatcgaagttcctgttttcatgaaagttgagaaatatcgctacgtcatgcatattacaagtgaagtgaccggcgagcttcgtcctgaatttacagctatggatgccttacgcgccacattgccagcggggacgctatcaggagcaccgaagcatcgagcctaccaaagaatttatgaatttgaaacgcaaaaacgaggaatttatggtggagctatcggttatctaacgaaaaatggaaattgcgattttgcaattgccattcggacaatggtcttgaaagacaagaaagcacatgttcaagcaggagccggaattgtttacgattcagtacccgaacatgaatatcaagaaaccttaaacaaagcccaaggcttattgaaagttggtcaataa

SEQ ID NO: 3370 - protein, 456 aa, Lactococcus lactis subsp. lactis
MRKIKEISADTMTPISVYLRLKGKNKVILESIPRENDQSRFSIIALNPVKHIKFTDGILSVNDEIISDENPMEFLEKLVCQPESTDENLDLPFTSGAIGYAGFDTYGIFEGIQPELKDSIGTPDMYFMLYESALIFDHKREKLIFIEDNTYSQRSEKELQNALYRNIESLSLLTEAENELTELSKLNFVSNMSQELFEEKVAKAKELIRNGDMFQVVLSQRLTADFTDNPFNYYRKLRVENPSSYMYFMEFDNFHVIGSSPERLVAVHGNQVSTNPIAGTRKRGQTEFEDQALIEDLESDPKEVAEHKMLVDLGRNDIGKISKYGSIEVPVFMKVEKYRYVMHITSEVTGELRPEFTAMDALRATLPAGTLSGAPKHRAYQRIYEFETQKRGIYGGAIGYLTKNGNCDFAIAIRTMVLKDKKAHVQAGAGIVYDSVPEHEYQETLNKAQGLLKVGQ

SEQ ID NO: 3371 - DNA, 1527 bp, Synechocystis sp
  CDS (1)..(1527)
atgatttcccctgggttttctcacttcactgaactcgcccaacaaggcaattttattccggtgtatcaggaatgggtggcggatttagaaacgccagtttctgcttggtacaaagtttgctctagccaaccctacaattttctcctggagtcggtggaagggggagagagtattggtcgctatagttttctcggttgcgaccccatgtgggtgctagaagccaggggcgacgaaactacccaagttttacgcaatgggcaaacggaaacctttcggggtaatcccctcgatattttgtcccaatgtttggaatcaatccgtccggtgaatttaccccaactacctccgggcattggtgggctgtttggggtttggggttatgagctgattcgttggatggaacccagggttcctgtgtatgaaccccagccggaagatccacccgatggcatttggatgcaggtggaccatctcctcattttcgaccaggtcaaacgcaaaatttgggcgattgcctttgcggatttgcggggggaaaatgttgatttggaaactgcctatcgcaatgcttgtcaacgggtgacgaaattagtcctgcaattacaattacctctgccgccggaagccaccgccctggaactgctcaccaaaacccaacttgagggtaaggaactgaactacagcagtaatacggagcaagaaaagtttttagaagaagtggcgatcgccaaggattacatcacagcgggggacattttccaggtggtgctttcccaaagactttccactatttaccgggatgatcccttcaagctctaccgttccctcaggctgattaatccttccccctacatggcttattacaactttggccattggcaaattattggctctagcccggaggtgatggtcaaagccgatcgccaactggatggcaaattaatggccacggtacgccccattgctggcaccagacccaggggcaaaacccacccagaggatgaacagttagccgaagaattgctgaacgatcccaaagaaatcgccgaacacgtcatgctggtggatttgggtcgcaatgatttgggacgggtttgcgttcagggctcagtcaaagtgaatgagttgatggtgattgaacgttattcccacgtcatgcacatagtcagtaacgtagtgggagaactggcatcggataaaaccgcctgggatcttttgaaagcttgttttcccgctggcaccgtcagtggtgcaccgaaaattagggccatggaaattattaacgagctggaaccggaacggcgggggccctactccggagtctatggctactatgattttgaaggccagttaaatacggcgatcgccattcggaccatggtggtgcaggaacagccagatggagcccatcgggtgtcggtgcagaccggagctggcattgtggccgattccgatccccaaaaagagtatgaggaaactttaaataaagcgaggggacttttggaagccattcgtgccttgtcctag

SEQ ID NO: 3372 - protein, 508 aa, Synechocystis sp
MISPGFSHFTELAQQGNFIPVYQEWVADLETPVSAWYKVCSSQPYNFLLESVEGGESIGRYSFLGCDPMWVLEARGDETTQVLRNGQTETFRGNPLDILSQCLESIRPVNLPQLPPGIGGLFGVWGYELIRWMEPRVPVYEPQPEDPPDGIWMQVDHLLIFDQVKRKIWAIAFADLRGENVDLETAYRNACQRVTKLVLQLQLPLPPEATALELLTKTQLEGKELNYSSNTEQEKFLEEVAIAKDYITAGDIFQVVLSQRLSTIYRDDPFKLYRSLRLINPSPYMAYYNFGHWQIIGSSPEVMVKADRQLDGKLMATVRPIAGTRPRGKTHPEDEQLAEELLNDPKEIAEHVMLVDLGRNDLGRVCVQGSVKVNELMVIERYSHVMHIVSNVVGELASDKTAWDLLKACFPAGTVSGAPKIRAMEIINELEPERRGPYSGVYGYYDFEGQLNTAIAIRTMVVQEQPDGAHRVSVQTGAGIVADSDPQKEYEETLNKARGLLEAIRALS

SEQ ID NO: 3373 - DNA, 1458 bp, Synechocystis sp
  CDS (1)..(1458)
atggcatcaattgcgcattgttcgggcggattggttggtgctgggaactttgattttattttggggggctcggatcctgtggggaggcatggcctgatggaactccaaccctggcattggtgttgtttgcccctagaaggccgcacgggcagtgaaatttttagtcaattatttggtcatcaaggcatcgccaccctactagaaagtccctatcctgcttcaccggatcatccccatttaggccgttattccctctgtgccggccaaccgagaaagggtaggttatggactcctaagccggaagagatttttagctttttaaaccaactttgcccatgtaatcatgatgtaaatttgacaaaaaatattcctgaacatttacctttccatggcggttggttaggctggttaggttacgacactgcttgggcaattgaaaaattaccttattcaaaagctgatgatttaccttttccggtggcctattggtacgagcctgaaaattttgtaattttagatcatcaagagcaattattatggttagctactaccgaccaggagaaaattaagttttttcaaactcagttagcagataaaatcaactcagtttcatcgcctcaagtgcctcccttaaatttgacctataccactgaccaagatcagtacgaaaccatggtcaatcaagcgaaacaatatattaaagccggagatatttttcaagctaatttaacactacgtttcattgctaaaactgagcaaaagcttaacagttggcaggtctatcaacatctacaaactatcaatccttctcctttcgctagttactggcgatcgccgtggggagatgtggttagttgttctccggaaagattagttaagttagaaggcaatgtggcccaaactagacccattgctggcactagggcaaggggcaaaaatctggcggaggatgaacaattattgcaggagttgctggttaacaccaaagagttggcagaacatatcatgttggtggatttagaacgcaatgacctcggccgggtctgtacctggggaacggtggaagtagatgaattattggcgatcgagcgctatagccatgtgtcccatttagttagtaatgtaaaaggcattttacaaccagataaaaccggagtagatttggtcaaagctttgtttcccggtggcaccattaccggctgtcccaaaatacgttgtttagaaattattgaagaattagaaccagtgcggcggagtttgttttacggttcctgtggctactgggatcaacgggggaacttagatttaaatattctcattcgcaccctgttattcacctctggacaagtgacaggacaagtgggagccggcattgtggcagacagtgatcccgccaaggaatggttagaatcattgcaaaaagccaaagctttattggcggcattggagggactataa

SEQ ID NO: 3374 - protein, 485 aa, Synechocystis sp
MASIAHCSGGLVGAGNFDFILGGSDPVGRHGLMELQPWHWCCLPLEGRTGSEIFSQLFGHQGIATLLESPYPASPDHPHLGRYSLCAGQPRKGRLWTPKPEEIFSFLNQLCPCNHDVNLTKNIPEHLPFHGGWLGWLGYDTAWAIEKLPYSKADDLPFPVAYWYEPENFVILDHQEQLLWLATTDQEKIKFFQTQLADKINSVSSPQVPPLNLTYTTDQDQYETMVNQAKQYIKAGDIFQANLTLRFIAKTEQKLNSWQVYQHLQTINPSPFASYWRSPWGDVVSCSPERLVKLEGNVAQTRPIAGTRARGKNLAEDEQLLQELLVNTKELAEHIMLVDLERNDLGRVCTWGTVEVDELLAIERYSHVSHLVSNVKGILQPDKTGVDLVKALFPGGTITGCPKIRCLEIIEELEPVRRSLFYGSCGYWDQRGNLDLNILIRTLLFTSGQVTGQVGAGIVADSDPAKEWLESLQKAKALLAALEGL

SEQ ID NO: 3375 - DNA, 2144 bp, Nicotiana tabacum (common tobacco)
  CDS (90)..(1940)
gtcaaaaatccccatttcaccgtttcctcgtttctcctcctcactaattttgtctctttctcttggtttgctattgtgctcttgtaggaatgcagtcgttacctatctcataccggttgtttccggccacccaccggaaagttctgccattcgccgtcatttctagccggagctcaacttctgcacttgcgcttcgtgtccgtacactacaatgccgctgccttcactcttcatctctagttatggatgaggacaggttcattgaagcttctaaaagcgggaacttgattccgctgcacaaaaccattttttctgatcatctgactccggtgctggcttaccggtgtttggtgaaagaagacgaccgtgaagctccaagctttctctttgaatccgttgaacctggttttcgaggttctagtgttggtcgctacagcgtggtgggggctcaaccatctatggaaattgtggctaaggaacacaatgtgactatattggaccaccacactggaaaattgacccagaagactgtccaagatcccatgacgattccgaggagtatttctgagggatggaagcccagactcattgatgaacttcctgataccttttgtggtggatgggttggttatttctcatatgacacagttcggtatgtagagaacaggaagttgccattcctaagggctccagaggatgaccggaaccttgcagatattcaattaggactatacgaagatgtcattgtgtttgatcatgttgagaagaaagcacatgtgattcactgggtgcagttggatcagtattcatctcttcctgaggcatatcttgatgggaagaaacgcttggaaatattagtgtctagagtacaaggaattgagtctccaaggttatctcccggttctgtggatttctgtactcatgcttttggaccttcattaaccaagggaaacatgacaagtgaggagtacaagaatgctgtcttacaagcaaaggagcacattgctgcaggagacatatttcaaatcgttttaagtcaacgctttgagagaagaacatttgctgacccatttgaagtgtacagagcattaagaattgtgaatccaagcccatatatgacttacatacaagccagaggctgtattttagttgcatcgagcccagaaattttgacacgtgtgaagaagagaagaattgttaatcgaccactggctgggacaagcagaagagggaagacacctgatgaggatgtgatgttggaaatgcagatgttaaaagatgagaaacaacgcgcagagcacatcatgctggttgatttaggacgaaatgatgtaggaaaggtgtcaaaacctggttctgtgaatgtcgaaaagctcatgagcgttgagcggtattcccatgtgatgcacataagctccacggtctctggagagttgcttgatcatttaacctgttgggatgcactacgtgctgcattgcctgttgggaccgtcagtggagcaccaaaggtaaaggccatggagttgattgatcagctagaagtagctcggagagggccttacagtggtgggtttggaggcatttccttttcaggtgacatggacatcgcactagctctaaggacgatggtattcctcaatggagctcgttatgacacaatgtattcatatacagatgccagcaagcgtcaggaatgggttgctcatctccaatccggggctggaattgtggctgatagtaatcctgatgaggaacagatagaatgcgagaataaagtagccggtctgtgccgagccattgacttggccgagtcagcttttgtaaagggaagacacaaaccgtcagtcaagataaatggttctgtgccaaatctattttcaagggtacaacgtcaaacatctgttatgtcgaaggacagagtacatgagaaaagaaactagcgaatatgaagatgtacataaattctaaagtggttttcttgttcagtttaatcttttactggattgagactgtagttgctgaagatagttgtttagaatgaccttcattttggtgttcctgaaaggacagtgcacatatatagcaaattgatcaaatgtttaatccttgtatgcgggtgagaatcaatgccatcagcaatttgg

SEQ ID NO: 3376 - protein, 616 aa, Nicotiana tabacum (common tobacco)
MQSLPISYRLFPATHRKVLPFAVISSRSSTSALALRVRTLQCRCLHSSSLVMDEDRFIEASKSGNLIPLHKTIFSDHLTPVLAYRCLVKEDDREAPSFLFESVEPGFRGSSVGRYSVVGAQPSMEIVAKEHNVTILDHHTGKLTQKTVQDPMTIPRSISEGWKPRLIDELPDTFCGGWVGYFSYDTVRYVENRKLPFLRAPEDDRNLADIQLGLYEDVIVFDHVEKKAHVIHWVQLDQYSSLPEAYLDGKKRLEILVSRVQGIESPRLSPGSVDFCTHAFGPSLTKGNMTSEEYKNAVLQAKEHIAAGDIFQIVLSQRFERRTFADPFEVYRALRIVNPSPYMTYIQARGCILVASSPEILTRVKKRRIVNRPLAGTSRRGKTPDEDVMLEMQMLKDEKQRAEHIMLVDLGRNDVGKVSKPGSVNVEKLMSVERYSHVMHISSTVSGELLDHLTCWDALRAALPVGTVSGAPKVKAMELIDQLEVARRGPYSGGFGGISFSGDMDIALALRTMVFLNGARYDTMYSYTDASKRQEWVAHLQSGAGIVADSNPDEEQIECENKVAGLCRAIDLAESAFVKGRHKPSVKINGSVPNLFSRVQRQTSVMSKDRVHEKRN

SEQ ID NO: 3377 - DNA, 1509 bp, Streptomyces coelicolor
  CDS (1)..(1509)
atggacgtcacgcatgacatggacctcgacaccttccgcaagctcgccgccgaccgccgggtgatcccggtgagccgcaagctcctcgccgacggcgacaccccggtcgcgctgtaccgcaagctcgccgcctcgcgccccggcaccttcctgctggagtccgcggagaacggacgctcctggtccaggtactccttcgtcggcgtccgcagcgccgccaccctcaccgagaaggacggccaggcgcactggcagggcaccccgcccgtcggcgtccccaccgacggcgacccgctcgccgccctgcgcgccaccgtcgaggccctgcacaccccgcgcgacctcgcccacgacctgggcctgccgcccttcaccggcggcatggtgggctacctcgggtacgacatcgtgcgccgcctggagaaggtcggcccgggggagcgcgacgacctgaagctgcccgagctgaccatgctgctcaccagcgacctcgccgtcatggaccactgggagggctcggtcctgctgatcgccaacgcgatcaaccacaacgacctggagaccggcgtcgacgaggcctacgccgacgcgatcgcccgcctcgacgtcatggaggccgacctcacgcgtgccgtcgcccagcccccggccgcgctgcccccctccgagctgcccgagtacaccgcgctgtggggcggccccgacttccaggacgccgtcgaggacatcaaggagcgcatccgcgcgggcgaggccttccaggtcgtcccctcccagcgcttcgagacgccctgcacggcgagcgccctcgacgtctaccgggtcctgcgggccaccaacccctccccgtacatgtacctgctccgtctcgacggcttcgacgtcgtcggctcgtcccccgaggcgctggtcaaggtcgaggacgggcgcgccatggtgcaccccatcgccggtacccgcccgcgcggcgccaccccgcgggaggaccagtccctcgccgacgaactgctcgccgaccccaaggagcgcgccgagcacctgatgctggtcgacctcggccgcaacgacctcgggcgcgtctgcgagcccgggtccgtcgaggtcgtcgacttcatgtccgtcgagcggtactcgcacgtcatgcacatcgtctcgacggtcaccggccgggtcgccccgggccgcaccgccttcgacgtcctcaccgcctgcttcccggccggcaccctctccggcgcgcccaagccgcgcgccctgcagatcatcgacgaactcgagccctcccggcgcggcctgtacggcggctgcgtcggctacctcgacttcgccggcgactccgacaccgccatcgccatccgcaccgccctgctgcgcgacggcaccgcctacgtccaggcgggcgcgggcgtcgtcgccgactccgacccggtcgccgaggacaccgagtgccgcaacaaggcggcggccgtgctgagggccgtacacacggccaaccggctggcgcaatag

SEQ ID NO: 3378 - protein, 502 aa, Streptomyces coelicolor
MDVTHDMDLDTFRKLAADRRVIPVSRKLLADGDTPVALYRKLAASRPGTFLLESAENGRSWSRYSFVGVRSAATLTEKDGQAHWQGTPPVGVPTDGDPLAALRATVEALHTPRDLAHDLGLPPFTGGMVGYLGYDIVRRLEKVGPGERDDLKLPELTMLLTSDLAVMDHWEGSVLLIANAINHNDLETGVDEAYADAIARLDVMEADLTRAVAQPPAALPPSELPEYTALWGGPDFQDAVEDIKERIRAGEAFQVVPSQRFETPCTASALDVYRVLRATNPSPYMYLLRLDGFDVVGSSPEALVKVEDGRAMVHPIAGTRPRGATPREDQSLADELLADPKERAEHLMLVDLGRNDLGRVCEPGSVEVVDFMSVERYSHVMHIVSTVTGRVAPGRTAFDVLTACFPAGTLSGAPKPRALQIIDELEPSRRGLYGGCVGYLDFAGDSDTAIAIRTALLRDGTAYVQAGAGVVADSDPVAEDTECRNKAAAVLRAVHTANRLAQ

SEQ ID NO: 3379 - DNA, 1470 bp, Schizosaccharomyces pombe
  CDS (1)..(1470)
atgaagatttatcctgacttgaaacaagttcaagagcttgctgaaaagcacaaggctaacaagattcccatttatggagtaatccctgccgatatgctgactccttcagtagcctacttgaagcttaatcaaggaaagaagtattcgtttattttagaaagtgtcactcaaggagagagtgtctcaagatacagttttattggcagcccttatagaatattaatggccaatggaaaaacagatcctttggcacgtttagaacgtgagttgaaagaagttaaaacagcccctgttgagggtctgccatctttcagtggaggtgctgtgggctatgtttcttatgattgcatcaaatattttgaacccactactgaaatgcctttagaagataccttgggtcttccggaggctatgtttttcatgaccgacgatttagtcgctttcgatcatgcttatcagactgtcaagataatttctcatgtttgcattcagcaaggccgacccattgaagaggcttacgaagctgccgttttcaaaatcaatatgcttaaaaagaaacttgaaagtcctgaaattcctttgcctgagcaaaagaaggtccatttaggatacgaagctaagtcaaatgtaggcgaagacgggtataaagcatttgtttccaacctcaaggaacatatctttaatggcgatattttccaagctgtcccaagccaacggattgctaggcgtacagatttacatccttttaatttgtaccgccatttaagaacagttaacccgtccccttatatgttctacatccactgtgatgatttcgacataatcggtgcttcccctgaattactggttaaatcagagcatgggcgtattatcaatcatcccattgccggaactgttccaagaggaaaaactaaagaagaggatgaggcatatgccaaggatttacttgctagtgtcaaggatagagctgaacatgtaatgctggtggacttggcaagaaacgatgtcagtcgtgtctgtgatctcgacacaacaagtgttgacaagttgatgactattgaaaagttttctcatgttcagcatcttgtttctcaagtttctggtgttctgagacctgataaaactcgttttgatgcattccgtagtatatttccggctggaacggtcagtgggtctcccaaagtccgtgcaattcagctcgtttatggattagagaaagaaaagcgtggtatatacgcgggagccgtaggtcgttggggctatgaagatgacaacatggatacttgtatagcaatccgtacaatggtttataaagacggaactgtttatttgcaagccggtggtggtattgtgtttgattcagatgaacaagatgagtacgtggaaactttaaacaaactacgttcaaatgttactgcaattgaggaaaccgaaaaattatacgctgaagaagaaaactcttcagcataa

SEQ ID NO: 3380 - protein, 489 aa, Schizosaccharomyces pombe
MKIYPDLKQVQELAEKHKANKIPIYGVIPADMLTPSVAYLKLNQGKKYSFILESVTQGESVSRYSFIGSPYRILMANGKTDPLARLERELKEVKTAPVEGLPSFSGGAVGYVSYDCIKYFEPTTEMPLEDTLGLPEAMFFMTDDLVAFDHAYQTVKIISHVCIQQGRPIEEAYEAAVFKINMLKKKLESPEIPLPEQKKVHLGYEAKSNVGEDGYKAFVSNLKEHIFNGDIFQAVPSQRIARRTDLHPFNLYRHLRTVNPSPYMFYIHCDDFDIIGASPELLVKSEHGRIINHPIAGTVPRGKTKEEDEAYAKDLLASVKDRAEHVMLVDLARNDVSRVCDLDTTSVDKLMTIEKFSHVQHLVSQVSGVLRPDKTRFDAFRSIFPAGTVSGSPKVRAIQLVYGLEKEKRGIYAGAVGRWGYEDDNMDTCIAIRTMVYKDGTVYLQAGGGIVFDSDEQDEYVETLNKLRSNVTAIEETEKLYAEEENSSA

SEQ ID NO: 3381 - DNA, 1302 bp, Pyrococcus kodakaraensis
  CDS (1)..(1302)
atgcctctcaaaaagctgaagcccgttgaccctttgaagctctacagcgcccttagagactttgggatgccattcatgctccgctctgccgagaaggactccaggaaggccagattcacctacatatcggccgagccggagttcgtcgtggaggtcggcgaggggactgagatcgacggggagcgagtttccgacgagaggaaccccctcagagctcttaaagggctcatgggggagagggtcgagggcaggaggttcatgggtggcttcgttggctacgtctcctacgattcggtacactccatcatcggggggaagatcgaagagccctcggtcttcggctactacccctggaccttcatctacgaccactctaccggcgctctttccttcttttacctcagagaggctcctttcgaccccgaggccttagttgaaagggccaggagggaagagtcacggcttgaagacggcggttcggaggtcatatccaccgacgcgggcatggaagagttcgttgaaatcgtcagggctgggaaggagtacatctactcgggggacgtcttccaggtggttctgtcgcgcgagtacagggttagaacggatctcgatgccctcgaaatctacaagcggctcgtggagctcaacccctccccgtacaccttcatcctggagttcgagaagaccgtcgtaggggcctcacccgaaaccatgggttccgtcgaggggagaaccttcaagataaaccccatagcaggaacagcgccgaggggaaggacgggggaggaagaccgggagctggaaaaggccctactctccgacgagaaagagcgagctgagcacgtcatgctcgttgaccttgctagaaacgacgtcaggagggtttcaaagcccgggagcgttaggctaacccgcttcttcgacgtcctgaagtacagccacgtccagcacatagagagcgaggtggtcggtgaactcgatgaggggaaaaacgcgttcgacgccatggaggcggcttttccggcgggaacactaaccggagccccgaagataagggcgatggagatcatagacgagctggagaggagcaggagaaaggtctacgggggagcagtgggttacttctccctcaccggggacgccgacatggcgatagcgataaggatggccgagatcgagggcaggaaagcgagcgttagggccggggcaggaatagtggcggattcagttccagagaaggagttcttcgagaccgagaacaaaatgagagcagttctgaaggcgctgggggtgagggaatga

SEQ ID NO: 3382 - protein, 433 aa, Pyrococcus kodakaraensis
MPLKKLKPVDPLKLYSALRDFGMPFMLRSAEKDSRKARFTYISAEPEFVVEVGEGTEIDGERVSDERNPLRALKGLMGERVEGRRFMGGFVGYVSYDSVHSIIGGKIEEPSVFGYYPWTFIYDHSTGALSFFYLREAPFDPEALVERARREESRLEDGGSEVISTDAGMEEFVEIVRAGKEYIYSGDVFQVVLSREYRVRTDLDALEIYKRLVELNPSPYTFILEFEKTVVGASPETMGSVEGRTFKINPIAGTAPRGRTGEEDRELEKALLSDEKERAEHVMLVDLARNDVRRVSKPGSVRLTRFFDVLKYSHVQHIESEVVGELDEGKNAFDAMEAAFPAGTLTGAPKIRAMEIIDELERSRRKVYGGAVGYFSLTGDADMAIAIRMAEIEGRKASVRAGAGIVADSVPEKEFFETENKMRAVLKALGVRE

SEQ ID NO: 3383 - DNA, 1590 bp, Mycobacterium leprae
  CDS (1)..(1590)
atgcacgcccacctcgccgccaccacgtcacgtgaggactttcgccagctagctgtcgatcatcgggtggttccagtgacccgcaaagtcttggccgatagcgaaacgccgctatcggcataccggaagctcgccgccaatcgtccgagcaccttcctgctagagtcggccgagaacggcagatcctggtcgcagtggtcgttcattggcgtgggtgccccatcggctttgacaattcgtgacggcgaagcggtgtggctgggcactgtaccgcaggacgcgcccactggcggtgaccccctgcatgtcctgcaggccacgctcgagctacttgccaccgcggcaatgcccgggttgccaccgctatcgagtggtatggtgggcttcttcgcctacgacatggtgcggcgcctggagcgcctgcctgaactggccttaaatgatttgcagttgcccgatatgctgctgctgttggccaccgatgtagcggccgttgaccaccacgagggcacgatcaccctgattgccaacgctgtgaactggaacggtaccgatgagcgggtagatcaggcctacgacgatgcgatcgcgcgcttggacgtaatgaccgcagcactgggccagccgctgccatcgaccattgccacgttcagccggcccgaccctcggcgccgagcgcaatgcaccatcgaggaatacggtgcgatcgtcgaccacctcgtcgaccagatcgcggccggtgaggcctttcaagtggtgccctcgcagcgcttcgaggtggataccgatgtcgatccgatcgatgtctatcgcatgctgcgggtcaccaaccctagcccttacatgtatctgctgcatgtgcctaatagcgatggagcaactggcttttcgatcgttggatccagcccggaggcgttggtgaccgtcaaggacggtcgggtgacgacgcatccgatcgctggaactcgctggcgaggccagaccgaagaagaggatcagctactggaaaaagagttgctcgccgacgagaaggaacgagcagagcacttaatgcttgtcgatctcggtcgcaacgaccttggtcgggtctgtacgccaggcaccgtacgtgtcgaggattacagccacgttgaacgttacagtcacgtaatgcacatggtgtctacggtgaccgggctgctcggtgaaggccgcaccgccctggacgcggtgaccgcctgcttccctgccggcacgctgtcgggtgccccgaaggtgcggtccatggagctaatcgaggaagtggagaagacgcgccgcggcctttatggtggcgtggtcggttacctcgacttcgctggtaacgctgacttcgcgatagcaatccgtacagcgctgatgcgtgacggcatcgcgtatgtccaagccggcggtggggtagtggccgactccaacgggccctacgaatacatcgaggcgagtaacaaggctcgagcggtgttgaacgcgatcgccgccgccgagacgttgacctctttggacttcggtgttgccctcgcccctggccgcgtggcggccaggggcgaggcgggcaatcaagggaggctgtga

SEQ ID NO: 3384 - protein, 529 aa, Mycobacterium leprae
MHAHLAATTSREDFRQLAVDHRVVPVTRKVLADSETPLSAYRKLAANRPSTFLLESAENGRSWSQWSFIGVGAPSALTIRDGEAVWLGTVPQDAPTGGDPLHVLQATLELLATAAMPGLPPLSSGMVGFFAYDMVRRLERLPELALNDLQLPDMLLLLATDVAAVDHHEGTITLIANAVNWNGTDERVDQAYDDAIARLDVMTAALGQPLPSTIATFSRPDPRRRAQCTIEEYGAIVDHLVDQIAAGEAFQVVPSQRFEVDTDVDPIDVYRMLRVTNPSPYMYLLHVPNSDGATGFSIVGSSPEALVTVKDGRVTTHPIAGTRWRGQTEEEDQLLEKELLADEKERAEHLMLVDLGRNDLGRVCTPGTVRVEDYSHVERYSHVMHMVSTVTGLLGEGRTALDAVTACFPAGTLSGAPKVRSMELIEEVEKTRRGLYGGVVGYLDFAGNADFAIAIRTALMRDGIAYVQAGGGVVADSNGPYEYIEASNKARAVLNAIAAAETLTSLDFGVALAPGRVAARGEAGNQGRL

SEQ ID NO: 3385 - DNA, 1512 bp, Rhodobacter sphaeroides
  CDS (1)..(1512)
atgtcgctcgtgacctccttcgaaagcttcgagcgcggctggaaggccgggcagaaccagatcgtctatgcccggctgaccgcggatctcgacacgccggtgtcgctgatgctgaagctcgccgaggcgcgcaccgacacgttcatgctggaatcggtgacgggcggcgagatccgcggccgctattcggtcgtgggcatgaagcccgacctgatctggcagtgccacgggcaggacagccgcatcaaccgcgaggcgcgcttcgaccggcaggccttccagccgctggaaggccacccgctcgagacgctgcgggcgctgatcgccgagagccggatcgagatgccggccgacctgcccccgatcgcggcgggcctcttcggctatctcggctatgacatgatccggctggtcgagcatctgccggggatcaaccccgatccgctcggtctgcccgatgcggtgctgatgcggccctcggtcgtggcggtgctcgacggggtgaagggcgaggtcaccgtggtggcgcccgcatgggtctcgtcgggcctctcggcgcgggccgcctatgcgcaggcggccgagcgggtgatggatgcgctgcgcgatctcgaccgcgcgccgcccgcgcagcgcgacttcggcgaggtggcgcaggtgggcgagatgcgctcgaacttcacccacgagggctacaaggccgcggtcgagaaggccaaggactacatccgcgcgggcgacatcttccaggtggtgccgtcgcaacgctgggcgcaggacttccgtctgccgcccttcgcgctctaccgctccttgcgcaagacgaacccctcgcccttcatgttcttcttcaacttcggcggcttccaggttgtgggggccagccccgagatcctcgtgcggctgcgcgaccgcgaggtgacggtgcgtcccatcgccggcacccgcaagcgcggcgcgacacccgaggaggaccgcgcgctggaggccgaccttctgtccgacaagaaggaactggccgagcatctgatgctgctcgatctcgggcgaaacgacgtgggccgggtggcgaagatcggcaccgtgcgcccgaccgagaagttcatcatcgagcgctattcccacgtcatgcatatcgtctcgaacgtggtgggcgagatcgcggagggcgaggatgcgctctcggcgctgctggcgggcctgccggcgggcaccgtctcgggcgcgcccaaggtgcgggcgatggagatcatcgacgagctcgagccggaaaagcgcggcgtctatggcggcggcgtgggctatttcgcggccaacggcgagatggatttctgcattgcgctgcggaccgcggtcctgaaggacgagacgctctacatccagtcgggcggcggcgtcgtctatgacagcgaccccgaggccgaatatcaggagacggtcaacaaggccagggcgctccgccgggccgccgaggatgcgggcctcttcgcccgccgcgccgggaacggctga

SEQ ID NO: 3386 - protein, 503 aa, Rhodobacter sphaeroides
MSLVTSFESFERGWKAGQNQIVYARLTADLDTPVSLMLKLAEARTDTFMLESVTGGEIRGRYSVVGMKPDLIWQCHGQDSRINREARFDRQAFQPLEGHPLETLRALIAESRIEMPADLPPIAAGLFGYLGYDMIRLVEHLPGINPDPLGLPDAVLMRPSVVAVLDGVKGEVTVVAPAWVSSGLSARAAYAQAAERVMDALRDLDRAPPAQRDFGEVAQVGEMRSNFTHEGYKAAVEKAKDYIRAGDIFQVVPSQRWAQDFRLPPFALYRSLRKTNPSPFMFFFNFGGFQVVGASPEILVRLRDREVTVRPIAGTRKRGATPEEDRALEADLLSDKKELAEHLMLLDLGRNDVGRVAKIGTVRPTEKFIIERYSHVMHIVSNVVGEIAEGEDALSALLAGLPAGTVSGAPKVRAMEIIDELEPEKRGVYGGGVGYFAANGEMDFCIALRTAVLKDETLYIQSGGGVVYDSDPEAEYQETVNKARALRRAAEDAGLFARRAGNG

SEQ ID NO: 3387 - DNA, 1993 bp, Ruta graveolens
  CDS (94)..(1935)
aaaaaatctgtctgtttttcgtgtttggacatttcagcggcactgggtgccatcagttgattcgactcatttgatttattttgtttgttggccatgagtgcagcggcaacgtcgatgcaatcccttaaattctccaaccgtctggtcccacccagtcgccgtctgtctccggttccgaacaatgtcacctgcaataacctccccaagtctgcagctcccgtccggacagtcaaatgctgcgcttcttcctggaacagtaccatcaacggcgcggccgccacgaccaacggtgcgtccgccgccagtaacggcgcatccacgaccaccactacatatgttagtgatgcaaccagatttatcgactcttctaaaagggcaaatctagtgccattataccgttgcatattcgcggatcatctcacgccggtgcttgcctatagatgtttggttcaagaagacgataaagagactccaagttttttattcgaatcagtagagccgggtcggatttctactgttgggaggtatagtgtggttggagctcatcccgtgatggaagttatagctaaagataatatggttacggtgatggatcatgagaaagggagcttagttgaggaggtggtcgatgatcccatggagattcctagaagaatttccgaggattggaagcctcaaataatcgatgatcttcctgaagctttttgcggtggttgggttggtttcttctcatacgatacagttcgatatgtggagaagaaaaagttaccattctcaaaggcacctcaggatgataggaatcttgcagatatgcatctaggtctctataacgatgttattgtgtttgatcatgtggaaaagaaagtatatgttattcattgggtgaggctaaatcaacagtcttctgaagaaaaagcatatgccgagggtctggaacacttggagagactagtatccagagtacaggatgagaacacgccaaggctcgccccaggttccatagacttacacactggtcattttggacctccattaaaaaagtcaaacatgacatgtgaagaatacaaaatggctgtactagcggcaaaagaacatattcaggctggggatatttttcaaatcgtactaagccaacgttttgaacgtcgaacatttgctgatccatttgaagtttatagggcactgagagttgttaatccgagtccctatatgacgtatatgcaggcaagagggtgtgttctggtagcttcaagtccagaaattcttactcgagtaaagaagaataagattgtgaatcgacctttggctggaacagcccgaagagggaggactactgaagaagatgagatgttggaaacacagttgctaaaagacgcaaagcaatgtgctgagcatgttatgctggtcgatttgggacggaatgatgttggcaaggtttcaaaatctggttctgtgaaagtggaaaagctgatgaatgttgaacgatattcacatgttatgcacataagctctacggtcacaggtgagttgcaagataatctcagttgctgggatgccctgcgtgctgcactgcctgtcgggactgttagtggagcaccaaaggtgaaggcaatggagttaatcgatgaattggaggtaaatagacgtggcccctacagtggtgggtttggcggtatctccttcaccggagatatggacattgccctggctctaaggaccattgttttccaaaccggtacacgctatgacacaatgtactcgtacaagaatgctaccaaacgccggcagtgggtggcataccttcaagccggggctggcattgttgctgatagtgatccagacgacgagcatcgtgagtgccagaacaaagccgccggactggcccgtgccatcgacctagctgagtctgcttttgtgaacaaatcaagtagctaaagttttggatttggaagtggagttgagtctcggataggatttagagtaaaaaaagagg

SEQ ID NO: 3388 - protein, 613 aa, Ruta graveolens
MSAAATSMQSLKFSNRLVPPSRRLSPVPNNVTCNNLPKSAAPVRTVKCCASSWNSTINGAAATTNGASAASNGASTTTTTYVSDATRFIDSSKRANLVPLYRCIFADHLTPVLAYRCLVQEDDKETPSFLFESVEPGRISTVGRYSVVGAHPVMEVIAKDNMVTVMDHEKGSLVEEVVDDPMEIPRRISEDWKPQIIDDLPEAFCGGWVGFFSYDTVRYVEKKKLPFSKAPQDDRNLADMHLGLYNDVIVFDHVEKKVYVIHWVRLNQQSSEEKAYAEGLEHLERLVSRVQDENTPRLAPGSIDLHTGHFGPPLKKSNMTCEEYKMAVLAAKEHIQAGDIFQIVLSQRFERRTFADPFEVYRALRVVNPSPYMTYMQARGCVLVASSPEILTRVKKNKIVNRPLAGTARRGRTTEEDEMLETQLLKDAKQCAEHVMLVDLGRNDVGKVSKSGSVKVEKLMNVERYSHVMHISSTVTGELQDNLSCWDALRAALPVGTVSGAPKVKAMELIDELEVNRRGPYSGGFGGISFTGDMDIALALRTIVFQTGTRYDTMYSYKNATKRRQWVAYLQAGAGIVADSDPDDEHRECQNKAAGLARAIDLAESAFVNKSSS

SEQ ID NO: 3389 - DNA, 1983 bp, Corynebacterium glutamicum
  CDS (86)..(1963)
tcgtctaagtttttctttgagttttcatatgtagaaggcatcgtcggcttcggcctggcggtgcttttctcgttgttttgtggttatgtcagaggatgtcatgcgcgttttaattattgataattatgattctttcacgtttaatctcgccacctatgtggaagaggttacgggtcaggcacctgtggtggtgcctaatgatcaagaaatagatgagatgcttttcgacgccgtcatcctctcacctggcccgggccacgccggcgttgcggctgattttggtatctgtgcaggcgtcattgagcgtgcacgcgttccgattttgggtgtgtgtttaggccaccagggcattgcgttggcctatggcggtgatgttgatttggcgcccaggccggtccacggtgaggtttcgcagatcacccatgatggttcaggtttatttgcaggcatccctgaaacgtttgaggcggtgcgttatcactcgatggtggcaacccgcttgccggagtcattgaaagctacagctaccagcgatgatggtttgatcatggcattggcacatgaagtgcttccgcagtggggtgtgcaatttcatccggaatctattggtggacaattcggccatcagatcattaagaacttccttaatttagcgcgcacatatcgctggcaactcacggagaaaactattccgctcagcgttgattcagcagcggtttttgaaacattctttgcccattcctcccatgctttttggctcgatgatgcccaaggaaccagctatcttggtgatgccagcggtcctctcgcacgcacaaaaacccataatgtcggcgagggggatttcttcacctggctaaaggaggatctcgccgccaactcagttgcgcccggtcaaggttttcgtcttggctgggttggttacgttggttatgagcttaaagcggaagctggcgcacgggctgcgcacacttcgagtcttccggatgcgcacctcatttttgccgatcgcgccatcgcagtggaatcggatcaggttcggttgctggcgttgggggagcaggacgagtggtttgaagaaaccatcaagaagctgcataatcttgtcgccccgcggatacctgcgtccggacacctcgctttgcaggttcgagattccaaagatgagtatctcgacaaaattcgcagagcccaggagctgattactcgcggcgaatcgtatgaaatctgcctgaccacaaaacttcagggcaccactgatgtggcccctctggctgcctatctagcactgcgtggggccaatcccaccgcatatggtgcgtatcttcagctgggggatacctctattttgagttcctcgccggagcggttcatcaccattgattcggcagggtatgtggaatcaaagcccattaaaggcaccaggccgcgtgggcgaacagcgcaagaagaccaagaaatcattgctgagctgcgcagtaatcctaaagatcgtgcagaaaacttgatgatcgtggatttggtccgcaacgacttagcccgcggcgctttgcccaccacagttaaaacatccaagcttttcgacgtcgaaacctacgccacagtccaccaacttgtcagcaccgtctctgcagagttggggccacgcagtccgattgagtgcgtgcgcgcagcattccccggtggttcgatgactggtgccccaaagctgcgcaccatggagatcatcgatgagctggaggcagctcctcgcggtatttactcaggtggcttgggatatttttccctcgacggcgcagttgatctctccatggtgatcagaactctcgtcatccagaacaatcacgtggagtacggagtgggcggtgcacttcttgctctgtctgatccggaggctgagtgggaggaaatccgcgttaaatcacggcctctgctgaatttgtttggggttgaattcccatgacgtacctcgtgtgggacggt

SEQ ID NO: 3390 - protein, 625 aa, Corynebacterium glutamicum
MSEDVMRVLIIDNYDSFTFNLATYVEEVTGQAPVVVPNDQEIDEMLFDAVILSPGPGHAGVAADFGICAGVIERARVPILGVCLGHQGIALAYGGDVDLAPRPVHGEVSQITHDGSGLFAGIPETFEAVRYHSMVATRLPESLKATATSDDGLIMALAHEVLPQWGVQFHPESIGGQFGHQIIKNFLNLARTYRWQLTEKTIPLSVDSAAVFETFFAHSSHAFWLDDAQGTSYLGDASGPLARTKTHNVGEGDFFTWLKEDLAANSVAPGQGFRLGWVGYVGYELKAEAGARAAHTSSLPDAHLIFADRAIAVESDQVRLLALGEQDEWFEETIKKLHNLVAPRIPASGHLALQVRDSKDEYLDKIRRAQELITRGESYEICLTTKLQGTTDVAPLAAYLALRGANPTAYGAYLQLGDTSILSSSPERFITIDSAGYVESKPIKGTRPRGRTAQEDQEIIAELRSNPKDRAENLMIVDLVRNDLARGALPTTVKTSKLFDVETYATVHQLVSTVSAELGPRSPIECVRAAFPGGSMTGAPKLRTMEIIDELEAAPRGIYSGGLGYFSLDGAVDLSMVIRTLVIQNNHVEYGVGGALLALSDPEAEWEEIRVKSRPLLNLFGVEFP

SEQ ID NO: 3391 - DNA, 2220 bp, Streptomyces pristinaespiralis
  CDS (61)..(2220)
ggcgtcaagaacctgccgctgaccgtacggcgcggctgacacagacaagggggccacctgatgcgcaccgtgcgaaccctgctgatcgacaactacgactcgttcacctacaacctcttccagatgctggccgaggtgaacggcgccgctccgctcgtcgtccgcaacgacgacacccgcacctggcaggccctggcgccgggcgacttcgacaacgtcgtcgtctcacccggccccggccaccccgccaccgacaccgacctgggcctcagccgccgggtgatcaccgaatgggacctgccgctgctcggggtgtgcctgggccaccaggccctgtgcctgctcgccggcgccgccgtcgtccacgcacccgaaccctttcacggccgcaccagcgacatccgccacgacgggcagggcctgttcgcgaacatcccctccccgctgaccgtggtccgctaccactcgctgaccgtccggcaactgcccgccgacctgcgcgccaccgcccacaccgccgacgggcagctgatggccgtcgcccaccgccacctgccccgcttcggcgtgcagttccaccccgaatcgatcagcagcgaacacggccaccggatgctcgccaacttccgcgacctgtccctgcgcgcggccggccaccgccccccgcacaccgaacgcatacccgcacccgcacccgcccccgcccccgcccccgcaccggcaccgcccgcgtccgcgccggtgggggagtaccggctgcatgtgcgcgaggtcgcctgcgtgcccgacgcggacgccgcgttcaccgccctgttcgccgacgccccggcccggttctggctcgacagcagccgcgtcgagccgggcctcgcccgcttcaccttcctcggcgcccccgccggcccgctcggcgaacagatcacctacgacgtcgccgaccgggccgtgcgcgtcaaggacggttcaggcggcgagacccgccggcccggcaccctcttcgaccacctggaacacgaactggccgcccgcgccctgcccgccaccggcctgcccttcgagttcaacctcggctacgtcggctacctcggctacgagaccaaggccgacagcggcggcgaggacgcccaccgcggcgaactgcccgacggcgccttcatgttcgccgaccggatgctcgccctcgaccacgaacaggggcgggcctggctcctggcactgagcagcacccgacggcccgccaccgcacccgccgccgaacgctggctcaccgacgccgcccggaccctcgccaccaccgccccccgcccgcccttcaccctgctgcccgacgaccaactgcccgccctggacgtccactaccgccacagcctgccccgctaccgggaactggtcgaggaatgccgccgcctgatcaccgacggcgagacctacgaggtgtgcctgacgaacatgctccgggtgcccggccggatcgacccgctcaccgcctaccgcgccctgcgcaccgtcagccccgccccctacgccgcctacctgcagttccccggggccaccgtgctcagctcctcacccgaacggttcctgcgcatcggcgcggacggttgggcggagtccaaacccatcaagggcacccgcccccgcggcgccggccccgcccaggacgccgccgtcaaggcctccctcgccgcggccgagaaggaccgcagcgagaacctgatgatcgtcgacctggtccgcaacgacctcggccaggtctgcgacatcggctccgtccacgtaccgggcctgttcgaggtggagacctacgccaccgtccaccagctcgtcagcacggtccgcggccgcctggcggccgacgtctcccgcccccgcgcggtacgggccgccttccccggcgggtcgatgaccggcgcgcccaaggtccgcaccatgcagttcatcgaccggctcgagaagggcccgcgcggcgtgtactcgggcgcgctgggctacttcgccctcagcggcgcggccgacctcagcatcgtcatccgcaccatcgtcgccaccgaggaggccgccaccatcggcgtgggcggcgccgtcgtcgccctgtccgaccccgacgacgaggtccgcgaaatgctcctcaaggcgcagaccaccctcgccgccctgcgccaggcacacgcgggcgccaccgcctcggaccgtgaactcctggccggcagcctgcggtga

SEQ ID NO: 3392 - protein, 719 aa, Streptomyces pristinaespiralis
MRTVRTLLIDNYDSFTYNLFQMLAEVNGAAPLVVRNDDTRTWQALAPGDFDNVVVSPGPGHPATDTDLGLSRRVITEWDLPLLGVCLGHQALCLLAGAAVVHAPEPFHGRTSDIRHDGQGLFANIPSPLTVVRYHSLTVRQLPADLRATAHTADGQLMAVAHRHLPRFGVQFHPESISSEHGHRMLANFRDLSLRAAGHRPPHTERIPAPAPAPAPAPAPAPPASAPVGEYRLHVREVACVPDADAAFTALFADAPARFWLDSSRVEPGLARFTFLGAPAGPLGEQITYDVADRAVRVKDGSGGETRRPGTLFDHLEHELAARALPATGLPFEFNLGYVGYLGYETKADSGGEDAHRGELPDGAFMFADRMLALDHEQGRAWLLALSSTRRPATAPAAERWLTDAARTLATTAPRPPFTLLPDDQLPALDVHYRHSLPRYRELVEECRRLITDGETYEVCLTNMLRVPGRIDPLTAYRALRTVSPAPYAAYLQFPGATVLSSSPERFLRIGADGWAESKPIKGTRPRGAGPAQDAAVKASLAAAEKDRSENLMIVDLVRNDLGQVCDIGSVHVPGLFEVETYATVHQLVSTVRGRLAADVSRPRAVRAAFPGGSMTGAPKVRTMQFIDRLEKGPRGVYSGALGYFALSGAADLSIVIRTIVATEEAATIGVGGAVVALSDPDDEVREMLLKAQTTLAALRQAHAGATASDRELLAGSLR

SEQ ID NO: 3393 - DNA, 2051 bp, Ruta graveolens
  CDS (43)..(1869)
ggcacactcaagtgccgtctcttctttattcagggaaccaaaatgattactctcaacgtggaaaccccacccctcacccgctctcagcttccgtcaactttccgtgtctcctccgccgcctccgttaactttaacgacagggttgctacctcgagatggcgccccaactccctctccctcaccacctccagctatcgtctccgcactcttaaatgcgccgcctccgcctccacctccgcctccacctccgcctcgccctctccctctccctcattggtcgaccagtcagcaaattttcacgaagcttcgaagaaggggaatttaattcctctataccggtgcatattctcggaccacttgactccagttcttgcgtacaggtgtttggttaaggaagatgatagagatgctccaagctttctgtttgagtcagttgagcctggttcacaagcttccagtattggaaggtatagtgttgttggagctcagccagccatagaaattgtggcaaaggagaacatggttacaattttggaccatgagggtgggcagagaacagagcaatttgtggaggatccaatggatgttcctaggagaatcatggagggatggaaaccccaacttattgatgaacttccagaagcattttgtggtggatgggttggttacttctcatatgacactgtccgctatgttgagaaaaaaaagctgcccttcttttctgccccaactgatgatagaaaccttcctgatgttcatctcggcctctatgacgatgtgatcgtgtttgatcacgtggagaagaaagcatttgttattcattgggtgcgattagatcaatattcttctgtggcggaggcatacaatgacggaatgaaccggttggaaaacctagtatctagagtgcatgatatagttccaccaaagctccgttcaggatcaataaagttacacactcgtcattttggtcctaaactggagaggtcaagcatgacaagtgaagcatacaaggaggcagtactggaggccaaggagcatatccttgctggtgacatattccagatcgtactaagtcagcgttttgaaaggcgaacgttcgcagacccatttgaaatctatagatcactgaggattgttaatccaagcccatatatgacttatttacaagctagaggatgtatattggttgcttctagtccagaaattcttacacgcgtgaagaagagaaagattactaatcgaccccttgctggcactattagaagagggaagacacgtaaggaagatttggtgtttgaaaaggagcttttgaatgatgagaagcaatgtgcggagcacattatgcttgttgacttggggaggaatgatgttggaaaggtctcagaacctggctctgtgaaggttgaaaagctcatgaatattgaacattattctcatgttatgcacattagctcaacagttactggagagttgcttgatcatttaactagctgggatgctttacgtgcagcactacctgttgggaccgtcagcggagcacccaaggtgaaagccatggagataattgataagctggaagtcacaaggcgtggcccatatggtggtggatttggaggcatttcatttactggtgatctggacattgcccttgctctcagaactatggtattccaaactgctacacgctatgacactatgtactcgtacaaagatgtggacaagagacgggaatggatcgctcatctccaagctggggctggaatcgtggccgacagtgatcctgctgatgagcagagagagtgtgagaacaaagctgcagctcttgctcgtgccattgatcttgcagaatcctcgttcattgagaaatgattaatagttttgccatatggagtgtctcggtcttcttgacattgcttcccttggtcacaagtgctagatttcttgccacgtggagaagaaacaaagcaccaatgtgatgataacttttcttggtgagtgtcaaccgtgactgaaatgttaaagaatgaaacagtttcttttcccgtttttgc

SEQ ID NO: 3394 - protein, 608 aa, Ruta graveolens
MITLNVETPPLTRSQLPSTFRVSSAASVNFNDRVATSRWRPNSLSLTTSSYRLRTLKCAASASTSASTSASPSPSPSLVDQSANFHEASKKGNLIPLYRCIFSDHLTPVLAYRCLVKEDDRDAPSFLFESVEPGSQASSIGRYSVVGAQPAIEIVAKENMVTILDHEGGQRTEQFVEDPMDVPRRIMEGWKPQLIDELPEAFCGGWVGYFSYDTVRYVEKKKLPFFSAPTDDRNLPDVHLGLYDDVIVFDHVEKKAFVIHWVRLDQYSSVAEAYNDGMNRLENLVSRVHDIVPPKLRSGSIKLHTRHFGPKLERSSMTSEAYKEAVLEAKEHILAGDIFQIVLSQRFERRTFADPFEIYRSLRIVNPSPYMTYLQARGCILVASSPEILTRVKKRKITNRPLAGTIRRGKTRKEDLVFEKELLNDEKQCAEHIMLVDLGRNDVGKVSEPGSVKVEKLMNIEHYSHVMHISSTVTGELLDHLTSWDALRAALPVGTVSGAPKVKAMEIIDKLEVTRRGPYGGGFGGISFTGDLDIALALRTMVFQTATRYDTMYSYKDVDKRREWIAHLQAGAGIVADSDPADEQRECENKAAALARAIDLAESSFIEK

SEQ ID NO: 3395 - DNA, 2660 bp, Streptomyces venezuelae
  CDS (651)..(2660)
ggatccgccgaggtcgtcgccctgcccttcctcggcgaacacggcgacctgcgcatccgcagcaagaccggatggctgatccgcttcggggagcgctccgtgctgttcgccgccgactccaccaacatctccccgacgatgtacaccaaggtggccgaggtgatcggccccgtcgacaccgtcttcatcggcatggagagcatcggcgcggcggccagctggatctacggtccgctctacggcgagccgctcgaccgcaggaccgaccagagccgacggctcaacggctccaacttcccccaggcgagggagatcgtcgacgccctggagcccgacgaggtctatgtgtacgcgatgggcctcgaaccctggatgggcgtcgtgatggccgtcgactacgacgagagccaccccgccatcgtcgacagcgacctcctcgtccggcacgtccaggacaagggcgggaccgccgaacggctgcacctccggcggacgctgcgcctctgagcgacgcgacgcccgcggccggggcgcggcgatccgccgcccccggcccccggcccctccggcacggcccctccggcccgtccccgtggcccgccgccgcccccgcgccctccggcgagcccttcgagacaaggtgccccatcatgcgcacgcttctgatcgacaactacgactcgttcacccagaacctgttccagtacatcggcgaggccaccgggcagccccccgtcgtgcccaacgacgccgactggtcgcggctgcccctcgaggacttcgacgcgatcgtcgtgtccccgggccccggcagccccgaccgggaacgggacttcgggatcagccgccgggcgatcaccgacagcggcctgcccgtcctcggcgtctgcctcggccaccagggcatcgcccagctctcggcggaacccatgcacggccgggtctccgaggtgcggcacaccggcgaggacgtcttccggggcctcccctcgccgttcaccgccgtgcgctaccactccctggccgccaccgacctccccgacgagctcgaacccctcgcctggagcgacgacggcgtcgtcatgggcctgcggcaccgcgagaagccgctgatgggcgtccagttcccaccggagtccatcggcagcgacttcggccgggagatcatggccaacttccgcgacctcgccctcgcccaccaccgggcacgtcgcgacgcggccgactggggctacgaactccacgtgcgccgcgtcgacgtgctgccggacgccgaagaggtacgccgcgctgcctgcccggccgagggcgccacgttctggctggacagcagctccgtcctcgaaggcgcctcgccgttctccttcctcggcgacgaccgcggcccgctcgccgagtacctcacctaccgcgtcgccgacggcgtcgtctccgtccgcggctccgacggcaccacgacccgggacgcggcgaccctcttcagctacctggaggagcagctcgaaccgccggcgggtcccgtcgcccccgacctgcccttcgagttcaacctcggctacgtcggctacctcggctacgagctgaaggcggagaccaccggcgaccccgcagtaccggccccgcaccccgacgccgcgttcctcttcgccgaccgcgccatcgccctcgaccaccaggaaggctgctgctacctgctggccctcgaccgccggggccacgacgacggcgcccgcgcctggctgcgggagacggccgagaccctcaccggcctggccgtccgcgtccggccgaggccgacccccgccatggtcttcggggtccccgaggcggcggccggcttcggccccctggctcgcgcacgccacgacaaggacgcctcggcgctccgcaacggcgagtcgtacgagatctgcctgaccaacatggtcaccgcgccgaccgaggcgacggccctgccgctctactccgcgctgcgccgcatcagccccgtcccgtctggcgccctgctcgagttccccgagctgtcggtgctcagcgcctcgcccgagcggttcctcacgatcggcgccgacggcggcgtcgagtccaagcccatcaaggggacccgcccccggggcgcaccggcggaggaggacgagcggctccgcgccgacctggccggccgggagaaggaccgggccgagaacctgatgatcgtcgacctggtccgcaacgacctcaacagcgtctgcgcgatcggctccgtccacgtgccccggctcttcgaggtgggagacctcgcgcccgtgcaccagctggtgtcgaccatccggggacggctgcggcccggcaccagcaccgccgcctgcgtacgcgccgccttccccggcggctccatgaccggcgcgcccaagaagcgacccatggagatcatcgaccgcctggaggaaggcccccggggcgtcttacccggggcgctcggatggttcgccctcagcggcgccgccgacctcagcatcgtcatccgcaccatcgtgctggccgacggccgggccgagttcggcgtcggcggggcgatcgtgtccctctccgaccaggaggaggagttcaggcagaccgtggtcaaggcccgcgccatggtcaccgccctcgacggcagcgcagtggcgggcgcccgatga

SEQ ID NO: 3396 - protein, 669 aa, Streptomyces venezuelae
MRTLLIDNYDSFTQNLFQYIGEATGQPPVVPNDADWSRLPLEDFDAIVVSPGPGSPDRERDFGISRRAITDSGLPVLGVCLGHQGIAQLSAEPMHGRVSEVRHTGEDVFRGLPSPFTAVRYHSLAATDLPDELEPLAWSDDGVVMGLRHREKPLMGVQFPPESIGSDFGREIMANFRDLALAHHRARRDAADWGYELHVRRVDVLPDAEEVRRAACPAEGATFWLDSSSVLEGASPFSFLGDDRGPLAEYLTYRVADGVVSVRGSDGTTTRDAATLFSYLEEQLEPPAGPVAPDLPFEFNLGYVGYLGYELKAETTGDPAVPAPHPDAAFLFADRAIALDHQEGCCYLLALDRRGHDDGARAWLRETAETLTGLAVRVRPRPTPAMVFGVPEAAAGFGPLARARHDKDASALRNGESYEICLTNMVTAPTEATALPLYSALRRISPVPSGALLEFPELSVLSASPERFLTIGADGGVESKPIKGTRPRGAPAEEDERLRADLAGREKDRAENLMIVDLVRNDLNSVCAIGSVHVPRLFEVGDLAPVHQLVSTIRGRLRPGTSTAACVRAAFPGGSMTGAPKKRPMEIIDRLEEGPRGVLPGALGWFALSGAADLSIVIRTIVLADGRAEFGVGGAIVSLSDQEEEFRQTVVKARAMVTALDGSAVAGAR

SEQ ID NO: 3397 - DNA, 1518 bp, Symbiobacterium thermophilum
  CDS (1)..(1518)
atgtaccaccccagcctggggacctacctgagcctggccagggagtacgacctggtccccgtccaccgggaggtcctggcggacctggagacgccgatctcggtcttcatgaagctctgcctcgacgagccgtgcgccttcctgttcgaatccgtggaaggcggggagaaggtggcccgctactccttcctcggctgccggccgctcctcaccctggcccacaaggcgggcgtgagccggctgctccggggcgaggaggccgcggagtaccgcacggtgggcatggtgaccgagggcgaacggggcgagcggatggagggcgacccgctgggccacctgcggcaggtgctgcgccgctatgccgtgtatcagcccccggggctgccccggttcgcgggcgggctggtgggctacgtggcctacgacgccgtccgggcgtacgagcgcctgccgccggggccgccggacgagctgaatctgcccgattcgctgttcatggcgccggagctggtggtggtgttcgaccacctgaagcacaagctgctgctcgtcgccaacaccatgccgggcggcgagcccgacgtggcctaccgccgggcgcaggccctcctggaccgggcggtcgagcggctgcggggtccggtgcccctgccgccgggactcccgtggacccggtcccgccccctggaggtgcgggcctgccagacgccggaggacttcacggcggcggtcgagcgggccaaggcctacatccgggcgggcgacgctttccaggtggtgctctcgcagcggtgggagacccgggtgcgcagccggccgctggacatctaccgggcgctgcgcatgctcaacccgagcccctacatgttctacctgagcttcggcgacctgaaggtgatcggcgcctcgccggagctgctggtgcgggtggaggacggcgtggccaccacccggccgctggcggggacccggccccggggcgccaccgaggaggaggaccggcggctggaggcggagctgctcgccgacgaaaaggagcgggccgagcacgtgatgctggtcgacctgggccgcaacgacctgggccgggtctgtaactacgggacggtgcacgtgcaccagctcatgcacgtggagcggtactcccacgtgatgcacatcgtcagcgacatccggggcgaggtggccgaggagaaggacgcctgcgacgtgctggccgcctgtttcccggccgggaccctcaccggggcgccgaaggtgcgggcgatggagatcatcgacgagctggaaccggtgcgcaggggcatctacggtggggccgtgggctacttctcctggagcggcgccatggacacctgcatcgccatccggaccctgatcatgaagggcgaccgggtcttcatccaggccggggccggcatcgtggccgactcggacgcggaagcggagctgaacgagtcccggaacaaggcccgggcgctgatccgggccctggagctggcggaggaggggctgtga

SEQ ID NO: 3398 - protein, 505 aa, Symbiobacterium thermophilum
MYHPSLGTYLSLAREYDLVPVHREVLADLETPISVFMKLCLDEPCAFLFESVEGGEKVARYSFLGCRPLLTLAHKAGVSRLLRGEEAAEYRTVGMVTEGERGERMEGDPLGHLRQVLRRYAVYQPPGLPRFAGGLVGYVAYDAVRAYERLPPGPPDELNLPDSLFMAPELVVVFDHLKHKLLLVANTMPGGEPDVAYRRAQALLDRAVERLRGPVPLPPGLPWTRSRPLEVRACQTPEDFTAAVERAKAYIRAGDAFQVVLSQRWETRVRSRPLDIYRALRMLNPSPYMFYLSFGDLKVIGASPELLVRVEDGVATTRPLAGTRPRGATEEEDRRLEAELLADEKERAEHVMLVDLGRNDLGRVCNYGTVHVHQLMHVERYSHVMHIVSDIRGEVAEEKDACDVLAACFPAGTLTGAPKVRAMEIIDELEPVRRGIYGGAVGYFSWSGAMDTCIAIRTLIMKGDRVFIQAGAGIVADSDAEAELNESRNKARALIRALELAEEGL

SEQ ID NO: 3399 - DNA, 1476 bp, Symbiobacterium thermophilum
  CDS (1)..(1476)
atggcgacggctgagtccgtccgccgcctgccccttccgccctgggagcccgcggacctggccgcggccctgggctccgggccggtggcgctgctggacggcatcacctgggaaggccgcagggtggccctggtggcctgggccccggaggcccgcgcccgcacggtggcggaggcggctgcggcggcggacaggacccccctgccgccgcaggccccgccgctgctggctgcggcggtgggccggctggactgggacggaaccggtcgcttctgggtaccgggctcggccgcgctgttcgaccgggaggcgggcgagctctgggtgcgggggcgcctgcccgccgtccccggccgcggctgcccgccggtgcgaagcggcgcctgcgcaggtgagggcggcgctgacgcaagcgagagcagtaccaacgcaggcgagagcggcggcaccgcgggtaagagcggcggcaacacgggcgagaacggcgccaacgtgcgcaagagcggcgccgacgcaaggaagagtggcgccgacgaaggcgaggtcggtcttgccgccggccagggcggctccggaagacccggcgagcgggcatcggcacatgcgcccccgcaccgggccgtgccgctgtggccgtacccggcgtacgcggccgcggtgcgggaggcgctgacggccatggccgaaggccggctgaccaaggtgatcctctcggtgcccttcgccgccccctgccccctgccccccgcggccatctaccgcccgctgactgccggcagcccgcccgggctggggttcctcctacgggtcggcgcgggtggcgagaccctggtgggcatctcccccgagccgctggtctttctggaagccggccgcgcccacatgcacctgctggccggcacccggcccgccgagcgcgcgtcggaactcgccgccagcccgaaggaccgggaggagcatgcggtggccgtggaacaggcccgccgggacctggaggcggtctgcctaccggggagcgtcgcggtggaagccttcatggagctggagcgccacccgggcctggtccacctggcgtcacggctgtcggggacgctccggcccgacctgggccccggcgatctggtcgccgcctgcttcccggccggcacggtgggcgggattccccgggaggcggcccgggcgctgatcgatcggttggaacctgtgccgcggggctggtacgccggcgccgtgggcgcggtactgcccggcggcggactgcagctctggctcaccatccgctcgctggccctgcgggacggcaccgtcctggtccgggccggcgccggtctggtgccgggcagcgaccccgcggccgaatggcgggagtgcatggccaaggcggaacgggccctggccgcggccggcgccgcgctgcccccggcggaggagctgatgcggggcgaggacgccgtccgaggaggtgacccaacgtga

SEQ ID NO: 3400 - protein, 491 aa, Symbiobacterium thermophilum
MATAESVRRLPLPPWEPADLAAALGSGPVALLDGITWEGRRVALVAWAPEARARTVAEAAAAADRTPLPPQAPPLLAAAVGRLDWDGTGRFWVPGSAALFDREAGELWVRGRLPAVPGRGCPPVRSGACAGEGGADASESSTNAGESGGTAGKSGGNTGENGANVRKSGADARKSGADEGEVGLAAGQGGSGRPGERASAHAPPHRAVPLWPYPAYAAAVREALTAMAEGRLTKVILSVPFAAPCPLPPAAIYRPLTAGSPPGLGFLLRVGAGGETLVGISPEPLVFLEAGRAHMHLLAGTRPAERASELAASPKDREEHAVAVEQARRDLEAVCLPGSVAVEAFMELERHPGLVHLASRLSGTLRPDLGPGDLVAACFPAGTVGGIPREAARALIDRLEPVPRGWYAGAVGAVLPGGGLQLWLTIRSLALRDGTVLVRAGAGLVPGSDPAAEWRECMAKAERALAAAGAALPPAEELMRGEDAVRGGDPT

SEQ ID NO: 3401 - DNA, 2088 bp, Propionibacterium acnes
  CDS (1)..(2088)
atgatcctgctggttgacaaccacgattccttcaccttcaacctggcacacctattggccgaagtcagcgggatcgagccagtggtggtccgccccgaggaggtcgagcgtgcagggatcctccgccgattggctgatggcgaattcgaccacgtggttatcggtccaggacctggctccccgcacaacgacaaggacttcaagaccgccggacaggtgatcgatgcctccaacaagctccccctgctcggggtgtgcctgggccaccaaggcctcgggttacgtcacggtgcccagttgcagaccattcggccccatcacggcatcgtcagccgaattcatcactccaggcgtggaatcttcgccggattaccgcaagatttcgaggcaactcggtatcactcactgtgcttgaccacgttgggtgaccagatcgtcgaacatgctcgcgccgaggatggcgccatcatggcgttcgaggttgccgaccggccacactggggcgtgcaattccacccagagtcagtcatgacgcaggtcggatgtcagttaatgacgaacttcctggcgatcggcagccagccacgacacagcgaggtacgcgacaaacgcgaaccgcgcaacatccagtcacgaaagtgtgcccggactacggcacggtggacaatccaccaccaaacggtggacatcgacctcgacgaagaagccaccttcagccgcctcgctggcgacggtgacgccttctggttggactcggccaccacgcgtggcgacaccggccgttggagtgtcatgggcacggcgtcgggggcggcatccgaactggtcagttacgacgtcatcacaaacacgttgacggtcaacgggcgaacccagtctggtgatgtgctggacttcttggaacgccgtcttgcagatggagtatcacggagggacccggaactagatgacatcccattcacaggtggctatgtcggtttcctgggctatgagtgcaaggcgctgaccttgggcccgaatgcgcactgcagcgaactgcccgatgccatgtggatgcgtccggccagctggattgcgtacgaccactaccggcatcacgctcacctcctagccttggacgaccgtgacacgcccggctgcaatgaggccgctgatctattggacgcactggctgcgacgctggtgaagcgaccaggtagcagcgaagagcccgcaccgctaaccgtgcctgtggaagggtcgtggcggctcagccgagggggctaccaggaccgtgttgccgcaatccagcaggcgctaacgcgcggtgactcgtacgaggcctgtctgaccgacacgtggacctcccggtgcgacgtggacggctggcggttgtaccgcgcactgcggcgtcgaaacccagccccctatggggcgtatcttcggtttaccgacccgcgtgtggaggtgtgctcttcatccccggaacggttcctgcgagtacgcgacggcatcgctgaatccaagccgatcaaggggacaatggctcgctgtgatgatccggtggaggatgcccggggaattgtcgatttacaacatgacgcgaaaaaccgcgccgagaatctcatgatcgctgatctggtgcgcaacgacctgtcgcgcgtgtgccaaccaggcacggtggaggtaccacgtctgatggcgatcgagtcatatgcgacggtgcaccagatggtgaccacggtgcgcggacgattgcgtgaggacgtcggattggtcgacgtactgcgagcgaccttccctggtggatcgatgaccggggcaccgaaggaacggtccgtagaaatcctggacggtctggaggtcggcgcccggggaatctactcgggaatcctgggatatctcggcttcgatcgcaccgccgacctcagcatcgtgatacggacggtgatccgaacggggtcgcaggtaacggtcggtgccggcggcgcaatcgtcgcagcttcccagcctgacgaggagtggcgcgagaagaacctcaaagcggcggcaccgttggctgcgctgacgctgtcagccgggccaggaattcccgtcactcccccatag

SEQ ID NO: 3402 - protein, 695 aa, Propionibacterium acnes
MILLVDNHDSFTFNLAHLLAEVSGIEPVVVRPEEVERAGILRRLADGEFDHVVIGPGPGSPHNDKDFKTAGQVIDASNKLPLLGVCLGHQGLGLRHGAQLQTIRPHHGIVSRIHHSRRGIFAGLPQDFEATRYHSLCLTTLGDQIVEHARAEDGAIMAFEVADRPHWGVQFHPESVMTQVGCQLMTNFLAIGSQPRHSEVRDKREPRNIQSRKCARTTARWTIHHQTVDIDLDEEATFSRLAGDGDAFWLDSATTRGDTGRWSVMGTASGAASELVSYDVITNTLTVNGRTQSGDVLDFLERRLADGVSRRDPELDDIPFTGGYVGFLGYECKALTLGPNAHCSELPDAMWMRPASWIAYDHYRHHAHLLALDDRDTPGCNEAADLLDALAATLVKRPGSSEEPAPLTVPVEGSWRLSRGGYQDRVAAIQQALTRGDSYEACLTDTWTSRCDVDGWRLYRALRRRNPAPYGAYLRFTDPRVEVCSSSPERFLRVRDGIAESKPIKGTMARCDDPVEDARGIVDLQHDAKNRAENLMIADLVRNDLSRVCQPGTVEVPRLMAIESYATVHQMVTTVRGRLREDVGLVDVLRATFPGGSMTGAPKERSVEILDGLEVGARGIYSGILGYLGFDRTADLSIVIRTVIRTGSQVTVGAGGAIVAASQPDEEWREKNLKAAAPLAALTLSAGPGIPVTPP

SEQ ID NO: 3403 - DNA, 1458 bp, Leifsonia xyli
  CDS (1)..(1458)
atgctcctcccaccccgtgtgcaccacctcaacgcccccgtcgacccagccgacgccttcgcagcgctttaccccgcaggcgatgccgtctggctcgattcgggcccggacgccgcagcgggcatgagcgtcatcggcaccgggacgcgcgtcgcgacggcgtccgtggcggacgggacggtgaccgtcgacggggagacccgcaccggcagcatcgtcgaggtgctgcgggcgaccggtcgcgcggacaccgcaggctacccgctcggctggatcggctggctcggctatgaggcgggcgcggcggatctcgggcttccgcacgcgccgggcgagggacaggacgcggcgttcgtctgggcggaccggctgatcgtgttcgatcacgacaccgggcgggtgacgctcgtggacgctcgcgacggcggggcggaccctgagccagcaggcggcgaatcatcggcgggaggagcgtcggactccgcaccggcctcctccgctcctccctggctccgcgcgaccgccgccgccctcaccgctccggccgccgccggctcggccgcgcggcacctcgcggcccacccgctgcccggcccgcgcgcccaagccggctggcggtatggaccggcggcctaccgcgccctcctcgacgcctgtcagtccgccatccacgccggggatgcctaccagctctgcctgacgaacaccgcaaccgcccagacgtccgccgacccgcttgccgtccacctgcggctgcgccgggaaagccccgcaccccacgcaggtttcctccgtattggcggcgaaaccctcgtcagctcgtcgcccgagcagtttctccgggtcgagcccgatggacgggtgcgaaccaagccgatcaagggcacccggccgcgcggaacgacgcccgccgaggaccgccgcctgcgagccgagctcgaagccagcgagaaggagcgtgccgagaatgtcatgatcgtggatctcatgcggaacgatctcgctcgggtgtgcgagaccggttcggtggaggtgcggcaccttctcgccgtcgagtcgtacgcccaggtccaccagctcgtcagcacggtcgagggacgcctccgcgacggccagggcgtgctggacgctctggccgcctgtttccccgccggctcgatgaccggtgcgccgaaactgagcgccatgcgcatcctgaaccgtctcgagcagggtccgcgcggtgtctacgcggggtgtttcggcgccctcgcggccgacggttcggccgacctcgcgatggtgatccgcagtgtccagttccgcggctccgtcgccaccatcggctccggtggcgggatcaccgcgctttcggtgcccgacgaagagctcgcggaggtcggcgtgaaggcggcggcgctcttgcgtgcggctggcctggacggcgccgggaacggacaggacctgccgaacgtttag

SEQ ID NO: 3404 - protein, 485 aa, Leifsonia xyli
MLLPPRVHHLNAPVDPADAFAALYPAGDAVWLDSGPDAAAGMSVIGTGTRVATASVADGTVTVDGETRTGSIVEVLRATGRADTAGYPLGWIGWLGYEAGAADLGLPHAPGEGQDAAFVWADRLIVFDHDTGRVTLVDARDGGADPEPAGGESSAGGASDSAPASSAPPWLRATAAALTAPAAAGSAARHLAAHPLPGPRAQAGWRYGPAAYRALLDACQSAIHAGDAYQLCLTNTATAQTSADPLAVHLRLRRESPAPHAGFLRIGGETLVSSSPEQFLRVEPDGRVRTKPIKGTRPRGTTPAEDRRLRAELEASEKERAENVMIVDLMRNDLARVCETGSVEVRHLLAVESYAQVHQLVSTVEGRLRDGQGVLDALAACFPAGSMTGAPKLSAMRILNRLEQGPRGVYAGCFGALAADGSADLAMVIRSVQFRGSVATIGSGGGITALSVPDEELAEVGVKAAALLRAAGLDGAGNGQDLPNV

SEQ ID NO: 3405 - DNA, 1560 bp, Leifsonia xyli
  CDS (1)..(1560)
atgatcgccacatccagcggtacaaccagccgcgagaagttcgacgcactgaccggcgcacaccgggtgatccccgtcgtgcgcgaactgttcgcagacggggagacgccggtcggcatctaccgcaagctcgccgccggccggccgggcaccttcctgctggaatccgccgagcagggcggtatctggtcgcaattctcgttcgtcggagccgcctcgttcggcgttctgacccagcaaggggaggaggtccgctggctcgactacggactctccgccgagcgcgcgctcggccccgacgcggctggccccgatgcgtctggccgtccactcgacgctctcgcggcgctgcaccggcgctggcagtcgccgcgcatccccggcctgcccccgctgaccggggggctcgtgggcttcatcggctgggaggcgatccgccagatcgagcggctgcccgaccagccgccagcggactacgatatcccgggccaggccctcgctttcgcggccgacctcgtggcgatcgaccatcgctccggcacagtgctgctgatcgcgaacgtgctggccgatggtgtcgacgacgccgacgcgctctgggcggatgcgcagtcccggctcgatcggatgcagggcgagctggcgcagccggcggaggcgtggctcgccgaggtggatctcgctgtgcctgtgcatccccctgtctctcgcacggccaagccagacttcctcgcggcggtcgaggccgccaaggagaggatcgtcgccggggacatcttccaggtcgtcatctcgcagcgcttcgaggtggcctgcgaggccggcgcactcgatgtctaccgtgtgctccgggcgctcaaccccagcccgtacatgtacctgctggcgctggagcggcccgatggcggcgtctacgagatcgtcggatcgtccccggaggcgctggtcaaggtgcgggagggacgcgcgttcacgcaccccatcgccggttcccgcccgcgcggggccacgccggaggaggatctcgacctcgaggcttcgctcctcgccgacgacaaggagcgcgccgagcacctcatgctcgtcgatctggcccgtaacgacctgttgaaggtctgcgcggccggcagcgtcgaggtgacggagttcatgcgcgtcgagcggttcagccacatcatgcacattgtctcctccgtcgagggcgatctcctgccggacgccagtgcgctcgacgtcttccgtgccaccttcccggcggggacgctctccggcgcgcccaagccgatggcgctgtggatcatcgacgagctggagcccgcgcagcgcggcgtttacgggggagtggtcggctacttcgacttcgccgccgacgccgatctcgcgatcgcgatccgcacggcgacgatcatggacggtgtggcgcgtgtgcaggccggcggcgggctggtcgccgactccgttcccgagtcggagttcgaggagtcgcagaacaaagcggcggcgccgttgcgggcggtggccgtcgccaatgcactgagacgggtgcagggtgcggactga

SEQ ID NO: 3406 - protein, 519 aa, Leifsonia xyli
MIATSSGTTSREKFDALTGAHRVIPVVRELFADGETPVGIYRKLAAGRPGTFLLESAEQGGIWSQFSFVGAASFGVLTQQGEEVRWLDYGLSAERALGPDAAGPDASGRPLDALAALHRRWQSPRIPGLPPLTGGLVGFIGWEAIRQIERLPDQPPADYDIPGQALAFAADLVAIDHRSGTVLLIANVLADGVDDADALWADAQSRLDRMQGELAQPAEAWLAEVDLAVPVHPPVSRTAKPDFLAAVEAAKERIVAGDIFQVVISQRFEVACEAGALDVYRVLRALNPSPYMYLLALERPDGGVYEIVGSSPEALVKVREGRAFTHPIAGSRPRGATPEEDLDLEASLLADDKERAEHLMLVDLARNDLLKVCAAGSVEVTEFMRVERFSHIMHIVSSVEGDLLPDASALDVFRATFPAGTLSGAPKPMALWIIDELEPAQRGVYGGVVGYFDFAADADLAIAIRTATIMDGVARVQAGGGLVADSVPESEFEESQNKAAAPLRAVAVANALRRVQGAD

SEQ ID NO: 3407 - DNA, 1545 bp, Debaryomyces hansenii CBS767
  CDS (1)..(1545)
atgttttctaaaattcaaccatcgcttgaagcattgacttcaattgttcaatcacatcaagatgatgaaaataagcctaatttgtatccaatttacaaatatgttacagcagatgatttgactgttcataaagcatatttgaaattagcaaaattgaacgacccaaagagatcaccatcatttttatttgagtcggcagttaacggtgataccgttgatagatactcgtttattggtctcaatccaaggaaagtgataagaactggtgaagacgaaagattattccctaaagagcattgtaatgttgatccaattaccatattagaaaaggaacttgcaaagtataatcaaattcaattaccgggattgccaaaatttagtggtggtgcagttggttacatttcatatgattgtattaaatacttcgaacctaagactcgtaagcccttagaagatgtattacagttaccagaagctgtgttaatgttatgtgatttaattgttgcattcgaccgtgtttatgatagatttcagatcatcaataatgtggcggttactgattcaaatgatttacaagcaagcttcaataaagctgccgaagcgattgataatgtggaaaagattttaagatccgaatctacaccagaagaaataaacccaaaacaacctccaatcaaggctaatcaaacgttcacatcaaacataggtcaagaaggttacgagggccatgtttcgaccttgaagaagcacatcttaaaaggtgacatcatccaggcggttccatctcaaagggttgctagacctacgtcattacatccattcaacatatatcgtcatttaagaactgtgaacccatcaccatatttgttctacatagatcttattgattttgagattatcggtgcatccccagagcttcttgtgaaagcggatgaaaagggtaaggttgtgactcatccaattgccggaactgtgaagagaggtaaaactaacgaagaagatgaagcaaatgccgaaattttaagatcgagtttgaaggacagggcggaacacatcatgttggtggatttggcccgtaacgacataaatagaatctgtacgccggaaagcaacaaagtagaccgtctcttgacaattgaaagattctctcacgttatgcatttggtatctgaagtgagcggtaccttgagatcggataaaacgaggtttgatgccttcagatctattttccctgctggaacagtaagtggtgcaccaaaggttaaagccatggagttaattggtacactcgagaaagagaagagaggtgtttatgcgggtgctgttggtcactggggttatgatggtaagaccatggacacttgtatcgccttgagaaccatggtttacaagaatggcattgcatatttgcaagctggtgggggaattgttttcgacagtgatgaatatgatgaatacgtggaaactatgaataagatgaaggccaacaatcagaccattattgatgccgaaaaggtttggattgaaaaagttggacaagaatag

SEQ ID NO: 3408 - protein, 514 aa, Debaryomyces hansenii CBS767
MFSKIQPSLEALTSIVQSHQDDENKPNLYPIYKYVTADDLTVHKAYLKLAKLNDPKRSPSFLFESAVNGDTVDRYSFIGLNPRKVIRTGEDERLFPKEHCNVDPITILEKELAKYNQIQLPGLPKFSGGAVGYISYDCIKYFEPKTRKPLEDVLQLPEAVLMLCDLIVAFDRVYDRFQIINNVAVTDSNDLQASFNKAAEAIDNVEKILRSESTPEEINPKQPPIKANQTFTSNIGQEGYEGHVSTLKKHILKGDIIQAVPSQRVARPTSLHPFNIYRHLRTVNPSPYLFYIDLIDFEIIGASPELLVKADEKGKVVTHPIAGTVKRGKTNEEDEANAEILRSSLKDRAEHIMLVDLARNDINRICTPESNKVDRLLTIERFSHVMHLVSEVSGTLRSDKTRFDAFRSIFPAGTVSGAPKVKAMELIGTLEKEKRGVYAGAVGHWGYDGKTMDTCIALRTMVYKNGIAYLQAGGGIVFDSDEYDEYVETMNKMKANNQTIIDAEKVWIEKVGQE

SEQ ID NO: 3409 - DNA, 1524 bp, Yarrowia lipolytica CLIB99
  CDS (1)..(1524)
atgatccaactcagacccactctagaggctcttcagaccatcgtggccgacaaccgagccgccgccaccaaggagactcttcccgacaacctctatcccgttttcgcctatgtggatgctgaggccctgactcctcatactgcctacctcaagttggctcgtctggatgaccccaaccgaagtccctcgttcctgttcgagtctgccctcggtggtaagcatctgtcccgatactctttcattggatctaatccccggaagatgatcaagactggtgctccccatggacctgacgttgatccgctcaacctgctggagtctgaactcgaccagtaccgacagttccagacccccggcgtccccactctttgtggaggagccatcggatacatttcgtacgactgcatcaagtacttcgagccccgaaccaagcgagatctcaaggacgtcctggaggtccccgaaagtgccctcatgctctacgacaccattgtggcctttgaccacgtctaccagcgactccaggttatcaccaatgtcaaggttgaggccgacaccgatctcaccaaggcctacgaggacgccaagaaggaggtgcagcgaatcgcagacctgctgacttcccctgaggttccccagcccccccagggacccgtgacccttggaaagactttcacttccaacattggccagaagggttacgaacagcacgtgaccactcttaaggagcgaatcaagaagggagacatcatccaggccgtgccctcacagcgagtagctcggcccaccgacctgcatcccttcaacgtctacagacacctgcgaaccgtcaacccctctccctacctgttctacattgactatcttgatttccagcttgttggtgcttctcctgagctgctcgtcaagattgagaacggccgaattgtgtctcatcccattgctggaacggttaagcggggagctactcctgccgaggataaccagctggctcaggagcttctcaactctgagaaggaccgagctgagcacgtcatgctggtcgatttggcccgaaacgatgtcaaccgagtatgtgatcctcgatccacttccgtcgatcggcttttgggtgtcgaaaccttctcgcacgtccagcatctcgtttcccaggtgtctggtgttctgcgacccgaccagacccgattcgacgccttccgatccattttccctgccggaaccgtttctggtgcccccaaggtcaaggccatggagctggttggagagcttgagaaggaaaagcgaggtgtctacgccggtgccgttggatctttcggctacaacggagaggccatggacacttgcattgctcttcgaactatgcttctcaaggacggtgttgcgtacctgcaggccggaggaggcattgtcttcgattctgacgagtacgacgaatatgtcgagactatcaacaagatgatggcaaacaaccggtgtattgtcgaggccgaggagatctgggctggacagcagaagggtgagtag

SEQ ID NO: 3410 - protein, 507 aa, Yarrowia lipolytica CLIB99
MIQLRPTLEALQTIVADNRAAATKETLPDNLYPVFAYVDAEALTPHTAYLKLARLDDPNRSPSFLFESALGGKHLSRYSFIGSNPRKMIKTGAPHGPDVDPLNLLESELDQYRQFQTPGVPTLCGGAIGYISYDCIKYFEPRTKRDLKDVLEVPESALMLYDTIVAFDHVYQRLQVITNVKVEADTDLTKAYEDAKKEVQRIADLLTSPEVPQPPQGPVTLGKTFTSNIGQKGYEQHVTTLKERIKKGDIIQAVPSQRVARPTDLHPFNVYRHLRTVNPSPYLFYIDYLDFQLVGASPELLVKIENGRIVSHPIAGTVKRGATPAEDNQLAQELLNSEKDRAEHVMLVDLARNDVNRVCDPRSTSVDRLLGVETFSHVQHLVSQVSGVLRPDQTRFDAFRSIFPAGTVSGAPKVKAMELVGELEKEKRGVYAGAVGSFGYNGEAMDTCIALRTMLLKDGVAYLQAGGGIVFDSDEYDEYVETINKMMANNRCIVEAEEIWAGQQKGE

SEQ ID NO: 3411 - DNA, 1527 bp, Kluyveromyces lactis NRRL Y
  CDS (1)..(1527)
atggcttctgatcatattactattcagccatcaattgaggtgattaaagaatgcatcgctgctaatgatgattccatcaatatgtacccagtataccacttcatgccagcaatggaccttacacctcatgtggcgtatttgaaaatgagtgagttgaacaataaggagaggtcaccatcttttctatttgaatccgcaaacggtaaccaattgagtcgatactcgttttttggtcatagtccacgtaagattatcaagactggtcctactgaaggtcaagcgtgtgacccattgaatattctacaagacgaattggctcagtatcgattggctgaaaatgttccaggcttacccaagctttctggtggtgctattggttatgtttcttacgactgtgttcagtattttgaaccaaagacgaagagaccattgaaagatgtgctacaagtaccagaatctgctttgatgctatacgataccattgttgcatttgatcatgttttccaaaggttccagatcataactaatatcaatgtgaagacggtctcatctttggaacaaggttacgaagatgcatctgagattatcaaacgcattatcgccatcttgaaggatgaatctagtccgataccattacctgaacaaccatcaatcaaattgaaccagactttcacatcaaacattggtcaagaaggatacgaacagcacgtgagagatttgaaagaacatatcaagaagggtgatatcatccaatgtgttccatctcaacgtgtcgctagaccaacttcacttcacccattcaatatctacaaacacttgcgtactgtgaatccctcgccatacttattctatatcgattatttggatttccaaatcattggtgcttcacctgaattgttatgccaagttgatgccaaaaacgaagttatcactcatcccattgctggtacagtcagaaggggtcagactccagaagaagatgacagattagcggaagagttgagaaattctactaaggacagagcagaacatgtgatgttagttgatctagcccgtaatgatgtgaacagggtctgtgatccaaccaccacttccgtggatgagttactttcagtgcaaaagttctctcacgtccaacatcttgtctctcaagtcagtggtacactaaggaaggatcaaaacagatttgatgctctaaggtctattttccctgcaggaacagtttctggtgctcctaaggtcaaggccatggaattgatcggagaactggaaggtgaaaaacggggtgtttacgctggtgccgttggacactggtcatatgacggaaaatccatggacacatgcattgccttgagaacaatggtttataaagacggtatagcctatttgcaagctggtggtggtatcatatttgattctgacccatatgatgagtacgtagaaacaatgaacaaaatgaaagctaaccacaatactattctacaagcagagcaaatttgggctgagaaagttggcactcaagactag

SEQ ID NO: 3412 - protein, 508 aa, Kluyveromyces lactis NRRL Y
MASDHITIQPSIEVIKECIAANDDSINMYPVYHFMPAMDLTPHVAYLKMSELNNKERSPSFLFESANGNQLSRYSFFGHSPRKIIKTGPTEGQACDPLNILQDELAQYRLAENVPGLPKLSGGAIGYVSYDCVQYFEPKTKRPLKDVLQVPESALMLYDTIVAFDHVFQRFQIITNINVKTVSSLEQGYEDASEIIKRIIAILKDESSPIPLPEQPSIKLNQTFTSNIGQEGYEQHVRDLKEHIKKGDIIQCVPSQRVARPTSLHPFNIYKHLRTVNPSPYLFYIDYLDFQIIGASPELLCQVDAKNEVITHPIAGTVRRGQTPEEDDRLAEELRNSTKDRAEHVMLVDLARNDVNRVCDPTTTSVDELLSVQKFSHVQHLVSQVSGTLRKDQNRFDALRSIFPAGTVSGAPKVKAMELIGELEGEKRGVYAGAVGHWSYDGKSMDTCIALRTMVYKDGIAYLQAGGGIIFDSDPYDEYVETMNKMKANHNTILQAEQIWAEKVGTQD

SEQ ID NO: 3413 - DNA, 1455 bp, Erwinia carotovora
  CDS (1)..(1455)
atgactgccgccaatacgactcacgtcactcatacaagagattctgcaaacgattcggccaccgcgacaggctccgccgttctctatcacgcgctgccttactacccgaacgtattgctcgatcgctttgcgcccttttctcaacagccgtgggctatgttgctgcattcggggtttgccgatcatccgcacaatcgcttcgatgtcatggtcgctgacccgcgagtcacgctatgcacgcgggggggcaagacggaaatcacaagtgacggcgtaacgaatacagtagagagcgatccatttactctgctgcagcaacagttggatgcattggcgctacccaccgaaacccaccttgatttcccttttcaggggggcgcacttggcctgttcggctacgatttggggcgtcagattgaaacgttgcccacacaggcagaacaggatatcgacctgccagacatggcgattggattatacgactgggcgctgattgccgatcatcaccggcaaacactaacgctgatcgtacatcattctcttcaggcgcgacttgactggttagccaacccgcccgttaacacgacgaaagtcggtttcaacctcaccagcgactggcaaccgaatatgtcacgcgacgcatacggtgaaaaattctgcaaaatacaggactatcttctggcgggcgattgctatcaggtcaatctggcgcagcgtttttctgccgcttatgcgggcgatgaatggcaggcgtttgtacaactgtccgcaggaaataaagcgcccttttctgccttcctgcgcctgccggaaaatacggtaatcagcgtgtcgccggaacgctttctctggctggaaaacaatcacattcaaacgcgcccgattaaagggacattaccgcgcctcgcagacccggatgctgataaacagcaggcagtacggctcgcaagttccgagaaagatcgctctgaaaacctgatgattgtcgatctactgcgcaacgatattggccgcgtcgcggttccgggcagcgttcgtgtacctgagttgttcgtcgtcgaaccttttcccgcggtacatcatctagtcagtacgattgaagcacagctaccggaagattgccctgccaccacactgctacgcgcctgtttccccggaggatcgattaccggcgcaccaaaaatccgtgctatgcagattattgaagaactagagcctcagcgccgcaatgcttactgcggcagcctcggttacattagcctgtgtggaaccatggacactaacatcaccatcaggacgttattaaccgaacacggcagaatttactgctgggcgggtggcggcatcgtcgccgatagccaggaacaggctgaatatcaggaaacgtttgataaagtgggccgcattctccccctactggaggattcccaaataactcaggtaccgagtaaatga

SEQ ID NO: 3414 - protein, 484 aa, Erwinia carotovora
MTAANTTHVTHTRDSANDSATATGSAVLYHALPYYPNVLLDRFAPFSQQPWAMLLHSGFADHPHNRFDVMVADPRVTLCTRGGKTEITSDGVTNTVESDPFTLLQQQLDALALPTETHLDFPFQGGALGLFGYDLGRQIETLPTQAEQDIDLPDMAIGLYDWALIADHHRQTLTLIVHHSLQARLDWLANPPVNTTKVGFNLTSDWQPNMSRDAYGEKFCKIQDYLLAGDCYQVNLAQRFSAAYAGDEWQAFVQLSAGNKAPFSAFLRLPENTVISVSPERFLWLENNHIQTRPIKGTLPRLADPDADKQQAVRLASSEKDRSENLMIVDLLRNDIGRVAVPGSVRVPELFVVEPFPAVHHLVSTIEAQLPEDCPATTLLRACFPGGSITGAPKIRAMQIIEELEPQRRNAYCGSLGYISLCGTMDTNITIRTLLTEHGRIYCWAGGGIVADSQEQAEYQETFDKVGRILPLLEDSQITQVPSK

SEQ ID NO: 3415 - DNA, 1563 bp, Erwinia carotovora
  CDS (1)..(1563)
atgcaaacaacacaacctaaactggaactgctgcgtattgaggccgtttaccgtaacgaccccagcgccatcttccatcagctctgcggtgccagaccggcaacgttgctgttagagtcggctgaaatcgacagcaaggaaaacctgaaaagcctgttgatcgtagatagcgcactacgcatcaccgcactgggtcagcacgtttccattcaggcactcacggcaaacggcgccagccttctgccgcttctggatgccgcgctgccagtggagattatcaatcagccgcgtccgaacggtcgtgaactcacgttcccactggcagacgccatgcaggacgaagatgctcgcctgcgttcgctgtccgtgtttgacgccttacgtcagattctgacgctggtcgcctgcccgatagatgagcgtgaagctatgtttctcggcggcctgttcgcctacgatctggtcgccgggtttgaagaattacctgcgctgaaccagcagcagcgttgcccggatttttgcttctatctggcagaaacgctgctggtgcttgaccaccaaaaacgtgtgaccgctctgcaagccagcctgtttacaccgaaccatagcgaaaagcagcgtctgcaacagcgtctggaacagctgcaacttcagctcactcagcccgcgcccgcgctgccgcgtcagtccatcgaagacatgacgctgagctgcaaccagagcgatgaggctttcggggaagtcgtcagccagatgcaggaagctatccgcatcggtgaaattttccaggtcgtgccgtcacgtcgtttctctctgccgtgtccttcaccgctggccgcctaccaaacgctgaaggatagcaatcccagcccttacatgttttacatgcaggatcaagacttcacgttgttcggtgcctcgccggaaagctcgctgaaatacgatgcagacagccgtcaaatcgaaatctatccgattgccggtactcgcccgcgcggtcgccgtgccgatggctcgctggatcgcgatctcgatagccgtattgaactggaaatgcgtaccgaccataaagagctggctgagcatttgatgctggtagatttagcccgtaacgatctggcgcgcatctgtcagccgggtagccgttacgttgctgacttgaccaaagtggaccgctattcctttgtcatgcatctggtctcccgcgttgtggggacattgcgtgaagatttagatgtgctgcacgcctaccgcgcctgcatgaatatgggcacgctaagcggcgcgccgaaagttcgggccatgcagctgattgccgaaagtgagaaaacccgacgcggcagctacggcggcgcggtgggctacttcaccgctcacggcgacctggacacctgcatcgtcattcgctccgcctatgtcgaagacggtattgccactgttcaggccggtgcgggcgtggtgctggattctaaccctcaagccgaagccgacgaaacacgcaataaagcccgggccgtactgcgagccattgccagcgcgcaccatgcaaaggagattttctga

SEQ ID NO: 3416 - protein, 520 aa, Erwinia carotovora
MQTTQPKLELLRIEAVYRNDPSAIFHQLCGARPATLLLESAEIDSKENLKSLLIVDSALRITALGQHVSIQALTANGASLLPLLDAALPVEIINQPRPNGRELTFPLADAMQDEDARLRSLSVFDALRQILTLVACPIDEREAMFLGGLFAYDLVAGFEELPALNQQQRCPDFCFYLAETLLVLDHQKRVTALQASLFTPNHSEKQRLQQRLEQLQLQLTQPAPALPRQSIEDMTLSCNQSDEAFGEVVSQMQEAIRIGEIFQVVPSRRFSLPCPSPLAAYQTLKDSNPSPYMFYMQDQDFTLFGASPESSLKYDADSRQIEIYPIAGTRPRGRRADGSLDRDLDSRIELEMRTDHKELAEHLMLVDLARNDLARICQPGSRYVADLTKVDRYSFVMHLVSRVVGTLREDLDVLHAYRACMNMGTLSGAPKVRAMQLIAESEKTRRGSYGGAVGYFTAHGDLDTCIVIRSAYVEDGIATVQAGAGVVLDSNPQAEADETRNKARAVLRAIASAHHAKEIF

SEQ ID NO: 3417 - DNA, 1311 bp, Acinetobacter sp
  CDS (1)..(1311)
atgctccttcaacagtctgaagtgactggattagtttttttgaataataaggatcagccgattatcggatttaatcctgctacattttgtatttttcaagatcatcaacttcattactacaaaagagatgaatcaaatcaatatatcgaggatcaagataataccgagctgactgaatttatcatttttcagaattctgaatattctacaaaaagtataaatagtaaatttcagggtggttatattggattcattggctatgattatgctgcatcacaatatgtaaataccgatttctgtgtacaacctgcgctttatgtaggcaaatatctgagttacctgactcaagaaaatgacgaatggtatttttatagtcaatctccaaatgctgaaactgaatatttacaactacttagtattttcacccaacaaatttctgagaataactcaagcttctatatatcaacaccatttcaatcccgatggacaaaatcgacatatttaaaggcttttgaaaaaattcaggattacatcaaatcaggggattgttatcaaattaatttgacacaagaatttcaaacgcactgcaaaggaaatttactttcaaaagccgatcaactttgggatttaaccaatgctccttacgcaggttatttgcagataggtgattttgaattactcagttgttcgcctgagttatttatcgaatttaatgagtatcgacaaatcaagacacgtcctattaaaggaactatgccgcgttttgataatgccgagttagatcaaatgtctaaacaaaaattacaagcatcagaaaaagatcaggcagaaaatgtcatgattgtcgatctgttacgtaatgatctaagtgtctatgcagaagttggctcagtaaaaacaacaaaactttttgaaattgaaagcttcaatcaggttcatcatatggtcagtgaaatcacggccacgctcaaagctgatgttaatccttttgaggtcttactcactgctttaccaggtggttcgattactggtgctcccaagattcgagccatgcagattatagatgagcttgaaggcgagccacgtggggcttattgcggttctttaggttactttaattttgatggtacaggttgctggaatattttaattcgtagtctgcaacggtatcaagatcaactttctttatgggcaggtggtggcattaccatcgcatcaaactctgaggctgaatatcaggaatgttttgataaagtctctgccatgctgaatctaatcaatacatggcaaagcatgcaaagcacggcttaa

SEQ ID NO: 3418 - protein, 436 aa, Acinetobacter sp
MLLQQSEVTGLVFLNNKDQPIIGFNPATFCIFQDHQLHYYKRDESNQYIEDQDNTELTEFIIFQNSEYSTKSINSKFQGGYIGFIGYDYAASQYVNTDFCVQPALYVGKYLSYLTQENDEWYFYSQSPNAETEYLQLLSIFTQQISENNSSFYISTPFQSRWTKSTYLKAFEKIQDYIKSGDCYQINLTQEFQTHCKGNLLSKADQLWDLTNAPYAGYLQIGDFELLSCSPELFIEFNEYRQIKTRPIKGTMPRFDNAELDQMSKQKLQASEKDQAENVMIVDLLRNDLSVYAEVGSVKTTKLFEIESFNQVHHMVSEITATLKADVNPFEVLLTALPGGSITGAPKIRAMQIIDELEGEPRGAYCGSLGYFNFDGTGCWNILIRSLQRYQDQLSLWAGGGITIASNSEAEYQECFDKVSAMLNLINTWQSMQSTA

SEQ ID NO: 3419 - DNA, 1521 bp, Candida glabrata CBS138
  CDS (1)..(1521)
atgcagattcaaccagacttacctactcttaagggtctctatgagcagaacaatgccctggatgaagggattaacatgtatccggtgtatgcgtttctgcctgcacttgatcttactccacacgtcgcttatttgaagctggcacaattgaacaacaaggatagaactgagtcgttcttgctggaaagtgccaaaaccactgatgaattggaccgttactctttcattggtgtgtcaccaagaaagattataaagactggacctacggaaggcattgagactgatcctctagatgtattggaagaagagatgtcccagttcaagctggccacaaacgtgccaggtttaccgaaactaagtggtggtgccatcggttacatatcctacgactgtataaggtattttgagccaaaaacgaaaagagacttgaaggatgtgctacaattgccagaggcctatttgatgatgtgtgacactattatagcctttgatcacgtattccaaagattccaaatcatgcataacatcaacactaaaaagcaatctctagaggaaggttacagtcacgcagtagaaatcatcaatgacattataaagagaatgactgatgattcaaagccaataccttaccctgaacaaccaccaatcaaaatggacaggtccttccagtctaatatcggtcaagaaggttacgaaaaccacgtcggcaacttgatagaacacataaaaaagggtgacatcattcaagcggttccttctcagcgagttgcaaggccaacagacctacatccattcaacatttacaggcatctacgtacagttaacccatcgccatatctcttttacatcgactgtctggatttccaaattatcggtgcttccccagaacttctatgtaaatccgatagcaagaataaagtaatcacacatccaattgctggtactatcaagagaggtgctacaactgaggaagatgatgaattaggtaaccaactgcgtaactctttgaaagatagagccgaacatgttatgctggtggatcttgctcgtaatgacatcaaccgtgtttgtgatccaaagacaacgaacgtcgacaagttactgacaattcaaaaattttcacatgtgcaacatttggtatctcaagtcagtggtactttaagaccggacaagactagattcgatgctttcagatctattttcccagccggtactgttagtggtgcacctaaagttaaagccatggaattaatctcagaactagaaggtgaaagacgtggtgtttacgctggtgccgttggtaactggtcttatgatggtaaaactatggatacctgtattgctcttagaacaatggtttacaaaaatggaacggcttacctgcaagcaggtggtggtattgtgtttgattccgacaagtacgatgaatatatagaaaccatgaacaaaatgatggctaatcacaataccattgttcaagctgagaagatttgggctgaaaaggttggaacgactaactaa

SEQ ID NO: 3420 - protein, 506 aa, Candida glabrata CBS138
MQIQPDLPTLKGLYEQNNALDEGINMYPVYAFLPALDLTPHVAYLKLAQLNNKDRTESFLLESAKTTDELDRYSFIGVSPRKIIKTGPTEGIETDPLDVLEEEMSQFKLATNVPGLPKLSGGAIGYISYDCIRYFEPKTKRDLKDVLQLPEAYLMMCDTIIAFDHVFQRFQIMHNINTKKQSLEEGYSHAVEIINDIIKRMTDDSKPIPYPEQPPIKMDRSFQSNIGQEGYENHVGNLIEHIKKGDIIQAVPSQRVARPTDLHPFNIYRHLRTVNPSPYLFYIDCLDFQIIGASPELLCKSDSKNKVITHPIAGTIKRGATTEEDDELGNQLRNSLKDRAEHVMLVDLARNDINRVCDPKTTNVDKLLTIQKFSHVQHLVSQVSGTLRPDKTRFDAFRSIFPAGTVSGAPKVKAMELISELEGERRGVYAGAVGNWSYDGKTMDTCIALRTMVYKNGTAYLQAGGGIVFDSDKYDEYIETMNKMMANHNTIVQAEKIWAEKVGTTN

SEQ ID NO: 3421 - DNA, 1407 bp, Staphylococcus aureus
  CDS (1)..(1407)
atggatatattttataaaaaaataaaagcaaatgtaacgccagaagttttagcacaacttcattccaagaagatcattttggaaagtacaaatcaacaacaaactaaaggtcgctattcagttgttatttttgatatttatggcactttaactttagataatgatgtattatcagtaagcactttaaaagaatcgtatcaaatcagtgaaagaccgtaccattatttaacgactaaaataaatgaagactaccataatattcaagatgagcaacttaagtcattaccgtttatatctggatatgttgggacgtgtagctttgatttagtaagacatgaatttcctaaattgcaatcaatacaattagaagatcacaagcagcacgatgtaaggttatatatggttgaacaagtttatgtatttgaccattacaaagatgagttatatatcatcgcgacgaatcaattttcaaattcaacaaaatcagatcttgagaatcgagttaataagtctatcgaagacttaactaaaatccaaccattcatgcctacacaagattttgattttaaaactaaagaaattcaatcaaacatttctgaagaaagatttatcgaaatgattcagtatttcaaagagaaaataacagaaggggatatgtttcaagttgtgccatcaagaatttacaaatatgcgcatcatgctagtcagcatttaaatcaactttcgtttcaactgtatcaaaatttaaaacgacaaaacccaagtccatatatgtattatcttaatatcgatcaaccatatattgtcggtagttctcccgaaagtttcgtaagtgtcaaagatcaaattgtaacaactaatcctattgcaggtacgattcaacgtggtgagacgacacaaatagataatgagaatatgaaacaactacttaatgatccaaaagaatgcagcgaacatcgtatgctagttgatttagggcgtaatgatattcatagagtaagtaaaatcggtacctcaaaaattactaaattaatggttattgaaaaatatgaacatgttatgcatatcgtaagtgaagtcacaggtaaaataaatcaaaatttatcgccaatgacagttattgcgaatttattaccaacaggtaccgtttcaggtgcaccaaaattacgtgcaattgaaagaatatatgaacaatatccacataaacggggcgtttatagtggtggtgttggatacataaattgtaatcataacttagattttgcattagcaattcgaacgatgatgatagatgagcagtatatcaacgtagaagctggttgtggcgttgtatatgattctattcctgaaaaagaactgaatgaaacgaaattgaaagctaaaagcttattggaggtgagcccatga

SEQ ID NO: 3422 - protein, 468 aa, Staphylococcus aureus
MDIFYKKIKANVTPEVLAQLHSKKIILESTNQQQTKGRYSVVIFDIYGTLTLDNDVLSVSTLKESYQISERPYHYLTTKINEDYHNIQDEQLKSLPFISGYVGTCSFDLVRHEFPKLQSIQLEDHKQHDVRLYMVEQVYVFDHYKDELYIIATNQFSNSTKSDLENRVNKSIEDLTKIQPFMPTQDFDFKTKEIQSNISEERFIEMIQYFKEKITEGDMFQVVPSRIYKYAHHASQHLNQLSFQLYQNLKRQNPSPYMYYLNIDQPYIVGSSPESFVSVKDQIVTTNPIAGTIQRGETTQIDNENMKQLLNDPKECSEHRMLVDLGRNDIHRVSKIGTSKITKLMVIEKYEHVMHIVSEVTGKINQNLSPMTVIANLLPTGTVSGAPKLRAIERIYEQYPHKRGVYSGGVGYINCNHNLDFALAIRTMMIDEQYINVEAGCGVVYDSIPEKELNETKLKAKSLLEVSP

SEQ ID NO: 3423 - DNA, 1407 bp, Staphylococcus aureus
  CDS (1)..(1407)
atggatgtattctataaaaaaataaaagcaaatgtaacacctgaagttttagcacaacttcattccaagaagatcattttggaaagtacaaatcaacaacaaactaagggtcgctattctatagtgatatttgatatctacggtactttaactttagataacgatgtattatcagtaagcactttaaaagagtcgtatcaaatcactgaaagaccgtatcattatttaacgactaaaataaatgaagactaccataatattcaagatgagcaacttaagccaataccgtttatatctggatatgttgggacgtgtagctttgatttagtaagacatgaatttcctaaattgcaatcaatacaattagaggatcacaagcaacacgatgtacggttatatatggttgaacaagtttatgtatttgaccattacaaagatgagttatatatcatcgcgacgaatcaattttcaaattcaacgaaatcagatcttgagaatcgagttaataagtctatcgaagacttaactaaaatccaaccattcatgcctacacaagattttgattttaaaactaaagaaattcaatcaaatatttctgaagaaagatttatcgaaatgattcagtatttcaaagagaaaataacagaaggggatatgttccaagttgtgccatcaagaatttacaaatatgcgcatcatgctaatcagcatttaaatcaacttacgtttcaactgtatcaaaatttaaaacgacaaaacccaagtccatatatgtattatcttaatatcgatcaaccctacattgtcggtagttctcccgaaagtttcgtaagtgtcaaagatcaaattgtaacaactaatcctattgcaggtacgattcaacgtggtgagacgacacaaatagataatgagaatatgaaacaactacttaatgatcctaaagaatgcagtgaacatcgtatgcttgttgatttagggcgtaatgatattcatagagtaagtaaaataggtacctcaaaaattactaaattaatggttattgaaaaatatgaacatgttatgcatatcgtaagtgaagtcacaggtgaaataaatcaaaatttatcgccaatgacagttattgcgaatttattaccaacaggtaccgtttcaggtgcaccaaaattacgtgcaatcgaaagaatttacgaacaatatccacataaacgtggcgtttatagtggtggtgttggatacataaattgtaatcataacttagattttgcattagcaattcgaacgatgatgatagatgagcagtatatcaacgtagaagctggttgtggggttgtatatgattctattcctgaaaaagaactaaatgaaacgaaattgaaagccaaaagtttattggaggtaagcccatga

SEQ ID NO: 3424 - protein, 468 aa, Staphylococcus aureus
MDVFYKKIKANVTPEVLAQLHSKKIILESTNQQQTKGRYSIVIFDIYGTLTLDNDVLSVSTLKESYQITERPYHYLTTKINEDYHNIQDEQLKPIPFISGYVGTCSFDLVRHEFPKLQSIQLEDHKQHDVRLYMVEQVYVFDHYKDELYIIATNQFSNSTKSDLENRVNKSIEDLTKIQPFMPTQDFDFKTKEIQSNISEERFIEMIQYFKEKITEGDMFQVVPSRIYKYAHHANQHLNQLTFQLYQNLKRQNPSPYMYYLNIDQPYIVGSSPESFVSVKDQIVTTNPIAGTIQRGETTQIDNENMKQLLNDPKECSEHRMLVDLGRNDIHRVSKIGTSKITKLMVIEKYEHVMHIVSEVTGEINQNLSPMTVIANLLPTGTVSGAPKLRAIERIYEQYPHKRGVYSGGVGYINCNHNLDFALAIRTMMIDEQYINVEAGCGVVYDSIPEKELNETKLKAKSLLEVSP

SEQ ID NO: 3425 - DNA, 1428 bp, Bacillus thuringiensis
  CDS (1)..(1428)
atgaaaggcatgatgacaaaagaggaatttataaaacagaaagaacaaagaaaaacatttttagtaatcgctgaagaagaaggagatagcattacgccaatttctttatatagacgtatgaaaggtaaaaagaaatttttattagaaagctcacagcttcatcaagataaaggacgctattcttacttaggttgtaatccatatggtgaagtgaaaagcgctggtacggaagtggaacgaaccatttacggcagagcagaaaagttgcaaagtaacgtactacaagtgttagaagaaataatcgcgcccgctcaagtagatagtccttttccattttgcggaggagcagttggatacattggctatgacgtcattcggcaatatgaaaacattggagcagatttacatgatccattgaatattccagaagtacaccttttactgtaccgtgagtttatcgtgtatgaccacttacgccaaaagttgtcgtttgtatatgtatgcagggaagatgattcagcagattatgaagaagtatacgaaaggctgcgagtatacaaagaggaagtgctacagggagaagaagcggaagtagctgaaataagatcaacattatcattcacttcttctataacggaaagagaattttgcgtgatggtagaaacggcgaaagaacacatcggggccggggatatatttcaagttgtattatctcagcgtttgcaaagcgaatgtattggagatccattcgcgttatatcgaaaacttcgaattgccaatccatcaccatatatgttttatatcgattttcaagattatgttgtactcggttcttcgccagaaagtttgttatcagtaagagaagataaagtgatgacgaatccaattgccggtacgagaccgagagggaaaacaaagcaggaggatacggaaattgaaaaagaactgttagaaaatgagaaagagcgagcggagcatatgatgcttgtagatcttgggcgaaatgatattggtagagtgagtgaaatcggctcagttacgatagataaatatatgaaagtagaaaagtattctcacgttatgcacattgtatctgaagtttacggaacattgcgaaaacggatgaacggatttgatgcattagcgtactgtttaccagcggggacggtatcaggtgctccgaaaattagagcgatggaaattataaatgagctagagaatgaaaaaagaaatgtgtacgccggtgcagttggatacgttagtttttcagggaatcttgatatggcgctcgccattcgaacaatggttgtaaaggatgaaaaagcatacgttcaggcaggagcgggtattgtttacgattcagatccagtagctgaatatgaagaaacattaaataaagcgagagcgctattggaggtaatgaaatga

SEQ ID NO: 3426 - protein, 475 aa, Bacillus thuringiensis
MKGMMTKEEFIKQKEQRKTFLVIAEEEGDSITPISLYRRMKGKKKFLLESSQLHQDKGRYSYLGCNPYGEVKSAGTEVERTIYGRAEKLQSNVLQVLEEIIAPAQVDSPFPFCGGAVGYIGYDVIRQYENIGADLHDPLNIPEVHLLLYREFIVYDHLRQKLSFVYVCREDDSADYEEVYERLRVYKEEVLQGEEAEVAEIRSTLSFTSSITEREFCVMVETAKEHIGAGDIFQVVLSQRLQSECIGDPFALYRKLRIANPSPYMFYIDFQDYVVLGSSPESLLSVREDKVMTNPIAGTRPRGKTKQEDTEIEKELLENEKERAEHMMLVDLGRNDIGRVSEIGSVTIDKYMKVEKYSHVMHIVSEVYGTLRKRMNGFDALAYCLPAGTVSGAPKIRAMEIINELENEKRNVYAGAVGYVSFSGNLDMALAIRTMVVKDEKAYVQAGAGIVYDSDPVAEYEETLNKARALLEVMK

SEQ ID NO: 3427 - DNA, 1443 bp, Bacillus thuringiensis
  CDS (46)..(1443)
gtggttaatataagagggtgggataaaagaagacggggtgttgatatgcaacgaagaaaatctttagcgctttctattccatatcagttagatttctttaagcaatataaatttctttctaaggataaaccgcaacacattttgttagagagtggacgtggcggtcgttataacatcgtgggattaaacccagtagcggtaatccgagggaagggtgaagcgttacatataagtgaaagtggtaaggaaacaataaagcaaggaaacccattggatttaatgcaggaatatatggagcgatggaaaacggattataatccggaatacccgccttttcaaggtggtgcaattggttactttagttatgattgcatccgttatattgaaaaacttccttctcttgcggaggatgatattaatatacctgatatattctttttattatttgatgatgtgtttgtgtatgatcaaaaagaaaaagtattatggattattacacattatgtagataagcatgaagaggcaaaagagcgattaaatgaatggaagattctttgggcgacagaagcgccggaagtgactataccgtttgcgtgccctgaaaagaaaaatgaagcagttgcttttactgaagaaagctttatgaaggcggttgaatgtattcaagaatatattggggctggtgatgtgttccaagtaaacttgtcgacaagacaagaaagaacgttacaaacacacccactagaaatatatacaagtcttcgtgaaattaatccatctccatatatgggttacttggagctcggggattttcaaattgtaagtggatcgccagagttgctaattaagaaacagggaactgaagtaagtacaagaccaattgctggaacgagatctagaggggcaaatgaacaagaggatgaagaattggcaagggaattaattgagaatgaaaaagaaagagcagagcacgtcatgcttgtggatttagaacgaaatgatttaggacgtgtttgtaaatatggcactgtagaagtagacgagtttatggtaattgagaaatactcacatgttatgcatattgtttctaatgtgcgtggtgaggtggaagaagataaagatgctttcgatttagtgaaggctgtattccctggaggaacaattacgggtgctccgaaaatacgtacgatggaaattattgaagaattagaacctgttcgccgagggatttatacaggttcaatcggttggattggttattctggagatacagaattgaatattgtaattaggacacttcttgctaaagacggaaaagcgcatgtacaagcaggggcgggaattgtcattgattcaaatccggaaaatgaatataaagagtcgttaaaaaaggcgattgctttatggcgtgcaaaagaacgtagcgaagaaacggttaggtag

SEQ ID NO: 3428 - protein, 465 aa, Bacillus thuringiensis
MQRRKSLALSIPYQLDFFKQYKFLSKDKPQHILLESGRGGRYNIVGLNPVAVIRGKGEALHISESGKETIKQGNPLDLMQEYMERWKTDYNPEYPPFQGGAIGYFSYDCIRYIEKLPSLAEDDINIPDIFFLLFDDVFVYDQKEKVLWIITHYVDKHEEAKERLNEWKILWATEAPEVTIPFACPEKKNEAVAFTEESFMKAVECIQEYIGAGDVFQVNLSTRQERTLQTHPLEIYTSLREINPSPYMGYLELGDFQIVSGSPELLIKKQGTEVSTRPIAGTRSRGANEQEDEELARELIENEKERAEHVMLVDLERNDLGRVCKYGTVEVDEFMVIEKYSHVMHIVSNVRGEVEEDKDAFDLVKAVFPGGTITGAPKIRTMEIIEELEPVRRGIYTGSIGWIGYSGDTELNIVIRTLLAKDGKAHVQAGAGIVIDSNPENEYKESLKKAIALWRAKERSEETVR

SEQ ID NO: 3429 - DNA, 2061 bp, Streptomyces venezuelae
  CDS (1)..(2061)
atgcgcacgcttctgatcgacaactacgactcgttcacccacaacctgttccagtacatcggcgaggccaccgggcaaccccccgtcgtcgtgcccaacgacgccgactggtcgcggctgcccgtcgaggacttcgacgcgatcgtcgtgtccccgggccccggcagccccgaccgggaacgggacttcggaatcagccgccgggcgatcaccgacagcggcctgcccgtcctcggcgtctgcctcggccaccagggcatcgcccagctcttcggcggaaccgtcggcctcgccccggaacccatgcacggccgggtctccgaggtgcggcacaccggcgaggacgtcttccggggcctcccctcgccgttcaccgccgtgcgctaccactccctggccgccaccgacctccccgacgagctcgaacccctcgcctggagcgacgacggggtcgtcatgggcctgcggcaccgcgagaagccgctgtggggcgtccagttccacccggagtccatcggcagcgacttcggccgggagatcatggccaacttccgcgacctcgccctcgcccaccaccgggcacggcgccacggggccgactccccgtacgaactccacgtgcgccgcgtcgacgtgctgccggacgccgaagaggtacgccgcggctgcctgcccggcgagggcaccacgttctggctggacagcagctccgtcctcgaaggcgcctcgcgcttctccttcctcggcgacgaccgcggcccgctcgccgagtacctcacctaccgcgtcgccgacggcgtcgtctccgtccgcggctccgacggcaccacgacccggacgcggcgccccttcttcaactacctggaggagcagctcgaacgccgacgggtccccgtcgcccccgaactgcccttcgagttcaacctcggctacgtcggctacctcggctacgagctgaaggcggagaccaccggcgaccccgcgcaccggtccccgcaccccgacgccgcgttcctcttcgccgaccgcgccatcgccctcgaccaccaggaaggctgctgctacctgctggccctcgaccgccggggccacgacgacggcgcccgcgcctggctgcgggagacggccgagaccctcaccggcctggccgtccgcgccccggccgagccgacccccgccatggtcttcgggatccccgaggcggcggccggcttcggccccctggcccgcgcgcgccacgacaaggacgcctacctcaagcgcatcgacgagtgcctcaaggagatccgcaacggcgagtcgtacgagatctgcctgaccaacatggtcaccgcgccgaccgaggcgacggccctgccgctctactccgcgctgcgcgccatcagccccgtcccgtacggcgccctgctcgagttccccgaactgtcggtgctgagcgcctcgcccgagcggttcctcacgatcggcgccgacggcggcgtcgagtccaagcccatcaaggggacccgcccccggggcggcaccgcggaggaggacgagcggctccgcgccgacctggccggccgggagaaggaccgggccgagaacctgatgatcgtcgacctggtccgcaacgacctcaacagcgtctgcgcgatcggctccgtccacgtgccccggctcttcgaggtggagacctacgcgcccgtgcaccagctggtgtcgaccatccggggacggctgcggcccggcaccagcaccgccgcctgcgtacgcgccgccttccccggcggctccatgaccggcgcgcccaagaagcgcaccatggagatcatcgaccgcctggaggaaggcccccggggcgtctactccggggcgctcggatggttcgccctcagcggcgccgccgacctcagcatcgtcatccgcaccatcgtgctggccgacggccaggcggagttcggcgtcggcggggcgatcgtgtccctctccgaccaggaggaggagttcaccgagaccgtggtaaaggcccgcgccatggtcaccgccctcgacggcagcgccgtggcgggcgcccgatga

SEQ ID NO: 3430 - protein, 686 aa, Streptomyces venezuelae
MRTLLIDNYDSFTHNLFQYIGEATGQPPVVVPNDADWSRLPVEDFDAIVVSPGPGSPDRERDFGISRRAITDSGLPVLGVCLGHQGIAQLFGGTVGLAPEPMHGRVSEVRHTGEDVFRGLPSPFTAVRYHSLAATDLPDELEPLAWSDDGVVMGLRHREKPLWGVQFHPESIGSDFGREIMANFRDLALAHHRARRHGADSPYELHVRRVDVLPDAEEVRRGCLPGEGTTFWLDSSSVLEGASRFSFLGDDRGPLAEYLTYRVADGVVSVRGSDGTTTRTRRPFFNYLEEQLERRRVPVAPELPFEFNLGYVGYLGYELKAETTGDPAHRSPHPDAAFLFADRAIALDHQEGCCYLLALDRRGHDDGARAWLRETAETLTGLAVRAPAEPTPAMVFGIPEAAAGFGPLARARHDKDAYLKRIDECLKEIRNGESYEICLTNMVTAPTEATALPLYSALRAISPVPYGALLEFPELSVLSASPERFLTIGADGGVESKPIKGTRPRGGTAEEDERLRADLAGREKDRAENLMIVDLVRNDLNSVCAIGSVHVPRLFEVETYAPVHQLVSTIRGRLRPGTSTAACVRAAFPGGSMTGAPKKRTMEIIDRLEEGPRGVYSGALGWFALSGAADLSIVIRTIVLADGQAEFGVGGAIVSLSDQEEEFTETVVKARAMVTALDGSAVAGAR

SEQ ID NO: 3431 - DNA, 1593 bp, Photobacterium profundum
  CDS (1)..(1593)
atgaatactaccccattaggtgcaggtgaattagaaatccttagccttgatgtaccttatgtagcagatccaacggagttatattactccgtatgtggtaatcgcccacataacctattgttggagtcggcagaagtcgactctaagcaagatcttcaaagtttaatgttagttgatgctgcggtacgcattgtatgccgaggtaaagaagtacgtcttgaagcattaaccgataatggcttatgcgtacttcaaactatcgaaaacgttgtgatcaccgacattactgtcgagcgtgaagcgcgctgtttggtcttacacttcccagccggtgaacgcacactcgatgaagacagccgtttacgtcaaacgtcgtcttttgatgcgctccgcatgattcaacatgccttcgacacatcggctcatccgcgtgaagcattatttttaggcggtttgttcgcttacgacttagtcgcaggctttgagcctctacctgatgtaacacaagacaataactgccctgattaccttttctatattgctgaaacgttactggttatcgaccaccagcgccgcaaaggtaaacttcaagccaccttgtttggtggtgagcaatataccgctagctactttgaactaagccgccgtttacagcatattaaagaagcctgcctagatcctaaacctgttccagcagcaaagcttcttgagcgttgtgagccagaagccagtatcagtgatgaagacttctgccaaacggtgaaagacttgaagcaatacgtcattgcaggtgatgtattccaagtggtgccttctcgtcaattcacattgccttgcccttcaccgcttgttgcttataaagaacttaaaatcggtaatccaagcccgtacatgttcttcttacaagattcagaattcaccttatttggcgcctcgccagaaagtgcactgaaatactgtacagaaagcaaccaagtcgagatttaccctatcgctggcacacgccatcgcggaaagaatgtcgatggttcgattaatctggatttagatgcacgtattgaacttgagttacgcagcgacttgaaagaaaacgcagaacacatgatgctagttgatttagcgcgtaacgatgttgctcgtatcagtgaaccgggtagccgttatgtggccgacctactgaaagtagaccgctatagtcacgtgatgcatttagtgtctcgtgttgtagggcaactacgcagtgaccttgatgcattacatgcttaccaagcgtgtatgaatatgggcactttaacaggcgcaccaaagattcgtgccatgcagctcattcgtgatgtagagcaacgtcgtcgtggtagctatggtggcgcagtgggttacttaacgggtcatggtgatatggacacctgtattgtgatccgttcagcttatgtcgaaaacgggattgcaagtgttcaagctggtgctggcgttgtgtacgactcgatcccccaagctgaagctgacgaaacacgtggtaaagcacaagcggttattgccgcgattcgcaaagcgcacagcttaaacgaaacaaacaacctaagcagtcaataa

SEQ ID NO: 3432 - protein, 530 aa, Photobacterium profundum
MNTTPLGAGELEILSLDVPYVADPTELYYSVCGNRPHNLLLESAEVDSKQDLQSLMLVDAAVRIVCRGKEVRLEALTDNGLCVLQTIENVVITDITVEREARCLVLHFPAGERTLDEDSRLRQTSSFDALRMIQHAFDTSAHPREALFLGGLFAYDLVAGFEPLPDVTQDNNCPDYLFYIAETLLVIDHQRRKGKLQATLFGGEQYTASYFELSRRLQHIKEACLDPKPVPAAKLLERCEPEASISDEDFCQTVKDLKQYVIAGDVFQVVPSRQFTLPCPSPLVAYKELKIGNPSPYMFFLQDSEFTLFGASPESALKYCTESNQVEIYPIAGTRHRGKNVDGSINLDLDARIELELRSDLKENAEHMMLVDLARNDVARISEPGSRYVADLLKVDRYSHVMHLVSRVVGQLRSDLDALHAYQACMNMGTLTGAPKIRAMQLIRDVEQRRRGSYGGAVGYLTGHGDMDTCIVIRSAYVENGIASVQAGAGVVYDSIPQAEADETRGKAQAVIAAIRKAHSLNETNNLSSQ

SEQ ID NO: 3433 - DNA, 1404 bp, Photobacterium profundum
  CDS (1)..(1404)
atgatttgtaaatcacaccccaaactaagcattgagcaacttgattacagcccagaaatgactcttgagtggttttcaccattatcaagtctgccgtgggcgatgatattacgttctgctgccaataatcacccagataatcgctttgatattctagttgctgatcctttagccactttagagacacaaggtgaaataacctgtattaaatttttaaatggtgatgaaaaaactagcactgacgatccattttatctgcttgagcatattcaacgagatctattaccctcacttaaccctatgactgatgtgccatttatcggcggtgctctgggttattttgcgtatgacctaggtcgacgggttgaaaaaattgcctcgttggctgaacacgatatttctgcacccgatatggcagtgggtatttatgattgggcattgattgctgatcaccaagagcagacgctctttttagtctctccttctggtagtcaacgtttagaatggctaaaacagcacaaagaaaacagtttaacgcagcacaaaaaagacgcattacaacaagctgaacacttttcattaacaactgattggtctgcaaacatgacaattagcagttactgcaataaatttgatcaagtccaagagtatttactctctggtgattgttatcaaattaaccttgcacagcgttttcaggcttcttatcgcggtgatgaatggcaagcttacttgcgtttagagaaaacgaatggtgcgcctttctctggttttatccgcactgaacacggtactgtcttgtctgtgtcaccagaacgttttctacaacataaccaaggttacgttgaaacgaagccgatcaaaggtacgcgcccacgatcagacaatgcagaacaagaccgagcctatgccgacgatttacgtcatgctgaaaaagatcgctcagaaaatttaatgattgttgatttgctacgcaatgatattggacgagtggcaaaacccggtagtgtcaaagtactcagcatttttgaaatcgaaagtttccccgcagttcatcacttggttagcacggtaacaggcgaactagaccaacagtactcggcaacggatttattacgtgcttgtttccccggaggctcaattacaggcgcccctaaagtgcgggctatgtctataattgaagaattagaaccgcatcgtcgtagtatttactgtggcagcattggctatatcagccgctgtggtcgcatggacactagtattacaatacgaacgttagtcactcaagaacagaaaatatacgcttgggcaggtggtggagtggttgcagatagcaaatctgacagtgaatatcaggaaacactggacaaactaagtagaattctgccagtcttgaggcagtag

SEQ ID NO: 3434 - protein, 467 aa, Photobacterium profundum
MICKSHPKLSIEQLDYSPEMTLEWFSPLSSLPWAMILRSAANNHPDNRFDILVADPLATLETQGEITCIKFLNGDEKTSTDDPFYLLEHIQRDLLPSLNPMTDVPFIGGALGYFAYDLGRRVEKIASLAEHDISAPDMAVGIYDWALIADHQEQTLFLVSPSGSQRLEWLKQHKENSLTQHKKDALQQAEHFSLTTDWSANMTISSYCNKFDQVQEYLLSGDCYQINLAQRFQASYRGDEWQAYLRLEKTNGAPFSGFIRTEHGTVLSVSPERFLQHNQGYVETKPIKGTRPRSDNAEQDRAYADDLRHAEKDRSENLMIVDLLRNDIGRVAKPGSVKVLSIFEIESFPAVHHLVSTVTGELDQQYSATDLLRACFPGGSITGAPKVRAMSIIEELEPHRRSIYCGSIGYISRCGRMDTSITIRTLVTQEQKIYAWAGGGVVADSKSDSEYQETLDKLSRILPVLRQ

SEQ ID NO: 3435 - DNA, 1404 bp, Photobacterium profundum
  CDS (1)..(1404)
atggctaataaaaacatgcaaacctataaaactctgtcatttgagcatcagtgccaacccattttactagcgactgaaatcgcgagtgccgatttctgcgcagactatatcgtttacgaacacaatcaggaatgggcaatcggcatcaataagcattcacaactcacggtaaaccaagtgggtgatatcgttgacttcgcaggcgtcagacaaagcgttaatcaaaataatatttgccaagcgattcatcaggcaacccaaaaaatacaaatcaaagactggagactatttggacgtgtagacttcgagttctgccattttgctcacaacttaaagcaaaaagagaccgaaagatctctactagaactttttgtaccagaaacagatatacgaatcagccaaacacatattaccattcgtacaatggatgaggccgttatacctcaaattcaacgaattgcagctgactgtaataactataaagctcaaccaactaaatcacataaaagcatgacacaaaaagatattgtgcgatgtgaagaagtaaaaaaatactaccaagacgtcgtccaacacgcagtaaatgaaatcaaagccgacaaatataaaaaagtaattctgtcacgccccgctattctgccttcatctatagatattaaaaacagcttcatagcaggaagaaaacataatacacctgctcgttctttcatgctccagatgggaggatttgaggcatttggattttctccagaaacggttctagaagtagatacttacggaaatttgagtacccaaccactagcaggaacacgtgcactgccatcggatcttacagaagccaagcgtttaaaaaatgaacttcttaccgatccaaaagagatcgctgagcatgcagcatcggtcaaacttgccgtcgaagaattggagcaagtgtgtgcaagtgaaaccgtcaatatcgctgagttcatgcatatttctgaaagaggcagtgtgcagcacctcgcctctcgtgtaacgggaactctaactgaaaacaaatcagcatgggatgcatttaaagttctcttcccagccatcacagcgtcaggtatccctaaacgtgaagccattgatgctattgcccgattcgaacctcttccgcgaggtttatatagtggaagtattcttgtttccgatcaaaacggatttttcgacgcggcacttatattacgagcagcatataaacataaatcactctctatacttcaagccggtgcaggtatcattagcttatctacccctcaaagagaatgggaagagacctgtgaaaaaatggcttgtgtcctcaatcacttagttttttcacaagaaaatacaccgcaactgcttccatcaagcgaaactgcctgtgaggaagaatcatga

SEQ ID NO: 3436 - protein, 467 aa, Photobacterium profundum
MANKNMQTYKTLSFEHQCQPILLATEIASADFCADYIVYEHNQEWAIGINKHSQLTVNQVGDIVDFAGVRQSVNQNNICQAIHQATQKIQIKDWRLFGRVDFEFCHFAHNLKQKETERSLLELFVPETDIRISQTHITIRTMDEAVIPQIQRIAADCNNYKAQPTKSHKSMTQKDIVRCEEVKKYYQDVVQHAVNEIKADKYKKVILSRPAILPSSIDIKNSFIAGRKHNTPARSFMLQMGGFEAFGFSPETVLEVDTYGNLSTQPLAGTRALPSDLTEAKRLKNELLTDPKEIAEHAASVKLAVEELEQVCASETVNIAEFMHISERGSVQHLASRVTGTLTENKSAWDAFKVLFPAITASGIPKREAIDAIARFEPLPRGLYSGSILVSDQNGFFDAALILRAAYKHKSLSILQAGAGIISLSTPQREWEETCEKMACVLNHLVFSQENTPQLLPSSETACEEES

SEQ ID NO: 3437 - DNA, 1320 bp, Methanococcus maripaludis
  CDS (1)..(1320)
atgtataaattggattatgtaaatcctctaaaactttacggggttttaagggatgaaggaaaatatccagtaatgcttgaatcaagagctaaaggacaagttaatgcaaggtacacatacatttcttcaaatcctgaatacatgcttagaatcggaaataaaaccaaaatggacaacgaaacgatttcaaaagaaagtaacccgttcaaagctttaaaagaaaacttcaaggttactcaaaaaggtgaccgttttactggaggatacgttggatatattgcatacgactgtattcataactacatcggcggaaaaattgaagaaccttcagtatttggatactacgatcacatgtatgtttacgaccacgaaacgaataatttttattatcattctgaaacgaataatcctgaagaattaagaaatgctgaaacaactgttgaaaaagcaaaaaattttaaaattgaagaagaagacggcggaattgaagttttgggttgcgatgcagatttggatgattacgtaaaaatggttgaaaaaactaaagaatacatttattcaggcgatgcttttcaggtcgttccttcaagagaatatcgcttgaaaaatgaattttctgcatttcaactttacagaaaccttagaaatgtaaatccaagtccttacatgtttttgcttgaatttgacaaggatgtagttggagcatctccagaaacaatggcttcagttcagaacaatatcttaaaagtaaaccctattgcggggactactgcaattggaaaaactgaaaacgaaactcaaaaattggcagaagcacttttaaaagatgaaaaagagcgagcagaacacatgatgcttgttgaccttgcaagaaatgatgtcaggaaagtttcaaaatctggaagcattgtacttgaaaggtttttcgacgttgtaagatacagccatgttcagcacattgaaagtgaggtgcttggaacattaaaagataattcaacaatatttgatgcaatagaagccgcatttcctgcaggaaccttaaccggagctccaaagtttagggcaatggaaattattgacgaagttgaaaaatcaagaagaaaaatttacggtggagctgttggatacttttcaaacagtggcaatgcggaccttgcaattggaattagaatggctgaaattgacagcgtttgccgggtaagggcaggcggaggggtggttgctgattccgtacctgaaaatgaatactacgaaacagagcggaaaatggccgcaatgatgaaagcactgggtgttcgaaatgatagtgataatagataa

SEQ ID NO: 3438 - protein, 439 aa, Methanococcus maripaludis
MYKLDYVNPLKLYGVLRDEGKYPVMLESRAKGQVNARYTYISSNPEYMLRIGNKTKMDNETISKESNPFKALKENFKVTQKGDRFTGGYVGYIAYDCIHNYIGGKIEEPSVFGYYDHMYVYDHETNNFYYHSETNNPEELRNAETTVEKAKNFKIEEEDGGIEVLGCDADLDDYVKMVEKTKEYIYSGDAFQVVPSREYRLKNEFSAFQLYRNLRNVNPSPYMFLLEFDKDVVGASPETMASVQNNILKVNPIAGTTAIGKTENETQKLAEALLKDEKERAEHMMLVDLARNDVRKVSKSGSIVLERFFDVVRYSHVQHIESEVLGTLKDNSTIFDAIEAAFPAGTLTGAPKFRAMEIIDEVEKSRRKIYGGAVGYFSNSGNADLAIGIRMAEIDSVCRVRAGGGVVADSVPENEYYETERKMAAMMKALGVRNDSDNR

SEQ ID NO: 3439 - DNA, 1305 bp, Parachlamydia sp
  CDS (1)..(1305)
atgcttttttctggaggcgaatttgactcctctgagcattcttttttatctctttttccgattgaaattgtaattgcaaaagatcggcaagtgatccataaaacaaagcaacagattttccagcaagagataaaaaatccttgggaagctcttcaaaaatttttttttgattcgttagaaaataactctgaaaactacgcttttggatttttcggttatgaaatgggattttcctccgatcctgatgtacaattattttgccaatctcatgaatggacacctgatgccatgtggcaaaaatgcgcaattacaattatctataaccattctaaccaacaggctatccttaaaatagctgattttactgaccaaacactaaaccctttacatcaacattgggttaaaaaactttctgataaaaattggtgggaaagtgatagctttaattttttttcccgaacttcacaaaaaacagaagctcaattaaaaaacttttctctttcaaatcgtcaacttacttatttaaagatgattgatgaggcaaaagagtggattttttcgggacatgtttaccaaattaatttatcccaagaatttacatttgaaggtgttccgcgaccttttgacgtctttcgtcaattaatagaaatcaatcccgctcccttttccgcttatttgaaagcagattattatacaattgtatcaagctctcctgaaaggtttttgcaaaaaaaggaaaggctattagaaacgcgcccaattaaaggaacaatacaaagaggtgggtattttgaagaagatcaattgttcaaagaaagattactatcatctgaaaaagaaaaagctgagctgttaatgattacagatttaatgcgcaatgatttaggtaaaatcagtgaaattggcagtgttaaaacggttgatttgtggcgttgtgaggcctatacgaacgtatatcacttgatttcaattattcgtgctattgctttaaagcatctaaaacctttagaaattatccgtagcgcatttccaggtggctctattaccggttgtcccaaattgaaagcgatggaatgtatacaaaaattagaaaatcgttcgcggggtatttatacgggttcgatgggatatatgacaggaaaaggagattttgatttgaatattgcgattcgaactttggtatttaaagacaattacattagcttccaagtgggaggtggaattgttatcgattctgatccaattaatgaatatgcagaaactctttttaagggtgactcattatttcgagtactaaagacttaa

SEQ ID NO: 3440 - protein, 434 aa, Parachlamydia sp
MLFSGGEFDSSEHSFLSLFPIEIVIAKDRQVIHKTKQQIFQQEIKNPWEALQKFFFDSLENNSENYAFGFFGYEMGFSSDPDVQLFCQSHEWTPDAMWQKCAITIIYNHSNQQAILKIADFTDQTLNPLHQHWVKKLSDKNWWESDSFNFFSRTSQKTEAQLKNFSLSNRQLTYLKMIDEAKEWIFSGHVYQINLSQEFTFEGVPRPFDVFRQLIEINPAPFSAYLKADYYTIVSSSPERFLQKKERLLETRPIKGTIQRGGYFEEDQLFKERLLSSEKEKAELLMITDLMRNDLGKISEIGSVKTVDLWRCEAYTNVYHLISIIRAIALKHLKPLEIIRSAFPGGSITGCPKLKAMECIQKLENRSRGIYTGSMGYMTGKGDFDLNIAIRTLVFKDNYISFQVGGGIVIDSDPINEYAETLFKGDSLFRVLKT

SEQ ID NO: 3441 - DNA, 2160 bp, Rhodopseudomonas palustris
  CDS (1)..(2160)
atgaacaggaccgttttctcgcttcccgcgaccagcgactataagaccgccgcgggcctcgcggtgacgcgcagcgcccagccttttgccggcggccaggcgctcgacgagctgatcgatctgctcgaccaccgccgcggcgtgatgctgtcgtccggcacaaccgtgccgggccgctacgagagcttcgacctcggctttgccgatccgccgctggcgctcaccactagggccgaaaaattcaccatcgaggcgctcaatccgcgcggccgggtgctgatcgcgttcctgtccgacaagcttgaagagccctgcgtggtggtggagcaggcctgcgccaccaagatcaggggccacatcgtccgcggcgaggccccggtcgacgaagaacaacgcacccgccgcgccagcgcgatctccctggtgcgcgcggtgattgctgccttcgcctcgccggccgatccgatgctcgggctgtacggcgccttcgcctacgaccttgtgttccagttcgaggatctgaagcagaagcgtgcccgcgaagccgaccagcgcgacatcgtgctgtacgtgccggatcgcctgctggcctacgatcgcgccaccggccgcggcgtcgacatttcctacgaattcgcctggaagggccagtccaccgccggcctgccgaacgagaccgccgagagcgtctacacccagaccggccggcagggtttcgccgaccacgccccgggcgactatcccaaggtggtcgagaaggcccgcgcggcgttcgcccgcggcgacctgttcgaggcggtgccgggccagctgttcggcgagccatgcgagcggtcgccggccgaagtgttcaagcggttgtgccggatcaacccgtcgccctatggcggcctgctcaatctcggcgacggcgaattcctggtgtcggcctcgccggaaatgttcgtccgctcggacggccgccggatcgagacctgcccgatctccggcactatcgcccgcggcgtcgatgcgatcagcgatgctgagcagatccagaagctcttgaactccgagaaggacgagttcgagctgaatatgtgcaccgacgtcgaccgcaacgacaaggcgcgggtctgcgtgccgggcacgatcaaagttctcgcgcgccgccagatcgagacctattcgaagctgttccacaccgtcgatcacgtcgagggcatgctgcgaccgggtttcgacgcgctcgacgccttcctcacccacgcctgggcggtcaccgtcaccggcgcgccgaagctgtgggcgatgcagttcgtcgaggatcacgagcgtagcccgcggcgctggtatgccggcgcgttcggcgtggtcggcttcgatggctcgatcaacaccggcctcaccatccgcaccatccggatgaaggacggcctcgccgaagttcgcgtcggcgccacctgcctgttcgacagcaatccggtcgccgaggacaaggaatgccaggtcaaggccgcggcactgttccaggcgctgcgcggcgatcccgccaagccgctgtcggcggtggcgccggacgccactggctcgggcaagaaggtgctgctggtcgaccacgacgacagcttcgtgcacatgctggcggactatttcaggcaggtcggcgcccaggtcaccgtggtgcgctacgttcacggcctgaagatgctggccgaaaacagctatgatcttctggtgctgtcgcccggtcccggccggccggaggacttcaagatcaaggatacgatcgacgccgcgctcgccaagaagctgccgatcttcggcgtctgcctcggcgtccaggcgatgggcgaatattttggcggtacgctcggccagctcgcgcagccggctcacggccgcccgtcgcggattcaggtgcgcggcggcgcgctgatgcgcggtctcccgaacgaggtcaccatcggccgctaccactcgctctatgtcgacatgcgcgacatgccgaaggagctgaccgtcaccgcctccaccgatgacggcatcgcgatggcgatcgagcacaagaccctgccggtcggcggcgtgcagttccaccccgagtcgctgatgtcgctcggcggcgaggtcgggctgcggatcgtcgaaaacgccttccggctcggccaggcggcctaa

SEQ ID NO: 3442 - protein, 719 aa, Rhodopseudomonas palustris
MNRTVFSLPATSDYKTAAGLAVTRSAQPFAGGQALDELIDLLDHRRGVMLSSGTTVPGRYESFDLGFADPPLALTTRAEKFTIEALNPRGRVLIAFLSDKLEEPCVVVEQACATKIRGHIVRGEAPVDEEQRTRRASAISLVRAVIAAFASPADPMLGLYGAFAYDLVFQFEDLKQKRAREADQRDIVLYVPDRLLAYDRATGRGVDISYEFAWKGQSTAGLPNETAESVYTQTGRQGFADHAPGDYPKVVEKARAAFARGDLFEAVPGQLFGEPCERSPAEVFKRLCRINPSPYGGLLNLGDGEFLVSASPEMFVRSDGRRIETCPISGTIARGVDAISDAEQIQKLLNSEKDEFELNMCTDVDRNDKARVCVPGTIKVLARRQIETYSKLFHTVDHVEGMLRPGFDALDAFLTHAWAVTVTGAPKLWAMQFVEDHERSPRRWYAGAFGVVGFDGSINTGLTIRTIRMKDGLAEVRVGATCLFDSNPVAEDKECQVKAAALFQALRGDPAKPLSAVAPDATGSGKKVLLVDHDDSFVHMLADYFRQVGAQVTVVRYVHGLKMLAENSYDLLVLSPGPGRPEDFKIKDTIDAALAKKLPIFGVCLGVQAMGEYFGGTLGQLAQPAHGRPSRIQVRGGALMRGLPNEVTIGRYHSLYVDMRDMPKELTVTASTDDGIAMAIEHKTLPVGGVQFHPESLMSLGGEVGLRIVENAFRLGQAA

SEQ ID NO: 3443 - DNA, 1554 bp, Corynebacterium diphtheriae
  CDS (1)..(1554)
atggcagatttccatgcatccgcccgcgaggtgcgctatcacgaggatgccgccgacctctttcatcatcttggcgggacctcggctagtgactccgttcttttagagtccgcagacattaaatccaagaagaacaccacatccatggcagtacttcaatcagcggttcgcgtgacgtgcatggggcaaaccgtgaccgccacgcccctaacatctacgggccatacaatggtggcgcgcctacaggagcactttggcacgagcggcacgaaatttagtttccgccgctccgagcttcacgacgaacgccagcgcctccttgacaccaataacgccgagattcttcgcctcctacagtgtgaggccggctattccggtgagcagttaccacttcttgccggcggtttcgccttcgactacgtggagacatttgagcaattacctcctgtaccggtaggggataattcttatcccgattaccagtttgtggtggcagaaacagtgctggtgaccgatcatctcaagcgcagtgcggttatcgagggcgtgtccattgatccaagcgagttggaggatcgactagattcccttgttgccacgattgacagccatgaaacagtcgaggaatgtcccgcgaccacggcaaccaatgagatattgactgtgcgtgccgatatttctgatgtggatttttgccaaagcgtaagcgcactgcaggacaatatccaggcgggagacatctatcaggtggttccagcacgcagctttagcgcgccctgtgagagtgcttatgcagcttatagacacttgcgcacaatcaatcccagcccctatatgttttacgtgcgcggcattacccccatttcatgcaattcaaataaaacatatgagctgataggagcgtcgccggagtctaatctcaagttcgattccagaacacgcgagatacaattgtatccgatcgccggtacccggccacggggacttaatcccgacgggagtattaatcacgaactcgacattcgtgccgagctggatatgcgaactaacgtcaaggaaatcgccgaacatactatgctagttgatcttgcacgcaatgatcttgcacgtgtttcattgcccacaacacgtcgcgttgcagagttattgcaggtagatcgctactcccgggtgatgcatctcgttagccgtgtggtagctacgctggatccagagttcgacgctattaacgcctaccgtgcctgcatgaacatgggaacgctaaccggagcaccaaaattgcgcgcaattgaattactgcgaggtgtggaagctaaacgtcgcggttcctatggtggtgcggttggataccttcaaggagatggctccatggatacttgcattgtcattcgttccgcctttattcaggatggggtagcggtggtacaggccggtgccggagtggtgcgggattctattccacaatcagaggccgatgaaacactccataaggcctatgccgttttgcatgccattgcattggcggccggaaaggatctggaggtggttcgctaa

SEQ ID NO: 3444 - protein, 517 aa, Corynebacterium diphtheriae
MADFHASAREVRYHEDAADLFHHLGGTSASDSVLLESADIKSKKNTTSMAVLQSAVRVTCMGQTVTATPLTSTGHTMVARLQEHFGTSGTKFSFRRSELHDERQRLLDTNNAEILRLLQCEAGYSGEQLPLLAGGFAFDYVETFEQLPPVPVGDNSYPDYQFVVAETVLVTDHLKRSAVIEGVSIDPSELEDRLDSLVATIDSHETVEECPATTATNEILTVRADISDVDFCQSVSALQDNIQAGDIYQVVPARSFSAPCESAYAAYRHLRTINPSPYMFYVRGITPISCNSNKTYELIGASPESNLKFDSRTREIQLYPIAGTRPRGLNPDGSINHELDIRAELDMRTNVKEIAEHTMLVDLARNDLARVSLPTTRRVAELLQVDRYSRVMHLVSRVVATLDPEFDAINAYRACMNMGTLTGAPKLRAIELLRGVEAKRRGSYGGAVGYLQGDGSMDTCIVIRSAFIQDGVAVVQAGAGVVRDSIPQSEADETLHKAYAVLHAIALAAGKDLEVVR

SEQ ID NO: 3445 - DNA, 3174 bp, Lycopersicon esculentum
  CDS (121)..(2829)
atttctgcaccaagcgttttcggatctgttaacttcattaatgagatctgcttgttggcttaatgcttatttttgcggagggatttggttggtgaacctgcggtttcgttacaagcataaatgaattctgccatgtcttcgtcatcatcatttatggttgcctcttcctgctgccaaaatcttcaaaccagaaaatattttcttttagcacctgaaccttttgagaagattggtatgatagatgcactccaaaaatataaccgtaaggaaaggaaggtatttatttcaagtcatttagtgcctggacatttggatgcatcgggaacaagaaaaaagtttttacatgagccagttccgaagttagaatttgtacgcacactactaattgacaactatgacagttacacttacaatattttccaagagctctcaatcattaatggaatgcctccggtggtgattcggaatgatgagtggacatggaaagaagtttatcattacctgtacgaagaaaggacgtttgacaatattgttatatcacctggtcctggctctccaacatgtccatcagatataggaatttgcctgaggctcttgcttgaatgcattgatatcccgatactaggcgtctgccttggtcaccaggcattgggatatgtgcatggtgctgaagttgtacatgcacctgaacctttccatggtcgtttgagtgatattgagcacaatggttgtcaattattccatgaaattccttcaggaagaagttctggatttaaggtggtacggtaccattcccttgtaatagacccgaaatcacttccgaaggaactcattcctatagcttggacctcaacagctgagacactccctttccagggtgtcaaacgatccaattcattcttaaatgcgtccaaagaaaataaagatatttttaatgggatgtcggagctatcagatgattcaaaggatgtgaaaggtggaaaagtcctcatgggtatcatgcattctagtaggcctcactatggattgcagttccacccagaaagtgttgcaacatgttacggaagacagcttttcaagaatttccggaaaatcacagaggattattggctcctgctgatgtcaacctccttcaatgaaagaagggctcattatgctgcatgcatgcaggtgcctaatttagacccgctgtcccgaagtgttgcaaaacgtgggcatctggtgaataaattgattgagaggagaactgccgaagtggatggaaccttaaatctatcacatccaggtcacagtgtaaaatttttgaagatgacatggaaaaaacttgattgctctgcgagccaagtaggtggagcggataatattttctgtgaactatttggagatcaagaggctaaaaacagtttttggctggatagctcttcaatagagaaggaaagggctagattttcctttatggggggaaagggtggctccctctggaagcaacttagttttaggttgtcaaatcgaagtgacagaatgtgtaaaggaggtggccatctatcagttgaagatgctaatggtcatgttatttctaaatttttggaagatggattttttgattatttagataaggagctcctatcattttgtttcgatgagaaggattatgaaggattaccatttgatttttatggtggttacattggttatatcgggtatgatcttaaagctgaatgtggtgtggcatctaatcgtcatagatccaaaacaccagatgcttgtttattctttacagataacgttattgtcattgatcatcagtatgatgacatatatactttgtcattacacgatggcagcacaagtactacttctcgcttggaagatctggagcagaggctgctcaacttgagagcttttacgcccagaaggctacaatcgcaggcatctcgaggattttctgtagtcgaactaaaatcagggttttctgctgagaaatcaagagagcagtatatcaaagacgttgagaattgtcaagagttcataaaagaaggagaaagttatgagttgtgtcttacaactcagatgagaatgaagttggggggaatagattctctggaactttatcgtaatctcagaataagaaatcctgcaccatatgctgcctggcttaatttttcaagggaaaacctaagcatatgttgttcatcacctgaaaggttcctacgattggacaggaatgctattctagaagcaaaacccataaaagggactatagctcgtggttccaccccaaaggaagatgaatttctgaaactgcaattagaatgcagtgaaaaggatcaggcggaaaatttgatgattgttgacttgttgaggaatgaccttgggcgtgtatgtgagactggctctgttcatgtcccacatctcatggaaattgaatcctatgcaacagttcataccatggtcagtacgattcgggggaaaaagcgatcagatgcaagtgcaattgattgtgttagagctgcattccctggtgggtcaatgacaggtgcaccaaagttgagatcaatggaacttcttgatcatcttgaaaattgttcgaggggcatatactcgggctgcattggatttttttcttataaccaagcatttgatctcaatattgtgatacggacggttgtcatacacgagggagaagcttcagtaggagcaggaggagccatcactgctctttcagatcctaatgatgagtatgaagaaatgcttcttaaaactcgagcaccgattaaggctgttcttgaacatcagagcagcatcttctcatcagatgctcagaagtgacatgaccagttgaaatgtccaatgcagaaatagtggtattgaactctcttagattctgggaaaatgtgggagcaattgcagcttctagtagttataattaaaagggaggggaaacagtggatgaaagcctatataattcatgcaaatatttgtcatgaccttgttttgtcagcacaatctattcattcttttgagcatagtgtttggaaaatatagccatggtagcatacagatctgcagtgactaaaatactgtacatagaagattttgaaagacctgtagaagattacagatatgtttgtgaagttgtactagtactgaattgatgattccacgtttcatttt

SEQ ID NO: 3446 - protein, 902 aa, Lycopersicon esculentum
MNSAMSSSSSFMVASSCCQNLQTRKYFLLAPEPFEKIGMIDALQKYNRKERKVFISSHLVPGHLDASGTRKKFLHEPVPKLEFVRTLLIDNYDSYTYNIFQELSIINGMPPVVIRNDEWTWKEVYHYLYEERTFDNIVISPGPGSPTCPSDIGICLRLLLECIDIPILGVCLGHQALGYVHGAEVVHAPEPFHGRLSDIEHNGCQLFHEIPSGRSSGFKVVRYHSLVIDPKSLPKELIPIAWTSTAETLPFQGVKRSNSFLNASKENKDIFNGMSELSDDSKDVKGGKVLMGIMHSSRPHYGLQFHPESVATCYGRQLFKNFRKITEDYWLLLMSTSFNERRAHYAACMQVPNLDPLSRSVAKRGHLVNKLIERRTAEVDGTLNLSHPGHSVKFLKMTWKKLDCSASQVGGADNIFCELFGDQEAKNSFWLDSSSIEKERARFSFMGGKGGSLWKQLSFRLSNRSDRMCKGGGHLSVEDANGHVISKFLEDGFFDYLDKELLSFCFDEKDYEGLPFDFYGGYIGYIGYDLKAECGVASNRHRSKTPDACLFFTDNVIVIDHQYDDIYTLSLHDGSTSTTSRLEDLEQRLLNLRAFTPRRLQSQASRGFSVVELKSGFSAEKSREQYIKDVENCQEFIKEGESYELCLTTQMRMKLGGIDSLELYRNLRIRNPAPYAAWLNFSRENLSICCSSPERFLRLDRNAILEAKPIKGTIARGSTPKEDEFLKLQLECSEKDQAENLMIVDLLRNDLGRVCETGSVHVPHLMEIESYATVHTMVSTIRGKKRSDASAIDCVRAAFPGGSMTGAPKLRSMELLDHLENCSRGIYSGCIGFFSYNQAFDLNIVIRTVVIHEGEASVGAGGAITALSDPNDEYEEMLLKTRAPIKAVLEHQSSIFSSDAQK

SEQ ID NO: 3447 - DNA, 1848 bp, uncultured bacterium
  CDS (1)..(1848)
atgagcagcagcacggcgccacggccaccaccggtggcgctgatcgatttcccatcggcccagggtcgccagcgattgaacttcgggccggccttgcactggctggtcgccaccgaagccgaccaggtcaggcgggtcatcgatgccgcccatgagcacgccagacaaggccgctggtgcgtgggctgggtggcctacgaagcggcccccgctttcgacgtgcacctgcctgtgcacccgcctgaacccggccagccgctcgccctgttcgccgtgttcgagcatgccctgccctggcctgatgaggccccgtcggccgcctggcagaccgcgccctggcaatcgggcctgaacgagcaggacttcaccgaccaggtggaagccatccgcgagttgatccgggccggcgaggtctaccaggtcaacctgaccacgccgctgcgcagccagttgcagccccaggcgcctgacaccgccctgcactacttccacgccttgcaccgcagccagccggatggctatgcggcttacctggacatggcttcggcaggcctggtgcaggcggtgcctgccgtcctgggccccagccacgtgctgagcgtgtcgcccgagctgttcttccactggcatgaaggccggatcaccacgcgcccgatgaaaggcacggctgcacgtggcaccacgcctgacaccgacgaggccgccgcccggcacctgcgcaccagcgacaaagagcgcgccgagaacctgatgatcgtggacctgttgcgcaacgacctgtcgcgcatcgcgcaggtcggctcggtgcgggtgccgtcgctgttcgatgtgcaggccttgcccaccgtgtggcagatgacctcgacggtggaggcgcgcacgctggatgggctgcgcctgtccgacgtctttggcgcgctgtttccttgcggctcggtgacgggggcgcccaagcgccgtgccatgcaccacatcgccaggctggagggtgcgccacggggcgtgtactgcggcgccgtcggcctgatggcgccgggtggcgaggtgaccttcaatgtgcccatccgcaccgtggtgctgcgggcaggacaagccgcgtgggaagcccgctgcggcatcggcagcggcatcacgctggacgccacgccgcaagccgaggcccaggaatggcgccacaagcaggccttcctgaaacgcgcggcccagcccttcgaactgctggaatcgctgcgcctggaacaaggtcgcgtcgcccggctggaagcgcacctgcaacgcctgtcgggcggtgcgcggcatttcggcatcccgctcgacctcgatgcggcgcgcgaggcgctggccttgcaagcccaggcccatccgcaagggacgcacaaggtgcggctgctggtcgacgcgcaaggccgcgtcacgtgcgaagccgcaccgctggccgccagcccctggcccatcaccgtggccctggccacgcggcccatgccccaggccgacgagttcatcgcgcacaagaccacgcagcgcggtgcctatgcgcccttcagcacgccctccggctgcttcgacacgctgctgtggaacgcgcaaggcgagctcaccgagttcaccatcggcaacgtggcggtgaaactggcgggcgaatggttcacgccgcccgccgcaagcggcctcttgcccggtgtgatgcgccagacactgctggccgaaggccgcctgcgcgagcgccgcatcaccgtcgatgaactgttgcaccagtccgagggcctggcgctgatcaacagcgtgcgcgggtggctggacgcccgcctcgcatccccaccccacgacccactcatcgtcggagattga

SEQ ID NO: 3448 - protein, 615 aa, uncultured bacterium
MSSSTAPRPPPVALIDFPSAQGRQRLNFGPALHWLVATEADQVRRVIDAAHEHARQGRWCVGWVAYEAAPAFDVHLPVHPPEPGQPLALFAVFEHALPWPDEAPSAAWQTAPWQSGLNEQDFTDQVEAIRELIRAGEVYQVNLTTPLRSQLQPQAPDTALHYFHALHRSQPDGYAAYLDMASAGLVQAVPAVLGPSHVLSVSPELFFHWHEGRITTRPMKGTAARGTTPDTDEAAARHLRTSDKERAENLMIVDLLRNDLSRIAQVGSVRVPSLFDVQALPTVWQMTSTVEARTLDGLRLSDVFGALFPCGSVTGAPKRRAMHHIARLEGAPRGVYCGAVGLMAPGGEVTFNVPIRTVVLRAGQAAWEARCGIGSGITLDATPQAEAQEWRHKQAFLKRAAQPFELLESLRLEQGRVARLEAHLQRLSGGARHFGIPLDLDAAREALALQAQAHPQGTHKVRLLVDAQGRVTCEAAPLAASPWPITVALATRPMPQADEFIAHKTTQRGAYAPFSTPSGCFDTLLWNAQGELTEFTIGNVAVKLAGEWFTPPAASGLLPGVMRQTLLAEGRLRERRITVDELLHQSEGLALINSVRGWLDARLASPPHDPLIVGD

SEQ ID NO: 3449 - DNA, 2151 bp, Xanthomonas albilineans
  CDS (1)..(2151)
atgcgctgccttatcataaataattacgattcgttcacttggaatctcgccgactacgtagcgcagatcttcggcgaagatcccctggtggtgcacaacgacgagtactcctggcacgaactgaaggaccgcgggggattttcctcgatcatcgtttcgcccggtcccggctcggtggttaatgaagcggattttcacatctcgctgcaggcgctggagcagaacgaatttccggtgttaggcgtatgcctgggctttcagggacttgcgcatgtctatggtggccgcatcctgcatgcgccggtgccctttcatggccgtcgctccaccgtcatcaacaccggcgacggtttgttcgaaggcatcccgcagcgtttcgaggcagtgcgctatcactcgttgatggtctgccagcaatcgctgccgcctgtgctgaaagtgacggcgcgtaccgattgcggtgtggtgatgggcttgcagcacgtgcaacacccgaaatggggagtacagttccaccccgaatcgatcctcaccgaacacggcaagcgcattgttgctaactttgccaagctggctgcgcgccacagtgcaccgttacttgccgggtcggagcaggccggcaaggttttaagcgtttgcgcgcccgagatggtgacaccgcgggtacgtcgcatgctgagccggaagatcaagtgccgttggcaggcggaagatgtctttctggccttgttcgctgacgaaaagcattgcttctggctggacagccagctggtctgcagtccaatggcgcgctattcgttcatgggagcggtgaacgagagcgaggtagtgcggcattgcgtgcggccagggagcatggtgcaggaggcaggcgagcggtttcttgctgagatggatcgggcgttgcaatcggtgcttactgaggacgtcgccgagcggccaccgttcgcgtttcgcggcggctacgtgggctacatgagctacgaaatgaaatcggtgttcggcgcgccggcttcacatgccaatgccatccccgatgcgttgtggatgcgcgtggagcgcttcgttgccttcgaccacgccactgaggaggtatggttgctggcgctcgccgatacggaggatctgtcggcattggcttggctagacgccatcgagcaacgtatccatgccattggtcaagcggctccggcttgcatttcgctaggcctgcgcagcatggaaatcgagctcaatcatggtcgtcgcggctaccttgaggcaatcgagcgttgcaaacaacgcatcgtcgatggcgagtcctatgaaatctgtcttaccgacctgttctcgttccaggccgagctggatccattgatgctctatcgctacatgcggcgagggaacccagcgccgttcggggcctatttgcgtaacggtagcgattgtatccttagtacttcaccagagcgttttctggaagtggacggccacggcacgattcagaccaagccaatcaagggcacctgccgccgtgccgaggatccccaactggaccgtaacttggccatgcgcctggccgcctcggaaaaggaccgagcggaaaacttgatgatcgtcgacttgatgcgcaacgacctaagccgcgtggcggtgcccggcagcgtcaccgtgcccaagctgatggacatcgaaagctacaagaccgtgcatcagatggtcagcacggtggaagcgaggctgcgcgccgattgcagtctagtcgacctgcttaaggcggtgttccccggcggctcgatcaccggcgcaccgaagttgcgcagtatggagattattgatggcctggagaatgcgccgcgtggcgtgtattgcggcagcatcggctacctgggctacaactgcgtcgccgacctaaacattgcgatccgcagtctttcttatgacgggcaggaaatacgtttcggcgccggcggcgccatcaccttcctgtccgacccgcaggatgagttcgacgaagtgttgctgaaggcggaggcgatcctcaagccgatctggcattatctacatgcgccgaacactcccctgcactacgagttgcgagaggacaagctgctgctagccgagcactgcgttagcgaaatgccggccaggcaggccttcatcgaaccatga

SEQ ID NO: 3450 - protein, 716 aa, Xanthomonas albilineans
MRCLIINNYDSFTWNLADYVAQIFGEDPLVVHNDEYSWHELKDRGGFSSIIVSPGPGSVVNEADFHISLQALEQNEFPVLGVCLGFQGLAHVYGGRILHAPVPFHGRRSTVINTGDGLFEGIPQRFEAVRYHSLMVCQQSLPPVLKVTARTDCGVVMGLQHVQHPKWGVQFHPESILTEHGKRIVANFAKLAARHSAPLLAGSEQAGKVLSVCAPEMVTPRVRRMLSRKIKCRWQAEDVFLALFADEKHCFWLDSQLVCSPMARYSFMGAVNESEVVRHCVRPGSMVQEAGERFLAEMDRALQSVLTEDVAERPPFAFRGGYVGYMSYEMKSVFGAPASHANAIPDALWMRVERFVAFDHATEEVWLLALADTEDLSALAWLDAIEQRIHAIGQAAPACISLGLRSMEIELNHGRRGYLEAIERCKQRIVDGESYEICLTDLFSFQAELDPLMLYRYMRRGNPAPFGAYLRNGSDCILSTSPERFLEVDGHGTIQTKPIKGTCRRAEDPQLDRNLAMRLAASEKDRAENLMIVDLMRNDLSRVAVPGSVTVPKLMDIESYKTVHQMVSTVEARLRADCSLVDLLKAVFPGGSITGAPKLRSMEIIDGLENAPRGVYCGSIGYLGYNCVADLNIAIRSLSYDGQEIRFGAGGAITFLSDPQDEFDEVLLKAEAILKPIWHYLHAPNTPLHYELREDKLLLAEHCVSEMPARQAFIEP

SEQ ID NO: 3451 - DNA, 2088 bp, Streptomyces thioluteus
  CDS (1)..(2088): Xaa of translated CDS can stand for any naturally occuring amino acid which can be translated from respective CDS-codon
atgcgggtgctgttgatcgacaactacgactsstwcacctacaacctgttccagctcctcgccgaggtgtacggcaaggaaccgacggtcctcgtcaacgacgacccgtcgtggccggagctggacccggcgatgttcgactgcgtcgtcgtctcgcccggcccgggccgcccccagcacccggccgacctcggcttctgccaggaggtcctggaccgctggacggacaccccggtcctcggggtgtgcctggggcaccaggcgatcgcccaccaccacggcgcggacgtggccgagggcacgccgaagcacggtcacctggcgcgggtccggcacggcgggcgggacctcttcgacggcctgccgcagaacttcaccgcggtgcgctaccactcgctgcgggccgccgaacccctgccggaggagctggaggccaccgcctgggccgaggacggcaccgtcatggcgctgcggcaccgcacgctgccccgctggggcgtgcagttccacccggagtccatcgcgagcgagtggggcgcccaactgctccagaacttcgcgaagctcgtcggcgccgagtacgccgccgcgccccgggaacgggcgcggtgggccgccccgttggaggacgcccccgcggaggcgccggaactgcggcccgtgttcgaggtgatcgaccgggccgtggacaccgcggagctgttcaccacgctgtactccgcgagcgccggctgcttctggctcgacagcagcgcgccggggatcgggccggcccggttctcgttcctcggggacgactccggccccctcgccgagacgctgacgtaccggaccggggagaacacggtcgcggtgcgcgacgccgccggtgaacgggccgagcccggcaccatcttcgaggtgctccagcagcggctccgcgaccgccggctcagcacgccggagctgcccttcgacctcaacggcggctacgtcggctacttcggctacgagctcaagggcgagtgcggcagcccgaacgtccaccggtccgaaaccccggacgccgtctggacgttcgccgaccggctgatcgcggtggaccacctggaagagaagacctacgtcgtggccgtgagcggcaccgggccgggcgaggaggacgcggcccgggcctgggtgacggagaccgcccggcgggcccgcgaactgccggaccccgccccgtccgaggcacccgccccggccgccacggcgccgtccgaacaggtcgacatcgcccgcgaccgcggccagtacgtgagcgacatcaaggactgcctcgacgagctgcacagcggcgagagctacgagatctgcctgaccaaccggatccggctgcccgagctgaaggacccgctcggctaccacctcctgctccggcgcctcaaccccgccccctacggcgcgttcctgcgccacgagggcgtgagcgtcgtgtgctcctccccggagcggttcctgcggatcgaccgggacggcgtcgtggagagccggcccatcaagggaacggccccccggggcgaggacccggccgccgacgaggcgctccgggtgtcgctcgccgcctcggccaagacccgggccgagaacctcatgatcgtcgacctgctccgcaacgacctgggccgggtgtgcgaggtcggttccgtcgacgtccccgcctacatggtcaccgagacgtacgcgacggtgcaccagctggtcaccacggtccggggccgcctgcggcacgacgtggacccggtcgcctgcgtccgggcctgcttccccggcggctcgatgacgggcgccccgaagctgcggacgatggccatcatcgaccgcctggagcaggaggcccgcggcatctactccggcaccatcggctacttcgggctctccggcgccgcggacctcaacatcgtcatccgcaccgccgtctccaccggtacgggcacggtcatcggcaccggcggcgccatcgtcctcgactcggacccggacgaggagttcgacgaggtgctgctcaagggccacgcgctggtgcgggcgcacgggctgctggagggggccgcggaggccccgtag

SEQ ID NO: 3452 - protein, 695 aa, Streptomyces thioluteus
  misc_feature (11)..(12): Xaa can be any naturally occuring amino acid
MRVLLIDNYDXXTYNLFQLLAEVYGKEPTVLVNDDPSWPELDPAMFDCVVVSPGPGRPQHPADLGFCQEVLDRWTDTPVLGVCLGHQAIAHHHGADVAEGTPKHGHLARVRHGGRDLFDGLPQNFTAVRYHSLRAAEPLPEELEATAWAEDGTVMALRHRTLPRWGVQFHPESIASEWGAQLLQNFAKLVGAEYAAAPRERARWAAPLEDAPAEAPELRPVFEVIDRAVDTAELFTTLYSASAGCFWLDSSAPGIGPARFSFLGDDSGPLAETLTYRTGENTVAVRDAAGERAEPGTIFEVLQQRLRDRRLSTPELPFDLNGGYVGYFGYELKGECGSPNVHRSETPDAVWTFADRLIAVDHLEEKTYVVAVSGTGPGEEDAARAWVTETARRARELPDPAPSEAPAPAATAPSEQVDIARDRGQYVSDIKDCLDELHSGESYEICLTNRIRLPELKDPLGYHLLLRRLNPAPYGAFLRHEGVSVVCSSPERFLRIDRDGVVESRPIKGTAPRGEDPAADEALRVSLAASAKTRAENLMIVDLLRNDLGRVCEVGSVDVPAYMVTETYATVHQLVTTVRGRLRHDVDPVACVRACFPGGSMTGAPKLRTMAIIDRLEQEARGIYSGTIGYFGLSGAADLNIVIRTAVSTGTGTVIGTGGAIVLDSDPDEEFDEVLLKGHALVRAHGLLEGAAEAP

SEQ ID NO: 3453 - DNA, 1707 bp, Listeria monocytogenes
  CDS (1)..(1707)
atgagcttattacgatttgattttgaaggcgacacaaaaatttttgaaaatccactgtatgaactagttacgcatgatttagcagaagttcttcctataatgaaagcagccgaagaagcccaaaaatcaggaaaatacgtcgccggttttgtcagttatgaggccgcgcctgcttttcgaagtaatttaaaaacaaaaaaaccgagcggaaacatgcccctcgtctggtttggcgtatacgataattttaacgttacagctaccgaaacaccagattcctcgccgctctcttttaaaatgaatactagtttccctgaatacgccgagaaaatagagcaaatcaaagctgaaattgcagctggaaatacttaccaaataaactacaccgtgcgacttcaaagtgatgtgccaaacagcttttcttctcaagcgacttatgaaacgttacagcagattggaaaggcgaattacaccgccctactttcaaccagtgactttgagattatctcggcttcacccgagctcttttttaaatggaaggaaaatcttctaacgacacgcccgatgaaaggtactattcgccgcggaataacggagcaagcggacttagaagcacatgattggctaaaaaacgatcctaaaaaccgtgcagaaaatgtgatgattgtcgatttactacggaacgaccttgggatgattgctgtacccgggagtgtcaaggttcctaagttaatgacgctagaaccttacccaactgtttggcaaatgacttcaaccgttacagcagaaacacctcctgagactgatttaacagctgtttttaaagcactcttcccatgtggctcaataactggtgcgcctaaagcacgaacaatggaaattatttcagaactagaagattctcctcgtggtgtttactgcggagcaattggctttttagaacctaacggaaatgcgattttcaatgtaccgattcgtactattgctatcgcagacaacaaggcaacttatggtgttggtggcggtatcgtctgggattcggaagccgctagcgaattttccgaaatccacgcaaaatcagctattttagaaaagacgacaaaattttctttaattgaatgtttgcgaattgaaaatggtgagcttttccgaaccgaatatcatttaaaacgactacaaacaagcgcagactttttcggtattccttttaatagggaagaaacagagaaactatggaccaaaactgcgcaaaaaaatacgaccgacacatacaaaatgcgctttttattacatcctgatggcgcacatgatctagaactaacaagaattgatacaaaaaacaagcgaataacagcgcaacttgctgataaaccagtcccttcgaatgatttatttctctatcataaaacgactcatcgaaaggtctatgaaaacttaaaaaatactcaaaccgaggaaacactactttggaatgaacggggtgaactgacagaatttattaacgggaatatagttctaggtataaatggctgttttttcacgccaccagtaacttcaggtcttctttcagggacaatgagagcagaactattagctaaaaataagatttccgagaaaacactagcaaaaaaagaccttttagaagcggactatgtgtggttaattaatagcgtaagaggatttatagaagtagaaatcaaacaataa

SEQ ID NO: 3454 - protein, 568 aa, Listeria monocytogenes
MSLLRFDFEGDTKIFENPLYELVTHDLAEVLPIMKAAEEAQKSGKYVAGFVSYEAAPAFRSNLKTKKPSGNMPLVWFGVYDNFNVTATETPDSSPLSFKMNTSFPEYAEKIEQIKAEIAAGNTYQINYTVRLQSDVPNSFSSQATYETLQQIGKANYTALLSTSDFEIISASPELFFKWKENLLTTRPMKGTIRRGITEQADLEAHDWLKNDPKNRAENVMIVDLLRNDLGMIAVPGSVKVPKLMTLEPYPTVWQMTSTVTAETPPETDLTAVFKALFPCGSITGAPKARTMEIISELEDSPRGVYCGAIGFLEPNGNAIFNVPIRTIAIADNKATYGVGGGIVWDSEAASEFSEIHAKSAILEKTTKFSLIECLRIENGELFRTEYHLKRLQTSADFFGIPFNREETEKLWTKTAQKNTTDTYKMRFLLHPDGAHDLELTRIDTKNKRITAQLADKPVPSNDLFLYHKTTHRKVYENLKNTQTEETLLWNERGELTEFINGNIVLGINGCFFTPPVTSGLLSGTMRAELLAKNKISEKTLAKKDLLEADYVWLINSVRGFIEVEIKQ

SEQ ID NO: 3455 - DNA, 1374 bp, Listeria monocytogenes
  CDS (1)..(1374)
atgattaagatgagaaaaacgaaaaaaatagatgctgacacactaacggctattctggcgtttcaaagaatttcaggtacagggaaaagtttgctagagggggcggcgaaagatgcggaggctggacgttattcgatcattgctattaatccagtccatgaaattaaagtatatcaacatgattattatatcgacggtatacatcaagttgtcgcagatcctttaaaagaaattgaattatttatcgaaaaagcaaaagaagatgaagcagatttaccgcttgattcaggtgcaattggttatgttggttatgatgtcattgcgctttatgagaatttaggcgaaattccagtagaaactcgggatatgccagatattcgtttttatgtatatgaaagttttgtgattatggatcatcaggcggaagaacttattttagtgcaagataattgctattcgggaagaagtgaggcggaactagataaggcgcttgaattaatgtttactgaacttacaacgccgaaaaaggaagagcacaaggctgtccatgttcccaaaatgacatacaagagtaactacacgaaagaggagtacatggggttagtgaaaaaagcaaaaacctatatccaagagggtgacttctttcaaattgttctctcgcaacgactagaagcagatttcaccgtgacaccatttgattattatcggaaattacgtttattaaatccttctccttatctttatttcattgattttggggatacagtgctaattggctcttcgccagaaagtttgattaaaacgaaagggcggacggtaattacgaatcctattgcaggaacaagacggcgcggggcaacgaaacaagaagatgaattacttgcttcggaattgttagcggatgaaaaagaattggcagagcaccggatgttagtagatcttgggcgaaatgatattgggaaaatcgccgaaactggatcggtgcatgtgcctgtttaccttactattgaaagataccgtttcttaatgcatttagtttcagtagtagaaggaaccttaaaacccggacttactgcaatggatgctcttcggtcgacgcttccggctggtacagttagcggagcaccgaaaataagagccatggagcgaatctatgaatgggaaaatgtaaaacgtggcccatatgctggtgcggttggttatttaactaaaaatggtgattcggatttcgcgctttcgattagaacaatggtacttcataacggaaaagcttatgttcaagctggtgcaggaattgtctatgattccgatccagaaagcgaatacttagaaacattacaaaaagcaaaggcacttttggaggtgggagaatga

SEQ ID NO: 3456 - protein, 457 aa, Listeria monocytogenes
MIKMRKTKKIDADTLTAILAFQRISGTGKSLLEGAAKDAEAGRYSIIAINPVHEIKVYQHDYYIDGIHQVVADPLKEIELFIEKAKEDEADLPLDSGAIGYVGYDVIALYENLGEIPVETRDMPDIRFYVYESFVIMDHQAEELILVQDNCYSGRSEAELDKALELMFTELTTPKKEEHKAVHVPKMTYKSNYTKEEYMGLVKKAKTYIQEGDFFQIVLSQRLEADFTVTPFDYYRKLRLLNPSPYLYFIDFGDTVLIGSSPESLIKTKGRTVITNPIAGTRRRGATKQEDELLASELLADEKELAEHRMLVDLGRNDIGKIAETGSVHVPVYLTIERYRFLMHLVSVVEGTLKPGLTAMDALRSTLPAGTVSGAPKIRAMERIYEWENVKRGPYAGAVGYLTKNGDSDFALSIRTMVLHNGKAYVQAGAGIVYDSDPESEYLETLQKAKALLEVGE

SEQ ID NO: 3457 - DNA, 1599 bp, Desulfovibrio vulgaris
  CDS (1)..(1599)
atggagatggacgacgcgaaaaggcccgcaggcgcgaaacggcgcacgggcggtgaagaggacgcaggtcgtgtcgccggtcacgccacgacgcaggacaatgctcatgcgatgcccagcacgcaagccggcacgcaagccgggggcgcaggtgcccatgcggatgcgaatccggctggatgcccggatgggcgcatcgtgctgcggcagtcgtgcagcctgcttgagggcgatgtggatacgcccatcagtctgtttctgggcatggtggggtcggggcagggcatcctgctcgagagtgccgaggtggacggacgctgggggcgttacagcatcatcggcttcaacttccttctgcgtctcggctgtgcggcagggcggcttgaggtggcagtacgcgacccgcgtcttgcggcactgaaggagctggaggggatgcccttcatcgagggcgtgcgtgccgtcatgcggcggctgaccatcgaaccggaccccgacttcgccaaccagccgcccatcacgcgagccctgtacgggtacatgggctacggcgtggcaggtctgctcgaacccaaactcgccccggtgctacgggcggaagcggcagaggcgtgtcttgccctgccgggcacggtggtggtcttcgaccatctctacaaccgcctgaccatgctctcgctcaccgaccgcaacggtctgcgcatcgaccgttcggtgctcgaccgtgcgccgcagacgccggaggtggggcccacccgcgcggtgcccgacgagtcagcctacaagcgcgccgtggagcgcacccgcgagatgatccggcagggcgaggccatacaggtggtgctctccacgcggttccaggcgtccttcaatggcgaccccttcacgctgtaccgcagactgcgacgcatcaacccctcgccctacatgttcttcatgcgcctgccgggtgtctcgctgctgggttcgtcgccggaggtgatggtgcgttgcagcaaggggcggttgcaggtcagccccatcgccggaacccgtccgcgcggggtcgatgacgtcgaagacgcgcgcctcgcggcggaattgctcgatgaccccaaggaacgcgccgaacatgtcatgctggtcgacctcgggcgcaacgacctcgggcgcatcgccgcccccggtacggtgcaggtcgagcggttcatggaggtggagaagttctcgcacgtcatgcacctcacctcgcgggtgaccgcagacctcgcagaggggcacgacgcactggacgtgctgacggccacgtttccggcaggcacggtgagtggtgcccccaaggtgcgcgccatggaaatcatcgccgaggccgaaggacagccgcgcggcccctatgccgggtgcataggctggttcggactcgaccgtgacagcgtgagtctcgacaccggcatcaccatccgcagcatgtgggtgcgcgaggggcaggtgcactggcaggcgggggcgggcatcgtgttcgactcgaaacccgccgcggaatggaaggagtgctgcaacaaggcggcggccatgcgtgccgcactggatggaggctgtcatgttcctgctcatcgataa

SEQ ID NO: 3458 - protein, 532 aa, Desulfovibrio vulgaris
MEMDDAKRPAGAKRRTGGEEDAGRVAGHATTQDNAHAMPSTQAGTQAGGAGAHADANPAGCPDGRIVLRQSCSLLEGDVDTPISLFLGMVGSGQGILLESAEVDGRWGRYSIIGFNFLLRLGCAAGRLEVAVRDPRLAALKELEGMPFIEGVRAVMRRLTIEPDPDFANQPPITRALYGYMGYGVAGLLEPKLAPVLRAEAAEACLALPGTVVVFDHLYNRLTMLSLTDRNGLRIDRSVLDRAPQTPEVGPTRAVPDESAYKRAVERTREMIRQGEAIQVVLSTRFQASFNGDPFTLYRRLRRINPSPYMFFMRLPGVSLLGSSPEVMVRCSKGRLQVSPIAGTRPRGVDDVEDARLAAELLDDPKERAEHVMLVDLGRNDLGRIAAPGTVQVERFMEVEKFSHVMHLTSRVTADLAEGHDALDVLTATFPAGTVSGAPKVRAMEIIAEAEGQPRGPYAGCIGWFGLDRDSVSLDTGITIRSMWVREGQVHWQAGAGIVFDSKPAAEWKECCNKAAAMRAALDGGCHVPAHR

SEQ ID NO: 3459 - DNA, 1899 bp, Thermus thermophilus
  CDS (1)..(1899)
atgcttgaccatccttgccctcaatatactgcgcctgtggccgggggtctgcttgggctctaccacgccgcccggtgctcgggcctgaggcccgccctcctggagtccttggggccgaggacgcccttttcccggctctccctcctcggggtggggcccgtgcaccgcctcgaggtctgggaggggaggctctacctggacggcaggcgggtgggggaggccctggaggtcttccgctacctggaaaggggcctaggcaagggcttcttccccgcctggatcgggtttttcgcctacgagttcgcccgccacctgggcctttccgcccacaaccccctccccggcctccccgaggccttcttcctctactaccccgaggggtacgccctctttgaggggaggctcgtgcaggccccctccttccccttgcggcccctgccctacgcccccccgccccttccccgccaccccctggtctcggacttcccccgggaggccttcttgcgcggggtggaggaggtgcgggagaggatccgcgccggggtggtctaccaggtgaacctctcccaccgcttccgcctcctaggccccgtggaccccctcctcctctacgccaggcttcgcgccctgaacccctcccccttcatggggcttttggagggggaggggtgggccgtggtctcggggagcccggagaggctcttccagaaggtgggccccagggtcttggcccggcccatcgccgggacgcggcctaggggaaggacggaggcggaggacttggccttagagcgggagctcctcgcctctcccaaggagcgggcggaacacgtgatgctcttggacctcctccggaacgacctcgcccgggtggcccgcccggggacggtgcgggtccgggagcttttcaccgtggagcgctacgcccacgtgatgcacctggtctccgaggtggagggccgcaccggggcctccttgggggaggtcttccagagcctcttccccggggggacgatcaccggggcccccaaggggacggtgatggaggccataagggagctggagcccgtcccccggggggcctacacggggagcctggggtacgtctcggggcggggggcggacttcaacatcctcatccgttccttccagaaggtgggggaggaggtcctcttctccgcgggggcgggcgtcgtcatcgcctcggaggcggagcgggagtacgaggagaccctccacaaggcgcaaagcctcctcctggccttggaaagggggaggccggggaagccccccgaggccccgaggccccgggcctcctggagcccgcccatgccctcgaggcggtacggggcccgggtcctcttcctggagaaccgggactccttcagccacaacctggtggactacctgcgggccctgggggccgaggtcgcggtggtggaccaggaggaggccccggacctcaagggcttcacccacctggtggtgggccccgggcccaaggaccccttcaccgcggggcgcgtcctggagtggacggagaaggccctggcggcggggcttcccctcctcggggtctgcctgggccaccaggccctaggggtggccctgggggcggagctttaccgggaggcccccgtgcacggggaggcccacgccgtcttccacaccggggagggcctctttagggggatcccgagccccgcccccttcgcccggtaccactccctggccttaaggcgcctttccccggggcttaggctcctcgcctggacggaagacggcgtgcccatggccatctgggacgggaggcgggcctacggggtccagttccacccggaaagcctgctttccccttacggcatgctccttctcgcccggttcctggaggtgggatga

SEQ ID NO: 3460 - protein, 632 aa, Thermus thermophilus
MLDHPCPQYTAPVAGGLLGLYHAARCSGLRPALLESLGPRTPFSRLSLLGVGPVHRLEVWEGRLYLDGRRVGEALEVFRYLERGLGKGFFPAWIGFFAYEFARHLGLSAHNPLPGLPEAFFLYYPEGYALFEGRLVQAPSFPLRPLPYAPPPLPRHPLVSDFPREAFLRGVEEVRERIRAGVVYQVNLSHRFRLLGPVDPLLLYARLRALNPSPFMGLLEGEGWAVVSGSPERLFQKVGPRVLARPIAGTRPRGRTEAEDLALERELLASPKERAEHVMLLDLLRNDLARVARPGTVRVRELFTVERYAHVMHLVSEVEGRTGASLGEVFQSLFPGGTITGAPKGTVMEAIRELEPVPRGAYTGSLGYVSGRGADFNILIRSFQKVGEEVLFSAGAGVVIASEAEREYEETLHKAQSLLLALERGRPGKPPEAPRPRASWSPPMPSRRYGARVLFLENRDSFSHNLVDYLRALGAEVAVVDQEEAPDLKGFTHLVVGPGPKDPFTAGRVLEWTEKALAAGLPLLGVCLGHQALGVALGAELYREAPVHGEAHAVFHTGEGLFRGIPSPAPFARYHSLALRRLSPGLRLLAWTEDGVPMAIWDGRRAYGVQFHPESLLSPYGMLLLARFLEVG

SEQ ID NO: 3461 - DNA, 1422 bp, Leptospira interrogans
  CDS (1)..(1422)
atggaaactccagtttctctgtttgcaaaatggggatgtgaatcttctcaaaattccttcctactcgaatctgtagaaggcggagaaaaactgggaagaaattcttttttaggtaaaactccttctcgtctccttcaaggtaaggacggtcttttttatatcacagttgcaaatgaacctcctacagaagtaatcacttatgatcctttggttcttttagaaaatcttttgggagatgacgtatatgttcaagattatcgtcttcctccttttgcaggtggagcggtcggttttttatcctttgccgcggttcgttattacgaaaatattccagatacaaaaccagaagatgaaaatgcccccgactgctattttggaatttatgatgaacttctaatagtcgatcatattgatcatgtgttaagaattgttgtcaatgcaagagtcggagaacactcctccctgagagaatgttacgattttgtaattgataaaatcaactctatcgaaaacgaaattcgaaacggaagtatcccggaagagatcaaaaatcctaaaatagcaaccggaagtctagagttaaatccgaatattccagatgaagaatataagaaaaatgtagaaaaagccaaagaatatattcaagcaggagatatttttcaggtagttccttcccgtaagttgaaatttaagccggatgttcctccgtttcaagtctatcgtggcttaagaaccgtaaatcccagtccctacatgtattatcttaagttaggcgaaattaccatcgtcggaagttctcccgaaattatggtaaaatacgctggaaatcagacctatcttcgtccgatcgccggaacccgtccacgaggcaaaaatccaaatgaagataagtttctagaagagaatcttctttctgatcctaaagaaatttccgaacatattatgttagtcgacttaggacgtaacgatctaggaagagtttgtaaacctggaagcgttcacgtgaatgatttcaaagttattgaaaaatattcccacgttatgcacattgtaagtcagtgttccggcgaactggacgatgaaaaaactgtttacgatttgattcgcgccgctcttcccgcagggaccgtgtcgggtgcgcctaaaatccgcgcgatggagattatagacgaattagaaacaactcgaagagcgatttattctggtgctttgggctatatttctttttcgggagaaactgatcttgcaatcatcattcgtacgatcgtgttttacaaagacacggcgttcttacaggcaggcggaggagttgtatacgattcggttccagagttggaattagaagaaacgaaaaataaaatggcagcgcttttaaaagcggtagagttcgcaagaaatggactcaaaggagaatggaaataa

SEQ ID NO: 3462 - protein, 473 aa, Leptospira interrogans
METPVSLFAKWGCESSQNSFLLESVEGGEKLGRNSFLGKTPSRLLQGKDGLFYITVANEPPTEVITYDPLVLLENLLGDDVYVQDYRLPPFAGGAVGFLSFAAVRYYENIPDTKPEDENAPDCYFGIYDELLIVDHIDHVLRIVVNARVGEHSSLRECYDFVIDKINSIENEIRNGSIPEEIKNPKIATGSLELNPNIPDEEYKKNVEKAKEYIQAGDIFQVVPSRKLKFKPDVPPFQVYRGLRTVNPSPYMYYLKLGEITIVGSSPEIMVKYAGNQTYLRPIAGTRPRGKNPNEDKFLEENLLSDPKEISEHIMLVDLGRNDLGRVCKPGSVHVNDFKVIEKYSHVMHIVSQCSGELDDEKTVYDLIRAALPAGTVSGAPKIRAMEIIDELETTRRAIYSGALGYISFSGETDLAIIIRTIVFYKDTAFLQAGGGVVYDSVPELELEETKNKMAALLKAVEFARNGLKGEWK
